United States Patent Application Publication US 2014/0004565 A1 - sequence listing, part 27

SEQ ID NO: 567369 - RNA, 19 nt, Artificial Sequence
  Description of Artificial Sequence: Synthetic oligonucleotide
ccccgcccagcuguggguu

SEQ ID NO: 567370 - RNA, 19 nt, Artificial Sequence
  Description of Artificial Sequence: Synthetic oligonucleotide
cguccccguaugucucauu

SEQ ID NO: 567371 - RNA, 19 nt, Artificial Sequence
  Description of Artificial Sequence: Synthetic oligonucleotide
cggagggauucgugccauu

SEQ ID NO: 567372 - RNA, 19 nt, Artificial Sequence
  Description of Artificial Sequence: Synthetic oligonucleotide
ccggcgggcguaggccagu

SEQ ID NO: 567373 - RNA, 19 nt, Artificial Sequence
  Description of Artificial Sequence: Synthetic oligonucleotide
aagacguauaaauaaaauc

SEQ ID NO: 567374 - RNA, 19 nt, Artificial Sequence
  Description of Artificial Sequence: Synthetic oligonucleotide
aauacaaucugaugauggc

SEQ ID NO: 567375 - RNA, 19 nt, Artificial Sequence
  Description of Artificial Sequence: Synthetic oligonucleotide
aagaauugcaucucaacag

SEQ ID NO: 567376 - RNA, 19 nt, Artificial Sequence
  Description of Artificial Sequence: Synthetic oligonucleotide
aacuuugugaagcacggac

SEQ ID NO: 567377 - RNA, 19 nt, Artificial Sequence
  Description of Artificial Sequence: Synthetic oligonucleotide
acaaguacuagacagauga

SEQ ID NO: 567378 - RNA, 19 nt, Artificial Sequence
  Description of Artificial Sequence: Synthetic oligonucleotide
aaagaauugcaucucaaca

SEQ ID NO: 567379 - RNA, 19 nt, Artificial Sequence
  Description of Artificial Sequence: Synthetic oligonucleotide
aacuuaucgggacugcugc

SEQ ID NO: 567380 - RNA, 19 nt, Artificial Sequence
  Description of Artificial Sequence: Synthetic oligonucleotide
aguaagacauuccagcucg

SEQ ID NO: 567381 - RNA, 19 nt, Artificial Sequence
  Description of Artificial Sequence: Synthetic oligonucleotide
uguaguaagacauuccagc

SEQ ID NO: 567382 - RNA, 19 nt, Artificial Sequence
  Description of Artificial Sequence: Synthetic oligonucleotide
aauaacucccaucccacac

SEQ ID NO: 567383 - RNA, 19 nt, Artificial Sequence
  Description of Artificial Sequence: Synthetic oligonucleotide
ucaacaaagacguauaaau

SEQ ID NO: 567384 - RNA, 19 nt, Artificial Sequence
  Description of Artificial Sequence: Synthetic oligonucleotide
uauagacagaguuagguug

SEQ ID NO: 567385 - RNA, 19 nt, Artificial Sequence
  Description of Artificial Sequence: Synthetic oligonucleotide
aaagcucuagacuagacau

SEQ ID NO: 567386 - RNA, 19 nt, Artificial Sequence
  Description of Artificial Sequence: Synthetic oligonucleotide
caugcuagcacacacagag

SEQ ID NO: 567387 - RNA, 19 nt, Artificial Sequence
  Description of Artificial Sequence: Synthetic oligonucleotide
aauuacaacuggucaaauc

SEQ ID NO: 567388 - RNA, 19 nt, Artificial Sequence
  Description of Artificial Sequence: Synthetic oligonucleotide
uauuagacaaguacuagac

SEQ ID NO: 567389 - RNA, 19 nt, Artificial Sequence
  Description of Artificial Sequence: Synthetic oligonucleotide
cuaacuuccaauccuauag

SEQ ID NO: 567390 - RNA, 19 nt, Artificial Sequence
  Description of Artificial Sequence: Synthetic oligonucleotide
uuuccugucuuacugggcg

SEQ ID NO: 567391 - RNA, 19 nt, Artificial Sequence
  Description of Artificial Sequence: Synthetic oligonucleotide
aaaagcauuucgcaccuag

SEQ ID NO: 567392 - RNA, 19 nt, Artificial Sequence
  Description of Artificial Sequence: Synthetic oligonucleotide
guggauuaaauuuaaggag

SEQ ID NO: 567393 - RNA, 19 nt, Artificial Sequence
  Description of Artificial Sequence: Synthetic oligonucleotide
aauaucacuggugggaagg

SEQ ID NO: 567394 - RNA, 19 nt, Artificial Sequence
  Description of Artificial Sequence: Synthetic oligonucleotide
aaaacgguaggcuaacaca

SEQ ID NO: 567395 - RNA, 19 nt, Artificial Sequence
  Description of Artificial Sequence: Synthetic oligonucleotide
agacguauaaauaaaaucu

SEQ ID NO: 567396 - RNA, 19 nt, Artificial Sequence
  Description of Artificial Sequence: Synthetic oligonucleotide
agcuagacaaccucagugc

SEQ ID NO: 567397 - RNA, 19 nt, Artificial Sequence
  Description of Artificial Sequence: Synthetic oligonucleotide
ucagauccaaauaugccag

SEQ ID NO: 567398 - RNA, 19 nt, Artificial Sequence
  Description of Artificial Sequence: Synthetic oligonucleotide
accauuucggcucugcuac

SEQ ID NO: 567399 - RNA, 19 nt, Artificial Sequence
  Description of Artificial Sequence: Synthetic oligonucleotide
aaaggucuagaauucucuc

SEQ ID NO: 567400 - RNA, 19 nt, Artificial Sequence
  Description of Artificial Sequence: Synthetic oligonucleotide
aguuuuacuacgcaugucu

SEQ ID NO: 567401 - RNA, 19 nt, Artificial Sequence
  Description of Artificial Sequence: Synthetic oligonucleotide
caaguuaaggcaugaaugc

SEQ ID NO: 567402 - RNA, 19 nt, Artificial Sequence
  Description of Artificial Sequence: Synthetic oligonucleotide
ucaaguuacacagagaaua

SEQ ID NO: 567403 - RNA, 19 nt, Artificial Sequence
  Description of Artificial Sequence: Synthetic oligonucleotide
aguauuguugcccucaccu

SEQ ID NO: 567404 - RNA, 19 nt, Artificial Sequence
  Description of Artificial Sequence: Synthetic oligonucleotide
ucacauagccauuccaugg

SEQ ID NO: 567405 - RNA, 19 nt, Artificial Sequence
  Description of Artificial Sequence: Synthetic oligonucleotide
uuuggcguugagaaggcgg

SEQ ID NO: 567406 - RNA, 19 nt, Artificial Sequence
  Description of Artificial Sequence: Synthetic oligonucleotide
aaguacuagacagaugauc

SEQ ID NO: 567407 - RNA, 19 nt, Artificial Sequence
  Description of Artificial Sequence: Synthetic oligonucleotide
caggcaauaacucccaucc

SEQ ID NO: 567408 - RNA, 19 nt, Artificial Sequence
  Description of Artificial Sequence: Synthetic oligonucleotide
auugguuacccuauuagac

SEQ ID NO: 567409 - RNA, 19 nt, Artificial Sequence
  Description of Artificial Sequence: Synthetic oligonucleotide
acagaguuagguuggaaag

SEQ ID NO: 567410 - RNA, 19 nt, Artificial Sequence
  Description of Artificial Sequence: Synthetic oligonucleotide
aucagauccaaauaugcca

SEQ ID NO: 567411 - RNA, 19 nt, Artificial Sequence
  Description of Artificial Sequence: Synthetic oligonucleotide
uccaaauaugccagggagg

SEQ ID NO: 567412 - RNA, 19 nt, Artificial Sequence
  Description of Artificial Sequence: Synthetic oligonucleotide
ggaaaugauccccaaaacg

SEQ ID NO: 567413 - RNA, 19 nt, Artificial Sequence
  Description of Artificial Sequence: Synthetic oligonucleotide
ucaucuaacuuccaauccu

SEQ ID NO: 567414 - RNA, 19 nt, Artificial Sequence
  Description of Artificial Sequence: Synthetic oligonucleotide
aguuagguuggaaagaguc

SEQ ID NO: 567415 - RNA, 19 nt, Artificial Sequence
  Description of Artificial Sequence: Synthetic oligonucleotide
ucuagacuagacauguugu

SEQ ID NO: 567416 - RNA, 19 nt, Artificial Sequence
  Description of Artificial Sequence: Synthetic oligonucleotide
gacaagagaaagcaguuca

SEQ ID NO: 567417 - RNA, 19 nt, Artificial Sequence
  Description of Artificial Sequence: Synthetic oligonucleotide
cuacgcaugucuuugguag

SEQ ID NO: 567418 - RNA, 19 nt, Artificial Sequence
  Description of Artificial Sequence: Synthetic oligonucleotide
ugucuaccuaaccaugggg

SEQ ID NO: 567419 - RNA, 19 nt, Artificial Sequence
  Description of Artificial Sequence: Synthetic oligonucleotide
ugggaaaugauccccaaaa

SEQ ID NO: 567420 - RNA, 19 nt, Artificial Sequence
  Description of Artificial Sequence: Synthetic oligonucleotide
ucgucugugucucaggagc

SEQ ID NO: 567421 - RNA, 19 nt, Artificial Sequence
  Description of Artificial Sequence: Synthetic oligonucleotide
ugaucacucaaggagaggc

SEQ ID NO: 567422 - RNA, 19 nt, Artificial Sequence
  Description of Artificial Sequence: Synthetic oligonucleotide
acugauucuaucgggaagg

SEQ ID NO: 567423 - RNA, 19 nt, Artificial Sequence
  Description of Artificial Sequence: Synthetic oligonucleotide
uuuacuacgcaugucuuug

SEQ ID NO: 567424 - RNA, 19 nt, Artificial Sequence
  Description of Artificial Sequence: Synthetic oligonucleotide
uugcauacgaaagaccggg

SEQ ID NO: 567425 - RNA, 19 nt, Artificial Sequence
  Description of Artificial Sequence: Synthetic oligonucleotide
uuugguagucaucacuaca

SEQ ID NO: 567426 - RNA, 19 nt, Artificial Sequence
  Description of Artificial Sequence: Synthetic oligonucleotide
ugaaauucugaguaagcuc

SEQ ID NO: 567427 - RNA, 19 nt, Artificial Sequence
  Description of Artificial Sequence: Synthetic oligonucleotide
gguggauuaaauuuaagga

SEQ ID NO: 567428 - RNA, 19 nt, Artificial Sequence
  Description of Artificial Sequence: Synthetic oligonucleotide
ucuagaauucucucuagaa

SEQ ID NO: 567429 - RNA, 19 nt, Artificial Sequence
  Description of Artificial Sequence: Synthetic oligonucleotide
aguaagcucaugcauuaag

SEQ ID NO: 567430 - RNA, 19 nt, Artificial Sequence
  Description of Artificial Sequence: Synthetic oligonucleotide
caguucagagcccagaggc

SEQ ID NO: 567431 - RNA, 19 nt, Artificial Sequence
  Description of Artificial Sequence: Synthetic oligonucleotide
cuugaaauucugaguaagc

SEQ ID NO: 567432 - RNA, 19 nt, Artificial Sequence
  Description of Artificial Sequence: Synthetic oligonucleotide
aucuuaaccacuuccacau

SEQ ID NO: 567433 - RNA, 19 nt, Artificial Sequence
  Description of Artificial Sequence: Synthetic oligonucleotide
uguugggugauggaggcgg

SEQ ID NO: 567434 - RNA, 19 nt, Artificial Sequence
  Description of Artificial Sequence: Synthetic oligonucleotide
ugagcgguaacccaaguua

SEQ ID NO: 567435 - RNA, 19 nt, Artificial Sequence
  Description of Artificial Sequence: Synthetic oligonucleotide
uugguagucaucacuacaa

SEQ ID NO: 567436 - RNA, 19 nt, Artificial Sequence
  Description of Artificial Sequence: Synthetic oligonucleotide
ucuuugguagucaucacua

SEQ ID NO: 567437 - RNA, 19 nt, Artificial Sequence
  Description of Artificial Sequence: Synthetic oligonucleotide
aguacuagacagaugauca

SEQ ID NO: 567438 - RNA, 19 nt, Artificial Sequence
  Description of Artificial Sequence: Synthetic oligonucleotide
aagaccgggugauauaggu

SEQ ID NO: 567439 - RNA, 19 nt, Artificial Sequence
  Description of Artificial Sequence: Synthetic oligonucleotide
aguuaaggcaugaaugcac

SEQ ID NO: 567440 - RNA, 19 nt, Artificial Sequence
  Description of Artificial Sequence: Synthetic oligonucleotide
uauuguugcagacccacaa

SEQ ID NO: 567441 - RNA, 19 nt, Artificial Sequence
  Description of Artificial Sequence: Synthetic oligonucleotide
uugguuacccuauuagaca

SEQ ID NO: 567442 - RNA, 19 nt, Artificial Sequence
  Description of Artificial Sequence: Synthetic oligonucleotide
uugcagacccacaacacug

SEQ ID NO: 567443 - RNA, 19 nt, Artificial Sequence
  Description of Artificial Sequence: Synthetic oligonucleotide
gaaucguuuagucucucac

SEQ ID NO: 567444 - RNA, 19 nt, Artificial Sequence
  Description of Artificial Sequence: Synthetic oligonucleotide
gaaagaccgggugauauag

SEQ ID NO: 567445 - RNA, 19 nt, Artificial Sequence
  Description of Artificial Sequence: Synthetic oligonucleotide
auacaaucugaugauggcg

SEQ ID NO: 567446 - RNA, 19 nt, Artificial Sequence
  Description of Artificial Sequence: Synthetic oligonucleotide
aagcauuucgcaccuagaa

SEQ ID NO: 567447 - RNA, 19 nt, Artificial Sequence
  Description of Artificial Sequence: Synthetic oligonucleotide
uguguguugggugauggag

SEQ ID NO: 567448 - RNA, 19 nt, Artificial Sequence
  Description of Artificial Sequence: Synthetic oligonucleotide
caugcuugacaagagaaag

SEQ ID NO: 567449 - RNA, 19 nt, Artificial Sequence
  Description of Artificial Sequence: Synthetic oligonucleotide
uaaucacaacugcugagca

SEQ ID NO: 567450 - RNA, 19 nt, Artificial Sequence
  Description of Artificial Sequence: Synthetic oligonucleotide
uuagucucucacaauggcu

SEQ ID NO: 567451 - RNA, 19 nt, Artificial Sequence
  Description of Artificial Sequence: Synthetic oligonucleotide
auccuauagacagaguuag

SEQ ID NO: 567452 - RNA, 19 nt, Artificial Sequence
  Description of Artificial Sequence: Synthetic oligonucleotide
aguuguaguaagacauucc

SEQ ID NO: 567453 - RNA, 19 nt, Artificial Sequence
  Description of Artificial Sequence: Synthetic oligonucleotide
cagaggaucccauugauca

SEQ ID NO: 567454 - RNA, 19 nt, Artificial Sequence
  Description of Artificial Sequence: Synthetic oligonucleotide
cucuagacuagacauguug

SEQ ID NO: 567455 - RNA, 19 nt, Artificial Sequence
  Description of Artificial Sequence: Synthetic oligonucleotide
aaaagugugucuguagaaa

SEQ ID NO: 567456 - RNA, 19 nt, Artificial Sequence
  Description of Artificial Sequence: Synthetic oligonucleotide
aacuggaggaucaacaaaa

SEQ ID NO: 567457 - RNA, 19 nt, Artificial Sequence
  Description of Artificial Sequence: Synthetic oligonucleotide
acuugaaauucugaguaag

SEQ ID NO: 567458 - RNA, 19 nt, Artificial Sequence
  Description of Artificial Sequence: Synthetic oligonucleotide
agaucaagaugcacaauac

SEQ ID NO: 567459 - RNA, 19 nt, Artificial Sequence
  Description of Artificial Sequence: Synthetic oligonucleotide
agcagggacaaguucaugu

SEQ ID NO: 567460 - RNA, 19 nt, Artificial Sequence
  Description of Artificial Sequence: Synthetic oligonucleotide
aaguucaugucuaccuaac

SEQ ID NO: 567461 - RNA, 19 nt, Artificial Sequence
  Description of Artificial Sequence: Synthetic oligonucleotide
cuaugaggagggaagcuag

SEQ ID NO: 567462 - RNA, 19 nt, Artificial Sequence
  Description of Artificial Sequence: Synthetic oligonucleotide
acaggcaauaacucccauc

SEQ ID NO: 567463 - RNA, 19 nt, Artificial Sequence
  Description of Artificial Sequence: Synthetic oligonucleotide
uaacuuccaauccuauaga

SEQ ID NO: 567464 - RNA, 19 nt, Artificial Sequence
  Description of Artificial Sequence: Synthetic oligonucleotide
ugucucaggagcuaagaau

SEQ ID NO: 567465 - RNA, 19 nt, Artificial Sequence
  Description of Artificial Sequence: Synthetic oligonucleotide
guucaucuaacuuccaauc

SEQ ID NO: 567466 - RNA, 19 nt, Artificial Sequence
  Description of Artificial Sequence: Synthetic oligonucleotide
ccaaguuaaggcaugaaug

SEQ ID NO: 567467 - RNA, 19 nt, Artificial Sequence
  Description of Artificial Sequence: Synthetic oligonucleotide
uaagaaucguuuagucucu

SEQ ID NO: 567468 - RNA, 19 nt, Artificial Sequence
  Description of Artificial Sequence: Synthetic oligonucleotide
cuugcauacgaaagaccgg

SEQ ID NO: 567469 - RNA, 19 nt, Artificial Sequence
  Description of Artificial Sequence: Synthetic oligonucleotide
auuagacaaguacuagaca

SEQ ID NO: 567470 - RNA, 19 nt, Artificial Sequence
  Description of Artificial Sequence: Synthetic oligonucleotide
caaaguugagcgguaaccc

SEQ ID NO: 567471 - RNA, 19 nt, Artificial Sequence
  Description of Artificial Sequence: Synthetic oligonucleotide
agggaagcuagacaaccuc

SEQ ID NO: 567472 - RNA, 19 nt, Artificial Sequence
  Description of Artificial Sequence: Synthetic oligonucleotide
augcauuaagggcugggag

SEQ ID NO: 567473 - RNA, 19 nt, Artificial Sequence
  Description of Artificial Sequence: Synthetic oligonucleotide
ucaauuacaacuggucaaa

SEQ ID NO: 567474 - RNA, 19 nt, Artificial Sequence
  Description of Artificial Sequence: Synthetic oligonucleotide
caucuauccacucauggca

SEQ ID NO: 567475 - RNA, 19 nt, Artificial Sequence
  Description of Artificial Sequence: Synthetic oligonucleotide
aggagcuaagaauuuaaaa

SEQ ID NO: 567476 - RNA, 19 nt, Artificial Sequence
  Description of Artificial Sequence: Synthetic oligonucleotide
aucaagaugcacaauacaa

SEQ ID NO: 567477 - RNA, 19 nt, Artificial Sequence
  Description of Artificial Sequence: Synthetic oligonucleotide
uuggcguugagaaggcggc

SEQ ID NO: 567478 - RNA, 19 nt, Artificial Sequence
  Description of Artificial Sequence: Synthetic oligonucleotide
guuuagucucucacaaugg

SEQ ID NO: 567479 - RNA, 19 nt, Artificial Sequence
  Description of Artificial Sequence: Synthetic oligonucleotide
aaccaaccguaugacuugc

SEQ ID NO: 567480 - RNA, 19 nt, Artificial Sequence
  Description of Artificial Sequence: Synthetic oligonucleotide
aaacgguaggcuaacacau

SEQ ID NO: 567481 - RNA, 19 nt, Artificial Sequence
  Description of Artificial Sequence: Synthetic oligonucleotide
caaaacgguaggcuaacac

SEQ ID NO: 567482 - RNA, 19 nt, Artificial Sequence
  Description of Artificial Sequence: Synthetic oligonucleotide
ugguuacccuauuagacaa

SEQ ID NO: 567483 - RNA, 19 nt, Artificial Sequence
  Description of Artificial Sequence: Synthetic oligonucleotide
aauugcaucucaacaggca

SEQ ID NO: 567484 - RNA, 19 nt, Artificial Sequence
  Description of Artificial Sequence: Synthetic oligonucleotide
gacagaguuagguuggaaa

SEQ ID NO: 567485 - RNA, 19 nt, Artificial Sequence
  Description of Artificial Sequence: Synthetic oligonucleotide
gacacugcggucaauuuac

SEQ ID NO: 567486 - RNA, 19 nt, Artificial Sequence
  Description of Artificial Sequence: Synthetic oligonucleotide
uaguaagacauuccagcuc

SEQ ID NO: 567487 - RNA, 19 nt, Artificial Sequence
  Description of Artificial Sequence: Synthetic oligonucleotide
cuugacaagagaaagcagu

SEQ ID NO: 567488 - RNA, 19 nt, Artificial Sequence
  Description of Artificial Sequence: Synthetic oligonucleotide
ucuaucgggaaggacaaaa

SEQ ID NO: 567489 - RNA, 19 nt, Artificial Sequence
  Description of Artificial Sequence: Synthetic oligonucleotide
ucagcauugguuacccuau

SEQ ID NO: 567490 - RNA, 19 nt, Artificial Sequence
  Description of Artificial Sequence: Synthetic oligonucleotide
aaguuaaggcaugaaugca

SEQ ID NO: 567491 - RNA, 19 nt, Artificial Sequence
  Description of Artificial Sequence: Synthetic oligonucleotide
aauucucucuagaaugcca

SEQ ID NO: 567492 - RNA, 19 nt, Artificial Sequence
  Description of Artificial Sequence: Synthetic oligonucleotide
uugacaagagaaagcaguu

SEQ ID NO: 567493 - RNA, 19 nt, Artificial Sequence
  Description of Artificial Sequence: Synthetic oligonucleotide
caucaauaucacugguggg

SEQ ID NO: 567494 - RNA, 19 nt, Artificial Sequence
  Description of Artificial Sequence: Synthetic oligonucleotide
aguucagaucaagaugcac

SEQ ID NO: 567495 - RNA, 19 nt, Artificial Sequence
  Description of Artificial Sequence: Synthetic oligonucleotide
uucggcucugcuacaaucu

SEQ ID NO: 567496 - RNA, 19 nt, Artificial Sequence
  Description of Artificial Sequence: Synthetic oligonucleotide
uccuauagacagaguuagg

SEQ ID NO: 567497 - RNA, 19 nt, Artificial Sequence
  Description of Artificial Sequence: Synthetic oligonucleotide
uuacuacgcaugucuuugg

SEQ ID NO: 567498 - RNA, 19 nt, Artificial Sequence
  Description of Artificial Sequence: Synthetic oligonucleotide
agggguaaccauuucggcu

SEQ ID NO: 567499 - RNA, 19 nt, Artificial Sequence
  Description of Artificial Sequence: Synthetic oligonucleotide
gaaaguauuguugcccuca

SEQ ID NO: 567500 - RNA, 19 nt, Artificial Sequence
  Description of Artificial Sequence: Synthetic oligonucleotide
aaguuuuacuacgcauguc

SEQ ID NO: 567501 - RNA, 19 nt, Artificial Sequence
  Description of Artificial Sequence: Synthetic oligonucleotide
acugcggucaauuuacauu

SEQ ID NO: 567502 - RNA, 19 nt, Artificial Sequence
  Description of Artificial Sequence: Synthetic oligonucleotide
guggacugggcucugauca

SEQ ID NO: 567503 - RNA, 19 nt, Artificial Sequence
  Description of Artificial Sequence: Synthetic oligonucleotide
acauagccauuccaugguc

SEQ ID NO: 567504 - RNA, 19 nt, Artificial Sequence
  Description of Artificial Sequence: Synthetic oligonucleotide
aauccuauagacagaguua

SEQ ID NO: 567505 - RNA, 19 nt, Artificial Sequence
  Description of Artificial Sequence: Synthetic oligonucleotide
uaggcugcuuuacaagaga

SEQ ID NO: 567506 - RNA, 19 nt, Artificial Sequence
  Description of Artificial Sequence: Synthetic oligonucleotide
ugaaaccaaccguaugacu

SEQ ID NO: 567507 - RNA, 19 nt, Artificial Sequence
  Description of Artificial Sequence: Synthetic oligonucleotide
uggagaguuguaguaagac

SEQ ID NO: 567508 - RNA, 19 nt, Artificial Sequence
  Description of Artificial Sequence: Synthetic oligonucleotide
gaucccauugaucacucaa

SEQ ID NO: 567509 - RNA, 19 nt, Artificial Sequence
  Description of Artificial Sequence: Synthetic oligonucleotide
ucucacaauggcucccgag

SEQ ID NO: 567510 - RNA, 19 nt, Artificial Sequence
  Description of Artificial Sequence: Synthetic oligonucleotide
acaaucugaugauggcgag

SEQ ID NO: 567511 - RNA, 19 nt, Artificial Sequence
  Description of Artificial Sequence: Synthetic oligonucleotide
ucacaauggcucccgagaa

SEQ ID NO: 567512 - RNA, 19 nt, Artificial Sequence
  Description of Artificial Sequence: Synthetic oligonucleotide
aggcaauaacucccauccc

SEQ ID NO: 567513 - RNA, 19 nt, Artificial Sequence
  Description of Artificial Sequence: Synthetic oligonucleotide
uuuuacuacgcaugucuuu

SEQ ID NO: 567514 - RNA, 19 nt, Artificial Sequence
  Description of Artificial Sequence: Synthetic oligonucleotide
agcucuagacuagacaugu

SEQ ID NO: 567515 - RNA, 19 nt, Artificial Sequence
  Description of Artificial Sequence: Synthetic oligonucleotide
ucuaacuuccaauccuaua

SEQ ID NO: 567516 - RNA, 19 nt, Artificial Sequence
  Description of Artificial Sequence: Synthetic oligonucleotide
gagaguuguaguaagacau

SEQ ID NO: 567517 - RNA, 19 nt, Artificial Sequence
  Description of Artificial Sequence: Synthetic oligonucleotide
ugaggugucaaagccacau

SEQ ID NO: 567518 - RNA, 19 nt, Artificial Sequence
  Description of Artificial Sequence: Synthetic oligonucleotide
cauugguuacccuauuaga

SEQ ID NO: 567519 - RNA, 19 nt, Artificial Sequence
  Description of Artificial Sequence: Synthetic oligonucleotide
cauacgaaagaccggguga

SEQ ID NO: 567520 - RNA, 19 nt, Artificial Sequence
  Description of Artificial Sequence: Synthetic oligonucleotide
cacccgauuagcagcacag

SEQ ID NO: 567521 - RNA, 19 nt, Artificial Sequence
  Description of Artificial Sequence: Synthetic oligonucleotide
uuucggcucugcuacaauc

SEQ ID NO: 567522 - RNA, 19 nt, Artificial Sequence
  Description of Artificial Sequence: Synthetic oligonucleotide
ugucuguagaaagcucuag

SEQ ID NO: 567523 - RNA, 19 nt, Artificial Sequence
  Description of Artificial Sequence: Synthetic oligonucleotide
ucuagaaugccagcaugcu

SEQ ID NO: 567524 - RNA, 19 nt, Artificial Sequence
  Description of Artificial Sequence: Synthetic oligonucleotide
cuagcacacacagaggauc

SEQ ID NO: 567525 - RNA, 19 nt, Artificial Sequence
  Description of Artificial Sequence: Synthetic oligonucleotide
uggucaacucgucuguguc

SEQ ID NO: 567526 - RNA, 19 nt, Artificial Sequence
  Description of Artificial Sequence: Synthetic oligonucleotide
gaccgggugauauaggucu

SEQ ID NO: 567527 - RNA, 19 nt, Artificial Sequence
  Description of Artificial Sequence: Synthetic oligonucleotide
gguaacccaaguuaaggca

SEQ ID NO: 567528 - RNA, 19 nt, Artificial Sequence
  Description of Artificial Sequence: Synthetic oligonucleotide
gagggguaaccauuucggc

SEQ ID NO: 567529 - RNA, 19 nt, Artificial Sequence
  Description of Artificial Sequence: Synthetic oligonucleotide
agcauuucgcaccuagaaa

SEQ ID NO: 567530 - RNA, 19 nt, Artificial Sequence
  Description of Artificial Sequence: Synthetic oligonucleotide
uaugaggagggaagcuaga

SEQ ID NO: 567531 - RNA, 19 nt, Artificial Sequence
  Description of Artificial Sequence: Synthetic oligonucleotide
acuagacagaugaucaagu

SEQ ID NO: 567532 - RNA, 19 nt, Artificial Sequence
  Description of Artificial Sequence: Synthetic oligonucleotide
ucucucacaauggcucccg

SEQ ID NO: 567533 - RNA, 19 nt, Artificial Sequence
  Description of Artificial Sequence: Synthetic oligonucleotide
cagaucaagaugcacaaua

SEQ ID NO: 567534 - RNA, 19 nt, Artificial Sequence
  Description of Artificial Sequence: Synthetic oligonucleotide
ucggcgaaaggucuagaau

SEQ ID NO: 567535 - RNA, 19 nt, Artificial Sequence
  Description of Artificial Sequence: Synthetic oligonucleotide
aaagaccgggugauauagg

SEQ ID NO: 567536 - RNA, 19 nt, Artificial Sequence
  Description of Artificial Sequence: Synthetic oligonucleotide
gaaugcugcugcgaugaag

SEQ ID NO: 567537 - RNA, 19 nt, Artificial Sequence
  Description of Artificial Sequence: Synthetic oligonucleotide
acccuauuagacaaguacu

SEQ ID NO: 567538 - RNA, 19 nt, Artificial Sequence
  Description of Artificial Sequence: Synthetic oligonucleotide
ggagggguaaccauuucgg

SEQ ID NO: 567539 - RNA, 19 nt, Artificial Sequence
  Description of Artificial Sequence: Synthetic oligonucleotide
acuuccacaucggcgaaag

SEQ ID NO: 567540 - RNA, 19 nt, Artificial Sequence
  Description of Artificial Sequence: Synthetic oligonucleotide
gcauuucgcaccuagaaaa

SEQ ID NO: 567541 - RNA, 19 nt, Artificial Sequence
  Description of Artificial Sequence: Synthetic oligonucleotide
gggauacacacucucuucc

SEQ ID NO: 567542 - RNA, 19 nt, Artificial Sequence
  Description of Artificial Sequence: Synthetic oligonucleotide
guauuguugcccucaccug

SEQ ID NO: 567543 - RNA, 19 nt, Artificial Sequence
  Description of Artificial Sequence: Synthetic oligonucleotide
aagaaucguuuagucucuc

SEQ ID NO: 567544 - RNA, 19 nt, Artificial Sequence
  Description of Artificial Sequence: Synthetic oligonucleotide
ggcaauaacucccauccca

SEQ ID NO: 567545 - RNA, 19 nt, Artificial Sequence
  Description of Artificial Sequence: Synthetic oligonucleotide
ucccaacuugaaauucuga

SEQ ID NO: 567546 - RNA, 19 nt, Artificial Sequence
  Description of Artificial Sequence: Synthetic oligonucleotide
cucccgagaaggaaccaag

SEQ ID NO: 567547 - RNA, 19 nt, Artificial Sequence
  Description of Artificial Sequence: Synthetic oligonucleotide
gcgaucuucaaaagcaggg

SEQ ID NO: 567548 - RNA, 19 nt, Artificial Sequence
  Description of Artificial Sequence: Synthetic oligonucleotide
accgagucaaacagcaaag

SEQ ID NO: 567549 - RNA, 19 nt, Artificial Sequence
  Description of Artificial Sequence: Synthetic oligonucleotide
agaaucguuuagucucuca

SEQ ID NO: 567550 - RNA, 19 nt, Artificial Sequence
  Description of Artificial Sequence: Synthetic oligonucleotide
gaaaccaaccguaugacuu

SEQ ID NO: 567551 - RNA, 19 nt, Artificial Sequence
  Description of Artificial Sequence: Synthetic oligonucleotide
gacuugcauacgaaagacc

SEQ ID NO: 567552 - RNA, 19 nt, Artificial Sequence
  Description of Artificial Sequence: Synthetic oligonucleotide
guaguaagacauuccagcu

SEQ ID NO: 567553 - RNA, 19 nt, Artificial Sequence
  Description of Artificial Sequence: Synthetic oligonucleotide
cagauccaaauaugccagg

SEQ ID NO: 567554 - RNA, 19 nt, Artificial Sequence
  Description of Artificial Sequence: Synthetic oligonucleotide
cugcggucaauuuacauua

SEQ ID NO: 567555 - RNA, 19 nt, Artificial Sequence
  Description of Artificial Sequence: Synthetic oligonucleotide
aaagcauuucgcaccuaga

SEQ ID NO: 567556 - RNA, 19 nt, Artificial Sequence
  Description of Artificial Sequence: Synthetic oligonucleotide
ucuauccacucauggcaga

SEQ ID NO: 567557 - RNA, 19 nt, Artificial Sequence
  Description of Artificial Sequence: Synthetic oligonucleotide
aggcugcuuuacaagagac

SEQ ID NO: 567558 - RNA, 19 nt, Artificial Sequence
  Description of Artificial Sequence: Synthetic oligonucleotide
guuaaggcaugaaugcaca

SEQ ID NO: 567559 - RNA, 19 nt, Artificial Sequence
  Description of Artificial Sequence: Synthetic oligonucleotide
ucacccgauuagcagcaca

SEQ ID NO: 567560 - RNA, 19 nt, Artificial Sequence
  Description of Artificial Sequence: Synthetic oligonucleotide
gacaagucccaacuugaaa

SEQ ID NO: 567561 - RNA, 19 nt, Artificial Sequence
  Description of Artificial Sequence: Synthetic oligonucleotide
gcaaaguugagcgguaacc

SEQ ID NO: 567562 - RNA, 19 nt, Artificial Sequence
  Description of Artificial Sequence: Synthetic oligonucleotide
cauuccauggucaacucgu

SEQ ID NO: 567563 - RNA, 19 nt, Artificial Sequence
  Description of Artificial Sequence: Synthetic oligonucleotide
augauccccaaaacgguag

SEQ ID NO: 567564 - RNA, 19 nt, Artificial Sequence
  Description of Artificial Sequence: Synthetic oligonucleotide
caauaucacuggugggaag

SEQ ID NO: 567565 - RNA, 19 nt, Artificial Sequence
  Description of Artificial Sequence: Synthetic oligonucleotide
agucaucacuacaagcucu

SEQ ID NO: 567566 - RNA, 19 nt, Artificial Sequence
  Description of Artificial Sequence: Synthetic oligonucleotide
acuagacauguugugggca

SEQ ID NO: 567567 - RNA, 19 nt, Artificial Sequence
  Description of Artificial Sequence: Synthetic oligonucleotide
ccucaccugccaaugaugg

SEQ ID NO: 567568 - RNA, 19 nt, Artificial Sequence
  Description of Artificial Sequence: Synthetic oligonucleotide
gggguaaccauuucggcuc

SEQ ID NO: 567569 - RNA, 19 nt, Artificial Sequence
  Description of Artificial Sequence: Synthetic oligonucleotide
gcugcugcgaugaaggggc

SEQ ID NO: 567570 - RNA, 19 nt, Artificial Sequence
  Description of Artificial Sequence: Synthetic oligonucleotide
cguuuagucucucacaaug

SEQ ID NO: 567571 - RNA, 19 nt, Artificial Sequence
  Description of Artificial Sequence: Synthetic oligonucleotide
agcgucaauggcuggcucu

SEQ ID NO: 567572 - RNA, 19 nt, Artificial Sequence
  Description of Artificial Sequence: Synthetic oligonucleotide
caaucugaugauggcgagg

SEQ ID NO: 567573 - RNA, 19 nt, Artificial Sequence
  Description of Artificial Sequence: Synthetic oligonucleotide
aagcucuagacuagacaug

SEQ ID NO: 567574 - RNA, 19 nt, Artificial Sequence
  Description of Artificial Sequence: Synthetic oligonucleotide
ugugggcaccgguucaucu

SEQ ID NO: 567575 - RNA, 19 nt, Artificial Sequence
  Description of Artificial Sequence: Synthetic oligonucleotide
aguucagagcccagaggcg

SEQ ID NO: 567576 - RNA, 19 nt, Artificial Sequence
  Description of Artificial Sequence: Synthetic oligonucleotide
ggagaguuguaguaagaca

SEQ ID NO: 567577 - RNA, 19 nt, Artificial Sequence
  Description of Artificial Sequence: Synthetic oligonucleotide
uacccgagggucucuguca

SEQ ID NO: 567578 - RNA, 19 nt, Artificial Sequence
  Description of Artificial Sequence: Synthetic oligonucleotide
caugucuuugguagucauc

SEQ ID NO: 567579 - RNA, 19 nt, Artificial Sequence
  Description of Artificial Sequence: Synthetic oligonucleotide
acguauaaauaaaaucuua

SEQ ID NO: 567580 - RNA, 19 nt, Artificial Sequence
  Description of Artificial Sequence: Synthetic oligonucleotide
aggaggggugcaccgaaug

SEQ ID NO: 567581 - RNA, 19 nt, Artificial Sequence
  Description of Artificial Sequence: Synthetic oligonucleotide
gucuagaauucucucuaga

SEQ ID NO: 567582 - RNA, 19 nt, Artificial Sequence
  Description of Artificial Sequence: Synthetic oligonucleotide
auacgugcacacacacagc

SEQ ID NO: 567583 - RNA, 19 nt, Artificial Sequence
  Description of Artificial Sequence: Synthetic oligonucleotide
cuauccacucauggcagag

SEQ ID NO: 567584 - RNA, 19 nt, Artificial Sequence
  Description of Artificial Sequence: Synthetic oligonucleotide
ugcauacgaaagaccgggu

SEQ ID NO: 567585 - RNA, 19 nt, Artificial Sequence
  Description of Artificial Sequence: Synthetic oligonucleotide
acuaugaggagggaagcua

SEQ ID NO: 567586 - RNA, 19 nt, Artificial Sequence
  Description of Artificial Sequence: Synthetic oligonucleotide
ggugacggccuugugaugc

SEQ ID NO: 567587 - RNA, 19 nt, Artificial Sequence
  Description of Artificial Sequence: Synthetic oligonucleotide
ggcucuuuaauaauuugga

SEQ ID NO: 567588 - RNA, 19 nt, Artificial Sequence
  Description of Artificial Sequence: Synthetic oligonucleotide
uuacccuauuagacaagua

SEQ ID NO: 567589 - RNA, 19 nt, Artificial Sequence
  Description of Artificial Sequence: Synthetic oligonucleotide
aucggcgaaaggucuagaa

SEQ ID NO: 567590 - RNA, 19 nt, Artificial Sequence
  Description of Artificial Sequence: Synthetic oligonucleotide
auggcgaggaccgagucaa

SEQ ID NO: 567591 - RNA, 19 nt, Artificial Sequence
  Description of Artificial Sequence: Synthetic oligonucleotide
cucagcauugguuacccua

SEQ ID NO: 567592 - RNA, 19 nt, Artificial Sequence
  Description of Artificial Sequence: Synthetic oligonucleotide
aacaggcaauaacucccau

SEQ ID NO: 567593 - RNA, 19 nt, Artificial Sequence
  Description of Artificial Sequence: Synthetic oligonucleotide
acgcaugucuuugguaguc

SEQ ID NO: 567594 - RNA, 19 nt, Artificial Sequence
  Description of Artificial Sequence: Synthetic oligonucleotide
gugaaaccaaccguaugac

SEQ ID NO: 567595 - RNA, 19 nt, Artificial Sequence
  Description of Artificial Sequence: Synthetic oligonucleotide
auucuaucgggaaggacaa

SEQ ID NO: 567596 - RNA, 19 nt, Artificial Sequence
  Description of Artificial Sequence: Synthetic oligonucleotide
uacgcaugucuuugguagu

SEQ ID NO: 567597 - RNA, 19 nt, Artificial Sequence
  Description of Artificial Sequence: Synthetic oligonucleotide
gcauacgaaagaccgggug

SEQ ID NO: 567598 - RNA, 19 nt, Artificial Sequence
  Description of Artificial Sequence: Synthetic oligonucleotide
gcgguaacccaaguuaagg

SEQ ID NO: 567599 - RNA, 19 nt, Artificial Sequence
  Description of Artificial Sequence: Synthetic oligonucleotide
cucgucugugucucaggag

SEQ ID NO: 567600 - RNA, 19 nt, Artificial Sequence
  Description of Artificial Sequence: Synthetic oligonucleotide
acgaaagaccgggugauau

SEQ ID NO: 567601 - RNA, 19 nt, Artificial Sequence
  Description of Artificial Sequence: Synthetic oligonucleotide
cagacccucacccgauuag

SEQ ID NO: 567602 - RNA, 19 nt, Artificial Sequence
  Description of Artificial Sequence: Synthetic oligonucleotide
ugucuuugguagucaucac

SEQ ID NO: 567603 - RNA, 19 nt, Artificial Sequence
  Description of Artificial Sequence: Synthetic oligonucleotide
ggaagcuagacaaccucag

SEQ ID NO: 567604 - RNA, 19 nt, Artificial Sequence
  Description of Artificial Sequence: Synthetic oligonucleotide
gacguauaaauaaaaucuu

SEQ ID NO: 567605 - RNA, 19 nt, Artificial Sequence
  Description of Artificial Sequence: Synthetic oligonucleotide
ggaacagacccucacccga

SEQ ID NO: 567606 - RNA, 19 nt, Artificial Sequence
  Description of Artificial Sequence: Synthetic oligonucleotide
gccccuaagaaucguuuag

SEQ ID NO: 567607 - RNA, 19 nt, Artificial Sequence
  Description of Artificial Sequence: Synthetic oligonucleotide
acaucggcgaaaggucuag

SEQ ID NO: 567608 - RNA, 19 nt, Artificial Sequence
  Description of Artificial Sequence: Synthetic oligonucleotide
cuacugauucuaucgggaa

SEQ ID NO: 567609 - RNA, 19 nt, Artificial Sequence
  Description of Artificial Sequence: Synthetic oligonucleotide
aguugagcgguaacccaag

SEQ ID NO: 567610 - RNA, 19 nt, Artificial Sequence
  Description of Artificial Sequence: Synthetic oligonucleotide
agaccgggugauauagguc

SEQ ID NO: 567611 - RNA, 19 nt, Artificial Sequence
  Description of Artificial Sequence: Synthetic oligonucleotide
accgaaugcugcugcgaug

SEQ ID NO: 567612 - RNA, 19 nt, Artificial Sequence
  Description of Artificial Sequence: Synthetic oligonucleotide
gucaacucgucugugucuc

SEQ ID NO: 567613 - RNA, 19 nt, Artificial Sequence
  Description of Artificial Sequence: Synthetic oligonucleotide
ucguuuagucucucacaau

SEQ ID NO: 567614 - RNA, 19 nt, Artificial Sequence
  Description of Artificial Sequence: Synthetic oligonucleotide
gaucacucaaggagaggca

SEQ ID NO: 567615 - RNA, 19 nt, Artificial Sequence
  Description of Artificial Sequence: Synthetic oligonucleotide
gucccaacuugaaauucug

SEQ ID NO: 567616 - RNA, 19 nt, Artificial Sequence
  Description of Artificial Sequence: Synthetic oligonucleotide
guacuagacagaugaucaa

SEQ ID NO: 567617 - RNA, 19 nt, Artificial Sequence
  Description of Artificial Sequence: Synthetic oligonucleotide
gugggaaggcaucuaucca

SEQ ID NO: 567618 - RNA, 19 nt, Artificial Sequence
  Description of Artificial Sequence: Synthetic oligonucleotide
aaagccccuaagaaucguu

SEQ ID NO: 567619 - RNA, 19 nt, Artificial Sequence
  Description of Artificial Sequence: Synthetic oligonucleotide
gaagcuagacaaccucagu

SEQ ID NO: 567620 - RNA, 19 nt, Artificial Sequence
  Description of Artificial Sequence: Synthetic oligonucleotide
ggagcagcgucaauggcug

SEQ ID NO: 567621 - RNA, 19 nt, Artificial Sequence
  Description of Artificial Sequence: Synthetic oligonucleotide
accguaugacuugcauacg

SEQ ID NO: 567622 - RNA, 19 nt, Artificial Sequence
  Description of Artificial Sequence: Synthetic oligonucleotide
caugcauuaagggcuggga

SEQ ID NO: 567623 - RNA, 19 nt, Artificial Sequence
  Description of Artificial Sequence: Synthetic oligonucleotide
ugcggucaauuuacauuaa

SEQ ID NO: 567624 - RNA, 19 nt, Artificial Sequence
  Description of Artificial Sequence: Synthetic oligonucleotide
gucaucacuacaagcucuc

SEQ ID NO: 567625 - RNA, 19 nt, Artificial Sequence
  Description of Artificial Sequence: Synthetic oligonucleotide
agcgguaacccaaguuaag

SEQ ID NO: 567626 - RNA, 19 nt, Artificial Sequence
  Description of Artificial Sequence: Synthetic oligonucleotide
caauaacucccaucccaca

SEQ ID NO: 567627 - RNA, 19 nt, Artificial Sequence
  Description of Artificial Sequence: Synthetic oligonucleotide
ggaggggugcaccgaaugc

SEQ ID NO: 567628 - RNA, 19 nt, Artificial Sequence
  Description of Artificial Sequence: Synthetic oligonucleotide
ucaacucgucugugucuca

SEQ ID NO: 567629 - RNA, 19 nt, Artificial Sequence
  Description of Artificial Sequence: Synthetic oligonucleotide
guuacccuauuagacaagu

SEQ ID NO: 567630 - RNA, 19 nt, Artificial Sequence
  Description of Artificial Sequence: Synthetic oligonucleotide
cagaguuagguuggaaaga

SEQ ID NO: 567631 - RNA, 19 nt, Artificial Sequence
  Description of Artificial Sequence: Synthetic oligonucleotide
auuucgcaccuagaaaaua

SEQ ID NO: 567632 - RNA, 19 nt, Artificial Sequence
  Description of Artificial Sequence: Synthetic oligonucleotide
gcaauaacucccaucccac

SEQ ID NO: 567633 - RNA, 19 nt, Artificial Sequence
  Description of Artificial Sequence: Synthetic oligonucleotide
ugcgaugaaggggcgggcu

SEQ ID NO: 567634 - RNA, 19 nt, Artificial Sequence
  Description of Artificial Sequence: Synthetic oligonucleotide
cuggagaguuguaguaaga

SEQ ID NO: 567635 - RNA, 19 nt, Artificial Sequence
  Description of Artificial Sequence: Synthetic oligonucleotide
aagccccuaagaaucguuu

SEQ ID NO: 567636 - RNA, 19 nt, Artificial Sequence
  Description of Artificial Sequence: Synthetic oligonucleotide
uccaaucaacaaagacgua

SEQ ID NO: 567637 - RNA, 19 nt, Artificial Sequence
  Description of Artificial Sequence: Synthetic oligonucleotide
caaccguaugacuugcaua

SEQ ID NO: 567638 - RNA, 19 nt, Artificial Sequence
  Description of Artificial Sequence: Synthetic oligonucleotide
cuuuggcguugagaaggcg

SEQ ID NO: 567639 - RNA, 19 nt, Artificial Sequence
  Description of Artificial Sequence: Synthetic oligonucleotide
cagaaguuuuacuacgcau

SEQ ID NO: 567640 - RNA, 19 nt, Artificial Sequence
  Description of Artificial Sequence: Synthetic oligonucleotide
gagcgguaacccaaguuaa

SEQ ID NO: 567641 - RNA, 19 nt, Artificial Sequence
  Description of Artificial Sequence: Synthetic oligonucleotide
ugucuuacugggcgaucuu

SEQ ID NO: 567642 - RNA, 19 nt, Artificial Sequence
  Description of Artificial Sequence: Synthetic oligonucleotide
cgaggaccgagucaaacag

SEQ ID NO: 567643 - RNA, 19 nt, Artificial Sequence
  Description of Artificial Sequence: Synthetic oligonucleotide
guacccgagggucucuguc

SEQ ID NO: 567644 - RNA, 19 nt, Artificial Sequence
  Description of Artificial Sequence: Synthetic oligonucleotide
ugcccucaccugccaauga

SEQ ID NO: 567645 - RNA, 19 nt, Artificial Sequence
  Description of Artificial Sequence: Synthetic oligonucleotide
ggggauacacacucucuuc

SEQ ID NO: 567646 - RNA, 19 nt, Artificial Sequence
  Description of Artificial Sequence: Synthetic oligonucleotide
gcuacugauucuaucggga

SEQ ID NO: 567647 - RNA, 19 nt, Artificial Sequence
  Description of Artificial Sequence: Synthetic oligonucleotide
cugaguaagcucaugcauu

SEQ ID NO: 567648 - RNA, 19 nt, Artificial Sequence
  Description of Artificial Sequence: Synthetic oligonucleotide
acagacccucacccgauua

SEQ ID NO: 567649 - RNA, 19 nt, Artificial Sequence
  Description of Artificial Sequence: Synthetic oligonucleotide
guaacccaaguuaaggcau

SEQ ID NO: 567650 - RNA, 19 nt, Artificial Sequence
  Description of Artificial Sequence: Synthetic oligonucleotide
agaguuguaguaagacauu

SEQ ID NO: 567651 - RNA, 19 nt, Artificial Sequence
  Description of Artificial Sequence: Synthetic oligonucleotide
gucuuacugggcgaucuuc

SEQ ID NO: 567652 - RNA, 19 nt, Artificial Sequence
  Description of Artificial Sequence: Synthetic oligonucleotide
gagcagcgucaauggcugg

SEQ ID NO: 567653 - RNA, 19 nt, Artificial Sequence
  Description of Artificial Sequence: Synthetic oligonucleotide
aaggggcgggcugcgaaga

SEQ ID NO: 567654 - RNA, 19 nt, Artificial Sequence
  Description of Artificial Sequence: Synthetic oligonucleotide
gaucaaaggcaaggucauc

SEQ ID NO: 567655 - RNA, 19 nt, Artificial Sequence
  Description of Artificial Sequence: Synthetic oligonucleotide
gucucucacaauggcuccc

SEQ ID NO: 567656 - RNA, 19 nt, Artificial Sequence
  Description of Artificial Sequence: Synthetic oligonucleotide
gaacuuugugaagcacgga

SEQ ID NO: 567657 - RNA, 19 nt, Artificial Sequence
  Description of Artificial Sequence: Synthetic oligonucleotide
ggcgaaaggucuagaauuc

SEQ ID NO: 567658 - RNA, 19 nt, Artificial Sequence
  Description of Artificial Sequence: Synthetic oligonucleotide
ccaucccacacauggggag

SEQ ID NO: 567659 - RNA, 19 nt, Artificial Sequence
  Description of Artificial Sequence: Synthetic oligonucleotide
aggggugcaccgaaugcug

SEQ ID NO: 567660 - RNA, 19 nt, Artificial Sequence
  Description of Artificial Sequence: Synthetic oligonucleotide
gugacggccuugugaugcc

SEQ ID NO: 567661 - RNA, 19 nt, Artificial Sequence
  Description of Artificial Sequence: Synthetic oligonucleotide
gcguuuccgacagacauuc

SEQ ID NO: 567662 - RNA, 19 nt, Artificial Sequence
  Description of Artificial Sequence: Synthetic oligonucleotide
gguugguggugugaaacca

SEQ ID NO: 567663 - RNA, 19 nt, Artificial Sequence
  Description of Artificial Sequence: Synthetic oligonucleotide
cacauggggagaagcuaca

SEQ ID NO: 567664 - RNA, 19 nt, Artificial Sequence
  Description of Artificial Sequence: Synthetic oligonucleotide
ccuaagaaucguuuagucu

SEQ ID NO: 567665 - RNA, 19 nt, Artificial Sequence
  Description of Artificial Sequence: Synthetic oligonucleotide
cagcucgagucaaugaggu

SEQ ID NO: 567666 - RNA, 19 nt, Artificial Sequence
  Description of Artificial Sequence: Synthetic oligonucleotide
gguuacccuauuagacaag

SEQ ID NO: 567667 - RNA, 19 nt, Artificial Sequence
  Description of Artificial Sequence: Synthetic oligonucleotide
aggcgaccuggguguggcc

SEQ ID NO: 567668 - RNA, 19 nt, Artificial Sequence
  Description of Artificial Sequence: Synthetic oligonucleotide
gcgaggaccgagucaaaca

SEQ ID NO: 567669 - RNA, 19 nt, Artificial Sequence
  Description of Artificial Sequence: Synthetic oligonucleotide
cccuauuagacaaguacua

SEQ ID NO: 567670 - RNA, 19 nt, Artificial Sequence
  Description of Artificial Sequence: Synthetic oligonucleotide
cugcugcgaugaaggggcg

SEQ ID NO: 567671 - RNA, 19 nt, Artificial Sequence
  Description of Artificial Sequence: Synthetic oligonucleotide
acccaugcuagcacacaca

SEQ ID NO: 567672 - RNA, 19 nt, Artificial Sequence
  Description of Artificial Sequence: Synthetic oligonucleotide
gaagggaccgagggcugca

SEQ ID NO: 567673 - RNA, 19 nt, Artificial Sequence
  Description of Artificial Sequence: Synthetic oligonucleotide
ugugggccuuuugaacuua

SEQ ID NO: 567674 - RNA, 19 nt, Artificial Sequence
  Description of Artificial Sequence: Synthetic oligonucleotide
ucccacacauggggagaag

SEQ ID NO: 567675 - RNA, 19 nt, Artificial Sequence
  Description of Artificial Sequence: Synthetic oligonucleotide
augggagggguaaccauuu

SEQ ID NO: 567676 - RNA, 19 nt, Artificial Sequence
  Description of Artificial Sequence: Synthetic oligonucleotide
aacucccaucccacacaug

SEQ ID NO: 567677 - RNA, 19 nt, Artificial Sequence
  Description of Artificial Sequence: Synthetic oligonucleotide
uacgaaagaccgggugaua

SEQ ID NO: 567678 - RNA, 19 nt, Artificial Sequence
  Description of Artificial Sequence: Synthetic oligonucleotide
aggggcgggcugcgaagag

SEQ ID NO: 567679 - RNA, 19 nt, Artificial Sequence
  Description of Artificial Sequence: Synthetic oligonucleotide
cggucaauuuacauuaaaa

SEQ ID NO: 567680 - RNA, 19 nt, Artificial Sequence
  Description of Artificial Sequence: Synthetic oligonucleotide
ccguaugacuugcauacga

SEQ ID NO: 567681 - RNA, 19 nt, Artificial Sequence
  Description of Artificial Sequence: Synthetic oligonucleotide
cccauugaucacucaagga

SEQ ID NO: 567682 - RNA, 19 nt, Artificial Sequence
  Description of Artificial Sequence: Synthetic oligonucleotide
ggugcaccgaaugcugcug

SEQ ID NO: 567683 - RNA, 19 nt, Artificial Sequence
  Description of Artificial Sequence: Synthetic oligonucleotide
acccgauuagcagcacagu

SEQ ID NO: 567684 - RNA, 19 nt, Artificial Sequence
  Description of Artificial Sequence: Synthetic oligonucleotide
cugauucuaucgggaagga

SEQ ID NO: 567685 - RNA, 19 nt, Artificial Sequence
  Description of Artificial Sequence: Synthetic oligonucleotide
aucccacacauggggagaa

SEQ ID NO: 567686 - RNA, 19 nt, Artificial Sequence
  Description of Artificial Sequence: Synthetic oligonucleotide
cuagaaugccagcaugcuu

SEQ ID NO: 567687 - RNA, 19 nt, Artificial Sequence
  Description of Artificial Sequence: Synthetic oligonucleotide
uucuaucgggaaggacaaa

SEQ ID NO: 567688 - RNA, 19 nt, Artificial Sequence
  Description of Artificial Sequence: Synthetic oligonucleotide
caucccacacauggggaga

SEQ ID NO: 567689 - RNA, 19 nt, Artificial Sequence
  Description of Artificial Sequence: Synthetic oligonucleotide
cccgcagcaagagauccag

SEQ ID NO: 567690 - RNA, 19 nt, Artificial Sequence
  Description of Artificial Sequence: Synthetic oligonucleotide
cucucuagaaugccagcau

SEQ ID NO: 567691 - RNA, 19 nt, Artificial Sequence
  Description of Artificial Sequence: Synthetic oligonucleotide
ggcggcuccaucagacaag

SEQ ID NO: 567692 - RNA, 19 nt, Artificial Sequence
  Description of Artificial Sequence: Synthetic oligonucleotide
ggcugcuuuacaagagaca

SEQ ID NO: 567693 - RNA, 19 nt, Artificial Sequence
  Description of Artificial Sequence: Synthetic oligonucleotide
ggcgaggaccgagucaaac

SEQ ID NO: 567694 - RNA, 19 nt, Artificial Sequence
  Description of Artificial Sequence: Synthetic oligonucleotide
ccgaaugcugcugcgauga

SEQ ID NO: 567695 - RNA, 19 nt, Artificial Sequence
  Description of Artificial Sequence: Synthetic oligonucleotide
accgggugauauaggucug

SEQ ID NO: 567696 - RNA, 19 nt, Artificial Sequence
  Description of Artificial Sequence: Synthetic oligonucleotide
cugucuuacugggcgaucu

SEQ ID NO: 567697 - RNA, 19 nt, Artificial Sequence
  Description of Artificial Sequence: Synthetic oligonucleotide
cacaucggcgaaaggucua

SEQ ID NO: 567698 - RNA, 19 nt, Artificial Sequence
  Description of Artificial Sequence: Synthetic oligonucleotide
gcggucaauuuacauuaaa

SEQ ID NO: 567699 - RNA, 19 nt, Artificial Sequence
  Description of Artificial Sequence: Synthetic oligonucleotide
cagacccacaacacuggcu

SEQ ID NO: 567700 - RNA, 19 nt, Artificial Sequence
  Description of Artificial Sequence: Synthetic oligonucleotide
cccgagaaggaaccaagga

SEQ ID NO: 567701 - RNA, 19 nt, Artificial Sequence
  Description of Artificial Sequence: Synthetic oligonucleotide
cugcgaugaaggggcgggc

SEQ ID NO: 567702 - RNA, 19 nt, Artificial Sequence
  Description of Artificial Sequence: Synthetic oligonucleotide
gcugccgaagggaccgagg

SEQ ID NO: 567703 - RNA, 19 nt, Artificial Sequence
  Description of Artificial Sequence: Synthetic oligonucleotide
caaguacuagacagaugau

SEQ ID NO: 567704 - RNA, 19 nt, Artificial Sequence
  Description of Artificial Sequence: Synthetic oligonucleotide
ggucaacucgucugugucu

SEQ ID NO: 567705 - RNA, 19 nt, Artificial Sequence
  Description of Artificial Sequence: Synthetic oligonucleotide
cacuacaagcucucagcau

SEQ ID NO: 567706 - RNA, 19 nt, Artificial Sequence
  Description of Artificial Sequence: Synthetic oligonucleotide
gcgaagagguggcugccga

SEQ ID NO: 567707 - RNA, 19 nt, Artificial Sequence
  Description of Artificial Sequence: Synthetic oligonucleotide
cacaacacuggcugcguuu

SEQ ID NO: 567708 - RNA, 19 nt, Artificial Sequence
  Description of Artificial Sequence: Synthetic oligonucleotide
cccaaaacgguaggcuaac

SEQ ID NO: 567709 - RNA, 19 nt, Artificial Sequence
  Description of Artificial Sequence: Synthetic oligonucleotide
ugcguggacugggcucuga

SEQ ID NO: 567710 - RNA, 19 nt, Artificial Sequence
  Description of Artificial Sequence: Synthetic oligonucleotide
accaaccguaugacuugca

SEQ ID NO: 567711 - RNA, 19 nt, Artificial Sequence
  Description of Artificial Sequence: Synthetic oligonucleotide
ccucacccgauuagcagca

SEQ ID NO: 567712 - RNA, 19 nt, Artificial Sequence
  Description of Artificial Sequence: Synthetic oligonucleotide
aggcggugugggccuuuug

SEQ ID NO: 567713 - RNA, 19 nt, Artificial Sequence
  Description of Artificial Sequence: Synthetic oligonucleotide
cguaugacuugcauacgaa

SEQ ID NO: 567714 - RNA, 19 nt, Artificial Sequence
  Description of Artificial Sequence: Synthetic oligonucleotide
cucucacaauggcucccga

SEQ ID NO: 567715 - RNA, 19 nt, Artificial Sequence
  Description of Artificial Sequence: Synthetic oligonucleotide
cuggugggaaggcaucuau

SEQ ID NO: 567716 - RNA, 19 nt, Artificial Sequence
  Description of Artificial Sequence: Synthetic oligonucleotide
ggggugcaccgaaugcugc

SEQ ID NO: 567717 - RNA, 19 nt, Artificial Sequence
  Description of Artificial Sequence: Synthetic oligonucleotide
cagaugcugggugcgugga

SEQ ID NO: 567718 - RNA, 19 nt, Artificial Sequence
  Description of Artificial Sequence: Synthetic oligonucleotide
gcauacgugcacacacaca

SEQ ID NO: 567719 - RNA, 19 nt, Artificial Sequence
  Description of Artificial Sequence: Synthetic oligonucleotide
uggcgaggaccgagucaaa

SEQ ID NO: 567720 - RNA, 19 nt, Artificial Sequence
  Description of Artificial Sequence: Synthetic oligonucleotide
ggcgaccuggguguggcca

SEQ ID NO: 567721 - RNA, 19 nt, Artificial Sequence
  Description of Artificial Sequence: Synthetic oligonucleotide
cucacccgauuagcagcac

SEQ ID NO: 567722 - RNA, 19 nt, Artificial Sequence
  Description of Artificial Sequence: Synthetic oligonucleotide
caccgaaugcugcugcgau

SEQ ID NO: 567723 - RNA, 19 nt, Artificial Sequence
  Description of Artificial Sequence: Synthetic oligonucleotide
gggcucugaucaaaggcaa

SEQ ID NO: 567724 - RNA, 19 nt, Artificial Sequence
  Description of Artificial Sequence: Synthetic oligonucleotide
ggcaccgguucaucuaacu

SEQ ID NO: 567725 - RNA, 19 nt, Artificial Sequence
  Description of Artificial Sequence: Synthetic oligonucleotide
cagcaaaguugagcgguaa

SEQ ID NO: 567726 - RNA, 19 nt, Artificial Sequence
  Description of Artificial Sequence: Synthetic oligonucleotide
gccuggagaguuguaguaa

SEQ ID NO: 567727 - RNA, 19 nt, Artificial Sequence
  Description of Artificial Sequence: Synthetic oligonucleotide
gcgccagaugcugggugcg

SEQ ID NO: 567728 - RNA, 19 nt, Artificial Sequence
  Description of Artificial Sequence: Synthetic oligonucleotide
caauuacaacuggucaaau

SEQ ID NO: 567729 - RNA, 19 nt, Artificial Sequence
  Description of Artificial Sequence: Synthetic oligonucleotide
augccaugggaggcuccca

SEQ ID NO: 567730 - RNA, 19 nt, Artificial Sequence
  Description of Artificial Sequence: Synthetic oligonucleotide
ggugcguggacugggcucu

SEQ ID NO: 567731 - RNA, 19 nt, Artificial Sequence
  Description of Artificial Sequence: Synthetic oligonucleotide
ccgggugauauaggucugc

SEQ ID NO: 567732 - RNA, 19 nt, Artificial Sequence
  Description of Artificial Sequence: Synthetic oligonucleotide
cagugguacccgagggucu

SEQ ID NO: 567733 - RNA, 19 nt, Artificial Sequence
  Description of Artificial Sequence: Synthetic oligonucleotide
cuccguggugacggccuug

SEQ ID NO: 567734 - RNA, 19 nt, Artificial Sequence
  Description of Artificial Sequence: Synthetic oligonucleotide
gguaaccauuucggcucug

SEQ ID NO: 567735 - RNA, 19 nt, Artificial Sequence
  Description of Artificial Sequence: Synthetic oligonucleotide
cggccuugugaugccaugg

SEQ ID NO: 567736 - RNA, 19 nt, Artificial Sequence
  Description of Artificial Sequence: Synthetic oligonucleotide
caucggcgaaaggucuaga

SEQ ID NO: 567737 - RNA, 19 nt, Artificial Sequence
  Description of Artificial Sequence: Synthetic oligonucleotide
ggcugccgaagggaccgag

SEQ ID NO: 567738 - RNA, 19 nt, Artificial Sequence
  Description of Artificial Sequence: Synthetic oligonucleotide
cggcgaaaggucuagaauu

SEQ ID NO: 567739 - RNA, 19 nt, Artificial Sequence
  Description of Artificial Sequence: Synthetic oligonucleotide
gggugcaccgaaugcugcu

SEQ ID NO: 567740 - RNA, 19 nt, Artificial Sequence
  Description of Artificial Sequence: Synthetic oligonucleotide
gcaccgguucaucuaacuu

SEQ ID NO: 567741 - RNA, 19 nt, Artificial Sequence
  Description of Artificial Sequence: Synthetic oligonucleotide
ggguaaccauuucggcucu

SEQ ID NO: 567742 - RNA, 19 nt, Artificial Sequence
  Description of Artificial Sequence: Synthetic oligonucleotide
gcgaaaggucuagaauucu

SEQ ID NO: 567743 - RNA, 19 nt, Artificial Sequence
  Description of Artificial Sequence: Synthetic oligonucleotide
ccaaccguaugacuugcau

SEQ ID NO: 567744 - RNA, 19 nt, Artificial Sequence
  Description of Artificial Sequence: Synthetic oligonucleotide
ccugucuuacugggcgauc

SEQ ID NO: 567745 - RNA, 19 nt, Artificial Sequence
  Description of Artificial Sequence: Synthetic oligonucleotide
gguacccgagggucucugu

SEQ ID NO: 567746 - RNA, 19 nt, Artificial Sequence
  Description of Artificial Sequence: Synthetic oligonucleotide
ccauuucggcucugcuaca

SEQ ID NO: 567747 - RNA, 19 nt, Artificial Sequence
  Description of Artificial Sequence: Synthetic oligonucleotide
ccgagucaaacagcaaagu

SEQ ID NO: 567748 - RNA, 19 nt, Artificial Sequence
  Description of Artificial Sequence: Synthetic oligonucleotide
cagcauugguuacccuauu

SEQ ID NO: 567749 - RNA, 19 nt, Artificial Sequence
  Description of Artificial Sequence: Synthetic oligonucleotide
ccccgcagcaagagaucca

SEQ ID NO: 567750 - RNA, 19 nt, Artificial Sequence
  Description of Artificial Sequence: Synthetic oligonucleotide
gcgucaauggcuggcucuu

SEQ ID NO: 567751 - RNA, 19 nt, Artificial Sequence
  Description of Artificial Sequence: Synthetic oligonucleotide
ccugccaaugauggcuacu

SEQ ID NO: 567752 - RNA, 19 nt, Artificial Sequence
  Description of Artificial Sequence: Synthetic oligonucleotide
gaggcggugugggccuuuu

SEQ ID NO: 567753 - RNA, 19 nt, Artificial Sequence
  Description of Artificial Sequence: Synthetic oligonucleotide
cacggaccgccaugcuuuu

SEQ ID NO: 567754 - RNA, 19 nt, Artificial Sequence
  Description of Artificial Sequence: Synthetic oligonucleotide
gcucuagacuagacauguu

SEQ ID NO: 567755 - RNA, 19 nt, Artificial Sequence
  Description of Artificial Sequence: Synthetic oligonucleotide
cgguaggcuaacacauuuu

SEQ ID NO: 567756 - RNA, 19 nt, Artificial Sequence
  Description of Artificial Sequence: Synthetic oligonucleotide
gggcugcgaagagguggcu

SEQ ID NO: 567757 - RNA, 19 nt, Artificial Sequence
  Description of Artificial Sequence: Synthetic oligonucleotide
uuauaguccguuuaaaagg

SEQ ID NO: 567758 - RNA, 19 nt, Artificial Sequence
  Description of Artificial Sequence: Synthetic oligonucleotide
auagaugccaaguuguagc

SEQ ID NO: 567759 - RNA, 19 nt, Artificial Sequence
  Description of Artificial Sequence: Synthetic oligonucleotide
uagauucagagauagaugc

SEQ ID NO: 567760 - RNA, 19 nt, Artificial Sequence
  Description of Artificial Sequence: Synthetic oligonucleotide
uauaguccguuuaaaaggg

SEQ ID NO: 567761 - RNA, 19 nt, Artificial Sequence
  Description of Artificial Sequence: Synthetic oligonucleotide
uguucugagacuuagugug

SEQ ID NO: 567762 - RNA, 19 nt, Artificial Sequence
  Description of Artificial Sequence: Synthetic oligonucleotide
agaacaaugguguuccucg

SEQ ID NO: 567763 - RNA, 19 nt, Artificial Sequence
  Description of Artificial Sequence: Synthetic oligonucleotide
acuaaguugucccucuucc

SEQ ID NO: 567764 - RNA, 19 nt, Artificial Sequence
  Description of Artificial Sequence: Synthetic oligonucleotide
acauauaauacacuggggu

SEQ ID NO: 567765 - RNA, 19 nt, Artificial Sequence
  Description of Artificial Sequence: Synthetic oligonucleotide
uuuggauuggcucaguuuc

SEQ ID NO: 567766 - RNA, 19 nt, Artificial Sequence
  Description of Artificial Sequence: Synthetic oligonucleotide
agggcuacuaaguuguccc

SEQ ID NO: 567767 - RNA, 19 nt, Artificial Sequence
  Description of Artificial Sequence: Synthetic oligonucleotide
aguaaggugggcauaaccc

SEQ ID NO: 567768 - RNA, 19 nt, Artificial Sequence
  Description of Artificial Sequence: Synthetic oligonucleotide
accagcugaaaccaguacc

SEQ ID NO: 567769 - RNA, 19 nt, Artificial Sequence
  Description of Artificial Sequence: Synthetic oligonucleotide
uauaacugccauuugugcc

SEQ ID NO: 567770 - RNA, 19 nt, Artificial Sequence
  Description of Artificial Sequence: Synthetic oligonucleotide
aguaauugaggccagggcu

SEQ ID NO: 567771 - RNA, 19 nt, Artificial Sequence
  Description of Artificial Sequence: Synthetic oligonucleotide
acaaugguguuccucgagc

SEQ ID NO: 567772 - RNA, 19 nt, Artificial Sequence
  Description of Artificial Sequence: Synthetic oligonucleotide
aagcuauucauguccugac

SEQ ID NO: 567773 - RNA, 19 nt, Artificial Sequence
  Description of Artificial Sequence: Synthetic oligonucleotide
uugagauguauccaggccu

SEQ ID NO: 567774 - RNA, 19 nt, Artificial Sequence
  Description of Artificial Sequence: Synthetic oligonucleotide
uaaacaggcagcaguaugu

SEQ ID NO: 567775 - RNA, 19 nt, Artificial Sequence
  Description of Artificial Sequence: Synthetic oligonucleotide
uuaaacucauaggcgaugg

SEQ ID NO: 567776 - RNA, 19 nt, Artificial Sequence
  Description of Artificial Sequence: Synthetic oligonucleotide
auagguuuaagugaggcca

SEQ ID NO: 567777 - RNA, 19 nt, Artificial Sequence
  Description of Artificial Sequence: Synthetic oligonucleotide
aacacgauccacguacucg

SEQ ID NO: 567778 - RNA, 19 nt, Artificial Sequence
  Description of Artificial Sequence: Synthetic oligonucleotide
aggguuugcacuuaaagaa

SEQ ID NO: 567779 - RNA, 19 nt, Artificial Sequence
  Description of Artificial Sequence: Synthetic oligonucleotide
uuccggguuaaacucauag

SEQ ID NO: 567780 - RNA, 19 nt, Artificial Sequence
  Description of Artificial Sequence: Synthetic oligonucleotide
cuuugguuagaacuggagc

SEQ ID NO: 567781 - RNA, 19 nt, Artificial Sequence
  Description of Artificial Sequence: Synthetic oligonucleotide
cuaguggauguucugaggc

SEQ ID NO: 567782 - RNA, 19 nt, Artificial Sequence
  Description of Artificial Sequence: Synthetic oligonucleotide
uucguagugucaaagugcu

SEQ ID NO: 567783 - RNA, 19 nt, Artificial Sequence
  Description of Artificial Sequence: Synthetic oligonucleotide
auuugugcccuucaauguc

SEQ ID NO: 567784 - RNA, 19 nt, Artificial Sequence
  Description of Artificial Sequence: Synthetic oligonucleotide
auaacgacugcaguacacc

SEQ ID NO: 567785 - RNA, 19 nt, Artificial Sequence
  Description of Artificial Sequence: Synthetic oligonucleotide
uucccuagcagcuuguucu

SEQ ID NO: 567786 - RNA, 19 nt, Artificial Sequence
  Description of Artificial Sequence: Synthetic oligonucleotide
aguucguagugucaaagug

SEQ ID NO: 567787 - RNA, 19 nt, Artificial Sequence
  Description of Artificial Sequence: Synthetic oligonucleotide
aucauccgcaaacugcgcc

SEQ ID NO: 567788 - RNA, 19 nt, Artificial Sequence
  Description of Artificial Sequence: Synthetic oligonucleotide
ucuacaacugaacauuaua

SEQ ID NO: 567789 - RNA, 19 nt, Artificial Sequence
  Description of Artificial Sequence: Synthetic oligonucleotide
ugagacuuagugugagugg

SEQ ID NO: 567790 - RNA, 19 nt, Artificial Sequence
  Description of Artificial Sequence: Synthetic oligonucleotide
gauagguuuaagugaggcc

SEQ ID NO: 567791 - RNA, 19 nt, Artificial Sequence
  Description of Artificial Sequence: Synthetic oligonucleotide
aauggcuugagcaugucga

SEQ ID NO: 567792 - RNA, 19 nt, Artificial Sequence
  Description of Artificial Sequence: Synthetic oligonucleotide
ugcacggacacauauaaua

SEQ ID NO: 567793 - RNA, 19 nt, Artificial Sequence
  Description of Artificial Sequence: Synthetic oligonucleotide
gaaagugccauggucauac

SEQ ID NO: 567794 - RNA, 19 nt, Artificial Sequence
  Description of Artificial Sequence: Synthetic oligonucleotide
gacgaugccaggcagucag

SEQ ID NO: 567795 - RNA, 19 nt, Artificial Sequence
  Description of Artificial Sequence: Synthetic oligonucleotide
gaaagcacagcuuccacga

SEQ ID NO: 567796 - RNA, 19 nt, Artificial Sequence
  Description of Artificial Sequence: Synthetic oligonucleotide
uuaagugaggccacccuca

SEQ ID NO: 567797 - RNA, 19 nt, Artificial Sequence
  Description of Artificial Sequence: Synthetic oligonucleotide
acguacucggcacuguggc

SEQ ID NO: 567798 - RNA, 19 nt, Artificial Sequence
  Description of Artificial Sequence: Synthetic oligonucleotide
uguccugaccuccagcugc

SEQ ID NO: 567799 - RNA, 19 nt, Artificial Sequence
  Description of Artificial Sequence: Synthetic oligonucleotide
agaguagauucuuuugcag

SEQ ID NO: 567800 - RNA, 19 nt, Artificial Sequence
  Description of Artificial Sequence: Synthetic oligonucleotide
augucgagcagccacagcu

SEQ ID NO: 567801 - RNA, 19 nt, Artificial Sequence
  Description of Artificial Sequence: Synthetic oligonucleotide
agcuauucauguccugacc

SEQ ID NO: 567802 - RNA, 19 nt, Artificial Sequence
  Description of Artificial Sequence: Synthetic oligonucleotide
ugcgucagcaucaagcuau

SEQ ID NO: 567803 - RNA, 19 nt, Artificial Sequence
  Description of Artificial Sequence: Synthetic oligonucleotide
aacaaugguguuccucgag

SEQ ID NO: 567804 - RNA, 19 nt, Artificial Sequence
  Description of Artificial Sequence: Synthetic oligonucleotide
uuuaagugaggccacccuc

SEQ ID NO: 567805 - RNA, 19 nt, Artificial Sequence
  Description of Artificial Sequence: Synthetic oligonucleotide
acgaucaggauccgcaggg

SEQ ID NO: 567806 - RNA, 19 nt, Artificial Sequence
  Description of Artificial Sequence: Synthetic oligonucleotide
uccucgagcaggcagugag

SEQ ID NO: 567807 - RNA, 19 nt, Artificial Sequence
  Description of Artificial Sequence: Synthetic oligonucleotide
uccggguuaaacucauagg

SEQ ID NO: 567808 - RNA, 19 nt, Artificial Sequence
  Description of Artificial Sequence: Synthetic oligonucleotide
gauaaugcggccauuggca

SEQ ID NO: 567809 - RNA, 19 nt, Artificial Sequence
  Description of Artificial Sequence: Synthetic oligonucleotide
ugcgcaugaggcuacagga

SEQ ID NO: 567810 - RNA, 19 nt, Artificial Sequence
  Description of Artificial Sequence: Synthetic oligonucleotide
aaacugcgccaguaucugc

SEQ ID NO: 567811 - RNA, 19 nt, Artificial Sequence
  Description of Artificial Sequence: Synthetic oligonucleotide
auaagccugacagagauaa

SEQ ID NO: 567812 - RNA, 19 nt, Artificial Sequence
  Description of Artificial Sequence: Synthetic oligonucleotide
cacuuaaagaagcaccuug

SEQ ID NO: 567813 - RNA, 19 nt, Artificial Sequence
  Description of Artificial Sequence: Synthetic oligonucleotide
ugggcguugacauaacgac

SEQ ID NO: 567814 - RNA, 19 nt, Artificial Sequence
  Description of Artificial Sequence: Synthetic oligonucleotide
gauuuagcauugcccagag

SEQ ID NO: 567815 - RNA, 19 nt, Artificial Sequence
  Description of Artificial Sequence: Synthetic oligonucleotide
gauagaugccaaguuguag

SEQ ID NO: 567816 - RNA, 19 nt, Artificial Sequence
  Description of Artificial Sequence: Synthetic oligonucleotide
ugguugagauguauccagg

SEQ ID NO: 567817 - RNA, 19 nt, Artificial Sequence
  Description of Artificial Sequence: Synthetic oligonucleotide
uuugugcccuucaauguca

SEQ ID NO: 567818 - RNA, 19 nt, Artificial Sequence
  Description of Artificial Sequence: Synthetic oligonucleotide
aaaccaguaccaguuccgg

SEQ ID NO: 567819 - RNA, 19 nt, Artificial Sequence
  Description of Artificial Sequence: Synthetic oligonucleotide
uauaccggcagcucggccu

SEQ ID NO: 567820 - RNA, 19 nt, Artificial Sequence
  Description of Artificial Sequence: Synthetic oligonucleotide
ugugauuucggguccuucu

SEQ ID NO: 567821 - RNA, 19 nt, Artificial Sequence
  Description of Artificial Sequence: Synthetic oligonucleotide
gacauaacgacugcaguac

SEQ ID NO: 567822 - RNA, 19 nt, Artificial Sequence
  Description of Artificial Sequence: Synthetic oligonucleotide
guaaacaggcagcaguaug

SEQ ID NO: 567823 - RNA, 19 nt, Artificial Sequence
  Description of Artificial Sequence: Synthetic oligonucleotide
gaguaaggugggcauaacc

SEQ ID NO: 567824 - RNA, 19 nt, Artificial Sequence
  Description of Artificial Sequence: Synthetic oligonucleotide
augcaagccuguuauaacu

SEQ ID NO: 567825 - RNA, 19 nt, Artificial Sequence
  Description of Artificial Sequence: Synthetic oligonucleotide
ugcagcguuccacaggucu

SEQ ID NO: 567826 - RNA, 19 nt, Artificial Sequence
  Description of Artificial Sequence: Synthetic oligonucleotide
agagauaacaccagguaga

SEQ ID NO: 567827 - RNA, 19 nt, Artificial Sequence
  Description of Artificial Sequence: Synthetic oligonucleotide
aaagugccauggucauacc

SEQ ID NO: 567828 - RNA, 19 nt, Artificial Sequence
  Description of Artificial Sequence: Synthetic oligonucleotide
agcagcuuguucugaguac

SEQ ID NO: 567829 - RNA, 19 nt, Artificial Sequence
  Description of Artificial Sequence: Synthetic oligonucleotide
accauaugggcguugacau

SEQ ID NO: 567830 - RNA, 19 nt, Artificial Sequence
  Description of Artificial Sequence: Synthetic oligonucleotide
uauucauguccugaccucc

SEQ ID NO: 567831 - RNA, 19 nt, Artificial Sequence
  Description of Artificial Sequence: Synthetic oligonucleotide
gguagaacaaugguguucc

SEQ ID NO: 567832 - RNA, 19 nt, Artificial Sequence
  Description of Artificial Sequence: Synthetic oligonucleotide
uacaccugauagcaaguca

SEQ ID NO: 567833 - RNA, 19 nt, Artificial Sequence
  Description of Artificial Sequence: Synthetic oligonucleotide
ugagcaagcaccgccuuag

SEQ ID NO: 567834 - RNA, 19 nt, Artificial Sequence
  Description of Artificial Sequence: Synthetic oligonucleotide
ugcuaguaggcccuccuca

SEQ ID NO: 567835 - RNA, 19 nt, Artificial Sequence
  Description of Artificial Sequence: Synthetic oligonucleotide
agauucagagauagaugcc

SEQ ID NO: 567836 - RNA, 19 nt, Artificial Sequence
  Description of Artificial Sequence: Synthetic oligonucleotide
aauccuugcgucagcauca

SEQ ID NO: 567837 - RNA, 19 nt, Artificial Sequence
  Description of Artificial Sequence: Synthetic oligonucleotide
guucguagugucaaagugc

SEQ ID NO: 567838 - RNA, 19 nt, Artificial Sequence
  Description of Artificial Sequence: Synthetic oligonucleotide
agaucuacaacugaacauu

SEQ ID NO: 567839 - RNA, 19 nt, Artificial Sequence
  Description of Artificial Sequence: Synthetic oligonucleotide
uaaguugucccucuuccuu

SEQ ID NO: 567840 - RNA, 19 nt, Artificial Sequence
  Description of Artificial Sequence: Synthetic oligonucleotide
uggaggacgcacuauugca

SEQ ID NO: 567841 - RNA, 19 nt, Artificial Sequence
  Description of Artificial Sequence: Synthetic oligonucleotide
auaggcgaugggaaguacc

SEQ ID NO: 567842 - RNA, 19 nt, Artificial Sequence
  Description of Artificial Sequence: Synthetic oligonucleotide
aagugcugagucuuccagu

SEQ ID NO: 567843 - RNA, 19 nt, Artificial Sequence
  Description of Artificial Sequence: Synthetic oligonucleotide
agcaguauguucugagacu

SEQ ID NO: 567844 - RNA, 19 nt, Artificial Sequence
  Description of Artificial Sequence: Synthetic oligonucleotide
agccuauaccggcagcucg

SEQ ID NO: 567845 - RNA, 19 nt, Artificial Sequence
  Description of Artificial Sequence: Synthetic oligonucleotide
uguuccucgagcaggcagu

SEQ ID NO: 567846 - RNA, 19 nt, Artificial Sequence
  Description of Artificial Sequence: Synthetic oligonucleotide
ccggguuaaacucauaggc

SEQ ID NO: 567847 - RNA, 19 nt, Artificial Sequence
  Description of Artificial Sequence: Synthetic oligonucleotide
gucucaguaauugaggcca

SEQ ID NO: 567848 - RNA, 19 nt, Artificial Sequence
  Description of Artificial Sequence: Synthetic oligonucleotide
aguaccagacgaugccagg

SEQ ID NO: 567849 - RNA, 19 nt, Artificial Sequence
  Description of Artificial Sequence: Synthetic oligonucleotide
uuggcuacuggcacccuca

SEQ ID NO: 567850 - RNA, 19 nt, Artificial Sequence
  Description of Artificial Sequence: Synthetic oligonucleotide
ugguuugcuugucugcgca

SEQ ID NO: 567851 - RNA, 19 nt, Artificial Sequence
  Description of Artificial Sequence: Synthetic oligonucleotide
ccuugcgucagcaucaagc

SEQ ID NO: 567852 - RNA, 19 nt, Artificial Sequence
  Description of Artificial Sequence: Synthetic oligonucleotide
ugaacauuauaguccguuu

SEQ ID NO: 567853 - RNA, 19 nt, Artificial Sequence
  Description of Artificial Sequence: Synthetic oligonucleotide
uaaggugggcauaacccuc

SEQ ID NO: 567854 - RNA, 19 nt, Artificial Sequence
  Description of Artificial Sequence: Synthetic oligonucleotide
auaugcaagccuguuauaa

SEQ ID NO: 567855 - RNA, 19 nt, Artificial Sequence
  Description of Artificial Sequence: Synthetic oligonucleotide
ucauccgcaaacugcgcca

SEQ ID NO: 567856 - RNA, 19 nt, Artificial Sequence
  Description of Artificial Sequence: Synthetic oligonucleotide
gacuuagugugaguggggc

SEQ ID NO: 567857 - RNA, 19 nt, Artificial Sequence
  Description of Artificial Sequence: Synthetic oligonucleotide
agauucaggggccuccuga

SEQ ID NO: 567858 - RNA, 19 nt, Artificial Sequence
  Description of Artificial Sequence: Synthetic oligonucleotide
uaacgacugcaguacaccu

SEQ ID NO: 567859 - RNA, 19 nt, Artificial Sequence
  Description of Artificial Sequence: Synthetic oligonucleotide
uuaaauaugcaagccuguu

SEQ ID NO: 567860 - RNA, 19 nt, Artificial Sequence
  Description of Artificial Sequence: Synthetic oligonucleotide
ucugcuaguaggcccuccu

SEQ ID NO: 567861 - RNA, 19 nt, Artificial Sequence
  Description of Artificial Sequence: Synthetic oligonucleotide
ggauaaugcggccauuggc

SEQ ID NO: 567862 - RNA, 19 nt, Artificial Sequence
  Description of Artificial Sequence: Synthetic oligonucleotide
uugcaaugccauucaacac

SEQ ID NO: 567863 - RNA, 19 nt, Artificial Sequence
  Description of Artificial Sequence: Synthetic oligonucleotide
uaguccguuuaaaaggguu

SEQ ID NO: 567864 - RNA, 19 nt, Artificial Sequence
  Description of Artificial Sequence: Synthetic oligonucleotide
agccugacagagauaacac

SEQ ID NO: 567865 - RNA, 19 nt, Artificial Sequence
  Description of Artificial Sequence: Synthetic oligonucleotide
aaauacauccugggcauua

SEQ ID NO: 567866 - RNA, 19 nt, Artificial Sequence
  Description of Artificial Sequence: Synthetic oligonucleotide
cacauuggacaggugaagc

SEQ ID NO: 567867 - RNA, 19 nt, Artificial Sequence
  Description of Artificial Sequence: Synthetic oligonucleotide
ggccucagaagguaaacag

SEQ ID NO: 567868 - RNA, 19 nt, Artificial Sequence
  Description of Artificial Sequence: Synthetic oligonucleotide
cuuaaagaagcaccuugca

SEQ ID NO: 567869 - RNA, 19 nt, Artificial Sequence
  Description of Artificial Sequence: Synthetic oligonucleotide
ugggaaguaccagacgaug

SEQ ID NO: 567870 - RNA, 19 nt, Artificial Sequence
  Description of Artificial Sequence: Synthetic oligonucleotide
ggguuaaacucauaggcga

SEQ ID NO: 567871 - RNA, 19 nt, Artificial Sequence
  Description of Artificial Sequence: Synthetic oligonucleotide
ccuucuuagggcuacuaag

SEQ ID NO: 567872 - RNA, 19 nt, Artificial Sequence
  Description of Artificial Sequence: Synthetic oligonucleotide
uauucaggauagguuuaag

SEQ ID NO: 567873 - RNA, 19 nt, Artificial Sequence
  Description of Artificial Sequence: Synthetic oligonucleotide
guuaaacucauaggcgaug

SEQ ID NO: 567874 - RNA, 19 nt, Artificial Sequence
  Description of Artificial Sequence: Synthetic oligonucleotide
uaccagacgaugccaggca

SEQ ID NO: 567875 - RNA, 19 nt, Artificial Sequence
  Description of Artificial Sequence: Synthetic oligonucleotide
gugggcauaacccucaggu

SEQ ID NO: 567876 - RNA, 19 nt, Artificial Sequence
  Description of Artificial Sequence: Synthetic oligonucleotide
guagccacccucuaggaua

SEQ ID NO: 567877 - RNA, 19 nt, Artificial Sequence
  Description of Artificial Sequence: Synthetic oligonucleotide
gaccauaugggcguugaca

SEQ ID NO: 567878 - RNA, 19 nt, Artificial Sequence
  Description of Artificial Sequence: Synthetic oligonucleotide
cugcgcaugaggcuacagg

SEQ ID NO: 567879 - RNA, 19 nt, Artificial Sequence
  Description of Artificial Sequence: Synthetic oligonucleotide
augucauccuugugauuuc

SEQ ID NO: 567880 - RNA, 19 nt, Artificial Sequence
  Description of Artificial Sequence: Synthetic oligonucleotide
gccauagauucagagauag

SEQ ID NO: 567881 - RNA, 19 nt, Artificial Sequence
  Description of Artificial Sequence: Synthetic oligonucleotide
cagaguagauucuuuugca

SEQ ID NO: 567882 - RNA, 19 nt, Artificial Sequence
  Description of Artificial Sequence: Synthetic oligonucleotide
uuggauuggcucaguuucu

SEQ ID NO: 567883 - RNA, 19 nt, Artificial Sequence
  Description of Artificial Sequence: Synthetic oligonucleotide
gacgcacuauugcaaugcc

SEQ ID NO: 567884 - RNA, 19 nt, Artificial Sequence
  Description of Artificial Sequence: Synthetic oligonucleotide
cuacuuggcuacuggcacc

SEQ ID NO: 567885 - RNA, 19 nt, Artificial Sequence
  Description of Artificial Sequence: Synthetic oligonucleotide
cauaccggugcacggacac

SEQ ID NO: 567886 - RNA, 19 nt, Artificial Sequence
  Description of Artificial Sequence: Synthetic oligonucleotide
uauaauacacuggggucau

SEQ ID NO: 567887 - RNA, 19 nt, Artificial Sequence
  Description of Artificial Sequence: Synthetic oligonucleotide
ugggcauaacccucaggug

SEQ ID NO: 567888 - RNA, 19 nt, Artificial Sequence
  Description of Artificial Sequence: Synthetic oligonucleotide
ggauagguuuaagugaggc

SEQ ID NO: 567889 - RNA, 19 nt, Artificial Sequence
  Description of Artificial Sequence: Synthetic oligonucleotide
gcaagcaccgccuuagcug

SEQ ID NO: 567890 - RNA, 19 nt, Artificial Sequence
  Description of Artificial Sequence: Synthetic oligonucleotide
aagccuauaccggcagcuc

SEQ ID NO: 567891 - RNA, 19 nt, Artificial Sequence
  Description of Artificial Sequence: Synthetic oligonucleotide
gagauagaugccaaguugu

SEQ ID NO: 567892 - RNA, 19 nt, Artificial Sequence
  Description of Artificial Sequence: Synthetic oligonucleotide
aagccuguuauaacugcca

SEQ ID NO: 567893 - RNA, 19 nt, Artificial Sequence
  Description of Artificial Sequence: Synthetic oligonucleotide
gaagguaaacaggcagcag

SEQ ID NO: 567894 - RNA, 19 nt, Artificial Sequence
  Description of Artificial Sequence: Synthetic oligonucleotide
ggauaguggggucacagca

SEQ ID NO: 567895 - RNA, 19 nt, Artificial Sequence
  Description of Artificial Sequence: Synthetic oligonucleotide
guccguaguacuuccuccc

SEQ ID NO: 567896 - RNA, 19 nt, Artificial Sequence
  Description of Artificial Sequence: Synthetic oligonucleotide
uaauugaggccagggcucc

SEQ ID NO: 567897 - RNA, 19 nt, Artificial Sequence
  Description of Artificial Sequence: Synthetic oligonucleotide
cagucagguagucagcauc

SEQ ID NO: 567898 - RNA, 19 nt, Artificial Sequence
  Description of Artificial Sequence: Synthetic oligonucleotide
ugcgccaguaucugcgaug

SEQ ID NO: 567899 - RNA, 19 nt, Artificial Sequence
  Description of Artificial Sequence: Synthetic oligonucleotide
uccguuuaaaaggguuugc

SEQ ID NO: 567900 - RNA, 19 nt, Artificial Sequence
  Description of Artificial Sequence: Synthetic oligonucleotide
guaauugaggccagggcuc

SEQ ID NO: 567901 - RNA, 19 nt, Artificial Sequence
  Description of Artificial Sequence: Synthetic oligonucleotide
ccgaacacgauccacguac

SEQ ID NO: 567902 - RNA, 19 nt, Artificial Sequence
  Description of Artificial Sequence: Synthetic oligonucleotide
auaaugcggccauuggcaa

SEQ ID NO: 567903 - RNA, 19 nt, Artificial Sequence
  Description of Artificial Sequence: Synthetic oligonucleotide
uccguaguacuuccuccca

SEQ ID NO: 567904 - RNA, 19 nt, Artificial Sequence
  Description of Artificial Sequence: Synthetic oligonucleotide
cugcgcacaggcaaaggug

SEQ ID NO: 567905 - RNA, 19 nt, Artificial Sequence
  Description of Artificial Sequence: Synthetic oligonucleotide
uguauaggggaagcuucug

SEQ ID NO: 567906 - RNA, 19 nt, Artificial Sequence
  Description of Artificial Sequence: Synthetic oligonucleotide
uagcauugcccagaguaga

SEQ ID NO: 567907 - RNA, 19 nt, Artificial Sequence
  Description of Artificial Sequence: Synthetic oligonucleotide
acuuagugugaguggggca

SEQ ID NO: 567908 - RNA, 19 nt, Artificial Sequence
  Description of Artificial Sequence: Synthetic oligonucleotide
agcaagcaccgccuuagcu

SEQ ID NO: 567909 - RNA, 19 nt, Artificial Sequence
  Description of Artificial Sequence: Synthetic oligonucleotide
uguggcaagcaagaagcuc

SEQ ID NO: 567910 - RNA, 19 nt, Artificial Sequence
  Description of Artificial Sequence: Synthetic oligonucleotide
cacgaucaggauccgcagg

SEQ ID NO: 567911 - RNA, 19 nt, Artificial Sequence
  Description of Artificial Sequence: Synthetic oligonucleotide
aauacauccugggcauuaa

SEQ ID NO: 567912 - RNA, 19 nt, Artificial Sequence
  Description of Artificial Sequence: Synthetic oligonucleotide
caggauaguggggucacag

SEQ ID NO: 567913 - RNA, 19 nt, Artificial Sequence
  Description of Artificial Sequence: Synthetic oligonucleotide
acccaugcggggcccauuc

SEQ ID NO: 567914 - RNA, 19 nt, Artificial Sequence
  Description of Artificial Sequence: Synthetic oligonucleotide
ggucucaguaauugaggcc

SEQ ID NO: 567915 - RNA, 19 nt, Artificial Sequence
  Description of Artificial Sequence: Synthetic oligonucleotide
guccguuuaaaaggguuug

SEQ ID NO: 567916 - RNA, 19 nt, Artificial Sequence
  Description of Artificial Sequence: Synthetic oligonucleotide
uguugcaggaauggggcau

SEQ ID NO: 567917 - RNA, 19 nt, Artificial Sequence
  Description of Artificial Sequence: Synthetic oligonucleotide
ggauauucaggauagguuu

SEQ ID NO: 567918 - RNA, 19 nt, Artificial Sequence
  Description of Artificial Sequence: Synthetic oligonucleotide
uccuggaggacgcacuauu

SEQ ID NO: 567919 - RNA, 19 nt, Artificial Sequence
  Description of Artificial Sequence: Synthetic oligonucleotide
accagguagacaggucaac

SEQ ID NO: 567920 - RNA, 19 nt, Artificial Sequence
  Description of Artificial Sequence: Synthetic oligonucleotide
caaugguguuccucgagca

SEQ ID NO: 567921 - RNA, 19 nt, Artificial Sequence
  Description of Artificial Sequence: Synthetic oligonucleotide
cacggacacauauaauaca

SEQ ID NO: 567922 - RNA, 19 nt, Artificial Sequence
  Description of Artificial Sequence: Synthetic oligonucleotide
guaccagacgaugccaggc

SEQ ID NO: 567923 - RNA, 19 nt, Artificial Sequence
  Description of Artificial Sequence: Synthetic oligonucleotide
caugcggggcccauuccag

SEQ ID NO: 567924 - RNA, 19 nt, Artificial Sequence
  Description of Artificial Sequence: Synthetic oligonucleotide
uugucugcgcaugaggcua

SEQ ID NO: 567925 - RNA, 19 nt, Artificial Sequence
  Description of Artificial Sequence: Synthetic oligonucleotide
uguagcucccggguuuuca

SEQ ID NO: 567926 - RNA, 19 nt, Artificial Sequence
  Description of Artificial Sequence: Synthetic oligonucleotide
ccuguauaggggaagcuuc

SEQ ID NO: 567927 - RNA, 19 nt, Artificial Sequence
  Description of Artificial Sequence: Synthetic oligonucleotide
gaacaaugguguuccucga

SEQ ID NO: 567928 - RNA, 19 nt, Artificial Sequence
  Description of Artificial Sequence: Synthetic oligonucleotide
ggcuugagcaugucgagca

SEQ ID NO: 567929 - RNA, 19 nt, Artificial Sequence
  Description of Artificial Sequence: Synthetic oligonucleotide
aucaagcuauucauguccu

SEQ ID NO: 567930 - RNA, 19 nt, Artificial Sequence
  Description of Artificial Sequence: Synthetic oligonucleotide
aggugaguaaggugggcau

SEQ ID NO: 567931 - RNA, 19 nt, Artificial Sequence
  Description of Artificial Sequence: Synthetic oligonucleotide
gguccguaguacuuccucc

SEQ ID NO: 567932 - RNA, 19 nt, Artificial Sequence
  Description of Artificial Sequence: Synthetic oligonucleotide
aggacgcacuauugcaaug

SEQ ID NO: 567933 - RNA, 19 nt, Artificial Sequence
  Description of Artificial Sequence: Synthetic oligonucleotide
uucacaucuuggagauccu

SEQ ID NO: 567934 - RNA, 19 nt, Artificial Sequence
  Description of Artificial Sequence: Synthetic oligonucleotide
augggcguugacauaacga

SEQ ID NO: 567935 - RNA, 19 nt, Artificial Sequence
  Description of Artificial Sequence: Synthetic oligonucleotide
auauucaggauagguuuaa

SEQ ID NO: 567936 - RNA, 19 nt, Artificial Sequence
  Description of Artificial Sequence: Synthetic oligonucleotide
guuugcuugucugcgcaug

SEQ ID NO: 567937 - RNA, 19 nt, Artificial Sequence
  Description of Artificial Sequence: Synthetic oligonucleotide
ucccuagcagcuuguucug

SEQ ID NO: 567938 - RNA, 19 nt, Artificial Sequence
  Description of Artificial Sequence: Synthetic oligonucleotide
caaacuuguuccggugggc

SEQ ID NO: 567939 - RNA, 19 nt, Artificial Sequence
  Description of Artificial Sequence: Synthetic oligonucleotide
agccuguuauaacugccau

SEQ ID NO: 567940 - RNA, 19 nt, Artificial Sequence
  Description of Artificial Sequence: Synthetic oligonucleotide
gcaagccuguuauaacugc

SEQ ID NO: 567941 - RNA, 19 nt, Artificial Sequence
  Description of Artificial Sequence: Synthetic oligonucleotide
uggaccauaugggcguuga

SEQ ID NO: 567942 - RNA, 19 nt, Artificial Sequence
  Description of Artificial Sequence: Synthetic oligonucleotide
gcuaguaggcccuccucag

SEQ ID NO: 567943 - RNA, 19 nt, Artificial Sequence
  Description of Artificial Sequence: Synthetic oligonucleotide
agcaccuugcaaaggauau

SEQ ID NO: 567944 - RNA, 19 nt, Artificial Sequence
  Description of Artificial Sequence: Synthetic oligonucleotide
cuugcgucagcaucaagcu

SEQ ID NO: 567945 - RNA, 19 nt, Artificial Sequence
  Description of Artificial Sequence: Synthetic oligonucleotide
gaggucgcagcaagguaag

SEQ ID NO: 567946 - RNA, 19 nt, Artificial Sequence
  Description of Artificial Sequence: Synthetic oligonucleotide
acgauccacguacucggca

SEQ ID NO: 567947 - RNA, 19 nt, Artificial Sequence
  Description of Artificial Sequence: Synthetic oligonucleotide
caucauccgcaaacugcgc

SEQ ID NO: 567948 - RNA, 19 nt, Artificial Sequence
  Description of Artificial Sequence: Synthetic oligonucleotide
gggcacauuggacagguga

SEQ ID NO: 567949 - RNA, 19 nt, Artificial Sequence
  Description of Artificial Sequence: Synthetic oligonucleotide
gaacacgauccacguacuc

SEQ ID NO: 567950 - RNA, 19 nt, Artificial Sequence
  Description of Artificial Sequence: Synthetic oligonucleotide
aacaugugcugaguuccau

SEQ ID NO: 567951 - RNA, 19 nt, Artificial Sequence
  Description of Artificial Sequence: Synthetic oligonucleotide
ggacgcacuauugcaaugc

SEQ ID NO: 567952 - RNA, 19 nt, Artificial Sequence
  Description of Artificial Sequence: Synthetic oligonucleotide
uuagugugaguggggcaug

SEQ ID NO: 567953 - RNA, 19 nt, Artificial Sequence
  Description of Artificial Sequence: Synthetic oligonucleotide
uggcaaggcccaucagcag

SEQ ID NO: 567954 - RNA, 19 nt, Artificial Sequence
  Description of Artificial Sequence: Synthetic oligonucleotide
uggaggucgcagcaaggua

SEQ ID NO: 567955 - RNA, 19 nt, Artificial Sequence
  Description of Artificial Sequence: Synthetic oligonucleotide
caaguuguagccacccucu

SEQ ID NO: 567956 - RNA, 19 nt, Artificial Sequence
  Description of Artificial Sequence: Synthetic oligonucleotide
gucgagcagccacagcuac

SEQ ID NO: 567957 - RNA, 19 nt, Artificial Sequence
  Description of Artificial Sequence: Synthetic oligonucleotide
ucauaggcgaugggaagua

SEQ ID NO: 567958 - RNA, 19 nt, Artificial Sequence
  Description of Artificial Sequence: Synthetic oligonucleotide
caguguagcuucccuagca

SEQ ID NO: 567959 - RNA, 19 nt, Artificial Sequence
  Description of Artificial Sequence: Synthetic oligonucleotide
gaucuacaacugaacauua

SEQ ID NO: 567960 - RNA, 19 nt, Artificial Sequence
  Description of Artificial Sequence: Synthetic oligonucleotide
cagggcacgcccagcaaug

SEQ ID NO: 567961 - RNA, 19 nt, Artificial Sequence
  Description of Artificial Sequence: Synthetic oligonucleotide
guuuaagugaggccacccu

SEQ ID NO: 567962 - RNA, 19 nt, Artificial Sequence
  Description of Artificial Sequence: Synthetic oligonucleotide
gacauaagccugacagaga

SEQ ID NO: 567963 - RNA, 19 nt, Artificial Sequence
  Description of Artificial Sequence: Synthetic oligonucleotide
gcuauucauguccugaccu

SEQ ID NO: 567964 - RNA, 19 nt, Artificial Sequence
  Description of Artificial Sequence: Synthetic oligonucleotide
aguccguuuaaaaggguuu

SEQ ID NO: 567965 - RNA, 19 nt, Artificial Sequence
  Description of Artificial Sequence: Synthetic oligonucleotide
aggauagguuuaagugagg

SEQ ID NO: 567966 - RNA, 19 nt, Artificial Sequence
  Description of Artificial Sequence: Synthetic oligonucleotide
uccaguucguagugucaaa

SEQ ID NO: 567967 - RNA, 19 nt, Artificial Sequence
  Description of Artificial Sequence: Synthetic oligonucleotide
guauaggggaagcuucugu

SEQ ID NO: 567968 - RNA, 19 nt, Artificial Sequence
  Description of Artificial Sequence: Synthetic oligonucleotide
cuauaccggcagcucggcc

SEQ ID NO: 567969 - RNA, 19 nt, Artificial Sequence
  Description of Artificial Sequence: Synthetic oligonucleotide
ggcgaugggaaguaccaga

SEQ ID NO: 567970 - RNA, 19 nt, Artificial Sequence
  Description of Artificial Sequence: Synthetic oligonucleotide
cugggcauuaaaguuccca

SEQ ID NO: 567971 - RNA, 19 nt, Artificial Sequence
  Description of Artificial Sequence: Synthetic oligonucleotide
gccaguaucugcgauggac

SEQ ID NO: 567972 - RNA, 19 nt, Artificial Sequence
  Description of Artificial Sequence: Synthetic oligonucleotide
ggcccgaacacgauccacg

SEQ ID NO: 567973 - RNA, 19 nt, Artificial Sequence
  Description of Artificial Sequence: Synthetic oligonucleotide
ccugauagcaagucagaca

SEQ ID NO: 567974 - RNA, 19 nt, Artificial Sequence
  Description of Artificial Sequence: Synthetic oligonucleotide
uugcgucagcaucaagcua

SEQ ID NO: 567975 - RNA, 19 nt, Artificial Sequence
  Description of Artificial Sequence: Synthetic oligonucleotide
gcacggacacauauaauac

SEQ ID NO: 567976 - RNA, 19 nt, Artificial Sequence
  Description of Artificial Sequence: Synthetic oligonucleotide
ggcauacugccaccaaaug

SEQ ID NO: 567977 - RNA, 19 nt, Artificial Sequence
  Description of Artificial Sequence: Synthetic oligonucleotide
cccagaguagauucuuuug

SEQ ID NO: 567978 - RNA, 19 nt, Artificial Sequence
  Description of Artificial Sequence: Synthetic oligonucleotide
agguaaacaggcagcagua

SEQ ID NO: 567979 - RNA, 19 nt, Artificial Sequence
  Description of Artificial Sequence: Synthetic oligonucleotide
gggcauaacccucaggugu

SEQ ID NO: 567980 - RNA, 19 nt, Artificial Sequence
  Description of Artificial Sequence: Synthetic oligonucleotide
auaugggcguugacauaac

SEQ ID NO: 567981 - RNA, 19 nt, Artificial Sequence
  Description of Artificial Sequence: Synthetic oligonucleotide
aggggcagaucuacaacug

SEQ ID NO: 567982 - RNA, 19 nt, Artificial Sequence
  Description of Artificial Sequence: Synthetic oligonucleotide
ucugcgcaugaggcuacag

SEQ ID NO: 567983 - RNA, 19 nt, Artificial Sequence
  Description of Artificial Sequence: Synthetic oligonucleotide
uaacugccauuugugcccu

SEQ ID NO: 567984 - RNA, 19 nt, Artificial Sequence
  Description of Artificial Sequence: Synthetic oligonucleotide
cuuggauggucucaguaau

SEQ ID NO: 567985 - RNA, 19 nt, Artificial Sequence
  Description of Artificial Sequence: Synthetic oligonucleotide
uccuugcgucagcaucaag

SEQ ID NO: 567986 - RNA, 19 nt, Artificial Sequence
  Description of Artificial Sequence: Synthetic oligonucleotide
caugucgagcagccacagc

SEQ ID NO: 567987 - RNA, 19 nt, Artificial Sequence
  Description of Artificial Sequence: Synthetic oligonucleotide
aguaccaguuccggguuaa

SEQ ID NO: 567988 - RNA, 19 nt, Artificial Sequence
  Description of Artificial Sequence: Synthetic oligonucleotide
ugaguaaggugggcauaac

SEQ ID NO: 567989 - RNA, 19 nt, Artificial Sequence
  Description of Artificial Sequence: Synthetic oligonucleotide
uccuggugguggacauaag

SEQ ID NO: 567990 - RNA, 19 nt, Artificial Sequence
  Description of Artificial Sequence: Synthetic oligonucleotide
gcgccaguaucugcgaugg

SEQ ID NO: 567991 - RNA, 19 nt, Artificial Sequence
  Description of Artificial Sequence: Synthetic oligonucleotide
gugcugaguuccauuacca

SEQ ID NO: 567992 - RNA, 19 nt, Artificial Sequence
  Description of Artificial Sequence: Synthetic oligonucleotide
gcugguccguaguacuucc

SEQ ID NO: 567993 - RNA, 19 nt, Artificial Sequence
  Description of Artificial Sequence: Synthetic oligonucleotide
aggucucacaugguugaga

SEQ ID NO: 567994 - RNA, 19 nt, Artificial Sequence
  Description of Artificial Sequence: Synthetic oligonucleotide
gagcaagcaccgccuuagc

SEQ ID NO: 567995 - RNA, 19 nt, Artificial Sequence
  Description of Artificial Sequence: Synthetic oligonucleotide
caagcaccgccuuagcugu

SEQ ID NO: 567996 - RNA, 19 nt, Artificial Sequence
  Description of Artificial Sequence: Synthetic oligonucleotide
agauucuuuugcagauacu

SEQ ID NO: 567997 - RNA, 19 nt, Artificial Sequence
  Description of Artificial Sequence: Synthetic oligonucleotide
cauccgcaaacugcgccag

SEQ ID NO: 567998 - RNA, 19 nt, Artificial Sequence
  Description of Artificial Sequence: Synthetic oligonucleotide
ggugggcauaacccucagg

SEQ ID NO: 567999 - RNA, 19 nt, Artificial Sequence
  Description of Artificial Sequence: Synthetic oligonucleotide
ggucaacacagcugaggac

SEQ ID NO: 568000 - RNA, 19 nt, Artificial Sequence
  Description of Artificial Sequence: Synthetic oligonucleotide
cucgagcaggcagugagca

SEQ ID NO: 568001 - RNA, 19 nt, Artificial Sequence
  Description of Artificial Sequence: Synthetic oligonucleotide
caguuccggguuaaacuca

SEQ ID NO: 568002 - RNA, 19 nt, Artificial Sequence
  Description of Artificial Sequence: Synthetic oligonucleotide
aggucgcagcaagguaagc

SEQ ID NO: 568003 - RNA, 19 nt, Artificial Sequence
  Description of Artificial Sequence: Synthetic oligonucleotide
auaguccguuuaaaagggu

SEQ ID NO: 568004 - RNA, 19 nt, Artificial Sequence
  Description of Artificial Sequence: Synthetic oligonucleotide
agauagaugccaaguugua

SEQ ID NO: 568005 - RNA, 19 nt, Artificial Sequence
  Description of Artificial Sequence: Synthetic oligonucleotide
caguucuccugcagcguuc

SEQ ID NO: 568006 - RNA, 19 nt, Artificial Sequence
  Description of Artificial Sequence: Synthetic oligonucleotide
caggugaguaaggugggca

SEQ ID NO: 568007 - RNA, 19 nt, Artificial Sequence
  Description of Artificial Sequence: Synthetic oligonucleotide
ccaguucguagugucaaag

SEQ ID NO: 568008 - RNA, 19 nt, Artificial Sequence
  Description of Artificial Sequence: Synthetic oligonucleotide
aggugggcauaacccucag

SEQ ID NO: 568009 - RNA, 19 nt, Artificial Sequence
  Description of Artificial Sequence: Synthetic oligonucleotide
uuccacgaggcagcaggca

SEQ ID NO: 568010 - RNA, 19 nt, Artificial Sequence
  Description of Artificial Sequence: Synthetic oligonucleotide
uucugcuaguaggcccucc

SEQ ID NO: 568011 - RNA, 19 nt, Artificial Sequence
  Description of Artificial Sequence: Synthetic oligonucleotide
ggaggucgcagcaagguaa

SEQ ID NO: 568012 - RNA, 19 nt, Artificial Sequence
  Description of Artificial Sequence: Synthetic oligonucleotide
ggccuacuuggcuacuggc

SEQ ID NO: 568013 - RNA, 19 nt, Artificial Sequence
  Description of Artificial Sequence: Synthetic oligonucleotide
gccuauaccggcagcucgg

SEQ ID NO: 568014 - RNA, 19 nt, Artificial Sequence
  Description of Artificial Sequence: Synthetic oligonucleotide
ucccuguauaggggaagcu

SEQ ID NO: 568015 - RNA, 19 nt, Artificial Sequence
  Description of Artificial Sequence: Synthetic oligonucleotide
cuucacgguguagcucccg

SEQ ID NO: 568016 - RNA, 19 nt, Artificial Sequence
  Description of Artificial Sequence: Synthetic oligonucleotide
uugcccagaguagauucuu

SEQ ID NO: 568017 - RNA, 19 nt, Artificial Sequence
  Description of Artificial Sequence: Synthetic oligonucleotide
ggaagcuucugugguuugc

SEQ ID NO: 568018 - RNA, 19 nt, Artificial Sequence
  Description of Artificial Sequence: Synthetic oligonucleotide
aguuccggguuaaacucau

SEQ ID NO: 568019 - RNA, 19 nt, Artificial Sequence
  Description of Artificial Sequence: Synthetic oligonucleotide
gcacauuggacaggugaag

SEQ ID NO: 568020 - RNA, 19 nt, Artificial Sequence
  Description of Artificial Sequence: Synthetic oligonucleotide
ggguagaacaaugguguuc

SEQ ID NO: 568021 - RNA, 19 nt, Artificial Sequence
  Description of Artificial Sequence: Synthetic oligonucleotide
aggcgaugggaaguaccag

SEQ ID NO: 568022 - RNA, 19 nt, Artificial Sequence
  Description of Artificial Sequence: Synthetic oligonucleotide
cuguggcccgaacacgauc

SEQ ID NO: 568023 - RNA, 19 nt, Artificial Sequence
  Description of Artificial Sequence: Synthetic oligonucleotide
cauaggcgaugggaaguac

SEQ ID NO: 568024 - RNA, 19 nt, Artificial Sequence
  Description of Artificial Sequence: Synthetic oligonucleotide
cuguauaggggaagcuucu

SEQ ID NO: 568025 - RNA, 19 nt, Artificial Sequence
  Description of Artificial Sequence: Synthetic oligonucleotide
auaccggcagcucggccua

SEQ ID NO: 568026 - RNA, 19 nt, Artificial Sequence
  Description of Artificial Sequence: Synthetic oligonucleotide
guuccggugggcagcacuc

SEQ ID NO: 568027 - RNA, 19 nt, Artificial Sequence
  Description of Artificial Sequence: Synthetic oligonucleotide
acgcacuauugcaaugcca

SEQ ID NO: 568028 - RNA, 19 nt, Artificial Sequence
  Description of Artificial Sequence: Synthetic oligonucleotide
ggucucacaugguugagau

SEQ ID NO: 568029 - RNA, 19 nt, Artificial Sequence
  Description of Artificial Sequence: Synthetic oligonucleotide
agcauugcccagaguagau

SEQ ID NO: 568030 - RNA, 19 nt, Artificial Sequence
  Description of Artificial Sequence: Synthetic oligonucleotide
cuugucugcgcaugaggcu

SEQ ID NO: 568031 - RNA, 19 nt, Artificial Sequence
  Description of Artificial Sequence: Synthetic oligonucleotide
gcaucacccaugcggggcc

SEQ ID NO: 568032 - RNA, 19 nt, Artificial Sequence
  Description of Artificial Sequence: Synthetic oligonucleotide
guuccucgagcaggcagug

SEQ ID NO: 568033 - RNA, 19 nt, Artificial Sequence
  Description of Artificial Sequence: Synthetic oligonucleotide
gauccacguacucggcacu

SEQ ID NO: 568034 - RNA, 19 nt, Artificial Sequence
  Description of Artificial Sequence: Synthetic oligonucleotide
gcgaugggaaguaccagac

SEQ ID NO: 568035 - RNA, 19 nt, Artificial Sequence
  Description of Artificial Sequence: Synthetic oligonucleotide
ugcgauggacuuggauggu

SEQ ID NO: 568036 - RNA, 19 nt, Artificial Sequence
  Description of Artificial Sequence: Synthetic oligonucleotide
uugcaggaauggggcauac

SEQ ID NO: 568037 - RNA, 19 nt, Artificial Sequence
  Description of Artificial Sequence: Synthetic oligonucleotide
cccuugugcagcaucaaaa

SEQ ID NO: 568038 - RNA, 19 nt, Artificial Sequence
  Description of Artificial Sequence: Synthetic oligonucleotide
guggauguucugaggcuuc

SEQ ID NO: 568039 - RNA, 19 nt, Artificial Sequence
  Description of Artificial Sequence: Synthetic oligonucleotide
uggcuacuggcacccucau

SEQ ID NO: 568040 - RNA, 19 nt, Artificial Sequence
  Description of Artificial Sequence: Synthetic oligonucleotide
uuggcaccuucacggugua

SEQ ID NO: 568041 - RNA, 19 nt, Artificial Sequence
  Description of Artificial Sequence: Synthetic oligonucleotide
cgauccacguacucggcac

SEQ ID NO: 568042 - RNA, 19 nt, Artificial Sequence
  Description of Artificial Sequence: Synthetic oligonucleotide
uggcccgaacacgauccac

SEQ ID NO: 568043 - RNA, 19 nt, Artificial Sequence
  Description of Artificial Sequence: Synthetic oligonucleotide
gcguugacauaacgacugc

SEQ ID NO: 568044 - RNA, 19 nt, Artificial Sequence
  Description of Artificial Sequence: Synthetic oligonucleotide
cauaagccugacagagaua

SEQ ID NO: 568045 - RNA, 19 nt, Artificial Sequence
  Description of Artificial Sequence: Synthetic oligonucleotide
acgaugccaggcagucagg

SEQ ID NO: 568046 - RNA, 19 nt, Artificial Sequence
  Description of Artificial Sequence: Synthetic oligonucleotide
ggcuacuaaguugucccuc

SEQ ID NO: 568047 - RNA, 19 nt, Artificial Sequence
  Description of Artificial Sequence: Synthetic oligonucleotide
gguggucugguuagguaca

SEQ ID NO: 568048 - RNA, 19 nt, Artificial Sequence
  Description of Artificial Sequence: Synthetic oligonucleotide
aagcaccgccuuagcuguc

SEQ ID NO: 568049 - RNA, 19 nt, Artificial Sequence
  Description of Artificial Sequence: Synthetic oligonucleotide
ggaggacgcacuauugcaa

SEQ ID NO: 568050 - RNA, 19 nt, Artificial Sequence
  Description of Artificial Sequence: Synthetic oligonucleotide
gccuacuuggcuacuggca

SEQ ID NO: 568051 - RNA, 19 nt, Artificial Sequence
  Description of Artificial Sequence: Synthetic oligonucleotide
ccucgagcaggcagugagc

SEQ ID NO: 568052 - RNA, 19 nt, Artificial Sequence
  Description of Artificial Sequence: Synthetic oligonucleotide
auaccggugcacggacaca

SEQ ID NO: 568053 - RNA, 19 nt, Artificial Sequence
  Description of Artificial Sequence: Synthetic oligonucleotide
agacgaugccaggcaguca

SEQ ID NO: 568054 - RNA, 19 nt, Artificial Sequence
  Description of Artificial Sequence: Synthetic oligonucleotide
uuccucgagcaggcaguga

SEQ ID NO: 568055 - RNA, 19 nt, Artificial Sequence
  Description of Artificial Sequence: Synthetic oligonucleotide
ccguuuaaaaggguuugca

SEQ ID NO: 568056 - RNA, 19 nt, Artificial Sequence
  Description of Artificial Sequence: Synthetic oligonucleotide
cacccucuaggauaaggau

SEQ ID NO: 568057 - RNA, 19 nt, Artificial Sequence
  Description of Artificial Sequence: Synthetic oligonucleotide
ccguaguacuuccucccac

SEQ ID NO: 568058 - RNA, 19 nt, Artificial Sequence
  Description of Artificial Sequence: Synthetic oligonucleotide
gcugcgcacaggcaaaggu

SEQ ID NO: 568059 - RNA, 19 nt, Artificial Sequence
  Description of Artificial Sequence: Synthetic oligonucleotide
agccauagauucagagaua

SEQ ID NO: 568060 - RNA, 19 nt, Artificial Sequence
  Description of Artificial Sequence: Synthetic oligonucleotide
ggucgcagcaagguaagcu

SEQ ID NO: 568061 - RNA, 19 nt, Artificial Sequence
  Description of Artificial Sequence: Synthetic oligonucleotide
gcaugcugguccguaguac

SEQ ID NO: 568062 - RNA, 19 nt, Artificial Sequence
  Description of Artificial Sequence: Synthetic oligonucleotide
guagcucccggguuuucau

SEQ ID NO: 568063 - RNA, 19 nt, Artificial Sequence
  Description of Artificial Sequence: Synthetic oligonucleotide
uccccuugugcagcaucaa

SEQ ID NO: 568064 - RNA, 19 nt, Artificial Sequence
  Description of Artificial Sequence: Synthetic oligonucleotide
agcuuccacgaggcagcag

SEQ ID NO: 568065 - RNA, 19 nt, Artificial Sequence
  Description of Artificial Sequence: Synthetic oligonucleotide
gcaguauguucugagacuu

SEQ ID NO: 568066 - RNA, 19 nt, Artificial Sequence
  Description of Artificial Sequence: Synthetic oligonucleotide
ggaccauaugggcguugac

SEQ ID NO: 568067 - RNA, 19 nt, Artificial Sequence
  Description of Artificial Sequence: Synthetic oligonucleotide
ggggccucagaagguaaac

SEQ ID NO: 568068 - RNA, 19 nt, Artificial Sequence
  Description of Artificial Sequence: Synthetic oligonucleotide
gggccucagaagguaaaca

SEQ ID NO: 568069 - RNA, 19 nt, Artificial Sequence
  Description of Artificial Sequence: Synthetic oligonucleotide
guggaccauaugggcguug

SEQ ID NO: 568070 - RNA, 19 nt, Artificial Sequence
  Description of Artificial Sequence: Synthetic oligonucleotide
guagaacaaugguguuccu

SEQ ID NO: 568071 - RNA, 19 nt, Artificial Sequence
  Description of Artificial Sequence: Synthetic oligonucleotide
uggucugguuagguacauu

SEQ ID NO: 568072 - RNA, 19 nt, Artificial Sequence
  Description of Artificial Sequence: Synthetic oligonucleotide
gguuaaacucauaggcgau

SEQ ID NO: 568073 - RNA, 19 nt, Artificial Sequence
  Description of Artificial Sequence: Synthetic oligonucleotide
guggcccgaacacgaucca

SEQ ID NO: 568074 - RNA, 19 nt, Artificial Sequence
  Description of Artificial Sequence: Synthetic oligonucleotide
cuguggcaagcaagaagcu

SEQ ID NO: 568075 - RNA, 19 nt, Artificial Sequence
  Description of Artificial Sequence: Synthetic oligonucleotide
ccauagauucagagauaga

SEQ ID NO: 568076 - RNA, 19 nt, Artificial Sequence
  Description of Artificial Sequence: Synthetic oligonucleotide
auccuugcgucagcaucaa

SEQ ID NO: 568077 - RNA, 19 nt, Artificial Sequence
  Description of Artificial Sequence: Synthetic oligonucleotide
ccuauaccggcagcucggc

SEQ ID NO: 568078 - RNA, 19 nt, Artificial Sequence
  Description of Artificial Sequence: Synthetic oligonucleotide
gcagcguuccacaggucuc

SEQ ID NO: 568079 - RNA, 19 nt, Artificial Sequence
  Description of Artificial Sequence: Synthetic oligonucleotide
ggugaguaaggugggcaua

SEQ ID NO: 568080 - RNA, 19 nt, Artificial Sequence
  Description of Artificial Sequence: Synthetic oligonucleotide
guaagcugggguggugggu

SEQ ID NO: 568081 - RNA, 19 nt, Artificial Sequence
  Description of Artificial Sequence: Synthetic oligonucleotide
gauccuggugguggacaua

SEQ ID NO: 568082 - RNA, 19 nt, Artificial Sequence
  Description of Artificial Sequence: Synthetic oligonucleotide
cggccuacuuggcuacugg

SEQ ID NO: 568083 - RNA, 19 nt, Artificial Sequence
  Description of Artificial Sequence: Synthetic oligonucleotide
ggcacgcccagcaauggcu

SEQ ID NO: 568084 - RNA, 19 nt, Artificial Sequence
  Description of Artificial Sequence: Synthetic oligonucleotide
caguaccaguuccggguua

SEQ ID NO: 568085 - RNA, 19 nt, Artificial Sequence
  Description of Artificial Sequence: Synthetic oligonucleotide
ccugggcauuaaaguuccc

SEQ ID NO: 568086 - RNA, 19 nt, Artificial Sequence
  Description of Artificial Sequence: Synthetic oligonucleotide
gguaaacaggcagcaguau

SEQ ID NO: 568087 - RNA, 19 nt, Artificial Sequence
  Description of Artificial Sequence: Synthetic oligonucleotide
cguugacauaacgacugca

SEQ ID NO: 568088 - RNA, 19 nt, Artificial Sequence
  Description of Artificial Sequence: Synthetic oligonucleotide
cuacuaaguugucccucuu

SEQ ID NO: 568089 - RNA, 19 nt, Artificial Sequence
  Description of Artificial Sequence: Synthetic oligonucleotide
cugguccguaguacuuccu

SEQ ID NO: 568090 - RNA, 19 nt, Artificial Sequence
  Description of Artificial Sequence: Synthetic oligonucleotide
guaccaguuccggguuaaa

SEQ ID NO: 568091 - RNA, 19 nt, Artificial Sequence
  Description of Artificial Sequence: Synthetic oligonucleotide
cccaugcggggcccauucc

SEQ ID NO: 568092 - RNA, 19 nt, Artificial Sequence
  Description of Artificial Sequence: Synthetic oligonucleotide
gcccgaacacgauccacgu

SEQ ID NO: 568093 - RNA, 19 nt, Artificial Sequence
  Description of Artificial Sequence: Synthetic oligonucleotide
gcgcaugaggcuacaggaa

SEQ ID NO: 568094 - RNA, 19 nt, Artificial Sequence
  Description of Artificial Sequence: Synthetic oligonucleotide
gguuugcuugucugcgcau

SEQ ID NO: 568095 - RNA, 19 nt, Artificial Sequence
  Description of Artificial Sequence: Synthetic oligonucleotide
gcaggccgcacagguagga

SEQ ID NO: 568096 - RNA, 19 nt, Artificial Sequence
  Description of Artificial Sequence: Synthetic oligonucleotide
agccacccucuaggauaag

SEQ ID NO: 568097 - RNA, 19 nt, Artificial Sequence
  Description of Artificial Sequence: Synthetic oligonucleotide
ggggcauguccuccccaaa

SEQ ID NO: 568098 - RNA, 19 nt, Artificial Sequence
  Description of Artificial Sequence: Synthetic oligonucleotide
cugaggacuaguggauguu

SEQ ID NO: 568099 - RNA, 19 nt, Artificial Sequence
  Description of Artificial Sequence: Synthetic oligonucleotide
guuccggguuaaacucaua

SEQ ID NO: 568100 - RNA, 19 nt, Artificial Sequence
  Description of Artificial Sequence: Synthetic oligonucleotide
ccauaugggcguugacaua

SEQ ID NO: 568101 - RNA, 19 nt, Artificial Sequence
  Description of Artificial Sequence: Synthetic oligonucleotide
gccgcacagguaggaugag

SEQ ID NO: 568102 - RNA, 19 nt, Artificial Sequence
  Description of Artificial Sequence: Synthetic oligonucleotide
gugcacggacacauauaau

SEQ ID NO: 568103 - RNA, 19 nt, Artificial Sequence
  Description of Artificial Sequence: Synthetic oligonucleotide
cuugugauuucggguccuu

SEQ ID NO: 568104 - RNA, 19 nt, Artificial Sequence
  Description of Artificial Sequence: Synthetic oligonucleotide
accggugcacggacacaua

SEQ ID NO: 568105 - RNA, 19 nt, Artificial Sequence
  Description of Artificial Sequence: Synthetic oligonucleotide
gcacuuaaagaagcaccuu

SEQ ID NO: 568106 - RNA, 19 nt, Artificial Sequence
  Description of Artificial Sequence: Synthetic oligonucleotide
gcccaucagcaggugagua

SEQ ID NO: 568107 - RNA, 19 nt, Artificial Sequence
  Description of Artificial Sequence: Synthetic oligonucleotide
cugcgccaguaucugcgau

SEQ ID NO: 568108 - RNA, 19 nt, Artificial Sequence
  Description of Artificial Sequence: Synthetic oligonucleotide
ccaguucuccugcagcguu

SEQ ID NO: 568109 - RNA, 19 nt, Artificial Sequence
  Description of Artificial Sequence: Synthetic oligonucleotide
cccuguauaggggaagcuu

SEQ ID NO: 568110 - RNA, 19 nt, Artificial Sequence
  Description of Artificial Sequence: Synthetic oligonucleotide
ccaguaccaguuccggguu

SEQ ID NO: 568111 - RNA, 19 nt, Artificial Sequence
  Description of Artificial Sequence: Synthetic oligonucleotide
cccgaacacgauccacgua

SEQ ID NO: 568112 - RNA, 19 nt, Artificial Sequence
  Description of Artificial Sequence: Synthetic oligonucleotide
cggugcacggacacauaua

SEQ ID NO: 568113 - RNA, 19 nt, Artificial Sequence
  Description of Artificial Sequence: Synthetic oligonucleotide
caggccgcacagguaggau

SEQ ID NO: 568114 - RNA, 19 nt, Artificial Sequence
  Description of Artificial Sequence: Synthetic oligonucleotide
ccaggauaguggggucaca

SEQ ID NO: 568115 - RNA, 19 nt, Artificial Sequence
  Description of Artificial Sequence: Synthetic oligonucleotide
ccuugugauuucggguccu

SEQ ID NO: 568116 - RNA, 19 nt, Artificial Sequence
  Description of Artificial Sequence: Synthetic oligonucleotide
gcgcacaggcaaaggugcu

SEQ ID NO: 568117 - RNA, 19 nt, Artificial Sequence
  Description of Artificial Sequence: Synthetic oligonucleotide
gguggaccauaugggcguu

SEQ ID NO: 568118 - RNA, 19 nt, Artificial Sequence
  Description of Artificial Sequence: Synthetic oligonucleotide
gcgucagcaucaagcuauu

SEQ ID NO: 568119 - RNA, 19 nt, Artificial Sequence
  Description of Artificial Sequence: Synthetic oligonucleotide
cacccaugcggggcccauu

SEQ ID NO: 568120 - RNA, 19 nt, Artificial Sequence
  Description of Artificial Sequence: Synthetic oligonucleotide
auaacuauuagccaucugc

SEQ ID NO: 568121 - RNA, 19 nt, Artificial Sequence
  Description of Artificial Sequence: Synthetic oligonucleotide
auagaaauaagcuuugugg

SEQ ID NO: 568122 - RNA, 19 nt, Artificial Sequence
  Description of Artificial Sequence: Synthetic oligonucleotide
aauauccacaaauuugacc

SEQ ID NO: 568123 - RNA, 19 nt, Artificial Sequence
  Description of Artificial Sequence: Synthetic oligonucleotide
aauaccuucacugagcccg

SEQ ID NO: 568124 - RNA, 19 nt, Artificial Sequence
  Description of Artificial Sequence: Synthetic oligonucleotide
uuuauggccaucaucacgg

SEQ ID NO: 568125 - RNA, 19 nt, Artificial Sequence
  Description of Artificial Sequence: Synthetic oligonucleotide
uuuaacaccaaauaugcug

SEQ ID NO: 568126 - RNA, 19 nt, Artificial Sequence
  Description of Artificial Sequence: Synthetic oligonucleotide
uuuucgaacauuuaauucc

SEQ ID NO: 568127 - RNA, 19 nt, Artificial Sequence
  Description of Artificial Sequence: Synthetic oligonucleotide
ucaaguauagaaauaagcu

SEQ ID NO: 568128 - RNA, 19 nt, Artificial Sequence
  Description of Artificial Sequence: Synthetic oligonucleotide
uuuaauuccucaaugauau

SEQ ID NO: 568129 - RNA, 19 nt, Artificial Sequence
  Description of Artificial Sequence: Synthetic oligonucleotide
aucaucacggcuuugaagg

SEQ ID NO: 568130 - RNA, 19 nt, Artificial Sequence
  Description of Artificial Sequence: Synthetic oligonucleotide
uuugcauuauaauaaacug

SEQ ID NO: 568131 - RNA, 19 nt, Artificial Sequence
  Description of Artificial Sequence: Synthetic oligonucleotide
ugagguaacauuaggaccc

SEQ ID NO: 568132 - RNA, 19 nt, Artificial Sequence
  Description of Artificial Sequence: Synthetic oligonucleotide
aauuaugugaggucuuagg

SEQ ID NO: 568133 - RNA, 19 nt, Artificial Sequence
  Description of Artificial Sequence: Synthetic oligonucleotide
ugcuuuauggccaucauca

SEQ ID NO: 568134 - RNA, 19 nt, Artificial Sequence
  Description of Artificial Sequence: Synthetic oligonucleotide
aaugagcgucuuuagauuc

SEQ ID NO: 568135 - RNA, 19 nt, Artificial Sequence
  Description of Artificial Sequence: Synthetic oligonucleotide
uguucauucggacauacca

SEQ ID NO: 568136 - RNA, 19 nt, Artificial Sequence
  Description of Artificial Sequence: Synthetic oligonucleotide
aauaugaagucgguguggc

SEQ ID NO: 568137 - RNA, 19 nt, Artificial Sequence
  Description of Artificial Sequence: Synthetic oligonucleotide
ugaauaaggauauuaucug

SEQ ID NO: 568138 - RNA, 19 nt, Artificial Sequence
  Description of Artificial Sequence: Synthetic oligonucleotide
cagcauauuagacagagcc

SEQ ID NO: 568139 - RNA, 19 nt, Artificial Sequence
  Description of Artificial Sequence: Synthetic oligonucleotide
aacacgacugcauaggugu

SEQ ID NO: 568140 - RNA, 19 nt, Artificial Sequence
  Description of Artificial Sequence: Synthetic oligonucleotide
uauuaucugauguaggaac

SEQ ID NO: 568141 - RNA, 19 nt, Artificial Sequence
  Description of Artificial Sequence: Synthetic oligonucleotide
ucuuaggucagucaauccc

SEQ ID NO: 568142 - RNA, 19 nt, Artificial Sequence
  Description of Artificial Sequence: Synthetic oligonucleotide
uaaggauauuaucugaugu

SEQ ID NO: 568143 - RNA, 19 nt, Artificial Sequence
  Description of Artificial Sequence: Synthetic oligonucleotide
ugaaaauuaugugaggucu

SEQ ID NO: 568144 - RNA, 19 nt, Artificial Sequence
  Description of Artificial Sequence: Synthetic oligonucleotide
uuagggcucucucugaccg

SEQ ID NO: 568145 - RNA, 19 nt, Artificial Sequence
  Description of Artificial Sequence: Synthetic oligonucleotide
gauauuaucugauguagga

SEQ ID NO: 568146 - RNA, 19 nt, Artificial Sequence
  Description of Artificial Sequence: Synthetic oligonucleotide
uagacaguguaacuuuucg

SEQ ID NO: 568147 - RNA, 19 nt, Artificial Sequence
  Description of Artificial Sequence: Synthetic oligonucleotide
gagaacuaaagccugagca

SEQ ID NO: 568148 - RNA, 19 nt, Artificial Sequence
  Description of Artificial Sequence: Synthetic oligonucleotide
gaggcgaauaucuucuucg

SEQ ID NO: 568149 - RNA, 19 nt, Artificial Sequence
  Description of Artificial Sequence: Synthetic oligonucleotide
aaauuugaccaggcgaggc

SEQ ID NO: 568150 - RNA, 19 nt, Artificial Sequence
  Description of Artificial Sequence: Synthetic oligonucleotide
gguacaucaauucaguaag

SEQ ID NO: 568151 - RNA, 19 nt, Artificial Sequence
  Description of Artificial Sequence: Synthetic oligonucleotide
acaguauauagucuguaag

SEQ ID NO: 568152 - RNA, 19 nt, Artificial Sequence
  Description of Artificial Sequence: Synthetic oligonucleotide
aacuauggguucuaagcag

SEQ ID NO: 568153 - RNA, 19 nt, Artificial Sequence
  Description of Artificial Sequence: Synthetic oligonucleotide
uaagguucacauaagcaca

SEQ ID NO: 568154 - RNA, 19 nt, Artificial Sequence
  Description of Artificial Sequence: Synthetic oligonucleotide
cuaaagaacucaaguauag

SEQ ID NO: 568155 - RNA, 19 nt, Artificial Sequence
  Description of Artificial Sequence: Synthetic oligonucleotide
uucuggauacgauugauga

SEQ ID NO: 568156 - RNA, 19 nt, Artificial Sequence
  Description of Artificial Sequence: Synthetic oligonucleotide
uggauaaccacaauuuccu

SEQ ID NO: 568157 - RNA, 19 nt, Artificial Sequence
  Description of Artificial Sequence: Synthetic oligonucleotide
uuuauugggacaguuuucc

SEQ ID NO: 568158 - RNA, 19 nt, Artificial Sequence
  Description of Artificial Sequence: Synthetic oligonucleotide
uuuuguacuaaagaacuca

SEQ ID NO: 568159 - RNA, 19 nt, Artificial Sequence
  Description of Artificial Sequence: Synthetic oligonucleotide
gauacgauugaugacuucc

SEQ ID NO: 568160 - RNA, 19 nt, Artificial Sequence
  Description of Artificial Sequence: Synthetic oligonucleotide
uauuagacagagcccaaag

SEQ ID NO: 568161 - RNA, 19 nt, Artificial Sequence
  Description of Artificial Sequence: Synthetic oligonucleotide
auccguuggaaccagauug

SEQ ID NO: 568162 - RNA, 19 nt, Artificial Sequence
  Description of Artificial Sequence: Synthetic oligonucleotide
uuagacagagcccaaagua

SEQ ID NO: 568163 - RNA, 19 nt, Artificial Sequence
  Description of Artificial Sequence: Synthetic oligonucleotide
uguuagacacucuuguggc

SEQ ID NO: 568164 - RNA, 19 nt, Artificial Sequence
  Description of Artificial Sequence: Synthetic oligonucleotide
uuuacaagguucaacuuau

SEQ ID NO: 568165 - RNA, 19 nt, Artificial Sequence
  Description of Artificial Sequence: Synthetic oligonucleotide
ugauauacuucuccaagga

SEQ ID NO: 568166 - RNA, 19 nt, Artificial Sequence
  Description of Artificial Sequence: Synthetic oligonucleotide
uaacuauuagccaucugca

SEQ ID NO: 568167 - RNA, 19 nt, Artificial Sequence
  Description of Artificial Sequence: Synthetic oligonucleotide
agguguuuaagguuaaaug

SEQ ID NO: 568168 - RNA, 19 nt, Artificial Sequence
  Description of Artificial Sequence: Synthetic oligonucleotide
ugccauuuaaaucacuccu

SEQ ID NO: 568169 - RNA, 19 nt, Artificial Sequence
  Description of Artificial Sequence: Synthetic oligonucleotide
uguguggauaacuauuagc

SEQ ID NO: 568170 - RNA, 19 nt, Artificial Sequence
  Description of Artificial Sequence: Synthetic oligonucleotide
auuaugugaggucuuaggu

SEQ ID NO: 568171 - RNA, 19 nt, Artificial Sequence
  Description of Artificial Sequence: Synthetic oligonucleotide
ucgaauaccauacuuguuu

SEQ ID NO: 568172 - RNA, 19 nt, Artificial Sequence
  Description of Artificial Sequence: Synthetic oligonucleotide
aaggucucaaaucaguuuu

SEQ ID NO: 568173 - RNA, 19 nt, Artificial Sequence
  Description of Artificial Sequence: Synthetic oligonucleotide
caagguucaacuuauuauc

SEQ ID NO: 568174 - RNA, 19 nt, Artificial Sequence
  Description of Artificial Sequence: Synthetic oligonucleotide
cucuguuugagucuuauuc

SEQ ID NO: 568175 - RNA, 19 nt, Artificial Sequence
  Description of Artificial Sequence: Synthetic oligonucleotide
ucacccuuuaaucuucucc

SEQ ID NO: 568176 - RNA, 19 nt, Artificial Sequence
  Description of Artificial Sequence: Synthetic oligonucleotide
aacuauuagccaucugcag

SEQ ID NO: 568177 - RNA, 19 nt, Artificial Sequence
  Description of Artificial Sequence: Synthetic oligonucleotide
auaccaauuggucagaaua

SEQ ID NO: 568178 - RNA, 19 nt, Artificial Sequence
  Description of Artificial Sequence: Synthetic oligonucleotide
uguuugagucuuauucagg

SEQ ID NO: 568179 - RNA, 19 nt, Artificial Sequence
  Description of Artificial Sequence: Synthetic oligonucleotide
aacucaaguauagaaauaa

SEQ ID NO: 568180 - RNA, 19 nt, Artificial Sequence
  Description of Artificial Sequence: Synthetic oligonucleotide
uuccgugccacucucaccc

SEQ ID NO: 568181 - RNA, 19 nt, Artificial Sequence
  Description of Artificial Sequence: Synthetic oligonucleotide
cagaggauacuuuauuggg

SEQ ID NO: 568182 - RNA, 19 nt, Artificial Sequence
  Description of Artificial Sequence: Synthetic oligonucleotide
ugagucuuauucaggaaca

SEQ ID NO: 568183 - RNA, 19 nt, Artificial Sequence
  Description of Artificial Sequence: Synthetic oligonucleotide
gguaacaacacucuuuagc

SEQ ID NO: 568184 - RNA, 19 nt, Artificial Sequence
  Description of Artificial Sequence: Synthetic oligonucleotide
uuucgaacauuuaauuccu

SEQ ID NO: 568185 - RNA, 19 nt, Artificial Sequence
  Description of Artificial Sequence: Synthetic oligonucleotide
uaucacucgcccaaguuca

SEQ ID NO: 568186 - RNA, 19 nt, Artificial Sequence
  Description of Artificial Sequence: Synthetic oligonucleotide
acaaauuugaccaggcgag

SEQ ID NO: 568187 - RNA, 19 nt, Artificial Sequence
  Description of Artificial Sequence: Synthetic oligonucleotide
auucggacauaccaauugg

SEQ ID NO: 568188 - RNA, 19 nt, Artificial Sequence
  Description of Artificial Sequence: Synthetic oligonucleotide
acuauuagccaucugcagu

SEQ ID NO: 568189 - RNA, 19 nt, Artificial Sequence
  Description of Artificial Sequence: Synthetic oligonucleotide
acaagguucaacuuauuau

SEQ ID NO: 568190 - RNA, 19 nt, Artificial Sequence
  Description of Artificial Sequence: Synthetic oligonucleotide
cugagguaacauuaggacc

SEQ ID NO: 568191 - RNA, 19 nt, Artificial Sequence
  Description of Artificial Sequence: Synthetic oligonucleotide
agagaacuaaagccugagc

SEQ ID NO: 568192 - RNA, 19 nt, Artificial Sequence
  Description of Artificial Sequence: Synthetic oligonucleotide
gaggauacuuuauugggac

SEQ ID NO: 568193 - RNA, 19 nt, Artificial Sequence
  Description of Artificial Sequence: Synthetic oligonucleotide
ucuagauacugcauccucu

SEQ ID NO: 568194 - RNA, 19 nt, Artificial Sequence
  Description of Artificial Sequence: Synthetic oligonucleotide
acaugaggcgaauaucuuc

SEQ ID NO: 568195 - RNA, 19 nt, Artificial Sequence
  Description of Artificial Sequence: Synthetic oligonucleotide
auaaggauauuaucugaug

SEQ ID NO: 568196 - RNA, 19 nt, Artificial Sequence
  Description of Artificial Sequence: Synthetic oligonucleotide
uacgauugaugacuucccg

SEQ ID NO: 568197 - RNA, 19 nt, Artificial Sequence
  Description of Artificial Sequence: Synthetic oligonucleotide
uuuguacuaaagaacucaa

SEQ ID NO: 568198 - RNA, 19 nt, Artificial Sequence
  Description of Artificial Sequence: Synthetic oligonucleotide
ugaguuccaguuccgaccc

SEQ ID NO: 568199 - RNA, 19 nt, Artificial Sequence
  Description of Artificial Sequence: Synthetic oligonucleotide
aaggauauuaucugaugua

SEQ ID NO: 568200 - RNA, 19 nt, Artificial Sequence
  Description of Artificial Sequence: Synthetic oligonucleotide
ucuaagcagcauauuagac

SEQ ID NO: 568201 - RNA, 19 nt, Artificial Sequence
  Description of Artificial Sequence: Synthetic oligonucleotide
uuauuaucaccuuuuggau

SEQ ID NO: 568202 - RNA, 19 nt, Artificial Sequence
  Description of Artificial Sequence: Synthetic oligonucleotide
cuaagagaacuaaagccug

SEQ ID NO: 568203 - RNA, 19 nt, Artificial Sequence
  Description of Artificial Sequence: Synthetic oligonucleotide
aauucauggccuuccacaa

SEQ ID NO: 568204 - RNA, 19 nt, Artificial Sequence
  Description of Artificial Sequence: Synthetic oligonucleotide
aguauauagucuguaagcu

SEQ ID NO: 568205 - RNA, 19 nt, Artificial Sequence
  Description of Artificial Sequence: Synthetic oligonucleotide
ucgaacauuuaauuccuca

SEQ ID NO: 568206 - RNA, 19 nt, Artificial Sequence
  Description of Artificial Sequence: Synthetic oligonucleotide
ugguacaucaauucaguaa

SEQ ID NO: 568207 - RNA, 19 nt, Artificial Sequence
  Description of Artificial Sequence: Synthetic oligonucleotide
cagguugauauacugacac

SEQ ID NO: 568208 - RNA, 19 nt, Artificial Sequence
  Description of Artificial Sequence: Synthetic oligonucleotide
aauuugaccaggcgaggca

SEQ ID NO: 568209 - RNA, 19 nt, Artificial Sequence
  Description of Artificial Sequence: Synthetic oligonucleotide
agucgaauaccauacuugu

SEQ ID NO: 568210 - RNA, 19 nt, Artificial Sequence
  Description of Artificial Sequence: Synthetic oligonucleotide
aauaaggauauuaucugau

SEQ ID NO: 568211 - RNA, 19 nt, Artificial Sequence
  Description of Artificial Sequence: Synthetic oligonucleotide
aaucaguuuuacaaggcca

SEQ ID NO: 568212 - RNA, 19 nt, Artificial Sequence
  Description of Artificial Sequence: Synthetic oligonucleotide
cugaauaaggauauuaucu

SEQ ID NO: 568213 - RNA, 19 nt, Artificial Sequence
  Description of Artificial Sequence: Synthetic oligonucleotide
gucgguguggcuuucaaug

SEQ ID NO: 568214 - RNA, 19 nt, Artificial Sequence
  Description of Artificial Sequence: Synthetic oligonucleotide
uuaugugaggucuuagguc

SEQ ID NO: 568215 - RNA, 19 nt, Artificial Sequence
  Description of Artificial Sequence: Synthetic oligonucleotide
gagugugaguuccaguucc

SEQ ID NO: 568216 - RNA, 19 nt, Artificial Sequence
  Description of Artificial Sequence: Synthetic oligonucleotide
agccauaacgcagucuucc

SEQ ID NO: 568217 - RNA, 19 nt, Artificial Sequence
  Description of Artificial Sequence: Synthetic oligonucleotide
gaacuauggguucuaagca

SEQ ID NO: 568218 - RNA, 19 nt, Artificial Sequence
  Description of Artificial Sequence: Synthetic oligonucleotide
uauuucugucucaccgugg

SEQ ID NO: 568219 - RNA, 19 nt, Artificial Sequence
  Description of Artificial Sequence: Synthetic oligonucleotide
ugacauuauucaaguaucu

SEQ ID NO: 568220 - RNA, 19 nt, Artificial Sequence
  Description of Artificial Sequence: Synthetic oligonucleotide
uggccuuccacaacaauac

SEQ ID NO: 568221 - RNA, 19 nt, Artificial Sequence
  Description of Artificial Sequence: Synthetic oligonucleotide
ugguggauaaccacaauuu

SEQ ID NO: 568222 - RNA, 19 nt, Artificial Sequence
  Description of Artificial Sequence: Synthetic oligonucleotide
guaacaacacucuuuagcu

SEQ ID NO: 568223 - RNA, 19 nt, Artificial Sequence
  Description of Artificial Sequence: Synthetic oligonucleotide
cuguuugagucuuauucag

SEQ ID NO: 568224 - RNA, 19 nt, Artificial Sequence
  Description of Artificial Sequence: Synthetic oligonucleotide
aguuccgaccccuuuaacu

SEQ ID NO: 568225 - RNA, 19 nt, Artificial Sequence
  Description of Artificial Sequence: Synthetic oligonucleotide
agagccauaacgcagucuu

SEQ ID NO: 568226 - RNA, 19 nt, Artificial Sequence
  Description of Artificial Sequence: Synthetic oligonucleotide
auaagcacaagcaggacca

SEQ ID NO: 568227 - RNA, 19 nt, Artificial Sequence
  Description of Artificial Sequence: Synthetic oligonucleotide
guuccgaccccuuuaacug

SEQ ID NO: 568228 - RNA, 19 nt, Artificial Sequence
  Description of Artificial Sequence: Synthetic oligonucleotide
uucccaaggaccaugugau

SEQ ID NO: 568229 - RNA, 19 nt, Artificial Sequence
  Description of Artificial Sequence: Synthetic oligonucleotide
caaauaugaagucggugug

SEQ ID NO: 568230 - RNA, 19 nt, Artificial Sequence
  Description of Artificial Sequence: Synthetic oligonucleotide
agaacuaaagccugagcau

SEQ ID NO: 568231 - RNA, 19 nt, Artificial Sequence
  Description of Artificial Sequence: Synthetic oligonucleotide
aguacaugaggcgaauauc

SEQ ID NO: 568232 - RNA, 19 nt, Artificial Sequence
  Description of Artificial Sequence: Synthetic oligonucleotide
agagcccaaaguaaauacc

SEQ ID NO: 568233 - RNA, 19 nt, Artificial Sequence
  Description of Artificial Sequence: Synthetic oligonucleotide
uaucaguagacaguguaac

SEQ ID NO: 568234 - RNA, 19 nt, Artificial Sequence
  Description of Artificial Sequence: Synthetic oligonucleotide
cauaacgcagucuuccgug

SEQ ID NO: 568235 - RNA, 19 nt, Artificial Sequence
  Description of Artificial Sequence: Synthetic oligonucleotide
auuagacagagcccaaagu

SEQ ID NO: 568236 - RNA, 19 nt, Artificial Sequence
  Description of Artificial Sequence: Synthetic oligonucleotide
aacuuuucgaacauuuaau

SEQ ID NO: 568237 - RNA, 19 nt, Artificial Sequence
  Description of Artificial Sequence: Synthetic oligonucleotide
uuccacaacaauacuccca

SEQ ID NO: 568238 - RNA, 19 nt, Artificial Sequence
  Description of Artificial Sequence: Synthetic oligonucleotide
guggauaaccacaauuucc

SEQ ID NO: 568239 - RNA, 19 nt, Artificial Sequence
  Description of Artificial Sequence: Synthetic oligonucleotide
guguuuaagguuaaaugug

SEQ ID NO: 568240 - RNA, 19 nt, Artificial Sequence
  Description of Artificial Sequence: Synthetic oligonucleotide
gcgaauaucuucuucgugc

SEQ ID NO: 568241 - RNA, 19 nt, Artificial Sequence
  Description of Artificial Sequence: Synthetic oligonucleotide
uugguggauaaccacaauu

SEQ ID NO: 568242 - RNA, 19 nt, Artificial Sequence
  Description of Artificial Sequence: Synthetic oligonucleotide
ggacauaccaauuggucag

SEQ ID NO: 568243 - RNA, 19 nt, Artificial Sequence
  Description of Artificial Sequence: Synthetic oligonucleotide
cacaaauuugaccaggcga

SEQ ID NO: 568244 - RNA, 19 nt, Artificial Sequence
  Description of Artificial Sequence: Synthetic oligonucleotide
augacuucccgagccaugc

SEQ ID NO: 568245 - RNA, 19 nt, Artificial Sequence
  Description of Artificial Sequence: Synthetic oligonucleotide
cuagauacugcauccucug

SEQ ID NO: 568246 - RNA, 19 nt, Artificial Sequence
  Description of Artificial Sequence: Synthetic oligonucleotide
uauuaucaccuuuuggauu

SEQ ID NO: 568247 - RNA, 19 nt, Artificial Sequence
  Description of Artificial Sequence: Synthetic oligonucleotide
aguuuuccggucucguauc

SEQ ID NO: 568248 - RNA, 19 nt, Artificial Sequence
  Description of Artificial Sequence: Synthetic oligonucleotide
uaccaauuggucagaauau

SEQ ID NO: 568249 - RNA, 19 nt, Artificial Sequence
  Description of Artificial Sequence: Synthetic oligonucleotide
ucuugguggauaaccacaa

SEQ ID NO: 568250 - RNA, 19 nt, Artificial Sequence
  Description of Artificial Sequence: Synthetic oligonucleotide
ugguucagcccuuagucga

SEQ ID NO: 568251 - RNA, 19 nt, Artificial Sequence
  Description of Artificial Sequence: Synthetic oligonucleotide
ucucguaucacucgcccaa

SEQ ID NO: 568252 - RNA, 19 nt, Artificial Sequence
  Description of Artificial Sequence: Synthetic oligonucleotide
cuucagacgcuucccaagg

SEQ ID NO: 568253 - RNA, 19 nt, Artificial Sequence
  Description of Artificial Sequence: Synthetic oligonucleotide
auacgauugaugacuuccc

SEQ ID NO: 568254 - RNA, 19 nt, Artificial Sequence
  Description of Artificial Sequence: Synthetic oligonucleotide
ugcuccugaauaaggauau

SEQ ID NO: 568255 - RNA, 19 nt, Artificial Sequence
  Description of Artificial Sequence: Synthetic oligonucleotide
aagguucaacuuauuauca

SEQ ID NO: 568256 - RNA, 19 nt, Artificial Sequence
  Description of Artificial Sequence: Synthetic oligonucleotide
caauucauggccuuccaca

SEQ ID NO: 568257 - RNA, 19 nt, Artificial Sequence
  Description of Artificial Sequence: Synthetic oligonucleotide
ugaaggcucccuucagacg

SEQ ID NO: 568258 - RNA, 19 nt, Artificial Sequence
  Description of Artificial Sequence: Synthetic oligonucleotide
uggauaacuauuagccauc

SEQ ID NO: 568259 - RNA, 19 nt, Artificial Sequence
  Description of Artificial Sequence: Synthetic oligonucleotide
ucggacauaccaauugguc

SEQ ID NO: 568260 - RNA, 19 nt, Artificial Sequence
  Description of Artificial Sequence: Synthetic oligonucleotide
uucauucggacauaccaau

SEQ ID NO: 568261 - RNA, 19 nt, Artificial Sequence
  Description of Artificial Sequence: Synthetic oligonucleotide
aucaauucaguaagaaaug

SEQ ID NO: 568262 - RNA, 19 nt, Artificial Sequence
  Description of Artificial Sequence: Synthetic oligonucleotide
uccguuggaaccagauugc

SEQ ID NO: 568263 - RNA, 19 nt, Artificial Sequence
  Description of Artificial Sequence: Synthetic oligonucleotide
gguguuuaagguuaaaugu

SEQ ID NO: 568264 - RNA, 19 nt, Artificial Sequence
  Description of Artificial Sequence: Synthetic oligonucleotide
auuugaccaggcgaggcac

SEQ ID NO: 568265 - RNA, 19 nt, Artificial Sequence
  Description of Artificial Sequence: Synthetic oligonucleotide
cacauaagcacaagcagga

SEQ ID NO: 568266 - RNA, 19 nt, Artificial Sequence
  Description of Artificial Sequence: Synthetic oligonucleotide
uucuagauacugcauccuc

SEQ ID NO: 568267 - RNA, 19 nt, Artificial Sequence
  Description of Artificial Sequence: Synthetic oligonucleotide
auucaguaagaaauggugu

SEQ ID NO: 568268 - RNA, 19 nt, Artificial Sequence
  Description of Artificial Sequence: Synthetic oligonucleotide
guauuucugucucaccgug

SEQ ID NO: 568269 - RNA, 19 nt, Artificial Sequence
  Description of Artificial Sequence: Synthetic oligonucleotide
gugaaaauuaugugagguc

SEQ ID NO: 568270 - RNA, 19 nt, Artificial Sequence
  Description of Artificial Sequence: Synthetic oligonucleotide
ucaguagacaguguaacuu

SEQ ID NO: 568271 - RNA, 19 nt, Artificial Sequence
  Description of Artificial Sequence: Synthetic oligonucleotide
aggugugacgucuaagaga

SEQ ID NO: 568272 - RNA, 19 nt, Artificial Sequence
  Description of Artificial Sequence: Synthetic oligonucleotide
uucggacauaccaauuggu

SEQ ID NO: 568273 - RNA, 19 nt, Artificial Sequence
  Description of Artificial Sequence: Synthetic oligonucleotide
ccagauugcacuucuuucg

SEQ ID NO: 568274 - RNA, 19 nt, Artificial Sequence
  Description of Artificial Sequence: Synthetic oligonucleotide
agggagcuuugacaguggc

SEQ ID NO: 568275 - RNA, 19 nt, Artificial Sequence
  Description of Artificial Sequence: Synthetic oligonucleotide
cagagugcgccucaaacug

SEQ ID NO: 568276 - RNA, 19 nt, Artificial Sequence
  Description of Artificial Sequence: Synthetic oligonucleotide
uaccuuggcugcuucauac

SEQ ID NO: 568277 - RNA, 19 nt, Artificial Sequence
  Description of Artificial Sequence: Synthetic oligonucleotide
uaugaagucgguguggcuu

SEQ ID NO: 568278 - RNA, 19 nt, Artificial Sequence
  Description of Artificial Sequence: Synthetic oligonucleotide
uuacuacuuugauuuaauc

SEQ ID NO: 568279 - RNA, 19 nt, Artificial Sequence
  Description of Artificial Sequence: Synthetic oligonucleotide
agcgucuuuagauucuggu

SEQ ID NO: 568280 - RNA, 19 nt, Artificial Sequence
  Description of Artificial Sequence: Synthetic oligonucleotide
aaaauuaugugaggucuua

SEQ ID NO: 568281 - RNA, 19 nt, Artificial Sequence
  Description of Artificial Sequence: Synthetic oligonucleotide
ucagucaaucccaucugaa

SEQ ID NO: 568282 - RNA, 19 nt, Artificial Sequence
  Description of Artificial Sequence: Synthetic oligonucleotide
ggcaacaugagguagugga

SEQ ID NO: 568283 - RNA, 19 nt, Artificial Sequence
  Description of Artificial Sequence: Synthetic oligonucleotide
ugugugugugugugugugg

SEQ ID NO: 568284 - RNA, 19 nt, Artificial Sequence
  Description of Artificial Sequence: Synthetic oligonucleotide
gaacuaaagccugagcauc

SEQ ID NO: 568285 - RNA, 19 nt, Artificial Sequence
  Description of Artificial Sequence: Synthetic oligonucleotide
aucaguagacaguguaacu

SEQ ID NO: 568286 - RNA, 19 nt, Artificial Sequence
  Description of Artificial Sequence: Synthetic oligonucleotide
ggauacuuuauugggacag

SEQ ID NO: 568287 - RNA, 19 nt, Artificial Sequence
  Description of Artificial Sequence: Synthetic oligonucleotide
uguuagggcucucucugac

SEQ ID NO: 568288 - RNA, 19 nt, Artificial Sequence
  Description of Artificial Sequence: Synthetic oligonucleotide
ugcucuagcuccucacugc

SEQ ID NO: 568289 - RNA, 19 nt, Artificial Sequence
  Description of Artificial Sequence: Synthetic oligonucleotide
aggccauauauauguacug

SEQ ID NO: 568290 - RNA, 19 nt, Artificial Sequence
  Description of Artificial Sequence: Synthetic oligonucleotide
aauaccuuggcugcuucau

SEQ ID NO: 568291 - RNA, 19 nt, Artificial Sequence
  Description of Artificial Sequence: Synthetic oligonucleotide
aguguaacuuuucgaacau

SEQ ID NO: 568292 - RNA, 19 nt, Artificial Sequence
  Description of Artificial Sequence: Synthetic oligonucleotide
auuaucugauguaggaacu

SEQ ID NO: 568293 - RNA, 19 nt, Artificial Sequence
  Description of Artificial Sequence: Synthetic oligonucleotide
cugaacuauggguucuaag

SEQ ID NO: 568294 - RNA, 19 nt, Artificial Sequence
  Description of Artificial Sequence: Synthetic oligonucleotide
gauaacuauuagccaucug

SEQ ID NO: 568295 - RNA, 19 nt, Artificial Sequence
  Description of Artificial Sequence: Synthetic oligonucleotide
uguguguguguguggauaa

SEQ ID NO: 568296 - RNA, 19 nt, Artificial Sequence
  Description of Artificial Sequence: Synthetic oligonucleotide
uacugacacagaagggcgc

SEQ ID NO: 568297 - RNA, 19 nt, Artificial Sequence
  Description of Artificial Sequence: Synthetic oligonucleotide
auuucauccguuggaacca

SEQ ID NO: 568298 - RNA, 19 nt, Artificial Sequence
  Description of Artificial Sequence: Synthetic oligonucleotide
auaugcugguaacaacacu

SEQ ID NO: 568299 - RNA, 19 nt, Artificial Sequence
  Description of Artificial Sequence: Synthetic oligonucleotide
acaacaauacucccacuuu

SEQ ID NO: 568300 - RNA, 19 nt, Artificial Sequence
  Description of Artificial Sequence: Synthetic oligonucleotide
aacuaaagccugagcauca

SEQ ID NO: 568301 - RNA, 19 nt, Artificial Sequence
  Description of Artificial Sequence: Synthetic oligonucleotide
aacgcagucuuccgugcca

SEQ ID NO: 568302 - RNA, 19 nt, Artificial Sequence
  Description of Artificial Sequence: Synthetic oligonucleotide
uguguguguguggauaacu

SEQ ID NO: 568303 - RNA, 19 nt, Artificial Sequence
  Description of Artificial Sequence: Synthetic oligonucleotide
accguggaagacugacagc

SEQ ID NO: 568304 - RNA, 19 nt, Artificial Sequence
  Description of Artificial Sequence: Synthetic oligonucleotide
ucauccguuggaaccagau

SEQ ID NO: 568305 - RNA, 19 nt, Artificial Sequence
  Description of Artificial Sequence: Synthetic oligonucleotide
ugaggcgaauaucuucuuc

SEQ ID NO: 568306 - RNA, 19 nt, Artificial Sequence
  Description of Artificial Sequence: Synthetic oligonucleotide
ucgcccaaguucaaucaca

SEQ ID NO: 568307 - RNA, 19 nt, Artificial Sequence
  Description of Artificial Sequence: Synthetic oligonucleotide
uucgaaguuucuggauacg

SEQ ID NO: 568308 - RNA, 19 nt, Artificial Sequence
  Description of Artificial Sequence: Synthetic oligonucleotide
ugcauucuagauacugcau

SEQ ID NO: 568309 - RNA, 19 nt, Artificial Sequence
  Description of Artificial Sequence: Synthetic oligonucleotide
acucaaguauagaaauaag

SEQ ID NO: 568310 - RNA, 19 nt, Artificial Sequence
  Description of Artificial Sequence: Synthetic oligonucleotide
gccauauauauguacugug

SEQ ID NO: 568311 - RNA, 19 nt, Artificial Sequence
  Description of Artificial Sequence: Synthetic oligonucleotide
ucacuccuacuuuuguacu

SEQ ID NO: 568312 - RNA, 19 nt, Artificial Sequence
  Description of Artificial Sequence: Synthetic oligonucleotide
gaauccaccggucagugau

SEQ ID NO: 568313 - RNA, 19 nt, Artificial Sequence
  Description of Artificial Sequence: Synthetic oligonucleotide
auauuaucugauguaggaa

SEQ ID NO: 568314 - RNA, 19 nt, Artificial Sequence
  Description of Artificial Sequence: Synthetic oligonucleotide
guaguggaugcugagugug

SEQ ID NO: 568315 - RNA, 19 nt, Artificial Sequence
  Description of Artificial Sequence: Synthetic oligonucleotide
aaugguguguaaggagcca

SEQ ID NO: 568316 - RNA, 19 nt, Artificial Sequence
  Description of Artificial Sequence: Synthetic oligonucleotide
uauggccaucaucacggcu

SEQ ID NO: 568317 - RNA, 19 nt, Artificial Sequence
  Description of Artificial Sequence: Synthetic oligonucleotide
ucgguguggcuuucaauga

SEQ ID NO: 568318 - RNA, 19 nt, Artificial Sequence
  Description of Artificial Sequence: Synthetic oligonucleotide
gguaacauuaggacccucc

SEQ ID NO: 568319 - RNA, 19 nt, Artificial Sequence
  Description of Artificial Sequence: Synthetic oligonucleotide
gaacacguggcaacaugag

SEQ ID NO: 568320 - RNA, 19 nt, Artificial Sequence
  Description of Artificial Sequence: Synthetic oligonucleotide
caaauuugaccaggcgagg

SEQ ID NO: 568321 - RNA, 19 nt, Artificial Sequence
  Description of Artificial Sequence: Synthetic oligonucleotide
guggauaacuauuagccau

SEQ ID NO: 568322 - RNA, 19 nt, Artificial Sequence
  Description of Artificial Sequence: Synthetic oligonucleotide
auuagccaucugcaguugu

SEQ ID NO: 568323 - RNA, 19 nt, Artificial Sequence
  Description of Artificial Sequence: Synthetic oligonucleotide
acauaagcacaagcaggac

SEQ ID NO: 568324 - RNA, 19 nt, Artificial Sequence
  Description of Artificial Sequence: Synthetic oligonucleotide
uuucaagcaggaggguacc

SEQ ID NO: 568325 - RNA, 19 nt, Artificial Sequence
  Description of Artificial Sequence: Synthetic oligonucleotide
ugagcaucagagugcgccu

SEQ ID NO: 568326 - RNA, 19 nt, Artificial Sequence
  Description of Artificial Sequence: Synthetic oligonucleotide
ccgaaguccaaauaccuug

SEQ ID NO: 568327 - RNA, 19 nt, Artificial Sequence
  Description of Artificial Sequence: Synthetic oligonucleotide
aaugccguuugcacagaug

SEQ ID NO: 568328 - RNA, 19 nt, Artificial Sequence
  Description of Artificial Sequence: Synthetic oligonucleotide
ggugugacgucuaagagaa

SEQ ID NO: 568329 - RNA, 19 nt, Artificial Sequence
  Description of Artificial Sequence: Synthetic oligonucleotide
agguugauauacugacaca

SEQ ID NO: 568330 - RNA, 19 nt, Artificial Sequence
  Description of Artificial Sequence: Synthetic oligonucleotide
caacacgacugcauaggug

SEQ ID NO: 568331 - RNA, 19 nt, Artificial Sequence
  Description of Artificial Sequence: Synthetic oligonucleotide
ucaccguggaagacugaca

SEQ ID NO: 568332 - RNA, 19 nt, Artificial Sequence
  Description of Artificial Sequence: Synthetic oligonucleotide
uucagacgcuucccaagga

SEQ ID NO: 568333 - RNA, 19 nt, Artificial Sequence
  Description of Artificial Sequence: Synthetic oligonucleotide
acucucacccuuuaaucuu

SEQ ID NO: 568334 - RNA, 19 nt, Artificial Sequence
  Description of Artificial Sequence: Synthetic oligonucleotide
cauugacuggucaggugug

SEQ ID NO: 568335 - RNA, 19 nt, Artificial Sequence
  Description of Artificial Sequence: Synthetic oligonucleotide
ggauuuuccaaaagcaaca

SEQ ID NO: 568336 - RNA, 19 nt, Artificial Sequence
  Description of Artificial Sequence: Synthetic oligonucleotide
aggauacuuuauugggaca

SEQ ID NO: 568337 - RNA, 19 nt, Artificial Sequence
  Description of Artificial Sequence: Synthetic oligonucleotide
uggcaaauaugaagucggu

SEQ ID NO: 568338 - RNA, 19 nt, Artificial Sequence
  Description of Artificial Sequence: Synthetic oligonucleotide
ugacgucuaagagaacuaa

SEQ ID NO: 568339 - RNA, 19 nt, Artificial Sequence
  Description of Artificial Sequence: Synthetic oligonucleotide
uccgaccccuuuaacugug

SEQ ID NO: 568340 - RNA, 19 nt, Artificial Sequence
  Description of Artificial Sequence: Synthetic oligonucleotide
guuagggcucucucugacc

SEQ ID NO: 568341 - RNA, 19 nt, Artificial Sequence
  Description of Artificial Sequence: Synthetic oligonucleotide
uccgaaguccaaauaccuu

SEQ ID NO: 568342 - RNA, 19 nt, Artificial Sequence
  Description of Artificial Sequence: Synthetic oligonucleotide
caugaggcgaauaucuucu

SEQ ID NO: 568343 - RNA, 19 nt, Artificial Sequence
  Description of Artificial Sequence: Synthetic oligonucleotide
uagucuguaagcugccauu

SEQ ID NO: 568344 - RNA, 19 nt, Artificial Sequence
  Description of Artificial Sequence: Synthetic oligonucleotide
gucuuaggucagucaaucc

SEQ ID NO: 568345 - RNA, 19 nt, Artificial Sequence
  Description of Artificial Sequence: Synthetic oligonucleotide
caaaguaaauaccuucacu

SEQ ID NO: 568346 - RNA, 19 nt, Artificial Sequence
  Description of Artificial Sequence: Synthetic oligonucleotide
gcauucuagauacugcauc

SEQ ID NO: 568347 - RNA, 19 nt, Artificial Sequence
  Description of Artificial Sequence: Synthetic oligonucleotide
aucacggcuuugaaggcuc

SEQ ID NO: 568348 - RNA, 19 nt, Artificial Sequence
  Description of Artificial Sequence: Synthetic oligonucleotide
ucauucggacauaccaauu

SEQ ID NO: 568349 - RNA, 19 nt, Artificial Sequence
  Description of Artificial Sequence: Synthetic oligonucleotide
uaacaccaaauaugcuggu

SEQ ID NO: 568350 - RNA, 19 nt, Artificial Sequence
  Description of Artificial Sequence: Synthetic oligonucleotide
gguggauaaccacaauuuc

SEQ ID NO: 568351 - RNA, 19 nt, Artificial Sequence
  Description of Artificial Sequence: Synthetic oligonucleotide
auauguacugugccauuua

SEQ ID NO: 568352 - RNA, 19 nt, Artificial Sequence
  Description of Artificial Sequence: Synthetic oligonucleotide
cucucacccuuuaaucuuc

SEQ ID NO: 568353 - RNA, 19 nt, Artificial Sequence
  Description of Artificial Sequence: Synthetic oligonucleotide
cucaccguggaagacugac

SEQ ID NO: 568354 - RNA, 19 nt, Artificial Sequence
  Description of Artificial Sequence: Synthetic oligonucleotide
uucgaacauuuaauuccuc

SEQ ID NO: 568355 - RNA, 19 nt, Artificial Sequence
  Description of Artificial Sequence: Synthetic oligonucleotide
gaguacaugaggcgaauau

SEQ ID NO: 568356 - RNA, 19 nt, Artificial Sequence
  Description of Artificial Sequence: Synthetic oligonucleotide
uguggugcugagguaacau

SEQ ID NO: 568357 - RNA, 19 nt, Artificial Sequence
  Description of Artificial Sequence: Synthetic oligonucleotide
ucucgaacacguggcaaca

SEQ ID NO: 568358 - RNA, 19 nt, Artificial Sequence
  Description of Artificial Sequence: Synthetic oligonucleotide
cacucgcccaaguucaauc

SEQ ID NO: 568359 - RNA, 19 nt, Artificial Sequence
  Description of Artificial Sequence: Synthetic oligonucleotide
uuucauccguuggaaccag

SEQ ID NO: 568360 - RNA, 19 nt, Artificial Sequence
  Description of Artificial Sequence: Synthetic oligonucleotide
ugugugugugugugugugu

SEQ ID NO: 568361 - RNA, 19 nt, Artificial Sequence
  Description of Artificial Sequence: Synthetic oligonucleotide
gucaaucccaucugaacua

SEQ ID NO: 568362 - RNA, 19 nt, Artificial Sequence
  Description of Artificial Sequence: Synthetic oligonucleotide
cuguucauucggacauacc

SEQ ID NO: 568363 - RNA, 19 nt, Artificial Sequence
  Description of Artificial Sequence: Synthetic oligonucleotide
auucuagauacugcauccu

SEQ ID NO: 568364 - RNA, 19 nt, Artificial Sequence
  Description of Artificial Sequence: Synthetic oligonucleotide
aggaacagcuugagccucc

SEQ ID NO: 568365 - RNA, 19 nt, Artificial Sequence
  Description of Artificial Sequence: Synthetic oligonucleotide
auauauguacugugccauu

SEQ ID NO: 568366 - RNA, 19 nt, Artificial Sequence
  Description of Artificial Sequence: Synthetic oligonucleotide
gucagucaaucccaucuga

SEQ ID NO: 568367 - RNA, 19 nt, Artificial Sequence
  Description of Artificial Sequence: Synthetic oligonucleotide
cuuuagauucugguacauc

SEQ ID NO: 568368 - RNA, 19 nt, Artificial Sequence
  Description of Artificial Sequence: Synthetic oligonucleotide
cuugcucaaugccguuugc

SEQ ID NO: 568369 - RNA, 19 nt, Artificial Sequence
  Description of Artificial Sequence: Synthetic oligonucleotide
gugugugugugugugugug

SEQ ID NO: 568370 - RNA, 19 nt, Artificial Sequence
  Description of Artificial Sequence: Synthetic oligonucleotide
auguuaagguucacauaag

SEQ ID NO: 568371 - RNA, 19 nt, Artificial Sequence
  Description of Artificial Sequence: Synthetic oligonucleotide
gucuugguggauaaccaca

SEQ ID NO: 568372 - RNA, 19 nt, Artificial Sequence
  Description of Artificial Sequence: Synthetic oligonucleotide
uuccgaccccuuuaacugu

SEQ ID NO: 568373 - RNA, 19 nt, Artificial Sequence
  Description of Artificial Sequence: Synthetic oligonucleotide
ucguaucacucgcccaagu

SEQ ID NO: 568374 - RNA, 19 nt, Artificial Sequence
  Description of Artificial Sequence: Synthetic oligonucleotide
cacccuuuaaucuucuccu

SEQ ID NO: 568375 - RNA, 19 nt, Artificial Sequence
  Description of Artificial Sequence: Synthetic oligonucleotide
ucaaucccaucugaacuau

SEQ ID NO: 568376 - RNA, 19 nt, Artificial Sequence
  Description of Artificial Sequence: Synthetic oligonucleotide
gcccaaaguaaauaccuuc

SEQ ID NO: 568377 - RNA, 19 nt, Artificial Sequence
  Description of Artificial Sequence: Synthetic oligonucleotide
auauuagacagagcccaaa

SEQ ID NO: 568378 - RNA, 19 nt, Artificial Sequence
  Description of Artificial Sequence: Synthetic oligonucleotide
agauugcacuucuuucgaa

SEQ ID NO: 568379 - RNA, 19 nt, Artificial Sequence
  Description of Artificial Sequence: Synthetic oligonucleotide
uuaauuccucaaugauaua

SEQ ID NO: 568380 - RNA, 19 nt, Artificial Sequence
  Description of Artificial Sequence: Synthetic oligonucleotide
ggucucguaucacucgccc

SEQ ID NO: 568381 - RNA, 19 nt, Artificial Sequence
  Description of Artificial Sequence: Synthetic oligonucleotide
auacuuuauugggacaguu

SEQ ID NO: 568382 - RNA, 19 nt, Artificial Sequence
  Description of Artificial Sequence: Synthetic oligonucleotide
cuggucaaaggaguacaug

SEQ ID NO: 568383 - RNA, 19 nt, Artificial Sequence
  Description of Artificial Sequence: Synthetic oligonucleotide
gagugcgccucaaacugug

SEQ ID NO: 568384 - RNA, 19 nt, Artificial Sequence
  Description of Artificial Sequence: Synthetic oligonucleotide
cagauugcacuucuuucga

SEQ ID NO: 568385 - RNA, 19 nt, Artificial Sequence
  Description of Artificial Sequence: Synthetic oligonucleotide
uagacacucuuguggcccu

SEQ ID NO: 568386 - RNA, 19 nt, Artificial Sequence
  Description of Artificial Sequence: Synthetic oligonucleotide
ugcuuucaagggagcuuug

SEQ ID NO: 568387 - RNA, 19 nt, Artificial Sequence
  Description of Artificial Sequence: Synthetic oligonucleotide
cuauggguucuaagcagca

SEQ ID NO: 568388 - RNA, 19 nt, Artificial Sequence
  Description of Artificial Sequence: Synthetic oligonucleotide
ugaguccauucuguccaag

SEQ ID NO: 568389 - RNA, 19 nt, Artificial Sequence
  Description of Artificial Sequence: Synthetic oligonucleotide
gaacucaaguauagaaaua

SEQ ID NO: 568390 - RNA, 19 nt, Artificial Sequence
  Description of Artificial Sequence: Synthetic oligonucleotide
gccauaacgcagucuuccg

SEQ ID NO: 568391 - RNA, 19 nt, Artificial Sequence
  Description of Artificial Sequence: Synthetic oligonucleotide
gucucaccguggaagacug

SEQ ID NO: 568392 - RNA, 19 nt, Artificial Sequence
  Description of Artificial Sequence: Synthetic oligonucleotide
ggaucaaugagcgucuuua

SEQ ID NO: 568393 - RNA, 19 nt, Artificial Sequence
  Description of Artificial Sequence: Synthetic oligonucleotide
ggcgaauaucuucuucgug

SEQ ID NO: 568394 - RNA, 19 nt, Artificial Sequence
  Description of Artificial Sequence: Synthetic oligonucleotide
cuauuagccaucugcaguu

SEQ ID NO: 568395 - RNA, 19 nt, Artificial Sequence
  Description of Artificial Sequence: Synthetic oligonucleotide
gagcgucuuuagauucugg

SEQ ID NO: 568396 - RNA, 19 nt, Artificial Sequence
  Description of Artificial Sequence: Synthetic oligonucleotide
guagacaguguaacuuuuc

SEQ ID NO: 568397 - RNA, 19 nt, Artificial Sequence
  Description of Artificial Sequence: Synthetic oligonucleotide
uucauccguuggaaccaga

SEQ ID NO: 568398 - RNA, 19 nt, Artificial Sequence
  Description of Artificial Sequence: Synthetic oligonucleotide
acaguuuuccggucucgua

SEQ ID NO: 568399 - RNA, 19 nt, Artificial Sequence
  Description of Artificial Sequence: Synthetic oligonucleotide
gacgucuaagagaacuaaa

SEQ ID NO: 568400 - RNA, 19 nt, Artificial Sequence
  Description of Artificial Sequence: Synthetic oligonucleotide
ccacaaauuugaccaggcg

SEQ ID NO: 568401 - RNA, 19 nt, Artificial Sequence
  Description of Artificial Sequence: Synthetic oligonucleotide
agaauccaccggucaguga

SEQ ID NO: 568402 - RNA, 19 nt, Artificial Sequence
  Description of Artificial Sequence: Synthetic oligonucleotide
ggucuuaggucagucaauc

SEQ ID NO: 568403 - RNA, 19 nt, Artificial Sequence
  Description of Artificial Sequence: Synthetic oligonucleotide
agaacccaaugagggacug

SEQ ID NO: 568404 - RNA, 19 nt, Artificial Sequence
  Description of Artificial Sequence: Synthetic oligonucleotide
ucaguuuuacaaggccaua

SEQ ID NO: 568405 - RNA, 19 nt, Artificial Sequence
  Description of Artificial Sequence: Synthetic oligonucleotide
guuuuccggucucguauca

SEQ ID NO: 568406 - RNA, 19 nt, Artificial Sequence
  Description of Artificial Sequence: Synthetic oligonucleotide
gucaggugugacgucuaag

SEQ ID NO: 568407 - RNA, 19 nt, Artificial Sequence
  Description of Artificial Sequence: Synthetic oligonucleotide
agugcgccucaaacugugc

SEQ ID NO: 568408 - RNA, 19 nt, Artificial Sequence
  Description of Artificial Sequence: Synthetic oligonucleotide
cauauuagacagagcccaa

SEQ ID NO: 568409 - RNA, 19 nt, Artificial Sequence
  Description of Artificial Sequence: Synthetic oligonucleotide
uguguguguguguguggau

SEQ ID NO: 568410 - RNA, 19 nt, Artificial Sequence
  Description of Artificial Sequence: Synthetic oligonucleotide
cuccugaauaaggauauua

SEQ ID NO: 568411 - RNA, 19 nt, Artificial Sequence
  Description of Artificial Sequence: Synthetic oligonucleotide
accggucagugauguuagg

SEQ ID NO: 568412 - RNA, 19 nt, Artificial Sequence
  Description of Artificial Sequence: Synthetic oligonucleotide
cacaacaauacucccacuu

SEQ ID NO: 568413 - RNA, 19 nt, Artificial Sequence
  Description of Artificial Sequence: Synthetic oligonucleotide
gaacccaaugagggacugc

SEQ ID NO: 568414 - RNA, 19 nt, Artificial Sequence
  Description of Artificial Sequence: Synthetic oligonucleotide
gagcccgugugugugugug

SEQ ID NO: 568415 - RNA, 19 nt, Artificial Sequence
  Description of Artificial Sequence: Synthetic oligonucleotide
gugugugugugugugugga

SEQ ID NO: 568416 - RNA, 19 nt, Artificial Sequence
  Description of Artificial Sequence: Synthetic oligonucleotide
gcucccuucagacgcuucc

SEQ ID NO: 568417 - RNA, 19 nt, Artificial Sequence
  Description of Artificial Sequence: Synthetic oligonucleotide
gugcgccucaaacugugca

SEQ ID NO: 568418 - RNA, 19 nt, Artificial Sequence
  Description of Artificial Sequence: Synthetic oligonucleotide
gacauaccaauuggucaga

SEQ ID NO: 568419 - RNA, 19 nt, Artificial Sequence
  Description of Artificial Sequence: Synthetic oligonucleotide
cuccgaaguccaaauaccu

SEQ ID NO: 568420 - RNA, 19 nt, Artificial Sequence
  Description of Artificial Sequence: Synthetic oligonucleotide
ggggcuguugacagcagag

SEQ ID NO: 568421 - RNA, 19 nt, Artificial Sequence
  Description of Artificial Sequence: Synthetic oligonucleotide
gauacuuuauugggacagu

SEQ ID NO: 568422 - RNA, 19 nt, Artificial Sequence
  Description of Artificial Sequence: Synthetic oligonucleotide
augagcgucuuuagauucu

SEQ ID NO: 568423 - RNA, 19 nt, Artificial Sequence
  Description of Artificial Sequence: Synthetic oligonucleotide
gcauagguguuuaagguua

SEQ ID NO: 568424 - RNA, 19 nt, Artificial Sequence
  Description of Artificial Sequence: Synthetic oligonucleotide
gaaaauuaugugaggucuu

SEQ ID NO: 568425 - RNA, 19 nt, Artificial Sequence
  Description of Artificial Sequence: Synthetic oligonucleotide
guacaucaauucaguaaga

SEQ ID NO: 568426 - RNA, 19 nt, Artificial Sequence
  Description of Artificial Sequence: Synthetic oligonucleotide
ccaucugaacuauggguuc

SEQ ID NO: 568427 - RNA, 19 nt, Artificial Sequence
  Description of Artificial Sequence: Synthetic oligonucleotide
ggucagugauguuagggcu

SEQ ID NO: 568428 - RNA, 19 nt, Artificial Sequence
  Description of Artificial Sequence: Synthetic oligonucleotide
auguacugugccauuuaaa

SEQ ID NO: 568429 - RNA, 19 nt, Artificial Sequence
  Description of Artificial Sequence: Synthetic oligonucleotide
ccggucagugauguuaggg

SEQ ID NO: 568430 - RNA, 19 nt, Artificial Sequence
  Description of Artificial Sequence: Synthetic oligonucleotide
ggacagaauccaccgguca

SEQ ID NO: 568431 - RNA, 19 nt, Artificial Sequence
  Description of Artificial Sequence: Synthetic oligonucleotide
gucucguaucacucgccca

SEQ ID NO: 568432 - RNA, 19 nt, Artificial Sequence
  Description of Artificial Sequence: Synthetic oligonucleotide
ucgugcaauucauggccuu

SEQ ID NO: 568433 - RNA, 19 nt, Artificial Sequence
  Description of Artificial Sequence: Synthetic oligonucleotide
auccaccggucagugaugu

SEQ ID NO: 568434 - RNA, 19 nt, Artificial Sequence
  Description of Artificial Sequence: Synthetic oligonucleotide
cucguaucacucgcccaag

SEQ ID NO: 568435 - RNA, 19 nt, Artificial Sequence
  Description of Artificial Sequence: Synthetic oligonucleotide
acauaccaauuggucagaa

SEQ ID NO: 568436 - RNA, 19 nt, Artificial Sequence
  Description of Artificial Sequence: Synthetic oligonucleotide
cuucccgagccaugccuuc

SEQ ID NO: 568437 - RNA, 19 nt, Artificial Sequence
  Description of Artificial Sequence: Synthetic oligonucleotide
cucacccuuuaaucuucuc

SEQ ID NO: 568438 - RNA, 19 nt, Artificial Sequence
  Description of Artificial Sequence: Synthetic oligonucleotide
ggaaccagauugcacuucu

SEQ ID NO: 568439 - RNA, 19 nt, Artificial Sequence
  Description of Artificial Sequence: Synthetic oligonucleotide
acgacugcauagguguuua

SEQ ID NO: 568440 - RNA, 19 nt, Artificial Sequence
  Description of Artificial Sequence: Synthetic oligonucleotide
cacuccuacuuuuguacua

SEQ ID NO: 568441 - RNA, 19 nt, Artificial Sequence
  Description of Artificial Sequence: Synthetic oligonucleotide
cggacauaccaauugguca

SEQ ID NO: 568442 - RNA, 19 nt, Artificial Sequence
  Description of Artificial Sequence: Synthetic oligonucleotide
gguguggcuuucaaugaca

SEQ ID NO: 568443 - RNA, 19 nt, Artificial Sequence
  Description of Artificial Sequence: Synthetic oligonucleotide
guguguguguguguggaua

SEQ ID NO: 568444 - RNA, 19 nt, Artificial Sequence
  Description of Artificial Sequence: Synthetic oligonucleotide
caacacucuuuagcuuuac

SEQ ID NO: 568445 - RNA, 19 nt, Artificial Sequence
  Description of Artificial Sequence: Synthetic oligonucleotide
caaugagcgucuuuagauu

SEQ ID NO: 568446 - RNA, 19 nt, Artificial Sequence
  Description of Artificial Sequence: Synthetic oligonucleotide
ugagcccgugugugugugu

SEQ ID NO: 568447 - RNA, 19 nt, Artificial Sequence
  Description of Artificial Sequence: Synthetic oligonucleotide
aggaguacaugaggcgaau

SEQ ID NO: 568448 - RNA, 19 nt, Artificial Sequence
  Description of Artificial Sequence: Synthetic oligonucleotide
gacaguuuuccggucucgu

SEQ ID NO: 568449 - RNA, 19 nt, Artificial Sequence
  Description of Artificial Sequence: Synthetic oligonucleotide
aggucuuaggucagucaau

SEQ ID NO: 568450 - RNA, 19 nt, Artificial Sequence
  Description of Artificial Sequence: Synthetic oligonucleotide
ucacucgcccaaguucaau

SEQ ID NO: 568451 - RNA, 19 nt, Artificial Sequence
  Description of Artificial Sequence: Synthetic oligonucleotide
acaacacucuuuagcuuua

SEQ ID NO: 568452 - RNA, 19 nt, Artificial Sequence
  Description of Artificial Sequence: Synthetic oligonucleotide
gugacgucuaagagaacua

SEQ ID NO: 568453 - RNA, 19 nt, Artificial Sequence
  Description of Artificial Sequence: Synthetic oligonucleotide
caguuccgaccccuuuaac

SEQ ID NO: 568454 - RNA, 19 nt, Artificial Sequence
  Description of Artificial Sequence: Synthetic oligonucleotide
cuucucgaacacguggcaa

SEQ ID NO: 568455 - RNA, 19 nt, Artificial Sequence
  Description of Artificial Sequence: Synthetic oligonucleotide
cugucucaccguggaagac

SEQ ID NO: 568456 - RNA, 19 nt, Artificial Sequence
  Description of Artificial Sequence: Synthetic oligonucleotide
gccguuugcacagauguua

SEQ ID NO: 568457 - RNA, 19 nt, Artificial Sequence
  Description of Artificial Sequence: Synthetic oligonucleotide
caguuuuacaaggccauau

SEQ ID NO: 568458 - RNA, 19 nt, Artificial Sequence
  Description of Artificial Sequence: Synthetic oligonucleotide
gaagucgguguggcuuuca

SEQ ID NO: 568459 - RNA, 19 nt, Artificial Sequence
  Description of Artificial Sequence: Synthetic oligonucleotide
ccccaacacgacugcauag

SEQ ID NO: 568460 - RNA, 19 nt, Artificial Sequence
  Description of Artificial Sequence: Synthetic oligonucleotide
ggauccccuggugagugug

SEQ ID NO: 568461 - RNA, 19 nt, Artificial Sequence
  Description of Artificial Sequence: Synthetic oligonucleotide
ugaagucgguguggcuuuc

SEQ ID NO: 568462 - RNA, 19 nt, Artificial Sequence
  Description of Artificial Sequence: Synthetic oligonucleotide
guguguguguguggauaac

SEQ ID NO: 568463 - RNA, 19 nt, Artificial Sequence
  Description of Artificial Sequence: Synthetic oligonucleotide
cauaccaauuggucagaau

SEQ ID NO: 568464 - RNA, 19 nt, Artificial Sequence
  Description of Artificial Sequence: Synthetic oligonucleotide
agcccgugugugugugugu

SEQ ID NO: 568465 - RNA, 19 nt, Artificial Sequence
  Description of Artificial Sequence: Synthetic oligonucleotide
uuaucaccuuuuggauuuu

SEQ ID NO: 568466 - RNA, 19 nt, Artificial Sequence
  Description of Artificial Sequence: Synthetic oligonucleotide
ggccauauauauguacugu

SEQ ID NO: 568467 - RNA, 19 nt, Artificial Sequence
  Description of Artificial Sequence: Synthetic oligonucleotide
aggucucaaaucaguuuua

SEQ ID NO: 568468 - RNA, 19 nt, Artificial Sequence
  Description of Artificial Sequence: Synthetic oligonucleotide
accuugcucaaugccguuu

SEQ ID NO: 568469 - RNA, 19 nt, Artificial Sequence
  Description of Artificial Sequence: Synthetic oligonucleotide
gauccccuggugaguguga

SEQ ID NO: 568470 - RNA, 19 nt, Artificial Sequence
  Description of Artificial Sequence: Synthetic oligonucleotide
auaccuucacugagcccgu

SEQ ID NO: 568471 - RNA, 19 nt, Artificial Sequence
  Description of Artificial Sequence: Synthetic oligonucleotide
acuucccgagccaugccuu

SEQ ID NO: 568472 - RNA, 19 nt, Artificial Sequence
  Description of Artificial Sequence: Synthetic oligonucleotide
cccuuagucgaauaccaua

SEQ ID NO: 568473 - RNA, 19 nt, Artificial Sequence
  Description of Artificial Sequence: Synthetic oligonucleotide
ucccggacagaagcaggau

SEQ ID NO: 568474 - RNA, 19 nt, Artificial Sequence
  Description of Artificial Sequence: Synthetic oligonucleotide
aggcgaggcaccacaguau

SEQ ID NO: 568475 - RNA, 19 nt, Artificial Sequence
  Description of Artificial Sequence: Synthetic oligonucleotide
gcagguugauauacugaca

SEQ ID NO: 568476 - RNA, 19 nt, Artificial Sequence
  Description of Artificial Sequence: Synthetic oligonucleotide
cccggacagaagcaggauc

SEQ ID NO: 568477 - RNA, 19 nt, Artificial Sequence
  Description of Artificial Sequence: Synthetic oligonucleotide
gagguaacauuaggacccu

SEQ ID NO: 568478 - RNA, 19 nt, Artificial Sequence
  Description of Artificial Sequence: Synthetic oligonucleotide
cguuugcacagauguuaag

SEQ ID NO: 568479 - RNA, 19 nt, Artificial Sequence
  Description of Artificial Sequence: Synthetic oligonucleotide
agacacucuuguggcccug

SEQ ID NO: 568480 - RNA, 19 nt, Artificial Sequence
  Description of Artificial Sequence: Synthetic oligonucleotide
ggcgaggcaccacaguaua

SEQ ID NO: 568481 - RNA, 19 nt, Artificial Sequence
  Description of Artificial Sequence: Synthetic oligonucleotide
ggauaacuauuagccaucu

SEQ ID NO: 568482 - RNA, 19 nt, Artificial Sequence
  Description of Artificial Sequence: Synthetic oligonucleotide
cagucccuccuguggccug

SEQ ID NO: 568483 - RNA, 19 nt, Artificial Sequence
  Description of Artificial Sequence: Synthetic oligonucleotide
ccgugugugugugugugug

SEQ ID NO: 568484 - RNA, 19 nt, Artificial Sequence
  Description of Artificial Sequence: Synthetic oligonucleotide
caguuguuggcaggacaga

SEQ ID NO: 568485 - RNA, 19 nt, Artificial Sequence
  Description of Artificial Sequence: Synthetic oligonucleotide
gggagcuuugacaguggca

SEQ ID NO: 568486 - RNA, 19 nt, Artificial Sequence
  Description of Artificial Sequence: Synthetic oligonucleotide
gcccgugugugugugugug

SEQ ID NO: 568487 - RNA, 19 nt, Artificial Sequence
  Description of Artificial Sequence: Synthetic oligonucleotide
ccguggaagacugacagcu

SEQ ID NO: 568488 - RNA, 19 nt, Artificial Sequence
  Description of Artificial Sequence: Synthetic oligonucleotide
caucacggcuuugaaggcu

SEQ ID NO: 568489 - RNA, 19 nt, Artificial Sequence
  Description of Artificial Sequence: Synthetic oligonucleotide
cagucuuccgugccacucu

SEQ ID NO: 568490 - RNA, 19 nt, Artificial Sequence
  Description of Artificial Sequence: Synthetic oligonucleotide
cacacaggguccucccacu

SEQ ID NO: 568491 - RNA, 19 nt, Artificial Sequence
  Description of Artificial Sequence: Synthetic oligonucleotide
cgguguggcuuucaaugac

SEQ ID NO: 568492 - RNA, 19 nt, Artificial Sequence
  Description of Artificial Sequence: Synthetic oligonucleotide
cgagccaugccuucaucca

SEQ ID NO: 568493 - RNA, 19 nt, Artificial Sequence
  Description of Artificial Sequence: Synthetic oligonucleotide
cuugguggauaaccacaau

SEQ ID NO: 568494 - RNA, 19 nt, Artificial Sequence
  Description of Artificial Sequence: Synthetic oligonucleotide
cccaaggaccaugugaucu

SEQ ID NO: 568495 - RNA, 19 nt, Artificial Sequence
  Description of Artificial Sequence: Synthetic oligonucleotide
aucacucgcccaaguucaa

SEQ ID NO: 568496 - RNA, 19 nt, Artificial Sequence
  Description of Artificial Sequence: Synthetic oligonucleotide
gucgaauaccauacuuguu

SEQ ID NO: 568497 - RNA, 19 nt, Artificial Sequence
  Description of Artificial Sequence: Synthetic oligonucleotide
gcaggaucaaugagcgucu

SEQ ID NO: 568498 - RNA, 19 nt, Artificial Sequence
  Description of Artificial Sequence: Synthetic oligonucleotide
acacgacugcauagguguu

SEQ ID NO: 568499 - RNA, 19 nt, Artificial Sequence
  Description of Artificial Sequence: Synthetic oligonucleotide
ggaguacaugaggcgaaua

SEQ ID NO: 568500 - RNA, 19 nt, Artificial Sequence
  Description of Artificial Sequence: Synthetic oligonucleotide
gugugacgucuaagagaac

SEQ ID NO: 568501 - RNA, 19 nt, Artificial Sequence
  Description of Artificial Sequence: Synthetic oligonucleotide
ccauaacgcagucuuccgu

SEQ ID NO: 568502 - RNA, 19 nt, Artificial Sequence
  Description of Artificial Sequence: Synthetic oligonucleotide
ccaacacgacugcauaggu

SEQ ID NO: 568503 - RNA, 19 nt, Artificial Sequence
  Description of Artificial Sequence: Synthetic oligonucleotide
gguacccacagucccuguu

SEQ ID NO: 568504 - RNA, 19 nt, Artificial Sequence
  Description of Artificial Sequence: Synthetic oligonucleotide
cagagccauaacgcagucu

SEQ ID NO: 568505 - RNA, 19 nt, Artificial Sequence
  Description of Artificial Sequence: Synthetic oligonucleotide
ggacagaagcaggaucaau

SEQ ID NO: 568506 - RNA, 19 nt, Artificial Sequence
  Description of Artificial Sequence: Synthetic oligonucleotide
cacgacugcauagguguuu

SEQ ID NO: 568507 - RNA, 19 nt, Artificial Sequence
  Description of Artificial Sequence: Synthetic oligonucleotide
ggguacccacagucccugu

SEQ ID NO: 568508 - RNA, 19 nt, Artificial Sequence
  Description of Artificial Sequence: Synthetic oligonucleotide
cgugugugugugugugugu

SEQ ID NO: 568509 - RNA, 19 nt, Artificial Sequence
  Description of Artificial Sequence: Synthetic oligonucleotide
gcgaggcaccacaguauau

SEQ ID NO: 568510 - RNA, 19 nt, Artificial Sequence
  Description of Artificial Sequence: Synthetic oligonucleotide
cccgugugugugugugugu

SEQ ID NO: 568511 - RNA, 19 nt, Artificial Sequence
  Description of Artificial Sequence: Synthetic oligonucleotide
ccgaccccuuuaacugugu

SEQ ID NO: 568512 - RNA, 19 nt, Artificial Sequence
  Description of Artificial Sequence: Synthetic oligonucleotide
cucugaccgugugcucauu

SEQ ID NO: 568513 - RNA, 19 nt, Artificial Sequence
  Description of Artificial Sequence: Synthetic oligonucleotide
uuucuauguagcuagaagg

SEQ ID NO: 568514 - RNA, 19 nt, Artificial Sequence
  Description of Artificial Sequence: Synthetic oligonucleotide
ucucuugucaaacagaggc

SEQ ID NO: 568515 - RNA, 19 nt, Artificial Sequence
  Description of Artificial Sequence: Synthetic oligonucleotide
ucuacguuucugaagaugg

SEQ ID NO: 568516 - RNA, 19 nt, Artificial Sequence
  Description of Artificial Sequence: Synthetic oligonucleotide
aagaucaguagcuggaaac

SEQ ID NO: 568517 - RNA, 19 nt, Artificial Sequence
  Description of Artificial Sequence: Synthetic oligonucleotide
uuacaaauguguuaucggg

SEQ ID NO: 568518 - RNA, 19 nt, Artificial Sequence
  Description of Artificial Sequence: Synthetic oligonucleotide
uuaagcaaaguaagaaggg

SEQ ID NO: 568519 - RNA, 19 nt, Artificial Sequence
  Description of Artificial Sequence: Synthetic oligonucleotide
ucuagcacaaaagacauag

SEQ ID NO: 568520 - RNA, 19 nt, Artificial Sequence
  Description of Artificial Sequence: Synthetic oligonucleotide
aacuaaaucuucuauccug

SEQ ID NO: 568521 - RNA, 19 nt, Artificial Sequence
  Description of Artificial Sequence: Synthetic oligonucleotide
auaagcacaagggugaacc

SEQ ID NO: 568522 - RNA, 19 nt, Artificial Sequence
  Description of Artificial Sequence: Synthetic oligonucleotide
augacuaggguacagcagc

SEQ ID NO: 568523 - RNA, 19 nt, Artificial Sequence
  Description of Artificial Sequence: Synthetic oligonucleotide
aauuguacacccaucacag

SEQ ID NO: 568524 - RNA, 19 nt, Artificial Sequence
  Description of Artificial Sequence: Synthetic oligonucleotide
auaucuacguuucugaaga

SEQ ID NO: 568525 - RNA, 19 nt, Artificial Sequence
  Description of Artificial Sequence: Synthetic oligonucleotide
ugaaacucuagcacaaaag

SEQ ID NO: 568526 - RNA, 19 nt, Artificial Sequence
  Description of Artificial Sequence: Synthetic oligonucleotide
uagcacaaaagacauaggc

SEQ ID NO: 568527 - RNA, 19 nt, Artificial Sequence
  Description of Artificial Sequence: Synthetic oligonucleotide
aguuaagcaaaguaagaag

SEQ ID NO: 568528 - RNA, 19 nt, Artificial Sequence
  Description of Artificial Sequence: Synthetic oligonucleotide
aaacaccguauucaguuac

SEQ ID NO: 568529 - RNA, 19 nt, Artificial Sequence
  Description of Artificial Sequence: Synthetic oligonucleotide
uguacaaauugaaaacacc

SEQ ID NO: 568530 - RNA, 19 nt, Artificial Sequence
  Description of Artificial Sequence: Synthetic oligonucleotide
ugaaccagaacucagggau

SEQ ID NO: 568531 - RNA, 19 nt, Artificial Sequence
  Description of Artificial Sequence: Synthetic oligonucleotide
aauauucuaacuauucugu

SEQ ID NO: 568532 - RNA, 19 nt, Artificial Sequence
  Description of Artificial Sequence: Synthetic oligonucleotide
aaaugguuagaugucacag

SEQ ID NO: 568533 - RNA, 19 nt, Artificial Sequence
  Description of Artificial Sequence: Synthetic oligonucleotide
uaacaaguggucugcaugg

SEQ ID NO: 568534 - RNA, 19 nt, Artificial Sequence
  Description of Artificial Sequence: Synthetic oligonucleotide
aacgauaacaaguggucug

SEQ ID NO: 568535 - RNA, 19 nt, Artificial Sequence
  Description of Artificial Sequence: Synthetic oligonucleotide
auaaauaagcacaagggug

SEQ ID NO: 568536 - RNA, 19 nt, Artificial Sequence
  Description of Artificial Sequence: Synthetic oligonucleotide
aauaucuugcagauguuuc

SEQ ID NO: 568537 - RNA, 19 nt, Artificial Sequence
  Description of Artificial Sequence: Synthetic oligonucleotide
uguguuaucggguaaggcu

SEQ ID NO: 568538 - RNA, 19 nt, Artificial Sequence
  Description of Artificial Sequence: Synthetic oligonucleotide
ucuauaugcgcacaccuca

SEQ ID NO: 568539 - RNA, 19 nt, Artificial Sequence
  Description of Artificial Sequence: Synthetic oligonucleotide
aaagacauaggcuguccag

SEQ ID NO: 568540 - RNA, 19 nt, Artificial Sequence
  Description of Artificial Sequence: Synthetic oligonucleotide
gaacucggaaucuucaucc

SEQ ID NO: 568541 - RNA, 19 nt, Artificial Sequence
  Description of Artificial Sequence: Synthetic oligonucleotide
ucuagaaaugcaugaauga

SEQ ID NO: 568542 - RNA, 19 nt, Artificial Sequence
  Description of Artificial Sequence: Synthetic oligonucleotide
agaucgguucaucauauuc

SEQ ID NO: 568543 - RNA, 19 nt, Artificial Sequence
  Description of Artificial Sequence: Synthetic oligonucleotide
ucagcuauaacuacuuuau

SEQ ID NO: 568544 - RNA, 19 nt, Artificial Sequence
  Description of Artificial Sequence: Synthetic oligonucleotide
guagcuggaaaccaugggg

SEQ ID NO: 568545 - RNA, 19 nt, Artificial Sequence
  Description of Artificial Sequence: Synthetic oligonucleotide
gaaacucuagcacaaaaga

SEQ ID NO: 568546 - RNA, 19 nt, Artificial Sequence
  Description of Artificial Sequence: Synthetic oligonucleotide
uuuggguaaaguuucuaug

SEQ ID NO: 568547 - RNA, 19 nt, Artificial Sequence
  Description of Artificial Sequence: Synthetic oligonucleotide
uauucuaacuauucuguac

SEQ ID NO: 568548 - RNA, 19 nt, Artificial Sequence
  Description of Artificial Sequence: Synthetic oligonucleotide
aggugcuacaacuaaaucu

SEQ ID NO: 568549 - RNA, 19 nt, Artificial Sequence
  Description of Artificial Sequence: Synthetic oligonucleotide
aacucuagcacaaaagaca

SEQ ID NO: 568550 - RNA, 19 nt, Artificial Sequence
  Description of Artificial Sequence: Synthetic oligonucleotide
aagacguuccugcaaagcu

SEQ ID NO: 568551 - RNA, 19 nt, Artificial Sequence
  Description of Artificial Sequence: Synthetic oligonucleotide
auaacaaguggucugcaug

SEQ ID NO: 568552 - RNA, 19 nt, Artificial Sequence
  Description of Artificial Sequence: Synthetic oligonucleotide
agaauauucuaacuauucu

SEQ ID NO: 568553 - RNA, 19 nt, Artificial Sequence
  Description of Artificial Sequence: Synthetic oligonucleotide
aaauugaaaacaccguauu

SEQ ID NO: 568554 - RNA, 19 nt, Artificial Sequence
  Description of Artificial Sequence: Synthetic oligonucleotide
uaucggguaaggcugagca

SEQ ID NO: 568555 - RNA, 19 nt, Artificial Sequence
  Description of Artificial Sequence: Synthetic oligonucleotide
uguucuacaggccagcaau

SEQ ID NO: 568556 - RNA, 19 nt, Artificial Sequence
  Description of Artificial Sequence: Synthetic oligonucleotide
aaagaaaacgggucagccu

SEQ ID NO: 568557 - RNA, 19 nt, Artificial Sequence
  Description of Artificial Sequence: Synthetic oligonucleotide
ucuaaggcgagcauagccu

SEQ ID NO: 568558 - RNA, 19 nt, Artificial Sequence
  Description of Artificial Sequence: Synthetic oligonucleotide
uccccagugaaguagagga

SEQ ID NO: 568559 - RNA, 19 nt, Artificial Sequence
  Description of Artificial Sequence: Synthetic oligonucleotide
ugcacuuggaaaugguuag

SEQ ID NO: 568560 - RNA, 19 nt, Artificial Sequence
  Description of Artificial Sequence: Synthetic oligonucleotide
aaacgggucagccuugucu

SEQ ID NO: 568561 - RNA, 19 nt, Artificial Sequence
  Description of Artificial Sequence: Synthetic oligonucleotide
guuucuauguagcuagaag

SEQ ID NO: 568562 - RNA, 19 nt, Artificial Sequence
  Description of Artificial Sequence: Synthetic oligonucleotide
ugcccaauuucaaagucag

SEQ ID NO: 568563 - RNA, 19 nt, Artificial Sequence
  Description of Artificial Sequence: Synthetic oligonucleotide
agaucaguagcuggaaacc

SEQ ID NO: 568564 - RNA, 19 nt, Artificial Sequence
  Description of Artificial Sequence: Synthetic oligonucleotide
cauaucuccagccaacuug

SEQ ID NO: 568565 - RNA, 19 nt, Artificial Sequence
  Description of Artificial Sequence: Synthetic oligonucleotide
auauuccugcaccagcucg

SEQ ID NO: 568566 - RNA, 19 nt, Artificial Sequence
  Description of Artificial Sequence: Synthetic oligonucleotide
uguacacccaucacagucc

SEQ ID NO: 568567 - RNA, 19 nt, Artificial Sequence
  Description of Artificial Sequence: Synthetic oligonucleotide
aaauguguuaucggguaag

SEQ ID NO: 568568 - RNA, 19 nt, Artificial Sequence
  Description of Artificial Sequence: Synthetic oligonucleotide
uuguacacccaucacaguc

SEQ ID NO: 568569 - RNA, 19 nt, Artificial Sequence
  Description of Artificial Sequence: Synthetic oligonucleotide
agucguuggguucaaagug

SEQ ID NO: 568570 - RNA, 19 nt, Artificial Sequence
  Description of Artificial Sequence: Synthetic oligonucleotide
ucggguaaggcugagcacg

SEQ ID NO: 568571 - RNA, 19 nt, Artificial Sequence
  Description of Artificial Sequence: Synthetic oligonucleotide
cuuccagucaauuguacac

SEQ ID NO: 568572 - RNA, 19 nt, Artificial Sequence
  Description of Artificial Sequence: Synthetic oligonucleotide
cucgcuaagcauaucuacg

SEQ ID NO: 568573 - RNA, 19 nt, Artificial Sequence
  Description of Artificial Sequence: Synthetic oligonucleotide
aacgggucagccuugucug

SEQ ID NO: 568574 - RNA, 19 nt, Artificial Sequence
  Description of Artificial Sequence: Synthetic oligonucleotide
aauguguuaucggguaagg

SEQ ID NO: 568575 - RNA, 19 nt, Artificial Sequence
  Description of Artificial Sequence: Synthetic oligonucleotide
cauaucuacguuucugaag

SEQ ID NO: 568576 - RNA, 19 nt, Artificial Sequence
  Description of Artificial Sequence: Synthetic oligonucleotide
uguagcuagaaggagugug

SEQ ID NO: 568577 - RNA, 19 nt, Artificial Sequence
  Description of Artificial Sequence: Synthetic oligonucleotide
uuucaagaucgguucauca

SEQ ID NO: 568578 - RNA, 19 nt, Artificial Sequence
  Description of Artificial Sequence: Synthetic oligonucleotide
ucaagaucgguucaucaua

SEQ ID NO: 568579 - RNA, 19 nt, Artificial Sequence
  Description of Artificial Sequence: Synthetic oligonucleotide
uuucgucaggacaggauug

SEQ ID NO: 568580 - RNA, 19 nt, Artificial Sequence
  Description of Artificial Sequence: Synthetic oligonucleotide
acgauaacaaguggucugc

SEQ ID NO: 568581 - RNA, 19 nt, Artificial Sequence
  Description of Artificial Sequence: Synthetic oligonucleotide
cuaaggugaacucggaauc

SEQ ID NO: 568582 - RNA, 19 nt, Artificial Sequence
  Description of Artificial Sequence: Synthetic oligonucleotide
agcauaucuacguuucuga

SEQ ID NO: 568583 - RNA, 19 nt, Artificial Sequence
  Description of Artificial Sequence: Synthetic oligonucleotide
cuuggugaugguucgcacg

SEQ ID NO: 568584 - RNA, 19 nt, Artificial Sequence
  Description of Artificial Sequence: Synthetic oligonucleotide
ugcuacaacuaaaucuucu

SEQ ID NO: 568585 - RNA, 19 nt, Artificial Sequence
  Description of Artificial Sequence: Synthetic oligonucleotide
cuugggguuaacaucagca

SEQ ID NO: 568586 - RNA, 19 nt, Artificial Sequence
  Description of Artificial Sequence: Synthetic oligonucleotide
agcauagccuccucuacag

SEQ ID NO: 568587 - RNA, 19 nt, Artificial Sequence
  Description of Artificial Sequence: Synthetic oligonucleotide
agaugacuaggguacagca

SEQ ID NO: 568588 - RNA, 19 nt, Artificial Sequence
  Description of Artificial Sequence: Synthetic oligonucleotide
agagacguugucaagacgu

SEQ ID NO: 568589 - RNA, 19 nt, Artificial Sequence
  Description of Artificial Sequence: Synthetic oligonucleotide
ugaugguucgcacggugcc

SEQ ID NO: 568590 - RNA, 19 nt, Artificial Sequence
  Description of Artificial Sequence: Synthetic oligonucleotide
aaaaugcucuaaggcgagc

SEQ ID NO: 568591 - RNA, 19 nt, Artificial Sequence
  Description of Artificial Sequence: Synthetic oligonucleotide
gacguugucaagacguucc

SEQ ID NO: 568592 - RNA, 19 nt, Artificial Sequence
  Description of Artificial Sequence: Synthetic oligonucleotide
ucggaaucuucauccaaag

SEQ ID NO: 568593 - RNA, 19 nt, Artificial Sequence
  Description of Artificial Sequence: Synthetic oligonucleotide
uauccugaacugcagccca

SEQ ID NO: 568594 - RNA, 19 nt, Artificial Sequence
  Description of Artificial Sequence: Synthetic oligonucleotide
uacaccuugggguuaacau

SEQ ID NO: 568595 - RNA, 19 nt, Artificial Sequence
  Description of Artificial Sequence: Synthetic oligonucleotide
ucuccuuuugacagcuuug

SEQ ID NO: 568596 - RNA, 19 nt, Artificial Sequence
  Description of Artificial Sequence: Synthetic oligonucleotide
acaagugaauaaauaagca

SEQ ID NO: 568597 - RNA, 19 nt, Artificial Sequence
  Description of Artificial Sequence: Synthetic oligonucleotide
agaaaugcaugaaugauua

SEQ ID NO: 568598 - RNA, 19 nt, Artificial Sequence
  Description of Artificial Sequence: Synthetic oligonucleotide
ucgcuaagcauaucuacgu

SEQ ID NO: 568599 - RNA, 19 nt, Artificial Sequence
  Description of Artificial Sequence: Synthetic oligonucleotide
cucgucaccuuccaauucc

SEQ ID NO: 568600 - RNA, 19 nt, Artificial Sequence
  Description of Artificial Sequence: Synthetic oligonucleotide
cucauugggcacuugcuug

SEQ ID NO: 568601 - RNA, 19 nt, Artificial Sequence
  Description of Artificial Sequence: Synthetic oligonucleotide
uauaugcgcacaccucacc

SEQ ID NO: 568602 - RNA, 19 nt, Artificial Sequence
  Description of Artificial Sequence: Synthetic oligonucleotide
aggagugugagagacguug

SEQ ID NO: 568603 - RNA, 19 nt, Artificial Sequence
  Description of Artificial Sequence: Synthetic oligonucleotide
acaaauguguuaucgggua

SEQ ID NO: 568604 - RNA, 19 nt, Artificial Sequence
  Description of Artificial Sequence: Synthetic oligonucleotide
auccaaagauucuccaucu

SEQ ID NO: 568605 - RNA, 19 nt, Artificial Sequence
  Description of Artificial Sequence: Synthetic oligonucleotide
cuacgcaaacuccacacac

SEQ ID NO: 568606 - RNA, 19 nt, Artificial Sequence
  Description of Artificial Sequence: Synthetic oligonucleotide
ugagagacguugucaagac

SEQ ID NO: 568607 - RNA, 19 nt, Artificial Sequence
  Description of Artificial Sequence: Synthetic oligonucleotide
ucugaacgucuuuuguccc

SEQ ID NO: 568608 - RNA, 19 nt, Artificial Sequence
  Description of Artificial Sequence: Synthetic oligonucleotide
uacguuucugaagauggug

SEQ ID NO: 568609 - RNA, 19 nt, Artificial Sequence
  Description of Artificial Sequence: Synthetic oligonucleotide
acuuggaaaugguuagaug

SEQ ID NO: 568610 - RNA, 19 nt, Artificial Sequence
  Description of Artificial Sequence: Synthetic oligonucleotide
cacacacuacgcaaacucc

SEQ ID NO: 568611 - RNA, 19 nt, Artificial Sequence
  Description of Artificial Sequence: Synthetic oligonucleotide
acaaaagacauaggcuguc

SEQ ID NO: 568612 - RNA, 19 nt, Artificial Sequence
  Description of Artificial Sequence: Synthetic oligonucleotide
gaugacuaggguacagcag

SEQ ID NO: 568613 - RNA, 19 nt, Artificial Sequence
  Description of Artificial Sequence: Synthetic oligonucleotide
cacuacgcaaacuccacac

SEQ ID NO: 568614 - RNA, 19 nt, Artificial Sequence
  Description of Artificial Sequence: Synthetic oligonucleotide
uacacggcuggucacugug

SEQ ID NO: 568615 - RNA, 19 nt, Artificial Sequence
  Description of Artificial Sequence: Synthetic oligonucleotide
caucugaacgucuuuuguc

SEQ ID NO: 568616 - RNA, 19 nt, Artificial Sequence
  Description of Artificial Sequence: Synthetic oligonucleotide
auguguuaucggguaaggc

SEQ ID NO: 568617 - RNA, 19 nt, Artificial Sequence
  Description of Artificial Sequence: Synthetic oligonucleotide
uucuauaugcgcacaccuc

SEQ ID NO: 568618 - RNA, 19 nt, Artificial Sequence
  Description of Artificial Sequence: Synthetic oligonucleotide
auaugcgcacaccucaccu

SEQ ID NO: 568619 - RNA, 19 nt, Artificial Sequence
  Description of Artificial Sequence: Synthetic oligonucleotide
aaaacaccguauucaguua

SEQ ID NO: 568620 - RNA, 19 nt, Artificial Sequence
  Description of Artificial Sequence: Synthetic oligonucleotide
guguuaucggguaaggcug

SEQ ID NO: 568621 - RNA, 19 nt, Artificial Sequence
  Description of Artificial Sequence: Synthetic oligonucleotide
cuagcacaaaagacauagg

SEQ ID NO: 568622 - RNA, 19 nt, Artificial Sequence
  Description of Artificial Sequence: Synthetic oligonucleotide
uucgucaggacaggauugg

SEQ ID NO: 568623 - RNA, 19 nt, Artificial Sequence
  Description of Artificial Sequence: Synthetic oligonucleotide
gagagacguugucaagacg

SEQ ID NO: 568624 - RNA, 19 nt, Artificial Sequence
  Description of Artificial Sequence: Synthetic oligonucleotide
uguuaucggguaaggcuga

SEQ ID NO: 568625 - RNA, 19 nt, Artificial Sequence
  Description of Artificial Sequence: Synthetic oligonucleotide
aaugcucuaaggcgagcau

SEQ ID NO: 568626 - RNA, 19 nt, Artificial Sequence
  Description of Artificial Sequence: Synthetic oligonucleotide
acuauucuguacaaauuga

SEQ ID NO: 568627 - RNA, 19 nt, Artificial Sequence
  Description of Artificial Sequence: Synthetic oligonucleotide
cuggcuacccguguaaaag

SEQ ID NO: 568628 - RNA, 19 nt, Artificial Sequence
  Description of Artificial Sequence: Synthetic oligonucleotide
aguagaggacagcccgugg

SEQ ID NO: 568629 - RNA, 19 nt, Artificial Sequence
  Description of Artificial Sequence: Synthetic oligonucleotide
ucaagacguuccugcaaag

SEQ ID NO: 568630 - RNA, 19 nt, Artificial Sequence
  Description of Artificial Sequence: Synthetic oligonucleotide
uggcacgauucgcucacgg

SEQ ID NO: 568631 - RNA, 19 nt, Artificial Sequence
  Description of Artificial Sequence: Synthetic oligonucleotide
aacuggucaccaaacccag

SEQ ID NO: 568632 - RNA, 19 nt, Artificial Sequence
  Description of Artificial Sequence: Synthetic oligonucleotide
ucauucucacugugccacg

SEQ ID NO: 568633 - RNA, 19 nt, Artificial Sequence
  Description of Artificial Sequence: Synthetic oligonucleotide
cugacuccgcaucuguggg

SEQ ID NO: 568634 - RNA, 19 nt, Artificial Sequence
  Description of Artificial Sequence: Synthetic oligonucleotide
acagccguccacaaggcag

SEQ ID NO: 568635 - RNA, 19 nt, Artificial Sequence
  Description of Artificial Sequence: Synthetic oligonucleotide
aucggguaaggcugagcac

SEQ ID NO: 568636 - RNA, 19 nt, Artificial Sequence
  Description of Artificial Sequence: Synthetic oligonucleotide
auauucuaacuauucugua

SEQ ID NO: 568637 - RNA, 19 nt, Artificial Sequence
  Description of Artificial Sequence: Synthetic oligonucleotide
ucuaacuauucuguacaaa

SEQ ID NO: 568638 - RNA, 19 nt, Artificial Sequence
  Description of Artificial Sequence: Synthetic oligonucleotide
aaguagaggacagcccgug

SEQ ID NO: 568639 - RNA, 19 nt, Artificial Sequence
  Description of Artificial Sequence: Synthetic oligonucleotide
cuuguauguuuucgucagg

SEQ ID NO: 568640 - RNA, 19 nt, Artificial Sequence
  Description of Artificial Sequence: Synthetic oligonucleotide
agggucugaaaacuucacu

SEQ ID NO: 568641 - RNA, 19 nt, Artificial Sequence
  Description of Artificial Sequence: Synthetic oligonucleotide
aagugaaacucuagcacaa

SEQ ID NO: 568642 - RNA, 19 nt, Artificial Sequence
  Description of Artificial Sequence: Synthetic oligonucleotide
uaagcacaagggugaacca

SEQ ID NO: 568643 - RNA, 19 nt, Artificial Sequence
  Description of Artificial Sequence: Synthetic oligonucleotide
aggcaacgauaacaagugg

SEQ ID NO: 568644 - RNA, 19 nt, Artificial Sequence
  Description of Artificial Sequence: Synthetic oligonucleotide
uugucaagacguuccugca

SEQ ID NO: 568645 - RNA, 19 nt, Artificial Sequence
  Description of Artificial Sequence: Synthetic oligonucleotide
uaaggugaacucggaaucu

SEQ ID NO: 568646 - RNA, 19 nt, Artificial Sequence
  Description of Artificial Sequence: Synthetic oligonucleotide
augguucgcacggugcccc

SEQ ID NO: 568647 - RNA, 19 nt, Artificial Sequence
  Description of Artificial Sequence: Synthetic oligonucleotide
uacgugguuuucaggcacc

SEQ ID NO: 568648 - RNA, 19 nt, Artificial Sequence
  Description of Artificial Sequence: Synthetic oligonucleotide
cuauccugaacugcagccc

SEQ ID NO: 568649 - RNA, 19 nt, Artificial Sequence
  Description of Artificial Sequence: Synthetic oligonucleotide
cuacgugguuuucaggcac

SEQ ID NO: 568650 - RNA, 19 nt, Artificial Sequence
  Description of Artificial Sequence: Synthetic oligonucleotide
cuaaggcgagcauagccuc

SEQ ID NO: 568651 - RNA, 19 nt, Artificial Sequence
  Description of Artificial Sequence: Synthetic oligonucleotide
cuauaugcgcacaccucac

SEQ ID NO: 568652 - RNA, 19 nt, Artificial Sequence
  Description of Artificial Sequence: Synthetic oligonucleotide
gcacagugcaagcugaagc

SEQ ID NO: 568653 - RNA, 19 nt, Artificial Sequence
  Description of Artificial Sequence: Synthetic oligonucleotide
acuacgcaaacuccacaca

SEQ ID NO: 568654 - RNA, 19 nt, Artificial Sequence
  Description of Artificial Sequence: Synthetic oligonucleotide
cucagcuauaacuacuuua

SEQ ID NO: 568655 - RNA, 19 nt, Artificial Sequence
  Description of Artificial Sequence: Synthetic oligonucleotide
cacacuacgcaaacuccac

SEQ ID NO: 568656 - RNA, 19 nt, Artificial Sequence
  Description of Artificial Sequence: Synthetic oligonucleotide
cccuacgugguuuucaggc

SEQ ID NO: 568657 - RNA, 19 nt, Artificial Sequence
  Description of Artificial Sequence: Synthetic oligonucleotide
acucuagcacaaaagacau

SEQ ID NO: 568658 - RNA, 19 nt, Artificial Sequence
  Description of Artificial Sequence: Synthetic oligonucleotide
ccguguaaaagcucgcucc

SEQ ID NO: 568659 - RNA, 19 nt, Artificial Sequence
  Description of Artificial Sequence: Synthetic oligonucleotide
auagaauauucuaacuauu

SEQ ID NO: 568660 - RNA, 19 nt, Artificial Sequence
  Description of Artificial Sequence: Synthetic oligonucleotide
ucagggucgcugcuucuca

SEQ ID NO: 568661 - RNA, 19 nt, Artificial Sequence
  Description of Artificial Sequence: Synthetic oligonucleotide
aagcacaagugaauaaaua

SEQ ID NO: 568662 - RNA, 19 nt, Artificial Sequence
  Description of Artificial Sequence: Synthetic oligonucleotide
caagacguuccugcaaagc

SEQ ID NO: 568663 - RNA, 19 nt, Artificial Sequence
  Description of Artificial Sequence: Synthetic oligonucleotide
aaauaagcacaagggugaa

SEQ ID NO: 568664 - RNA, 19 nt, Artificial Sequence
  Description of Artificial Sequence: Synthetic oligonucleotide
caaauugaaaacaccguau

SEQ ID NO: 568665 - RNA, 19 nt, Artificial Sequence
  Description of Artificial Sequence: Synthetic oligonucleotide
gaucaguagcuggaaacca

SEQ ID NO: 568666 - RNA, 19 nt, Artificial Sequence
  Description of Artificial Sequence: Synthetic oligonucleotide
gucccaguugccaaagacc

SEQ ID NO: 568667 - RNA, 19 nt, Artificial Sequence
  Description of Artificial Sequence: Synthetic oligonucleotide
agacguugucaagacguuc

SEQ ID NO: 568668 - RNA, 19 nt, Artificial Sequence
  Description of Artificial Sequence: Synthetic oligonucleotide
ugaagaucaguagcuggaa

SEQ ID NO: 568669 - RNA, 19 nt, Artificial Sequence
  Description of Artificial Sequence: Synthetic oligonucleotide
cuauguagcuagaaggagu

SEQ ID NO: 568670 - RNA, 19 nt, Artificial Sequence
  Description of Artificial Sequence: Synthetic oligonucleotide
caagcugaagcucuguucu

SEQ ID NO: 568671 - RNA, 19 nt, Artificial Sequence
  Description of Artificial Sequence: Synthetic oligonucleotide
gugagagacguugucaaga

SEQ ID NO: 568672 - RNA, 19 nt, Artificial Sequence
  Description of Artificial Sequence: Synthetic oligonucleotide
ugcggcacuggcuacccgu

SEQ ID NO: 568673 - RNA, 19 nt, Artificial Sequence
  Description of Artificial Sequence: Synthetic oligonucleotide
cugguacaaggcugcauac

SEQ ID NO: 568674 - RNA, 19 nt, Artificial Sequence
  Description of Artificial Sequence: Synthetic oligonucleotide
uuugacagcuuuggguaaa

SEQ ID NO: 568675 - RNA, 19 nt, Artificial Sequence
  Description of Artificial Sequence: Synthetic oligonucleotide
ugcuuggugaugguucgca

SEQ ID NO: 568676 - RNA, 19 nt, Artificial Sequence
  Description of Artificial Sequence: Synthetic oligonucleotide
uguuuucgucaggacagga

SEQ ID NO: 568677 - RNA, 19 nt, Artificial Sequence
  Description of Artificial Sequence: Synthetic oligonucleotide
acacuacgcaaacuccaca

SEQ ID NO: 568678 - RNA, 19 nt, Artificial Sequence
  Description of Artificial Sequence: Synthetic oligonucleotide
aggucgugaacuuccucgu

SEQ ID NO: 568679 - RNA, 19 nt, Artificial Sequence
  Description of Artificial Sequence: Synthetic oligonucleotide
ggacucauugggcacuugc

SEQ ID NO: 568680 - RNA, 19 nt, Artificial Sequence
  Description of Artificial Sequence: Synthetic oligonucleotide
aacaccguauucaguuaca

SEQ ID NO: 568681 - RNA, 19 nt, Artificial Sequence
  Description of Artificial Sequence: Synthetic oligonucleotide
auuguacacccaucacagu

SEQ ID NO: 568682 - RNA, 19 nt, Artificial Sequence
  Description of Artificial Sequence: Synthetic oligonucleotide
guagcuagaaggaguguga

SEQ ID NO: 568683 - RNA, 19 nt, Artificial Sequence
  Description of Artificial Sequence: Synthetic oligonucleotide
aaggcgagcauagccuccu

SEQ ID NO: 568684 - RNA, 19 nt, Artificial Sequence
  Description of Artificial Sequence: Synthetic oligonucleotide
cuucaguaggggagggcug

SEQ ID NO: 568685 - RNA, 19 nt, Artificial Sequence
  Description of Artificial Sequence: Synthetic oligonucleotide
ccguauucaguuacaaaug

SEQ ID NO: 568686 - RNA, 19 nt, Artificial Sequence
  Description of Artificial Sequence: Synthetic oligonucleotide
cagccguccacaaggcagc

SEQ ID NO: 568687 - RNA, 19 nt, Artificial Sequence
  Description of Artificial Sequence: Synthetic oligonucleotide
ucuacacggcuggucacug

SEQ ID NO: 568688 - RNA, 19 nt, Artificial Sequence
  Description of Artificial Sequence: Synthetic oligonucleotide
ucuguucuacaggccagca

SEQ ID NO: 568689 - RNA, 19 nt, Artificial Sequence
  Description of Artificial Sequence: Synthetic oligonucleotide
uuaucggguaaggcugagc

SEQ ID NO: 568690 - RNA, 19 nt, Artificial Sequence
  Description of Artificial Sequence: Synthetic oligonucleotide
ugacuccgcaucugugggc

SEQ ID NO: 568691 - RNA, 19 nt, Artificial Sequence
  Description of Artificial Sequence: Synthetic oligonucleotide
ggauuggugaaguagucgu

SEQ ID NO: 568692 - RNA, 19 nt, Artificial Sequence
  Description of Artificial Sequence: Synthetic oligonucleotide
gcugagcacgcucuacacg

SEQ ID NO: 568693 - RNA, 19 nt, Artificial Sequence
  Description of Artificial Sequence: Synthetic oligonucleotide
cauucucacugugccacgc

SEQ ID NO: 568694 - RNA, 19 nt, Artificial Sequence
  Description of Artificial Sequence: Synthetic oligonucleotide
cacuccgcuggcuggcugg

SEQ ID NO: 568695 - RNA, 19 nt, Artificial Sequence
  Description of Artificial Sequence: Synthetic oligonucleotide
acggcuggucacuguggac

SEQ ID NO: 568696 - RNA, 19 nt, Artificial Sequence
  Description of Artificial Sequence: Synthetic oligonucleotide
gcucgcuaagcauaucuac

SEQ ID NO: 568697 - RNA, 19 nt, Artificial Sequence
  Description of Artificial Sequence: Synthetic oligonucleotide
augcacuuggaaaugguua

SEQ ID NO: 568698 - RNA, 19 nt, Artificial Sequence
  Description of Artificial Sequence: Synthetic oligonucleotide
gugugugccacaacccacc

SEQ ID NO: 568699 - RNA, 19 nt, Artificial Sequence
  Description of Artificial Sequence: Synthetic oligonucleotide
cacagugcaagcugaagcu

SEQ ID NO: 568700 - RNA, 19 nt, Artificial Sequence
  Description of Artificial Sequence: Synthetic oligonucleotide
acguugucaagacguuccu

SEQ ID NO: 568701 - RNA, 19 nt, Artificial Sequence
  Description of Artificial Sequence: Synthetic oligonucleotide
gugaugguucgcacggugc

SEQ ID NO: 568702 - RNA, 19 nt, Artificial Sequence
  Description of Artificial Sequence: Synthetic oligonucleotide
caggugcuacaacuaaauc

SEQ ID NO: 568703 - RNA, 19 nt, Artificial Sequence
  Description of Artificial Sequence: Synthetic oligonucleotide
gggugaaccagacagcucu

SEQ ID NO: 568704 - RNA, 19 nt, Artificial Sequence
  Description of Artificial Sequence: Synthetic oligonucleotide
guuucaagaucgguucauc

SEQ ID NO: 568705 - RNA, 19 nt, Artificial Sequence
  Description of Artificial Sequence: Synthetic oligonucleotide
gcuacaacuaaaucuucua

SEQ ID NO: 568706 - RNA, 19 nt, Artificial Sequence
  Description of Artificial Sequence: Synthetic oligonucleotide
uaucuacguuucugaagau

SEQ ID NO: 568707 - RNA, 19 nt, Artificial Sequence
  Description of Artificial Sequence: Synthetic oligonucleotide
acgauucgcucacggaaaa

SEQ ID NO: 568708 - RNA, 19 nt, Artificial Sequence
  Description of Artificial Sequence: Synthetic oligonucleotide
cuagaaaugcaugaaugau

SEQ ID NO: 568709 - RNA, 19 nt, Artificial Sequence
  Description of Artificial Sequence: Synthetic oligonucleotide
gcaagcugaagcucuguuc

SEQ ID NO: 568710 - RNA, 19 nt, Artificial Sequence
  Description of Artificial Sequence: Synthetic oligonucleotide
gacuaggguacagcagcug

SEQ ID NO: 568711 - RNA, 19 nt, Artificial Sequence
  Description of Artificial Sequence: Synthetic oligonucleotide
caaaaucaccaggcucugc

SEQ ID NO: 568712 - RNA, 19 nt, Artificial Sequence
  Description of Artificial Sequence: Synthetic oligonucleotide
uccccucgcgccuccugcg

SEQ ID NO: 568713 - RNA, 19 nt, Artificial Sequence
  Description of Artificial Sequence: Synthetic oligonucleotide
acagcccguggcacgauuc

SEQ ID NO: 568714 - RNA, 19 nt, Artificial Sequence
  Description of Artificial Sequence: Synthetic oligonucleotide
caaauguguuaucggguaa

SEQ ID NO: 568715 - RNA, 19 nt, Artificial Sequence
  Description of Artificial Sequence: Synthetic oligonucleotide
ggugcuacaacuaaaucuu

SEQ ID NO: 568716 - RNA, 19 nt, Artificial Sequence
  Description of Artificial Sequence: Synthetic oligonucleotide
cagcccguggcacgauucg

SEQ ID NO: 568717 - RNA, 19 nt, Artificial Sequence
  Description of Artificial Sequence: Synthetic oligonucleotide
ucuguauuacuggcauuuu

SEQ ID NO: 568718 - RNA, 19 nt, Artificial Sequence
  Description of Artificial Sequence: Synthetic oligonucleotide
cacgauucgcucacggaaa

SEQ ID NO: 568719 - RNA, 19 nt, Artificial Sequence
  Description of Artificial Sequence: Synthetic oligonucleotide
gcuaaggugaacucggaau

SEQ ID NO: 568720 - RNA, 19 nt, Artificial Sequence
  Description of Artificial Sequence: Synthetic oligonucleotide
gcuucuauaugcgcacacc

SEQ ID NO: 568721 - RNA, 19 nt, Artificial Sequence
  Description of Artificial Sequence: Synthetic oligonucleotide
gcugguacaaggcugcaua

SEQ ID NO: 568722 - RNA, 19 nt, Artificial Sequence
  Description of Artificial Sequence: Synthetic oligonucleotide
gcacgauucgcucacggaa

SEQ ID NO: 568723 - RNA, 19 nt, Artificial Sequence
  Description of Artificial Sequence: Synthetic oligonucleotide
acaccguauucaguuacaa

SEQ ID NO: 568724 - RNA, 19 nt, Artificial Sequence
  Description of Artificial Sequence: Synthetic oligonucleotide
caggugugacccuggugug

SEQ ID NO: 568725 - RNA, 19 nt, Artificial Sequence
  Description of Artificial Sequence: Synthetic oligonucleotide
caagaucgguucaucauau

SEQ ID NO: 568726 - RNA, 19 nt, Artificial Sequence
  Description of Artificial Sequence: Synthetic oligonucleotide
agugaaacucuagcacaaa

SEQ ID NO: 568727 - RNA, 19 nt, Artificial Sequence
  Description of Artificial Sequence: Synthetic oligonucleotide
guuaucggguaaggcugag

SEQ ID NO: 568728 - RNA, 19 nt, Artificial Sequence
  Description of Artificial Sequence: Synthetic oligonucleotide
gacagccguccacaaggca

SEQ ID NO: 568729 - RNA, 19 nt, Artificial Sequence
  Description of Artificial Sequence: Synthetic oligonucleotide
acacggcuggucacugugg

SEQ ID NO: 568730 - RNA, 19 nt, Artificial Sequence
  Description of Artificial Sequence: Synthetic oligonucleotide
ggcaacgauaacaaguggu

SEQ ID NO: 568731 - RNA, 19 nt, Artificial Sequence
  Description of Artificial Sequence: Synthetic oligonucleotide
acgcucuacacggcugguc

SEQ ID NO: 568732 - RNA, 19 nt, Artificial Sequence
  Description of Artificial Sequence: Synthetic oligonucleotide
uguccccucgcgccuccug

SEQ ID NO: 568733 - RNA, 19 nt, Artificial Sequence
  Description of Artificial Sequence: Synthetic oligonucleotide
acccguguaaaagcucgcu

SEQ ID NO: 568734 - RNA, 19 nt, Artificial Sequence
  Description of Artificial Sequence: Synthetic oligonucleotide
gacucauugggcacuugcu

SEQ ID NO: 568735 - RNA, 19 nt, Artificial Sequence
  Description of Artificial Sequence: Synthetic oligonucleotide
cagucaauuguacacccau

SEQ ID NO: 568736 - RNA, 19 nt, Artificial Sequence
  Description of Artificial Sequence: Synthetic oligonucleotide
agccguccacaaggcagcc

SEQ ID NO: 568737 - RNA, 19 nt, Artificial Sequence
  Description of Artificial Sequence: Synthetic oligonucleotide
caccguauucaguuacaaa

SEQ ID NO: 568738 - RNA, 19 nt, Artificial Sequence
  Description of Artificial Sequence: Synthetic oligonucleotide
guccccucgcgccuccugc

SEQ ID NO: 568739 - RNA, 19 nt, Artificial Sequence
  Description of Artificial Sequence: Synthetic oligonucleotide
aaggacucauugggcacuu

SEQ ID NO: 568740 - RNA, 19 nt, Artificial Sequence
  Description of Artificial Sequence: Synthetic oligonucleotide
accaaccaacuggucacca

SEQ ID NO: 568741 - RNA, 19 nt, Artificial Sequence
  Description of Artificial Sequence: Synthetic oligonucleotide
gguccugacagccguccac

SEQ ID NO: 568742 - RNA, 19 nt, Artificial Sequence
  Description of Artificial Sequence: Synthetic oligonucleotide
cagcucgcuaagcauaucu

SEQ ID NO: 568743 - RNA, 19 nt, Artificial Sequence
  Description of Artificial Sequence: Synthetic oligonucleotide
cagggucgcugcuucucac

SEQ ID NO: 568744 - RNA, 19 nt, Artificial Sequence
  Description of Artificial Sequence: Synthetic oligonucleotide
cgucuuuuguccccucgcg

SEQ ID NO: 568745 - RNA, 19 nt, Artificial Sequence
  Description of Artificial Sequence: Synthetic oligonucleotide
gcuaagcauaucuacguuu

SEQ ID NO: 568746 - RNA, 19 nt, Artificial Sequence
  Description of Artificial Sequence: Synthetic oligonucleotide
caacgauaacaaguggucu

SEQ ID NO: 568747 - RNA, 19 nt, Artificial Sequence
  Description of Artificial Sequence: Synthetic oligonucleotide
cacggcuggucacugugga

SEQ ID NO: 568748 - RNA, 19 nt, Artificial Sequence
  Description of Artificial Sequence: Synthetic oligonucleotide
acgugguuuucaggcacca

SEQ ID NO: 568749 - RNA, 19 nt, Artificial Sequence
  Description of Artificial Sequence: Synthetic oligonucleotide
ugccacgcugacuccgcau

SEQ ID NO: 568750 - RNA, 19 nt, Artificial Sequence
  Description of Artificial Sequence: Synthetic oligonucleotide
cuuguggguucugcaucac

SEQ ID NO: 568751 - RNA, 19 nt, Artificial Sequence
  Description of Artificial Sequence: Synthetic oligonucleotide
gugcuacaacuaaaucuuc

SEQ ID NO: 568752 - RNA, 19 nt, Artificial Sequence
  Description of Artificial Sequence: Synthetic oligonucleotide
cuguucuacaggccagcaa

SEQ ID NO: 568753 - RNA, 19 nt, Artificial Sequence
  Description of Artificial Sequence: Synthetic oligonucleotide
ggugugacccuggugugca

SEQ ID NO: 568754 - RNA, 19 nt, Artificial Sequence
  Description of Artificial Sequence: Synthetic oligonucleotide
aaguagucguuggguucaa

SEQ ID NO: 568755 - RNA, 19 nt, Artificial Sequence
  Description of Artificial Sequence: Synthetic oligonucleotide
cuacguuucugaagauggu

SEQ ID NO: 568756 - RNA, 19 nt, Artificial Sequence
  Description of Artificial Sequence: Synthetic oligonucleotide
cacaacccacccagcccug

SEQ ID NO: 568757 - RNA, 19 nt, Artificial Sequence
  Description of Artificial Sequence: Synthetic oligonucleotide
agcucgcuaagcauaucua

SEQ ID NO: 568758 - RNA, 19 nt, Artificial Sequence
  Description of Artificial Sequence: Synthetic oligonucleotide
gaaaacgggucagccuugu

SEQ ID NO: 568759 - RNA, 19 nt, Artificial Sequence
  Description of Artificial Sequence: Synthetic oligonucleotide
cacgcugacuccgcaucug

SEQ ID NO: 568760 - RNA, 19 nt, Artificial Sequence
  Description of Artificial Sequence: Synthetic oligonucleotide
gagcacgcucuacacggcu

SEQ ID NO: 568761 - RNA, 19 nt, Artificial Sequence
  Description of Artificial Sequence: Synthetic oligonucleotide
acccuccagaggcaacgau

SEQ ID NO: 568762 - RNA, 19 nt, Artificial Sequence
  Description of Artificial Sequence: Synthetic oligonucleotide
ccugacagccguccacaag

SEQ ID NO: 568763 - RNA, 19 nt, Artificial Sequence
  Description of Artificial Sequence: Synthetic oligonucleotide
gccacgcugacuccgcauc

SEQ ID NO: 568764 - RNA, 19 nt, Artificial Sequence
  Description of Artificial Sequence: Synthetic oligonucleotide
ccuacgugguuuucaggca

SEQ ID NO: 568765 - RNA, 19 nt, Artificial Sequence
  Description of Artificial Sequence: Synthetic oligonucleotide
cucuagcacaaaagacaua

SEQ ID NO: 568766 - RNA, 19 nt, Artificial Sequence
  Description of Artificial Sequence: Synthetic oligonucleotide
guggcacgauucgcucacg

SEQ ID NO: 568767 - RNA, 19 nt, Artificial Sequence
  Description of Artificial Sequence: Synthetic oligonucleotide
cagugcuugggagaugacu

SEQ ID NO: 568768 - RNA, 19 nt, Artificial Sequence
  Description of Artificial Sequence: Synthetic oligonucleotide
aggcuaaggugaacucgga

SEQ ID NO: 568769 - RNA, 19 nt, Artificial Sequence
  Description of Artificial Sequence: Synthetic oligonucleotide
aguagucguuggguucaaa

SEQ ID NO: 568770 - RNA, 19 nt, Artificial Sequence
  Description of Artificial Sequence: Synthetic oligonucleotide
cugcggcacuggcuacccg

SEQ ID NO: 568771 - RNA, 19 nt, Artificial Sequence
  Description of Artificial Sequence: Synthetic oligonucleotide
ugccccgacccuugugcuu

SEQ ID NO: 568772 - RNA, 19 nt, Artificial Sequence
  Description of Artificial Sequence: Synthetic oligonucleotide
gcuacccguguaaaagcuc

SEQ ID NO: 568773 - RNA, 19 nt, Artificial Sequence
  Description of Artificial Sequence: Synthetic oligonucleotide
ccccuacgugguuuucagg

SEQ ID NO: 568774 - RNA, 19 nt, Artificial Sequence
  Description of Artificial Sequence: Synthetic oligonucleotide
ccucgucaccuuccaauuc

SEQ ID NO: 568775 - RNA, 19 nt, Artificial Sequence
  Description of Artificial Sequence: Synthetic oligonucleotide
aggacucauugggcacuug

SEQ ID NO: 568776 - RNA, 19 nt, Artificial Sequence
  Description of Artificial Sequence: Synthetic oligonucleotide
cccuacaugagggaggacu

SEQ ID NO: 568777 - RNA, 19 nt, Artificial Sequence
  Description of Artificial Sequence: Synthetic oligonucleotide
gcucuaaggcgagcauagc

SEQ ID NO: 568778 - RNA, 19 nt, Artificial Sequence
  Description of Artificial Sequence: Synthetic oligonucleotide
gagacguugucaagacguu

SEQ ID NO: 568779 - RNA, 19 nt, Artificial Sequence
  Description of Artificial Sequence: Synthetic oligonucleotide
cgcucuacacggcugguca

SEQ ID NO: 568780 - RNA, 19 nt, Artificial Sequence
  Description of Artificial Sequence: Synthetic oligonucleotide
acggugccccgacccuugu

SEQ ID NO: 568781 - RNA, 19 nt, Artificial Sequence
  Description of Artificial Sequence: Synthetic oligonucleotide
gccucagaggugugugcca

SEQ ID NO: 568782 - RNA, 19 nt, Artificial Sequence
  Description of Artificial Sequence: Synthetic oligonucleotide
ccaucugaacgucuuuugu

SEQ ID NO: 568783 - RNA, 19 nt, Artificial Sequence
  Description of Artificial Sequence: Synthetic oligonucleotide
ggcuacccguguaaaagcu

SEQ ID NO: 568784 - RNA, 19 nt, Artificial Sequence
  Description of Artificial Sequence: Synthetic oligonucleotide
gugccacgcugacuccgca

SEQ ID NO: 568785 - RNA, 19 nt, Artificial Sequence
  Description of Artificial Sequence: Synthetic oligonucleotide
ccauggggccucuucagua

SEQ ID NO: 568786 - RNA, 19 nt, Artificial Sequence
  Description of Artificial Sequence: Synthetic oligonucleotide
cccguggcacgauucgcuc

SEQ ID NO: 568787 - RNA, 19 nt, Artificial Sequence
  Description of Artificial Sequence: Synthetic oligonucleotide
ccacaacccacccagcccu

SEQ ID NO: 568788 - RNA, 19 nt, Artificial Sequence
  Description of Artificial Sequence: Synthetic oligonucleotide
ggucgugaacuuccucgua

SEQ ID NO: 568789 - RNA, 19 nt, Artificial Sequence
  Description of Artificial Sequence: Synthetic oligonucleotide
cagcuauaacuacuuuauu

SEQ ID NO: 568790 - RNA, 19 nt, Artificial Sequence
  Description of Artificial Sequence: Synthetic oligonucleotide
ccugcggcacuggcuaccc

SEQ ID NO: 568791 - RNA, 19 nt, Artificial Sequence
  Description of Artificial Sequence: Synthetic oligonucleotide
ggacaggauuggugaagua

SEQ ID NO: 568792 - RNA, 19 nt, Artificial Sequence
  Description of Artificial Sequence: Synthetic oligonucleotide
cguugucaagacguuccug

SEQ ID NO: 568793 - RNA, 19 nt, Artificial Sequence
  Description of Artificial Sequence: Synthetic oligonucleotide
ccuacaugagggaggacuu

SEQ ID NO: 568794 - RNA, 19 nt, Artificial Sequence
  Description of Artificial Sequence: Synthetic oligonucleotide
gugccccgacccuugugcu

SEQ ID NO: 568795 - RNA, 19 nt, Artificial Sequence
  Description of Artificial Sequence: Synthetic oligonucleotide
gcggcacuggcuacccgug

SEQ ID NO: 568796 - RNA, 19 nt, Artificial Sequence
  Description of Artificial Sequence: Synthetic oligonucleotide
ccccucgcgccuccugcgg

SEQ ID NO: 568797 - RNA, 19 nt, Artificial Sequence
  Description of Artificial Sequence: Synthetic oligonucleotide
gccguccacaaggcagccc

SEQ ID NO: 568798 - RNA, 19 nt, Artificial Sequence
  Description of Artificial Sequence: Synthetic oligonucleotide
cgauaacaaguggucugca

SEQ ID NO: 568799 - RNA, 19 nt, Artificial Sequence
  Description of Artificial Sequence: Synthetic oligonucleotide
gcccguggcacgauucgcu

SEQ ID NO: 568800 - RNA, 19 nt, Artificial Sequence
  Description of Artificial Sequence: Synthetic oligonucleotide
ccccuggcuacagccugac

SEQ ID NO: 568801 - RNA, 19 nt, Artificial Sequence
  Description of Artificial Sequence: Synthetic oligonucleotide
ccagcucgcuaagcauauc

SEQ ID NO: 568802 - RNA, 19 nt, Artificial Sequence
  Description of Artificial Sequence: Synthetic oligonucleotide
cacgcucuacacggcuggu

SEQ ID NO: 568803 - RNA, 19 nt, Artificial Sequence
  Description of Artificial Sequence: Synthetic oligonucleotide
ccacgcugacuccgcaucu

SEQ ID NO: 568804 - RNA, 19 nt, Artificial Sequence
  Description of Artificial Sequence: Synthetic oligonucleotide
ccucuauggccuccccagu

SEQ ID NO: 568805 - RNA, 19 nt, Artificial Sequence
  Description of Artificial Sequence: Synthetic oligonucleotide
cgcuaagcauaucuacguu

SEQ ID NO: 568806 - RNA, 19 nt, Artificial Sequence
  Description of Artificial Sequence: Synthetic oligonucleotide
cggugccccgacccuugug

SEQ ID NO: 568807 - RNA, 19 nt, Artificial Sequence
  Description of Artificial Sequence: Synthetic oligonucleotide
ccccuacaugagggaggac

SEQ ID NO: 568808 - RNA, 19 nt, Artificial Sequence
  Description of Artificial Sequence: Synthetic oligonucleotide
cgggucagccuugucuggu

SEQ ID NO: 568809 - RNA, 19 nt, Artificial Sequence
  Description of Artificial Sequence: Synthetic oligonucleotide
cgcacggugccccgacccu

SEQ ID NO: 568810 - RNA, 19 nt, Artificial Sequence
  Description of Artificial Sequence: Synthetic oligonucleotide
ccccgacccuugugcuucu

SEQ ID NO: 568811 - RNA, 19 nt, Artificial Sequence
  Description of Artificial Sequence: Synthetic oligonucleotide
uuugauugaauacaucugg

SEQ ID NO: 568812 - RNA, 19 nt, Artificial Sequence
  Description of Artificial Sequence: Synthetic oligonucleotide
aucuaaaguaagcugaugc

SEQ ID NO: 568813 - RNA, 19 nt, Artificial Sequence
  Description of Artificial Sequence: Synthetic oligonucleotide
agacaaaacaaccucaugg

SEQ ID NO: 568814 - RNA, 19 nt, Artificial Sequence
  Description of Artificial Sequence: Synthetic oligonucleotide
ugaauuaacaccauugaga

SEQ ID NO: 568815 - RNA, 19 nt, Artificial Sequence
  Description of Artificial Sequence: Synthetic oligonucleotide
uguaguuguaauucaaucg

SEQ ID NO: 568816 - RNA, 19 nt, Artificial Sequence
  Description of Artificial Sequence: Synthetic oligonucleotide
aaaacaaccucauggauca

SEQ ID NO: 568817 - RNA, 19 nt, Artificial Sequence
  Description of Artificial Sequence: Synthetic oligonucleotide
auaauguacacguagaaga

SEQ ID NO: 568818 - RNA, 19 nt, Artificial Sequence
  Description of Artificial Sequence: Synthetic oligonucleotide
aaacacuugauuucuauga

SEQ ID NO: 568819 - RNA, 19 nt, Artificial Sequence
  Description of Artificial Sequence: Synthetic oligonucleotide
uuggauauaaagaugguuc

SEQ ID NO: 568820 - RNA, 19 nt, Artificial Sequence
  Description of Artificial Sequence: Synthetic oligonucleotide
uuaauuuuggaaagcucgg

SEQ ID NO: 568821 - RNA, 19 nt, Artificial Sequence
  Description of Artificial Sequence: Synthetic oligonucleotide
aaacugaaccgguaucugc

SEQ ID NO: 568822 - RNA, 19 nt, Artificial Sequence
  Description of Artificial Sequence: Synthetic oligonucleotide
uuuucaaucuaaaguaagc

SEQ ID NO: 568823 - RNA, 19 nt, Artificial Sequence
  Description of Artificial Sequence: Synthetic oligonucleotide
aucacugccaugucaaacc

SEQ ID NO: 568824 - RNA, 19 nt, Artificial Sequence
  Description of Artificial Sequence: Synthetic oligonucleotide
uuguguagcauucaauugc

SEQ ID NO: 568825 - RNA, 19 nt, Artificial Sequence
  Description of Artificial Sequence: Synthetic oligonucleotide
agcaucauaaucguaagac

SEQ ID NO: 568826 - RNA, 19 nt, Artificial Sequence
  Description of Artificial Sequence: Synthetic oligonucleotide
aauaauguacacguagaag

SEQ ID NO: 568827 - RNA, 19 nt, Artificial Sequence
  Description of Artificial Sequence: Synthetic oligonucleotide
agaacaagagccuucuggg

SEQ ID NO: 568828 - RNA, 19 nt, Artificial Sequence
  Description of Artificial Sequence: Synthetic oligonucleotide
uggauauaaagaugguucg

SEQ ID NO: 568829 - RNA, 19 nt, Artificial Sequence
  Description of Artificial Sequence: Synthetic oligonucleotide
aaggcaauugccaaauuac

SEQ ID NO: 568830 - RNA, 19 nt, Artificial Sequence
  Description of Artificial Sequence: Synthetic oligonucleotide
ucgaauaggagguaaauuc

SEQ ID NO: 568831 - RNA, 19 nt, Artificial Sequence
  Description of Artificial Sequence: Synthetic oligonucleotide
aauacauuugugaucuuuc

SEQ ID NO: 568832 - RNA, 19 nt, Artificial Sequence
  Description of Artificial Sequence: Synthetic oligonucleotide
ucuuggaagaaucuuuagc

SEQ ID NO: 568833 - RNA, 19 nt, Artificial Sequence
  Description of Artificial Sequence: Synthetic oligonucleotide
gauuauacgggucagcauc

SEQ ID NO: 568834 - RNA, 19 nt, Artificial Sequence
  Description of Artificial Sequence: Synthetic oligonucleotide
ugcuugauuacucugggga

SEQ ID NO: 568835 - RNA, 19 nt, Artificial Sequence
  Description of Artificial Sequence: Synthetic oligonucleotide
uaaucguaagacuuuauuc

SEQ ID NO: 568836 - RNA, 19 nt, Artificial Sequence
  Description of Artificial Sequence: Synthetic oligonucleotide
aaucguggguguuaucuuc

SEQ ID NO: 568837 - RNA, 19 nt, Artificial Sequence
  Description of Artificial Sequence: Synthetic oligonucleotide
aaauaauguacacguagaa

SEQ ID NO: 568838 - RNA, 19 nt, Artificial Sequence
  Description of Artificial Sequence: Synthetic oligonucleotide
cuaagugacugaauaauac

SEQ ID NO: 568839 - RNA, 19 nt, Artificial Sequence
  Description of Artificial Sequence: Synthetic oligonucleotide
uucuauuuucaacacuuug

SEQ ID NO: 568840 - RNA, 19 nt, Artificial Sequence
  Description of Artificial Sequence: Synthetic oligonucleotide
gaugucggaagucagacuc

SEQ ID NO: 568841 - RNA, 19 nt, Artificial Sequence
  Description of Artificial Sequence: Synthetic oligonucleotide
auaggagccgucuaguaag

SEQ ID NO: 568842 - RNA, 19 nt, Artificial Sequence
  Description of Artificial Sequence: Synthetic oligonucleotide
gaagucauuucucacuagc

SEQ ID NO: 568843 - RNA, 19 nt, Artificial Sequence
  Description of Artificial Sequence: Synthetic oligonucleotide
uucugaaucuucagguagg

SEQ ID NO: 568844 - RNA, 19 nt, Artificial Sequence
  Description of Artificial Sequence: Synthetic oligonucleotide
uauaaagaugguucgauuu

SEQ ID NO: 568845 - RNA, 19 nt, Artificial Sequence
  Description of Artificial Sequence: Synthetic oligonucleotide
gagccgucuaguaagaugg

SEQ ID NO: 568846 - RNA, 19 nt, Artificial Sequence
  Description of Artificial Sequence: Synthetic oligonucleotide
uacugauacaacauaucug

SEQ ID NO: 568847 - RNA, 19 nt, Artificial Sequence
  Description of Artificial Sequence: Synthetic oligonucleotide
uggggaacuucucagaugu

SEQ ID NO: 568848 - RNA, 19 nt, Artificial Sequence
  Description of Artificial Sequence: Synthetic oligonucleotide
ggauuuuaaagccugauca

SEQ ID NO: 568849 - RNA, 19 nt, Artificial Sequence
  Description of Artificial Sequence: Synthetic oligonucleotide
uaagugacugaauaauaca

SEQ ID NO: 568850 - RNA, 19 nt, Artificial Sequence
  Description of Artificial Sequence: Synthetic oligonucleotide
ucuaaaguaagcugaugcu

SEQ ID NO: 568851 - RNA, 19 nt, Artificial Sequence
  Description of Artificial Sequence: Synthetic oligonucleotide
gucauuucucacuagcuag

SEQ ID NO: 568852 - RNA, 19 nt, Artificial Sequence
  Description of Artificial Sequence: Synthetic oligonucleotide
aggauuucgaagaugagag

SEQ ID NO: 568853 - RNA, 19 nt, Artificial Sequence
  Description of Artificial Sequence: Synthetic oligonucleotide
cuuuaggugacccacgaug

SEQ ID NO: 568854 - RNA, 19 nt, Artificial Sequence
  Description of Artificial Sequence: Synthetic oligonucleotide
uuucaaucuaaaguaagcu

SEQ ID NO: 568855 - RNA, 19 nt, Artificial Sequence
  Description of Artificial Sequence: Synthetic oligonucleotide
uuuguguggagucaagaaa

SEQ ID NO: 568856 - RNA, 19 nt, Artificial Sequence
  Description of Artificial Sequence: Synthetic oligonucleotide
guuuaaucacuguagcagc

SEQ ID NO: 568857 - RNA, 19 nt, Artificial Sequence
  Description of Artificial Sequence: Synthetic oligonucleotide
aacacaggauuauacgggu

SEQ ID NO: 568858 - RNA, 19 nt, Artificial Sequence
  Description of Artificial Sequence: Synthetic oligonucleotide
uguagcauucaauugcuuc

SEQ ID NO: 568859 - RNA, 19 nt, Artificial Sequence
  Description of Artificial Sequence: Synthetic oligonucleotide
ucccuucucaauuaauucc

SEQ ID NO: 568860 - RNA, 19 nt, Artificial Sequence
  Description of Artificial Sequence: Synthetic oligonucleotide
uaauguacacguagaagac

SEQ ID NO: 568861 - RNA, 19 nt, Artificial Sequence
  Description of Artificial Sequence: Synthetic oligonucleotide
uaauuugaagucauuucuc

SEQ ID NO: 568862 - RNA, 19 nt, Artificial Sequence
  Description of Artificial Sequence: Synthetic oligonucleotide
uggaguaucaccugcggga

SEQ ID NO: 568863 - RNA, 19 nt, Artificial Sequence
  Description of Artificial Sequence: Synthetic oligonucleotide
aacaagagccuucugggaa

SEQ ID NO: 568864 - RNA, 19 nt, Artificial Sequence
  Description of Artificial Sequence: Synthetic oligonucleotide
guugguuuaaucacuguag

SEQ ID NO: 568865 - RNA, 19 nt, Artificial Sequence
  Description of Artificial Sequence: Synthetic oligonucleotide
aauucucuucaggaacacc

SEQ ID NO: 568866 - RNA, 19 nt, Artificial Sequence
  Description of Artificial Sequence: Synthetic oligonucleotide
uuucgaagaugagagcugg

SEQ ID NO: 568867 - RNA, 19 nt, Artificial Sequence
  Description of Artificial Sequence: Synthetic oligonucleotide
uuuaaucacuguagcagcu

SEQ ID NO: 568868 - RNA, 19 nt, Artificial Sequence
  Description of Artificial Sequence: Synthetic oligonucleotide
ucuagguucuucugaaaca

SEQ ID NO: 568869 - RNA, 19 nt, Artificial Sequence
  Description of Artificial Sequence: Synthetic oligonucleotide
ugacugaauaauacauuug

SEQ ID NO: 568870 - RNA, 19 nt, Artificial Sequence
  Description of Artificial Sequence: Synthetic oligonucleotide
gguuuaaucacuguagcag

SEQ ID NO: 568871 - RNA, 19 nt, Artificial Sequence
  Description of Artificial Sequence: Synthetic oligonucleotide
ucaaucgccuuacuuguug

SEQ ID NO: 568872 - RNA, 19 nt, Artificial Sequence
  Description of Artificial Sequence: Synthetic oligonucleotide
uuguuuucggugaccacag

SEQ ID NO: 568873 - RNA, 19 nt, Artificial Sequence
  Description of Artificial Sequence: Synthetic oligonucleotide
uucaguugguuuaaucacu

SEQ ID NO: 568874 - RNA, 19 nt, Artificial Sequence
  Description of Artificial Sequence: Synthetic oligonucleotide
uuggaguaucaccugcggg

SEQ ID NO: 568875 - RNA, 19 nt, Artificial Sequence
  Description of Artificial Sequence: Synthetic oligonucleotide
acguagaagacaaaacaac

SEQ ID NO: 568876 - RNA, 19 nt, Artificial Sequence
  Description of Artificial Sequence: Synthetic oligonucleotide
ucggaagucagacuccagc

SEQ ID NO: 568877 - RNA, 19 nt, Artificial Sequence
  Description of Artificial Sequence: Synthetic oligonucleotide
ucuaauuuccacagagcaa

SEQ ID NO: 568878 - RNA, 19 nt, Artificial Sequence
  Description of Artificial Sequence: Synthetic oligonucleotide
uacacguagaagacaaaac

SEQ ID NO: 568879 - RNA, 19 nt, Artificial Sequence
  Description of Artificial Sequence: Synthetic oligonucleotide
auugcucgcucauauuuuc

SEQ ID NO: 568880 - RNA, 19 nt, Artificial Sequence
  Description of Artificial Sequence: Synthetic oligonucleotide
uuuuggaaagcucggugac

SEQ ID NO: 568881 - RNA, 19 nt, Artificial Sequence
  Description of Artificial Sequence: Synthetic oligonucleotide
aggcggauuaucuacaggu

SEQ ID NO: 568882 - RNA, 19 nt, Artificial Sequence
  Description of Artificial Sequence: Synthetic oligonucleotide
gaugguucgauuuucuuua

SEQ ID NO: 568883 - RNA, 19 nt, Artificial Sequence
  Description of Artificial Sequence: Synthetic oligonucleotide
acacuuuacaugaauuaac

SEQ ID NO: 568884 - RNA, 19 nt, Artificial Sequence
  Description of Artificial Sequence: Synthetic oligonucleotide
aauuaacaccauugagaug

SEQ ID NO: 568885 - RNA, 19 nt, Artificial Sequence
  Description of Artificial Sequence: Synthetic oligonucleotide
aucguaagacuuuauucug

SEQ ID NO: 568886 - RNA, 19 nt, Artificial Sequence
  Description of Artificial Sequence: Synthetic oligonucleotide
uaggauuucgaagaugaga

SEQ ID NO: 568887 - RNA, 19 nt, Artificial Sequence
  Description of Artificial Sequence: Synthetic oligonucleotide
auuauacgggucagcaucc

SEQ ID NO: 568888 - RNA, 19 nt, Artificial Sequence
  Description of Artificial Sequence: Synthetic oligonucleotide
aaaccuucucaguucagaa

SEQ ID NO: 568889 - RNA, 19 nt, Artificial Sequence
  Description of Artificial Sequence: Synthetic oligonucleotide
acuaucggcagcuaucccu

SEQ ID NO: 568890 - RNA, 19 nt, Artificial Sequence
  Description of Artificial Sequence: Synthetic oligonucleotide
agggcauugguacuaucgg

SEQ ID NO: 568891 - RNA, 19 nt, Artificial Sequence
  Description of Artificial Sequence: Synthetic oligonucleotide
ucaaaucaaccugugguug

SEQ ID NO: 568892 - RNA, 19 nt, Artificial Sequence
  Description of Artificial Sequence: Synthetic oligonucleotide
ucauucguugcuucaaagu

SEQ ID NO: 568893 - RNA, 19 nt, Artificial Sequence
  Description of Artificial Sequence: Synthetic oligonucleotide
uucauucguugcuucaaag

SEQ ID NO: 568894 - RNA, 19 nt, Artificial Sequence
  Description of Artificial Sequence: Synthetic oligonucleotide
cuugcaguuccucuccugg

SEQ ID NO: 568895 - RNA, 19 nt, Artificial Sequence
  Description of Artificial Sequence: Synthetic oligonucleotide
cucuaauuuccacagagca

SEQ ID NO: 568896 - RNA, 19 nt, Artificial Sequence
  Description of Artificial Sequence: Synthetic oligonucleotide
agucagacucagcaacagc

SEQ ID NO: 568897 - RNA, 19 nt, Artificial Sequence
  Description of Artificial Sequence: Synthetic oligonucleotide
uggagcaucaacagucucu

SEQ ID NO: 568898 - RNA, 19 nt, Artificial Sequence
  Description of Artificial Sequence: Synthetic oligonucleotide
aagugacugaauaauacau

SEQ ID NO: 568899 - RNA, 19 nt, Artificial Sequence
  Description of Artificial Sequence: Synthetic oligonucleotide
cuuggaagaaucuuuagcu

SEQ ID NO: 568900 - RNA, 19 nt, Artificial Sequence
  Description of Artificial Sequence: Synthetic oligonucleotide
agaaucguggguguuaucu

SEQ ID NO: 568901 - RNA, 19 nt, Artificial Sequence
  Description of Artificial Sequence: Synthetic oligonucleotide
auaaucguaagacuuuauu

SEQ ID NO: 568902 - RNA, 19 nt, Artificial Sequence
  Description of Artificial Sequence: Synthetic oligonucleotide
ugguuuaaucacuguagca

SEQ ID NO: 568903 - RNA, 19 nt, Artificial Sequence
  Description of Artificial Sequence: Synthetic oligonucleotide
uugguguaacuccugcuca

SEQ ID NO: 568904 - RNA, 19 nt, Artificial Sequence
  Description of Artificial Sequence: Synthetic oligonucleotide
uucguugcuucaaaguuau

SEQ ID NO: 568905 - RNA, 19 nt, Artificial Sequence
  Description of Artificial Sequence: Synthetic oligonucleotide
uaauucaaucgccuuacuu

SEQ ID NO: 568906 - RNA, 19 nt, Artificial Sequence
  Description of Artificial Sequence: Synthetic oligonucleotide
uacacuuuacaugaauuaa

SEQ ID NO: 568907 - RNA, 19 nt, Artificial Sequence
  Description of Artificial Sequence: Synthetic oligonucleotide
uucaaaucaaccugugguu

SEQ ID NO: 568908 - RNA, 19 nt, Artificial Sequence
  Description of Artificial Sequence: Synthetic oligonucleotide
aauggccuucugcuuguuc

SEQ ID NO: 568909 - RNA, 19 nt, Artificial Sequence
  Description of Artificial Sequence: Synthetic oligonucleotide
cuguuagcgggaaggaggg

SEQ ID NO: 568910 - RNA, 19 nt, Artificial Sequence
  Description of Artificial Sequence: Synthetic oligonucleotide
cuaaaguaagcugaugcuc

SEQ ID NO: 568911 - RNA, 19 nt, Artificial Sequence
  Description of Artificial Sequence: Synthetic oligonucleotide
acaaccucauggaucaugg

SEQ ID NO: 568912 - RNA, 19 nt, Artificial Sequence
  Description of Artificial Sequence: Synthetic oligonucleotide
cuaauuuccacagagcaaa

SEQ ID NO: 568913 - RNA, 19 nt, Artificial Sequence
  Description of Artificial Sequence: Synthetic oligonucleotide
uuggaaagcucggugacug

SEQ ID NO: 568914 - RNA, 19 nt, Artificial Sequence
  Description of Artificial Sequence: Synthetic oligonucleotide
uacgggucagcauccaugc

SEQ ID NO: 568915 - RNA, 19 nt, Artificial Sequence
  Description of Artificial Sequence: Synthetic oligonucleotide
caagcaucauaaucguaag

SEQ ID NO: 568916 - RNA, 19 nt, Artificial Sequence
  Description of Artificial Sequence: Synthetic oligonucleotide
auuucucacuagcuagguc

SEQ ID NO: 568917 - RNA, 19 nt, Artificial Sequence
  Description of Artificial Sequence: Synthetic oligonucleotide
ugucccuucucaauuaauu

SEQ ID NO: 568918 - RNA, 19 nt, Artificial Sequence
  Description of Artificial Sequence: Synthetic oligonucleotide
uuuggauauaaagaugguu

SEQ ID NO: 568919 - RNA, 19 nt, Artificial Sequence
  Description of Artificial Sequence: Synthetic oligonucleotide
gauuucgaagaugagagcu

SEQ ID NO: 568920 - RNA, 19 nt, Artificial Sequence
  Description of Artificial Sequence: Synthetic oligonucleotide
uguugguaacacaggauua

SEQ ID NO: 568921 - RNA, 19 nt, Artificial Sequence
  Description of Artificial Sequence: Synthetic oligonucleotide
ucgccuuacuuguugaagu

SEQ ID NO: 568922 - RNA, 19 nt, Artificial Sequence
  Description of Artificial Sequence: Synthetic oligonucleotide
aaagcucggugacugccug

SEQ ID NO: 568923 - RNA, 19 nt, Artificial Sequence
  Description of Artificial Sequence: Synthetic oligonucleotide
aacugaaccgguaucugcu

SEQ ID NO: 568924 - RNA, 19 nt, Artificial Sequence
  Description of Artificial Sequence: Synthetic oligonucleotide
uguagggccaaagugucac

SEQ ID NO: 568925 - RNA, 19 nt, Artificial Sequence
  Description of Artificial Sequence: Synthetic oligonucleotide
augucaaaccuucucaguu

SEQ ID NO: 568926 - RNA, 19 nt, Artificial Sequence
  Description of Artificial Sequence: Synthetic oligonucleotide
uguguggagucaagaaaga

SEQ ID NO: 568927 - RNA, 19 nt, Artificial Sequence
  Description of Artificial Sequence: Synthetic oligonucleotide
uucucaguucagaaagccu

SEQ ID NO: 568928 - RNA, 19 nt, Artificial Sequence
  Description of Artificial Sequence: Synthetic oligonucleotide
gaucaauuuuccugaguuc

SEQ ID NO: 568929 - RNA, 19 nt, Artificial Sequence
  Description of Artificial Sequence: Synthetic oligonucleotide
agaugguucgauuuucuuu

SEQ ID NO: 568930 - RNA, 19 nt, Artificial Sequence
  Description of Artificial Sequence: Synthetic oligonucleotide
uugcccuuuucuuuuagaa

SEQ ID NO: 568931 - RNA, 19 nt, Artificial Sequence
  Description of Artificial Sequence: Synthetic oligonucleotide
ggaaggagggcauugguac

SEQ ID NO: 568932 - RNA, 19 nt, Artificial Sequence
  Description of Artificial Sequence: Synthetic oligonucleotide
uuaggugacccacgaugag

SEQ ID NO: 568933 - RNA, 19 nt, Artificial Sequence
  Description of Artificial Sequence: Synthetic oligonucleotide
aaccgguaucugcuccacc

SEQ ID NO: 568934 - RNA, 19 nt, Artificial Sequence
  Description of Artificial Sequence: Synthetic oligonucleotide
aguucucucagguaugauu

SEQ ID NO: 568935 - RNA, 19 nt, Artificial Sequence
  Description of Artificial Sequence: Synthetic oligonucleotide
ucucagaugucggaaguca

SEQ ID NO: 568936 - RNA, 19 nt, Artificial Sequence
  Description of Artificial Sequence: Synthetic oligonucleotide
uacaacauaucuggggaac

SEQ ID NO: 568937 - RNA, 19 nt, Artificial Sequence
  Description of Artificial Sequence: Synthetic oligonucleotide
aaaaucuugcuuggccuca

SEQ ID NO: 568938 - RNA, 19 nt, Artificial Sequence
  Description of Artificial Sequence: Synthetic oligonucleotide
ugugugcagucucuuucag

SEQ ID NO: 568939 - RNA, 19 nt, Artificial Sequence
  Description of Artificial Sequence: Synthetic oligonucleotide
auuacucuggggagcagcg

SEQ ID NO: 568940 - RNA, 19 nt, Artificial Sequence
  Description of Artificial Sequence: Synthetic oligonucleotide
gauuacucuggggagcagc

SEQ ID NO: 568941 - RNA, 19 nt, Artificial Sequence
  Description of Artificial Sequence: Synthetic oligonucleotide
aggauuauacgggucagca

SEQ ID NO: 568942 - RNA, 19 nt, Artificial Sequence
  Description of Artificial Sequence: Synthetic oligonucleotide
aaaucuugcuuggccucac

SEQ ID NO: 568943 - RNA, 19 nt, Artificial Sequence
  Description of Artificial Sequence: Synthetic oligonucleotide
uccugaguucauucguugc

SEQ ID NO: 568944 - RNA, 19 nt, Artificial Sequence
  Description of Artificial Sequence: Synthetic oligonucleotide
ugaggcggauuaucuacag

SEQ ID NO: 568945 - RNA, 19 nt, Artificial Sequence
  Description of Artificial Sequence: Synthetic oligonucleotide
ugcccuuuucuuuuagaac

SEQ ID NO: 568946 - RNA, 19 nt, Artificial Sequence
  Description of Artificial Sequence: Synthetic oligonucleotide
uaauuuuggaaagcucggu

SEQ ID NO: 568947 - RNA, 19 nt, Artificial Sequence
  Description of Artificial Sequence: Synthetic oligonucleotide
ugcuucaaaucaaccugug

SEQ ID NO: 568948 - RNA, 19 nt, Artificial Sequence
  Description of Artificial Sequence: Synthetic oligonucleotide
ugccuuuuguguagcauuc

SEQ ID NO: 568949 - RNA, 19 nt, Artificial Sequence
  Description of Artificial Sequence: Synthetic oligonucleotide
gcaguggcaaacugaaccg

SEQ ID NO: 568950 - RNA, 19 nt, Artificial Sequence
  Description of Artificial Sequence: Synthetic oligonucleotide
acugaaccgguaucugcuc

SEQ ID NO: 568951 - RNA, 19 nt, Artificial Sequence
  Description of Artificial Sequence: Synthetic oligonucleotide
aguuguaauucaaucgccu

SEQ ID NO: 568952 - RNA, 19 nt, Artificial Sequence
  Description of Artificial Sequence: Synthetic oligonucleotide
acuccgauuccugggacac

SEQ ID NO: 568953 - RNA, 19 nt, Artificial Sequence
  Description of Artificial Sequence: Synthetic oligonucleotide
ucgcucauauuuucccucc

SEQ ID NO: 568954 - RNA, 19 nt, Artificial Sequence
  Description of Artificial Sequence: Synthetic oligonucleotide
caauuugcuucuugucccc

SEQ ID NO: 568955 - RNA, 19 nt, Artificial Sequence
  Description of Artificial Sequence: Synthetic oligonucleotide
guacacuuuacaugaauua

SEQ ID NO: 568956 - RNA, 19 nt, Artificial Sequence
  Description of Artificial Sequence: Synthetic oligonucleotide
uccuuuuguuuaaugucau

SEQ ID NO: 568957 - RNA, 19 nt, Artificial Sequence
  Description of Artificial Sequence: Synthetic oligonucleotide
guacuaucggcagcuaucc

SEQ ID NO: 568958 - RNA, 19 nt, Artificial Sequence
  Description of Artificial Sequence: Synthetic oligonucleotide
ucuaucaacuugccaguuu

SEQ ID NO: 568959 - RNA, 19 nt, Artificial Sequence
  Description of Artificial Sequence: Synthetic oligonucleotide
ucgagaguuuucuuuggau

SEQ ID NO: 568960 - RNA, 19 nt, Artificial Sequence
  Description of Artificial Sequence: Synthetic oligonucleotide
uuucgaauaggagguaaau

SEQ ID NO: 568961 - RNA, 19 nt, Artificial Sequence
  Description of Artificial Sequence: Synthetic oligonucleotide
ucauaaucguaagacuuua

SEQ ID NO: 568962 - RNA, 19 nt, Artificial Sequence
  Description of Artificial Sequence: Synthetic oligonucleotide
agcauucaauugcucgcuc

SEQ ID NO: 568963 - RNA, 19 nt, Artificial Sequence
  Description of Artificial Sequence: Synthetic oligonucleotide
uuagaacaagagccuucug

SEQ ID NO: 568964 - RNA, 19 nt, Artificial Sequence
  Description of Artificial Sequence: Synthetic oligonucleotide
cuugagugcuuuaggugac

SEQ ID NO: 568965 - RNA, 19 nt, Artificial Sequence
  Description of Artificial Sequence: Synthetic oligonucleotide
ugaaccgguaucugcucca

SEQ ID NO: 568966 - RNA, 19 nt, Artificial Sequence
  Description of Artificial Sequence: Synthetic oligonucleotide
uuccuaaaauucccauuuc

SEQ ID NO: 568967 - RNA, 19 nt, Artificial Sequence
  Description of Artificial Sequence: Synthetic oligonucleotide
uccaggaguaauacaguuu

SEQ ID NO: 568968 - RNA, 19 nt, Artificial Sequence
  Description of Artificial Sequence: Synthetic oligonucleotide
ucaaaccuucucaguucag

SEQ ID NO: 568969 - RNA, 19 nt, Artificial Sequence
  Description of Artificial Sequence: Synthetic oligonucleotide
cuaucggcagcuaucccuc

SEQ ID NO: 568970 - RNA, 19 nt, Artificial Sequence
  Description of Artificial Sequence: Synthetic oligonucleotide
ccaggaguaauacaguuuc

SEQ ID NO: 568971 - RNA, 19 nt, Artificial Sequence
  Description of Artificial Sequence: Synthetic oligonucleotide
ucggcagcuaucccucgag

SEQ ID NO: 568972 - RNA, 19 nt, Artificial Sequence
  Description of Artificial Sequence: Synthetic oligonucleotide
cacaggauuauacggguca

SEQ ID NO: 568973 - RNA, 19 nt, Artificial Sequence
  Description of Artificial Sequence: Synthetic oligonucleotide
aggaguaauacaguuucaa

SEQ ID NO: 568974 - RNA, 19 nt, Artificial Sequence
  Description of Artificial Sequence: Synthetic oligonucleotide
uucgaauaggagguaaauu

SEQ ID NO: 568975 - RNA, 19 nt, Artificial Sequence
  Description of Artificial Sequence: Synthetic oligonucleotide
aaucgccuuacuuguugaa

SEQ ID NO: 568976 - RNA, 19 nt, Artificial Sequence
  Description of Artificial Sequence: Synthetic oligonucleotide
aucgccuuacuuguugaag

SEQ ID NO: 568977 - RNA, 19 nt, Artificial Sequence
  Description of Artificial Sequence: Synthetic oligonucleotide
uucgaagaugagagcuggc

SEQ ID NO: 568978 - RNA, 19 nt, Artificial Sequence
  Description of Artificial Sequence: Synthetic oligonucleotide
ugggucgagaguuuucuuu

SEQ ID NO: 568979 - RNA, 19 nt, Artificial Sequence
  Description of Artificial Sequence: Synthetic oligonucleotide
cugaaccgguaucugcucc

SEQ ID NO: 568980 - RNA, 19 nt, Artificial Sequence
  Description of Artificial Sequence: Synthetic oligonucleotide
accucgccugauguaagcc

SEQ ID NO: 568981 - RNA, 19 nt, Artificial Sequence
  Description of Artificial Sequence: Synthetic oligonucleotide
agucucuaucaacuugcca

SEQ ID NO: 568982 - RNA, 19 nt, Artificial Sequence
  Description of Artificial Sequence: Synthetic oligonucleotide
uuuggaaagcucggugacu

SEQ ID NO: 568983 - RNA, 19 nt, Artificial Sequence
  Description of Artificial Sequence: Synthetic oligonucleotide
aauugcucgcucauauuuu

SEQ ID NO: 568984 - RNA, 19 nt, Artificial Sequence
  Description of Artificial Sequence: Synthetic oligonucleotide
uaucccucgaguguagcau

SEQ ID NO: 568985 - RNA, 19 nt, Artificial Sequence
  Description of Artificial Sequence: Synthetic oligonucleotide
guuagcgggaaggagggca

SEQ ID NO: 568986 - RNA, 19 nt, Artificial Sequence
  Description of Artificial Sequence: Synthetic oligonucleotide
gaguucauucguugcuuca

SEQ ID NO: 568987 - RNA, 19 nt, Artificial Sequence
  Description of Artificial Sequence: Synthetic oligonucleotide
acaggauuauacgggucag

SEQ ID NO: 568988 - RNA, 19 nt, Artificial Sequence
  Description of Artificial Sequence: Synthetic oligonucleotide
ugguacuaucggcagcuau

SEQ ID NO: 568989 - RNA, 19 nt, Artificial Sequence
  Description of Artificial Sequence: Synthetic oligonucleotide
uugccaaauuacagucaga

SEQ ID NO: 568990 - RNA, 19 nt, Artificial Sequence
  Description of Artificial Sequence: Synthetic oligonucleotide
auacgggucagcauccaug

SEQ ID NO: 568991 - RNA, 19 nt, Artificial Sequence
  Description of Artificial Sequence: Synthetic oligonucleotide
gcuaucuggagcaucaaca

SEQ ID NO: 568992 - RNA, 19 nt, Artificial Sequence
  Description of Artificial Sequence: Synthetic oligonucleotide
uuagcgggaaggagggcau

SEQ ID NO: 568993 - RNA, 19 nt, Artificial Sequence
  Description of Artificial Sequence: Synthetic oligonucleotide
agcucggugacugccugcg

SEQ ID NO: 568994 - RNA, 19 nt, Artificial Sequence
  Description of Artificial Sequence: Synthetic oligonucleotide
guaagauggcuugugugca

SEQ ID NO: 568995 - RNA, 19 nt, Artificial Sequence
  Description of Artificial Sequence: Synthetic oligonucleotide
uacuaucggcagcuauccc

SEQ ID NO: 568996 - RNA, 19 nt, Artificial Sequence
  Description of Artificial Sequence: Synthetic oligonucleotide
ucucagguaugauuucauu

SEQ ID NO: 568997 - RNA, 19 nt, Artificial Sequence
  Description of Artificial Sequence: Synthetic oligonucleotide
ggagccgucuaguaagaug

SEQ ID NO: 568998 - RNA, 19 nt, Artificial Sequence
  Description of Artificial Sequence: Synthetic oligonucleotide
cuagguucuucugaaacaa

SEQ ID NO: 568999 - RNA, 19 nt, Artificial Sequence
  Description of Artificial Sequence: Synthetic oligonucleotide
ugcauaggagccgucuagu

SEQ ID NO: 569000 - RNA, 19 nt, Artificial Sequence
  Description of Artificial Sequence: Synthetic oligonucleotide
uguuuucggugaccacagc

SEQ ID NO: 569001 - RNA, 19 nt, Artificial Sequence
  Description of Artificial Sequence: Synthetic oligonucleotide
uaucggcagcuaucccucg

SEQ ID NO: 569002 - RNA, 19 nt, Artificial Sequence
  Description of Artificial Sequence: Synthetic oligonucleotide
ugguucgauuuucuuuaaa

SEQ ID NO: 569003 - RNA, 19 nt, Artificial Sequence
  Description of Artificial Sequence: Synthetic oligonucleotide
ggucgagaguuuucuuugg

SEQ ID NO: 569004 - RNA, 19 nt, Artificial Sequence
  Description of Artificial Sequence: Synthetic oligonucleotide
uguaagccuugguguaacu

SEQ ID NO: 569005 - RNA, 19 nt, Artificial Sequence
  Description of Artificial Sequence: Synthetic oligonucleotide
uaggagccgucuaguaaga

SEQ ID NO: 569006 - RNA, 19 nt, Artificial Sequence
  Description of Artificial Sequence: Synthetic oligonucleotide
gagaguucucucagguaug

SEQ ID NO: 569007 - RNA, 19 nt, Artificial Sequence
  Description of Artificial Sequence: Synthetic oligonucleotide
ugacuccgauuccugggac

SEQ ID NO: 569008 - RNA, 19 nt, Artificial Sequence
  Description of Artificial Sequence: Synthetic oligonucleotide
caguggcaaacugaaccgg

SEQ ID NO: 569009 - RNA, 19 nt, Artificial Sequence
  Description of Artificial Sequence: Synthetic oligonucleotide
ccucuguaggauuucgaag

SEQ ID NO: 569010 - RNA, 19 nt, Artificial Sequence
  Description of Artificial Sequence: Synthetic oligonucleotide
cucggguccugacaugaac

SEQ ID NO: 569011 - RNA, 19 nt, Artificial Sequence
  Description of Artificial Sequence: Synthetic oligonucleotide
acgaugaggcggauuaucu

SEQ ID NO: 569012 - RNA, 19 nt, Artificial Sequence
  Description of Artificial Sequence: Synthetic oligonucleotide
uugugucuuuguguggagu

SEQ ID NO: 569013 - RNA, 19 nt, Artificial Sequence
  Description of Artificial Sequence: Synthetic oligonucleotide
auucguugcuucaaaguua

SEQ ID NO: 569014 - RNA, 19 nt, Artificial Sequence
  Description of Artificial Sequence: Synthetic oligonucleotide
ggauuucgaagaugagagc

SEQ ID NO: 569015 - RNA, 19 nt, Artificial Sequence
  Description of Artificial Sequence: Synthetic oligonucleotide
uggaaagcucggugacugc

SEQ ID NO: 569016 - RNA, 19 nt, Artificial Sequence
  Description of Artificial Sequence: Synthetic oligonucleotide
auuucgaauaggagguaaa

SEQ ID NO: 569017 - RNA, 19 nt, Artificial Sequence
  Description of Artificial Sequence: Synthetic oligonucleotide
cacucgaacaccgucaucu

SEQ ID NO: 569018 - RNA, 19 nt, Artificial Sequence
  Description of Artificial Sequence: Synthetic oligonucleotide
acacaggauuauacggguc

SEQ ID NO: 569019 - RNA, 19 nt, Artificial Sequence
  Description of Artificial Sequence: Synthetic oligonucleotide
cucuguuagcgggaaggag

SEQ ID NO: 569020 - RNA, 19 nt, Artificial Sequence
  Description of Artificial Sequence: Synthetic oligonucleotide
gggcauugguacuaucggc

SEQ ID NO: 569021 - RNA, 19 nt, Artificial Sequence
  Description of Artificial Sequence: Synthetic oligonucleotide
caucaaggauacuguccac

SEQ ID NO: 569022 - RNA, 19 nt, Artificial Sequence
  Description of Artificial Sequence: Synthetic oligonucleotide
gguacuaucggcagcuauc

SEQ ID NO: 569023 - RNA, 19 nt, Artificial Sequence
  Description of Artificial Sequence: Synthetic oligonucleotide
ggaucuagguucuucugaa

SEQ ID NO: 569024 - RNA, 19 nt, Artificial Sequence
  Description of Artificial Sequence: Synthetic oligonucleotide
aguggcaaacugaaccggu

SEQ ID NO: 569025 - RNA, 19 nt, Artificial Sequence
  Description of Artificial Sequence: Synthetic oligonucleotide
gucgagaguuuucuuugga

SEQ ID NO: 569026 - RNA, 19 nt, Artificial Sequence
  Description of Artificial Sequence: Synthetic oligonucleotide
ucggugacugccugcguau

SEQ ID NO: 569027 - RNA, 19 nt, Artificial Sequence
  Description of Artificial Sequence: Synthetic oligonucleotide
gaucuagguucuucugaaa

SEQ ID NO: 569028 - RNA, 19 nt, Artificial Sequence
  Description of Artificial Sequence: Synthetic oligonucleotide
cauucguugcuucaaaguu

SEQ ID NO: 569029 - RNA, 19 nt, Artificial Sequence
  Description of Artificial Sequence: Synthetic oligonucleotide
ggaaagcucggugacugcc

SEQ ID NO: 569030 - RNA, 19 nt, Artificial Sequence
  Description of Artificial Sequence: Synthetic oligonucleotide
augagaguucucucaggua

SEQ ID NO: 569031 - RNA, 19 nt, Artificial Sequence
  Description of Artificial Sequence: Synthetic oligonucleotide
acagaaucguggguguuau

SEQ ID NO: 569032 - RNA, 19 nt, Artificial Sequence
  Description of Artificial Sequence: Synthetic oligonucleotide
gacuccgauuccugggaca

SEQ ID NO: 569033 - RNA, 19 nt, Artificial Sequence
  Description of Artificial Sequence: Synthetic oligonucleotide
gacacagaaucgugggugu

SEQ ID NO: 569034 - RNA, 19 nt, Artificial Sequence
  Description of Artificial Sequence: Synthetic oligonucleotide
ggcauugguacuaucggca

SEQ ID NO: 569035 - RNA, 19 nt, Artificial Sequence
  Description of Artificial Sequence: Synthetic oligonucleotide
guucauucguugcuucaaa

SEQ ID NO: 569036 - RNA, 19 nt, Artificial Sequence
  Description of Artificial Sequence: Synthetic oligonucleotide
auccacucgaacaccguca

SEQ ID NO: 569037 - RNA, 19 nt, Artificial Sequence
  Description of Artificial Sequence: Synthetic oligonucleotide
cuaucccucgaguguagca

SEQ ID NO: 569038 - RNA, 19 nt, Artificial Sequence
  Description of Artificial Sequence: Synthetic oligonucleotide
ucccucgaguguagcauuc

SEQ ID NO: 569039 - RNA, 19 nt, Artificial Sequence
  Description of Artificial Sequence: Synthetic oligonucleotide
uucaaucgccuuacuuguu

SEQ ID NO: 569040 - RNA, 19 nt, Artificial Sequence
  Description of Artificial Sequence: Synthetic oligonucleotide
caaucgccuuacuuguuga

SEQ ID NO: 569041 - RNA, 19 nt, Artificial Sequence
  Description of Artificial Sequence: Synthetic oligonucleotide
caccucgccugauguaagc

SEQ ID NO: 569042 - RNA, 19 nt, Artificial Sequence
  Description of Artificial Sequence: Synthetic oligonucleotide
cauuucgaauaggagguaa

SEQ ID NO: 569043 - RNA, 19 nt, Artificial Sequence
  Description of Artificial Sequence: Synthetic oligonucleotide
cuaguaagauggcuugugu

SEQ ID NO: 569044 - RNA, 19 nt, Artificial Sequence
  Description of Artificial Sequence: Synthetic oligonucleotide
ggauauaaagaugguucga

SEQ ID NO: 569045 - RNA, 19 nt, Artificial Sequence
  Description of Artificial Sequence: Synthetic oligonucleotide
aucguggguguuaucuucu

SEQ ID NO: 569046 - RNA, 19 nt, Artificial Sequence
  Description of Artificial Sequence: Synthetic oligonucleotide
uguccccuucaguugguuu

SEQ ID NO: 569047 - RNA, 19 nt, Artificial Sequence
  Description of Artificial Sequence: Synthetic oligonucleotide
agccgucuaguaagauggc

SEQ ID NO: 569048 - RNA, 19 nt, Artificial Sequence
  Description of Artificial Sequence: Synthetic oligonucleotide
cgucuaguaagauggcuug

SEQ ID NO: 569049 - RNA, 19 nt, Artificial Sequence
  Description of Artificial Sequence: Synthetic oligonucleotide
augaggcggauuaucuaca

SEQ ID NO: 569050 - RNA, 19 nt, Artificial Sequence
  Description of Artificial Sequence: Synthetic oligonucleotide
augguucgauuuucuuuaa

SEQ ID NO: 569051 - RNA, 19 nt, Artificial Sequence
  Description of Artificial Sequence: Synthetic oligonucleotide
gugacugccugcguauuuc

SEQ ID NO: 569052 - RNA, 19 nt, Artificial Sequence
  Description of Artificial Sequence: Synthetic oligonucleotide
gguguaacuccugcucaag

SEQ ID NO: 569053 - RNA, 19 nt, Artificial Sequence
  Description of Artificial Sequence: Synthetic oligonucleotide
cauggcucuguuagcggga

SEQ ID NO: 569054 - RNA, 19 nt, Artificial Sequence
  Description of Artificial Sequence: Synthetic oligonucleotide
cuucacuuguaguuguaau

SEQ ID NO: 569055 - RNA, 19 nt, Artificial Sequence
  Description of Artificial Sequence: Synthetic oligonucleotide
cugaaacaacuuuggauau

SEQ ID NO: 569056 - RNA, 19 nt, Artificial Sequence
  Description of Artificial Sequence: Synthetic oligonucleotide
gcaucauaaucguaagacu

SEQ ID NO: 569057 - RNA, 19 nt, Artificial Sequence
  Description of Artificial Sequence: Synthetic oligonucleotide
aucccucgaguguagcauu

SEQ ID NO: 569058 - RNA, 19 nt, Artificial Sequence
  Description of Artificial Sequence: Synthetic oligonucleotide
ucucacuagcuaggucaca

SEQ ID NO: 569059 - RNA, 19 nt, Artificial Sequence
  Description of Artificial Sequence: Synthetic oligonucleotide
gaaccgguaucugcuccac

SEQ ID NO: 569060 - RNA, 19 nt, Artificial Sequence
  Description of Artificial Sequence: Synthetic oligonucleotide
uguuagcgggaaggagggc

SEQ ID NO: 569061 - RNA, 19 nt, Artificial Sequence
  Description of Artificial Sequence: Synthetic oligonucleotide
auaauacauuugugaucuu

SEQ ID NO: 569062 - RNA, 19 nt, Artificial Sequence
  Description of Artificial Sequence: Synthetic oligonucleotide
agcggcagugcuaucugga

SEQ ID NO: 569063 - RNA, 19 nt, Artificial Sequence
  Description of Artificial Sequence: Synthetic oligonucleotide
gaaucguggguguuaucuu

SEQ ID NO: 569064 - RNA, 19 nt, Artificial Sequence
  Description of Artificial Sequence: Synthetic oligonucleotide
aguuuugcccaagcaucau

SEQ ID NO: 569065 - RNA, 19 nt, Artificial Sequence
  Description of Artificial Sequence: Synthetic oligonucleotide
gggaauccacucgaacacc

SEQ ID NO: 569066 - RNA, 19 nt, Artificial Sequence
  Description of Artificial Sequence: Synthetic oligonucleotide
acccauuccccagaucuuu

SEQ ID NO: 569067 - RNA, 19 nt, Artificial Sequence
  Description of Artificial Sequence: Synthetic oligonucleotide
gaaagcucggugacugccu

SEQ ID NO: 569068 - RNA, 19 nt, Artificial Sequence
  Description of Artificial Sequence: Synthetic oligonucleotide
cuuugcauaggagccgucu

SEQ ID NO: 569069 - RNA, 19 nt, Artificial Sequence
  Description of Artificial Sequence: Synthetic oligonucleotide
cauaaucguaagacuuuau

SEQ ID NO: 569070 - RNA, 19 nt, Artificial Sequence
  Description of Artificial Sequence: Synthetic oligonucleotide
guaauucaaucgccuuacu

SEQ ID NO: 569071 - RNA, 19 nt, Artificial Sequence
  Description of Artificial Sequence: Synthetic oligonucleotide
cugaucaauuuuccugagu

SEQ ID NO: 569072 - RNA, 19 nt, Artificial Sequence
  Description of Artificial Sequence: Synthetic oligonucleotide
gcagcuaucccucgagugu

SEQ ID NO: 569073 - RNA, 19 nt, Artificial Sequence
  Description of Artificial Sequence: Synthetic oligonucleotide
cucggugacugccugcgua

SEQ ID NO: 569074 - RNA, 19 nt, Artificial Sequence
  Description of Artificial Sequence: Synthetic oligonucleotide
ucguugcuucaaaguuauc

SEQ ID NO: 569075 - RNA, 19 nt, Artificial Sequence
  Description of Artificial Sequence: Synthetic oligonucleotide
aaacaaccucauggaucau

SEQ ID NO: 569076 - RNA, 19 nt, Artificial Sequence
  Description of Artificial Sequence: Synthetic oligonucleotide
cagaaucguggguguuauc

SEQ ID NO: 569077 - RNA, 19 nt, Artificial Sequence
  Description of Artificial Sequence: Synthetic oligonucleotide
cugcuucacuuguaguugu

SEQ ID NO: 569078 - RNA, 19 nt, Artificial Sequence
  Description of Artificial Sequence: Synthetic oligonucleotide
gaauccacucgaacaccgu

SEQ ID NO: 569079 - RNA, 19 nt, Artificial Sequence
  Description of Artificial Sequence: Synthetic oligonucleotide
cgaauaggagguaaauucu

SEQ ID NO: 569080 - RNA, 19 nt, Artificial Sequence
  Description of Artificial Sequence: Synthetic oligonucleotide
gagucaagaaagacaucuu

SEQ ID NO: 569081 - RNA, 19 nt, Artificial Sequence
  Description of Artificial Sequence: Synthetic oligonucleotide
aaauggccuucugcuuguu

SEQ ID NO: 569082 - RNA, 19 nt, Artificial Sequence
  Description of Artificial Sequence: Synthetic oligonucleotide
cguugcuucaaaguuaucu

SEQ ID NO: 569083 - RNA, 19 nt, Artificial Sequence
  Description of Artificial Sequence: Synthetic oligonucleotide
ggauuauacgggucagcau

SEQ ID NO: 569084 - RNA, 19 nt, Artificial Sequence
  Description of Artificial Sequence: Synthetic oligonucleotide
gcuaucccucgaguguagc

SEQ ID NO: 569085 - RNA, 19 nt, Artificial Sequence
  Description of Artificial Sequence: Synthetic oligonucleotide
cucgccugauguaagccuu

SEQ ID NO: 569086 - RNA, 19 nt, Artificial Sequence
  Description of Artificial Sequence: Synthetic oligonucleotide
cagaaagccucuguaggau

SEQ ID NO: 569087 - RNA, 19 nt, Artificial Sequence
  Description of Artificial Sequence: Synthetic oligonucleotide
ccuuacuuguugaagucau

SEQ ID NO: 569088 - RNA, 19 nt, Artificial Sequence
  Description of Artificial Sequence: Synthetic oligonucleotide
cagcuaucccucgagugua

SEQ ID NO: 569089 - RNA, 19 nt, Artificial Sequence
  Description of Artificial Sequence: Synthetic oligonucleotide
gcauaggagccgucuagua

SEQ ID NO: 569090 - RNA, 19 nt, Artificial Sequence
  Description of Artificial Sequence: Synthetic oligonucleotide
gcagcaccucgccugaugu

SEQ ID NO: 569091 - RNA, 19 nt, Artificial Sequence
  Description of Artificial Sequence: Synthetic oligonucleotide
gcucuaagucccucaugaa

SEQ ID NO: 569092 - RNA, 19 nt, Artificial Sequence
  Description of Artificial Sequence: Synthetic oligonucleotide
uuguccccuucaguugguu

SEQ ID NO: 569093 - RNA, 19 nt, Artificial Sequence
  Description of Artificial Sequence: Synthetic oligonucleotide
caauuuuccugaguucauu

SEQ ID NO: 569094 - RNA, 19 nt, Artificial Sequence
  Description of Artificial Sequence: Synthetic oligonucleotide
guagggccaaagugucacu

SEQ ID NO: 569095 - RNA, 19 nt, Artificial Sequence
  Description of Artificial Sequence: Synthetic oligonucleotide
caccugcgggaaagguguc

SEQ ID NO: 569096 - RNA, 19 nt, Artificial Sequence
  Description of Artificial Sequence: Synthetic oligonucleotide
gcaccucgccugauguaag

SEQ ID NO: 569097 - RNA, 19 nt, Artificial Sequence
  Description of Artificial Sequence: Synthetic oligonucleotide
ggagcagcggcagugcuau

SEQ ID NO: 569098 - RNA, 19 nt, Artificial Sequence
  Description of Artificial Sequence: Synthetic oligonucleotide
cgauuccugggacacagaa

SEQ ID NO: 569099 - RNA, 19 nt, Artificial Sequence
  Description of Artificial Sequence: Synthetic oligonucleotide
gccuuuuguguagcauuca

SEQ ID NO: 569100 - RNA, 19 nt, Artificial Sequence
  Description of Artificial Sequence: Synthetic oligonucleotide
ccgucuaguaagauggcuu

SEQ ID NO: 569101 - RNA, 19 nt, Artificial Sequence
  Description of Artificial Sequence: Synthetic oligonucleotide
gugcuaucuggagcaucaa

SEQ ID NO: 569102 - RNA, 19 nt, Artificial Sequence
  Description of Artificial Sequence: Synthetic oligonucleotide
ggcuugaauucuucuuguu

SEQ ID NO: 569103 - RNA, 19 nt, Artificial Sequence
  Description of Artificial Sequence: Synthetic oligonucleotide
ccuuugcauaggagccguc

SEQ ID NO: 569104 - RNA, 19 nt, Artificial Sequence
  Description of Artificial Sequence: Synthetic oligonucleotide
cagcaccucgccugaugua

SEQ ID NO: 569105 - RNA, 19 nt, Artificial Sequence
  Description of Artificial Sequence: Synthetic oligonucleotide
gccgucuaguaagauggcu

SEQ ID NO: 569106 - RNA, 19 nt, Artificial Sequence
  Description of Artificial Sequence: Synthetic oligonucleotide
cggauuaucuacagguuuu

SEQ ID NO: 569107 - RNA, 19 nt, Artificial Sequence
  Description of Artificial Sequence: Synthetic oligonucleotide
ccucgccugauguaagccu

SEQ ID NO: 569108 - RNA, 19 nt, Artificial Sequence
  Description of Artificial Sequence: Synthetic oligonucleotide
gcuuuaggugacccacgau

SEQ ID NO: 569109 - RNA, 19 nt, Artificial Sequence
  Description of Artificial Sequence: Synthetic oligonucleotide
ccacucgaacaccgucauc

SEQ ID NO: 569110 - RNA, 19 nt, Artificial Sequence
  Description of Artificial Sequence: Synthetic oligonucleotide
ccuuuuguuuaaugucauu

SEQ ID NO: 569111 - RNA, 19 nt, Artificial Sequence
  Description of Artificial Sequence: Synthetic oligonucleotide
cugugguuguagggccaaa

SEQ ID NO: 569112 - RNA, 19 nt, Artificial Sequence
  Description of Artificial Sequence: Synthetic oligonucleotide
ccgauuccugggacacaga

SEQ ID NO: 569113 - RNA, 19 nt, Artificial Sequence
  Description of Artificial Sequence: Synthetic oligonucleotide
gccugcguauuuccagguu

SEQ ID NO: 569114 - RNA, 19 nt, Artificial Sequence
  Description of Artificial Sequence: Synthetic oligonucleotide
ggcuugugugcagucucuu

SEQ ID NO: 569115 - RNA, 19 nt, Artificial Sequence
  Description of Artificial Sequence: Synthetic oligonucleotide
gcucggugacugccugcgu

SEQ ID NO: 569116 - RNA, 19 nt, Artificial Sequence
  Description of Artificial Sequence: Synthetic oligonucleotide
caucuggaucuagguucuu

SEQ ID NO: 569117 - RNA, 19 nt, Artificial Sequence
  Description of Artificial Sequence: Synthetic oligonucleotide
ccgguaucugcuccaccuu

SEQ ID NO: 569118 - RNA, 19 nt, Artificial Sequence
  Description of Artificial Sequence: Synthetic oligonucleotide
uugaauaaagucuacaacc

SEQ ID NO: 569119 - RNA, 19 nt, Artificial Sequence
  Description of Artificial Sequence: Synthetic oligonucleotide
aaguguacaacagagagcg

SEQ ID NO: 569120 - RNA, 19 nt, Artificial Sequence
  Description of Artificial Sequence: Synthetic oligonucleotide
aaggaguuucccuagaugg

SEQ ID NO: 569121 - RNA, 19 nt, Artificial Sequence
  Description of Artificial Sequence: Synthetic oligonucleotide
aauaaagucuacaaccucc

SEQ ID NO: 569122 - RNA, 19 nt, Artificial Sequence
  Description of Artificial Sequence: Synthetic oligonucleotide
aaaucagaaccacuagucc

SEQ ID NO: 569123 - RNA, 19 nt, Artificial Sequence
  Description of Artificial Sequence: Synthetic oligonucleotide
gacaguucugcccauaucg

SEQ ID NO: 569124 - RNA, 19 nt, Artificial Sequence
  Description of Artificial Sequence: Synthetic oligonucleotide
aaaaucagaaccacuaguc

SEQ ID NO: 569125 - RNA, 19 nt, Artificial Sequence
  Description of Artificial Sequence: Synthetic oligonucleotide
aaaacucagucucgggucc

SEQ ID NO: 569126 - RNA, 19 nt, Artificial Sequence
  Description of Artificial Sequence: Synthetic oligonucleotide
acaguuaugagcauccucc

SEQ ID NO: 569127 - RNA, 19 nt, Artificial Sequence
  Description of Artificial Sequence: Synthetic oligonucleotide
cagaaaacaguccaggugg

SEQ ID NO: 569128 - RNA, 19 nt, Artificial Sequence
  Description of Artificial Sequence: Synthetic oligonucleotide
gauaauaucaggaagauau

SEQ ID NO: 569129 - RNA, 19 nt, Artificial Sequence
  Description of Artificial Sequence: Synthetic oligonucleotide
gucaauuuggcaucaauag

SEQ ID NO: 569130 - RNA, 19 nt, Artificial Sequence
  Description of Artificial Sequence: Synthetic oligonucleotide
acauaucuaaagcuuugcc

SEQ ID NO: 569131 - RNA, 19 nt, Artificial Sequence
  Description of Artificial Sequence: Synthetic oligonucleotide
ugaauaaagucuacaaccu

SEQ ID NO: 569132 - RNA, 19 nt, Artificial Sequence
  Description of Artificial Sequence: Synthetic oligonucleotide
augacaauaaccgaagcuc

SEQ ID NO: 569133 - RNA, 19 nt, Artificial Sequence
  Description of Artificial Sequence: Synthetic oligonucleotide
auaagacauaucuaaagcu

SEQ ID NO: 569134 - RNA, 19 nt, Artificial Sequence
  Description of Artificial Sequence: Synthetic oligonucleotide
uuaaugacuuccucugugg

SEQ ID NO: 569135 - RNA, 19 nt, Artificial Sequence
  Description of Artificial Sequence: Synthetic oligonucleotide
agugucuggagccaggcac

SEQ ID NO: 569136 - RNA, 19 nt, Artificial Sequence
  Description of Artificial Sequence: Synthetic oligonucleotide
gaucuuugauaauaucagg

SEQ ID NO: 569137 - RNA, 19 nt, Artificial Sequence
  Description of Artificial Sequence: Synthetic oligonucleotide
gcaucaauagccaagaagg

SEQ ID NO: 569138 - RNA, 19 nt, Artificial Sequence
  Description of Artificial Sequence: Synthetic oligonucleotide
caggaauacaguuaugagc

SEQ ID NO: 569139 - RNA, 19 nt, Artificial Sequence
  Description of Artificial Sequence: Synthetic oligonucleotide
aaaucaucuguuccucagg

SEQ ID NO: 569140 - RNA, 19 nt, Artificial Sequence
  Description of Artificial Sequence: Synthetic oligonucleotide
gaauucgugaucaucagug

SEQ ID NO: 569141 - RNA, 19 nt, Artificial Sequence
  Description of Artificial Sequence: Synthetic oligonucleotide
cuuugauaauaucaggaag

SEQ ID NO: 569142 - RNA, 19 nt, Artificial Sequence
  Description of Artificial Sequence: Synthetic oligonucleotide
cuugaugcgugcuagcucc

SEQ ID NO: 569143 - RNA, 19 nt, Artificial Sequence
  Description of Artificial Sequence: Synthetic oligonucleotide
aaaguguugcucgaaagug

SEQ ID NO: 569144 - RNA, 19 nt, Artificial Sequence
  Description of Artificial Sequence: Synthetic oligonucleotide
gacucuuccauccauggug

SEQ ID NO: 569145 - RNA, 19 nt, Artificial Sequence
  Description of Artificial Sequence: Synthetic oligonucleotide
aagaacuuggacuuagcaa

SEQ ID NO: 569146 - RNA, 19 nt, Artificial Sequence
  Description of Artificial Sequence: Synthetic oligonucleotide
ugguuuguggucauaagac

SEQ ID NO: 569147 - RNA, 19 nt, Artificial Sequence
  Description of Artificial Sequence: Synthetic oligonucleotide
uagaaguggucuccaaugg

SEQ ID NO: 569148 - RNA, 19 nt, Artificial Sequence
  Description of Artificial Sequence: Synthetic oligonucleotide
uguaccauccccugaagug

SEQ ID NO: 569149 - RNA, 19 nt, Artificial Sequence
  Description of Artificial Sequence: Synthetic oligonucleotide
ucuguggucaauuuggcau

SEQ ID NO: 569150 - RNA, 19 nt, Artificial Sequence
  Description of Artificial Sequence: Synthetic oligonucleotide
uuggauugaauaaagucua

SEQ ID NO: 569151 - RNA, 19 nt, Artificial Sequence
  Description of Artificial Sequence: Synthetic oligonucleotide
ucuacaaccuccuggcugc

SEQ ID NO: 569152 - RNA, 19 nt, Artificial Sequence
  Description of Artificial Sequence: Synthetic oligonucleotide
ucuuugauaauaucaggaa

SEQ ID NO: 569153 - RNA, 19 nt, Artificial Sequence
  Description of Artificial Sequence: Synthetic oligonucleotide
agaaguggucuccaauggc

SEQ ID NO: 569154 - RNA, 19 nt, Artificial Sequence
  Description of Artificial Sequence: Synthetic oligonucleotide
ucagucucggguccaaggg

SEQ ID NO: 569155 - RNA, 19 nt, Artificial Sequence
  Description of Artificial Sequence: Synthetic oligonucleotide
caaaugaugaugcauguca

SEQ ID NO: 569156 - RNA, 19 nt, Artificial Sequence
  Description of Artificial Sequence: Synthetic oligonucleotide
ugcucgaaaguguacaaca

SEQ ID NO: 569157 - RNA, 19 nt, Artificial Sequence
  Description of Artificial Sequence: Synthetic oligonucleotide
aauacccacugcuaaggcu

SEQ ID NO: 569158 - RNA, 19 nt, Artificial Sequence
  Description of Artificial Sequence: Synthetic oligonucleotide
guagaaguggucuccaaug

SEQ ID NO: 569159 - RNA, 19 nt, Artificial Sequence
  Description of Artificial Sequence: Synthetic oligonucleotide
ucuaaagccuucuguagcu

SEQ ID NO: 569160 - RNA, 19 nt, Artificial Sequence
  Description of Artificial Sequence: Synthetic oligonucleotide
uucgugaucaucagugaga

SEQ ID NO: 569161 - RNA, 19 nt, Artificial Sequence
  Description of Artificial Sequence: Synthetic oligonucleotide
acugcuaaggcuaaaagaa

SEQ ID NO: 569162 - RNA, 19 nt, Artificial Sequence
  Description of Artificial Sequence: Synthetic oligonucleotide
ggacuuagcaacucgaggc

SEQ ID NO: 569163 - RNA, 19 nt, Artificial Sequence
  Description of Artificial Sequence: Synthetic oligonucleotide
cuuggauugaauaaagucu

SEQ ID NO: 569164 - RNA, 19 nt, Artificial Sequence
  Description of Artificial Sequence: Synthetic oligonucleotide
agcaacucgaggcagcuug

SEQ ID NO: 569165 - RNA, 19 nt, Artificial Sequence
  Description of Artificial Sequence: Synthetic oligonucleotide
gaagauauuuggcacagua

SEQ ID NO: 569166 - RNA, 19 nt, Artificial Sequence
  Description of Artificial Sequence: Synthetic oligonucleotide
auucgugaucaucagugag

SEQ ID NO: 569167 - RNA, 19 nt, Artificial Sequence
  Description of Artificial Sequence: Synthetic oligonucleotide
aauucgugaucaucaguga

SEQ ID NO: 569168 - RNA, 19 nt, Artificial Sequence
  Description of Artificial Sequence: Synthetic oligonucleotide
aaguggucuccaauggccc

SEQ ID NO: 569169 - RNA, 19 nt, Artificial Sequence
  Description of Artificial Sequence: Synthetic oligonucleotide
gaugccaucgcaagcaaug

SEQ ID NO: 569170 - RNA, 19 nt, Artificial Sequence
  Description of Artificial Sequence: Synthetic oligonucleotide
acaacgagagucuccagca

SEQ ID NO: 569171 - RNA, 19 nt, Artificial Sequence
  Description of Artificial Sequence: Synthetic oligonucleotide
acuuggacuuagcaacucg

SEQ ID NO: 569172 - RNA, 19 nt, Artificial Sequence
  Description of Artificial Sequence: Synthetic oligonucleotide
gaucuuggauugaauaaag

SEQ ID NO: 569173 - RNA, 19 nt, Artificial Sequence
  Description of Artificial Sequence: Synthetic oligonucleotide
auauuuggcacaguacaag

SEQ ID NO: 569174 - RNA, 19 nt, Artificial Sequence
  Description of Artificial Sequence: Synthetic oligonucleotide
cgauggaugacaauaaccg

SEQ ID NO: 569175 - RNA, 19 nt, Artificial Sequence
  Description of Artificial Sequence: Synthetic oligonucleotide
gaaggaguuucccuagaug

SEQ ID NO: 569176 - RNA, 19 nt, Artificial Sequence
  Description of Artificial Sequence: Synthetic oligonucleotide
cacaacagcgcacaggcac

SEQ ID NO: 569177 - RNA, 19 nt, Artificial Sequence
  Description of Artificial Sequence: Synthetic oligonucleotide
uggagcucgacuguguucc

SEQ ID NO: 569178 - RNA, 19 nt, Artificial Sequence
  Description of Artificial Sequence: Synthetic oligonucleotide
uccaucguagacagaaaac

SEQ ID NO: 569179 - RNA, 19 nt, Artificial Sequence
  Description of Artificial Sequence: Synthetic oligonucleotide
gcuguaaccauccucuucc

SEQ ID NO: 569180 - RNA, 19 nt, Artificial Sequence
  Description of Artificial Sequence: Synthetic oligonucleotide
ucuuccacgauggaugaca

SEQ ID NO: 569181 - RNA, 19 nt, Artificial Sequence
  Description of Artificial Sequence: Synthetic oligonucleotide
ucgugaucaucagugagag

SEQ ID NO: 569182 - RNA, 19 nt, Artificial Sequence
  Description of Artificial Sequence: Synthetic oligonucleotide
gaauaaagucuacaaccuc

SEQ ID NO: 569183 - RNA, 19 nt, Artificial Sequence
  Description of Artificial Sequence: Synthetic oligonucleotide
uccccggagcacuugaccg

SEQ ID NO: 569184 - RNA, 19 nt, Artificial Sequence
  Description of Artificial Sequence: Synthetic oligonucleotide
caucaauagccaagaaggc

SEQ ID NO: 569185 - RNA, 19 nt, Artificial Sequence
  Description of Artificial Sequence: Synthetic oligonucleotide
ugaauucgugaucaucagu

SEQ ID NO: 569186 - RNA, 19 nt, Artificial Sequence
  Description of Artificial Sequence: Synthetic oligonucleotide
uguugcucgaaaguguaca

SEQ ID NO: 569187 - RNA, 19 nt, Artificial Sequence
  Description of Artificial Sequence: Synthetic oligonucleotide
uguagaaguggucuccaau

SEQ ID NO: 569188 - RNA, 19 nt, Artificial Sequence
  Description of Artificial Sequence: Synthetic oligonucleotide
cuugccgccagcauucuug

SEQ ID NO: 569189 - RNA, 19 nt, Artificial Sequence
  Description of Artificial Sequence: Synthetic oligonucleotide
guuggcugaucuuggauug

SEQ ID NO: 569190 - RNA, 19 nt, Artificial Sequence
  Description of Artificial Sequence: Synthetic oligonucleotide
uaucuaaagcuuugccagc

SEQ ID NO: 569191 - RNA, 19 nt, Artificial Sequence
  Description of Artificial Sequence: Synthetic oligonucleotide
cuugauguccggaagggca

SEQ ID NO: 569192 - RNA, 19 nt, Artificial Sequence
  Description of Artificial Sequence: Synthetic oligonucleotide
aacugcuagucccgcuugg

SEQ ID NO: 569193 - RNA, 19 nt, Artificial Sequence
  Description of Artificial Sequence: Synthetic oligonucleotide
cacaacgagagucuccagc

SEQ ID NO: 569194 - RNA, 19 nt, Artificial Sequence
  Description of Artificial Sequence: Synthetic oligonucleotide
gauggaugacaauaaccga

SEQ ID NO: 569195 - RNA, 19 nt, Artificial Sequence
  Description of Artificial Sequence: Synthetic oligonucleotide
caaugcagccuccucauug

SEQ ID NO: 569196 - RNA, 19 nt, Artificial Sequence
  Description of Artificial Sequence: Synthetic oligonucleotide
agacaaaacucagucucgg

SEQ ID NO: 569197 - RNA, 19 nt, Artificial Sequence
  Description of Artificial Sequence: Synthetic oligonucleotide
cuugccacucucuggcugg

SEQ ID NO: 569198 - RNA, 19 nt, Artificial Sequence
  Description of Artificial Sequence: Synthetic oligonucleotide
aucacguuggcugaucuug

SEQ ID NO: 569199 - RNA, 19 nt, Artificial Sequence
  Description of Artificial Sequence: Synthetic oligonucleotide
uacaguuaugagcauccuc

SEQ ID NO: 569200 - RNA, 19 nt, Artificial Sequence
  Description of Artificial Sequence: Synthetic oligonucleotide
accaaauacccacugcuaa

SEQ ID NO: 569201 - RNA, 19 nt, Artificial Sequence
  Description of Artificial Sequence: Synthetic oligonucleotide
uucugaucuuugauaauau

SEQ ID NO: 569202 - RNA, 19 nt, Artificial Sequence
  Description of Artificial Sequence: Synthetic oligonucleotide
agucaugguagccucuuca

SEQ ID NO: 569203 - RNA, 19 nt, Artificial Sequence
  Description of Artificial Sequence: Synthetic oligonucleotide
cuuagcaacucgaggcagc

SEQ ID NO: 569204 - RNA, 19 nt, Artificial Sequence
  Description of Artificial Sequence: Synthetic oligonucleotide
aucgcaagcaaugaccaug

SEQ ID NO: 569205 - RNA, 19 nt, Artificial Sequence
  Description of Artificial Sequence: Synthetic oligonucleotide
gucauguugucacauccug

SEQ ID NO: 569206 - RNA, 19 nt, Artificial Sequence
  Description of Artificial Sequence: Synthetic oligonucleotide
uuuguggucauaagacaua

SEQ ID NO: 569207 - RNA, 19 nt, Artificial Sequence
  Description of Artificial Sequence: Synthetic oligonucleotide
ucgcaagcaaugaccauga

SEQ ID NO: 569208 - RNA, 19 nt, Artificial Sequence
  Description of Artificial Sequence: Synthetic oligonucleotide
uccaacacaacagcgcaca

SEQ ID NO: 569209 - RNA, 19 nt, Artificial Sequence
  Description of Artificial Sequence: Synthetic oligonucleotide
uugauaauaucaggaagau

SEQ ID NO: 569210 - RNA, 19 nt, Artificial Sequence
  Description of Artificial Sequence: Synthetic oligonucleotide
ugaagcaaaugaugaugca

SEQ ID NO: 569211 - RNA, 19 nt, Artificial Sequence
  Description of Artificial Sequence: Synthetic oligonucleotide
ugucacauccuguaccauc

SEQ ID NO: 569212 - RNA, 19 nt, Artificial Sequence
  Description of Artificial Sequence: Synthetic oligonucleotide
uccagaugccaucgcaagc

SEQ ID NO: 569213 - RNA, 19 nt, Artificial Sequence
  Description of Artificial Sequence: Synthetic oligonucleotide
caggacgcgacccuugccg

SEQ ID NO: 569214 - RNA, 19 nt, Artificial Sequence
  Description of Artificial Sequence: Synthetic oligonucleotide
gaccaugaauucgugauca

SEQ ID NO: 569215 - RNA, 19 nt, Artificial Sequence
  Description of Artificial Sequence: Synthetic oligonucleotide
cucagucucggguccaagg

SEQ ID NO: 569216 - RNA, 19 nt, Artificial Sequence
  Description of Artificial Sequence: Synthetic oligonucleotide
agcucgacuguguuccggg

SEQ ID NO: 569217 - RNA, 19 nt, Artificial Sequence
  Description of Artificial Sequence: Synthetic oligonucleotide
caauagucaugguagccuc

SEQ ID NO: 569218 - RNA, 19 nt, Artificial Sequence
  Description of Artificial Sequence: Synthetic oligonucleotide
uccuguaccauccccugaa

SEQ ID NO: 569219 - RNA, 19 nt, Artificial Sequence
  Description of Artificial Sequence: Synthetic oligonucleotide
uugcauggcggagaagccg

SEQ ID NO: 569220 - RNA, 19 nt, Artificial Sequence
  Description of Artificial Sequence: Synthetic oligonucleotide
aaggcgagcaggacgcgac

SEQ ID NO: 569221 - RNA, 19 nt, Artificial Sequence
  Description of Artificial Sequence: Synthetic oligonucleotide
ugcauggcggagaagccgu

SEQ ID NO: 569222 - RNA, 19 nt, Artificial Sequence
  Description of Artificial Sequence: Synthetic oligonucleotide
uggucauaagacauaucua

SEQ ID NO: 569223 - RNA, 19 nt, Artificial Sequence
  Description of Artificial Sequence: Synthetic oligonucleotide
ccauguuccaagcuggagg

SEQ ID NO: 569224 - RNA, 19 nt, Artificial Sequence
  Description of Artificial Sequence: Synthetic oligonucleotide
acauuccagaugccaucgc

SEQ ID NO: 569225 - RNA, 19 nt, Artificial Sequence
  Description of Artificial Sequence: Synthetic oligonucleotide
agcaggacgcgacccuugc

SEQ ID NO: 569226 - RNA, 19 nt, Artificial Sequence
  Description of Artificial Sequence: Synthetic oligonucleotide
cacugcuaaggcuaaaaga

SEQ ID NO: 569227 - RNA, 19 nt, Artificial Sequence
  Description of Artificial Sequence: Synthetic oligonucleotide
aggcacagaaccgaccgac

SEQ ID NO: 569228 - RNA, 19 nt, Artificial Sequence
  Description of Artificial Sequence: Synthetic oligonucleotide
gacuuagcaacucgaggca

SEQ ID NO: 569229 - RNA, 19 nt, Artificial Sequence
  Description of Artificial Sequence: Synthetic oligonucleotide
auggaugacaauaaccgaa

SEQ ID NO: 569230 - RNA, 19 nt, Artificial Sequence
  Description of Artificial Sequence: Synthetic oligonucleotide
aaguguugcucgaaagugu

SEQ ID NO: 569231 - RNA, 19 nt, Artificial Sequence
  Description of Artificial Sequence: Synthetic oligonucleotide
acagaaccgaccgaccguc

SEQ ID NO: 569232 - RNA, 19 nt, Artificial Sequence
  Description of Artificial Sequence: Synthetic oligonucleotide
cugaucuuggauugaauaa

SEQ ID NO: 569233 - RNA, 19 nt, Artificial Sequence
  Description of Artificial Sequence: Synthetic oligonucleotide
gaccguguugggcugggag

SEQ ID NO: 569234 - RNA, 19 nt, Artificial Sequence
  Description of Artificial Sequence: Synthetic oligonucleotide
uguuuggccuuuagucuga

SEQ ID NO: 569235 - RNA, 19 nt, Artificial Sequence
  Description of Artificial Sequence: Synthetic oligonucleotide
ucugcccauaucgugucag

SEQ ID NO: 569236 - RNA, 19 nt, Artificial Sequence
  Description of Artificial Sequence: Synthetic oligonucleotide
cugguuuguggucauaaga

SEQ ID NO: 569237 - RNA, 19 nt, Artificial Sequence
  Description of Artificial Sequence: Synthetic oligonucleotide
auaaagucuacaaccuccu

SEQ ID NO: 569238 - RNA, 19 nt, Artificial Sequence
  Description of Artificial Sequence: Synthetic oligonucleotide
cacaccaaauacccacugc

SEQ ID NO: 569239 - RNA, 19 nt, Artificial Sequence
  Description of Artificial Sequence: Synthetic oligonucleotide
acaaggcaacuuccucccc

SEQ ID NO: 569240 - RNA, 19 nt, Artificial Sequence
  Description of Artificial Sequence: Synthetic oligonucleotide
gauauuuggcacaguacaa

SEQ ID NO: 569241 - RNA, 19 nt, Artificial Sequence
  Description of Artificial Sequence: Synthetic oligonucleotide
uggucaauuuggcaucaau

SEQ ID NO: 569242 - RNA, 19 nt, Artificial Sequence
  Description of Artificial Sequence: Synthetic oligonucleotide
aguuccagauuuggugugg

SEQ ID NO: 569243 - RNA, 19 nt, Artificial Sequence
  Description of Artificial Sequence: Synthetic oligonucleotide
cuuggacuuagcaacucga

SEQ ID NO: 569244 - RNA, 19 nt, Artificial Sequence
  Description of Artificial Sequence: Synthetic oligonucleotide
gcggcuaggggucacagag

SEQ ID NO: 569245 - RNA, 19 nt, Artificial Sequence
  Description of Artificial Sequence: Synthetic oligonucleotide
agagagcgggugcaagcgg

SEQ ID NO: 569246 - RNA, 19 nt, Artificial Sequence
  Description of Artificial Sequence: Synthetic oligonucleotide
acugcuagucccgcuuggc

SEQ ID NO: 569247 - RNA, 19 nt, Artificial Sequence
  Description of Artificial Sequence: Synthetic oligonucleotide
uaaccgaagcuccccauuu

SEQ ID NO: 569248 - RNA, 19 nt, Artificial Sequence
  Description of Artificial Sequence: Synthetic oligonucleotide
caucgccugucccaguucc

SEQ ID NO: 569249 - RNA, 19 nt, Artificial Sequence
  Description of Artificial Sequence: Synthetic oligonucleotide
uuguggucauaagacauau

SEQ ID NO: 569250 - RNA, 19 nt, Artificial Sequence
  Description of Artificial Sequence: Synthetic oligonucleotide
auaucgugucagcaacucu

SEQ ID NO: 569251 - RNA, 19 nt, Artificial Sequence
  Description of Artificial Sequence: Synthetic oligonucleotide
uucagugggucucccugca

SEQ ID NO: 569252 - RNA, 19 nt, Artificial Sequence
  Description of Artificial Sequence: Synthetic oligonucleotide
cuuguaggccuucugaucu

SEQ ID NO: 569253 - RNA, 19 nt, Artificial Sequence
  Description of Artificial Sequence: Synthetic oligonucleotide
uccucagguggcaaguuuu

SEQ ID NO: 569254 - RNA, 19 nt, Artificial Sequence
  Description of Artificial Sequence: Synthetic oligonucleotide
gaagugucuggagccaggc

SEQ ID NO: 569255 - RNA, 19 nt, Artificial Sequence
  Description of Artificial Sequence: Synthetic oligonucleotide
gaugcaugucauguuguca

SEQ ID NO: 569256 - RNA, 19 nt, Artificial Sequence
  Description of Artificial Sequence: Synthetic oligonucleotide
gucaggacaacugcuaguc

SEQ ID NO: 569257 - RNA, 19 nt, Artificial Sequence
  Description of Artificial Sequence: Synthetic oligonucleotide
accaccgccguugugccac

SEQ ID NO: 569258 - RNA, 19 nt, Artificial Sequence
  Description of Artificial Sequence: Synthetic oligonucleotide
gcauuccucacugucaucc

SEQ ID NO: 569259 - RNA, 19 nt, Artificial Sequence
  Description of Artificial Sequence: Synthetic oligonucleotide
uuagcaacucgaggcagcu

SEQ ID NO: 569260 - RNA, 19 nt, Artificial Sequence
  Description of Artificial Sequence: Synthetic oligonucleotide
uugaggccuccauugacuc

SEQ ID NO: 569261 - RNA, 19 nt, Artificial Sequence
  Description of Artificial Sequence: Synthetic oligonucleotide
ugacucuuccauccauggu

SEQ ID NO: 569262 - RNA, 19 nt, Artificial Sequence
  Description of Artificial Sequence: Synthetic oligonucleotide
acuuagcaacucgaggcag

SEQ ID NO: 569263 - RNA, 19 nt, Artificial Sequence
  Description of Artificial Sequence: Synthetic oligonucleotide
uccucuuguagaagugguc

SEQ ID NO: 569264 - RNA, 19 nt, Artificial Sequence
  Description of Artificial Sequence: Synthetic oligonucleotide
agcucaccaauuuggccug

SEQ ID NO: 569265 - RNA, 19 nt, Artificial Sequence
  Description of Artificial Sequence: Synthetic oligonucleotide
auugacucuuccauccaug

SEQ ID NO: 569266 - RNA, 19 nt, Artificial Sequence
  Description of Artificial Sequence: Synthetic oligonucleotide
caagcuggaggaaaggucu

SEQ ID NO: 569267 - RNA, 19 nt, Artificial Sequence
  Description of Artificial Sequence: Synthetic oligonucleotide
acagcgcacaggcacagaa

SEQ ID NO: 569268 - RNA, 19 nt, Artificial Sequence
  Description of Artificial Sequence: Synthetic oligonucleotide
ugucccaguuccagauuug

SEQ ID NO: 569269 - RNA, 19 nt, Artificial Sequence
  Description of Artificial Sequence: Synthetic oligonucleotide
cacgauggaugacaauaac

SEQ ID NO: 569270 - RNA, 19 nt, Artificial Sequence
  Description of Artificial Sequence: Synthetic oligonucleotide
aagugucuggagccaggca

SEQ ID NO: 569271 - RNA, 19 nt, Artificial Sequence
  Description of Artificial Sequence: Synthetic oligonucleotide
gcacagaaccgaccgaccg

SEQ ID NO: 569272 - RNA, 19 nt, Artificial Sequence
  Description of Artificial Sequence: Synthetic oligonucleotide
ugauaauaucaggaagaua

SEQ ID NO: 569273 - RNA, 19 nt, Artificial Sequence
  Description of Artificial Sequence: Synthetic oligonucleotide
aggacgcgacccuugccgg

SEQ ID NO: 569274 - RNA, 19 nt, Artificial Sequence
  Description of Artificial Sequence: Synthetic oligonucleotide
cauaucgugucagcaacuc

SEQ ID NO: 569275 - RNA, 19 nt, Artificial Sequence
  Description of Artificial Sequence: Synthetic oligonucleotide
agagcccucuuuggaaugg

SEQ ID NO: 569276 - RNA, 19 nt, Artificial Sequence
  Description of Artificial Sequence: Synthetic oligonucleotide
uguggucaauuuggcauca

SEQ ID NO: 569277 - RNA, 19 nt, Artificial Sequence
  Description of Artificial Sequence: Synthetic oligonucleotide
cucgacuguguuccggggc

SEQ ID NO: 569278 - RNA, 19 nt, Artificial Sequence
  Description of Artificial Sequence: Synthetic oligonucleotide
aguuccuuaaugacuuccu

SEQ ID NO: 569279 - RNA, 19 nt, Artificial Sequence
  Description of Artificial Sequence: Synthetic oligonucleotide
agggagagcccucuuugga

SEQ ID NO: 569280 - RNA, 19 nt, Artificial Sequence
  Description of Artificial Sequence: Synthetic oligonucleotide
accguguugggcugggaga

SEQ ID NO: 569281 - RNA, 19 nt, Artificial Sequence
  Description of Artificial Sequence: Synthetic oligonucleotide
guccaucguagacagaaaa

SEQ ID NO: 569282 - RNA, 19 nt, Artificial Sequence
  Description of Artificial Sequence: Synthetic oligonucleotide
auacccacugcuaaggcua

SEQ ID NO: 569283 - RNA, 19 nt, Artificial Sequence
  Description of Artificial Sequence: Synthetic oligonucleotide
uguggucauaagacauauc

SEQ ID NO: 569284 - RNA, 19 nt, Artificial Sequence
  Description of Artificial Sequence: Synthetic oligonucleotide
cauuccagaugccaucgca

SEQ ID NO: 569285 - RNA, 19 nt, Artificial Sequence
  Description of Artificial Sequence: Synthetic oligonucleotide
cagauuugguguggggagg

SEQ ID NO: 569286 - RNA, 19 nt, Artificial Sequence
  Description of Artificial Sequence: Synthetic oligonucleotide
guuccagauuugguguggg

SEQ ID NO: 569287 - RNA, 19 nt, Artificial Sequence
  Description of Artificial Sequence: Synthetic oligonucleotide
auaaccgaagcuccccauu

SEQ ID NO: 569288 - RNA, 19 nt, Artificial Sequence
  Description of Artificial Sequence: Synthetic oligonucleotide
guaucagagccaccaccgc

SEQ ID NO: 569289 - RNA, 19 nt, Artificial Sequence
  Description of Artificial Sequence: Synthetic oligonucleotide
cagucucggguccaagggc

SEQ ID NO: 569290 - RNA, 19 nt, Artificial Sequence
  Description of Artificial Sequence: Synthetic oligonucleotide
cacaggcacagaaccgacc

SEQ ID NO: 569291 - RNA, 19 nt, Artificial Sequence
  Description of Artificial Sequence: Synthetic oligonucleotide
gagagcgggugcaagcggc

SEQ ID NO: 569292 - RNA, 19 nt, Artificial Sequence
  Description of Artificial Sequence: Synthetic oligonucleotide
caauagccaagaaggcauc

SEQ ID NO: 569293 - RNA, 19 nt, Artificial Sequence
  Description of Artificial Sequence: Synthetic oligonucleotide
cugcuagucccgcuuggcc

SEQ ID NO: 569294 - RNA, 19 nt, Artificial Sequence
  Description of Artificial Sequence: Synthetic oligonucleotide
ugcccauaucgugucagca

SEQ ID NO: 569295 - RNA, 19 nt, Artificial Sequence
  Description of Artificial Sequence: Synthetic oligonucleotide
cacacaacgagagucucca

SEQ ID NO: 569296 - RNA, 19 nt, Artificial Sequence
  Description of Artificial Sequence: Synthetic oligonucleotide
uugcucgaaaguguacaac

SEQ ID NO: 569297 - RNA, 19 nt, Artificial Sequence
  Description of Artificial Sequence: Synthetic oligonucleotide
aaccgaccgaccgucgaug

SEQ ID NO: 569298 - RNA, 19 nt, Artificial Sequence
  Description of Artificial Sequence: Synthetic oligonucleotide
cagcaaggcucccaggcug

SEQ ID NO: 569299 - RNA, 19 nt, Artificial Sequence
  Description of Artificial Sequence: Synthetic oligonucleotide
agaaccgaccgaccgucga

SEQ ID NO: 569300 - RNA, 19 nt, Artificial Sequence
  Description of Artificial Sequence: Synthetic oligonucleotide
cagcucaccaauuuggccu

SEQ ID NO: 569301 - RNA, 19 nt, Artificial Sequence
  Description of Artificial Sequence: Synthetic oligonucleotide
ggugcaagcggcuaggggu

SEQ ID NO: 569302 - RNA, 19 nt, Artificial Sequence
  Description of Artificial Sequence: Synthetic oligonucleotide
accacacaacgagagucuc

SEQ ID NO: 569303 - RNA, 19 nt, Artificial Sequence
  Description of Artificial Sequence: Synthetic oligonucleotide
uaccauccccugaaguguc

SEQ ID NO: 569304 - RNA, 19 nt, Artificial Sequence
  Description of Artificial Sequence: Synthetic oligonucleotide
agcgggugcaagcggcuag

SEQ ID NO: 569305 - RNA, 19 nt, Artificial Sequence
  Description of Artificial Sequence: Synthetic oligonucleotide
gacgcgacccuugccggcg

SEQ ID NO: 569306 - RNA, 19 nt, Artificial Sequence
  Description of Artificial Sequence: Synthetic oligonucleotide
gucauaagacauaucuaaa

SEQ ID NO: 569307 - RNA, 19 nt, Artificial Sequence
  Description of Artificial Sequence: Synthetic oligonucleotide
gcugaucuuggauugaaua

SEQ ID NO: 569308 - RNA, 19 nt, Artificial Sequence
  Description of Artificial Sequence: Synthetic oligonucleotide
guugcucgaaaguguacaa

SEQ ID NO: 569309 - RNA, 19 nt, Artificial Sequence
  Description of Artificial Sequence: Synthetic oligonucleotide
agacgcgccagccuugcau

SEQ ID NO: 569310 - RNA, 19 nt, Artificial Sequence
  Description of Artificial Sequence: Synthetic oligonucleotide
uugccgccagcauucuuga

SEQ ID NO: 569311 - RNA, 19 nt, Artificial Sequence
  Description of Artificial Sequence: Synthetic oligonucleotide
gaccgaccgucgaugagcc

SEQ ID NO: 569312 - RNA, 19 nt, Artificial Sequence
  Description of Artificial Sequence: Synthetic oligonucleotide
agucucggguccaagggcu

SEQ ID NO: 569313 - RNA, 19 nt, Artificial Sequence
  Description of Artificial Sequence: Synthetic oligonucleotide
cuccaacacaacagcgcac

SEQ ID NO: 569314 - RNA, 19 nt, Artificial Sequence
  Description of Artificial Sequence: Synthetic oligonucleotide
aagcggcuaggggucacag

SEQ ID NO: 569315 - RNA, 19 nt, Artificial Sequence
  Description of Artificial Sequence: Synthetic oligonucleotide
cugugccaguuccuuaaug

SEQ ID NO: 569316 - RNA, 19 nt, Artificial Sequence
  Description of Artificial Sequence: Synthetic oligonucleotide
aguguugcucgaaagugua

SEQ ID NO: 569317 - RNA, 19 nt, Artificial Sequence
  Description of Artificial Sequence: Synthetic oligonucleotide
cugggaaggaguuucccua

SEQ ID NO: 569318 - RNA, 19 nt, Artificial Sequence
  Description of Artificial Sequence: Synthetic oligonucleotide
augcgugcuagcuccacuu

SEQ ID NO: 569319 - RNA, 19 nt, Artificial Sequence
  Description of Artificial Sequence: Synthetic oligonucleotide
cccauaucgugucagcaac

SEQ ID NO: 569320 - RNA, 19 nt, Artificial Sequence
  Description of Artificial Sequence: Synthetic oligonucleotide
uggggagggcccuucugac

SEQ ID NO: 569321 - RNA, 19 nt, Artificial Sequence
  Description of Artificial Sequence: Synthetic oligonucleotide
ugaggccuccauugacucu

SEQ ID NO: 569322 - RNA, 19 nt, Artificial Sequence
  Description of Artificial Sequence: Synthetic oligonucleotide
uggagggagagcccucuuu

SEQ ID NO: 569323 - RNA, 19 nt, Artificial Sequence
  Description of Artificial Sequence: Synthetic oligonucleotide
cugcuaaggcuaaaagaaa

SEQ ID NO: 569324 - RNA, 19 nt, Artificial Sequence
  Description of Artificial Sequence: Synthetic oligonucleotide
caacugcuagucccgcuug

SEQ ID NO: 569325 - RNA, 19 nt, Artificial Sequence
  Description of Artificial Sequence: Synthetic oligonucleotide
cagaaccacuaguccuucc

SEQ ID NO: 569326 - RNA, 19 nt, Artificial Sequence
  Description of Artificial Sequence: Synthetic oligonucleotide
uucugcccauaucguguca

SEQ ID NO: 569327 - RNA, 19 nt, Artificial Sequence
  Description of Artificial Sequence: Synthetic oligonucleotide
gaauguccuuaaauaaagu

SEQ ID NO: 569328 - RNA, 19 nt, Artificial Sequence
  Description of Artificial Sequence: Synthetic oligonucleotide
gagcucgacuguguuccgg

SEQ ID NO: 569329 - RNA, 19 nt, Artificial Sequence
  Description of Artificial Sequence: Synthetic oligonucleotide
uggagacgcgccagccuug

SEQ ID NO: 569330 - RNA, 19 nt, Artificial Sequence
  Description of Artificial Sequence: Synthetic oligonucleotide
ccaucguagacagaaaaca

SEQ ID NO: 569331 - RNA, 19 nt, Artificial Sequence
  Description of Artificial Sequence: Synthetic oligonucleotide
ugcgugcuagcuccacuuc

SEQ ID NO: 569332 - RNA, 19 nt, Artificial Sequence
  Description of Artificial Sequence: Synthetic oligonucleotide
uugaugcgugcuagcucca

SEQ ID NO: 569333 - RNA, 19 nt, Artificial Sequence
  Description of Artificial Sequence: Synthetic oligonucleotide
gcucgaaaguguacaacag

SEQ ID NO: 569334 - RNA, 19 nt, Artificial Sequence
  Description of Artificial Sequence: Synthetic oligonucleotide
gguucaucgccugucccag

SEQ ID NO: 569335 - RNA, 19 nt, Artificial Sequence
  Description of Artificial Sequence: Synthetic oligonucleotide
gaguuucccuagauggguc

SEQ ID NO: 569336 - RNA, 19 nt, Artificial Sequence
  Description of Artificial Sequence: Synthetic oligonucleotide
caucguagacagaaaacau

SEQ ID NO: 569337 - RNA, 19 nt, Artificial Sequence
  Description of Artificial Sequence: Synthetic oligonucleotide
ucagaaccacuaguccuuc

SEQ ID NO: 569338 - RNA, 19 nt, Artificial Sequence
  Description of Artificial Sequence: Synthetic oligonucleotide
acacaacgagagucuccag

SEQ ID NO: 569339 - RNA, 19 nt, Artificial Sequence
  Description of Artificial Sequence: Synthetic oligonucleotide
cuggagcucgacuguguuc

SEQ ID NO: 569340 - RNA, 19 nt, Artificial Sequence
  Description of Artificial Sequence: Synthetic oligonucleotide
acaacagcgcacaggcaca

SEQ ID NO: 569341 - RNA, 19 nt, Artificial Sequence
  Description of Artificial Sequence: Synthetic oligonucleotide
uccacggagagugccuccu

SEQ ID NO: 569342 - RNA, 19 nt, Artificial Sequence
  Description of Artificial Sequence: Synthetic oligonucleotide
cagaaccgaccgaccgucg

SEQ ID NO: 569343 - RNA, 19 nt, Artificial Sequence
  Description of Artificial Sequence: Synthetic oligonucleotide
auacaguuaugagcauccu

SEQ ID NO: 569344 - RNA, 19 nt, Artificial Sequence
  Description of Artificial Sequence: Synthetic oligonucleotide
gagagugccuccucaaguu

SEQ ID NO: 569345 - RNA, 19 nt, Artificial Sequence
  Description of Artificial Sequence: Synthetic oligonucleotide
gguaccaucaucucuucuu

SEQ ID NO: 569346 - RNA, 19 nt, Artificial Sequence
  Description of Artificial Sequence: Synthetic oligonucleotide
ccguaucagagccaccacc

SEQ ID NO: 569347 - RNA, 19 nt, Artificial Sequence
  Description of Artificial Sequence: Synthetic oligonucleotide
aguguacaacagagagcgg

SEQ ID NO: 569348 - RNA, 19 nt, Artificial Sequence
  Description of Artificial Sequence: Synthetic oligonucleotide
ugauguccggaagggcaga

SEQ ID NO: 569349 - RNA, 19 nt, Artificial Sequence
  Description of Artificial Sequence: Synthetic oligonucleotide
ucagugggucucccugcaa

SEQ ID NO: 569350 - RNA, 19 nt, Artificial Sequence
  Description of Artificial Sequence: Synthetic oligonucleotide
accgaccgaccgucgauga

SEQ ID NO: 569351 - RNA, 19 nt, Artificial Sequence
  Description of Artificial Sequence: Synthetic oligonucleotide
guagcagugcccagcucac

SEQ ID NO: 569352 - RNA, 19 nt, Artificial Sequence
  Description of Artificial Sequence: Synthetic oligonucleotide
accgaccgucgaugagccc

SEQ ID NO: 569353 - RNA, 19 nt, Artificial Sequence
  Description of Artificial Sequence: Synthetic oligonucleotide
gagcgccaaccccaucccc

SEQ ID NO: 569354 - RNA, 19 nt, Artificial Sequence
  Description of Artificial Sequence: Synthetic oligonucleotide
acggagagugccuccucaa

SEQ ID NO: 569355 - RNA, 19 nt, Artificial Sequence
  Description of Artificial Sequence: Synthetic oligonucleotide
uccccauuuucaucacguu

SEQ ID NO: 569356 - RNA, 19 nt, Artificial Sequence
  Description of Artificial Sequence: Synthetic oligonucleotide
caccaaauacccacugcua

SEQ ID NO: 569357 - RNA, 19 nt, Artificial Sequence
  Description of Artificial Sequence: Synthetic oligonucleotide
ggagcacuugaccguguug

SEQ ID NO: 569358 - RNA, 19 nt, Artificial Sequence
  Description of Artificial Sequence: Synthetic oligonucleotide
gaugcgugcuagcuccacu

SEQ ID NO: 569359 - RNA, 19 nt, Artificial Sequence
  Description of Artificial Sequence: Synthetic oligonucleotide
ccgaccgucgaugagcccc

SEQ ID NO: 569360 - RNA, 19 nt, Artificial Sequence
  Description of Artificial Sequence: Synthetic oligonucleotide
ccacacaacgagagucucc

SEQ ID NO: 569361 - RNA, 19 nt, Artificial Sequence
  Description of Artificial Sequence: Synthetic oligonucleotide
uuguaggccuucugaucuu

SEQ ID NO: 569362 - RNA, 19 nt, Artificial Sequence
  Description of Artificial Sequence: Synthetic oligonucleotide
ugaugcgugcuagcuccac

SEQ ID NO: 569363 - RNA, 19 nt, Artificial Sequence
  Description of Artificial Sequence: Synthetic oligonucleotide
cagguaccaucaucucuuc

SEQ ID NO: 569364 - RNA, 19 nt, Artificial Sequence
  Description of Artificial Sequence: Synthetic oligonucleotide
gaaggcgagcaggacgcga

SEQ ID NO: 569365 - RNA, 19 nt, Artificial Sequence
  Description of Artificial Sequence: Synthetic oligonucleotide
cauccccggagcacuugac

SEQ ID NO: 569366 - RNA, 19 nt, Artificial Sequence
  Description of Artificial Sequence: Synthetic oligonucleotide
uuuggcuguggggccauuu

SEQ ID NO: 569367 - RNA, 19 nt, Artificial Sequence
  Description of Artificial Sequence: Synthetic oligonucleotide
gaggcgcggagcgccaacc

SEQ ID NO: 569368 - RNA, 19 nt, Artificial Sequence
  Description of Artificial Sequence: Synthetic oligonucleotide
acgcgacccuugccggcgc

SEQ ID NO: 569369 - RNA, 19 nt, Artificial Sequence
  Description of Artificial Sequence: Synthetic oligonucleotide
gcaagcaaugaccaugaau

SEQ ID NO: 569370 - RNA, 19 nt, Artificial Sequence
  Description of Artificial Sequence: Synthetic oligonucleotide
cacggagagugccuccuca

SEQ ID NO: 569371 - RNA, 19 nt, Artificial Sequence
  Description of Artificial Sequence: Synthetic oligonucleotide
agcggcuaggggucacaga

SEQ ID NO: 569372 - RNA, 19 nt, Artificial Sequence
  Description of Artificial Sequence: Synthetic oligonucleotide
gucaugguagccucuucau

SEQ ID NO: 569373 - RNA, 19 nt, Artificial Sequence
  Description of Artificial Sequence: Synthetic oligonucleotide
ggagcgccaaccccauccc

SEQ ID NO: 569374 - RNA, 19 nt, Artificial Sequence
  Description of Artificial Sequence: Synthetic oligonucleotide
ggagagugccuccucaagu

SEQ ID NO: 569375 - RNA, 19 nt, Artificial Sequence
  Description of Artificial Sequence: Synthetic oligonucleotide
caaggcaacuuccuccccu

SEQ ID NO: 569376 - RNA, 19 nt, Artificial Sequence
  Description of Artificial Sequence: Synthetic oligonucleotide
gcucgacuguguuccgggg

SEQ ID NO: 569377 - RNA, 19 nt, Artificial Sequence
  Description of Artificial Sequence: Synthetic oligonucleotide
gacaacugcuagucccgcu

SEQ ID NO: 569378 - RNA, 19 nt, Artificial Sequence
  Description of Artificial Sequence: Synthetic oligonucleotide
accgccguugugccacugu

SEQ ID NO: 569379 - RNA, 19 nt, Artificial Sequence
  Description of Artificial Sequence: Synthetic oligonucleotide
aacagcgcacaggcacaga

SEQ ID NO: 569380 - RNA, 19 nt, Artificial Sequence
  Description of Artificial Sequence: Synthetic oligonucleotide
gcgccagccuugcauggcg

SEQ ID NO: 569381 - RNA, 19 nt, Artificial Sequence
  Description of Artificial Sequence: Synthetic oligonucleotide
guguugcucgaaaguguac

SEQ ID NO: 569382 - RNA, 19 nt, Artificial Sequence
  Description of Artificial Sequence: Synthetic oligonucleotide
gggagagcccucuuuggaa

SEQ ID NO: 569383 - RNA, 19 nt, Artificial Sequence
  Description of Artificial Sequence: Synthetic oligonucleotide
guccggaagggcagaaauc

SEQ ID NO: 569384 - RNA, 19 nt, Artificial Sequence
  Description of Artificial Sequence: Synthetic oligonucleotide
gugcaagcggcuagggguc

SEQ ID NO: 569385 - RNA, 19 nt, Artificial Sequence
  Description of Artificial Sequence: Synthetic oligonucleotide
agcgggaggcgcggagcgc

SEQ ID NO: 569386 - RNA, 19 nt, Artificial Sequence
  Description of Artificial Sequence: Synthetic oligonucleotide
uccuucccuccaacacaac

SEQ ID NO: 569387 - RNA, 19 nt, Artificial Sequence
  Description of Artificial Sequence: Synthetic oligonucleotide
ugcaagcggcuagggguca

SEQ ID NO: 569388 - RNA, 19 nt, Artificial Sequence
  Description of Artificial Sequence: Synthetic oligonucleotide
cacccauggcggcggcugg

SEQ ID NO: 569389 - RNA, 19 nt, Artificial Sequence
  Description of Artificial Sequence: Synthetic oligonucleotide
gauguccggaagggcagaa

SEQ ID NO: 569390 - RNA, 19 nt, Artificial Sequence
  Description of Artificial Sequence: Synthetic oligonucleotide
acuguguuccggggcuuga

SEQ ID NO: 569391 - RNA, 19 nt, Artificial Sequence
  Description of Artificial Sequence: Synthetic oligonucleotide
gcgccaaccccauccccgg

SEQ ID NO: 569392 - RNA, 19 nt, Artificial Sequence
  Description of Artificial Sequence: Synthetic oligonucleotide
gaaccgaccgaccgucgau

SEQ ID NO: 569393 - RNA, 19 nt, Artificial Sequence
  Description of Artificial Sequence: Synthetic oligonucleotide
ggcacagaaccgaccgacc

SEQ ID NO: 569394 - RNA, 19 nt, Artificial Sequence
  Description of Artificial Sequence: Synthetic oligonucleotide
gcgugcuagcuccacuuca

SEQ ID NO: 569395 - RNA, 19 nt, Artificial Sequence
  Description of Artificial Sequence: Synthetic oligonucleotide
agagcgggugcaagcggcu

SEQ ID NO: 569396 - RNA, 19 nt, Artificial Sequence
  Description of Artificial Sequence: Synthetic oligonucleotide
uacaaccuccuggcugcuc

SEQ ID NO: 569397 - RNA, 19 nt, Artificial Sequence
  Description of Artificial Sequence: Synthetic oligonucleotide
cacagaaccgaccgaccgu

SEQ ID NO: 569398 - RNA, 19 nt, Artificial Sequence
  Description of Artificial Sequence: Synthetic oligonucleotide
ggacaacugcuagucccgc

SEQ ID NO: 569399 - RNA, 19 nt, Artificial Sequence
  Description of Artificial Sequence: Synthetic oligonucleotide
ccacgauggaugacaauaa

SEQ ID NO: 569400 - RNA, 19 nt, Artificial Sequence
  Description of Artificial Sequence: Synthetic oligonucleotide
cgaccgaccgucgaugagc

SEQ ID NO: 569401 - RNA, 19 nt, Artificial Sequence
  Description of Artificial Sequence: Synthetic oligonucleotide
ggcgagcaggacgcgaccc

SEQ ID NO: 569402 - RNA, 19 nt, Artificial Sequence
  Description of Artificial Sequence: Synthetic oligonucleotide
ggagagcccucuuuggaau

SEQ ID NO: 569403 - RNA, 19 nt, Artificial Sequence
  Description of Artificial Sequence: Synthetic oligonucleotide
guuccggggcuugaagcaa

SEQ ID NO: 569404 - RNA, 19 nt, Artificial Sequence
  Description of Artificial Sequence: Synthetic oligonucleotide
ggacgcgacccuugccggc

SEQ ID NO: 569405 - RNA, 19 nt, Artificial Sequence
  Description of Artificial Sequence: Synthetic oligonucleotide
ugccgcguggagggagagc

SEQ ID NO: 569406 - RNA, 19 nt, Artificial Sequence
  Description of Artificial Sequence: Synthetic oligonucleotide
guuucccuagauggguccu

SEQ ID NO: 569407 - RNA, 19 nt, Artificial Sequence
  Description of Artificial Sequence: Synthetic oligonucleotide
gcacccauggcggcggcug

SEQ ID NO: 569408 - RNA, 19 nt, Artificial Sequence
  Description of Artificial Sequence: Synthetic oligonucleotide
gcaggacgcgacccuugcc

SEQ ID NO: 569409 - RNA, 19 nt, Artificial Sequence
  Description of Artificial Sequence: Synthetic oligonucleotide
ccccguaucagagccacca

SEQ ID NO: 569410 - RNA, 19 nt, Artificial Sequence
  Description of Artificial Sequence: Synthetic oligonucleotide
cagugggucucccugcaau

SEQ ID NO: 569411 - RNA, 19 nt, Artificial Sequence
  Description of Artificial Sequence: Synthetic oligonucleotide
gagacgcgccagccuugca

SEQ ID NO: 569412 - RNA, 19 nt, Artificial Sequence
  Description of Artificial Sequence: Synthetic oligonucleotide
ugccgccagcauucuugau

SEQ ID NO: 569413 - RNA, 19 nt, Artificial Sequence
  Description of Artificial Sequence: Synthetic oligonucleotide
cccguaucagagccaccac

SEQ ID NO: 569414 - RNA, 19 nt, Artificial Sequence
  Description of Artificial Sequence: Synthetic oligonucleotide
gaggcccugaggcccuggu

SEQ ID NO: 569415 - RNA, 19 nt, Artificial Sequence
  Description of Artificial Sequence: Synthetic oligonucleotide
caagcggcuaggggucaca

SEQ ID NO: 569416 - RNA, 19 nt, Artificial Sequence
  Description of Artificial Sequence: Synthetic oligonucleotide
ccuugccggcgccggagcc

SEQ ID NO: 569417 - RNA, 19 nt, Artificial Sequence
  Description of Artificial Sequence: Synthetic oligonucleotide
caucgcaagcaaugaccau

SEQ ID NO: 569418 - RNA, 19 nt, Artificial Sequence
  Description of Artificial Sequence: Synthetic oligonucleotide
cagcaccuugauguccgga

SEQ ID NO: 569419 - RNA, 19 nt, Artificial Sequence
  Description of Artificial Sequence: Synthetic oligonucleotide
ccgccguugugccacuguc

SEQ ID NO: 569420 - RNA, 19 nt, Artificial Sequence
  Description of Artificial Sequence: Synthetic oligonucleotide
gcggcuggccggcgguggg

SEQ ID NO: 569421 - RNA, 19 nt, Artificial Sequence
  Description of Artificial Sequence: Synthetic oligonucleotide
accuugccgccagcauucu

SEQ ID NO: 569422 - RNA, 19 nt, Artificial Sequence
  Description of Artificial Sequence: Synthetic oligonucleotide
ggaggcgcggagcgccaac

SEQ ID NO: 569423 - RNA, 19 nt, Artificial Sequence
  Description of Artificial Sequence: Synthetic oligonucleotide
ccgaccgaccgucgaugag

SEQ ID NO: 569424 - RNA, 19 nt, Artificial Sequence
  Description of Artificial Sequence: Synthetic oligonucleotide
cccggagcacuugaccgug

SEQ ID NO: 569425 - RNA, 19 nt, Artificial Sequence
  Description of Artificial Sequence: Synthetic oligonucleotide
guggucaauuuggcaucaa

SEQ ID NO: 569426 - RNA, 19 nt, Artificial Sequence
  Description of Artificial Sequence: Synthetic oligonucleotide
guucaucgccugucccagu

SEQ ID NO: 569427 - RNA, 19 nt, Artificial Sequence
  Description of Artificial Sequence: Synthetic oligonucleotide
gcgacccuugccggcgccg

SEQ ID NO: 569428 - RNA, 19 nt, Artificial Sequence
  Description of Artificial Sequence: Synthetic oligonucleotide
ccccuccacggagagugcc

SEQ ID NO: 569429 - RNA, 19 nt, Artificial Sequence
  Description of Artificial Sequence: Synthetic oligonucleotide
ccauaucgugucagcaacu

SEQ ID NO: 569430 - RNA, 19 nt, Artificial Sequence
  Description of Artificial Sequence: Synthetic oligonucleotide
ggcugcggagccgacgcaa

SEQ ID NO: 569431 - RNA, 19 nt, Artificial Sequence
  Description of Artificial Sequence: Synthetic oligonucleotide
gcucaccaauuuggccugc

SEQ ID NO: 569432 - RNA, 19 nt, Artificial Sequence
  Description of Artificial Sequence: Synthetic oligonucleotide
ggaagauauuuggcacagu

SEQ ID NO: 569433 - RNA, 19 nt, Artificial Sequence
  Description of Artificial Sequence: Synthetic oligonucleotide
gcuggagcucgacuguguu

SEQ ID NO: 569434 - RNA, 19 nt, Artificial Sequence
  Description of Artificial Sequence: Synthetic oligonucleotide
ccgcguggagggagagccc

SEQ ID NO: 569435 - RNA, 19 nt, Artificial Sequence
  Description of Artificial Sequence: Synthetic oligonucleotide
gcaagcggcuaggggucac

SEQ ID NO: 569436 - RNA, 19 nt, Artificial Sequence
  Description of Artificial Sequence: Synthetic oligonucleotide
ccacggagagugccuccuc

SEQ ID NO: 569437 - RNA, 19 nt, Artificial Sequence
  Description of Artificial Sequence: Synthetic oligonucleotide
gcgagcaggacgcgacccu

SEQ ID NO: 569438 - RNA, 19 nt, Artificial Sequence
  Description of Artificial Sequence: Synthetic oligonucleotide
caccgccguugugccacug

SEQ ID NO: 569439 - RNA, 19 nt, Artificial Sequence
  Description of Artificial Sequence: Synthetic oligonucleotide
ccggggcuugaagcaaaug

SEQ ID NO: 569440 - RNA, 19 nt, Artificial Sequence
  Description of Artificial Sequence: Synthetic oligonucleotide
gccuugcauggcggagaag

SEQ ID NO: 569441 - RNA, 19 nt, Artificial Sequence
  Description of Artificial Sequence: Synthetic oligonucleotide
gcaacucgaggcagcuugu

SEQ ID NO: 569442 - RNA, 19 nt, Artificial Sequence
  Description of Artificial Sequence: Synthetic oligonucleotide
cgccguugugccacuguca

SEQ ID NO: 569443 - RNA, 19 nt, Artificial Sequence
  Description of Artificial Sequence: Synthetic oligonucleotide
ccccggagcacuugaccgu

SEQ ID NO: 569444 - RNA, 19 nt, Artificial Sequence
  Description of Artificial Sequence: Synthetic oligonucleotide
gcguggagggagagcccuc

SEQ ID NO: 569445 - RNA, 19 nt, Artificial Sequence
  Description of Artificial Sequence: Synthetic oligonucleotide
gcccugguucaucgccugu

SEQ ID NO: 569446 - RNA, 19 nt, Artificial Sequence
  Description of Artificial Sequence: Synthetic oligonucleotide
gcggagcgccaaccccauc

SEQ ID NO: 569447 - RNA, 19 nt, Artificial Sequence
  Description of Artificial Sequence: Synthetic oligonucleotide
cgcgacccuugccggcgcc

SEQ ID NO: 569448 - RNA, 19 nt, Artificial Sequence
  Description of Artificial Sequence: Synthetic oligonucleotide
gcuggccggcgguggggaa

SEQ ID NO: 569449 - RNA, 19 nt, Artificial Sequence
  Description of Artificial Sequence: Synthetic oligonucleotide
cugucagagccaggcucuu

SEQ ID NO: 569450 - RNA, 19 nt, Artificial Sequence
  Description of Artificial Sequence: Synthetic oligonucleotide
gcauggcggagaagccgua

SEQ ID NO: 569451 - RNA, 19 nt, Artificial Sequence
  Description of Artificial Sequence: Synthetic oligonucleotide
ccauuccagguaccaucau

SEQ ID NO: 569452 - RNA, 19 nt, Artificial Sequence
  Description of Artificial Sequence: Synthetic oligonucleotide
cgcguggagggagagcccu

SEQ ID NO: 569453 - RNA, 19 nt, Artificial Sequence
  Description of Artificial Sequence: Synthetic oligonucleotide
ccggagcacuugaccgugu

SEQ ID NO: 569454 - RNA, 19 nt, Artificial Sequence
  Description of Artificial Sequence: Synthetic oligonucleotide
ggggcgcgcguggcaggga

SEQ ID NO: 569455 - RNA, 19 nt, Artificial Sequence
  Description of Artificial Sequence: Synthetic oligonucleotide
ccuugccgccagcauucuu

SEQ ID NO: 569456 - RNA, 19 nt, Artificial Sequence
  Description of Artificial Sequence: Synthetic oligonucleotide
cgagcaggacgcgacccuu

SEQ ID NO: 569457 - RNA, 19 nt, Artificial Sequence
  Description of Artificial Sequence: Synthetic oligonucleotide
gggccccaggggcgcgcgu

SEQ ID NO: 569458 - RNA, 19 nt, Artificial Sequence
  Description of Artificial Sequence: Synthetic oligonucleotide
cgcggagcgccaaccccau

SEQ ID NO: 569459 - RNA, 19 nt, Artificial Sequence
  Description of Artificial Sequence: Synthetic oligonucleotide
ccaccgccguugugccacu

SEQ ID NO: 569460 - RNA, 19 nt, Artificial Sequence
  Description of Artificial Sequence: Synthetic oligonucleotide
aaagagaucuucuacuucc

SEQ ID NO: 569461 - RNA, 19 nt, Artificial Sequence
  Description of Artificial Sequence: Synthetic oligonucleotide
uauaagguaagacugaucc

SEQ ID NO: 569462 - RNA, 19 nt, Artificial Sequence
  Description of Artificial Sequence: Synthetic oligonucleotide
aaauacaaguguuuauugc

SEQ ID NO: 569463 - RNA, 19 nt, Artificial Sequence
  Description of Artificial Sequence: Synthetic oligonucleotide
uuuagaauauuaaccaugg

SEQ ID NO: 569464 - RNA, 19 nt, Artificial Sequence
  Description of Artificial Sequence: Synthetic oligonucleotide
uguuuuaagauuaaugaug

SEQ ID NO: 569465 - RNA, 19 nt, Artificial Sequence
  Description of Artificial Sequence: Synthetic oligonucleotide
gaugguacuccauauaugg

SEQ ID NO: 569466 - RNA, 19 nt, Artificial Sequence
  Description of Artificial Sequence: Synthetic oligonucleotide
auggauucauaauugaccc

SEQ ID NO: 569467 - RNA, 19 nt, Artificial Sequence
  Description of Artificial Sequence: Synthetic oligonucleotide
uuuggaaccagucauagcu

SEQ ID NO: 569468 - RNA, 19 nt, Artificial Sequence
  Description of Artificial Sequence: Synthetic oligonucleotide
uuaagauuaaugaugacau

SEQ ID NO: 569469 - RNA, 19 nt, Artificial Sequence
  Description of Artificial Sequence: Synthetic oligonucleotide
aaagguaccuugcugcgcc

SEQ ID NO: 569470 - RNA, 19 nt, Artificial Sequence
  Description of Artificial Sequence: Synthetic oligonucleotide
uuuuagaauauuaaccaug

SEQ ID NO: 569471 - RNA, 19 nt, Artificial Sequence
  Description of Artificial Sequence: Synthetic oligonucleotide
uuugguguauauaacaaug

SEQ ID NO: 569472 - RNA, 19 nt, Artificial Sequence
  Description of Artificial Sequence: Synthetic oligonucleotide
aguuacaucaauuaaccug

SEQ ID NO: 569473 - RNA, 19 nt, Artificial Sequence
  Description of Artificial Sequence: Synthetic oligonucleotide
aauauaacccaguugaaua

SEQ ID NO: 569474 - RNA, 19 nt, Artificial Sequence
  Description of Artificial Sequence: Synthetic oligonucleotide
aauuuaaucuguauugcuc

SEQ ID NO: 569475 - RNA, 19 nt, Artificial Sequence
  Description of Artificial Sequence: Synthetic oligonucleotide
uuauaaugucauaaaauac

SEQ ID NO: 569476 - RNA, 19 nt, Artificial Sequence
  Description of Artificial Sequence: Synthetic oligonucleotide
auauguauaagguaagacu

SEQ ID NO: 569477 - RNA, 19 nt, Artificial Sequence
  Description of Artificial Sequence: Synthetic oligonucleotide
aauaucuacuuuuccaaca

SEQ ID NO: 569478 - RNA, 19 nt, Artificial Sequence
  Description of Artificial Sequence: Synthetic oligonucleotide
aguugaauaaaagacaaug

SEQ ID NO: 569479 - RNA, 19 nt, Artificial Sequence
  Description of Artificial Sequence: Synthetic oligonucleotide
uucguuaugcuguaaaccc

SEQ ID NO: 569480 - RNA, 19 nt, Artificial Sequence
  Description of Artificial Sequence: Synthetic oligonucleotide
cuuauugugugucuuaagc

SEQ ID NO: 569481 - RNA, 19 nt, Artificial Sequence
  Description of Artificial Sequence: Synthetic oligonucleotide
aaaagagaucuucuacuuc

SEQ ID NO: 569482 - RNA, 19 nt, Artificial Sequence
  Description of Artificial Sequence: Synthetic oligonucleotide
agaauauuaaccaugggug

SEQ ID NO: 569483 - RNA, 19 nt, Artificial Sequence
  Description of Artificial Sequence: Synthetic oligonucleotide
uugguguauauaacaaugg

SEQ ID NO: 569484 - RNA, 19 nt, Artificial Sequence
  Description of Artificial Sequence: Synthetic oligonucleotide
agaacagugauacauuuca

SEQ ID NO: 569485 - RNA, 19 nt, Artificial Sequence
  Description of Artificial Sequence: Synthetic oligonucleotide
uuuauugcagaacagugau

SEQ ID NO: 569486 - RNA, 19 nt, Artificial Sequence
  Description of Artificial Sequence: Synthetic oligonucleotide
uuaugcuguaaacccaugg

SEQ ID NO: 569487 - RNA, 19 nt, Artificial Sequence
  Description of Artificial Sequence: Synthetic oligonucleotide
agugguaaggaaaacuugc

SEQ ID NO: 569488 - RNA, 19 nt, Artificial Sequence
  Description of Artificial Sequence: Synthetic oligonucleotide
uauugcagaacagugauac

SEQ ID NO: 569489 - RNA, 19 nt, Artificial Sequence
  Description of Artificial Sequence: Synthetic oligonucleotide
uuuuaaagguaccuugcug

SEQ ID NO: 569490 - RNA, 19 nt, Artificial Sequence
  Description of Artificial Sequence: Synthetic oligonucleotide
agugauacauuucaguggu

SEQ ID NO: 569491 - RNA, 19 nt, Artificial Sequence
  Description of Artificial Sequence: Synthetic oligonucleotide
auaguuacagcauuccaug

SEQ ID NO: 569492 - RNA, 19 nt, Artificial Sequence
  Description of Artificial Sequence: Synthetic oligonucleotide
gaccaagacauuuccaagg

SEQ ID NO: 569493 - RNA, 19 nt, Artificial Sequence
  Description of Artificial Sequence: Synthetic oligonucleotide
uaagacugauccuugauaa

SEQ ID NO: 569494 - RNA, 19 nt, Artificial Sequence
  Description of Artificial Sequence: Synthetic oligonucleotide
gaaucaugcuucuccaagg

SEQ ID NO: 569495 - RNA, 19 nt, Artificial Sequence
  Description of Artificial Sequence: Synthetic oligonucleotide
aauuccugaguaaacagug

SEQ ID NO: 569496 - RNA, 19 nt, Artificial Sequence
  Description of Artificial Sequence: Synthetic oligonucleotide
ucuaaguugauauucuuuu

SEQ ID NO: 569497 - RNA, 19 nt, Artificial Sequence
  Description of Artificial Sequence: Synthetic oligonucleotide
ucaacuauuaccgagucua

SEQ ID NO: 569498 - RNA, 19 nt, Artificial Sequence
  Description of Artificial Sequence: Synthetic oligonucleotide
aucaguaguaaaguaaguc

SEQ ID NO: 569499 - RNA, 19 nt, Artificial Sequence
  Description of Artificial Sequence: Synthetic oligonucleotide
cucaauauguauaagguaa

SEQ ID NO: 569500 - RNA, 19 nt, Artificial Sequence
  Description of Artificial Sequence: Synthetic oligonucleotide
aauugacccagcgaugaac

SEQ ID NO: 569501 - RNA, 19 nt, Artificial Sequence
  Description of Artificial Sequence: Synthetic oligonucleotide
ucagcauggauucauaauu

SEQ ID NO: 569502 - RNA, 19 nt, Artificial Sequence
  Description of Artificial Sequence: Synthetic oligonucleotide
auacauuucagugguaagg

SEQ ID NO: 569503 - RNA, 19 nt, Artificial Sequence
  Description of Artificial Sequence: Synthetic oligonucleotide
ugagaguaaggauucagac

SEQ ID NO: 569504 - RNA, 19 nt, Artificial Sequence
  Description of Artificial Sequence: Synthetic oligonucleotide
aaacaaguccucuuauaca

SEQ ID NO: 569505 - RNA, 19 nt, Artificial Sequence
  Description of Artificial Sequence: Synthetic oligonucleotide
ugucaugaguaacauauuc

SEQ ID NO: 569506 - RNA, 19 nt, Artificial Sequence
  Description of Artificial Sequence: Synthetic oligonucleotide
acuauuaccgagucuaagu

SEQ ID NO: 569507 - RNA, 19 nt, Artificial Sequence
  Description of Artificial Sequence: Synthetic oligonucleotide
cauagcuuggagaacuagg

SEQ ID NO: 569508 - RNA, 19 nt, Artificial Sequence
  Description of Artificial Sequence: Synthetic oligonucleotide
uaacaauggugacugagga

SEQ ID NO: 569509 - RNA, 19 nt, Artificial Sequence
  Description of Artificial Sequence: Synthetic oligonucleotide
uuuccaacauucucaauga

SEQ ID NO: 569510 - RNA, 19 nt, Artificial Sequence
  Description of Artificial Sequence: Synthetic oligonucleotide
gaaauuaacuggcacuuuc

SEQ ID NO: 569511 - RNA, 19 nt, Artificial Sequence
  Description of Artificial Sequence: Synthetic oligonucleotide
ucauuaaacagauccguuc

SEQ ID NO: 569512 - RNA, 19 nt, Artificial Sequence
  Description of Artificial Sequence: Synthetic oligonucleotide
uuuuaagacucucuucccu

SEQ ID NO: 569513 - RNA, 19 nt, Artificial Sequence
  Description of Artificial Sequence: Synthetic oligonucleotide
uguuugguguauauaacaa

SEQ ID NO: 569514 - RNA, 19 nt, Artificial Sequence
  Description of Artificial Sequence: Synthetic oligonucleotide
ugguaaggaaaacuugcag

SEQ ID NO: 569515 - RNA, 19 nt, Artificial Sequence
  Description of Artificial Sequence: Synthetic oligonucleotide
aagacugauccuugauaac

SEQ ID NO: 569516 - RNA, 19 nt, Artificial Sequence
  Description of Artificial Sequence: Synthetic oligonucleotide
uccgcagaugcaaaggaag

SEQ ID NO: 569517 - RNA, 19 nt, Artificial Sequence
  Description of Artificial Sequence: Synthetic oligonucleotide
uuucguuaugcuguaaacc

SEQ ID NO: 569518 - RNA, 19 nt, Artificial Sequence
  Description of Artificial Sequence: Synthetic oligonucleotide
uucauaauugacccagcga

SEQ ID NO: 569519 - RNA, 19 nt, Artificial Sequence
  Description of Artificial Sequence: Synthetic oligonucleotide
aguaacauauuccuuggaa

SEQ ID NO: 569520 - RNA, 19 nt, Artificial Sequence
  Description of Artificial Sequence: Synthetic oligonucleotide
aaaauccuaagcaaucaca

SEQ ID NO: 569521 - RNA, 19 nt, Artificial Sequence
  Description of Artificial Sequence: Synthetic oligonucleotide
caguguaucugucacuugg

SEQ ID NO: 569522 - RNA, 19 nt, Artificial Sequence
  Description of Artificial Sequence: Synthetic oligonucleotide
gaggucaacuauuaccgag

SEQ ID NO: 569523 - RNA, 19 nt, Artificial Sequence
  Description of Artificial Sequence: Synthetic oligonucleotide
ugauugaccucccagguua

SEQ ID NO: 569524 - RNA, 19 nt, Artificial Sequence
  Description of Artificial Sequence: Synthetic oligonucleotide
ugggacgccauuuuaagac

SEQ ID NO: 569525 - RNA, 19 nt, Artificial Sequence
  Description of Artificial Sequence: Synthetic oligonucleotide
guuuuaagauuaaugauga

SEQ ID NO: 569526 - RNA, 19 nt, Artificial Sequence
  Description of Artificial Sequence: Synthetic oligonucleotide
aaagccucgugucaugagu

SEQ ID NO: 569527 - RNA, 19 nt, Artificial Sequence
  Description of Artificial Sequence: Synthetic oligonucleotide
aaauauaacccaguugaau

SEQ ID NO: 569528 - RNA, 19 nt, Artificial Sequence
  Description of Artificial Sequence: Synthetic oligonucleotide
auugcuuacuuuauaaugu

SEQ ID NO: 569529 - RNA, 19 nt, Artificial Sequence
  Description of Artificial Sequence: Synthetic oligonucleotide
ugucacuuggcucuuggga

SEQ ID NO: 569530 - RNA, 19 nt, Artificial Sequence
  Description of Artificial Sequence: Synthetic oligonucleotide
ggaaaaguuaagaucaugc

SEQ ID NO: 569531 - RNA, 19 nt, Artificial Sequence
  Description of Artificial Sequence: Synthetic oligonucleotide
auagcuuggagaacuaggg

SEQ ID NO: 569532 - RNA, 19 nt, Artificial Sequence
  Description of Artificial Sequence: Synthetic oligonucleotide
ugguguauauaacaauggu

SEQ ID NO: 569533 - RNA, 19 nt, Artificial Sequence
  Description of Artificial Sequence: Synthetic oligonucleotide
acaucaauuaaccugccuu

SEQ ID NO: 569534 - RNA, 19 nt, Artificial Sequence
  Description of Artificial Sequence: Synthetic oligonucleotide
uauuaccgagucuaaguug

SEQ ID NO: 569535 - RNA, 19 nt, Artificial Sequence
  Description of Artificial Sequence: Synthetic oligonucleotide
aaaauugcccucgggacug

SEQ ID NO: 569536 - RNA, 19 nt, Artificial Sequence
  Description of Artificial Sequence: Synthetic oligonucleotide
uguauauaacaauggugac

SEQ ID NO: 569537 - RNA, 19 nt, Artificial Sequence
  Description of Artificial Sequence: Synthetic oligonucleotide
ucaauuaaccugccuuuca

SEQ ID NO: 569538 - RNA, 19 nt, Artificial Sequence
  Description of Artificial Sequence: Synthetic oligonucleotide
uuuucguuaugcuguaaac

SEQ ID NO: 569539 - RNA, 19 nt, Artificial Sequence
  Description of Artificial Sequence: Synthetic oligonucleotide
aaccuuauccccucaucug

SEQ ID NO: 569540 - RNA, 19 nt, Artificial Sequence
  Description of Artificial Sequence: Synthetic oligonucleotide
aaugauugcuuacuuuaua

SEQ ID NO: 569541 - RNA, 19 nt, Artificial Sequence
  Description of Artificial Sequence: Synthetic oligonucleotide
aagguaccuguacugaaga

SEQ ID NO: 569542 - RNA, 19 nt, Artificial Sequence
  Description of Artificial Sequence: Synthetic oligonucleotide
uacuuuauaaugucauaaa

SEQ ID NO: 569543 - RNA, 19 nt, Artificial Sequence
  Description of Artificial Sequence: Synthetic oligonucleotide
augauugcuuacuuuauaa

SEQ ID NO: 569544 - RNA, 19 nt, Artificial Sequence
  Description of Artificial Sequence: Synthetic oligonucleotide
uguuuggaaccagucauag

SEQ ID NO: 569545 - RNA, 19 nt, Artificial Sequence
  Description of Artificial Sequence: Synthetic oligonucleotide
aacagauccguuccaucug

SEQ ID NO: 569546 - RNA, 19 nt, Artificial Sequence
  Description of Artificial Sequence: Synthetic oligonucleotide
uuuacuauuucugcaccug

SEQ ID NO: 569547 - RNA, 19 nt, Artificial Sequence
  Description of Artificial Sequence: Synthetic oligonucleotide
ugaccaagacauuuccaag

SEQ ID NO: 569548 - RNA, 19 nt, Artificial Sequence
  Description of Artificial Sequence: Synthetic oligonucleotide
uuaaaggcuaguuucucua

SEQ ID NO: 569549 - RNA, 19 nt, Artificial Sequence
  Description of Artificial Sequence: Synthetic oligonucleotide
caguggaaaaguuaagauc

SEQ ID NO: 569550 - RNA, 19 nt, Artificial Sequence
  Description of Artificial Sequence: Synthetic oligonucleotide
aguuuaaaauugcccucgg

SEQ ID NO: 569551 - RNA, 19 nt, Artificial Sequence
  Description of Artificial Sequence: Synthetic oligonucleotide
guuuaaaauugcccucggg

SEQ ID NO: 569552 - RNA, 19 nt, Artificial Sequence
  Description of Artificial Sequence: Synthetic oligonucleotide
gacagaaaagccucguguc

SEQ ID NO: 569553 - RNA, 19 nt, Artificial Sequence
  Description of Artificial Sequence: Synthetic oligonucleotide
uguaaacaaguccucuuau

SEQ ID NO: 569554 - RNA, 19 nt, Artificial Sequence
  Description of Artificial Sequence: Synthetic oligonucleotide
uucucuaguuggcaucucc

SEQ ID NO: 569555 - RNA, 19 nt, Artificial Sequence
  Description of Artificial Sequence: Synthetic oligonucleotide
gagaguaaggauucagaca

SEQ ID NO: 569556 - RNA, 19 nt, Artificial Sequence
  Description of Artificial Sequence: Synthetic oligonucleotide
ucuacuuccuggaguuuag

SEQ ID NO: 569557 - RNA, 19 nt, Artificial Sequence
  Description of Artificial Sequence: Synthetic oligonucleotide
ugcuuacuuuauaauguca

SEQ ID NO: 569558 - RNA, 19 nt, Artificial Sequence
  Description of Artificial Sequence: Synthetic oligonucleotide
cagacacggguguauaugg

SEQ ID NO: 569559 - RNA, 19 nt, Artificial Sequence
  Description of Artificial Sequence: Synthetic oligonucleotide
accgagucuaaguugauau

SEQ ID NO: 569560 - RNA, 19 nt, Artificial Sequence
  Description of Artificial Sequence: Synthetic oligonucleotide
acuauuucugcaccuguga

SEQ ID NO: 569561 - RNA, 19 nt, Artificial Sequence
  Description of Artificial Sequence: Synthetic oligonucleotide
aacuauuaccgagucuaag

SEQ ID NO: 569562 - RNA, 19 nt, Artificial Sequence
  Description of Artificial Sequence: Synthetic oligonucleotide
caauuaaccugccuuucag

SEQ ID NO: 569563 - RNA, 19 nt, Artificial Sequence
  Description of Artificial Sequence: Synthetic oligonucleotide
ugauaaccacuucugcucu

SEQ ID NO: 569564 - RNA, 19 nt, Artificial Sequence
  Description of Artificial Sequence: Synthetic oligonucleotide
ucugagaguaaggauucag

SEQ ID NO: 569565 - RNA, 19 nt, Artificial Sequence
  Description of Artificial Sequence: Synthetic oligonucleotide
aaaagccucgugucaugag

SEQ ID NO: 569566 - RNA, 19 nt, Artificial Sequence
  Description of Artificial Sequence: Synthetic oligonucleotide
auaauugacccagcgauga

SEQ ID NO: 569567 - RNA, 19 nt, Artificial Sequence
  Description of Artificial Sequence: Synthetic oligonucleotide
cuaaguugauauucuuuug

SEQ ID NO: 569568 - RNA, 19 nt, Artificial Sequence
  Description of Artificial Sequence: Synthetic oligonucleotide
acauauccaacagucaucu

SEQ ID NO: 569569 - RNA, 19 nt, Artificial Sequence
  Description of Artificial Sequence: Synthetic oligonucleotide
aaauuaacuggcacuuucu

SEQ ID NO: 569570 - RNA, 19 nt, Artificial Sequence
  Description of Artificial Sequence: Synthetic oligonucleotide
uuacuauuucugcaccugu

SEQ ID NO: 569571 - RNA, 19 nt, Artificial Sequence
  Description of Artificial Sequence: Synthetic oligonucleotide
ucuuauugugugucuuaag

SEQ ID NO: 569572 - RNA, 19 nt, Artificial Sequence
  Description of Artificial Sequence: Synthetic oligonucleotide
cucuuauacauauccaaca

SEQ ID NO: 569573 - RNA, 19 nt, Artificial Sequence
  Description of Artificial Sequence: Synthetic oligonucleotide
aggaugguacuccauauau

SEQ ID NO: 569574 - RNA, 19 nt, Artificial Sequence
  Description of Artificial Sequence: Synthetic oligonucleotide
ggauucauaauugacccag

SEQ ID NO: 569575 - RNA, 19 nt, Artificial Sequence
  Description of Artificial Sequence: Synthetic oligonucleotide
auuaccgagucuaaguuga

SEQ ID NO: 569576 - RNA, 19 nt, Artificial Sequence
  Description of Artificial Sequence: Synthetic oligonucleotide
cuugggacgccauuuuaag

SEQ ID NO: 569577 - RNA, 19 nt, Artificial Sequence
  Description of Artificial Sequence: Synthetic oligonucleotide
agucauagcuuggagaacu

SEQ ID NO: 569578 - RNA, 19 nt, Artificial Sequence
  Description of Artificial Sequence: Synthetic oligonucleotide
ucuaguuggcaucuccaaa

SEQ ID NO: 569579 - RNA, 19 nt, Artificial Sequence
  Description of Artificial Sequence: Synthetic oligonucleotide
aaccagucauagcuuggag

SEQ ID NO: 569580 - RNA, 19 nt, Artificial Sequence
  Description of Artificial Sequence: Synthetic oligonucleotide
agucgaauccaauccauaa

SEQ ID NO: 569581 - RNA, 19 nt, Artificial Sequence
  Description of Artificial Sequence: Synthetic oligonucleotide
cucagaagacaucuugcag

SEQ ID NO: 569582 - RNA, 19 nt, Artificial Sequence
  Description of Artificial Sequence: Synthetic oligonucleotide
agcucaauauguauaaggu

SEQ ID NO: 569583 - RNA, 19 nt, Artificial Sequence
  Description of Artificial Sequence: Synthetic oligonucleotide
aagaucaugcagcaaccuu

SEQ ID NO: 569584 - RNA, 19 nt, Artificial Sequence
  Description of Artificial Sequence: Synthetic oligonucleotide
ggaaucaugcuucuccaag

SEQ ID NO: 569585 - RNA, 19 nt, Artificial Sequence
  Description of Artificial Sequence: Synthetic oligonucleotide
ucguuaugcuguaaaccca

SEQ ID NO: 569586 - RNA, 19 nt, Artificial Sequence
  Description of Artificial Sequence: Synthetic oligonucleotide
aguguaucugucacuuggc

SEQ ID NO: 569587 - RNA, 19 nt, Artificial Sequence
  Description of Artificial Sequence: Synthetic oligonucleotide
aguuaaguccuuuccacuu

SEQ ID NO: 569588 - RNA, 19 nt, Artificial Sequence
  Description of Artificial Sequence: Synthetic oligonucleotide
uuuaucuuuaaaggcuagu

SEQ ID NO: 569589 - RNA, 19 nt, Artificial Sequence
  Description of Artificial Sequence: Synthetic oligonucleotide
auaaaggaaucaugcuucu

SEQ ID NO: 569590 - RNA, 19 nt, Artificial Sequence
  Description of Artificial Sequence: Synthetic oligonucleotide
uuuuaagauuaaugaugac

SEQ ID NO: 569591 - RNA, 19 nt, Artificial Sequence
  Description of Artificial Sequence: Synthetic oligonucleotide
uugccauuccauucugaag

SEQ ID NO: 569592 - RNA, 19 nt, Artificial Sequence
  Description of Artificial Sequence: Synthetic oligonucleotide
ugauugcuuacuuuauaau

SEQ ID NO: 569593 - RNA, 19 nt, Artificial Sequence
  Description of Artificial Sequence: Synthetic oligonucleotide
gacaucuugcagcauagaa

SEQ ID NO: 569594 - RNA, 19 nt, Artificial Sequence
  Description of Artificial Sequence: Synthetic oligonucleotide
gucacuuggcucuugggac

SEQ ID NO: 569595 - RNA, 19 nt, Artificial Sequence
  Description of Artificial Sequence: Synthetic oligonucleotide
accagucauagcuuggaga

SEQ ID NO: 569596 - RNA, 19 nt, Artificial Sequence
  Description of Artificial Sequence: Synthetic oligonucleotide
uguauaagguaagacugau

SEQ ID NO: 569597 - RNA, 19 nt, Artificial Sequence
  Description of Artificial Sequence: Synthetic oligonucleotide
auaagguaagacugauccu

SEQ ID NO: 569598 - RNA, 19 nt, Artificial Sequence
  Description of Artificial Sequence: Synthetic oligonucleotide
uugcuuacuuuauaauguc

SEQ ID NO: 569599 - RNA, 19 nt, Artificial Sequence
  Description of Artificial Sequence: Synthetic oligonucleotide
ggucagucgaauccaaucc

SEQ ID NO: 569600 - RNA, 19 nt, Artificial Sequence
  Description of Artificial Sequence: Synthetic oligonucleotide
uuucagcauggauucauaa

SEQ ID NO: 569601 - RNA, 19 nt, Artificial Sequence
  Description of Artificial Sequence: Synthetic oligonucleotide
uccauaagacuucugccuu

SEQ ID NO: 569602 - RNA, 19 nt, Artificial Sequence
  Description of Artificial Sequence: Synthetic oligonucleotide
cugaguaaacagugcagug

SEQ ID NO: 569603 - RNA, 19 nt, Artificial Sequence
  Description of Artificial Sequence: Synthetic oligonucleotide
cagcauggauucauaauug

SEQ ID NO: 569604 - RNA, 19 nt, Artificial Sequence
  Description of Artificial Sequence: Synthetic oligonucleotide
ucagacacggguguauaug

SEQ ID NO: 569605 - RNA, 19 nt, Artificial Sequence
  Description of Artificial Sequence: Synthetic oligonucleotide
gaacuagggccuucccugg

SEQ ID NO: 569606 - RNA, 19 nt, Artificial Sequence
  Description of Artificial Sequence: Synthetic oligonucleotide
agcauggauucauaauuga

SEQ ID NO: 569607 - RNA, 19 nt, Artificial Sequence
  Description of Artificial Sequence: Synthetic oligonucleotide
aagguaccuugcugcgccc

SEQ ID NO: 569608 - RNA, 19 nt, Artificial Sequence
  Description of Artificial Sequence: Synthetic oligonucleotide
aacuagggccuucccuggg

SEQ ID NO: 569609 - RNA, 19 nt, Artificial Sequence
  Description of Artificial Sequence: Synthetic oligonucleotide
guaaaguaagucacaguac

SEQ ID NO: 569610 - RNA, 19 nt, Artificial Sequence
  Description of Artificial Sequence: Synthetic oligonucleotide
uaguaaaguaagucacagu

SEQ ID NO: 569611 - RNA, 19 nt, Artificial Sequence
  Description of Artificial Sequence: Synthetic oligonucleotide
uuacaucaauuaaccugcc

SEQ ID NO: 569612 - RNA, 19 nt, Artificial Sequence
  Description of Artificial Sequence: Synthetic oligonucleotide
uuaaucuguauugcucaga

SEQ ID NO: 569613 - RNA, 19 nt, Artificial Sequence
  Description of Artificial Sequence: Synthetic oligonucleotide
gcaucaguaguaaaguaag

SEQ ID NO: 569614 - RNA, 19 nt, Artificial Sequence
  Description of Artificial Sequence: Synthetic oligonucleotide
auauuaaccauggguguga

SEQ ID NO: 569615 - RNA, 19 nt, Artificial Sequence
  Description of Artificial Sequence: Synthetic oligonucleotide
guguauauggcuuuacuau

SEQ ID NO: 569616 - RNA, 19 nt, Artificial Sequence
  Description of Artificial Sequence: Synthetic oligonucleotide
cagugguaaggaaaacuug

SEQ ID NO: 569617 - RNA, 19 nt, Artificial Sequence
  Description of Artificial Sequence: Synthetic oligonucleotide
cuugauaaccacuucugcu

SEQ ID NO: 569618 - RNA, 19 nt, Artificial Sequence
  Description of Artificial Sequence: Synthetic oligonucleotide
uggauucauaauugaccca

SEQ ID NO: 569619 - RNA, 19 nt, Artificial Sequence
  Description of Artificial Sequence: Synthetic oligonucleotide
auugugugucuuaagcucu

SEQ ID NO: 569620 - RNA, 19 nt, Artificial Sequence
  Description of Artificial Sequence: Synthetic oligonucleotide
ucuuucagcauggauucau

SEQ ID NO: 569621 - RNA, 19 nt, Artificial Sequence
  Description of Artificial Sequence: Synthetic oligonucleotide
uucuuauugugugucuuaa

SEQ ID NO: 569622 - RNA, 19 nt, Artificial Sequence
  Description of Artificial Sequence: Synthetic oligonucleotide
uugggacgccauuuuaaga

SEQ ID NO: 569623 - RNA, 19 nt, Artificial Sequence
  Description of Artificial Sequence: Synthetic oligonucleotide
uaguuacagcauuccaugu

SEQ ID NO: 569624 - RNA, 19 nt, Artificial Sequence
  Description of Artificial Sequence: Synthetic oligonucleotide
acgaucaagcucuggugug

SEQ ID NO: 569625 - RNA, 19 nt, Artificial Sequence
  Description of Artificial Sequence: Synthetic oligonucleotide
ccaugauugaccucccagg

SEQ ID NO: 569626 - RNA, 19 nt, Artificial Sequence
  Description of Artificial Sequence: Synthetic oligonucleotide
gacaggcucgccuggccgg

SEQ ID NO: 569627 - RNA, 19 nt, Artificial Sequence
  Description of Artificial Sequence: Synthetic oligonucleotide
uugguccgcagaugcaaag

SEQ ID NO: 569628 - RNA, 19 nt, Artificial Sequence
  Description of Artificial Sequence: Synthetic oligonucleotide
ugguccgcagaugcaaagg

SEQ ID NO: 569629 - RNA, 19 nt, Artificial Sequence
  Description of Artificial Sequence: Synthetic oligonucleotide
cugagaguaaggauucaga

SEQ ID NO: 569630 - RNA, 19 nt, Artificial Sequence
  Description of Artificial Sequence: Synthetic oligonucleotide
uaaagguaccuugcugcgc

SEQ ID NO: 569631 - RNA, 19 nt, Artificial Sequence
  Description of Artificial Sequence: Synthetic oligonucleotide
cuuuucguuaugcuguaaa

SEQ ID NO: 569632 - RNA, 19 nt, Artificial Sequence
  Description of Artificial Sequence: Synthetic oligonucleotide
uuauugcagaacagugaua

SEQ ID NO: 569633 - RNA, 19 nt, Artificial Sequence
  Description of Artificial Sequence: Synthetic oligonucleotide
acucuguuuggaaccaguc

SEQ ID NO: 569634 - RNA, 19 nt, Artificial Sequence
  Description of Artificial Sequence: Synthetic oligonucleotide
uuaaaccaagguaccugua

SEQ ID NO: 569635 - RNA, 19 nt, Artificial Sequence
  Description of Artificial Sequence: Synthetic oligonucleotide
gacgaucaagcucuggugu

SEQ ID NO: 569636 - RNA, 19 nt, Artificial Sequence
  Description of Artificial Sequence: Synthetic oligonucleotide
uuauccccucaucuguaaa

SEQ ID NO: 569637 - RNA, 19 nt, Artificial Sequence
  Description of Artificial Sequence: Synthetic oligonucleotide
caauaguuacagcauucca

SEQ ID NO: 569638 - RNA, 19 nt, Artificial Sequence
  Description of Artificial Sequence: Synthetic oligonucleotide
gacacauguccccguuugc

SEQ ID NO: 569639 - RNA, 19 nt, Artificial Sequence
  Description of Artificial Sequence: Synthetic oligonucleotide
gacugauccuugauaacca

SEQ ID NO: 569640 - RNA, 19 nt, Artificial Sequence
  Description of Artificial Sequence: Synthetic oligonucleotide
cuaagcaaucacaaauaua

SEQ ID NO: 569641 - RNA, 19 nt, Artificial Sequence
  Description of Artificial Sequence: Synthetic oligonucleotide
agacacggguguauauggc

SEQ ID NO: 569642 - RNA, 19 nt, Artificial Sequence
  Description of Artificial Sequence: Synthetic oligonucleotide
guaaacaaguccucuuaua

SEQ ID NO: 569643 - RNA, 19 nt, Artificial Sequence
  Description of Artificial Sequence: Synthetic oligonucleotide
aauggugacugaggacucu

SEQ ID NO: 569644 - RNA, 19 nt, Artificial Sequence
  Description of Artificial Sequence: Synthetic oligonucleotide
gguguauauggcuuuacua

SEQ ID NO: 569645 - RNA, 19 nt, Artificial Sequence
  Description of Artificial Sequence: Synthetic oligonucleotide
uccaacagucaucuuucuu

SEQ ID NO: 569646 - RNA, 19 nt, Artificial Sequence
  Description of Artificial Sequence: Synthetic oligonucleotide
acacggaagucaaagagua

SEQ ID NO: 569647 - RNA, 19 nt, Artificial Sequence
  Description of Artificial Sequence: Synthetic oligonucleotide
auaaccacuucugcucuca

SEQ ID NO: 569648 - RNA, 19 nt, Artificial Sequence
  Description of Artificial Sequence: Synthetic oligonucleotide
gccaugauugaccucccag

SEQ ID NO: 569649 - RNA, 19 nt, Artificial Sequence
  Description of Artificial Sequence: Synthetic oligonucleotide
gaaaagccucgugucauga

SEQ ID NO: 569650 - RNA, 19 nt, Artificial Sequence
  Description of Artificial Sequence: Synthetic oligonucleotide
uaauugacccagcgaugaa

SEQ ID NO: 569651 - RNA, 19 nt, Artificial Sequence
  Description of Artificial Sequence: Synthetic oligonucleotide
cuuauacauauccaacagu

SEQ ID NO: 569652 - RNA, 19 nt, Artificial Sequence
  Description of Artificial Sequence: Synthetic oligonucleotide
ggaggcgacgcgcugcugg

SEQ ID NO: 569653 - RNA, 19 nt, Artificial Sequence
  Description of Artificial Sequence: Synthetic oligonucleotide
gggacguucagcauccuug

SEQ ID NO: 569654 - RNA, 19 nt, Artificial Sequence
  Description of Artificial Sequence: Synthetic oligonucleotide
agguaagacugauccuuga

SEQ ID NO: 569655 - RNA, 19 nt, Artificial Sequence
  Description of Artificial Sequence: Synthetic oligonucleotide
ccaguugaauaaaagacaa

SEQ ID NO: 569656 - RNA, 19 nt, Artificial Sequence
  Description of Artificial Sequence: Synthetic oligonucleotide
gaguaacauauuccuugga

SEQ ID NO: 569657 - RNA, 19 nt, Artificial Sequence
  Description of Artificial Sequence: Synthetic oligonucleotide
aggucaacuauuaccgagu

SEQ ID NO: 569658 - RNA, 19 nt, Artificial Sequence
  Description of Artificial Sequence: Synthetic oligonucleotide
gaaccagucauagcuugga

SEQ ID NO: 569659 - RNA, 19 nt, Artificial Sequence
  Description of Artificial Sequence: Synthetic oligonucleotide
guacuccauauaugggcug

SEQ ID NO: 569660 - RNA, 19 nt, Artificial Sequence
  Description of Artificial Sequence: Synthetic oligonucleotide
accaagguaccuguacuga

SEQ ID NO: 569661 - RNA, 19 nt, Artificial Sequence
  Description of Artificial Sequence: Synthetic oligonucleotide
uugcccucgggacugcuua

SEQ ID NO: 569662 - RNA, 19 nt, Artificial Sequence
  Description of Artificial Sequence: Synthetic oligonucleotide
gacacggguguauauggcu

SEQ ID NO: 569663 - RNA, 19 nt, Artificial Sequence
  Description of Artificial Sequence: Synthetic oligonucleotide
guaguacaagccuguaucu

SEQ ID NO: 569664 - RNA, 19 nt, Artificial Sequence
  Description of Artificial Sequence: Synthetic oligonucleotide
gauugaccucccagguuag

SEQ ID NO: 569665 - RNA, 19 nt, Artificial Sequence
  Description of Artificial Sequence: Synthetic oligonucleotide
ggcugaccaagacauuucc

SEQ ID NO: 569666 - RNA, 19 nt, Artificial Sequence
  Description of Artificial Sequence: Synthetic oligonucleotide
guacugaagacaugugacu

SEQ ID NO: 569667 - RNA, 19 nt, Artificial Sequence
  Description of Artificial Sequence: Synthetic oligonucleotide
cauucucaaugacccguac

SEQ ID NO: 569668 - RNA, 19 nt, Artificial Sequence
  Description of Artificial Sequence: Synthetic oligonucleotide
cccaguugaauaaaagaca

SEQ ID NO: 569669 - RNA, 19 nt, Artificial Sequence
  Description of Artificial Sequence: Synthetic oligonucleotide
ugacccguacagaaauauu

SEQ ID NO: 569670 - RNA, 19 nt, Artificial Sequence
  Description of Artificial Sequence: Synthetic oligonucleotide
uaaaggaaucaugcuucuc

SEQ ID NO: 569671 - RNA, 19 nt, Artificial Sequence
  Description of Artificial Sequence: Synthetic oligonucleotide
uccccguuugccauuccau

SEQ ID NO: 569672 - RNA, 19 nt, Artificial Sequence
  Description of Artificial Sequence: Synthetic oligonucleotide
gacccagcgaugaaccuca

SEQ ID NO: 569673 - RNA, 19 nt, Artificial Sequence
  Description of Artificial Sequence: Synthetic oligonucleotide
ugacccagcgaugaaccuc

SEQ ID NO: 569674 - RNA, 19 nt, Artificial Sequence
  Description of Artificial Sequence: Synthetic oligonucleotide
acgccauuuuaagacucuc

SEQ ID NO: 569675 - RNA, 19 nt, Artificial Sequence
  Description of Artificial Sequence: Synthetic oligonucleotide
gacguucagcauccuuggc

SEQ ID NO: 569676 - RNA, 19 nt, Artificial Sequence
  Description of Artificial Sequence: Synthetic oligonucleotide
agguaccuugcugcgcccc

SEQ ID NO: 569677 - RNA, 19 nt, Artificial Sequence
  Description of Artificial Sequence: Synthetic oligonucleotide
gugguaaggaaaacuugca

SEQ ID NO: 569678 - RNA, 19 nt, Artificial Sequence
  Description of Artificial Sequence: Synthetic oligonucleotide
augauugaccucccagguu

SEQ ID NO: 569679 - RNA, 19 nt, Artificial Sequence
  Description of Artificial Sequence: Synthetic oligonucleotide
gacacggaagucaaagagu

SEQ ID NO: 569680 - RNA, 19 nt, Artificial Sequence
  Description of Artificial Sequence: Synthetic oligonucleotide
guauaagguaagacugauc

SEQ ID NO: 569681 - RNA, 19 nt, Artificial Sequence
  Description of Artificial Sequence: Synthetic oligonucleotide
cuccaaauuauaucauccu

SEQ ID NO: 569682 - RNA, 19 nt, Artificial Sequence
  Description of Artificial Sequence: Synthetic oligonucleotide
ggaguuuagauaguuuaaa

SEQ ID NO: 569683 - RNA, 19 nt, Artificial Sequence
  Description of Artificial Sequence: Synthetic oligonucleotide
uugugugucuuaagcucuu

SEQ ID NO: 569684 - RNA, 19 nt, Artificial Sequence
  Description of Artificial Sequence: Synthetic oligonucleotide
uacgggcuccgccaccaga

SEQ ID NO: 569685 - RNA, 19 nt, Artificial Sequence
  Description of Artificial Sequence: Synthetic oligonucleotide
ggaaccagucauagcuugg

SEQ ID NO: 569686 - RNA, 19 nt, Artificial Sequence
  Description of Artificial Sequence: Synthetic oligonucleotide
aagccucgugucaugagua

SEQ ID NO: 569687 - RNA, 19 nt, Artificial Sequence
  Description of Artificial Sequence: Synthetic oligonucleotide
ggucaacuauuaccgaguc

SEQ ID NO: 569688 - RNA, 19 nt, Artificial Sequence
  Description of Artificial Sequence: Synthetic oligonucleotide
guaccuguacugaagacau

SEQ ID NO: 569689 - RNA, 19 nt, Artificial Sequence
  Description of Artificial Sequence: Synthetic oligonucleotide
agcaaccuuauccccucau

SEQ ID NO: 569690 - RNA, 19 nt, Artificial Sequence
  Description of Artificial Sequence: Synthetic oligonucleotide
cgugucaugaguaacauau

SEQ ID NO: 569691 - RNA, 19 nt, Artificial Sequence
  Description of Artificial Sequence: Synthetic oligonucleotide
gcucaauauguauaaggua

SEQ ID NO: 569692 - RNA, 19 nt, Artificial Sequence
  Description of Artificial Sequence: Synthetic oligonucleotide
cuauuaccgagucuaaguu

SEQ ID NO: 569693 - RNA, 19 nt, Artificial Sequence
  Description of Artificial Sequence: Synthetic oligonucleotide
caucaauuaaccugccuuu

SEQ ID NO: 569694 - RNA, 19 nt, Artificial Sequence
  Description of Artificial Sequence: Synthetic oligonucleotide
uuaccgagucuaaguugau

SEQ ID NO: 569695 - RNA, 19 nt, Artificial Sequence
  Description of Artificial Sequence: Synthetic oligonucleotide
ggaugguacuccauauaug

SEQ ID NO: 569696 - RNA, 19 nt, Artificial Sequence
  Description of Artificial Sequence: Synthetic oligonucleotide
ugcugcgccccugggaggc

SEQ ID NO: 569697 - RNA, 19 nt, Artificial Sequence
  Description of Artificial Sequence: Synthetic oligonucleotide
uccugagacuggacacgga

SEQ ID NO: 569698 - RNA, 19 nt, Artificial Sequence
  Description of Artificial Sequence: Synthetic oligonucleotide
ucgugucaugaguaacaua

SEQ ID NO: 569699 - RNA, 19 nt, Artificial Sequence
  Description of Artificial Sequence: Synthetic oligonucleotide
agcuuuucguuaugcugua

SEQ ID NO: 569700 - RNA, 19 nt, Artificial Sequence
  Description of Artificial Sequence: Synthetic oligonucleotide
cgagucuaaguugauauuc

SEQ ID NO: 569701 - RNA, 19 nt, Artificial Sequence
  Description of Artificial Sequence: Synthetic oligonucleotide
guuucucuaguuggcaucu

SEQ ID NO: 569702 - RNA, 19 nt, Artificial Sequence
  Description of Artificial Sequence: Synthetic oligonucleotide
aguuaagaucaugcagcaa

SEQ ID NO: 569703 - RNA, 19 nt, Artificial Sequence
  Description of Artificial Sequence: Synthetic oligonucleotide
uaccgagucuaaguugaua

SEQ ID NO: 569704 - RNA, 19 nt, Artificial Sequence
  Description of Artificial Sequence: Synthetic oligonucleotide
cugccaugauugaccuccc

SEQ ID NO: 569705 - RNA, 19 nt, Artificial Sequence
  Description of Artificial Sequence: Synthetic oligonucleotide
caucaguaguaaaguaagu

SEQ ID NO: 569706 - RNA, 19 nt, Artificial Sequence
  Description of Artificial Sequence: Synthetic oligonucleotide
ccauaagacuucugccuug

SEQ ID NO: 569707 - RNA, 19 nt, Artificial Sequence
  Description of Artificial Sequence: Synthetic oligonucleotide
cuacccgggccgcguacgg

SEQ ID NO: 569708 - RNA, 19 nt, Artificial Sequence
  Description of Artificial Sequence: Synthetic oligonucleotide
cuguuuggaaccagucaua

SEQ ID NO: 569709 - RNA, 19 nt, Artificial Sequence
  Description of Artificial Sequence: Synthetic oligonucleotide
gaucaagcucuggugugaa

SEQ ID NO: 569710 - RNA, 19 nt, Artificial Sequence
  Description of Artificial Sequence: Synthetic oligonucleotide
caacuauuaccgagucuaa

SEQ ID NO: 569711 - RNA, 19 nt, Artificial Sequence
  Description of Artificial Sequence: Synthetic oligonucleotide
agccucgugucaugaguaa

SEQ ID NO: 569712 - RNA, 19 nt, Artificial Sequence
  Description of Artificial Sequence: Synthetic oligonucleotide
cagcgaugaaccucauuaa

SEQ ID NO: 569713 - RNA, 19 nt, Artificial Sequence
  Description of Artificial Sequence: Synthetic oligonucleotide
gauucagacacggguguau

SEQ ID NO: 569714 - RNA, 19 nt, Artificial Sequence
  Description of Artificial Sequence: Synthetic oligonucleotide
gcuuacuuuauaaugucau

SEQ ID NO: 569715 - RNA, 19 nt, Artificial Sequence
  Description of Artificial Sequence: Synthetic oligonucleotide
ccucgugucaugaguaaca

SEQ ID NO: 569716 - RNA, 19 nt, Artificial Sequence
  Description of Artificial Sequence: Synthetic oligonucleotide
agccuuucguacauacaaa

SEQ ID NO: 569717 - RNA, 19 nt, Artificial Sequence
  Description of Artificial Sequence: Synthetic oligonucleotide
agggacguucagcauccuu

SEQ ID NO: 569718 - RNA, 19 nt, Artificial Sequence
  Description of Artificial Sequence: Synthetic oligonucleotide
cuagggccuucccugggca

SEQ ID NO: 569719 - RNA, 19 nt, Artificial Sequence
  Description of Artificial Sequence: Synthetic oligonucleotide
acaggcucgccuggccggg

SEQ ID NO: 569720 - RNA, 19 nt, Artificial Sequence
  Description of Artificial Sequence: Synthetic oligonucleotide
ggaggucaacuauuaccga

SEQ ID NO: 569721 - RNA, 19 nt, Artificial Sequence
  Description of Artificial Sequence: Synthetic oligonucleotide
uacccgggccgcguacggg

SEQ ID NO: 569722 - RNA, 19 nt, Artificial Sequence
  Description of Artificial Sequence: Synthetic oligonucleotide
uuucucuaguuggcaucuc

SEQ ID NO: 569723 - RNA, 19 nt, Artificial Sequence
  Description of Artificial Sequence: Synthetic oligonucleotide
ggcuccgccaccagacagg

SEQ ID NO: 569724 - RNA, 19 nt, Artificial Sequence
  Description of Artificial Sequence: Synthetic oligonucleotide
uguccccguuugccauucc

SEQ ID NO: 569725 - RNA, 19 nt, Artificial Sequence
  Description of Artificial Sequence: Synthetic oligonucleotide
ugcccucgggacugcuuac

SEQ ID NO: 569726 - RNA, 19 nt, Artificial Sequence
  Description of Artificial Sequence: Synthetic oligonucleotide
caggaugguacuccauaua

SEQ ID NO: 569727 - RNA, 19 nt, Artificial Sequence
  Description of Artificial Sequence: Synthetic oligonucleotide
cuccauauaugggcugaca

SEQ ID NO: 569728 - RNA, 19 nt, Artificial Sequence
  Description of Artificial Sequence: Synthetic oligonucleotide
gguuaggcaucaguaguaa

SEQ ID NO: 569729 - RNA, 19 nt, Artificial Sequence
  Description of Artificial Sequence: Synthetic oligonucleotide
cccagguuaggcaucagua

SEQ ID NO: 569730 - RNA, 19 nt, Artificial Sequence
  Description of Artificial Sequence: Synthetic oligonucleotide
cucgccuggccggggaccc

SEQ ID NO: 569731 - RNA, 19 nt, Artificial Sequence
  Description of Artificial Sequence: Synthetic oligonucleotide
agggccuucccugggcagu

SEQ ID NO: 569732 - RNA, 19 nt, Artificial Sequence
  Description of Artificial Sequence: Synthetic oligonucleotide
caguugaauaaaagacaau

SEQ ID NO: 569733 - RNA, 19 nt, Artificial Sequence
  Description of Artificial Sequence: Synthetic oligonucleotide
cguacauacaaaauucuuu

SEQ ID NO: 569734 - RNA, 19 nt, Artificial Sequence
  Description of Artificial Sequence: Synthetic oligonucleotide
guccgcagaugcaaaggaa

SEQ ID NO: 569735 - RNA, 19 nt, Artificial Sequence
  Description of Artificial Sequence: Synthetic oligonucleotide
ggcuuagcucaauauguau

SEQ ID NO: 569736 - RNA, 19 nt, Artificial Sequence
  Description of Artificial Sequence: Synthetic oligonucleotide
ggccgggaaagccugggaa

SEQ ID NO: 569737 - RNA, 19 nt, Artificial Sequence
  Description of Artificial Sequence: Synthetic oligonucleotide
gcccaacuggcaccugaag

SEQ ID NO: 569738 - RNA, 19 nt, Artificial Sequence
  Description of Artificial Sequence: Synthetic oligonucleotide
gcuacccgggccgcguacg

SEQ ID NO: 569739 - RNA, 19 nt, Artificial Sequence
  Description of Artificial Sequence: Synthetic oligonucleotide
ccucaucuguaaauggugu

SEQ ID NO: 569740 - RNA, 19 nt, Artificial Sequence
  Description of Artificial Sequence: Synthetic oligonucleotide
ccucauuaaacagauccgu

SEQ ID NO: 569741 - RNA, 19 nt, Artificial Sequence
  Description of Artificial Sequence: Synthetic oligonucleotide
acggguguauauggcuuua

SEQ ID NO: 569742 - RNA, 19 nt, Artificial Sequence
  Description of Artificial Sequence: Synthetic oligonucleotide
aagggcugaccaagacauu

SEQ ID NO: 569743 - RNA, 19 nt, Artificial Sequence
  Description of Artificial Sequence: Synthetic oligonucleotide
cccucgggacugcuuacag

SEQ ID NO: 569744 - RNA, 19 nt, Artificial Sequence
  Description of Artificial Sequence: Synthetic oligonucleotide
gcuccgccaccagacaggc

SEQ ID NO: 569745 - RNA, 19 nt, Artificial Sequence
  Description of Artificial Sequence: Synthetic oligonucleotide
gcaccugaaggugagugcu

SEQ ID NO: 569746 - RNA, 19 nt, Artificial Sequence
  Description of Artificial Sequence: Synthetic oligonucleotide
cucgugucaugaguaacau

SEQ ID NO: 569747 - RNA, 19 nt, Artificial Sequence
  Description of Artificial Sequence: Synthetic oligonucleotide
ccuuucguacauacaaaau

SEQ ID NO: 569748 - RNA, 19 nt, Artificial Sequence
  Description of Artificial Sequence: Synthetic oligonucleotide
cacggaagucaaagaguau

SEQ ID NO: 569749 - RNA, 19 nt, Artificial Sequence
  Description of Artificial Sequence: Synthetic oligonucleotide
cacggguguauauggcuuu

SEQ ID NO: 569750 - RNA, 19 nt, Artificial Sequence
  Description of Artificial Sequence: Synthetic oligonucleotide
ccuuauccccucaucugua

SEQ ID NO: 569751 - RNA, 19 nt, Artificial Sequence
  Description of Artificial Sequence: Synthetic oligonucleotide
gcgacgcgcugcugggagc

SEQ ID NO: 569752 - RNA, 19 nt, Artificial Sequence
  Description of Artificial Sequence: Synthetic oligonucleotide
ccaggaugguacuccauau

SEQ ID NO: 569753 - RNA, 19 nt, Artificial Sequence
  Description of Artificial Sequence: Synthetic oligonucleotide
gugucaugaguaacauauu

SEQ ID NO: 569754 - RNA, 19 nt, Artificial Sequence
  Description of Artificial Sequence: Synthetic oligonucleotide
ggaaauuaacuggcacuuu

SEQ ID NO: 569755 - RNA, 19 nt, Artificial Sequence
  Description of Artificial Sequence: Synthetic oligonucleotide
cgacgcgcugcugggagcc

SEQ ID NO: 569756 - RNA, 19 nt, Artificial Sequence
  Description of Artificial Sequence: Synthetic oligonucleotide
gcucgccuggccggggacc

SEQ ID NO: 569757 - RNA, 19 nt, Artificial Sequence
  Description of Artificial Sequence: Synthetic oligonucleotide
gcguacgggcuccgccacc

SEQ ID NO: 569758 - RNA, 19 nt, Artificial Sequence
  Description of Artificial Sequence: Synthetic oligonucleotide
ccgcguacgggcuccgcca

SEQ ID NO: 569759 - RNA, 19 nt, Artificial Sequence
  Description of Artificial Sequence: Synthetic oligonucleotide
cacuucuggucagucgaau

SEQ ID NO: 569760 - RNA, 19 nt, Artificial Sequence
  Description of Artificial Sequence: Synthetic oligonucleotide
cgaucaagcucugguguga

SEQ ID NO: 569761 - RNA, 19 nt, Artificial Sequence
  Description of Artificial Sequence: Synthetic oligonucleotide
gcuuuucguuaugcuguaa

SEQ ID NO: 569762 - RNA, 19 nt, Artificial Sequence
  Description of Artificial Sequence: Synthetic oligonucleotide
gcucuugggacgccauuuu

SEQ ID NO: 569763 - RNA, 19 nt, Artificial Sequence
  Description of Artificial Sequence: Synthetic oligonucleotide
cggguguauauggcuuuac

SEQ ID NO: 569764 - RNA, 19 nt, Artificial Sequence
  Description of Artificial Sequence: Synthetic oligonucleotide
gcugcgccccugggaggcg

SEQ ID NO: 569765 - RNA, 19 nt, Artificial Sequence
  Description of Artificial Sequence: Synthetic oligonucleotide
gcccucgggacugcuuaca

SEQ ID NO: 569766 - RNA, 19 nt, Artificial Sequence
  Description of Artificial Sequence: Synthetic oligonucleotide
cguacgggcuccgccacca

SEQ ID NO: 569767 - RNA, 19 nt, Artificial Sequence
  Description of Artificial Sequence: Synthetic oligonucleotide
cgcguacgggcuccgccac

SEQ ID NO: 569768 - RNA, 19 nt, Artificial Sequence
  Description of Artificial Sequence: Synthetic oligonucleotide
ccgagucuaaguugauauu

SEQ ID NO: 569769 - RNA, 19 nt, Artificial Sequence
  Description of Artificial Sequence: Synthetic oligonucleotide
ccaugggugugaagccugu

SEQ ID NO: 569770 - RNA, 19 nt, Artificial Sequence
  Description of Artificial Sequence: Synthetic oligonucleotide
gcgccccugggaggcgacg

SEQ ID NO: 569771 - RNA, 19 nt, Artificial Sequence
  Description of Artificial Sequence: Synthetic oligonucleotide
ccccguuugccauuccauu

SEQ ID NO: 569772 - RNA, 19 nt, Artificial Sequence
  Description of Artificial Sequence: Synthetic oligonucleotide
acccagcgaugaaccucau

SEQ ID NO: 569773 - RNA, 19 nt, Artificial Sequence
  Description of Artificial Sequence: Synthetic oligonucleotide
ggcccgcuacccgggccgc

SEQ ID NO: 569774 - RNA, 19 nt, Artificial Sequence
  Description of Artificial Sequence: Synthetic oligonucleotide
gcccgcuacccgggccgcg

SEQ ID NO: 569775 - RNA, 19 nt, Artificial Sequence
  Description of Artificial Sequence: Synthetic oligonucleotide
ccgcggccgggcagaggcc

SEQ ID NO: 569776 - RNA, 19 nt, Artificial Sequence
  Description of Artificial Sequence: Synthetic oligonucleotide
gggccgcguacgggcuccg

SEQ ID NO: 569777 - RNA, 19 nt, Artificial Sequence
  Description of Artificial Sequence: Synthetic oligonucleotide
cuccgccaccagacaggcu

SEQ ID NO: 569778 - RNA, 19 nt, Artificial Sequence
  Description of Artificial Sequence: Synthetic oligonucleotide
auugauucgucccagaaac

SEQ ID NO: 569779 - RNA, 19 nt, Artificial Sequence
  Description of Artificial Sequence: Synthetic oligonucleotide
aacucagacaugucgagcc

SEQ ID NO: 569780 - RNA, 19 nt, Artificial Sequence
  Description of Artificial Sequence: Synthetic oligonucleotide
cuuuauuagauguucaggg

SEQ ID NO: 569781 - RNA, 19 nt, Artificial Sequence
  Description of Artificial Sequence: Synthetic oligonucleotide
uagaagauacuccagggcg

SEQ ID NO: 569782 - RNA, 19 nt, Artificial Sequence
  Description of Artificial Sequence: Synthetic oligonucleotide
aggacuacugcauuggggc

SEQ ID NO: 569783 - RNA, 19 nt, Artificial Sequence
  Description of Artificial Sequence: Synthetic oligonucleotide
agauguucaggguacauac

SEQ ID NO: 569784 - RNA, 19 nt, Artificial Sequence
  Description of Artificial Sequence: Synthetic oligonucleotide
uaagauagaagauacucca

SEQ ID NO: 569785 - RNA, 19 nt, Artificial Sequence
  Description of Artificial Sequence: Synthetic oligonucleotide
aauccaacggugugugucc

SEQ ID NO: 569786 - RNA, 19 nt, Artificial Sequence
  Description of Artificial Sequence: Synthetic oligonucleotide
auaagauagaagauacucc

SEQ ID NO: 569787 - RNA, 19 nt, Artificial Sequence
  Description of Artificial Sequence: Synthetic oligonucleotide
auagguccugcucauaggc

SEQ ID NO: 569788 - RNA, 19 nt, Artificial Sequence
  Description of Artificial Sequence: Synthetic oligonucleotide
agcaauucgauuucggcuc

SEQ ID NO: 569789 - RNA, 19 nt, Artificial Sequence
  Description of Artificial Sequence: Synthetic oligonucleotide
guagcaaugaaccaccagc

SEQ ID NO: 569790 - RNA, 19 nt, Artificial Sequence
  Description of Artificial Sequence: Synthetic oligonucleotide
uuagcagucuuguagacac

SEQ ID NO: 569791 - RNA, 19 nt, Artificial Sequence
  Description of Artificial Sequence: Synthetic oligonucleotide
uuuucccuauuccagauga

SEQ ID NO: 569792 - RNA, 19 nt, Artificial Sequence
  Description of Artificial Sequence: Synthetic oligonucleotide
ucuauaauccccuggugcc

SEQ ID NO: 569793 - RNA, 19 nt, Artificial Sequence
  Description of Artificial Sequence: Synthetic oligonucleotide
uugaguaacccuacgaaga

SEQ ID NO: 569794 - RNA, 19 nt, Artificial Sequence
  Description of Artificial Sequence: Synthetic oligonucleotide
aaacucaucucuccggaag

SEQ ID NO: 569795 - RNA, 19 nt, Artificial Sequence
  Description of Artificial Sequence: Synthetic oligonucleotide
gguacauacaggcaggugg

SEQ ID NO: 569796 - RNA, 19 nt, Artificial Sequence
  Description of Artificial Sequence: Synthetic oligonucleotide
ucgauuucggcucaucucc

SEQ ID NO: 569797 - RNA, 19 nt, Artificial Sequence
  Description of Artificial Sequence: Synthetic oligonucleotide
uaauagguccugcucauag

SEQ ID NO: 569798 - RNA, 19 nt, Artificial Sequence
  Description of Artificial Sequence: Synthetic oligonucleotide
uagcaaugaaccaccagcg

SEQ ID NO: 569799 - RNA, 19 nt, Artificial Sequence
  Description of Artificial Sequence: Synthetic oligonucleotide
uauuagauguucaggguac

SEQ ID NO: 569800 - RNA, 19 nt, Artificial Sequence
  Description of Artificial Sequence: Synthetic oligonucleotide
aauagguccugcucauagg

SEQ ID NO: 569801 - RNA, 19 nt, Artificial Sequence
  Description of Artificial Sequence: Synthetic oligonucleotide
cacuguuuuagcuucuugg

SEQ ID NO: 569802 - RNA, 19 nt, Artificial Sequence
  Description of Artificial Sequence: Synthetic oligonucleotide
aacucuccgugcuuucucc

SEQ ID NO: 569803 - RNA, 19 nt, Artificial Sequence
  Description of Artificial Sequence: Synthetic oligonucleotide
cauaacuuccccuucccgg

SEQ ID NO: 569804 - RNA, 19 nt, Artificial Sequence
  Description of Artificial Sequence: Synthetic oligonucleotide
ucaaccaacacaucugcca

SEQ ID NO: 569805 - RNA, 19 nt, Artificial Sequence
  Description of Artificial Sequence: Synthetic oligonucleotide
ucccuauuccagaugaucc

SEQ ID NO: 569806 - RNA, 19 nt, Artificial Sequence
  Description of Artificial Sequence: Synthetic oligonucleotide
uuauuagauguucagggua

SEQ ID NO: 569807 - RNA, 19 nt, Artificial Sequence
  Description of Artificial Sequence: Synthetic oligonucleotide
aaguagacgaucucauuga

SEQ ID NO: 569808 - RNA, 19 nt, Artificial Sequence
  Description of Artificial Sequence: Synthetic oligonucleotide
auguucaggguacauacag

SEQ ID NO: 569809 - RNA, 19 nt, Artificial Sequence
  Description of Artificial Sequence: Synthetic oligonucleotide
acccaauaaacuuggcuac

SEQ ID NO: 569810 - RNA, 19 nt, Artificial Sequence
  Description of Artificial Sequence: Synthetic oligonucleotide
ugaguaacccuacgaagag

SEQ ID NO: 569811 - RNA, 19 nt, Artificial Sequence
  Description of Artificial Sequence: Synthetic oligonucleotide
auaacuuccccuucccggg

SEQ ID NO: 569812 - RNA, 19 nt, Artificial Sequence
  Description of Artificial Sequence: Synthetic oligonucleotide
cuugaguaacccuacgaag

SEQ ID NO: 569813 - RNA, 19 nt, Artificial Sequence
  Description of Artificial Sequence: Synthetic oligonucleotide
uaucaaugaucuccagacg

SEQ ID NO: 569814 - RNA, 19 nt, Artificial Sequence
  Description of Artificial Sequence: Synthetic oligonucleotide
uuacgcuccggccauaagc

SEQ ID NO: 569815 - RNA, 19 nt, Artificial Sequence
  Description of Artificial Sequence: Synthetic oligonucleotide
caaugaaccaccagcgccg

SEQ ID NO: 569816 - RNA, 19 nt, Artificial Sequence
  Description of Artificial Sequence: Synthetic oligonucleotide
ugcuagaugguguagcaca

SEQ ID NO: 569817 - RNA, 19 nt, Artificial Sequence
  Description of Artificial Sequence: Synthetic oligonucleotide
guucaggguacauacaggc

SEQ ID NO: 569818 - RNA, 19 nt, Artificial Sequence
  Description of Artificial Sequence: Synthetic oligonucleotide
uguucaggguacauacagg

SEQ ID NO: 569819 - RNA, 19 nt, Artificial Sequence
  Description of Artificial Sequence: Synthetic oligonucleotide
gaugguguagcacaccuuc

SEQ ID NO: 569820 - RNA, 19 nt, Artificial Sequence
  Description of Artificial Sequence: Synthetic oligonucleotide
uguuguagcaaugaaccac

SEQ ID NO: 569821 - RNA, 19 nt, Artificial Sequence
  Description of Artificial Sequence: Synthetic oligonucleotide
guagccaucaaccaacaca

SEQ ID NO: 569822 - RNA, 19 nt, Artificial Sequence
  Description of Artificial Sequence: Synthetic oligonucleotide
uggagacccaauaaacuug

SEQ ID NO: 569823 - RNA, 19 nt, Artificial Sequence
  Description of Artificial Sequence: Synthetic oligonucleotide
ucagucgcugcucuagcgg

SEQ ID NO: 569824 - RNA, 19 nt, Artificial Sequence
  Description of Artificial Sequence: Synthetic oligonucleotide
aacaccgcggacaacauca

SEQ ID NO: 569825 - RNA, 19 nt, Artificial Sequence
  Description of Artificial Sequence: Synthetic oligonucleotide
ugaaccaccagcgccgugg

SEQ ID NO: 569826 - RNA, 19 nt, Artificial Sequence
  Description of Artificial Sequence: Synthetic oligonucleotide
ucaaugaucuccagacgca

SEQ ID NO: 569827 - RNA, 19 nt, Artificial Sequence
  Description of Artificial Sequence: Synthetic oligonucleotide
gauggggcggaucacauuc

SEQ ID NO: 569828 - RNA, 19 nt, Artificial Sequence
  Description of Artificial Sequence: Synthetic oligonucleotide
aacggugugugucccaucu

SEQ ID NO: 569829 - RNA, 19 nt, Artificial Sequence
  Description of Artificial Sequence: Synthetic oligonucleotide
uuugugcauauacuuggca

SEQ ID NO: 569830 - RNA, 19 nt, Artificial Sequence
  Description of Artificial Sequence: Synthetic oligonucleotide
aguucuuugagauggugau

SEQ ID NO: 569831 - RNA, 19 nt, Artificial Sequence
  Description of Artificial Sequence: Synthetic oligonucleotide
acuuggcuaccucaugucg

SEQ ID NO: 569832 - RNA, 19 nt, Artificial Sequence
  Description of Artificial Sequence: Synthetic oligonucleotide
gacccaauaaacuuggcua

SEQ ID NO: 569833 - RNA, 19 nt, Artificial Sequence
  Description of Artificial Sequence: Synthetic oligonucleotide
uguagcaaugaaccaccag

SEQ ID NO: 569834 - RNA, 19 nt, Artificial Sequence
  Description of Artificial Sequence: Synthetic oligonucleotide
uuucggcucaucuccaaag

SEQ ID NO: 569835 - RNA, 19 nt, Artificial Sequence
  Description of Artificial Sequence: Synthetic oligonucleotide
uuaugucuugcguugacau

SEQ ID NO: 569836 - RNA, 19 nt, Artificial Sequence
  Description of Artificial Sequence: Synthetic oligonucleotide
augucgagccgaaugaagc

SEQ ID NO: 569837 - RNA, 19 nt, Artificial Sequence
  Description of Artificial Sequence: Synthetic oligonucleotide
agacaugucgagccgaaug

SEQ ID NO: 569838 - RNA, 19 nt, Artificial Sequence
  Description of Artificial Sequence: Synthetic oligonucleotide
agaagauacuccagggcgc

SEQ ID NO: 569839 - RNA, 19 nt, Artificial Sequence
  Description of Artificial Sequence: Synthetic oligonucleotide
ugucauuucggcugauggc

SEQ ID NO: 569840 - RNA, 19 nt, Artificial Sequence
  Description of Artificial Sequence: Synthetic oligonucleotide
acuugaguaacccuacgaa

SEQ ID NO: 569841 - RNA, 19 nt, Artificial Sequence
  Description of Artificial Sequence: Synthetic oligonucleotide
uaccucaugucgcuccugg

SEQ ID NO: 569842 - RNA, 19 nt, Artificial Sequence
  Description of Artificial Sequence: Synthetic oligonucleotide
ugcguugacaucugcaccu

SEQ ID NO: 569843 - RNA, 19 nt, Artificial Sequence
  Description of Artificial Sequence: Synthetic oligonucleotide
gauccuaagaagaggaaga

SEQ ID NO: 569844 - RNA, 19 nt, Artificial Sequence
  Description of Artificial Sequence: Synthetic oligonucleotide
gagcuuucaggauggggcg

SEQ ID NO: 569845 - RNA, 19 nt, Artificial Sequence
  Description of Artificial Sequence: Synthetic oligonucleotide
ggugagcacaucuggaugg

SEQ ID NO: 569846 - RNA, 19 nt, Artificial Sequence
  Description of Artificial Sequence: Synthetic oligonucleotide
ucuugcguugacaucugca

SEQ ID NO: 569847 - RNA, 19 nt, Artificial Sequence
  Description of Artificial Sequence: Synthetic oligonucleotide
agacccaauaaacuuggcu

SEQ ID NO: 569848 - RNA, 19 nt, Artificial Sequence
  Description of Artificial Sequence: Synthetic oligonucleotide
uguuucuucggggcuaggg

SEQ ID NO: 569849 - RNA, 19 nt, Artificial Sequence
  Description of Artificial Sequence: Synthetic oligonucleotide
cuuggcuaccucaugucgc

SEQ ID NO: 569850 - RNA, 19 nt, Artificial Sequence
  Description of Artificial Sequence: Synthetic oligonucleotide
uacgcuccggccauaagca

SEQ ID NO: 569851 - RNA, 19 nt, Artificial Sequence
  Description of Artificial Sequence: Synthetic oligonucleotide
aagugagcuuucaggaugg

SEQ ID NO: 569852 - RNA, 19 nt, Artificial Sequence
  Description of Artificial Sequence: Synthetic oligonucleotide
ucacuaaucuggacguccc

SEQ ID NO: 569853 - RNA, 19 nt, Artificial Sequence
  Description of Artificial Sequence: Synthetic oligonucleotide
acauuggaagucaugauga

SEQ ID NO: 569854 - RNA, 19 nt, Artificial Sequence
  Description of Artificial Sequence: Synthetic oligonucleotide
guuguagcaaugaaccacc

SEQ ID NO: 569855 - RNA, 19 nt, Artificial Sequence
  Description of Artificial Sequence: Synthetic oligonucleotide
uguagccugguggagaccc

SEQ ID NO: 569856 - RNA, 19 nt, Artificial Sequence
  Description of Artificial Sequence: Synthetic oligonucleotide
ucauugauucgucccagaa

SEQ ID NO: 569857 - RNA, 19 nt, Artificial Sequence
  Description of Artificial Sequence: Synthetic oligonucleotide
gaaguuuucagaagcuuca

SEQ ID NO: 569858 - RNA, 19 nt, Artificial Sequence
  Description of Artificial Sequence: Synthetic oligonucleotide
augucuugcguugacaucu

SEQ ID NO: 569859 - RNA, 19 nt, Artificial Sequence
  Description of Artificial Sequence: Synthetic oligonucleotide
aaugcuguccagccaaguu

SEQ ID NO: 569860 - RNA, 19 nt, Artificial Sequence
  Description of Artificial Sequence: Synthetic oligonucleotide
gaaggacucuuguuguagc

SEQ ID NO: 569861 - RNA, 19 nt, Artificial Sequence
  Description of Artificial Sequence: Synthetic oligonucleotide
aaggacucuuguuguagca

SEQ ID NO: 569862 - RNA, 19 nt, Artificial Sequence
  Description of Artificial Sequence: Synthetic oligonucleotide
uugaaacuagcacgguugu

SEQ ID NO: 569863 - RNA, 19 nt, Artificial Sequence
  Description of Artificial Sequence: Synthetic oligonucleotide
uauaauccccuggugccgg

SEQ ID NO: 569864 - RNA, 19 nt, Artificial Sequence
  Description of Artificial Sequence: Synthetic oligonucleotide
ugucgagccgaaugaagcc

SEQ ID NO: 569865 - RNA, 19 nt, Artificial Sequence
  Description of Artificial Sequence: Synthetic oligonucleotide
gacaugucgagccgaauga

SEQ ID NO: 569866 - RNA, 19 nt, Artificial Sequence
  Description of Artificial Sequence: Synthetic oligonucleotide
uggugagcacaucuggaug

SEQ ID NO: 569867 - RNA, 19 nt, Artificial Sequence
  Description of Artificial Sequence: Synthetic oligonucleotide
uucggcucaucuccaaagc

SEQ ID NO: 569868 - RNA, 19 nt, Artificial Sequence
  Description of Artificial Sequence: Synthetic oligonucleotide
uugacgaugcgguagucau

SEQ ID NO: 569869 - RNA, 19 nt, Artificial Sequence
  Description of Artificial Sequence: Synthetic oligonucleotide
ugauucgcagagugcagcc

SEQ ID NO: 569870 - RNA, 19 nt, Artificial Sequence
  Description of Artificial Sequence: Synthetic oligonucleotide
aacuagcacgguuguuuag

SEQ ID NO: 569871 - RNA, 19 nt, Artificial Sequence
  Description of Artificial Sequence: Synthetic oligonucleotide
uuuggagcgagggagacuu

SEQ ID NO: 569872 - RNA, 19 nt, Artificial Sequence
  Description of Artificial Sequence: Synthetic oligonucleotide
uuuaugucuugcguugaca

SEQ ID NO: 569873 - RNA, 19 nt, Artificial Sequence
  Description of Artificial Sequence: Synthetic oligonucleotide
gaggacuacugcauugggg

SEQ ID NO: 569874 - RNA, 19 nt, Artificial Sequence
  Description of Artificial Sequence: Synthetic oligonucleotide
uaacccuacgaagagccgc

SEQ ID NO: 569875 - RNA, 19 nt, Artificial Sequence
  Description of Artificial Sequence: Synthetic oligonucleotide
ugcauuggggcacuguuuu

SEQ ID NO: 569876 - RNA, 19 nt, Artificial Sequence
  Description of Artificial Sequence: Synthetic oligonucleotide
ugauucgucccagaaacuc

SEQ ID NO: 569877 - RNA, 19 nt, Artificial Sequence
  Description of Artificial Sequence: Synthetic oligonucleotide
cugguuuaccacacggcgc

SEQ ID NO: 569878 - RNA, 19 nt, Artificial Sequence
  Description of Artificial Sequence: Synthetic oligonucleotide
agaggacuacugcauuggg

SEQ ID NO: 569879 - RNA, 19 nt, Artificial Sequence
  Description of Artificial Sequence: Synthetic oligonucleotide
gacuugaguaacccuacga

SEQ ID NO: 569880 - RNA, 19 nt, Artificial Sequence
  Description of Artificial Sequence: Synthetic oligonucleotide
caaccaacacaucugccac

SEQ ID NO: 569881 - RNA, 19 nt, Artificial Sequence
  Description of Artificial Sequence: Synthetic oligonucleotide
caugucgagccgaaugaag

SEQ ID NO: 569882 - RNA, 19 nt, Artificial Sequence
  Description of Artificial Sequence: Synthetic oligonucleotide
auauacuuggcagucugcu

SEQ ID NO: 569883 - RNA, 19 nt, Artificial Sequence
  Description of Artificial Sequence: Synthetic oligonucleotide
cuagcacgguuguuuagcc

SEQ ID NO: 569884 - RNA, 19 nt, Artificial Sequence
  Description of Artificial Sequence: Synthetic oligonucleotide
cauauacuuggcagucugc

SEQ ID NO: 569885 - RNA, 19 nt, Artificial Sequence
  Description of Artificial Sequence: Synthetic oligonucleotide
uuguuguagcaaugaacca

SEQ ID NO: 569886 - RNA, 19 nt, Artificial Sequence
  Description of Artificial Sequence: Synthetic oligonucleotide
cucaguuuucccuauucca

SEQ ID NO: 569887 - RNA, 19 nt, Artificial Sequence
  Description of Artificial Sequence: Synthetic oligonucleotide
aacccuacgaagagccgcg

SEQ ID NO: 569888 - RNA, 19 nt, Artificial Sequence
  Description of Artificial Sequence: Synthetic oligonucleotide
agacuugaguaacccuacg

SEQ ID NO: 569889 - RNA, 19 nt, Artificial Sequence
  Description of Artificial Sequence: Synthetic oligonucleotide
agccaaguuuaugucuugc

SEQ ID NO: 569890 - RNA, 19 nt, Artificial Sequence
  Description of Artificial Sequence: Synthetic oligonucleotide
caggguacauacaggcagg

SEQ ID NO: 569891 - RNA, 19 nt, Artificial Sequence
  Description of Artificial Sequence: Synthetic oligonucleotide
auuuguugccaugccacag

SEQ ID NO: 569892 - RNA, 19 nt, Artificial Sequence
  Description of Artificial Sequence: Synthetic oligonucleotide
uaccacacggcgcucuacc

SEQ ID NO: 569893 - RNA, 19 nt, Artificial Sequence
  Description of Artificial Sequence: Synthetic oligonucleotide
ucauuucggcugauggcug

SEQ ID NO: 569894 - RNA, 19 nt, Artificial Sequence
  Description of Artificial Sequence: Synthetic oligonucleotide
uggagcgggcgccauagug

SEQ ID NO: 569895 - RNA, 19 nt, Artificial Sequence
  Description of Artificial Sequence: Synthetic oligonucleotide
uccggaagugagcuuucag

SEQ ID NO: 569896 - RNA, 19 nt, Artificial Sequence
  Description of Artificial Sequence: Synthetic oligonucleotide
cuggaguguuucuucgggg

SEQ ID NO: 569897 - RNA, 19 nt, Artificial Sequence
  Description of Artificial Sequence: Synthetic oligonucleotide
ucuagcgggaagcggcgcc

SEQ ID NO: 569898 - RNA, 19 nt, Artificial Sequence
  Description of Artificial Sequence: Synthetic oligonucleotide
gauggagcgggcgccauag

SEQ ID NO: 569899 - RNA, 19 nt, Artificial Sequence
  Description of Artificial Sequence: Synthetic oligonucleotide
gucacuaaucuggacgucc

SEQ ID NO: 569900 - RNA, 19 nt, Artificial Sequence
  Description of Artificial Sequence: Synthetic oligonucleotide
cagagggugcuccucgucg

SEQ ID NO: 569901 - RNA, 19 nt, Artificial Sequence
  Description of Artificial Sequence: Synthetic oligonucleotide
cucaugucgcuccuggaac

SEQ ID NO: 569902 - RNA, 19 nt, Artificial Sequence
  Description of Artificial Sequence: Synthetic oligonucleotide
auccucucgagugacuagg

SEQ ID NO: 569903 - RNA, 19 nt, Artificial Sequence
  Description of Artificial Sequence: Synthetic oligonucleotide
ugugucccaucucauuccu

SEQ ID NO: 569904 - RNA, 19 nt, Artificial Sequence
  Description of Artificial Sequence: Synthetic oligonucleotide
agcugguuuaccacacggc

SEQ ID NO: 569905 - RNA, 19 nt, Artificial Sequence
  Description of Artificial Sequence: Synthetic oligonucleotide
gacgcaguguggguggacg

SEQ ID NO: 569906 - RNA, 19 nt, Artificial Sequence
  Description of Artificial Sequence: Synthetic oligonucleotide
cuaggacuuccagagaaug

SEQ ID NO: 569907 - RNA, 19 nt, Artificial Sequence
  Description of Artificial Sequence: Synthetic oligonucleotide
agcgagggagacuugagua

SEQ ID NO: 569908 - RNA, 19 nt, Artificial Sequence
  Description of Artificial Sequence: Synthetic oligonucleotide
cuauaauccccuggugccg

SEQ ID NO: 569909 - RNA, 19 nt, Artificial Sequence
  Description of Artificial Sequence: Synthetic oligonucleotide
ucaugucgcuccuggaacu

SEQ ID NO: 569910 - RNA, 19 nt, Artificial Sequence
  Description of Artificial Sequence: Synthetic oligonucleotide
uguuuagccgguuguugaa

SEQ ID NO: 569911 - RNA, 19 nt, Artificial Sequence
  Description of Artificial Sequence: Synthetic oligonucleotide
guuguuuagccgguuguug

SEQ ID NO: 569912 - RNA, 19 nt, Artificial Sequence
  Description of Artificial Sequence: Synthetic oligonucleotide
uuggcuaccucaugucgcu

SEQ ID NO: 569913 - RNA, 19 nt, Artificial Sequence
  Description of Artificial Sequence: Synthetic oligonucleotide
agcagucuuguagacacug

SEQ ID NO: 569914 - RNA, 19 nt, Artificial Sequence
  Description of Artificial Sequence: Synthetic oligonucleotide
gcuacauuggaagucauga

SEQ ID NO: 569915 - RNA, 19 nt, Artificial Sequence
  Description of Artificial Sequence: Synthetic oligonucleotide
aagcaggaccuguaccaca

SEQ ID NO: 569916 - RNA, 19 nt, Artificial Sequence
  Description of Artificial Sequence: Synthetic oligonucleotide
cagucgcugcucuagcggg

SEQ ID NO: 569917 - RNA, 19 nt, Artificial Sequence
  Description of Artificial Sequence: Synthetic oligonucleotide
gagaauggauucccuguuc

SEQ ID NO: 569918 - RNA, 19 nt, Artificial Sequence
  Description of Artificial Sequence: Synthetic oligonucleotide
gcugcauccuuguuggaag

SEQ ID NO: 569919 - RNA, 19 nt, Artificial Sequence
  Description of Artificial Sequence: Synthetic oligonucleotide
ugcagccuuugaaacuagc

SEQ ID NO: 569920 - RNA, 19 nt, Artificial Sequence
  Description of Artificial Sequence: Synthetic oligonucleotide
ccuuuauuagauguucagg

SEQ ID NO: 569921 - RNA, 19 nt, Artificial Sequence
  Description of Artificial Sequence: Synthetic oligonucleotide
ggccauaagcacuucccgg

SEQ ID NO: 569922 - RNA, 19 nt, Artificial Sequence
  Description of Artificial Sequence: Synthetic oligonucleotide
uucccuauuccagaugauc

SEQ ID NO: 569923 - RNA, 19 nt, Artificial Sequence
  Description of Artificial Sequence: Synthetic oligonucleotide
uccauguacuuggucucgg

SEQ ID NO: 569924 - RNA, 19 nt, Artificial Sequence
  Description of Artificial Sequence: Synthetic oligonucleotide
acuaaucuggacgucccca

SEQ ID NO: 569925 - RNA, 19 nt, Artificial Sequence
  Description of Artificial Sequence: Synthetic oligonucleotide
gccuuuauuagauguucag

SEQ ID NO: 569926 - RNA, 19 nt, Artificial Sequence
  Description of Artificial Sequence: Synthetic oligonucleotide
ugcuccucgucguaccagc

SEQ ID NO: 569927 - RNA, 19 nt, Artificial Sequence
  Description of Artificial Sequence: Synthetic oligonucleotide
acgcaguguggguggacgc

SEQ ID NO: 569928 - RNA, 19 nt, Artificial Sequence
  Description of Artificial Sequence: Synthetic oligonucleotide
auuucggcugauggcugcc

SEQ ID NO: 569929 - RNA, 19 nt, Artificial Sequence
  Description of Artificial Sequence: Synthetic oligonucleotide
uccagggaauaagauagaa

SEQ ID NO: 569930 - RNA, 19 nt, Artificial Sequence
  Description of Artificial Sequence: Synthetic oligonucleotide
uugauucgucccagaaacu

SEQ ID NO: 569931 - RNA, 19 nt, Artificial Sequence
  Description of Artificial Sequence: Synthetic oligonucleotide
ucgagccgaaugaagcccu

SEQ ID NO: 569932 - RNA, 19 nt, Artificial Sequence
  Description of Artificial Sequence: Synthetic oligonucleotide
cauuucggcugauggcugc

SEQ ID NO: 569933 - RNA, 19 nt, Artificial Sequence
  Description of Artificial Sequence: Synthetic oligonucleotide
auaauccccuggugccggc

SEQ ID NO: 569934 - RNA, 19 nt, Artificial Sequence
  Description of Artificial Sequence: Synthetic oligonucleotide
aguagacgaucucauugau

SEQ ID NO: 569935 - RNA, 19 nt, Artificial Sequence
  Description of Artificial Sequence: Synthetic oligonucleotide
ucuugucacuaaucuggac

SEQ ID NO: 569936 - RNA, 19 nt, Artificial Sequence
  Description of Artificial Sequence: Synthetic oligonucleotide
uuguagcaaugaaccacca

SEQ ID NO: 569937 - RNA, 19 nt, Artificial Sequence
  Description of Artificial Sequence: Synthetic oligonucleotide
caauaaacuuggcuaccuc

SEQ ID NO: 569938 - RNA, 19 nt, Artificial Sequence
  Description of Artificial Sequence: Synthetic oligonucleotide
gccauaguggacauuguag

SEQ ID NO: 569939 - RNA, 19 nt, Artificial Sequence
  Description of Artificial Sequence: Synthetic oligonucleotide
guuuaugucuugcguugac

SEQ ID NO: 569940 - RNA, 19 nt, Artificial Sequence
  Description of Artificial Sequence: Synthetic oligonucleotide
uguagccaucaaccaacac

SEQ ID NO: 569941 - RNA, 19 nt, Artificial Sequence
  Description of Artificial Sequence: Synthetic oligonucleotide
augcuagaugguguagcac

SEQ ID NO: 569942 - RNA, 19 nt, Artificial Sequence
  Description of Artificial Sequence: Synthetic oligonucleotide
ucgcuccuggaacucagac

SEQ ID NO: 569943 - RNA, 19 nt, Artificial Sequence
  Description of Artificial Sequence: Synthetic oligonucleotide
ggcauaauccaacggugug

SEQ ID NO: 569944 - RNA, 19 nt, Artificial Sequence
  Description of Artificial Sequence: Synthetic oligonucleotide
acgguuguuuagccgguug

SEQ ID NO: 569945 - RNA, 19 nt, Artificial Sequence
  Description of Artificial Sequence: Synthetic oligonucleotide
uagauguucaggguacaua

SEQ ID NO: 569946 - RNA, 19 nt, Artificial Sequence
  Description of Artificial Sequence: Synthetic oligonucleotide
cacuucaucaaagaggacu

SEQ ID NO: 569947 - RNA, 19 nt, Artificial Sequence
  Description of Artificial Sequence: Synthetic oligonucleotide
acauacaggcagguggaug

SEQ ID NO: 569948 - RNA, 19 nt, Artificial Sequence
  Description of Artificial Sequence: Synthetic oligonucleotide
caugcuugauggagcgggc

SEQ ID NO: 569949 - RNA, 19 nt, Artificial Sequence
  Description of Artificial Sequence: Synthetic oligonucleotide
aagauacuccagggcgcac

SEQ ID NO: 569950 - RNA, 19 nt, Artificial Sequence
  Description of Artificial Sequence: Synthetic oligonucleotide
gugauucgcagagugcagc

SEQ ID NO: 569951 - RNA, 19 nt, Artificial Sequence
  Description of Artificial Sequence: Synthetic oligonucleotide
gaagauacuccagggcgca

SEQ ID NO: 569952 - RNA, 19 nt, Artificial Sequence
  Description of Artificial Sequence: Synthetic oligonucleotide
ccuacgaagagccgcggcg

SEQ ID NO: 569953 - RNA, 19 nt, Artificial Sequence
  Description of Artificial Sequence: Synthetic oligonucleotide
auaagcacuucccgggcuu

SEQ ID NO: 569954 - RNA, 19 nt, Artificial Sequence
  Description of Artificial Sequence: Synthetic oligonucleotide
gaacucuccgugcuuucuc

SEQ ID NO: 569955 - RNA, 19 nt, Artificial Sequence
  Description of Artificial Sequence: Synthetic oligonucleotide
cuacgaagagccgcggcgc

SEQ ID NO: 569956 - RNA, 19 nt, Artificial Sequence
  Description of Artificial Sequence: Synthetic oligonucleotide
ucucggggaggaguggugc

SEQ ID NO: 569957 - RNA, 19 nt, Artificial Sequence
  Description of Artificial Sequence: Synthetic oligonucleotide
aaugaaccaccagcgccgu

SEQ ID NO: 569958 - RNA, 19 nt, Artificial Sequence
  Description of Artificial Sequence: Synthetic oligonucleotide
uggaugcuagaugguguag

SEQ ID NO: 569959 - RNA, 19 nt, Artificial Sequence
  Description of Artificial Sequence: Synthetic oligonucleotide
guacauacaggcaggugga

SEQ ID NO: 569960 - RNA, 19 nt, Artificial Sequence
  Description of Artificial Sequence: Synthetic oligonucleotide
cauugauucgucccagaaa

SEQ ID NO: 569961 - RNA, 19 nt, Artificial Sequence
  Description of Artificial Sequence: Synthetic oligonucleotide
gucgagccgaaugaagccc

SEQ ID NO: 569962 - RNA, 19 nt, Artificial Sequence
  Description of Artificial Sequence: Synthetic oligonucleotide
auccaacgguguguguccc

SEQ ID NO: 569963 - RNA, 19 nt, Artificial Sequence
  Description of Artificial Sequence: Synthetic oligonucleotide
cacuaaucuggacgucccc

SEQ ID NO: 569964 - RNA, 19 nt, Artificial Sequence
  Description of Artificial Sequence: Synthetic oligonucleotide
uuuaccacacggcgcucua

SEQ ID NO: 569965 - RNA, 19 nt, Artificial Sequence
  Description of Artificial Sequence: Synthetic oligonucleotide
gucguaccagccauucucc

SEQ ID NO: 569966 - RNA, 19 nt, Artificial Sequence
  Description of Artificial Sequence: Synthetic oligonucleotide
gacgaucucauugauucgu

SEQ ID NO: 569967 - RNA, 19 nt, Artificial Sequence
  Description of Artificial Sequence: Synthetic oligonucleotide
agugauucgcagagugcag

SEQ ID NO: 569968 - RNA, 19 nt, Artificial Sequence
  Description of Artificial Sequence: Synthetic oligonucleotide
acgaucucauugauucguc

SEQ ID NO: 569969 - RNA, 19 nt, Artificial Sequence
  Description of Artificial Sequence: Synthetic oligonucleotide
cucucgagugacuaggacu

SEQ ID NO: 569970 - RNA, 19 nt, Artificial Sequence
  Description of Artificial Sequence: Synthetic oligonucleotide
gggguuggcuccuccaucc

SEQ ID NO: 569971 - RNA, 19 nt, Artificial Sequence
  Description of Artificial Sequence: Synthetic oligonucleotide
cagucaauggucuuccccu

SEQ ID NO: 569972 - RNA, 19 nt, Artificial Sequence
  Description of Artificial Sequence: Synthetic oligonucleotide
ggagcgggcgccauagugg

SEQ ID NO: 569973 - RNA, 19 nt, Artificial Sequence
  Description of Artificial Sequence: Synthetic oligonucleotide
cagcaauucgauuucggcu

SEQ ID NO: 569974 - RNA, 19 nt, Artificial Sequence
  Description of Artificial Sequence: Synthetic oligonucleotide
uuucccuauuccagaugau

SEQ ID NO: 569975 - RNA, 19 nt, Artificial Sequence
  Description of Artificial Sequence: Synthetic oligonucleotide
gcgguucuccucaacaccg

SEQ ID NO: 569976 - RNA, 19 nt, Artificial Sequence
  Description of Artificial Sequence: Synthetic oligonucleotide
augguuacgcuccggccau

SEQ ID NO: 569977 - RNA, 19 nt, Artificial Sequence
  Description of Artificial Sequence: Synthetic oligonucleotide
cccagaaacucaucucucc

SEQ ID NO: 569978 - RNA, 19 nt, Artificial Sequence
  Description of Artificial Sequence: Synthetic oligonucleotide
ucaacaccgcggacaacau

SEQ ID NO: 569979 - RNA, 19 nt, Artificial Sequence
  Description of Artificial Sequence: Synthetic oligonucleotide
auaauccaacggugugugu

SEQ ID NO: 569980 - RNA, 19 nt, Artificial Sequence
  Description of Artificial Sequence: Synthetic oligonucleotide
caucaugacaccugcuucu

SEQ ID NO: 569981 - RNA, 19 nt, Artificial Sequence
  Description of Artificial Sequence: Synthetic oligonucleotide
cacacggcgcucuaccuca

SEQ ID NO: 569982 - RNA, 19 nt, Artificial Sequence
  Description of Artificial Sequence: Synthetic oligonucleotide
guggacgcuucucagccuc

SEQ ID NO: 569983 - RNA, 19 nt, Artificial Sequence
  Description of Artificial Sequence: Synthetic oligonucleotide
uggacguccccaagguuuu

SEQ ID NO: 569984 - RNA, 19 nt, Artificial Sequence
  Description of Artificial Sequence: Synthetic oligonucleotide
guggagacccaauaaacuu

SEQ ID NO: 569985 - RNA, 19 nt, Artificial Sequence
  Description of Artificial Sequence: Synthetic oligonucleotide
acgcuccggccauaagcac

SEQ ID NO: 569986 - RNA, 19 nt, Artificial Sequence
  Description of Artificial Sequence: Synthetic oligonucleotide
ggcuaccucaugucgcucc

SEQ ID NO: 569987 - RNA, 19 nt, Artificial Sequence
  Description of Artificial Sequence: Synthetic oligonucleotide
agccgaaugaagcccuuuu

SEQ ID NO: 569988 - RNA, 19 nt, Artificial Sequence
  Description of Artificial Sequence: Synthetic oligonucleotide
ucguaccagccauucuccu

SEQ ID NO: 569989 - RNA, 19 nt, Artificial Sequence
  Description of Artificial Sequence: Synthetic oligonucleotide
acggugugugucccaucuc

SEQ ID NO: 569990 - RNA, 19 nt, Artificial Sequence
  Description of Artificial Sequence: Synthetic oligonucleotide
gagcgggcgccauagugga

SEQ ID NO: 569991 - RNA, 19 nt, Artificial Sequence
  Description of Artificial Sequence: Synthetic oligonucleotide
ggaccuguaccacacuguc

SEQ ID NO: 569992 - RNA, 19 nt, Artificial Sequence
  Description of Artificial Sequence: Synthetic oligonucleotide
cauguacuuggucucggaa

SEQ ID NO: 569993 - RNA, 19 nt, Artificial Sequence
  Description of Artificial Sequence: Synthetic oligonucleotide
aucuugucacuaaucugga

SEQ ID NO: 569994 - RNA, 19 nt, Artificial Sequence
  Description of Artificial Sequence: Synthetic oligonucleotide
agucaauggucuuccccuu

SEQ ID NO: 569995 - RNA, 19 nt, Artificial Sequence
  Description of Artificial Sequence: Synthetic oligonucleotide
gaagcggcgccucucuucu

SEQ ID NO: 569996 - RNA, 19 nt, Artificial Sequence
  Description of Artificial Sequence: Synthetic oligonucleotide
uggggcggaucacauucuc

SEQ ID NO: 569997 - RNA, 19 nt, Artificial Sequence
  Description of Artificial Sequence: Synthetic oligonucleotide
ucgucguaccagccauucu

SEQ ID NO: 569998 - RNA, 19 nt, Artificial Sequence
  Description of Artificial Sequence: Synthetic oligonucleotide
ucccucuucauggccgaug

SEQ ID NO: 569999 - RNA, 19 nt, Artificial Sequence
  Description of Artificial Sequence: Synthetic oligonucleotide
ccggauguccaguuuucgg

SEQ ID NO: 570000 - RNA, 19 nt, Artificial Sequence
  Description of Artificial Sequence: Synthetic oligonucleotide
guuacgcuccggccauaag

SEQ ID NO: 570001 - RNA, 19 nt, Artificial Sequence
  Description of Artificial Sequence: Synthetic oligonucleotide
guggaugcuagauggugua

SEQ ID NO: 570002 - RNA, 19 nt, Artificial Sequence
  Description of Artificial Sequence: Synthetic oligonucleotide
ucuccggaagugagcuuuc

SEQ ID NO: 570003 - RNA, 19 nt, Artificial Sequence
  Description of Artificial Sequence: Synthetic oligonucleotide
cauuggaagucaugaugaa

SEQ ID NO: 570004 - RNA, 19 nt, Artificial Sequence
  Description of Artificial Sequence: Synthetic oligonucleotide
acuacugcauuggggcacu

SEQ ID NO: 570005 - RNA, 19 nt, Artificial Sequence
  Description of Artificial Sequence: Synthetic oligonucleotide
guuuucgggucuugcuguc

SEQ ID NO: 570006 - RNA, 19 nt, Artificial Sequence
  Description of Artificial Sequence: Synthetic oligonucleotide
uagcagucuuguagacacu

SEQ ID NO: 570007 - RNA, 19 nt, Artificial Sequence
  Description of Artificial Sequence: Synthetic oligonucleotide
augcgguagucaucagcca

SEQ ID NO: 570008 - RNA, 19 nt, Artificial Sequence
  Description of Artificial Sequence: Synthetic oligonucleotide
aggacucuuguuguagcaa

SEQ ID NO: 570009 - RNA, 19 nt, Artificial Sequence
  Description of Artificial Sequence: Synthetic oligonucleotide
auguagccugguggagacc

SEQ ID NO: 570010 - RNA, 19 nt, Artificial Sequence
  Description of Artificial Sequence: Synthetic oligonucleotide
agccuccugguaauagguc

SEQ ID NO: 570011 - RNA, 19 nt, Artificial Sequence
  Description of Artificial Sequence: Synthetic oligonucleotide
uccaacgguguguguccca

SEQ ID NO: 570012 - RNA, 19 nt, Artificial Sequence
  Description of Artificial Sequence: Synthetic oligonucleotide
cucgucguaccagccauuc

SEQ ID NO: 570013 - RNA, 19 nt, Artificial Sequence
  Description of Artificial Sequence: Synthetic oligonucleotide
cagccaaguuuaugucuug

SEQ ID NO: 570014 - RNA, 19 nt, Artificial Sequence
  Description of Artificial Sequence: Synthetic oligonucleotide
cacgguggcaauggcacuc

SEQ ID NO: 570015 - RNA, 19 nt, Artificial Sequence
  Description of Artificial Sequence: Synthetic oligonucleotide
accuucucggggaggagug

SEQ ID NO: 570016 - RNA, 19 nt, Artificial Sequence
  Description of Artificial Sequence: Synthetic oligonucleotide
cuguccagccaaguuuaug

SEQ ID NO: 570017 - RNA, 19 nt, Artificial Sequence
  Description of Artificial Sequence: Synthetic oligonucleotide
caucaaugcuguccagcca

SEQ ID NO: 570018 - RNA, 19 nt, Artificial Sequence
  Description of Artificial Sequence: Synthetic oligonucleotide
acgaagagccgcggcgccg

SEQ ID NO: 570019 - RNA, 19 nt, Artificial Sequence
  Description of Artificial Sequence: Synthetic oligonucleotide
ugucacuaaucuggacguc

SEQ ID NO: 570020 - RNA, 19 nt, Artificial Sequence
  Description of Artificial Sequence: Synthetic oligonucleotide
uaauccccuggugccggcc

SEQ ID NO: 570021 - RNA, 19 nt, Artificial Sequence
  Description of Artificial Sequence: Synthetic oligonucleotide
acaugucgagccgaaugaa

SEQ ID NO: 570022 - RNA, 19 nt, Artificial Sequence
  Description of Artificial Sequence: Synthetic oligonucleotide
cuggacguccccaagguuu

SEQ ID NO: 570023 - RNA, 19 nt, Artificial Sequence
  Description of Artificial Sequence: Synthetic oligonucleotide
cgucguaccagccauucuc

SEQ ID NO: 570024 - RNA, 19 nt, Artificial Sequence
  Description of Artificial Sequence: Synthetic oligonucleotide
gcuucauaacuuccccuuc

SEQ ID NO: 570025 - RNA, 19 nt, Artificial Sequence
  Description of Artificial Sequence: Synthetic oligonucleotide
cugccucacgcuuccucug

SEQ ID NO: 570026 - RNA, 19 nt, Artificial Sequence
  Description of Artificial Sequence: Synthetic oligonucleotide
gaccuguaccacacuguca

SEQ ID NO: 570027 - RNA, 19 nt, Artificial Sequence
  Description of Artificial Sequence: Synthetic oligonucleotide
gacguccccaagguuuuca

SEQ ID NO: 570028 - RNA, 19 nt, Artificial Sequence
  Description of Artificial Sequence: Synthetic oligonucleotide
ggaggaaguagacgaucuc

SEQ ID NO: 570029 - RNA, 19 nt, Artificial Sequence
  Description of Artificial Sequence: Synthetic oligonucleotide
uuaccacacggcgcucuac

SEQ ID NO: 570030 - RNA, 19 nt, Artificial Sequence
  Description of Artificial Sequence: Synthetic oligonucleotide
gagcgagggagacuugagu

SEQ ID NO: 570031 - RNA, 19 nt, Artificial Sequence
  Description of Artificial Sequence: Synthetic oligonucleotide
caacaccgcggacaacauc

SEQ ID NO: 570032 - RNA, 19 nt, Artificial Sequence
  Description of Artificial Sequence: Synthetic oligonucleotide
gggccuuuauuagauguuc

SEQ ID NO: 570033 - RNA, 19 nt, Artificial Sequence
  Description of Artificial Sequence: Synthetic oligonucleotide
cgaucucauugauucgucc

SEQ ID NO: 570034 - RNA, 19 nt, Artificial Sequence
  Description of Artificial Sequence: Synthetic oligonucleotide
gcggcagccaggcaugaac

SEQ ID NO: 570035 - RNA, 19 nt, Artificial Sequence
  Description of Artificial Sequence: Synthetic oligonucleotide
agacgcaguguggguggac

SEQ ID NO: 570036 - RNA, 19 nt, Artificial Sequence
  Description of Artificial Sequence: Synthetic oligonucleotide
gaguguuucuucggggcua

SEQ ID NO: 570037 - RNA, 19 nt, Artificial Sequence
  Description of Artificial Sequence: Synthetic oligonucleotide
caugucgcuccuggaacuc

SEQ ID NO: 570038 - RNA, 19 nt, Artificial Sequence
  Description of Artificial Sequence: Synthetic oligonucleotide
cggaagugagcuuucagga

SEQ ID NO: 570039 - RNA, 19 nt, Artificial Sequence
  Description of Artificial Sequence: Synthetic oligonucleotide
cccaauaaacuuggcuacc

SEQ ID NO: 570040 - RNA, 19 nt, Artificial Sequence
  Description of Artificial Sequence: Synthetic oligonucleotide
ggcgcgguucuccucaaca

SEQ ID NO: 570041 - RNA, 19 nt, Artificial Sequence
  Description of Artificial Sequence: Synthetic oligonucleotide
gugugauguugugucucug

SEQ ID NO: 570042 - RNA, 19 nt, Artificial Sequence
  Description of Artificial Sequence: Synthetic oligonucleotide
gguggagacccaauaaacu

SEQ ID NO: 570043 - RNA, 19 nt, Artificial Sequence
  Description of Artificial Sequence: Synthetic oligonucleotide
cuacauuggaagucaugau

SEQ ID NO: 570044 - RNA, 19 nt, Artificial Sequence
  Description of Artificial Sequence: Synthetic oligonucleotide
cgggcauaauccaacggug

SEQ ID NO: 570045 - RNA, 19 nt, Artificial Sequence
  Description of Artificial Sequence: Synthetic oligonucleotide
uuccccuucccgggcauaa

SEQ ID NO: 570046 - RNA, 19 nt, Artificial Sequence
  Description of Artificial Sequence: Synthetic oligonucleotide
agcacccacgguggcaaug

SEQ ID NO: 570047 - RNA, 19 nt, Artificial Sequence
  Description of Artificial Sequence: Synthetic oligonucleotide
gcuugauggagcgggcgcc

SEQ ID NO: 570048 - RNA, 19 nt, Artificial Sequence
  Description of Artificial Sequence: Synthetic oligonucleotide
gcggucuccaaugguuacg

SEQ ID NO: 570049 - RNA, 19 nt, Artificial Sequence
  Description of Artificial Sequence: Synthetic oligonucleotide
acgaugcgguagucaucag

SEQ ID NO: 570050 - RNA, 19 nt, Artificial Sequence
  Description of Artificial Sequence: Synthetic oligonucleotide
ggacuacugcauuggggca

SEQ ID NO: 570051 - RNA, 19 nt, Artificial Sequence
  Description of Artificial Sequence: Synthetic oligonucleotide
gcaauucgauuucggcuca

SEQ ID NO: 570052 - RNA, 19 nt, Artificial Sequence
  Description of Artificial Sequence: Synthetic oligonucleotide
caccgcggacaacaucaug

SEQ ID NO: 570053 - RNA, 19 nt, Artificial Sequence
  Description of Artificial Sequence: Synthetic oligonucleotide
aagcggcgccucucuucug

SEQ ID NO: 570054 - RNA, 19 nt, Artificial Sequence
  Description of Artificial Sequence: Synthetic oligonucleotide
cugucaggcggcccucauc

SEQ ID NO: 570055 - RNA, 19 nt, Artificial Sequence
  Description of Artificial Sequence: Synthetic oligonucleotide
augaaccaccagcgccgug

SEQ ID NO: 570056 - RNA, 19 nt, Artificial Sequence
  Description of Artificial Sequence: Synthetic oligonucleotide
ggagcgagggagacuugag

SEQ ID NO: 570057 - RNA, 19 nt, Artificial Sequence
  Description of Artificial Sequence: Synthetic oligonucleotide
ccguguccccagaaggcgg

SEQ ID NO: 570058 - RNA, 19 nt, Artificial Sequence
  Description of Artificial Sequence: Synthetic oligonucleotide
ggccuuuauuagauguuca

SEQ ID NO: 570059 - RNA, 19 nt, Artificial Sequence
  Description of Artificial Sequence: Synthetic oligonucleotide
gggugcuccucgucguacc

SEQ ID NO: 570060 - RNA, 19 nt, Artificial Sequence
  Description of Artificial Sequence: Synthetic oligonucleotide
acccuacgaagagccgcgg

SEQ ID NO: 570061 - RNA, 19 nt, Artificial Sequence
  Description of Artificial Sequence: Synthetic oligonucleotide
ccaaguuuaugucuugcgu

SEQ ID NO: 570062 - RNA, 19 nt, Artificial Sequence
  Description of Artificial Sequence: Synthetic oligonucleotide
cucuagcgggaagcggcgc

SEQ ID NO: 570063 - RNA, 19 nt, Artificial Sequence
  Description of Artificial Sequence: Synthetic oligonucleotide
gcgagggagacuugaguaa

SEQ ID NO: 570064 - RNA, 19 nt, Artificial Sequence
  Description of Artificial Sequence: Synthetic oligonucleotide
cggaucgcagcacccacgg

SEQ ID NO: 570065 - RNA, 19 nt, Artificial Sequence
  Description of Artificial Sequence: Synthetic oligonucleotide
cuugauggagcgggcgcca

SEQ ID NO: 570066 - RNA, 19 nt, Artificial Sequence
  Description of Artificial Sequence: Synthetic oligonucleotide
cggccauaagcacuucccg

SEQ ID NO: 570067 - RNA, 19 nt, Artificial Sequence
  Description of Artificial Sequence: Synthetic oligonucleotide
cccgggcauaauccaacgg

SEQ ID NO: 570068 - RNA, 19 nt, Artificial Sequence
  Description of Artificial Sequence: Synthetic oligonucleotide
gcgcgguucuccucaacac

SEQ ID NO: 570069 - RNA, 19 nt, Artificial Sequence
  Description of Artificial Sequence: Synthetic oligonucleotide
caacggugugugucccauc

SEQ ID NO: 570070 - RNA, 19 nt, Artificial Sequence
  Description of Artificial Sequence: Synthetic oligonucleotide
ccggaucgcagcacccacg

SEQ ID NO: 570071 - RNA, 19 nt, Artificial Sequence
  Description of Artificial Sequence: Synthetic oligonucleotide
agcgggaagcggcgccucu

SEQ ID NO: 570072 - RNA, 19 nt, Artificial Sequence
  Description of Artificial Sequence: Synthetic oligonucleotide
uuggcacgggcagcuucca

SEQ ID NO: 570073 - RNA, 19 nt, Artificial Sequence
  Description of Artificial Sequence: Synthetic oligonucleotide
cgcgguucuccucaacacc

SEQ ID NO: 570074 - RNA, 19 nt, Artificial Sequence
  Description of Artificial Sequence: Synthetic oligonucleotide
ccgcggacaacaucaugac

SEQ ID NO: 570075 - RNA, 19 nt, Artificial Sequence
  Description of Artificial Sequence: Synthetic oligonucleotide
ucggggcuagggccguguc

SEQ ID NO: 570076 - RNA, 19 nt, Artificial Sequence
  Description of Artificial Sequence: Synthetic oligonucleotide
ccgggcuuuggagcgaggg

SEQ ID NO: 570077 - RNA, 19 nt, Artificial Sequence
  Description of Artificial Sequence: Synthetic oligonucleotide
ggggcggaucacauucucc

SEQ ID NO: 570078 - RNA, 19 nt, Artificial Sequence
  Description of Artificial Sequence: Synthetic oligonucleotide
gcauaauccaacggugugu

SEQ ID NO: 570079 - RNA, 19 nt, Artificial Sequence
  Description of Artificial Sequence: Synthetic oligonucleotide
ggguacauacaggcaggug

SEQ ID NO: 570080 - RNA, 19 nt, Artificial Sequence
  Description of Artificial Sequence: Synthetic oligonucleotide
cuaccucaugucgcuccug

SEQ ID NO: 570081 - RNA, 19 nt, Artificial Sequence
  Description of Artificial Sequence: Synthetic oligonucleotide
gcuuuggagcgagggagac

SEQ ID NO: 570082 - RNA, 19 nt, Artificial Sequence
  Description of Artificial Sequence: Synthetic oligonucleotide
auggggcggaucacauucu

SEQ ID NO: 570083 - RNA, 19 nt, Artificial Sequence
  Description of Artificial Sequence: Synthetic oligonucleotide
cagccgcugcggcucuccg

SEQ ID NO: 570084 - RNA, 19 nt, Artificial Sequence
  Description of Artificial Sequence: Synthetic oligonucleotide
ggcacucuccuggccaaug

SEQ ID NO: 570085 - RNA, 19 nt, Artificial Sequence
  Description of Artificial Sequence: Synthetic oligonucleotide
ccucaugucgcuccuggaa

SEQ ID NO: 570086 - RNA, 19 nt, Artificial Sequence
  Description of Artificial Sequence: Synthetic oligonucleotide
guagacgaucucauugauu

SEQ ID NO: 570087 - RNA, 19 nt, Artificial Sequence
  Description of Artificial Sequence: Synthetic oligonucleotide
cccggauguccaguuuucg

SEQ ID NO: 570088 - RNA, 19 nt, Artificial Sequence
  Description of Artificial Sequence: Synthetic oligonucleotide
cccuacgaagagccgcggc

SEQ ID NO: 570089 - RNA, 19 nt, Artificial Sequence
  Description of Artificial Sequence: Synthetic oligonucleotide
gagggugcuccucgucgua

SEQ ID NO: 570090 - RNA, 19 nt, Artificial Sequence
  Description of Artificial Sequence: Synthetic oligonucleotide
cguguccccagaaggcggc

SEQ ID NO: 570091 - RNA, 19 nt, Artificial Sequence
  Description of Artificial Sequence: Synthetic oligonucleotide
cucuccggaagugagcuuu

SEQ ID NO: 570092 - RNA, 19 nt, Artificial Sequence
  Description of Artificial Sequence: Synthetic oligonucleotide
ccgggcauaauccaacggu

SEQ ID NO: 570093 - RNA, 19 nt, Artificial Sequence
  Description of Artificial Sequence: Synthetic oligonucleotide
uucccgggcuuuggagcga

SEQ ID NO: 570094 - RNA, 19 nt, Artificial Sequence
  Description of Artificial Sequence: Synthetic oligonucleotide
uggcuaccucaugucgcuc

SEQ ID NO: 570095 - RNA, 19 nt, Artificial Sequence
  Description of Artificial Sequence: Synthetic oligonucleotide
gcgggcgccauaguggaca

SEQ ID NO: 570096 - RNA, 19 nt, Artificial Sequence
  Description of Artificial Sequence: Synthetic oligonucleotide
auacuccagggcgcaccca

SEQ ID NO: 570097 - RNA, 19 nt, Artificial Sequence
  Description of Artificial Sequence: Synthetic oligonucleotide
agcgggcgccauaguggac

SEQ ID NO: 570098 - RNA, 19 nt, Artificial Sequence
  Description of Artificial Sequence: Synthetic oligonucleotide
gggaccccauuccagcugu

SEQ ID NO: 570099 - RNA, 19 nt, Artificial Sequence
  Description of Artificial Sequence: Synthetic oligonucleotide
gggcauaauccaacggugu

SEQ ID NO: 570100 - RNA, 19 nt, Artificial Sequence
  Description of Artificial Sequence: Synthetic oligonucleotide
cugcauuggggcacuguuu

SEQ ID NO: 570101 - RNA, 19 nt, Artificial Sequence
  Description of Artificial Sequence: Synthetic oligonucleotide
ccaauaaacuuggcuaccu

SEQ ID NO: 570102 - RNA, 19 nt, Artificial Sequence
  Description of Artificial Sequence: Synthetic oligonucleotide
cccuauuccagaugauccu

SEQ ID NO: 570103 - RNA, 19 nt, Artificial Sequence
  Description of Artificial Sequence: Synthetic oligonucleotide
uagcgggaagcggcgccuc

SEQ ID NO: 570104 - RNA, 19 nt, Artificial Sequence
  Description of Artificial Sequence: Synthetic oligonucleotide
ccuauuccagaugauccua

SEQ ID NO: 570105 - RNA, 19 nt, Artificial Sequence
  Description of Artificial Sequence: Synthetic oligonucleotide
gucgcuccuggaacucaga

SEQ ID NO: 570106 - RNA, 19 nt, Artificial Sequence
  Description of Artificial Sequence: Synthetic oligonucleotide
ccgauguagccugguggag

SEQ ID NO: 570107 - RNA, 19 nt, Artificial Sequence
  Description of Artificial Sequence: Synthetic oligonucleotide
gguuacgcuccggccauaa

SEQ ID NO: 570108 - RNA, 19 nt, Artificial Sequence
  Description of Artificial Sequence: Synthetic oligonucleotide
cgaagagccgcggcgccgg

SEQ ID NO: 570109 - RNA, 19 nt, Artificial Sequence
  Description of Artificial Sequence: Synthetic oligonucleotide
acaccgcggacaacaucau

SEQ ID NO: 570110 - RNA, 19 nt, Artificial Sequence
  Description of Artificial Sequence: Synthetic oligonucleotide
cuuuggagcgagggagacu

SEQ ID NO: 570111 - RNA, 19 nt, Artificial Sequence
  Description of Artificial Sequence: Synthetic oligonucleotide
ccccguccagggaauaaga

SEQ ID NO: 570112 - RNA, 19 nt, Artificial Sequence
  Description of Artificial Sequence: Synthetic oligonucleotide
gguuguuuagccgguuguu

SEQ ID NO: 570113 - RNA, 19 nt, Artificial Sequence
  Description of Artificial Sequence: Synthetic oligonucleotide
cgcggucuccaaugguuac

SEQ ID NO: 570114 - RNA, 19 nt, Artificial Sequence
  Description of Artificial Sequence: Synthetic oligonucleotide
ggguuggcuccuccaucca

SEQ ID NO: 570115 - RNA, 19 nt, Artificial Sequence
  Description of Artificial Sequence: Synthetic oligonucleotide
ccuccugguaauagguccu

SEQ ID NO: 570116 - RNA, 19 nt, Artificial Sequence
  Description of Artificial Sequence: Synthetic oligonucleotide
cuagcgggaagcggcgccu

SEQ ID NO: 570117 - RNA, 19 nt, Artificial Sequence
  Description of Artificial Sequence: Synthetic oligonucleotide
ugguuacgcuccggccaua

SEQ ID NO: 570118 - RNA, 19 nt, Artificial Sequence
  Description of Artificial Sequence: Synthetic oligonucleotide
guguccccagaaggcggca

SEQ ID NO: 570119 - RNA, 19 nt, Artificial Sequence
  Description of Artificial Sequence: Synthetic oligonucleotide
cagacgcagugugggugga

SEQ ID NO: 570120 - RNA, 19 nt, Artificial Sequence
  Description of Artificial Sequence: Synthetic oligonucleotide
gagccgaaugaagcccuuu

SEQ ID NO: 570121 - RNA, 19 nt, Artificial Sequence
  Description of Artificial Sequence: Synthetic oligonucleotide
cgcggacaacaucaugaca

SEQ ID NO: 570122 - RNA, 19 nt, Artificial Sequence
  Description of Artificial Sequence: Synthetic oligonucleotide
gcaugaacucuccgugcuu

SEQ ID NO: 570123 - RNA, 19 nt, Artificial Sequence
  Description of Artificial Sequence: Synthetic oligonucleotide
cuccggccauaagcacuuc

SEQ ID NO: 570124 - RNA, 19 nt, Artificial Sequence
  Description of Artificial Sequence: Synthetic oligonucleotide
ccgcggucuccaaugguua

SEQ ID NO: 570125 - RNA, 19 nt, Artificial Sequence
  Description of Artificial Sequence: Synthetic oligonucleotide
cgggcuuuggagcgaggga

SEQ ID NO: 570126 - RNA, 19 nt, Artificial Sequence
  Description of Artificial Sequence: Synthetic oligonucleotide
cccgggcuuuggagcgagg

SEQ ID NO: 570127 - RNA, 19 nt, Artificial Sequence
  Description of Artificial Sequence: Synthetic oligonucleotide
cccguccagggaauaagau

SEQ ID NO: 570128 - RNA, 19 nt, Artificial Sequence
  Description of Artificial Sequence: Synthetic oligonucleotide
ggacguccccaagguuuuc

SEQ ID NO: 570129 - RNA, 19 nt, Artificial Sequence
  Description of Artificial Sequence: Synthetic oligonucleotide
cagacaugucgagccgaau

SEQ ID NO: 570130 - RNA, 19 nt, Artificial Sequence
  Description of Artificial Sequence: Synthetic oligonucleotide
cuuccccuucccgggcaua

SEQ ID NO: 570131 - RNA, 19 nt, Artificial Sequence
  Description of Artificial Sequence: Synthetic oligonucleotide
ccgcugcggcucuccgcgg

SEQ ID NO: 570132 - RNA, 19 nt, Artificial Sequence
  Description of Artificial Sequence: Synthetic oligonucleotide
ccaacggugugugucccau

SEQ ID NO: 570133 - RNA, 19 nt, Artificial Sequence
  Description of Artificial Sequence: Synthetic oligonucleotide
cgcuggcuacauuggaagu

SEQ ID NO: 570134 - RNA, 19 nt, Artificial Sequence
  Description of Artificial Sequence: Synthetic oligonucleotide
cacgguuguuuagccgguu

SEQ ID NO: 570135 - RNA, 19 nt, Artificial Sequence
  Description of Artificial Sequence: Synthetic oligonucleotide
cgguggcaauggcacucuc

SEQ ID NO: 570136 - RNA, 19 nt, Artificial Sequence
  Description of Artificial Sequence: Synthetic oligonucleotide
gcgccauaguggacauugu

SEQ ID NO: 570137 - RNA, 19 nt, Artificial Sequence
  Description of Artificial Sequence: Synthetic oligonucleotide
gcguugacaucugcaccuu

SEQ ID NO: 570138 - RNA, 19 nt, Artificial Sequence
  Description of Artificial Sequence: Synthetic oligonucleotide
aaugcuuacaguuagcgga

SEQ ID NO: 570139 - RNA, 19 nt, Artificial Sequence
  Description of Artificial Sequence: Synthetic oligonucleotide
aaauuuccuaaucacacag

SEQ ID NO: 570140 - RNA, 19 nt, Artificial Sequence
  Description of Artificial Sequence: Synthetic oligonucleotide
agaauuugagcccugcucc

SEQ ID NO: 570141 - RNA, 19 nt, Artificial Sequence
  Description of Artificial Sequence: Synthetic oligonucleotide
agcauaauacacuugcagc

SEQ ID NO: 570142 - RNA, 19 nt, Artificial Sequence
  Description of Artificial Sequence: Synthetic oligonucleotide
aauagaauuuucuuaggca

SEQ ID NO: 570143 - RNA, 19 nt, Artificial Sequence
  Description of Artificial Sequence: Synthetic oligonucleotide
uaauagaguacuaauagaa

SEQ ID NO: 570144 - RNA, 19 nt, Artificial Sequence
  Description of Artificial Sequence: Synthetic oligonucleotide
uuuaccuacagccaccaag

SEQ ID NO: 570145 - RNA, 19 nt, Artificial Sequence
  Description of Artificial Sequence: Synthetic oligonucleotide
uuauguuuuaagcuuagcu

SEQ ID NO: 570146 - RNA, 19 nt, Artificial Sequence
  Description of Artificial Sequence: Synthetic oligonucleotide
uaauagaauuuucuuaggc

SEQ ID NO: 570147 - RNA, 19 nt, Artificial Sequence
  Description of Artificial Sequence: Synthetic oligonucleotide
uuuuaugcacuaaaugugc

SEQ ID NO: 570148 - RNA, 19 nt, Artificial Sequence
  Description of Artificial Sequence: Synthetic oligonucleotide
aagcauaauacacuugcag

SEQ ID NO: 570149 - RNA, 19 nt, Artificial Sequence
  Description of Artificial Sequence: Synthetic oligonucleotide
uuuauuuaccuacagccac

SEQ ID NO: 570150 - RNA, 19 nt, Artificial Sequence
  Description of Artificial Sequence: Synthetic oligonucleotide
uaguucagcauuauaaaug

SEQ ID NO: 570151 - RNA, 19 nt, Artificial Sequence
  Description of Artificial Sequence: Synthetic oligonucleotide
uugaccuuaacaaaugacu

SEQ ID NO: 570152 - RNA, 19 nt, Artificial Sequence
  Description of Artificial Sequence: Synthetic oligonucleotide
uguuauggguaguagcugg

SEQ ID NO: 570153 - RNA, 19 nt, Artificial Sequence
  Description of Artificial Sequence: Synthetic oligonucleotide
gaggguacgaaauagucug

SEQ ID NO: 570154 - RNA, 19 nt, Artificial Sequence
  Description of Artificial Sequence: Synthetic oligonucleotide
ugauacaacguaaaacgug

SEQ ID NO: 570155 - RNA, 19 nt, Artificial Sequence
  Description of Artificial Sequence: Synthetic oligonucleotide
aaacuuauguuuuaagcuu

SEQ ID NO: 570156 - RNA, 19 nt, Artificial Sequence
  Description of Artificial Sequence: Synthetic oligonucleotide
uagcggaaaauucuaaaag

SEQ ID NO: 570157 - RNA, 19 nt, Artificial Sequence
  Description of Artificial Sequence: Synthetic oligonucleotide
aacagaaugaucauaucug

SEQ ID NO: 570158 - RNA, 19 nt, Artificial Sequence
  Description of Artificial Sequence: Synthetic oligonucleotide
agaauaauacaucuuuacu

SEQ ID NO: 570159 - RNA, 19 nt, Artificial Sequence
  Description of Artificial Sequence: Synthetic oligonucleotide
uucgaaaugauacaacgua

SEQ ID NO: 570160 - RNA, 19 nt, Artificial Sequence
  Description of Artificial Sequence: Synthetic oligonucleotide
gcuaauagaguacuaauag

SEQ ID NO: 570161 - RNA, 19 nt, Artificial Sequence
  Description of Artificial Sequence: Synthetic oligonucleotide
ucuucuaugugcauaguuc

SEQ ID NO: 570162 - RNA, 19 nt, Artificial Sequence
  Description of Artificial Sequence: Synthetic oligonucleotide
augaauaccugacauauaa

SEQ ID NO: 570163 - RNA, 19 nt, Artificial Sequence
  Description of Artificial Sequence: Synthetic oligonucleotide
auuuuagagaaagaacagg

SEQ ID NO: 570164 - RNA, 19 nt, Artificial Sequence
  Description of Artificial Sequence: Synthetic oligonucleotide
uccaguacgaggcaguucu

SEQ ID NO: 570165 - RNA, 19 nt, Artificial Sequence
  Description of Artificial Sequence: Synthetic oligonucleotide
aauuccugaugcuaguagu

SEQ ID NO: 570166 - RNA, 19 nt, Artificial Sequence
  Description of Artificial Sequence: Synthetic oligonucleotide
agucgacugagacagaaag

SEQ ID NO: 570167 - RNA, 19 nt, Artificial Sequence
  Description of Artificial Sequence: Synthetic oligonucleotide
ugacaaucaaucugcauca

SEQ ID NO: 570168 - RNA, 19 nt, Artificial Sequence
  Description of Artificial Sequence: Synthetic oligonucleotide
uucaguuagcaccauuaag

SEQ ID NO: 570169 - RNA, 19 nt, Artificial Sequence
  Description of Artificial Sequence: Synthetic oligonucleotide
aacguaaaacgugucuccc

SEQ ID NO: 570170 - RNA, 19 nt, Artificial Sequence
  Description of Artificial Sequence: Synthetic oligonucleotide
gaaccaaagaagguguugg

SEQ ID NO: 570171 - RNA, 19 nt, Artificial Sequence
  Description of Artificial Sequence: Synthetic oligonucleotide
gaugcuaguagucucugug

SEQ ID NO: 570172 - RNA, 19 nt, Artificial Sequence
  Description of Artificial Sequence: Synthetic oligonucleotide
uggaggaauauaaaguagu

SEQ ID NO: 570173 - RNA, 19 nt, Artificial Sequence
  Description of Artificial Sequence: Synthetic oligonucleotide
accaagucgacugagacag

SEQ ID NO: 570174 - RNA, 19 nt, Artificial Sequence
  Description of Artificial Sequence: Synthetic oligonucleotide
augacguuaucauuuaugu

SEQ ID NO: 570175 - RNA, 19 nt, Artificial Sequence
  Description of Artificial Sequence: Synthetic oligonucleotide
uaggauucaaggcauacuc

SEQ ID NO: 570176 - RNA, 19 nt, Artificial Sequence
  Description of Artificial Sequence: Synthetic oligonucleotide
caucauuacuucauagucc

SEQ ID NO: 570177 - RNA, 19 nt, Artificial Sequence
  Description of Artificial Sequence: Synthetic oligonucleotide
uacuaacccauccugaagu

SEQ ID NO: 570178 - RNA, 19 nt, Artificial Sequence
  Description of Artificial Sequence: Synthetic oligonucleotide
gauuuuagagaaagaacag

SEQ ID NO: 570179 - RNA, 19 nt, Artificial Sequence
  Description of Artificial Sequence: Synthetic oligonucleotide
aagaaugcguguuuucugu

SEQ ID NO: 570180 - RNA, 19 nt, Artificial Sequence
  Description of Artificial Sequence: Synthetic oligonucleotide
ucaaucugcaucauuacuu

SEQ ID NO: 570181 - RNA, 19 nt, Artificial Sequence
  Description of Artificial Sequence: Synthetic oligonucleotide
ugugacacgagcuagccau

SEQ ID NO: 570182 - RNA, 19 nt, Artificial Sequence
  Description of Artificial Sequence: Synthetic oligonucleotide
ucuuguuauggguaguagc

SEQ ID NO: 570183 - RNA, 19 nt, Artificial Sequence
  Description of Artificial Sequence: Synthetic oligonucleotide
auagaguacuaauagaauu

SEQ ID NO: 570184 - RNA, 19 nt, Artificial Sequence
  Description of Artificial Sequence: Synthetic oligonucleotide
agaaagugcacccgugugg

SEQ ID NO: 570185 - RNA, 19 nt, Artificial Sequence
  Description of Artificial Sequence: Synthetic oligonucleotide
gaggaauauaaaguagugg

SEQ ID NO: 570186 - RNA, 19 nt, Artificial Sequence
  Description of Artificial Sequence: Synthetic oligonucleotide
aaucacacaggcuugucau

SEQ ID NO: 570187 - RNA, 19 nt, Artificial Sequence
  Description of Artificial Sequence: Synthetic oligonucleotide
guacgaaauagucuguugc

SEQ ID NO: 570188 - RNA, 19 nt, Artificial Sequence
  Description of Artificial Sequence: Synthetic oligonucleotide
gaucccuucgaaaugauac

SEQ ID NO: 570189 - RNA, 19 nt, Artificial Sequence
  Description of Artificial Sequence: Synthetic oligonucleotide
uuaguugaggguacgaaau

SEQ ID NO: 570190 - RNA, 19 nt, Artificial Sequence
  Description of Artificial Sequence: Synthetic oligonucleotide
uuaccuacagccaccaagu

SEQ ID NO: 570191 - RNA, 19 nt, Artificial Sequence
  Description of Artificial Sequence: Synthetic oligonucleotide
uauaagcuaauagaguacu

SEQ ID NO: 570192 - RNA, 19 nt, Artificial Sequence
  Description of Artificial Sequence: Synthetic oligonucleotide
gaaaauucuaaaagaugcc

SEQ ID NO: 570193 - RNA, 19 nt, Artificial Sequence
  Description of Artificial Sequence: Synthetic oligonucleotide
cuaauagaauuuucuuagg

SEQ ID NO: 570194 - RNA, 19 nt, Artificial Sequence
  Description of Artificial Sequence: Synthetic oligonucleotide
aguacuaauagaauuuucu

SEQ ID NO: 570195 - RNA, 19 nt, Artificial Sequence
  Description of Artificial Sequence: Synthetic oligonucleotide
agcggaaaauucuaaaaga

SEQ ID NO: 570196 - RNA, 19 nt, Artificial Sequence
  Description of Artificial Sequence: Synthetic oligonucleotide
aaagacuuaguugagggua

SEQ ID NO: 570197 - RNA, 19 nt, Artificial Sequence
  Description of Artificial Sequence: Synthetic oligonucleotide
uggaggggaaccaaagaag

SEQ ID NO: 570198 - RNA, 19 nt, Artificial Sequence
  Description of Artificial Sequence: Synthetic oligonucleotide
ugguuuauuuaccuacagc

SEQ ID NO: 570199 - RNA, 19 nt, Artificial Sequence
  Description of Artificial Sequence: Synthetic oligonucleotide
uuaucuuccuucuaggcuu

SEQ ID NO: 570200 - RNA, 19 nt, Artificial Sequence
  Description of Artificial Sequence: Synthetic oligonucleotide
acaacguaaaacgugucuc

SEQ ID NO: 570201 - RNA, 19 nt, Artificial Sequence
  Description of Artificial Sequence: Synthetic oligonucleotide
aguucuugaaccccgacau

SEQ ID NO: 570202 - RNA, 19 nt, Artificial Sequence
  Description of Artificial Sequence: Synthetic oligonucleotide
gacuaugugguacugguga

SEQ ID NO: 570203 - RNA, 19 nt, Artificial Sequence
  Description of Artificial Sequence: Synthetic oligonucleotide
aauaccugacauauaauaa

SEQ ID NO: 570204 - RNA, 19 nt, Artificial Sequence
  Description of Artificial Sequence: Synthetic oligonucleotide
gacguuaucauuuauguuu

SEQ ID NO: 570205 - RNA, 19 nt, Artificial Sequence
  Description of Artificial Sequence: Synthetic oligonucleotide
uccuggugaagcauaauac

SEQ ID NO: 570206 - RNA, 19 nt, Artificial Sequence
  Description of Artificial Sequence: Synthetic oligonucleotide
agcauacuggggaauaugc

SEQ ID NO: 570207 - RNA, 19 nt, Artificial Sequence
  Description of Artificial Sequence: Synthetic oligonucleotide
auauaagcuaauagaguac

SEQ ID NO: 570208 - RNA, 19 nt, Artificial Sequence
  Description of Artificial Sequence: Synthetic oligonucleotide
gaugacguuaucauuuaug

SEQ ID NO: 570209 - RNA, 19 nt, Artificial Sequence
  Description of Artificial Sequence: Synthetic oligonucleotide
ugcaucauuacuucauagu

SEQ ID NO: 570210 - RNA, 19 nt, Artificial Sequence
  Description of Artificial Sequence: Synthetic oligonucleotide
aaacuguauuucuucuaug

SEQ ID NO: 570211 - RNA, 19 nt, Artificial Sequence
  Description of Artificial Sequence: Synthetic oligonucleotide
caccugacaaucaaucugc

SEQ ID NO: 570212 - RNA, 19 nt, Artificial Sequence
  Description of Artificial Sequence: Synthetic oligonucleotide
gacauauaauaacugcuga

SEQ ID NO: 570213 - RNA, 19 nt, Artificial Sequence
  Description of Artificial Sequence: Synthetic oligonucleotide
ucgaaaugauacaacguaa

SEQ ID NO: 570214 - RNA, 19 nt, Artificial Sequence
  Description of Artificial Sequence: Synthetic oligonucleotide
ugaggguacgaaauagucu

SEQ ID NO: 570215 - RNA, 19 nt, Artificial Sequence
  Description of Artificial Sequence: Synthetic oligonucleotide
accuacagccaccaagucg

SEQ ID NO: 570216 - RNA, 19 nt, Artificial Sequence
  Description of Artificial Sequence: Synthetic oligonucleotide
uuuagcggaaaauucuaaa

SEQ ID NO: 570217 - RNA, 19 nt, Artificial Sequence
  Description of Artificial Sequence: Synthetic oligonucleotide
ugggauuagcauacugggg

SEQ ID NO: 570218 - RNA, 19 nt, Artificial Sequence
  Description of Artificial Sequence: Synthetic oligonucleotide
uuuagagaaagaacaggua

SEQ ID NO: 570219 - RNA, 19 nt, Artificial Sequence
  Description of Artificial Sequence: Synthetic oligonucleotide
uugaaccccgacauaagca

SEQ ID NO: 570220 - RNA, 19 nt, Artificial Sequence
  Description of Artificial Sequence: Synthetic oligonucleotide
uaaaacgugucuccccgcc

SEQ ID NO: 570221 - RNA, 19 nt, Artificial Sequence
  Description of Artificial Sequence: Synthetic oligonucleotide
gaagaaugcguguuuucug

SEQ ID NO: 570222 - RNA, 19 nt, Artificial Sequence
  Description of Artificial Sequence: Synthetic oligonucleotide
aagacuuaguugaggguac

SEQ ID NO: 570223 - RNA, 19 nt, Artificial Sequence
  Description of Artificial Sequence: Synthetic oligonucleotide
ugagcuacuaacccauccu

SEQ ID NO: 570224 - RNA, 19 nt, Artificial Sequence
  Description of Artificial Sequence: Synthetic oligonucleotide
gacagaggagcuuuugaug

SEQ ID NO: 570225 - RNA, 19 nt, Artificial Sequence
  Description of Artificial Sequence: Synthetic oligonucleotide
aaaagaugccuccuuugau

SEQ ID NO: 570226 - RNA, 19 nt, Artificial Sequence
  Description of Artificial Sequence: Synthetic oligonucleotide
auuaaucaggggcugacau

SEQ ID NO: 570227 - RNA, 19 nt, Artificial Sequence
  Description of Artificial Sequence: Synthetic oligonucleotide
ugaccuuaacaaaugacuu

SEQ ID NO: 570228 - RNA, 19 nt, Artificial Sequence
  Description of Artificial Sequence: Synthetic oligonucleotide
uucgcuuuggacucgggac

SEQ ID NO: 570229 - RNA, 19 nt, Artificial Sequence
  Description of Artificial Sequence: Synthetic oligonucleotide
agcucuucgcuuuggacuc

SEQ ID NO: 570230 - RNA, 19 nt, Artificial Sequence
  Description of Artificial Sequence: Synthetic oligonucleotide
uaagcuaauagaguacuaa

SEQ ID NO: 570231 - RNA, 19 nt, Artificial Sequence
  Description of Artificial Sequence: Synthetic oligonucleotide
ugcgugacugacaagcaga

SEQ ID NO: 570232 - RNA, 19 nt, Artificial Sequence
  Description of Artificial Sequence: Synthetic oligonucleotide
acuguauuucuucuaugug

SEQ ID NO: 570233 - RNA, 19 nt, Artificial Sequence
  Description of Artificial Sequence: Synthetic oligonucleotide
uuugauguggaggauccug

SEQ ID NO: 570234 - RNA, 19 nt, Artificial Sequence
  Description of Artificial Sequence: Synthetic oligonucleotide
ugcauaguuccuuuuggac

SEQ ID NO: 570235 - RNA, 19 nt, Artificial Sequence
  Description of Artificial Sequence: Synthetic oligonucleotide
ucuaaaagaugccuccuuu

SEQ ID NO: 570236 - RNA, 19 nt, Artificial Sequence
  Description of Artificial Sequence: Synthetic oligonucleotide
auaaaguagugguucuuca

SEQ ID NO: 570237 - RNA, 19 nt, Artificial Sequence
  Description of Artificial Sequence: Synthetic oligonucleotide
uggacuaugugguacuggu

SEQ ID NO: 570238 - RNA, 19 nt, Artificial Sequence
  Description of Artificial Sequence: Synthetic oligonucleotide
agagaaagaacagguauca

SEQ ID NO: 570239 - RNA, 19 nt, Artificial Sequence
  Description of Artificial Sequence: Synthetic oligonucleotide
acauauaauaacugcugaa

SEQ ID NO: 570240 - RNA, 19 nt, Artificial Sequence
  Description of Artificial Sequence: Synthetic oligonucleotide
caaugcuuacaguuagcgg

SEQ ID NO: 570241 - RNA, 19 nt, Artificial Sequence
  Description of Artificial Sequence: Synthetic oligonucleotide
uaucuuccuagguagugca

SEQ ID NO: 570242 - RNA, 19 nt, Artificial Sequence
  Description of Artificial Sequence: Synthetic oligonucleotide
uuugaaacagaaugaucau

SEQ ID NO: 570243 - RNA, 19 nt, Artificial Sequence
  Description of Artificial Sequence: Synthetic oligonucleotide
uaauaacugcugaaaguuc

SEQ ID NO: 570244 - RNA, 19 nt, Artificial Sequence
  Description of Artificial Sequence: Synthetic oligonucleotide
uauaaaguagugguucuuc

SEQ ID NO: 570245 - RNA, 19 nt, Artificial Sequence
  Description of Artificial Sequence: Synthetic oligonucleotide
ugugcaaugcuuacaguua

SEQ ID NO: 570246 - RNA, 19 nt, Artificial Sequence
  Description of Artificial Sequence: Synthetic oligonucleotide
ucuuuagcggaaaauucua

SEQ ID NO: 570247 - RNA, 19 nt, Artificial Sequence
  Description of Artificial Sequence: Synthetic oligonucleotide
aaacgugucuccccgccug

SEQ ID NO: 570248 - RNA, 19 nt, Artificial Sequence
  Description of Artificial Sequence: Synthetic oligonucleotide
uuaaucaggggcugacaug

SEQ ID NO: 570249 - RNA, 19 nt, Artificial Sequence
  Description of Artificial Sequence: Synthetic oligonucleotide
ucuuaaacacaugguaaga

SEQ ID NO: 570250 - RNA, 19 nt, Artificial Sequence
  Description of Artificial Sequence: Synthetic oligonucleotide
cuaauagaguacuaauaga

SEQ ID NO: 570251 - RNA, 19 nt, Artificial Sequence
  Description of Artificial Sequence: Synthetic oligonucleotide
aagaacccuugguaacuuc

SEQ ID NO: 570252 - RNA, 19 nt, Artificial Sequence
  Description of Artificial Sequence: Synthetic oligonucleotide
caucaccugacaaucaauc

SEQ ID NO: 570253 - RNA, 19 nt, Artificial Sequence
  Description of Artificial Sequence: Synthetic oligonucleotide
uuuccuaaucacacaggcu

SEQ ID NO: 570254 - RNA, 19 nt, Artificial Sequence
  Description of Artificial Sequence: Synthetic oligonucleotide
ucuaugaauaccugacaua

SEQ ID NO: 570255 - RNA, 19 nt, Artificial Sequence
  Description of Artificial Sequence: Synthetic oligonucleotide
gaaugcguguuuucuguug

SEQ ID NO: 570256 - RNA, 19 nt, Artificial Sequence
  Description of Artificial Sequence: Synthetic oligonucleotide
uggggaauaugccacacuu

SEQ ID NO: 570257 - RNA, 19 nt, Artificial Sequence
  Description of Artificial Sequence: Synthetic oligonucleotide
uaaagacuuaguugagggu

SEQ ID NO: 570258 - RNA, 19 nt, Artificial Sequence
  Description of Artificial Sequence: Synthetic oligonucleotide
acuaacccauccugaaguc

SEQ ID NO: 570259 - RNA, 19 nt, Artificial Sequence
  Description of Artificial Sequence: Synthetic oligonucleotide
ccugacauauaauaacugc

SEQ ID NO: 570260 - RNA, 19 nt, Artificial Sequence
  Description of Artificial Sequence: Synthetic oligonucleotide
gauccugguguccaucacc

SEQ ID NO: 570261 - RNA, 19 nt, Artificial Sequence
  Description of Artificial Sequence: Synthetic oligonucleotide
aacgugucuccccgccugc

SEQ ID NO: 570262 - RNA, 19 nt, Artificial Sequence
  Description of Artificial Sequence: Synthetic oligonucleotide
ucuugaaccccgacauaag

SEQ ID NO: 570263 - RNA, 19 nt, Artificial Sequence
  Description of Artificial Sequence: Synthetic oligonucleotide
gauacaacguaaaacgugu

SEQ ID NO: 570264 - RNA, 19 nt, Artificial Sequence
  Description of Artificial Sequence: Synthetic oligonucleotide
uguggucuuguuaugggua

SEQ ID NO: 570265 - RNA, 19 nt, Artificial Sequence
  Description of Artificial Sequence: Synthetic oligonucleotide
cuuacaguuagcggaacac

SEQ ID NO: 570266 - RNA, 19 nt, Artificial Sequence
  Description of Artificial Sequence: Synthetic oligonucleotide
ugguugauaucaucugaug

SEQ ID NO: 570267 - RNA, 19 nt, Artificial Sequence
  Description of Artificial Sequence: Synthetic oligonucleotide
gugcaaugcuuacaguuag

SEQ ID NO: 570268 - RNA, 19 nt, Artificial Sequence
  Description of Artificial Sequence: Synthetic oligonucleotide
gagcuacuaacccauccug

SEQ ID NO: 570269 - RNA, 19 nt, Artificial Sequence
  Description of Artificial Sequence: Synthetic oligonucleotide
agaggagcuuuugaugugg

SEQ ID NO: 570270 - RNA, 19 nt, Artificial Sequence
  Description of Artificial Sequence: Synthetic oligonucleotide
cauauaauaacugcugaaa

SEQ ID NO: 570271 - RNA, 19 nt, Artificial Sequence
  Description of Artificial Sequence: Synthetic oligonucleotide
ugagaauuugagcccugcu

SEQ ID NO: 570272 - RNA, 19 nt, Artificial Sequence
  Description of Artificial Sequence: Synthetic oligonucleotide
aacagguaucacauuauaa

SEQ ID NO: 570273 - RNA, 19 nt, Artificial Sequence
  Description of Artificial Sequence: Synthetic oligonucleotide
ugcuauuagggcgggaaug

SEQ ID NO: 570274 - RNA, 19 nt, Artificial Sequence
  Description of Artificial Sequence: Synthetic oligonucleotide
ucgggcacuacuguaagga

SEQ ID NO: 570275 - RNA, 19 nt, Artificial Sequence
  Description of Artificial Sequence: Synthetic oligonucleotide
cuuguuauggguaguagcu

SEQ ID NO: 570276 - RNA, 19 nt, Artificial Sequence
  Description of Artificial Sequence: Synthetic oligonucleotide
uucaaccugagagauucug

SEQ ID NO: 570277 - RNA, 19 nt, Artificial Sequence
  Description of Artificial Sequence: Synthetic oligonucleotide
uccaucaccugacaaucaa

SEQ ID NO: 570278 - RNA, 19 nt, Artificial Sequence
  Description of Artificial Sequence: Synthetic oligonucleotide
aauuccuguaguggggacu

SEQ ID NO: 570279 - RNA, 19 nt, Artificial Sequence
  Description of Artificial Sequence: Synthetic oligonucleotide
cugagcuacuaacccaucc

SEQ ID NO: 570280 - RNA, 19 nt, Artificial Sequence
  Description of Artificial Sequence: Synthetic oligonucleotide
ccugaguccaguacgaggc

SEQ ID NO: 570281 - RNA, 19 nt, Artificial Sequence
  Description of Artificial Sequence: Synthetic oligonucleotide
uuacaguuagcggaacaca

SEQ ID NO: 570282 - RNA, 19 nt, Artificial Sequence
  Description of Artificial Sequence: Synthetic oligonucleotide
agguaucacauuauaaaga

SEQ ID NO: 570283 - RNA, 19 nt, Artificial Sequence
  Description of Artificial Sequence: Synthetic oligonucleotide
uagggcgggaaugacaaug

SEQ ID NO: 570284 - RNA, 19 nt, Artificial Sequence
  Description of Artificial Sequence: Synthetic oligonucleotide
auugcugguaagacaauug

SEQ ID NO: 570285 - RNA, 19 nt, Artificial Sequence
  Description of Artificial Sequence: Synthetic oligonucleotide
augaacccagccucgaagu

SEQ ID NO: 570286 - RNA, 19 nt, Artificial Sequence
  Description of Artificial Sequence: Synthetic oligonucleotide
uauuuaccuacagccacca

SEQ ID NO: 570287 - RNA, 19 nt, Artificial Sequence
  Description of Artificial Sequence: Synthetic oligonucleotide
aaaacgugucuccccgccu

SEQ ID NO: 570288 - RNA, 19 nt, Artificial Sequence
  Description of Artificial Sequence: Synthetic oligonucleotide
uguuuuaagcuuagcuauu

SEQ ID NO: 570289 - RNA, 19 nt, Artificial Sequence
  Description of Artificial Sequence: Synthetic oligonucleotide
auuuucuuaggcaggagaa

SEQ ID NO: 570290 - RNA, 19 nt, Artificial Sequence
  Description of Artificial Sequence: Synthetic oligonucleotide
acacgagcuagccaugaca

SEQ ID NO: 570291 - RNA, 19 nt, Artificial Sequence
  Description of Artificial Sequence: Synthetic oligonucleotide
uacgaggcaguucuccacu

SEQ ID NO: 570292 - RNA, 19 nt, Artificial Sequence
  Description of Artificial Sequence: Synthetic oligonucleotide
guggaggaauauaaaguag

SEQ ID NO: 570293 - RNA, 19 nt, Artificial Sequence
  Description of Artificial Sequence: Synthetic oligonucleotide
uguauuaaucaggggcuga

SEQ ID NO: 570294 - RNA, 19 nt, Artificial Sequence
  Description of Artificial Sequence: Synthetic oligonucleotide
gaaaacuguauuucuucua

SEQ ID NO: 570295 - RNA, 19 nt, Artificial Sequence
  Description of Artificial Sequence: Synthetic oligonucleotide
cuacuaacccauccugaag

SEQ ID NO: 570296 - RNA, 19 nt, Artificial Sequence
  Description of Artificial Sequence: Synthetic oligonucleotide
gcaaugcuuacaguuagcg

SEQ ID NO: 570297 - RNA, 19 nt, Artificial Sequence
  Description of Artificial Sequence: Synthetic oligonucleotide
aacuuauguuuuaagcuua

SEQ ID NO: 570298 - RNA, 19 nt, Artificial Sequence
  Description of Artificial Sequence: Synthetic oligonucleotide
ucugugacacgagcuagcc

SEQ ID NO: 570299 - RNA, 19 nt, Artificial Sequence
  Description of Artificial Sequence: Synthetic oligonucleotide
gguucaaccugagagauuc

SEQ ID NO: 570300 - RNA, 19 nt, Artificial Sequence
  Description of Artificial Sequence: Synthetic oligonucleotide
uucuaaaagaugccuccuu

SEQ ID NO: 570301 - RNA, 19 nt, Artificial Sequence
  Description of Artificial Sequence: Synthetic oligonucleotide
aaucauuaaaggagagaau

SEQ ID NO: 570302 - RNA, 19 nt, Artificial Sequence
  Description of Artificial Sequence: Synthetic oligonucleotide
ucgcuuuggacucgggacu

SEQ ID NO: 570303 - RNA, 19 nt, Artificial Sequence
  Description of Artificial Sequence: Synthetic oligonucleotide
guugaccuuaacaaaugac

SEQ ID NO: 570304 - RNA, 19 nt, Artificial Sequence
  Description of Artificial Sequence: Synthetic oligonucleotide
agguggaggaauauaaagu

SEQ ID NO: 570305 - RNA, 19 nt, Artificial Sequence
  Description of Artificial Sequence: Synthetic oligonucleotide
ucuguugguuauuuaucau

SEQ ID NO: 570306 - RNA, 19 nt, Artificial Sequence
  Description of Artificial Sequence: Synthetic oligonucleotide
ucuuccuagguagugcagu

SEQ ID NO: 570307 - RNA, 19 nt, Artificial Sequence
  Description of Artificial Sequence: Synthetic oligonucleotide
cuuaguugaggguacgaaa

SEQ ID NO: 570308 - RNA, 19 nt, Artificial Sequence
  Description of Artificial Sequence: Synthetic oligonucleotide
uuguauuaaucaggggcug

SEQ ID NO: 570309 - RNA, 19 nt, Artificial Sequence
  Description of Artificial Sequence: Synthetic oligonucleotide
auuagggcgggaaugacaa

SEQ ID NO: 570310 - RNA, 19 nt, Artificial Sequence
  Description of Artificial Sequence: Synthetic oligonucleotide
cugacauauaauaacugcu

SEQ ID NO: 570311 - RNA, 19 nt, Artificial Sequence
  Description of Artificial Sequence: Synthetic oligonucleotide
ugguaagacaggucucaug

SEQ ID NO: 570312 - RNA, 19 nt, Artificial Sequence
  Description of Artificial Sequence: Synthetic oligonucleotide
uuguuauggguaguagcug

SEQ ID NO: 570313 - RNA, 19 nt, Artificial Sequence
  Description of Artificial Sequence: Synthetic oligonucleotide
gguaagacaggucucaugu

SEQ ID NO: 570314 - RNA, 19 nt, Artificial Sequence
  Description of Artificial Sequence: Synthetic oligonucleotide
ugauaucaucugauguguc

SEQ ID NO: 570315 - RNA, 19 nt, Artificial Sequence
  Description of Artificial Sequence: Synthetic oligonucleotide
uauuaaucaggggcugaca

SEQ ID NO: 570316 - RNA, 19 nt, Artificial Sequence
  Description of Artificial Sequence: Synthetic oligonucleotide
acuaaaugugcaaugcuua

SEQ ID NO: 570317 - RNA, 19 nt, Artificial Sequence
  Description of Artificial Sequence: Synthetic oligonucleotide
cuuccuagguagugcagug

SEQ ID NO: 570318 - RNA, 19 nt, Artificial Sequence
  Description of Artificial Sequence: Synthetic oligonucleotide
cuuucccugaguccaguac

SEQ ID NO: 570319 - RNA, 19 nt, Artificial Sequence
  Description of Artificial Sequence: Synthetic oligonucleotide
gguggaggaauauaaagua

SEQ ID NO: 570320 - RNA, 19 nt, Artificial Sequence
  Description of Artificial Sequence: Synthetic oligonucleotide
gcaucaggcauucuaagca

SEQ ID NO: 570321 - RNA, 19 nt, Artificial Sequence
  Description of Artificial Sequence: Synthetic oligonucleotide
ugguauuuguugaccuuaa

SEQ ID NO: 570322 - RNA, 19 nt, Artificial Sequence
  Description of Artificial Sequence: Synthetic oligonucleotide
ugagagcgcagccuucaac

SEQ ID NO: 570323 - RNA, 19 nt, Artificial Sequence
  Description of Artificial Sequence: Synthetic oligonucleotide
cuuauguuuuaagcuuagc

SEQ ID NO: 570324 - RNA, 19 nt, Artificial Sequence
  Description of Artificial Sequence: Synthetic oligonucleotide
guuguauuaaucaggggcu

SEQ ID NO: 570325 - RNA, 19 nt, Artificial Sequence
  Description of Artificial Sequence: Synthetic oligonucleotide
ccauaguucagcauuauaa

SEQ ID NO: 570326 - RNA, 19 nt, Artificial Sequence
  Description of Artificial Sequence: Synthetic oligonucleotide
uugguuugguuccucugau

SEQ ID NO: 570327 - RNA, 19 nt, Artificial Sequence
  Description of Artificial Sequence: Synthetic oligonucleotide
augaucucggagauaagga

SEQ ID NO: 570328 - RNA, 19 nt, Artificial Sequence
  Description of Artificial Sequence: Synthetic oligonucleotide
uggguaguagcuggcaaca

SEQ ID NO: 570329 - RNA, 19 nt, Artificial Sequence
  Description of Artificial Sequence: Synthetic oligonucleotide
gaauuugagcccugcucca

SEQ ID NO: 570330 - RNA, 19 nt, Artificial Sequence
  Description of Artificial Sequence: Synthetic oligonucleotide
uuccuagguagugcagugg

SEQ ID NO: 570331 - RNA, 19 nt, Artificial Sequence
  Description of Artificial Sequence: Synthetic oligonucleotide
acuuauguuuuaagcuuag

SEQ ID NO: 570332 - RNA, 19 nt, Artificial Sequence
  Description of Artificial Sequence: Synthetic oligonucleotide
guuccagcaugcucauggg

SEQ ID NO: 570333 - RNA, 19 nt, Artificial Sequence
  Description of Artificial Sequence: Synthetic oligonucleotide
gguacgaaauagucuguug

SEQ ID NO: 570334 - RNA, 19 nt, Artificial Sequence
  Description of Artificial Sequence: Synthetic oligonucleotide
auaugccacacuuccuggu

SEQ ID NO: 570335 - RNA, 19 nt, Artificial Sequence
  Description of Artificial Sequence: Synthetic oligonucleotide
ucuaugugcauaguuccuu

SEQ ID NO: 570336 - RNA, 19 nt, Artificial Sequence
  Description of Artificial Sequence: Synthetic oligonucleotide
gagagcagcacugcucacc

SEQ ID NO: 570337 - RNA, 19 nt, Artificial Sequence
  Description of Artificial Sequence: Synthetic oligonucleotide
acgaaauagucuguugcca

SEQ ID NO: 570338 - RNA, 19 nt, Artificial Sequence
  Description of Artificial Sequence: Synthetic oligonucleotide
aagugcacccgugugguau

SEQ ID NO: 570339 - RNA, 19 nt, Artificial Sequence
  Description of Artificial Sequence: Synthetic oligonucleotide
agugcuauuagggcgggaa

SEQ ID NO: 570340 - RNA, 19 nt, Artificial Sequence
  Description of Artificial Sequence: Synthetic oligonucleotide
aggugaucccuucgaaaug

SEQ ID NO: 570341 - RNA, 19 nt, Artificial Sequence
  Description of Artificial Sequence: Synthetic oligonucleotide
agaguacuaauagaauuuu

SEQ ID NO: 570342 - RNA, 19 nt, Artificial Sequence
  Description of Artificial Sequence: Synthetic oligonucleotide
ggugauaucuuccuaggua

SEQ ID NO: 570343 - RNA, 19 nt, Artificial Sequence
  Description of Artificial Sequence: Synthetic oligonucleotide
gaaccccgacauaagcagg

SEQ ID NO: 570344 - RNA, 19 nt, Artificial Sequence
  Description of Artificial Sequence: Synthetic oligonucleotide
ugguaagacaauugacauu

SEQ ID NO: 570345 - RNA, 19 nt, Artificial Sequence
  Description of Artificial Sequence: Synthetic oligonucleotide
guauuaaucaggggcugac

SEQ ID NO: 570346 - RNA, 19 nt, Artificial Sequence
  Description of Artificial Sequence: Synthetic oligonucleotide
uagguagugcagugguuac

SEQ ID NO: 570347 - RNA, 19 nt, Artificial Sequence
  Description of Artificial Sequence: Synthetic oligonucleotide
ugugguauuuguugaccuu

SEQ ID NO: 570348 - RNA, 19 nt, Artificial Sequence
  Description of Artificial Sequence: Synthetic oligonucleotide
uagcauacuggggaauaug

SEQ ID NO: 570349 - RNA, 19 nt, Artificial Sequence
  Description of Artificial Sequence: Synthetic oligonucleotide
ucuaugaacccagccucga

SEQ ID NO: 570350 - RNA, 19 nt, Artificial Sequence
  Description of Artificial Sequence: Synthetic oligonucleotide
gaguacuaauagaauuuuc

SEQ ID NO: 570351 - RNA, 19 nt, Artificial Sequence
  Description of Artificial Sequence: Synthetic oligonucleotide
ugacguuaucauuuauguu

SEQ ID NO: 570352 - RNA, 19 nt, Artificial Sequence
  Description of Artificial Sequence: Synthetic oligonucleotide
gaacagguaucacauuaua

SEQ ID NO: 570353 - RNA, 19 nt, Artificial Sequence
  Description of Artificial Sequence: Synthetic oligonucleotide
agcuaauagaguacuaaua

SEQ ID NO: 570354 - RNA, 19 nt, Artificial Sequence
  Description of Artificial Sequence: Synthetic oligonucleotide
ugaugacguuaucauuuau

SEQ ID NO: 570355 - RNA, 19 nt, Artificial Sequence
  Description of Artificial Sequence: Synthetic oligonucleotide
ccaucugagcuacuaaccc

SEQ ID NO: 570356 - RNA, 19 nt, Artificial Sequence
  Description of Artificial Sequence: Synthetic oligonucleotide
acucgggacuuuaagccuc

SEQ ID NO: 570357 - RNA, 19 nt, Artificial Sequence
  Description of Artificial Sequence: Synthetic oligonucleotide
caucugagcuacuaaccca

SEQ ID NO: 570358 - RNA, 19 nt, Artificial Sequence
  Description of Artificial Sequence: Synthetic oligonucleotide
gcauaauacacuugcagcu

SEQ ID NO: 570359 - RNA, 19 nt, Artificial Sequence
  Description of Artificial Sequence: Synthetic oligonucleotide
uucuagcaauauccaaaau

SEQ ID NO: 570360 - RNA, 19 nt, Artificial Sequence
  Description of Artificial Sequence: Synthetic oligonucleotide
guaaaacgugucuccccgc

SEQ ID NO: 570361 - RNA, 19 nt, Artificial Sequence
  Description of Artificial Sequence: Synthetic oligonucleotide
aaccccgacauaagcaggu

SEQ ID NO: 570362 - RNA, 19 nt, Artificial Sequence
  Description of Artificial Sequence: Synthetic oligonucleotide
ugguuugguuccucugaug

SEQ ID NO: 570363 - RNA, 19 nt, Artificial Sequence
  Description of Artificial Sequence: Synthetic oligonucleotide
cuggggaggaaugucuccc

SEQ ID NO: 570364 - RNA, 19 nt, Artificial Sequence
  Description of Artificial Sequence: Synthetic oligonucleotide
auuagcauacuggggaaua

SEQ ID NO: 570365 - RNA, 19 nt, Artificial Sequence
  Description of Artificial Sequence: Synthetic oligonucleotide
acuuaguugaggguacgaa

SEQ ID NO: 570366 - RNA, 19 nt, Artificial Sequence
  Description of Artificial Sequence: Synthetic oligonucleotide
aacucuuuauuuggauuuu

SEQ ID NO: 570367 - RNA, 19 nt, Artificial Sequence
  Description of Artificial Sequence: Synthetic oligonucleotide
uagccaugacaugacucag

SEQ ID NO: 570368 - RNA, 19 nt, Artificial Sequence
  Description of Artificial Sequence: Synthetic oligonucleotide
guacuaauagaauuuucuu

SEQ ID NO: 570369 - RNA, 19 nt, Artificial Sequence
  Description of Artificial Sequence: Synthetic oligonucleotide
ugaucccuucgaaaugaua

SEQ ID NO: 570370 - RNA, 19 nt, Artificial Sequence
  Description of Artificial Sequence: Synthetic oligonucleotide
caugguaagacaggucuca

SEQ ID NO: 570371 - RNA, 19 nt, Artificial Sequence
  Description of Artificial Sequence: Synthetic oligonucleotide
cuuuagcggaaaauucuaa

SEQ ID NO: 570372 - RNA, 19 nt, Artificial Sequence
  Description of Artificial Sequence: Synthetic oligonucleotide
gucuuguuauggguaguag

SEQ ID NO: 570373 - RNA, 19 nt, Artificial Sequence
  Description of Artificial Sequence: Synthetic oligonucleotide
uuagcauacuggggaauau

SEQ ID NO: 570374 - RNA, 19 nt, Artificial Sequence
  Description of Artificial Sequence: Synthetic oligonucleotide
gugcauaguuccuuuugga

SEQ ID NO: 570375 - RNA, 19 nt, Artificial Sequence
  Description of Artificial Sequence: Synthetic oligonucleotide
caguacgaggcaguucucc

SEQ ID NO: 570376 - RNA, 19 nt, Artificial Sequence
  Description of Artificial Sequence: Synthetic oligonucleotide
cugguaagacaauugacau

SEQ ID NO: 570377 - RNA, 19 nt, Artificial Sequence
  Description of Artificial Sequence: Synthetic oligonucleotide
ucuccccgccugcggaugg

SEQ ID NO: 570378 - RNA, 19 nt, Artificial Sequence
  Description of Artificial Sequence: Synthetic oligonucleotide
auagucuguugccauuauu

SEQ ID NO: 570379 - RNA, 19 nt, Artificial Sequence
  Description of Artificial Sequence: Synthetic oligonucleotide
cuucgaaaugauacaacgu

SEQ ID NO: 570380 - RNA, 19 nt, Artificial Sequence
  Description of Artificial Sequence: Synthetic oligonucleotide
agcaccauuaaggcuuugu

SEQ ID NO: 570381 - RNA, 19 nt, Artificial Sequence
  Description of Artificial Sequence: Synthetic oligonucleotide
agaacagguaucacauuau

SEQ ID NO: 570382 - RNA, 19 nt, Artificial Sequence
  Description of Artificial Sequence: Synthetic oligonucleotide
uuagcaccauuaaggcuuu

SEQ ID NO: 570383 - RNA, 19 nt, Artificial Sequence
  Description of Artificial Sequence: Synthetic oligonucleotide
ugccuccuuugauuugcag

SEQ ID NO: 570384 - RNA, 19 nt, Artificial Sequence
  Description of Artificial Sequence: Synthetic oligonucleotide
auauaaaguagugguucuu

SEQ ID NO: 570385 - RNA, 19 nt, Artificial Sequence
  Description of Artificial Sequence: Synthetic oligonucleotide
ucucccuucaagugcuauu

SEQ ID NO: 570386 - RNA, 19 nt, Artificial Sequence
  Description of Artificial Sequence: Synthetic oligonucleotide
ucugagcuacuaacccauc

SEQ ID NO: 570387 - RNA, 19 nt, Artificial Sequence
  Description of Artificial Sequence: Synthetic oligonucleotide
agaaugcguguuuucuguu

SEQ ID NO: 570388 - RNA, 19 nt, Artificial Sequence
  Description of Artificial Sequence: Synthetic oligonucleotide
acguuaucauuuauguuua

SEQ ID NO: 570389 - RNA, 19 nt, Artificial Sequence
  Description of Artificial Sequence: Synthetic oligonucleotide
gacaagcagacucacgauu

SEQ ID NO: 570390 - RNA, 19 nt, Artificial Sequence
  Description of Artificial Sequence: Synthetic oligonucleotide
gaccuuaacaaaugacuuu

SEQ ID NO: 570391 - RNA, 19 nt, Artificial Sequence
  Description of Artificial Sequence: Synthetic oligonucleotide
agcuacuaacccauccuga

SEQ ID NO: 570392 - RNA, 19 nt, Artificial Sequence
  Description of Artificial Sequence: Synthetic oligonucleotide
caugggcccauaguucagc

SEQ ID NO: 570393 - RNA, 19 nt, Artificial Sequence
  Description of Artificial Sequence: Synthetic oligonucleotide
cuucaguuagcaccauuaa

SEQ ID NO: 570394 - RNA, 19 nt, Artificial Sequence
  Description of Artificial Sequence: Synthetic oligonucleotide
uuuugauguggaggauccu

SEQ ID NO: 570395 - RNA, 19 nt, Artificial Sequence
  Description of Artificial Sequence: Synthetic oligonucleotide
ggugaucccuucgaaauga

SEQ ID NO: 570396 - RNA, 19 nt, Artificial Sequence
  Description of Artificial Sequence: Synthetic oligonucleotide
gagcacccugaagaaugcg

SEQ ID NO: 570397 - RNA, 19 nt, Artificial Sequence
  Description of Artificial Sequence: Synthetic oligonucleotide
agcaggugaucccuucgaa

SEQ ID NO: 570398 - RNA, 19 nt, Artificial Sequence
  Description of Artificial Sequence: Synthetic oligonucleotide
acgagcuagccaugacaug

SEQ ID NO: 570399 - RNA, 19 nt, Artificial Sequence
  Description of Artificial Sequence: Synthetic oligonucleotide
gguauuuguugaccuuaac

SEQ ID NO: 570400 - RNA, 19 nt, Artificial Sequence
  Description of Artificial Sequence: Synthetic oligonucleotide
uaccuacagccaccaaguc

SEQ ID NO: 570401 - RNA, 19 nt, Artificial Sequence
  Description of Artificial Sequence: Synthetic oligonucleotide
agaauuccugaugcuagua

SEQ ID NO: 570402 - RNA, 19 nt, Artificial Sequence
  Description of Artificial Sequence: Synthetic oligonucleotide
ugacaugacucaggaaauu

SEQ ID NO: 570403 - RNA, 19 nt, Artificial Sequence
  Description of Artificial Sequence: Synthetic oligonucleotide
cuaguagucucuguguacu

SEQ ID NO: 570404 - RNA, 19 nt, Artificial Sequence
  Description of Artificial Sequence: Synthetic oligonucleotide
cccugaguccaguacgagg

SEQ ID NO: 570405 - RNA, 19 nt, Artificial Sequence
  Description of Artificial Sequence: Synthetic oligonucleotide
aucacccauaauuccugua

SEQ ID NO: 570406 - RNA, 19 nt, Artificial Sequence
  Description of Artificial Sequence: Synthetic oligonucleotide
gcuacuaacccauccugaa

SEQ ID NO: 570407 - RNA, 19 nt, Artificial Sequence
  Description of Artificial Sequence: Synthetic oligonucleotide
caggugaucccuucgaaau

SEQ ID NO: 570408 - RNA, 19 nt, Artificial Sequence
  Description of Artificial Sequence: Synthetic oligonucleotide
uuuggacucuggugauauc

SEQ ID NO: 570409 - RNA, 19 nt, Artificial Sequence
  Description of Artificial Sequence: Synthetic oligonucleotide
guagcuggcaacagcaggu

SEQ ID NO: 570410 - RNA, 19 nt, Artificial Sequence
  Description of Artificial Sequence: Synthetic oligonucleotide
ugcguguuuucuguugguu

SEQ ID NO: 570411 - RNA, 19 nt, Artificial Sequence
  Description of Artificial Sequence: Synthetic oligonucleotide
aagucgacugagacagaaa

SEQ ID NO: 570412 - RNA, 19 nt, Artificial Sequence
  Description of Artificial Sequence: Synthetic oligonucleotide
caagugcuauuagggcggg

SEQ ID NO: 570413 - RNA, 19 nt, Artificial Sequence
  Description of Artificial Sequence: Synthetic oligonucleotide
caagucgacugagacagaa

SEQ ID NO: 570414 - RNA, 19 nt, Artificial Sequence
  Description of Artificial Sequence: Synthetic oligonucleotide
cuaacccauccugaaguca

SEQ ID NO: 570415 - RNA, 19 nt, Artificial Sequence
  Description of Artificial Sequence: Synthetic oligonucleotide
auaagcuaauagaguacua

SEQ ID NO: 570416 - RNA, 19 nt, Artificial Sequence
  Description of Artificial Sequence: Synthetic oligonucleotide
gagcuagccaugacaugac

SEQ ID NO: 570417 - RNA, 19 nt, Artificial Sequence
  Description of Artificial Sequence: Synthetic oligonucleotide
ggcauucuaagcaaguccu

SEQ ID NO: 570418 - RNA, 19 nt, Artificial Sequence
  Description of Artificial Sequence: Synthetic oligonucleotide
ucccugaguccaguacgag

SEQ ID NO: 570419 - RNA, 19 nt, Artificial Sequence
  Description of Artificial Sequence: Synthetic oligonucleotide
cagacagcucuucgcuuug

SEQ ID NO: 570420 - RNA, 19 nt, Artificial Sequence
  Description of Artificial Sequence: Synthetic oligonucleotide
ccugcggauggcuucgaag

SEQ ID NO: 570421 - RNA, 19 nt, Artificial Sequence
  Description of Artificial Sequence: Synthetic oligonucleotide
guuaucauuuauguuuauu

SEQ ID NO: 570422 - RNA, 19 nt, Artificial Sequence
  Description of Artificial Sequence: Synthetic oligonucleotide
cacgagcuagccaugacau

SEQ ID NO: 570423 - RNA, 19 nt, Artificial Sequence
  Description of Artificial Sequence: Synthetic oligonucleotide
augcuuacaguuagcggaa

SEQ ID NO: 570424 - RNA, 19 nt, Artificial Sequence
  Description of Artificial Sequence: Synthetic oligonucleotide
ggauuagcauacuggggaa

SEQ ID NO: 570425 - RNA, 19 nt, Artificial Sequence
  Description of Artificial Sequence: Synthetic oligonucleotide
guaagacaggucucaugua

SEQ ID NO: 570426 - RNA, 19 nt, Artificial Sequence
  Description of Artificial Sequence: Synthetic oligonucleotide
uagcggaacacagggucau

SEQ ID NO: 570427 - RNA, 19 nt, Artificial Sequence
  Description of Artificial Sequence: Synthetic oligonucleotide
guugaggguacgaaauagu

SEQ ID NO: 570428 - RNA, 19 nt, Artificial Sequence
  Description of Artificial Sequence: Synthetic oligonucleotide
agggcgggaaugacaaugu

SEQ ID NO: 570429 - RNA, 19 nt, Artificial Sequence
  Description of Artificial Sequence: Synthetic oligonucleotide
auuuaccuacagccaccaa

SEQ ID NO: 570430 - RNA, 19 nt, Artificial Sequence
  Description of Artificial Sequence: Synthetic oligonucleotide
cucccuucaagugcuauua

SEQ ID NO: 570431 - RNA, 19 nt, Artificial Sequence
  Description of Artificial Sequence: Synthetic oligonucleotide
cagggacccguucuccuuc

SEQ ID NO: 570432 - RNA, 19 nt, Artificial Sequence
  Description of Artificial Sequence: Synthetic oligonucleotide
gggaggaaugucucccuuc

SEQ ID NO: 570433 - RNA, 19 nt, Artificial Sequence
  Description of Artificial Sequence: Synthetic oligonucleotide
auaguuccuuuuggacucu

SEQ ID NO: 570434 - RNA, 19 nt, Artificial Sequence
  Description of Artificial Sequence: Synthetic oligonucleotide
aaucaggggcugacaugga

SEQ ID NO: 570435 - RNA, 19 nt, Artificial Sequence
  Description of Artificial Sequence: Synthetic oligonucleotide
accccgacauaagcagguc

SEQ ID NO: 570436 - RNA, 19 nt, Artificial Sequence
  Description of Artificial Sequence: Synthetic oligonucleotide
uuagggcgggaaugacaau

SEQ ID NO: 570437 - RNA, 19 nt, Artificial Sequence
  Description of Artificial Sequence: Synthetic oligonucleotide
ccaggcucgggcacuacug

SEQ ID NO: 570438 - RNA, 19 nt, Artificial Sequence
  Description of Artificial Sequence: Synthetic oligonucleotide
cuaugaacccagccucgaa

SEQ ID NO: 570439 - RNA, 19 nt, Artificial Sequence
  Description of Artificial Sequence: Synthetic oligonucleotide
agggacccguucuccuucu

SEQ ID NO: 570440 - RNA, 19 nt, Artificial Sequence
  Description of Artificial Sequence: Synthetic oligonucleotide
ggacagaggagcuuuugau

SEQ ID NO: 570441 - RNA, 19 nt, Artificial Sequence
  Description of Artificial Sequence: Synthetic oligonucleotide
aggguacgaaauagucugu

SEQ ID NO: 570442 - RNA, 19 nt, Artificial Sequence
  Description of Artificial Sequence: Synthetic oligonucleotide
cuaggauucaaggcauacu

SEQ ID NO: 570443 - RNA, 19 nt, Artificial Sequence
  Description of Artificial Sequence: Synthetic oligonucleotide
aagugcuauuagggcggga

SEQ ID NO: 570444 - RNA, 19 nt, Artificial Sequence
  Description of Artificial Sequence: Synthetic oligonucleotide
gaggggaaccaaagaaggu

SEQ ID NO: 570445 - RNA, 19 nt, Artificial Sequence
  Description of Artificial Sequence: Synthetic oligonucleotide
acgugucuccccgccugcg

SEQ ID NO: 570446 - RNA, 19 nt, Artificial Sequence
  Description of Artificial Sequence: Synthetic oligonucleotide
ggacuaugugguacuggug

SEQ ID NO: 570447 - RNA, 19 nt, Artificial Sequence
  Description of Artificial Sequence: Synthetic oligonucleotide
cugugacacgagcuagcca

SEQ ID NO: 570448 - RNA, 19 nt, Artificial Sequence
  Description of Artificial Sequence: Synthetic oligonucleotide
cgagcuagccaugacauga

SEQ ID NO: 570449 - RNA, 19 nt, Artificial Sequence
  Description of Artificial Sequence: Synthetic oligonucleotide
guaaggacucaggaauggu

SEQ ID NO: 570450 - RNA, 19 nt, Artificial Sequence
  Description of Artificial Sequence: Synthetic oligonucleotide
gugacacgagcuagccaug

SEQ ID NO: 570451 - RNA, 19 nt, Artificial Sequence
  Description of Artificial Sequence: Synthetic oligonucleotide
acauggagguggaggaaua

SEQ ID NO: 570452 - RNA, 19 nt, Artificial Sequence
  Description of Artificial Sequence: Synthetic oligonucleotide
ggagauaaggagggacaga

SEQ ID NO: 570453 - RNA, 19 nt, Artificial Sequence
  Description of Artificial Sequence: Synthetic oligonucleotide
cccguugaugacguuauca

SEQ ID NO: 570454 - RNA, 19 nt, Artificial Sequence
  Description of Artificial Sequence: Synthetic oligonucleotide
ccgugugguauuuguugac

SEQ ID NO: 570455 - RNA, 19 nt, Artificial Sequence
  Description of Artificial Sequence: Synthetic oligonucleotide
ggguaguagcuggcaacag

SEQ ID NO: 570456 - RNA, 19 nt, Artificial Sequence
  Description of Artificial Sequence: Synthetic oligonucleotide
gcgugacugacaagcagac

SEQ ID NO: 570457 - RNA, 19 nt, Artificial Sequence
  Description of Artificial Sequence: Synthetic oligonucleotide
ggcgggaaugacaaugucu

SEQ ID NO: 570458 - RNA, 19 nt, Artificial Sequence
  Description of Artificial Sequence: Synthetic oligonucleotide
ggucuuguuauggguagua

SEQ ID NO: 570459 - RNA, 19 nt, Artificial Sequence
  Description of Artificial Sequence: Synthetic oligonucleotide
cacuugccaaggaggcaga

SEQ ID NO: 570460 - RNA, 19 nt, Artificial Sequence
  Description of Artificial Sequence: Synthetic oligonucleotide
gcggaacacagggucauuc

SEQ ID NO: 570461 - RNA, 19 nt, Artificial Sequence
  Description of Artificial Sequence: Synthetic oligonucleotide
caccaugccuggacuaugu

SEQ ID NO: 570462 - RNA, 19 nt, Artificial Sequence
  Description of Artificial Sequence: Synthetic oligonucleotide
gggcccauaguucagcauu

SEQ ID NO: 570463 - RNA, 19 nt, Artificial Sequence
  Description of Artificial Sequence: Synthetic oligonucleotide
guccaguacgaggcaguuc

SEQ ID NO: 570464 - RNA, 19 nt, Artificial Sequence
  Description of Artificial Sequence: Synthetic oligonucleotide
gguagugcagugguuacuu

SEQ ID NO: 570465 - RNA, 19 nt, Artificial Sequence
  Description of Artificial Sequence: Synthetic oligonucleotide
cugcccguugaugacguua

SEQ ID NO: 570466 - RNA, 19 nt, Artificial Sequence
  Description of Artificial Sequence: Synthetic oligonucleotide
gugcuauuagggcgggaau

SEQ ID NO: 570467 - RNA, 19 nt, Artificial Sequence
  Description of Artificial Sequence: Synthetic oligonucleotide
ccuuaacaaaugacuuuua

SEQ ID NO: 570468 - RNA, 19 nt, Artificial Sequence
  Description of Artificial Sequence: Synthetic oligonucleotide
gucuccccgccugcggaug

SEQ ID NO: 570469 - RNA, 19 nt, Artificial Sequence
  Description of Artificial Sequence: Synthetic oligonucleotide
gguguugguuugguuccuc

SEQ ID NO: 570470 - RNA, 19 nt, Artificial Sequence
  Description of Artificial Sequence: Synthetic oligonucleotide
gggcgggaaugacaauguc

SEQ ID NO: 570471 - RNA, 19 nt, Artificial Sequence
  Description of Artificial Sequence: Synthetic oligonucleotide
ccuggacuaugugguacug

SEQ ID NO: 570472 - RNA, 19 nt, Artificial Sequence
  Description of Artificial Sequence: Synthetic oligonucleotide
cgggcacuacuguaaggac

SEQ ID NO: 570473 - RNA, 19 nt, Artificial Sequence
  Description of Artificial Sequence: Synthetic oligonucleotide
caagcagacucacgauuuu

SEQ ID NO: 570474 - RNA, 19 nt, Artificial Sequence
  Description of Artificial Sequence: Synthetic oligonucleotide
cugagagcgcagccuucaa

SEQ ID NO: 570475 - RNA, 19 nt, Artificial Sequence
  Description of Artificial Sequence: Synthetic oligonucleotide
cgugucuccccgccugcgg

SEQ ID NO: 570476 - RNA, 19 nt, Artificial Sequence
  Description of Artificial Sequence: Synthetic oligonucleotide
cacagacagcucuucgcuu

SEQ ID NO: 570477 - RNA, 19 nt, Artificial Sequence
  Description of Artificial Sequence: Synthetic oligonucleotide
gccaccaagucgacugaga

SEQ ID NO: 570478 - RNA, 19 nt, Artificial Sequence
  Description of Artificial Sequence: Synthetic oligonucleotide
ggcccauaguucagcauua

SEQ ID NO: 570479 - RNA, 19 nt, Artificial Sequence
  Description of Artificial Sequence: Synthetic oligonucleotide
cccauaguucagcauuaua

SEQ ID NO: 570480 - RNA, 19 nt, Artificial Sequence
  Description of Artificial Sequence: Synthetic oligonucleotide
gcucguucucugagagcgc

SEQ ID NO: 570481 - RNA, 19 nt, Artificial Sequence
  Description of Artificial Sequence: Synthetic oligonucleotide
agcggaacacagggucauu

SEQ ID NO: 570482 - RNA, 19 nt, Artificial Sequence
  Description of Artificial Sequence: Synthetic oligonucleotide
cuccccgccugcggauggc

SEQ ID NO: 570483 - RNA, 19 nt, Artificial Sequence
  Description of Artificial Sequence: Synthetic oligonucleotide
ccaguacgaggcaguucuc

SEQ ID NO: 570484 - RNA, 19 nt, Artificial Sequence
  Description of Artificial Sequence: Synthetic oligonucleotide
guucaaccugagagauucu

SEQ ID NO: 570485 - RNA, 19 nt, Artificial Sequence
  Description of Artificial Sequence: Synthetic oligonucleotide
ccgccugcggauggcuucg

SEQ ID NO: 570486 - RNA, 19 nt, Artificial Sequence
  Description of Artificial Sequence: Synthetic oligonucleotide
cccgacauaagcaggucuu

SEQ ID NO: 570487 - RNA, 19 nt, Artificial Sequence
  Description of Artificial Sequence: Synthetic oligonucleotide
ggguacgaaauagucuguu

SEQ ID NO: 570488 - RNA, 19 nt, Artificial Sequence
  Description of Artificial Sequence: Synthetic oligonucleotide
ccuaaucacacaggcuugu

SEQ ID NO: 570489 - RNA, 19 nt, Artificial Sequence
  Description of Artificial Sequence: Synthetic oligonucleotide
ccuuuuggacucuggugau

SEQ ID NO: 570490 - RNA, 19 nt, Artificial Sequence
  Description of Artificial Sequence: Synthetic oligonucleotide
ggggaggaaugucucccuu

SEQ ID NO: 570491 - RNA, 19 nt, Artificial Sequence
  Description of Artificial Sequence: Synthetic oligonucleotide
ccccgacauaagcaggucu

SEQ ID NO: 570492 - RNA, 19 nt, Artificial Sequence
  Description of Artificial Sequence: Synthetic oligonucleotide
ccaagucgacugagacaga

SEQ ID NO: 570493 - RNA, 19 nt, Artificial Sequence
  Description of Artificial Sequence: Synthetic oligonucleotide
gcgcagccuucaaccuggc

SEQ ID NO: 570494 - RNA, 19 nt, Artificial Sequence
  Description of Artificial Sequence: Synthetic oligonucleotide
gcccauaguucagcauuau

SEQ ID NO: 570495 - RNA, 19 nt, Artificial Sequence
  Description of Artificial Sequence: Synthetic oligonucleotide
gugcacccgugugguauuu

SEQ ID NO: 570496 - RNA, 19 nt, Artificial Sequence
  Description of Artificial Sequence: Synthetic oligonucleotide
cgacauaagcaggucuuuu

SEQ ID NO: 570497 - RNA, 19 nt, Artificial Sequence
  Description of Artificial Sequence: Synthetic oligonucleotide
gggacccguucuccuucuu

SEQ ID NO: 570498 - RNA, 19 nt, Artificial Sequence
  Description of Artificial Sequence: Synthetic oligonucleotide
cgccugcggauggcuucga

SEQ ID NO: 570499 - RNA, 19 nt, Artificial Sequence
  Description of Artificial Sequence: Synthetic oligonucleotide
acaagaggaauucagagcc

SEQ ID NO: 570500 - RNA, 19 nt, Artificial Sequence
  Description of Artificial Sequence: Synthetic oligonucleotide
gaauacuccagucagaugc

SEQ ID NO: 570501 - RNA, 19 nt, Artificial Sequence
  Description of Artificial Sequence: Synthetic oligonucleotide
ucagaugccacauugaugc

SEQ ID NO: 570502 - RNA, 19 nt, Artificial Sequence
  Description of Artificial Sequence: Synthetic oligonucleotide
aacccuaaaggucacugcc

SEQ ID NO: 570503 - RNA, 19 nt, Artificial Sequence
  Description of Artificial Sequence: Synthetic oligonucleotide
ugaacuagagacaagugug

SEQ ID NO: 570504 - RNA, 19 nt, Artificial Sequence
  Description of Artificial Sequence: Synthetic oligonucleotide
aagacuaggucacaagagg

SEQ ID NO: 570505 - RNA, 19 nt, Artificial Sequence
  Description of Artificial Sequence: Synthetic oligonucleotide
ucugauaguuaaaugagug

SEQ ID NO: 570506 - RNA, 19 nt, Artificial Sequence
  Description of Artificial Sequence: Synthetic oligonucleotide
agaggaucaucuuucauac

SEQ ID NO: 570507 - RNA, 19 nt, Artificial Sequence
  Description of Artificial Sequence: Synthetic oligonucleotide
aaauuuaaugaccaccccu

SEQ ID NO: 570508 - RNA, 19 nt, Artificial Sequence
  Description of Artificial Sequence: Synthetic oligonucleotide
aaaagguugagaugagaag

SEQ ID NO: 570509 - RNA, 19 nt, Artificial Sequence
  Description of Artificial Sequence: Synthetic oligonucleotide
agagcuuggaaacacacag

SEQ ID NO: 570510 - RNA, 19 nt, Artificial Sequence
  Description of Artificial Sequence: Synthetic oligonucleotide
uuccuggugagcuugauag

SEQ ID NO: 570511 - RNA, 19 nt, Artificial Sequence
  Description of Artificial Sequence: Synthetic oligonucleotide
acuagcgccaugcugagac

SEQ ID NO: 570512 - RNA, 19 nt, Artificial Sequence
  Description of Artificial Sequence: Synthetic oligonucleotide
aaaaggaacccuaaagguc

SEQ ID NO: 570513 - RNA, 19 nt, Artificial Sequence
  Description of Artificial Sequence: Synthetic oligonucleotide
aaagguugagaugagaaga

SEQ ID NO: 570514 - RNA, 19 nt, Artificial Sequence
  Description of Artificial Sequence: Synthetic oligonucleotide
cucaugucgagucugauag

SEQ ID NO: 570515 - RNA, 19 nt, Artificial Sequence
  Description of Artificial Sequence: Synthetic oligonucleotide
uacagucugaagaacgccg

SEQ ID NO: 570516 - RNA, 19 nt, Artificial Sequence
  Description of Artificial Sequence: Synthetic oligonucleotide
uguuauccugcccagaugu

SEQ ID NO: 570517 - RNA, 19 nt, Artificial Sequence
  Description of Artificial Sequence: Synthetic oligonucleotide
gauagaagaggguauacca

SEQ ID NO: 570518 - RNA, 19 nt, Artificial Sequence
  Description of Artificial Sequence: Synthetic oligonucleotide
caguguaucagugaaacgg

SEQ ID NO: 570519 - RNA, 19 nt, Artificial Sequence
  Description of Artificial Sequence: Synthetic oligonucleotide
guuaccggcagguacaggg

SEQ ID NO: 570520 - RNA, 19 nt, Artificial Sequence
  Description of Artificial Sequence: Synthetic oligonucleotide
ucacaagaggaauucagag

SEQ ID NO: 570521 - RNA, 19 nt, Artificial Sequence
  Description of Artificial Sequence: Synthetic oligonucleotide
acucgcucaauccagacag

SEQ ID NO: 570522 - RNA, 19 nt, Artificial Sequence
  Description of Artificial Sequence: Synthetic oligonucleotide
auucacugaaaccacaacu

SEQ ID NO: 570523 - RNA, 19 nt, Artificial Sequence
  Description of Artificial Sequence: Synthetic oligonucleotide
aggaaagucccacuagcgc

SEQ ID NO: 570524 - RNA, 19 nt, Artificial Sequence
  Description of Artificial Sequence: Synthetic oligonucleotide
ucccucaacagguuaaggg

SEQ ID NO: 570525 - RNA, 19 nt, Artificial Sequence
  Description of Artificial Sequence: Synthetic oligonucleotide
acauccgcaccacagaagg

SEQ ID NO: 570526 - RNA, 19 nt, Artificial Sequence
  Description of Artificial Sequence: Synthetic oligonucleotide
aacucaagaccaccacacc

SEQ ID NO: 570527 - RNA, 19 nt, Artificial Sequence
  Description of Artificial Sequence: Synthetic oligonucleotide
guucuaugccgccagagcg

SEQ ID NO: 570528 - RNA, 19 nt, Artificial Sequence
  Description of Artificial Sequence: Synthetic oligonucleotide
gcaaccugaaucuugaucc

SEQ ID NO: 570529 - RNA, 19 nt, Artificial Sequence
  Description of Artificial Sequence: Synthetic oligonucleotide
aacagguuaagggaugauc

SEQ ID NO: 570530 - RNA, 19 nt, Artificial Sequence
  Description of Artificial Sequence: Synthetic oligonucleotide
aaugucauaccaaaccucu

SEQ ID NO: 570531 - RNA, 19 nt, Artificial Sequence
  Description of Artificial Sequence: Synthetic oligonucleotide
uguauuagcccaucagcag

SEQ ID NO: 570532 - RNA, 19 nt, Artificial Sequence
  Description of Artificial Sequence: Synthetic oligonucleotide
ugauaguuaaaugaguguc

SEQ ID NO: 570533 - RNA, 19 nt, Artificial Sequence
  Description of Artificial Sequence: Synthetic oligonucleotide
guagggucaaacuccaagg

SEQ ID NO: 570534 - RNA, 19 nt, Artificial Sequence
  Description of Artificial Sequence: Synthetic oligonucleotide
aguagggucaaacuccaag

SEQ ID NO: 570535 - RNA, 19 nt, Artificial Sequence
  Description of Artificial Sequence: Synthetic oligonucleotide
uaacucaagaccaccacac

SEQ ID NO: 570536 - RNA, 19 nt, Artificial Sequence
  Description of Artificial Sequence: Synthetic oligonucleotide
cuacucaggacaaagggac

SEQ ID NO: 570537 - RNA, 19 nt, Artificial Sequence
  Description of Artificial Sequence: Synthetic oligonucleotide
acuaucagcacagaggucu

SEQ ID NO: 570538 - RNA, 19 nt, Artificial Sequence
  Description of Artificial Sequence: Synthetic oligonucleotide
gaaggaaagucccacuagc

SEQ ID NO: 570539 - RNA, 19 nt, Artificial Sequence
  Description of Artificial Sequence: Synthetic oligonucleotide
aaagacuaggucacaagag

SEQ ID NO: 570540 - RNA, 19 nt, Artificial Sequence
  Description of Artificial Sequence: Synthetic oligonucleotide
gauaguuaaaugagugucc

SEQ ID NO: 570541 - RNA, 19 nt, Artificial Sequence
  Description of Artificial Sequence: Synthetic oligonucleotide
augaguguccaucaucuag

SEQ ID NO: 570542 - RNA, 19 nt, Artificial Sequence
  Description of Artificial Sequence: Synthetic oligonucleotide
gaaagacuaggucacaaga

SEQ ID NO: 570543 - RNA, 19 nt, Artificial Sequence
  Description of Artificial Sequence: Synthetic oligonucleotide
aagguaugcagcuggaaaa

SEQ ID NO: 570544 - RNA, 19 nt, Artificial Sequence
  Description of Artificial Sequence: Synthetic oligonucleotide
ugaagaacgccgcaugcgc

SEQ ID NO: 570545 - RNA, 19 nt, Artificial Sequence
  Description of Artificial Sequence: Synthetic oligonucleotide
ugaguguccaucaucuaga

SEQ ID NO: 570546 - RNA, 19 nt, Artificial Sequence
  Description of Artificial Sequence: Synthetic oligonucleotide
acagggauacuguucaaag

SEQ ID NO: 570547 - RNA, 19 nt, Artificial Sequence
  Description of Artificial Sequence: Synthetic oligonucleotide
agguuugcgcacuaucagc

SEQ ID NO: 570548 - RNA, 19 nt, Artificial Sequence
  Description of Artificial Sequence: Synthetic oligonucleotide
augaccaccccucauaacu

SEQ ID NO: 570549 - RNA, 19 nt, Artificial Sequence
  Description of Artificial Sequence: Synthetic oligonucleotide
accgugauucacugaaacc

SEQ ID NO: 570550 - RNA, 19 nt, Artificial Sequence
  Description of Artificial Sequence: Synthetic oligonucleotide
ucgaaagaauggcugguag

SEQ ID NO: 570551 - RNA, 19 nt, Artificial Sequence
  Description of Artificial Sequence: Synthetic oligonucleotide
agcaaccugaaucuugauc

SEQ ID NO: 570552 - RNA, 19 nt, Artificial Sequence
  Description of Artificial Sequence: Synthetic oligonucleotide
acccauuaugaccacucgc

SEQ ID NO: 570553 - RNA, 19 nt, Artificial Sequence
  Description of Artificial Sequence: Synthetic oligonucleotide
cacauauaagccauagaug

SEQ ID NO: 570554 - RNA, 19 nt, Artificial Sequence
  Description of Artificial Sequence: Synthetic oligonucleotide
gagacaaguguguugccag

SEQ ID NO: 570555 - RNA, 19 nt, Artificial Sequence
  Description of Artificial Sequence: Synthetic oligonucleotide
uguugccagagaaugagaa

SEQ ID NO: 570556 - RNA, 19 nt, Artificial Sequence
  Description of Artificial Sequence: Synthetic oligonucleotide
uugccagagaaugagaacu

SEQ ID NO: 570557 - RNA, 19 nt, Artificial Sequence
  Description of Artificial Sequence: Synthetic oligonucleotide
agaaagagcucuccuuggg

SEQ ID NO: 570558 - RNA, 19 nt, Artificial Sequence
  Description of Artificial Sequence: Synthetic oligonucleotide
aaggaaagucccacuagcg

SEQ ID NO: 570559 - RNA, 19 nt, Artificial Sequence
  Description of Artificial Sequence: Synthetic oligonucleotide
ggguaguguacccagaggg

SEQ ID NO: 570560 - RNA, 19 nt, Artificial Sequence
  Description of Artificial Sequence: Synthetic oligonucleotide
aaugaccaccccucauaac

SEQ ID NO: 570561 - RNA, 19 nt, Artificial Sequence
  Description of Artificial Sequence: Synthetic oligonucleotide
agcgaggcacaauuguccc

SEQ ID NO: 570562 - RNA, 19 nt, Artificial Sequence
  Description of Artificial Sequence: Synthetic oligonucleotide
uuaaugaccaccccucaua

SEQ ID NO: 570563 - RNA, 19 nt, Artificial Sequence
  Description of Artificial Sequence: Synthetic oligonucleotide
uaaguagggucaaacucca

SEQ ID NO: 570564 - RNA, 19 nt, Artificial Sequence
  Description of Artificial Sequence: Synthetic oligonucleotide
caaaguuaccggcagguac

SEQ ID NO: 570565 - RNA, 19 nt, Artificial Sequence
  Description of Artificial Sequence: Synthetic oligonucleotide
agcucgaaagaauggcugg

SEQ ID NO: 570566 - RNA, 19 nt, Artificial Sequence
  Description of Artificial Sequence: Synthetic oligonucleotide
ucucccagccgccauaaug

SEQ ID NO: 570567 - RNA, 19 nt, Artificial Sequence
  Description of Artificial Sequence: Synthetic oligonucleotide
gaaggaaagacuaggucac

SEQ ID NO: 570568 - RNA, 19 nt, Artificial Sequence
  Description of Artificial Sequence: Synthetic oligonucleotide
auguuggaaagacaggcga

SEQ ID NO: 570569 - RNA, 19 nt, Artificial Sequence
  Description of Artificial Sequence: Synthetic oligonucleotide
guaggcacccauuugguac

SEQ ID NO: 570570 - RNA, 19 nt, Artificial Sequence
  Description of Artificial Sequence: Synthetic oligonucleotide
ggcaugaauacacagggug

SEQ ID NO: 570571 - RNA, 19 nt, Artificial Sequence
  Description of Artificial Sequence: Synthetic oligonucleotide
gaaagcccuacucaggaca

SEQ ID NO: 570572 - RNA, 19 nt, Artificial Sequence
  Description of Artificial Sequence: Synthetic oligonucleotide
ugauagaagaggguauacc

SEQ ID NO: 570573 - RNA, 19 nt, Artificial Sequence
  Description of Artificial Sequence: Synthetic oligonucleotide
gguuauugaagaugaauac

SEQ ID NO: 570574 - RNA, 19 nt, Artificial Sequence
  Description of Artificial Sequence: Synthetic oligonucleotide
ugagaugcuaacagccaug

SEQ ID NO: 570575 - RNA, 19 nt, Artificial Sequence
  Description of Artificial Sequence: Synthetic oligonucleotide
gagaugcuaacagccaugg

SEQ ID NO: 570576 - RNA, 19 nt, Artificial Sequence
  Description of Artificial Sequence: Synthetic oligonucleotide
aggcagauagacuuguaca

SEQ ID NO: 570577 - RNA, 19 nt, Artificial Sequence
  Description of Artificial Sequence: Synthetic oligonucleotide
aaagagagugagaggauca

SEQ ID NO: 570578 - RNA, 19 nt, Artificial Sequence
  Description of Artificial Sequence: Synthetic oligonucleotide
ugagcucgaaagaauggcu

SEQ ID NO: 570579 - RNA, 19 nt, Artificial Sequence
  Description of Artificial Sequence: Synthetic oligonucleotide
uucaaaguuaccggcaggu

SEQ ID NO: 570580 - RNA, 19 nt, Artificial Sequence
  Description of Artificial Sequence: Synthetic oligonucleotide
auuaugaccacucgcucaa

SEQ ID NO: 570581 - RNA, 19 nt, Artificial Sequence
  Description of Artificial Sequence: Synthetic oligonucleotide
uggacgcacaugaucaucu

SEQ ID NO: 570582 - RNA, 19 nt, Artificial Sequence
  Description of Artificial Sequence: Synthetic oligonucleotide
ggaaagucccacuagcgcc

SEQ ID NO: 570583 - RNA, 19 nt, Artificial Sequence
  Description of Artificial Sequence: Synthetic oligonucleotide
ucuagaaagagcucuccuu

SEQ ID NO: 570584 - RNA, 19 nt, Artificial Sequence
  Description of Artificial Sequence: Synthetic oligonucleotide
auaguuaaaugagugucca

SEQ ID NO: 570585 - RNA, 19 nt, Artificial Sequence
  Description of Artificial Sequence: Synthetic oligonucleotide
uacucaggacaaagggacg

SEQ ID NO: 570586 - RNA, 19 nt, Artificial Sequence
  Description of Artificial Sequence: Synthetic oligonucleotide
ugaucccaguguaucagug

SEQ ID NO: 570587 - RNA, 19 nt, Artificial Sequence
  Description of Artificial Sequence: Synthetic oligonucleotide
gaggguaguguacccagag

SEQ ID NO: 570588 - RNA, 19 nt, Artificial Sequence
  Description of Artificial Sequence: Synthetic oligonucleotide
cuugauacugagaugcuaa

SEQ ID NO: 570589 - RNA, 19 nt, Artificial Sequence
  Description of Artificial Sequence: Synthetic oligonucleotide
uucuaugccgccagagcgc

SEQ ID NO: 570590 - RNA, 19 nt, Artificial Sequence
  Description of Artificial Sequence: Synthetic oligonucleotide
gaugccacauugaugccag

SEQ ID NO: 570591 - RNA, 19 nt, Artificial Sequence
  Description of Artificial Sequence: Synthetic oligonucleotide
aagaucuggcaucagcaua

SEQ ID NO: 570592 - RNA, 19 nt, Artificial Sequence
  Description of Artificial Sequence: Synthetic oligonucleotide
ucugauagcuuugaauguc

SEQ ID NO: 570593 - RNA, 19 nt, Artificial Sequence
  Description of Artificial Sequence: Synthetic oligonucleotide
cuguguggaagcuucuccc

SEQ ID NO: 570594 - RNA, 19 nt, Artificial Sequence
  Description of Artificial Sequence: Synthetic oligonucleotide
auauaagccauagauguua

SEQ ID NO: 570595 - RNA, 19 nt, Artificial Sequence
  Description of Artificial Sequence: Synthetic oligonucleotide
ugaccacucgcucaaucca

SEQ ID NO: 570596 - RNA, 19 nt, Artificial Sequence
  Description of Artificial Sequence: Synthetic oligonucleotide
ucaggggauccuuuggucu

SEQ ID NO: 570597 - RNA, 19 nt, Artificial Sequence
  Description of Artificial Sequence: Synthetic oligonucleotide
gaaaggugagguguaggag

SEQ ID NO: 570598 - RNA, 19 nt, Artificial Sequence
  Description of Artificial Sequence: Synthetic oligonucleotide
guugggaacccagaggaag

SEQ ID NO: 570599 - RNA, 19 nt, Artificial Sequence
  Description of Artificial Sequence: Synthetic oligonucleotide
gaacucuuaaguaggguca

SEQ ID NO: 570600 - RNA, 19 nt, Artificial Sequence
  Description of Artificial Sequence: Synthetic oligonucleotide
uauaagccauagauguuau

SEQ ID NO: 570601 - RNA, 19 nt, Artificial Sequence
  Description of Artificial Sequence: Synthetic oligonucleotide
ucgccaugugcacauauaa

SEQ ID NO: 570602 - RNA, 19 nt, Artificial Sequence
  Description of Artificial Sequence: Synthetic oligonucleotide
uccagcgaggcacaauugu

SEQ ID NO: 570603 - RNA, 19 nt, Artificial Sequence
  Description of Artificial Sequence: Synthetic oligonucleotide
acagucugaagaacgccgc

SEQ ID NO: 570604 - RNA, 19 nt, Artificial Sequence
  Description of Artificial Sequence: Synthetic oligonucleotide
aagggaugaucccagugua

SEQ ID NO: 570605 - RNA, 19 nt, Artificial Sequence
  Description of Artificial Sequence: Synthetic oligonucleotide
gacgcacaugaucaucucc

SEQ ID NO: 570606 - RNA, 19 nt, Artificial Sequence
  Description of Artificial Sequence: Synthetic oligonucleotide
aggucucaggaucauguug

SEQ ID NO: 570607 - RNA, 19 nt, Artificial Sequence
  Description of Artificial Sequence: Synthetic oligonucleotide
gaaagacaaggccccucgg

SEQ ID NO: 570608 - RNA, 19 nt, Artificial Sequence
  Description of Artificial Sequence: Synthetic oligonucleotide
uagcccaucagcagucgcc

SEQ ID NO: 570609 - RNA, 19 nt, Artificial Sequence
  Description of Artificial Sequence: Synthetic oligonucleotide
agguaugcagcuggaaaac

SEQ ID NO: 570610 - RNA, 19 nt, Artificial Sequence
  Description of Artificial Sequence: Synthetic oligonucleotide
cagcgaggcacaauugucc

SEQ ID NO: 570611 - RNA, 19 nt, Artificial Sequence
  Description of Artificial Sequence: Synthetic oligonucleotide
guucaaaguuaccggcagg

SEQ ID NO: 570612 - RNA, 19 nt, Artificial Sequence
  Description of Artificial Sequence: Synthetic oligonucleotide
ugaccaccccucauaacug

SEQ ID NO: 570613 - RNA, 19 nt, Artificial Sequence
  Description of Artificial Sequence: Synthetic oligonucleotide
agagcgcuguauuagccca

SEQ ID NO: 570614 - RNA, 19 nt, Artificial Sequence
  Description of Artificial Sequence: Synthetic oligonucleotide
augaauacuccagucagau

SEQ ID NO: 570615 - RNA, 19 nt, Artificial Sequence
  Description of Artificial Sequence: Synthetic oligonucleotide
aggguaguguacccagagg

SEQ ID NO: 570616 - RNA, 19 nt, Artificial Sequence
  Description of Artificial Sequence: Synthetic oligonucleotide
ugaauacuccagucagaug

SEQ ID NO: 570617 - RNA, 19 nt, Artificial Sequence
  Description of Artificial Sequence: Synthetic oligonucleotide
ucgggucuucacaaaugag

SEQ ID NO: 570618 - RNA, 19 nt, Artificial Sequence
  Description of Artificial Sequence: Synthetic oligonucleotide
ucgagucugauaguuaaau

SEQ ID NO: 570619 - RNA, 19 nt, Artificial Sequence
  Description of Artificial Sequence: Synthetic oligonucleotide
gacaaguguguugccagag

SEQ ID NO: 570620 - RNA, 19 nt, Artificial Sequence
  Description of Artificial Sequence: Synthetic oligonucleotide
uggaaacacacagaaggaa

SEQ ID NO: 570621 - RNA, 19 nt, Artificial Sequence
  Description of Artificial Sequence: Synthetic oligonucleotide
ucaacagguuaagggauga

SEQ ID NO: 570622 - RNA, 19 nt, Artificial Sequence
  Description of Artificial Sequence: Synthetic oligonucleotide
cuugagugucccaagggga

SEQ ID NO: 570623 - RNA, 19 nt, Artificial Sequence
  Description of Artificial Sequence: Synthetic oligonucleotide
guuauggaugucccgguuc

SEQ ID NO: 570624 - RNA, 19 nt, Artificial Sequence
  Description of Artificial Sequence: Synthetic oligonucleotide
cucaacagguuaagggaug

SEQ ID NO: 570625 - RNA, 19 nt, Artificial Sequence
  Description of Artificial Sequence: Synthetic oligonucleotide
aaccugucacaguugggaa

SEQ ID NO: 570626 - RNA, 19 nt, Artificial Sequence
  Description of Artificial Sequence: Synthetic oligonucleotide
gagcucgaaagaauggcug

SEQ ID NO: 570627 - RNA, 19 nt, Artificial Sequence
  Description of Artificial Sequence: Synthetic oligonucleotide
ggaaagacuaggucacaag

SEQ ID NO: 570628 - RNA, 19 nt, Artificial Sequence
  Description of Artificial Sequence: Synthetic oligonucleotide
cagagcgcuguauuagccc

SEQ ID NO: 570629 - RNA, 19 nt, Artificial Sequence
  Description of Artificial Sequence: Synthetic oligonucleotide
aagaacgccgcaugcgcau

SEQ ID NO: 570630 - RNA, 19 nt, Artificial Sequence
  Description of Artificial Sequence: Synthetic oligonucleotide
cugagacacauagggauag

SEQ ID NO: 570631 - RNA, 19 nt, Artificial Sequence
  Description of Artificial Sequence: Synthetic oligonucleotide
acccuaaaggucacugccc

SEQ ID NO: 570632 - RNA, 19 nt, Artificial Sequence
  Description of Artificial Sequence: Synthetic oligonucleotide
cagauguuagcagaaucug

SEQ ID NO: 570633 - RNA, 19 nt, Artificial Sequence
  Description of Artificial Sequence: Synthetic oligonucleotide
ggucucaugacaggaaucc

SEQ ID NO: 570634 - RNA, 19 nt, Artificial Sequence
  Description of Artificial Sequence: Synthetic oligonucleotide
agagcccuaggacagcccu

SEQ ID NO: 570635 - RNA, 19 nt, Artificial Sequence
  Description of Artificial Sequence: Synthetic oligonucleotide
aguguaucagugaaacgga

SEQ ID NO: 570636 - RNA, 19 nt, Artificial Sequence
  Description of Artificial Sequence: Synthetic oligonucleotide
gagugugcuccaguuacag

SEQ ID NO: 570637 - RNA, 19 nt, Artificial Sequence
  Description of Artificial Sequence: Synthetic oligonucleotide
guugccagagaaugagaac

SEQ ID NO: 570638 - RNA, 19 nt, Artificial Sequence
  Description of Artificial Sequence: Synthetic oligonucleotide
agggacguucuaugccgcc

SEQ ID NO: 570639 - RNA, 19 nt, Artificial Sequence
  Description of Artificial Sequence: Synthetic oligonucleotide
ugauagcuuugaaugucau

SEQ ID NO: 570640 - RNA, 19 nt, Artificial Sequence
  Description of Artificial Sequence: Synthetic oligonucleotide
ucgcucaauccagacaggc

SEQ ID NO: 570641 - RNA, 19 nt, Artificial Sequence
  Description of Artificial Sequence: Synthetic oligonucleotide
auaagccauagauguuaug

SEQ ID NO: 570642 - RNA, 19 nt, Artificial Sequence
  Description of Artificial Sequence: Synthetic oligonucleotide
guuccugaguccucccucc

SEQ ID NO: 570643 - RNA, 19 nt, Artificial Sequence
  Description of Artificial Sequence: Synthetic oligonucleotide
ugagaggaucaucuuucau

SEQ ID NO: 570644 - RNA, 19 nt, Artificial Sequence
  Description of Artificial Sequence: Synthetic oligonucleotide
agacuaggucacaagagga

SEQ ID NO: 570645 - RNA, 19 nt, Artificial Sequence
  Description of Artificial Sequence: Synthetic oligonucleotide
aggaguaucgcuggaacaa

SEQ ID NO: 570646 - RNA, 19 nt, Artificial Sequence
  Description of Artificial Sequence: Synthetic oligonucleotide
gaucccaguguaucaguga

SEQ ID NO: 570647 - RNA, 19 nt, Artificial Sequence
  Description of Artificial Sequence: Synthetic oligonucleotide
uacuccagucagaugccac

SEQ ID NO: 570648 - RNA, 19 nt, Artificial Sequence
  Description of Artificial Sequence: Synthetic oligonucleotide
acaaguguguugccagaga

SEQ ID NO: 570649 - RNA, 19 nt, Artificial Sequence
  Description of Artificial Sequence: Synthetic oligonucleotide
ggguauaccagaaggggag

SEQ ID NO: 570650 - RNA, 19 nt, Artificial Sequence
  Description of Artificial Sequence: Synthetic oligonucleotide
aaguuaccggcagguacag

SEQ ID NO: 570651 - RNA, 19 nt, Artificial Sequence
  Description of Artificial Sequence: Synthetic oligonucleotide
aucgcuggaacaaggcauc

SEQ ID NO: 570652 - RNA, 19 nt, Artificial Sequence
  Description of Artificial Sequence: Synthetic oligonucleotide
agaucuggcaucagcauaa

SEQ ID NO: 570653 - RNA, 19 nt, Artificial Sequence
  Description of Artificial Sequence: Synthetic oligonucleotide
cccuacucaggacaaaggg

SEQ ID NO: 570654 - RNA, 19 nt, Artificial Sequence
  Description of Artificial Sequence: Synthetic oligonucleotide
gugcacauauaagccauag

SEQ ID NO: 570655 - RNA, 19 nt, Artificial Sequence
  Description of Artificial Sequence: Synthetic oligonucleotide
gacgggagaaaugcagcag

SEQ ID NO: 570656 - RNA, 19 nt, Artificial Sequence
  Description of Artificial Sequence: Synthetic oligonucleotide
gaacaaguuccuuggguua

SEQ ID NO: 570657 - RNA, 19 nt, Artificial Sequence
  Description of Artificial Sequence: Synthetic oligonucleotide
aacucuuaaguagggucaa

SEQ ID NO: 570658 - RNA, 19 nt, Artificial Sequence
  Description of Artificial Sequence: Synthetic oligonucleotide
aggggagcaaggaguaucg

SEQ ID NO: 570659 - RNA, 19 nt, Artificial Sequence
  Description of Artificial Sequence: Synthetic oligonucleotide
ucuugauacugagaugcua

SEQ ID NO: 570660 - RNA, 19 nt, Artificial Sequence
  Description of Artificial Sequence: Synthetic oligonucleotide
agauguuagcagaaucuga

SEQ ID NO: 570661 - RNA, 19 nt, Artificial Sequence
  Description of Artificial Sequence: Synthetic oligonucleotide
agguuaagggaugauccca

SEQ ID NO: 570662 - RNA, 19 nt, Artificial Sequence
  Description of Artificial Sequence: Synthetic oligonucleotide
aacuagagacaaguguguu

SEQ ID NO: 570663 - RNA, 19 nt, Artificial Sequence
  Description of Artificial Sequence: Synthetic oligonucleotide
uaguguacccagagggguc

SEQ ID NO: 570664 - RNA, 19 nt, Artificial Sequence
  Description of Artificial Sequence: Synthetic oligonucleotide
gaaagucccacuagcgcca

SEQ ID NO: 570665 - RNA, 19 nt, Artificial Sequence
  Description of Artificial Sequence: Synthetic oligonucleotide
gaucagaaaggugaacucu

SEQ ID NO: 570666 - RNA, 19 nt, Artificial Sequence
  Description of Artificial Sequence: Synthetic oligonucleotide
uuauccugcccagauguua

SEQ ID NO: 570667 - RNA, 19 nt, Artificial Sequence
  Description of Artificial Sequence: Synthetic oligonucleotide
cacccauuaugaccacucg

SEQ ID NO: 570668 - RNA, 19 nt, Artificial Sequence
  Description of Artificial Sequence: Synthetic oligonucleotide
ucucggauugcaucuugau

SEQ ID NO: 570669 - RNA, 19 nt, Artificial Sequence
  Description of Artificial Sequence: Synthetic oligonucleotide
gguaacucaagaccaccac

SEQ ID NO: 570670 - RNA, 19 nt, Artificial Sequence
  Description of Artificial Sequence: Synthetic oligonucleotide
agggacgggagaaaugcag

SEQ ID NO: 570671 - RNA, 19 nt, Artificial Sequence
  Description of Artificial Sequence: Synthetic oligonucleotide
agcccuacucaggacaaag

SEQ ID NO: 570672 - RNA, 19 nt, Artificial Sequence
  Description of Artificial Sequence: Synthetic oligonucleotide
uauaccagaaggggagcaa

SEQ ID NO: 570673 - RNA, 19 nt, Artificial Sequence
  Description of Artificial Sequence: Synthetic oligonucleotide
cacauccgcaccacagaag

SEQ ID NO: 570674 - RNA, 19 nt, Artificial Sequence
  Description of Artificial Sequence: Synthetic oligonucleotide
gaccacucgcucaauccag

SEQ ID NO: 570675 - RNA, 19 nt, Artificial Sequence
  Description of Artificial Sequence: Synthetic oligonucleotide
guguaucagugaaacggag

SEQ ID NO: 570676 - RNA, 19 nt, Artificial Sequence
  Description of Artificial Sequence: Synthetic oligonucleotide
cacauagggauagaaaucu

SEQ ID NO: 570677 - RNA, 19 nt, Artificial Sequence
  Description of Artificial Sequence: Synthetic oligonucleotide
agacaaguguguugccaga

SEQ ID NO: 570678 - RNA, 19 nt, Artificial Sequence
  Description of Artificial Sequence: Synthetic oligonucleotide
ucuaugccgccagagcgcu

SEQ ID NO: 570679 - RNA, 19 nt, Artificial Sequence
  Description of Artificial Sequence: Synthetic oligonucleotide
aaagcccuacucaggacaa

SEQ ID NO: 570680 - RNA, 19 nt, Artificial Sequence
  Description of Artificial Sequence: Synthetic oligonucleotide
ugagugucccaaggggacc

SEQ ID NO: 570681 - RNA, 19 nt, Artificial Sequence
  Description of Artificial Sequence: Synthetic oligonucleotide
uaguuaaaugaguguccau

SEQ ID NO: 570682 - RNA, 19 nt, Artificial Sequence
  Description of Artificial Sequence: Synthetic oligonucleotide
acucaugucgagucugaua

SEQ ID NO: 570683 - RNA, 19 nt, Artificial Sequence
  Description of Artificial Sequence: Synthetic oligonucleotide
uccugaggguaguguaccc

SEQ ID NO: 570684 - RNA, 19 nt, Artificial Sequence
  Description of Artificial Sequence: Synthetic oligonucleotide
ggguuauugaagaugaaua

SEQ ID NO: 570685 - RNA, 19 nt, Artificial Sequence
  Description of Artificial Sequence: Synthetic oligonucleotide
aaccugcgaagaaagcccu

SEQ ID NO: 570686 - RNA, 19 nt, Artificial Sequence
  Description of Artificial Sequence: Synthetic oligonucleotide
cugauaguuaaaugagugu

SEQ ID NO: 570687 - RNA, 19 nt, Artificial Sequence
  Description of Artificial Sequence: Synthetic oligonucleotide
gaacgccgcaugcgcaucc

SEQ ID NO: 570688 - RNA, 19 nt, Artificial Sequence
  Description of Artificial Sequence: Synthetic oligonucleotide
aucagaaaggugaacucuu

SEQ ID NO: 570689 - RNA, 19 nt, Artificial Sequence
  Description of Artificial Sequence: Synthetic oligonucleotide
uuggguuauugaagaugaa

SEQ ID NO: 570690 - RNA, 19 nt, Artificial Sequence
  Description of Artificial Sequence: Synthetic oligonucleotide
acguucuaugccgccagag

SEQ ID NO: 570691 - RNA, 19 nt, Artificial Sequence
  Description of Artificial Sequence: Synthetic oligonucleotide
aggaaagacuaggucacaa

SEQ ID NO: 570692 - RNA, 19 nt, Artificial Sequence
  Description of Artificial Sequence: Synthetic oligonucleotide
augucauaccaaaccucuc

SEQ ID NO: 570693 - RNA, 19 nt, Artificial Sequence
  Description of Artificial Sequence: Synthetic oligonucleotide
aguguacccagaggggucu

SEQ ID NO: 570694 - RNA, 19 nt, Artificial Sequence
  Description of Artificial Sequence: Synthetic oligonucleotide
cucgcucaauccagacagg

SEQ ID NO: 570695 - RNA, 19 nt, Artificial Sequence
  Description of Artificial Sequence: Synthetic oligonucleotide
cuguuauccugcccagaug

SEQ ID NO: 570696 - RNA, 19 nt, Artificial Sequence
  Description of Artificial Sequence: Synthetic oligonucleotide
uguuguccccuguccacaa

SEQ ID NO: 570697 - RNA, 19 nt, Artificial Sequence
  Description of Artificial Sequence: Synthetic oligonucleotide
ucaugucgagucugauagu

SEQ ID NO: 570698 - RNA, 19 nt, Artificial Sequence
  Description of Artificial Sequence: Synthetic oligonucleotide
cuaucagcacagaggucuc

SEQ ID NO: 570699 - RNA, 19 nt, Artificial Sequence
  Description of Artificial Sequence: Synthetic oligonucleotide
ggaacucaugucgagucug

SEQ ID NO: 570700 - RNA, 19 nt, Artificial Sequence
  Description of Artificial Sequence: Synthetic oligonucleotide
ggcacaauugucccaccac

SEQ ID NO: 570701 - RNA, 19 nt, Artificial Sequence
  Description of Artificial Sequence: Synthetic oligonucleotide
aacucagaacaaguuccuu

SEQ ID NO: 570702 - RNA, 19 nt, Artificial Sequence
  Description of Artificial Sequence: Synthetic oligonucleotide
gaagaacgccgcaugcgca

SEQ ID NO: 570703 - RNA, 19 nt, Artificial Sequence
  Description of Artificial Sequence: Synthetic oligonucleotide
caaguuccuuggguuauug

SEQ ID NO: 570704 - RNA, 19 nt, Artificial Sequence
  Description of Artificial Sequence: Synthetic oligonucleotide
gaacuagagacaagugugu

SEQ ID NO: 570705 - RNA, 19 nt, Artificial Sequence
  Description of Artificial Sequence: Synthetic oligonucleotide
uagcgccaugcugagacac

SEQ ID NO: 570706 - RNA, 19 nt, Artificial Sequence
  Description of Artificial Sequence: Synthetic oligonucleotide
ucaaaguuaccggcaggua

SEQ ID NO: 570707 - RNA, 19 nt, Artificial Sequence
  Description of Artificial Sequence: Synthetic oligonucleotide
cugagucuugggaucagaa

SEQ ID NO: 570708 - RNA, 19 nt, Artificial Sequence
  Description of Artificial Sequence: Synthetic oligonucleotide
ggacguucuaugccgccag

SEQ ID NO: 570709 - RNA, 19 nt, Artificial Sequence
  Description of Artificial Sequence: Synthetic oligonucleotide
agcgcuguauuagcccauc

SEQ ID NO: 570710 - RNA, 19 nt, Artificial Sequence
  Description of Artificial Sequence: Synthetic oligonucleotide
ggaugaucccaguguauca

SEQ ID NO: 570711 - RNA, 19 nt, Artificial Sequence
  Description of Artificial Sequence: Synthetic oligonucleotide
gccauaaugcacagcgucc

SEQ ID NO: 570712 - RNA, 19 nt, Artificial Sequence
  Description of Artificial Sequence: Synthetic oligonucleotide
ccgugauucacugaaacca

SEQ ID NO: 570713 - RNA, 19 nt, Artificial Sequence
  Description of Artificial Sequence: Synthetic oligonucleotide
cagaugccacauugaugcc

SEQ ID NO: 570714 - RNA, 19 nt, Artificial Sequence
  Description of Artificial Sequence: Synthetic oligonucleotide
agggugaaucaggagugca

SEQ ID NO: 570715 - RNA, 19 nt, Artificial Sequence
  Description of Artificial Sequence: Synthetic oligonucleotide
ccaguguaucagugaaacg

SEQ ID NO: 570716 - RNA, 19 nt, Artificial Sequence
  Description of Artificial Sequence: Synthetic oligonucleotide
agcaucugauacaggguga

SEQ ID NO: 570717 - RNA, 19 nt, Artificial Sequence
  Description of Artificial Sequence: Synthetic oligonucleotide
ugccccuaucuucuuccaa

SEQ ID NO: 570718 - RNA, 19 nt, Artificial Sequence
  Description of Artificial Sequence: Synthetic oligonucleotide
ccagagcgcuguauuagcc

SEQ ID NO: 570719 - RNA, 19 nt, Artificial Sequence
  Description of Artificial Sequence: Synthetic oligonucleotide
aagggacgggagaaaugca

SEQ ID NO: 570720 - RNA, 19 nt, Artificial Sequence
  Description of Artificial Sequence: Synthetic oligonucleotide
gugauucacugaaaccaca

SEQ ID NO: 570721 - RNA, 19 nt, Artificial Sequence
  Description of Artificial Sequence: Synthetic oligonucleotide
ccuacucaggacaaaggga

SEQ ID NO: 570722 - RNA, 19 nt, Artificial Sequence
  Description of Artificial Sequence: Synthetic oligonucleotide
ggaguaucgcuggaacaag

SEQ ID NO: 570723 - RNA, 19 nt, Artificial Sequence
  Description of Artificial Sequence: Synthetic oligonucleotide
cucggauugcaucuugaua

SEQ ID NO: 570724 - RNA, 19 nt, Artificial Sequence
  Description of Artificial Sequence: Synthetic oligonucleotide
cuaaaggucacugccccua

SEQ ID NO: 570725 - RNA, 19 nt, Artificial Sequence
  Description of Artificial Sequence: Synthetic oligonucleotide
caugcgcauccagcgaggc

SEQ ID NO: 570726 - RNA, 19 nt, Artificial Sequence
  Description of Artificial Sequence: Synthetic oligonucleotide
cucccucaagggacgggag

SEQ ID NO: 570727 - RNA, 19 nt, Artificial Sequence
  Description of Artificial Sequence: Synthetic oligonucleotide
agaacgccgcaugcgcauc

SEQ ID NO: 570728 - RNA, 19 nt, Artificial Sequence
  Description of Artificial Sequence: Synthetic oligonucleotide
ccagguuugcgcacuauca

SEQ ID NO: 570729 - RNA, 19 nt, Artificial Sequence
  Description of Artificial Sequence: Synthetic oligonucleotide
cgugauucacugaaaccac

SEQ ID NO: 570730 - RNA, 19 nt, Artificial Sequence
  Description of Artificial Sequence: Synthetic oligonucleotide
gguauaccagaaggggagc

SEQ ID NO: 570731 - RNA, 19 nt, Artificial Sequence
  Description of Artificial Sequence: Synthetic oligonucleotide
gccagagcgcuguauuagc

SEQ ID NO: 570732 - RNA, 19 nt, Artificial Sequence
  Description of Artificial Sequence: Synthetic oligonucleotide
aggucacaagaggaauuca

SEQ ID NO: 570733 - RNA, 19 nt, Artificial Sequence
  Description of Artificial Sequence: Synthetic oligonucleotide
gaaucccuuccuggugagc

SEQ ID NO: 570734 - RNA, 19 nt, Artificial Sequence
  Description of Artificial Sequence: Synthetic oligonucleotide
cacuaucagcacagagguc

SEQ ID NO: 570735 - RNA, 19 nt, Artificial Sequence
  Description of Artificial Sequence: Synthetic oligonucleotide
aucuugauacugagaugcu

SEQ ID NO: 570736 - RNA, 19 nt, Artificial Sequence
  Description of Artificial Sequence: Synthetic oligonucleotide
aguuaccggcagguacagg

SEQ ID NO: 570737 - RNA, 19 nt, Artificial Sequence
  Description of Artificial Sequence: Synthetic oligonucleotide
ccagccgccauaaugcaca

SEQ ID NO: 570738 - RNA, 19 nt, Artificial Sequence
  Description of Artificial Sequence: Synthetic oligonucleotide
auugucccaccacguugga

SEQ ID NO: 570739 - RNA, 19 nt, Artificial Sequence
  Description of Artificial Sequence: Synthetic oligonucleotide
cagacaggcgucucaaggu

SEQ ID NO: 570740 - RNA, 19 nt, Artificial Sequence
  Description of Artificial Sequence: Synthetic oligonucleotide
gcgcacuaucagcacagag

SEQ ID NO: 570741 - RNA, 19 nt, Artificial Sequence
  Description of Artificial Sequence: Synthetic oligonucleotide
cuggacgcacaugaucauc

SEQ ID NO: 570742 - RNA, 19 nt, Artificial Sequence
  Description of Artificial Sequence: Synthetic oligonucleotide
ggcaucucggauugcaucu

SEQ ID NO: 570743 - RNA, 19 nt, Artificial Sequence
  Description of Artificial Sequence: Synthetic oligonucleotide
cacucgcucaauccagaca

SEQ ID NO: 570744 - RNA, 19 nt, Artificial Sequence
  Description of Artificial Sequence: Synthetic oligonucleotide
auccccaagcaggaacuga

SEQ ID NO: 570745 - RNA, 19 nt, Artificial Sequence
  Description of Artificial Sequence: Synthetic oligonucleotide
cauuugguaccagcgcaca

SEQ ID NO: 570746 - RNA, 19 nt, Artificial Sequence
  Description of Artificial Sequence: Synthetic oligonucleotide
ccagcgaggcacaauuguc

SEQ ID NO: 570747 - RNA, 19 nt, Artificial Sequence
  Description of Artificial Sequence: Synthetic oligonucleotide
cucucgccgcccagugucc

SEQ ID NO: 570748 - RNA, 19 nt, Artificial Sequence
  Description of Artificial Sequence: Synthetic oligonucleotide
cagggauacuguucaaagu

SEQ ID NO: 570749 - RNA, 19 nt, Artificial Sequence
  Description of Artificial Sequence: Synthetic oligonucleotide
gacguucuaugccgccaga

SEQ ID NO: 570750 - RNA, 19 nt, Artificial Sequence
  Description of Artificial Sequence: Synthetic oligonucleotide
gcucucgccgcccaguguc

SEQ ID NO: 570751 - RNA, 19 nt, Artificial Sequence
  Description of Artificial Sequence: Synthetic oligonucleotide
aaagucccacuagcgccau

SEQ ID NO: 570752 - RNA, 19 nt, Artificial Sequence
  Description of Artificial Sequence: Synthetic oligonucleotide
ccauuaugaccacucgcuc

SEQ ID NO: 570753 - RNA, 19 nt, Artificial Sequence
  Description of Artificial Sequence: Synthetic oligonucleotide
cguucuaugccgccagagc

SEQ ID NO: 570754 - RNA, 19 nt, Artificial Sequence
  Description of Artificial Sequence: Synthetic oligonucleotide
guuaagggaugaucccagu

SEQ ID NO: 570755 - RNA, 19 nt, Artificial Sequence
  Description of Artificial Sequence: Synthetic oligonucleotide
ccgcccaguguccaagugg

SEQ ID NO: 570756 - RNA, 19 nt, Artificial Sequence
  Description of Artificial Sequence: Synthetic oligonucleotide
cauccagcgaggcacaauu

SEQ ID NO: 570757 - RNA, 19 nt, Artificial Sequence
  Description of Artificial Sequence: Synthetic oligonucleotide
cuaggucacaagaggaauu

SEQ ID NO: 570758 - RNA, 19 nt, Artificial Sequence
  Description of Artificial Sequence: Synthetic oligonucleotide
caagugggcaugagcucga

SEQ ID NO: 570759 - RNA, 19 nt, Artificial Sequence
  Description of Artificial Sequence: Synthetic oligonucleotide
ggcgacuuucaggggaucc

SEQ ID NO: 570760 - RNA, 19 nt, Artificial Sequence
  Description of Artificial Sequence: Synthetic oligonucleotide
ucgccgcccaguguccaag

SEQ ID NO: 570761 - RNA, 19 nt, Artificial Sequence
  Description of Artificial Sequence: Synthetic oligonucleotide
aacgccgcaugcgcaucca

SEQ ID NO: 570762 - RNA, 19 nt, Artificial Sequence
  Description of Artificial Sequence: Synthetic oligonucleotide
cagucugaagaacgccgca

SEQ ID NO: 570763 - RNA, 19 nt, Artificial Sequence
  Description of Artificial Sequence: Synthetic oligonucleotide
ucgcuggaacaaggcaucu

SEQ ID NO: 570764 - RNA, 19 nt, Artificial Sequence
  Description of Artificial Sequence: Synthetic oligonucleotide
agcacccauuaugaccacu

SEQ ID NO: 570765 - RNA, 19 nt, Artificial Sequence
  Description of Artificial Sequence: Synthetic oligonucleotide
cucuaucuugaguguccca

SEQ ID NO: 570766 - RNA, 19 nt, Artificial Sequence
  Description of Artificial Sequence: Synthetic oligonucleotide
ccucgggucuucacaaaug

SEQ ID NO: 570767 - RNA, 19 nt, Artificial Sequence
  Description of Artificial Sequence: Synthetic oligonucleotide
gcccuacucaggacaaagg

SEQ ID NO: 570768 - RNA, 19 nt, Artificial Sequence
  Description of Artificial Sequence: Synthetic oligonucleotide
gcacccauuaugaccacuc

SEQ ID NO: 570769 - RNA, 19 nt, Artificial Sequence
  Description of Artificial Sequence: Synthetic oligonucleotide
gaccaccccucauaacugu

SEQ ID NO: 570770 - RNA, 19 nt, Artificial Sequence
  Description of Artificial Sequence: Synthetic oligonucleotide
gccagguuugcgcacuauc

SEQ ID NO: 570771 - RNA, 19 nt, Artificial Sequence
  Description of Artificial Sequence: Synthetic oligonucleotide
auccagcgaggcacaauug

SEQ ID NO: 570772 - RNA, 19 nt, Artificial Sequence
  Description of Artificial Sequence: Synthetic oligonucleotide
ugcgcacuaucagcacaga

SEQ ID NO: 570773 - RNA, 19 nt, Artificial Sequence
  Description of Artificial Sequence: Synthetic oligonucleotide
guccccuguccacaaagcu

SEQ ID NO: 570774 - RNA, 19 nt, Artificial Sequence
  Description of Artificial Sequence: Synthetic oligonucleotide
accacucgcucaauccaga

SEQ ID NO: 570775 - RNA, 19 nt, Artificial Sequence
  Description of Artificial Sequence: Synthetic oligonucleotide
caugucgagucugauaguu

SEQ ID NO: 570776 - RNA, 19 nt, Artificial Sequence
  Description of Artificial Sequence: Synthetic oligonucleotide
cgccaugugcacauauaag

SEQ ID NO: 570777 - RNA, 19 nt, Artificial Sequence
  Description of Artificial Sequence: Synthetic oligonucleotide
acucuuaaguagggucaaa

SEQ ID NO: 570778 - RNA, 19 nt, Artificial Sequence
  Description of Artificial Sequence: Synthetic oligonucleotide
uuaugaccacucgcucaau

SEQ ID NO: 570779 - RNA, 19 nt, Artificial Sequence
  Description of Artificial Sequence: Synthetic oligonucleotide
cauccgcaccacagaagga

SEQ ID NO: 570780 - RNA, 19 nt, Artificial Sequence
  Description of Artificial Sequence: Synthetic oligonucleotide
cucgaaagaauggcuggua

SEQ ID NO: 570781 - RNA, 19 nt, Artificial Sequence
  Description of Artificial Sequence: Synthetic oligonucleotide
ccccucauaacugugugga

SEQ ID NO: 570782 - RNA, 19 nt, Artificial Sequence
  Description of Artificial Sequence: Synthetic oligonucleotide
cgcaugcgcauccagcgag

SEQ ID NO: 570783 - RNA, 19 nt, Artificial Sequence
  Description of Artificial Sequence: Synthetic oligonucleotide
gcaugaauacacagggugu

SEQ ID NO: 570784 - RNA, 19 nt, Artificial Sequence
  Description of Artificial Sequence: Synthetic oligonucleotide
ucucgccgcccagugucca

SEQ ID NO: 570785 - RNA, 19 nt, Artificial Sequence
  Description of Artificial Sequence: Synthetic oligonucleotide
augucgagucugauaguua

SEQ ID NO: 570786 - RNA, 19 nt, Artificial Sequence
  Description of Artificial Sequence: Synthetic oligonucleotide
aagcccuacucaggacaaa

SEQ ID NO: 570787 - RNA, 19 nt, Artificial Sequence
  Description of Artificial Sequence: Synthetic oligonucleotide
cuagcgccaugcugagaca

SEQ ID NO: 570788 - RNA, 19 nt, Artificial Sequence
  Description of Artificial Sequence: Synthetic oligonucleotide
aagugggcaugagcucgaa

SEQ ID NO: 570789 - RNA, 19 nt, Artificial Sequence
  Description of Artificial Sequence: Synthetic oligonucleotide
ccuaggacagcccuguuau

SEQ ID NO: 570790 - RNA, 19 nt, Artificial Sequence
  Description of Artificial Sequence: Synthetic oligonucleotide
aggggucucaugacaggaa

SEQ ID NO: 570791 - RNA, 19 nt, Artificial Sequence
  Description of Artificial Sequence: Synthetic oligonucleotide
gcaugcgcauccagcgagg

SEQ ID NO: 570792 - RNA, 19 nt, Artificial Sequence
  Description of Artificial Sequence: Synthetic oligonucleotide
ggacgcacaugaucaucuc

SEQ ID NO: 570793 - RNA, 19 nt, Artificial Sequence
  Description of Artificial Sequence: Synthetic oligonucleotide
ggugaccgugauucacuga

SEQ ID NO: 570794 - RNA, 19 nt, Artificial Sequence
  Description of Artificial Sequence: Synthetic oligonucleotide
aggcgacuuucaggggauc

SEQ ID NO: 570795 - RNA, 19 nt, Artificial Sequence
  Description of Artificial Sequence: Synthetic oligonucleotide
agcgccaugcugagacaca

SEQ ID NO: 570796 - RNA, 19 nt, Artificial Sequence
  Description of Artificial Sequence: Synthetic oligonucleotide
agaggaauucagagcccua

SEQ ID NO: 570797 - RNA, 19 nt, Artificial Sequence
  Description of Artificial Sequence: Synthetic oligonucleotide
gccagagaaugagaacuga

SEQ ID NO: 570798 - RNA, 19 nt, Artificial Sequence
  Description of Artificial Sequence: Synthetic oligonucleotide
gcaucugauacagggugaa

SEQ ID NO: 570799 - RNA, 19 nt, Artificial Sequence
  Description of Artificial Sequence: Synthetic oligonucleotide
cuaugccgccagagcgcug

SEQ ID NO: 570800 - RNA, 19 nt, Artificial Sequence
  Description of Artificial Sequence: Synthetic oligonucleotide
gucgccaugugcacauaua

SEQ ID NO: 570801 - RNA, 19 nt, Artificial Sequence
  Description of Artificial Sequence: Synthetic oligonucleotide
gcaaggaguaucgcuggaa

SEQ ID NO: 570802 - RNA, 19 nt, Artificial Sequence
  Description of Artificial Sequence: Synthetic oligonucleotide
gcuugauagaagaggguau

SEQ ID NO: 570803 - RNA, 19 nt, Artificial Sequence
  Description of Artificial Sequence: Synthetic oligonucleotide
gggacguucuaugccgcca

SEQ ID NO: 570804 - RNA, 19 nt, Artificial Sequence
  Description of Artificial Sequence: Synthetic oligonucleotide
ccccuaucuucuuccaaga

SEQ ID NO: 570805 - RNA, 19 nt, Artificial Sequence
  Description of Artificial Sequence: Synthetic oligonucleotide
acguuggaacacagggaua

SEQ ID NO: 570806 - RNA, 19 nt, Artificial Sequence
  Description of Artificial Sequence: Synthetic oligonucleotide
augccagguuugcgcacua

SEQ ID NO: 570807 - RNA, 19 nt, Artificial Sequence
  Description of Artificial Sequence: Synthetic oligonucleotide
cugcgaagaaagcccuacu

SEQ ID NO: 570808 - RNA, 19 nt, Artificial Sequence
  Description of Artificial Sequence: Synthetic oligonucleotide
gcgaggcacaauuguccca

SEQ ID NO: 570809 - RNA, 19 nt, Artificial Sequence
  Description of Artificial Sequence: Synthetic oligonucleotide
ggggagcaaggaguaucgc

SEQ ID NO: 570810 - RNA, 19 nt, Artificial Sequence
  Description of Artificial Sequence: Synthetic oligonucleotide
ccuguuauccugcccagau

SEQ ID NO: 570811 - RNA, 19 nt, Artificial Sequence
  Description of Artificial Sequence: Synthetic oligonucleotide
cgccagagcgcuguauuag

SEQ ID NO: 570812 - RNA, 19 nt, Artificial Sequence
  Description of Artificial Sequence: Synthetic oligonucleotide
ugccgccagagcgcuguau

SEQ ID NO: 570813 - RNA, 19 nt, Artificial Sequence
  Description of Artificial Sequence: Synthetic oligonucleotide
gccgcccaguguccaagug

SEQ ID NO: 570814 - RNA, 19 nt, Artificial Sequence
  Description of Artificial Sequence: Synthetic oligonucleotide
caggcgacuuucaggggau

SEQ ID NO: 570815 - RNA, 19 nt, Artificial Sequence
  Description of Artificial Sequence: Synthetic oligonucleotide
ccauaaugcacagcguccu

SEQ ID NO: 570816 - RNA, 19 nt, Artificial Sequence
  Description of Artificial Sequence: Synthetic oligonucleotide
gcucgaaagaauggcuggu

SEQ ID NO: 570817 - RNA, 19 nt, Artificial Sequence
  Description of Artificial Sequence: Synthetic oligonucleotide
ccagcgcacaagcagcucu

SEQ ID NO: 570818 - RNA, 19 nt, Artificial Sequence
  Description of Artificial Sequence: Synthetic oligonucleotide
ccacaacucauuucucuau

SEQ ID NO: 570819 - RNA, 19 nt, Artificial Sequence
  Description of Artificial Sequence: Synthetic oligonucleotide
cccuaggacagcccuguua

SEQ ID NO: 570820 - RNA, 19 nt, Artificial Sequence
  Description of Artificial Sequence: Synthetic oligonucleotide
gcgacuuucaggggauccu

SEQ ID NO: 570821 - RNA, 19 nt, Artificial Sequence
  Description of Artificial Sequence: Synthetic oligonucleotide
caucugauacagggugaau

SEQ ID NO: 570822 - RNA, 19 nt, Artificial Sequence
  Description of Artificial Sequence: Synthetic oligonucleotide
gagcgcuguauuagcccau

SEQ ID NO: 570823 - RNA, 19 nt, Artificial Sequence
  Description of Artificial Sequence: Synthetic oligonucleotide
cacuagcgccaugcugaga

SEQ ID NO: 570824 - RNA, 19 nt, Artificial Sequence
  Description of Artificial Sequence: Synthetic oligonucleotide
gccgccagagcgcuguauu

SEQ ID NO: 570825 - RNA, 19 nt, Artificial Sequence
  Description of Artificial Sequence: Synthetic oligonucleotide
augccgccagagcgcugua

SEQ ID NO: 570826 - RNA, 19 nt, Artificial Sequence
  Description of Artificial Sequence: Synthetic oligonucleotide
gcgcacaagcagcucuggu

SEQ ID NO: 570827 - RNA, 19 nt, Artificial Sequence
  Description of Artificial Sequence: Synthetic oligonucleotide
cgcacaagcagcucugguu

SEQ ID NO: 570828 - RNA, 19 nt, Artificial Sequence
  Description of Artificial Sequence: Synthetic oligonucleotide
ccgccagagcgcuguauua

SEQ ID NO: 570829 - RNA, 19 nt, Artificial Sequence
  Description of Artificial Sequence: Synthetic oligonucleotide
cccuaucuucuuccaagau

SEQ ID NO: 570830 - RNA, 19 nt, Artificial Sequence
  Description of Artificial Sequence: Synthetic oligonucleotide
gcgccaugcugagacacau

SEQ ID NO: 570831 - RNA, 19 nt, Artificial Sequence
  Description of Artificial Sequence: Synthetic oligonucleotide
ccuggacgcacaugaucau

SEQ ID NO: 570832 - RNA, 19 nt, Artificial Sequence
  Description of Artificial Sequence: Synthetic oligonucleotide
ccgccauaaugcacagcgu

SEQ ID NO: 570833 - RNA, 19 nt, Artificial Sequence
  Description of Artificial Sequence: Synthetic oligonucleotide
gccaucccuggacgcacau

SEQ ID NO: 570834 - RNA, 19 nt, Artificial Sequence
  Description of Artificial Sequence: Synthetic oligonucleotide
gcauccagcgaggcacaau

SEQ ID NO: 570835 - RNA, 19 nt, Artificial Sequence
  Description of Artificial Sequence: Synthetic oligonucleotide
cgacuuucaggggauccuu

SEQ ID NO: 570836 - RNA, 19 nt, Artificial Sequence
  Description of Artificial Sequence: Synthetic oligonucleotide
cgccgcccaguguccaagu

SEQ ID NO: 570837 - RNA, 19 nt, Artificial Sequence
  Description of Artificial Sequence: Synthetic oligonucleotide
agaaauaacugauagagcc

SEQ ID NO: 570838 - RNA, 19 nt, Artificial Sequence
  Description of Artificial Sequence: Synthetic oligonucleotide
aaagauuaaggucauauac

SEQ ID NO: 570839 - RNA, 19 nt, Artificial Sequence
  Description of Artificial Sequence: Synthetic oligonucleotide
agugaaacagcauugaucc

SEQ ID NO: 570840 - RNA, 19 nt, Artificial Sequence
  Description of Artificial Sequence: Synthetic oligonucleotide
aaauuuaucaaauaugcug

SEQ ID NO: 570841 - RNA, 19 nt, Artificial Sequence
  Description of Artificial Sequence: Synthetic oligonucleotide
aacuauaggacccaugggc

SEQ ID NO: 570842 - RNA, 19 nt, Artificial Sequence
  Description of Artificial Sequence: Synthetic oligonucleotide
aauuaauguauacuuagag

SEQ ID NO: 570843 - RNA, 19 nt, Artificial Sequence
  Description of Artificial Sequence: Synthetic oligonucleotide
auuacgauggcugagagcc

SEQ ID NO: 570844 - RNA, 19 nt, Artificial Sequence
  Description of Artificial Sequence: Synthetic oligonucleotide
ucauauacaaucaaucugc

SEQ ID NO: 570845 - RNA, 19 nt, Artificial Sequence
  Description of Artificial Sequence: Synthetic oligonucleotide
aacauaauuagcugccgcc

SEQ ID NO: 570846 - RNA, 19 nt, Artificial Sequence
  Description of Artificial Sequence: Synthetic oligonucleotide
uccauugucggacugaugg

SEQ ID NO: 570847 - RNA, 19 nt, Artificial Sequence
  Description of Artificial Sequence: Synthetic oligonucleotide
agagaaauaacugauagag

SEQ ID NO: 570848 - RNA, 19 nt, Artificial Sequence
  Description of Artificial Sequence: Synthetic oligonucleotide
ucuacuauauuuuaacuga

SEQ ID NO: 570849 - RNA, 19 nt, Artificial Sequence
  Description of Artificial Sequence: Synthetic oligonucleotide
uguguuuaaagauuuaaga

SEQ ID NO: 570850 - RNA, 19 nt, Artificial Sequence
  Description of Artificial Sequence: Synthetic oligonucleotide
aaucgugagacauaccuag

SEQ ID NO: 570851 - RNA, 19 nt, Artificial Sequence
  Description of Artificial Sequence: Synthetic oligonucleotide
aaaguuuccauugucggac

SEQ ID NO: 570852 - RNA, 19 nt, Artificial Sequence
  Description of Artificial Sequence: Synthetic oligonucleotide
aaauuagagagcuucaaau

SEQ ID NO: 570853 - RNA, 19 nt, Artificial Sequence
  Description of Artificial Sequence: Synthetic oligonucleotide
gaggauuugaagcaaacag

SEQ ID NO: 570854 - RNA, 19 nt, Artificial Sequence
  Description of Artificial Sequence: Synthetic oligonucleotide
uccuauaggcccaauaggg

SEQ ID NO: 570855 - RNA, 19 nt, Artificial Sequence
  Description of Artificial Sequence: Synthetic oligonucleotide
aacugauagagccaaaaga

SEQ ID NO: 570856 - RNA, 19 nt, Artificial Sequence
  Description of Artificial Sequence: Synthetic oligonucleotide
aguguuugcaugcaacacc

SEQ ID NO: 570857 - RNA, 19 nt, Artificial Sequence
  Description of Artificial Sequence: Synthetic oligonucleotide
acuauauuuuaacugaacu

SEQ ID NO: 570858 - RNA, 19 nt, Artificial Sequence
  Description of Artificial Sequence: Synthetic oligonucleotide
auuaaauuacuaucauagg

SEQ ID NO: 570859 - RNA, 19 nt, Artificial Sequence
  Description of Artificial Sequence: Synthetic oligonucleotide
aauacuucuagauguacaa

SEQ ID NO: 570860 - RNA, 19 nt, Artificial Sequence
  Description of Artificial Sequence: Synthetic oligonucleotide
uguacaaauaauagcaaaa

SEQ ID NO: 570861 - RNA, 19 nt, Artificial Sequence
  Description of Artificial Sequence: Synthetic oligonucleotide
ucaaaaugcauauuagggu

SEQ ID NO: 570862 - RNA, 19 nt, Artificial Sequence
  Description of Artificial Sequence: Synthetic oligonucleotide
auaaaaguaaagcacaauu

SEQ ID NO: 570863 - RNA, 19 nt, Artificial Sequence
  Description of Artificial Sequence: Synthetic oligonucleotide
uguacaacuccaauugugc

SEQ ID NO: 570864 - RNA, 19 nt, Artificial Sequence
  Description of Artificial Sequence: Synthetic oligonucleotide
auuaauguauacuuagaga

SEQ ID NO: 570865 - RNA, 19 nt, Artificial Sequence
  Description of Artificial Sequence: Synthetic oligonucleotide
uuuaugaaccccauggcgu

SEQ ID NO: 570866 - RNA, 19 nt, Artificial Sequence
  Description of Artificial Sequence: Synthetic oligonucleotide
caugcaacaccuuugagug

SEQ ID NO: 570867 - RNA, 19 nt, Artificial Sequence
  Description of Artificial Sequence: Synthetic oligonucleotide
ugcuggaucugcauuaacg

SEQ ID NO: 570868 - RNA, 19 nt, Artificial Sequence
  Description of Artificial Sequence: Synthetic oligonucleotide
ggcauuacuacacugaucc

SEQ ID NO: 570869 - RNA, 19 nt, Artificial Sequence
  Description of Artificial Sequence: Synthetic oligonucleotide
uuugacauggccgcaagcg

SEQ ID NO: 570870 - RNA, 19 nt, Artificial Sequence
  Description of Artificial Sequence: Synthetic oligonucleotide
uauuagggucucuucaugg

SEQ ID NO: 570871 - RNA, 19 nt, Artificial Sequence
  Description of Artificial Sequence: Synthetic oligonucleotide
uccaccuuaaaaugcaucc

SEQ ID NO: 570872 - RNA, 19 nt, Artificial Sequence
  Description of Artificial Sequence: Synthetic oligonucleotide
acaaaaucgugagacauac

SEQ ID NO: 570873 - RNA, 19 nt, Artificial Sequence
  Description of Artificial Sequence: Synthetic oligonucleotide
uccaguaaguuacauuucc

SEQ ID NO: 570874 - RNA, 19 nt, Artificial Sequence
  Description of Artificial Sequence: Synthetic oligonucleotide
aauaucuccauucuacauu

SEQ ID NO: 570875 - RNA, 19 nt, Artificial Sequence
  Description of Artificial Sequence: Synthetic oligonucleotide
aaaguaaagcacaauuuug

SEQ ID NO: 570876 - RNA, 19 nt, Artificial Sequence
  Description of Artificial Sequence: Synthetic oligonucleotide
agccaaaagauacacuuuc

SEQ ID NO: 570877 - RNA, 19 nt, Artificial Sequence
  Description of Artificial Sequence: Synthetic oligonucleotide
aaucugcaacuguugacac

SEQ ID NO: 570878 - RNA, 19 nt, Artificial Sequence
  Description of Artificial Sequence: Synthetic oligonucleotide
aaauucgggagcuguggac

SEQ ID NO: 570879 - RNA, 19 nt, Artificial Sequence
  Description of Artificial Sequence: Synthetic oligonucleotide
uuagcugccgccauggugu

SEQ ID NO: 570880 - RNA, 19 nt, Artificial Sequence
  Description of Artificial Sequence: Synthetic oligonucleotide
aauuagagagcuucaaaua

SEQ ID NO: 570881 - RNA, 19 nt, Artificial Sequence
  Description of Artificial Sequence: Synthetic oligonucleotide
ggaacuauaggacccaugg

SEQ ID NO: 570882 - RNA, 19 nt, Artificial Sequence
  Description of Artificial Sequence: Synthetic oligonucleotide
aaaucuuacagcauuugcu

SEQ ID NO: 570883 - RNA, 19 nt, Artificial Sequence
  Description of Artificial Sequence: Synthetic oligonucleotide
uguacuaaagaugcuagca

SEQ ID NO: 570884 - RNA, 19 nt, Artificial Sequence
  Description of Artificial Sequence: Synthetic oligonucleotide
aacugugaaggcugauacc

SEQ ID NO: 570885 - RNA, 19 nt, Artificial Sequence
  Description of Artificial Sequence: Synthetic oligonucleotide
uacuucuagauguacaacu

SEQ ID NO: 570886 - RNA, 19 nt, Artificial Sequence
  Description of Artificial Sequence: Synthetic oligonucleotide
cuuuuagauuuauaaguag

SEQ ID NO: 570887 - RNA, 19 nt, Artificial Sequence
  Description of Artificial Sequence: Synthetic oligonucleotide
aauucgggagcuguggacg

SEQ ID NO: 570888 - RNA, 19 nt, Artificial Sequence
  Description of Artificial Sequence: Synthetic oligonucleotide
aaauuacuaucauaggcua

SEQ ID NO: 570889 - RNA, 19 nt, Artificial Sequence
  Description of Artificial Sequence: Synthetic oligonucleotide
uauaaguagacagauuuaa

SEQ ID NO: 570890 - RNA, 19 nt, Artificial Sequence
  Description of Artificial Sequence: Synthetic oligonucleotide
uuugcaugcaacaccuuug

SEQ ID NO: 570891 - RNA, 19 nt, Artificial Sequence
  Description of Artificial Sequence: Synthetic oligonucleotide
uguauacuuagagaaacca

SEQ ID NO: 570892 - RNA, 19 nt, Artificial Sequence
  Description of Artificial Sequence: Synthetic oligonucleotide
uaacugauagagccaaaag

SEQ ID NO: 570893 - RNA, 19 nt, Artificial Sequence
  Description of Artificial Sequence: Synthetic oligonucleotide
uacuagaggagcuaccgcc

SEQ ID NO: 570894 - RNA, 19 nt, Artificial Sequence
  Description of Artificial Sequence: Synthetic oligonucleotide
agauuaaggucauauacaa

SEQ ID NO: 570895 - RNA, 19 nt, Artificial Sequence
  Description of Artificial Sequence: Synthetic oligonucleotide
aauugugcuuacuguacug

SEQ ID NO: 570896 - RNA, 19 nt, Artificial Sequence
  Description of Artificial Sequence: Synthetic oligonucleotide
uuuuaccacaaauuagaga

SEQ ID NO: 570897 - RNA, 19 nt, Artificial Sequence
  Description of Artificial Sequence: Synthetic oligonucleotide
cucggauuugacauggccg

SEQ ID NO: 570898 - RNA, 19 nt, Artificial Sequence
  Description of Artificial Sequence: Synthetic oligonucleotide
aagauuaaggucauauaca

SEQ ID NO: 570899 - RNA, 19 nt, Artificial Sequence
  Description of Artificial Sequence: Synthetic oligonucleotide
uuuguguguuuaaagauuu

SEQ ID NO: 570900 - RNA, 19 nt, Artificial Sequence
  Description of Artificial Sequence: Synthetic oligonucleotide
gaugcuagcaacauaauua

SEQ ID NO: 570901 - RNA, 19 nt, Artificial Sequence
  Description of Artificial Sequence: Synthetic oligonucleotide
aauggccgcauugaugucg

SEQ ID NO: 570902 - RNA, 19 nt, Artificial Sequence
  Description of Artificial Sequence: Synthetic oligonucleotide
aaggauugggcaguggauc

SEQ ID NO: 570903 - RNA, 19 nt, Artificial Sequence
  Description of Artificial Sequence: Synthetic oligonucleotide
uacuaaagaugcuagcaac

SEQ ID NO: 570904 - RNA, 19 nt, Artificial Sequence
  Description of Artificial Sequence: Synthetic oligonucleotide
ucugcauuaacgcuugcau

SEQ ID NO: 570905 - RNA, 19 nt, Artificial Sequence
  Description of Artificial Sequence: Synthetic oligonucleotide
aaugugacacuguaaguuu

SEQ ID NO: 570906 - RNA, 19 nt, Artificial Sequence
  Description of Artificial Sequence: Synthetic oligonucleotide
aggauaaacauuucuacua

SEQ ID NO: 570907 - RNA, 19 nt, Artificial Sequence
  Description of Artificial Sequence: Synthetic oligonucleotide
ucggauuugacauggccgc

SEQ ID NO: 570908 - RNA, 19 nt, Artificial Sequence
  Description of Artificial Sequence: Synthetic oligonucleotide
acuaucauaggcuaauguu

SEQ ID NO: 570909 - RNA, 19 nt, Artificial Sequence
  Description of Artificial Sequence: Synthetic oligonucleotide
uaauuacgauggcugagag

SEQ ID NO: 570910 - RNA, 19 nt, Artificial Sequence
  Description of Artificial Sequence: Synthetic oligonucleotide
ucagagauucuacaguaau

SEQ ID NO: 570911 - RNA, 19 nt, Artificial Sequence
  Description of Artificial Sequence: Synthetic oligonucleotide
gaagcuuggaaugaggcca

SEQ ID NO: 570912 - RNA, 19 nt, Artificial Sequence
  Description of Artificial Sequence: Synthetic oligonucleotide
ucacgauuuaugaacccca

SEQ ID NO: 570913 - RNA, 19 nt, Artificial Sequence
  Description of Artificial Sequence: Synthetic oligonucleotide
uacuauauuuuaacugaac

SEQ ID NO: 570914 - RNA, 19 nt, Artificial Sequence
  Description of Artificial Sequence: Synthetic oligonucleotide
uguugacacaaugugacac

SEQ ID NO: 570915 - RNA, 19 nt, Artificial Sequence
  Description of Artificial Sequence: Synthetic oligonucleotide
auucaaaucagagaaggaa

SEQ ID NO: 570916 - RNA, 19 nt, Artificial Sequence
  Description of Artificial Sequence: Synthetic oligonucleotide
uacuaucauaggcuaaugu

SEQ ID NO: 570917 - RNA, 19 nt, Artificial Sequence
  Description of Artificial Sequence: Synthetic oligonucleotide
acagaaauguaauuacgau

SEQ ID NO: 570918 - RNA, 19 nt, Artificial Sequence
  Description of Artificial Sequence: Synthetic oligonucleotide
uguaauuacgauggcugag

SEQ ID NO: 570919 - RNA, 19 nt, Artificial Sequence
  Description of Artificial Sequence: Synthetic oligonucleotide
ucucggauuugacauggcc

SEQ ID NO: 570920 - RNA, 19 nt, Artificial Sequence
  Description of Artificial Sequence: Synthetic oligonucleotide
ucuacaaaaucgugagaca

SEQ ID NO: 570921 - RNA, 19 nt, Artificial Sequence
  Description of Artificial Sequence: Synthetic oligonucleotide
aacgcuugcaucgcucucg

SEQ ID NO: 570922 - RNA, 19 nt, Artificial Sequence
  Description of Artificial Sequence: Synthetic oligonucleotide
agggacuccaccuuaaaau

SEQ ID NO: 570923 - RNA, 19 nt, Artificial Sequence
  Description of Artificial Sequence: Synthetic oligonucleotide
cuucuagauguacaacucc

SEQ ID NO: 570924 - RNA, 19 nt, Artificial Sequence
  Description of Artificial Sequence: Synthetic oligonucleotide
ugaugguaucaguagcugc

SEQ ID NO: 570925 - RNA, 19 nt, Artificial Sequence
  Description of Artificial Sequence: Synthetic oligonucleotide
acagauuuaaaagaaucaa

SEQ ID NO: 570926 - RNA, 19 nt, Artificial Sequence
  Description of Artificial Sequence: Synthetic oligonucleotide
uucacgauuuaugaacccc

SEQ ID NO: 570927 - RNA, 19 nt, Artificial Sequence
  Description of Artificial Sequence: Synthetic oligonucleotide
auaggcuaauguuuaaaau

SEQ ID NO: 570928 - RNA, 19 nt, Artificial Sequence
  Description of Artificial Sequence: Synthetic oligonucleotide
gacauaccuagcuucagga

SEQ ID NO: 570929 - RNA, 19 nt, Artificial Sequence
  Description of Artificial Sequence: Synthetic oligonucleotide
guauacuuagagaaaccag

SEQ ID NO: 570930 - RNA, 19 nt, Artificial Sequence
  Description of Artificial Sequence: Synthetic oligonucleotide
uggagcgaagcuuggaaug

SEQ ID NO: 570931 - RNA, 19 nt, Artificial Sequence
  Description of Artificial Sequence: Synthetic oligonucleotide
auguauacuuagagaaacc

SEQ ID NO: 570932 - RNA, 19 nt, Artificial Sequence
  Description of Artificial Sequence: Synthetic oligonucleotide
auaucuccauucuacauua

SEQ ID NO: 570933 - RNA, 19 nt, Artificial Sequence
  Description of Artificial Sequence: Synthetic oligonucleotide
ugacauggccgcaagcgug

SEQ ID NO: 570934 - RNA, 19 nt, Artificial Sequence
  Description of Artificial Sequence: Synthetic oligonucleotide
uguucacccaacugugaag

SEQ ID NO: 570935 - RNA, 19 nt, Artificial Sequence
  Description of Artificial Sequence: Synthetic oligonucleotide
uaauaucuccauucuacau

SEQ ID NO: 570936 - RNA, 19 nt, Artificial Sequence
  Description of Artificial Sequence: Synthetic oligonucleotide
ucgugagacauaccuagcu

SEQ ID NO: 570937 - RNA, 19 nt, Artificial Sequence
  Description of Artificial Sequence: Synthetic oligonucleotide
uccaauugugcuuacugua

SEQ ID NO: 570938 - RNA, 19 nt, Artificial Sequence
  Description of Artificial Sequence: Synthetic oligonucleotide
ggauuugaagcaaacagug

SEQ ID NO: 570939 - RNA, 19 nt, Artificial Sequence
  Description of Artificial Sequence: Synthetic oligonucleotide
aaucaaucugcaacuguug

SEQ ID NO: 570940 - RNA, 19 nt, Artificial Sequence
  Description of Artificial Sequence: Synthetic oligonucleotide
agauucuacaaaaucguga

SEQ ID NO: 570941 - RNA, 19 nt, Artificial Sequence
  Description of Artificial Sequence: Synthetic oligonucleotide
uauaggcccaauagggccu

SEQ ID NO: 570942 - RNA, 19 nt, Artificial Sequence
  Description of Artificial Sequence: Synthetic oligonucleotide
auuagcugccgccauggug

SEQ ID NO: 570943 - RNA, 19 nt, Artificial Sequence
  Description of Artificial Sequence: Synthetic oligonucleotide
aaagcacaauuuugugugu

SEQ ID NO: 570944 - RNA, 19 nt, Artificial Sequence
  Description of Artificial Sequence: Synthetic oligonucleotide
auuccugguguacuaaaga

SEQ ID NO: 570945 - RNA, 19 nt, Artificial Sequence
  Description of Artificial Sequence: Synthetic oligonucleotide
acuucuagauguacaacuc

SEQ ID NO: 570946 - RNA, 19 nt, Artificial Sequence
  Description of Artificial Sequence: Synthetic oligonucleotide
gguaucaguagcugcacag

SEQ ID NO: 570947 - RNA, 19 nt, Artificial Sequence
  Description of Artificial Sequence: Synthetic oligonucleotide
agaacuuguucacccaacu

SEQ ID NO: 570948 - RNA, 19 nt, Artificial Sequence
  Description of Artificial Sequence: Synthetic oligonucleotide
uaugggagugacugggccc

SEQ ID NO: 570949 - RNA, 19 nt, Artificial Sequence
  Description of Artificial Sequence: Synthetic oligonucleotide
auuacuaucauaggcuaau

SEQ ID NO: 570950 - RNA, 19 nt, Artificial Sequence
  Description of Artificial Sequence: Synthetic oligonucleotide
ugaacugcgggcuggguaa

SEQ ID NO: 570951 - RNA, 19 nt, Artificial Sequence
  Description of Artificial Sequence: Synthetic oligonucleotide
aguuacauuuccaauuaca

SEQ ID NO: 570952 - RNA, 19 nt, Artificial Sequence
  Description of Artificial Sequence: Synthetic oligonucleotide
gagugaaacagcauugauc

SEQ ID NO: 570953 - RNA, 19 nt, Artificial Sequence
  Description of Artificial Sequence: Synthetic oligonucleotide
gaucccgguuuucugugcg

SEQ ID NO: 570954 - RNA, 19 nt, Artificial Sequence
  Description of Artificial Sequence: Synthetic oligonucleotide
auucgggagcuguggacgc

SEQ ID NO: 570955 - RNA, 19 nt, Artificial Sequence
  Description of Artificial Sequence: Synthetic oligonucleotide
uuaacgcuugcaucgcucu

SEQ ID NO: 570956 - RNA, 19 nt, Artificial Sequence
  Description of Artificial Sequence: Synthetic oligonucleotide
guuauggugguucccagga

SEQ ID NO: 570957 - RNA, 19 nt, Artificial Sequence
  Description of Artificial Sequence: Synthetic oligonucleotide
auaauuagcugccgccaug

SEQ ID NO: 570958 - RNA, 19 nt, Artificial Sequence
  Description of Artificial Sequence: Synthetic oligonucleotide
uuguucacccaacugugaa

SEQ ID NO: 570959 - RNA, 19 nt, Artificial Sequence
  Description of Artificial Sequence: Synthetic oligonucleotide
gaaauaacugauagagcca

SEQ ID NO: 570960 - RNA, 19 nt, Artificial Sequence
  Description of Artificial Sequence: Synthetic oligonucleotide
aaugaaugguauaaaucuu

SEQ ID NO: 570961 - RNA, 19 nt, Artificial Sequence
  Description of Artificial Sequence: Synthetic oligonucleotide
uuccugguguacuaaagau

SEQ ID NO: 570962 - RNA, 19 nt, Artificial Sequence
  Description of Artificial Sequence: Synthetic oligonucleotide
ugaggauuugaagcaaaca

SEQ ID NO: 570963 - RNA, 19 nt, Artificial Sequence
  Description of Artificial Sequence: Synthetic oligonucleotide
auacuucuagauguacaac

SEQ ID NO: 570964 - RNA, 19 nt, Artificial Sequence
  Description of Artificial Sequence: Synthetic oligonucleotide
caguggguccuauaggccc

SEQ ID NO: 570965 - RNA, 19 nt, Artificial Sequence
  Description of Artificial Sequence: Synthetic oligonucleotide
aaacaucacaugacacuuc

SEQ ID NO: 570966 - RNA, 19 nt, Artificial Sequence
  Description of Artificial Sequence: Synthetic oligonucleotide
aauuucacugagaaauuua

SEQ ID NO: 570967 - RNA, 19 nt, Artificial Sequence
  Description of Artificial Sequence: Synthetic oligonucleotide
gugagacauaccuagcuuc

SEQ ID NO: 570968 - RNA, 19 nt, Artificial Sequence
  Description of Artificial Sequence: Synthetic oligonucleotide
cauuccugguguacuaaag

SEQ ID NO: 570969 - RNA, 19 nt, Artificial Sequence
  Description of Artificial Sequence: Synthetic oligonucleotide
uugaagcaaacagugggcu

SEQ ID NO: 570970 - RNA, 19 nt, Artificial Sequence
  Description of Artificial Sequence: Synthetic oligonucleotide
ccauucaaaucagagaagg

SEQ ID NO: 570971 - RNA, 19 nt, Artificial Sequence
  Description of Artificial Sequence: Synthetic oligonucleotide
auucuacaguaauacuucu

SEQ ID NO: 570972 - RNA, 19 nt, Artificial Sequence
  Description of Artificial Sequence: Synthetic oligonucleotide
ugagugaaacagcauugau

SEQ ID NO: 570973 - RNA, 19 nt, Artificial Sequence
  Description of Artificial Sequence: Synthetic oligonucleotide
guggcuagugucuguagcc

SEQ ID NO: 570974 - RNA, 19 nt, Artificial Sequence
  Description of Artificial Sequence: Synthetic oligonucleotide
gacccaugggcccuauggg

SEQ ID NO: 570975 - RNA, 19 nt, Artificial Sequence
  Description of Artificial Sequence: Synthetic oligonucleotide
acaaugugacacuguaagu

SEQ ID NO: 570976 - RNA, 19 nt, Artificial Sequence
  Description of Artificial Sequence: Synthetic oligonucleotide
auauucugaaucagcuggg

SEQ ID NO: 570977 - RNA, 19 nt, Artificial Sequence
  Description of Artificial Sequence: Synthetic oligonucleotide
aggauuugaagcaaacagu

SEQ ID NO: 570978 - RNA, 19 nt, Artificial Sequence
  Description of Artificial Sequence: Synthetic oligonucleotide
uugccuagccaacaauuuc

SEQ ID NO: 570979 - RNA, 19 nt, Artificial Sequence
  Description of Artificial Sequence: Synthetic oligonucleotide
ugcuagcaacauaauuagc

SEQ ID NO: 570980 - RNA, 19 nt, Artificial Sequence
  Description of Artificial Sequence: Synthetic oligonucleotide
uugacauggccgcaagcgu

SEQ ID NO: 570981 - RNA, 19 nt, Artificial Sequence
  Description of Artificial Sequence: Synthetic oligonucleotide
uuuucugugcgggaaggcu

SEQ ID NO: 570982 - RNA, 19 nt, Artificial Sequence
  Description of Artificial Sequence: Synthetic oligonucleotide
ugacacuuccaguaaguua

SEQ ID NO: 570983 - RNA, 19 nt, Artificial Sequence
  Description of Artificial Sequence: Synthetic oligonucleotide
ugggcuacucaucaucauc

SEQ ID NO: 570984 - RNA, 19 nt, Artificial Sequence
  Description of Artificial Sequence: Synthetic oligonucleotide
cauaggcuaauguuuaaaa

SEQ ID NO: 570985 - RNA, 19 nt, Artificial Sequence
  Description of Artificial Sequence: Synthetic oligonucleotide
auaacugauagagccaaaa

SEQ ID NO: 570986 - RNA, 19 nt, Artificial Sequence
  Description of Artificial Sequence: Synthetic oligonucleotide
aaacagugggcuacucauc

SEQ ID NO: 570987 - RNA, 19 nt, Artificial Sequence
  Description of Artificial Sequence: Synthetic oligonucleotide
ugcauauuagggucucuuc

SEQ ID NO: 570988 - RNA, 19 nt, Artificial Sequence
  Description of Artificial Sequence: Synthetic oligonucleotide
ggacccaugggcccuaugg

SEQ ID NO: 570989 - RNA, 19 nt, Artificial Sequence
  Description of Artificial Sequence: Synthetic oligonucleotide
guacuaaagaugcuagcaa

SEQ ID NO: 570990 - RNA, 19 nt, Artificial Sequence
  Description of Artificial Sequence: Synthetic oligonucleotide
ucugcauuccugguguacu

SEQ ID NO: 570991 - RNA, 19 nt, Artificial Sequence
  Description of Artificial Sequence: Synthetic oligonucleotide
gaaauucgggagcugugga

SEQ ID NO: 570992 - RNA, 19 nt, Artificial Sequence
  Description of Artificial Sequence: Synthetic oligonucleotide
agaauaaagagaaguguuu

SEQ ID NO: 570993 - RNA, 19 nt, Artificial Sequence
  Description of Artificial Sequence: Synthetic oligonucleotide
ugcuacuagaggagcuacc

SEQ ID NO: 570994 - RNA, 19 nt, Artificial Sequence
  Description of Artificial Sequence: Synthetic oligonucleotide
uguagccccugcuggaucu

SEQ ID NO: 570995 - RNA, 19 nt, Artificial Sequence
  Description of Artificial Sequence: Synthetic oligonucleotide
gcuaccgccaggcauagug

SEQ ID NO: 570996 - RNA, 19 nt, Artificial Sequence
  Description of Artificial Sequence: Synthetic oligonucleotide
acauaauuagcugccgcca

SEQ ID NO: 570997 - RNA, 19 nt, Artificial Sequence
  Description of Artificial Sequence: Synthetic oligonucleotide
gcuacuagaggagcuaccg

SEQ ID NO: 570998 - RNA, 19 nt, Artificial Sequence
  Description of Artificial Sequence: Synthetic oligonucleotide
aacuugccuagccaacaau

SEQ ID NO: 570999 - RNA, 19 nt, Artificial Sequence
  Description of Artificial Sequence: Synthetic oligonucleotide
acgauuuaugaaccccaug

SEQ ID NO: 571000 - RNA, 19 nt, Artificial Sequence
  Description of Artificial Sequence: Synthetic oligonucleotide
guaauuacgauggcugaga

SEQ ID NO: 571001 - RNA, 19 nt, Artificial Sequence
  Description of Artificial Sequence: Synthetic oligonucleotide
cugcauuaacgcuugcauc

SEQ ID NO: 571002 - RNA, 19 nt, Artificial Sequence
  Description of Artificial Sequence: Synthetic oligonucleotide
gcuacucaucaucaucugg

SEQ ID NO: 571003 - RNA, 19 nt, Artificial Sequence
  Description of Artificial Sequence: Synthetic oligonucleotide
uuacuaucauaggcuaaug

SEQ ID NO: 571004 - RNA, 19 nt, Artificial Sequence
  Description of Artificial Sequence: Synthetic oligonucleotide
acaaccaaugaaugguaua

SEQ ID NO: 571005 - RNA, 19 nt, Artificial Sequence
  Description of Artificial Sequence: Synthetic oligonucleotide
uauuagggccugcaaguuu

SEQ ID NO: 571006 - RNA, 19 nt, Artificial Sequence
  Description of Artificial Sequence: Synthetic oligonucleotide
uccuggcauuacuacacug

SEQ ID NO: 571007 - RNA, 19 nt, Artificial Sequence
  Description of Artificial Sequence: Synthetic oligonucleotide
auugugcuuacuguacugu

SEQ ID NO: 571008 - RNA, 19 nt, Artificial Sequence
  Description of Artificial Sequence: Synthetic oligonucleotide
accaucugaugaaugaacu

SEQ ID NO: 571009 - RNA, 19 nt, Artificial Sequence
  Description of Artificial Sequence: Synthetic oligonucleotide
cuacuagaggagcuaccgc

SEQ ID NO: 571010 - RNA, 19 nt, Artificial Sequence
  Description of Artificial Sequence: Synthetic oligonucleotide
augguaucaguagcugcac

SEQ ID NO: 571011 - RNA, 19 nt, Artificial Sequence
  Description of Artificial Sequence: Synthetic oligonucleotide
aacaaccaaugaaugguau

SEQ ID NO: 571012 - RNA, 19 nt, Artificial Sequence
  Description of Artificial Sequence: Synthetic oligonucleotide
augaaugguauaaaucuua

SEQ ID NO: 571013 - RNA, 19 nt, Artificial Sequence
  Description of Artificial Sequence: Synthetic oligonucleotide
aaacaaccaaugaauggua

SEQ ID NO: 571014 - RNA, 19 nt, Artificial Sequence
  Description of Artificial Sequence: Synthetic oligonucleotide
acaaauuagagagcuucaa

SEQ ID NO: 571015 - RNA, 19 nt, Artificial Sequence
  Description of Artificial Sequence: Synthetic oligonucleotide
ugguaucaguagcugcaca

SEQ ID NO: 571016 - RNA, 19 nt, Artificial Sequence
  Description of Artificial Sequence: Synthetic oligonucleotide
cacugauccuucaggcugc

SEQ ID NO: 571017 - RNA, 19 nt, Artificial Sequence
  Description of Artificial Sequence: Synthetic oligonucleotide
gcacaagagaaauaacuga

SEQ ID NO: 571018 - RNA, 19 nt, Artificial Sequence
  Description of Artificial Sequence: Synthetic oligonucleotide
uaccgccaggcauagugcc

SEQ ID NO: 571019 - RNA, 19 nt, Artificial Sequence
  Description of Artificial Sequence: Synthetic oligonucleotide
caaaaucgugagacauacc

SEQ ID NO: 571020 - RNA, 19 nt, Artificial Sequence
  Description of Artificial Sequence: Synthetic oligonucleotide
agcacuuuccuggcauuac

SEQ ID NO: 571021 - RNA, 19 nt, Artificial Sequence
  Description of Artificial Sequence: Synthetic oligonucleotide
cuaucauaggcuaauguuu

SEQ ID NO: 571022 - RNA, 19 nt, Artificial Sequence
  Description of Artificial Sequence: Synthetic oligonucleotide
guaucaguagcugcacagc

SEQ ID NO: 571023 - RNA, 19 nt, Artificial Sequence
  Description of Artificial Sequence: Synthetic oligonucleotide
ugucggacugaugguauca

SEQ ID NO: 571024 - RNA, 19 nt, Artificial Sequence
  Description of Artificial Sequence: Synthetic oligonucleotide
gugcccaaggauugggcag

SEQ ID NO: 571025 - RNA, 19 nt, Artificial Sequence
  Description of Artificial Sequence: Synthetic oligonucleotide
aucgugagacauaccuagc

SEQ ID NO: 571026 - RNA, 19 nt, Artificial Sequence
  Description of Artificial Sequence: Synthetic oligonucleotide
gcauauuagggucucuuca

SEQ ID NO: 571027 - RNA, 19 nt, Artificial Sequence
  Description of Artificial Sequence: Synthetic oligonucleotide
gagcuugcagggccagugg

SEQ ID NO: 571028 - RNA, 19 nt, Artificial Sequence
  Description of Artificial Sequence: Synthetic oligonucleotide
uauaggacccaugggcccu

SEQ ID NO: 571029 - RNA, 19 nt, Artificial Sequence
  Description of Artificial Sequence: Synthetic oligonucleotide
uccccaccauucaaaucag

SEQ ID NO: 571030 - RNA, 19 nt, Artificial Sequence
  Description of Artificial Sequence: Synthetic oligonucleotide
aaccaaugaaugguauaaa

SEQ ID NO: 571031 - RNA, 19 nt, Artificial Sequence
  Description of Artificial Sequence: Synthetic oligonucleotide
cuacuauauuuuaacugaa

SEQ ID NO: 571032 - RNA, 19 nt, Artificial Sequence
  Description of Artificial Sequence: Synthetic oligonucleotide
cuaccgccaggcauagugc

SEQ ID NO: 571033 - RNA, 19 nt, Artificial Sequence
  Description of Artificial Sequence: Synthetic oligonucleotide
uggcauuacuacacugauc

SEQ ID NO: 571034 - RNA, 19 nt, Artificial Sequence
  Description of Artificial Sequence: Synthetic oligonucleotide
uuuccauugucggacugau

SEQ ID NO: 571035 - RNA, 19 nt, Artificial Sequence
  Description of Artificial Sequence: Synthetic oligonucleotide
uggcuagugucuguagccc

SEQ ID NO: 571036 - RNA, 19 nt, Artificial Sequence
  Description of Artificial Sequence: Synthetic oligonucleotide
accauucaaaucagagaag

SEQ ID NO: 571037 - RNA, 19 nt, Artificial Sequence
  Description of Artificial Sequence: Synthetic oligonucleotide
ccuauaggcccaauagggc

SEQ ID NO: 571038 - RNA, 19 nt, Artificial Sequence
  Description of Artificial Sequence: Synthetic oligonucleotide
agcgugucuggauucugca

SEQ ID NO: 571039 - RNA, 19 nt, Artificial Sequence
  Description of Artificial Sequence: Synthetic oligonucleotide
ccaauugugcuuacuguac

SEQ ID NO: 571040 - RNA, 19 nt, Artificial Sequence
  Description of Artificial Sequence: Synthetic oligonucleotide
auggccgcauugaugucgc

SEQ ID NO: 571041 - RNA, 19 nt, Artificial Sequence
  Description of Artificial Sequence: Synthetic oligonucleotide
uucaggcugcacaaagauu

SEQ ID NO: 571042 - RNA, 19 nt, Artificial Sequence
  Description of Artificial Sequence: Synthetic oligonucleotide
agugccgguggauccagga

SEQ ID NO: 571043 - RNA, 19 nt, Artificial Sequence
  Description of Artificial Sequence: Synthetic oligonucleotide
ggcccuaugggagugacug

SEQ ID NO: 571044 - RNA, 19 nt, Artificial Sequence
  Description of Artificial Sequence: Synthetic oligonucleotide
ugguguucccgaaggugcu

SEQ ID NO: 571045 - RNA, 19 nt, Artificial Sequence
  Description of Artificial Sequence: Synthetic oligonucleotide
agugggcuacucaucauca

SEQ ID NO: 571046 - RNA, 19 nt, Artificial Sequence
  Description of Artificial Sequence: Synthetic oligonucleotide
agcgaagcuuggaaugagg

SEQ ID NO: 571047 - RNA, 19 nt, Artificial Sequence
  Description of Artificial Sequence: Synthetic oligonucleotide
uguuggucggagagcccug

SEQ ID NO: 571048 - RNA, 19 nt, Artificial Sequence
  Description of Artificial Sequence: Synthetic oligonucleotide
aucugcaacuguugacaca

SEQ ID NO: 571049 - RNA, 19 nt, Artificial Sequence
  Description of Artificial Sequence: Synthetic oligonucleotide
acgcuugcaucgcucucgg

SEQ ID NO: 571050 - RNA, 19 nt, Artificial Sequence
  Description of Artificial Sequence: Synthetic oligonucleotide
uuagagaaaccaggauaaa

SEQ ID NO: 571051 - RNA, 19 nt, Artificial Sequence
  Description of Artificial Sequence: Synthetic oligonucleotide
aguaauacuucuagaugua

SEQ ID NO: 571052 - RNA, 19 nt, Artificial Sequence
  Description of Artificial Sequence: Synthetic oligonucleotide
ucggacugaugguaucagu

SEQ ID NO: 571053 - RNA, 19 nt, Artificial Sequence
  Description of Artificial Sequence: Synthetic oligonucleotide
ggggugaaaggaacuauag

SEQ ID NO: 571054 - RNA, 19 nt, Artificial Sequence
  Description of Artificial Sequence: Synthetic oligonucleotide
agggguuauggugguuccc

SEQ ID NO: 571055 - RNA, 19 nt, Artificial Sequence
  Description of Artificial Sequence: Synthetic oligonucleotide
gagggacuccaccuuaaaa

SEQ ID NO: 571056 - RNA, 19 nt, Artificial Sequence
  Description of Artificial Sequence: Synthetic oligonucleotide
gugaaacagcauugauccc

SEQ ID NO: 571057 - RNA, 19 nt, Artificial Sequence
  Description of Artificial Sequence: Synthetic oligonucleotide
auggccgcaagcgugucug

SEQ ID NO: 571058 - RNA, 19 nt, Artificial Sequence
  Description of Artificial Sequence: Synthetic oligonucleotide
gcaacauaauuagcugccg

SEQ ID NO: 571059 - RNA, 19 nt, Artificial Sequence
  Description of Artificial Sequence: Synthetic oligonucleotide
cauaccuagcuucaggaau

SEQ ID NO: 571060 - RNA, 19 nt, Artificial Sequence
  Description of Artificial Sequence: Synthetic oligonucleotide
gcucucggauuugacaugg

SEQ ID NO: 571061 - RNA, 19 nt, Artificial Sequence
  Description of Artificial Sequence: Synthetic oligonucleotide
uuccauugucggacugaug

SEQ ID NO: 571062 - RNA, 19 nt, Artificial Sequence
  Description of Artificial Sequence: Synthetic oligonucleotide
ugcgggcuggguaaaguuu

SEQ ID NO: 571063 - RNA, 19 nt, Artificial Sequence
  Description of Artificial Sequence: Synthetic oligonucleotide
acuugccuagccaacaauu

SEQ ID NO: 571064 - RNA, 19 nt, Artificial Sequence
  Description of Artificial Sequence: Synthetic oligonucleotide
uaugaaccccauggcguug

SEQ ID NO: 571065 - RNA, 19 nt, Artificial Sequence
  Description of Artificial Sequence: Synthetic oligonucleotide
gagaaguguuugcaugcaa

SEQ ID NO: 571066 - RNA, 19 nt, Artificial Sequence
  Description of Artificial Sequence: Synthetic oligonucleotide
auaccuagcuucaggaaua

SEQ ID NO: 571067 - RNA, 19 nt, Artificial Sequence
  Description of Artificial Sequence: Synthetic oligonucleotide
gaacuugccuagccaacaa

SEQ ID NO: 571068 - RNA, 19 nt, Artificial Sequence
  Description of Artificial Sequence: Synthetic oligonucleotide
acuagaggagcuaccgcca

SEQ ID NO: 571069 - RNA, 19 nt, Artificial Sequence
  Description of Artificial Sequence: Synthetic oligonucleotide
gagcgaagcuuggaaugag

SEQ ID NO: 571070 - RNA, 19 nt, Artificial Sequence
  Description of Artificial Sequence: Synthetic oligonucleotide
gggccaguggguccuauag

SEQ ID NO: 571071 - RNA, 19 nt, Artificial Sequence
  Description of Artificial Sequence: Synthetic oligonucleotide
uugcaucgcucucggauuu

SEQ ID NO: 571072 - RNA, 19 nt, Artificial Sequence
  Description of Artificial Sequence: Synthetic oligonucleotide
cauauuagggucucuucau

SEQ ID NO: 571073 - RNA, 19 nt, Artificial Sequence
  Description of Artificial Sequence: Synthetic oligonucleotide
ugggcaguggaucccgguu

SEQ ID NO: 571074 - RNA, 19 nt, Artificial Sequence
  Description of Artificial Sequence: Synthetic oligonucleotide
gcuauuagggccugcaagu

SEQ ID NO: 571075 - RNA, 19 nt, Artificial Sequence
  Description of Artificial Sequence: Synthetic oligonucleotide
uaacgcuugcaucgcucuc

SEQ ID NO: 571076 - RNA, 19 nt, Artificial Sequence
  Description of Artificial Sequence: Synthetic oligonucleotide
uaucuccauucuacauuaa

SEQ ID NO: 571077 - RNA, 19 nt, Artificial Sequence
  Description of Artificial Sequence: Synthetic oligonucleotide
ugcccaaggauugggcagu

SEQ ID NO: 571078 - RNA, 19 nt, Artificial Sequence
  Description of Artificial Sequence: Synthetic oligonucleotide
aaggaacuauaggacccau

SEQ ID NO: 571079 - RNA, 19 nt, Artificial Sequence
  Description of Artificial Sequence: Synthetic oligonucleotide
caguuaucuguugcagcag

SEQ ID NO: 571080 - RNA, 19 nt, Artificial Sequence
  Description of Artificial Sequence: Synthetic oligonucleotide
uugucggacugaugguauc

SEQ ID NO: 571081 - RNA, 19 nt, Artificial Sequence
  Description of Artificial Sequence: Synthetic oligonucleotide
caaugugacacuguaaguu

SEQ ID NO: 571082 - RNA, 19 nt, Artificial Sequence
  Description of Artificial Sequence: Synthetic oligonucleotide
gcucagagauucuacagua

SEQ ID NO: 571083 - RNA, 19 nt, Artificial Sequence
  Description of Artificial Sequence: Synthetic oligonucleotide
ggaucugcauuaacgcuug

SEQ ID NO: 571084 - RNA, 19 nt, Artificial Sequence
  Description of Artificial Sequence: Synthetic oligonucleotide
agagagcuucaaauaauuu

SEQ ID NO: 571085 - RNA, 19 nt, Artificial Sequence
  Description of Artificial Sequence: Synthetic oligonucleotide
guguuugcaugcaacaccu

SEQ ID NO: 571086 - RNA, 19 nt, Artificial Sequence
  Description of Artificial Sequence: Synthetic oligonucleotide
accuuaaaaugcauccuuu

SEQ ID NO: 571087 - RNA, 19 nt, Artificial Sequence
  Description of Artificial Sequence: Synthetic oligonucleotide
ggugcuucaguggcuagug

SEQ ID NO: 571088 - RNA, 19 nt, Artificial Sequence
  Description of Artificial Sequence: Synthetic oligonucleotide
aggcugcacaaagauuaag

SEQ ID NO: 571089 - RNA, 19 nt, Artificial Sequence
  Description of Artificial Sequence: Synthetic oligonucleotide
gucggacugaugguaucag

SEQ ID NO: 571090 - RNA, 19 nt, Artificial Sequence
  Description of Artificial Sequence: Synthetic oligonucleotide
ggcuagugucuguagcccc

SEQ ID NO: 571091 - RNA, 19 nt, Artificial Sequence
  Description of Artificial Sequence: Synthetic oligonucleotide
gcagaauaaagagaagugu

SEQ ID NO: 571092 - RNA, 19 nt, Artificial Sequence
  Description of Artificial Sequence: Synthetic oligonucleotide
aggaacuauaggacccaug

SEQ ID NO: 571093 - RNA, 19 nt, Artificial Sequence
  Description of Artificial Sequence: Synthetic oligonucleotide
cuccaauugugcuuacugu

SEQ ID NO: 571094 - RNA, 19 nt, Artificial Sequence
  Description of Artificial Sequence: Synthetic oligonucleotide
caucgcucucggauuugac

SEQ ID NO: 571095 - RNA, 19 nt, Artificial Sequence
  Description of Artificial Sequence: Synthetic oligonucleotide
cgugguguuggucggagag

SEQ ID NO: 571096 - RNA, 19 nt, Artificial Sequence
  Description of Artificial Sequence: Synthetic oligonucleotide
uguuugcaugcaacaccuu

SEQ ID NO: 571097 - RNA, 19 nt, Artificial Sequence
  Description of Artificial Sequence: Synthetic oligonucleotide
uguggacgcaucugcucuu

SEQ ID NO: 571098 - RNA, 19 nt, Artificial Sequence
  Description of Artificial Sequence: Synthetic oligonucleotide
cauuacuacacugauccuu

SEQ ID NO: 571099 - RNA, 19 nt, Artificial Sequence
  Description of Artificial Sequence: Synthetic oligonucleotide
gucgugguguuggucggag

SEQ ID NO: 571100 - RNA, 19 nt, Artificial Sequence
  Description of Artificial Sequence: Synthetic oligonucleotide
cacuuuccuggcauuacua

SEQ ID NO: 571101 - RNA, 19 nt, Artificial Sequence
  Description of Artificial Sequence: Synthetic oligonucleotide
cuaaagaugcuagcaacau

SEQ ID NO: 571102 - RNA, 19 nt, Artificial Sequence
  Description of Artificial Sequence: Synthetic oligonucleotide
ggcuacucaucaucaucug

SEQ ID NO: 571103 - RNA, 19 nt, Artificial Sequence
  Description of Artificial Sequence: Synthetic oligonucleotide
cauugucggacugauggua

SEQ ID NO: 571104 - RNA, 19 nt, Artificial Sequence
  Description of Artificial Sequence: Synthetic oligonucleotide
ucgugguguuggucggaga

SEQ ID NO: 571105 - RNA, 19 nt, Artificial Sequence
  Description of Artificial Sequence: Synthetic oligonucleotide
aggugcuucaguggcuagu

SEQ ID NO: 571106 - RNA, 19 nt, Artificial Sequence
  Description of Artificial Sequence: Synthetic oligonucleotide
uaccuagcuucaggaauau

SEQ ID NO: 571107 - RNA, 19 nt, Artificial Sequence
  Description of Artificial Sequence: Synthetic oligonucleotide
cuugccuagccaacaauuu

SEQ ID NO: 571108 - RNA, 19 nt, Artificial Sequence
  Description of Artificial Sequence: Synthetic oligonucleotide
ccaguaaguuacauuucca

SEQ ID NO: 571109 - RNA, 19 nt, Artificial Sequence
  Description of Artificial Sequence: Synthetic oligonucleotide
ggcuaauguuuaaaaugca

SEQ ID NO: 571110 - RNA, 19 nt, Artificial Sequence
  Description of Artificial Sequence: Synthetic oligonucleotide
uuguggucgugguguuggu

SEQ ID NO: 571111 - RNA, 19 nt, Artificial Sequence
  Description of Artificial Sequence: Synthetic oligonucleotide
cuguggacgcaucugcucu

SEQ ID NO: 571112 - RNA, 19 nt, Artificial Sequence
  Description of Artificial Sequence: Synthetic oligonucleotide
gagcuaccgccaggcauag

SEQ ID NO: 571113 - RNA, 19 nt, Artificial Sequence
  Description of Artificial Sequence: Synthetic oligonucleotide
gcauuaacgcuugcaucgc

SEQ ID NO: 571114 - RNA, 19 nt, Artificial Sequence
  Description of Artificial Sequence: Synthetic oligonucleotide
cauaauuagcugccgccau

SEQ ID NO: 571115 - RNA, 19 nt, Artificial Sequence
  Description of Artificial Sequence: Synthetic oligonucleotide
gcuugcaucgcucucggau

SEQ ID NO: 571116 - RNA, 19 nt, Artificial Sequence
  Description of Artificial Sequence: Synthetic oligonucleotide
ggagcgaagcuuggaauga

SEQ ID NO: 571117 - RNA, 19 nt, Artificial Sequence
  Description of Artificial Sequence: Synthetic oligonucleotide
ggaucccgguuuucugugc

SEQ ID NO: 571118 - RNA, 19 nt, Artificial Sequence
  Description of Artificial Sequence: Synthetic oligonucleotide
cuugcaucgcucucggauu

SEQ ID NO: 571119 - RNA, 19 nt, Artificial Sequence
  Description of Artificial Sequence: Synthetic oligonucleotide
ugggcccuaugggagugac

SEQ ID NO: 571120 - RNA, 19 nt, Artificial Sequence
  Description of Artificial Sequence: Synthetic oligonucleotide
uucgggagcuguggacgca

SEQ ID NO: 571121 - RNA, 19 nt, Artificial Sequence
  Description of Artificial Sequence: Synthetic oligonucleotide
uagcuggcguuggugccca

SEQ ID NO: 571122 - RNA, 19 nt, Artificial Sequence
  Description of Artificial Sequence: Synthetic oligonucleotide
caauggccgcauugauguc

SEQ ID NO: 571123 - RNA, 19 nt, Artificial Sequence
  Description of Artificial Sequence: Synthetic oligonucleotide
ucgggagcuguggacgcau

SEQ ID NO: 571124 - RNA, 19 nt, Artificial Sequence
  Description of Artificial Sequence: Synthetic oligonucleotide
cuggagcgaagcuuggaau

SEQ ID NO: 571125 - RNA, 19 nt, Artificial Sequence
  Description of Artificial Sequence: Synthetic oligonucleotide
cagugccgguggauccagg

SEQ ID NO: 571126 - RNA, 19 nt, Artificial Sequence
  Description of Artificial Sequence: Synthetic oligonucleotide
ggagcuaccgccaggcaua

SEQ ID NO: 571127 - RNA, 19 nt, Artificial Sequence
  Description of Artificial Sequence: Synthetic oligonucleotide
accuggagcgaagcuugga

SEQ ID NO: 571128 - RNA, 19 nt, Artificial Sequence
  Description of Artificial Sequence: Synthetic oligonucleotide
cacgauuuaugaaccccau

SEQ ID NO: 571129 - RNA, 19 nt, Artificial Sequence
  Description of Artificial Sequence: Synthetic oligonucleotide
cauuaacgcuugcaucgcu

SEQ ID NO: 571130 - RNA, 19 nt, Artificial Sequence
  Description of Artificial Sequence: Synthetic oligonucleotide
ucgccuccuguugcuauua

SEQ ID NO: 571131 - RNA, 19 nt, Artificial Sequence
  Description of Artificial Sequence: Synthetic oligonucleotide
gccuagccaacaauuucac

SEQ ID NO: 571132 - RNA, 19 nt, Artificial Sequence
  Description of Artificial Sequence: Synthetic oligonucleotide
ggugcuacuagaggagcua

SEQ ID NO: 571133 - RNA, 19 nt, Artificial Sequence
  Description of Artificial Sequence: Synthetic oligonucleotide
auaggcccaauagggccua

SEQ ID NO: 571134 - RNA, 19 nt, Artificial Sequence
  Description of Artificial Sequence: Synthetic oligonucleotide
ccuggagcgaagcuuggaa

SEQ ID NO: 571135 - RNA, 19 nt, Artificial Sequence
  Description of Artificial Sequence: Synthetic oligonucleotide
ggguccuauaggcccaaua

SEQ ID NO: 571136 - RNA, 19 nt, Artificial Sequence
  Description of Artificial Sequence: Synthetic oligonucleotide
gcacuuuccuggcauuacu

SEQ ID NO: 571137 - RNA, 19 nt, Artificial Sequence
  Description of Artificial Sequence: Synthetic oligonucleotide
agcugccgccaugguguuc

SEQ ID NO: 571138 - RNA, 19 nt, Artificial Sequence
  Description of Artificial Sequence: Synthetic oligonucleotide
ggagggacuccaccuuaaa

SEQ ID NO: 571139 - RNA, 19 nt, Artificial Sequence
  Description of Artificial Sequence: Synthetic oligonucleotide
caguggaucccgguuuucu

SEQ ID NO: 571140 - RNA, 19 nt, Artificial Sequence
  Description of Artificial Sequence: Synthetic oligonucleotide
cuauuagggccugcaaguu

SEQ ID NO: 571141 - RNA, 19 nt, Artificial Sequence
  Description of Artificial Sequence: Synthetic oligonucleotide
cgcaagcgugucuggauuc

SEQ ID NO: 571142 - RNA, 19 nt, Artificial Sequence
  Description of Artificial Sequence: Synthetic oligonucleotide
gcucagcgacugcaucaug

SEQ ID NO: 571143 - RNA, 19 nt, Artificial Sequence
  Description of Artificial Sequence: Synthetic oligonucleotide
gaacugcgggcuggguaaa

SEQ ID NO: 571144 - RNA, 19 nt, Artificial Sequence
  Description of Artificial Sequence: Synthetic oligonucleotide
accuagcuucaggaauauu

SEQ ID NO: 571145 - RNA, 19 nt, Artificial Sequence
  Description of Artificial Sequence: Synthetic oligonucleotide
ugggagugacugggcccac

SEQ ID NO: 571146 - RNA, 19 nt, Artificial Sequence
  Description of Artificial Sequence: Synthetic oligonucleotide
gggcuggguaaaguuucca

SEQ ID NO: 571147 - RNA, 19 nt, Artificial Sequence
  Description of Artificial Sequence: Synthetic oligonucleotide
ccagugccgguggauccag

SEQ ID NO: 571148 - RNA, 19 nt, Artificial Sequence
  Description of Artificial Sequence: Synthetic oligonucleotide
ccuagccaacaauuucacu

SEQ ID NO: 571149 - RNA, 19 nt, Artificial Sequence
  Description of Artificial Sequence: Synthetic oligonucleotide
ccauugucggacugauggu

SEQ ID NO: 571150 - RNA, 19 nt, Artificial Sequence
  Description of Artificial Sequence: Synthetic oligonucleotide
ccgguuuucugugcgggaa

SEQ ID NO: 571151 - RNA, 19 nt, Artificial Sequence
  Description of Artificial Sequence: Synthetic oligonucleotide
cuggguagcuggcguuggu

SEQ ID NO: 571152 - RNA, 19 nt, Artificial Sequence
  Description of Artificial Sequence: Synthetic oligonucleotide
gcccaaggauugggcagug

SEQ ID NO: 571153 - RNA, 19 nt, Artificial Sequence
  Description of Artificial Sequence: Synthetic oligonucleotide
gcgugucuggauucugcau

SEQ ID NO: 571154 - RNA, 19 nt, Artificial Sequence
  Description of Artificial Sequence: Synthetic oligonucleotide
gggagugacugggcccaca

SEQ ID NO: 571155 - RNA, 19 nt, Artificial Sequence
  Description of Artificial Sequence: Synthetic oligonucleotide
ggaccccagugccggugga

SEQ ID NO: 571156 - RNA, 19 nt, Artificial Sequence
  Description of Artificial Sequence: Synthetic oligonucleotide
ccccaccauucaaaucaga

SEQ ID NO: 571157 - RNA, 19 nt, Artificial Sequence
  Description of Artificial Sequence: Synthetic oligonucleotide
cgugagacauaccuagcuu

SEQ ID NO: 571158 - RNA, 19 nt, Artificial Sequence
  Description of Artificial Sequence: Synthetic oligonucleotide
ccgguggauccaggagagc

SEQ ID NO: 571159 - RNA, 19 nt, Artificial Sequence
  Description of Artificial Sequence: Synthetic oligonucleotide
ccgcaagcgugucuggauu

SEQ ID NO: 571160 - RNA, 19 nt, Artificial Sequence
  Description of Artificial Sequence: Synthetic oligonucleotide
gggcccuaugggagugacu

SEQ ID NO: 571161 - RNA, 19 nt, Artificial Sequence
  Description of Artificial Sequence: Synthetic oligonucleotide
cgcuugcaucgcucucgga

SEQ ID NO: 571162 - RNA, 19 nt, Artificial Sequence
  Description of Artificial Sequence: Synthetic oligonucleotide
aacccuauaguacagcugg

SEQ ID NO: 571163 - RNA, 19 nt, Artificial Sequence
  Description of Artificial Sequence: Synthetic oligonucleotide
agugaaaggacucaagggg

SEQ ID NO: 571164 - RNA, 19 nt, Artificial Sequence
  Description of Artificial Sequence: Synthetic oligonucleotide
uuaacgagcgccaucuugg

SEQ ID NO: 571165 - RNA, 19 nt, Artificial Sequence
  Description of Artificial Sequence: Synthetic oligonucleotide
guuucuauuaacgagcgcc

SEQ ID NO: 571166 - RNA, 19 nt, Artificial Sequence
  Description of Artificial Sequence: Synthetic oligonucleotide
agagauugcaggcauuugg

SEQ ID NO: 571167 - RNA, 19 nt, Artificial Sequence
  Description of Artificial Sequence: Synthetic oligonucleotide
uccaguagagccuagcgcc

SEQ ID NO: 571168 - RNA, 19 nt, Artificial Sequence
  Description of Artificial Sequence: Synthetic oligonucleotide
aggaugaccacagauuucc

SEQ ID NO: 571169 - RNA, 19 nt, Artificial Sequence
  Description of Artificial Sequence: Synthetic oligonucleotide
ugcccaaccauacuugacg

SEQ ID NO: 571170 - RNA, 19 nt, Artificial Sequence
  Description of Artificial Sequence: Synthetic oligonucleotide
cuucguaacauacaucccc

SEQ ID NO: 571171 - RNA, 19 nt, Artificial Sequence
  Description of Artificial Sequence: Synthetic oligonucleotide
agagcaacccuugagggcc

SEQ ID NO: 571172 - RNA, 19 nt, Artificial Sequence
  Description of Artificial Sequence: Synthetic oligonucleotide
ugacacgacauaaauaaaa

SEQ ID NO: 571173 - RNA, 19 nt, Artificial Sequence
  Description of Artificial Sequence: Synthetic oligonucleotide
uauaguacagcuggggucc

SEQ ID NO: 571174 - RNA, 19 nt, Artificial Sequence
  Description of Artificial Sequence: Synthetic oligonucleotide
aaaaugguagcgucgucca

SEQ ID NO: 571175 - RNA, 19 nt, Artificial Sequence
  Description of Artificial Sequence: Synthetic oligonucleotide
acaaguucagccgacagag

SEQ ID NO: 571176 - RNA, 19 nt, Artificial Sequence
  Description of Artificial Sequence: Synthetic oligonucleotide
uuuaacugcccaaccauac

SEQ ID NO: 571177 - RNA, 19 nt, Artificial Sequence
  Description of Artificial Sequence: Synthetic oligonucleotide
auugcaggcauuuggucuc

SEQ ID NO: 571178 - RNA, 19 nt, Artificial Sequence
  Description of Artificial Sequence: Synthetic oligonucleotide
auagucuggcaucuuuccc

SEQ ID NO: 571179 - RNA, 19 nt, Artificial Sequence
  Description of Artificial Sequence: Synthetic oligonucleotide
aaguucagccgacagagau

SEQ ID NO: 571180 - RNA, 19 nt, Artificial Sequence
  Description of Artificial Sequence: Synthetic oligonucleotide
gauaugugagccacagucg

SEQ ID NO: 571181 - RNA, 19 nt, Artificial Sequence
  Description of Artificial Sequence: Synthetic oligonucleotide
aaccaggacacaauccgcc

SEQ ID NO: 571182 - RNA, 19 nt, Artificial Sequence
  Description of Artificial Sequence: Synthetic oligonucleotide
cagugaaaggacucaaggg

SEQ ID NO: 571183 - RNA, 19 nt, Artificial Sequence
  Description of Artificial Sequence: Synthetic oligonucleotide
uuucuauuaacgagcgcca

SEQ ID NO: 571184 - RNA, 19 nt, Artificial Sequence
  Description of Artificial Sequence: Synthetic oligonucleotide
uacuugacguuauuccagg

SEQ ID NO: 571185 - RNA, 19 nt, Artificial Sequence
  Description of Artificial Sequence: Synthetic oligonucleotide
ucucuaggcagaaaaugca

SEQ ID NO: 571186 - RNA, 19 nt, Artificial Sequence
  Description of Artificial Sequence: Synthetic oligonucleotide
auuaacgagcgccaucuug

SEQ ID NO: 571187 - RNA, 19 nt, Artificial Sequence
  Description of Artificial Sequence: Synthetic oligonucleotide
uucguaacauacaucccca

SEQ ID NO: 571188 - RNA, 19 nt, Artificial Sequence
  Description of Artificial Sequence: Synthetic oligonucleotide
aaaccaggacacaauccgc

SEQ ID NO: 571189 - RNA, 19 nt, Artificial Sequence
  Description of Artificial Sequence: Synthetic oligonucleotide
aaaggacucaaggggaaag

SEQ ID NO: 571190 - RNA, 19 nt, Artificial Sequence
  Description of Artificial Sequence: Synthetic oligonucleotide
cucucccucaaaaugguag

SEQ ID NO: 571191 - RNA, 19 nt, Artificial Sequence
  Description of Artificial Sequence: Synthetic oligonucleotide
gguagcgucguccacaaag

SEQ ID NO: 571192 - RNA, 19 nt, Artificial Sequence
  Description of Artificial Sequence: Synthetic oligonucleotide
ugaacaugggguaucgcuc

SEQ ID NO: 571193 - RNA, 19 nt, Artificial Sequence
  Description of Artificial Sequence: Synthetic oligonucleotide
auaugugagccacagucga

SEQ ID NO: 571194 - RNA, 19 nt, Artificial Sequence
  Description of Artificial Sequence: Synthetic oligonucleotide
uccaguguacccugggucc

SEQ ID NO: 571195 - RNA, 19 nt, Artificial Sequence
  Description of Artificial Sequence: Synthetic oligonucleotide
aaaugguagcgucguccac

SEQ ID NO: 571196 - RNA, 19 nt, Artificial Sequence
  Description of Artificial Sequence: Synthetic oligonucleotide
gagacguacaccaccaggc

SEQ ID NO: 571197 - RNA, 19 nt, Artificial Sequence
  Description of Artificial Sequence: Synthetic oligonucleotide
gacacggaguucauggacg

SEQ ID NO: 571198 - RNA, 19 nt, Artificial Sequence
  Description of Artificial Sequence: Synthetic oligonucleotide
aaugguagcgucguccaca

SEQ ID NO: 571199 - RNA, 19 nt, Artificial Sequence
  Description of Artificial Sequence: Synthetic oligonucleotide
agaacccuauaguacagcu

SEQ ID NO: 571200 - RNA, 19 nt, Artificial Sequence
  Description of Artificial Sequence: Synthetic oligonucleotide
acacggaguucauggacgc

SEQ ID NO: 571201 - RNA, 19 nt, Artificial Sequence
  Description of Artificial Sequence: Synthetic oligonucleotide
uacauccccagccacaguc

SEQ ID NO: 571202 - RNA, 19 nt, Artificial Sequence
  Description of Artificial Sequence: Synthetic oligonucleotide
ggucgauuccaguagagcc

SEQ ID NO: 571203 - RNA, 19 nt, Artificial Sequence
  Description of Artificial Sequence: Synthetic oligonucleotide
agucgagauacaaagucuc

SEQ ID NO: 571204 - RNA, 19 nt, Artificial Sequence
  Description of Artificial Sequence: Synthetic oligonucleotide
gcagugaaaggacucaagg

SEQ ID NO: 571205 - RNA, 19 nt, Artificial Sequence
  Description of Artificial Sequence: Synthetic oligonucleotide
aacccggguuucuauuaac

SEQ ID NO: 571206 - RNA, 19 nt, Artificial Sequence
  Description of Artificial Sequence: Synthetic oligonucleotide
acggaguucauggacgcgc

SEQ ID NO: 571207 - RNA, 19 nt, Artificial Sequence
  Description of Artificial Sequence: Synthetic oligonucleotide
acacuuggaggucacaagu

SEQ ID NO: 571208 - RNA, 19 nt, Artificial Sequence
  Description of Artificial Sequence: Synthetic oligonucleotide
cugagcguggcccucagcc

SEQ ID NO: 571209 - RNA, 19 nt, Artificial Sequence
  Description of Artificial Sequence: Synthetic oligonucleotide
accacuucguaacauacau

SEQ ID NO: 571210 - RNA, 19 nt, Artificial Sequence
  Description of Artificial Sequence: Synthetic oligonucleotide
ucccauaccugacacgaca

SEQ ID NO: 571211 - RNA, 19 nt, Artificial Sequence
  Description of Artificial Sequence: Synthetic oligonucleotide
ucucccucaaaaugguagc

SEQ ID NO: 571212 - RNA, 19 nt, Artificial Sequence
  Description of Artificial Sequence: Synthetic oligonucleotide
ucucaaccccaaaaggcug

SEQ ID NO: 571213 - RNA, 19 nt, Artificial Sequence
  Description of Artificial Sequence: Synthetic oligonucleotide
ucuauuaacgagcgccauc

SEQ ID NO: 571214 - RNA, 19 nt, Artificial Sequence
  Description of Artificial Sequence: Synthetic oligonucleotide
guugggucgccaaaggagg

SEQ ID NO: 571215 - RNA, 19 nt, Artificial Sequence
  Description of Artificial Sequence: Synthetic oligonucleotide
ggcgacacggaguucaugg

SEQ ID NO: 571216 - RNA, 19 nt, Artificial Sequence
  Description of Artificial Sequence: Synthetic oligonucleotide
uuaacugcccaaccauacu

SEQ ID NO: 571217 - RNA, 19 nt, Artificial Sequence
  Description of Artificial Sequence: Synthetic oligonucleotide
cauacuugacguuauucca

SEQ ID NO: 571218 - RNA, 19 nt, Artificial Sequence
  Description of Artificial Sequence: Synthetic oligonucleotide
cugagagacguacaccacc

SEQ ID NO: 571219 - RNA, 19 nt, Artificial Sequence
  Description of Artificial Sequence: Synthetic oligonucleotide
agacguacaccaccaggcg

SEQ ID NO: 571220 - RNA, 19 nt, Artificial Sequence
  Description of Artificial Sequence: Synthetic oligonucleotide
uaugugagccacagucgag

SEQ ID NO: 571221 - RNA, 19 nt, Artificial Sequence
  Description of Artificial Sequence: Synthetic oligonucleotide
gaucccauaccugacacga

SEQ ID NO: 571222 - RNA, 19 nt, Artificial Sequence
  Description of Artificial Sequence: Synthetic oligonucleotide
agcgcuacucgguacgcgg

SEQ ID NO: 571223 - RNA, 19 nt, Artificial Sequence
  Description of Artificial Sequence: Synthetic oligonucleotide
cuguaggauggaaaugccc

SEQ ID NO: 571224 - RNA, 19 nt, Artificial Sequence
  Description of Artificial Sequence: Synthetic oligonucleotide
ugguagccaaugaaguaca

SEQ ID NO: 571225 - RNA, 19 nt, Artificial Sequence
  Description of Artificial Sequence: Synthetic oligonucleotide
cauccuacccagagaagcc

SEQ ID NO: 571226 - RNA, 19 nt, Artificial Sequence
  Description of Artificial Sequence: Synthetic oligonucleotide
gaggggucgauuccaguag

SEQ ID NO: 571227 - RNA, 19 nt, Artificial Sequence
  Description of Artificial Sequence: Synthetic oligonucleotide
agcagcgcuacucgguacg

SEQ ID NO: 571228 - RNA, 19 nt, Artificial Sequence
  Description of Artificial Sequence: Synthetic oligonucleotide
uaucgcuccgugacugagg

SEQ ID NO: 571229 - RNA, 19 nt, Artificial Sequence
  Description of Artificial Sequence: Synthetic oligonucleotide
uaccugacacgacauaaau

SEQ ID NO: 571230 - RNA, 19 nt, Artificial Sequence
  Description of Artificial Sequence: Synthetic oligonucleotide
uuauuccaggcugucagga

SEQ ID NO: 571231 - RNA, 19 nt, Artificial Sequence
  Description of Artificial Sequence: Synthetic oligonucleotide
agcguagaacccuauagua

SEQ ID NO: 571232 - RNA, 19 nt, Artificial Sequence
  Description of Artificial Sequence: Synthetic oligonucleotide
uggcacacacauccuaccc

SEQ ID NO: 571233 - RNA, 19 nt, Artificial Sequence
  Description of Artificial Sequence: Synthetic oligonucleotide
agccgacagagauugcagg

SEQ ID NO: 571234 - RNA, 19 nt, Artificial Sequence
  Description of Artificial Sequence: Synthetic oligonucleotide
ccugacacgacauaaauaa

SEQ ID NO: 571235 - RNA, 19 nt, Artificial Sequence
  Description of Artificial Sequence: Synthetic oligonucleotide
ucagccgacagagauugca

SEQ ID NO: 571236 - RNA, 19 nt, Artificial Sequence
  Description of Artificial Sequence: Synthetic oligonucleotide
aaggggaaagucagccugg

SEQ ID NO: 571237 - RNA, 19 nt, Artificial Sequence
  Description of Artificial Sequence: Synthetic oligonucleotide
uagccgauguagcccaaag

SEQ ID NO: 571238 - RNA, 19 nt, Artificial Sequence
  Description of Artificial Sequence: Synthetic oligonucleotide
cucaaccccaaaaggcugc

SEQ ID NO: 571239 - RNA, 19 nt, Artificial Sequence
  Description of Artificial Sequence: Synthetic oligonucleotide
agcacugccauuggaguuc

SEQ ID NO: 571240 - RNA, 19 nt, Artificial Sequence
  Description of Artificial Sequence: Synthetic oligonucleotide
guagcgucguccacaaagg

SEQ ID NO: 571241 - RNA, 19 nt, Artificial Sequence
  Description of Artificial Sequence: Synthetic oligonucleotide
ucauggacgcgccggggag

SEQ ID NO: 571242 - RNA, 19 nt, Artificial Sequence
  Description of Artificial Sequence: Synthetic oligonucleotide
ugguccggcuuuuaacugc

SEQ ID NO: 571243 - RNA, 19 nt, Artificial Sequence
  Description of Artificial Sequence: Synthetic oligonucleotide
uuggcacacacauccuacc

SEQ ID NO: 571244 - RNA, 19 nt, Artificial Sequence
  Description of Artificial Sequence: Synthetic oligonucleotide
uuugaaaccgcuggauguc

SEQ ID NO: 571245 - RNA, 19 nt, Artificial Sequence
  Description of Artificial Sequence: Synthetic oligonucleotide
gcagagcaacccuugaggg

SEQ ID NO: 571246 - RNA, 19 nt, Artificial Sequence
  Description of Artificial Sequence: Synthetic oligonucleotide
aguaguggggauccaagua

SEQ ID NO: 571247 - RNA, 19 nt, Artificial Sequence
  Description of Artificial Sequence: Synthetic oligonucleotide
uucauggacgcgccgggga

SEQ ID NO: 571248 - RNA, 19 nt, Artificial Sequence
  Description of Artificial Sequence: Synthetic oligonucleotide
uucugaccgaaggagcucc

SEQ ID NO: 571249 - RNA, 19 nt, Artificial Sequence
  Description of Artificial Sequence: Synthetic oligonucleotide
accgaaggagcuccuucac

SEQ ID NO: 571250 - RNA, 19 nt, Artificial Sequence
  Description of Artificial Sequence: Synthetic oligonucleotide
ucguaacauacauccccag

SEQ ID NO: 571251 - RNA, 19 nt, Artificial Sequence
  Description of Artificial Sequence: Synthetic oligonucleotide
ugacguuauuccaggcugu

SEQ ID NO: 571252 - RNA, 19 nt, Artificial Sequence
  Description of Artificial Sequence: Synthetic oligonucleotide
ggucucaaccccaaaaggc

SEQ ID NO: 571253 - RNA, 19 nt, Artificial Sequence
  Description of Artificial Sequence: Synthetic oligonucleotide
gacugcgagggcccgaggc

SEQ ID NO: 571254 - RNA, 19 nt, Artificial Sequence
  Description of Artificial Sequence: Synthetic oligonucleotide
uacagugagugccggggcu

SEQ ID NO: 571255 - RNA, 19 nt, Artificial Sequence
  Description of Artificial Sequence: Synthetic oligonucleotide
aucuugcggggcgaggugc

SEQ ID NO: 571256 - RNA, 19 nt, Artificial Sequence
  Description of Artificial Sequence: Synthetic oligonucleotide
uccgugacugaggaggagc

SEQ ID NO: 571257 - RNA, 19 nt, Artificial Sequence
  Description of Artificial Sequence: Synthetic oligonucleotide
caauccgccggugccaucg

SEQ ID NO: 571258 - RNA, 19 nt, Artificial Sequence
  Description of Artificial Sequence: Synthetic oligonucleotide
gaacccuauaguacagcug

SEQ ID NO: 571259 - RNA, 19 nt, Artificial Sequence
  Description of Artificial Sequence: Synthetic oligonucleotide
aagucccggcgauauguga

SEQ ID NO: 571260 - RNA, 19 nt, Artificial Sequence
  Description of Artificial Sequence: Synthetic oligonucleotide
gguuuagggucucaccacc

SEQ ID NO: 571261 - RNA, 19 nt, Artificial Sequence
  Description of Artificial Sequence: Synthetic oligonucleotide
cacccucucccucaaaaug

SEQ ID NO: 571262 - RNA, 19 nt, Artificial Sequence
  Description of Artificial Sequence: Synthetic oligonucleotide
ugaaaccgcuggaugucac

SEQ ID NO: 571263 - RNA, 19 nt, Artificial Sequence
  Description of Artificial Sequence: Synthetic oligonucleotide
aguucugaccgaaggagcu

SEQ ID NO: 571264 - RNA, 19 nt, Artificial Sequence
  Description of Artificial Sequence: Synthetic oligonucleotide
ggaaaugcccacagaagcc

SEQ ID NO: 571265 - RNA, 19 nt, Artificial Sequence
  Description of Artificial Sequence: Synthetic oligonucleotide
acccggguuucuauuaacg

SEQ ID NO: 571266 - RNA, 19 nt, Artificial Sequence
  Description of Artificial Sequence: Synthetic oligonucleotide
ccagcguagaacccuauag

SEQ ID NO: 571267 - RNA, 19 nt, Artificial Sequence
  Description of Artificial Sequence: Synthetic oligonucleotide
agacgugccacgucugccu

SEQ ID NO: 571268 - RNA, 19 nt, Artificial Sequence
  Description of Artificial Sequence: Synthetic oligonucleotide
caggcuaccuccacaacca

SEQ ID NO: 571269 - RNA, 19 nt, Artificial Sequence
  Description of Artificial Sequence: Synthetic oligonucleotide
ggguuucuauuaacgagcg

SEQ ID NO: 571270 - RNA, 19 nt, Artificial Sequence
  Description of Artificial Sequence: Synthetic oligonucleotide
cagccgacagagauugcag

SEQ ID NO: 571271 - RNA, 19 nt, Artificial Sequence
  Description of Artificial Sequence: Synthetic oligonucleotide
gaccccgaaggucccaggc

SEQ ID NO: 571272 - RNA, 19 nt, Artificial Sequence
  Description of Artificial Sequence: Synthetic oligonucleotide
uugggucgccaaaggagga

SEQ ID NO: 571273 - RNA, 19 nt, Artificial Sequence
  Description of Artificial Sequence: Synthetic oligonucleotide
cuauuaacgagcgccaucu

SEQ ID NO: 571274 - RNA, 19 nt, Artificial Sequence
  Description of Artificial Sequence: Synthetic oligonucleotide
cggguuucuauuaacgagc

SEQ ID NO: 571275 - RNA, 19 nt, Artificial Sequence
  Description of Artificial Sequence: Synthetic oligonucleotide
aauccgccggugccaucgg

SEQ ID NO: 571276 - RNA, 19 nt, Artificial Sequence
  Description of Artificial Sequence: Synthetic oligonucleotide
agucccggcgauaugugag

SEQ ID NO: 571277 - RNA, 19 nt, Artificial Sequence
  Description of Artificial Sequence: Synthetic oligonucleotide
gagagacguacaccaccag

SEQ ID NO: 571278 - RNA, 19 nt, Artificial Sequence
  Description of Artificial Sequence: Synthetic oligonucleotide
ccgauguagcccaaagggg

SEQ ID NO: 571279 - RNA, 19 nt, Artificial Sequence
  Description of Artificial Sequence: Synthetic oligonucleotide
aggugcagugaaaggacuc

SEQ ID NO: 571280 - RNA, 19 nt, Artificial Sequence
  Description of Artificial Sequence: Synthetic oligonucleotide
ccggguuucuauuaacgag

SEQ ID NO: 571281 - RNA, 19 nt, Artificial Sequence
  Description of Artificial Sequence: Synthetic oligonucleotide
cagugaacaugggguaucg

SEQ ID NO: 571282 - RNA, 19 nt, Artificial Sequence
  Description of Artificial Sequence: Synthetic oligonucleotide
ugagcguggcccucagcca

SEQ ID NO: 571283 - RNA, 19 nt, Artificial Sequence
  Description of Artificial Sequence: Synthetic oligonucleotide
cguuuugacuucaggaggc

SEQ ID NO: 571284 - RNA, 19 nt, Artificial Sequence
  Description of Artificial Sequence: Synthetic oligonucleotide
ggccguuuugacuucagga

SEQ ID NO: 571285 - RNA, 19 nt, Artificial Sequence
  Description of Artificial Sequence: Synthetic oligonucleotide
caccucgucaggcucggag

SEQ ID NO: 571286 - RNA, 19 nt, Artificial Sequence
  Description of Artificial Sequence: Synthetic oligonucleotide
ucggucggcgacccucggg

SEQ ID NO: 571287 - RNA, 19 nt, Artificial Sequence
  Description of Artificial Sequence: Synthetic oligonucleotide
cacggugacacuuggaggu

SEQ ID NO: 571288 - RNA, 19 nt, Artificial Sequence
  Description of Artificial Sequence: Synthetic oligonucleotide
ucggaggggucgauuccag

SEQ ID NO: 571289 - RNA, 19 nt, Artificial Sequence
  Description of Artificial Sequence: Synthetic oligonucleotide
uagcgucguccacaaaggu

SEQ ID NO: 571290 - RNA, 19 nt, Artificial Sequence
  Description of Artificial Sequence: Synthetic oligonucleotide
guacagugagugccggggc

SEQ ID NO: 571291 - RNA, 19 nt, Artificial Sequence
  Description of Artificial Sequence: Synthetic oligonucleotide
caacccuugagggccacag

SEQ ID NO: 571292 - RNA, 19 nt, Artificial Sequence
  Description of Artificial Sequence: Synthetic oligonucleotide
agagccuagcgccgccccg

SEQ ID NO: 571293 - RNA, 19 nt, Artificial Sequence
  Description of Artificial Sequence: Synthetic oligonucleotide
acagagggcccguaccagu

SEQ ID NO: 571294 - RNA, 19 nt, Artificial Sequence
  Description of Artificial Sequence: Synthetic oligonucleotide
ucuugcggggcgaggugca

SEQ ID NO: 571295 - RNA, 19 nt, Artificial Sequence
  Description of Artificial Sequence: Synthetic oligonucleotide
agcgucguccacaaaggug

SEQ ID NO: 571296 - RNA, 19 nt, Artificial Sequence
  Description of Artificial Sequence: Synthetic oligonucleotide
acucgguacgcggugccgg

SEQ ID NO: 571297 - RNA, 19 nt, Artificial Sequence
  Description of Artificial Sequence: Synthetic oligonucleotide
cacaaguucagccgacaga

SEQ ID NO: 571298 - RNA, 19 nt, Artificial Sequence
  Description of Artificial Sequence: Synthetic oligonucleotide
cugguccggcuuuuaacug

SEQ ID NO: 571299 - RNA, 19 nt, Artificial Sequence
  Description of Artificial Sequence: Synthetic oligonucleotide
acgcggguguucccugagc

SEQ ID NO: 571300 - RNA, 19 nt, Artificial Sequence
  Description of Artificial Sequence: Synthetic oligonucleotide
gcccguaccagucuccugc

SEQ ID NO: 571301 - RNA, 19 nt, Artificial Sequence
  Description of Artificial Sequence: Synthetic oligonucleotide
gccgacagagauugcaggc

SEQ ID NO: 571302 - RNA, 19 nt, Artificial Sequence
  Description of Artificial Sequence: Synthetic oligonucleotide
uucuauuaacgagcgccau

SEQ ID NO: 571303 - RNA, 19 nt, Artificial Sequence
  Description of Artificial Sequence: Synthetic oligonucleotide
cacuagccgauguagccca

SEQ ID NO: 571304 - RNA, 19 nt, Artificial Sequence
  Description of Artificial Sequence: Synthetic oligonucleotide
gagugccggggcuugcccc

SEQ ID NO: 571305 - RNA, 19 nt, Artificial Sequence
  Description of Artificial Sequence: Synthetic oligonucleotide
aggggucgauuccaguaga

SEQ ID NO: 571306 - RNA, 19 nt, Artificial Sequence
  Description of Artificial Sequence: Synthetic oligonucleotide
aucugaccacuucguaaca

SEQ ID NO: 571307 - RNA, 19 nt, Artificial Sequence
  Description of Artificial Sequence: Synthetic oligonucleotide
cuacucgguacgcggugcc

SEQ ID NO: 571308 - RNA, 19 nt, Artificial Sequence
  Description of Artificial Sequence: Synthetic oligonucleotide
augguagcgucguccacaa

SEQ ID NO: 571309 - RNA, 19 nt, Artificial Sequence
  Description of Artificial Sequence: Synthetic oligonucleotide
gguacugcgccgcggcagg

SEQ ID NO: 571310 - RNA, 19 nt, Artificial Sequence
  Description of Artificial Sequence: Synthetic oligonucleotide
uacucgguacgcggugccg

SEQ ID NO: 571311 - RNA, 19 nt, Artificial Sequence
  Description of Artificial Sequence: Synthetic oligonucleotide
guaucgcuccgugacugag

SEQ ID NO: 571312 - RNA, 19 nt, Artificial Sequence
  Description of Artificial Sequence: Synthetic oligonucleotide
gaagucccggcgauaugug

SEQ ID NO: 571313 - RNA, 19 nt, Artificial Sequence
  Description of Artificial Sequence: Synthetic oligonucleotide
cuguauuggggaggauggg

SEQ ID NO: 571314 - RNA, 19 nt, Artificial Sequence
  Description of Artificial Sequence: Synthetic oligonucleotide
ggcgaggugcagugaaagg

SEQ ID NO: 571315 - RNA, 19 nt, Artificial Sequence
  Description of Artificial Sequence: Synthetic oligonucleotide
ugggccguuuugacuucag

SEQ ID NO: 571316 - RNA, 19 nt, Artificial Sequence
  Description of Artificial Sequence: Synthetic oligonucleotide
cucgguacgcggugccggg

SEQ ID NO: 571317 - RNA, 19 nt, Artificial Sequence
  Description of Artificial Sequence: Synthetic oligonucleotide
gucggcgacccucgggccg

SEQ ID NO: 571318 - RNA, 19 nt, Artificial Sequence
  Description of Artificial Sequence: Synthetic oligonucleotide
ugcugggucccacggugac

SEQ ID NO: 571319 - RNA, 19 nt, Artificial Sequence
  Description of Artificial Sequence: Synthetic oligonucleotide
ugaccccgaaggucccagg

SEQ ID NO: 571320 - RNA, 19 nt, Artificial Sequence
  Description of Artificial Sequence: Synthetic oligonucleotide
cugcccaaccauacuugac

SEQ ID NO: 571321 - RNA, 19 nt, Artificial Sequence
  Description of Artificial Sequence: Synthetic oligonucleotide
ccgauaacggcugggagag

SEQ ID NO: 571322 - RNA, 19 nt, Artificial Sequence
  Description of Artificial Sequence: Synthetic oligonucleotide
gucccggcgauaugugagc

SEQ ID NO: 571323 - RNA, 19 nt, Artificial Sequence
  Description of Artificial Sequence: Synthetic oligonucleotide
uccgccggugccaucgguc

SEQ ID NO: 571324 - RNA, 19 nt, Artificial Sequence
  Description of Artificial Sequence: Synthetic oligonucleotide
gagacccauguggccaagg

SEQ ID NO: 571325 - RNA, 19 nt, Artificial Sequence
  Description of Artificial Sequence: Synthetic oligonucleotide
gaacccggguuucuauuaa

SEQ ID NO: 571326 - RNA, 19 nt, Artificial Sequence
  Description of Artificial Sequence: Synthetic oligonucleotide
ucugaccgaaggagcuccu

SEQ ID NO: 571327 - RNA, 19 nt, Artificial Sequence
  Description of Artificial Sequence: Synthetic oligonucleotide
gaccacuucguaacauaca

SEQ ID NO: 571328 - RNA, 19 nt, Artificial Sequence
  Description of Artificial Sequence: Synthetic oligonucleotide
agugagugccggggcuugc

SEQ ID NO: 571329 - RNA, 19 nt, Artificial Sequence
  Description of Artificial Sequence: Synthetic oligonucleotide
cagucgagauacaaagucu

SEQ ID NO: 571330 - RNA, 19 nt, Artificial Sequence
  Description of Artificial Sequence: Synthetic oligonucleotide
cauccccagccacagucug

SEQ ID NO: 571331 - RNA, 19 nt, Artificial Sequence
  Description of Artificial Sequence: Synthetic oligonucleotide
uguccccucggucggcgac

SEQ ID NO: 571332 - RNA, 19 nt, Artificial Sequence
  Description of Artificial Sequence: Synthetic oligonucleotide
aggaaggacgcggguguuc

SEQ ID NO: 571333 - RNA, 19 nt, Artificial Sequence
  Description of Artificial Sequence: Synthetic oligonucleotide
uauuaacgagcgccaucuu

SEQ ID NO: 571334 - RNA, 19 nt, Artificial Sequence
  Description of Artificial Sequence: Synthetic oligonucleotide
gucucaaccccaaaaggcu

SEQ ID NO: 571335 - RNA, 19 nt, Artificial Sequence
  Description of Artificial Sequence: Synthetic oligonucleotide
gguuucuauuaacgagcgc

SEQ ID NO: 571336 - RNA, 19 nt, Artificial Sequence
  Description of Artificial Sequence: Synthetic oligonucleotide
gacguuauuccaggcuguc

SEQ ID NO: 571337 - RNA, 19 nt, Artificial Sequence
  Description of Artificial Sequence: Synthetic oligonucleotide
cagagggcccguaccaguc

SEQ ID NO: 571338 - RNA, 19 nt, Artificial Sequence
  Description of Artificial Sequence: Synthetic oligonucleotide
ccacggugacacuuggagg

SEQ ID NO: 571339 - RNA, 19 nt, Artificial Sequence
  Description of Artificial Sequence: Synthetic oligonucleotide
guucauggacgcgccgggg

SEQ ID NO: 571340 - RNA, 19 nt, Artificial Sequence
  Description of Artificial Sequence: Synthetic oligonucleotide
cucaccacccagucgcaca

SEQ ID NO: 571341 - RNA, 19 nt, Artificial Sequence
  Description of Artificial Sequence: Synthetic oligonucleotide
agccuagcgccgccccgcc

SEQ ID NO: 571342 - RNA, 19 nt, Artificial Sequence
  Description of Artificial Sequence: Synthetic oligonucleotide
accccgaaggucccaggcu

SEQ ID NO: 571343 - RNA, 19 nt, Artificial Sequence
  Description of Artificial Sequence: Synthetic oligonucleotide
ggguuuagggucucaccac

SEQ ID NO: 571344 - RNA, 19 nt, Artificial Sequence
  Description of Artificial Sequence: Synthetic oligonucleotide
cgcuccgugacugaggagg

SEQ ID NO: 571345 - RNA, 19 nt, Artificial Sequence
  Description of Artificial Sequence: Synthetic oligonucleotide
cucaaaaugguagcgucgu

SEQ ID NO: 571346 - RNA, 19 nt, Artificial Sequence
  Description of Artificial Sequence: Synthetic oligonucleotide
cugaggaugugugccacca

SEQ ID NO: 571347 - RNA, 19 nt, Artificial Sequence
  Description of Artificial Sequence: Synthetic oligonucleotide
gacgcgccggggaggaagg

SEQ ID NO: 571348 - RNA, 19 nt, Artificial Sequence
  Description of Artificial Sequence: Synthetic oligonucleotide
gcguagaacccuauaguac

SEQ ID NO: 571349 - RNA, 19 nt, Artificial Sequence
  Description of Artificial Sequence: Synthetic oligonucleotide
ccaguagagccuagcgccg

SEQ ID NO: 571350 - RNA, 19 nt, Artificial Sequence
  Description of Artificial Sequence: Synthetic oligonucleotide
ucccggcgauaugugagcc

SEQ ID NO: 571351 - RNA, 19 nt, Artificial Sequence
  Description of Artificial Sequence: Synthetic oligonucleotide
cccuauaguacagcugggg

SEQ ID NO: 571352 - RNA, 19 nt, Artificial Sequence
  Description of Artificial Sequence: Synthetic oligonucleotide
ugggauccgggacccgggu

SEQ ID NO: 571353 - RNA, 19 nt, Artificial Sequence
  Description of Artificial Sequence: Synthetic oligonucleotide
ggaguucauggacgcgccg

SEQ ID NO: 571354 - RNA, 19 nt, Artificial Sequence
  Description of Artificial Sequence: Synthetic oligonucleotide
acggugacacuuggagguc

SEQ ID NO: 571355 - RNA, 19 nt, Artificial Sequence
  Description of Artificial Sequence: Synthetic oligonucleotide
gucgccaaaggaggaaaca

SEQ ID NO: 571356 - RNA, 19 nt, Artificial Sequence
  Description of Artificial Sequence: Synthetic oligonucleotide
ugccuucuugccagagcuc

SEQ ID NO: 571357 - RNA, 19 nt, Artificial Sequence
  Description of Artificial Sequence: Synthetic oligonucleotide
ccagucucuaggcagaaaa

SEQ ID NO: 571358 - RNA, 19 nt, Artificial Sequence
  Description of Artificial Sequence: Synthetic oligonucleotide
aucccauaccugacacgac

SEQ ID NO: 571359 - RNA, 19 nt, Artificial Sequence
  Description of Artificial Sequence: Synthetic oligonucleotide
acguuauuccaggcuguca

SEQ ID NO: 571360 - RNA, 19 nt, Artificial Sequence
  Description of Artificial Sequence: Synthetic oligonucleotide
cauggacgcgccggggagg

SEQ ID NO: 571361 - RNA, 19 nt, Artificial Sequence
  Description of Artificial Sequence: Synthetic oligonucleotide
gagcagcgcuacucgguac

SEQ ID NO: 571362 - RNA, 19 nt, Artificial Sequence
  Description of Artificial Sequence: Synthetic oligonucleotide
caucuugcggggcgaggug

SEQ ID NO: 571363 - RNA, 19 nt, Artificial Sequence
  Description of Artificial Sequence: Synthetic oligonucleotide
ccaguugggucgccaaagg

SEQ ID NO: 571364 - RNA, 19 nt, Artificial Sequence
  Description of Artificial Sequence: Synthetic oligonucleotide
gagggcccguaccagucuc

SEQ ID NO: 571365 - RNA, 19 nt, Artificial Sequence
  Description of Artificial Sequence: Synthetic oligonucleotide
caguugggucgccaaagga

SEQ ID NO: 571366 - RNA, 19 nt, Artificial Sequence
  Description of Artificial Sequence: Synthetic oligonucleotide
gggccguuuugacuucagg

SEQ ID NO: 571367 - RNA, 19 nt, Artificial Sequence
  Description of Artificial Sequence: Synthetic oligonucleotide
ggaggggucgauuccagua

SEQ ID NO: 571368 - RNA, 19 nt, Artificial Sequence
  Description of Artificial Sequence: Synthetic oligonucleotide
uguugggauccgggacccg

SEQ ID NO: 571369 - RNA, 19 nt, Artificial Sequence
  Description of Artificial Sequence: Synthetic oligonucleotide
gagccuagcgccgccccgc

SEQ ID NO: 571370 - RNA, 19 nt, Artificial Sequence
  Description of Artificial Sequence: Synthetic oligonucleotide
gggucgauuccaguagagc

SEQ ID NO: 571371 - RNA, 19 nt, Artificial Sequence
  Description of Artificial Sequence: Synthetic oligonucleotide
cagcguagaacccuauagu

SEQ ID NO: 571372 - RNA, 19 nt, Artificial Sequence
  Description of Artificial Sequence: Synthetic oligonucleotide
ggacaccagacgugccacg

SEQ ID NO: 571373 - RNA, 19 nt, Artificial Sequence
  Description of Artificial Sequence: Synthetic oligonucleotide
accugacacgacauaaaua

SEQ ID NO: 571374 - RNA, 19 nt, Artificial Sequence
  Description of Artificial Sequence: Synthetic oligonucleotide
gcugguccggcuuuuaacu

SEQ ID NO: 571375 - RNA, 19 nt, Artificial Sequence
  Description of Artificial Sequence: Synthetic oligonucleotide
agccacagucgagauacaa

SEQ ID NO: 571376 - RNA, 19 nt, Artificial Sequence
  Description of Artificial Sequence: Synthetic oligonucleotide
acaauccgccggugccauc

SEQ ID NO: 571377 - RNA, 19 nt, Artificial Sequence
  Description of Artificial Sequence: Synthetic oligonucleotide
ggaggcguccugagcaagg

SEQ ID NO: 571378 - RNA, 19 nt, Artificial Sequence
  Description of Artificial Sequence: Synthetic oligonucleotide
ggguaucgcuccgugacug

SEQ ID NO: 571379 - RNA, 19 nt, Artificial Sequence
  Description of Artificial Sequence: Synthetic oligonucleotide
cugcgagggcccgaggcgc

SEQ ID NO: 571380 - RNA, 19 nt, Artificial Sequence
  Description of Artificial Sequence: Synthetic oligonucleotide
ccagagcagcgcuacucgg

SEQ ID NO: 571381 - RNA, 19 nt, Artificial Sequence
  Description of Artificial Sequence: Synthetic oligonucleotide
aguucagccgacagagauu

SEQ ID NO: 571382 - RNA, 19 nt, Artificial Sequence
  Description of Artificial Sequence: Synthetic oligonucleotide
gguagccaaugaaguacag

SEQ ID NO: 571383 - RNA, 19 nt, Artificial Sequence
  Description of Artificial Sequence: Synthetic oligonucleotide
gguccggcuuuuaacugcc

SEQ ID NO: 571384 - RNA, 19 nt, Artificial Sequence
  Description of Artificial Sequence: Synthetic oligonucleotide
ugggucgccaaaggaggaa

SEQ ID NO: 571385 - RNA, 19 nt, Artificial Sequence
  Description of Artificial Sequence: Synthetic oligonucleotide
ggcucggaggggucgauuc

SEQ ID NO: 571386 - RNA, 19 nt, Artificial Sequence
  Description of Artificial Sequence: Synthetic oligonucleotide
gcaggcgacacggaguuca

SEQ ID NO: 571387 - RNA, 19 nt, Artificial Sequence
  Description of Artificial Sequence: Synthetic oligonucleotide
ggaucuggccaggacacca

SEQ ID NO: 571388 - RNA, 19 nt, Artificial Sequence
  Description of Artificial Sequence: Synthetic oligonucleotide
ugagacccauguggccaag

SEQ ID NO: 571389 - RNA, 19 nt, Artificial Sequence
  Description of Artificial Sequence: Synthetic oligonucleotide
gccgcggcaggcgacacgg

SEQ ID NO: 571390 - RNA, 19 nt, Artificial Sequence
  Description of Artificial Sequence: Synthetic oligonucleotide
guucugaccgaaggagcuc

SEQ ID NO: 571391 - RNA, 19 nt, Artificial Sequence
  Description of Artificial Sequence: Synthetic oligonucleotide
ggacaugaggacagggauc

SEQ ID NO: 571392 - RNA, 19 nt, Artificial Sequence
  Description of Artificial Sequence: Synthetic oligonucleotide
caaguucagccgacagaga

SEQ ID NO: 571393 - RNA, 19 nt, Artificial Sequence
  Description of Artificial Sequence: Synthetic oligonucleotide
ggaagucccggcgauaugu

SEQ ID NO: 571394 - RNA, 19 nt, Artificial Sequence
  Description of Artificial Sequence: Synthetic oligonucleotide
ggaacccggguuucuauua

SEQ ID NO: 571395 - RNA, 19 nt, Artificial Sequence
  Description of Artificial Sequence: Synthetic oligonucleotide
gccuagccaggucuggcug

SEQ ID NO: 571396 - RNA, 19 nt, Artificial Sequence
  Description of Artificial Sequence: Synthetic oligonucleotide
cagcgcuacucgguacgcg

SEQ ID NO: 571397 - RNA, 19 nt, Artificial Sequence
  Description of Artificial Sequence: Synthetic oligonucleotide
ccugagagacguacaccac

SEQ ID NO: 571398 - RNA, 19 nt, Artificial Sequence
  Description of Artificial Sequence: Synthetic oligonucleotide
uccgccaguugggucgcca

SEQ ID NO: 571399 - RNA, 19 nt, Artificial Sequence
  Description of Artificial Sequence: Synthetic oligonucleotide
caguaguggggauccaagu

SEQ ID NO: 571400 - RNA, 19 nt, Artificial Sequence
  Description of Artificial Sequence: Synthetic oligonucleotide
ggcacauacacaggguuua

SEQ ID NO: 571401 - RNA, 19 nt, Artificial Sequence
  Description of Artificial Sequence: Synthetic oligonucleotide
cuccgagcacuucuccaca

SEQ ID NO: 571402 - RNA, 19 nt, Artificial Sequence
  Description of Artificial Sequence: Synthetic oligonucleotide
caccagacgugccacgucu

SEQ ID NO: 571403 - RNA, 19 nt, Artificial Sequence
  Description of Artificial Sequence: Synthetic oligonucleotide
ccaaccauacuugacguua

SEQ ID NO: 571404 - RNA, 19 nt, Artificial Sequence
  Description of Artificial Sequence: Synthetic oligonucleotide
cucggaggggucgauucca

SEQ ID NO: 571405 - RNA, 19 nt, Artificial Sequence
  Description of Artificial Sequence: Synthetic oligonucleotide
caagcuccacuagccgaug

SEQ ID NO: 571406 - RNA, 19 nt, Artificial Sequence
  Description of Artificial Sequence: Synthetic oligonucleotide
uccagucucuaggcagaaa

SEQ ID NO: 571407 - RNA, 19 nt, Artificial Sequence
  Description of Artificial Sequence: Synthetic oligonucleotide
ggggucgauuccaguagag

SEQ ID NO: 571408 - RNA, 19 nt, Artificial Sequence
  Description of Artificial Sequence: Synthetic oligonucleotide
ccggcgauaugugagccac

SEQ ID NO: 571409 - RNA, 19 nt, Artificial Sequence
  Description of Artificial Sequence: Synthetic oligonucleotide
auggacgcgccggggagga

SEQ ID NO: 571410 - RNA, 19 nt, Artificial Sequence
  Description of Artificial Sequence: Synthetic oligonucleotide
gcuacucgguacgcggugc

SEQ ID NO: 571411 - RNA, 19 nt, Artificial Sequence
  Description of Artificial Sequence: Synthetic oligonucleotide
ucccagcguagaacccuau

SEQ ID NO: 571412 - RNA, 19 nt, Artificial Sequence
  Description of Artificial Sequence: Synthetic oligonucleotide
cccggguuucuauuaacga

SEQ ID NO: 571413 - RNA, 19 nt, Artificial Sequence
  Description of Artificial Sequence: Synthetic oligonucleotide
ccuauaguacagcuggggu

SEQ ID NO: 571414 - RNA, 19 nt, Artificial Sequence
  Description of Artificial Sequence: Synthetic oligonucleotide
gcaggcauuuggucucaac

SEQ ID NO: 571415 - RNA, 19 nt, Artificial Sequence
  Description of Artificial Sequence: Synthetic oligonucleotide
ugcgggaacccggguuucu

SEQ ID NO: 571416 - RNA, 19 nt, Artificial Sequence
  Description of Artificial Sequence: Synthetic oligonucleotide
ggacgcgccggggaggaag

SEQ ID NO: 571417 - RNA, 19 nt, Artificial Sequence
  Description of Artificial Sequence: Synthetic oligonucleotide
cagagcagcgcuacucggu

SEQ ID NO: 571418 - RNA, 19 nt, Artificial Sequence
  Description of Artificial Sequence: Synthetic oligonucleotide
ucgguacgcggugccgggc

SEQ ID NO: 571419 - RNA, 19 nt, Artificial Sequence
  Description of Artificial Sequence: Synthetic oligonucleotide
accagacgugccacgucug

SEQ ID NO: 571420 - RNA, 19 nt, Artificial Sequence
  Description of Artificial Sequence: Synthetic oligonucleotide
uugcggggcgaggugcagu

SEQ ID NO: 571421 - RNA, 19 nt, Artificial Sequence
  Description of Artificial Sequence: Synthetic oligonucleotide
caaccauacuugacguuau

SEQ ID NO: 571422 - RNA, 19 nt, Artificial Sequence
  Description of Artificial Sequence: Synthetic oligonucleotide
ggucacaaguucagccgac

SEQ ID NO: 571423 - RNA, 19 nt, Artificial Sequence
  Description of Artificial Sequence: Synthetic oligonucleotide
cagugagugccggggcuug

SEQ ID NO: 571424 - RNA, 19 nt, Artificial Sequence
  Description of Artificial Sequence: Synthetic oligonucleotide
gucacagggcaaggccagc

SEQ ID NO: 571425 - RNA, 19 nt, Artificial Sequence
  Description of Artificial Sequence: Synthetic oligonucleotide
gguaucgcuccgugacuga

SEQ ID NO: 571426 - RNA, 19 nt, Artificial Sequence
  Description of Artificial Sequence: Synthetic oligonucleotide
guacgcggugccgggcucc

SEQ ID NO: 571427 - RNA, 19 nt, Artificial Sequence
  Description of Artificial Sequence: Synthetic oligonucleotide
ccucggucggcgacccucg

SEQ ID NO: 571428 - RNA, 19 nt, Artificial Sequence
  Description of Artificial Sequence: Synthetic oligonucleotide
cucggucggcgacccucgg

SEQ ID NO: 571429 - RNA, 19 nt, Artificial Sequence
  Description of Artificial Sequence: Synthetic oligonucleotide
uacgcggugccgggcuccc

SEQ ID NO: 571430 - RNA, 19 nt, Artificial Sequence
  Description of Artificial Sequence: Synthetic oligonucleotide
gggacugcgagggcccgag

SEQ ID NO: 571431 - RNA, 19 nt, Artificial Sequence
  Description of Artificial Sequence: Synthetic oligonucleotide
gggcaaggccagcccacag

SEQ ID NO: 571432 - RNA, 19 nt, Artificial Sequence
  Description of Artificial Sequence: Synthetic oligonucleotide
ccgagcacuucuccacagc

SEQ ID NO: 571433 - RNA, 19 nt, Artificial Sequence
  Description of Artificial Sequence: Synthetic oligonucleotide
ccgccggugccaucggucc

SEQ ID NO: 571434 - RNA, 19 nt, Artificial Sequence
  Description of Artificial Sequence: Synthetic oligonucleotide
cuaccuccacaaccaagcu

SEQ ID NO: 571435 - RNA, 19 nt, Artificial Sequence
  Description of Artificial Sequence: Synthetic oligonucleotide
auccgccggugccaucggu

SEQ ID NO: 571436 - RNA, 19 nt, Artificial Sequence
  Description of Artificial Sequence: Synthetic oligonucleotide
cggaguucauggacgcgcc

SEQ ID NO: 571437 - RNA, 19 nt, Artificial Sequence
  Description of Artificial Sequence: Synthetic oligonucleotide
aggcgacacggaguucaug

SEQ ID NO: 571438 - RNA, 19 nt, Artificial Sequence
  Description of Artificial Sequence: Synthetic oligonucleotide
cccguaccagucuccugcc

SEQ ID NO: 571439 - RNA, 19 nt, Artificial Sequence
  Description of Artificial Sequence: Synthetic oligonucleotide
gcccaaccauacuugacgu

SEQ ID NO: 571440 - RNA, 19 nt, Artificial Sequence
  Description of Artificial Sequence: Synthetic oligonucleotide
gcgacacggaguucaugga

SEQ ID NO: 571441 - RNA, 19 nt, Artificial Sequence
  Description of Artificial Sequence: Synthetic oligonucleotide
gggaagucccggcgauaug

SEQ ID NO: 571442 - RNA, 19 nt, Artificial Sequence
  Description of Artificial Sequence: Synthetic oligonucleotide
caccacccagucgcacagg

SEQ ID NO: 571443 - RNA, 19 nt, Artificial Sequence
  Description of Artificial Sequence: Synthetic oligonucleotide
ccaucgguccugcuccauc

SEQ ID NO: 571444 - RNA, 19 nt, Artificial Sequence
  Description of Artificial Sequence: Synthetic oligonucleotide
ccggcuuuuaacugcccaa

SEQ ID NO: 571445 - RNA, 19 nt, Artificial Sequence
  Description of Artificial Sequence: Synthetic oligonucleotide
ggggccuagccaggucugg

SEQ ID NO: 571446 - RNA, 19 nt, Artificial Sequence
  Description of Artificial Sequence: Synthetic oligonucleotide
agccaacuucccagaggca

SEQ ID NO: 571447 - RNA, 19 nt, Artificial Sequence
  Description of Artificial Sequence: Synthetic oligonucleotide
ccucagucugagacccaug

SEQ ID NO: 571448 - RNA, 19 nt, Artificial Sequence
  Description of Artificial Sequence: Synthetic oligonucleotide
ugggucccacggugacacu

SEQ ID NO: 571449 - RNA, 19 nt, Artificial Sequence
  Description of Artificial Sequence: Synthetic oligonucleotide
guccggcuuuuaacugccc

SEQ ID NO: 571450 - RNA, 19 nt, Artificial Sequence
  Description of Artificial Sequence: Synthetic oligonucleotide
cggcuuuuaacugcccaac

SEQ ID NO: 571451 - RNA, 19 nt, Artificial Sequence
  Description of Artificial Sequence: Synthetic oligonucleotide
cuagccgauguagcccaaa

SEQ ID NO: 571452 - RNA, 19 nt, Artificial Sequence
  Description of Artificial Sequence: Synthetic oligonucleotide
gcagcgcuacucgguacgc

SEQ ID NO: 571453 - RNA, 19 nt, Artificial Sequence
  Description of Artificial Sequence: Synthetic oligonucleotide
gggacccgggucugucccc

SEQ ID NO: 571454 - RNA, 19 nt, Artificial Sequence
  Description of Artificial Sequence: Synthetic oligonucleotide
guacugcgccgcggcaggc

SEQ ID NO: 571455 - RNA, 19 nt, Artificial Sequence
  Description of Artificial Sequence: Synthetic oligonucleotide
ccgaaggagcuccuucaca

SEQ ID NO: 571456 - RNA, 19 nt, Artificial Sequence
  Description of Artificial Sequence: Synthetic oligonucleotide
gggauccgggacccggguc

SEQ ID NO: 571457 - RNA, 19 nt, Artificial Sequence
  Description of Artificial Sequence: Synthetic oligonucleotide
gggucgccaaaggaggaaa

SEQ ID NO: 571458 - RNA, 19 nt, Artificial Sequence
  Description of Artificial Sequence: Synthetic oligonucleotide
guccugagcguggcccuca

SEQ ID NO: 571459 - RNA, 19 nt, Artificial Sequence
  Description of Artificial Sequence: Synthetic oligonucleotide
gguacgcggugccgggcuc

SEQ ID NO: 571460 - RNA, 19 nt, Artificial Sequence
  Description of Artificial Sequence: Synthetic oligonucleotide
gccggugccaucgguccug

SEQ ID NO: 571461 - RNA, 19 nt, Artificial Sequence
  Description of Artificial Sequence: Synthetic oligonucleotide
cugggccguuuugacuuca

SEQ ID NO: 571462 - RNA, 19 nt, Artificial Sequence
  Description of Artificial Sequence: Synthetic oligonucleotide
ggccuagccaggucuggcu

SEQ ID NO: 571463 - RNA, 19 nt, Artificial Sequence
  Description of Artificial Sequence: Synthetic oligonucleotide
cgacccucgggccggcgcg

SEQ ID NO: 571464 - RNA, 19 nt, Artificial Sequence
  Description of Artificial Sequence: Synthetic oligonucleotide
cgggacccgggucuguccc

SEQ ID NO: 571465 - RNA, 19 nt, Artificial Sequence
  Description of Artificial Sequence: Synthetic oligonucleotide
gagccacagucgagauaca

SEQ ID NO: 571466 - RNA, 19 nt, Artificial Sequence
  Description of Artificial Sequence: Synthetic oligonucleotide
acuagccgauguagcccaa

SEQ ID NO: 571467 - RNA, 19 nt, Artificial Sequence
  Description of Artificial Sequence: Synthetic oligonucleotide
gcugggccguuuugacuuc

SEQ ID NO: 571468 - RNA, 19 nt, Artificial Sequence
  Description of Artificial Sequence: Synthetic oligonucleotide
ggccaucuugcggggcgag

SEQ ID NO: 571469 - RNA, 19 nt, Artificial Sequence
  Description of Artificial Sequence: Synthetic oligonucleotide
cgcuacucgguacgcggug

SEQ ID NO: 571470 - RNA, 19 nt, Artificial Sequence
  Description of Artificial Sequence: Synthetic oligonucleotide
cuguccccucggucggcga

SEQ ID NO: 571471 - RNA, 19 nt, Artificial Sequence
  Description of Artificial Sequence: Synthetic oligonucleotide
cccucggucggcgacccuc

SEQ ID NO: 571472 - RNA, 19 nt, Artificial Sequence
  Description of Artificial Sequence: Synthetic oligonucleotide
ggggaaagucagccuggcu

SEQ ID NO: 571473 - RNA, 19 nt, Artificial Sequence
  Description of Artificial Sequence: Synthetic oligonucleotide
gggaacccggguuucuauu

SEQ ID NO: 571474 - RNA, 19 nt, Artificial Sequence
  Description of Artificial Sequence: Synthetic oligonucleotide
ccauaccugacacgacaua

SEQ ID NO: 571475 - RNA, 19 nt, Artificial Sequence
  Description of Artificial Sequence: Synthetic oligonucleotide
aggcucggaggggucgauu

SEQ ID NO: 571476 - RNA, 19 nt, Artificial Sequence
  Description of Artificial Sequence: Synthetic oligonucleotide
gugggaagucccggcgaua

SEQ ID NO: 571477 - RNA, 19 nt, Artificial Sequence
  Description of Artificial Sequence: Synthetic oligonucleotide
ccgugacugaggaggagcu

SEQ ID NO: 571478 - RNA, 19 nt, Artificial Sequence
  Description of Artificial Sequence: Synthetic oligonucleotide
cgguacugcgccgcggcag

SEQ ID NO: 571479 - RNA, 19 nt, Artificial Sequence
  Description of Artificial Sequence: Synthetic oligonucleotide
cccauaccugacacgacau

SEQ ID NO: 571480 - RNA, 19 nt, Artificial Sequence
  Description of Artificial Sequence: Synthetic oligonucleotide
ccuagccaggucuggcugu

SEQ ID NO: 571481 - RNA, 19 nt, Artificial Sequence
  Description of Artificial Sequence: Synthetic oligonucleotide
cccggcgauaugugagcca

SEQ ID NO: 571482 - RNA, 19 nt, Artificial Sequence
  Description of Artificial Sequence: Synthetic oligonucleotide
gcgguacugcgccgcggca

SEQ ID NO: 571483 - RNA, 19 nt, Artificial Sequence
  Description of Artificial Sequence: Synthetic oligonucleotide
cccagcguagaacccuaua

SEQ ID NO: 571484 - RNA, 19 nt, Artificial Sequence
  Description of Artificial Sequence: Synthetic oligonucleotide
ggggcgaggugcagugaaa

SEQ ID NO: 571485 - RNA, 19 nt, Artificial Sequence
  Description of Artificial Sequence: Synthetic oligonucleotide
caggcgacacggaguucau

SEQ ID NO: 571486 - RNA, 19 nt, Artificial Sequence
  Description of Artificial Sequence: Synthetic oligonucleotide
ggcucccgcugcgguacug

SEQ ID NO: 571487 - RNA, 19 nt, Artificial Sequence
  Description of Artificial Sequence: Synthetic oligonucleotide
gcgcgcguccuccgggcuc

SEQ ID NO: 571488 - RNA, 19 nt, Artificial Sequence
  Description of Artificial Sequence: Synthetic oligonucleotide
cgcgcguccuccgggcucc

SEQ ID NO: 571489 - RNA, 19 nt, Artificial Sequence
  Description of Artificial Sequence: Synthetic oligonucleotide
gcggcaggcgacacggagu

SEQ ID NO: 571490 - RNA, 19 nt, Artificial Sequence
  Description of Artificial Sequence: Synthetic oligonucleotide
gggucccacggugacacuu

SEQ ID NO: 571491 - RNA, 19 nt, Artificial Sequence
  Description of Artificial Sequence: Synthetic oligonucleotide
ggcgacccucgggccggcg

SEQ ID NO: 571492 - RNA, 19 nt, Artificial Sequence
  Description of Artificial Sequence: Synthetic oligonucleotide
ggacccgggucuguccccu

SEQ ID NO: 571493 - RNA, 19 nt, Artificial Sequence
  Description of Artificial Sequence: Synthetic oligonucleotide
ccgccaguugggucgccaa

SEQ ID NO: 571494 - RNA, 19 nt, Artificial Sequence
  Description of Artificial Sequence: Synthetic oligonucleotide
gcgggaacccggguuucua

SEQ ID NO: 571495 - RNA, 19 nt, Artificial Sequence
  Description of Artificial Sequence: Synthetic oligonucleotide
ggcaggcgacacggaguuc

SEQ ID NO: 571496 - RNA, 19 nt, Artificial Sequence
  Description of Artificial Sequence: Synthetic oligonucleotide
cccaaccauacuugacguu

SEQ ID NO: 571497 - RNA, 19 nt, Artificial Sequence
  Description of Artificial Sequence: Synthetic oligonucleotide
gcgcuacucgguacgcggu

SEQ ID NO: 571498 - RNA, 19 nt, Artificial Sequence
  Description of Artificial Sequence: Synthetic oligonucleotide
gugccacgucugccuugua

SEQ ID NO: 571499 - RNA, 19 nt, Artificial Sequence
  Description of Artificial Sequence: Synthetic oligonucleotide
cgccaguugggucgccaaa

SEQ ID NO: 571500 - RNA, 19 nt, Artificial Sequence
  Description of Artificial Sequence: Synthetic oligonucleotide
cgugccacgucugccuugu

SEQ ID NO: 571501 - RNA, 19 nt, Artificial Sequence
  Description of Artificial Sequence: Synthetic oligonucleotide
cggcaggcgacacggaguu

SEQ ID NO: 571502 - RNA, 19 nt, Artificial Sequence
  Description of Artificial Sequence: Synthetic oligonucleotide
ccguaccagucuccugccu

SEQ ID NO: 571503 - RNA, 19 nt, Artificial Sequence
  Description of Artificial Sequence: Synthetic oligonucleotide
cgggaacccggguuucuau

SEQ ID NO: 571504 - RNA, 19 nt, Artificial Sequence
  Description of Artificial Sequence: Synthetic oligonucleotide
cggaggggucgauuccagu

SEQ ID NO: 571505 - RNA, 19 nt, Artificial Sequence
  Description of Artificial Sequence: Synthetic oligonucleotide
ccgggucuguccccucggu

SEQ ID NO: 571506 - RNA, 19 nt, Artificial Sequence
  Description of Artificial Sequence: Synthetic oligonucleotide
gccuagcgccgccccgccu

SEQ ID NO: 571507 - RNA, 19 nt, Artificial Sequence
  Description of Artificial Sequence: Synthetic oligonucleotide
cggcgacccucgggccggc

SEQ ID NO: 571508 - RNA, 19 nt, Artificial Sequence
  Description of Artificial Sequence: Synthetic oligonucleotide
cguggcccucagccacagu

SEQ ID NO: 571509 - RNA, 19 nt, Artificial Sequence
  Description of Artificial Sequence: Synthetic oligonucleotide
uucaucaucaucaucaucc

SEQ ID NO: 571510 - RNA, 19 nt, Artificial Sequence
  Description of Artificial Sequence: Synthetic oligonucleotide
cugauaaauaacuagacag

SEQ ID NO: 571511 - RNA, 19 nt, Artificial Sequence
  Description of Artificial Sequence: Synthetic oligonucleotide
ucuaaaguuaauuuaauuc

SEQ ID NO: 571512 - RNA, 19 nt, Artificial Sequence
  Description of Artificial Sequence: Synthetic oligonucleotide
uuaaguaucaaacuaguau

SEQ ID NO: 571513 - RNA, 19 nt, Artificial Sequence
  Description of Artificial Sequence: Synthetic oligonucleotide
uuuaauacuaggugcaucc

SEQ ID NO: 571514 - RNA, 19 nt, Artificial Sequence
  Description of Artificial Sequence: Synthetic oligonucleotide
aauaacuagacagucaaug

SEQ ID NO: 571515 - RNA, 19 nt, Artificial Sequence
  Description of Artificial Sequence: Synthetic oligonucleotide
aaugccaaaacccuguuaa

SEQ ID NO: 571516 - RNA, 19 nt, Artificial Sequence
  Description of Artificial Sequence: Synthetic oligonucleotide
uuuuaauauccucagcuca

SEQ ID NO: 571517 - RNA, 19 nt, Artificial Sequence
  Description of Artificial Sequence: Synthetic oligonucleotide
gaaucaaauagcaacaaug

SEQ ID NO: 571518 - RNA, 19 nt, Artificial Sequence
  Description of Artificial Sequence: Synthetic oligonucleotide
uucuugacaaguuaugaag

SEQ ID NO: 571519 - RNA, 19 nt, Artificial Sequence
  Description of Artificial Sequence: Synthetic oligonucleotide
uguacucucaauuaucucu

SEQ ID NO: 571520 - RNA, 19 nt, Artificial Sequence
  Description of Artificial Sequence: Synthetic oligonucleotide
aaggcuguauuacugaaug

SEQ ID NO: 571521 - RNA, 19 nt, Artificial Sequence
  Description of Artificial Sequence: Synthetic oligonucleotide
ucacaugaagucuucauag

SEQ ID NO: 571522 - RNA, 19 nt, Artificial Sequence
  Description of Artificial Sequence: Synthetic oligonucleotide
guuaugaaguaguucaagg

SEQ ID NO: 571523 - RNA, 19 nt, Artificial Sequence
  Description of Artificial Sequence: Synthetic oligonucleotide
aaguugaaggguuuugguc

SEQ ID NO: 571524 - RNA, 19 nt, Artificial Sequence
  Description of Artificial Sequence: Synthetic oligonucleotide
uguaguuauugcuauguag

SEQ ID NO: 571525 - RNA, 19 nt, Artificial Sequence
  Description of Artificial Sequence: Synthetic oligonucleotide
agaaauagcugauaaauaa

SEQ ID NO: 571526 - RNA, 19 nt, Artificial Sequence
  Description of Artificial Sequence: Synthetic oligonucleotide
uuaaacggaguuuaucugc

SEQ ID NO: 571527 - RNA, 19 nt, Artificial Sequence
  Description of Artificial Sequence: Synthetic oligonucleotide
aaccuguauuauuaacacc

SEQ ID NO: 571528 - RNA, 19 nt, Artificial Sequence
  Description of Artificial Sequence: Synthetic oligonucleotide
ugugcuacauguugaaggg

SEQ ID NO: 571529 - RNA, 19 nt, Artificial Sequence
  Description of Artificial Sequence: Synthetic oligonucleotide
aacggagagguuuaccuuc

SEQ ID NO: 571530 - RNA, 19 nt, Artificial Sequence
  Description of Artificial Sequence: Synthetic oligonucleotide
ugauaaauaacuagacagu

SEQ ID NO: 571531 - RNA, 19 nt, Artificial Sequence
  Description of Artificial Sequence: Synthetic oligonucleotide
uuuugcuaauucaaggucu

SEQ ID NO: 571532 - RNA, 19 nt, Artificial Sequence
  Description of Artificial Sequence: Synthetic oligonucleotide
cugagcauguuuuauaaag

SEQ ID NO: 571533 - RNA, 19 nt, Artificial Sequence
  Description of Artificial Sequence: Synthetic oligonucleotide
auuuuaaccccuuggcaac

SEQ ID NO: 571534 - RNA, 19 nt, Artificial Sequence
  Description of Artificial Sequence: Synthetic oligonucleotide
aauacuaggugcaucccac

SEQ ID NO: 571535 - RNA, 19 nt, Artificial Sequence
  Description of Artificial Sequence: Synthetic oligonucleotide
uaauuguuaacauaacaau

SEQ ID NO: 571536 - RNA, 19 nt, Artificial Sequence
  Description of Artificial Sequence: Synthetic oligonucleotide
uaaguaucaaacuaguauu

SEQ ID NO: 571537 - RNA, 19 nt, Artificial Sequence
  Description of Artificial Sequence: Synthetic oligonucleotide
acaguuaaggaacagggga

SEQ ID NO: 571538 - RNA, 19 nt, Artificial Sequence
  Description of Artificial Sequence: Synthetic oligonucleotide
acuggcauaauauagugau

SEQ ID NO: 571539 - RNA, 19 nt, Artificial Sequence
  Description of Artificial Sequence: Synthetic oligonucleotide
aauaacggagagguuuacc

SEQ ID NO: 571540 - RNA, 19 nt, Artificial Sequence
  Description of Artificial Sequence: Synthetic oligonucleotide
auuauuacugcuaaguaga

SEQ ID NO: 571541 - RNA, 19 nt, Artificial Sequence
  Description of Artificial Sequence: Synthetic oligonucleotide
uauuacugaauggugcugg

SEQ ID NO: 571542 - RNA, 19 nt, Artificial Sequence
  Description of Artificial Sequence: Synthetic oligonucleotide
uuccuauugccuauggaag

SEQ ID NO: 571543 - RNA, 19 nt, Artificial Sequence
  Description of Artificial Sequence: Synthetic oligonucleotide
ugauuguagcauuuggcag

SEQ ID NO: 571544 - RNA, 19 nt, Artificial Sequence
  Description of Artificial Sequence: Synthetic oligonucleotide
ugcacuguaauaacggaga

SEQ ID NO: 571545 - RNA, 19 nt, Artificial Sequence
  Description of Artificial Sequence: Synthetic oligonucleotide
ucuuaaguaucaaacuagu

SEQ ID NO: 571546 - RNA, 19 nt, Artificial Sequence
  Description of Artificial Sequence: Synthetic oligonucleotide
uuuaaacggaguuuaucug

SEQ ID NO: 571547 - RNA, 19 nt, Artificial Sequence
  Description of Artificial Sequence: Synthetic oligonucleotide
ucuugacaaguuaugaagu

SEQ ID NO: 571548 - RNA, 19 nt, Artificial Sequence
  Description of Artificial Sequence: Synthetic oligonucleotide
acagucaaugcacuggauc

SEQ ID NO: 571549 - RNA, 19 nt, Artificial Sequence
  Description of Artificial Sequence: Synthetic oligonucleotide
cuaauucaaggucugauuc

SEQ ID NO: 571550 - RNA, 19 nt, Artificial Sequence
  Description of Artificial Sequence: Synthetic oligonucleotide
uaaccuguauuauuaacac

SEQ ID NO: 571551 - RNA, 19 nt, Artificial Sequence
  Description of Artificial Sequence: Synthetic oligonucleotide
cuguauuacugaauggugc

SEQ ID NO: 571552 - RNA, 19 nt, Artificial Sequence
  Description of Artificial Sequence: Synthetic oligonucleotide
ugacaaguuaugaaguagu

SEQ ID NO: 571553 - RNA, 19 nt, Artificial Sequence
  Description of Artificial Sequence: Synthetic oligonucleotide
aacuggugcaguuugcuga

SEQ ID NO: 571554 - RNA, 19 nt, Artificial Sequence
  Description of Artificial Sequence: Synthetic oligonucleotide
uguauuacugaauggugcu

SEQ ID NO: 571555 - RNA, 19 nt, Artificial Sequence
  Description of Artificial Sequence: Synthetic oligonucleotide
uuagugacugcugcuaugg

SEQ ID NO: 571556 - RNA, 19 nt, Artificial Sequence
  Description of Artificial Sequence: Synthetic oligonucleotide
cuucuauuaauucaaguca

SEQ ID NO: 571557 - RNA, 19 nt, Artificial Sequence
  Description of Artificial Sequence: Synthetic oligonucleotide
uccauaaccuguauuauua

SEQ ID NO: 571558 - RNA, 19 nt, Artificial Sequence
  Description of Artificial Sequence: Synthetic oligonucleotide
aggaaguugugcuacaugu

SEQ ID NO: 571559 - RNA, 19 nt, Artificial Sequence
  Description of Artificial Sequence: Synthetic oligonucleotide
gaacugaaaggaaaggaag

SEQ ID NO: 571560 - RNA, 19 nt, Artificial Sequence
  Description of Artificial Sequence: Synthetic oligonucleotide
uucuauuaauucaagucau

SEQ ID NO: 571561 - RNA, 19 nt, Artificial Sequence
  Description of Artificial Sequence: Synthetic oligonucleotide
uugccuauggaagagaaac

SEQ ID NO: 571562 - RNA, 19 nt, Artificial Sequence
  Description of Artificial Sequence: Synthetic oligonucleotide
ugcuaauugcucuucaggu

SEQ ID NO: 571563 - RNA, 19 nt, Artificial Sequence
  Description of Artificial Sequence: Synthetic oligonucleotide
uuugcuaauucaaggucug

SEQ ID NO: 571564 - RNA, 19 nt, Artificial Sequence
  Description of Artificial Sequence: Synthetic oligonucleotide
ugguaaauacuacacaauu

SEQ ID NO: 571565 - RNA, 19 nt, Artificial Sequence
  Description of Artificial Sequence: Synthetic oligonucleotide
agguuuaccuucuucagcu

SEQ ID NO: 571566 - RNA, 19 nt, Artificial Sequence
  Description of Artificial Sequence: Synthetic oligonucleotide
auauugcguaauuuuaucu

SEQ ID NO: 571567 - RNA, 19 nt, Artificial Sequence
  Description of Artificial Sequence: Synthetic oligonucleotide
uccuguuuuccacuuagug

SEQ ID NO: 571568 - RNA, 19 nt, Artificial Sequence
  Description of Artificial Sequence: Synthetic oligonucleotide
uucauauugcguaauuuua

SEQ ID NO: 571569 - RNA, 19 nt, Artificial Sequence
  Description of Artificial Sequence: Synthetic oligonucleotide
gauuguagcauuuggcaga

SEQ ID NO: 571570 - RNA, 19 nt, Artificial Sequence
  Description of Artificial Sequence: Synthetic oligonucleotide
augguuaaggcuguauuac

SEQ ID NO: 571571 - RNA, 19 nt, Artificial Sequence
  Description of Artificial Sequence: Synthetic oligonucleotide
acuacaguuaaggaacagg

SEQ ID NO: 571572 - RNA, 19 nt, Artificial Sequence
  Description of Artificial Sequence: Synthetic oligonucleotide
ucauauugcguaauuuuau

SEQ ID NO: 571573 - RNA, 19 nt, Artificial Sequence
  Description of Artificial Sequence: Synthetic oligonucleotide
aaguaguucaaggagguau

SEQ ID NO: 571574 - RNA, 19 nt, Artificial Sequence
  Description of Artificial Sequence: Synthetic oligonucleotide
ggaagagaaacuauaaagc

SEQ ID NO: 571575 - RNA, 19 nt, Artificial Sequence
  Description of Artificial Sequence: Synthetic oligonucleotide
auaaccuguauuauuaaca

SEQ ID NO: 571576 - RNA, 19 nt, Artificial Sequence
  Description of Artificial Sequence: Synthetic oligonucleotide
aagagcugcgaagaguuag

SEQ ID NO: 571577 - RNA, 19 nt, Artificial Sequence
  Description of Artificial Sequence: Synthetic oligonucleotide
uggucuacagagcuuugag

SEQ ID NO: 571578 - RNA, 19 nt, Artificial Sequence
  Description of Artificial Sequence: Synthetic oligonucleotide
gcuaaguagaucuuagccc

SEQ ID NO: 571579 - RNA, 19 nt, Artificial Sequence
  Description of Artificial Sequence: Synthetic oligonucleotide
aagagaacuccacccaaga

SEQ ID NO: 571580 - RNA, 19 nt, Artificial Sequence
  Description of Artificial Sequence: Synthetic oligonucleotide
uaaacggaguuuaucugcu

SEQ ID NO: 571581 - RNA, 19 nt, Artificial Sequence
  Description of Artificial Sequence: Synthetic oligonucleotide
aacauuuguuucucagaca

SEQ ID NO: 571582 - RNA, 19 nt, Artificial Sequence
  Description of Artificial Sequence: Synthetic oligonucleotide
agcugauaaauaacuagac

SEQ ID NO: 571583 - RNA, 19 nt, Artificial Sequence
  Description of Artificial Sequence: Synthetic oligonucleotide
acuugcacuguaauaacgg

SEQ ID NO: 571584 - RNA, 19 nt, Artificial Sequence
  Description of Artificial Sequence: Synthetic oligonucleotide
ucuaaccucuuucuaauuu

SEQ ID NO: 571585 - RNA, 19 nt, Artificial Sequence
  Description of Artificial Sequence: Synthetic oligonucleotide
acuguaguuaacuggugca

SEQ ID NO: 571586 - RNA, 19 nt, Artificial Sequence
  Description of Artificial Sequence: Synthetic oligonucleotide
uauugcguaauuuuaucuu

SEQ ID NO: 571587 - RNA, 19 nt, Artificial Sequence
  Description of Artificial Sequence: Synthetic oligonucleotide
ugucaagggguuaaauaac

SEQ ID NO: 571588 - RNA, 19 nt, Artificial Sequence
  Description of Artificial Sequence: Synthetic oligonucleotide
uccaccauaaucagccaga

SEQ ID NO: 571589 - RNA, 19 nt, Artificial Sequence
  Description of Artificial Sequence: Synthetic oligonucleotide
auuauuagguuuguuuugu

SEQ ID NO: 571590 - RNA, 19 nt, Artificial Sequence
  Description of Artificial Sequence: Synthetic oligonucleotide
aacaauuuaccaaacugua

SEQ ID NO: 571591 - RNA, 19 nt, Artificial Sequence
  Description of Artificial Sequence: Synthetic oligonucleotide
gguaacacaaaauuuaagu

SEQ ID NO: 571592 - RNA, 19 nt, Artificial Sequence
  Description of Artificial Sequence: Synthetic oligonucleotide
cuuuaaacggaguuuaucu

SEQ ID NO: 571593 - RNA, 19 nt, Artificial Sequence
  Description of Artificial Sequence: Synthetic oligonucleotide
cauauugcguaauuuuauc

SEQ ID NO: 571594 - RNA, 19 nt, Artificial Sequence
  Description of Artificial Sequence: Synthetic oligonucleotide
aauaaccagcacaaaagau

SEQ ID NO: 571595 - RNA, 19 nt, Artificial Sequence
  Description of Artificial Sequence: Synthetic oligonucleotide
ugcugguaaauacuacaca

SEQ ID NO: 571596 - RNA, 19 nt, Artificial Sequence
  Description of Artificial Sequence: Synthetic oligonucleotide
uccacuuaguggucuacag

SEQ ID NO: 571597 - RNA, 19 nt, Artificial Sequence
  Description of Artificial Sequence: Synthetic oligonucleotide
ugucugucauuauuacugc

SEQ ID NO: 571598 - RNA, 19 nt, Artificial Sequence
  Description of Artificial Sequence: Synthetic oligonucleotide
agguguuagcacuuuaggu

SEQ ID NO: 571599 - RNA, 19 nt, Artificial Sequence
  Description of Artificial Sequence: Synthetic oligonucleotide
gaucuuagcccuugucugc

SEQ ID NO: 571600 - RNA, 19 nt, Artificial Sequence
  Description of Artificial Sequence: Synthetic oligonucleotide
ccuguuuuccacuuagugg

SEQ ID NO: 571601 - RNA, 19 nt, Artificial Sequence
  Description of Artificial Sequence: Synthetic oligonucleotide
cacuugcacuguaauaacg

SEQ ID NO: 571602 - RNA, 19 nt, Artificial Sequence
  Description of Artificial Sequence: Synthetic oligonucleotide
ccuucuauuaauucaaguc

SEQ ID NO: 571603 - RNA, 19 nt, Artificial Sequence
  Description of Artificial Sequence: Synthetic oligonucleotide
gacaucucgaacuaaggcu

SEQ ID NO: 571604 - RNA, 19 nt, Artificial Sequence
  Description of Artificial Sequence: Synthetic oligonucleotide
ucaucaucaucaucauccc

SEQ ID NO: 571605 - RNA, 19 nt, Artificial Sequence
  Description of Artificial Sequence: Synthetic oligonucleotide
uccuauugccuauggaaga

SEQ ID NO: 571606 - RNA, 19 nt, Artificial Sequence
  Description of Artificial Sequence: Synthetic oligonucleotide
uuauugcuauguagucacg

SEQ ID NO: 571607 - RNA, 19 nt, Artificial Sequence
  Description of Artificial Sequence: Synthetic oligonucleotide
acuguaguuauugcuaugu

SEQ ID NO: 571608 - RNA, 19 nt, Artificial Sequence
  Description of Artificial Sequence: Synthetic oligonucleotide
uuuagugacugcugcuaug

SEQ ID NO: 571609 - RNA, 19 nt, Artificial Sequence
  Description of Artificial Sequence: Synthetic oligonucleotide
ccaguuauccuucacgucc

SEQ ID NO: 571610 - RNA, 19 nt, Artificial Sequence
  Description of Artificial Sequence: Synthetic oligonucleotide
agagaaacuauaaagcauu

SEQ ID NO: 571611 - RNA, 19 nt, Artificial Sequence
  Description of Artificial Sequence: Synthetic oligonucleotide
ucccaguuauccuucacgu

SEQ ID NO: 571612 - RNA, 19 nt, Artificial Sequence
  Description of Artificial Sequence: Synthetic oligonucleotide
uuuccaauuuagugacugc

SEQ ID NO: 571613 - RNA, 19 nt, Artificial Sequence
  Description of Artificial Sequence: Synthetic oligonucleotide
agugucaagggguuaaaua

SEQ ID NO: 571614 - RNA, 19 nt, Artificial Sequence
  Description of Artificial Sequence: Synthetic oligonucleotide
ugcugagcauguuuuauaa

SEQ ID NO: 571615 - RNA, 19 nt, Artificial Sequence
  Description of Artificial Sequence: Synthetic oligonucleotide
aacguguccgcgucccagg

SEQ ID NO: 571616 - RNA, 19 nt, Artificial Sequence
  Description of Artificial Sequence: Synthetic oligonucleotide
auaaccagcacaaaagaua

SEQ ID NO: 571617 - RNA, 19 nt, Artificial Sequence
  Description of Artificial Sequence: Synthetic oligonucleotide
ucgucuuucaugguggccu

SEQ ID NO: 571618 - RNA, 19 nt, Artificial Sequence
  Description of Artificial Sequence: Synthetic oligonucleotide
uucagugucugucauuauu

SEQ ID NO: 571619 - RNA, 19 nt, Artificial Sequence
  Description of Artificial Sequence: Synthetic oligonucleotide
uagcaccugagugucaagg

SEQ ID NO: 571620 - RNA, 19 nt, Artificial Sequence
  Description of Artificial Sequence: Synthetic oligonucleotide
aauucaaggucugauucuu

SEQ ID NO: 571621 - RNA, 19 nt, Artificial Sequence
  Description of Artificial Sequence: Synthetic oligonucleotide
uaguuauugcuauguaguc

SEQ ID NO: 571622 - RNA, 19 nt, Artificial Sequence
  Description of Artificial Sequence: Synthetic oligonucleotide
ucuuuaaacggaguuuauc

SEQ ID NO: 571623 - RNA, 19 nt, Artificial Sequence
  Description of Artificial Sequence: Synthetic oligonucleotide
caucggguccuccauagag

SEQ ID NO: 571624 - RNA, 19 nt, Artificial Sequence
  Description of Artificial Sequence: Synthetic oligonucleotide
uuuuaauacuaggugcauc

SEQ ID NO: 571625 - RNA, 19 nt, Artificial Sequence
  Description of Artificial Sequence: Synthetic oligonucleotide
ucuauuaauucaagucauu

SEQ ID NO: 571626 - RNA, 19 nt, Artificial Sequence
  Description of Artificial Sequence: Synthetic oligonucleotide
ugaagggaagagcugcgaa

SEQ ID NO: 571627 - RNA, 19 nt, Artificial Sequence
  Description of Artificial Sequence: Synthetic oligonucleotide
ugagcgugugugaagggaa

SEQ ID NO: 571628 - RNA, 19 nt, Artificial Sequence
  Description of Artificial Sequence: Synthetic oligonucleotide
uggugcaguuugcugagca

SEQ ID NO: 571629 - RNA, 19 nt, Artificial Sequence
  Description of Artificial Sequence: Synthetic oligonucleotide
augcacuggaucauccacc

SEQ ID NO: 571630 - RNA, 19 nt, Artificial Sequence
  Description of Artificial Sequence: Synthetic oligonucleotide
uuauuacugcuaaguagau

SEQ ID NO: 571631 - RNA, 19 nt, Artificial Sequence
  Description of Artificial Sequence: Synthetic oligonucleotide
cuacauguugaagggauug

SEQ ID NO: 571632 - RNA, 19 nt, Artificial Sequence
  Description of Artificial Sequence: Synthetic oligonucleotide
agagaacguguccgcgucc

SEQ ID NO: 571633 - RNA, 19 nt, Artificial Sequence
  Description of Artificial Sequence: Synthetic oligonucleotide
uuaauacuaggugcauccc

SEQ ID NO: 571634 - RNA, 19 nt, Artificial Sequence
  Description of Artificial Sequence: Synthetic oligonucleotide
uguaguuaacuggugcagu

SEQ ID NO: 571635 - RNA, 19 nt, Artificial Sequence
  Description of Artificial Sequence: Synthetic oligonucleotide
ugcuuuucuugacaaguua

SEQ ID NO: 571636 - RNA, 19 nt, Artificial Sequence
  Description of Artificial Sequence: Synthetic oligonucleotide
guaguuauugcuauguagu

SEQ ID NO: 571637 - RNA, 19 nt, Artificial Sequence
  Description of Artificial Sequence: Synthetic oligonucleotide
ugguuaaggcuguauuacu

SEQ ID NO: 571638 - RNA, 19 nt, Artificial Sequence
  Description of Artificial Sequence: Synthetic oligonucleotide
ggaguuuaucugcuaauug

SEQ ID NO: 571639 - RNA, 19 nt, Artificial Sequence
  Description of Artificial Sequence: Synthetic oligonucleotide
ucauuagcaccugaguguc

SEQ ID NO: 571640 - RNA, 19 nt, Artificial Sequence
  Description of Artificial Sequence: Synthetic oligonucleotide
agcuucuuuaaacggaguu

SEQ ID NO: 571641 - RNA, 19 nt, Artificial Sequence
  Description of Artificial Sequence: Synthetic oligonucleotide
uuucaucaucaucaucauc

SEQ ID NO: 571642 - RNA, 19 nt, Artificial Sequence
  Description of Artificial Sequence: Synthetic oligonucleotide
ugacaacauuauuagguuu

SEQ ID NO: 571643 - RNA, 19 nt, Artificial Sequence
  Description of Artificial Sequence: Synthetic oligonucleotide
agagcugcgaagaguuagc

SEQ ID NO: 571644 - RNA, 19 nt, Artificial Sequence
  Description of Artificial Sequence: Synthetic oligonucleotide
ugcugcuauggaaucaaau

SEQ ID NO: 571645 - RNA, 19 nt, Artificial Sequence
  Description of Artificial Sequence: Synthetic oligonucleotide
aguaguucaaggagguaug

SEQ ID NO: 571646 - RNA, 19 nt, Artificial Sequence
  Description of Artificial Sequence: Synthetic oligonucleotide
cuauggaagagaaacuaua

SEQ ID NO: 571647 - RNA, 19 nt, Artificial Sequence
  Description of Artificial Sequence: Synthetic oligonucleotide
uguuagcacuuuagguucu

SEQ ID NO: 571648 - RNA, 19 nt, Artificial Sequence
  Description of Artificial Sequence: Synthetic oligonucleotide
gagaagauaaaaggucaca

SEQ ID NO: 571649 - RNA, 19 nt, Artificial Sequence
  Description of Artificial Sequence: Synthetic oligonucleotide
uagagaacguguccgcguc

SEQ ID NO: 571650 - RNA, 19 nt, Artificial Sequence
  Description of Artificial Sequence: Synthetic oligonucleotide
uuccauaaccuguauuauu

SEQ ID NO: 571651 - RNA, 19 nt, Artificial Sequence
  Description of Artificial Sequence: Synthetic oligonucleotide
accccuuggcaacaagauc

SEQ ID NO: 571652 - RNA, 19 nt, Artificial Sequence
  Description of Artificial Sequence: Synthetic oligonucleotide
ugcuaauucaaggucugau

SEQ ID NO: 571653 - RNA, 19 nt, Artificial Sequence
  Description of Artificial Sequence: Synthetic oligonucleotide
uacuguaguuauugcuaug

SEQ ID NO: 571654 - RNA, 19 nt, Artificial Sequence
  Description of Artificial Sequence: Synthetic oligonucleotide
auaaucagccagaucgucu

SEQ ID NO: 571655 - RNA, 19 nt, Artificial Sequence
  Description of Artificial Sequence: Synthetic oligonucleotide
gcugauaaauaacuagaca

SEQ ID NO: 571656 - RNA, 19 nt, Artificial Sequence
  Description of Artificial Sequence: Synthetic oligonucleotide
aacuggcauaauauaguga

SEQ ID NO: 571657 - RNA, 19 nt, Artificial Sequence
  Description of Artificial Sequence: Synthetic oligonucleotide
aucucgaacuaaggcuucc

SEQ ID NO: 571658 - RNA, 19 nt, Artificial Sequence
  Description of Artificial Sequence: Synthetic oligonucleotide
auuacugaauggugcuggu

SEQ ID NO: 571659 - RNA, 19 nt, Artificial Sequence
  Description of Artificial Sequence: Synthetic oligonucleotide
aacugagguucccaauuuu

SEQ ID NO: 571660 - RNA, 19 nt, Artificial Sequence
  Description of Artificial Sequence: Synthetic oligonucleotide
auagucuuguacauauccu

SEQ ID NO: 571661 - RNA, 19 nt, Artificial Sequence
  Description of Artificial Sequence: Synthetic oligonucleotide
uuaucucuugggagguaac

SEQ ID NO: 571662 - RNA, 19 nt, Artificial Sequence
  Description of Artificial Sequence: Synthetic oligonucleotide
uacuaggugcaucccacau

SEQ ID NO: 571663 - RNA, 19 nt, Artificial Sequence
  Description of Artificial Sequence: Synthetic oligonucleotide
aguugugcuacauguugaa

SEQ ID NO: 571664 - RNA, 19 nt, Artificial Sequence
  Description of Artificial Sequence: Synthetic oligonucleotide
gguccuguuuuccacuuag

SEQ ID NO: 571665 - RNA, 19 nt, Artificial Sequence
  Description of Artificial Sequence: Synthetic oligonucleotide
cuguaguuaacuggugcag

SEQ ID NO: 571666 - RNA, 19 nt, Artificial Sequence
  Description of Artificial Sequence: Synthetic oligonucleotide
agcaucuauuccauaaccu

SEQ ID NO: 571667 - RNA, 19 nt, Artificial Sequence
  Description of Artificial Sequence: Synthetic oligonucleotide
ucggguccuccauagagaa

SEQ ID NO: 571668 - RNA, 19 nt, Artificial Sequence
  Description of Artificial Sequence: Synthetic oligonucleotide
uauuacugcuaaguagauc

SEQ ID NO: 571669 - RNA, 19 nt, Artificial Sequence
  Description of Artificial Sequence: Synthetic oligonucleotide
agguuccuauugccuaugg

SEQ ID NO: 571670 - RNA, 19 nt, Artificial Sequence
  Description of Artificial Sequence: Synthetic oligonucleotide
gaucgucuuucaugguggc

SEQ ID NO: 571671 - RNA, 19 nt, Artificial Sequence
  Description of Artificial Sequence: Synthetic oligonucleotide
auuaucucuugggagguaa

SEQ ID NO: 571672 - RNA, 19 nt, Artificial Sequence
  Description of Artificial Sequence: Synthetic oligonucleotide
uuaacaccaaaaguuucuu

SEQ ID NO: 571673 - RNA, 19 nt, Artificial Sequence
  Description of Artificial Sequence: Synthetic oligonucleotide
uacuacaguuaaggaacag

SEQ ID NO: 571674 - RNA, 19 nt, Artificial Sequence
  Description of Artificial Sequence: Synthetic oligonucleotide
cuugcacuguaauaacgga

SEQ ID NO: 571675 - RNA, 19 nt, Artificial Sequence
  Description of Artificial Sequence: Synthetic oligonucleotide
aucgucuuucaugguggcc

SEQ ID NO: 571676 - RNA, 19 nt, Artificial Sequence
  Description of Artificial Sequence: Synthetic oligonucleotide
cuuaaguaucaaacuagua

SEQ ID NO: 571677 - RNA, 19 nt, Artificial Sequence
  Description of Artificial Sequence: Synthetic oligonucleotide
uacauguugaagggauugu

SEQ ID NO: 571678 - RNA, 19 nt, Artificial Sequence
  Description of Artificial Sequence: Synthetic oligonucleotide
uugucauguugcaaccuuu

SEQ ID NO: 571679 - RNA, 19 nt, Artificial Sequence
  Description of Artificial Sequence: Synthetic oligonucleotide
cucgagucgcgggugagcg

SEQ ID NO: 571680 - RNA, 19 nt, Artificial Sequence
  Description of Artificial Sequence: Synthetic oligonucleotide
agguuuuauucagugucug

SEQ ID NO: 571681 - RNA, 19 nt, Artificial Sequence
  Description of Artificial Sequence: Synthetic oligonucleotide
uuaauauccucagcucaau

SEQ ID NO: 571682 - RNA, 19 nt, Artificial Sequence
  Description of Artificial Sequence: Synthetic oligonucleotide
uugcugagcauguuuuaua

SEQ ID NO: 571683 - RNA, 19 nt, Artificial Sequence
  Description of Artificial Sequence: Synthetic oligonucleotide
agauaaaaggucacaugaa

SEQ ID NO: 571684 - RNA, 19 nt, Artificial Sequence
  Description of Artificial Sequence: Synthetic oligonucleotide
acaacauuauuagguuugu

SEQ ID NO: 571685 - RNA, 19 nt, Artificial Sequence
  Description of Artificial Sequence: Synthetic oligonucleotide
ucaaggagguaugguuaag

SEQ ID NO: 571686 - RNA, 19 nt, Artificial Sequence
  Description of Artificial Sequence: Synthetic oligonucleotide
uuaguggucuacagagcuu

SEQ ID NO: 571687 - RNA, 19 nt, Artificial Sequence
  Description of Artificial Sequence: Synthetic oligonucleotide
uuauuagguuuguuuuguu

SEQ ID NO: 571688 - RNA, 19 nt, Artificial Sequence
  Description of Artificial Sequence: Synthetic oligonucleotide
caaagcacagucaaugaau

SEQ ID NO: 571689 - RNA, 19 nt, Artificial Sequence
  Description of Artificial Sequence: Synthetic oligonucleotide
cauugcagccuagaagaac

SEQ ID NO: 571690 - RNA, 19 nt, Artificial Sequence
  Description of Artificial Sequence: Synthetic oligonucleotide
gcuauggaaucaaauagca

SEQ ID NO: 571691 - RNA, 19 nt, Artificial Sequence
  Description of Artificial Sequence: Synthetic oligonucleotide
cugaucuuucuauaauaaa

SEQ ID NO: 571692 - RNA, 19 nt, Artificial Sequence
  Description of Artificial Sequence: Synthetic oligonucleotide
guauuacugaauggugcug

SEQ ID NO: 571693 - RNA, 19 nt, Artificial Sequence
  Description of Artificial Sequence: Synthetic oligonucleotide
gggauugugggcaacauaa

SEQ ID NO: 571694 - RNA, 19 nt, Artificial Sequence
  Description of Artificial Sequence: Synthetic oligonucleotide
gagaacguguccgcguccc

SEQ ID NO: 571695 - RNA, 19 nt, Artificial Sequence
  Description of Artificial Sequence: Synthetic oligonucleotide
uuauucagugucugucauu

SEQ ID NO: 571696 - RNA, 19 nt, Artificial Sequence
  Description of Artificial Sequence: Synthetic oligonucleotide
aaccccuuggcaacaagau

SEQ ID NO: 571697 - RNA, 19 nt, Artificial Sequence
  Description of Artificial Sequence: Synthetic oligonucleotide
gguguuagcacuuuagguu

SEQ ID NO: 571698 - RNA, 19 nt, Artificial Sequence
  Description of Artificial Sequence: Synthetic oligonucleotide
gaacguguccgcgucccag

SEQ ID NO: 571699 - RNA, 19 nt, Artificial Sequence
  Description of Artificial Sequence: Synthetic oligonucleotide
auacuaggugcaucccaca

SEQ ID NO: 571700 - RNA, 19 nt, Artificial Sequence
  Description of Artificial Sequence: Synthetic oligonucleotide
gcuguauuacugaauggug

SEQ ID NO: 571701 - RNA, 19 nt, Artificial Sequence
  Description of Artificial Sequence: Synthetic oligonucleotide
aaacggaguuuaucugcua

SEQ ID NO: 571702 - RNA, 19 nt, Artificial Sequence
  Description of Artificial Sequence: Synthetic oligonucleotide
acggaguuuaucugcuaau

SEQ ID NO: 571703 - RNA, 19 nt, Artificial Sequence
  Description of Artificial Sequence: Synthetic oligonucleotide
acacaaaauuuaaguccuc

SEQ ID NO: 571704 - RNA, 19 nt, Artificial Sequence
  Description of Artificial Sequence: Synthetic oligonucleotide
gaagggauugugggcaaca

SEQ ID NO: 571705 - RNA, 19 nt, Artificial Sequence
  Description of Artificial Sequence: Synthetic oligonucleotide
uaauaacggagagguuuac

SEQ ID NO: 571706 - RNA, 19 nt, Artificial Sequence
  Description of Artificial Sequence: Synthetic oligonucleotide
guaauaacggagagguuua

SEQ ID NO: 571707 - RNA, 19 nt, Artificial Sequence
  Description of Artificial Sequence: Synthetic oligonucleotide
gcagaugucauaauuguua

SEQ ID NO: 571708 - RNA, 19 nt, Artificial Sequence
  Description of Artificial Sequence: Synthetic oligonucleotide
ugcaaccuuuguuuccaau

SEQ ID NO: 571709 - RNA, 19 nt, Artificial Sequence
  Description of Artificial Sequence: Synthetic oligonucleotide
uagugacugcugcuaugga

SEQ ID NO: 571710 - RNA, 19 nt, Artificial Sequence
  Description of Artificial Sequence: Synthetic oligonucleotide
gcacaaaagauacugcacu

SEQ ID NO: 571711 - RNA, 19 nt, Artificial Sequence
  Description of Artificial Sequence: Synthetic oligonucleotide
guucaaggagguaugguua

SEQ ID NO: 571712 - RNA, 19 nt, Artificial Sequence
  Description of Artificial Sequence: Synthetic oligonucleotide
uccacccaagagcugcauc

SEQ ID NO: 571713 - RNA, 19 nt, Artificial Sequence
  Description of Artificial Sequence: Synthetic oligonucleotide
agcaacugagguucccaau

SEQ ID NO: 571714 - RNA, 19 nt, Artificial Sequence
  Description of Artificial Sequence: Synthetic oligonucleotide
agucacggccuucuauuaa

SEQ ID NO: 571715 - RNA, 19 nt, Artificial Sequence
  Description of Artificial Sequence: Synthetic oligonucleotide
ucgcgggugagcgugugug

SEQ ID NO: 571716 - RNA, 19 nt, Artificial Sequence
  Description of Artificial Sequence: Synthetic oligonucleotide
aucuauuccauaaccugua

SEQ ID NO: 571717 - RNA, 19 nt, Artificial Sequence
  Description of Artificial Sequence: Synthetic oligonucleotide
gaccuuccgcaucgggucc

SEQ ID NO: 571718 - RNA, 19 nt, Artificial Sequence
  Description of Artificial Sequence: Synthetic oligonucleotide
gagcgugugugaagggaag

SEQ ID NO: 571719 - RNA, 19 nt, Artificial Sequence
  Description of Artificial Sequence: Synthetic oligonucleotide
uucccucauuugcucauua

SEQ ID NO: 571720 - RNA, 19 nt, Artificial Sequence
  Description of Artificial Sequence: Synthetic oligonucleotide
ggagaagauaaaaggucac

SEQ ID NO: 571721 - RNA, 19 nt, Artificial Sequence
  Description of Artificial Sequence: Synthetic oligonucleotide
ccucagcucaauuuuaaga

SEQ ID NO: 571722 - RNA, 19 nt, Artificial Sequence
  Description of Artificial Sequence: Synthetic oligonucleotide
agauccaaguucccucauu

SEQ ID NO: 571723 - RNA, 19 nt, Artificial Sequence
  Description of Artificial Sequence: Synthetic oligonucleotide
ucauagcaucuauuccaua

SEQ ID NO: 571724 - RNA, 19 nt, Artificial Sequence
  Description of Artificial Sequence: Synthetic oligonucleotide
ucacggccuucuauuaauu

SEQ ID NO: 571725 - RNA, 19 nt, Artificial Sequence
  Description of Artificial Sequence: Synthetic oligonucleotide
gauggguucauagcaucua

SEQ ID NO: 571726 - RNA, 19 nt, Artificial Sequence
  Description of Artificial Sequence: Synthetic oligonucleotide
aauuaucucuugggaggua

SEQ ID NO: 571727 - RNA, 19 nt, Artificial Sequence
  Description of Artificial Sequence: Synthetic oligonucleotide
uccgcaucggguccuccau

SEQ ID NO: 571728 - RNA, 19 nt, Artificial Sequence
  Description of Artificial Sequence: Synthetic oligonucleotide
uacagacaucucgaacuaa

SEQ ID NO: 571729 - RNA, 19 nt, Artificial Sequence
  Description of Artificial Sequence: Synthetic oligonucleotide
ucucgagucgcgggugagc

SEQ ID NO: 571730 - RNA, 19 nt, Artificial Sequence
  Description of Artificial Sequence: Synthetic oligonucleotide
caucccaguuauccuucac

SEQ ID NO: 571731 - RNA, 19 nt, Artificial Sequence
  Description of Artificial Sequence: Synthetic oligonucleotide
guaguuaacuggugcaguu

SEQ ID NO: 571732 - RNA, 19 nt, Artificial Sequence
  Description of Artificial Sequence: Synthetic oligonucleotide
auacugcacuucugauugu

SEQ ID NO: 571733 - RNA, 19 nt, Artificial Sequence
  Description of Artificial Sequence: Synthetic oligonucleotide
cugguaaauacuacacaau

SEQ ID NO: 571734 - RNA, 19 nt, Artificial Sequence
  Description of Artificial Sequence: Synthetic oligonucleotide
aucggguccuccauagaga

SEQ ID NO: 571735 - RNA, 19 nt, Artificial Sequence
  Description of Artificial Sequence: Synthetic oligonucleotide
caguuaaggaacaggggau

SEQ ID NO: 571736 - RNA, 19 nt, Artificial Sequence
  Description of Artificial Sequence: Synthetic oligonucleotide
auucagugucugucauuau

SEQ ID NO: 571737 - RNA, 19 nt, Artificial Sequence
  Description of Artificial Sequence: Synthetic oligonucleotide
agcgugugugaagggaaga

SEQ ID NO: 571738 - RNA, 19 nt, Artificial Sequence
  Description of Artificial Sequence: Synthetic oligonucleotide
cuauguagucacggccuuc

SEQ ID NO: 571739 - RNA, 19 nt, Artificial Sequence
  Description of Artificial Sequence: Synthetic oligonucleotide
guccucacaauaguuauuu

SEQ ID NO: 571740 - RNA, 19 nt, Artificial Sequence
  Description of Artificial Sequence: Synthetic oligonucleotide
uguccgcgucccaggaguc

SEQ ID NO: 571741 - RNA, 19 nt, Artificial Sequence
  Description of Artificial Sequence: Synthetic oligonucleotide
cuggaucauccaccacuug

SEQ ID NO: 571742 - RNA, 19 nt, Artificial Sequence
  Description of Artificial Sequence: Synthetic oligonucleotide
ggaaucaaauagcaacaau

SEQ ID NO: 571743 - RNA, 19 nt, Artificial Sequence
  Description of Artificial Sequence: Synthetic oligonucleotide
agaacguguccgcguccca

SEQ ID NO: 571744 - RNA, 19 nt, Artificial Sequence
  Description of Artificial Sequence: Synthetic oligonucleotide
cccgcgaccuuccgcaucg

SEQ ID NO: 571745 - RNA, 19 nt, Artificial Sequence
  Description of Artificial Sequence: Synthetic oligonucleotide
aggucacaugaagucuuca

SEQ ID NO: 571746 - RNA, 19 nt, Artificial Sequence
  Description of Artificial Sequence: Synthetic oligonucleotide
gcgugugugaagggaagag

SEQ ID NO: 571747 - RNA, 19 nt, Artificial Sequence
  Description of Artificial Sequence: Synthetic oligonucleotide
caugcccuugcuugcugca

SEQ ID NO: 571748 - RNA, 19 nt, Artificial Sequence
  Description of Artificial Sequence: Synthetic oligonucleotide
acggagagguuuaccuucu

SEQ ID NO: 571749 - RNA, 19 nt, Artificial Sequence
  Description of Artificial Sequence: Synthetic oligonucleotide
acguguccgcgucccagga

SEQ ID NO: 571750 - RNA, 19 nt, Artificial Sequence
  Description of Artificial Sequence: Synthetic oligonucleotide
guguccgcgucccaggagu

SEQ ID NO: 571751 - RNA, 19 nt, Artificial Sequence
  Description of Artificial Sequence: Synthetic oligonucleotide
aucucgagucgcgggugag

SEQ ID NO: 571752 - RNA, 19 nt, Artificial Sequence
  Description of Artificial Sequence: Synthetic oligonucleotide
caauuaucucuugggaggu

SEQ ID NO: 571753 - RNA, 19 nt, Artificial Sequence
  Description of Artificial Sequence: Synthetic oligonucleotide
gccuauggaagagaaacua

SEQ ID NO: 571754 - RNA, 19 nt, Artificial Sequence
  Description of Artificial Sequence: Synthetic oligonucleotide
gcuaauucaaggucugauu

SEQ ID NO: 571755 - RNA, 19 nt, Artificial Sequence
  Description of Artificial Sequence: Synthetic oligonucleotide
cauuuauaugguccuguuu

SEQ ID NO: 571756 - RNA, 19 nt, Artificial Sequence
  Description of Artificial Sequence: Synthetic oligonucleotide
cauuagcaccugaguguca

SEQ ID NO: 571757 - RNA, 19 nt, Artificial Sequence
  Description of Artificial Sequence: Synthetic oligonucleotide
ucgagucgcgggugagcgu

SEQ ID NO: 571758 - RNA, 19 nt, Artificial Sequence
  Description of Artificial Sequence: Synthetic oligonucleotide
cucugagauaagcagucuu

SEQ ID NO: 571759 - RNA, 19 nt, Artificial Sequence
  Description of Artificial Sequence: Synthetic oligonucleotide
gugcuacauguugaaggga

SEQ ID NO: 571760 - RNA, 19 nt, Artificial Sequence
  Description of Artificial Sequence: Synthetic oligonucleotide
caucucgagucgcggguga

SEQ ID NO: 571761 - RNA, 19 nt, Artificial Sequence
  Description of Artificial Sequence: Synthetic oligonucleotide
gcaacugagguucccaauu

SEQ ID NO: 571762 - RNA, 19 nt, Artificial Sequence
  Description of Artificial Sequence: Synthetic oligonucleotide
cgcaucggguccuccauag

SEQ ID NO: 571763 - RNA, 19 nt, Artificial Sequence
  Description of Artificial Sequence: Synthetic oligonucleotide
ggugcaucccacaugcccu

SEQ ID NO: 571764 - RNA, 19 nt, Artificial Sequence
  Description of Artificial Sequence: Synthetic oligonucleotide
ccacuuaguggucuacaga

SEQ ID NO: 571765 - RNA, 19 nt, Artificial Sequence
  Description of Artificial Sequence: Synthetic oligonucleotide
gggcaacauaaagaagaca

SEQ ID NO: 571766 - RNA, 19 nt, Artificial Sequence
  Description of Artificial Sequence: Synthetic oligonucleotide
gggagguaacacaaaauuu

SEQ ID NO: 571767 - RNA, 19 nt, Artificial Sequence
  Description of Artificial Sequence: Synthetic oligonucleotide
gagugucaagggguuaaau

SEQ ID NO: 571768 - RNA, 19 nt, Artificial Sequence
  Description of Artificial Sequence: Synthetic oligonucleotide
uuguagcauuuggcagaac

SEQ ID NO: 571769 - RNA, 19 nt, Artificial Sequence
  Description of Artificial Sequence: Synthetic oligonucleotide
ccuauggaagagaaacuau

SEQ ID NO: 571770 - RNA, 19 nt, Artificial Sequence
  Description of Artificial Sequence: Synthetic oligonucleotide
agucgcgggugagcgugug

SEQ ID NO: 571771 - RNA, 19 nt, Artificial Sequence
  Description of Artificial Sequence: Synthetic oligonucleotide
cuggcauaauauagugauu

SEQ ID NO: 571772 - RNA, 19 nt, Artificial Sequence
  Description of Artificial Sequence: Synthetic oligonucleotide
ggauugugggcaacauaaa

SEQ ID NO: 571773 - RNA, 19 nt, Artificial Sequence
  Description of Artificial Sequence: Synthetic oligonucleotide
agcgguccccgccggccgu

SEQ ID NO: 571774 - RNA, 19 nt, Artificial Sequence
  Description of Artificial Sequence: Synthetic oligonucleotide
cuuagcccuugucugcuuu

SEQ ID NO: 571775 - RNA, 19 nt, Artificial Sequence
  Description of Artificial Sequence: Synthetic oligonucleotide
cgagucgcgggugagcgug

SEQ ID NO: 571776 - RNA, 19 nt, Artificial Sequence
  Description of Artificial Sequence: Synthetic oligonucleotide
gccaucucgagucgcgggu

SEQ ID NO: 571777 - RNA, 19 nt, Artificial Sequence
  Description of Artificial Sequence: Synthetic oligonucleotide
ccaucucgagucgcgggug

SEQ ID NO: 571778 - RNA, 19 nt, Artificial Sequence
  Description of Artificial Sequence: Synthetic oligonucleotide
cuguaauaacggagagguu

SEQ ID NO: 571779 - RNA, 19 nt, Artificial Sequence
  Description of Artificial Sequence: Synthetic oligonucleotide
cgggugagcgugugugaag

SEQ ID NO: 571780 - RNA, 19 nt, Artificial Sequence
  Description of Artificial Sequence: Synthetic oligonucleotide
guccuguuuuccacuuagu

SEQ ID NO: 571781 - RNA, 19 nt, Artificial Sequence
  Description of Artificial Sequence: Synthetic oligonucleotide
caacauuauuagguuuguu

SEQ ID NO: 571782 - RNA, 19 nt, Artificial Sequence
  Description of Artificial Sequence: Synthetic oligonucleotide
gcuauguagucacggccuu

SEQ ID NO: 571783 - RNA, 19 nt, Artificial Sequence
  Description of Artificial Sequence: Synthetic oligonucleotide
gcaucggguccuccauaga

SEQ ID NO: 571784 - RNA, 19 nt, Artificial Sequence
  Description of Artificial Sequence: Synthetic oligonucleotide
guuagcacuuuagguucuu

SEQ ID NO: 571785 - RNA, 19 nt, Artificial Sequence
  Description of Artificial Sequence: Synthetic oligonucleotide
gcgaccuuccgcaucgggu

SEQ ID NO: 571786 - RNA, 19 nt, Artificial Sequence
  Description of Artificial Sequence: Synthetic oligonucleotide
cgcgaccuuccgcaucggg

SEQ ID NO: 571787 - RNA, 19 nt, Artificial Sequence
  Description of Artificial Sequence: Synthetic oligonucleotide
gucgcgggugagcgugugu

SEQ ID NO: 571788 - RNA, 19 nt, Artificial Sequence
  Description of Artificial Sequence: Synthetic oligonucleotide
gcccgcgaccuuccgcauc

SEQ ID NO: 571789 - RNA, 19 nt, Artificial Sequence
  Description of Artificial Sequence: Synthetic oligonucleotide
cccgccgccgccgccgccg

SEQ ID NO: 571790 - RNA, 19 nt, Artificial Sequence
  Description of Artificial Sequence: Synthetic oligonucleotide
caccugaaucaggcaaaau

SEQ ID NO: 571791 - RNA, 19 nt, Artificial Sequence
  Description of Artificial Sequence: Synthetic oligonucleotide
gagucgcgggugagcgugu

SEQ ID NO: 571792 - RNA, 19 nt, Artificial Sequence
  Description of Artificial Sequence: Synthetic oligonucleotide
gccgccgccgccgccgcug

SEQ ID NO: 571793 - RNA, 19 nt, Artificial Sequence
  Description of Artificial Sequence: Synthetic oligonucleotide
ccucgccuucccagcgguc

SEQ ID NO: 571794 - RNA, 19 nt, Artificial Sequence
  Description of Artificial Sequence: Synthetic oligonucleotide
cccagcgguccccgccggc

SEQ ID NO: 571795 - RNA, 19 nt, Artificial Sequence
  Description of Artificial Sequence: Synthetic oligonucleotide
ccugagugucaagggguua

SEQ ID NO: 571796 - RNA, 19 nt, Artificial Sequence
  Description of Artificial Sequence: Synthetic oligonucleotide
gcgucccaggaguccgagu

SEQ ID NO: 571797 - RNA, 19 nt, Artificial Sequence
  Description of Artificial Sequence: Synthetic oligonucleotide
ccgcaucggguccuccaua

SEQ ID NO: 571798 - RNA, 19 nt, Artificial Sequence
  Description of Artificial Sequence: Synthetic oligonucleotide
gcgguccccgccggccgug

SEQ ID NO: 571799 - RNA, 19 nt, Artificial Sequence
  Description of Artificial Sequence: Synthetic oligonucleotide
ccgcgaccuuccgcaucgg

SEQ ID NO: 571800 - RNA, 19 nt, Artificial Sequence
  Description of Artificial Sequence: Synthetic oligonucleotide
ccgccgccgccgccgccgc

SEQ ID NO: 571801 - RNA, 19 nt, Artificial Sequence
  Description of Artificial Sequence: Synthetic oligonucleotide
ccccgccgccgccgccgcc

SEQ ID NO: 571802 - RNA, 19 nt, Artificial Sequence
  Description of Artificial Sequence: Synthetic oligonucleotide
cgcccgcgaccuuccgcau

SEQ ID NO: 571803 - RNA, 19 nt, Artificial Sequence
  Description of Artificial Sequence: Synthetic oligonucleotide
cgccgccgccgccgccgcu

SEQ ID NO: 571804 - RNA, 19 nt, Artificial Sequence
  Description of Artificial Sequence: Synthetic oligonucleotide
auaauuaggguguaggucc

SEQ ID NO: 571805 - RNA, 19 nt, Artificial Sequence
  Description of Artificial Sequence: Synthetic oligonucleotide
uucuacuucagguagaagg

SEQ ID NO: 571806 - RNA, 19 nt, Artificial Sequence
  Description of Artificial Sequence: Synthetic oligonucleotide
agaacauagugguugaggc

SEQ ID NO: 571807 - RNA, 19 nt, Artificial Sequence
  Description of Artificial Sequence: Synthetic oligonucleotide
gucuuaaucacauugugcc

SEQ ID NO: 571808 - RNA, 19 nt, Artificial Sequence
  Description of Artificial Sequence: Synthetic oligonucleotide
aagcgcauggccuugacag

SEQ ID NO: 571809 - RNA, 19 nt, Artificial Sequence
  Description of Artificial Sequence: Synthetic oligonucleotide
uuauuggaggugaagaagc

SEQ ID NO: 571810 - RNA, 19 nt, Artificial Sequence
  Description of Artificial Sequence: Synthetic oligonucleotide
uguccuaacagcuugggug

SEQ ID NO: 571811 - RNA, 19 nt, Artificial Sequence
  Description of Artificial Sequence: Synthetic oligonucleotide
gaaacugcgcaccacaucc

SEQ ID NO: 571812 - RNA, 19 nt, Artificial Sequence
  Description of Artificial Sequence: Synthetic oligonucleotide
agacauaguagcaagaggg

SEQ ID NO: 571813 - RNA, 19 nt, Artificial Sequence
  Description of Artificial Sequence: Synthetic oligonucleotide
auaguuagcucccagcauc

SEQ ID NO: 571814 - RNA, 19 nt, Artificial Sequence
  Description of Artificial Sequence: Synthetic oligonucleotide
cauacaacccaacaugucc

SEQ ID NO: 571815 - RNA, 19 nt, Artificial Sequence
  Description of Artificial Sequence: Synthetic oligonucleotide
cuaauccacacccuaaucc

SEQ ID NO: 571816 - RNA, 19 nt, Artificial Sequence
  Description of Artificial Sequence: Synthetic oligonucleotide
aagcaagagguucaauagg

SEQ ID NO: 571817 - RNA, 19 nt, Artificial Sequence
  Description of Artificial Sequence: Synthetic oligonucleotide
uuugauucggccuguguag

SEQ ID NO: 571818 - RNA, 19 nt, Artificial Sequence
  Description of Artificial Sequence: Synthetic oligonucleotide
cugaacauagcccuucucg

SEQ ID NO: 571819 - RNA, 19 nt, Artificial Sequence
  Description of Artificial Sequence: Synthetic oligonucleotide
acgaugaccgagcagcugc

SEQ ID NO: 571820 - RNA, 19 nt, Artificial Sequence
  Description of Artificial Sequence: Synthetic oligonucleotide
uaauccacgguucugucug

SEQ ID NO: 571821 - RNA, 19 nt, Artificial Sequence
  Description of Artificial Sequence: Synthetic oligonucleotide
gaacucauagacccgggcg

SEQ ID NO: 571822 - RNA, 19 nt, Artificial Sequence
  Description of Artificial Sequence: Synthetic oligonucleotide
ucuuaaucacauugugccg

SEQ ID NO: 571823 - RNA, 19 nt, Artificial Sequence
  Description of Artificial Sequence: Synthetic oligonucleotide
aaggguagcaggaagucuc

SEQ ID NO: 571824 - RNA, 19 nt, Artificial Sequence
  Description of Artificial Sequence: Synthetic oligonucleotide
uuggacugaacauagcccu

SEQ ID NO: 571825 - RNA, 19 nt, Artificial Sequence
  Description of Artificial Sequence: Synthetic oligonucleotide
gaacauagugguugaggcg

SEQ ID NO: 571826 - RNA, 19 nt, Artificial Sequence
  Description of Artificial Sequence: Synthetic oligonucleotide
gcuacagagacauaguagc

SEQ ID NO: 571827 - RNA, 19 nt, Artificial Sequence
  Description of Artificial Sequence: Synthetic oligonucleotide
cuuaaucacauugugccgc

SEQ ID NO: 571828 - RNA, 19 nt, Artificial Sequence
  Description of Artificial Sequence: Synthetic oligonucleotide
auacagaacauagugguug

SEQ ID NO: 571829 - RNA, 19 nt, Artificial Sequence
  Description of Artificial Sequence: Synthetic oligonucleotide
aacucauagacccgggcgu

SEQ ID NO: 571830 - RNA, 19 nt, Artificial Sequence
  Description of Artificial Sequence: Synthetic oligonucleotide
guuguuagccuguucgggg

SEQ ID NO: 571831 - RNA, 19 nt, Artificial Sequence
  Description of Artificial Sequence: Synthetic oligonucleotide
guguaguagagguaccugg

SEQ ID NO: 571832 - RNA, 19 nt, Artificial Sequence
  Description of Artificial Sequence: Synthetic oligonucleotide
auacaacccaacauguccc

SEQ ID NO: 571833 - RNA, 19 nt, Artificial Sequence
  Description of Artificial Sequence: Synthetic oligonucleotide
agcaagagguucaauaggg

SEQ ID NO: 571834 - RNA, 19 nt, Artificial Sequence
  Description of Artificial Sequence: Synthetic oligonucleotide
ucuuguuccccucccggcg

SEQ ID NO: 571835 - RNA, 19 nt, Artificial Sequence
  Description of Artificial Sequence: Synthetic oligonucleotide
uuggcgacaaugaacucug

SEQ ID NO: 571836 - RNA, 19 nt, Artificial Sequence
  Description of Artificial Sequence: Synthetic oligonucleotide
caagcuguaauguagguaa

SEQ ID NO: 571837 - RNA, 19 nt, Artificial Sequence
  Description of Artificial Sequence: Synthetic oligonucleotide
ugaucaugcgcacaccugu

SEQ ID NO: 571838 - RNA, 19 nt, Artificial Sequence
  Description of Artificial Sequence: Synthetic oligonucleotide
ucgugauugaugcuggccu

SEQ ID NO: 571839 - RNA, 19 nt, Artificial Sequence
  Description of Artificial Sequence: Synthetic oligonucleotide
aauaggguagccuguccgu

SEQ ID NO: 571840 - RNA, 19 nt, Artificial Sequence
  Description of Artificial Sequence: Synthetic oligonucleotide
uucucgugauugaugcugg

SEQ ID NO: 571841 - RNA, 19 nt, Artificial Sequence
  Description of Artificial Sequence: Synthetic oligonucleotide
aggauuugggaggaaagcg

SEQ ID NO: 571842 - RNA, 19 nt, Artificial Sequence
  Description of Artificial Sequence: Synthetic oligonucleotide
agagguucaauaggguagc

SEQ ID NO: 571843 - RNA, 19 nt, Artificial Sequence
  Description of Artificial Sequence: Synthetic oligonucleotide
accagcuacagagacauag

SEQ ID NO: 571844 - RNA, 19 nt, Artificial Sequence
  Description of Artificial Sequence: Synthetic oligonucleotide
uuguuguuagccuguucgg

SEQ ID NO: 571845 - RNA, 19 nt, Artificial Sequence
  Description of Artificial Sequence: Synthetic oligonucleotide
uagaguagaugucagucau

SEQ ID NO: 571846 - RNA, 19 nt, Artificial Sequence
  Description of Artificial Sequence: Synthetic oligonucleotide
uguuguuagccuguucggg

SEQ ID NO: 571847 - RNA, 19 nt, Artificial Sequence
  Description of Artificial Sequence: Synthetic oligonucleotide
caauaggguagccuguccg

SEQ ID NO: 571848 - RNA, 19 nt, Artificial Sequence
  Description of Artificial Sequence: Synthetic oligonucleotide
gucuguuugaagccaacag

SEQ ID NO: 571849 - RNA, 19 nt, Artificial Sequence
  Description of Artificial Sequence: Synthetic oligonucleotide
gguucaauaggguagccug

SEQ ID NO: 571850 - RNA, 19 nt, Artificial Sequence
  Description of Artificial Sequence: Synthetic oligonucleotide
gacauaguagcaagagggg

SEQ ID NO: 571851 - RNA, 19 nt, Artificial Sequence
  Description of Artificial Sequence: Synthetic oligonucleotide
agagguaccuggcccauuc

SEQ ID NO: 571852 - RNA, 19 nt, Artificial Sequence
  Description of Artificial Sequence: Synthetic oligonucleotide
auuccgaagcaagagguuc

SEQ ID NO: 571853 - RNA, 19 nt, Artificial Sequence
  Description of Artificial Sequence: Synthetic oligonucleotide
ucugugagcuguguguggg

SEQ ID NO: 571854 - RNA, 19 nt, Artificial Sequence
  Description of Artificial Sequence: Synthetic oligonucleotide
aacccaacaugucccaacu

SEQ ID NO: 571855 - RNA, 19 nt, Artificial Sequence
  Description of Artificial Sequence: Synthetic oligonucleotide
cacauugugccgcagccgg

SEQ ID NO: 571856 - RNA, 19 nt, Artificial Sequence
  Description of Artificial Sequence: Synthetic oligonucleotide
ggcggcgugacguagacgg

SEQ ID NO: 571857 - RNA, 19 nt, Artificial Sequence
  Description of Artificial Sequence: Synthetic oligonucleotide
cuucuccccgaacugaucc

SEQ ID NO: 571858 - RNA, 19 nt, Artificial Sequence
  Description of Artificial Sequence: Synthetic oligonucleotide
cucgccuacacccucacac

SEQ ID NO: 571859 - RNA, 19 nt, Artificial Sequence
  Description of Artificial Sequence: Synthetic oligonucleotide
caugcacggccuuauacag

SEQ ID NO: 571860 - RNA, 19 nt, Artificial Sequence
  Description of Artificial Sequence: Synthetic oligonucleotide
uguaggucggcuucugugu

SEQ ID NO: 571861 - RNA, 19 nt, Artificial Sequence
  Description of Artificial Sequence: Synthetic oligonucleotide
acacuaguuucucagccug

SEQ ID NO: 571862 - RNA, 19 nt, Artificial Sequence
  Description of Artificial Sequence: Synthetic oligonucleotide
gaucacaccgucccggaug

SEQ ID NO: 571863 - RNA, 19 nt, Artificial Sequence
  Description of Artificial Sequence: Synthetic oligonucleotide
ugcaaacuccuucccggcg

SEQ ID NO: 571864 - RNA, 19 nt, Artificial Sequence
  Description of Artificial Sequence: Synthetic oligonucleotide
aucacaccgucccggaugg

SEQ ID NO: 571865 - RNA, 19 nt, Artificial Sequence
  Description of Artificial Sequence: Synthetic oligonucleotide
agaaacugcgcaccacauc

SEQ ID NO: 571866 - RNA, 19 nt, Artificial Sequence
  Description of Artificial Sequence: Synthetic oligonucleotide
guaccuggcccauucauug

SEQ ID NO: 571867 - RNA, 19 nt, Artificial Sequence
  Description of Artificial Sequence: Synthetic oligonucleotide
gagauaggcuucuacuuca

SEQ ID NO: 571868 - RNA, 19 nt, Artificial Sequence
  Description of Artificial Sequence: Synthetic oligonucleotide
cagaacauagugguugagg

SEQ ID NO: 571869 - RNA, 19 nt, Artificial Sequence
  Description of Artificial Sequence: Synthetic oligonucleotide
guacaagcuguaauguagg

SEQ ID NO: 571870 - RNA, 19 nt, Artificial Sequence
  Description of Artificial Sequence: Synthetic oligonucleotide
aggcuucuacuucagguag

SEQ ID NO: 571871 - RNA, 19 nt, Artificial Sequence
  Description of Artificial Sequence: Synthetic oligonucleotide
uaguuagcucccagcaucc

SEQ ID NO: 571872 - RNA, 19 nt, Artificial Sequence
  Description of Artificial Sequence: Synthetic oligonucleotide
ucgcggguagaguagaugu

SEQ ID NO: 571873 - RNA, 19 nt, Artificial Sequence
  Description of Artificial Sequence: Synthetic oligonucleotide
uagggcaugagagagcgcu

SEQ ID NO: 571874 - RNA, 19 nt, Artificial Sequence
  Description of Artificial Sequence: Synthetic oligonucleotide
ugcacggccuuauacagaa

SEQ ID NO: 571875 - RNA, 19 nt, Artificial Sequence
  Description of Artificial Sequence: Synthetic oligonucleotide
ucaauaggguagccugucc

SEQ ID NO: 571876 - RNA, 19 nt, Artificial Sequence
  Description of Artificial Sequence: Synthetic oligonucleotide
uuaaucacauugugccgca

SEQ ID NO: 571877 - RNA, 19 nt, Artificial Sequence
  Description of Artificial Sequence: Synthetic oligonucleotide
gaagcuugugcaccgucug

SEQ ID NO: 571878 - RNA, 19 nt, Artificial Sequence
  Description of Artificial Sequence: Synthetic oligonucleotide
agggcauuggucaucguuc

SEQ ID NO: 571879 - RNA, 19 nt, Artificial Sequence
  Description of Artificial Sequence: Synthetic oligonucleotide
ggucguacaagcuguaaug

SEQ ID NO: 571880 - RNA, 19 nt, Artificial Sequence
  Description of Artificial Sequence: Synthetic oligonucleotide
cacauacgcagucugugag

SEQ ID NO: 571881 - RNA, 19 nt, Artificial Sequence
  Description of Artificial Sequence: Synthetic oligonucleotide
cagccggauaauuagggug

SEQ ID NO: 571882 - RNA, 19 nt, Artificial Sequence
  Description of Artificial Sequence: Synthetic oligonucleotide
gagagagcgcuugagggag

SEQ ID NO: 571883 - RNA, 19 nt, Artificial Sequence
  Description of Artificial Sequence: Synthetic oligonucleotide
gauagcuuugauucggccu

SEQ ID NO: 571884 - RNA, 19 nt, Artificial Sequence
  Description of Artificial Sequence: Synthetic oligonucleotide
agauccgggaauaggagag

SEQ ID NO: 571885 - RNA, 19 nt, Artificial Sequence
  Description of Artificial Sequence: Synthetic oligonucleotide
aaagcgcauggccuugaca

SEQ ID NO: 571886 - RNA, 19 nt, Artificial Sequence
  Description of Artificial Sequence: Synthetic oligonucleotide
guagaguagaugucaguca

SEQ ID NO: 571887 - RNA, 19 nt, Artificial Sequence
  Description of Artificial Sequence: Synthetic oligonucleotide
uguaggauuugggaggaaa

SEQ ID NO: 571888 - RNA, 19 nt, Artificial Sequence
  Description of Artificial Sequence: Synthetic oligonucleotide
guaguagagguaccuggcc

SEQ ID NO: 571889 - RNA, 19 nt, Artificial Sequence
  Description of Artificial Sequence: Synthetic oligonucleotide
uacagagacauaguagcaa

SEQ ID NO: 571890 - RNA, 19 nt, Artificial Sequence
  Description of Artificial Sequence: Synthetic oligonucleotide
uguguaguagagguaccug

SEQ ID NO: 571891 - RNA, 19 nt, Artificial Sequence
  Description of Artificial Sequence: Synthetic oligonucleotide
uuguuagccuguucgggga

SEQ ID NO: 571892 - RNA, 19 nt, Artificial Sequence
  Description of Artificial Sequence: Synthetic oligonucleotide
auccgggaauaggagaggc

SEQ ID NO: 571893 - RNA, 19 nt, Artificial Sequence
  Description of Artificial Sequence: Synthetic oligonucleotide
uggucguacaagcuguaau

SEQ ID NO: 571894 - RNA, 19 nt, Artificial Sequence
  Description of Artificial Sequence: Synthetic oligonucleotide
gauucggccuguguaguag

SEQ ID NO: 571895 - RNA, 19 nt, Artificial Sequence
  Description of Artificial Sequence: Synthetic oligonucleotide
caagauuuccuguccuaac

SEQ ID NO: 571896 - RNA, 19 nt, Artificial Sequence
  Description of Artificial Sequence: Synthetic oligonucleotide
uccuguccuaacagcuugg

SEQ ID NO: 571897 - RNA, 19 nt, Artificial Sequence
  Description of Artificial Sequence: Synthetic oligonucleotide
cugacggaacugcaggcgg

SEQ ID NO: 571898 - RNA, 19 nt, Artificial Sequence
  Description of Artificial Sequence: Synthetic oligonucleotide
aagacccugccuccaggag

SEQ ID NO: 571899 - RNA, 19 nt, Artificial Sequence
  Description of Artificial Sequence: Synthetic oligonucleotide
uacgcggacggaacuguag

SEQ ID NO: 571900 - RNA, 19 nt, Artificial Sequence
  Description of Artificial Sequence: Synthetic oligonucleotide
gacguagacggcagcaucc

SEQ ID NO: 571901 - RNA, 19 nt, Artificial Sequence
  Description of Artificial Sequence: Synthetic oligonucleotide
uacgcagucugugagcugu

SEQ ID NO: 571902 - RNA, 19 nt, Artificial Sequence
  Description of Artificial Sequence: Synthetic oligonucleotide
acgcggacggaacuguagg

SEQ ID NO: 571903 - RNA, 19 nt, Artificial Sequence
  Description of Artificial Sequence: Synthetic oligonucleotide
ggccuuauacagaacauag

SEQ ID NO: 571904 - RNA, 19 nt, Artificial Sequence
  Description of Artificial Sequence: Synthetic oligonucleotide
agcguuugcuguucauuag

SEQ ID NO: 571905 - RNA, 19 nt, Artificial Sequence
  Description of Artificial Sequence: Synthetic oligonucleotide
aaggcuagcugaggcucgc

SEQ ID NO: 571906 - RNA, 19 nt, Artificial Sequence
  Description of Artificial Sequence: Synthetic oligonucleotide
gccuacaccaccauuaggc

SEQ ID NO: 571907 - RNA, 19 nt, Artificial Sequence
  Description of Artificial Sequence: Synthetic oligonucleotide
uagcguuugcuguucauua

SEQ ID NO: 571908 - RNA, 19 nt, Artificial Sequence
  Description of Artificial Sequence: Synthetic oligonucleotide
cugaccccugcacauacgc

SEQ ID NO: 571909 - RNA, 19 nt, Artificial Sequence
  Description of Artificial Sequence: Synthetic oligonucleotide
cguacaagcuguaauguag

SEQ ID NO: 571910 - RNA, 19 nt, Artificial Sequence
  Description of Artificial Sequence: Synthetic oligonucleotide
cuacuucagguagaagggg

SEQ ID NO: 571911 - RNA, 19 nt, Artificial Sequence
  Description of Artificial Sequence: Synthetic oligonucleotide
ggucccgucuguuugaaac

SEQ ID NO: 571912 - RNA, 19 nt, Artificial Sequence
  Description of Artificial Sequence: Synthetic oligonucleotide
ugacguagacggcagcauc

SEQ ID NO: 571913 - RNA, 19 nt, Artificial Sequence
  Description of Artificial Sequence: Synthetic oligonucleotide
gguagaguagaugucaguc

SEQ ID NO: 571914 - RNA, 19 nt, Artificial Sequence
  Description of Artificial Sequence: Synthetic oligonucleotide
ggauaguuagcucccagca

SEQ ID NO: 571915 - RNA, 19 nt, Artificial Sequence
  Description of Artificial Sequence: Synthetic oligonucleotide
ggcgugauaauaguaacac

SEQ ID NO: 571916 - RNA, 19 nt, Artificial Sequence
  Description of Artificial Sequence: Synthetic oligonucleotide
caagaaacugcgcaccaca

SEQ ID NO: 571917 - RNA, 19 nt, Artificial Sequence
  Description of Artificial Sequence: Synthetic oligonucleotide
acgccguuccucugcagac

SEQ ID NO: 571918 - RNA, 19 nt, Artificial Sequence
  Description of Artificial Sequence: Synthetic oligonucleotide
uggucaucguucuccgggc

SEQ ID NO: 571919 - RNA, 19 nt, Artificial Sequence
  Description of Artificial Sequence: Synthetic oligonucleotide
ggccuugacagacauguug

SEQ ID NO: 571920 - RNA, 19 nt, Artificial Sequence
  Description of Artificial Sequence: Synthetic oligonucleotide
cacggccuuauacagaaca

SEQ ID NO: 571921 - RNA, 19 nt, Artificial Sequence
  Description of Artificial Sequence: Synthetic oligonucleotide
gguagcaggaagucucgag

SEQ ID NO: 571922 - RNA, 19 nt, Artificial Sequence
  Description of Artificial Sequence: Synthetic oligonucleotide
guauugucaccagcuacag

SEQ ID NO: 571923 - RNA, 19 nt, Artificial Sequence
  Description of Artificial Sequence: Synthetic oligonucleotide
aguguauugucaccagcua

SEQ ID NO: 571924 - RNA, 19 nt, Artificial Sequence
  Description of Artificial Sequence: Synthetic oligonucleotide
ggggucgcggccuaguccg

SEQ ID NO: 571925 - RNA, 19 nt, Artificial Sequence
  Description of Artificial Sequence: Synthetic oligonucleotide
auaggguagccuguccguc

SEQ ID NO: 571926 - RNA, 19 nt, Artificial Sequence
  Description of Artificial Sequence: Synthetic oligonucleotide
agggagauccgggaauagg

SEQ ID NO: 571927 - RNA, 19 nt, Artificial Sequence
  Description of Artificial Sequence: Synthetic oligonucleotide
uucaauaggguagccuguc

SEQ ID NO: 571928 - RNA, 19 nt, Artificial Sequence
  Description of Artificial Sequence: Synthetic oligonucleotide
ucguacaagcuguaaugua

SEQ ID NO: 571929 - RNA, 19 nt, Artificial Sequence
  Description of Artificial Sequence: Synthetic oligonucleotide
cugaucaugcgcacaccug

SEQ ID NO: 571930 - RNA, 19 nt, Artificial Sequence
  Description of Artificial Sequence: Synthetic oligonucleotide
ucgccuacacccucacacc

SEQ ID NO: 571931 - RNA, 19 nt, Artificial Sequence
  Description of Artificial Sequence: Synthetic oligonucleotide
accauuaggcaagacccug

SEQ ID NO: 571932 - RNA, 19 nt, Artificial Sequence
  Description of Artificial Sequence: Synthetic oligonucleotide
gcguuugcuguucauuagg

SEQ ID NO: 571933 - RNA, 19 nt, Artificial Sequence
  Description of Artificial Sequence: Synthetic oligonucleotide
gugauugaugcuggccucg

SEQ ID NO: 571934 - RNA, 19 nt, Artificial Sequence
  Description of Artificial Sequence: Synthetic oligonucleotide
uccacgguucugucugucc

SEQ ID NO: 571935 - RNA, 19 nt, Artificial Sequence
  Description of Artificial Sequence: Synthetic oligonucleotide
ggagauaggcuucuacuuc

SEQ ID NO: 571936 - RNA, 19 nt, Artificial Sequence
  Description of Artificial Sequence: Synthetic oligonucleotide
uccuguacgcggacggaac

SEQ ID NO: 571937 - RNA, 19 nt, Artificial Sequence
  Description of Artificial Sequence: Synthetic oligonucleotide
cuacagagacauaguagca

SEQ ID NO: 571938 - RNA, 19 nt, Artificial Sequence
  Description of Artificial Sequence: Synthetic oligonucleotide
gucucgaguggcguuauug

SEQ ID NO: 571939 - RNA, 19 nt, Artificial Sequence
  Description of Artificial Sequence: Synthetic oligonucleotide
gauccgggaauaggagagg

SEQ ID NO: 571940 - RNA, 19 nt, Artificial Sequence
  Description of Artificial Sequence: Synthetic oligonucleotide
uccccgaacugauccagga

SEQ ID NO: 571941 - RNA, 19 nt, Artificial Sequence
  Description of Artificial Sequence: Synthetic oligonucleotide
auucucugcccacagugua

SEQ ID NO: 571942 - RNA, 19 nt, Artificial Sequence
  Description of Artificial Sequence: Synthetic oligonucleotide
ggauuugggaggaaagcgc

SEQ ID NO: 571943 - RNA, 19 nt, Artificial Sequence
  Description of Artificial Sequence: Synthetic oligonucleotide
cuucuaggaaggguagcag

SEQ ID NO: 571944 - RNA, 19 nt, Artificial Sequence
  Description of Artificial Sequence: Synthetic oligonucleotide
aucaugcgcacaccugucu

SEQ ID NO: 571945 - RNA, 19 nt, Artificial Sequence
  Description of Artificial Sequence: Synthetic oligonucleotide
cuuagacacuaguuucuca

SEQ ID NO: 571946 - RNA, 19 nt, Artificial Sequence
  Description of Artificial Sequence: Synthetic oligonucleotide
gacccgggcgugauaauag

SEQ ID NO: 571947 - RNA, 19 nt, Artificial Sequence
  Description of Artificial Sequence: Synthetic oligonucleotide
ucuccccgaacugauccag

SEQ ID NO: 571948 - RNA, 19 nt, Artificial Sequence
  Description of Artificial Sequence: Synthetic oligonucleotide
aguuagcucccagcauccc

SEQ ID NO: 571949 - RNA, 19 nt, Artificial Sequence
  Description of Artificial Sequence: Synthetic oligonucleotide
auagacccgggcgugauaa

SEQ ID NO: 571950 - RNA, 19 nt, Artificial Sequence
  Description of Artificial Sequence: Synthetic oligonucleotide
ucguucuccgggcuucaga

SEQ ID NO: 571951 - RNA, 19 nt, Artificial Sequence
  Description of Artificial Sequence: Synthetic oligonucleotide
agugcucgguggcggcugc

SEQ ID NO: 571952 - RNA, 19 nt, Artificial Sequence
  Description of Artificial Sequence: Synthetic oligonucleotide
cuaguccggggaccgaggc

SEQ ID NO: 571953 - RNA, 19 nt, Artificial Sequence
  Description of Artificial Sequence: Synthetic oligonucleotide
agccggauaauuagggugu

SEQ ID NO: 571954 - RNA, 19 nt, Artificial Sequence
  Description of Artificial Sequence: Synthetic oligonucleotide
gguucugucuguccccucc

SEQ ID NO: 571955 - RNA, 19 nt, Artificial Sequence
  Description of Artificial Sequence: Synthetic oligonucleotide
uguacgcggacggaacugu

SEQ ID NO: 571956 - RNA, 19 nt, Artificial Sequence
  Description of Artificial Sequence: Synthetic oligonucleotide
uguuagccuguucggggaa

SEQ ID NO: 571957 - RNA, 19 nt, Artificial Sequence
  Description of Artificial Sequence: Synthetic oligonucleotide
ucaugcgcacaccugucuu

SEQ ID NO: 571958 - RNA, 19 nt, Artificial Sequence
  Description of Artificial Sequence: Synthetic oligonucleotide
ugacggaacugcaggcggu

SEQ ID NO: 571959 - RNA, 19 nt, Artificial Sequence
  Description of Artificial Sequence: Synthetic oligonucleotide
gacagacuuagacacuagu

SEQ ID NO: 571960 - RNA, 19 nt, Artificial Sequence
  Description of Artificial Sequence: Synthetic oligonucleotide
uccgggaauaggagaggcu

SEQ ID NO: 571961 - RNA, 19 nt, Artificial Sequence
  Description of Artificial Sequence: Synthetic oligonucleotide
ugaccccugcacauacgca

SEQ ID NO: 571962 - RNA, 19 nt, Artificial Sequence
  Description of Artificial Sequence: Synthetic oligonucleotide
cugccuacaccaccauuag

SEQ ID NO: 571963 - RNA, 19 nt, Artificial Sequence
  Description of Artificial Sequence: Synthetic oligonucleotide
guagguaauuccgaagcaa

SEQ ID NO: 571964 - RNA, 19 nt, Artificial Sequence
  Description of Artificial Sequence: Synthetic oligonucleotide
gcuagcugaggcucgcggg

SEQ ID NO: 571965 - RNA, 19 nt, Artificial Sequence
  Description of Artificial Sequence: Synthetic oligonucleotide
guagcaggaagucucgagu

SEQ ID NO: 571966 - RNA, 19 nt, Artificial Sequence
  Description of Artificial Sequence: Synthetic oligonucleotide
cauucauuguuguuagccu

SEQ ID NO: 571967 - RNA, 19 nt, Artificial Sequence
  Description of Artificial Sequence: Synthetic oligonucleotide
ugguugaggcggcgugacg

SEQ ID NO: 571968 - RNA, 19 nt, Artificial Sequence
  Description of Artificial Sequence: Synthetic oligonucleotide
gcccauucauuguuguuag

SEQ ID NO: 571969 - RNA, 19 nt, Artificial Sequence
  Description of Artificial Sequence: Synthetic oligonucleotide
uugauucggccuguguagu

SEQ ID NO: 571970 - RNA, 19 nt, Artificial Sequence
  Description of Artificial Sequence: Synthetic oligonucleotide
gcccgaaacagccuucucc

SEQ ID NO: 571971 - RNA, 19 nt, Artificial Sequence
  Description of Artificial Sequence: Synthetic oligonucleotide
gacacuaguuucucagccu

SEQ ID NO: 571972 - RNA, 19 nt, Artificial Sequence
  Description of Artificial Sequence: Synthetic oligonucleotide
agagacgggccugcacacc

SEQ ID NO: 571973 - RNA, 19 nt, Artificial Sequence
  Description of Artificial Sequence: Synthetic oligonucleotide
caguguauugucaccagcu

SEQ ID NO: 571974 - RNA, 19 nt, Artificial Sequence
  Description of Artificial Sequence: Synthetic oligonucleotide
acguagacggcagcauccg

SEQ ID NO: 571975 - RNA, 19 nt, Artificial Sequence
  Description of Artificial Sequence: Synthetic oligonucleotide
ugaggcggcgugacguaga

SEQ ID NO: 571976 - RNA, 19 nt, Artificial Sequence
  Description of Artificial Sequence: Synthetic oligonucleotide
cucucgcugggagugcucg

SEQ ID NO: 571977 - RNA, 19 nt, Artificial Sequence
  Description of Artificial Sequence: Synthetic oligonucleotide
gaggcucgcggguagagua

SEQ ID NO: 571978 - RNA, 19 nt, Artificial Sequence
  Description of Artificial Sequence: Synthetic oligonucleotide
ggauagcuuugauucggcc

SEQ ID NO: 571979 - RNA, 19 nt, Artificial Sequence
  Description of Artificial Sequence: Synthetic oligonucleotide
auucggccuguguaguaga

SEQ ID NO: 571980 - RNA, 19 nt, Artificial Sequence
  Description of Artificial Sequence: Synthetic oligonucleotide
uucuccccgaacugaucca

SEQ ID NO: 571981 - RNA, 19 nt, Artificial Sequence
  Description of Artificial Sequence: Synthetic oligonucleotide
agguucaauaggguagccu

SEQ ID NO: 571982 - RNA, 19 nt, Artificial Sequence
  Description of Artificial Sequence: Synthetic oligonucleotide
uccggagccgggcaugcaa

SEQ ID NO: 571983 - RNA, 19 nt, Artificial Sequence
  Description of Artificial Sequence: Synthetic oligonucleotide
uuagccuguucggggaaga

SEQ ID NO: 571984 - RNA, 19 nt, Artificial Sequence
  Description of Artificial Sequence: Synthetic oligonucleotide
ucaucguucuccgggcuuc

SEQ ID NO: 571985 - RNA, 19 nt, Artificial Sequence
  Description of Artificial Sequence: Synthetic oligonucleotide
cacaccgucccggauggcc

SEQ ID NO: 571986 - RNA, 19 nt, Artificial Sequence
  Description of Artificial Sequence: Synthetic oligonucleotide
gauaguuagcucccagcau

SEQ ID NO: 571987 - RNA, 19 nt, Artificial Sequence
  Description of Artificial Sequence: Synthetic oligonucleotide
cacaccugucuuaaucaca

SEQ ID NO: 571988 - RNA, 19 nt, Artificial Sequence
  Description of Artificial Sequence: Synthetic oligonucleotide
cagacuuagacacuaguuu

SEQ ID NO: 571989 - RNA, 19 nt, Artificial Sequence
  Description of Artificial Sequence: Synthetic oligonucleotide
gacuuagacacuaguuucu

SEQ ID NO: 571990 - RNA, 19 nt, Artificial Sequence
  Description of Artificial Sequence: Synthetic oligonucleotide
cuacacccucacaccagag

SEQ ID NO: 571991 - RNA, 19 nt, Artificial Sequence
  Description of Artificial Sequence: Synthetic oligonucleotide
agguaccuggcccauucau

SEQ ID NO: 571992 - RNA, 19 nt, Artificial Sequence
  Description of Artificial Sequence: Synthetic oligonucleotide
ugccuugucggcgccucgg

SEQ ID NO: 571993 - RNA, 19 nt, Artificial Sequence
  Description of Artificial Sequence: Synthetic oligonucleotide
uugagccgcuccccgcugc

SEQ ID NO: 571994 - RNA, 19 nt, Artificial Sequence
  Description of Artificial Sequence: Synthetic oligonucleotide
uaaucacauugugccgcag

SEQ ID NO: 571995 - RNA, 19 nt, Artificial Sequence
  Description of Artificial Sequence: Synthetic oligonucleotide
gaaagcgcauggccuugac

SEQ ID NO: 571996 - RNA, 19 nt, Artificial Sequence
  Description of Artificial Sequence: Synthetic oligonucleotide
cggauaauuaggguguagg

SEQ ID NO: 571997 - RNA, 19 nt, Artificial Sequence
  Description of Artificial Sequence: Synthetic oligonucleotide
cgcacgaugaccgagcagc

SEQ ID NO: 571998 - RNA, 19 nt, Artificial Sequence
  Description of Artificial Sequence: Synthetic oligonucleotide
cuaacagcuugggugagaa

SEQ ID NO: 571999 - RNA, 19 nt, Artificial Sequence
  Description of Artificial Sequence: Synthetic oligonucleotide
ggauaauuaggguguaggu

SEQ ID NO: 572000 - RNA, 19 nt, Artificial Sequence
  Description of Artificial Sequence: Synthetic oligonucleotide
uaguccggggaccgaggca

SEQ ID NO: 572001 - RNA, 19 nt, Artificial Sequence
  Description of Artificial Sequence: Synthetic oligonucleotide
uugccuugucggcgccucg

SEQ ID NO: 572002 - RNA, 19 nt, Artificial Sequence
  Description of Artificial Sequence: Synthetic oligonucleotide
uugaggcggcgugacguag

SEQ ID NO: 572003 - RNA, 19 nt, Artificial Sequence
  Description of Artificial Sequence: Synthetic oligonucleotide
cugccgcccauucucugcc

SEQ ID NO: 572004 - RNA, 19 nt, Artificial Sequence
  Description of Artificial Sequence: Synthetic oligonucleotide
cuugcccgaaacagccuuc

SEQ ID NO: 572005 - RNA, 19 nt, Artificial Sequence
  Description of Artificial Sequence: Synthetic oligonucleotide
guaggucggcuucuguguc

SEQ ID NO: 572006 - RNA, 19 nt, Artificial Sequence
  Description of Artificial Sequence: Synthetic oligonucleotide
cuacaagguccagggcucg

SEQ ID NO: 572007 - RNA, 19 nt, Artificial Sequence
  Description of Artificial Sequence: Synthetic oligonucleotide
ggcuagcugaggcucgcgg

SEQ ID NO: 572008 - RNA, 19 nt, Artificial Sequence
  Description of Artificial Sequence: Synthetic oligonucleotide
ugauucggccuguguagua

SEQ ID NO: 572009 - RNA, 19 nt, Artificial Sequence
  Description of Artificial Sequence: Synthetic oligonucleotide
uuuccuguacgcggacgga

SEQ ID NO: 572010 - RNA, 19 nt, Artificial Sequence
  Description of Artificial Sequence: Synthetic oligonucleotide
guuagccuguucggggaag

SEQ ID NO: 572011 - RNA, 19 nt, Artificial Sequence
  Description of Artificial Sequence: Synthetic oligonucleotide
gcugacggaacugcaggcg

SEQ ID NO: 572012 - RNA, 19 nt, Artificial Sequence
  Description of Artificial Sequence: Synthetic oligonucleotide
uuugccuugucggcgccuc

SEQ ID NO: 572013 - RNA, 19 nt, Artificial Sequence
  Description of Artificial Sequence: Synthetic oligonucleotide
gacggaacuguaggucggc

SEQ ID NO: 572014 - RNA, 19 nt, Artificial Sequence
  Description of Artificial Sequence: Synthetic oligonucleotide
uuccuguacgcggacggaa

SEQ ID NO: 572015 - RNA, 19 nt, Artificial Sequence
  Description of Artificial Sequence: Synthetic oligonucleotide
aggaagucucgaguggcgu

SEQ ID NO: 572016 - RNA, 19 nt, Artificial Sequence
  Description of Artificial Sequence: Synthetic oligonucleotide
uuguuccccucccggcggc

SEQ ID NO: 572017 - RNA, 19 nt, Artificial Sequence
  Description of Artificial Sequence: Synthetic oligonucleotide
ucaugccggaggguggcug

SEQ ID NO: 572018 - RNA, 19 nt, Artificial Sequence
  Description of Artificial Sequence: Synthetic oligonucleotide
gaucaugcgcacaccuguc

SEQ ID NO: 572019 - RNA, 19 nt, Artificial Sequence
  Description of Artificial Sequence: Synthetic oligonucleotide
gggagauccgggaauagga

SEQ ID NO: 572020 - RNA, 19 nt, Artificial Sequence
  Description of Artificial Sequence: Synthetic oligonucleotide
ugugcaccgucuguuugaa

SEQ ID NO: 572021 - RNA, 19 nt, Artificial Sequence
  Description of Artificial Sequence: Synthetic oligonucleotide
uccuugcccgaaacagccu

SEQ ID NO: 572022 - RNA, 19 nt, Artificial Sequence
  Description of Artificial Sequence: Synthetic oligonucleotide
cggacggaacuguaggucg

SEQ ID NO: 572023 - RNA, 19 nt, Artificial Sequence
  Description of Artificial Sequence: Synthetic oligonucleotide
cguucuccgggcuucagag

SEQ ID NO: 572024 - RNA, 19 nt, Artificial Sequence
  Description of Artificial Sequence: Synthetic oligonucleotide
gaagucucgaguggcguua

SEQ ID NO: 572025 - RNA, 19 nt, Artificial Sequence
  Description of Artificial Sequence: Synthetic oligonucleotide
ggggauaguuagcucccag

SEQ ID NO: 572026 - RNA, 19 nt, Artificial Sequence
  Description of Artificial Sequence: Synthetic oligonucleotide
ggcgacaaugaacucugca

SEQ ID NO: 572027 - RNA, 19 nt, Artificial Sequence
  Description of Artificial Sequence: Synthetic oligonucleotide
gaggcggcgugacguagac

SEQ ID NO: 572028 - RNA, 19 nt, Artificial Sequence
  Description of Artificial Sequence: Synthetic oligonucleotide
agcuguaauguagguaauu

SEQ ID NO: 572029 - RNA, 19 nt, Artificial Sequence
  Description of Artificial Sequence: Synthetic oligonucleotide
ggaaggcuagcugaggcuc

SEQ ID NO: 572030 - RNA, 19 nt, Artificial Sequence
  Description of Artificial Sequence: Synthetic oligonucleotide
gucgcggccuaguccgggg

SEQ ID NO: 572031 - RNA, 19 nt, Artificial Sequence
  Description of Artificial Sequence: Synthetic oligonucleotide
auacgcagucugugagcug

SEQ ID NO: 572032 - RNA, 19 nt, Artificial Sequence
  Description of Artificial Sequence: Synthetic oligonucleotide
guuagcucccagcaucccu

SEQ ID NO: 572033 - RNA, 19 nt, Artificial Sequence
  Description of Artificial Sequence: Synthetic oligonucleotide
gagccgggcaugcaagaaa

SEQ ID NO: 572034 - RNA, 19 nt, Artificial Sequence
  Description of Artificial Sequence: Synthetic oligonucleotide
cagcuacagagacauagua

SEQ ID NO: 572035 - RNA, 19 nt, Artificial Sequence
  Description of Artificial Sequence: Synthetic oligonucleotide
ggcguuauuggaggugaag

SEQ ID NO: 572036 - RNA, 19 nt, Artificial Sequence
  Description of Artificial Sequence: Synthetic oligonucleotide
uggcgacaaugaacucugc

SEQ ID NO: 572037 - RNA, 19 nt, Artificial Sequence
  Description of Artificial Sequence: Synthetic oligonucleotide
cuguacgcggacggaacug

SEQ ID NO: 572038 - RNA, 19 nt, Artificial Sequence
  Description of Artificial Sequence: Synthetic oligonucleotide
ucccgucuguuugaaacuu

SEQ ID NO: 572039 - RNA, 19 nt, Artificial Sequence
  Description of Artificial Sequence: Synthetic oligonucleotide
cucgcggguagaguagaug

SEQ ID NO: 572040 - RNA, 19 nt, Artificial Sequence
  Description of Artificial Sequence: Synthetic oligonucleotide
aggaaagcgcauggccuug

SEQ ID NO: 572041 - RNA, 19 nt, Artificial Sequence
  Description of Artificial Sequence: Synthetic oligonucleotide
acccgggcgugauaauagu

SEQ ID NO: 572042 - RNA, 19 nt, Artificial Sequence
  Description of Artificial Sequence: Synthetic oligonucleotide
cauacgcagucugugagcu

SEQ ID NO: 572043 - RNA, 19 nt, Artificial Sequence
  Description of Artificial Sequence: Synthetic oligonucleotide
gacugaacauagcccuucu

SEQ ID NO: 572044 - RNA, 19 nt, Artificial Sequence
  Description of Artificial Sequence: Synthetic oligonucleotide
gaggaaagcgcauggccuu

SEQ ID NO: 572045 - RNA, 19 nt, Artificial Sequence
  Description of Artificial Sequence: Synthetic oligonucleotide
ggacggaacuguaggucgg

SEQ ID NO: 572046 - RNA, 19 nt, Artificial Sequence
  Description of Artificial Sequence: Synthetic oligonucleotide
agcuugugcaccgucuguu

SEQ ID NO: 572047 - RNA, 19 nt, Artificial Sequence
  Description of Artificial Sequence: Synthetic oligonucleotide
ccaugcacggccuuauaca

SEQ ID NO: 572048 - RNA, 19 nt, Artificial Sequence
  Description of Artificial Sequence: Synthetic oligonucleotide
ccuaauccacacccuaauc

SEQ ID NO: 572049 - RNA, 19 nt, Artificial Sequence
  Description of Artificial Sequence: Synthetic oligonucleotide
ugaggcucgcggguagagu

SEQ ID NO: 572050 - RNA, 19 nt, Artificial Sequence
  Description of Artificial Sequence: Synthetic oligonucleotide
gcgcacaccugucuuaauc

SEQ ID NO: 572051 - RNA, 19 nt, Artificial Sequence
  Description of Artificial Sequence: Synthetic oligonucleotide
gacggaacugcaggcgguc

SEQ ID NO: 572052 - RNA, 19 nt, Artificial Sequence
  Description of Artificial Sequence: Synthetic oligonucleotide
gcggcuuugccuugucggc

SEQ ID NO: 572053 - RNA, 19 nt, Artificial Sequence
  Description of Artificial Sequence: Synthetic oligonucleotide
uggcguuauuggaggugaa

SEQ ID NO: 572054 - RNA, 19 nt, Artificial Sequence
  Description of Artificial Sequence: Synthetic oligonucleotide
aagucucgaguggcguuau

SEQ ID NO: 572055 - RNA, 19 nt, Artificial Sequence
  Description of Artificial Sequence: Synthetic oligonucleotide
acccuaauccacgguucug

SEQ ID NO: 572056 - RNA, 19 nt, Artificial Sequence
  Description of Artificial Sequence: Synthetic oligonucleotide
gagguaccuggcccauuca

SEQ ID NO: 572057 - RNA, 19 nt, Artificial Sequence
  Description of Artificial Sequence: Synthetic oligonucleotide
cgaagcaagagguucaaua

SEQ ID NO: 572058 - RNA, 19 nt, Artificial Sequence
  Description of Artificial Sequence: Synthetic oligonucleotide
gcuacaagguccagggcuc

SEQ ID NO: 572059 - RNA, 19 nt, Artificial Sequence
  Description of Artificial Sequence: Synthetic oligonucleotide
gcaugagagagcgcuugag

SEQ ID NO: 572060 - RNA, 19 nt, Artificial Sequence
  Description of Artificial Sequence: Synthetic oligonucleotide
guugagccgcuccccgcug

SEQ ID NO: 572061 - RNA, 19 nt, Artificial Sequence
  Description of Artificial Sequence: Synthetic oligonucleotide
uguuccccucccggcggcg

SEQ ID NO: 572062 - RNA, 19 nt, Artificial Sequence
  Description of Artificial Sequence: Synthetic oligonucleotide
gagugcucgguggcggcug

SEQ ID NO: 572063 - RNA, 19 nt, Artificial Sequence
  Description of Artificial Sequence: Synthetic oligonucleotide
gcacauacgcagucuguga

SEQ ID NO: 572064 - RNA, 19 nt, Artificial Sequence
  Description of Artificial Sequence: Synthetic oligonucleotide
ucgcggccuaguccgggga

SEQ ID NO: 572065 - RNA, 19 nt, Artificial Sequence
  Description of Artificial Sequence: Synthetic oligonucleotide
cauucucugcccacagugu

SEQ ID NO: 572066 - RNA, 19 nt, Artificial Sequence
  Description of Artificial Sequence: Synthetic oligonucleotide
acggccuuauacagaacau

SEQ ID NO: 572067 - RNA, 19 nt, Artificial Sequence
  Description of Artificial Sequence: Synthetic oligonucleotide
gcggguagaguagauguca

SEQ ID NO: 572068 - RNA, 19 nt, Artificial Sequence
  Description of Artificial Sequence: Synthetic oligonucleotide
agcgcuugagggagggcug

SEQ ID NO: 572069 - RNA, 19 nt, Artificial Sequence
  Description of Artificial Sequence: Synthetic oligonucleotide
guaacacuuugcagcuaca

SEQ ID NO: 572070 - RNA, 19 nt, Artificial Sequence
  Description of Artificial Sequence: Synthetic oligonucleotide
ugcccgaaacagccuucuc

SEQ ID NO: 572071 - RNA, 19 nt, Artificial Sequence
  Description of Artificial Sequence: Synthetic oligonucleotide
accgaggcaggggccucgc

SEQ ID NO: 572072 - RNA, 19 nt, Artificial Sequence
  Description of Artificial Sequence: Synthetic oligonucleotide
ggacugaacauagcccuuc

SEQ ID NO: 572073 - RNA, 19 nt, Artificial Sequence
  Description of Artificial Sequence: Synthetic oligonucleotide
caugcgcacaccugucuua

SEQ ID NO: 572074 - RNA, 19 nt, Artificial Sequence
  Description of Artificial Sequence: Synthetic oligonucleotide
gggcaugagagagcgcuug

SEQ ID NO: 572075 - RNA, 19 nt, Artificial Sequence
  Description of Artificial Sequence: Synthetic oligonucleotide
cagggagauccgggaauag

SEQ ID NO: 572076 - RNA, 19 nt, Artificial Sequence
  Description of Artificial Sequence: Synthetic oligonucleotide
guucaauaggguagccugu

SEQ ID NO: 572077 - RNA, 19 nt, Artificial Sequence
  Description of Artificial Sequence: Synthetic oligonucleotide
ccuacaccaccauuaggca

SEQ ID NO: 572078 - RNA, 19 nt, Artificial Sequence
  Description of Artificial Sequence: Synthetic oligonucleotide
aggagaugcgcugguggaa

SEQ ID NO: 572079 - RNA, 19 nt, Artificial Sequence
  Description of Artificial Sequence: Synthetic oligonucleotide
agacccgggcgugauaaua

SEQ ID NO: 572080 - RNA, 19 nt, Artificial Sequence
  Description of Artificial Sequence: Synthetic oligonucleotide
uagccuguucggggaagac

SEQ ID NO: 572081 - RNA, 19 nt, Artificial Sequence
  Description of Artificial Sequence: Synthetic oligonucleotide
gucccgucuguuugaaacu

SEQ ID NO: 572082 - RNA, 19 nt, Artificial Sequence
  Description of Artificial Sequence: Synthetic oligonucleotide
ccugucuuaaucacauugu

SEQ ID NO: 572083 - RNA, 19 nt, Artificial Sequence
  Description of Artificial Sequence: Synthetic oligonucleotide
ccuaguccggggaccgagg

SEQ ID NO: 572084 - RNA, 19 nt, Artificial Sequence
  Description of Artificial Sequence: Synthetic oligonucleotide
acggaacuguaggucggcu

SEQ ID NO: 572085 - RNA, 19 nt, Artificial Sequence
  Description of Artificial Sequence: Synthetic oligonucleotide
ccgcagcacaaaccgaggc

SEQ ID NO: 572086 - RNA, 19 nt, Artificial Sequence
  Description of Artificial Sequence: Synthetic oligonucleotide
cacacccuaauccacgguu

SEQ ID NO: 572087 - RNA, 19 nt, Artificial Sequence
  Description of Artificial Sequence: Synthetic oligonucleotide
uaggucccgucuguuugaa

SEQ ID NO: 572088 - RNA, 19 nt, Artificial Sequence
  Description of Artificial Sequence: Synthetic oligonucleotide
ccgcagccggauaauuagg

SEQ ID NO: 572089 - RNA, 19 nt, Artificial Sequence
  Description of Artificial Sequence: Synthetic oligonucleotide
gcucgcgucgggccgcacg

SEQ ID NO: 572090 - RNA, 19 nt, Artificial Sequence
  Description of Artificial Sequence: Synthetic oligonucleotide
ggcgugacguagacggcag

SEQ ID NO: 572091 - RNA, 19 nt, Artificial Sequence
  Description of Artificial Sequence: Synthetic oligonucleotide
augcacggccuuauacaga

SEQ ID NO: 572092 - RNA, 19 nt, Artificial Sequence
  Description of Artificial Sequence: Synthetic oligonucleotide
ggaccccugagggaaaaga

SEQ ID NO: 572093 - RNA, 19 nt, Artificial Sequence
  Description of Artificial Sequence: Synthetic oligonucleotide
uccgggcuucagaguacuc

SEQ ID NO: 572094 - RNA, 19 nt, Artificial Sequence
  Description of Artificial Sequence: Synthetic oligonucleotide
gagaccugccgcccauucu

SEQ ID NO: 572095 - RNA, 19 nt, Artificial Sequence
  Description of Artificial Sequence: Synthetic oligonucleotide
ggcaagauuuccuguccua

SEQ ID NO: 572096 - RNA, 19 nt, Artificial Sequence
  Description of Artificial Sequence: Synthetic oligonucleotide
guugaggcggcgugacgua

SEQ ID NO: 572097 - RNA, 19 nt, Artificial Sequence
  Description of Artificial Sequence: Synthetic oligonucleotide
ggcggucugggaucucccc

SEQ ID NO: 572098 - RNA, 19 nt, Artificial Sequence
  Description of Artificial Sequence: Synthetic oligonucleotide
cccgcagcacaaaccgagg

SEQ ID NO: 572099 - RNA, 19 nt, Artificial Sequence
  Description of Artificial Sequence: Synthetic oligonucleotide
gguugaggcggcgugacgu

SEQ ID NO: 572100 - RNA, 19 nt, Artificial Sequence
  Description of Artificial Sequence: Synthetic oligonucleotide
cgggcgugauaauaguaac

SEQ ID NO: 572101 - RNA, 19 nt, Artificial Sequence
  Description of Artificial Sequence: Synthetic oligonucleotide
aucguucuccgggcuucag

SEQ ID NO: 572102 - RNA, 19 nt, Artificial Sequence
  Description of Artificial Sequence: Synthetic oligonucleotide
guuccccucccggcggcgg

SEQ ID NO: 572103 - RNA, 19 nt, Artificial Sequence
  Description of Artificial Sequence: Synthetic oligonucleotide
ccgggcgugauaauaguaa

SEQ ID NO: 572104 - RNA, 19 nt, Artificial Sequence
  Description of Artificial Sequence: Synthetic oligonucleotide
ggcaugagagagcgcuuga

SEQ ID NO: 572105 - RNA, 19 nt, Artificial Sequence
  Description of Artificial Sequence: Synthetic oligonucleotide
caccauuaggcaagacccu

SEQ ID NO: 572106 - RNA, 19 nt, Artificial Sequence
  Description of Artificial Sequence: Synthetic oligonucleotide
gucgggccgcacgaugacc

SEQ ID NO: 572107 - RNA, 19 nt, Artificial Sequence
  Description of Artificial Sequence: Synthetic oligonucleotide
ugcgcacaccugucuuaau

SEQ ID NO: 572108 - RNA, 19 nt, Artificial Sequence
  Description of Artificial Sequence: Synthetic oligonucleotide
uagacccgggcgugauaau

SEQ ID NO: 572109 - RNA, 19 nt, Artificial Sequence
  Description of Artificial Sequence: Synthetic oligonucleotide
cagacauguuguggauguc

SEQ ID NO: 572110 - RNA, 19 nt, Artificial Sequence
  Description of Artificial Sequence: Synthetic oligonucleotide
ccucgaucacaccgucccg

SEQ ID NO: 572111 - RNA, 19 nt, Artificial Sequence
  Description of Artificial Sequence: Synthetic oligonucleotide
gccuacacccucacaccag

SEQ ID NO: 572112 - RNA, 19 nt, Artificial Sequence
  Description of Artificial Sequence: Synthetic oligonucleotide
cuguccggagccgggcaug

SEQ ID NO: 572113 - RNA, 19 nt, Artificial Sequence
  Description of Artificial Sequence: Synthetic oligonucleotide
aggcggcgugacguagacg

SEQ ID NO: 572114 - RNA, 19 nt, Artificial Sequence
  Description of Artificial Sequence: Synthetic oligonucleotide
gccuaguccggggaccgag

SEQ ID NO: 572115 - RNA, 19 nt, Artificial Sequence
  Description of Artificial Sequence: Synthetic oligonucleotide
gcggacggaacuguagguc

SEQ ID NO: 572116 - RNA, 19 nt, Artificial Sequence
  Description of Artificial Sequence: Synthetic oligonucleotide
ccuacacccucacaccaga

SEQ ID NO: 572117 - RNA, 19 nt, Artificial Sequence
  Description of Artificial Sequence: Synthetic oligonucleotide
cagggcauuggucaucguu

SEQ ID NO: 572118 - RNA, 19 nt, Artificial Sequence
  Description of Artificial Sequence: Synthetic oligonucleotide
cacccuaauccacgguucu

SEQ ID NO: 572119 - RNA, 19 nt, Artificial Sequence
  Description of Artificial Sequence: Synthetic oligonucleotide
gcgugauaauaguaacacu

SEQ ID NO: 572120 - RNA, 19 nt, Artificial Sequence
  Description of Artificial Sequence: Synthetic oligonucleotide
ggcccuaauccacacccua

SEQ ID NO: 572121 - RNA, 19 nt, Artificial Sequence
  Description of Artificial Sequence: Synthetic oligonucleotide
gguagccuguccgucugca

SEQ ID NO: 572122 - RNA, 19 nt, Artificial Sequence
  Description of Artificial Sequence: Synthetic oligonucleotide
ccggagccgggcaugcaag

SEQ ID NO: 572123 - RNA, 19 nt, Artificial Sequence
  Description of Artificial Sequence: Synthetic oligonucleotide
aggucccgucuguuugaaa

SEQ ID NO: 572124 - RNA, 19 nt, Artificial Sequence
  Description of Artificial Sequence: Synthetic oligonucleotide
ggccgcacgaugaccgagc

SEQ ID NO: 572125 - RNA, 19 nt, Artificial Sequence
  Description of Artificial Sequence: Synthetic oligonucleotide
gcccuucucgugauugaug

SEQ ID NO: 572126 - RNA, 19 nt, Artificial Sequence
  Description of Artificial Sequence: Synthetic oligonucleotide
ccggauaauuaggguguag

SEQ ID NO: 572127 - RNA, 19 nt, Artificial Sequence
  Description of Artificial Sequence: Synthetic oligonucleotide
gggagggcugacggaacug

SEQ ID NO: 572128 - RNA, 19 nt, Artificial Sequence
  Description of Artificial Sequence: Synthetic oligonucleotide
gcagccggauaauuagggu

SEQ ID NO: 572129 - RNA, 19 nt, Artificial Sequence
  Description of Artificial Sequence: Synthetic oligonucleotide
cuggucguacaagcuguaa

SEQ ID NO: 572130 - RNA, 19 nt, Artificial Sequence
  Description of Artificial Sequence: Synthetic oligonucleotide
gccuugucggcgccucggc

SEQ ID NO: 572131 - RNA, 19 nt, Artificial Sequence
  Description of Artificial Sequence: Synthetic oligonucleotide
agggacgcagggaccccug

SEQ ID NO: 572132 - RNA, 19 nt, Artificial Sequence
  Description of Artificial Sequence: Synthetic oligonucleotide
cccggauggccuuggcgac

SEQ ID NO: 572133 - RNA, 19 nt, Artificial Sequence
  Description of Artificial Sequence: Synthetic oligonucleotide
ggcggcgguucuuguuccc

SEQ ID NO: 572134 - RNA, 19 nt, Artificial Sequence
  Description of Artificial Sequence: Synthetic oligonucleotide
ccgucuguuugaaacuucu

SEQ ID NO: 572135 - RNA, 19 nt, Artificial Sequence
  Description of Artificial Sequence: Synthetic oligonucleotide
ggaaagcgcauggccuuga

SEQ ID NO: 572136 - RNA, 19 nt, Artificial Sequence
  Description of Artificial Sequence: Synthetic oligonucleotide
ucacaccgucccggauggc

SEQ ID NO: 572137 - RNA, 19 nt, Artificial Sequence
  Description of Artificial Sequence: Synthetic oligonucleotide
accgucccggauggccuug

SEQ ID NO: 572138 - RNA, 19 nt, Artificial Sequence
  Description of Artificial Sequence: Synthetic oligonucleotide
cgguucugaguacugaucu

SEQ ID NO: 572139 - RNA, 19 nt, Artificial Sequence
  Description of Artificial Sequence: Synthetic oligonucleotide
cguagacggcagcauccgc

SEQ ID NO: 572140 - RNA, 19 nt, Artificial Sequence
  Description of Artificial Sequence: Synthetic oligonucleotide
ccagcuacagagacauagu

SEQ ID NO: 572141 - RNA, 19 nt, Artificial Sequence
  Description of Artificial Sequence: Synthetic oligonucleotide
caccaccauuaggcaagac

SEQ ID NO: 572142 - RNA, 19 nt, Artificial Sequence
  Description of Artificial Sequence: Synthetic oligonucleotide
gccgcacgaugaccgagca

SEQ ID NO: 572143 - RNA, 19 nt, Artificial Sequence
  Description of Artificial Sequence: Synthetic oligonucleotide
ccuuggcgacaaugaacuc

SEQ ID NO: 572144 - RNA, 19 nt, Artificial Sequence
  Description of Artificial Sequence: Synthetic oligonucleotide
caucguucuccgggcuuca

SEQ ID NO: 572145 - RNA, 19 nt, Artificial Sequence
  Description of Artificial Sequence: Synthetic oligonucleotide
ggaagucucgaguggcguu

SEQ ID NO: 572146 - RNA, 19 nt, Artificial Sequence
  Description of Artificial Sequence: Synthetic oligonucleotide
guagccuguccgucugcau

SEQ ID NO: 572147 - RNA, 19 nt, Artificial Sequence
  Description of Artificial Sequence: Synthetic oligonucleotide
gggaauaggagaggcugau

SEQ ID NO: 572148 - RNA, 19 nt, Artificial Sequence
  Description of Artificial Sequence: Synthetic oligonucleotide
gcggccuaguccggggacc

SEQ ID NO: 572149 - RNA, 19 nt, Artificial Sequence
  Description of Artificial Sequence: Synthetic oligonucleotide
gccuggucguacaagcugu

SEQ ID NO: 572150 - RNA, 19 nt, Artificial Sequence
  Description of Artificial Sequence: Synthetic oligonucleotide
cucggcgguucugaguacu

SEQ ID NO: 572151 - RNA, 19 nt, Artificial Sequence
  Description of Artificial Sequence: Synthetic oligonucleotide
gggaccccugagggaaaag

SEQ ID NO: 572152 - RNA, 19 nt, Artificial Sequence
  Description of Artificial Sequence: Synthetic oligonucleotide
ggucaucguucuccgggcu

SEQ ID NO: 572153 - RNA, 19 nt, Artificial Sequence
  Description of Artificial Sequence: Synthetic oligonucleotide
cgugacguagacggcagca

SEQ ID NO: 572154 - RNA, 19 nt, Artificial Sequence
  Description of Artificial Sequence: Synthetic oligonucleotide
cggggucgcggccuagucc

SEQ ID NO: 572155 - RNA, 19 nt, Artificial Sequence
  Description of Artificial Sequence: Synthetic oligonucleotide
cucgcugggagugcucggu

SEQ ID NO: 572156 - RNA, 19 nt, Artificial Sequence
  Description of Artificial Sequence: Synthetic oligonucleotide
ggcucgcggguagaguaga

SEQ ID NO: 572157 - RNA, 19 nt, Artificial Sequence
  Description of Artificial Sequence: Synthetic oligonucleotide
guacgcggacggaacugua

SEQ ID NO: 572158 - RNA, 19 nt, Artificial Sequence
  Description of Artificial Sequence: Synthetic oligonucleotide
ccuguccgucugcaucaug

SEQ ID NO: 572159 - RNA, 19 nt, Artificial Sequence
  Description of Artificial Sequence: Synthetic oligonucleotide
cccuaauccacgguucugu

SEQ ID NO: 572160 - RNA, 19 nt, Artificial Sequence
  Description of Artificial Sequence: Synthetic oligonucleotide
ccgcacgaugaccgagcag

SEQ ID NO: 572161 - RNA, 19 nt, Artificial Sequence
  Description of Artificial Sequence: Synthetic oligonucleotide
ccuaacagcuugggugaga

SEQ ID NO: 572162 - RNA, 19 nt, Artificial Sequence
  Description of Artificial Sequence: Synthetic oligonucleotide
gugcucgguggcggcugcc

SEQ ID NO: 572163 - RNA, 19 nt, Artificial Sequence
  Description of Artificial Sequence: Synthetic oligonucleotide
gcuugugcaccgucuguuu

SEQ ID NO: 572164 - RNA, 19 nt, Artificial Sequence
  Description of Artificial Sequence: Synthetic oligonucleotide
cuccgggcuucagaguacu

SEQ ID NO: 572165 - RNA, 19 nt, Artificial Sequence
  Description of Artificial Sequence: Synthetic oligonucleotide
cccgggcgugauaauagua

SEQ ID NO: 572166 - RNA, 19 nt, Artificial Sequence
  Description of Artificial Sequence: Synthetic oligonucleotide
ccuguacgcggacggaacu

SEQ ID NO: 572167 - RNA, 19 nt, Artificial Sequence
  Description of Artificial Sequence: Synthetic oligonucleotide
cggccuaguccggggaccg

SEQ ID NO: 572168 - RNA, 19 nt, Artificial Sequence
  Description of Artificial Sequence: Synthetic oligonucleotide
ccgaacugauccaggacuu

SEQ ID NO: 572169 - RNA, 19 nt, Artificial Sequence
  Description of Artificial Sequence: Synthetic oligonucleotide
ccccguugagccgcucccc

SEQ ID NO: 572170 - RNA, 19 nt, Artificial Sequence
  Description of Artificial Sequence: Synthetic oligonucleotide
cuuugccuugucggcgccu

SEQ ID NO: 572171 - RNA, 19 nt, Artificial Sequence
  Description of Artificial Sequence: Synthetic oligonucleotide
cgaugaccgagcagcugca

SEQ ID NO: 572172 - RNA, 19 nt, Artificial Sequence
  Description of Artificial Sequence: Synthetic oligonucleotide
gcgcuugagggagggcuga

SEQ ID NO: 572173 - RNA, 19 nt, Artificial Sequence
  Description of Artificial Sequence: Synthetic oligonucleotide
gcggcgugacguagacggc

SEQ ID NO: 572174 - RNA, 19 nt, Artificial Sequence
  Description of Artificial Sequence: Synthetic oligonucleotide
ccuugcgcagggcauuggu

SEQ ID NO: 572175 - RNA, 19 nt, Artificial Sequence
  Description of Artificial Sequence: Synthetic oligonucleotide
cgcagcacaaaccgaggcu

SEQ ID NO: 572176 - RNA, 19 nt, Artificial Sequence
  Description of Artificial Sequence: Synthetic oligonucleotide
ccuggucguacaagcugua

SEQ ID NO: 572177 - RNA, 19 nt, Artificial Sequence
  Description of Artificial Sequence: Synthetic oligonucleotide
ccgcgccgagcccuccugc

SEQ ID NO: 572178 - RNA, 19 nt, Artificial Sequence
  Description of Artificial Sequence: Synthetic oligonucleotide
gggaccgaggcaggggccu

SEQ ID NO: 572179 - RNA, 19 nt, Artificial Sequence
  Description of Artificial Sequence: Synthetic oligonucleotide
gccucggcgccgcgccgag

SEQ ID NO: 572180 - RNA, 19 nt, Artificial Sequence
  Description of Artificial Sequence: Synthetic oligonucleotide
gccggauaauuagggugua

SEQ ID NO: 572181 - RNA, 19 nt, Artificial Sequence
  Description of Artificial Sequence: Synthetic oligonucleotide
gggcucggcgguucugagu

SEQ ID NO: 572182 - RNA, 19 nt, Artificial Sequence
  Description of Artificial Sequence: Synthetic oligonucleotide
cagggacgcagggaccccu

SEQ ID NO: 572183 - RNA, 19 nt, Artificial Sequence
  Description of Artificial Sequence: Synthetic oligonucleotide
cggccuuauacagaacaua

SEQ ID NO: 572184 - RNA, 19 nt, Artificial Sequence
  Description of Artificial Sequence: Synthetic oligonucleotide
gcacggccuuauacagaac

SEQ ID NO: 572185 - RNA, 19 nt, Artificial Sequence
  Description of Artificial Sequence: Synthetic oligonucleotide
ccgucccggauggccuugg

SEQ ID NO: 572186 - RNA, 19 nt, Artificial Sequence
  Description of Artificial Sequence: Synthetic oligonucleotide
gcgcagggcauuggucauc

SEQ ID NO: 572187 - RNA, 19 nt, Artificial Sequence
  Description of Artificial Sequence: Synthetic oligonucleotide
gcacgaugaccgagcagcu

SEQ ID NO: 572188 - RNA, 19 nt, Artificial Sequence
  Description of Artificial Sequence: Synthetic oligonucleotide
cggcgugacguagacggca

SEQ ID NO: 572189 - RNA, 19 nt, Artificial Sequence
  Description of Artificial Sequence: Synthetic oligonucleotide
cguugagccgcuccccgcu

SEQ ID NO: 572190 - RNA, 19 nt, Artificial Sequence
  Description of Artificial Sequence: Synthetic oligonucleotide
caccagcgcgggcucgcgu

SEQ ID NO: 572191 - RNA, 19 nt, Artificial Sequence
  Description of Artificial Sequence: Synthetic oligonucleotide
cgcggacggaacuguaggu

SEQ ID NO: 572192 - RNA, 19 nt, Artificial Sequence
  Description of Artificial Sequence: Synthetic oligonucleotide
ggccuaguccggggaccga

SEQ ID NO: 572193 - RNA, 19 nt, Artificial Sequence
  Description of Artificial Sequence: Synthetic oligonucleotide
gcucgcggguagaguagau

SEQ ID NO: 572194 - RNA, 19 nt, Artificial Sequence
  Description of Artificial Sequence: Synthetic oligonucleotide
ccgaagcaagagguucaau

SEQ ID NO: 572195 - RNA, 19 nt, Artificial Sequence
  Description of Artificial Sequence: Synthetic oligonucleotide
ccgaggcuccuugcccgaa

SEQ ID NO: 572196 - RNA, 19 nt, Artificial Sequence
  Description of Artificial Sequence: Synthetic oligonucleotide
auaauaaggauuuuaagac

SEQ ID NO: 572197 - RNA, 19 nt, Artificial Sequence
  Description of Artificial Sequence: Synthetic oligonucleotide
accaccauaaauccgaucc

SEQ ID NO: 572198 - RNA, 19 nt, Artificial Sequence
  Description of Artificial Sequence: Synthetic oligonucleotide
acauuuacaaccucgcugc

SEQ ID NO: 572199 - RNA, 19 nt, Artificial Sequence
  Description of Artificial Sequence: Synthetic oligonucleotide
  modified_base (7)..(7): a, c, u, g, unknown or other
auuuucngaaaaugggacc

SEQ ID NO: 572200 - RNA, 19 nt, Artificial Sequence
  Description of Artificial Sequence: Synthetic oligonucleotide
aacuuuagcuguuagacca

SEQ ID NO: 572201 - RNA, 19 nt, Artificial Sequence
  Description of Artificial Sequence: Synthetic oligonucleotide
agugucuuuguacugacac

SEQ ID NO: 572202 - RNA, 19 nt, Artificial Sequence
  Description of Artificial Sequence: Synthetic oligonucleotide
uguuagaccaccauaaauc

SEQ ID NO: 572203 - RNA, 19 nt, Artificial Sequence
  Description of Artificial Sequence: Synthetic oligonucleotide
ugaucuguuaaccaaguca

SEQ ID NO: 572204 - RNA, 19 nt, Artificial Sequence
  Description of Artificial Sequence: Synthetic oligonucleotide
uguucaacuacagaagugg

SEQ ID NO: 572205 - RNA, 19 nt, Artificial Sequence
  Description of Artificial Sequence: Synthetic oligonucleotide
aaauucuuggugugagacc

SEQ ID NO: 572206 - RNA, 19 nt, Artificial Sequence
  Description of Artificial Sequence: Synthetic oligonucleotide
gauaguaagacugcugugg

SEQ ID NO: 572207 - RNA, 19 nt, Artificial Sequence
  Description of Artificial Sequence: Synthetic oligonucleotide
aaaucguuauccuucuuug

SEQ ID NO: 572208 - RNA, 19 nt, Artificial Sequence
  Description of Artificial Sequence: Synthetic oligonucleotide
  modified_base (9)..(9): a, c, u, g, unknown or other
ugauuuucngaaaauggga

SEQ ID NO: 572209 - RNA, 19 nt, Artificial Sequence
  Description of Artificial Sequence: Synthetic oligonucleotide
aaucguuauccuucuuugc

SEQ ID NO: 572210 - RNA, 19 nt, Artificial Sequence
  Description of Artificial Sequence: Synthetic oligonucleotide
acuugguuaggauagacug

SEQ ID NO: 572211 - RNA, 19 nt, Artificial Sequence
  Description of Artificial Sequence: Synthetic oligonucleotide
aaucugaucauaauaucuc

SEQ ID NO: 572212 - RNA, 19 nt, Artificial Sequence
  Description of Artificial Sequence: Synthetic oligonucleotide
ugauaaaugaaaucguuau

SEQ ID NO: 572213 - RNA, 19 nt, Artificial Sequence
  Description of Artificial Sequence: Synthetic oligonucleotide
ugaucauaauaucucagca

SEQ ID NO: 572214 - RNA, 19 nt, Artificial Sequence
  Description of Artificial Sequence: Synthetic oligonucleotide
auaaauccgauccagcuca

SEQ ID NO: 572215 - RNA, 19 nt, Artificial Sequence
  Description of Artificial Sequence: Synthetic oligonucleotide
gaucuguuaaccaagucag

SEQ ID NO: 572216 - RNA, 19 nt, Artificial Sequence
  Description of Artificial Sequence: Synthetic oligonucleotide
gacauuuacaaccucgcug

SEQ ID NO: 572217 - RNA, 19 nt, Artificial Sequence
  Description of Artificial Sequence: Synthetic oligonucleotide
ucauuugagcgauugaucu

SEQ ID NO: 572218 - RNA, 19 nt, Artificial Sequence
  Description of Artificial Sequence: Synthetic oligonucleotide
ucauaauaucucagcagcg

SEQ ID NO: 572219 - RNA, 19 nt, Artificial Sequence
  Description of Artificial Sequence: Synthetic oligonucleotide
auuggaugcaguccuuugc

SEQ ID NO: 572220 - RNA, 19 nt, Artificial Sequence
  Description of Artificial Sequence: Synthetic oligonucleotide
gaauuuugaucuuaaguca

SEQ ID NO: 572221 - RNA, 19 nt, Artificial Sequence
  Description of Artificial Sequence: Synthetic oligonucleotide
ucuaagauuucucuauuuc

SEQ ID NO: 572222 - RNA, 19 nt, Artificial Sequence
  Description of Artificial Sequence: Synthetic oligonucleotide
uagaccaccauaaauccga

SEQ ID NO: 572223 - RNA, 19 nt, Artificial Sequence
  Description of Artificial Sequence: Synthetic oligonucleotide
uaauaaggauuuuaagaca

SEQ ID NO: 572224 - RNA, 19 nt, Artificial Sequence
  Description of Artificial Sequence: Synthetic oligonucleotide
auaauaucucagcagcguc

SEQ ID NO: 572225 - RNA, 19 nt, Artificial Sequence
  Description of Artificial Sequence: Synthetic oligonucleotide
uuuaucuaaaacugcucug

SEQ ID NO: 572226 - RNA, 19 nt, Artificial Sequence
  Description of Artificial Sequence: Synthetic oligonucleotide
aacacuaugucacugcauu

SEQ ID NO: 572227 - RNA, 19 nt, Artificial Sequence
  Description of Artificial Sequence: Synthetic oligonucleotide
ucguuguaaaacuuugugc

SEQ ID NO: 572228 - RNA, 19 nt, Artificial Sequence
  Description of Artificial Sequence: Synthetic oligonucleotide
uuaagucauugucaguugc

SEQ ID NO: 572229 - RNA, 19 nt, Artificial Sequence
  Description of Artificial Sequence: Synthetic oligonucleotide
gacaauacccaggauaucc

SEQ ID NO: 572230 - RNA, 19 nt, Artificial Sequence
  Description of Artificial Sequence: Synthetic oligonucleotide
uuuacaaccucgcugcccu

SEQ ID NO: 572231 - RNA, 19 nt, Artificial Sequence
  Description of Artificial Sequence: Synthetic oligonucleotide
uuuaucacgccauccuggg

SEQ ID NO: 572232 - RNA, 19 nt, Artificial Sequence
  Description of Artificial Sequence: Synthetic oligonucleotide
gauagguaggauacggugg

SEQ ID NO: 572233 - RNA, 19 nt, Artificial Sequence
  Description of Artificial Sequence: Synthetic oligonucleotide
uuagacugcuucauuuuag

SEQ ID NO: 572234 - RNA, 19 nt, Artificial Sequence
  Description of Artificial Sequence: Synthetic oligonucleotide
auaguaagacugcuguggg

SEQ ID NO: 572235 - RNA, 19 nt, Artificial Sequence
  Description of Artificial Sequence: Synthetic oligonucleotide
  modified_base (3)..(3): a, c, u, g, unknown or other
ucngaaaaugggaccuugg

SEQ ID NO: 572236 - RNA, 19 nt, Artificial Sequence
  Description of Artificial Sequence: Synthetic oligonucleotide
aaggauagacuggugguac

SEQ ID NO: 572237 - RNA, 19 nt, Artificial Sequence
  Description of Artificial Sequence: Synthetic oligonucleotide
ugagcgauugaucuguuaa

SEQ ID NO: 572238 - RNA, 19 nt, Artificial Sequence
  Description of Artificial Sequence: Synthetic oligonucleotide
  modified_base (6)..(6): a, c, u, g, unknown or other
uuuucngaaaaugggaccu

SEQ ID NO: 572239 - RNA, 19 nt, Artificial Sequence
  Description of Artificial Sequence: Synthetic oligonucleotide
aguucaacaaaguugucau

SEQ ID NO: 572240 - RNA, 19 nt, Artificial Sequence
  Description of Artificial Sequence: Synthetic oligonucleotide
agcgauugaucuguuaacc

SEQ ID NO: 572241 - RNA, 19 nt, Artificial Sequence
  Description of Artificial Sequence: Synthetic oligonucleotide
aaguucaacaaaguuguca

SEQ ID NO: 572242 - RNA, 19 nt, Artificial Sequence
  Description of Artificial Sequence: Synthetic oligonucleotide
agcaucgccaaaguaaucg

SEQ ID NO: 572243 - RNA, 19 nt, Artificial Sequence
  Description of Artificial Sequence: Synthetic oligonucleotide
  modified_base (8)..(8): a, c, u, g, unknown or other
gauuuucngaaaaugggac

SEQ ID NO: 572244 - RNA, 19 nt, Artificial Sequence
  Description of Artificial Sequence: Synthetic oligonucleotide
guaaucgucaagcagaucu

SEQ ID NO: 572245 - RNA, 19 nt, Artificial Sequence
  Description of Artificial Sequence: Synthetic oligonucleotide
ugucaaaauucacugacuu

SEQ ID NO: 572246 - RNA, 19 nt, Artificial Sequence
  Description of Artificial Sequence: Synthetic oligonucleotide
ucuuaagucauugucaguu

SEQ ID NO: 572247 - RNA, 19 nt, Artificial Sequence
  Description of Artificial Sequence: Synthetic oligonucleotide
uugguuaggauagacugag

SEQ ID NO: 572248 - RNA, 19 nt, Artificial Sequence
  Description of Artificial Sequence: Synthetic oligonucleotide
ucggguagcuccuuuauca

SEQ ID NO: 572249 - RNA, 19 nt, Artificial Sequence
  Description of Artificial Sequence: Synthetic oligonucleotide
cucguaaaggcuuguagag

SEQ ID NO: 572250 - RNA, 19 nt, Artificial Sequence
  Description of Artificial Sequence: Synthetic oligonucleotide
ucuguuaaccaagucagcu

SEQ ID NO: 572251 - RNA, 19 nt, Artificial Sequence
  Description of Artificial Sequence: Synthetic oligonucleotide
uccuggauagguaggauac

SEQ ID NO: 572252 - RNA, 19 nt, Artificial Sequence
  Description of Artificial Sequence: Synthetic oligonucleotide
uucaaguuagcuacaaguu

SEQ ID NO: 572253 - RNA, 19 nt, Artificial Sequence
  Description of Artificial Sequence: Synthetic oligonucleotide
auaugcaguugccaaguuc

SEQ ID NO: 572254 - RNA, 19 nt, Artificial Sequence
  Description of Artificial Sequence: Synthetic oligonucleotide
uguuaaccaagucagcuuu

SEQ ID NO: 572255 - RNA, 19 nt, Artificial Sequence
  Description of Artificial Sequence: Synthetic oligonucleotide
ugcucguaaaggcuuguag

SEQ ID NO: 572256 - RNA, 19 nt, Artificial Sequence
  Description of Artificial Sequence: Synthetic oligonucleotide
ucgguuugcaggaagcaca

SEQ ID NO: 572257 - RNA, 19 nt, Artificial Sequence
  Description of Artificial Sequence: Synthetic oligonucleotide
uaugcguagggguuguagc

SEQ ID NO: 572258 - RNA, 19 nt, Artificial Sequence
  Description of Artificial Sequence: Synthetic oligonucleotide
gaacuuuagcuguuagacc

SEQ ID NO: 572259 - RNA, 19 nt, Artificial Sequence
  Description of Artificial Sequence: Synthetic oligonucleotide
uuccucugaccaaacacag

SEQ ID NO: 572260 - RNA, 19 nt, Artificial Sequence
  Description of Artificial Sequence: Synthetic oligonucleotide
  modified_base (2)..(2): a, c, u, g, unknown or other
cngaaaaugggaccuuggg

SEQ ID NO: 572261 - RNA, 19 nt, Artificial Sequence
  Description of Artificial Sequence: Synthetic oligonucleotide
cguuguaaaacuuugugcc

SEQ ID NO: 572262 - RNA, 19 nt, Artificial Sequence
  Description of Artificial Sequence: Synthetic oligonucleotide
ucaacagucuggaugccac

SEQ ID NO: 572263 - RNA, 19 nt, Artificial Sequence
  Description of Artificial Sequence: Synthetic oligonucleotide
cucguuguaaaacuuugug

SEQ ID NO: 572264 - RNA, 19 nt, Artificial Sequence
  Description of Artificial Sequence: Synthetic oligonucleotide
ugucauaugcaguugccaa

SEQ ID NO: 572265 - RNA, 19 nt, Artificial Sequence
  Description of Artificial Sequence: Synthetic oligonucleotide
ggaaauaccuccuugggga

SEQ ID NO: 572266 - RNA, 19 nt, Artificial Sequence
  Description of Artificial Sequence: Synthetic oligonucleotide
uuccgugcaaacacuaugu

SEQ ID NO: 572267 - RNA, 19 nt, Artificial Sequence
  Description of Artificial Sequence: Synthetic oligonucleotide
auuuaucacgccauccugg

SEQ ID NO: 572268 - RNA, 19 nt, Artificial Sequence
  Description of Artificial Sequence: Synthetic oligonucleotide
auuuacaaccucgcugccc

SEQ ID NO: 572269 - RNA, 19 nt, Artificial Sequence
  Description of Artificial Sequence: Synthetic oligonucleotide
ucgugauaaaugaaaucgu

SEQ ID NO: 572270 - RNA, 19 nt, Artificial Sequence
  Description of Artificial Sequence: Synthetic oligonucleotide
agagugucuuuguacugac

SEQ ID NO: 572271 - RNA, 19 nt, Artificial Sequence
  Description of Artificial Sequence: Synthetic oligonucleotide
ucagguuccggcuuacaca

SEQ ID NO: 572272 - RNA, 19 nt, Artificial Sequence
  Description of Artificial Sequence: Synthetic oligonucleotide
auuuccgucugcuugcaca

SEQ ID NO: 572273 - RNA, 19 nt, Artificial Sequence
  Description of Artificial Sequence: Synthetic oligonucleotide
ucuuuaaggucugggacgc

SEQ ID NO: 572274 - RNA, 19 nt, Artificial Sequence
  Description of Artificial Sequence: Synthetic oligonucleotide
gauacgguggucccugagc

SEQ ID NO: 572275 - RNA, 19 nt, Artificial Sequence
  Description of Artificial Sequence: Synthetic oligonucleotide
uaaucgucaagcagaucug

SEQ ID NO: 572276 - RNA, 19 nt, Artificial Sequence
  Description of Artificial Sequence: Synthetic oligonucleotide
uccuuacacauugacauac

SEQ ID NO: 572277 - RNA, 19 nt, Artificial Sequence
  Description of Artificial Sequence: Synthetic oligonucleotide
uuccggcuuacacagaagu

SEQ ID NO: 572278 - RNA, 19 nt, Artificial Sequence
  Description of Artificial Sequence: Synthetic oligonucleotide
uguacuggccauaugcgua

SEQ ID NO: 572279 - RNA, 19 nt, Artificial Sequence
  Description of Artificial Sequence: Synthetic oligonucleotide
gauauccuggauagguagg

SEQ ID NO: 572280 - RNA, 19 nt, Artificial Sequence
  Description of Artificial Sequence: Synthetic oligonucleotide
agaagugcgauggugucuc

SEQ ID NO: 572281 - RNA, 19 nt, Artificial Sequence
  Description of Artificial Sequence: Synthetic oligonucleotide
uccgacgucuucuucagcu

SEQ ID NO: 572282 - RNA, 19 nt, Artificial Sequence
  Description of Artificial Sequence: Synthetic oligonucleotide
uuggcuugcaugauacacu

SEQ ID NO: 572283 - RNA, 19 nt, Artificial Sequence
  Description of Artificial Sequence: Synthetic oligonucleotide
ugauggguacauugacugg

SEQ ID NO: 572284 - RNA, 19 nt, Artificial Sequence
  Description of Artificial Sequence: Synthetic oligonucleotide
aaagcaucgccaaaguaau

SEQ ID NO: 572285 - RNA, 19 nt, Artificial Sequence
  Description of Artificial Sequence: Synthetic oligonucleotide
auuugagcgauugaucugu

SEQ ID NO: 572286 - RNA, 19 nt, Artificial Sequence
  Description of Artificial Sequence: Synthetic oligonucleotide
uguacggcauguuguacug

SEQ ID NO: 572287 - RNA, 19 nt, Artificial Sequence
  Description of Artificial Sequence: Synthetic oligonucleotide
ucguuauccuucuuugcug

SEQ ID NO: 572288 - RNA, 19 nt, Artificial Sequence
  Description of Artificial Sequence: Synthetic oligonucleotide
gaaauaccuccuuggggag

SEQ ID NO: 572289 - RNA, 19 nt, Artificial Sequence
  Description of Artificial Sequence: Synthetic oligonucleotide
uggcuugcaugauacacug

SEQ ID NO: 572290 - RNA, 19 nt, Artificial Sequence
  Description of Artificial Sequence: Synthetic oligonucleotide
uagguuagcuucauuguua

SEQ ID NO: 572291 - RNA, 19 nt, Artificial Sequence
  Description of Artificial Sequence: Synthetic oligonucleotide
uuugccgauaggauccaga

SEQ ID NO: 572292 - RNA, 19 nt, Artificial Sequence
  Description of Artificial Sequence: Synthetic oligonucleotide
ucguaaaggcuuguagagg

SEQ ID NO: 572293 - RNA, 19 nt, Artificial Sequence
  Description of Artificial Sequence: Synthetic oligonucleotide
cugauaugcuggaggaggg

SEQ ID NO: 572294 - RNA, 19 nt, Artificial Sequence
  Description of Artificial Sequence: Synthetic oligonucleotide
uacggcauguuguacuggc

SEQ ID NO: 572295 - RNA, 19 nt, Artificial Sequence
  Description of Artificial Sequence: Synthetic oligonucleotide
uccgauccagcucagugac

SEQ ID NO: 572296 - RNA, 19 nt, Artificial Sequence
  Description of Artificial Sequence: Synthetic oligonucleotide
guuaggauagacugaggca

SEQ ID NO: 572297 - RNA, 19 nt, Artificial Sequence
  Description of Artificial Sequence: Synthetic oligonucleotide
uaguaagacugcugugggg

SEQ ID NO: 572298 - RNA, 19 nt, Artificial Sequence
  Description of Artificial Sequence: Synthetic oligonucleotide
uuugugcccuccuucaagu

SEQ ID NO: 572299 - RNA, 19 nt, Artificial Sequence
  Description of Artificial Sequence: Synthetic oligonucleotide
uugcaugauacacugcuuu

SEQ ID NO: 572300 - RNA, 19 nt, Artificial Sequence
  Description of Artificial Sequence: Synthetic oligonucleotide
cuggauagguaggauacgg

SEQ ID NO: 572301 - RNA, 19 nt, Artificial Sequence
  Description of Artificial Sequence: Synthetic oligonucleotide
ggauauccuggauagguag

SEQ ID NO: 572302 - RNA, 19 nt, Artificial Sequence
  Description of Artificial Sequence: Synthetic oligonucleotide
agucagcucguuguaaaac

SEQ ID NO: 572303 - RNA, 19 nt, Artificial Sequence
  Description of Artificial Sequence: Synthetic oligonucleotide
gaucccucugcucguaaag

SEQ ID NO: 572304 - RNA, 19 nt, Artificial Sequence
  Description of Artificial Sequence: Synthetic oligonucleotide
aaccugaccaagauuucag

SEQ ID NO: 572305 - RNA, 19 nt, Artificial Sequence
  Description of Artificial Sequence: Synthetic oligonucleotide
  modified_base (4)..(4): a, c, u, g, unknown or other
uucngaaaaugggaccuug

SEQ ID NO: 572306 - RNA, 19 nt, Artificial Sequence
  Description of Artificial Sequence: Synthetic oligonucleotide
aauaccccauuugccaaag

SEQ ID NO: 572307 - RNA, 19 nt, Artificial Sequence
  Description of Artificial Sequence: Synthetic oligonucleotide
uuagcuguuagaccaccau

SEQ ID NO: 572308 - RNA, 19 nt, Artificial Sequence
  Description of Artificial Sequence: Synthetic oligonucleotide
cugaauuuggaucccucug

SEQ ID NO: 572309 - RNA, 19 nt, Artificial Sequence
  Description of Artificial Sequence: Synthetic oligonucleotide
cucauuugagcgauugauc

SEQ ID NO: 572310 - RNA, 19 nt, Artificial Sequence
  Description of Artificial Sequence: Synthetic oligonucleotide
uugcuugucaugucaaaau

SEQ ID NO: 572311 - RNA, 19 nt, Artificial Sequence
  Description of Artificial Sequence: Synthetic oligonucleotide
auagcgagacugcugcuug

SEQ ID NO: 572312 - RNA, 19 nt, Artificial Sequence
  Description of Artificial Sequence: Synthetic oligonucleotide
ucucucauuugagcgauug

SEQ ID NO: 572313 - RNA, 19 nt, Artificial Sequence
  Description of Artificial Sequence: Synthetic oligonucleotide
aaggucugggacgcggucg

SEQ ID NO: 572314 - RNA, 19 nt, Artificial Sequence
  Description of Artificial Sequence: Synthetic oligonucleotide
uguaguaacucggguagcu

SEQ ID NO: 572315 - RNA, 19 nt, Artificial Sequence
  Description of Artificial Sequence: Synthetic oligonucleotide
gggaaauaccuccuugggg

SEQ ID NO: 572316 - RNA, 19 nt, Artificial Sequence
  Description of Artificial Sequence: Synthetic oligonucleotide
cucgaugggacugguagcg

SEQ ID NO: 572317 - RNA, 19 nt, Artificial Sequence
  Description of Artificial Sequence: Synthetic oligonucleotide
cucauuuaucacgccaucc

SEQ ID NO: 572318 - RNA, 19 nt, Artificial Sequence
  Description of Artificial Sequence: Synthetic oligonucleotide
uaccccauuugccaaagua

SEQ ID NO: 572319 - RNA, 19 nt, Artificial Sequence
  Description of Artificial Sequence: Synthetic oligonucleotide
ucaagcagaucugauuuuc

SEQ ID NO: 572320 - RNA, 19 nt, Artificial Sequence
  Description of Artificial Sequence: Synthetic oligonucleotide
agacacaucuucaauggcu

SEQ ID NO: 572321 - RNA, 19 nt, Artificial Sequence
  Description of Artificial Sequence: Synthetic oligonucleotide
agaaagggccuccucauuu

SEQ ID NO: 572322 - RNA, 19 nt, Artificial Sequence
  Description of Artificial Sequence: Synthetic oligonucleotide
aaucgucaagcagaucuga

SEQ ID NO: 572323 - RNA, 19 nt, Artificial Sequence
  Description of Artificial Sequence: Synthetic oligonucleotide
uggauagguaggauacggu

SEQ ID NO: 572324 - RNA, 19 nt, Artificial Sequence
  Description of Artificial Sequence: Synthetic oligonucleotide
cauuugagcgauugaucug

SEQ ID NO: 572325 - RNA, 19 nt, Artificial Sequence
  Description of Artificial Sequence: Synthetic oligonucleotide
guacuggccauaugcguag

SEQ ID NO: 572326 - RNA, 19 nt, Artificial Sequence
  Description of Artificial Sequence: Synthetic oligonucleotide
cuuuguaguaacucgggua

SEQ ID NO: 572327 - RNA, 19 nt, Artificial Sequence
  Description of Artificial Sequence: Synthetic oligonucleotide
uagacuggugguacucagc

SEQ ID NO: 572328 - RNA, 19 nt, Artificial Sequence
  Description of Artificial Sequence: Synthetic oligonucleotide
gacgcggucgugauaaaug

SEQ ID NO: 572329 - RNA, 19 nt, Artificial Sequence
  Description of Artificial Sequence: Synthetic oligonucleotide
uccgucugcuugcacagcu

SEQ ID NO: 572330 - RNA, 19 nt, Artificial Sequence
  Description of Artificial Sequence: Synthetic oligonucleotide
ucucgaugggacugguagc

SEQ ID NO: 572331 - RNA, 19 nt, Artificial Sequence
  Description of Artificial Sequence: Synthetic oligonucleotide
agacauuuacaaccucgcu

SEQ ID NO: 572332 - RNA, 19 nt, Artificial Sequence
  Description of Artificial Sequence: Synthetic oligonucleotide
accccauuugccaaaguag

SEQ ID NO: 572333 - RNA, 19 nt, Artificial Sequence
  Description of Artificial Sequence: Synthetic oligonucleotide
auacccaggauauccugga

SEQ ID NO: 572334 - RNA, 19 nt, Artificial Sequence
  Description of Artificial Sequence: Synthetic oligonucleotide
gguacacuggcguguacgg

SEQ ID NO: 572335 - RNA, 19 nt, Artificial Sequence
  Description of Artificial Sequence: Synthetic oligonucleotide
gaugccacccuguucaacu

SEQ ID NO: 572336 - RNA, 19 nt, Artificial Sequence
  Description of Artificial Sequence: Synthetic oligonucleotide
ugguuaggauagacugagg

SEQ ID NO: 572337 - RNA, 19 nt, Artificial Sequence
  Description of Artificial Sequence: Synthetic oligonucleotide
uuaaggucugggacgcggu

SEQ ID NO: 572338 - RNA, 19 nt, Artificial Sequence
  Description of Artificial Sequence: Synthetic oligonucleotide
uugccgauaggauccagau

SEQ ID NO: 572339 - RNA, 19 nt, Artificial Sequence
  Description of Artificial Sequence: Synthetic oligonucleotide
uccuucaagagcucaucuc

SEQ ID NO: 572340 - RNA, 19 nt, Artificial Sequence
  Description of Artificial Sequence: Synthetic oligonucleotide
uuggugugagaccuguaua

SEQ ID NO: 572341 - RNA, 19 nt, Artificial Sequence
  Description of Artificial Sequence: Synthetic oligonucleotide
auaugcguagggguuguag

SEQ ID NO: 572342 - RNA, 19 nt, Artificial Sequence
  Description of Artificial Sequence: Synthetic oligonucleotide
ugugcccuccuucaaguua

SEQ ID NO: 572343 - RNA, 19 nt, Artificial Sequence
  Description of Artificial Sequence: Synthetic oligonucleotide
uagcuguuagaccaccaua

SEQ ID NO: 572344 - RNA, 19 nt, Artificial Sequence
  Description of Artificial Sequence: Synthetic oligonucleotide
aucgccaaaguaaucguca

SEQ ID NO: 572345 - RNA, 19 nt, Artificial Sequence
  Description of Artificial Sequence: Synthetic oligonucleotide
auugacugggguggguuuc

SEQ ID NO: 572346 - RNA, 19 nt, Artificial Sequence
  Description of Artificial Sequence: Synthetic oligonucleotide
ugaagcaaccccugccccu

SEQ ID NO: 572347 - RNA, 19 nt, Artificial Sequence
  Description of Artificial Sequence: Synthetic oligonucleotide
auccgauccagcucaguga

SEQ ID NO: 572348 - RNA, 19 nt, Artificial Sequence
  Description of Artificial Sequence: Synthetic oligonucleotide
caugauacacugcuuugca

SEQ ID NO: 572349 - RNA, 19 nt, Artificial Sequence
  Description of Artificial Sequence: Synthetic oligonucleotide
ugucuuccgugcaaacacu

SEQ ID NO: 572350 - RNA, 19 nt, Artificial Sequence
  Description of Artificial Sequence: Synthetic oligonucleotide
uggcuuugccgauaggauc

SEQ ID NO: 572351 - RNA, 19 nt, Artificial Sequence
  Description of Artificial Sequence: Synthetic oligonucleotide
uggcguguacggcauguug

SEQ ID NO: 572352 - RNA, 19 nt, Artificial Sequence
  Description of Artificial Sequence: Synthetic oligonucleotide
uuaguucaucaagacuuga

SEQ ID NO: 572353 - RNA, 19 nt, Artificial Sequence
  Description of Artificial Sequence: Synthetic oligonucleotide
uuaucacgccauccugggc

SEQ ID NO: 572354 - RNA, 19 nt, Artificial Sequence
  Description of Artificial Sequence: Synthetic oligonucleotide
uccucugaccaaacacagc

SEQ ID NO: 572355 - RNA, 19 nt, Artificial Sequence
  Description of Artificial Sequence: Synthetic oligonucleotide
aaguaaucgucaagcagau

SEQ ID NO: 572356 - RNA, 19 nt, Artificial Sequence
  Description of Artificial Sequence: Synthetic oligonucleotide
aguaagggcacggcugauc

SEQ ID NO: 572357 - RNA, 19 nt, Artificial Sequence
  Description of Artificial Sequence: Synthetic oligonucleotide
cuggccauaugcguagggg

SEQ ID NO: 572358 - RNA, 19 nt, Artificial Sequence
  Description of Artificial Sequence: Synthetic oligonucleotide
uaaauccgauccagcucag

SEQ ID NO: 572359 - RNA, 19 nt, Artificial Sequence
  Description of Artificial Sequence: Synthetic oligonucleotide
gacuugauaauaaggauuu

SEQ ID NO: 572360 - RNA, 19 nt, Artificial Sequence
  Description of Artificial Sequence: Synthetic oligonucleotide
agcuguuagaccaccauaa

SEQ ID NO: 572361 - RNA, 19 nt, Artificial Sequence
  Description of Artificial Sequence: Synthetic oligonucleotide
aagacucuucuaagauuuc

SEQ ID NO: 572362 - RNA, 19 nt, Artificial Sequence
  Description of Artificial Sequence: Synthetic oligonucleotide
ugggacgcggucgugauaa

SEQ ID NO: 572363 - RNA, 19 nt, Artificial Sequence
  Description of Artificial Sequence: Synthetic oligonucleotide
aagucauugucaguugcuu

SEQ ID NO: 572364 - RNA, 19 nt, Artificial Sequence
  Description of Artificial Sequence: Synthetic oligonucleotide
agcgagacugcugcuuggc

SEQ ID NO: 572365 - RNA, 19 nt, Artificial Sequence
  Description of Artificial Sequence: Synthetic oligonucleotide
acgcggucgugauaaauga

SEQ ID NO: 572366 - RNA, 19 nt, Artificial Sequence
  Description of Artificial Sequence: Synthetic oligonucleotide
ucgucaagcagaucugauu

SEQ ID NO: 572367 - RNA, 19 nt, Artificial Sequence
  Description of Artificial Sequence: Synthetic oligonucleotide
aaaugggaccuuggguuca

SEQ ID NO: 572368 - RNA, 19 nt, Artificial Sequence
  Description of Artificial Sequence: Synthetic oligonucleotide
ugacacugcuugaaagcau

SEQ ID NO: 572369 - RNA, 19 nt, Artificial Sequence
  Description of Artificial Sequence: Synthetic oligonucleotide
uccgugcaaacacuauguc

SEQ ID NO: 572370 - RNA, 19 nt, Artificial Sequence
  Description of Artificial Sequence: Synthetic oligonucleotide
ggcuuugccgauaggaucc

SEQ ID NO: 572371 - RNA, 19 nt, Artificial Sequence
  Description of Artificial Sequence: Synthetic oligonucleotide
caucgccaaaguaaucguc

SEQ ID NO: 572372 - RNA, 19 nt, Artificial Sequence
  Description of Artificial Sequence: Synthetic oligonucleotide
agugcgauggugucucgau

SEQ ID NO: 572373 - RNA, 19 nt, Artificial Sequence
  Description of Artificial Sequence: Synthetic oligonucleotide
cuuagguuagcuucauugu

SEQ ID NO: 572374 - RNA, 19 nt, Artificial Sequence
  Description of Artificial Sequence: Synthetic oligonucleotide
uugccaucguuccuugaau

SEQ ID NO: 572375 - RNA, 19 nt, Artificial Sequence
  Description of Artificial Sequence: Synthetic oligonucleotide
gaauuuggaucccucugcu

SEQ ID NO: 572376 - RNA, 19 nt, Artificial Sequence
  Description of Artificial Sequence: Synthetic oligonucleotide
guuagacugcuucauuuua

SEQ ID NO: 572377 - RNA, 19 nt, Artificial Sequence
  Description of Artificial Sequence: Synthetic oligonucleotide
ggguacauugacuggggug

SEQ ID NO: 572378 - RNA, 19 nt, Artificial Sequence
  Description of Artificial Sequence: Synthetic oligonucleotide
uacucaucauagcgagacu

SEQ ID NO: 572379 - RNA, 19 nt, Artificial Sequence
  Description of Artificial Sequence: Synthetic oligonucleotide
gaaguggacuugguuagga

SEQ ID NO: 572380 - RNA, 19 nt, Artificial Sequence
  Description of Artificial Sequence: Synthetic oligonucleotide
gcucguaaaggcuuguaga

SEQ ID NO: 572381 - RNA, 19 nt, Artificial Sequence
  Description of Artificial Sequence: Synthetic oligonucleotide
agaaguggacuugguuagg

SEQ ID NO: 572382 - RNA, 19 nt, Artificial Sequence
  Description of Artificial Sequence: Synthetic oligonucleotide
gaagcaaccccugccccug

SEQ ID NO: 572383 - RNA, 19 nt, Artificial Sequence
  Description of Artificial Sequence: Synthetic oligonucleotide
aacucggguagcuccuuua

SEQ ID NO: 572384 - RNA, 19 nt, Artificial Sequence
  Description of Artificial Sequence: Synthetic oligonucleotide
guggauaguaagacugcug

SEQ ID NO: 572385 - RNA, 19 nt, Artificial Sequence
  Description of Artificial Sequence: Synthetic oligonucleotide
cauuuacaaccucgcugcc

SEQ ID NO: 572386 - RNA, 19 nt, Artificial Sequence
  Description of Artificial Sequence: Synthetic oligonucleotide
aaacacuaugucacugcau

SEQ ID NO: 572387 - RNA, 19 nt, Artificial Sequence
  Description of Artificial Sequence: Synthetic oligonucleotide
uuguaguaacucggguagc

SEQ ID NO: 572388 - RNA, 19 nt, Artificial Sequence
  Description of Artificial Sequence: Synthetic oligonucleotide
augucaaaauucacugacu

SEQ ID NO: 572389 - RNA, 19 nt, Artificial Sequence
  Description of Artificial Sequence: Synthetic oligonucleotide
caaccccugccccuguggg

SEQ ID NO: 572390 - RNA, 19 nt, Artificial Sequence
  Description of Artificial Sequence: Synthetic oligonucleotide
uugccaaaguaguggcuuc

SEQ ID NO: 572391 - RNA, 19 nt, Artificial Sequence
  Description of Artificial Sequence: Synthetic oligonucleotide
aagcaucgccaaaguaauc

SEQ ID NO: 572392 - RNA, 19 nt, Artificial Sequence
  Description of Artificial Sequence: Synthetic oligonucleotide
ugauaugcuggaggaggga

SEQ ID NO: 572393 - RNA, 19 nt, Artificial Sequence
  Description of Artificial Sequence: Synthetic oligonucleotide
ggugacucgguuugcagga

SEQ ID NO: 572394 - RNA, 19 nt, Artificial Sequence
  Description of Artificial Sequence: Synthetic oligonucleotide
uaaggucugggacgcgguc

SEQ ID NO: 572395 - RNA, 19 nt, Artificial Sequence
  Description of Artificial Sequence: Synthetic oligonucleotide
ccggcuuacacagaagugc

SEQ ID NO: 572396 - RNA, 19 nt, Artificial Sequence
  Description of Artificial Sequence: Synthetic oligonucleotide
aggauagacugaggcacag

SEQ ID NO: 572397 - RNA, 19 nt, Artificial Sequence
  Description of Artificial Sequence: Synthetic oligonucleotide
ggggagagugucuuuguac

SEQ ID NO: 572398 - RNA, 19 nt, Artificial Sequence
  Description of Artificial Sequence: Synthetic oligonucleotide
agguccaccuccgacgucu

SEQ ID NO: 572399 - RNA, 19 nt, Artificial Sequence
  Description of Artificial Sequence: Synthetic oligonucleotide
gaagugcgauggugucucg

SEQ ID NO: 572400 - RNA, 19 nt, Artificial Sequence
  Description of Artificial Sequence: Synthetic oligonucleotide
acuugcuugucaugucaaa

SEQ ID NO: 572401 - RNA, 19 nt, Artificial Sequence
  Description of Artificial Sequence: Synthetic oligonucleotide
gcaugguucuuggagcugg

SEQ ID NO: 572402 - RNA, 19 nt, Artificial Sequence
  Description of Artificial Sequence: Synthetic oligonucleotide
ugccgauaggauccagauc

SEQ ID NO: 572403 - RNA, 19 nt, Artificial Sequence
  Description of Artificial Sequence: Synthetic oligonucleotide
uccagcgagcccucgugcu

SEQ ID NO: 572404 - RNA, 19 nt, Artificial Sequence
  Description of Artificial Sequence: Synthetic oligonucleotide
gguacggagccuguccugg

SEQ ID NO: 572405 - RNA, 19 nt, Artificial Sequence
  Description of Artificial Sequence: Synthetic oligonucleotide
aguaguggcuucucucauu

SEQ ID NO: 572406 - RNA, 19 nt, Artificial Sequence
  Description of Artificial Sequence: Synthetic oligonucleotide
gguggcuuugccgauagga

SEQ ID NO: 572407 - RNA, 19 nt, Artificial Sequence
  Description of Artificial Sequence: Synthetic oligonucleotide
aguaaucgucaagcagauc

SEQ ID NO: 572408 - RNA, 19 nt, Artificial Sequence
  Description of Artificial Sequence: Synthetic oligonucleotide
cucgguuugcaggaagcac

SEQ ID NO: 572409 - RNA, 19 nt, Artificial Sequence
  Description of Artificial Sequence: Synthetic oligonucleotide
aguaacucggguagcuccu

SEQ ID NO: 572410 - RNA, 19 nt, Artificial Sequence
  Description of Artificial Sequence: Synthetic oligonucleotide
cauucagcucagguuccgg

SEQ ID NO: 572411 - RNA, 19 nt, Artificial Sequence
  Description of Artificial Sequence: Synthetic oligonucleotide
cuugcuugucaugucaaaa

SEQ ID NO: 572412 - RNA, 19 nt, Artificial Sequence
  Description of Artificial Sequence: Synthetic oligonucleotide
uggugaggccugauaugcu

SEQ ID NO: 572413 - RNA, 19 nt, Artificial Sequence
  Description of Artificial Sequence: Synthetic oligonucleotide
cauaauaucucagcagcgu

SEQ ID NO: 572414 - RNA, 19 nt, Artificial Sequence
  Description of Artificial Sequence: Synthetic oligonucleotide
cacagaagugcgauggugu

SEQ ID NO: 572415 - RNA, 19 nt, Artificial Sequence
  Description of Artificial Sequence: Synthetic oligonucleotide
agacccucucuuuccuucu

SEQ ID NO: 572416 - RNA, 19 nt, Artificial Sequence
  Description of Artificial Sequence: Synthetic oligonucleotide
ucggccgcacggcaguacu

SEQ ID NO: 572417 - RNA, 19 nt, Artificial Sequence
  Description of Artificial Sequence: Synthetic oligonucleotide
aagugcgauggugucucga

SEQ ID NO: 572418 - RNA, 19 nt, Artificial Sequence
  Description of Artificial Sequence: Synthetic oligonucleotide
gucuuuguacugacacugc

SEQ ID NO: 572419 - RNA, 19 nt, Artificial Sequence
  Description of Artificial Sequence: Synthetic oligonucleotide
ugaaaucguuauccuucuu

SEQ ID NO: 572420 - RNA, 19 nt, Artificial Sequence
  Description of Artificial Sequence: Synthetic oligonucleotide
acucggguagcuccuuuau

SEQ ID NO: 572421 - RNA, 19 nt, Artificial Sequence
  Description of Artificial Sequence: Synthetic oligonucleotide
cguuauccuucuuugcugc

SEQ ID NO: 572422 - RNA, 19 nt, Artificial Sequence
  Description of Artificial Sequence: Synthetic oligonucleotide
ccgcauucagcucagguuc

SEQ ID NO: 572423 - RNA, 19 nt, Artificial Sequence
  Description of Artificial Sequence: Synthetic oligonucleotide
ucauagcgagacugcugcu

SEQ ID NO: 572424 - RNA, 19 nt, Artificial Sequence
  Description of Artificial Sequence: Synthetic oligonucleotide
aaauccgauccagcucagu

SEQ ID NO: 572425 - RNA, 19 nt, Artificial Sequence
  Description of Artificial Sequence: Synthetic oligonucleotide
  modified_base (5)..(5): a, c, u, g, unknown or other
uuucngaaaaugggaccuu

SEQ ID NO: 572426 - RNA, 19 nt, Artificial Sequence
  Description of Artificial Sequence: Synthetic oligonucleotide
ucgcaggcggcaugguucu

SEQ ID NO: 572427 - RNA, 19 nt, Artificial Sequence
  Description of Artificial Sequence: Synthetic oligonucleotide
uugagcgauugaucuguua

SEQ ID NO: 572428 - RNA, 19 nt, Artificial Sequence
  Description of Artificial Sequence: Synthetic oligonucleotide
cucgcugcccugcaugguc

SEQ ID NO: 572429 - RNA, 19 nt, Artificial Sequence
  Description of Artificial Sequence: Synthetic oligonucleotide
guguacggcauguuguacu

SEQ ID NO: 572430 - RNA, 19 nt, Artificial Sequence
  Description of Artificial Sequence: Synthetic oligonucleotide
cucgccgccgcucggguac

SEQ ID NO: 572431 - RNA, 19 nt, Artificial Sequence
  Description of Artificial Sequence: Synthetic oligonucleotide
gaugggacugguagcgcuc

SEQ ID NO: 572432 - RNA, 19 nt, Artificial Sequence
  Description of Artificial Sequence: Synthetic oligonucleotide
uuugagcgauugaucuguu

SEQ ID NO: 572433 - RNA, 19 nt, Artificial Sequence
  Description of Artificial Sequence: Synthetic oligonucleotide
ggguacgucugcuggauga

SEQ ID NO: 572434 - RNA, 19 nt, Artificial Sequence
  Description of Artificial Sequence: Synthetic oligonucleotide
gcgauugaucuguuaacca

SEQ ID NO: 572435 - RNA, 19 nt, Artificial Sequence
  Description of Artificial Sequence: Synthetic oligonucleotide
uccucggccgcacggcagu

SEQ ID NO: 572436 - RNA, 19 nt, Artificial Sequence
  Description of Artificial Sequence: Synthetic oligonucleotide
acucgguuugcaggaagca

SEQ ID NO: 572437 - RNA, 19 nt, Artificial Sequence
  Description of Artificial Sequence: Synthetic oligonucleotide
gugcgauggugucucgaug

SEQ ID NO: 572438 - RNA, 19 nt, Artificial Sequence
  Description of Artificial Sequence: Synthetic oligonucleotide
acuggcguguacggcaugu

SEQ ID NO: 572439 - RNA, 19 nt, Artificial Sequence
  Description of Artificial Sequence: Synthetic oligonucleotide
cuauuucuuuguaguaacu

SEQ ID NO: 572440 - RNA, 19 nt, Artificial Sequence
  Description of Artificial Sequence: Synthetic oligonucleotide
guacggcauguuguacugg

SEQ ID NO: 572441 - RNA, 19 nt, Artificial Sequence
  Description of Artificial Sequence: Synthetic oligonucleotide
gguuccggcuuacacagaa

SEQ ID NO: 572442 - RNA, 19 nt, Artificial Sequence
  Description of Artificial Sequence: Synthetic oligonucleotide
guuaaccaagucagcuuuc

SEQ ID NO: 572443 - RNA, 19 nt, Artificial Sequence
  Description of Artificial Sequence: Synthetic oligonucleotide
cuccagcgagcccucgugc

SEQ ID NO: 572444 - RNA, 19 nt, Artificial Sequence
  Description of Artificial Sequence: Synthetic oligonucleotide
  modified_base (13)..(13): a, c, u, g, unknown or other
gaucugauuuucngaaaau

SEQ ID NO: 572445 - RNA, 19 nt, Artificial Sequence
  Description of Artificial Sequence: Synthetic oligonucleotide
cggcuuacacagaagugcg

SEQ ID NO: 572446 - RNA, 19 nt, Artificial Sequence
  Description of Artificial Sequence: Synthetic oligonucleotide
cuguuagaccaccauaaau

SEQ ID NO: 572447 - RNA, 19 nt, Artificial Sequence
  Description of Artificial Sequence: Synthetic oligonucleotide
guaguaacucggguagcuc

SEQ ID NO: 572448 - RNA, 19 nt, Artificial Sequence
  Description of Artificial Sequence: Synthetic oligonucleotide
gggagagugucuuuguacu

SEQ ID NO: 572449 - RNA, 19 nt, Artificial Sequence
  Description of Artificial Sequence: Synthetic oligonucleotide
uuacaaccucgcugcccug

SEQ ID NO: 572450 - RNA, 19 nt, Artificial Sequence
  Description of Artificial Sequence: Synthetic oligonucleotide
cuuuaaggucugggacgcg

SEQ ID NO: 572451 - RNA, 19 nt, Artificial Sequence
  Description of Artificial Sequence: Synthetic oligonucleotide
uaacucggguagcuccuuu

SEQ ID NO: 572452 - RNA, 19 nt, Artificial Sequence
  Description of Artificial Sequence: Synthetic oligonucleotide
ucgaugggacugguagcgc

SEQ ID NO: 572453 - RNA, 19 nt, Artificial Sequence
  Description of Artificial Sequence: Synthetic oligonucleotide
guacacuggcguguacggc

SEQ ID NO: 572454 - RNA, 19 nt, Artificial Sequence
  Description of Artificial Sequence: Synthetic oligonucleotide
agcgccgugcgccgcagcu

SEQ ID NO: 572455 - RNA, 19 nt, Artificial Sequence
  Description of Artificial Sequence: Synthetic oligonucleotide
gcaguaagggcacggcuga

SEQ ID NO: 572456 - RNA, 19 nt, Artificial Sequence
  Description of Artificial Sequence: Synthetic oligonucleotide
gugugagaccuguauauuu

SEQ ID NO: 572457 - RNA, 19 nt, Artificial Sequence
  Description of Artificial Sequence: Synthetic oligonucleotide
uggaucccucugcucguaa

SEQ ID NO: 572458 - RNA, 19 nt, Artificial Sequence
  Description of Artificial Sequence: Synthetic oligonucleotide
caauaccccauuugccaaa

SEQ ID NO: 572459 - RNA, 19 nt, Artificial Sequence
  Description of Artificial Sequence: Synthetic oligonucleotide
uagcgcucuuucacauuuc

SEQ ID NO: 572460 - RNA, 19 nt, Artificial Sequence
  Description of Artificial Sequence: Synthetic oligonucleotide
guuccggcuuacacagaag

SEQ ID NO: 572461 - RNA, 19 nt, Artificial Sequence
  Description of Artificial Sequence: Synthetic oligonucleotide
ggacugguagcgcucuuuc

SEQ ID NO: 572462 - RNA, 19 nt, Artificial Sequence
  Description of Artificial Sequence: Synthetic oligonucleotide
auaccccauuugccaaagu

SEQ ID NO: 572463 - RNA, 19 nt, Artificial Sequence
  Description of Artificial Sequence: Synthetic oligonucleotide
aggauauccuggauaggua

SEQ ID NO: 572464 - RNA, 19 nt, Artificial Sequence
  Description of Artificial Sequence: Synthetic oligonucleotide
aucgucaagcagaucugau

SEQ ID NO: 572465 - RNA, 19 nt, Artificial Sequence
  Description of Artificial Sequence: Synthetic oligonucleotide
ggauagacuggugguacuc

SEQ ID NO: 572466 - RNA, 19 nt, Artificial Sequence
  Description of Artificial Sequence: Synthetic oligonucleotide
ugcccuccuucaaguuagc

SEQ ID NO: 572467 - RNA, 19 nt, Artificial Sequence
  Description of Artificial Sequence: Synthetic oligonucleotide
ccgugcaaacacuauguca

SEQ ID NO: 572468 - RNA, 19 nt, Artificial Sequence
  Description of Artificial Sequence: Synthetic oligonucleotide
cauuuccgucugcuugcac

SEQ ID NO: 572469 - RNA, 19 nt, Artificial Sequence
  Description of Artificial Sequence: Synthetic oligonucleotide
agggugggaaauaccuccu

SEQ ID NO: 572470 - RNA, 19 nt, Artificial Sequence
  Description of Artificial Sequence: Synthetic oligonucleotide
uugugcccuccuucaaguu

SEQ ID NO: 572471 - RNA, 19 nt, Artificial Sequence
  Description of Artificial Sequence: Synthetic oligonucleotide
cuguuaaccaagucagcuu

SEQ ID NO: 572472 - RNA, 19 nt, Artificial Sequence
  Description of Artificial Sequence: Synthetic oligonucleotide
cuuugccgauaggauccag

SEQ ID NO: 572473 - RNA, 19 nt, Artificial Sequence
  Description of Artificial Sequence: Synthetic oligonucleotide
ggccgcacggcaguacugg

SEQ ID NO: 572474 - RNA, 19 nt, Artificial Sequence
  Description of Artificial Sequence: Synthetic oligonucleotide
cagucagcucguuguaaaa

SEQ ID NO: 572475 - RNA, 19 nt, Artificial Sequence
  Description of Artificial Sequence: Synthetic oligonucleotide
cuucuaagauuucucuauu

SEQ ID NO: 572476 - RNA, 19 nt, Artificial Sequence
  Description of Artificial Sequence: Synthetic oligonucleotide
gcggucgugauaaaugaaa

SEQ ID NO: 572477 - RNA, 19 nt, Artificial Sequence
  Description of Artificial Sequence: Synthetic oligonucleotide
ccuggauagguaggauacg

SEQ ID NO: 572478 - RNA, 19 nt, Artificial Sequence
  Description of Artificial Sequence: Synthetic oligonucleotide
uuccgucugcuugcacagc

SEQ ID NO: 572479 - RNA, 19 nt, Artificial Sequence
  Description of Artificial Sequence: Synthetic oligonucleotide
cagcgagcccucgugcuug

SEQ ID NO: 572480 - RNA, 19 nt, Artificial Sequence
  Description of Artificial Sequence: Synthetic oligonucleotide
gcagcgucuccagcgagcc

SEQ ID NO: 572481 - RNA, 19 nt, Artificial Sequence
  Description of Artificial Sequence: Synthetic oligonucleotide
gucccggguacggagccug

SEQ ID NO: 572482 - RNA, 19 nt, Artificial Sequence
  Description of Artificial Sequence: Synthetic oligonucleotide
gcuguuagaccaccauaaa

SEQ ID NO: 572483 - RNA, 19 nt, Artificial Sequence
  Description of Artificial Sequence: Synthetic oligonucleotide
gcuuuccucugaccaaaca

SEQ ID NO: 572484 - RNA, 19 nt, Artificial Sequence
  Description of Artificial Sequence: Synthetic oligonucleotide
ccggguacggagccugucc

SEQ ID NO: 572485 - RNA, 19 nt, Artificial Sequence
  Description of Artificial Sequence: Synthetic oligonucleotide
gcgagacugcugcuuggcc

SEQ ID NO: 572486 - RNA, 19 nt, Artificial Sequence
  Description of Artificial Sequence: Synthetic oligonucleotide
auggccgcauucagcucag

SEQ ID NO: 572487 - RNA, 19 nt, Artificial Sequence
  Description of Artificial Sequence: Synthetic oligonucleotide
ccaauaccccauuugccaa

SEQ ID NO: 572488 - RNA, 19 nt, Artificial Sequence
  Description of Artificial Sequence: Synthetic oligonucleotide
gucuuccgugcaaacacua

SEQ ID NO: 572489 - RNA, 19 nt, Artificial Sequence
  Description of Artificial Sequence: Synthetic oligonucleotide
cuucucucauuugagcgau

SEQ ID NO: 572490 - RNA, 19 nt, Artificial Sequence
  Description of Artificial Sequence: Synthetic oligonucleotide
gucugggacgcggucguga

SEQ ID NO: 572491 - RNA, 19 nt, Artificial Sequence
  Description of Artificial Sequence: Synthetic oligonucleotide
cuugcaugauacacugcuu

SEQ ID NO: 572492 - RNA, 19 nt, Artificial Sequence
  Description of Artificial Sequence: Synthetic oligonucleotide
agaccaccauaaauccgau

SEQ ID NO: 572493 - RNA, 19 nt, Artificial Sequence
  Description of Artificial Sequence: Synthetic oligonucleotide
gccgcacggcaguacuggg

SEQ ID NO: 572494 - RNA, 19 nt, Artificial Sequence
  Description of Artificial Sequence: Synthetic oligonucleotide
ccgacgucuucuucagcug

SEQ ID NO: 572495 - RNA, 19 nt, Artificial Sequence
  Description of Artificial Sequence: Synthetic oligonucleotide
ucccggguacggagccugu

SEQ ID NO: 572496 - RNA, 19 nt, Artificial Sequence
  Description of Artificial Sequence: Synthetic oligonucleotide
gccugauaugcuggaggag

SEQ ID NO: 572497 - RNA, 19 nt, Artificial Sequence
  Description of Artificial Sequence: Synthetic oligonucleotide
gcaggcggcaugguucuug

SEQ ID NO: 572498 - RNA, 19 nt, Artificial Sequence
  Description of Artificial Sequence: Synthetic oligonucleotide
agcgagcccucgugcuugu

SEQ ID NO: 572499 - RNA, 19 nt, Artificial Sequence
  Description of Artificial Sequence: Synthetic oligonucleotide
cuaugucacugcauuuguu

SEQ ID NO: 572500 - RNA, 19 nt, Artificial Sequence
  Description of Artificial Sequence: Synthetic oligonucleotide
ccccauuugccaaaguagu

SEQ ID NO: 572501 - RNA, 19 nt, Artificial Sequence
  Description of Artificial Sequence: Synthetic oligonucleotide
ggcguguacggcauguugu

SEQ ID NO: 572502 - RNA, 19 nt, Artificial Sequence
  Description of Artificial Sequence: Synthetic oligonucleotide
ggaucccucugcucguaaa

SEQ ID NO: 572503 - RNA, 19 nt, Artificial Sequence
  Description of Artificial Sequence: Synthetic oligonucleotide
guaggauacgguggucccu

SEQ ID NO: 572504 - RNA, 19 nt, Artificial Sequence
  Description of Artificial Sequence: Synthetic oligonucleotide
gcaucgccaaaguaaucgu

SEQ ID NO: 572505 - RNA, 19 nt, Artificial Sequence
  Description of Artificial Sequence: Synthetic oligonucleotide
ggcuugcaugauacacugc

SEQ ID NO: 572506 - RNA, 19 nt, Artificial Sequence
  Description of Artificial Sequence: Synthetic oligonucleotide
cauagcgagacugcugcuu

SEQ ID NO: 572507 - RNA, 19 nt, Artificial Sequence
  Description of Artificial Sequence: Synthetic oligonucleotide
cauugacugggguggguuu

SEQ ID NO: 572508 - RNA, 19 nt, Artificial Sequence
  Description of Artificial Sequence: Synthetic oligonucleotide
gcguguacggcauguugua

SEQ ID NO: 572509 - RNA, 19 nt, Artificial Sequence
  Description of Artificial Sequence: Synthetic oligonucleotide
cccagaugaacgacgacau

SEQ ID NO: 572510 - RNA, 19 nt, Artificial Sequence
  Description of Artificial Sequence: Synthetic oligonucleotide
ucgccgccgcucggguacg

SEQ ID NO: 572511 - RNA, 19 nt, Artificial Sequence
  Description of Artificial Sequence: Synthetic oligonucleotide
ggccgcauucagcucaggu

SEQ ID NO: 572512 - RNA, 19 nt, Artificial Sequence
  Description of Artificial Sequence: Synthetic oligonucleotide
ggugguacacuggcgugua

SEQ ID NO: 572513 - RNA, 19 nt, Artificial Sequence
  Description of Artificial Sequence: Synthetic oligonucleotide
ggcggccgagcgccgugcg

SEQ ID NO: 572514 - RNA, 19 nt, Artificial Sequence
  Description of Artificial Sequence: Synthetic oligonucleotide
gcucguuguaaaacuuugu

SEQ ID NO: 572515 - RNA, 19 nt, Artificial Sequence
  Description of Artificial Sequence: Synthetic oligonucleotide
gcauguuguacuggccaua

SEQ ID NO: 572516 - RNA, 19 nt, Artificial Sequence
  Description of Artificial Sequence: Synthetic oligonucleotide
cuucgcaggcggcaugguu

SEQ ID NO: 572517 - RNA, 19 nt, Artificial Sequence
  Description of Artificial Sequence: Synthetic oligonucleotide
ggugugagaccuguauauu

SEQ ID NO: 572518 - RNA, 19 nt, Artificial Sequence
  Description of Artificial Sequence: Synthetic oligonucleotide
cugcucguaaaggcuugua

SEQ ID NO: 572519 - RNA, 19 nt, Artificial Sequence
  Description of Artificial Sequence: Synthetic oligonucleotide
agguuccggcuuacacaga

SEQ ID NO: 572520 - RNA, 19 nt, Artificial Sequence
  Description of Artificial Sequence: Synthetic oligonucleotide
gcuuugccgauaggaucca

SEQ ID NO: 572521 - RNA, 19 nt, Artificial Sequence
  Description of Artificial Sequence: Synthetic oligonucleotide
gguagcgcucuuucacauu

SEQ ID NO: 572522 - RNA, 19 nt, Artificial Sequence
  Description of Artificial Sequence: Synthetic oligonucleotide
gcgcuggguucucuggcaa

SEQ ID NO: 572523 - RNA, 19 nt, Artificial Sequence
  Description of Artificial Sequence: Synthetic oligonucleotide
gcucugaauuuggaucccu

SEQ ID NO: 572524 - RNA, 19 nt, Artificial Sequence
  Description of Artificial Sequence: Synthetic oligonucleotide
gcggccgagcgccgugcgc

SEQ ID NO: 572525 - RNA, 19 nt, Artificial Sequence
  Description of Artificial Sequence: Synthetic oligonucleotide
ccaucguuccuugaauuuu

SEQ ID NO: 572526 - RNA, 19 nt, Artificial Sequence
  Description of Artificial Sequence: Synthetic oligonucleotide
cgaugggacugguagcgcu

SEQ ID NO: 572527 - RNA, 19 nt, Artificial Sequence
  Description of Artificial Sequence: Synthetic oligonucleotide
ggacgcggucgugauaaau

SEQ ID NO: 572528 - RNA, 19 nt, Artificial Sequence
  Description of Artificial Sequence: Synthetic oligonucleotide
ccgauccagcucagugaca

SEQ ID NO: 572529 - RNA, 19 nt, Artificial Sequence
  Description of Artificial Sequence: Synthetic oligonucleotide
cgcggucgugauaaaugaa

SEQ ID NO: 572530 - RNA, 19 nt, Artificial Sequence
  Description of Artificial Sequence: Synthetic oligonucleotide
cggguacgucugcuggaug

SEQ ID NO: 572531 - RNA, 19 nt, Artificial Sequence
  Description of Artificial Sequence: Synthetic oligonucleotide
gcacggcaguacugggccu

SEQ ID NO: 572532 - RNA, 19 nt, Artificial Sequence
  Description of Artificial Sequence: Synthetic oligonucleotide
gggacgcggucgugauaaa

SEQ ID NO: 572533 - RNA, 19 nt, Artificial Sequence
  Description of Artificial Sequence: Synthetic oligonucleotide
cccggguacggagccuguc

SEQ ID NO: 572534 - RNA, 19 nt, Artificial Sequence
  Description of Artificial Sequence: Synthetic oligonucleotide
caguaagggcacggcugau

SEQ ID NO: 572535 - RNA, 19 nt, Artificial Sequence
  Description of Artificial Sequence: Synthetic oligonucleotide
cuggcguguacggcauguu

SEQ ID NO: 572536 - RNA, 19 nt, Artificial Sequence
  Description of Artificial Sequence: Synthetic oligonucleotide
cggguacggagccuguccu

SEQ ID NO: 572537 - RNA, 19 nt, Artificial Sequence
  Description of Artificial Sequence: Synthetic oligonucleotide
gccgagcgccgugcgccgc

SEQ ID NO: 572538 - RNA, 19 nt, Artificial Sequence
  Description of Artificial Sequence: Synthetic oligonucleotide
ccgauaggauccagaucuu

SEQ ID NO: 572539 - RNA, 19 nt, Artificial Sequence
  Description of Artificial Sequence: Synthetic oligonucleotide
cgauaggauccagaucuuu

SEQ ID NO: 572540 - RNA, 19 nt, Artificial Sequence
  Description of Artificial Sequence: Synthetic oligonucleotide
gcuucgcaggcggcauggu

SEQ ID NO: 572541 - RNA, 19 nt, Artificial Sequence
  Description of Artificial Sequence: Synthetic oligonucleotide
cgggcggccgagcgccgug

SEQ ID NO: 572542 - RNA, 19 nt, Artificial Sequence
  Description of Artificial Sequence: Synthetic oligonucleotide
ccgucugcuugcacagcuu

SEQ ID NO: 572543 - RNA, 19 nt, Artificial Sequence
  Description of Artificial Sequence: Synthetic oligonucleotide
ccucgcugcccugcauggu

SEQ ID NO: 572544 - RNA, 19 nt, Artificial Sequence
  Description of Artificial Sequence: Synthetic oligonucleotide
ccgcucggguacgucugcu

SEQ ID NO: 572545 - RNA, 19 nt, Artificial Sequence
  Description of Artificial Sequence: Synthetic oligonucleotide
ccucggccgcacggcagua

SEQ ID NO: 572546 - RNA, 19 nt, Artificial Sequence
  Description of Artificial Sequence: Synthetic oligonucleotide
cgcaggcggcaugguucuu

SEQ ID NO: 572547 - RNA, 19 nt, Artificial Sequence
  Description of Artificial Sequence: Synthetic oligonucleotide
ucuaccuucaguuuuaacc

SEQ ID NO: 572548 - RNA, 19 nt, Artificial Sequence
  Description of Artificial Sequence: Synthetic oligonucleotide
uuuaaagacagccuguccc

SEQ ID NO: 572549 - RNA, 19 nt, Artificial Sequence
  Description of Artificial Sequence: Synthetic oligonucleotide
auaacucauguuuacaucg

SEQ ID NO: 572550 - RNA, 19 nt, Artificial Sequence
  Description of Artificial Sequence: Synthetic oligonucleotide
auugguaagauucuaaucu

SEQ ID NO: 572551 - RNA, 19 nt, Artificial Sequence
  Description of Artificial Sequence: Synthetic oligonucleotide
uuugaguaaucuuugagcc

SEQ ID NO: 572552 - RNA, 19 nt, Artificial Sequence
  Description of Artificial Sequence: Synthetic oligonucleotide
ucuacuucuauucuggucu

SEQ ID NO: 572553 - RNA, 19 nt, Artificial Sequence
  Description of Artificial Sequence: Synthetic oligonucleotide
ucuuaugaaaagaugguug

SEQ ID NO: 572554 - RNA, 19 nt, Artificial Sequence
  Description of Artificial Sequence: Synthetic oligonucleotide
ucuuugaacaucuaucugc

SEQ ID NO: 572555 - RNA, 19 nt, Artificial Sequence
  Description of Artificial Sequence: Synthetic oligonucleotide
aucguauuuauagacaagc

SEQ ID NO: 572556 - RNA, 19 nt, Artificial Sequence
  Description of Artificial Sequence: Synthetic oligonucleotide
caaaauauaagucguuucc

SEQ ID NO: 572557 - RNA, 19 nt, Artificial Sequence
  Description of Artificial Sequence: Synthetic oligonucleotide
uugaacaucuaucugcaag

SEQ ID NO: 572558 - RNA, 19 nt, Artificial Sequence
  Description of Artificial Sequence: Synthetic oligonucleotide
aaagauccuccauauccgc

SEQ ID NO: 572559 - RNA, 19 nt, Artificial Sequence
  Description of Artificial Sequence: Synthetic oligonucleotide
ucuuauuguauucucuacc

SEQ ID NO: 572560 - RNA, 19 nt, Artificial Sequence
  Description of Artificial Sequence: Synthetic oligonucleotide
aucucaaucaaaauaacuc

SEQ ID NO: 572561 - RNA, 19 nt, Artificial Sequence
  Description of Artificial Sequence: Synthetic oligonucleotide
ucaguguuuacuuugggga

SEQ ID NO: 572562 - RNA, 19 nt, Artificial Sequence
  Description of Artificial Sequence: Synthetic oligonucleotide
auucccuaaaugcagggac

SEQ ID NO: 572563 - RNA, 19 nt, Artificial Sequence
  Description of Artificial Sequence: Synthetic oligonucleotide
aggcaagccguuuucaucc

SEQ ID NO: 572564 - RNA, 19 nt, Artificial Sequence
  Description of Artificial Sequence: Synthetic oligonucleotide
ugagcuucguuuuaaagac

SEQ ID NO: 572565 - RNA, 19 nt, Artificial Sequence
  Description of Artificial Sequence: Synthetic oligonucleotide
aguagauucuagcacguuc

SEQ ID NO: 572566 - RNA, 19 nt, Artificial Sequence
  Description of Artificial Sequence: Synthetic oligonucleotide
uucgcucccgaaaagaucc

SEQ ID NO: 572567 - RNA, 19 nt, Artificial Sequence
  Description of Artificial Sequence: Synthetic oligonucleotide
ucguuuuaaagacagccug

SEQ ID NO: 572568 - RNA, 19 nt, Artificial Sequence
  Description of Artificial Sequence: Synthetic oligonucleotide
aauauaagucguuuccuaa

SEQ ID NO: 572569 - RNA, 19 nt, Artificial Sequence
  Description of Artificial Sequence: Synthetic oligonucleotide
agauaugucaucugcaccu

SEQ ID NO: 572570 - RNA, 19 nt, Artificial Sequence
  Description of Artificial Sequence: Synthetic oligonucleotide
caauuaaauuuucacaaac

SEQ ID NO: 572571 - RNA, 19 nt, Artificial Sequence
  Description of Artificial Sequence: Synthetic oligonucleotide
agaaucuuugcgcuccgcc

SEQ ID NO: 572572 - RNA, 19 nt, Artificial Sequence
  Description of Artificial Sequence: Synthetic oligonucleotide
ucaucauuaucagaagccg

SEQ ID NO: 572573 - RNA, 19 nt, Artificial Sequence
  Description of Artificial Sequence: Synthetic oligonucleotide
gaaaagaugguugugguca

SEQ ID NO: 572574 - RNA, 19 nt, Artificial Sequence
  Description of Artificial Sequence: Synthetic oligonucleotide
aucugcaagugacagaguc

SEQ ID NO: 572575 - RNA, 19 nt, Artificial Sequence
  Description of Artificial Sequence: Synthetic oligonucleotide
acacaaaucaaugaaucuc

SEQ ID NO: 572576 - RNA, 19 nt, Artificial Sequence
  Description of Artificial Sequence: Synthetic oligonucleotide
uuacaucguauuuauagac

SEQ ID NO: 572577 - RNA, 19 nt, Artificial Sequence
  Description of Artificial Sequence: Synthetic oligonucleotide
aaaagaugguuguggucac

SEQ ID NO: 572578 - RNA, 19 nt, Artificial Sequence
  Description of Artificial Sequence: Synthetic oligonucleotide
uauuguauucucuaccuuc

SEQ ID NO: 572579 - RNA, 19 nt, Artificial Sequence
  Description of Artificial Sequence: Synthetic oligonucleotide
aaucuuugcgcuccgccuc

SEQ ID NO: 572580 - RNA, 19 nt, Artificial Sequence
  Description of Artificial Sequence: Synthetic oligonucleotide
uuguauacaucaaacacuu

SEQ ID NO: 572581 - RNA, 19 nt, Artificial Sequence
  Description of Artificial Sequence: Synthetic oligonucleotide
ugcgacucccuccuaaugg

SEQ ID NO: 572582 - RNA, 19 nt, Artificial Sequence
  Description of Artificial Sequence: Synthetic oligonucleotide
uucauucccuaaaugcagg

SEQ ID NO: 572583 - RNA, 19 nt, Artificial Sequence
  Description of Artificial Sequence: Synthetic oligonucleotide
auauaagucguuuccuaag

SEQ ID NO: 572584 - RNA, 19 nt, Artificial Sequence
  Description of Artificial Sequence: Synthetic oligonucleotide
caucauaucggucaggcuc

SEQ ID NO: 572585 - RNA, 19 nt, Artificial Sequence
  Description of Artificial Sequence: Synthetic oligonucleotide
gaagauaugucaucugcac

SEQ ID NO: 572586 - RNA, 19 nt, Artificial Sequence
  Description of Artificial Sequence: Synthetic oligonucleotide
ugaagauaugucaucugca

SEQ ID NO: 572587 - RNA, 19 nt, Artificial Sequence
  Description of Artificial Sequence: Synthetic oligonucleotide
aucuuauuguauucucuac

SEQ ID NO: 572588 - RNA, 19 nt, Artificial Sequence
  Description of Artificial Sequence: Synthetic oligonucleotide
uaagucguuuccuaaguca

SEQ ID NO: 572589 - RNA, 19 nt, Artificial Sequence
  Description of Artificial Sequence: Synthetic oligonucleotide
aaauauaagucguuuccua

SEQ ID NO: 572590 - RNA, 19 nt, Artificial Sequence
  Description of Artificial Sequence: Synthetic oligonucleotide
uauaagucguuuccuaagu

SEQ ID NO: 572591 - RNA, 19 nt, Artificial Sequence
  Description of Artificial Sequence: Synthetic oligonucleotide
cuaauggaggcccucaggc

SEQ ID NO: 572592 - RNA, 19 nt, Artificial Sequence
  Description of Artificial Sequence: Synthetic oligonucleotide
gagggaauugcauucuugc

SEQ ID NO: 572593 - RNA, 19 nt, Artificial Sequence
  Description of Artificial Sequence: Synthetic oligonucleotide
guagcuggcacucagcccc

SEQ ID NO: 572594 - RNA, 19 nt, Artificial Sequence
  Description of Artificial Sequence: Synthetic oligonucleotide
ugucuuaugaaaagauggu

SEQ ID NO: 572595 - RNA, 19 nt, Artificial Sequence
  Description of Artificial Sequence: Synthetic oligonucleotide
uucgucuuggucacuuucg

SEQ ID NO: 572596 - RNA, 19 nt, Artificial Sequence
  Description of Artificial Sequence: Synthetic oligonucleotide
gauucuaaucuucuguguc

SEQ ID NO: 572597 - RNA, 19 nt, Artificial Sequence
  Description of Artificial Sequence: Synthetic oligonucleotide
uuuuaaagacagccugucc

SEQ ID NO: 572598 - RNA, 19 nt, Artificial Sequence
  Description of Artificial Sequence: Synthetic oligonucleotide
ucgaucuucaucugaagcu

SEQ ID NO: 572599 - RNA, 19 nt, Artificial Sequence
  Description of Artificial Sequence: Synthetic oligonucleotide
aaguugggcaguuuaacaa

SEQ ID NO: 572600 - RNA, 19 nt, Artificial Sequence
  Description of Artificial Sequence: Synthetic oligonucleotide
ucguaaaacuucaucuuca

SEQ ID NO: 572601 - RNA, 19 nt, Artificial Sequence
  Description of Artificial Sequence: Synthetic oligonucleotide
aaucagaaucuuugcgcuc

SEQ ID NO: 572602 - RNA, 19 nt, Artificial Sequence
  Description of Artificial Sequence: Synthetic oligonucleotide
uacaucguauuuauagaca

SEQ ID NO: 572603 - RNA, 19 nt, Artificial Sequence
  Description of Artificial Sequence: Synthetic oligonucleotide
cuaucggaggaguagauuc

SEQ ID NO: 572604 - RNA, 19 nt, Artificial Sequence
  Description of Artificial Sequence: Synthetic oligonucleotide
agaagacucaccuuccuca

SEQ ID NO: 572605 - RNA, 19 nt, Artificial Sequence
  Description of Artificial Sequence: Synthetic oligonucleotide
aaacaguuccuuguuacug

SEQ ID NO: 572606 - RNA, 19 nt, Artificial Sequence
  Description of Artificial Sequence: Synthetic oligonucleotide
aguaccuugucuuaugaaa

SEQ ID NO: 572607 - RNA, 19 nt, Artificial Sequence
  Description of Artificial Sequence: Synthetic oligonucleotide
uuuacuuuggggauuucua

SEQ ID NO: 572608 - RNA, 19 nt, Artificial Sequence
  Description of Artificial Sequence: Synthetic oligonucleotide
acaugcuuccaucugacca

SEQ ID NO: 572609 - RNA, 19 nt, Artificial Sequence
  Description of Artificial Sequence: Synthetic oligonucleotide
cuugucuuaugaaaagaug

SEQ ID NO: 572610 - RNA, 19 nt, Artificial Sequence
  Description of Artificial Sequence: Synthetic oligonucleotide
aucgucggaguucuguagc

SEQ ID NO: 572611 - RNA, 19 nt, Artificial Sequence
  Description of Artificial Sequence: Synthetic oligonucleotide
ugagugguggcucccauca

SEQ ID NO: 572612 - RNA, 19 nt, Artificial Sequence
  Description of Artificial Sequence: Synthetic oligonucleotide
aauugcauucuugcgcuuc

SEQ ID NO: 572613 - RNA, 19 nt, Artificial Sequence
  Description of Artificial Sequence: Synthetic oligonucleotide
uguugucugacccuucaga

SEQ ID NO: 572614 - RNA, 19 nt, Artificial Sequence
  Description of Artificial Sequence: Synthetic oligonucleotide
agguauuggcuccuccucc

SEQ ID NO: 572615 - RNA, 19 nt, Artificial Sequence
  Description of Artificial Sequence: Synthetic oligonucleotide
auaagucguuuccuaaguc

SEQ ID NO: 572616 - RNA, 19 nt, Artificial Sequence
  Description of Artificial Sequence: Synthetic oligonucleotide
uuaaagacagccugucccu

SEQ ID NO: 572617 - RNA, 19 nt, Artificial Sequence
  Description of Artificial Sequence: Synthetic oligonucleotide
uguagcuugucuucaucag

SEQ ID NO: 572618 - RNA, 19 nt, Artificial Sequence
  Description of Artificial Sequence: Synthetic oligonucleotide
ugagccuugucuucuuccg

SEQ ID NO: 572619 - RNA, 19 nt, Artificial Sequence
  Description of Artificial Sequence: Synthetic oligonucleotide
aacaucuaucugcaaguga

SEQ ID NO: 572620 - RNA, 19 nt, Artificial Sequence
  Description of Artificial Sequence: Synthetic oligonucleotide
acaucguauuuauagacaa

SEQ ID NO: 572621 - RNA, 19 nt, Artificial Sequence
  Description of Artificial Sequence: Synthetic oligonucleotide
auucuaaucuucugugucu

SEQ ID NO: 572622 - RNA, 19 nt, Artificial Sequence
  Description of Artificial Sequence: Synthetic oligonucleotide
aucauaucggucaggcucc

SEQ ID NO: 572623 - RNA, 19 nt, Artificial Sequence
  Description of Artificial Sequence: Synthetic oligonucleotide
uauccucguggucggaucg

SEQ ID NO: 572624 - RNA, 19 nt, Artificial Sequence
  Description of Artificial Sequence: Synthetic oligonucleotide
aagucguuuccuaagucag

SEQ ID NO: 572625 - RNA, 19 nt, Artificial Sequence
  Description of Artificial Sequence: Synthetic oligonucleotide
aaccuuccgccucugagug

SEQ ID NO: 572626 - RNA, 19 nt, Artificial Sequence
  Description of Artificial Sequence: Synthetic oligonucleotide
ucguauuuauagacaagcu

SEQ ID NO: 572627 - RNA, 19 nt, Artificial Sequence
  Description of Artificial Sequence: Synthetic oligonucleotide
gaggaguagauucuagcac

SEQ ID NO: 572628 - RNA, 19 nt, Artificial Sequence
  Description of Artificial Sequence: Synthetic oligonucleotide
uguaguggggcuuuguaua

SEQ ID NO: 572629 - RNA, 19 nt, Artificial Sequence
  Description of Artificial Sequence: Synthetic oligonucleotide
guauuuauagacaagcugu

SEQ ID NO: 572630 - RNA, 19 nt, Artificial Sequence
  Description of Artificial Sequence: Synthetic oligonucleotide
caucauuaucagaagccgc

SEQ ID NO: 572631 - RNA, 19 nt, Artificial Sequence
  Description of Artificial Sequence: Synthetic oligonucleotide
guagauucuagcacguucc

SEQ ID NO: 572632 - RNA, 19 nt, Artificial Sequence
  Description of Artificial Sequence: Synthetic oligonucleotide
agcacguuccucucgaaug

SEQ ID NO: 572633 - RNA, 19 nt, Artificial Sequence
  Description of Artificial Sequence: Synthetic oligonucleotide
agggaauugcauucuugcg

SEQ ID NO: 572634 - RNA, 19 nt, Artificial Sequence
  Description of Artificial Sequence: Synthetic oligonucleotide
accacuugacuauccgagc

SEQ ID NO: 572635 - RNA, 19 nt, Artificial Sequence
  Description of Artificial Sequence: Synthetic oligonucleotide
auagacaagcuguacaaua

SEQ ID NO: 572636 - RNA, 19 nt, Artificial Sequence
  Description of Artificial Sequence: Synthetic oligonucleotide
uaauggaggcccucaggcg

SEQ ID NO: 572637 - RNA, 19 nt, Artificial Sequence
  Description of Artificial Sequence: Synthetic oligonucleotide
agacucaccuuccucauca

SEQ ID NO: 572638 - RNA, 19 nt, Artificial Sequence
  Description of Artificial Sequence: Synthetic oligonucleotide
ucuagcacguuccucucga

SEQ ID NO: 572639 - RNA, 19 nt, Artificial Sequence
  Description of Artificial Sequence: Synthetic oligonucleotide
gaugguuguggucacccug

SEQ ID NO: 572640 - RNA, 19 nt, Artificial Sequence
  Description of Artificial Sequence: Synthetic oligonucleotide
uuguggccuuucaucaucg

SEQ ID NO: 572641 - RNA, 19 nt, Artificial Sequence
  Description of Artificial Sequence: Synthetic oligonucleotide
cucauaauacugaggauca

SEQ ID NO: 572642 - RNA, 19 nt, Artificial Sequence
  Description of Artificial Sequence: Synthetic oligonucleotide
gaccacuugacuauccgag

SEQ ID NO: 572643 - RNA, 19 nt, Artificial Sequence
  Description of Artificial Sequence: Synthetic oligonucleotide
ucaucggacaccuguggcc

SEQ ID NO: 572644 - RNA, 19 nt, Artificial Sequence
  Description of Artificial Sequence: Synthetic oligonucleotide
ugucuguagagugaggccu

SEQ ID NO: 572645 - RNA, 19 nt, Artificial Sequence
  Description of Artificial Sequence: Synthetic oligonucleotide
gaaguugggcaguuuaaca

SEQ ID NO: 572646 - RNA, 19 nt, Artificial Sequence
  Description of Artificial Sequence: Synthetic oligonucleotide
caucaucugaucugugacc

SEQ ID NO: 572647 - RNA, 19 nt, Artificial Sequence
  Description of Artificial Sequence: Synthetic oligonucleotide
auucguaaaacuucaucuu

SEQ ID NO: 572648 - RNA, 19 nt, Artificial Sequence
  Description of Artificial Sequence: Synthetic oligonucleotide
gggaauugcauucuugcgc

SEQ ID NO: 572649 - RNA, 19 nt, Artificial Sequence
  Description of Artificial Sequence: Synthetic oligonucleotide
ugaguaaucuuugagccuu

SEQ ID NO: 572650 - RNA, 19 nt, Artificial Sequence
  Description of Artificial Sequence: Synthetic oligonucleotide
cuuugaacaucuaucugca

SEQ ID NO: 572651 - RNA, 19 nt, Artificial Sequence
  Description of Artificial Sequence: Synthetic oligonucleotide
agauucuaaucuucugugu

SEQ ID NO: 572652 - RNA, 19 nt, Artificial Sequence
  Description of Artificial Sequence: Synthetic oligonucleotide
agcuucguuuuaaagacag

SEQ ID NO: 572653 - RNA, 19 nt, Artificial Sequence
  Description of Artificial Sequence: Synthetic oligonucleotide
uccaaacagauccaugguu

SEQ ID NO: 572654 - RNA, 19 nt, Artificial Sequence
  Description of Artificial Sequence: Synthetic oligonucleotide
cuucauucguaaaacuuca

SEQ ID NO: 572655 - RNA, 19 nt, Artificial Sequence
  Description of Artificial Sequence: Synthetic oligonucleotide
aucacuaucggaggaguag

SEQ ID NO: 572656 - RNA, 19 nt, Artificial Sequence
  Description of Artificial Sequence: Synthetic oligonucleotide
cuuuucgucguccgacugg

SEQ ID NO: 572657 - RNA, 19 nt, Artificial Sequence
  Description of Artificial Sequence: Synthetic oligonucleotide
cauccucauaauacugagg

SEQ ID NO: 572658 - RNA, 19 nt, Artificial Sequence
  Description of Artificial Sequence: Synthetic oligonucleotide
gaaucagaaucuuugcgcu

SEQ ID NO: 572659 - RNA, 19 nt, Artificial Sequence
  Description of Artificial Sequence: Synthetic oligonucleotide
uaacaaaauauaagucguu

SEQ ID NO: 572660 - RNA, 19 nt, Artificial Sequence
  Description of Artificial Sequence: Synthetic oligonucleotide
uugaguaaucuuugagccu

SEQ ID NO: 572661 - RNA, 19 nt, Artificial Sequence
  Description of Artificial Sequence: Synthetic oligonucleotide
cucguggucggaucgcucg

SEQ ID NO: 572662 - RNA, 19 nt, Artificial Sequence
  Description of Artificial Sequence: Synthetic oligonucleotide
agagggcucauuauccucg

SEQ ID NO: 572663 - RNA, 19 nt, Artificial Sequence
  Description of Artificial Sequence: Synthetic oligonucleotide
uuuaaccugguucucccuu

SEQ ID NO: 572664 - RNA, 19 nt, Artificial Sequence
  Description of Artificial Sequence: Synthetic oligonucleotide
cuaaucuucugugucuuug

SEQ ID NO: 572665 - RNA, 19 nt, Artificial Sequence
  Description of Artificial Sequence: Synthetic oligonucleotide
uugacuauccgagcauugc

SEQ ID NO: 572666 - RNA, 19 nt, Artificial Sequence
  Description of Artificial Sequence: Synthetic oligonucleotide
uauccgccauggcagcucg

SEQ ID NO: 572667 - RNA, 19 nt, Artificial Sequence
  Description of Artificial Sequence: Synthetic oligonucleotide
uugcgcuucauucguaaaa

SEQ ID NO: 572668 - RNA, 19 nt, Artificial Sequence
  Description of Artificial Sequence: Synthetic oligonucleotide
ucagaaucuuugcgcuccg

SEQ ID NO: 572669 - RNA, 19 nt, Artificial Sequence
  Description of Artificial Sequence: Synthetic oligonucleotide
cuuauuguauucucuaccu

SEQ ID NO: 572670 - RNA, 19 nt, Artificial Sequence
  Description of Artificial Sequence: Synthetic oligonucleotide
uucuacuucuauucugguc

SEQ ID NO: 572671 - RNA, 19 nt, Artificial Sequence
  Description of Artificial Sequence: Synthetic oligonucleotide
ucauuaucagaagccgcag

SEQ ID NO: 572672 - RNA, 19 nt, Artificial Sequence
  Description of Artificial Sequence: Synthetic oligonucleotide
caucguauuuauagacaag

SEQ ID NO: 572673 - RNA, 19 nt, Artificial Sequence
  Description of Artificial Sequence: Synthetic oligonucleotide
gggcucauuauccucgugg

SEQ ID NO: 572674 - RNA, 19 nt, Artificial Sequence
  Description of Artificial Sequence: Synthetic oligonucleotide
auucucuaccuucaguuuu

SEQ ID NO: 572675 - RNA, 19 nt, Artificial Sequence
  Description of Artificial Sequence: Synthetic oligonucleotide
ucuuuucgucguccgacug

SEQ ID NO: 572676 - RNA, 19 nt, Artificial Sequence
  Description of Artificial Sequence: Synthetic oligonucleotide
aucggaguucugcaucuuc

SEQ ID NO: 572677 - RNA, 19 nt, Artificial Sequence
  Description of Artificial Sequence: Synthetic oligonucleotide
ucgucuuggucacuuucgc

SEQ ID NO: 572678 - RNA, 19 nt, Artificial Sequence
  Description of Artificial Sequence: Synthetic oligonucleotide
ucaucggaguucugcaucu

SEQ ID NO: 572679 - RNA, 19 nt, Artificial Sequence
  Description of Artificial Sequence: Synthetic oligonucleotide
uuuuaauggcugccaggcu

SEQ ID NO: 572680 - RNA, 19 nt, Artificial Sequence
  Description of Artificial Sequence: Synthetic oligonucleotide
cacuuucgcugccagaggc

SEQ ID NO: 572681 - RNA, 19 nt, Artificial Sequence
  Description of Artificial Sequence: Synthetic oligonucleotide
cuuaaucaucucugugcgc

SEQ ID NO: 572682 - RNA, 19 nt, Artificial Sequence
  Description of Artificial Sequence: Synthetic oligonucleotide
uugguaagauucuaaucuu

SEQ ID NO: 572683 - RNA, 19 nt, Artificial Sequence
  Description of Artificial Sequence: Synthetic oligonucleotide
ucucuuucgucuuggucac

SEQ ID NO: 572684 - RNA, 19 nt, Artificial Sequence
  Description of Artificial Sequence: Synthetic oligonucleotide
aguugggcaguuuaacaaa

SEQ ID NO: 572685 - RNA, 19 nt, Artificial Sequence
  Description of Artificial Sequence: Synthetic oligonucleotide
ucaucguccgaguucugcu

SEQ ID NO: 572686 - RNA, 19 nt, Artificial Sequence
  Description of Artificial Sequence: Synthetic oligonucleotide
cugaccacuugacuauccg

SEQ ID NO: 572687 - RNA, 19 nt, Artificial Sequence
  Description of Artificial Sequence: Synthetic oligonucleotide
ggcagauucugacuucugg

SEQ ID NO: 572688 - RNA, 19 nt, Artificial Sequence
  Description of Artificial Sequence: Synthetic oligonucleotide
uuauuguauucucuaccuu

SEQ ID NO: 572689 - RNA, 19 nt, Artificial Sequence
  Description of Artificial Sequence: Synthetic oligonucleotide
agcauugcucucuuuaauu

SEQ ID NO: 572690 - RNA, 19 nt, Artificial Sequence
  Description of Artificial Sequence: Synthetic oligonucleotide
uuuucggaaccuuccgccu

SEQ ID NO: 572691 - RNA, 19 nt, Artificial Sequence
  Description of Artificial Sequence: Synthetic oligonucleotide
uuccaucugaccacuugac

SEQ ID NO: 572692 - RNA, 19 nt, Artificial Sequence
  Description of Artificial Sequence: Synthetic oligonucleotide
ugcgcuucauucguaaaac

SEQ ID NO: 572693 - RNA, 19 nt, Artificial Sequence
  Description of Artificial Sequence: Synthetic oligonucleotide
ugaccacuugacuauccga

SEQ ID NO: 572694 - RNA, 19 nt, Artificial Sequence
  Description of Artificial Sequence: Synthetic oligonucleotide
caucaucugacugccuucg

SEQ ID NO: 572695 - RNA, 19 nt, Artificial Sequence
  Description of Artificial Sequence: Synthetic oligonucleotide
aucguccgaguucugcuuc

SEQ ID NO: 572696 - RNA, 19 nt, Artificial Sequence
  Description of Artificial Sequence: Synthetic oligonucleotide
cuugacuauccgagcauug

SEQ ID NO: 572697 - RNA, 19 nt, Artificial Sequence
  Description of Artificial Sequence: Synthetic oligonucleotide
ugaagcuuguggccuuuca

SEQ ID NO: 572698 - RNA, 19 nt, Artificial Sequence
  Description of Artificial Sequence: Synthetic oligonucleotide
caccucagugucacuaucc

SEQ ID NO: 572699 - RNA, 19 nt, Artificial Sequence
  Description of Artificial Sequence: Synthetic oligonucleotide
aacucauguuuacaucgua

SEQ ID NO: 572700 - RNA, 19 nt, Artificial Sequence
  Description of Artificial Sequence: Synthetic oligonucleotide
gagugauugucgcugccac

SEQ ID NO: 572701 - RNA, 19 nt, Artificial Sequence
  Description of Artificial Sequence: Synthetic oligonucleotide
cuaccuucaguuuuaaccu

SEQ ID NO: 572702 - RNA, 19 nt, Artificial Sequence
  Description of Artificial Sequence: Synthetic oligonucleotide
uccuaauggaggcccucag

SEQ ID NO: 572703 - RNA, 19 nt, Artificial Sequence
  Description of Artificial Sequence: Synthetic oligonucleotide
ucggaggaguagauucuag

SEQ ID NO: 572704 - RNA, 19 nt, Artificial Sequence
  Description of Artificial Sequence: Synthetic oligonucleotide
gugauugucgcugccacug

SEQ ID NO: 572705 - RNA, 19 nt, Artificial Sequence
  Description of Artificial Sequence: Synthetic oligonucleotide
gucacuauccgcuuccgaa

SEQ ID NO: 572706 - RNA, 19 nt, Artificial Sequence
  Description of Artificial Sequence: Synthetic oligonucleotide
ucgucagaguucugcaucu

SEQ ID NO: 572707 - RNA, 19 nt, Artificial Sequence
  Description of Artificial Sequence: Synthetic oligonucleotide
ucacuaucggaggaguaga

SEQ ID NO: 572708 - RNA, 19 nt, Artificial Sequence
  Description of Artificial Sequence: Synthetic oligonucleotide
cuuugggcaccucaguguc

SEQ ID NO: 572709 - RNA, 19 nt, Artificial Sequence
  Description of Artificial Sequence: Synthetic oligonucleotide
uaccuucaguuuuaaccug

SEQ ID NO: 572710 - RNA, 19 nt, Artificial Sequence
  Description of Artificial Sequence: Synthetic oligonucleotide
aagcuguacaauaaauaua

SEQ ID NO: 572711 - RNA, 19 nt, Artificial Sequence
  Description of Artificial Sequence: Synthetic oligonucleotide
uuucuacuucuauucuggu

SEQ ID NO: 572712 - RNA, 19 nt, Artificial Sequence
  Description of Artificial Sequence: Synthetic oligonucleotide
caucggacaccuguggccg

SEQ ID NO: 572713 - RNA, 19 nt, Artificial Sequence
  Description of Artificial Sequence: Synthetic oligonucleotide
uuaaccugguucucccuuc

SEQ ID NO: 572714 - RNA, 19 nt, Artificial Sequence
  Description of Artificial Sequence: Synthetic oligonucleotide
uuuucgucguccgacuggu

SEQ ID NO: 572715 - RNA, 19 nt, Artificial Sequence
  Description of Artificial Sequence: Synthetic oligonucleotide
ucauugugggcuucagauc

SEQ ID NO: 572716 - RNA, 19 nt, Artificial Sequence
  Description of Artificial Sequence: Synthetic oligonucleotide
agaggcauuacugccagaa

SEQ ID NO: 572717 - RNA, 19 nt, Artificial Sequence
  Description of Artificial Sequence: Synthetic oligonucleotide
ggucggaucgcucggaagc

SEQ ID NO: 572718 - RNA, 19 nt, Artificial Sequence
  Description of Artificial Sequence: Synthetic oligonucleotide
ucuugcgcuucauucguaa

SEQ ID NO: 572719 - RNA, 19 nt, Artificial Sequence
  Description of Artificial Sequence: Synthetic oligonucleotide
acgaccagccauugguaag

SEQ ID NO: 572720 - RNA, 19 nt, Artificial Sequence
  Description of Artificial Sequence: Synthetic oligonucleotide
gauugucgcugccacugug

SEQ ID NO: 572721 - RNA, 19 nt, Artificial Sequence
  Description of Artificial Sequence: Synthetic oligonucleotide
cucaucggacaccuguggc

SEQ ID NO: 572722 - RNA, 19 nt, Artificial Sequence
  Description of Artificial Sequence: Synthetic oligonucleotide
gaggcauuacugccagaag

SEQ ID NO: 572723 - RNA, 19 nt, Artificial Sequence
  Description of Artificial Sequence: Synthetic oligonucleotide
ucacuauccgcuuccgaau

SEQ ID NO: 572724 - RNA, 19 nt, Artificial Sequence
  Description of Artificial Sequence: Synthetic oligonucleotide
aaacagauccaugguucca

SEQ ID NO: 572725 - RNA, 19 nt, Artificial Sequence
  Description of Artificial Sequence: Synthetic oligonucleotide
guauucucuaccuucaguu

SEQ ID NO: 572726 - RNA, 19 nt, Artificial Sequence
  Description of Artificial Sequence: Synthetic oligonucleotide
cguauuuauagacaagcug

SEQ ID NO: 572727 - RNA, 19 nt, Artificial Sequence
  Description of Artificial Sequence: Synthetic oligonucleotide
ugucuuugggcaccucagu

SEQ ID NO: 572728 - RNA, 19 nt, Artificial Sequence
  Description of Artificial Sequence: Synthetic oligonucleotide
uggccgguccucaucgucc

SEQ ID NO: 572729 - RNA, 19 nt, Artificial Sequence
  Description of Artificial Sequence: Synthetic oligonucleotide
uuaucuucucugucccacu

SEQ ID NO: 572730 - RNA, 19 nt, Artificial Sequence
  Description of Artificial Sequence: Synthetic oligonucleotide
uuccuuguuacugggcugu

SEQ ID NO: 572731 - RNA, 19 nt, Artificial Sequence
  Description of Artificial Sequence: Synthetic oligonucleotide
uauccgagcauugcucucu

SEQ ID NO: 572732 - RNA, 19 nt, Artificial Sequence
  Description of Artificial Sequence: Synthetic oligonucleotide
gucgucagaguucugcauc

SEQ ID NO: 572733 - RNA, 19 nt, Artificial Sequence
  Description of Artificial Sequence: Synthetic oligonucleotide
uuucggaaccuuccgccuc

SEQ ID NO: 572734 - RNA, 19 nt, Artificial Sequence
  Description of Artificial Sequence: Synthetic oligonucleotide
uccgaaucagagggaauug

SEQ ID NO: 572735 - RNA, 19 nt, Artificial Sequence
  Description of Artificial Sequence: Synthetic oligonucleotide
aguggggcuuuguauacau

SEQ ID NO: 572736 - RNA, 19 nt, Artificial Sequence
  Description of Artificial Sequence: Synthetic oligonucleotide
ucgucgucagaguucugca

SEQ ID NO: 572737 - RNA, 19 nt, Artificial Sequence
  Description of Artificial Sequence: Synthetic oligonucleotide
caucgucggaguucuguag

SEQ ID NO: 572738 - RNA, 19 nt, Artificial Sequence
  Description of Artificial Sequence: Synthetic oligonucleotide
uauagacaagcuguacaau

SEQ ID NO: 572739 - RNA, 19 nt, Artificial Sequence
  Description of Artificial Sequence: Synthetic oligonucleotide
uucuucaucucggcgcacc

SEQ ID NO: 572740 - RNA, 19 nt, Artificial Sequence
  Description of Artificial Sequence: Synthetic oligonucleotide
aucuuuucgucguccgacu

SEQ ID NO: 572741 - RNA, 19 nt, Artificial Sequence
  Description of Artificial Sequence: Synthetic oligonucleotide
cccggaaucagaaucuuug

SEQ ID NO: 572742 - RNA, 19 nt, Artificial Sequence
  Description of Artificial Sequence: Synthetic oligonucleotide
ugaccuguugucugacccu

SEQ ID NO: 572743 - RNA, 19 nt, Artificial Sequence
  Description of Artificial Sequence: Synthetic oligonucleotide
ucaucauaucggucaggcu

SEQ ID NO: 572744 - RNA, 19 nt, Artificial Sequence
  Description of Artificial Sequence: Synthetic oligonucleotide
uuauccucguggucggauc

SEQ ID NO: 572745 - RNA, 19 nt, Artificial Sequence
  Description of Artificial Sequence: Synthetic oligonucleotide
agggacaugcuuccaucug

SEQ ID NO: 572746 - RNA, 19 nt, Artificial Sequence
  Description of Artificial Sequence: Synthetic oligonucleotide
ucguggucggaucgcucgg

SEQ ID NO: 572747 - RNA, 19 nt, Artificial Sequence
  Description of Artificial Sequence: Synthetic oligonucleotide
ugcagggacaugcuuccau

SEQ ID NO: 572748 - RNA, 19 nt, Artificial Sequence
  Description of Artificial Sequence: Synthetic oligonucleotide
ccgcuuccgaaucagaggg

SEQ ID NO: 572749 - RNA, 19 nt, Artificial Sequence
  Description of Artificial Sequence: Synthetic oligonucleotide
ugaggcaagccguuuucau

SEQ ID NO: 572750 - RNA, 19 nt, Artificial Sequence
  Description of Artificial Sequence: Synthetic oligonucleotide
ucaucgucggaguucugua

SEQ ID NO: 572751 - RNA, 19 nt, Artificial Sequence
  Description of Artificial Sequence: Synthetic oligonucleotide
cuucgcucccgaaaagauc

SEQ ID NO: 572752 - RNA, 19 nt, Artificial Sequence
  Description of Artificial Sequence: Synthetic oligonucleotide
ucgucaucgucggaguucu

SEQ ID NO: 572753 - RNA, 19 nt, Artificial Sequence
  Description of Artificial Sequence: Synthetic oligonucleotide
gaaucuuugcgcuccgccu

SEQ ID NO: 572754 - RNA, 19 nt, Artificial Sequence
  Description of Artificial Sequence: Synthetic oligonucleotide
uugggcaguuuaacaaaau

SEQ ID NO: 572755 - RNA, 19 nt, Artificial Sequence
  Description of Artificial Sequence: Synthetic oligonucleotide
acuauccgcuuccgaauca

SEQ ID NO: 572756 - RNA, 19 nt, Artificial Sequence
  Description of Artificial Sequence: Synthetic oligonucleotide
guaccuugucuuaugaaaa

SEQ ID NO: 572757 - RNA, 19 nt, Artificial Sequence
  Description of Artificial Sequence: Synthetic oligonucleotide
agagggaauugcauucuug

SEQ ID NO: 572758 - RNA, 19 nt, Artificial Sequence
  Description of Artificial Sequence: Synthetic oligonucleotide
ucccugaagauaugucauc

SEQ ID NO: 572759 - RNA, 19 nt, Artificial Sequence
  Description of Artificial Sequence: Synthetic oligonucleotide
agugauugucgcugccacu

SEQ ID NO: 572760 - RNA, 19 nt, Artificial Sequence
  Description of Artificial Sequence: Synthetic oligonucleotide
ucccuccuaauggaggccc

SEQ ID NO: 572761 - RNA, 19 nt, Artificial Sequence
  Description of Artificial Sequence: Synthetic oligonucleotide
uuguuacugggcuguccug

SEQ ID NO: 572762 - RNA, 19 nt, Artificial Sequence
  Description of Artificial Sequence: Synthetic oligonucleotide
gaggaucaaaaggccuggg

SEQ ID NO: 572763 - RNA, 19 nt, Artificial Sequence
  Description of Artificial Sequence: Synthetic oligonucleotide
ucggaagccucugaccugu

SEQ ID NO: 572764 - RNA, 19 nt, Artificial Sequence
  Description of Artificial Sequence: Synthetic oligonucleotide
ucgucggaguucuguagcu

SEQ ID NO: 572765 - RNA, 19 nt, Artificial Sequence
  Description of Artificial Sequence: Synthetic oligonucleotide
ggaucaaaaggccugggcu

SEQ ID NO: 572766 - RNA, 19 nt, Artificial Sequence
  Description of Artificial Sequence: Synthetic oligonucleotide
ucacucccugaagauaugu

SEQ ID NO: 572767 - RNA, 19 nt, Artificial Sequence
  Description of Artificial Sequence: Synthetic oligonucleotide
acguuccucucgaaugccc

SEQ ID NO: 572768 - RNA, 19 nt, Artificial Sequence
  Description of Artificial Sequence: Synthetic oligonucleotide
ucguuuccuaagucagugu

SEQ ID NO: 572769 - RNA, 19 nt, Artificial Sequence
  Description of Artificial Sequence: Synthetic oligonucleotide
gcccucaucacuaucggag

SEQ ID NO: 572770 - RNA, 19 nt, Artificial Sequence
  Description of Artificial Sequence: Synthetic oligonucleotide
uccgacuggucacucuuau

SEQ ID NO: 572771 - RNA, 19 nt, Artificial Sequence
  Description of Artificial Sequence: Synthetic oligonucleotide
agagugauugucgcugcca

SEQ ID NO: 572772 - RNA, 19 nt, Artificial Sequence
  Description of Artificial Sequence: Synthetic oligonucleotide
uucgcugccagaggcauua

SEQ ID NO: 572773 - RNA, 19 nt, Artificial Sequence
  Description of Artificial Sequence: Synthetic oligonucleotide
cagaagacucaccuuccuc

SEQ ID NO: 572774 - RNA, 19 nt, Artificial Sequence
  Description of Artificial Sequence: Synthetic oligonucleotide
ugauugucgcugccacugu

SEQ ID NO: 572775 - RNA, 19 nt, Artificial Sequence
  Description of Artificial Sequence: Synthetic oligonucleotide
ccuggucagagucugaguc

SEQ ID NO: 572776 - RNA, 19 nt, Artificial Sequence
  Description of Artificial Sequence: Synthetic oligonucleotide
ggaauugcauucuugcgcu

SEQ ID NO: 572777 - RNA, 19 nt, Artificial Sequence
  Description of Artificial Sequence: Synthetic oligonucleotide
caucugaucugugacccuc

SEQ ID NO: 572778 - RNA, 19 nt, Artificial Sequence
  Description of Artificial Sequence: Synthetic oligonucleotide
ucuuucgucuuggucacuu

SEQ ID NO: 572779 - RNA, 19 nt, Artificial Sequence
  Description of Artificial Sequence: Synthetic oligonucleotide
ucgucguccgacuggucac

SEQ ID NO: 572780 - RNA, 19 nt, Artificial Sequence
  Description of Artificial Sequence: Synthetic oligonucleotide
cuacuucuauucuggucuc

SEQ ID NO: 572781 - RNA, 19 nt, Artificial Sequence
  Description of Artificial Sequence: Synthetic oligonucleotide
cuauccgcuuccgaaucag

SEQ ID NO: 572782 - RNA, 19 nt, Artificial Sequence
  Description of Artificial Sequence: Synthetic oligonucleotide
ucaucucggcgcacccucc

SEQ ID NO: 572783 - RNA, 19 nt, Artificial Sequence
  Description of Artificial Sequence: Synthetic oligonucleotide
caucagaauuccccuuuuc

SEQ ID NO: 572784 - RNA, 19 nt, Artificial Sequence
  Description of Artificial Sequence: Synthetic oligonucleotide
ugcauucuugcgcuucauu

SEQ ID NO: 572785 - RNA, 19 nt, Artificial Sequence
  Description of Artificial Sequence: Synthetic oligonucleotide
gccagaagcaccguucucc

SEQ ID NO: 572786 - RNA, 19 nt, Artificial Sequence
  Description of Artificial Sequence: Synthetic oligonucleotide
ugcugcgacucccuccuaa

SEQ ID NO: 572787 - RNA, 19 nt, Artificial Sequence
  Description of Artificial Sequence: Synthetic oligonucleotide
ucccuaaaugcagggacau

SEQ ID NO: 572788 - RNA, 19 nt, Artificial Sequence
  Description of Artificial Sequence: Synthetic oligonucleotide
uccucgucaucgucggagu

SEQ ID NO: 572789 - RNA, 19 nt, Artificial Sequence
  Description of Artificial Sequence: Synthetic oligonucleotide
cuuguuacugggcuguccu

SEQ ID NO: 572790 - RNA, 19 nt, Artificial Sequence
  Description of Artificial Sequence: Synthetic oligonucleotide
guggccuuucaucaucgga

SEQ ID NO: 572791 - RNA, 19 nt, Artificial Sequence
  Description of Artificial Sequence: Synthetic oligonucleotide
agaugguuguggucacccu

SEQ ID NO: 572792 - RNA, 19 nt, Artificial Sequence
  Description of Artificial Sequence: Synthetic oligonucleotide
cauggcagcucgguccgcg

SEQ ID NO: 572793 - RNA, 19 nt, Artificial Sequence
  Description of Artificial Sequence: Synthetic oligonucleotide
aguguuuacuuuggggauu

SEQ ID NO: 572794 - RNA, 19 nt, Artificial Sequence
  Description of Artificial Sequence: Synthetic oligonucleotide
gccuuuucggaaccuuccg

SEQ ID NO: 572795 - RNA, 19 nt, Artificial Sequence
  Description of Artificial Sequence: Synthetic oligonucleotide
uccgccucugagugguggc

SEQ ID NO: 572796 - RNA, 19 nt, Artificial Sequence
  Description of Artificial Sequence: Synthetic oligonucleotide
gcacguuccucucgaaugc

SEQ ID NO: 572797 - RNA, 19 nt, Artificial Sequence
  Description of Artificial Sequence: Synthetic oligonucleotide
cagagugauugucgcugcc

SEQ ID NO: 572798 - RNA, 19 nt, Artificial Sequence
  Description of Artificial Sequence: Synthetic oligonucleotide
ccuaauggaggcccucagg

SEQ ID NO: 572799 - RNA, 19 nt, Artificial Sequence
  Description of Artificial Sequence: Synthetic oligonucleotide
uuccuaagucaguguuuac

SEQ ID NO: 572800 - RNA, 19 nt, Artificial Sequence
  Description of Artificial Sequence: Synthetic oligonucleotide
agcuucgcucccgaaaaga

SEQ ID NO: 572801 - RNA, 19 nt, Artificial Sequence
  Description of Artificial Sequence: Synthetic oligonucleotide
auuauccucguggucggau

SEQ ID NO: 572802 - RNA, 19 nt, Artificial Sequence
  Description of Artificial Sequence: Synthetic oligonucleotide
cuauccgagcauugcucuc

SEQ ID NO: 572803 - RNA, 19 nt, Artificial Sequence
  Description of Artificial Sequence: Synthetic oligonucleotide
auccucguggucggaucgc

SEQ ID NO: 572804 - RNA, 19 nt, Artificial Sequence
  Description of Artificial Sequence: Synthetic oligonucleotide
uacuucuauucuggucuca

SEQ ID NO: 572805 - RNA, 19 nt, Artificial Sequence
  Description of Artificial Sequence: Synthetic oligonucleotide
cucccgaaaagauccucca

SEQ ID NO: 572806 - RNA, 19 nt, Artificial Sequence
  Description of Artificial Sequence: Synthetic oligonucleotide
gcuuccaucugaccacuug

SEQ ID NO: 572807 - RNA, 19 nt, Artificial Sequence
  Description of Artificial Sequence: Synthetic oligonucleotide
cucgucaucgucggaguuc

SEQ ID NO: 572808 - RNA, 19 nt, Artificial Sequence
  Description of Artificial Sequence: Synthetic oligonucleotide
ccuuuucggaaccuuccgc

SEQ ID NO: 572809 - RNA, 19 nt, Artificial Sequence
  Description of Artificial Sequence: Synthetic oligonucleotide
gauucugacuucuggucuu

SEQ ID NO: 572810 - RNA, 19 nt, Artificial Sequence
  Description of Artificial Sequence: Synthetic oligonucleotide
acuugacuauccgagcauu

SEQ ID NO: 572811 - RNA, 19 nt, Artificial Sequence
  Description of Artificial Sequence: Synthetic oligonucleotide
ucugacugccuucgaucuu

SEQ ID NO: 572812 - RNA, 19 nt, Artificial Sequence
  Description of Artificial Sequence: Synthetic oligonucleotide
accuuccgccucugagugg

SEQ ID NO: 572813 - RNA, 19 nt, Artificial Sequence
  Description of Artificial Sequence: Synthetic oligonucleotide
uuuguacuucagucaucuu

SEQ ID NO: 572814 - RNA, 19 nt, Artificial Sequence
  Description of Artificial Sequence: Synthetic oligonucleotide
agacagccugucccugcag

SEQ ID NO: 572815 - RNA, 19 nt, Artificial Sequence
  Description of Artificial Sequence: Synthetic oligonucleotide
acuaucggaggaguagauu

SEQ ID NO: 572816 - RNA, 19 nt, Artificial Sequence
  Description of Artificial Sequence: Synthetic oligonucleotide
cucagcuucgcucccgaaa

SEQ ID NO: 572817 - RNA, 19 nt, Artificial Sequence
  Description of Artificial Sequence: Synthetic oligonucleotide
uggacuccucgccuuccuc

SEQ ID NO: 572818 - RNA, 19 nt, Artificial Sequence
  Description of Artificial Sequence: Synthetic oligonucleotide
aucgcucggaagccucuga

SEQ ID NO: 572819 - RNA, 19 nt, Artificial Sequence
  Description of Artificial Sequence: Synthetic oligonucleotide
gacucaccuuccucaucac

SEQ ID NO: 572820 - RNA, 19 nt, Artificial Sequence
  Description of Artificial Sequence: Synthetic oligonucleotide
ugccuucgaucuucaucug

SEQ ID NO: 572821 - RNA, 19 nt, Artificial Sequence
  Description of Artificial Sequence: Synthetic oligonucleotide
caucugaccacuugacuau

SEQ ID NO: 572822 - RNA, 19 nt, Artificial Sequence
  Description of Artificial Sequence: Synthetic oligonucleotide
cacguuccucucgaaugcc

SEQ ID NO: 572823 - RNA, 19 nt, Artificial Sequence
  Description of Artificial Sequence: Synthetic oligonucleotide
cugcgacucccuccuaaug

SEQ ID NO: 572824 - RNA, 19 nt, Artificial Sequence
  Description of Artificial Sequence: Synthetic oligonucleotide
agucguuuccuaagucagu

SEQ ID NO: 572825 - RNA, 19 nt, Artificial Sequence
  Description of Artificial Sequence: Synthetic oligonucleotide
ucagacccuugcuccugcu

SEQ ID NO: 572826 - RNA, 19 nt, Artificial Sequence
  Description of Artificial Sequence: Synthetic oligonucleotide
gaucgcucggaagccucug

SEQ ID NO: 572827 - RNA, 19 nt, Artificial Sequence
  Description of Artificial Sequence: Synthetic oligonucleotide
cacgaccagccauugguaa

SEQ ID NO: 572828 - RNA, 19 nt, Artificial Sequence
  Description of Artificial Sequence: Synthetic oligonucleotide
ucucuaccuucaguuuuaa

SEQ ID NO: 572829 - RNA, 19 nt, Artificial Sequence
  Description of Artificial Sequence: Synthetic oligonucleotide
cggaggaguagauucuagc

SEQ ID NO: 572830 - RNA, 19 nt, Artificial Sequence
  Description of Artificial Sequence: Synthetic oligonucleotide
ggucacgaccagccauugg

SEQ ID NO: 572831 - RNA, 19 nt, Artificial Sequence
  Description of Artificial Sequence: Synthetic oligonucleotide
ucguccgacuggucacucu

SEQ ID NO: 572832 - RNA, 19 nt, Artificial Sequence
  Description of Artificial Sequence: Synthetic oligonucleotide
cucauccggcgcugcugcg

SEQ ID NO: 572833 - RNA, 19 nt, Artificial Sequence
  Description of Artificial Sequence: Synthetic oligonucleotide
caguaccuugucuuaugaa

SEQ ID NO: 572834 - RNA, 19 nt, Artificial Sequence
  Description of Artificial Sequence: Synthetic oligonucleotide
ugcagcccaguaccuuguc

SEQ ID NO: 572835 - RNA, 19 nt, Artificial Sequence
  Description of Artificial Sequence: Synthetic oligonucleotide
ucgcucccgaaaagauccu

SEQ ID NO: 572836 - RNA, 19 nt, Artificial Sequence
  Description of Artificial Sequence: Synthetic oligonucleotide
cagcuucgcucccgaaaag

SEQ ID NO: 572837 - RNA, 19 nt, Artificial Sequence
  Description of Artificial Sequence: Synthetic oligonucleotide
ccgaaucagagggaauugc

SEQ ID NO: 572838 - RNA, 19 nt, Artificial Sequence
  Description of Artificial Sequence: Synthetic oligonucleotide
ggcuucagauccacugugc

SEQ ID NO: 572839 - RNA, 19 nt, Artificial Sequence
  Description of Artificial Sequence: Synthetic oligonucleotide
cagaaucuuugcgcuccgc

SEQ ID NO: 572840 - RNA, 19 nt, Artificial Sequence
  Description of Artificial Sequence: Synthetic oligonucleotide
ucauaucggucaggcucca

SEQ ID NO: 572841 - RNA, 19 nt, Artificial Sequence
  Description of Artificial Sequence: Synthetic oligonucleotide
uccucguggucggaucgcu

SEQ ID NO: 572842 - RNA, 19 nt, Artificial Sequence
  Description of Artificial Sequence: Synthetic oligonucleotide
cuugcgcuucauucguaaa

SEQ ID NO: 572843 - RNA, 19 nt, Artificial Sequence
  Description of Artificial Sequence: Synthetic oligonucleotide
ugguuguggucacccugua

SEQ ID NO: 572844 - RNA, 19 nt, Artificial Sequence
  Description of Artificial Sequence: Synthetic oligonucleotide
ucggaucgcucggaagccu

SEQ ID NO: 572845 - RNA, 19 nt, Artificial Sequence
  Description of Artificial Sequence: Synthetic oligonucleotide
aucggaggaguagauucua

SEQ ID NO: 572846 - RNA, 19 nt, Artificial Sequence
  Description of Artificial Sequence: Synthetic oligonucleotide
uuucgcugccagaggcauu

SEQ ID NO: 572847 - RNA, 19 nt, Artificial Sequence
  Description of Artificial Sequence: Synthetic oligonucleotide
cucccuccuaauggaggcc

SEQ ID NO: 572848 - RNA, 19 nt, Artificial Sequence
  Description of Artificial Sequence: Synthetic oligonucleotide
gcacccuccaucuuauugu

SEQ ID NO: 572849 - RNA, 19 nt, Artificial Sequence
  Description of Artificial Sequence: Synthetic oligonucleotide
uguggccgguccucaucgu

SEQ ID NO: 572850 - RNA, 19 nt, Artificial Sequence
  Description of Artificial Sequence: Synthetic oligonucleotide
ggcuuaucuucuccaucac

SEQ ID NO: 572851 - RNA, 19 nt, Artificial Sequence
  Description of Artificial Sequence: Synthetic oligonucleotide
caucacuaucggaggagua

SEQ ID NO: 572852 - RNA, 19 nt, Artificial Sequence
  Description of Artificial Sequence: Synthetic oligonucleotide
uuucgucguccgacugguc

SEQ ID NO: 572853 - RNA, 19 nt, Artificial Sequence
  Description of Artificial Sequence: Synthetic oligonucleotide
ggcucauuauccucguggu

SEQ ID NO: 572854 - RNA, 19 nt, Artificial Sequence
  Description of Artificial Sequence: Synthetic oligonucleotide
ucucagcuucgcucccgaa

SEQ ID NO: 572855 - RNA, 19 nt, Artificial Sequence
  Description of Artificial Sequence: Synthetic oligonucleotide
cgaaucagagggaauugca

SEQ ID NO: 572856 - RNA, 19 nt, Artificial Sequence
  Description of Artificial Sequence: Synthetic oligonucleotide
gaagcaccguucuccuggu

SEQ ID NO: 572857 - RNA, 19 nt, Artificial Sequence
  Description of Artificial Sequence: Synthetic oligonucleotide
ucacccuguaguggggcuu

SEQ ID NO: 572858 - RNA, 19 nt, Artificial Sequence
  Description of Artificial Sequence: Synthetic oligonucleotide
gguauuggcuccuccuccu

SEQ ID NO: 572859 - RNA, 19 nt, Artificial Sequence
  Description of Artificial Sequence: Synthetic oligonucleotide
gcuucguuuuaaagacagc

SEQ ID NO: 572860 - RNA, 19 nt, Artificial Sequence
  Description of Artificial Sequence: Synthetic oligonucleotide
ucggacaccuguggccggu

SEQ ID NO: 572861 - RNA, 19 nt, Artificial Sequence
  Description of Artificial Sequence: Synthetic oligonucleotide
cuccuaauggaggcccuca

SEQ ID NO: 572862 - RNA, 19 nt, Artificial Sequence
  Description of Artificial Sequence: Synthetic oligonucleotide
ccuugucuuaugaaaagau

SEQ ID NO: 572863 - RNA, 19 nt, Artificial Sequence
  Description of Artificial Sequence: Synthetic oligonucleotide
ccacugugaugagaggccc

SEQ ID NO: 572864 - RNA, 19 nt, Artificial Sequence
  Description of Artificial Sequence: Synthetic oligonucleotide
ggaguucuguagcuugucu

SEQ ID NO: 572865 - RNA, 19 nt, Artificial Sequence
  Description of Artificial Sequence: Synthetic oligonucleotide
ggccugaaggugagcuucg

SEQ ID NO: 572866 - RNA, 19 nt, Artificial Sequence
  Description of Artificial Sequence: Synthetic oligonucleotide
gcuuccgaaucagagggaa

SEQ ID NO: 572867 - RNA, 19 nt, Artificial Sequence
  Description of Artificial Sequence: Synthetic oligonucleotide
ugggccuuuucggaaccuu

SEQ ID NO: 572868 - RNA, 19 nt, Artificial Sequence
  Description of Artificial Sequence: Synthetic oligonucleotide
agggucacgaccagccauu

SEQ ID NO: 572869 - RNA, 19 nt, Artificial Sequence
  Description of Artificial Sequence: Synthetic oligonucleotide
cacccuccaucuuauugua

SEQ ID NO: 572870 - RNA, 19 nt, Artificial Sequence
  Description of Artificial Sequence: Synthetic oligonucleotide
gccuucgaucuucaucuga

SEQ ID NO: 572871 - RNA, 19 nt, Artificial Sequence
  Description of Artificial Sequence: Synthetic oligonucleotide
auccgagcauugcucucuu

SEQ ID NO: 572872 - RNA, 19 nt, Artificial Sequence
  Description of Artificial Sequence: Synthetic oligonucleotide
gcaucuuuucgucguccga

SEQ ID NO: 572873 - RNA, 19 nt, Artificial Sequence
  Description of Artificial Sequence: Synthetic oligonucleotide
cucucagcuucgcucccga

SEQ ID NO: 572874 - RNA, 19 nt, Artificial Sequence
  Description of Artificial Sequence: Synthetic oligonucleotide
aucucggcgcacccuccau

SEQ ID NO: 572875 - RNA, 19 nt, Artificial Sequence
  Description of Artificial Sequence: Synthetic oligonucleotide
gccauugguaagauucuaa

SEQ ID NO: 572876 - RNA, 19 nt, Artificial Sequence
  Description of Artificial Sequence: Synthetic oligonucleotide
cucggcgcacccuccaucu

SEQ ID NO: 572877 - RNA, 19 nt, Artificial Sequence
  Description of Artificial Sequence: Synthetic oligonucleotide
caucaucagaauuccccuu

SEQ ID NO: 572878 - RNA, 19 nt, Artificial Sequence
  Description of Artificial Sequence: Synthetic oligonucleotide
caucaucggaguucugcau

SEQ ID NO: 572879 - RNA, 19 nt, Artificial Sequence
  Description of Artificial Sequence: Synthetic oligonucleotide
caucucggcgcacccucca

SEQ ID NO: 572880 - RNA, 19 nt, Artificial Sequence
  Description of Artificial Sequence: Synthetic oligonucleotide
guggucggaucgcucggaa

SEQ ID NO: 572881 - RNA, 19 nt, Artificial Sequence
  Description of Artificial Sequence: Synthetic oligonucleotide
uccgagcauugcucucuuu

SEQ ID NO: 572882 - RNA, 19 nt, Artificial Sequence
  Description of Artificial Sequence: Synthetic oligonucleotide
ccgaaaagauccuccauau

SEQ ID NO: 572883 - RNA, 19 nt, Artificial Sequence
  Description of Artificial Sequence: Synthetic oligonucleotide
cuagcacguuccucucgaa

SEQ ID NO: 572884 - RNA, 19 nt, Artificial Sequence
  Description of Artificial Sequence: Synthetic oligonucleotide
cacuugacuauccgagcau

SEQ ID NO: 572885 - RNA, 19 nt, Artificial Sequence
  Description of Artificial Sequence: Synthetic oligonucleotide
ccgagcauugcucucuuua

SEQ ID NO: 572886 - RNA, 19 nt, Artificial Sequence
  Description of Artificial Sequence: Synthetic oligonucleotide
ggaguagauucuagcacgu

SEQ ID NO: 572887 - RNA, 19 nt, Artificial Sequence
  Description of Artificial Sequence: Synthetic oligonucleotide
gaauugcauucuugcgcuu

SEQ ID NO: 572888 - RNA, 19 nt, Artificial Sequence
  Description of Artificial Sequence: Synthetic oligonucleotide
agucugagucagacccgga

SEQ ID NO: 572889 - RNA, 19 nt, Artificial Sequence
  Description of Artificial Sequence: Synthetic oligonucleotide
cuuccgccucugaguggug

SEQ ID NO: 572890 - RNA, 19 nt, Artificial Sequence
  Description of Artificial Sequence: Synthetic oligonucleotide
cacuaucggaggaguagau

SEQ ID NO: 572891 - RNA, 19 nt, Artificial Sequence
  Description of Artificial Sequence: Synthetic oligonucleotide
cuuucgcugccagaggcau

SEQ ID NO: 572892 - RNA, 19 nt, Artificial Sequence
  Description of Artificial Sequence: Synthetic oligonucleotide
gggccuuuucggaaccuuc

SEQ ID NO: 572893 - RNA, 19 nt, Artificial Sequence
  Description of Artificial Sequence: Synthetic oligonucleotide
gaccuguugucugacccuu

SEQ ID NO: 572894 - RNA, 19 nt, Artificial Sequence
  Description of Artificial Sequence: Synthetic oligonucleotide
guggggcuuuguauacauc

SEQ ID NO: 572895 - RNA, 19 nt, Artificial Sequence
  Description of Artificial Sequence: Synthetic oligonucleotide
cucgguccgcggccuuggc

SEQ ID NO: 572896 - RNA, 19 nt, Artificial Sequence
  Description of Artificial Sequence: Synthetic oligonucleotide
cagggucacgaccagccau

SEQ ID NO: 572897 - RNA, 19 nt, Artificial Sequence
  Description of Artificial Sequence: Synthetic oligonucleotide
cuuccgaaucagagggaau

SEQ ID NO: 572898 - RNA, 19 nt, Artificial Sequence
  Description of Artificial Sequence: Synthetic oligonucleotide
ucggcgcacccuccaucuu

SEQ ID NO: 572899 - RNA, 19 nt, Artificial Sequence
  Description of Artificial Sequence: Synthetic oligonucleotide
ccgguccucaucguccgag

SEQ ID NO: 572900 - RNA, 19 nt, Artificial Sequence
  Description of Artificial Sequence: Synthetic oligonucleotide
cauuauccucguggucgga

SEQ ID NO: 572901 - RNA, 19 nt, Artificial Sequence
  Description of Artificial Sequence: Synthetic oligonucleotide
gaguagauucuagcacguu

SEQ ID NO: 572902 - RNA, 19 nt, Artificial Sequence
  Description of Artificial Sequence: Synthetic oligonucleotide
ccgacuggucacucuuauc

SEQ ID NO: 572903 - RNA, 19 nt, Artificial Sequence
  Description of Artificial Sequence: Synthetic oligonucleotide
caucguccgaguucugcuu

SEQ ID NO: 572904 - RNA, 19 nt, Artificial Sequence
  Description of Artificial Sequence: Synthetic oligonucleotide
gcucgguccgcggccuugg

SEQ ID NO: 572905 - RNA, 19 nt, Artificial Sequence
  Description of Artificial Sequence: Synthetic oligonucleotide
gucguccgacuggucacuc

SEQ ID NO: 572906 - RNA, 19 nt, Artificial Sequence
  Description of Artificial Sequence: Synthetic oligonucleotide
cagaggcauuacugccaga

SEQ ID NO: 572907 - RNA, 19 nt, Artificial Sequence
  Description of Artificial Sequence: Synthetic oligonucleotide
cccuaaaugcagggacaug

SEQ ID NO: 572908 - RNA, 19 nt, Artificial Sequence
  Description of Artificial Sequence: Synthetic oligonucleotide
cauauccgccauggcagcu

SEQ ID NO: 572909 - RNA, 19 nt, Artificial Sequence
  Description of Artificial Sequence: Synthetic oligonucleotide
cucugugcgcuggcacuca

SEQ ID NO: 572910 - RNA, 19 nt, Artificial Sequence
  Description of Artificial Sequence: Synthetic oligonucleotide
ccgccucgcucucagcuuc

SEQ ID NO: 572911 - RNA, 19 nt, Artificial Sequence
  Description of Artificial Sequence: Synthetic oligonucleotide
ggcaccucagugucacuau

SEQ ID NO: 572912 - RNA, 19 nt, Artificial Sequence
  Description of Artificial Sequence: Synthetic oligonucleotide
ucgcugccagaggcauuac

SEQ ID NO: 572913 - RNA, 19 nt, Artificial Sequence
  Description of Artificial Sequence: Synthetic oligonucleotide
gagugguggcucccaucau

SEQ ID NO: 572914 - RNA, 19 nt, Artificial Sequence
  Description of Artificial Sequence: Synthetic oligonucleotide
gcuucgcucccgaaaagau

SEQ ID NO: 572915 - RNA, 19 nt, Artificial Sequence
  Description of Artificial Sequence: Synthetic oligonucleotide
ccucguggucggaucgcuc

SEQ ID NO: 572916 - RNA, 19 nt, Artificial Sequence
  Description of Artificial Sequence: Synthetic oligonucleotide
cggaucgcucggaagccuc

SEQ ID NO: 572917 - RNA, 19 nt, Artificial Sequence
  Description of Artificial Sequence: Synthetic oligonucleotide
guccgacuggucacucuua

SEQ ID NO: 572918 - RNA, 19 nt, Artificial Sequence
  Description of Artificial Sequence: Synthetic oligonucleotide
cgaccagccauugguaaga

SEQ ID NO: 572919 - RNA, 19 nt, Artificial Sequence
  Description of Artificial Sequence: Synthetic oligonucleotide
ccuccuaauggaggcccuc

SEQ ID NO: 572920 - RNA, 19 nt, Artificial Sequence
  Description of Artificial Sequence: Synthetic oligonucleotide
cauaucggucaggcuccaa

SEQ ID NO: 572921 - RNA, 19 nt, Artificial Sequence
  Description of Artificial Sequence: Synthetic oligonucleotide
gcugcgacucccuccuaau

SEQ ID NO: 572922 - RNA, 19 nt, Artificial Sequence
  Description of Artificial Sequence: Synthetic oligonucleotide
ccgagcccucaucacuauc

SEQ ID NO: 572923 - RNA, 19 nt, Artificial Sequence
  Description of Artificial Sequence: Synthetic oligonucleotide
caccguucuccuggucaga

SEQ ID NO: 572924 - RNA, 19 nt, Artificial Sequence
  Description of Artificial Sequence: Synthetic oligonucleotide
cuuugcgcuccgccucgcu

SEQ ID NO: 572925 - RNA, 19 nt, Artificial Sequence
  Description of Artificial Sequence: Synthetic oligonucleotide
ccuuccgccucugaguggu

SEQ ID NO: 572926 - RNA, 19 nt, Artificial Sequence
  Description of Artificial Sequence: Synthetic oligonucleotide
ccgccauggcagcucgguc

SEQ ID NO: 572927 - RNA, 19 nt, Artificial Sequence
  Description of Artificial Sequence: Synthetic oligonucleotide
ggaucgcucggaagccucu

SEQ ID NO: 572928 - RNA, 19 nt, Artificial Sequence
  Description of Artificial Sequence: Synthetic oligonucleotide
ggcgcacccuccaucuuau

SEQ ID NO: 572929 - RNA, 19 nt, Artificial Sequence
  Description of Artificial Sequence: Synthetic oligonucleotide
cgcuuccgaaucagaggga

SEQ ID NO: 572930 - RNA, 19 nt, Artificial Sequence
  Description of Artificial Sequence: Synthetic oligonucleotide
cugacccuucagagugauu

SEQ ID NO: 572931 - RNA, 19 nt, Artificial Sequence
  Description of Artificial Sequence: Synthetic oligonucleotide
cucaggcguucuucuucuu

SEQ ID NO: 572932 - RNA, 19 nt, Artificial Sequence
  Description of Artificial Sequence: Synthetic oligonucleotide
cucuuucgucuuggucacu

SEQ ID NO: 572933 - RNA, 19 nt, Artificial Sequence
  Description of Artificial Sequence: Synthetic oligonucleotide
caucggaguucugcaucuu

SEQ ID NO: 572934 - RNA, 19 nt, Artificial Sequence
  Description of Artificial Sequence: Synthetic oligonucleotide
gccgcagggugcucaucau

SEQ ID NO: 572935 - RNA, 19 nt, Artificial Sequence
  Description of Artificial Sequence: Synthetic oligonucleotide
cggcgcacccuccaucuua

SEQ ID NO: 572936 - RNA, 19 nt, Artificial Sequence
  Description of Artificial Sequence: Synthetic oligonucleotide
cguggucggaucgcucgga

SEQ ID NO: 572937 - RNA, 19 nt, Artificial Sequence
  Description of Artificial Sequence: Synthetic oligonucleotide
cguccgacuggucacucuu

SEQ ID NO: 572938 - RNA, 19 nt, Artificial Sequence
  Description of Artificial Sequence: Synthetic oligonucleotide
cccuccuaauggaggcccu

SEQ ID NO: 572939 - RNA, 19 nt, Artificial Sequence
  Description of Artificial Sequence: Synthetic oligonucleotide
cugcugcgacucccuccua

SEQ ID NO: 572940 - RNA, 19 nt, Artificial Sequence
  Description of Artificial Sequence: Synthetic oligonucleotide
ccucgucaucgucggaguu

SEQ ID NO: 572941 - RNA, 19 nt, Artificial Sequence
  Description of Artificial Sequence: Synthetic oligonucleotide
gcuccacacugaggaaguu

SEQ ID NO: 572942 - RNA, 19 nt, Artificial Sequence
  Description of Artificial Sequence: Synthetic oligonucleotide
cggacaccuguggccgguc

SEQ ID NO: 572943 - RNA, 19 nt, Artificial Sequence
  Description of Artificial Sequence: Synthetic oligonucleotide
cgucggaguucuguagcuu

SEQ ID NO: 572944 - RNA, 19 nt, Artificial Sequence
  Description of Artificial Sequence: Synthetic oligonucleotide
gcgcacccuccaucuuauu

SEQ ID NO: 572945 - RNA, 19 nt, Artificial Sequence
  Description of Artificial Sequence: Synthetic oligonucleotide
ugaagguugacuuuaagcg

SEQ ID NO: 572946 - RNA, 19 nt, Artificial Sequence
  Description of Artificial Sequence: Synthetic oligonucleotide
  modified_base (3)..(3): a, c, u, g, unknown or other
ganaaagucaauaaccucg

SEQ ID NO: 572947 - RNA, 19 nt, Artificial Sequence
  Description of Artificial Sequence: Synthetic oligonucleotide
aaagacauugggcaucucc

SEQ ID NO: 572948 - RNA, 19 nt, Artificial Sequence
  Description of Artificial Sequence: Synthetic oligonucleotide
aaugggugugaccagaagg

SEQ ID NO: 572949 - RNA, 19 nt, Artificial Sequence
  Description of Artificial Sequence: Synthetic oligonucleotide
aaaguggucacuugcuagc

SEQ ID NO: 572950 - RNA, 19 nt, Artificial Sequence
  Description of Artificial Sequence: Synthetic oligonucleotide
augaagguugacuuuaagc

SEQ ID NO: 572951 - RNA, 19 nt, Artificial Sequence
  Description of Artificial Sequence: Synthetic oligonucleotide
ucuuuauggaccuugaaaa

SEQ ID NO: 572952 - RNA, 19 nt, Artificial Sequence
  Description of Artificial Sequence: Synthetic oligonucleotide
uaaaauaucaugguucuug

SEQ ID NO: 572953 - RNA, 19 nt, Artificial Sequence
  Description of Artificial Sequence: Synthetic oligonucleotide
aagcgaguacauuucagac

SEQ ID NO: 572954 - RNA, 19 nt, Artificial Sequence
  Description of Artificial Sequence: Synthetic oligonucleotide
accaccucaguguaaagcc

SEQ ID NO: 572955 - RNA, 19 nt, Artificial Sequence
  Description of Artificial Sequence: Synthetic oligonucleotide
aauggugacccuuucccuc

SEQ ID NO: 572956 - RNA, 19 nt, Artificial Sequence
  Description of Artificial Sequence: Synthetic oligonucleotide
  modified_base (2)..(2): a, c, u, g, unknown or other
anaaagucaauaaccucgg

SEQ ID NO: 572957 - RNA, 19 nt, Artificial Sequence
  Description of Artificial Sequence: Synthetic oligonucleotide
ugugagguggaaccgaucc

SEQ ID NO: 572958 - RNA, 19 nt, Artificial Sequence
  Description of Artificial Sequence: Synthetic oligonucleotide
uucacauccaagcaucacc

SEQ ID NO: 572959 - RNA, 19 nt, Artificial Sequence
  Description of Artificial Sequence: Synthetic oligonucleotide
agcgaguacauuucagacc

SEQ ID NO: 572960 - RNA, 19 nt, Artificial Sequence
  Description of Artificial Sequence: Synthetic oligonucleotide
accagaaggcaacucaagc

SEQ ID NO: 572961 - RNA, 19 nt, Artificial Sequence
  Description of Artificial Sequence: Synthetic oligonucleotide
guaaagcccacccugacag

SEQ ID NO: 572962 - RNA, 19 nt, Artificial Sequence
  Description of Artificial Sequence: Synthetic oligonucleotide
aucucaccuacccucagcc

SEQ ID NO: 572963 - RNA, 19 nt, Artificial Sequence
  Description of Artificial Sequence: Synthetic oligonucleotide
  modified_base (7)..(7): a, c, u, g, unknown or other
agccganaaagucaauaac

SEQ ID NO: 572964 - RNA, 19 nt, Artificial Sequence
  Description of Artificial Sequence: Synthetic oligonucleotide
auuucagaccccucagacc

SEQ ID NO: 572965 - RNA, 19 nt, Artificial Sequence
  Description of Artificial Sequence: Synthetic oligonucleotide
ucacauccaagcaucaccc

SEQ ID NO: 572966 - RNA, 19 nt, Artificial Sequence
  Description of Artificial Sequence: Synthetic oligonucleotide
aacaucaucgaugcccucg

SEQ ID NO: 572967 - RNA, 19 nt, Artificial Sequence
  Description of Artificial Sequence: Synthetic oligonucleotide
uauaggaaagggcuggggu

SEQ ID NO: 572968 - RNA, 19 nt, Artificial Sequence
  Description of Artificial Sequence: Synthetic oligonucleotide
cacucaacaucaucgaugc

SEQ ID NO: 572969 - RNA, 19 nt, Artificial Sequence
  Description of Artificial Sequence: Synthetic oligonucleotide
  modified_base (18)..(18): a, c, u, g, unknown or other
auaaccucggcugaugcnc

SEQ ID NO: 572970 - RNA, 19 nt, Artificial Sequence
  Description of Artificial Sequence: Synthetic oligonucleotide
auggcugucacucaugccu

SEQ ID NO: 572971 - RNA, 19 nt, Artificial Sequence
  Description of Artificial Sequence: Synthetic oligonucleotide
cuaagggcagcauuucugg

SEQ ID NO: 572972 - RNA, 19 nt, Artificial Sequence
  Description of Artificial Sequence: Synthetic oligonucleotide
gaugagauguggaggaagg

SEQ ID NO: 572973 - RNA, 19 nt, Artificial Sequence
  Description of Artificial Sequence: Synthetic oligonucleotide
agggauggaaggccgaggc

SEQ ID NO: 572974 - RNA, 19 nt, Artificial Sequence
  Description of Artificial Sequence: Synthetic oligonucleotide
cacccacucaacaucaucg

SEQ ID NO: 572975 - RNA, 19 nt, Artificial Sequence
  Description of Artificial Sequence: Synthetic oligonucleotide
uuuaagcgaguacauuuca

SEQ ID NO: 572976 - RNA, 19 nt, Artificial Sequence
  Description of Artificial Sequence: Synthetic oligonucleotide
uucuuauugcucagucugg

SEQ ID NO: 572977 - RNA, 19 nt, Artificial Sequence
  Description of Artificial Sequence: Synthetic oligonucleotide
guagaucucucccagguug

SEQ ID NO: 572978 - RNA, 19 nt, Artificial Sequence
  Description of Artificial Sequence: Synthetic oligonucleotide
ugugcacaaaaucccacug

SEQ ID NO: 572979 - RNA, 19 nt, Artificial Sequence
  Description of Artificial Sequence: Synthetic oligonucleotide
auagggcguguccaggucc

SEQ ID NO: 572980 - RNA, 19 nt, Artificial Sequence
  Description of Artificial Sequence: Synthetic oligonucleotide
aacuucugagaacucgucu

SEQ ID NO: 572981 - RNA, 19 nt, Artificial Sequence
  Description of Artificial Sequence: Synthetic oligonucleotide
aaauaucaugguucuugug

SEQ ID NO: 572982 - RNA, 19 nt, Artificial Sequence
  Description of Artificial Sequence: Synthetic oligonucleotide
uuggacacuacacccagac

SEQ ID NO: 572983 - RNA, 19 nt, Artificial Sequence
  Description of Artificial Sequence: Synthetic oligonucleotide
auaucaugguucuugugca

SEQ ID NO: 572984 - RNA, 19 nt, Artificial Sequence
  Description of Artificial Sequence: Synthetic oligonucleotide
uguaucuagcagcuugggc

SEQ ID NO: 572985 - RNA, 19 nt, Artificial Sequence
  Description of Artificial Sequence: Synthetic oligonucleotide
gaucucagaacacccagac

SEQ ID NO: 572986 - RNA, 19 nt, Artificial Sequence
  Description of Artificial Sequence: Synthetic oligonucleotide
ucuugugcacaaaauccca

SEQ ID NO: 572987 - RNA, 19 nt, Artificial Sequence
  Description of Artificial Sequence: Synthetic oligonucleotide
  modified_base (19)..(19): a, c, u, g, unknown or other
aauaaccucggcugaugcn

SEQ ID NO: 572988 - RNA, 19 nt, Artificial Sequence
  Description of Artificial Sequence: Synthetic oligonucleotide
caaaguggucacuugcuag

SEQ ID NO: 572989 - RNA, 19 nt, Artificial Sequence
  Description of Artificial Sequence: Synthetic oligonucleotide
uagcucaugacccucuaac

SEQ ID NO: 572990 - RNA, 19 nt, Artificial Sequence
  Description of Artificial Sequence: Synthetic oligonucleotide
aagaaggcugccccuaaca

SEQ ID NO: 572991 - RNA, 19 nt, Artificial Sequence
  Description of Artificial Sequence: Synthetic oligonucleotide
gaagguugacuuuaagcga

SEQ ID NO: 572992 - RNA, 19 nt, Artificial Sequence
  Description of Artificial Sequence: Synthetic oligonucleotide
gcgaguacauuucagaccc

SEQ ID NO: 572993 - RNA, 19 nt, Artificial Sequence
  Description of Artificial Sequence: Synthetic oligonucleotide
aaaugagagggugagggaa

SEQ ID NO: 572994 - RNA, 19 nt, Artificial Sequence
  Description of Artificial Sequence: Synthetic oligonucleotide
ucuuggcgcaccaucacca

SEQ ID NO: 572995 - RNA, 19 nt, Artificial Sequence
  Description of Artificial Sequence: Synthetic oligonucleotide
caccgcucagucuuuaugg

SEQ ID NO: 572996 - RNA, 19 nt, Artificial Sequence
  Description of Artificial Sequence: Synthetic oligonucleotide
uugccaaccacccacucaa

SEQ ID NO: 572997 - RNA, 19 nt, Artificial Sequence
  Description of Artificial Sequence: Synthetic oligonucleotide
acagccuuaaaagaaagau

SEQ ID NO: 572998 - RNA, 19 nt, Artificial Sequence
  Description of Artificial Sequence: Synthetic oligonucleotide
uguaaagcccacccugaca

SEQ ID NO: 572999 - RNA, 19 nt, Artificial Sequence
  Description of Artificial Sequence: Synthetic oligonucleotide
cuggaguauaggaaagggc

SEQ ID NO: 573000 - RNA, 19 nt, Artificial Sequence
  Description of Artificial Sequence: Synthetic oligonucleotide
uugagcuuccuaagggcag

SEQ ID NO: 573001 - RNA, 19 nt, Artificial Sequence
  Description of Artificial Sequence: Synthetic oligonucleotide
auuagcgccagugaucuug

SEQ ID NO: 573002 - RNA, 19 nt, Artificial Sequence
  Description of Artificial Sequence: Synthetic oligonucleotide
aagaaagaaggcugccccu

SEQ ID NO: 573003 - RNA, 19 nt, Artificial Sequence
  Description of Artificial Sequence: Synthetic oligonucleotide
cagaucuuccccagcaccg

SEQ ID NO: 573004 - RNA, 19 nt, Artificial Sequence
  Description of Artificial Sequence: Synthetic oligonucleotide
cuuauugcucagucugggg

SEQ ID NO: 573005 - RNA, 19 nt, Artificial Sequence
  Description of Artificial Sequence: Synthetic oligonucleotide
ugcacaaaaucccacuguu

SEQ ID NO: 573006 - RNA, 19 nt, Artificial Sequence
  Description of Artificial Sequence: Synthetic oligonucleotide
aaugagagggugagggaag

SEQ ID NO: 573007 - RNA, 19 nt, Artificial Sequence
  Description of Artificial Sequence: Synthetic oligonucleotide
ucguuccgguucuugaggg

SEQ ID NO: 573008 - RNA, 19 nt, Artificial Sequence
  Description of Artificial Sequence: Synthetic oligonucleotide
uggggaucucagaacaccc

SEQ ID NO: 573009 - RNA, 19 nt, Artificial Sequence
  Description of Artificial Sequence: Synthetic oligonucleotide
  modified_base (6)..(6): a, c, u, g, unknown or other
gccganaaagucaauaacc

SEQ ID NO: 573010 - RNA, 19 nt, Artificial Sequence
  Description of Artificial Sequence: Synthetic oligonucleotide
aaaucccacuguucacauc

SEQ ID NO: 573011 - RNA, 19 nt, Artificial Sequence
  Description of Artificial Sequence: Synthetic oligonucleotide
gagcuugcgguugucaggg

SEQ ID NO: 573012 - RNA, 19 nt, Artificial Sequence
  Description of Artificial Sequence: Synthetic oligonucleotide
aguuccugcaucuugcgua

SEQ ID NO: 573013 - RNA, 19 nt, Artificial Sequence
  Description of Artificial Sequence: Synthetic oligonucleotide
cuguucacauccaagcauc

SEQ ID NO: 573014 - RNA, 19 nt, Artificial Sequence
  Description of Artificial Sequence: Synthetic oligonucleotide
uuuuccuauucaagagcug

SEQ ID NO: 573015 - RNA, 19 nt, Artificial Sequence
  Description of Artificial Sequence: Synthetic oligonucleotide
uugugagggcaucagggac

SEQ ID NO: 573016 - RNA, 19 nt, Artificial Sequence
  Description of Artificial Sequence: Synthetic oligonucleotide
ucgucugagauguccagcu

SEQ ID NO: 573017 - RNA, 19 nt, Artificial Sequence
  Description of Artificial Sequence: Synthetic oligonucleotide
aagggcccauucauggugc

SEQ ID NO: 573018 - RNA, 19 nt, Artificial Sequence
  Description of Artificial Sequence: Synthetic oligonucleotide
caucagccgggcuaugucg

SEQ ID NO: 573019 - RNA, 19 nt, Artificial Sequence
  Description of Artificial Sequence: Synthetic oligonucleotide
ugcugcuuggacacuacac

SEQ ID NO: 573020 - RNA, 19 nt, Artificial Sequence
  Description of Artificial Sequence: Synthetic oligonucleotide
cuugcucucuuucccaaag

SEQ ID NO: 573021 - RNA, 19 nt, Artificial Sequence
  Description of Artificial Sequence: Synthetic oligonucleotide
aacucaagcccaagggguc

SEQ ID NO: 573022 - RNA, 19 nt, Artificial Sequence
  Description of Artificial Sequence: Synthetic oligonucleotide
ugccccuaacauuauauau

SEQ ID NO: 573023 - RNA, 19 nt, Artificial Sequence
  Description of Artificial Sequence: Synthetic oligonucleotide
  modified_base (7)..(7): a, c, u, g, unknown or other
aaccacnccaggacagccg

SEQ ID NO: 573024 - RNA, 19 nt, Artificial Sequence
  Description of Artificial Sequence: Synthetic oligonucleotide
ccaaccacuggccauaggg

SEQ ID NO: 573025 - RNA, 19 nt, Artificial Sequence
  Description of Artificial Sequence: Synthetic oligonucleotide
uugugcacaaaaucccacu

SEQ ID NO: 573026 - RNA, 19 nt, Artificial Sequence
  Description of Artificial Sequence: Synthetic oligonucleotide
cuggcggguagaaagugcc

SEQ ID NO: 573027 - RNA, 19 nt, Artificial Sequence
  Description of Artificial Sequence: Synthetic oligonucleotide
caauaaccucggcugaugc

SEQ ID NO: 573028 - RNA, 19 nt, Artificial Sequence
  Description of Artificial Sequence: Synthetic oligonucleotide
uggaaccgauccaaggcug

SEQ ID NO: 573029 - RNA, 19 nt, Artificial Sequence
  Description of Artificial Sequence: Synthetic oligonucleotide
uucacagcuugugagggca

SEQ ID NO: 573030 - RNA, 19 nt, Artificial Sequence
  Description of Artificial Sequence: Synthetic oligonucleotide
ucuuaccagcacaccaccc

SEQ ID NO: 573031 - RNA, 19 nt, Artificial Sequence
  Description of Artificial Sequence: Synthetic oligonucleotide
cuugcguaggcucgggaag

SEQ ID NO: 573032 - RNA, 19 nt, Artificial Sequence
  Description of Artificial Sequence: Synthetic oligonucleotide
cuccccucaaccagaaggc

SEQ ID NO: 573033 - RNA, 19 nt, Artificial Sequence
  Description of Artificial Sequence: Synthetic oligonucleotide
aagcccaaggggucugcuc

SEQ ID NO: 573034 - RNA, 19 nt, Artificial Sequence
  Description of Artificial Sequence: Synthetic oligonucleotide
uuagcgccagugaucuugc

SEQ ID NO: 573035 - RNA, 19 nt, Artificial Sequence
  Description of Artificial Sequence: Synthetic oligonucleotide
agucaauaaccucggcuga

SEQ ID NO: 573036 - RNA, 19 nt, Artificial Sequence
  Description of Artificial Sequence: Synthetic oligonucleotide
ucuugcguaggcucgggaa

SEQ ID NO: 573037 - RNA, 19 nt, Artificial Sequence
  Description of Artificial Sequence: Synthetic oligonucleotide
cucguuccgguucuugagg

SEQ ID NO: 573038 - RNA, 19 nt, Artificial Sequence
  Description of Artificial Sequence: Synthetic oligonucleotide
ucaauaaccucggcugaug

SEQ ID NO: 573039 - RNA, 19 nt, Artificial Sequence
  Description of Artificial Sequence: Synthetic oligonucleotide
ucguuggccagcaugucau

SEQ ID NO: 573040 - RNA, 19 nt, Artificial Sequence
  Description of Artificial Sequence: Synthetic oligonucleotide
  modified_base (12)..(12): a, c, u, g, unknown or other
aggacagccganaaaguca

SEQ ID NO: 573041 - RNA, 19 nt, Artificial Sequence
  Description of Artificial Sequence: Synthetic oligonucleotide
aguauaggaaagggcuggg

SEQ ID NO: 573042 - RNA, 19 nt, Artificial Sequence
  Description of Artificial Sequence: Synthetic oligonucleotide
uaacuucugagaacucguc

SEQ ID NO: 573043 - RNA, 19 nt, Artificial Sequence
  Description of Artificial Sequence: Synthetic oligonucleotide
agcucaugacccucuaacu

SEQ ID NO: 573044 - RNA, 19 nt, Artificial Sequence
  Description of Artificial Sequence: Synthetic oligonucleotide
ugagguggaaccgauccaa

SEQ ID NO: 573045 - RNA, 19 nt, Artificial Sequence
  Description of Artificial Sequence: Synthetic oligonucleotide
gaaaugagagggugaggga

SEQ ID NO: 573046 - RNA, 19 nt, Artificial Sequence
  Description of Artificial Sequence: Synthetic oligonucleotide
ccuaacauuauauauuaaa

SEQ ID NO: 573047 - RNA, 19 nt, Artificial Sequence
  Description of Artificial Sequence: Synthetic oligonucleotide
uggcauuagcgccagugau

SEQ ID NO: 573048 - RNA, 19 nt, Artificial Sequence
  Description of Artificial Sequence: Synthetic oligonucleotide
aaccagaaggcaacucaag

SEQ ID NO: 573049 - RNA, 19 nt, Artificial Sequence
  Description of Artificial Sequence: Synthetic oligonucleotide
caugaagguugacuuuaag

SEQ ID NO: 573050 - RNA, 19 nt, Artificial Sequence
  Description of Artificial Sequence: Synthetic oligonucleotide
aguggucacuugcuagcuc

SEQ ID NO: 573051 - RNA, 19 nt, Artificial Sequence
  Description of Artificial Sequence: Synthetic oligonucleotide
uccaaggcuggaguauagg

SEQ ID NO: 573052 - RNA, 19 nt, Artificial Sequence
  Description of Artificial Sequence: Synthetic oligonucleotide
cucuuaccagcacaccacc

SEQ ID NO: 573053 - RNA, 19 nt, Artificial Sequence
  Description of Artificial Sequence: Synthetic oligonucleotide
ugcccaaagggcccauuca

SEQ ID NO: 573054 - RNA, 19 nt, Artificial Sequence
  Description of Artificial Sequence: Synthetic oligonucleotide
acucaacaucaucgaugcc

SEQ ID NO: 573055 - RNA, 19 nt, Artificial Sequence
  Description of Artificial Sequence: Synthetic oligonucleotide
ucagaggguagcucaugac

SEQ ID NO: 573056 - RNA, 19 nt, Artificial Sequence
  Description of Artificial Sequence: Synthetic oligonucleotide
ucccgcucgauuuucuggu

SEQ ID NO: 573057 - RNA, 19 nt, Artificial Sequence
  Description of Artificial Sequence: Synthetic oligonucleotide
acaccgcucagucuuuaug

SEQ ID NO: 573058 - RNA, 19 nt, Artificial Sequence
  Description of Artificial Sequence: Synthetic oligonucleotide
augggugugaccagaagga

SEQ ID NO: 573059 - RNA, 19 nt, Artificial Sequence
  Description of Artificial Sequence: Synthetic oligonucleotide
gucacuugcuagcucuggc

SEQ ID NO: 573060 - RNA, 19 nt, Artificial Sequence
  Description of Artificial Sequence: Synthetic oligonucleotide
gcuggaguauaggaaaggg

SEQ ID NO: 573061 - RNA, 19 nt, Artificial Sequence
  Description of Artificial Sequence: Synthetic oligonucleotide
ggucauugagcuuccuaag

SEQ ID NO: 573062 - RNA, 19 nt, Artificial Sequence
  Description of Artificial Sequence: Synthetic oligonucleotide
acaggagacaguguauaga

SEQ ID NO: 573063 - RNA, 19 nt, Artificial Sequence
  Description of Artificial Sequence: Synthetic oligonucleotide
  modified_base (6)..(6): a, c, u, g, unknown or other
accacnccaggacagccga

SEQ ID NO: 573064 - RNA, 19 nt, Artificial Sequence
  Description of Artificial Sequence: Synthetic oligonucleotide
  modified_base (9)..(9): a, c, u, g, unknown or other
acagccganaaagucaaua

SEQ ID NO: 573065 - RNA, 19 nt, Artificial Sequence
  Description of Artificial Sequence: Synthetic oligonucleotide
aaccgauccaaggcuggag

SEQ ID NO: 573066 - RNA, 19 nt, Artificial Sequence
  Description of Artificial Sequence: Synthetic oligonucleotide
cugucagacagaggaagag

SEQ ID NO: 573067 - RNA, 19 nt, Artificial Sequence
  Description of Artificial Sequence: Synthetic oligonucleotide
ucaccuacccucagccaac

SEQ ID NO: 573068 - RNA, 19 nt, Artificial Sequence
  Description of Artificial Sequence: Synthetic oligonucleotide
agcgccagugaucuugcca

SEQ ID NO: 573069 - RNA, 19 nt, Artificial Sequence
  Description of Artificial Sequence: Synthetic oligonucleotide
ugaccuccccucaaccaga

SEQ ID NO: 573070 - RNA, 19 nt, Artificial Sequence
  Description of Artificial Sequence: Synthetic oligonucleotide
aguugggaugaccuccccu

SEQ ID NO: 573071 - RNA, 19 nt, Artificial Sequence
  Description of Artificial Sequence: Synthetic oligonucleotide
guuccgguucuugagggcc

SEQ ID NO: 573072 - RNA, 19 nt, Artificial Sequence
  Description of Artificial Sequence: Synthetic oligonucleotide
ugacaggagacaguguaua

SEQ ID NO: 573073 - RNA, 19 nt, Artificial Sequence
  Description of Artificial Sequence: Synthetic oligonucleotide
ggaucuugucccucguucc

SEQ ID NO: 573074 - RNA, 19 nt, Artificial Sequence
  Description of Artificial Sequence: Synthetic oligonucleotide
aaguggucacuugcuagcu

SEQ ID NO: 573075 - RNA, 19 nt, Artificial Sequence
  Description of Artificial Sequence: Synthetic oligonucleotide
ugucccucguuccgguucu

SEQ ID NO: 573076 - RNA, 19 nt, Artificial Sequence
  Description of Artificial Sequence: Synthetic oligonucleotide
agccgggcuaugucguugg

SEQ ID NO: 573077 - RNA, 19 nt, Artificial Sequence
  Description of Artificial Sequence: Synthetic oligonucleotide
caucucaccuacccucagc

SEQ ID NO: 573078 - RNA, 19 nt, Artificial Sequence
  Description of Artificial Sequence: Synthetic oligonucleotide
cuggccauagggcgugucc

SEQ ID NO: 573079 - RNA, 19 nt, Artificial Sequence
  Description of Artificial Sequence: Synthetic oligonucleotide
aguguaaagcccacccuga

SEQ ID NO: 573080 - RNA, 19 nt, Artificial Sequence
  Description of Artificial Sequence: Synthetic oligonucleotide
  modified_base (17)..(17): a, c, u, g, unknown or other
uaaccucggcugaugcncu

SEQ ID NO: 573081 - RNA, 19 nt, Artificial Sequence
  Description of Artificial Sequence: Synthetic oligonucleotide
gauaaggugguuggccaga

SEQ ID NO: 573082 - RNA, 19 nt, Artificial Sequence
  Description of Artificial Sequence: Synthetic oligonucleotide
ggcucgggaagucaccggg

SEQ ID NO: 573083 - RNA, 19 nt, Artificial Sequence
  Description of Artificial Sequence: Synthetic oligonucleotide
acccacucaacaucaucga

SEQ ID NO: 573084 - RNA, 19 nt, Artificial Sequence
  Description of Artificial Sequence: Synthetic oligonucleotide
gccuugauaacuucugaga

SEQ ID NO: 573085 - RNA, 19 nt, Artificial Sequence
  Description of Artificial Sequence: Synthetic oligonucleotide
uccguuuggagggugggau

SEQ ID NO: 573086 - RNA, 19 nt, Artificial Sequence
  Description of Artificial Sequence: Synthetic oligonucleotide
ucuugucccucguuccggu

SEQ ID NO: 573087 - RNA, 19 nt, Artificial Sequence
  Description of Artificial Sequence: Synthetic oligonucleotide
caaugggugugaccagaag

SEQ ID NO: 573088 - RNA, 19 nt, Artificial Sequence
  Description of Artificial Sequence: Synthetic oligonucleotide
agggcccauucauggugcc

SEQ ID NO: 573089 - RNA, 19 nt, Artificial Sequence
  Description of Artificial Sequence: Synthetic oligonucleotide
cugggugauggcaggcagc

SEQ ID NO: 573090 - RNA, 19 nt, Artificial Sequence
  Description of Artificial Sequence: Synthetic oligonucleotide
caccguguugggcagcuug

SEQ ID NO: 573091 - RNA, 19 nt, Artificial Sequence
  Description of Artificial Sequence: Synthetic oligonucleotide
  modified_base (8)..(8): a, c, u, g, unknown or other
cagccganaaagucaauaa

SEQ ID NO: 573092 - RNA, 19 nt, Artificial Sequence
  Description of Artificial Sequence: Synthetic oligonucleotide
cuguaucuagcagcuuggg

SEQ ID NO: 573093 - RNA, 19 nt, Artificial Sequence
  Description of Artificial Sequence: Synthetic oligonucleotide
ccuacccucagccaacagc

SEQ ID NO: 573094 - RNA, 19 nt, Artificial Sequence
  Description of Artificial Sequence: Synthetic oligonucleotide
ucucaccuacccucagcca

SEQ ID NO: 573095 - RNA, 19 nt, Artificial Sequence
  Description of Artificial Sequence: Synthetic oligonucleotide
aacaccgcucagucuuuau

SEQ ID NO: 573096 - RNA, 19 nt, Artificial Sequence
  Description of Artificial Sequence: Synthetic oligonucleotide
uggcugucacucaugccuc

SEQ ID NO: 573097 - RNA, 19 nt, Artificial Sequence
  Description of Artificial Sequence: Synthetic oligonucleotide
cucgucugagauguccagc

SEQ ID NO: 573098 - RNA, 19 nt, Artificial Sequence
  Description of Artificial Sequence: Synthetic oligonucleotide
uggccaaaguggucacuug

SEQ ID NO: 573099 - RNA, 19 nt, Artificial Sequence
  Description of Artificial Sequence: Synthetic oligonucleotide
caccucaguguaaagccca

SEQ ID NO: 573100 - RNA, 19 nt, Artificial Sequence
  Description of Artificial Sequence: Synthetic oligonucleotide
ccauugacaggagacagug

SEQ ID NO: 573101 - RNA, 19 nt, Artificial Sequence
  Description of Artificial Sequence: Synthetic oligonucleotide
gacaucucaccuacccuca

SEQ ID NO: 573102 - RNA, 19 nt, Artificial Sequence
  Description of Artificial Sequence: Synthetic oligonucleotide
guguaaagcccacccugac

SEQ ID NO: 573103 - RNA, 19 nt, Artificial Sequence
  Description of Artificial Sequence: Synthetic oligonucleotide
cgcucagucuuuauggacc

SEQ ID NO: 573104 - RNA, 19 nt, Artificial Sequence
  Description of Artificial Sequence: Synthetic oligonucleotide
uuccgguucuugagggccu

SEQ ID NO: 573105 - RNA, 19 nt, Artificial Sequence
  Description of Artificial Sequence: Synthetic oligonucleotide
ggggucugcucuaugcugg

SEQ ID NO: 573106 - RNA, 19 nt, Artificial Sequence
  Description of Artificial Sequence: Synthetic oligonucleotide
ggaaacaccgcucagucuu

SEQ ID NO: 573107 - RNA, 19 nt, Artificial Sequence
  Description of Artificial Sequence: Synthetic oligonucleotide
ggaugaccuccccucaacc

SEQ ID NO: 573108 - RNA, 19 nt, Artificial Sequence
  Description of Artificial Sequence: Synthetic oligonucleotide
  modified_base (4)..(4): a, c, u, g, unknown or other
cganaaagucaauaaccuc

SEQ ID NO: 573109 - RNA, 19 nt, Artificial Sequence
  Description of Artificial Sequence: Synthetic oligonucleotide
cucaugccuccguuuggag

SEQ ID NO: 573110 - RNA, 19 nt, Artificial Sequence
  Description of Artificial Sequence: Synthetic oligonucleotide
  modified_base (3)..(3): a, c, u, g, unknown or other
  modified_base (17)..(17): a, c, u, g, unknown or other
acnccaggacagccganaa

SEQ ID NO: 573111 - RNA, 19 nt, Artificial Sequence
  Description of Artificial Sequence: Synthetic oligonucleotide
agaaagaaggcugccccua

SEQ ID NO: 573112 - RNA, 19 nt, Artificial Sequence
  Description of Artificial Sequence: Synthetic oligonucleotide
uggcggguagaaagugcca

SEQ ID NO: 573113 - RNA, 19 nt, Artificial Sequence
  Description of Artificial Sequence: Synthetic oligonucleotide
guuuuccccuauccugcug

SEQ ID NO: 573114 - RNA, 19 nt, Artificial Sequence
  Description of Artificial Sequence: Synthetic oligonucleotide
gaugagcaaugggugugac

SEQ ID NO: 573115 - RNA, 19 nt, Artificial Sequence
  Description of Artificial Sequence: Synthetic oligonucleotide
ugccaugaagguugacuuu

SEQ ID NO: 573116 - RNA, 19 nt, Artificial Sequence
  Description of Artificial Sequence: Synthetic oligonucleotide
guggaaccgauccaaggcu

SEQ ID NO: 573117 - RNA, 19 nt, Artificial Sequence
  Description of Artificial Sequence: Synthetic oligonucleotide
caaaagcaccacccuucac

SEQ ID NO: 573118 - RNA, 19 nt, Artificial Sequence
  Description of Artificial Sequence: Synthetic oligonucleotide
uggguagagacuggauguc

SEQ ID NO: 573119 - RNA, 19 nt, Artificial Sequence
  Description of Artificial Sequence: Synthetic oligonucleotide
cauagggcguguccagguc

SEQ ID NO: 573120 - RNA, 19 nt, Artificial Sequence
  Description of Artificial Sequence: Synthetic oligonucleotide
gaguacauuucagaccccu

SEQ ID NO: 573121 - RNA, 19 nt, Artificial Sequence
  Description of Artificial Sequence: Synthetic oligonucleotide
acccucuaacuugaccuug

SEQ ID NO: 573122 - RNA, 19 nt, Artificial Sequence
  Description of Artificial Sequence: Synthetic oligonucleotide
ugaaccccggacagccuua

SEQ ID NO: 573123 - RNA, 19 nt, Artificial Sequence
  Description of Artificial Sequence: Synthetic oligonucleotide
  modified_base (5)..(5): a, c, u, g, unknown or other
ccganaaagucaauaaccu

SEQ ID NO: 573124 - RNA, 19 nt, Artificial Sequence
  Description of Artificial Sequence: Synthetic oligonucleotide
cucccacugaaccccggac

SEQ ID NO: 573125 - RNA, 19 nt, Artificial Sequence
  Description of Artificial Sequence: Synthetic oligonucleotide
uggugacccuuucccuccc

SEQ ID NO: 573126 - RNA, 19 nt, Artificial Sequence
  Description of Artificial Sequence: Synthetic oligonucleotide
gcgguugucagggaugagc

SEQ ID NO: 573127 - RNA, 19 nt, Artificial Sequence
  Description of Artificial Sequence: Synthetic oligonucleotide
gauccaaggcuggaguaua

SEQ ID NO: 573128 - RNA, 19 nt, Artificial Sequence
  Description of Artificial Sequence: Synthetic oligonucleotide
aucuugcguaggcucggga

SEQ ID NO: 573129 - RNA, 19 nt, Artificial Sequence
  Description of Artificial Sequence: Synthetic oligonucleotide
gggugugaccagaaggagc

SEQ ID NO: 573130 - RNA, 19 nt, Artificial Sequence
  Description of Artificial Sequence: Synthetic oligonucleotide
ggauggaaggccgaggcaa

SEQ ID NO: 573131 - RNA, 19 nt, Artificial Sequence
  Description of Artificial Sequence: Synthetic oligonucleotide
caucaucgaugcccucgcc

SEQ ID NO: 573132 - RNA, 19 nt, Artificial Sequence
  Description of Artificial Sequence: Synthetic oligonucleotide
cucaaccagaaggcaacuc

SEQ ID NO: 573133 - RNA, 19 nt, Artificial Sequence
  Description of Artificial Sequence: Synthetic oligonucleotide
guaggcucgggaagucacc

SEQ ID NO: 573134 - RNA, 19 nt, Artificial Sequence
  Description of Artificial Sequence: Synthetic oligonucleotide
agauggugguuuuccuauu

SEQ ID NO: 573135 - RNA, 19 nt, Artificial Sequence
  Description of Artificial Sequence: Synthetic oligonucleotide
auccaaggcuggaguauag

SEQ ID NO: 573136 - RNA, 19 nt, Artificial Sequence
  Description of Artificial Sequence: Synthetic oligonucleotide
gugcacaaaaucccacugu

SEQ ID NO: 573137 - RNA, 19 nt, Artificial Sequence
  Description of Artificial Sequence: Synthetic oligonucleotide
caccacccuucacagcuug

SEQ ID NO: 573138 - RNA, 19 nt, Artificial Sequence
  Description of Artificial Sequence: Synthetic oligonucleotide
gcaaggagcuggcggguag

SEQ ID NO: 573139 - RNA, 19 nt, Artificial Sequence
  Description of Artificial Sequence: Synthetic oligonucleotide
cucuaacuugaccuugaua

SEQ ID NO: 573140 - RNA, 19 nt, Artificial Sequence
  Description of Artificial Sequence: Synthetic oligonucleotide
caucuugcguaggcucggg

SEQ ID NO: 573141 - RNA, 19 nt, Artificial Sequence
  Description of Artificial Sequence: Synthetic oligonucleotide
ggaguugggaugaccuccc

SEQ ID NO: 573142 - RNA, 19 nt, Artificial Sequence
  Description of Artificial Sequence: Synthetic oligonucleotide
ccucguuccgguucuugag

SEQ ID NO: 573143 - RNA, 19 nt, Artificial Sequence
  Description of Artificial Sequence: Synthetic oligonucleotide
aucagccgggcuaugucgu

SEQ ID NO: 573144 - RNA, 19 nt, Artificial Sequence
  Description of Artificial Sequence: Synthetic oligonucleotide
  modified_base (2)..(2): a, c, u, g, unknown or other
  modified_base (16)..(16): a, c, u, g, unknown or other
cnccaggacagccganaaa

SEQ ID NO: 573145 - RNA, 19 nt, Artificial Sequence
  Description of Artificial Sequence: Synthetic oligonucleotide
gagggaagggguuggguuu

SEQ ID NO: 573146 - RNA, 19 nt, Artificial Sequence
  Description of Artificial Sequence: Synthetic oligonucleotide
cugccaugaagguugacuu

SEQ ID NO: 573147 - RNA, 19 nt, Artificial Sequence
  Description of Artificial Sequence: Synthetic oligonucleotide
accuacccucagccaacag

SEQ ID NO: 573148 - RNA, 19 nt, Artificial Sequence
  Description of Artificial Sequence: Synthetic oligonucleotide
ccccuaacauuauauauua

SEQ ID NO: 573149 - RNA, 19 nt, Artificial Sequence
  Description of Artificial Sequence: Synthetic oligonucleotide
cugugagguggaaccgauc

SEQ ID NO: 573150 - RNA, 19 nt, Artificial Sequence
  Description of Artificial Sequence: Synthetic oligonucleotide
guagcucaugacccucuaa

SEQ ID NO: 573151 - RNA, 19 nt, Artificial Sequence
  Description of Artificial Sequence: Synthetic oligonucleotide
ugccaaccacccacucaac

SEQ ID NO: 573152 - RNA, 19 nt, Artificial Sequence
  Description of Artificial Sequence: Synthetic oligonucleotide
ggcauuagcgccagugauc

SEQ ID NO: 573153 - RNA, 19 nt, Artificial Sequence
  Description of Artificial Sequence: Synthetic oligonucleotide
gaaccgauccaaggcugga

SEQ ID NO: 573154 - RNA, 19 nt, Artificial Sequence
  Description of Artificial Sequence: Synthetic oligonucleotide
caucacccaugccucccac

SEQ ID NO: 573155 - RNA, 19 nt, Artificial Sequence
  Description of Artificial Sequence: Synthetic oligonucleotide
aaacaccgcucagucuuua

SEQ ID NO: 573156 - RNA, 19 nt, Artificial Sequence
  Description of Artificial Sequence: Synthetic oligonucleotide
acuggccauagggcguguc

SEQ ID NO: 573157 - RNA, 19 nt, Artificial Sequence
  Description of Artificial Sequence: Synthetic oligonucleotide
gggaugaccuccccucaac

SEQ ID NO: 573158 - RNA, 19 nt, Artificial Sequence
  Description of Artificial Sequence: Synthetic oligonucleotide
cacauccaagcaucaccca

SEQ ID NO: 573159 - RNA, 19 nt, Artificial Sequence
  Description of Artificial Sequence: Synthetic oligonucleotide
  modified_base (4)..(4): a, c, u, g, unknown or other
  modified_base (18)..(18): a, c, u, g, unknown or other
cacnccaggacagccgana

SEQ ID NO: 573160 - RNA, 19 nt, Artificial Sequence
  Description of Artificial Sequence: Synthetic oligonucleotide
agguuguucaccagcucuu

SEQ ID NO: 573161 - RNA, 19 nt, Artificial Sequence
  Description of Artificial Sequence: Synthetic oligonucleotide
ggcuaugucguuggccagc

SEQ ID NO: 573162 - RNA, 19 nt, Artificial Sequence
  Description of Artificial Sequence: Synthetic oligonucleotide
cugccccuaacauuauaua

SEQ ID NO: 573163 - RNA, 19 nt, Artificial Sequence
  Description of Artificial Sequence: Synthetic oligonucleotide
ucccucguuccgguucuug

SEQ ID NO: 573164 - RNA, 19 nt, Artificial Sequence
  Description of Artificial Sequence: Synthetic oligonucleotide
ccggacagccuuaaaagaa

SEQ ID NO: 573165 - RNA, 19 nt, Artificial Sequence
  Description of Artificial Sequence: Synthetic oligonucleotide
  modified_base (17)..(17): a, c, u, g, unknown or other
gcgcucagcaaaccacncc

SEQ ID NO: 573166 - RNA, 19 nt, Artificial Sequence
  Description of Artificial Sequence: Synthetic oligonucleotide
gcauuagcgccagugaucu

SEQ ID NO: 573167 - RNA, 19 nt, Artificial Sequence
  Description of Artificial Sequence: Synthetic oligonucleotide
gcugucacucaugccuccg

SEQ ID NO: 573168 - RNA, 19 nt, Artificial Sequence
  Description of Artificial Sequence: Synthetic oligonucleotide
cugccucgaagagcuugcg

SEQ ID NO: 573169 - RNA, 19 nt, Artificial Sequence
  Description of Artificial Sequence: Synthetic oligonucleotide
gccaaccacccacucaaca

SEQ ID NO: 573170 - RNA, 19 nt, Artificial Sequence
  Description of Artificial Sequence: Synthetic oligonucleotide
ugucguuggccagcauguc

SEQ ID NO: 573171 - RNA, 19 nt, Artificial Sequence
  Description of Artificial Sequence: Synthetic oligonucleotide
  modified_base (11)..(11): a, c, u, g, unknown or other
ggacagccganaaagucaa

SEQ ID NO: 573172 - RNA, 19 nt, Artificial Sequence
  Description of Artificial Sequence: Synthetic oligonucleotide
uagcgccagugaucuugcc

SEQ ID NO: 573173 - RNA, 19 nt, Artificial Sequence
  Description of Artificial Sequence: Synthetic oligonucleotide
cguaggcucgggaagucac

SEQ ID NO: 573174 - RNA, 19 nt, Artificial Sequence
  Description of Artificial Sequence: Synthetic oligonucleotide
ccgcucagucuuuauggac

SEQ ID NO: 573175 - RNA, 19 nt, Artificial Sequence
  Description of Artificial Sequence: Synthetic oligonucleotide
ccuugauaaggugguuggc

SEQ ID NO: 573176 - RNA, 19 nt, Artificial Sequence
  Description of Artificial Sequence: Synthetic oligonucleotide
ugcguaggcucgggaaguc

SEQ ID NO: 573177 - RNA, 19 nt, Artificial Sequence
  Description of Artificial Sequence: Synthetic oligonucleotide
agccaaccacuggccauag

SEQ ID NO: 573178 - RNA, 19 nt, Artificial Sequence
  Description of Artificial Sequence: Synthetic oligonucleotide
ccgcucgauuuucugguag

SEQ ID NO: 573179 - RNA, 19 nt, Artificial Sequence
  Description of Artificial Sequence: Synthetic oligonucleotide
gcuggcggguagaaagugc

SEQ ID NO: 573180 - RNA, 19 nt, Artificial Sequence
  Description of Artificial Sequence: Synthetic oligonucleotide
gagcuuccuaagggcagca

SEQ ID NO: 573181 - RNA, 19 nt, Artificial Sequence
  Description of Artificial Sequence: Synthetic oligonucleotide
ccuauccugcugcuuggac

SEQ ID NO: 573182 - RNA, 19 nt, Artificial Sequence
  Description of Artificial Sequence: Synthetic oligonucleotide
cacccagaccaggccacag

SEQ ID NO: 573183 - RNA, 19 nt, Artificial Sequence
  Description of Artificial Sequence: Synthetic oligonucleotide
cugcugcuuggacacuaca

SEQ ID NO: 573184 - RNA, 19 nt, Artificial Sequence
  Description of Artificial Sequence: Synthetic oligonucleotide
cccggacagccuuaaaaga

SEQ ID NO: 573185 - RNA, 19 nt, Artificial Sequence
  Description of Artificial Sequence: Synthetic oligonucleotide
cagccgggcuaugucguug

SEQ ID NO: 573186 - RNA, 19 nt, Artificial Sequence
  Description of Artificial Sequence: Synthetic oligonucleotide
gggauggaaggccgaggca

SEQ ID NO: 573187 - RNA, 19 nt, Artificial Sequence
  Description of Artificial Sequence: Synthetic oligonucleotide
gcuaugucguuggccagca

SEQ ID NO: 573188 - RNA, 19 nt, Artificial Sequence
  Description of Artificial Sequence: Synthetic oligonucleotide
cugcucuaugcuggcugug

SEQ ID NO: 573189 - RNA, 19 nt, Artificial Sequence
  Description of Artificial Sequence: Synthetic oligonucleotide
ggggaucucagaacaccca

SEQ ID NO: 573190 - RNA, 19 nt, Artificial Sequence
  Description of Artificial Sequence: Synthetic oligonucleotide
ggugacccuuucccucccc

SEQ ID NO: 573191 - RNA, 19 nt, Artificial Sequence
  Description of Artificial Sequence: Synthetic oligonucleotide
gucacucaugccuccguuu

SEQ ID NO: 573192 - RNA, 19 nt, Artificial Sequence
  Description of Artificial Sequence: Synthetic oligonucleotide
gguugucagggaugagcaa

SEQ ID NO: 573193 - RNA, 19 nt, Artificial Sequence
  Description of Artificial Sequence: Synthetic oligonucleotide
ccacccuucacagcuugug

SEQ ID NO: 573194 - RNA, 19 nt, Artificial Sequence
  Description of Artificial Sequence: Synthetic oligonucleotide
gcgccagugaucuugccau

SEQ ID NO: 573195 - RNA, 19 nt, Artificial Sequence
  Description of Artificial Sequence: Synthetic oligonucleotide
ccguuuggagggugggaug

SEQ ID NO: 573196 - RNA, 19 nt, Artificial Sequence
  Description of Artificial Sequence: Synthetic oligonucleotide
gccuccguuuggagggugg

SEQ ID NO: 573197 - RNA, 19 nt, Artificial Sequence
  Description of Artificial Sequence: Synthetic oligonucleotide
ccuccguuuggaggguggg

SEQ ID NO: 573198 - RNA, 19 nt, Artificial Sequence
  Description of Artificial Sequence: Synthetic oligonucleotide
agcuuccuaagggcagcau

SEQ ID NO: 573199 - RNA, 19 nt, Artificial Sequence
  Description of Artificial Sequence: Synthetic oligonucleotide
ccaaaguggucacuugcua

SEQ ID NO: 573200 - RNA, 19 nt, Artificial Sequence
  Description of Artificial Sequence: Synthetic oligonucleotide
gguugacuuuaagcgagua

SEQ ID NO: 573201 - RNA, 19 nt, Artificial Sequence
  Description of Artificial Sequence: Synthetic oligonucleotide
ccgggcuaugucguuggcc

SEQ ID NO: 573202 - RNA, 19 nt, Artificial Sequence
  Description of Artificial Sequence: Synthetic oligonucleotide
uccgguucuugagggccuu

SEQ ID NO: 573203 - RNA, 19 nt, Artificial Sequence
  Description of Artificial Sequence: Synthetic oligonucleotide
gcaucacccaugccuccca

SEQ ID NO: 573204 - RNA, 19 nt, Artificial Sequence
  Description of Artificial Sequence: Synthetic oligonucleotide
gcguguccaggucccugag

SEQ ID NO: 573205 - RNA, 19 nt, Artificial Sequence
  Description of Artificial Sequence: Synthetic oligonucleotide
cuccguuuggaggguggga

SEQ ID NO: 573206 - RNA, 19 nt, Artificial Sequence
  Description of Artificial Sequence: Synthetic oligonucleotide
accacccuucacagcuugu

SEQ ID NO: 573207 - RNA, 19 nt, Artificial Sequence
  Description of Artificial Sequence: Synthetic oligonucleotide
gccccuaacauuauauauu

SEQ ID NO: 573208 - RNA, 19 nt, Artificial Sequence
  Description of Artificial Sequence: Synthetic oligonucleotide
gguuuuccccuauccugcu

SEQ ID NO: 573209 - RNA, 19 nt, Artificial Sequence
  Description of Artificial Sequence: Synthetic oligonucleotide
gccaaaguggucacuugcu

SEQ ID NO: 573210 - RNA, 19 nt, Artificial Sequence
  Description of Artificial Sequence: Synthetic oligonucleotide
cagaccccucagagcagga

SEQ ID NO: 573211 - RNA, 19 nt, Artificial Sequence
  Description of Artificial Sequence: Synthetic oligonucleotide
cagccaaccacuggccaua

SEQ ID NO: 573212 - RNA, 19 nt, Artificial Sequence
  Description of Artificial Sequence: Synthetic oligonucleotide
cugaaccccggacagccuu

SEQ ID NO: 573213 - RNA, 19 nt, Artificial Sequence
  Description of Artificial Sequence: Synthetic oligonucleotide
ccccucaaccagaaggcaa

SEQ ID NO: 573214 - RNA, 19 nt, Artificial Sequence
  Description of Artificial Sequence: Synthetic oligonucleotide
ggccgaggcaaggagcuaa

SEQ ID NO: 573215 - RNA, 19 nt, Artificial Sequence
  Description of Artificial Sequence: Synthetic oligonucleotide
gaaacaccgcucagucuuu

SEQ ID NO: 573216 - RNA, 19 nt, Artificial Sequence
  Description of Artificial Sequence: Synthetic oligonucleotide
ccaccggcagugucagaug

SEQ ID NO: 573217 - RNA, 19 nt, Artificial Sequence
  Description of Artificial Sequence: Synthetic oligonucleotide
cuuggcgcaccaucaccau

SEQ ID NO: 573218 - RNA, 19 nt, Artificial Sequence
  Description of Artificial Sequence: Synthetic oligonucleotide
cgaguacauuucagacccc

SEQ ID NO: 573219 - RNA, 19 nt, Artificial Sequence
  Description of Artificial Sequence: Synthetic oligonucleotide
  modified_base (10)..(10): a, c, u, g, unknown or other
gacagccganaaagucaau

SEQ ID NO: 573220 - RNA, 19 nt, Artificial Sequence
  Description of Artificial Sequence: Synthetic oligonucleotide
ggguagagacuggaugucu

SEQ ID NO: 573221 - RNA, 19 nt, Artificial Sequence
  Description of Artificial Sequence: Synthetic oligonucleotide
caccuacccucagccaaca

SEQ ID NO: 573222 - RNA, 19 nt, Artificial Sequence
  Description of Artificial Sequence: Synthetic oligonucleotide
  modified_base (18)..(18): a, c, u, g, unknown or other
cgcgcucagcaaaccacnc

SEQ ID NO: 573223 - RNA, 19 nt, Artificial Sequence
  Description of Artificial Sequence: Synthetic oligonucleotide
cccauucauggugccauca

SEQ ID NO: 573224 - RNA, 19 nt, Artificial Sequence
  Description of Artificial Sequence: Synthetic oligonucleotide
gucaggcauggcugucacu

SEQ ID NO: 573225 - RNA, 19 nt, Artificial Sequence
  Description of Artificial Sequence: Synthetic oligonucleotide
ccgauccaaggcuggagua

SEQ ID NO: 573226 - RNA, 19 nt, Artificial Sequence
  Description of Artificial Sequence: Synthetic oligonucleotide
cacggaucuugucccucgu

SEQ ID NO: 573227 - RNA, 19 nt, Artificial Sequence
  Description of Artificial Sequence: Synthetic oligonucleotide
gccgaggcaaggagcuaac

SEQ ID NO: 573228 - RNA, 19 nt, Artificial Sequence
  Description of Artificial Sequence: Synthetic oligonucleotide
ggcugccccuaacauuaua

SEQ ID NO: 573229 - RNA, 19 nt, Artificial Sequence
  Description of Artificial Sequence: Synthetic oligonucleotide
gccgggcuaugucguuggc

SEQ ID NO: 573230 - RNA, 19 nt, Artificial Sequence
  Description of Artificial Sequence: Synthetic oligonucleotide
gcguaggcucgggaaguca

SEQ ID NO: 573231 - RNA, 19 nt, Artificial Sequence
  Description of Artificial Sequence: Synthetic oligonucleotide
cuugucccucguuccgguu

SEQ ID NO: 573232 - RNA, 19 nt, Artificial Sequence
  Description of Artificial Sequence: Synthetic oligonucleotide
gcugugagguggaaccgau

SEQ ID NO: 573233 - RNA, 19 nt, Artificial Sequence
  Description of Artificial Sequence: Synthetic oligonucleotide
caagcccaaggggucugcu

SEQ ID NO: 573234 - RNA, 19 nt, Artificial Sequence
  Description of Artificial Sequence: Synthetic oligonucleotide
aggcugccccuaacauuau

SEQ ID NO: 573235 - RNA, 19 nt, Artificial Sequence
  Description of Artificial Sequence: Synthetic oligonucleotide
cauggaccuuggccagccu

SEQ ID NO: 573236 - RNA, 19 nt, Artificial Sequence
  Description of Artificial Sequence: Synthetic oligonucleotide
cccaccggcagugucagau

SEQ ID NO: 573237 - RNA, 19 nt, Artificial Sequence
  Description of Artificial Sequence: Synthetic oligonucleotide
ggcaaggagcuggcgggua

SEQ ID NO: 573238 - RNA, 19 nt, Artificial Sequence
  Description of Artificial Sequence: Synthetic oligonucleotide
gggugauggcaggcagcuc

SEQ ID NO: 573239 - RNA, 19 nt, Artificial Sequence
  Description of Artificial Sequence: Synthetic oligonucleotide
cuaugucguuggccagcau

SEQ ID NO: 573240 - RNA, 19 nt, Artificial Sequence
  Description of Artificial Sequence: Synthetic oligonucleotide
  modified_base (5)..(5): a, c, u, g, unknown or other
  modified_base (19)..(19): a, c, u, g, unknown or other
ccacnccaggacagccgan

SEQ ID NO: 573241 - RNA, 19 nt, Artificial Sequence
  Description of Artificial Sequence: Synthetic oligonucleotide
cauuagcgccagugaucuu

SEQ ID NO: 573242 - RNA, 19 nt, Artificial Sequence
  Description of Artificial Sequence: Synthetic oligonucleotide
ccucuaacuugaccuugau

SEQ ID NO: 573243 - RNA, 19 nt, Artificial Sequence
  Description of Artificial Sequence: Synthetic oligonucleotide
cccgcucgauuuucuggua

SEQ ID NO: 573244 - RNA, 19 nt, Artificial Sequence
  Description of Artificial Sequence: Synthetic oligonucleotide
ccucaaccagaaggcaacu

SEQ ID NO: 573245 - RNA, 19 nt, Artificial Sequence
  Description of Artificial Sequence: Synthetic oligonucleotide
caugcccaaagggcccauu

SEQ ID NO: 573246 - RNA, 19 nt, Artificial Sequence
  Description of Artificial Sequence: Synthetic oligonucleotide
cgauccaaggcuggaguau

SEQ ID NO: 573247 - RNA, 19 nt, Artificial Sequence
  Description of Artificial Sequence: Synthetic oligonucleotide
gcccaccggcagugucaga

SEQ ID NO: 573248 - RNA, 19 nt, Artificial Sequence
  Description of Artificial Sequence: Synthetic oligonucleotide
cgccguagccaugcccaaa

SEQ ID NO: 573249 - RNA, 19 nt, Artificial Sequence
  Description of Artificial Sequence: Synthetic oligonucleotide
gucccucguuccgguucuu

SEQ ID NO: 573250 - RNA, 19 nt, Artificial Sequence
  Description of Artificial Sequence: Synthetic oligonucleotide
cgccagugaucuugccauu

SEQ ID NO: 573251 - RNA, 19 nt, Artificial Sequence
  Description of Artificial Sequence: Synthetic oligonucleotide
gcaccguguugggcagcuu

SEQ ID NO: 573252 - RNA, 19 nt, Artificial Sequence
  Description of Artificial Sequence: Synthetic oligonucleotide
aaauaugagaucuaggugg

SEQ ID NO: 573253 - RNA, 19 nt, Artificial Sequence
  Description of Artificial Sequence: Synthetic oligonucleotide
aagacaacuagguagagac

SEQ ID NO: 573254 - RNA, 19 nt, Artificial Sequence
  Description of Artificial Sequence: Synthetic oligonucleotide
aaucccuagaacuugauac

SEQ ID NO: 573255 - RNA, 19 nt, Artificial Sequence
  Description of Artificial Sequence: Synthetic oligonucleotide
aauuauucauacuuaauug

SEQ ID NO: 573256 - RNA, 19 nt, Artificial Sequence
  Description of Artificial Sequence: Synthetic oligonucleotide
auauauauauaucuaauag

SEQ ID NO: 573257 - RNA, 19 nt, Artificial Sequence
  Description of Artificial Sequence: Synthetic oligonucleotide
aauuagaugaugaugcagc

SEQ ID NO: 573258 - RNA, 19 nt, Artificial Sequence
  Description of Artificial Sequence: Synthetic oligonucleotide
guaaucaugacauugucgg

SEQ ID NO: 573259 - RNA, 19 nt, Artificial Sequence
  Description of Artificial Sequence: Synthetic oligonucleotide
accagaauuaauuuuggcc

SEQ ID NO: 573260 - RNA, 19 nt, Artificial Sequence
  Description of Artificial Sequence: Synthetic oligonucleotide
auuuuauauauauauaucu

SEQ ID NO: 573261 - RNA, 19 nt, Artificial Sequence
  Description of Artificial Sequence: Synthetic oligonucleotide
acuagcaagagacuaauac

SEQ ID NO: 573262 - RNA, 19 nt, Artificial Sequence
  Description of Artificial Sequence: Synthetic oligonucleotide
aaacaugagauuugcuggc

SEQ ID NO: 573263 - RNA, 19 nt, Artificial Sequence
  Description of Artificial Sequence: Synthetic oligonucleotide
ucuuaaaugaaguuaggca

SEQ ID NO: 573264 - RNA, 19 nt, Artificial Sequence
  Description of Artificial Sequence: Synthetic oligonucleotide
ucauuuuauauauauauau

SEQ ID NO: 573265 - RNA, 19 nt, Artificial Sequence
  Description of Artificial Sequence: Synthetic oligonucleotide
uuuauauauauauaucuaa

SEQ ID NO: 573266 - RNA, 19 nt, Artificial Sequence
  Description of Artificial Sequence: Synthetic oligonucleotide
ugcaagguuaauaaaucgg

SEQ ID NO: 573267 - RNA, 19 nt, Artificial Sequence
  Description of Artificial Sequence: Synthetic oligonucleotide
uacaguaaucguaacacag

SEQ ID NO: 573268 - RNA, 19 nt, Artificial Sequence
  Description of Artificial Sequence: Synthetic oligonucleotide
ugacagauaugaaaugugg

SEQ ID NO: 573269 - RNA, 19 nt, Artificial Sequence
  Description of Artificial Sequence: Synthetic oligonucleotide
auagcuuuugauuacauau

SEQ ID NO: 573270 - RNA, 19 nt, Artificial Sequence
  Description of Artificial Sequence: Synthetic oligonucleotide
aauaaaucggacacgagug

SEQ ID NO: 573271 - RNA, 19 nt, Artificial Sequence
  Description of Artificial Sequence: Synthetic oligonucleotide
uaugauuuuggcuaagaga

SEQ ID NO: 573272 - RNA, 19 nt, Artificial Sequence
  Description of Artificial Sequence: Synthetic oligonucleotide
aauaucuacaguaaucaug

SEQ ID NO: 573273 - RNA, 19 nt, Artificial Sequence
  Description of Artificial Sequence: Synthetic oligonucleotide
ugaauaugaagaaggaacu

SEQ ID NO: 573274 - RNA, 19 nt, Artificial Sequence
  Description of Artificial Sequence: Synthetic oligonucleotide
uguauuuaaaccacuucca

SEQ ID NO: 573275 - RNA, 19 nt, Artificial Sequence
  Description of Artificial Sequence: Synthetic oligonucleotide
ugaaguuucgagaucuucc

SEQ ID NO: 573276 - RNA, 19 nt, Artificial Sequence
  Description of Artificial Sequence: Synthetic oligonucleotide
aguuaaaagguccagcuga

SEQ ID NO: 573277 - RNA, 19 nt, Artificial Sequence
  Description of Artificial Sequence: Synthetic oligonucleotide
aaccagaauuaauuuuggc

SEQ ID NO: 573278 - RNA, 19 nt, Artificial Sequence
  Description of Artificial Sequence: Synthetic oligonucleotide
uuauauauauauaucuaau

SEQ ID NO: 573279 - RNA, 19 nt, Artificial Sequence
  Description of Artificial Sequence: Synthetic oligonucleotide
agugcaguaagacaacuag

SEQ ID NO: 573280 - RNA, 19 nt, Artificial Sequence
  Description of Artificial Sequence: Synthetic oligonucleotide
uuuuauauauauauaucua

SEQ ID NO: 573281 - RNA, 19 nt, Artificial Sequence
  Description of Artificial Sequence: Synthetic oligonucleotide
ugaaggaauaauaucuaca

SEQ ID NO: 573282 - RNA, 19 nt, Artificial Sequence
  Description of Artificial Sequence: Synthetic oligonucleotide
uuaucuacuuuucccauca

SEQ ID NO: 573283 - RNA, 19 nt, Artificial Sequence
  Description of Artificial Sequence: Synthetic oligonucleotide
uauauauauauaucuaaua

SEQ ID NO: 573284 - RNA, 19 nt, Artificial Sequence
  Description of Artificial Sequence: Synthetic oligonucleotide
aauucaacuguaaagugcu

SEQ ID NO: 573285 - RNA, 19 nt, Artificial Sequence
  Description of Artificial Sequence: Synthetic oligonucleotide
auaaaucggacacgagugc

SEQ ID NO: 573286 - RNA, 19 nt, Artificial Sequence
  Description of Artificial Sequence: Synthetic oligonucleotide
gaagucaagguucuuggag

SEQ ID NO: 573287 - RNA, 19 nt, Artificial Sequence
  Description of Artificial Sequence: Synthetic oligonucleotide
auucauacuuaauugccag

SEQ ID NO: 573288 - RNA, 19 nt, Artificial Sequence
  Description of Artificial Sequence: Synthetic oligonucleotide
gugaauaugaagaaggaac

SEQ ID NO: 573289 - RNA, 19 nt, Artificial Sequence
  Description of Artificial Sequence: Synthetic oligonucleotide
guuucgaaaagauugguga

SEQ ID NO: 573290 - RNA, 19 nt, Artificial Sequence
  Description of Artificial Sequence: Synthetic oligonucleotide
aagaaaucuaaaucccuga

SEQ ID NO: 573291 - RNA, 19 nt, Artificial Sequence
  Description of Artificial Sequence: Synthetic oligonucleotide
uucuacauaagucuccuuc

SEQ ID NO: 573292 - RNA, 19 nt, Artificial Sequence
  Description of Artificial Sequence: Synthetic oligonucleotide
uauucauacuuaauugcca

SEQ ID NO: 573293 - RNA, 19 nt, Artificial Sequence
  Description of Artificial Sequence: Synthetic oligonucleotide
ucuauguaguucaugaaua

SEQ ID NO: 573294 - RNA, 19 nt, Artificial Sequence
  Description of Artificial Sequence: Synthetic oligonucleotide
aauugaugagcauugcuua

SEQ ID NO: 573295 - RNA, 19 nt, Artificial Sequence
  Description of Artificial Sequence: Synthetic oligonucleotide
uccaauauuucucccagcu

SEQ ID NO: 573296 - RNA, 19 nt, Artificial Sequence
  Description of Artificial Sequence: Synthetic oligonucleotide
aagaugaugcuccacuacu

SEQ ID NO: 573297 - RNA, 19 nt, Artificial Sequence
  Description of Artificial Sequence: Synthetic oligonucleotide
cauuuuauauauauauauc

SEQ ID NO: 573298 - RNA, 19 nt, Artificial Sequence
  Description of Artificial Sequence: Synthetic oligonucleotide
ugcuagaaucccuagaacu

SEQ ID NO: 573299 - RNA, 19 nt, Artificial Sequence
  Description of Artificial Sequence: Synthetic oligonucleotide
aauaaacauguucacggau

SEQ ID NO: 573300 - RNA, 19 nt, Artificial Sequence
  Description of Artificial Sequence: Synthetic oligonucleotide
cauaagugcaguaagacaa

SEQ ID NO: 573301 - RNA, 19 nt, Artificial Sequence
  Description of Artificial Sequence: Synthetic oligonucleotide
ugaucuuguauucaaggaa

SEQ ID NO: 573302 - RNA, 19 nt, Artificial Sequence
  Description of Artificial Sequence: Synthetic oligonucleotide
uaaacauguucacggauca

SEQ ID NO: 573303 - RNA, 19 nt, Artificial Sequence
  Description of Artificial Sequence: Synthetic oligonucleotide
acuagguagagaccagagc

SEQ ID NO: 573304 - RNA, 19 nt, Artificial Sequence
  Description of Artificial Sequence: Synthetic oligonucleotide
uacaguaaucaugacauug

SEQ ID NO: 573305 - RNA, 19 nt, Artificial Sequence
  Description of Artificial Sequence: Synthetic oligonucleotide
aguaccauugaugaagauc

SEQ ID NO: 573306 - RNA, 19 nt, Artificial Sequence
  Description of Artificial Sequence: Synthetic oligonucleotide
ugaauucaacuguaaagug

SEQ ID NO: 573307 - RNA, 19 nt, Artificial Sequence
  Description of Artificial Sequence: Synthetic oligonucleotide
ugauuccugauuaaaauuu

SEQ ID NO: 573308 - RNA, 19 nt, Artificial Sequence
  Description of Artificial Sequence: Synthetic oligonucleotide
ucucuuaucaagucgguuc

SEQ ID NO: 573309 - RNA, 19 nt, Artificial Sequence
  Description of Artificial Sequence: Synthetic oligonucleotide
aaguugugaaaucaccacu

SEQ ID NO: 573310 - RNA, 19 nt, Artificial Sequence
  Description of Artificial Sequence: Synthetic oligonucleotide
aaaaguagaugacaugcua

SEQ ID NO: 573311 - RNA, 19 nt, Artificial Sequence
  Description of Artificial Sequence: Synthetic oligonucleotide
uguuucgaaaagauuggug

SEQ ID NO: 573312 - RNA, 19 nt, Artificial Sequence
  Description of Artificial Sequence: Synthetic oligonucleotide
aggaauccugacuagaucu

SEQ ID NO: 573313 - RNA, 19 nt, Artificial Sequence
  Description of Artificial Sequence: Synthetic oligonucleotide
caaaccggaauaaggaacc

SEQ ID NO: 573314 - RNA, 19 nt, Artificial Sequence
  Description of Artificial Sequence: Synthetic oligonucleotide
auaucuacaguaaucauga

SEQ ID NO: 573315 - RNA, 19 nt, Artificial Sequence
  Description of Artificial Sequence: Synthetic oligonucleotide
aaguagaugacaugcuaga

SEQ ID NO: 573316 - RNA, 19 nt, Artificial Sequence
  Description of Artificial Sequence: Synthetic oligonucleotide
auuggugauugguagauga

SEQ ID NO: 573317 - RNA, 19 nt, Artificial Sequence
  Description of Artificial Sequence: Synthetic oligonucleotide
auaucaaauguucuguuau

SEQ ID NO: 573318 - RNA, 19 nt, Artificial Sequence
  Description of Artificial Sequence: Synthetic oligonucleotide
agaucuaggugguacaucu

SEQ ID NO: 573319 - RNA, 19 nt, Artificial Sequence
  Description of Artificial Sequence: Synthetic oligonucleotide
gucaauuggugauugguag

SEQ ID NO: 573320 - RNA, 19 nt, Artificial Sequence
  Description of Artificial Sequence: Synthetic oligonucleotide
cauccauuugucuuaaaug

SEQ ID NO: 573321 - RNA, 19 nt, Artificial Sequence
  Description of Artificial Sequence: Synthetic oligonucleotide
uuucagaacucagugaucu

SEQ ID NO: 573322 - RNA, 19 nt, Artificial Sequence
  Description of Artificial Sequence: Synthetic oligonucleotide
uugacuaugccuccaagaa

SEQ ID NO: 573323 - RNA, 19 nt, Artificial Sequence
  Description of Artificial Sequence: Synthetic oligonucleotide
uuugucuuaaaugaaguua

SEQ ID NO: 573324 - RNA, 19 nt, Artificial Sequence
  Description of Artificial Sequence: Synthetic oligonucleotide
auaaccacgguccuguacu

SEQ ID NO: 573325 - RNA, 19 nt, Artificial Sequence
  Description of Artificial Sequence: Synthetic oligonucleotide
cuugauacuguuuugaugu

SEQ ID NO: 573326 - RNA, 19 nt, Artificial Sequence
  Description of Artificial Sequence: Synthetic oligonucleotide
gugguuacagcuucuaaag

SEQ ID NO: 573327 - RNA, 19 nt, Artificial Sequence
  Description of Artificial Sequence: Synthetic oligonucleotide
agucgguuccaaaugaacc

SEQ ID NO: 573328 - RNA, 19 nt, Artificial Sequence
  Description of Artificial Sequence: Synthetic oligonucleotide
gauuacuuccgagugcugg

SEQ ID NO: 573329 - RNA, 19 nt, Artificial Sequence
  Description of Artificial Sequence: Synthetic oligonucleotide
agcucuauguaguucauga

SEQ ID NO: 573330 - RNA, 19 nt, Artificial Sequence
  Description of Artificial Sequence: Synthetic oligonucleotide
uucagaaggucaauuggug

SEQ ID NO: 573331 - RNA, 19 nt, Artificial Sequence
  Description of Artificial Sequence: Synthetic oligonucleotide
uuuguucacauaagugcag

SEQ ID NO: 573332 - RNA, 19 nt, Artificial Sequence
  Description of Artificial Sequence: Synthetic oligonucleotide
uucauuuuauauauauaua

SEQ ID NO: 573333 - RNA, 19 nt, Artificial Sequence
  Description of Artificial Sequence: Synthetic oligonucleotide
ugcuaauggaggaaucugc

SEQ ID NO: 573334 - RNA, 19 nt, Artificial Sequence
  Description of Artificial Sequence: Synthetic oligonucleotide
gaaguugugaaaucaccac

SEQ ID NO: 573335 - RNA, 19 nt, Artificial Sequence
  Description of Artificial Sequence: Synthetic oligonucleotide
ugauuguaauccauaagau

SEQ ID NO: 573336 - RNA, 19 nt, Artificial Sequence
  Description of Artificial Sequence: Synthetic oligonucleotide
acagauaugaaauguggau

SEQ ID NO: 573337 - RNA, 19 nt, Artificial Sequence
  Description of Artificial Sequence: Synthetic oligonucleotide
uucccaucauaucagaaaa

SEQ ID NO: 573338 - RNA, 19 nt, Artificial Sequence
  Description of Artificial Sequence: Synthetic oligonucleotide
aacaugagauuugcuggcc

SEQ ID NO: 573339 - RNA, 19 nt, Artificial Sequence
  Description of Artificial Sequence: Synthetic oligonucleotide
ucuacauaagucuccuucu

SEQ ID NO: 573340 - RNA, 19 nt, Artificial Sequence
  Description of Artificial Sequence: Synthetic oligonucleotide
ugucuuaaaugaaguuagg

SEQ ID NO: 573341 - RNA, 19 nt, Artificial Sequence
  Description of Artificial Sequence: Synthetic oligonucleotide
uugcaugagcucuauguag

SEQ ID NO: 573342 - RNA, 19 nt, Artificial Sequence
  Description of Artificial Sequence: Synthetic oligonucleotide
aguugcaacuucucuuuac

SEQ ID NO: 573343 - RNA, 19 nt, Artificial Sequence
  Description of Artificial Sequence: Synthetic oligonucleotide
aagcuuuguucacauaagu

SEQ ID NO: 573344 - RNA, 19 nt, Artificial Sequence
  Description of Artificial Sequence: Synthetic oligonucleotide
uuaauaaaucggacacgag

SEQ ID NO: 573345 - RNA, 19 nt, Artificial Sequence
  Description of Artificial Sequence: Synthetic oligonucleotide
auucaaggaauccugacua

SEQ ID NO: 573346 - RNA, 19 nt, Artificial Sequence
  Description of Artificial Sequence: Synthetic oligonucleotide
aagauaaccacgguccugu

SEQ ID NO: 573347 - RNA, 19 nt, Artificial Sequence
  Description of Artificial Sequence: Synthetic oligonucleotide
acugcaaaccggaauaagg

SEQ ID NO: 573348 - RNA, 19 nt, Artificial Sequence
  Description of Artificial Sequence: Synthetic oligonucleotide
ucgaaaagauuggugauug

SEQ ID NO: 573349 - RNA, 19 nt, Artificial Sequence
  Description of Artificial Sequence: Synthetic oligonucleotide
caaauucuacauaagucuc

SEQ ID NO: 573350 - RNA, 19 nt, Artificial Sequence
  Description of Artificial Sequence: Synthetic oligonucleotide
uaauaaacauguucacgga

SEQ ID NO: 573351 - RNA, 19 nt, Artificial Sequence
  Description of Artificial Sequence: Synthetic oligonucleotide
ucagauuacuuccgagugc

SEQ ID NO: 573352 - RNA, 19 nt, Artificial Sequence
  Description of Artificial Sequence: Synthetic oligonucleotide
guuaauaaaucggacacga

SEQ ID NO: 573353 - RNA, 19 nt, Artificial Sequence
  Description of Artificial Sequence: Synthetic oligonucleotide
aaguacauuuuaucugacu

SEQ ID NO: 573354 - RNA, 19 nt, Artificial Sequence
  Description of Artificial Sequence: Synthetic oligonucleotide
cucccugugaauaugaaga

SEQ ID NO: 573355 - RNA, 19 nt, Artificial Sequence
  Description of Artificial Sequence: Synthetic oligonucleotide
aaaucugguggggagccac

SEQ ID NO: 573356 - RNA, 19 nt, Artificial Sequence
  Description of Artificial Sequence: Synthetic oligonucleotide
uuucccaucauaucagaaa

SEQ ID NO: 573357 - RNA, 19 nt, Artificial Sequence
  Description of Artificial Sequence: Synthetic oligonucleotide
ugcaucuauuucuaaguga

SEQ ID NO: 573358 - RNA, 19 nt, Artificial Sequence
  Description of Artificial Sequence: Synthetic oligonucleotide
aauccugacuagaucuucg

SEQ ID NO: 573359 - RNA, 19 nt, Artificial Sequence
  Description of Artificial Sequence: Synthetic oligonucleotide
aagauuggugauugucuug

SEQ ID NO: 573360 - RNA, 19 nt, Artificial Sequence
  Description of Artificial Sequence: Synthetic oligonucleotide
gacaacuagguagagacca

SEQ ID NO: 573361 - RNA, 19 nt, Artificial Sequence
  Description of Artificial Sequence: Synthetic oligonucleotide
ggcucuaucaguaaauuag

SEQ ID NO: 573362 - RNA, 19 nt, Artificial Sequence
  Description of Artificial Sequence: Synthetic oligonucleotide
gucagauuacuuccgagug

SEQ ID NO: 573363 - RNA, 19 nt, Artificial Sequence
  Description of Artificial Sequence: Synthetic oligonucleotide
caagagacuaauacaaaca

SEQ ID NO: 573364 - RNA, 19 nt, Artificial Sequence
  Description of Artificial Sequence: Synthetic oligonucleotide
gagaccagagcugauaaac

SEQ ID NO: 573365 - RNA, 19 nt, Artificial Sequence
  Description of Artificial Sequence: Synthetic oligonucleotide
aagucgguuccaaaugaac

SEQ ID NO: 573366 - RNA, 19 nt, Artificial Sequence
  Description of Artificial Sequence: Synthetic oligonucleotide
gaaguuucgagaucuucca

SEQ ID NO: 573367 - RNA, 19 nt, Artificial Sequence
  Description of Artificial Sequence: Synthetic oligonucleotide
auuagaugaugaugcagcu

SEQ ID NO: 573368 - RNA, 19 nt, Artificial Sequence
  Description of Artificial Sequence: Synthetic oligonucleotide
uacuccgagacugugaagu

SEQ ID NO: 573369 - RNA, 19 nt, Artificial Sequence
  Description of Artificial Sequence: Synthetic oligonucleotide
ucuaaagaagaaccagaau

SEQ ID NO: 573370 - RNA, 19 nt, Artificial Sequence
  Description of Artificial Sequence: Synthetic oligonucleotide
aacuugauacuguuuugau

SEQ ID NO: 573371 - RNA, 19 nt, Artificial Sequence
  Description of Artificial Sequence: Synthetic oligonucleotide
cuagcaagagacuaauaca

SEQ ID NO: 573372 - RNA, 19 nt, Artificial Sequence
  Description of Artificial Sequence: Synthetic oligonucleotide
ucuagagaacaaaggugug

SEQ ID NO: 573373 - RNA, 19 nt, Artificial Sequence
  Description of Artificial Sequence: Synthetic oligonucleotide
acuguuucgaaaagauugg

SEQ ID NO: 573374 - RNA, 19 nt, Artificial Sequence
  Description of Artificial Sequence: Synthetic oligonucleotide
ccuaagaaaucuaaauccc

SEQ ID NO: 573375 - RNA, 19 nt, Artificial Sequence
  Description of Artificial Sequence: Synthetic oligonucleotide
gaaguuaggcaauaucaaa

SEQ ID NO: 573376 - RNA, 19 nt, Artificial Sequence
  Description of Artificial Sequence: Synthetic oligonucleotide
gucuuaaaugaaguuaggc

SEQ ID NO: 573377 - RNA, 19 nt, Artificial Sequence
  Description of Artificial Sequence: Synthetic oligonucleotide
auccauaagauugcuaaug

SEQ ID NO: 573378 - RNA, 19 nt, Artificial Sequence
  Description of Artificial Sequence: Synthetic oligonucleotide
aauccauaagauugcuaau

SEQ ID NO: 573379 - RNA, 19 nt, Artificial Sequence
  Description of Artificial Sequence: Synthetic oligonucleotide
aaggucaauuggugauugg

SEQ ID NO: 573380 - RNA, 19 nt, Artificial Sequence
  Description of Artificial Sequence: Synthetic oligonucleotide
gaguuaaaagguccagcug

SEQ ID NO: 573381 - RNA, 19 nt, Artificial Sequence
  Description of Artificial Sequence: Synthetic oligonucleotide
guucuugcaagguuaauaa

SEQ ID NO: 573382 - RNA, 19 nt, Artificial Sequence
  Description of Artificial Sequence: Synthetic oligonucleotide
ucgccuaagaaaucuaaau

SEQ ID NO: 573383 - RNA, 19 nt, Artificial Sequence
  Description of Artificial Sequence: Synthetic oligonucleotide
uuucgaaaagauuggugau

SEQ ID NO: 573384 - RNA, 19 nt, Artificial Sequence
  Description of Artificial Sequence: Synthetic oligonucleotide
ugcuagaagcuauucuuga

SEQ ID NO: 573385 - RNA, 19 nt, Artificial Sequence
  Description of Artificial Sequence: Synthetic oligonucleotide
ugugaauaugaagaaggaa

SEQ ID NO: 573386 - RNA, 19 nt, Artificial Sequence
  Description of Artificial Sequence: Synthetic oligonucleotide
uuccauaaauaugacuaca

SEQ ID NO: 573387 - RNA, 19 nt, Artificial Sequence
  Description of Artificial Sequence: Synthetic oligonucleotide
uuuaucuacuuuucccauc

SEQ ID NO: 573388 - RNA, 19 nt, Artificial Sequence
  Description of Artificial Sequence: Synthetic oligonucleotide
ugcuucaaggugaacuacu

SEQ ID NO: 573389 - RNA, 19 nt, Artificial Sequence
  Description of Artificial Sequence: Synthetic oligonucleotide
uucaaggaauccugacuag

SEQ ID NO: 573390 - RNA, 19 nt, Artificial Sequence
  Description of Artificial Sequence: Synthetic oligonucleotide
ugaaagaauuucugcuaga

SEQ ID NO: 573391 - RNA, 19 nt, Artificial Sequence
  Description of Artificial Sequence: Synthetic oligonucleotide
cuagguagagaccagagcu

SEQ ID NO: 573392 - RNA, 19 nt, Artificial Sequence
  Description of Artificial Sequence: Synthetic oligonucleotide
ucauugacuucagaagaug

SEQ ID NO: 573393 - RNA, 19 nt, Artificial Sequence
  Description of Artificial Sequence: Synthetic oligonucleotide
cuugauggacauacugcag

SEQ ID NO: 573394 - RNA, 19 nt, Artificial Sequence
  Description of Artificial Sequence: Synthetic oligonucleotide
auuacuuccgagugcuggu

SEQ ID NO: 573395 - RNA, 19 nt, Artificial Sequence
  Description of Artificial Sequence: Synthetic oligonucleotide
gaaggugcuacuuuuaguu

SEQ ID NO: 573396 - RNA, 19 nt, Artificial Sequence
  Description of Artificial Sequence: Synthetic oligonucleotide
caucuauuucuaagugagg

SEQ ID NO: 573397 - RNA, 19 nt, Artificial Sequence
  Description of Artificial Sequence: Synthetic oligonucleotide
uggugauugguagaugaug

SEQ ID NO: 573398 - RNA, 19 nt, Artificial Sequence
  Description of Artificial Sequence: Synthetic oligonucleotide
gcaagagacuaauacaaac

SEQ ID NO: 573399 - RNA, 19 nt, Artificial Sequence
  Description of Artificial Sequence: Synthetic oligonucleotide
ugaugagcauugcuuagau

SEQ ID NO: 573400 - RNA, 19 nt, Artificial Sequence
  Description of Artificial Sequence: Synthetic oligonucleotide
ucuaagugaggaagauaac

SEQ ID NO: 573401 - RNA, 19 nt, Artificial Sequence
  Description of Artificial Sequence: Synthetic oligonucleotide
ugcaaaccggaauaaggaa

SEQ ID NO: 573402 - RNA, 19 nt, Artificial Sequence
  Description of Artificial Sequence: Synthetic oligonucleotide
ugcucauugaauucucuuu

SEQ ID NO: 573403 - RNA, 19 nt, Artificial Sequence
  Description of Artificial Sequence: Synthetic oligonucleotide
aaucggacacgagugcuug

SEQ ID NO: 573404 - RNA, 19 nt, Artificial Sequence
  Description of Artificial Sequence: Synthetic oligonucleotide
uucgccuaagaaaucuaaa

SEQ ID NO: 573405 - RNA, 19 nt, Artificial Sequence
  Description of Artificial Sequence: Synthetic oligonucleotide
cuuguggucuguuggcagc

SEQ ID NO: 573406 - RNA, 19 nt, Artificial Sequence
  Description of Artificial Sequence: Synthetic oligonucleotide
gaaggucaauuggugauug

SEQ ID NO: 573407 - RNA, 19 nt, Artificial Sequence
  Description of Artificial Sequence: Synthetic oligonucleotide
aguuucgagaucuuccaua

SEQ ID NO: 573408 - RNA, 19 nt, Artificial Sequence
  Description of Artificial Sequence: Synthetic oligonucleotide
uaaaucggacacgagugcu

SEQ ID NO: 573409 - RNA, 19 nt, Artificial Sequence
  Description of Artificial Sequence: Synthetic oligonucleotide
guauucaaggaauccugac

SEQ ID NO: 573410 - RNA, 19 nt, Artificial Sequence
  Description of Artificial Sequence: Synthetic oligonucleotide
augacuacaguaaucguaa

SEQ ID NO: 573411 - RNA, 19 nt, Artificial Sequence
  Description of Artificial Sequence: Synthetic oligonucleotide
uauguaguucaugaauauc

SEQ ID NO: 573412 - RNA, 19 nt, Artificial Sequence
  Description of Artificial Sequence: Synthetic oligonucleotide
gauaaccacgguccuguac

SEQ ID NO: 573413 - RNA, 19 nt, Artificial Sequence
  Description of Artificial Sequence: Synthetic oligonucleotide
cugcaaaccggaauaagga

SEQ ID NO: 573414 - RNA, 19 nt, Artificial Sequence
  Description of Artificial Sequence: Synthetic oligonucleotide
uauaucuaauaggcauucc

SEQ ID NO: 573415 - RNA, 19 nt, Artificial Sequence
  Description of Artificial Sequence: Synthetic oligonucleotide
ggugauuguaauccauaag

SEQ ID NO: 573416 - RNA, 19 nt, Artificial Sequence
  Description of Artificial Sequence: Synthetic oligonucleotide
cuagaaucccuagaacuug

SEQ ID NO: 573417 - RNA, 19 nt, Artificial Sequence
  Description of Artificial Sequence: Synthetic oligonucleotide
cuugacuaugccuccaaga

SEQ ID NO: 573418 - RNA, 19 nt, Artificial Sequence
  Description of Artificial Sequence: Synthetic oligonucleotide
ugccauuggcauuuuauuu

SEQ ID NO: 573419 - RNA, 19 nt, Artificial Sequence
  Description of Artificial Sequence: Synthetic oligonucleotide
uuaaaccacuuccaauauu

SEQ ID NO: 573420 - RNA, 19 nt, Artificial Sequence
  Description of Artificial Sequence: Synthetic oligonucleotide
uugcuaauggaggaaucug

SEQ ID NO: 573421 - RNA, 19 nt, Artificial Sequence
  Description of Artificial Sequence: Synthetic oligonucleotide
gugcaucuauuucuaagug

SEQ ID NO: 573422 - RNA, 19 nt, Artificial Sequence
  Description of Artificial Sequence: Synthetic oligonucleotide
cuaauggaggaaucugcuc

SEQ ID NO: 573423 - RNA, 19 nt, Artificial Sequence
  Description of Artificial Sequence: Synthetic oligonucleotide
uugaugagcauugcuuaga

SEQ ID NO: 573424 - RNA, 19 nt, Artificial Sequence
  Description of Artificial Sequence: Synthetic oligonucleotide
gauuguaauccauaagauu

SEQ ID NO: 573425 - RNA, 19 nt, Artificial Sequence
  Description of Artificial Sequence: Synthetic oligonucleotide
auaugacuacaguaaucgu

SEQ ID NO: 573426 - RNA, 19 nt, Artificial Sequence
  Description of Artificial Sequence: Synthetic oligonucleotide
cugaggcaaaucugguggg

SEQ ID NO: 573427 - RNA, 19 nt, Artificial Sequence
  Description of Artificial Sequence: Synthetic oligonucleotide
aguucuugcaagguuaaua

SEQ ID NO: 573428 - RNA, 19 nt, Artificial Sequence
  Description of Artificial Sequence: Synthetic oligonucleotide
augcccugccaucauugac

SEQ ID NO: 573429 - RNA, 19 nt, Artificial Sequence
  Description of Artificial Sequence: Synthetic oligonucleotide
acuugacuaugccuccaag

SEQ ID NO: 573430 - RNA, 19 nt, Artificial Sequence
  Description of Artificial Sequence: Synthetic oligonucleotide
aauuggugauugguagaug

SEQ ID NO: 573431 - RNA, 19 nt, Artificial Sequence
  Description of Artificial Sequence: Synthetic oligonucleotide
agguagauguacaauuugu

SEQ ID NO: 573432 - RNA, 19 nt, Artificial Sequence
  Description of Artificial Sequence: Synthetic oligonucleotide
gcuucuaaagaagaaccag

SEQ ID NO: 573433 - RNA, 19 nt, Artificial Sequence
  Description of Artificial Sequence: Synthetic oligonucleotide
ucggugauuguaauccaua

SEQ ID NO: 573434 - RNA, 19 nt, Artificial Sequence
  Description of Artificial Sequence: Synthetic oligonucleotide
aacuugacuaugccuccaa

SEQ ID NO: 573435 - RNA, 19 nt, Artificial Sequence
  Description of Artificial Sequence: Synthetic oligonucleotide
guuaaguugcaacuucucu

SEQ ID NO: 573436 - RNA, 19 nt, Artificial Sequence
  Description of Artificial Sequence: Synthetic oligonucleotide
uaagugcaguaagacaacu

SEQ ID NO: 573437 - RNA, 19 nt, Artificial Sequence
  Description of Artificial Sequence: Synthetic oligonucleotide
uucacggaucauccauuug

SEQ ID NO: 573438 - RNA, 19 nt, Artificial Sequence
  Description of Artificial Sequence: Synthetic oligonucleotide
uacugcagacucccugugc

SEQ ID NO: 573439 - RNA, 19 nt, Artificial Sequence
  Description of Artificial Sequence: Synthetic oligonucleotide
ugauacuguuuugauguuc

SEQ ID NO: 573440 - RNA, 19 nt, Artificial Sequence
  Description of Artificial Sequence: Synthetic oligonucleotide
aucuucgccuaagaaaucu

SEQ ID NO: 573441 - RNA, 19 nt, Artificial Sequence
  Description of Artificial Sequence: Synthetic oligonucleotide
gaagauaaccacgguccug

SEQ ID NO: 573442 - RNA, 19 nt, Artificial Sequence
  Description of Artificial Sequence: Synthetic oligonucleotide
accuucugauuccugauua

SEQ ID NO: 573443 - RNA, 19 nt, Artificial Sequence
  Description of Artificial Sequence: Synthetic oligonucleotide
agacaacuagguagagacc

SEQ ID NO: 573444 - RNA, 19 nt, Artificial Sequence
  Description of Artificial Sequence: Synthetic oligonucleotide
uucggugauuguaauccau

SEQ ID NO: 573445 - RNA, 19 nt, Artificial Sequence
  Description of Artificial Sequence: Synthetic oligonucleotide
cagguuaaguugcaacuuc

SEQ ID NO: 573446 - RNA, 19 nt, Artificial Sequence
  Description of Artificial Sequence: Synthetic oligonucleotide
cucgccuccuucuagagaa

SEQ ID NO: 573447 - RNA, 19 nt, Artificial Sequence
  Description of Artificial Sequence: Synthetic oligonucleotide
cagugaucuuguauucaag

SEQ ID NO: 573448 - RNA, 19 nt, Artificial Sequence
  Description of Artificial Sequence: Synthetic oligonucleotide
agaauuaauuuuggccugu

SEQ ID NO: 573449 - RNA, 19 nt, Artificial Sequence
  Description of Artificial Sequence: Synthetic oligonucleotide
uucgaaaagauuggugauu

SEQ ID NO: 573450 - RNA, 19 nt, Artificial Sequence
  Description of Artificial Sequence: Synthetic oligonucleotide
guuaggcaauaucaaaugu

SEQ ID NO: 573451 - RNA, 19 nt, Artificial Sequence
  Description of Artificial Sequence: Synthetic oligonucleotide
aguugugaaaucaccacuu

SEQ ID NO: 573452 - RNA, 19 nt, Artificial Sequence
  Description of Artificial Sequence: Synthetic oligonucleotide
caguaaucguaacacagaa

SEQ ID NO: 573453 - RNA, 19 nt, Artificial Sequence
  Description of Artificial Sequence: Synthetic oligonucleotide
gauugguagaugaugaauu

SEQ ID NO: 573454 - RNA, 19 nt, Artificial Sequence
  Description of Artificial Sequence: Synthetic oligonucleotide
uuggugauugguagaugau

SEQ ID NO: 573455 - RNA, 19 nt, Artificial Sequence
  Description of Artificial Sequence: Synthetic oligonucleotide
ggugauugguagaugauga

SEQ ID NO: 573456 - RNA, 19 nt, Artificial Sequence
  Description of Artificial Sequence: Synthetic oligonucleotide
gacugcaaaccggaauaag

SEQ ID NO: 573457 - RNA, 19 nt, Artificial Sequence
  Description of Artificial Sequence: Synthetic oligonucleotide
uggccagaguuaaaagguc

SEQ ID NO: 573458 - RNA, 19 nt, Artificial Sequence
  Description of Artificial Sequence: Synthetic oligonucleotide
ccagaauuaauuuuggccu

SEQ ID NO: 573459 - RNA, 19 nt, Artificial Sequence
  Description of Artificial Sequence: Synthetic oligonucleotide
uuucuaagugaggaagaua

SEQ ID NO: 573460 - RNA, 19 nt, Artificial Sequence
  Description of Artificial Sequence: Synthetic oligonucleotide
ucaugacauugucggucag

SEQ ID NO: 573461 - RNA, 19 nt, Artificial Sequence
  Description of Artificial Sequence: Synthetic oligonucleotide
agauugcuaauggaggaau

SEQ ID NO: 573462 - RNA, 19 nt, Artificial Sequence
  Description of Artificial Sequence: Synthetic oligonucleotide
augcuagaagcuauucuug

SEQ ID NO: 573463 - RNA, 19 nt, Artificial Sequence
  Description of Artificial Sequence: Synthetic oligonucleotide
ucccacucaccuacaagaa

SEQ ID NO: 573464 - RNA, 19 nt, Artificial Sequence
  Description of Artificial Sequence: Synthetic oligonucleotide
acggaucauccauuugucu

SEQ ID NO: 573465 - RNA, 19 nt, Artificial Sequence
  Description of Artificial Sequence: Synthetic oligonucleotide
caugcuagaagcuauucuu

SEQ ID NO: 573466 - RNA, 19 nt, Artificial Sequence
  Description of Artificial Sequence: Synthetic oligonucleotide
uggcucuaucaguaaauua

SEQ ID NO: 573467 - RNA, 19 nt, Artificial Sequence
  Description of Artificial Sequence: Synthetic oligonucleotide
ugacuagaucuucgugaga

SEQ ID NO: 573468 - RNA, 19 nt, Artificial Sequence
  Description of Artificial Sequence: Synthetic oligonucleotide
aaaccggaauaaggaacca

SEQ ID NO: 573469 - RNA, 19 nt, Artificial Sequence
  Description of Artificial Sequence: Synthetic oligonucleotide
ucucgccuccuucuagaga

SEQ ID NO: 573470 - RNA, 19 nt, Artificial Sequence
  Description of Artificial Sequence: Synthetic oligonucleotide
aguagaugacaugcuagaa

SEQ ID NO: 573471 - RNA, 19 nt, Artificial Sequence
  Description of Artificial Sequence: Synthetic oligonucleotide
auacugcagacucccugug

SEQ ID NO: 573472 - RNA, 19 nt, Artificial Sequence
  Description of Artificial Sequence: Synthetic oligonucleotide
gaaucccuagaacuugaua

SEQ ID NO: 573473 - RNA, 19 nt, Artificial Sequence
  Description of Artificial Sequence: Synthetic oligonucleotide
cuuguauucaaggaauccu

SEQ ID NO: 573474 - RNA, 19 nt, Artificial Sequence
  Description of Artificial Sequence: Synthetic oligonucleotide
ccugacuagaucuucguga

SEQ ID NO: 573475 - RNA, 19 nt, Artificial Sequence
  Description of Artificial Sequence: Synthetic oligonucleotide
uaucuacaguaaucaugac

SEQ ID NO: 573476 - RNA, 19 nt, Artificial Sequence
  Description of Artificial Sequence: Synthetic oligonucleotide
aaguaccauugaugaagau

SEQ ID NO: 573477 - RNA, 19 nt, Artificial Sequence
  Description of Artificial Sequence: Synthetic oligonucleotide
ugacuacaguaaucguaac

SEQ ID NO: 573478 - RNA, 19 nt, Artificial Sequence
  Description of Artificial Sequence: Synthetic oligonucleotide
gucggucagauuacuuccg

SEQ ID NO: 573479 - RNA, 19 nt, Artificial Sequence
  Description of Artificial Sequence: Synthetic oligonucleotide
gacaugcuagaagcuauuc

SEQ ID NO: 573480 - RNA, 19 nt, Artificial Sequence
  Description of Artificial Sequence: Synthetic oligonucleotide
agguuaaguugcaacuucu

SEQ ID NO: 573481 - RNA, 19 nt, Artificial Sequence
  Description of Artificial Sequence: Synthetic oligonucleotide
uaccuucugauuccugauu

SEQ ID NO: 573482 - RNA, 19 nt, Artificial Sequence
  Description of Artificial Sequence: Synthetic oligonucleotide
gcaaaccggaauaaggaac

SEQ ID NO: 573483 - RNA, 19 nt, Artificial Sequence
  Description of Artificial Sequence: Synthetic oligonucleotide
ugcuauuccuguacuucuu

SEQ ID NO: 573484 - RNA, 19 nt, Artificial Sequence
  Description of Artificial Sequence: Synthetic oligonucleotide
ucgguuccaaaugaaccaa

SEQ ID NO: 573485 - RNA, 19 nt, Artificial Sequence
  Description of Artificial Sequence: Synthetic oligonucleotide
aucggacacgagugcuugg

SEQ ID NO: 573486 - RNA, 19 nt, Artificial Sequence
  Description of Artificial Sequence: Synthetic oligonucleotide
acaacuagguagagaccag

SEQ ID NO: 573487 - RNA, 19 nt, Artificial Sequence
  Description of Artificial Sequence: Synthetic oligonucleotide
ugcauuugcauggcucuau

SEQ ID NO: 573488 - RNA, 19 nt, Artificial Sequence
  Description of Artificial Sequence: Synthetic oligonucleotide
cauaugugccugaagaguu

SEQ ID NO: 573489 - RNA, 19 nt, Artificial Sequence
  Description of Artificial Sequence: Synthetic oligonucleotide
caucugauggagauauucu

SEQ ID NO: 573490 - RNA, 19 nt, Artificial Sequence
  Description of Artificial Sequence: Synthetic oligonucleotide
gaugcccugccaucauuga

SEQ ID NO: 573491 - RNA, 19 nt, Artificial Sequence
  Description of Artificial Sequence: Synthetic oligonucleotide
aguaaucguaacacagaaa

SEQ ID NO: 573492 - RNA, 19 nt, Artificial Sequence
  Description of Artificial Sequence: Synthetic oligonucleotide
aaaucggacacgagugcuu

SEQ ID NO: 573493 - RNA, 19 nt, Artificial Sequence
  Description of Artificial Sequence: Synthetic oligonucleotide
guuaaaagguccagcugaa

SEQ ID NO: 573494 - RNA, 19 nt, Artificial Sequence
  Description of Artificial Sequence: Synthetic oligonucleotide
gaucuaggugguacaucug

SEQ ID NO: 573495 - RNA, 19 nt, Artificial Sequence
  Description of Artificial Sequence: Synthetic oligonucleotide
aaacauguucacggaucau

SEQ ID NO: 573496 - RNA, 19 nt, Artificial Sequence
  Description of Artificial Sequence: Synthetic oligonucleotide
ggccagaguuaaaaggucc

SEQ ID NO: 573497 - RNA, 19 nt, Artificial Sequence
  Description of Artificial Sequence: Synthetic oligonucleotide
gaugagcauugcuuagaua

SEQ ID NO: 573498 - RNA, 19 nt, Artificial Sequence
  Description of Artificial Sequence: Synthetic oligonucleotide
cucucgccuccuucuagag

SEQ ID NO: 573499 - RNA, 19 nt, Artificial Sequence
  Description of Artificial Sequence: Synthetic oligonucleotide
agagaccagagcugauaaa

SEQ ID NO: 573500 - RNA, 19 nt, Artificial Sequence
  Description of Artificial Sequence: Synthetic oligonucleotide
ggacacgagugcuugguuc

SEQ ID NO: 573501 - RNA, 19 nt, Artificial Sequence
  Description of Artificial Sequence: Synthetic oligonucleotide
cuauguaguucaugaauau

SEQ ID NO: 573502 - RNA, 19 nt, Artificial Sequence
  Description of Artificial Sequence: Synthetic oligonucleotide
gggacugcaaaccggaaua

SEQ ID NO: 573503 - RNA, 19 nt, Artificial Sequence
  Description of Artificial Sequence: Synthetic oligonucleotide
augaugaauucaacuguaa

SEQ ID NO: 573504 - RNA, 19 nt, Artificial Sequence
  Description of Artificial Sequence: Synthetic oligonucleotide
ugcucccugugaauaugaa

SEQ ID NO: 573505 - RNA, 19 nt, Artificial Sequence
  Description of Artificial Sequence: Synthetic oligonucleotide
ggucagauuacuuccgagu

SEQ ID NO: 573506 - RNA, 19 nt, Artificial Sequence
  Description of Artificial Sequence: Synthetic oligonucleotide
caucuucgccuaagaaauc

SEQ ID NO: 573507 - RNA, 19 nt, Artificial Sequence
  Description of Artificial Sequence: Synthetic oligonucleotide
agugcucauugaauucucu

SEQ ID NO: 573508 - RNA, 19 nt, Artificial Sequence
  Description of Artificial Sequence: Synthetic oligonucleotide
caaaguucacaggugguua

SEQ ID NO: 573509 - RNA, 19 nt, Artificial Sequence
  Description of Artificial Sequence: Synthetic oligonucleotide
uuccgagugcuggugggac

SEQ ID NO: 573510 - RNA, 19 nt, Artificial Sequence
  Description of Artificial Sequence: Synthetic oligonucleotide
cagaaggucaauuggugau

SEQ ID NO: 573511 - RNA, 19 nt, Artificial Sequence
  Description of Artificial Sequence: Synthetic oligonucleotide
cuacuccgagacugugaag

SEQ ID NO: 573512 - RNA, 19 nt, Artificial Sequence
  Description of Artificial Sequence: Synthetic oligonucleotide
uucagaacucagugaucuu

SEQ ID NO: 573513 - RNA, 19 nt, Artificial Sequence
  Description of Artificial Sequence: Synthetic oligonucleotide
cagauuacuuccgagugcu

SEQ ID NO: 573514 - RNA, 19 nt, Artificial Sequence
  Description of Artificial Sequence: Synthetic oligonucleotide
auggcucuaucaguaaauu

SEQ ID NO: 573515 - RNA, 19 nt, Artificial Sequence
  Description of Artificial Sequence: Synthetic oligonucleotide
caagucgguuccaaaugaa

SEQ ID NO: 573516 - RNA, 19 nt, Artificial Sequence
  Description of Artificial Sequence: Synthetic oligonucleotide
gaacuugacuaugccucca

SEQ ID NO: 573517 - RNA, 19 nt, Artificial Sequence
  Description of Artificial Sequence: Synthetic oligonucleotide
cauaucagaaaagcuuugu

SEQ ID NO: 573518 - RNA, 19 nt, Artificial Sequence
  Description of Artificial Sequence: Synthetic oligonucleotide
cuuaucaagucgguuccaa

SEQ ID NO: 573519 - RNA, 19 nt, Artificial Sequence
  Description of Artificial Sequence: Synthetic oligonucleotide
ccaauauuucucccagcug

SEQ ID NO: 573520 - RNA, 19 nt, Artificial Sequence
  Description of Artificial Sequence: Synthetic oligonucleotide
cacuacuccgagacuguga

SEQ ID NO: 573521 - RNA, 19 nt, Artificial Sequence
  Description of Artificial Sequence: Synthetic oligonucleotide
auucuacauaagucuccuu

SEQ ID NO: 573522 - RNA, 19 nt, Artificial Sequence
  Description of Artificial Sequence: Synthetic oligonucleotide
cucuaucaguaaauuagau

SEQ ID NO: 573523 - RNA, 19 nt, Artificial Sequence
  Description of Artificial Sequence: Synthetic oligonucleotide
cugccaucugacaaauucu

SEQ ID NO: 573524 - RNA, 19 nt, Artificial Sequence
  Description of Artificial Sequence: Synthetic oligonucleotide
ggguaaugcuuucccacuc

SEQ ID NO: 573525 - RNA, 19 nt, Artificial Sequence
  Description of Artificial Sequence: Synthetic oligonucleotide
aagcuauucuugacagaua

SEQ ID NO: 573526 - RNA, 19 nt, Artificial Sequence
  Description of Artificial Sequence: Synthetic oligonucleotide
uaaccacgguccuguacuu

SEQ ID NO: 573527 - RNA, 19 nt, Artificial Sequence
  Description of Artificial Sequence: Synthetic oligonucleotide
gugcuucaaggugaacuac

SEQ ID NO: 573528 - RNA, 19 nt, Artificial Sequence
  Description of Artificial Sequence: Synthetic oligonucleotide
auugucggucagauuacuu

SEQ ID NO: 573529 - RNA, 19 nt, Artificial Sequence
  Description of Artificial Sequence: Synthetic oligonucleotide
gcuaugauuuuggcuaaga

SEQ ID NO: 573530 - RNA, 19 nt, Artificial Sequence
  Description of Artificial Sequence: Synthetic oligonucleotide
gacucccugugcauuugca

SEQ ID NO: 573531 - RNA, 19 nt, Artificial Sequence
  Description of Artificial Sequence: Synthetic oligonucleotide
ggucaauuggugauuggua

SEQ ID NO: 573532 - RNA, 19 nt, Artificial Sequence
  Description of Artificial Sequence: Synthetic oligonucleotide
auguggaugugaacuguuu

SEQ ID NO: 573533 - RNA, 19 nt, Artificial Sequence
  Description of Artificial Sequence: Synthetic oligonucleotide
ucaccacuucggugauugu

SEQ ID NO: 573534 - RNA, 19 nt, Artificial Sequence
  Description of Artificial Sequence: Synthetic oligonucleotide
ucgccuccuucuagagaac

SEQ ID NO: 573535 - RNA, 19 nt, Artificial Sequence
  Description of Artificial Sequence: Synthetic oligonucleotide
cuagaacuugauacuguuu

SEQ ID NO: 573536 - RNA, 19 nt, Artificial Sequence
  Description of Artificial Sequence: Synthetic oligonucleotide
ccggaauaaggaaccagga

SEQ ID NO: 573537 - RNA, 19 nt, Artificial Sequence
  Description of Artificial Sequence: Synthetic oligonucleotide
agauuacuuccgagugcug

SEQ ID NO: 573538 - RNA, 19 nt, Artificial Sequence
  Description of Artificial Sequence: Synthetic oligonucleotide
gccagaguuaaaaggucca

SEQ ID NO: 573539 - RNA, 19 nt, Artificial Sequence
  Description of Artificial Sequence: Synthetic oligonucleotide
ggaagauaaccacgguccu

SEQ ID NO: 573540 - RNA, 19 nt, Artificial Sequence
  Description of Artificial Sequence: Synthetic oligonucleotide
gcucuauguaguucaugaa

SEQ ID NO: 573541 - RNA, 19 nt, Artificial Sequence
  Description of Artificial Sequence: Synthetic oligonucleotide
acaggugguuacagcuucu

SEQ ID NO: 573542 - RNA, 19 nt, Artificial Sequence
  Description of Artificial Sequence: Synthetic oligonucleotide
guucacggaucauccauuu

SEQ ID NO: 573543 - RNA, 19 nt, Artificial Sequence
  Description of Artificial Sequence: Synthetic oligonucleotide
agauaaccacgguccugua

SEQ ID NO: 573544 - RNA, 19 nt, Artificial Sequence
  Description of Artificial Sequence: Synthetic oligonucleotide
acuaugccuccaagaagaa

SEQ ID NO: 573545 - RNA, 19 nt, Artificial Sequence
  Description of Artificial Sequence: Synthetic oligonucleotide
gcuaauggaggaaucugcu

SEQ ID NO: 573546 - RNA, 19 nt, Artificial Sequence
  Description of Artificial Sequence: Synthetic oligonucleotide
gugcucauugaauucucuu

SEQ ID NO: 573547 - RNA, 19 nt, Artificial Sequence
  Description of Artificial Sequence: Synthetic oligonucleotide
ccaagaagaaucugauacu

SEQ ID NO: 573548 - RNA, 19 nt, Artificial Sequence
  Description of Artificial Sequence: Synthetic oligonucleotide
caaaugaaccaaguaccau

SEQ ID NO: 573549 - RNA, 19 nt, Artificial Sequence
  Description of Artificial Sequence: Synthetic oligonucleotide
cagacucccugugcauuug

SEQ ID NO: 573550 - RNA, 19 nt, Artificial Sequence
  Description of Artificial Sequence: Synthetic oligonucleotide
caccacuucggugauugua

SEQ ID NO: 573551 - RNA, 19 nt, Artificial Sequence
  Description of Artificial Sequence: Synthetic oligonucleotide
cuguuucgaaaagauuggu

SEQ ID NO: 573552 - RNA, 19 nt, Artificial Sequence
  Description of Artificial Sequence: Synthetic oligonucleotide
gcuagaaucccuagaacuu

SEQ ID NO: 573553 - RNA, 19 nt, Artificial Sequence
  Description of Artificial Sequence: Synthetic oligonucleotide
cggucagauuacuuccgag

SEQ ID NO: 573554 - RNA, 19 nt, Artificial Sequence
  Description of Artificial Sequence: Synthetic oligonucleotide
ccuagaacuugauacuguu

SEQ ID NO: 573555 - RNA, 19 nt, Artificial Sequence
  Description of Artificial Sequence: Synthetic oligonucleotide
gacauacugcagacucccu

SEQ ID NO: 573556 - RNA, 19 nt, Artificial Sequence
  Description of Artificial Sequence: Synthetic oligonucleotide
cggugauuguaauccauaa

SEQ ID NO: 573557 - RNA, 19 nt, Artificial Sequence
  Description of Artificial Sequence: Synthetic oligonucleotide
cauugucggucagauuacu

SEQ ID NO: 573558 - RNA, 19 nt, Artificial Sequence
  Description of Artificial Sequence: Synthetic oligonucleotide
ccuccuucuagagaacaaa

SEQ ID NO: 573559 - RNA, 19 nt, Artificial Sequence
  Description of Artificial Sequence: Synthetic oligonucleotide
ccgagacugugaagucaag

SEQ ID NO: 573560 - RNA, 19 nt, Artificial Sequence
  Description of Artificial Sequence: Synthetic oligonucleotide
caggugguuacagcuucua

SEQ ID NO: 573561 - RNA, 19 nt, Artificial Sequence
  Description of Artificial Sequence: Synthetic oligonucleotide
cuaugccuccaagaagaau

SEQ ID NO: 573562 - RNA, 19 nt, Artificial Sequence
  Description of Artificial Sequence: Synthetic oligonucleotide
cugcagacucccugugcau

SEQ ID NO: 573563 - RNA, 19 nt, Artificial Sequence
  Description of Artificial Sequence: Synthetic oligonucleotide
cccaaggggaucacucugu

SEQ ID NO: 573564 - RNA, 19 nt, Artificial Sequence
  Description of Artificial Sequence: Synthetic oligonucleotide
cagaugcccugccaucauu

SEQ ID NO: 573565 - RNA, 19 nt, Artificial Sequence
  Description of Artificial Sequence: Synthetic oligonucleotide
ccagguuaaguugcaacuu

SEQ ID NO: 573566 - RNA, 19 nt, Artificial Sequence
  Description of Artificial Sequence: Synthetic oligonucleotide
cacgagugcuugguucaau

SEQ ID NO: 573567 - RNA, 19 nt, Artificial Sequence
  Description of Artificial Sequence: Synthetic oligonucleotide
cggacacgagugcuugguu

SEQ ID NO: 573568 - RNA, 19 nt, Artificial Sequence
  Description of Artificial Sequence: Synthetic oligonucleotide
auagcaauucaccugacuc

SEQ ID NO: 573569 - RNA, 19 nt, Artificial Sequence
  Description of Artificial Sequence: Synthetic oligonucleotide
aagcaggacacacacacac

SEQ ID NO: 573570 - RNA, 19 nt, Artificial Sequence
  Description of Artificial Sequence: Synthetic oligonucleotide
uuuauuggagcuuggaaug

SEQ ID NO: 573571 - RNA, 19 nt, Artificial Sequence
  Description of Artificial Sequence: Synthetic oligonucleotide
aaaggagaaccucgcaggc

SEQ ID NO: 573572 - RNA, 19 nt, Artificial Sequence
  Description of Artificial Sequence: Synthetic oligonucleotide
gaaguucucagauucugcg

SEQ ID NO: 573573 - RNA, 19 nt, Artificial Sequence
  Description of Artificial Sequence: Synthetic oligonucleotide
  modified_base (9)..(9): a, c, u, g, unknown or other
uccugggunauucugaggc

SEQ ID NO: 573574 - RNA, 19 nt, Artificial Sequence
  Description of Artificial Sequence: Synthetic oligonucleotide
aggaccaagagucuccugc

SEQ ID NO: 573575 - RNA, 19 nt, Artificial Sequence
  Description of Artificial Sequence: Synthetic oligonucleotide
ugaauuagguuuccaaaug

SEQ ID NO: 573576 - RNA, 19 nt, Artificial Sequence
  Description of Artificial Sequence: Synthetic oligonucleotide
uguuauagcaauucaccug

SEQ ID NO: 573577 - RNA, 19 nt, Artificial Sequence
  Description of Artificial Sequence: Synthetic oligonucleotide
aggacacacacacacacac

SEQ ID NO: 573578 - RNA, 19 nt, Artificial Sequence
  Description of Artificial Sequence: Synthetic oligonucleotide
uauaccaugcgcucgcagg

SEQ ID NO: 573579 - RNA, 19 nt, Artificial Sequence
  Description of Artificial Sequence: Synthetic oligonucleotide
ugcaauguauaccaugcgc

SEQ ID NO: 573580 - RNA, 19 nt, Artificial Sequence
  Description of Artificial Sequence: Synthetic oligonucleotide
gauucugcgugacaggcgg

SEQ ID NO: 573581 - RNA, 19 nt, Artificial Sequence
  Description of Artificial Sequence: Synthetic oligonucleotide
aagcaccgcaccuuguacc

SEQ ID NO: 573582 - RNA, 19 nt, Artificial Sequence
  Description of Artificial Sequence: Synthetic oligonucleotide
gauauuggaacuccaguac

SEQ ID NO: 573583 - RNA, 19 nt, Artificial Sequence
  Description of Artificial Sequence: Synthetic oligonucleotide
aauguauaccaugcgcucg

SEQ ID NO: 573584 - RNA, 19 nt, Artificial Sequence
  Description of Artificial Sequence: Synthetic oligonucleotide
uuugcaguuggaaacggga

SEQ ID NO: 573585 - RNA, 19 nt, Artificial Sequence
  Description of Artificial Sequence: Synthetic oligonucleotide
gaagaagcgcgccuggugg

SEQ ID NO: 573586 - RNA, 19 nt, Artificial Sequence
  Description of Artificial Sequence: Synthetic oligonucleotide
uguuaugaaugcaggaugu

SEQ ID NO: 573587 - RNA, 19 nt, Artificial Sequence
  Description of Artificial Sequence: Synthetic oligonucleotide
aaccuugcagcauggcagc

SEQ ID NO: 573588 - RNA, 19 nt, Artificial Sequence
  Description of Artificial Sequence: Synthetic oligonucleotide
ugaagggaccgacuggugg

SEQ ID NO: 573589 - RNA, 19 nt, Artificial Sequence
  Description of Artificial Sequence: Synthetic oligonucleotide
gauaaaacggaaaccccgg

SEQ ID NO: 573590 - RNA, 19 nt, Artificial Sequence
  Description of Artificial Sequence: Synthetic oligonucleotide
  modified_base (2)..(2): a, c, u, g, unknown or other
unauucugaggccaggaac

SEQ ID NO: 573591 - RNA, 19 nt, Artificial Sequence
  Description of Artificial Sequence: Synthetic oligonucleotide
ucuuguguguuucggauga

SEQ ID NO: 573592 - RNA, 19 nt, Artificial Sequence
  Description of Artificial Sequence: Synthetic oligonucleotide
agugagagggagccuaacc

SEQ ID NO: 573593 - RNA, 19 nt, Artificial Sequence
  Description of Artificial Sequence: Synthetic oligonucleotide
ugauccucuguuaagcuga

SEQ ID NO: 573594 - RNA, 19 nt, Artificial Sequence
  Description of Artificial Sequence: Synthetic oligonucleotide
aaggacacgaccauuccgg

SEQ ID NO: 573595 - RNA, 19 nt, Artificial Sequence
  Description of Artificial Sequence: Synthetic oligonucleotide
uguguuucggaugagcacc

SEQ ID NO: 573596 - RNA, 19 nt, Artificial Sequence
  Description of Artificial Sequence: Synthetic oligonucleotide
uguaccucguggauauugg

SEQ ID NO: 573597 - RNA, 19 nt, Artificial Sequence
  Description of Artificial Sequence: Synthetic oligonucleotide
auguuaugaaugcaggaug

SEQ ID NO: 573598 - RNA, 19 nt, Artificial Sequence
  Description of Artificial Sequence: Synthetic oligonucleotide
auguauaccaugcgcucgc

SEQ ID NO: 573599 - RNA, 19 nt, Artificial Sequence
  Description of Artificial Sequence: Synthetic oligonucleotide
uccccugcgguccagaacc

SEQ ID NO: 573600 - RNA, 19 nt, Artificial Sequence
  Description of Artificial Sequence: Synthetic oligonucleotide
aaugggaagcaaaucuggg

SEQ ID NO: 573601 - RNA, 19 nt, Artificial Sequence
  Description of Artificial Sequence: Synthetic oligonucleotide
auuagguuuccaaaugcac

SEQ ID NO: 573602 - RNA, 19 nt, Artificial Sequence
  Description of Artificial Sequence: Synthetic oligonucleotide
aguacguaugguuggucac

SEQ ID NO: 573603 - RNA, 19 nt, Artificial Sequence
  Description of Artificial Sequence: Synthetic oligonucleotide
caugccacuucccaaagag

SEQ ID NO: 573604 - RNA, 19 nt, Artificial Sequence
  Description of Artificial Sequence: Synthetic oligonucleotide
gaauguuauagcaauucac

SEQ ID NO: 573605 - RNA, 19 nt, Artificial Sequence
  Description of Artificial Sequence: Synthetic oligonucleotide
caggauguuaugaaugcag

SEQ ID NO: 573606 - RNA, 19 nt, Artificial Sequence
  Description of Artificial Sequence: Synthetic oligonucleotide
ucuauccuccucuucuggg

SEQ ID NO: 573607 - RNA, 19 nt, Artificial Sequence
  Description of Artificial Sequence: Synthetic oligonucleotide
gacacacacacacacacca

SEQ ID NO: 573608 - RNA, 19 nt, Artificial Sequence
  Description of Artificial Sequence: Synthetic oligonucleotide
ucgcugauaaaacggaaac

SEQ ID NO: 573609 - RNA, 19 nt, Artificial Sequence
  Description of Artificial Sequence: Synthetic oligonucleotide
gaaggacacgaccauuccg

SEQ ID NO: 573610 - RNA, 19 nt, Artificial Sequence
  Description of Artificial Sequence: Synthetic oligonucleotide
uggauauuggaacuccagu

SEQ ID NO: 573611 - RNA, 19 nt, Artificial Sequence
  Description of Artificial Sequence: Synthetic oligonucleotide
cauagccuggcucagcgcg

SEQ ID NO: 573612 - RNA, 19 nt, Artificial Sequence
  Description of Artificial Sequence: Synthetic oligonucleotide
uguuacgcaggauauucca

SEQ ID NO: 573613 - RNA, 19 nt, Artificial Sequence
  Description of Artificial Sequence: Synthetic oligonucleotide
agggagccuaaccucaccc

SEQ ID NO: 573614 - RNA, 19 nt, Artificial Sequence
  Description of Artificial Sequence: Synthetic oligonucleotide
guuaucaagacugggagca

SEQ ID NO: 573615 - RNA, 19 nt, Artificial Sequence
  Description of Artificial Sequence: Synthetic oligonucleotide
gcugauaaaacggaaaccc

SEQ ID NO: 573616 - RNA, 19 nt, Artificial Sequence
  Description of Artificial Sequence: Synthetic oligonucleotide
uguccuggcuacauuagga

SEQ ID NO: 573617 - RNA, 19 nt, Artificial Sequence
  Description of Artificial Sequence: Synthetic oligonucleotide
uuggaacuccaguacuugg

SEQ ID NO: 573618 - RNA, 19 nt, Artificial Sequence
  Description of Artificial Sequence: Synthetic oligonucleotide
ugcaguuggaaacgggaug

SEQ ID NO: 573619 - RNA, 19 nt, Artificial Sequence
  Description of Artificial Sequence: Synthetic oligonucleotide
uaaccucacccauaugucc

SEQ ID NO: 573620 - RNA, 19 nt, Artificial Sequence
  Description of Artificial Sequence: Synthetic oligonucleotide
uccguuucagcucugccgu

SEQ ID NO: 573621 - RNA, 19 nt, Artificial Sequence
  Description of Artificial Sequence: Synthetic oligonucleotide
auuaggaacccugcuugcc

SEQ ID NO: 573622 - RNA, 19 nt, Artificial Sequence
  Description of Artificial Sequence: Synthetic oligonucleotide
ugguuggucacccaccacu

SEQ ID NO: 573623 - RNA, 19 nt, Artificial Sequence
  Description of Artificial Sequence: Synthetic oligonucleotide
ucucacuagcgcaugacuc

SEQ ID NO: 573624 - RNA, 19 nt, Artificial Sequence
  Description of Artificial Sequence: Synthetic oligonucleotide
uuugccgauguuguuacgc

SEQ ID NO: 573625 - RNA, 19 nt, Artificial Sequence
  Description of Artificial Sequence: Synthetic oligonucleotide
acucaagcuggcucacucc

SEQ ID NO: 573626 - RNA, 19 nt, Artificial Sequence
  Description of Artificial Sequence: Synthetic oligonucleotide
agcuuggaauguuauagca

SEQ ID NO: 573627 - RNA, 19 nt, Artificial Sequence
  Description of Artificial Sequence: Synthetic oligonucleotide
ugggaaaagggcaucuccu

SEQ ID NO: 573628 - RNA, 19 nt, Artificial Sequence
  Description of Artificial Sequence: Synthetic oligonucleotide
ggagcuuggaauguuauag

SEQ ID NO: 573629 - RNA, 19 nt, Artificial Sequence
  Description of Artificial Sequence: Synthetic oligonucleotide
uaaaacggaaaccccgguc

SEQ ID NO: 573630 - RNA, 19 nt, Artificial Sequence
  Description of Artificial Sequence: Synthetic oligonucleotide
gucuggguagcaucaaggg

SEQ ID NO: 573631 - RNA, 19 nt, Artificial Sequence
  Description of Artificial Sequence: Synthetic oligonucleotide
acccauauguccaugguag

SEQ ID NO: 573632 - RNA, 19 nt, Artificial Sequence
  Description of Artificial Sequence: Synthetic oligonucleotide
aaacggaaaccccggucag

SEQ ID NO: 573633 - RNA, 19 nt, Artificial Sequence
  Description of Artificial Sequence: Synthetic oligonucleotide
uacgcaggauauuccaaag

SEQ ID NO: 573634 - RNA, 19 nt, Artificial Sequence
  Description of Artificial Sequence: Synthetic oligonucleotide
uaucuuguguguuucggau

SEQ ID NO: 573635 - RNA, 19 nt, Artificial Sequence
  Description of Artificial Sequence: Synthetic oligonucleotide
uguguugagcggcucguug

SEQ ID NO: 573636 - RNA, 19 nt, Artificial Sequence
  Description of Artificial Sequence: Synthetic oligonucleotide
ucuuugccgauguuguuac

SEQ ID NO: 573637 - RNA, 19 nt, Artificial Sequence
  Description of Artificial Sequence: Synthetic oligonucleotide
acggaaaccccggucaggc

SEQ ID NO: 573638 - RNA, 19 nt, Artificial Sequence
  Description of Artificial Sequence: Synthetic oligonucleotide
uuacgcaggauauuccaaa

SEQ ID NO: 573639 - RNA, 19 nt, Artificial Sequence
  Description of Artificial Sequence: Synthetic oligonucleotide
uuguuacgcaggauauucc

SEQ ID NO: 573640 - RNA, 19 nt, Artificial Sequence
  Description of Artificial Sequence: Synthetic oligonucleotide
aggauguuaugaaugcagg

SEQ ID NO: 573641 - RNA, 19 nt, Artificial Sequence
  Description of Artificial Sequence: Synthetic oligonucleotide
ggguuaucaagacugggag

SEQ ID NO: 573642 - RNA, 19 nt, Artificial Sequence
  Description of Artificial Sequence: Synthetic oligonucleotide
uaggacagucuuuauugga

SEQ ID NO: 573643 - RNA, 19 nt, Artificial Sequence
  Description of Artificial Sequence: Synthetic oligonucleotide
guuguuacgcaggauauuc

SEQ ID NO: 573644 - RNA, 19 nt, Artificial Sequence
  Description of Artificial Sequence: Synthetic oligonucleotide
guugacaguccccacgggc

SEQ ID NO: 573645 - RNA, 19 nt, Artificial Sequence
  Description of Artificial Sequence: Synthetic oligonucleotide
acgcaggauauuccaaagg

SEQ ID NO: 573646 - RNA, 19 nt, Artificial Sequence
  Description of Artificial Sequence: Synthetic oligonucleotide
gagcuuggaauguuauagc

SEQ ID NO: 573647 - RNA, 19 nt, Artificial Sequence
  Description of Artificial Sequence: Synthetic oligonucleotide
ugguacguggaggaguagg

SEQ ID NO: 573648 - RNA, 19 nt, Artificial Sequence
  Description of Artificial Sequence: Synthetic oligonucleotide
uggugaucucacuagcgca

SEQ ID NO: 573649 - RNA, 19 nt, Artificial Sequence
  Description of Artificial Sequence: Synthetic oligonucleotide
gaaagguuggagccuuggc

SEQ ID NO: 573650 - RNA, 19 nt, Artificial Sequence
  Description of Artificial Sequence: Synthetic oligonucleotide
aagucuaggacagucuuua

SEQ ID NO: 573651 - RNA, 19 nt, Artificial Sequence
  Description of Artificial Sequence: Synthetic oligonucleotide
uugagcggcucguugagcu

SEQ ID NO: 573652 - RNA, 19 nt, Artificial Sequence
  Description of Artificial Sequence: Synthetic oligonucleotide
gaagggucugacaugccag

SEQ ID NO: 573653 - RNA, 19 nt, Artificial Sequence
  Description of Artificial Sequence: Synthetic oligonucleotide
gaagccgaaguuucgcuca

SEQ ID NO: 573654 - RNA, 19 nt, Artificial Sequence
  Description of Artificial Sequence: Synthetic oligonucleotide
augggcgugugcgagacac

SEQ ID NO: 573655 - RNA, 19 nt, Artificial Sequence
  Description of Artificial Sequence: Synthetic oligonucleotide
cuaaccucacccauauguc

SEQ ID NO: 573656 - RNA, 19 nt, Artificial Sequence
  Description of Artificial Sequence: Synthetic oligonucleotide
ggaaacgggaugcaggccc

SEQ ID NO: 573657 - RNA, 19 nt, Artificial Sequence
  Description of Artificial Sequence: Synthetic oligonucleotide
gugugcgagacacagcccc

SEQ ID NO: 573658 - RNA, 19 nt, Artificial Sequence
  Description of Artificial Sequence: Synthetic oligonucleotide
uccgucugccgccugaaga

SEQ ID NO: 573659 - RNA, 19 nt, Artificial Sequence
  Description of Artificial Sequence: Synthetic oligonucleotide
ucguaggucucucccaaga

SEQ ID NO: 573660 - RNA, 19 nt, Artificial Sequence
  Description of Artificial Sequence: Synthetic oligonucleotide
  modified_base (6)..(6): a, c, u, g, unknown or other
ugggunauucugaggccag

SEQ ID NO: 573661 - RNA, 19 nt, Artificial Sequence
  Description of Artificial Sequence: Synthetic oligonucleotide
ggaaaccccggucaggccg

SEQ ID NO: 573662 - RNA, 19 nt, Artificial Sequence
  Description of Artificial Sequence: Synthetic oligonucleotide
agaacucugugugggaguc

SEQ ID NO: 573663 - RNA, 19 nt, Artificial Sequence
  Description of Artificial Sequence: Synthetic oligonucleotide
aggacacgaccauuccggc

SEQ ID NO: 573664 - RNA, 19 nt, Artificial Sequence
  Description of Artificial Sequence: Synthetic oligonucleotide
ugcaccggcaucgacaccu

SEQ ID NO: 573665 - RNA, 19 nt, Artificial Sequence
  Description of Artificial Sequence: Synthetic oligonucleotide
cuccaguacguaugguugg

SEQ ID NO: 573666 - RNA, 19 nt, Artificial Sequence
  Description of Artificial Sequence: Synthetic oligonucleotide
cauugaauuagguuuccaa

SEQ ID NO: 573667 - RNA, 19 nt, Artificial Sequence
  Description of Artificial Sequence: Synthetic oligonucleotide
agggcuaccagagcacggc

SEQ ID NO: 573668 - RNA, 19 nt, Artificial Sequence
  Description of Artificial Sequence: Synthetic oligonucleotide
uaagcaccgcaccuuguac

SEQ ID NO: 573669 - RNA, 19 nt, Artificial Sequence
  Description of Artificial Sequence: Synthetic oligonucleotide
gaaagucuggguagcauca

SEQ ID NO: 573670 - RNA, 19 nt, Artificial Sequence
  Description of Artificial Sequence: Synthetic oligonucleotide
uaccucguggauauuggaa

SEQ ID NO: 573671 - RNA, 19 nt, Artificial Sequence
  Description of Artificial Sequence: Synthetic oligonucleotide
aucuuguguguuucggaug

SEQ ID NO: 573672 - RNA, 19 nt, Artificial Sequence
  Description of Artificial Sequence: Synthetic oligonucleotide
ugguggugaucucacuagc

SEQ ID NO: 573673 - RNA, 19 nt, Artificial Sequence
  Description of Artificial Sequence: Synthetic oligonucleotide
uggacuauguuguucucuu

SEQ ID NO: 573674 - RNA, 19 nt, Artificial Sequence
  Description of Artificial Sequence: Synthetic oligonucleotide
auaaaacggaaaccccggu

SEQ ID NO: 573675 - RNA, 19 nt, Artificial Sequence
  Description of Artificial Sequence: Synthetic oligonucleotide
acccaccacucuuugccgc

SEQ ID NO: 573676 - RNA, 19 nt, Artificial Sequence
  Description of Artificial Sequence: Synthetic oligonucleotide
gaaguuucgcucauggucu

SEQ ID NO: 573677 - RNA, 19 nt, Artificial Sequence
  Description of Artificial Sequence: Synthetic oligonucleotide
ugugugggagucggcaagg

SEQ ID NO: 573678 - RNA, 19 nt, Artificial Sequence
  Description of Artificial Sequence: Synthetic oligonucleotide
ugucuugccagaagaugaa

SEQ ID NO: 573679 - RNA, 19 nt, Artificial Sequence
  Description of Artificial Sequence: Synthetic oligonucleotide
acgaccauuccggcuaagc

SEQ ID NO: 573680 - RNA, 19 nt, Artificial Sequence
  Description of Artificial Sequence: Synthetic oligonucleotide
gcugcaauguauaccaugc

SEQ ID NO: 573681 - RNA, 19 nt, Artificial Sequence
  Description of Artificial Sequence: Synthetic oligonucleotide
aucucacuagcgcaugacu

SEQ ID NO: 573682 - RNA, 19 nt, Artificial Sequence
  Description of Artificial Sequence: Synthetic oligonucleotide
aacggaaaccccggucagg

SEQ ID NO: 573683 - RNA, 19 nt, Artificial Sequence
  Description of Artificial Sequence: Synthetic oligonucleotide
uuuugauagcggucggcuc

SEQ ID NO: 573684 - RNA, 19 nt, Artificial Sequence
  Description of Artificial Sequence: Synthetic oligonucleotide
aaccucacccauaugucca

SEQ ID NO: 573685 - RNA, 19 nt, Artificial Sequence
  Description of Artificial Sequence: Synthetic oligonucleotide
gauguuaugaaugcaggau

SEQ ID NO: 573686 - RNA, 19 nt, Artificial Sequence
  Description of Artificial Sequence: Synthetic oligonucleotide
uaucaagacugggagcaca

SEQ ID NO: 573687 - RNA, 19 nt, Artificial Sequence
  Description of Artificial Sequence: Synthetic oligonucleotide
uguccguuucagcucugcc

SEQ ID NO: 573688 - RNA, 19 nt, Artificial Sequence
  Description of Artificial Sequence: Synthetic oligonucleotide
uguccaugguaggaauggg

SEQ ID NO: 573689 - RNA, 19 nt, Artificial Sequence
  Description of Artificial Sequence: Synthetic oligonucleotide
aaguuucgcucauggucug

SEQ ID NO: 573690 - RNA, 19 nt, Artificial Sequence
  Description of Artificial Sequence: Synthetic oligonucleotide
uugcaguuggaaacgggau

SEQ ID NO: 573691 - RNA, 19 nt, Artificial Sequence
  Description of Artificial Sequence: Synthetic oligonucleotide
ugggagucggcaagggaca

SEQ ID NO: 573692 - RNA, 19 nt, Artificial Sequence
  Description of Artificial Sequence: Synthetic oligonucleotide
ugaucucacuagcgcauga

SEQ ID NO: 573693 - RNA, 19 nt, Artificial Sequence
  Description of Artificial Sequence: Synthetic oligonucleotide
ugccgauguuguuacgcag

SEQ ID NO: 573694 - RNA, 19 nt, Artificial Sequence
  Description of Artificial Sequence: Synthetic oligonucleotide
uacguaugguuggucaccc

SEQ ID NO: 573695 - RNA, 19 nt, Artificial Sequence
  Description of Artificial Sequence: Synthetic oligonucleotide
cugcaauguauaccaugcg

SEQ ID NO: 573696 - RNA, 19 nt, Artificial Sequence
  Description of Artificial Sequence: Synthetic oligonucleotide
aggacacaugggaaaaggg

SEQ ID NO: 573697 - RNA, 19 nt, Artificial Sequence
  Description of Artificial Sequence: Synthetic oligonucleotide
uccggcuaagcaccgcacc

SEQ ID NO: 573698 - RNA, 19 nt, Artificial Sequence
  Description of Artificial Sequence: Synthetic oligonucleotide
ucguggauauuggaacucc

SEQ ID NO: 573699 - RNA, 19 nt, Artificial Sequence
  Description of Artificial Sequence: Synthetic oligonucleotide
ggucugacaugccagcugc

SEQ ID NO: 573700 - RNA, 19 nt, Artificial Sequence
  Description of Artificial Sequence: Synthetic oligonucleotide
ucacccauauguccauggu

SEQ ID NO: 573701 - RNA, 19 nt, Artificial Sequence
  Description of Artificial Sequence: Synthetic oligonucleotide
guguccuggcuacauuagg

SEQ ID NO: 573702 - RNA, 19 nt, Artificial Sequence
  Description of Artificial Sequence: Synthetic oligonucleotide
acuagcgcaugacuccucu

SEQ ID NO: 573703 - RNA, 19 nt, Artificial Sequence
  Description of Artificial Sequence: Synthetic oligonucleotide
caccgcaccuuguaccucg

SEQ ID NO: 573704 - RNA, 19 nt, Artificial Sequence
  Description of Artificial Sequence: Synthetic oligonucleotide
ggaacuccaguacuuggcc

SEQ ID NO: 573705 - RNA, 19 nt, Artificial Sequence
  Description of Artificial Sequence: Synthetic oligonucleotide
aagaagcgcgccuggugga

SEQ ID NO: 573706 - RNA, 19 nt, Artificial Sequence
  Description of Artificial Sequence: Synthetic oligonucleotide
gccgaaguuucgcucaugg

SEQ ID NO: 573707 - RNA, 19 nt, Artificial Sequence
  Description of Artificial Sequence: Synthetic oligonucleotide
gaauggcuugcauccugcc

SEQ ID NO: 573708 - RNA, 19 nt, Artificial Sequence
  Description of Artificial Sequence: Synthetic oligonucleotide
guuucgcucauggucuggg

SEQ ID NO: 573709 - RNA, 19 nt, Artificial Sequence
  Description of Artificial Sequence: Synthetic oligonucleotide
ggauauuggaacuccagua

SEQ ID NO: 573710 - RNA, 19 nt, Artificial Sequence
  Description of Artificial Sequence: Synthetic oligonucleotide
uggcggaaaaggagaaccu

SEQ ID NO: 573711 - RNA, 19 nt, Artificial Sequence
  Description of Artificial Sequence: Synthetic oligonucleotide
uguguccuaggaaggcacu

SEQ ID NO: 573712 - RNA, 19 nt, Artificial Sequence
  Description of Artificial Sequence: Synthetic oligonucleotide
acacacacacacaccacuc

SEQ ID NO: 573713 - RNA, 19 nt, Artificial Sequence
  Description of Artificial Sequence: Synthetic oligonucleotide
agacccugcucgcugauaa

SEQ ID NO: 573714 - RNA, 19 nt, Artificial Sequence
  Description of Artificial Sequence: Synthetic oligonucleotide
cuggcuacauuaggaaccc

SEQ ID NO: 573715 - RNA, 19 nt, Artificial Sequence
  Description of Artificial Sequence: Synthetic oligonucleotide
guagccgagugucagugga

SEQ ID NO: 573716 - RNA, 19 nt, Artificial Sequence
  Description of Artificial Sequence: Synthetic oligonucleotide
gaccaagagucuccugccc

SEQ ID NO: 573717 - RNA, 19 nt, Artificial Sequence
  Description of Artificial Sequence: Synthetic oligonucleotide
ccugcucgcugauaaaacg

SEQ ID NO: 573718 - RNA, 19 nt, Artificial Sequence
  Description of Artificial Sequence: Synthetic oligonucleotide
  modified_base (15)..(15): a, c, u, g, unknown or other
acucccuccugggunauuc

SEQ ID NO: 573719 - RNA, 19 nt, Artificial Sequence
  Description of Artificial Sequence: Synthetic oligonucleotide
acacacacacaccacucaa

SEQ ID NO: 573720 - RNA, 19 nt, Artificial Sequence
  Description of Artificial Sequence: Synthetic oligonucleotide
uuggucacccaccacucuu

SEQ ID NO: 573721 - RNA, 19 nt, Artificial Sequence
  Description of Artificial Sequence: Synthetic oligonucleotide
gcaggacacacacacacac

SEQ ID NO: 573722 - RNA, 19 nt, Artificial Sequence
  Description of Artificial Sequence: Synthetic oligonucleotide
agcaccgcaccuuguaccu

SEQ ID NO: 573723 - RNA, 19 nt, Artificial Sequence
  Description of Artificial Sequence: Synthetic oligonucleotide
agccuaaccucacccauau

SEQ ID NO: 573724 - RNA, 19 nt, Artificial Sequence
  Description of Artificial Sequence: Synthetic oligonucleotide
ucugugugggagucggcaa

SEQ ID NO: 573725 - RNA, 19 nt, Artificial Sequence
  Description of Artificial Sequence: Synthetic oligonucleotide
ggcggaaugggcgugugcg

SEQ ID NO: 573726 - RNA, 19 nt, Artificial Sequence
  Description of Artificial Sequence: Synthetic oligonucleotide
agccugauccucuguuaag

SEQ ID NO: 573727 - RNA, 19 nt, Artificial Sequence
  Description of Artificial Sequence: Synthetic oligonucleotide
guacguaugguuggucacc

SEQ ID NO: 573728 - RNA, 19 nt, Artificial Sequence
  Description of Artificial Sequence: Synthetic oligonucleotide
caguacguaugguugguca

SEQ ID NO: 573729 - RNA, 19 nt, Artificial Sequence
  Description of Artificial Sequence: Synthetic oligonucleotide
guauaccaugcgcucgcag

SEQ ID NO: 573730 - RNA, 19 nt, Artificial Sequence
  Description of Artificial Sequence: Synthetic oligonucleotide
  modified_base (7)..(7): a, c, u, g, unknown or other
cugggunauucugaggcca

SEQ ID NO: 573731 - RNA, 19 nt, Artificial Sequence
  Description of Artificial Sequence: Synthetic oligonucleotide
guaugguuggucacccacc

SEQ ID NO: 573732 - RNA, 19 nt, Artificial Sequence
  Description of Artificial Sequence: Synthetic oligonucleotide
cgaaguuucgcucaugguc

SEQ ID NO: 573733 - RNA, 19 nt, Artificial Sequence
  Description of Artificial Sequence: Synthetic oligonucleotide
accggcaucgacaccuugg

SEQ ID NO: 573734 - RNA, 19 nt, Artificial Sequence
  Description of Artificial Sequence: Synthetic oligonucleotide
cugugugggagucggcaag

SEQ ID NO: 573735 - RNA, 19 nt, Artificial Sequence
  Description of Artificial Sequence: Synthetic oligonucleotide
  modified_base (3)..(3): a, c, u, g, unknown or other
gunauucugaggccaggaa

SEQ ID NO: 573736 - RNA, 19 nt, Artificial Sequence
  Description of Artificial Sequence: Synthetic oligonucleotide
ugacaguccccacgggcac

SEQ ID NO: 573737 - RNA, 19 nt, Artificial Sequence
  Description of Artificial Sequence: Synthetic oligonucleotide
augguuggucacccaccac

SEQ ID NO: 573738 - RNA, 19 nt, Artificial Sequence
  Description of Artificial Sequence: Synthetic oligonucleotide
ucguugagcugcaccggca

SEQ ID NO: 573739 - RNA, 19 nt, Artificial Sequence
  Description of Artificial Sequence: Synthetic oligonucleotide
ggaguaggcagagacagca

SEQ ID NO: 573740 - RNA, 19 nt, Artificial Sequence
  Description of Artificial Sequence: Synthetic oligonucleotide
cucgcugauaaaacggaaa

SEQ ID NO: 573741 - RNA, 19 nt, Artificial Sequence
  Description of Artificial Sequence: Synthetic oligonucleotide
acggccccguccaaguucc

SEQ ID NO: 573742 - RNA, 19 nt, Artificial Sequence
  Description of Artificial Sequence: Synthetic oligonucleotide
gaaugggcgugugcgagac

SEQ ID NO: 573743 - RNA, 19 nt, Artificial Sequence
  Description of Artificial Sequence: Synthetic oligonucleotide
gaucucacuagcgcaugac

SEQ ID NO: 573744 - RNA, 19 nt, Artificial Sequence
  Description of Artificial Sequence: Synthetic oligonucleotide
gcuacauuaggaacccugc

SEQ ID NO: 573745 - RNA, 19 nt, Artificial Sequence
  Description of Artificial Sequence: Synthetic oligonucleotide
ggucaggccgcucacacuc

SEQ ID NO: 573746 - RNA, 19 nt, Artificial Sequence
  Description of Artificial Sequence: Synthetic oligonucleotide
cacacucguaggucucucc

SEQ ID NO: 573747 - RNA, 19 nt, Artificial Sequence
  Description of Artificial Sequence: Synthetic oligonucleotide
ccagaaccucuucagacag

SEQ ID NO: 573748 - RNA, 19 nt, Artificial Sequence
  Description of Artificial Sequence: Synthetic oligonucleotide
ccuccaguacguaugguug

SEQ ID NO: 573749 - RNA, 19 nt, Artificial Sequence
  Description of Artificial Sequence: Synthetic oligonucleotide
acacacacacacacaccac

SEQ ID NO: 573750 - RNA, 19 nt, Artificial Sequence
  Description of Artificial Sequence: Synthetic oligonucleotide
cacccaccacucuuugccg

SEQ ID NO: 573751 - RNA, 19 nt, Artificial Sequence
  Description of Artificial Sequence: Synthetic oligonucleotide
agccgagugucaguggaag

SEQ ID NO: 573752 - RNA, 19 nt, Artificial Sequence
  Description of Artificial Sequence: Synthetic oligonucleotide
cagccuccaguacguaugg

SEQ ID NO: 573753 - RNA, 19 nt, Artificial Sequence
  Description of Artificial Sequence: Synthetic oligonucleotide
cauauguccaugguaggaa

SEQ ID NO: 573754 - RNA, 19 nt, Artificial Sequence
  Description of Artificial Sequence: Synthetic oligonucleotide
auguuguuacgcaggauau

SEQ ID NO: 573755 - RNA, 19 nt, Artificial Sequence
  Description of Artificial Sequence: Synthetic oligonucleotide
ggaccaagagucuccugcc

SEQ ID NO: 573756 - RNA, 19 nt, Artificial Sequence
  Description of Artificial Sequence: Synthetic oligonucleotide
augccacuucccaaagagg

SEQ ID NO: 573757 - RNA, 19 nt, Artificial Sequence
  Description of Artificial Sequence: Synthetic oligonucleotide
gcgcuuugcaguuggaaac

SEQ ID NO: 573758 - RNA, 19 nt, Artificial Sequence
  Description of Artificial Sequence: Synthetic oligonucleotide
uagcggucggcuccccugc

SEQ ID NO: 573759 - RNA, 19 nt, Artificial Sequence
  Description of Artificial Sequence: Synthetic oligonucleotide
uuaucaagacugggagcac

SEQ ID NO: 573760 - RNA, 19 nt, Artificial Sequence
  Description of Artificial Sequence: Synthetic oligonucleotide
uccaguacguaugguuggu

SEQ ID NO: 573761 - RNA, 19 nt, Artificial Sequence
  Description of Artificial Sequence: Synthetic oligonucleotide
ugccgucagcucauucagc

SEQ ID NO: 573762 - RNA, 19 nt, Artificial Sequence
  Description of Artificial Sequence: Synthetic oligonucleotide
agaagcgcgccugguggac

SEQ ID NO: 573763 - RNA, 19 nt, Artificial Sequence
  Description of Artificial Sequence: Synthetic oligonucleotide
gguacguggaggaguaggc

SEQ ID NO: 573764 - RNA, 19 nt, Artificial Sequence
  Description of Artificial Sequence: Synthetic oligonucleotide
gcuaccagagcacggcccc

SEQ ID NO: 573765 - RNA, 19 nt, Artificial Sequence
  Description of Artificial Sequence: Synthetic oligonucleotide
gaaaccccggucaggccgc

SEQ ID NO: 573766 - RNA, 19 nt, Artificial Sequence
  Description of Artificial Sequence: Synthetic oligonucleotide
aguuucgcucauggucugg

SEQ ID NO: 573767 - RNA, 19 nt, Artificial Sequence
  Description of Artificial Sequence: Synthetic oligonucleotide
aagccgaaguuucgcucau

SEQ ID NO: 573768 - RNA, 19 nt, Artificial Sequence
  Description of Artificial Sequence: Synthetic oligonucleotide
gcaggcgcuuugcaguugg

SEQ ID NO: 573769 - RNA, 19 nt, Artificial Sequence
  Description of Artificial Sequence: Synthetic oligonucleotide
ccuaaccucacccauaugu

SEQ ID NO: 573770 - RNA, 19 nt, Artificial Sequence
  Description of Artificial Sequence: Synthetic oligonucleotide
uguauaccaugcgcucgca

SEQ ID NO: 573771 - RNA, 19 nt, Artificial Sequence
  Description of Artificial Sequence: Synthetic oligonucleotide
guccuggcuacauuaggaa

SEQ ID NO: 573772 - RNA, 19 nt, Artificial Sequence
  Description of Artificial Sequence: Synthetic oligonucleotide
uggucacccaccacucuuu

SEQ ID NO: 573773 - RNA, 19 nt, Artificial Sequence
  Description of Artificial Sequence: Synthetic oligonucleotide
accacucaagcuggcucac

SEQ ID NO: 573774 - RNA, 19 nt, Artificial Sequence
  Description of Artificial Sequence: Synthetic oligonucleotide
auacggcuggccuggucca

SEQ ID NO: 573775 - RNA, 19 nt, Artificial Sequence
  Description of Artificial Sequence: Synthetic oligonucleotide
ggauauuccaaaggcucac

SEQ ID NO: 573776 - RNA, 19 nt, Artificial Sequence
  Description of Artificial Sequence: Synthetic oligonucleotide
cacacacacacaccacuca

SEQ ID NO: 573777 - RNA, 19 nt, Artificial Sequence
  Description of Artificial Sequence: Synthetic oligonucleotide
cugcuguccgucugccgcc

SEQ ID NO: 573778 - RNA, 19 nt, Artificial Sequence
  Description of Artificial Sequence: Synthetic oligonucleotide
accaugcgcucgcaggggu

SEQ ID NO: 573779 - RNA, 19 nt, Artificial Sequence
  Description of Artificial Sequence: Synthetic oligonucleotide
aaacgggaugcaggcccag

SEQ ID NO: 573780 - RNA, 19 nt, Artificial Sequence
  Description of Artificial Sequence: Synthetic oligonucleotide
aaugggcgugugcgagaca

SEQ ID NO: 573781 - RNA, 19 nt, Artificial Sequence
  Description of Artificial Sequence: Synthetic oligonucleotide
uggcaggagcuaucuugug

SEQ ID NO: 573782 - RNA, 19 nt, Artificial Sequence
  Description of Artificial Sequence: Synthetic oligonucleotide
cugaagggaccgacuggug

SEQ ID NO: 573783 - RNA, 19 nt, Artificial Sequence
  Description of Artificial Sequence: Synthetic oligonucleotide
ggcgcuuugcaguuggaaa

SEQ ID NO: 573784 - RNA, 19 nt, Artificial Sequence
  Description of Artificial Sequence: Synthetic oligonucleotide
cuaagcaccgcaccuugua

SEQ ID NO: 573785 - RNA, 19 nt, Artificial Sequence
  Description of Artificial Sequence: Synthetic oligonucleotide
gcaauguauaccaugcgcu

SEQ ID NO: 573786 - RNA, 19 nt, Artificial Sequence
  Description of Artificial Sequence: Synthetic oligonucleotide
caugggaaaagggcaucuc

SEQ ID NO: 573787 - RNA, 19 nt, Artificial Sequence
  Description of Artificial Sequence: Synthetic oligonucleotide
uggcggaaugggcgugugc

SEQ ID NO: 573788 - RNA, 19 nt, Artificial Sequence
  Description of Artificial Sequence: Synthetic oligonucleotide
gaaacgggaugcaggccca

SEQ ID NO: 573789 - RNA, 19 nt, Artificial Sequence
  Description of Artificial Sequence: Synthetic oligonucleotide
agggaccgacuggugggcc

SEQ ID NO: 573790 - RNA, 19 nt, Artificial Sequence
  Description of Artificial Sequence: Synthetic oligonucleotide
guuacgcaggauauuccaa

SEQ ID NO: 573791 - RNA, 19 nt, Artificial Sequence
  Description of Artificial Sequence: Synthetic oligonucleotide
cacacacacacacaccacu

SEQ ID NO: 573792 - RNA, 19 nt, Artificial Sequence
  Description of Artificial Sequence: Synthetic oligonucleotide
agucuaggacagucuuuau

SEQ ID NO: 573793 - RNA, 19 nt, Artificial Sequence
  Description of Artificial Sequence: Synthetic oligonucleotide
cccauauguccaugguagg

SEQ ID NO: 573794 - RNA, 19 nt, Artificial Sequence
  Description of Artificial Sequence: Synthetic oligonucleotide
cagagcacggccccgucca

SEQ ID NO: 573795 - RNA, 19 nt, Artificial Sequence
  Description of Artificial Sequence: Synthetic oligonucleotide
  modified_base (8)..(8): a, c, u, g, unknown or other
ccugggunauucugaggcc

SEQ ID NO: 573796 - RNA, 19 nt, Artificial Sequence
  Description of Artificial Sequence: Synthetic oligonucleotide
cucugugugggagucggca

SEQ ID NO: 573797 - RNA, 19 nt, Artificial Sequence
  Description of Artificial Sequence: Synthetic oligonucleotide
caggacacacacacacaca

SEQ ID NO: 573798 - RNA, 19 nt, Artificial Sequence
  Description of Artificial Sequence: Synthetic oligonucleotide
ucugcgugacaggcggaga

SEQ ID NO: 573799 - RNA, 19 nt, Artificial Sequence
  Description of Artificial Sequence: Synthetic oligonucleotide
gguguccuggcuacauuag

SEQ ID NO: 573800 - RNA, 19 nt, Artificial Sequence
  Description of Artificial Sequence: Synthetic oligonucleotide
cuccccguagugcucgauc

SEQ ID NO: 573801 - RNA, 19 nt, Artificial Sequence
  Description of Artificial Sequence: Synthetic oligonucleotide
gccgagugucaguggaagg

SEQ ID NO: 573802 - RNA, 19 nt, Artificial Sequence
  Description of Artificial Sequence: Synthetic oligonucleotide
cguaugguuggucacccac

SEQ ID NO: 573803 - RNA, 19 nt, Artificial Sequence
  Description of Artificial Sequence: Synthetic oligonucleotide
cuuguguguuucggaugag

SEQ ID NO: 573804 - RNA, 19 nt, Artificial Sequence
  Description of Artificial Sequence: Synthetic oligonucleotide
aagcgcgccugguggacua

SEQ ID NO: 573805 - RNA, 19 nt, Artificial Sequence
  Description of Artificial Sequence: Synthetic oligonucleotide
ggcauugaauuagguuucc

SEQ ID NO: 573806 - RNA, 19 nt, Artificial Sequence
  Description of Artificial Sequence: Synthetic oligonucleotide
gggcauugaauuagguuuc

SEQ ID NO: 573807 - RNA, 19 nt, Artificial Sequence
  Description of Artificial Sequence: Synthetic oligonucleotide
agcaggacacacacacaca

SEQ ID NO: 573808 - RNA, 19 nt, Artificial Sequence
  Description of Artificial Sequence: Synthetic oligonucleotide
gaaugcaggaugucaccuu

SEQ ID NO: 573809 - RNA, 19 nt, Artificial Sequence
  Description of Artificial Sequence: Synthetic oligonucleotide
gugaagccgaaguuucgcu

SEQ ID NO: 573810 - RNA, 19 nt, Artificial Sequence
  Description of Artificial Sequence: Synthetic oligonucleotide
cacccauauguccauggua

SEQ ID NO: 573811 - RNA, 19 nt, Artificial Sequence
  Description of Artificial Sequence: Synthetic oligonucleotide
gccacucaggauguuauga

SEQ ID NO: 573812 - RNA, 19 nt, Artificial Sequence
  Description of Artificial Sequence: Synthetic oligonucleotide
cagccugauccucuguuaa

SEQ ID NO: 573813 - RNA, 19 nt, Artificial Sequence
  Description of Artificial Sequence: Synthetic oligonucleotide
agcggucggcuccccugcg

SEQ ID NO: 573814 - RNA, 19 nt, Artificial Sequence
  Description of Artificial Sequence: Synthetic oligonucleotide
gcugguggugaucucacua

SEQ ID NO: 573815 - RNA, 19 nt, Artificial Sequence
  Description of Artificial Sequence: Synthetic oligonucleotide
acguaugguuggucaccca

SEQ ID NO: 573816 - RNA, 19 nt, Artificial Sequence
  Description of Artificial Sequence: Synthetic oligonucleotide
aggugauuuugcaguggca

SEQ ID NO: 573817 - RNA, 19 nt, Artificial Sequence
  Description of Artificial Sequence: Synthetic oligonucleotide
ggacacacacacacacacc

SEQ ID NO: 573818 - RNA, 19 nt, Artificial Sequence
  Description of Artificial Sequence: Synthetic oligonucleotide
aggagcuaucuuguguguu

SEQ ID NO: 573819 - RNA, 19 nt, Artificial Sequence
  Description of Artificial Sequence: Synthetic oligonucleotide
ggcucacaucuguuccagg

SEQ ID NO: 573820 - RNA, 19 nt, Artificial Sequence
  Description of Artificial Sequence: Synthetic oligonucleotide
gcuuggaauguuauagcaa

SEQ ID NO: 573821 - RNA, 19 nt, Artificial Sequence
  Description of Artificial Sequence: Synthetic oligonucleotide
cauuccggcuaagcaccgc

SEQ ID NO: 573822 - RNA, 19 nt, Artificial Sequence
  Description of Artificial Sequence: Synthetic oligonucleotide
ggcggaaaaggagaaccuc

SEQ ID NO: 573823 - RNA, 19 nt, Artificial Sequence
  Description of Artificial Sequence: Synthetic oligonucleotide
gucaggccgcucacacucg

SEQ ID NO: 573824 - RNA, 19 nt, Artificial Sequence
  Description of Artificial Sequence: Synthetic oligonucleotide
aguggcggaaugggcgugu

SEQ ID NO: 573825 - RNA, 19 nt, Artificial Sequence
  Description of Artificial Sequence: Synthetic oligonucleotide
ggucacccaccacucuuug

SEQ ID NO: 573826 - RNA, 19 nt, Artificial Sequence
  Description of Artificial Sequence: Synthetic oligonucleotide
ccugucucgcuggagcugc

SEQ ID NO: 573827 - RNA, 19 nt, Artificial Sequence
  Description of Artificial Sequence: Synthetic oligonucleotide
uccagggauuugccccaaa

SEQ ID NO: 573828 - RNA, 19 nt, Artificial Sequence
  Description of Artificial Sequence: Synthetic oligonucleotide
ggccuguauguuccccucc

SEQ ID NO: 573829 - RNA, 19 nt, Artificial Sequence
  Description of Artificial Sequence: Synthetic oligonucleotide
cccugcucgcugauaaaac

SEQ ID NO: 573830 - RNA, 19 nt, Artificial Sequence
  Description of Artificial Sequence: Synthetic oligonucleotide
gguuggucacccaccacuc

SEQ ID NO: 573831 - RNA, 19 nt, Artificial Sequence
  Description of Artificial Sequence: Synthetic oligonucleotide
ggcuaccagagcacggccc

SEQ ID NO: 573832 - RNA, 19 nt, Artificial Sequence
  Description of Artificial Sequence: Synthetic oligonucleotide
gcugacguugacagucccc

SEQ ID NO: 573833 - RNA, 19 nt, Artificial Sequence
  Description of Artificial Sequence: Synthetic oligonucleotide
cacuagcgcaugacuccuc

SEQ ID NO: 573834 - RNA, 19 nt, Artificial Sequence
  Description of Artificial Sequence: Synthetic oligonucleotide
ggaccgacuggugggcccg

SEQ ID NO: 573835 - RNA, 19 nt, Artificial Sequence
  Description of Artificial Sequence: Synthetic oligonucleotide
aggcgcuuugcaguuggaa

SEQ ID NO: 573836 - RNA, 19 nt, Artificial Sequence
  Description of Artificial Sequence: Synthetic oligonucleotide
cgcuuugcaguuggaaacg

SEQ ID NO: 573837 - RNA, 19 nt, Artificial Sequence
  Description of Artificial Sequence: Synthetic oligonucleotide
caugcgcucgcagggguca

SEQ ID NO: 573838 - RNA, 19 nt, Artificial Sequence
  Description of Artificial Sequence: Synthetic oligonucleotide
gggcuaccagagcacggcc

SEQ ID NO: 573839 - RNA, 19 nt, Artificial Sequence
  Description of Artificial Sequence: Synthetic oligonucleotide
gggaccgacuggugggccc

SEQ ID NO: 573840 - RNA, 19 nt, Artificial Sequence
  Description of Artificial Sequence: Synthetic oligonucleotide
ggaaugggcgugugcgaga

SEQ ID NO: 573841 - RNA, 19 nt, Artificial Sequence
  Description of Artificial Sequence: Synthetic oligonucleotide
gaacccugcuugccugcaa

SEQ ID NO: 573842 - RNA, 19 nt, Artificial Sequence
  Description of Artificial Sequence: Synthetic oligonucleotide
guccgucugccgccugaag

SEQ ID NO: 573843 - RNA, 19 nt, Artificial Sequence
  Description of Artificial Sequence: Synthetic oligonucleotide
gagccuaaccucacccaua

SEQ ID NO: 573844 - RNA, 19 nt, Artificial Sequence
  Description of Artificial Sequence: Synthetic oligonucleotide
gcaaucccuggaacacacg

SEQ ID NO: 573845 - RNA, 19 nt, Artificial Sequence
  Description of Artificial Sequence: Synthetic oligonucleotide
ccauauguccaugguagga

SEQ ID NO: 573846 - RNA, 19 nt, Artificial Sequence
  Description of Artificial Sequence: Synthetic oligonucleotide
ggugguacguggaggagua

SEQ ID NO: 573847 - RNA, 19 nt, Artificial Sequence
  Description of Artificial Sequence: Synthetic oligonucleotide
ccguagugcucgauccagc

SEQ ID NO: 573848 - RNA, 19 nt, Artificial Sequence
  Description of Artificial Sequence: Synthetic oligonucleotide
ggcagugagagggagccua

SEQ ID NO: 573849 - RNA, 19 nt, Artificial Sequence
  Description of Artificial Sequence: Synthetic oligonucleotide
uggcuacauuaggaacccu

SEQ ID NO: 573850 - RNA, 19 nt, Artificial Sequence
  Description of Artificial Sequence: Synthetic oligonucleotide
ggagccuaaccucacccau

SEQ ID NO: 573851 - RNA, 19 nt, Artificial Sequence
  Description of Artificial Sequence: Synthetic oligonucleotide
gcauugaauuagguuucca

SEQ ID NO: 573852 - RNA, 19 nt, Artificial Sequence
  Description of Artificial Sequence: Synthetic oligonucleotide
agccgaaguuucgcucaug

SEQ ID NO: 573853 - RNA, 19 nt, Artificial Sequence
  Description of Artificial Sequence: Synthetic oligonucleotide
aaccccggucaggccgcuc

SEQ ID NO: 573854 - RNA, 19 nt, Artificial Sequence
  Description of Artificial Sequence: Synthetic oligonucleotide
ugcgcucgcaggggucagc

SEQ ID NO: 573855 - RNA, 19 nt, Artificial Sequence
  Description of Artificial Sequence: Synthetic oligonucleotide
gugguacguggaggaguag

SEQ ID NO: 573856 - RNA, 19 nt, Artificial Sequence
  Description of Artificial Sequence: Synthetic oligonucleotide
ccggucaggccgcucacac

SEQ ID NO: 573857 - RNA, 19 nt, Artificial Sequence
  Description of Artificial Sequence: Synthetic oligonucleotide
ggugaucucacuagcgcau

SEQ ID NO: 573858 - RNA, 19 nt, Artificial Sequence
  Description of Artificial Sequence: Synthetic oligonucleotide
caccggcaucgacaccuug

SEQ ID NO: 573859 - RNA, 19 nt, Artificial Sequence
  Description of Artificial Sequence: Synthetic oligonucleotide
cgacuggugggcccguggg

SEQ ID NO: 573860 - RNA, 19 nt, Artificial Sequence
  Description of Artificial Sequence: Synthetic oligonucleotide
caguuggaaacgggaugca

SEQ ID NO: 573861 - RNA, 19 nt, Artificial Sequence
  Description of Artificial Sequence: Synthetic oligonucleotide
ccgacuggugggcccgugg

SEQ ID NO: 573862 - RNA, 19 nt, Artificial Sequence
  Description of Artificial Sequence: Synthetic oligonucleotide
caggagcuaucuugugugu

SEQ ID NO: 573863 - RNA, 19 nt, Artificial Sequence
  Description of Artificial Sequence: Synthetic oligonucleotide
cagcgcgcagccuccagua

SEQ ID NO: 573864 - RNA, 19 nt, Artificial Sequence
  Description of Artificial Sequence: Synthetic oligonucleotide
cugcgugacaggcggagau

SEQ ID NO: 573865 - RNA, 19 nt, Artificial Sequence
  Description of Artificial Sequence: Synthetic oligonucleotide
cgaccauuccggcuaagca

SEQ ID NO: 573866 - RNA, 19 nt, Artificial Sequence
  Description of Artificial Sequence: Synthetic oligonucleotide
guguuucggaugagcaccu

SEQ ID NO: 573867 - RNA, 19 nt, Artificial Sequence
  Description of Artificial Sequence: Synthetic oligonucleotide
gcggucggcuccccugcgg

SEQ ID NO: 573868 - RNA, 19 nt, Artificial Sequence
  Description of Artificial Sequence: Synthetic oligonucleotide
caguggcggaaugggcgug

SEQ ID NO: 573869 - RNA, 19 nt, Artificial Sequence
  Description of Artificial Sequence: Synthetic oligonucleotide
cuguuaagcugagccugaa

SEQ ID NO: 573870 - RNA, 19 nt, Artificial Sequence
  Description of Artificial Sequence: Synthetic oligonucleotide
cugccccuuugcccucaag

SEQ ID NO: 573871 - RNA, 19 nt, Artificial Sequence
  Description of Artificial Sequence: Synthetic oligonucleotide
guggcggaaugggcgugug

SEQ ID NO: 573872 - RNA, 19 nt, Artificial Sequence
  Description of Artificial Sequence: Synthetic oligonucleotide
gccgcucacacucguaggu

SEQ ID NO: 573873 - RNA, 19 nt, Artificial Sequence
  Description of Artificial Sequence: Synthetic oligonucleotide
cugcaccggcaucgacacc

SEQ ID NO: 573874 - RNA, 19 nt, Artificial Sequence
  Description of Artificial Sequence: Synthetic oligonucleotide
ccagggauuugccccaaaa

SEQ ID NO: 573875 - RNA, 19 nt, Artificial Sequence
  Description of Artificial Sequence: Synthetic oligonucleotide
guaccucuggucaggccgu

SEQ ID NO: 573876 - RNA, 19 nt, Artificial Sequence
  Description of Artificial Sequence: Synthetic oligonucleotide
cguggauauuggaacucca

SEQ ID NO: 573877 - RNA, 19 nt, Artificial Sequence
  Description of Artificial Sequence: Synthetic oligonucleotide
cggaaugggcgugugcgag

SEQ ID NO: 573878 - RNA, 19 nt, Artificial Sequence
  Description of Artificial Sequence: Synthetic oligonucleotide
gccgccugaagaagcgcgc

SEQ ID NO: 573879 - RNA, 19 nt, Artificial Sequence
  Description of Artificial Sequence: Synthetic oligonucleotide
augcgcucgcaggggucag

SEQ ID NO: 573880 - RNA, 19 nt, Artificial Sequence
  Description of Artificial Sequence: Synthetic oligonucleotide
cgugugcgagacacagccc

SEQ ID NO: 573881 - RNA, 19 nt, Artificial Sequence
  Description of Artificial Sequence: Synthetic oligonucleotide
gcggaaugggcgugugcga

SEQ ID NO: 573882 - RNA, 19 nt, Artificial Sequence
  Description of Artificial Sequence: Synthetic oligonucleotide
gcucgcugauaaaacggaa

SEQ ID NO: 573883 - RNA, 19 nt, Artificial Sequence
  Description of Artificial Sequence: Synthetic oligonucleotide
  modified_base (17)..(17): a, c, u, g, unknown or other
ucacucccuccugggunau

SEQ ID NO: 573884 - RNA, 19 nt, Artificial Sequence
  Description of Artificial Sequence: Synthetic oligonucleotide
ccggcaucgacaccuugga

SEQ ID NO: 573885 - RNA, 19 nt, Artificial Sequence
  Description of Artificial Sequence: Synthetic oligonucleotide
cacgaccauuccggcuaag

SEQ ID NO: 573886 - RNA, 19 nt, Artificial Sequence
  Description of Artificial Sequence: Synthetic oligonucleotide
gaagcgcgccugguggacu

SEQ ID NO: 573887 - RNA, 19 nt, Artificial Sequence
  Description of Artificial Sequence: Synthetic oligonucleotide
gcucgcaggggucagccau

SEQ ID NO: 573888 - RNA, 19 nt, Artificial Sequence
  Description of Artificial Sequence: Synthetic oligonucleotide
ccgucagcucauucagcuc

SEQ ID NO: 573889 - RNA, 19 nt, Artificial Sequence
  Description of Artificial Sequence: Synthetic oligonucleotide
ccugaagggaccgacuggu

SEQ ID NO: 573890 - RNA, 19 nt, Artificial Sequence
  Description of Artificial Sequence: Synthetic oligonucleotide
gcgcucgcaggggucagcc

SEQ ID NO: 573891 - RNA, 19 nt, Artificial Sequence
  Description of Artificial Sequence: Synthetic oligonucleotide
gccuaaccucacccauaug

SEQ ID NO: 573892 - RNA, 19 nt, Artificial Sequence
  Description of Artificial Sequence: Synthetic oligonucleotide
cggcucguugagcugcacc

SEQ ID NO: 573893 - RNA, 19 nt, Artificial Sequence
  Description of Artificial Sequence: Synthetic oligonucleotide
gccucggcggccuguaugu

SEQ ID NO: 573894 - RNA, 19 nt, Artificial Sequence
  Description of Artificial Sequence: Synthetic oligonucleotide
ccaguacguaugguugguc

SEQ ID NO: 573895 - RNA, 19 nt, Artificial Sequence
  Description of Artificial Sequence: Synthetic oligonucleotide
ccgccugaagaagcgcgcc

SEQ ID NO: 573896 - RNA, 19 nt, Artificial Sequence
  Description of Artificial Sequence: Synthetic oligonucleotide
ggaacccugcuugccugca

SEQ ID NO: 573897 - RNA, 19 nt, Artificial Sequence
  Description of Artificial Sequence: Synthetic oligonucleotide
accgacuggugggcccgug

SEQ ID NO: 573898 - RNA, 19 nt, Artificial Sequence
  Description of Artificial Sequence: Synthetic oligonucleotide
caggcgcuuugcaguugga

SEQ ID NO: 573899 - RNA, 19 nt, Artificial Sequence
  Description of Artificial Sequence: Synthetic oligonucleotide
cacaccacucaagcuggcu

SEQ ID NO: 573900 - RNA, 19 nt, Artificial Sequence
  Description of Artificial Sequence: Synthetic oligonucleotide
ggagaaccucgcaggcauc

SEQ ID NO: 573901 - RNA, 19 nt, Artificial Sequence
  Description of Artificial Sequence: Synthetic oligonucleotide
gggcacgaucuccagggau

SEQ ID NO: 573902 - RNA, 19 nt, Artificial Sequence
  Description of Artificial Sequence: Synthetic oligonucleotide
accgcaccuuguaccucgu

SEQ ID NO: 573903 - RNA, 19 nt, Artificial Sequence
  Description of Artificial Sequence: Synthetic oligonucleotide
gcggccuguauguuccccu

SEQ ID NO: 573904 - RNA, 19 nt, Artificial Sequence
  Description of Artificial Sequence: Synthetic oligonucleotide
cggaaaccccggucaggcc

SEQ ID NO: 573905 - RNA, 19 nt, Artificial Sequence
  Description of Artificial Sequence: Synthetic oligonucleotide
cuagcgcaugacuccucuu

SEQ ID NO: 573906 - RNA, 19 nt, Artificial Sequence
  Description of Artificial Sequence: Synthetic oligonucleotide
ggccccguccaaguuccca

SEQ ID NO: 573907 - RNA, 19 nt, Artificial Sequence
  Description of Artificial Sequence: Synthetic oligonucleotide
cccuggaacacacggcccu

SEQ ID NO: 573908 - RNA, 19 nt, Artificial Sequence
  Description of Artificial Sequence: Synthetic oligonucleotide
ccggcuaagcaccgcaccu

SEQ ID NO: 573909 - RNA, 19 nt, Artificial Sequence
  Description of Artificial Sequence: Synthetic oligonucleotide
ggucuuugccgauguuguu

SEQ ID NO: 573910 - RNA, 19 nt, Artificial Sequence
  Description of Artificial Sequence: Synthetic oligonucleotide
ccggugguacguggaggag

SEQ ID NO: 573911 - RNA, 19 nt, Artificial Sequence
  Description of Artificial Sequence: Synthetic oligonucleotide
gccccguccaaguucccau

SEQ ID NO: 573912 - RNA, 19 nt, Artificial Sequence
  Description of Artificial Sequence: Synthetic oligonucleotide
ccgaaguuucgcucauggu

SEQ ID NO: 573913 - RNA, 19 nt, Artificial Sequence
  Description of Artificial Sequence: Synthetic oligonucleotide
agcgcgccugguggacuau

SEQ ID NO: 573914 - RNA, 19 nt, Artificial Sequence
  Description of Artificial Sequence: Synthetic oligonucleotide
ccgcaccuuguaccucgug

SEQ ID NO: 573915 - RNA, 19 nt, Artificial Sequence
  Description of Artificial Sequence: Synthetic oligonucleotide
guguguugagcggcucguu

SEQ ID NO: 573916 - RNA, 19 nt, Artificial Sequence
  Description of Artificial Sequence: Synthetic oligonucleotide
gcaccgcaccuuguaccuc

SEQ ID NO: 573917 - RNA, 19 nt, Artificial Sequence
  Description of Artificial Sequence: Synthetic oligonucleotide
gcgcgccugguggacuaug

SEQ ID NO: 573918 - RNA, 19 nt, Artificial Sequence
  Description of Artificial Sequence: Synthetic oligonucleotide
ccccguccaaguucccaua

SEQ ID NO: 573919 - RNA, 19 nt, Artificial Sequence
  Description of Artificial Sequence: Synthetic oligonucleotide
gaccgacuggugggcccgu

SEQ ID NO: 573920 - RNA, 19 nt, Artificial Sequence
  Description of Artificial Sequence: Synthetic oligonucleotide
cuuguaccucguggauauu

SEQ ID NO: 573921 - RNA, 19 nt, Artificial Sequence
  Description of Artificial Sequence: Synthetic oligonucleotide
gcgccugguggacuauguu

SEQ ID NO: 573922 - RNA, 19 nt, Artificial Sequence
  Description of Artificial Sequence: Synthetic oligonucleotide
ggccuugcagaaggugauu

SEQ ID NO: 573923 - RNA, 19 nt, Artificial Sequence
  Description of Artificial Sequence: Synthetic oligonucleotide
cggugguacguggaggagu

SEQ ID NO: 573924 - RNA, 19 nt, Artificial Sequence
  Description of Artificial Sequence: Synthetic oligonucleotide
cggcggccuguauguuccc

SEQ ID NO: 573925 - RNA, 19 nt, Artificial Sequence
  Description of Artificial Sequence: Synthetic oligonucleotide
  modified_base (16)..(16): a, c, u, g, unknown or other
cacucccuccugggunauu

SEQ ID NO: 573926 - RNA, 19 nt, Artificial Sequence
  Description of Artificial Sequence: Synthetic oligonucleotide
cccggucaggccgcucaca

SEQ ID NO: 573927 - RNA, 19 nt, Artificial Sequence
  Description of Artificial Sequence: Synthetic oligonucleotide
cgcgccugguggacuaugu

SEQ ID NO: 573928 - RNA, 19 nt, Artificial Sequence
  Description of Artificial Sequence: Synthetic oligonucleotide
cgccugaagaagcgcgccu

SEQ ID NO: 573929 - RNA, 19 nt, Artificial Sequence
  Description of Artificial Sequence: Synthetic oligonucleotide
cgcucgcaggggucagcca

SEQ ID NO: 573930 - RNA, 19 nt, Artificial Sequence
  Description of Artificial Sequence: Synthetic oligonucleotide
cggucggcuccccugcggu

SEQ ID NO: 573931 - RNA, 19 nt, Artificial Sequence
  Description of Artificial Sequence: Synthetic oligonucleotide
cggccccguccaaguuccc

SEQ ID NO: 573932 - RNA, 19 nt, Artificial Sequence
  Description of Artificial Sequence: Synthetic oligonucleotide
ccccaaaccugggcaggcu

SEQ ID NO: 573933 - RNA, 19 nt, Artificial Sequence
  Description of Artificial Sequence: Synthetic oligonucleotide
gcaccggcaucgacaccuu

SEQ ID NO: 573934 - RNA, 19 nt, Artificial Sequence
  Description of Artificial Sequence: Synthetic oligonucleotide
cggcuaagcaccgcaccuu

SEQ ID NO: 573935 - RNA, 19 nt, Artificial Sequence
  Description of Artificial Sequence: Synthetic oligonucleotide
aaaucuaugugccuuaauc

SEQ ID NO: 573936 - RNA, 19 nt, Artificial Sequence
  Description of Artificial Sequence: Synthetic oligonucleotide
uuugguauauaauuguucg

SEQ ID NO: 573937 - RNA, 19 nt, Artificial Sequence
  Description of Artificial Sequence: Synthetic oligonucleotide
auaaauacucgccagggcc

SEQ ID NO: 573938 - RNA, 19 nt, Artificial Sequence
  Description of Artificial Sequence: Synthetic oligonucleotide
aaccauuccauuucuauac

SEQ ID NO: 573939 - RNA, 19 nt, Artificial Sequence
  Description of Artificial Sequence: Synthetic oligonucleotide
acuaucaagcuauaaauac

SEQ ID NO: 573940 - RNA, 19 nt, Artificial Sequence
  Description of Artificial Sequence: Synthetic oligonucleotide
caaaucaugaggaagacag

SEQ ID NO: 573941 - RNA, 19 nt, Artificial Sequence
  Description of Artificial Sequence: Synthetic oligonucleotide
gaagaaaugaacuagucuc

SEQ ID NO: 573942 - RNA, 19 nt, Artificial Sequence
  Description of Artificial Sequence: Synthetic oligonucleotide
uaaaguagaaaacaugugu

SEQ ID NO: 573943 - RNA, 19 nt, Artificial Sequence
  Description of Artificial Sequence: Synthetic oligonucleotide
ucggaauuauguuacaugg

SEQ ID NO: 573944 - RNA, 19 nt, Artificial Sequence
  Description of Artificial Sequence: Synthetic oligonucleotide
aauauauggcacccuaaac

SEQ ID NO: 573945 - RNA, 19 nt, Artificial Sequence
  Description of Artificial Sequence: Synthetic oligonucleotide
ucuguuaaagcauggagag

SEQ ID NO: 573946 - RNA, 19 nt, Artificial Sequence
  Description of Artificial Sequence: Synthetic oligonucleotide
ucuaacuucuguaugggag

SEQ ID NO: 573947 - RNA, 19 nt, Artificial Sequence
  Description of Artificial Sequence: Synthetic oligonucleotide
acaauauucagguagguga

SEQ ID NO: 573948 - RNA, 19 nt, Artificial Sequence
  Description of Artificial Sequence: Synthetic oligonucleotide
agucuauuaauuucucugc

SEQ ID NO: 573949 - RNA, 19 nt, Artificial Sequence
  Description of Artificial Sequence: Synthetic oligonucleotide
auauaaacccuguucuucc

SEQ ID NO: 573950 - RNA, 19 nt, Artificial Sequence
  Description of Artificial Sequence: Synthetic oligonucleotide
caagguauaguacugagag

SEQ ID NO: 573951 - RNA, 19 nt, Artificial Sequence
  Description of Artificial Sequence: Synthetic oligonucleotide
uuuugagcuacaaaaggag

SEQ ID NO: 573952 - RNA, 19 nt, Artificial Sequence
  Description of Artificial Sequence: Synthetic oligonucleotide
auauuauaauauuuaaucu

SEQ ID NO: 573953 - RNA, 19 nt, Artificial Sequence
  Description of Artificial Sequence: Synthetic oligonucleotide
uguuaaaguagaaaacaug

SEQ ID NO: 573954 - RNA, 19 nt, Artificial Sequence
  Description of Artificial Sequence: Synthetic oligonucleotide
ucaauuacugucauuuuca

SEQ ID NO: 573955 - RNA, 19 nt, Artificial Sequence
  Description of Artificial Sequence: Synthetic oligonucleotide
uaauuguucggaauuaugu

SEQ ID NO: 573956 - RNA, 19 nt, Artificial Sequence
  Description of Artificial Sequence: Synthetic oligonucleotide
aauaagucugcuuccacca

SEQ ID NO: 573957 - RNA, 19 nt, Artificial Sequence
  Description of Artificial Sequence: Synthetic oligonucleotide
auauauggcacccuaaaca

SEQ ID NO: 573958 - RNA, 19 nt, Artificial Sequence
  Description of Artificial Sequence: Synthetic oligonucleotide
ucacugacaauccagaauc

SEQ ID NO: 573959 - RNA, 19 nt, Artificial Sequence
  Description of Artificial Sequence: Synthetic oligonucleotide
ugacaaugauucuacaucc

SEQ ID NO: 573960 - RNA, 19 nt, Artificial Sequence
  Description of Artificial Sequence: Synthetic oligonucleotide
ugaauugccgcucacaaau

SEQ ID NO: 573961 - RNA, 19 nt, Artificial Sequence
  Description of Artificial Sequence: Synthetic oligonucleotide
ucuaaacucaucugcauca

SEQ ID NO: 573962 - RNA, 19 nt, Artificial Sequence
  Description of Artificial Sequence: Synthetic oligonucleotide
ugacaauuaagcaauuccu

SEQ ID NO: 573963 - RNA, 19 nt, Artificial Sequence
  Description of Artificial Sequence: Synthetic oligonucleotide
caagcuauaaauaccacuc

SEQ ID NO: 573964 - RNA, 19 nt, Artificial Sequence
  Description of Artificial Sequence: Synthetic oligonucleotide
uagguauucauuucguaag

SEQ ID NO: 573965 - RNA, 19 nt, Artificial Sequence
  Description of Artificial Sequence: Synthetic oligonucleotide
uuaaaguagaaaacaugug

SEQ ID NO: 573966 - RNA, 19 nt, Artificial Sequence
  Description of Artificial Sequence: Synthetic oligonucleotide
cacuccaagaaguacaugc

SEQ ID NO: 573967 - RNA, 19 nt, Artificial Sequence
  Description of Artificial Sequence: Synthetic oligonucleotide
ugauaggucagucugcaca

SEQ ID NO: 573968 - RNA, 19 nt, Artificial Sequence
  Description of Artificial Sequence: Synthetic oligonucleotide
cuuguagguauucauuucg

SEQ ID NO: 573969 - RNA, 19 nt, Artificial Sequence
  Description of Artificial Sequence: Synthetic oligonucleotide
cugacaauuaagcaauucc

SEQ ID NO: 573970 - RNA, 19 nt, Artificial Sequence
  Description of Artificial Sequence: Synthetic oligonucleotide
ugcaucauaaauacucgcc

SEQ ID NO: 573971 - RNA, 19 nt, Artificial Sequence
  Description of Artificial Sequence: Synthetic oligonucleotide
cacuuaucaaaucaugagg

SEQ ID NO: 573972 - RNA, 19 nt, Artificial Sequence
  Description of Artificial Sequence: Synthetic oligonucleotide
ugugcugacaauuaagcaa

SEQ ID NO: 573973 - RNA, 19 nt, Artificial Sequence
  Description of Artificial Sequence: Synthetic oligonucleotide
uguuaaagcauggagaguc

SEQ ID NO: 573974 - RNA, 19 nt, Artificial Sequence
  Description of Artificial Sequence: Synthetic oligonucleotide
ucggcuuuuaauuugugca

SEQ ID NO: 573975 - RNA, 19 nt, Artificial Sequence
  Description of Artificial Sequence: Synthetic oligonucleotide
auaacgggcaaauaagucu

SEQ ID NO: 573976 - RNA, 19 nt, Artificial Sequence
  Description of Artificial Sequence: Synthetic oligonucleotide
uccaagaaccuuuuaguag

SEQ ID NO: 573977 - RNA, 19 nt, Artificial Sequence
  Description of Artificial Sequence: Synthetic oligonucleotide
uuacacuccaagaaguaca

SEQ ID NO: 573978 - RNA, 19 nt, Artificial Sequence
  Description of Artificial Sequence: Synthetic oligonucleotide
aaaccuagcucugugcugg

SEQ ID NO: 573979 - RNA, 19 nt, Artificial Sequence
  Description of Artificial Sequence: Synthetic oligonucleotide
aggauauuaacacugcagu

SEQ ID NO: 573980 - RNA, 19 nt, Artificial Sequence
  Description of Artificial Sequence: Synthetic oligonucleotide
auuaacauccacagcaugg

SEQ ID NO: 573981 - RNA, 19 nt, Artificial Sequence
  Description of Artificial Sequence: Synthetic oligonucleotide
ucauaaauacucgccaggg

SEQ ID NO: 573982 - RNA, 19 nt, Artificial Sequence
  Description of Artificial Sequence: Synthetic oligonucleotide
cugcaguuaccuuacaugg

SEQ ID NO: 573983 - RNA, 19 nt, Artificial Sequence
  Description of Artificial Sequence: Synthetic oligonucleotide
aaacauguguucacaagac

SEQ ID NO: 573984 - RNA, 19 nt, Artificial Sequence
  Description of Artificial Sequence: Synthetic oligonucleotide
aacuauccacaguuugggc

SEQ ID NO: 573985 - RNA, 19 nt, Artificial Sequence
  Description of Artificial Sequence: Synthetic oligonucleotide
uggauuucgaaguaguccu

SEQ ID NO: 573986 - RNA, 19 nt, Artificial Sequence
  Description of Artificial Sequence: Synthetic oligonucleotide
aaggaggcgaucauaacgg

SEQ ID NO: 573987 - RNA, 19 nt, Artificial Sequence
  Description of Artificial Sequence: Synthetic oligonucleotide
aaggauauuaacacugcag

SEQ ID NO: 573988 - RNA, 19 nt, Artificial Sequence
  Description of Artificial Sequence: Synthetic oligonucleotide
ucuauaguuuucauuucug

SEQ ID NO: 573989 - RNA, 19 nt, Artificial Sequence
  Description of Artificial Sequence: Synthetic oligonucleotide
agaagaaaugaacuagucu

SEQ ID NO: 573990 - RNA, 19 nt, Artificial Sequence
  Description of Artificial Sequence: Synthetic oligonucleotide
acccuaaacaucuugcaag

SEQ ID NO: 573991 - RNA, 19 nt, Artificial Sequence
  Description of Artificial Sequence: Synthetic oligonucleotide
uuugaauugccgcucacaa

SEQ ID NO: 573992 - RNA, 19 nt, Artificial Sequence
  Description of Artificial Sequence: Synthetic oligonucleotide
ucaagcuauaaauaccacu

SEQ ID NO: 573993 - RNA, 19 nt, Artificial Sequence
  Description of Artificial Sequence: Synthetic oligonucleotide
aauccaacuaucaagcuau

SEQ ID NO: 573994 - RNA, 19 nt, Artificial Sequence
  Description of Artificial Sequence: Synthetic oligonucleotide
acgacauugacuuuccugu

SEQ ID NO: 573995 - RNA, 19 nt, Artificial Sequence
  Description of Artificial Sequence: Synthetic oligonucleotide
uaacgggcaaauaagucug

SEQ ID NO: 573996 - RNA, 19 nt, Artificial Sequence
  Description of Artificial Sequence: Synthetic oligonucleotide
agucuguuaaagcauggag

SEQ ID NO: 573997 - RNA, 19 nt, Artificial Sequence
  Description of Artificial Sequence: Synthetic oligonucleotide
auguuuacacuccaagaag

SEQ ID NO: 573998 - RNA, 19 nt, Artificial Sequence
  Description of Artificial Sequence: Synthetic oligonucleotide
gagacacucauuugaauug

SEQ ID NO: 573999 - RNA, 19 nt, Artificial Sequence
  Description of Artificial Sequence: Synthetic oligonucleotide
uacuugacgauagauuagg

SEQ ID NO: 574000 - RNA, 19 nt, Artificial Sequence
  Description of Artificial Sequence: Synthetic oligonucleotide
uaacuauccacaguuuggg

SEQ ID NO: 574001 - RNA, 19 nt, Artificial Sequence
  Description of Artificial Sequence: Synthetic oligonucleotide
uugguauauaauuguucgg

SEQ ID NO: 574002 - RNA, 19 nt, Artificial Sequence
  Description of Artificial Sequence: Synthetic oligonucleotide
uuucguaagucuauuaauu

SEQ ID NO: 574003 - RNA, 19 nt, Artificial Sequence
  Description of Artificial Sequence: Synthetic oligonucleotide
cuugacgauagauuagggc

SEQ ID NO: 574004 - RNA, 19 nt, Artificial Sequence
  Description of Artificial Sequence: Synthetic oligonucleotide
aauuguucggaauuauguu

SEQ ID NO: 574005 - RNA, 19 nt, Artificial Sequence
  Description of Artificial Sequence: Synthetic oligonucleotide
aaauccaacuaucaagcua

SEQ ID NO: 574006 - RNA, 19 nt, Artificial Sequence
  Description of Artificial Sequence: Synthetic oligonucleotide
uucggaauuauguuacaug

SEQ ID NO: 574007 - RNA, 19 nt, Artificial Sequence
  Description of Artificial Sequence: Synthetic oligonucleotide
caaugauucuacauccugc

SEQ ID NO: 574008 - RNA, 19 nt, Artificial Sequence
  Description of Artificial Sequence: Synthetic oligonucleotide
uuguucggaauuauguuac

SEQ ID NO: 574009 - RNA, 19 nt, Artificial Sequence
  Description of Artificial Sequence: Synthetic oligonucleotide
auuagggcaaaccauucca

SEQ ID NO: 574010 - RNA, 19 nt, Artificial Sequence
  Description of Artificial Sequence: Synthetic oligonucleotide
acugccucgguguucuucc

SEQ ID NO: 574011 - RNA, 19 nt, Artificial Sequence
  Description of Artificial Sequence: Synthetic oligonucleotide
cuaaccuaaagcuugggga

SEQ ID NO: 574012 - RNA, 19 nt, Artificial Sequence
  Description of Artificial Sequence: Synthetic oligonucleotide
uucaguucggcuuuuaauu

SEQ ID NO: 574013 - RNA, 19 nt, Artificial Sequence
  Description of Artificial Sequence: Synthetic oligonucleotide
uguguucacaagacgcagg

SEQ ID NO: 574014 - RNA, 19 nt, Artificial Sequence
  Description of Artificial Sequence: Synthetic oligonucleotide
uuugcaguacacauguuua

SEQ ID NO: 574015 - RNA, 19 nt, Artificial Sequence
  Description of Artificial Sequence: Synthetic oligonucleotide
ucauaacgggcaaauaagu

SEQ ID NO: 574016 - RNA, 19 nt, Artificial Sequence
  Description of Artificial Sequence: Synthetic oligonucleotide
auaacuauccacaguuugg

SEQ ID NO: 574017 - RNA, 19 nt, Artificial Sequence
  Description of Artificial Sequence: Synthetic oligonucleotide
uucaaaaccuagcucugug

SEQ ID NO: 574018 - RNA, 19 nt, Artificial Sequence
  Description of Artificial Sequence: Synthetic oligonucleotide
uccuggaucagacuugaca

SEQ ID NO: 574019 - RNA, 19 nt, Artificial Sequence
  Description of Artificial Sequence: Synthetic oligonucleotide
acuauccacaguuugggca

SEQ ID NO: 574020 - RNA, 19 nt, Artificial Sequence
  Description of Artificial Sequence: Synthetic oligonucleotide
acauugacuuuccuguuag

SEQ ID NO: 574021 - RNA, 19 nt, Artificial Sequence
  Description of Artificial Sequence: Synthetic oligonucleotide
gagacaauauucagguagg

SEQ ID NO: 574022 - RNA, 19 nt, Artificial Sequence
  Description of Artificial Sequence: Synthetic oligonucleotide
uaggucagucugcacaagg

SEQ ID NO: 574023 - RNA, 19 nt, Artificial Sequence
  Description of Artificial Sequence: Synthetic oligonucleotide
aaguuuaacucuugacccu

SEQ ID NO: 574024 - RNA, 19 nt, Artificial Sequence
  Description of Artificial Sequence: Synthetic oligonucleotide
agcagauagccaugguacc

SEQ ID NO: 574025 - RNA, 19 nt, Artificial Sequence
  Description of Artificial Sequence: Synthetic oligonucleotide
cacucauuugaauugccgc

SEQ ID NO: 574026 - RNA, 19 nt, Artificial Sequence
  Description of Artificial Sequence: Synthetic oligonucleotide
gacgacauugacuuuccug

SEQ ID NO: 574027 - RNA, 19 nt, Artificial Sequence
  Description of Artificial Sequence: Synthetic oligonucleotide
caugguaccgccaggcucc

SEQ ID NO: 574028 - RNA, 19 nt, Artificial Sequence
  Description of Artificial Sequence: Synthetic oligonucleotide
ucuaugugccuuaaucagu

SEQ ID NO: 574029 - RNA, 19 nt, Artificial Sequence
  Description of Artificial Sequence: Synthetic oligonucleotide
caucauaaauacucgccag

SEQ ID NO: 574030 - RNA, 19 nt, Artificial Sequence
  Description of Artificial Sequence: Synthetic oligonucleotide
uauacggcgagcagaagaa

SEQ ID NO: 574031 - RNA, 19 nt, Artificial Sequence
  Description of Artificial Sequence: Synthetic oligonucleotide
ucaaaaccuagcucugugc

SEQ ID NO: 574032 - RNA, 19 nt, Artificial Sequence
  Description of Artificial Sequence: Synthetic oligonucleotide
gauuagggcaaaccauucc

SEQ ID NO: 574033 - RNA, 19 nt, Artificial Sequence
  Description of Artificial Sequence: Synthetic oligonucleotide
aguagaaaacauguguuca

SEQ ID NO: 574034 - RNA, 19 nt, Artificial Sequence
  Description of Artificial Sequence: Synthetic oligonucleotide
agcuauaaauaccacucca

SEQ ID NO: 574035 - RNA, 19 nt, Artificial Sequence
  Description of Artificial Sequence: Synthetic oligonucleotide
ugcaagguauaguacugag

SEQ ID NO: 574036 - RNA, 19 nt, Artificial Sequence
  Description of Artificial Sequence: Synthetic oligonucleotide
auuucguaagucuauuaau

SEQ ID NO: 574037 - RNA, 19 nt, Artificial Sequence
  Description of Artificial Sequence: Synthetic oligonucleotide
uccuguuaguaacaaccag

SEQ ID NO: 574038 - RNA, 19 nt, Artificial Sequence
  Description of Artificial Sequence: Synthetic oligonucleotide
uaacacugcagucaggauu

SEQ ID NO: 574039 - RNA, 19 nt, Artificial Sequence
  Description of Artificial Sequence: Synthetic oligonucleotide
ucguaagucuauuaauuuc

SEQ ID NO: 574040 - RNA, 19 nt, Artificial Sequence
  Description of Artificial Sequence: Synthetic oligonucleotide
auuguucggaauuauguua

SEQ ID NO: 574041 - RNA, 19 nt, Artificial Sequence
  Description of Artificial Sequence: Synthetic oligonucleotide
aucauaacgggcaaauaag

SEQ ID NO: 574042 - RNA, 19 nt, Artificial Sequence
  Description of Artificial Sequence: Synthetic oligonucleotide
acaauuaagcaauuccuua

SEQ ID NO: 574043 - RNA, 19 nt, Artificial Sequence
  Description of Artificial Sequence: Synthetic oligonucleotide
aguuaccuuacauggggag

SEQ ID NO: 574044 - RNA, 19 nt, Artificial Sequence
  Description of Artificial Sequence: Synthetic oligonucleotide
gucuacaucagauccagca

SEQ ID NO: 574045 - RNA, 19 nt, Artificial Sequence
  Description of Artificial Sequence: Synthetic oligonucleotide
uguuacagccaucuaacuu

SEQ ID NO: 574046 - RNA, 19 nt, Artificial Sequence
  Description of Artificial Sequence: Synthetic oligonucleotide
ggaacagucuguuaaagca

SEQ ID NO: 574047 - RNA, 19 nt, Artificial Sequence
  Description of Artificial Sequence: Synthetic oligonucleotide
uaagucuauuaauuucucu

SEQ ID NO: 574048 - RNA, 19 nt, Artificial Sequence
  Description of Artificial Sequence: Synthetic oligonucleotide
uucggcuuuuaauuugugc

SEQ ID NO: 574049 - RNA, 19 nt, Artificial Sequence
  Description of Artificial Sequence: Synthetic oligonucleotide
agacacucauuugaauugc

SEQ ID NO: 574050 - RNA, 19 nt, Artificial Sequence
  Description of Artificial Sequence: Synthetic oligonucleotide
ugccauuagauccaaggua

SEQ ID NO: 574051 - RNA, 19 nt, Artificial Sequence
  Description of Artificial Sequence: Synthetic oligonucleotide
auaguacugagagggcucc

SEQ ID NO: 574052 - RNA, 19 nt, Artificial Sequence
  Description of Artificial Sequence: Synthetic oligonucleotide
gcaaaugguguauucaaag

SEQ ID NO: 574053 - RNA, 19 nt, Artificial Sequence
  Description of Artificial Sequence: Synthetic oligonucleotide
ugggcauauuauaauauuu

SEQ ID NO: 574054 - RNA, 19 nt, Artificial Sequence
  Description of Artificial Sequence: Synthetic oligonucleotide
aauugccgcucacaaauau

SEQ ID NO: 574055 - RNA, 19 nt, Artificial Sequence
  Description of Artificial Sequence: Synthetic oligonucleotide
ucagucugcacaagguaca

SEQ ID NO: 574056 - RNA, 19 nt, Artificial Sequence
  Description of Artificial Sequence: Synthetic oligonucleotide
uucuauacggcgagcagaa

SEQ ID NO: 574057 - RNA, 19 nt, Artificial Sequence
  Description of Artificial Sequence: Synthetic oligonucleotide
uuucuauacggcgagcaga

SEQ ID NO: 574058 - RNA, 19 nt, Artificial Sequence
  Description of Artificial Sequence: Synthetic oligonucleotide
gaauauauggcacccuaaa

SEQ ID NO: 574059 - RNA, 19 nt, Artificial Sequence
  Description of Artificial Sequence: Synthetic oligonucleotide
uuaaagcuuuucaucugcu

SEQ ID NO: 574060 - RNA, 19 nt, Artificial Sequence
  Description of Artificial Sequence: Synthetic oligonucleotide
auuucuauacggcgagcag

SEQ ID NO: 574061 - RNA, 19 nt, Artificial Sequence
  Description of Artificial Sequence: Synthetic oligonucleotide
gagcagauagccaugguac

SEQ ID NO: 574062 - RNA, 19 nt, Artificial Sequence
  Description of Artificial Sequence: Synthetic oligonucleotide
aggaguagccacugaagag

SEQ ID NO: 574063 - RNA, 19 nt, Artificial Sequence
  Description of Artificial Sequence: Synthetic oligonucleotide
uguuuguaaggguuggcuc

SEQ ID NO: 574064 - RNA, 19 nt, Artificial Sequence
  Description of Artificial Sequence: Synthetic oligonucleotide
auuagauccaagguagacu

SEQ ID NO: 574065 - RNA, 19 nt, Artificial Sequence
  Description of Artificial Sequence: Synthetic oligonucleotide
uggaucagacuugacaaug

SEQ ID NO: 574066 - RNA, 19 nt, Artificial Sequence
  Description of Artificial Sequence: Synthetic oligonucleotide
ugaauauauggcacccuaa

SEQ ID NO: 574067 - RNA, 19 nt, Artificial Sequence
  Description of Artificial Sequence: Synthetic oligonucleotide
cauguuuacacuccaagaa

SEQ ID NO: 574068 - RNA, 19 nt, Artificial Sequence
  Description of Artificial Sequence: Synthetic oligonucleotide
uucguaagucuauuaauuu

SEQ ID NO: 574069 - RNA, 19 nt, Artificial Sequence
  Description of Artificial Sequence: Synthetic oligonucleotide
aguuuaacucuugacccuc

SEQ ID NO: 574070 - RNA, 19 nt, Artificial Sequence
  Description of Artificial Sequence: Synthetic oligonucleotide
cuuacauggggagaccccg

SEQ ID NO: 574071 - RNA, 19 nt, Artificial Sequence
  Description of Artificial Sequence: Synthetic oligonucleotide
guagguauucauuucguaa

SEQ ID NO: 574072 - RNA, 19 nt, Artificial Sequence
  Description of Artificial Sequence: Synthetic oligonucleotide
aauuuacuauuaaagcuuu

SEQ ID NO: 574073 - RNA, 19 nt, Artificial Sequence
  Description of Artificial Sequence: Synthetic oligonucleotide
augauucuacauccugcac

SEQ ID NO: 574074 - RNA, 19 nt, Artificial Sequence
  Description of Artificial Sequence: Synthetic oligonucleotide
gacaauauucagguaggug

SEQ ID NO: 574075 - RNA, 19 nt, Artificial Sequence
  Description of Artificial Sequence: Synthetic oligonucleotide
ugacgauagauuagggcaa

SEQ ID NO: 574076 - RNA, 19 nt, Artificial Sequence
  Description of Artificial Sequence: Synthetic oligonucleotide
acagccaucuaacuucugu

SEQ ID NO: 574077 - RNA, 19 nt, Artificial Sequence
  Description of Artificial Sequence: Synthetic oligonucleotide
cauaaauacucgccagggc

SEQ ID NO: 574078 - RNA, 19 nt, Artificial Sequence
  Description of Artificial Sequence: Synthetic oligonucleotide
accauuccauuucuauacg

SEQ ID NO: 574079 - RNA, 19 nt, Artificial Sequence
  Description of Artificial Sequence: Synthetic oligonucleotide
aucaaaucaugaggaagac

SEQ ID NO: 574080 - RNA, 19 nt, Artificial Sequence
  Description of Artificial Sequence: Synthetic oligonucleotide
agcaaacagcaccacacug

SEQ ID NO: 574081 - RNA, 19 nt, Artificial Sequence
  Description of Artificial Sequence: Synthetic oligonucleotide
uucccauuagguugucuag

SEQ ID NO: 574082 - RNA, 19 nt, Artificial Sequence
  Description of Artificial Sequence: Synthetic oligonucleotide
uuaccuuacauggggagac

SEQ ID NO: 574083 - RNA, 19 nt, Artificial Sequence
  Description of Artificial Sequence: Synthetic oligonucleotide
acaugcacucacuacccag

SEQ ID NO: 574084 - RNA, 19 nt, Artificial Sequence
  Description of Artificial Sequence: Synthetic oligonucleotide
aagcaaacagcaccacacu

SEQ ID NO: 574085 - RNA, 19 nt, Artificial Sequence
  Description of Artificial Sequence: Synthetic oligonucleotide
ggaagagugaauauauggc

SEQ ID NO: 574086 - RNA, 19 nt, Artificial Sequence
  Description of Artificial Sequence: Synthetic oligonucleotide
ucucacagaaacagauacu

SEQ ID NO: 574087 - RNA, 19 nt, Artificial Sequence
  Description of Artificial Sequence: Synthetic oligonucleotide
guaaaacccagaaauaaaa

SEQ ID NO: 574088 - RNA, 19 nt, Artificial Sequence
  Description of Artificial Sequence: Synthetic oligonucleotide
caugcacucacuacccagc

SEQ ID NO: 574089 - RNA, 19 nt, Artificial Sequence
  Description of Artificial Sequence: Synthetic oligonucleotide
uuguagguauucauuucgu

SEQ ID NO: 574090 - RNA, 19 nt, Artificial Sequence
  Description of Artificial Sequence: Synthetic oligonucleotide
ccaucuaacuucuguaugg

SEQ ID NO: 574091 - RNA, 19 nt, Artificial Sequence
  Description of Artificial Sequence: Synthetic oligonucleotide
ggaauuauguuacauggaa

SEQ ID NO: 574092 - RNA, 19 nt, Artificial Sequence
  Description of Artificial Sequence: Synthetic oligonucleotide
caagacgcaggucaauuac

SEQ ID NO: 574093 - RNA, 19 nt, Artificial Sequence
  Description of Artificial Sequence: Synthetic oligonucleotide
cuguaugggagucccacag

SEQ ID NO: 574094 - RNA, 19 nt, Artificial Sequence
  Description of Artificial Sequence: Synthetic oligonucleotide
ucccauuagguugucuagg

SEQ ID NO: 574095 - RNA, 19 nt, Artificial Sequence
  Description of Artificial Sequence: Synthetic oligonucleotide
ucccuaaccuaaagcuugg

SEQ ID NO: 574096 - RNA, 19 nt, Artificial Sequence
  Description of Artificial Sequence: Synthetic oligonucleotide
aggucuucugacgacauug

SEQ ID NO: 574097 - RNA, 19 nt, Artificial Sequence
  Description of Artificial Sequence: Synthetic oligonucleotide
aguuugggcauauuauaau

SEQ ID NO: 574098 - RNA, 19 nt, Artificial Sequence
  Description of Artificial Sequence: Synthetic oligonucleotide
ucaggauuucaguucggcu

SEQ ID NO: 574099 - RNA, 19 nt, Artificial Sequence
  Description of Artificial Sequence: Synthetic oligonucleotide
aacuaucaagcuauaaaua

SEQ ID NO: 574100 - RNA, 19 nt, Artificial Sequence
  Description of Artificial Sequence: Synthetic oligonucleotide
uguaugggagucccacagc

SEQ ID NO: 574101 - RNA, 19 nt, Artificial Sequence
  Description of Artificial Sequence: Synthetic oligonucleotide
agguacagaaggcaaaauu

SEQ ID NO: 574102 - RNA, 19 nt, Artificial Sequence
  Description of Artificial Sequence: Synthetic oligonucleotide
gcaaaauugcagcuggagc

SEQ ID NO: 574103 - RNA, 19 nt, Artificial Sequence
  Description of Artificial Sequence: Synthetic oligonucleotide
accuuacauggggagaccc

SEQ ID NO: 574104 - RNA, 19 nt, Artificial Sequence
  Description of Artificial Sequence: Synthetic oligonucleotide
uaaacccuguucuuccuuc

SEQ ID NO: 574105 - RNA, 19 nt, Artificial Sequence
  Description of Artificial Sequence: Synthetic oligonucleotide
acugcagucaggauuucag

SEQ ID NO: 574106 - RNA, 19 nt, Artificial Sequence
  Description of Artificial Sequence: Synthetic oligonucleotide
gucuguuaaagcauggaga

SEQ ID NO: 574107 - RNA, 19 nt, Artificial Sequence
  Description of Artificial Sequence: Synthetic oligonucleotide
gaaguacugcauacagccg

SEQ ID NO: 574108 - RNA, 19 nt, Artificial Sequence
  Description of Artificial Sequence: Synthetic oligonucleotide
uuccuucuacacaggaaga

SEQ ID NO: 574109 - RNA, 19 nt, Artificial Sequence
  Description of Artificial Sequence: Synthetic oligonucleotide
aaccuaaagcuuggggaag

SEQ ID NO: 574110 - RNA, 19 nt, Artificial Sequence
  Description of Artificial Sequence: Synthetic oligonucleotide
cuauacggcgagcagaaga

SEQ ID NO: 574111 - RNA, 19 nt, Artificial Sequence
  Description of Artificial Sequence: Synthetic oligonucleotide
uuauaacuauccacaguuu

SEQ ID NO: 574112 - RNA, 19 nt, Artificial Sequence
  Description of Artificial Sequence: Synthetic oligonucleotide
uauaaacccuguucuuccu

SEQ ID NO: 574113 - RNA, 19 nt, Artificial Sequence
  Description of Artificial Sequence: Synthetic oligonucleotide
ucgguguucuucccauuag

SEQ ID NO: 574114 - RNA, 19 nt, Artificial Sequence
  Description of Artificial Sequence: Synthetic oligonucleotide
uugggcauauuauaauauu

SEQ ID NO: 574115 - RNA, 19 nt, Artificial Sequence
  Description of Artificial Sequence: Synthetic oligonucleotide
gcuucuaggucuucugacg

SEQ ID NO: 574116 - RNA, 19 nt, Artificial Sequence
  Description of Artificial Sequence: Synthetic oligonucleotide
uacugcauacagccgguac

SEQ ID NO: 574117 - RNA, 19 nt, Artificial Sequence
  Description of Artificial Sequence: Synthetic oligonucleotide
gggcaaauaagucugcuuc

SEQ ID NO: 574118 - RNA, 19 nt, Artificial Sequence
  Description of Artificial Sequence: Synthetic oligonucleotide
uggacauagucugaaaguu

SEQ ID NO: 574119 - RNA, 19 nt, Artificial Sequence
  Description of Artificial Sequence: Synthetic oligonucleotide
cauuucguaagucuauuaa

SEQ ID NO: 574120 - RNA, 19 nt, Artificial Sequence
  Description of Artificial Sequence: Synthetic oligonucleotide
acacucauuugaauugccg

SEQ ID NO: 574121 - RNA, 19 nt, Artificial Sequence
  Description of Artificial Sequence: Synthetic oligonucleotide
ggagagacaauauucaggu

SEQ ID NO: 574122 - RNA, 19 nt, Artificial Sequence
  Description of Artificial Sequence: Synthetic oligonucleotide
uccgcuuuucuaaacucau

SEQ ID NO: 574123 - RNA, 19 nt, Artificial Sequence
  Description of Artificial Sequence: Synthetic oligonucleotide
uguagguauucauuucgua

SEQ ID NO: 574124 - RNA, 19 nt, Artificial Sequence
  Description of Artificial Sequence: Synthetic oligonucleotide
aacgggcaaauaagucugc

SEQ ID NO: 574125 - RNA, 19 nt, Artificial Sequence
  Description of Artificial Sequence: Synthetic oligonucleotide
cauuagauccaagguagac

SEQ ID NO: 574126 - RNA, 19 nt, Artificial Sequence
  Description of Artificial Sequence: Synthetic oligonucleotide
caauuuacuauuaaagcuu

SEQ ID NO: 574127 - RNA, 19 nt, Artificial Sequence
  Description of Artificial Sequence: Synthetic oligonucleotide
ucaguucggcuuuuaauuu

SEQ ID NO: 574128 - RNA, 19 nt, Artificial Sequence
  Description of Artificial Sequence: Synthetic oligonucleotide
gacauagucugaaaguuua

SEQ ID NO: 574129 - RNA, 19 nt, Artificial Sequence
  Description of Artificial Sequence: Synthetic oligonucleotide
agauuagggcaaaccauuc

SEQ ID NO: 574130 - RNA, 19 nt, Artificial Sequence
  Description of Artificial Sequence: Synthetic oligonucleotide
uccuuaauuuucaguguua

SEQ ID NO: 574131 - RNA, 19 nt, Artificial Sequence
  Description of Artificial Sequence: Synthetic oligonucleotide
uucacaagacgcaggucaa

SEQ ID NO: 574132 - RNA, 19 nt, Artificial Sequence
  Description of Artificial Sequence: Synthetic oligonucleotide
gaauuauguuacauggaaa

SEQ ID NO: 574133 - RNA, 19 nt, Artificial Sequence
  Description of Artificial Sequence: Synthetic oligonucleotide
agggccaauaauucauccu

SEQ ID NO: 574134 - RNA, 19 nt, Artificial Sequence
  Description of Artificial Sequence: Synthetic oligonucleotide
ucauuucguaagucuauua

SEQ ID NO: 574135 - RNA, 19 nt, Artificial Sequence
  Description of Artificial Sequence: Synthetic oligonucleotide
ggcuccaacaaugucaggc

SEQ ID NO: 574136 - RNA, 19 nt, Artificial Sequence
  Description of Artificial Sequence: Synthetic oligonucleotide
uaugugccuuaaucaguag

SEQ ID NO: 574137 - RNA, 19 nt, Artificial Sequence
  Description of Artificial Sequence: Synthetic oligonucleotide
ucacuacccagcuucucac

SEQ ID NO: 574138 - RNA, 19 nt, Artificial Sequence
  Description of Artificial Sequence: Synthetic oligonucleotide
cugacgacauugacuuucc

SEQ ID NO: 574139 - RNA, 19 nt, Artificial Sequence
  Description of Artificial Sequence: Synthetic oligonucleotide
aucaagcuauaaauaccac

SEQ ID NO: 574140 - RNA, 19 nt, Artificial Sequence
  Description of Artificial Sequence: Synthetic oligonucleotide
cacuauucuggagacacuc

SEQ ID NO: 574141 - RNA, 19 nt, Artificial Sequence
  Description of Artificial Sequence: Synthetic oligonucleotide
auauaauuguucggaauua

SEQ ID NO: 574142 - RNA, 19 nt, Artificial Sequence
  Description of Artificial Sequence: Synthetic oligonucleotide
guuuguaaggguuggcucu

SEQ ID NO: 574143 - RNA, 19 nt, Artificial Sequence
  Description of Artificial Sequence: Synthetic oligonucleotide
uauucuggagacacucauu

SEQ ID NO: 574144 - RNA, 19 nt, Artificial Sequence
  Description of Artificial Sequence: Synthetic oligonucleotide
caguucggcuuuuaauuug

SEQ ID NO: 574145 - RNA, 19 nt, Artificial Sequence
  Description of Artificial Sequence: Synthetic oligonucleotide
cccuaaacaucuugcaagg

SEQ ID NO: 574146 - RNA, 19 nt, Artificial Sequence
  Description of Artificial Sequence: Synthetic oligonucleotide
ggauauuaacacugcaguc

SEQ ID NO: 574147 - RNA, 19 nt, Artificial Sequence
  Description of Artificial Sequence: Synthetic oligonucleotide
aguacaccacaucugccau

SEQ ID NO: 574148 - RNA, 19 nt, Artificial Sequence
  Description of Artificial Sequence: Synthetic oligonucleotide
uguucggaauuauguuaca

SEQ ID NO: 574149 - RNA, 19 nt, Artificial Sequence
  Description of Artificial Sequence: Synthetic oligonucleotide
gcaucauaaauacucgcca

SEQ ID NO: 574150 - RNA, 19 nt, Artificial Sequence
  Description of Artificial Sequence: Synthetic oligonucleotide
gagaccccgugauagguca

SEQ ID NO: 574151 - RNA, 19 nt, Artificial Sequence
  Description of Artificial Sequence: Synthetic oligonucleotide
guacaugcacucacuaccc

SEQ ID NO: 574152 - RNA, 19 nt, Artificial Sequence
  Description of Artificial Sequence: Synthetic oligonucleotide
auugccgcucacaaauauc

SEQ ID NO: 574153 - RNA, 19 nt, Artificial Sequence
  Description of Artificial Sequence: Synthetic oligonucleotide
acggacuccgcuuuucuaa

SEQ ID NO: 574154 - RNA, 19 nt, Artificial Sequence
  Description of Artificial Sequence: Synthetic oligonucleotide
uugaauugccgcucacaaa

SEQ ID NO: 574155 - RNA, 19 nt, Artificial Sequence
  Description of Artificial Sequence: Synthetic oligonucleotide
gagaaggaggcgaucauaa

SEQ ID NO: 574156 - RNA, 19 nt, Artificial Sequence
  Description of Artificial Sequence: Synthetic oligonucleotide
ccuaaccuaaagcuugggg

SEQ ID NO: 574157 - RNA, 19 nt, Artificial Sequence
  Description of Artificial Sequence: Synthetic oligonucleotide
aagacgcaggucaauuacu

SEQ ID NO: 574158 - RNA, 19 nt, Artificial Sequence
  Description of Artificial Sequence: Synthetic oligonucleotide
gaccugaccaggaguagcc

SEQ ID NO: 574159 - RNA, 19 nt, Artificial Sequence
  Description of Artificial Sequence: Synthetic oligonucleotide
acuugacgauagauuaggg

SEQ ID NO: 574160 - RNA, 19 nt, Artificial Sequence
  Description of Artificial Sequence: Synthetic oligonucleotide
gugaauauauggcacccua

SEQ ID NO: 574161 - RNA, 19 nt, Artificial Sequence
  Description of Artificial Sequence: Synthetic oligonucleotide
ucgccagggccaauaauuc

SEQ ID NO: 574162 - RNA, 19 nt, Artificial Sequence
  Description of Artificial Sequence: Synthetic oligonucleotide
uuguguacuugacgauaga

SEQ ID NO: 574163 - RNA, 19 nt, Artificial Sequence
  Description of Artificial Sequence: Synthetic oligonucleotide
gacacucauuugaauugcc

SEQ ID NO: 574164 - RNA, 19 nt, Artificial Sequence
  Description of Artificial Sequence: Synthetic oligonucleotide
cagauagccaugguaccgc

SEQ ID NO: 574165 - RNA, 19 nt, Artificial Sequence
  Description of Artificial Sequence: Synthetic oligonucleotide
agacuugacaaugauucua

SEQ ID NO: 574166 - RNA, 19 nt, Artificial Sequence
  Description of Artificial Sequence: Synthetic oligonucleotide
cucauuugaauugccgcuc

SEQ ID NO: 574167 - RNA, 19 nt, Artificial Sequence
  Description of Artificial Sequence: Synthetic oligonucleotide
caguuugggcauauuauaa

SEQ ID NO: 574168 - RNA, 19 nt, Artificial Sequence
  Description of Artificial Sequence: Synthetic oligonucleotide
cuugauugaaguccaagau

SEQ ID NO: 574169 - RNA, 19 nt, Artificial Sequence
  Description of Artificial Sequence: Synthetic oligonucleotide
gguauauaauuguucggaa

SEQ ID NO: 574170 - RNA, 19 nt, Artificial Sequence
  Description of Artificial Sequence: Synthetic oligonucleotide
agaaguacaugcacucacu

SEQ ID NO: 574171 - RNA, 19 nt, Artificial Sequence
  Description of Artificial Sequence: Synthetic oligonucleotide
cucacuacccagcuucuca

SEQ ID NO: 574172 - RNA, 19 nt, Artificial Sequence
  Description of Artificial Sequence: Synthetic oligonucleotide
ccauuccauuucuauacgg

SEQ ID NO: 574173 - RNA, 19 nt, Artificial Sequence
  Description of Artificial Sequence: Synthetic oligonucleotide
gcaaacagcaccacacugc

SEQ ID NO: 574174 - RNA, 19 nt, Artificial Sequence
  Description of Artificial Sequence: Synthetic oligonucleotide
agacgcaggucaauuacug

SEQ ID NO: 574175 - RNA, 19 nt, Artificial Sequence
  Description of Artificial Sequence: Synthetic oligonucleotide
gucaggauuucaguucggc

SEQ ID NO: 574176 - RNA, 19 nt, Artificial Sequence
  Description of Artificial Sequence: Synthetic oligonucleotide
ggacaguugaggcauuuca

SEQ ID NO: 574177 - RNA, 19 nt, Artificial Sequence
  Description of Artificial Sequence: Synthetic oligonucleotide
cacaggaacaauuuacuau

SEQ ID NO: 574178 - RNA, 19 nt, Artificial Sequence
  Description of Artificial Sequence: Synthetic oligonucleotide
cauaccucuguuccaagaa

SEQ ID NO: 574179 - RNA, 19 nt, Artificial Sequence
  Description of Artificial Sequence: Synthetic oligonucleotide
acaagacgcaggucaauua

SEQ ID NO: 574180 - RNA, 19 nt, Artificial Sequence
  Description of Artificial Sequence: Synthetic oligonucleotide
ucaauagggcugugacugu

SEQ ID NO: 574181 - RNA, 19 nt, Artificial Sequence
  Description of Artificial Sequence: Synthetic oligonucleotide
uucauuucguaagucuauu

SEQ ID NO: 574182 - RNA, 19 nt, Artificial Sequence
  Description of Artificial Sequence: Synthetic oligonucleotide
ggcaaaauugcagcuggag

SEQ ID NO: 574183 - RNA, 19 nt, Artificial Sequence
  Description of Artificial Sequence: Synthetic oligonucleotide
uuacauggggagaccccgu

SEQ ID NO: 574184 - RNA, 19 nt, Artificial Sequence
  Description of Artificial Sequence: Synthetic oligonucleotide
aagccacuuaucaaaucau

SEQ ID NO: 574185 - RNA, 19 nt, Artificial Sequence
  Description of Artificial Sequence: Synthetic oligonucleotide
gccgguacaggucaucuug

SEQ ID NO: 574186 - RNA, 19 nt, Artificial Sequence
  Description of Artificial Sequence: Synthetic oligonucleotide
agaccccauuuugagcuac

SEQ ID NO: 574187 - RNA, 19 nt, Artificial Sequence
  Description of Artificial Sequence: Synthetic oligonucleotide
aaaucccauuuacuuucua

SEQ ID NO: 574188 - RNA, 19 nt, Artificial Sequence
  Description of Artificial Sequence: Synthetic oligonucleotide
acuccaagaaguacaugca

SEQ ID NO: 574189 - RNA, 19 nt, Artificial Sequence
  Description of Artificial Sequence: Synthetic oligonucleotide
aguucggcuuuuaauuugu

SEQ ID NO: 574190 - RNA, 19 nt, Artificial Sequence
  Description of Artificial Sequence: Synthetic oligonucleotide
agugaauauauggcacccu

SEQ ID NO: 574191 - RNA, 19 nt, Artificial Sequence
  Description of Artificial Sequence: Synthetic oligonucleotide
gccacuauucuggagacac

SEQ ID NO: 574192 - RNA, 19 nt, Artificial Sequence
  Description of Artificial Sequence: Synthetic oligonucleotide
auaaacccuguucuuccuu

SEQ ID NO: 574193 - RNA, 19 nt, Artificial Sequence
  Description of Artificial Sequence: Synthetic oligonucleotide
cuuucuagccaguggagcu

SEQ ID NO: 574194 - RNA, 19 nt, Artificial Sequence
  Description of Artificial Sequence: Synthetic oligonucleotide
ugucccuagcugcaaggua

SEQ ID NO: 574195 - RNA, 19 nt, Artificial Sequence
  Description of Artificial Sequence: Synthetic oligonucleotide
acgauagauuagggcaaac

SEQ ID NO: 574196 - RNA, 19 nt, Artificial Sequence
  Description of Artificial Sequence: Synthetic oligonucleotide
agcaaaugggucaggcucu

SEQ ID NO: 574197 - RNA, 19 nt, Artificial Sequence
  Description of Artificial Sequence: Synthetic oligonucleotide
ccaacuaucaagcuauaaa

SEQ ID NO: 574198 - RNA, 19 nt, Artificial Sequence
  Description of Artificial Sequence: Synthetic oligonucleotide
aaauacucgccagggccaa

SEQ ID NO: 574199 - RNA, 19 nt, Artificial Sequence
  Description of Artificial Sequence: Synthetic oligonucleotide
ggugcuugcagagagcaga

SEQ ID NO: 574200 - RNA, 19 nt, Artificial Sequence
  Description of Artificial Sequence: Synthetic oligonucleotide
cugaaccuuugguauauaa

SEQ ID NO: 574201 - RNA, 19 nt, Artificial Sequence
  Description of Artificial Sequence: Synthetic oligonucleotide
cauggaacagucuguuaaa

SEQ ID NO: 574202 - RNA, 19 nt, Artificial Sequence
  Description of Artificial Sequence: Synthetic oligonucleotide
uugaccugaccaggaguag

SEQ ID NO: 574203 - RNA, 19 nt, Artificial Sequence
  Description of Artificial Sequence: Synthetic oligonucleotide
aagguagacuggagaagga

SEQ ID NO: 574204 - RNA, 19 nt, Artificial Sequence
  Description of Artificial Sequence: Synthetic oligonucleotide
cccgugauaggucagucug

SEQ ID NO: 574205 - RNA, 19 nt, Artificial Sequence
  Description of Artificial Sequence: Synthetic oligonucleotide
accuuggacggacuccgcu

SEQ ID NO: 574206 - RNA, 19 nt, Artificial Sequence
  Description of Artificial Sequence: Synthetic oligonucleotide
gacuccgcuuuucuaaacu

SEQ ID NO: 574207 - RNA, 19 nt, Artificial Sequence
  Description of Artificial Sequence: Synthetic oligonucleotide
auaccacuccaaacacugg

SEQ ID NO: 574208 - RNA, 19 nt, Artificial Sequence
  Description of Artificial Sequence: Synthetic oligonucleotide
ggcuuugcaguacacaugu

SEQ ID NO: 574209 - RNA, 19 nt, Artificial Sequence
  Description of Artificial Sequence: Synthetic oligonucleotide
acggcgagcagaagaaaug

SEQ ID NO: 574210 - RNA, 19 nt, Artificial Sequence
  Description of Artificial Sequence: Synthetic oligonucleotide
aggcuaccaagccacuuau

SEQ ID NO: 574211 - RNA, 19 nt, Artificial Sequence
  Description of Artificial Sequence: Synthetic oligonucleotide
cuuugcaguacacauguuu

SEQ ID NO: 574212 - RNA, 19 nt, Artificial Sequence
  Description of Artificial Sequence: Synthetic oligonucleotide
guauaguacugagagggcu

SEQ ID NO: 574213 - RNA, 19 nt, Artificial Sequence
  Description of Artificial Sequence: Synthetic oligonucleotide
ccagauagauccugguuuc

SEQ ID NO: 574214 - RNA, 19 nt, Artificial Sequence
  Description of Artificial Sequence: Synthetic oligonucleotide
gacuuuccuguuaguaaca

SEQ ID NO: 574215 - RNA, 19 nt, Artificial Sequence
  Description of Artificial Sequence: Synthetic oligonucleotide
ucuauacggcgagcagaag

SEQ ID NO: 574216 - RNA, 19 nt, Artificial Sequence
  Description of Artificial Sequence: Synthetic oligonucleotide
accuaaagcuuggggaaga

SEQ ID NO: 574217 - RNA, 19 nt, Artificial Sequence
  Description of Artificial Sequence: Synthetic oligonucleotide
ugacgacauugacuuuccu

SEQ ID NO: 574218 - RNA, 19 nt, Artificial Sequence
  Description of Artificial Sequence: Synthetic oligonucleotide
ucuagccaguggagcugag

SEQ ID NO: 574219 - RNA, 19 nt, Artificial Sequence
  Description of Artificial Sequence: Synthetic oligonucleotide
ggagcagauagccauggua

SEQ ID NO: 574220 - RNA, 19 nt, Artificial Sequence
  Description of Artificial Sequence: Synthetic oligonucleotide
ggagacacucauuugaauu

SEQ ID NO: 574221 - RNA, 19 nt, Artificial Sequence
  Description of Artificial Sequence: Synthetic oligonucleotide
gcgagcagaagaaaugaac

SEQ ID NO: 574222 - RNA, 19 nt, Artificial Sequence
  Description of Artificial Sequence: Synthetic oligonucleotide
gccacuuaucaaaucauga

SEQ ID NO: 574223 - RNA, 19 nt, Artificial Sequence
  Description of Artificial Sequence: Synthetic oligonucleotide
caauccagaaucagucugu

SEQ ID NO: 574224 - RNA, 19 nt, Artificial Sequence
  Description of Artificial Sequence: Synthetic oligonucleotide
gcuauaaauaccacuccaa

SEQ ID NO: 574225 - RNA, 19 nt, Artificial Sequence
  Description of Artificial Sequence: Synthetic oligonucleotide
caagaaguacaugcacuca

SEQ ID NO: 574226 - RNA, 19 nt, Artificial Sequence
  Description of Artificial Sequence: Synthetic oligonucleotide
cacccuaaacaucuugcaa

SEQ ID NO: 574227 - RNA, 19 nt, Artificial Sequence
  Description of Artificial Sequence: Synthetic oligonucleotide
uaccuuacauggggagacc

SEQ ID NO: 574228 - RNA, 19 nt, Artificial Sequence
  Description of Artificial Sequence: Synthetic oligonucleotide
guagccacugaagagcacu

SEQ ID NO: 574229 - RNA, 19 nt, Artificial Sequence
  Description of Artificial Sequence: Synthetic oligonucleotide
uacucgccagggccaauaa

SEQ ID NO: 574230 - RNA, 19 nt, Artificial Sequence
  Description of Artificial Sequence: Synthetic oligonucleotide
gaacagucuguuaaagcau

SEQ ID NO: 574231 - RNA, 19 nt, Artificial Sequence
  Description of Artificial Sequence: Synthetic oligonucleotide
caauagggcugugacuguc

SEQ ID NO: 574232 - RNA, 19 nt, Artificial Sequence
  Description of Artificial Sequence: Synthetic oligonucleotide
cuauccacaguuugggcau

SEQ ID NO: 574233 - RNA, 19 nt, Artificial Sequence
  Description of Artificial Sequence: Synthetic oligonucleotide
uguucacaagacgcagguc

SEQ ID NO: 574234 - RNA, 19 nt, Artificial Sequence
  Description of Artificial Sequence: Synthetic oligonucleotide
auaggucagucugcacaag

SEQ ID NO: 574235 - RNA, 19 nt, Artificial Sequence
  Description of Artificial Sequence: Synthetic oligonucleotide
cagucugcacaagguacag

SEQ ID NO: 574236 - RNA, 19 nt, Artificial Sequence
  Description of Artificial Sequence: Synthetic oligonucleotide
aaccuagcucugugcugga

SEQ ID NO: 574237 - RNA, 19 nt, Artificial Sequence
  Description of Artificial Sequence: Synthetic oligonucleotide
caguuaccuuacaugggga

SEQ ID NO: 574238 - RNA, 19 nt, Artificial Sequence
  Description of Artificial Sequence: Synthetic oligonucleotide
ccuuacauggggagacccc

SEQ ID NO: 574239 - RNA, 19 nt, Artificial Sequence
  Description of Artificial Sequence: Synthetic oligonucleotide
gugcugacaauuaagcaau

SEQ ID NO: 574240 - RNA, 19 nt, Artificial Sequence
  Description of Artificial Sequence: Synthetic oligonucleotide
ggggcaguacaccacaucu

SEQ ID NO: 574241 - RNA, 19 nt, Artificial Sequence
  Description of Artificial Sequence: Synthetic oligonucleotide
cucgccagggccaauaauu

SEQ ID NO: 574242 - RNA, 19 nt, Artificial Sequence
  Description of Artificial Sequence: Synthetic oligonucleotide
cuauucuggagacacucau

SEQ ID NO: 574243 - RNA, 19 nt, Artificial Sequence
  Description of Artificial Sequence: Synthetic oligonucleotide
gacgauagauuagggcaaa

SEQ ID NO: 574244 - RNA, 19 nt, Artificial Sequence
  Description of Artificial Sequence: Synthetic oligonucleotide
gacaaugauucuacauccu

SEQ ID NO: 574245 - RNA, 19 nt, Artificial Sequence
  Description of Artificial Sequence: Synthetic oligonucleotide
cagccaucuaacuucugua

SEQ ID NO: 574246 - RNA, 19 nt, Artificial Sequence
  Description of Artificial Sequence: Synthetic oligonucleotide
uggacaguugaggcauuuc

SEQ ID NO: 574247 - RNA, 19 nt, Artificial Sequence
  Description of Artificial Sequence: Synthetic oligonucleotide
agcauggaacagucuguua

SEQ ID NO: 574248 - RNA, 19 nt, Artificial Sequence
  Description of Artificial Sequence: Synthetic oligonucleotide
acgggcaaauaagucugcu

SEQ ID NO: 574249 - RNA, 19 nt, Artificial Sequence
  Description of Artificial Sequence: Synthetic oligonucleotide
gugauaggucagucugcac

SEQ ID NO: 574250 - RNA, 19 nt, Artificial Sequence
  Description of Artificial Sequence: Synthetic oligonucleotide
cguaagucuauuaauuucu

SEQ ID NO: 574251 - RNA, 19 nt, Artificial Sequence
  Description of Artificial Sequence: Synthetic oligonucleotide
accccgugauaggucaguc

SEQ ID NO: 574252 - RNA, 19 nt, Artificial Sequence
  Description of Artificial Sequence: Synthetic oligonucleotide
ucacaagacgcaggucaau

SEQ ID NO: 574253 - RNA, 19 nt, Artificial Sequence
  Description of Artificial Sequence: Synthetic oligonucleotide
cucgguguucuucccauua

SEQ ID NO: 574254 - RNA, 19 nt, Artificial Sequence
  Description of Artificial Sequence: Synthetic oligonucleotide
ggaucagacuugacaauga

SEQ ID NO: 574255 - RNA, 19 nt, Artificial Sequence
  Description of Artificial Sequence: Synthetic oligonucleotide
acucgccagggccaauaau

SEQ ID NO: 574256 - RNA, 19 nt, Artificial Sequence
  Description of Artificial Sequence: Synthetic oligonucleotide
guucggcuuuuaauuugug

SEQ ID NO: 574257 - RNA, 19 nt, Artificial Sequence
  Description of Artificial Sequence: Synthetic oligonucleotide
uuccuggaucagacuugac

SEQ ID NO: 574258 - RNA, 19 nt, Artificial Sequence
  Description of Artificial Sequence: Synthetic oligonucleotide
cugcaagguauaguacuga

SEQ ID NO: 574259 - RNA, 19 nt, Artificial Sequence
  Description of Artificial Sequence: Synthetic oligonucleotide
ccaugguaccgccaggcuc

SEQ ID NO: 574260 - RNA, 19 nt, Artificial Sequence
  Description of Artificial Sequence: Synthetic oligonucleotide
gucccuagcugcaagguau

SEQ ID NO: 574261 - RNA, 19 nt, Artificial Sequence
  Description of Artificial Sequence: Synthetic oligonucleotide
ccgugauaggucagucugc

SEQ ID NO: 574262 - RNA, 19 nt, Artificial Sequence
  Description of Artificial Sequence: Synthetic oligonucleotide
gcacaggaacaauuuacua

SEQ ID NO: 574263 - RNA, 19 nt, Artificial Sequence
  Description of Artificial Sequence: Synthetic oligonucleotide
guucggaauuauguuacau

SEQ ID NO: 574264 - RNA, 19 nt, Artificial Sequence
  Description of Artificial Sequence: Synthetic oligonucleotide
auacucgccagggccaaua

SEQ ID NO: 574265 - RNA, 19 nt, Artificial Sequence
  Description of Artificial Sequence: Synthetic oligonucleotide
gaauugccgcucacaaaua

SEQ ID NO: 574266 - RNA, 19 nt, Artificial Sequence
  Description of Artificial Sequence: Synthetic oligonucleotide
agaggcuaccaagccacuu

SEQ ID NO: 574267 - RNA, 19 nt, Artificial Sequence
  Description of Artificial Sequence: Synthetic oligonucleotide
ggcugugacugucccuagc

SEQ ID NO: 574268 - RNA, 19 nt, Artificial Sequence
  Description of Artificial Sequence: Synthetic oligonucleotide
gcauggagagucaggguca

SEQ ID NO: 574269 - RNA, 19 nt, Artificial Sequence
  Description of Artificial Sequence: Synthetic oligonucleotide
ggacuccgcuuuucuaaac

SEQ ID NO: 574270 - RNA, 19 nt, Artificial Sequence
  Description of Artificial Sequence: Synthetic oligonucleotide
gccguuguccuucucugaa

SEQ ID NO: 574271 - RNA, 19 nt, Artificial Sequence
  Description of Artificial Sequence: Synthetic oligonucleotide
aggcaaaauugcagcugga

SEQ ID NO: 574272 - RNA, 19 nt, Artificial Sequence
  Description of Artificial Sequence: Synthetic oligonucleotide
cuagccaguggagcugaga

SEQ ID NO: 574273 - RNA, 19 nt, Artificial Sequence
  Description of Artificial Sequence: Synthetic oligonucleotide
gagaccccauuuugagcua

SEQ ID NO: 574274 - RNA, 19 nt, Artificial Sequence
  Description of Artificial Sequence: Synthetic oligonucleotide
agccgguacaggucaucuu

SEQ ID NO: 574275 - RNA, 19 nt, Artificial Sequence
  Description of Artificial Sequence: Synthetic oligonucleotide
uaccgccaggcuccugcau

SEQ ID NO: 574276 - RNA, 19 nt, Artificial Sequence
  Description of Artificial Sequence: Synthetic oligonucleotide
aucugccauuagauccaag

SEQ ID NO: 574277 - RNA, 19 nt, Artificial Sequence
  Description of Artificial Sequence: Synthetic oligonucleotide
cuggaucagacuugacaau

SEQ ID NO: 574278 - RNA, 19 nt, Artificial Sequence
  Description of Artificial Sequence: Synthetic oligonucleotide
agaccccgugauaggucag

SEQ ID NO: 574279 - RNA, 19 nt, Artificial Sequence
  Description of Artificial Sequence: Synthetic oligonucleotide
cauugacuuuccuguuagu

SEQ ID NO: 574280 - RNA, 19 nt, Artificial Sequence
  Description of Artificial Sequence: Synthetic oligonucleotide
gguugucuaggugcuugca

SEQ ID NO: 574281 - RNA, 19 nt, Artificial Sequence
  Description of Artificial Sequence: Synthetic oligonucleotide
cccaaacgucuccauuaac

SEQ ID NO: 574282 - RNA, 19 nt, Artificial Sequence
  Description of Artificial Sequence: Synthetic oligonucleotide
cuuggacggacuccgcuuu

SEQ ID NO: 574283 - RNA, 19 nt, Artificial Sequence
  Description of Artificial Sequence: Synthetic oligonucleotide
ggcauuucacuuggccauc

SEQ ID NO: 574284 - RNA, 19 nt, Artificial Sequence
  Description of Artificial Sequence: Synthetic oligonucleotide
cuguuaaagcauggagagu

SEQ ID NO: 574285 - RNA, 19 nt, Artificial Sequence
  Description of Artificial Sequence: Synthetic oligonucleotide
ggagaccccgugauagguc

SEQ ID NO: 574286 - RNA, 19 nt, Artificial Sequence
  Description of Artificial Sequence: Synthetic oligonucleotide
cccuaaccuaaagcuuggg

SEQ ID NO: 574287 - RNA, 19 nt, Artificial Sequence
  Description of Artificial Sequence: Synthetic oligonucleotide
cacaagacgcaggucaauu

SEQ ID NO: 574288 - RNA, 19 nt, Artificial Sequence
  Description of Artificial Sequence: Synthetic oligonucleotide
cccauuagguugucuaggu

SEQ ID NO: 574289 - RNA, 19 nt, Artificial Sequence
  Description of Artificial Sequence: Synthetic oligonucleotide
caaaugggucaggcucuca

SEQ ID NO: 574290 - RNA, 19 nt, Artificial Sequence
  Description of Artificial Sequence: Synthetic oligonucleotide
cgugauaggucagucugca

SEQ ID NO: 574291 - RNA, 19 nt, Artificial Sequence
  Description of Artificial Sequence: Synthetic oligonucleotide
gaccccgugauaggucagu

SEQ ID NO: 574292 - RNA, 19 nt, Artificial Sequence
  Description of Artificial Sequence: Synthetic oligonucleotide
cagauagauccugguuucu

SEQ ID NO: 574293 - RNA, 19 nt, Artificial Sequence
  Description of Artificial Sequence: Synthetic oligonucleotide
guacugcauacagccggua

SEQ ID NO: 574294 - RNA, 19 nt, Artificial Sequence
  Description of Artificial Sequence: Synthetic oligonucleotide
cucucagugcagugucaau

SEQ ID NO: 574295 - RNA, 19 nt, Artificial Sequence
  Description of Artificial Sequence: Synthetic oligonucleotide
cagccgguacaggucaucu

SEQ ID NO: 574296 - RNA, 19 nt, Artificial Sequence
  Description of Artificial Sequence: Synthetic oligonucleotide
ggcgaucauaacgggcaaa

SEQ ID NO: 574297 - RNA, 19 nt, Artificial Sequence
  Description of Artificial Sequence: Synthetic oligonucleotide
ggcuaccaagccacuuauc

SEQ ID NO: 574298 - RNA, 19 nt, Artificial Sequence
  Description of Artificial Sequence: Synthetic oligonucleotide
gcauuucacuuggccaucu

SEQ ID NO: 574299 - RNA, 19 nt, Artificial Sequence
  Description of Artificial Sequence: Synthetic oligonucleotide
gcucucucauccacaauuu

SEQ ID NO: 574300 - RNA, 19 nt, Artificial Sequence
  Description of Artificial Sequence: Synthetic oligonucleotide
ccuaaagcuuggggaagaa

SEQ ID NO: 574301 - RNA, 19 nt, Artificial Sequence
  Description of Artificial Sequence: Synthetic oligonucleotide
gccaugguaccgccaggcu

SEQ ID NO: 574302 - RNA, 19 nt, Artificial Sequence
  Description of Artificial Sequence: Synthetic oligonucleotide
gguuggcucuggagagaga

SEQ ID NO: 574303 - RNA, 19 nt, Artificial Sequence
  Description of Artificial Sequence: Synthetic oligonucleotide
cggacuccgcuuuucuaaa

SEQ ID NO: 574304 - RNA, 19 nt, Artificial Sequence
  Description of Artificial Sequence: Synthetic oligonucleotide
ccuuggacggacuccgcuu

SEQ ID NO: 574305 - RNA, 19 nt, Artificial Sequence
  Description of Artificial Sequence: Synthetic oligonucleotide
ccccgugauaggucagucu

SEQ ID NO: 574306 - RNA, 19 nt, Artificial Sequence
  Description of Artificial Sequence: Synthetic oligonucleotide
ccugagccguuguccuucu

SEQ ID NO: 574307 - RNA, 19 nt, Artificial Sequence
  Description of Artificial Sequence: Synthetic oligonucleotide
cgacauugacuuuccuguu

SEQ ID NO: 574308 - RNA, 19 nt, Artificial Sequence
  Description of Artificial Sequence: Synthetic oligonucleotide
aaauacaccaaccauuucc

SEQ ID NO: 574309 - RNA, 19 nt, Artificial Sequence
  Description of Artificial Sequence: Synthetic oligonucleotide
aauuauaguuuacauagcc

SEQ ID NO: 574310 - RNA, 19 nt, Artificial Sequence
  Description of Artificial Sequence: Synthetic oligonucleotide
aaagaauuugagcugagcc

SEQ ID NO: 574311 - RNA, 19 nt, Artificial Sequence
  Description of Artificial Sequence: Synthetic oligonucleotide
aaaagguucucauuccugc

SEQ ID NO: 574312 - RNA, 19 nt, Artificial Sequence
  Description of Artificial Sequence: Synthetic oligonucleotide
ucaauagacaauuuaauac

SEQ ID NO: 574313 - RNA, 19 nt, Artificial Sequence
  Description of Artificial Sequence: Synthetic oligonucleotide
aaggaguuaauuuucuuuc

SEQ ID NO: 574314 - RNA, 19 nt, Artificial Sequence
  Description of Artificial Sequence: Synthetic oligonucleotide
agugaacugaaccaaaacg

SEQ ID NO: 574315 - RNA, 19 nt, Artificial Sequence
  Description of Artificial Sequence: Synthetic oligonucleotide
aguuaauuuucuuucaauc

SEQ ID NO: 574316 - RNA, 19 nt, Artificial Sequence
  Description of Artificial Sequence: Synthetic oligonucleotide
aauaugaggucccugaggu

SEQ ID NO: 574317 - RNA, 19 nt, Artificial Sequence
  Description of Artificial Sequence: Synthetic oligonucleotide
acucacuacaucuggaugc

SEQ ID NO: 574318 - RNA, 19 nt, Artificial Sequence
  Description of Artificial Sequence: Synthetic oligonucleotide
uuaaacaauaucccguuug

SEQ ID NO: 574319 - RNA, 19 nt, Artificial Sequence
  Description of Artificial Sequence: Synthetic oligonucleotide
aacagucuguuguugauuc

SEQ ID NO: 574320 - RNA, 19 nt, Artificial Sequence
  Description of Artificial Sequence: Synthetic oligonucleotide
agucagagugaacugaacc

SEQ ID NO: 574321 - RNA, 19 nt, Artificial Sequence
  Description of Artificial Sequence: Synthetic oligonucleotide
aaaaucaguuugcuucgcc

SEQ ID NO: 574322 - RNA, 19 nt, Artificial Sequence
  Description of Artificial Sequence: Synthetic oligonucleotide
aauuacugacaaaauacac

SEQ ID NO: 574323 - RNA, 19 nt, Artificial Sequence
  Description of Artificial Sequence: Synthetic oligonucleotide
aaauaugaggucccugagg

SEQ ID NO: 574324 - RNA, 19 nt, Artificial Sequence
  Description of Artificial Sequence: Synthetic oligonucleotide
uucaauucucgauauaacc

SEQ ID NO: 574325 - RNA, 19 nt, Artificial Sequence
  Description of Artificial Sequence: Synthetic oligonucleotide
uucaauccuauauaaaaca

SEQ ID NO: 574326 - RNA, 19 nt, Artificial Sequence
  Description of Artificial Sequence: Synthetic oligonucleotide
ucaauucucgauauaaccu

SEQ ID NO: 574327 - RNA, 19 nt, Artificial Sequence
  Description of Artificial Sequence: Synthetic oligonucleotide
aaccaauuaguauauuugu

SEQ ID NO: 574328 - RNA, 19 nt, Artificial Sequence
  Description of Artificial Sequence: Synthetic oligonucleotide
uguagagcaacagugaaug

SEQ ID NO: 574329 - RNA, 19 nt, Artificial Sequence
  Description of Artificial Sequence: Synthetic oligonucleotide
uuaaggaaugcuuuguaga

SEQ ID NO: 574330 - RNA, 19 nt, Artificial Sequence
  Description of Artificial Sequence: Synthetic oligonucleotide
uuucaauccuauauaaaac

SEQ ID NO: 574331 - RNA, 19 nt, Artificial Sequence
  Description of Artificial Sequence: Synthetic oligonucleotide
uguaagguuggccacagcu

SEQ ID NO: 574332 - RNA, 19 nt, Artificial Sequence
  Description of Artificial Sequence: Synthetic oligonucleotide
ucucgauauaaccugcuag

SEQ ID NO: 574333 - RNA, 19 nt, Artificial Sequence
  Description of Artificial Sequence: Synthetic oligonucleotide
uaaacaauaucccguuugc

SEQ ID NO: 574334 - RNA, 19 nt, Artificial Sequence
  Description of Artificial Sequence: Synthetic oligonucleotide
auuaaagucuaacaugaga

SEQ ID NO: 574335 - RNA, 19 nt, Artificial Sequence
  Description of Artificial Sequence: Synthetic oligonucleotide
uguggcaugagacacguaa

SEQ ID NO: 574336 - RNA, 19 nt, Artificial Sequence
  Description of Artificial Sequence: Synthetic oligonucleotide
gauauaaccugcuagugaa

SEQ ID NO: 574337 - RNA, 19 nt, Artificial Sequence
  Description of Artificial Sequence: Synthetic oligonucleotide
aauucucgauauaaccugc

SEQ ID NO: 574338 - RNA, 19 nt, Artificial Sequence
  Description of Artificial Sequence: Synthetic oligonucleotide
aagaguucaauucucgaua

SEQ ID NO: 574339 - RNA, 19 nt, Artificial Sequence
  Description of Artificial Sequence: Synthetic oligonucleotide
cuuaaggaaugcuuuguag

SEQ ID NO: 574340 - RNA, 19 nt, Artificial Sequence
  Description of Artificial Sequence: Synthetic oligonucleotide
aauccuauauaaaacaaua

SEQ ID NO: 574341 - RNA, 19 nt, Artificial Sequence
  Description of Artificial Sequence: Synthetic oligonucleotide
aaaggcguaaucugcaaau

SEQ ID NO: 574342 - RNA, 19 nt, Artificial Sequence
  Description of Artificial Sequence: Synthetic oligonucleotide
uuugcugcccgcaucaaga

SEQ ID NO: 574343 - RNA, 19 nt, Artificial Sequence
  Description of Artificial Sequence: Synthetic oligonucleotide
acagugaauggcuugucuc

SEQ ID NO: 574344 - RNA, 19 nt, Artificial Sequence
  Description of Artificial Sequence: Synthetic oligonucleotide
cuaaacaaaauaugagguc

SEQ ID NO: 574345 - RNA, 19 nt, Artificial Sequence
  Description of Artificial Sequence: Synthetic oligonucleotide
ucauaaaaguacuaucaau

SEQ ID NO: 574346 - RNA, 19 nt, Artificial Sequence
  Description of Artificial Sequence: Synthetic oligonucleotide
uccauuguaaagagguggc

SEQ ID NO: 574347 - RNA, 19 nt, Artificial Sequence
  Description of Artificial Sequence: Synthetic oligonucleotide
ucagucgaggaugagcucg

SEQ ID NO: 574348 - RNA, 19 nt, Artificial Sequence
  Description of Artificial Sequence: Synthetic oligonucleotide
ugcgugaggcugaugaccg

SEQ ID NO: 574349 - RNA, 19 nt, Artificial Sequence
  Description of Artificial Sequence: Synthetic oligonucleotide
aaugaaagguguaacaguu

SEQ ID NO: 574350 - RNA, 19 nt, Artificial Sequence
  Description of Artificial Sequence: Synthetic oligonucleotide
ucacacgugcgaauuaaag

SEQ ID NO: 574351 - RNA, 19 nt, Artificial Sequence
  Description of Artificial Sequence: Synthetic oligonucleotide
uuuguagagcaacagugaa

SEQ ID NO: 574352 - RNA, 19 nt, Artificial Sequence
  Description of Artificial Sequence: Synthetic oligonucleotide
caauucucgauauaaccug

SEQ ID NO: 574353 - RNA, 19 nt, Artificial Sequence
  Description of Artificial Sequence: Synthetic oligonucleotide
ucaaccuuaauugcuccgg

SEQ ID NO: 574354 - RNA, 19 nt, Artificial Sequence
  Description of Artificial Sequence: Synthetic oligonucleotide
aggaaugcuuuguagagca

SEQ ID NO: 574355 - RNA, 19 nt, Artificial Sequence
  Description of Artificial Sequence: Synthetic oligonucleotide
accuuaauugcuccggguc

SEQ ID NO: 574356 - RNA, 19 nt, Artificial Sequence
  Description of Artificial Sequence: Synthetic oligonucleotide
cuaucaauagacaauuuaa

SEQ ID NO: 574357 - RNA, 19 nt, Artificial Sequence
  Description of Artificial Sequence: Synthetic oligonucleotide
uuuuaaacaauaucccguu

SEQ ID NO: 574358 - RNA, 19 nt, Artificial Sequence
  Description of Artificial Sequence: Synthetic oligonucleotide
aucaauagacaauuuaaua

SEQ ID NO: 574359 - RNA, 19 nt, Artificial Sequence
  Description of Artificial Sequence: Synthetic oligonucleotide
uuuuaccuaucuccagccg

SEQ ID NO: 574360 - RNA, 19 nt, Artificial Sequence
  Description of Artificial Sequence: Synthetic oligonucleotide
uacgacaguaaaguaacag

SEQ ID NO: 574361 - RNA, 19 nt, Artificial Sequence
  Description of Artificial Sequence: Synthetic oligonucleotide
acugcuaauuauuugcuaa

SEQ ID NO: 574362 - RNA, 19 nt, Artificial Sequence
  Description of Artificial Sequence: Synthetic oligonucleotide
ugcuacgacaguaaaguaa

SEQ ID NO: 574363 - RNA, 19 nt, Artificial Sequence
  Description of Artificial Sequence: Synthetic oligonucleotide
acuaucaauagacaauuua

SEQ ID NO: 574364 - RNA, 19 nt, Artificial Sequence
  Description of Artificial Sequence: Synthetic oligonucleotide
ugaaaagguucucauuccu

SEQ ID NO: 574365 - RNA, 19 nt, Artificial Sequence
  Description of Artificial Sequence: Synthetic oligonucleotide
guuucugccgcacugaaga

SEQ ID NO: 574366 - RNA, 19 nt, Artificial Sequence
  Description of Artificial Sequence: Synthetic oligonucleotide
aauacaccaaccauuucca

SEQ ID NO: 574367 - RNA, 19 nt, Artificial Sequence
  Description of Artificial Sequence: Synthetic oligonucleotide
ugaucaagcuguucaaaga

SEQ ID NO: 574368 - RNA, 19 nt, Artificial Sequence
  Description of Artificial Sequence: Synthetic oligonucleotide
agacacguaacucacuaca

SEQ ID NO: 574369 - RNA, 19 nt, Artificial Sequence
  Description of Artificial Sequence: Synthetic oligonucleotide
uacaauaaccucugaaaau

SEQ ID NO: 574370 - RNA, 19 nt, Artificial Sequence
  Description of Artificial Sequence: Synthetic oligonucleotide
aaacgcacacaggaugagc

SEQ ID NO: 574371 - RNA, 19 nt, Artificial Sequence
  Description of Artificial Sequence: Synthetic oligonucleotide
aacgccaaccugugugggc

SEQ ID NO: 574372 - RNA, 19 nt, Artificial Sequence
  Description of Artificial Sequence: Synthetic oligonucleotide
agaaccaauuaguauauuu

SEQ ID NO: 574373 - RNA, 19 nt, Artificial Sequence
  Description of Artificial Sequence: Synthetic oligonucleotide
uucaaccuuaauugcuccg

SEQ ID NO: 574374 - RNA, 19 nt, Artificial Sequence
  Description of Artificial Sequence: Synthetic oligonucleotide
uugcuaagcgcuuccauca

SEQ ID NO: 574375 - RNA, 19 nt, Artificial Sequence
  Description of Artificial Sequence: Synthetic oligonucleotide
uguugauucuucucaacuc

SEQ ID NO: 574376 - RNA, 19 nt, Artificial Sequence
  Description of Artificial Sequence: Synthetic oligonucleotide
acgacaguaaaguaacaga

SEQ ID NO: 574377 - RNA, 19 nt, Artificial Sequence
  Description of Artificial Sequence: Synthetic oligonucleotide
aaucaguuugcuucgccaa

SEQ ID NO: 574378 - RNA, 19 nt, Artificial Sequence
  Description of Artificial Sequence: Synthetic oligonucleotide
ucugccgcacugaagagcu

SEQ ID NO: 574379 - RNA, 19 nt, Artificial Sequence
  Description of Artificial Sequence: Synthetic oligonucleotide
ugugagguuggcaucucgc

SEQ ID NO: 574380 - RNA, 19 nt, Artificial Sequence
  Description of Artificial Sequence: Synthetic oligonucleotide
ugcuucaaccuuaauugcu

SEQ ID NO: 574381 - RNA, 19 nt, Artificial Sequence
  Description of Artificial Sequence: Synthetic oligonucleotide
ugagacacguaacucacua

SEQ ID NO: 574382 - RNA, 19 nt, Artificial Sequence
  Description of Artificial Sequence: Synthetic oligonucleotide
gaugcagguuccgugaugc

SEQ ID NO: 574383 - RNA, 19 nt, Artificial Sequence
  Description of Artificial Sequence: Synthetic oligonucleotide
caugagaauccacacggag

SEQ ID NO: 574384 - RNA, 19 nt, Artificial Sequence
  Description of Artificial Sequence: Synthetic oligonucleotide
acacguaacucacuacauc

SEQ ID NO: 574385 - RNA, 19 nt, Artificial Sequence
  Description of Artificial Sequence: Synthetic oligonucleotide
acccgcgugauucuuugcc

SEQ ID NO: 574386 - RNA, 19 nt, Artificial Sequence
  Description of Artificial Sequence: Synthetic oligonucleotide
ucacuuaaggaaugcuuug

SEQ ID NO: 574387 - RNA, 19 nt, Artificial Sequence
  Description of Artificial Sequence: Synthetic oligonucleotide
ucuuucaauccuauauaaa

SEQ ID NO: 574388 - RNA, 19 nt, Artificial Sequence
  Description of Artificial Sequence: Synthetic oligonucleotide
uauuuaugcugaaaagguu

SEQ ID NO: 574389 - RNA, 19 nt, Artificial Sequence
  Description of Artificial Sequence: Synthetic oligonucleotide
agaaacagucuguuguuga

SEQ ID NO: 574390 - RNA, 19 nt, Artificial Sequence
  Description of Artificial Sequence: Synthetic oligonucleotide
caugagacacguaacucac

SEQ ID NO: 574391 - RNA, 19 nt, Artificial Sequence
  Description of Artificial Sequence: Synthetic oligonucleotide
uuaguauauuuguaauaaa

SEQ ID NO: 574392 - RNA, 19 nt, Artificial Sequence
  Description of Artificial Sequence: Synthetic oligonucleotide
uagugaaauccucugcuuc

SEQ ID NO: 574393 - RNA, 19 nt, Artificial Sequence
  Description of Artificial Sequence: Synthetic oligonucleotide
aucaguuugcuucgccaac

SEQ ID NO: 574394 - RNA, 19 nt, Artificial Sequence
  Description of Artificial Sequence: Synthetic oligonucleotide
uuugcuucgccaacugacu

SEQ ID NO: 574395 - RNA, 19 nt, Artificial Sequence
  Description of Artificial Sequence: Synthetic oligonucleotide
ucuggaugcagguuccgug

SEQ ID NO: 574396 - RNA, 19 nt, Artificial Sequence
  Description of Artificial Sequence: Synthetic oligonucleotide
uucgccaacugacugcuac

SEQ ID NO: 574397 - RNA, 19 nt, Artificial Sequence
  Description of Artificial Sequence: Synthetic oligonucleotide
ucgaggaugagcucggguc

SEQ ID NO: 574398 - RNA, 19 nt, Artificial Sequence
  Description of Artificial Sequence: Synthetic oligonucleotide
aguacuaucaauagacaau

SEQ ID NO: 574399 - RNA, 19 nt, Artificial Sequence
  Description of Artificial Sequence: Synthetic oligonucleotide
cucaacucugauuuauuuc

SEQ ID NO: 574400 - RNA, 19 nt, Artificial Sequence
  Description of Artificial Sequence: Synthetic oligonucleotide
guaaaguaacagaaaugag

SEQ ID NO: 574401 - RNA, 19 nt, Artificial Sequence
  Description of Artificial Sequence: Synthetic oligonucleotide
aacgcacacaggaugagca

SEQ ID NO: 574402 - RNA, 19 nt, Artificial Sequence
  Description of Artificial Sequence: Synthetic oligonucleotide
aagguugaggugaagaguu

SEQ ID NO: 574403 - RNA, 19 nt, Artificial Sequence
  Description of Artificial Sequence: Synthetic oligonucleotide
ugagucagagugaacugaa

SEQ ID NO: 574404 - RNA, 19 nt, Artificial Sequence
  Description of Artificial Sequence: Synthetic oligonucleotide
uggggugauaaauagucua

SEQ ID NO: 574405 - RNA, 19 nt, Artificial Sequence
  Description of Artificial Sequence: Synthetic oligonucleotide
cacagugcaaguaaaaugu

SEQ ID NO: 574406 - RNA, 19 nt, Artificial Sequence
  Description of Artificial Sequence: Synthetic oligonucleotide
caagguaagguugagguga

SEQ ID NO: 574407 - RNA, 19 nt, Artificial Sequence
  Description of Artificial Sequence: Synthetic oligonucleotide
guagacgcacaccuagcgg

SEQ ID NO: 574408 - RNA, 19 nt, Artificial Sequence
  Description of Artificial Sequence: Synthetic oligonucleotide
gagugaacugaaccaaaac

SEQ ID NO: 574409 - RNA, 19 nt, Artificial Sequence
  Description of Artificial Sequence: Synthetic oligonucleotide
gaaaagguucucauuccug

SEQ ID NO: 574410 - RNA, 19 nt, Artificial Sequence
  Description of Artificial Sequence: Synthetic oligonucleotide
uggucaccgaggcagccgg

SEQ ID NO: 574411 - RNA, 19 nt, Artificial Sequence
  Description of Artificial Sequence: Synthetic oligonucleotide
aaauguauuuaugcugaaa

SEQ ID NO: 574412 - RNA, 19 nt, Artificial Sequence
  Description of Artificial Sequence: Synthetic oligonucleotide
aaaguccgcaggcaugcgu

SEQ ID NO: 574413 - RNA, 19 nt, Artificial Sequence
  Description of Artificial Sequence: Synthetic oligonucleotide
uguuguugauucuucucaa

SEQ ID NO: 574414 - RNA, 19 nt, Artificial Sequence
  Description of Artificial Sequence: Synthetic oligonucleotide
cuaagcgcuuccaucaguc

SEQ ID NO: 574415 - RNA, 19 nt, Artificial Sequence
  Description of Artificial Sequence: Synthetic oligonucleotide
agaguucaauucucgauau

SEQ ID NO: 574416 - RNA, 19 nt, Artificial Sequence
  Description of Artificial Sequence: Synthetic oligonucleotide
aaccuuaauugcuccgggu

SEQ ID NO: 574417 - RNA, 19 nt, Artificial Sequence
  Description of Artificial Sequence: Synthetic oligonucleotide
ugcucuggacgccuguaag

SEQ ID NO: 574418 - RNA, 19 nt, Artificial Sequence
  Description of Artificial Sequence: Synthetic oligonucleotide
cuggacgccuguaagguug

SEQ ID NO: 574419 - RNA, 19 nt, Artificial Sequence
  Description of Artificial Sequence: Synthetic oligonucleotide
aaacaauaucccguuugcu

SEQ ID NO: 574420 - RNA, 19 nt, Artificial Sequence
  Description of Artificial Sequence: Synthetic oligonucleotide
ucgauauaaccugcuagug

SEQ ID NO: 574421 - RNA, 19 nt, Artificial Sequence
  Description of Artificial Sequence: Synthetic oligonucleotide
acacuugauccacacugag

SEQ ID NO: 574422 - RNA, 19 nt, Artificial Sequence
  Description of Artificial Sequence: Synthetic oligonucleotide
uuguagagcaacagugaau

SEQ ID NO: 574423 - RNA, 19 nt, Artificial Sequence
  Description of Artificial Sequence: Synthetic oligonucleotide
uuuaaacaauaucccguuu

SEQ ID NO: 574424 - RNA, 19 nt, Artificial Sequence
  Description of Artificial Sequence: Synthetic oligonucleotide
aacugcuaauuauuugcua

SEQ ID NO: 574425 - RNA, 19 nt, Artificial Sequence
  Description of Artificial Sequence: Synthetic oligonucleotide
guuugcuucgccaacugac

SEQ ID NO: 574426 - RNA, 19 nt, Artificial Sequence
  Description of Artificial Sequence: Synthetic oligonucleotide
aaaacgcacacaggaugag

SEQ ID NO: 574427 - RNA, 19 nt, Artificial Sequence
  Description of Artificial Sequence: Synthetic oligonucleotide
acgccuguaagguuggcca

SEQ ID NO: 574428 - RNA, 19 nt, Artificial Sequence
  Description of Artificial Sequence: Synthetic oligonucleotide
aucggcuguagacgcacac

SEQ ID NO: 574429 - RNA, 19 nt, Artificial Sequence
  Description of Artificial Sequence: Synthetic oligonucleotide
acgcucauuuucuaaacaa

SEQ ID NO: 574430 - RNA, 19 nt, Artificial Sequence
  Description of Artificial Sequence: Synthetic oligonucleotide
uugcuucgccaacugacug

SEQ ID NO: 574431 - RNA, 19 nt, Artificial Sequence
  Description of Artificial Sequence: Synthetic oligonucleotide
acucagucgaggaugagcu

SEQ ID NO: 574432 - RNA, 19 nt, Artificial Sequence
  Description of Artificial Sequence: Synthetic oligonucleotide
cagucucuuagcaaaauaa

SEQ ID NO: 574433 - RNA, 19 nt, Artificial Sequence
  Description of Artificial Sequence: Synthetic oligonucleotide
cacaagguaagguugaggu

SEQ ID NO: 574434 - RNA, 19 nt, Artificial Sequence
  Description of Artificial Sequence: Synthetic oligonucleotide
ugucucaaggcagguaagc

SEQ ID NO: 574435 - RNA, 19 nt, Artificial Sequence
  Description of Artificial Sequence: Synthetic oligonucleotide
cacggagcugcucagcacc

SEQ ID NO: 574436 - RNA, 19 nt, Artificial Sequence
  Description of Artificial Sequence: Synthetic oligonucleotide
ugcuucgccaacugacugc

SEQ ID NO: 574437 - RNA, 19 nt, Artificial Sequence
  Description of Artificial Sequence: Synthetic oligonucleotide
aagccagaguauuuacaau

SEQ ID NO: 574438 - RNA, 19 nt, Artificial Sequence
  Description of Artificial Sequence: Synthetic oligonucleotide
guagagcaacagugaaugg

SEQ ID NO: 574439 - RNA, 19 nt, Artificial Sequence
  Description of Artificial Sequence: Synthetic oligonucleotide
gaagaguucaauucucgau

SEQ ID NO: 574440 - RNA, 19 nt, Artificial Sequence
  Description of Artificial Sequence: Synthetic oligonucleotide
agugcaaguaaaauguauu

SEQ ID NO: 574441 - RNA, 19 nt, Artificial Sequence
  Description of Artificial Sequence: Synthetic oligonucleotide
ucgccaacugacugcuacg

SEQ ID NO: 574442 - RNA, 19 nt, Artificial Sequence
  Description of Artificial Sequence: Synthetic oligonucleotide
aauacugaucaggguucag

SEQ ID NO: 574443 - RNA, 19 nt, Artificial Sequence
  Description of Artificial Sequence: Synthetic oligonucleotide
acaaaauaugaggucccug

SEQ ID NO: 574444 - RNA, 19 nt, Artificial Sequence
  Description of Artificial Sequence: Synthetic oligonucleotide
ugcuaagcgcuuccaucag

SEQ ID NO: 574445 - RNA, 19 nt, Artificial Sequence
  Description of Artificial Sequence: Synthetic oligonucleotide
uucaguucacacgugcgaa

SEQ ID NO: 574446 - RNA, 19 nt, Artificial Sequence
  Description of Artificial Sequence: Synthetic oligonucleotide
aacgccggcuccuccuguc

SEQ ID NO: 574447 - RNA, 19 nt, Artificial Sequence
  Description of Artificial Sequence: Synthetic oligonucleotide
gcuacgacaguaaaguaac

SEQ ID NO: 574448 - RNA, 19 nt, Artificial Sequence
  Description of Artificial Sequence: Synthetic oligonucleotide
uggacgccuguaagguugg

SEQ ID NO: 574449 - RNA, 19 nt, Artificial Sequence
  Description of Artificial Sequence: Synthetic oligonucleotide
uucucgauauaaccugcua

SEQ ID NO: 574450 - RNA, 19 nt, Artificial Sequence
  Description of Artificial Sequence: Synthetic oligonucleotide
cacguaacucacuacaucu

SEQ ID NO: 574451 - RNA, 19 nt, Artificial Sequence
  Description of Artificial Sequence: Synthetic oligonucleotide
uuucugccgcacugaagag

SEQ ID NO: 574452 - RNA, 19 nt, Artificial Sequence
  Description of Artificial Sequence: Synthetic oligonucleotide
aggcguaaucugcaaauau

SEQ ID NO: 574453 - RNA, 19 nt, Artificial Sequence
  Description of Artificial Sequence: Synthetic oligonucleotide
gagacacguaacucacuac

SEQ ID NO: 574454 - RNA, 19 nt, Artificial Sequence
  Description of Artificial Sequence: Synthetic oligonucleotide
aaaaguccgcaggcaugcg

SEQ ID NO: 574455 - RNA, 19 nt, Artificial Sequence
  Description of Artificial Sequence: Synthetic oligonucleotide
aguuuucacucugagcuaa

SEQ ID NO: 574456 - RNA, 19 nt, Artificial Sequence
  Description of Artificial Sequence: Synthetic oligonucleotide
cacucagucgaggaugagc

SEQ ID NO: 574457 - RNA, 19 nt, Artificial Sequence
  Description of Artificial Sequence: Synthetic oligonucleotide
ugacccgcgugauucuuug

SEQ ID NO: 574458 - RNA, 19 nt, Artificial Sequence
  Description of Artificial Sequence: Synthetic oligonucleotide
gaauuugagcugagcccgg

SEQ ID NO: 574459 - RNA, 19 nt, Artificial Sequence
  Description of Artificial Sequence: Synthetic oligonucleotide
cuguagacgcacaccuagc

SEQ ID NO: 574460 - RNA, 19 nt, Artificial Sequence
  Description of Artificial Sequence: Synthetic oligonucleotide
uugccaacgccaaccugug

SEQ ID NO: 574461 - RNA, 19 nt, Artificial Sequence
  Description of Artificial Sequence: Synthetic oligonucleotide
cucgauauaaccugcuagu

SEQ ID NO: 574462 - RNA, 19 nt, Artificial Sequence
  Description of Artificial Sequence: Synthetic oligonucleotide
cuuugcugcccgcaucaag

SEQ ID NO: 574463 - RNA, 19 nt, Artificial Sequence
  Description of Artificial Sequence: Synthetic oligonucleotide
uggaugaaggccgcggagu

SEQ ID NO: 574464 - RNA, 19 nt, Artificial Sequence
  Description of Artificial Sequence: Synthetic oligonucleotide
ugacugcuacgacaguaaa

SEQ ID NO: 574465 - RNA, 19 nt, Artificial Sequence
  Description of Artificial Sequence: Synthetic oligonucleotide
agcugugcgcugcacggag

SEQ ID NO: 574466 - RNA, 19 nt, Artificial Sequence
  Description of Artificial Sequence: Synthetic oligonucleotide
ugagcccggacaucacuug

SEQ ID NO: 574467 - RNA, 19 nt, Artificial Sequence
  Description of Artificial Sequence: Synthetic oligonucleotide
uucacacgugcgaauuaaa

SEQ ID NO: 574468 - RNA, 19 nt, Artificial Sequence
  Description of Artificial Sequence: Synthetic oligonucleotide
ggggcuuugcucuggacgc

SEQ ID NO: 574469 - RNA, 19 nt, Artificial Sequence
  Description of Artificial Sequence: Synthetic oligonucleotide
uucugccgcacugaagagc

SEQ ID NO: 574470 - RNA, 19 nt, Artificial Sequence
  Description of Artificial Sequence: Synthetic oligonucleotide
uacuaucaauagacaauuu

SEQ ID NO: 574471 - RNA, 19 nt, Artificial Sequence
  Description of Artificial Sequence: Synthetic oligonucleotide
ugucgcaucugugccagcu

SEQ ID NO: 574472 - RNA, 19 nt, Artificial Sequence
  Description of Artificial Sequence: Synthetic oligonucleotide
gccaacgccaaccugugug

SEQ ID NO: 574473 - RNA, 19 nt, Artificial Sequence
  Description of Artificial Sequence: Synthetic oligonucleotide
ucccguuugcuuguuacaa

SEQ ID NO: 574474 - RNA, 19 nt, Artificial Sequence
  Description of Artificial Sequence: Synthetic oligonucleotide
cugcgugaggcugaugacc

SEQ ID NO: 574475 - RNA, 19 nt, Artificial Sequence
  Description of Artificial Sequence: Synthetic oligonucleotide
ggucaucggcuguagacgc

SEQ ID NO: 574476 - RNA, 19 nt, Artificial Sequence
  Description of Artificial Sequence: Synthetic oligonucleotide
ccggacaucacuugcuugc

SEQ ID NO: 574477 - RNA, 19 nt, Artificial Sequence
  Description of Artificial Sequence: Synthetic oligonucleotide
gaaagacagggauuuccua

SEQ ID NO: 574478 - RNA, 19 nt, Artificial Sequence
  Description of Artificial Sequence: Synthetic oligonucleotide
cagucgaggaugagcucgg

SEQ ID NO: 574479 - RNA, 19 nt, Artificial Sequence
  Description of Artificial Sequence: Synthetic oligonucleotide
uggagggcgcuggucaccg

SEQ ID NO: 574480 - RNA, 19 nt, Artificial Sequence
  Description of Artificial Sequence: Synthetic oligonucleotide
ucaucggcuguagacgcac

SEQ ID NO: 574481 - RNA, 19 nt, Artificial Sequence
  Description of Artificial Sequence: Synthetic oligonucleotide
gcucuggacgccuguaagg

SEQ ID NO: 574482 - RNA, 19 nt, Artificial Sequence
  Description of Artificial Sequence: Synthetic oligonucleotide
gacgccuguaagguuggcc

SEQ ID NO: 574483 - RNA, 19 nt, Artificial Sequence
  Description of Artificial Sequence: Synthetic oligonucleotide
gagcccggacaucacuugc

SEQ ID NO: 574484 - RNA, 19 nt, Artificial Sequence
  Description of Artificial Sequence: Synthetic oligonucleotide
cugcuccauuguaaagagg

SEQ ID NO: 574485 - RNA, 19 nt, Artificial Sequence
  Description of Artificial Sequence: Synthetic oligonucleotide
ugccgcacugaagagcuga

SEQ ID NO: 574486 - RNA, 19 nt, Artificial Sequence
  Description of Artificial Sequence: Synthetic oligonucleotide
cugucucaaggcagguaag

SEQ ID NO: 574487 - RNA, 19 nt, Artificial Sequence
  Description of Artificial Sequence: Synthetic oligonucleotide
ucggcuguagacgcacacc

SEQ ID NO: 574488 - RNA, 19 nt, Artificial Sequence
  Description of Artificial Sequence: Synthetic oligonucleotide
cugagguugacccgcguga

SEQ ID NO: 574489 - RNA, 19 nt, Artificial Sequence
  Description of Artificial Sequence: Synthetic oligonucleotide
cuggaugcagguuccguga

SEQ ID NO: 574490 - RNA, 19 nt, Artificial Sequence
  Description of Artificial Sequence: Synthetic oligonucleotide
guucccacgccggagcugc

SEQ ID NO: 574491 - RNA, 19 nt, Artificial Sequence
  Description of Artificial Sequence: Synthetic oligonucleotide
gaaacagucuguuguugau

SEQ ID NO: 574492 - RNA, 19 nt, Artificial Sequence
  Description of Artificial Sequence: Synthetic oligonucleotide
cacacgugcgaauuaaagu

SEQ ID NO: 574493 - RNA, 19 nt, Artificial Sequence
  Description of Artificial Sequence: Synthetic oligonucleotide
aaggcguaaucugcaaaua

SEQ ID NO: 574494 - RNA, 19 nt, Artificial Sequence
  Description of Artificial Sequence: Synthetic oligonucleotide
guauucucucugcugcaga

SEQ ID NO: 574495 - RNA, 19 nt, Artificial Sequence
  Description of Artificial Sequence: Synthetic oligonucleotide
uaccugucaucauccuugu

SEQ ID NO: 574496 - RNA, 19 nt, Artificial Sequence
  Description of Artificial Sequence: Synthetic oligonucleotide
ucccuucagaaacgccggc

SEQ ID NO: 574497 - RNA, 19 nt, Artificial Sequence
  Description of Artificial Sequence: Synthetic oligonucleotide
uuaugcugaaaagguucuc

SEQ ID NO: 574498 - RNA, 19 nt, Artificial Sequence
  Description of Artificial Sequence: Synthetic oligonucleotide
cacuugauccacacugaga

SEQ ID NO: 574499 - RNA, 19 nt, Artificial Sequence
  Description of Artificial Sequence: Synthetic oligonucleotide
caccuagcgggugagucag

SEQ ID NO: 574500 - RNA, 19 nt, Artificial Sequence
  Description of Artificial Sequence: Synthetic oligonucleotide
acguaacucacuacaucug

SEQ ID NO: 574501 - RNA, 19 nt, Artificial Sequence
  Description of Artificial Sequence: Synthetic oligonucleotide
aggcaugcgucccuucaga

SEQ ID NO: 574502 - RNA, 19 nt, Artificial Sequence
  Description of Artificial Sequence: Synthetic oligonucleotide
aguucacacgugcgaauua

SEQ ID NO: 574503 - RNA, 19 nt, Artificial Sequence
  Description of Artificial Sequence: Synthetic oligonucleotide
gcuagugaaauccucugcu

SEQ ID NO: 574504 - RNA, 19 nt, Artificial Sequence
  Description of Artificial Sequence: Synthetic oligonucleotide
ucuuugccgugugaacugu

SEQ ID NO: 574505 - RNA, 19 nt, Artificial Sequence
  Description of Artificial Sequence: Synthetic oligonucleotide
aaccugcuagugaaauccu

SEQ ID NO: 574506 - RNA, 19 nt, Artificial Sequence
  Description of Artificial Sequence: Synthetic oligonucleotide
ccaacugacugcuacgaca

SEQ ID NO: 574507 - RNA, 19 nt, Artificial Sequence
  Description of Artificial Sequence: Synthetic oligonucleotide
auucucgauauaaccugcu

SEQ ID NO: 574508 - RNA, 19 nt, Artificial Sequence
  Description of Artificial Sequence: Synthetic oligonucleotide
uucucagguguugguaaaa

SEQ ID NO: 574509 - RNA, 19 nt, Artificial Sequence
  Description of Artificial Sequence: Synthetic oligonucleotide
ggaucgagacuuugcugcc

SEQ ID NO: 574510 - RNA, 19 nt, Artificial Sequence
  Description of Artificial Sequence: Synthetic oligonucleotide
caggcaugcgucccuucag

SEQ ID NO: 574511 - RNA, 19 nt, Artificial Sequence
  Description of Artificial Sequence: Synthetic oligonucleotide
acgccaaccugugugggcu

SEQ ID NO: 574512 - RNA, 19 nt, Artificial Sequence
  Description of Artificial Sequence: Synthetic oligonucleotide
guggcaugagacacguaac

SEQ ID NO: 574513 - RNA, 19 nt, Artificial Sequence
  Description of Artificial Sequence: Synthetic oligonucleotide
gagucagagugaacugaac

SEQ ID NO: 574514 - RNA, 19 nt, Artificial Sequence
  Description of Artificial Sequence: Synthetic oligonucleotide
aagaaccaauuaguauauu

SEQ ID NO: 574515 - RNA, 19 nt, Artificial Sequence
  Description of Artificial Sequence: Synthetic oligonucleotide
guucacacgugcgaauuaa

SEQ ID NO: 574516 - RNA, 19 nt, Artificial Sequence
  Description of Artificial Sequence: Synthetic oligonucleotide
uaccuaucuccagccggag

SEQ ID NO: 574517 - RNA, 19 nt, Artificial Sequence
  Description of Artificial Sequence: Synthetic oligonucleotide
ugagguugacccgcgugau

SEQ ID NO: 574518 - RNA, 19 nt, Artificial Sequence
  Description of Artificial Sequence: Synthetic oligonucleotide
cuuugccgugugaacuguc

SEQ ID NO: 574519 - RNA, 19 nt, Artificial Sequence
  Description of Artificial Sequence: Synthetic oligonucleotide
caccaaccauuuccaacac

SEQ ID NO: 574520 - RNA, 19 nt, Artificial Sequence
  Description of Artificial Sequence: Synthetic oligonucleotide
ucuggacgccuguaagguu

SEQ ID NO: 574521 - RNA, 19 nt, Artificial Sequence
  Description of Artificial Sequence: Synthetic oligonucleotide
ucgagacuuugcugcccgc

SEQ ID NO: 574522 - RNA, 19 nt, Artificial Sequence
  Description of Artificial Sequence: Synthetic oligonucleotide
auaugaggucccugagguu

SEQ ID NO: 574523 - RNA, 19 nt, Artificial Sequence
  Description of Artificial Sequence: Synthetic oligonucleotide
aauaucccguuugcuuguu

SEQ ID NO: 574524 - RNA, 19 nt, Artificial Sequence
  Description of Artificial Sequence: Synthetic oligonucleotide
gucuaacaugagaauccac

SEQ ID NO: 574525 - RNA, 19 nt, Artificial Sequence
  Description of Artificial Sequence: Synthetic oligonucleotide
ccgaucgccgccaaugcug

SEQ ID NO: 574526 - RNA, 19 nt, Artificial Sequence
  Description of Artificial Sequence: Synthetic oligonucleotide
acaugagaauccacacgga

SEQ ID NO: 574527 - RNA, 19 nt, Artificial Sequence
  Description of Artificial Sequence: Synthetic oligonucleotide
augcgucccuucagaaacg

SEQ ID NO: 574528 - RNA, 19 nt, Artificial Sequence
  Description of Artificial Sequence: Synthetic oligonucleotide
aggcagguaagcuccucuu

SEQ ID NO: 574529 - RNA, 19 nt, Artificial Sequence
  Description of Artificial Sequence: Synthetic oligonucleotide
ccgguuucccagcugugcg

SEQ ID NO: 574530 - RNA, 19 nt, Artificial Sequence
  Description of Artificial Sequence: Synthetic oligonucleotide
uggcuugucucacgcucau

SEQ ID NO: 574531 - RNA, 19 nt, Artificial Sequence
  Description of Artificial Sequence: Synthetic oligonucleotide
ucaccgaggcagccgguuu

SEQ ID NO: 574532 - RNA, 19 nt, Artificial Sequence
  Description of Artificial Sequence: Synthetic oligonucleotide
cagugcaaguaaaauguau

SEQ ID NO: 574533 - RNA, 19 nt, Artificial Sequence
  Description of Artificial Sequence: Synthetic oligonucleotide
cacuugcuugcucauaccu

SEQ ID NO: 574534 - RNA, 19 nt, Artificial Sequence
  Description of Artificial Sequence: Synthetic oligonucleotide
cccgcgugauucuuugccg

SEQ ID NO: 574535 - RNA, 19 nt, Artificial Sequence
  Description of Artificial Sequence: Synthetic oligonucleotide
acgcacacaggaugagcaa

SEQ ID NO: 574536 - RNA, 19 nt, Artificial Sequence
  Description of Artificial Sequence: Synthetic oligonucleotide
auauaaccugcuagugaaa

SEQ ID NO: 574537 - RNA, 19 nt, Artificial Sequence
  Description of Artificial Sequence: Synthetic oligonucleotide
cucagucgaggaugagcuc

SEQ ID NO: 574538 - RNA, 19 nt, Artificial Sequence
  Description of Artificial Sequence: Synthetic oligonucleotide
gacccgcgugauucuuugc

SEQ ID NO: 574539 - RNA, 19 nt, Artificial Sequence
  Description of Artificial Sequence: Synthetic oligonucleotide
agcucgggucagcuguccu

SEQ ID NO: 574540 - RNA, 19 nt, Artificial Sequence
  Description of Artificial Sequence: Synthetic oligonucleotide
ggaugcagguuccgugaug

SEQ ID NO: 574541 - RNA, 19 nt, Artificial Sequence
  Description of Artificial Sequence: Synthetic oligonucleotide
ggcagguaagcuccucuuc

SEQ ID NO: 574542 - RNA, 19 nt, Artificial Sequence
  Description of Artificial Sequence: Synthetic oligonucleotide
caauaucccguuugcuugu

SEQ ID NO: 574543 - RNA, 19 nt, Artificial Sequence
  Description of Artificial Sequence: Synthetic oligonucleotide
ggcguaaucugcaaauaua

SEQ ID NO: 574544 - RNA, 19 nt, Artificial Sequence
  Description of Artificial Sequence: Synthetic oligonucleotide
caccgaggcagccgguuuc

SEQ ID NO: 574545 - RNA, 19 nt, Artificial Sequence
  Description of Artificial Sequence: Synthetic oligonucleotide
ggggugauaaauagucuaa

SEQ ID NO: 574546 - RNA, 19 nt, Artificial Sequence
  Description of Artificial Sequence: Synthetic oligonucleotide
gacgcacaccuagcgggug

SEQ ID NO: 574547 - RNA, 19 nt, Artificial Sequence
  Description of Artificial Sequence: Synthetic oligonucleotide
gcaucaagaucucccucuc

SEQ ID NO: 574548 - RNA, 19 nt, Artificial Sequence
  Description of Artificial Sequence: Synthetic oligonucleotide
auaucccguuugcuuguua

SEQ ID NO: 574549 - RNA, 19 nt, Artificial Sequence
  Description of Artificial Sequence: Synthetic oligonucleotide
ccugagguugacccgcgug

SEQ ID NO: 574550 - RNA, 19 nt, Artificial Sequence
  Description of Artificial Sequence: Synthetic oligonucleotide
cacuuaaggaaugcuuugu

SEQ ID NO: 574551 - RNA, 19 nt, Artificial Sequence
  Description of Artificial Sequence: Synthetic oligonucleotide
gucucaaggcagguaagcu

SEQ ID NO: 574552 - RNA, 19 nt, Artificial Sequence
  Description of Artificial Sequence: Synthetic oligonucleotide
gggugauaaauagucuaaa

SEQ ID NO: 574553 - RNA, 19 nt, Artificial Sequence
  Description of Artificial Sequence: Synthetic oligonucleotide
agguaagguugaggugaag

SEQ ID NO: 574554 - RNA, 19 nt, Artificial Sequence
  Description of Artificial Sequence: Synthetic oligonucleotide
ggcccgaucgccgccaaug

SEQ ID NO: 574555 - RNA, 19 nt, Artificial Sequence
  Description of Artificial Sequence: Synthetic oligonucleotide
gcuggaugaaggccgcgga

SEQ ID NO: 574556 - RNA, 19 nt, Artificial Sequence
  Description of Artificial Sequence: Synthetic oligonucleotide
ccuagcgggugagucagag

SEQ ID NO: 574557 - RNA, 19 nt, Artificial Sequence
  Description of Artificial Sequence: Synthetic oligonucleotide
gguuccgugaugccgugcu

SEQ ID NO: 574558 - RNA, 19 nt, Artificial Sequence
  Description of Artificial Sequence: Synthetic oligonucleotide
agaaggccacucagucgag

SEQ ID NO: 574559 - RNA, 19 nt, Artificial Sequence
  Description of Artificial Sequence: Synthetic oligonucleotide
agcgggugagucagaguga

SEQ ID NO: 574560 - RNA, 19 nt, Artificial Sequence
  Description of Artificial Sequence: Synthetic oligonucleotide
cugcuacgacaguaaagua

SEQ ID NO: 574561 - RNA, 19 nt, Artificial Sequence
  Description of Artificial Sequence: Synthetic oligonucleotide
gccaacugacugcuacgac

SEQ ID NO: 574562 - RNA, 19 nt, Artificial Sequence
  Description of Artificial Sequence: Synthetic oligonucleotide
acgccggcuccuccuguca

SEQ ID NO: 574563 - RNA, 19 nt, Artificial Sequence
  Description of Artificial Sequence: Synthetic oligonucleotide
gcuugcauacagucucuua

SEQ ID NO: 574564 - RNA, 19 nt, Artificial Sequence
  Description of Artificial Sequence: Synthetic oligonucleotide
ccuuaauugcuccgggucu

SEQ ID NO: 574565 - RNA, 19 nt, Artificial Sequence
  Description of Artificial Sequence: Synthetic oligonucleotide
ggcaugcgucccuucagaa

SEQ ID NO: 574566 - RNA, 19 nt, Artificial Sequence
  Description of Artificial Sequence: Synthetic oligonucleotide
cuugucucacgcucauuuu

SEQ ID NO: 574567 - RNA, 19 nt, Artificial Sequence
  Description of Artificial Sequence: Synthetic oligonucleotide
gcccgaucgccgccaaugc

SEQ ID NO: 574568 - RNA, 19 nt, Artificial Sequence
  Description of Artificial Sequence: Synthetic oligonucleotide
ggaugagcaacugcuaauu

SEQ ID NO: 574569 - RNA, 19 nt, Artificial Sequence
  Description of Artificial Sequence: Synthetic oligonucleotide
gcgugaggcugaugaccgg

SEQ ID NO: 574570 - RNA, 19 nt, Artificial Sequence
  Description of Artificial Sequence: Synthetic oligonucleotide
cguaaucugcaaauauaua

SEQ ID NO: 574571 - RNA, 19 nt, Artificial Sequence
  Description of Artificial Sequence: Synthetic oligonucleotide
gugagugcagugguggcuu

SEQ ID NO: 574572 - RNA, 19 nt, Artificial Sequence
  Description of Artificial Sequence: Synthetic oligonucleotide
cacugagaaacagucuguu

SEQ ID NO: 574573 - RNA, 19 nt, Artificial Sequence
  Description of Artificial Sequence: Synthetic oligonucleotide
cgccaaugcugugagguug

SEQ ID NO: 574574 - RNA, 19 nt, Artificial Sequence
  Description of Artificial Sequence: Synthetic oligonucleotide
cugccgcacugaagagcug

SEQ ID NO: 574575 - RNA, 19 nt, Artificial Sequence
  Description of Artificial Sequence: Synthetic oligonucleotide
cuagcgggugagucagagu

SEQ ID NO: 574576 - RNA, 19 nt, Artificial Sequence
  Description of Artificial Sequence: Synthetic oligonucleotide
gcuaagcgcuuccaucagu

SEQ ID NO: 574577 - RNA, 19 nt, Artificial Sequence
  Description of Artificial Sequence: Synthetic oligonucleotide
gcuucgccaacugacugcu

SEQ ID NO: 574578 - RNA, 19 nt, Artificial Sequence
  Description of Artificial Sequence: Synthetic oligonucleotide
gcgggugagucagagugaa

SEQ ID NO: 574579 - RNA, 19 nt, Artificial Sequence
  Description of Artificial Sequence: Synthetic oligonucleotide
gagguugacccgcgugauu

SEQ ID NO: 574580 - RNA, 19 nt, Artificial Sequence
  Description of Artificial Sequence: Synthetic oligonucleotide
cgcgugauucuuugccgug

SEQ ID NO: 574581 - RNA, 19 nt, Artificial Sequence
  Description of Artificial Sequence: Synthetic oligonucleotide
gccaaccugugugggcugc

SEQ ID NO: 574582 - RNA, 19 nt, Artificial Sequence
  Description of Artificial Sequence: Synthetic oligonucleotide
ccacgccggagcugccugg

SEQ ID NO: 574583 - RNA, 19 nt, Artificial Sequence
  Description of Artificial Sequence: Synthetic oligonucleotide
gcugugcgcugcacggagc

SEQ ID NO: 574584 - RNA, 19 nt, Artificial Sequence
  Description of Artificial Sequence: Synthetic oligonucleotide
ggaaugcuuuguagagcaa

SEQ ID NO: 574585 - RNA, 19 nt, Artificial Sequence
  Description of Artificial Sequence: Synthetic oligonucleotide
gguugacccgcgugauucu

SEQ ID NO: 574586 - RNA, 19 nt, Artificial Sequence
  Description of Artificial Sequence: Synthetic oligonucleotide
cccacgccggagcugccug

SEQ ID NO: 574587 - RNA, 19 nt, Artificial Sequence
  Description of Artificial Sequence: Synthetic oligonucleotide
ccugggcccgaucgccgcc

SEQ ID NO: 574588 - RNA, 19 nt, Artificial Sequence
  Description of Artificial Sequence: Synthetic oligonucleotide
cugggcccgaucgccgcca

SEQ ID NO: 574589 - RNA, 19 nt, Artificial Sequence
  Description of Artificial Sequence: Synthetic oligonucleotide
cuucgccaacugacugcua

SEQ ID NO: 574590 - RNA, 19 nt, Artificial Sequence
  Description of Artificial Sequence: Synthetic oligonucleotide
gcgugauucuuugccgugu

SEQ ID NO: 574591 - RNA, 19 nt, Artificial Sequence
  Description of Artificial Sequence: Synthetic oligonucleotide
accuagcgggugagucaga

SEQ ID NO: 574592 - RNA, 19 nt, Artificial Sequence
  Description of Artificial Sequence: Synthetic oligonucleotide
ggcuuugcucuggacgccu

SEQ ID NO: 574593 - RNA, 19 nt, Artificial Sequence
  Description of Artificial Sequence: Synthetic oligonucleotide
gccgcggagucugggguca

SEQ ID NO: 574594 - RNA, 19 nt, Artificial Sequence
  Description of Artificial Sequence: Synthetic oligonucleotide
ggacgccuguaagguuggc

SEQ ID NO: 574595 - RNA, 19 nt, Artificial Sequence
  Description of Artificial Sequence: Synthetic oligonucleotide
gucaccgaggcagccgguu

SEQ ID NO: 574596 - RNA, 19 nt, Artificial Sequence
  Description of Artificial Sequence: Synthetic oligonucleotide
cccggcccggcacagucca

SEQ ID NO: 574597 - RNA, 19 nt, Artificial Sequence
  Description of Artificial Sequence: Synthetic oligonucleotide
ggguucccacgccggagcu

SEQ ID NO: 574598 - RNA, 19 nt, Artificial Sequence
  Description of Artificial Sequence: Synthetic oligonucleotide
ccgcgugauucuuugccgu

SEQ ID NO: 574599 - RNA, 19 nt, Artificial Sequence
  Description of Artificial Sequence: Synthetic oligonucleotide
cgccaacugacugcuacga

SEQ ID NO: 574600 - RNA, 19 nt, Artificial Sequence
  Description of Artificial Sequence: Synthetic oligonucleotide
gcuugugaggcggguggcu

SEQ ID NO: 574601 - RNA, 19 nt, Artificial Sequence
  Description of Artificial Sequence: Synthetic oligonucleotide
cgggugagucagagugaac

SEQ ID NO: 574602 - RNA, 19 nt, Artificial Sequence
  Description of Artificial Sequence: Synthetic oligonucleotide
cgaucgccgccaaugcugu

SEQ ID NO: 574603 - RNA, 19 nt, Artificial Sequence
  Description of Artificial Sequence: Synthetic oligonucleotide
caccagugguguggguggu

SEQ ID NO: 574604 - RNA, 19 nt, Artificial Sequence
  Description of Artificial Sequence: Synthetic oligonucleotide
gcgcuuccaucagucuuua

SEQ ID NO: 574605 - RNA, 19 nt, Artificial Sequence
  Description of Artificial Sequence: Synthetic oligonucleotide
cccgaucgccgccaaugcu

SEQ ID NO: 574606 - RNA, 19 nt, Artificial Sequence
  Description of Artificial Sequence: Synthetic oligonucleotide
ccggcccggcacaguccac

SEQ ID NO: 574607 - RNA, 19 nt, Artificial Sequence
  Description of Artificial Sequence: Synthetic oligonucleotide
gggcugcgugaggcugaug

SEQ ID NO: 574608 - RNA, 19 nt, Artificial Sequence
  Description of Artificial Sequence: Synthetic oligonucleotide
ccgcggagucuggggucag

SEQ ID NO: 574609 - RNA, 19 nt, Artificial Sequence
  Description of Artificial Sequence: Synthetic oligonucleotide
ccgccaaugcugugagguu

SEQ ID NO: 574610 - RNA, 19 nt, Artificial Sequence
  Description of Artificial Sequence: Synthetic oligonucleotide
ggcuugucucacgcucauu

SEQ ID NO: 574611 - RNA, 19 nt, Artificial Sequence
  Description of Artificial Sequence: Synthetic oligonucleotide
cggcccggcacaguccacu

SEQ ID NO: 574612 - RNA, 19 nt, Artificial Sequence
  Description of Artificial Sequence: Synthetic oligonucleotide
ucuuaauugaguuugaagc

SEQ ID NO: 574613 - RNA, 19 nt, Artificial Sequence
  Description of Artificial Sequence: Synthetic oligonucleotide
uuuucagucauuaauuuag

SEQ ID NO: 574614 - RNA, 19 nt, Artificial Sequence
  Description of Artificial Sequence: Synthetic oligonucleotide
uuuagcuacauuaucaccc

SEQ ID NO: 574615 - RNA, 19 nt, Artificial Sequence
  Description of Artificial Sequence: Synthetic oligonucleotide
aauuuagcuacauuaucac

SEQ ID NO: 574616 - RNA, 19 nt, Artificial Sequence
  Description of Artificial Sequence: Synthetic oligonucleotide
ugaaguuuuacuuuggcca

SEQ ID NO: 574617 - RNA, 19 nt, Artificial Sequence
  Description of Artificial Sequence: Synthetic oligonucleotide
uuuauucuuggucucaccg

SEQ ID NO: 574618 - RNA, 19 nt, Artificial Sequence
  Description of Artificial Sequence: Synthetic oligonucleotide
aagaguuuguacuugacca

SEQ ID NO: 574619 - RNA, 19 nt, Artificial Sequence
  Description of Artificial Sequence: Synthetic oligonucleotide
ugauguuugccucugagag

SEQ ID NO: 574620 - RNA, 19 nt, Artificial Sequence
  Description of Artificial Sequence: Synthetic oligonucleotide
uaauuuagcuacauuauca

SEQ ID NO: 574621 - RNA, 19 nt, Artificial Sequence
  Description of Artificial Sequence: Synthetic oligonucleotide
auuguugugaacucagacg

SEQ ID NO: 574622 - RNA, 19 nt, Artificial Sequence
  Description of Artificial Sequence: Synthetic oligonucleotide
uuguugugaacucagacga

SEQ ID NO: 574623 - RNA, 19 nt, Artificial Sequence
  Description of Artificial Sequence: Synthetic oligonucleotide
auaucggagaccugaaggc

SEQ ID NO: 574624 - RNA, 19 nt, Artificial Sequence
  Description of Artificial Sequence: Synthetic oligonucleotide
aaugcuacuuuucaaggga

SEQ ID NO: 574625 - RNA, 19 nt, Artificial Sequence
  Description of Artificial Sequence: Synthetic oligonucleotide
aacuuguaguucuagcauc

SEQ ID NO: 574626 - RNA, 19 nt, Artificial Sequence
  Description of Artificial Sequence: Synthetic oligonucleotide
uguuuuaauccuuucauaa

SEQ ID NO: 574627 - RNA, 19 nt, Artificial Sequence
  Description of Artificial Sequence: Synthetic oligonucleotide
uaaaggagaacugugaaga

SEQ ID NO: 574628 - RNA, 19 nt, Artificial Sequence
  Description of Artificial Sequence: Synthetic oligonucleotide
aagggaugcacuucuuccc

SEQ ID NO: 574629 - RNA, 19 nt, Artificial Sequence
  Description of Artificial Sequence: Synthetic oligonucleotide
cagucauuaauuuagcuac

SEQ ID NO: 574630 - RNA, 19 nt, Artificial Sequence
  Description of Artificial Sequence: Synthetic oligonucleotide
auguaugcgagcuuucagc

SEQ ID NO: 574631 - RNA, 19 nt, Artificial Sequence
  Description of Artificial Sequence: Synthetic oligonucleotide
auuuagcuacauuaucacc

SEQ ID NO: 574632 - RNA, 19 nt, Artificial Sequence
  Description of Artificial Sequence: Synthetic oligonucleotide
uuuggauugcagcacuugg

SEQ ID NO: 574633 - RNA, 19 nt, Artificial Sequence
  Description of Artificial Sequence: Synthetic oligonucleotide
uucuccgcaggauauaugg

SEQ ID NO: 574634 - RNA, 19 nt, Artificial Sequence
  Description of Artificial Sequence: Synthetic oligonucleotide
uauugaauucuucuuucag

SEQ ID NO: 574635 - RNA, 19 nt, Artificial Sequence
  Description of Artificial Sequence: Synthetic oligonucleotide
caaguugauacuuucuccg

SEQ ID NO: 574636 - RNA, 19 nt, Artificial Sequence
  Description of Artificial Sequence: Synthetic oligonucleotide
uaccauuagaugcagcucc

SEQ ID NO: 574637 - RNA, 19 nt, Artificial Sequence
  Description of Artificial Sequence: Synthetic oligonucleotide
auuacaggcugugagagac

SEQ ID NO: 574638 - RNA, 19 nt, Artificial Sequence
  Description of Artificial Sequence: Synthetic oligonucleotide
cauaucggagaccugaagg

SEQ ID NO: 574639 - RNA, 19 nt, Artificial Sequence
  Description of Artificial Sequence: Synthetic oligonucleotide
auacaagcuguucuugacc

SEQ ID NO: 574640 - RNA, 19 nt, Artificial Sequence
  Description of Artificial Sequence: Synthetic oligonucleotide
agugaggacauuuacagaa

SEQ ID NO: 574641 - RNA, 19 nt, Artificial Sequence
  Description of Artificial Sequence: Synthetic oligonucleotide
uucauggcuuauaagcagg

SEQ ID NO: 574642 - RNA, 19 nt, Artificial Sequence
  Description of Artificial Sequence: Synthetic oligonucleotide
ugcaugaauccacagagcu

SEQ ID NO: 574643 - RNA, 19 nt, Artificial Sequence
  Description of Artificial Sequence: Synthetic oligonucleotide
cuguuuaaugcucaagucc

SEQ ID NO: 574644 - RNA, 19 nt, Artificial Sequence
  Description of Artificial Sequence: Synthetic oligonucleotide
aacccugacaucucauugg

SEQ ID NO: 574645 - RNA, 19 nt, Artificial Sequence
  Description of Artificial Sequence: Synthetic oligonucleotide
ucuuggucauugcacaagg

SEQ ID NO: 574646 - RNA, 19 nt, Artificial Sequence
  Description of Artificial Sequence: Synthetic oligonucleotide
acaagauuugagcaacaac

SEQ ID NO: 574647 - RNA, 19 nt, Artificial Sequence
  Description of Artificial Sequence: Synthetic oligonucleotide
gaaugcuacuuuucaaggg

SEQ ID NO: 574648 - RNA, 19 nt, Artificial Sequence
  Description of Artificial Sequence: Synthetic oligonucleotide
uguccuuaagcacaucugc

SEQ ID NO: 574649 - RNA, 19 nt, Artificial Sequence
  Description of Artificial Sequence: Synthetic oligonucleotide
uugaccuuuaaguuggucu

SEQ ID NO: 574650 - RNA, 19 nt, Artificial Sequence
  Description of Artificial Sequence: Synthetic oligonucleotide
uugcacaaggaaaucauug

SEQ ID NO: 574651 - RNA, 19 nt, Artificial Sequence
  Description of Artificial Sequence: Synthetic oligonucleotide
uuaauuuagcuacauuauc

SEQ ID NO: 574652 - RNA, 19 nt, Artificial Sequence
  Description of Artificial Sequence: Synthetic oligonucleotide
uuuaauucuucgguuagcc

SEQ ID NO: 574653 - RNA, 19 nt, Artificial Sequence
  Description of Artificial Sequence: Synthetic oligonucleotide
guuuucauugauugguggg

SEQ ID NO: 574654 - RNA, 19 nt, Artificial Sequence
  Description of Artificial Sequence: Synthetic oligonucleotide
guucuuuggucuuauaggc

SEQ ID NO: 574655 - RNA, 19 nt, Artificial Sequence
  Description of Artificial Sequence: Synthetic oligonucleotide
gauauauggacucguuuug

SEQ ID NO: 574656 - RNA, 19 nt, Artificial Sequence
  Description of Artificial Sequence: Synthetic oligonucleotide
aaugcuuacuuucccucag

SEQ ID NO: 574657 - RNA, 19 nt, Artificial Sequence
  Description of Artificial Sequence: Synthetic oligonucleotide
ucuuacauaucggagaccu

SEQ ID NO: 574658 - RNA, 19 nt, Artificial Sequence
  Description of Artificial Sequence: Synthetic oligonucleotide
aacauuacaggcugugaga

SEQ ID NO: 574659 - RNA, 19 nt, Artificial Sequence
  Description of Artificial Sequence: Synthetic oligonucleotide
cacacauuugacuacugcc

SEQ ID NO: 574660 - RNA, 19 nt, Artificial Sequence
  Description of Artificial Sequence: Synthetic oligonucleotide
ugucccacuaccauucucc

SEQ ID NO: 574661 - RNA, 19 nt, Artificial Sequence
  Description of Artificial Sequence: Synthetic oligonucleotide
ugcauaaugcuuacuuucc

SEQ ID NO: 574662 - RNA, 19 nt, Artificial Sequence
  Description of Artificial Sequence: Synthetic oligonucleotide
ucucauuuagcucucuuaa

SEQ ID NO: 574663 - RNA, 19 nt, Artificial Sequence
  Description of Artificial Sequence: Synthetic oligonucleotide
aaccgaagaauucaguaaa

SEQ ID NO: 574664 - RNA, 19 nt, Artificial Sequence
  Description of Artificial Sequence: Synthetic oligonucleotide
uuuacaagauuugagcaac

SEQ ID NO: 574665 - RNA, 19 nt, Artificial Sequence
  Description of Artificial Sequence: Synthetic oligonucleotide
cuaguucaaacuuagucuc

SEQ ID NO: 574666 - RNA, 19 nt, Artificial Sequence
  Description of Artificial Sequence: Synthetic oligonucleotide
acuauugacuguuuucuug

SEQ ID NO: 574667 - RNA, 19 nt, Artificial Sequence
  Description of Artificial Sequence: Synthetic oligonucleotide
aaguuuacauacaagcugu

SEQ ID NO: 574668 - RNA, 19 nt, Artificial Sequence
  Description of Artificial Sequence: Synthetic oligonucleotide
uccauuguuauuuuggauu

SEQ ID NO: 574669 - RNA, 19 nt, Artificial Sequence
  Description of Artificial Sequence: Synthetic oligonucleotide
aaggagaacugugaagacg

SEQ ID NO: 574670 - RNA, 19 nt, Artificial Sequence
  Description of Artificial Sequence: Synthetic oligonucleotide
ucagucauuaauuuagcua

SEQ ID NO: 574671 - RNA, 19 nt, Artificial Sequence
  Description of Artificial Sequence: Synthetic oligonucleotide
ucuuuggucuuauaggccu

SEQ ID NO: 574672 - RNA, 19 nt, Artificial Sequence
  Description of Artificial Sequence: Synthetic oligonucleotide
ucuaauucagacacucgcu

SEQ ID NO: 574673 - RNA, 19 nt, Artificial Sequence
  Description of Artificial Sequence: Synthetic oligonucleotide
agcugauucacagauuuac

SEQ ID NO: 574674 - RNA, 19 nt, Artificial Sequence
  Description of Artificial Sequence: Synthetic oligonucleotide
ucauuuagcucucuuaauu

SEQ ID NO: 574675 - RNA, 19 nt, Artificial Sequence
  Description of Artificial Sequence: Synthetic oligonucleotide
auuuauucuuggucucacc

SEQ ID NO: 574676 - RNA, 19 nt, Artificial Sequence
  Description of Artificial Sequence: Synthetic oligonucleotide
uaauucuucgguuagccua

SEQ ID NO: 574677 - RNA, 19 nt, Artificial Sequence
  Description of Artificial Sequence: Synthetic oligonucleotide
uuacauaucggagaccuga

SEQ ID NO: 574678 - RNA, 19 nt, Artificial Sequence
  Description of Artificial Sequence: Synthetic oligonucleotide
cuaacuucugcgcagcaag

SEQ ID NO: 574679 - RNA, 19 nt, Artificial Sequence
  Description of Artificial Sequence: Synthetic oligonucleotide
ucuagcaucucuuuggcuu

SEQ ID NO: 574680 - RNA, 19 nt, Artificial Sequence
  Description of Artificial Sequence: Synthetic oligonucleotide
uuaaugcucaaguccuccg

SEQ ID NO: 574681 - RNA, 19 nt, Artificial Sequence
  Description of Artificial Sequence: Synthetic oligonucleotide
aaacuuuuguaagaauucu

SEQ ID NO: 574682 - RNA, 19 nt, Artificial Sequence
  Description of Artificial Sequence: Synthetic oligonucleotide
ugcacuaaagccaguuuug

SEQ ID NO: 574683 - RNA, 19 nt, Artificial Sequence
  Description of Artificial Sequence: Synthetic oligonucleotide
aacucagacgagcaacuug

SEQ ID NO: 574684 - RNA, 19 nt, Artificial Sequence
  Description of Artificial Sequence: Synthetic oligonucleotide
cucuuaauugaguuugaag

SEQ ID NO: 574685 - RNA, 19 nt, Artificial Sequence
  Description of Artificial Sequence: Synthetic oligonucleotide
ucugguauggcagugcaug

SEQ ID NO: 574686 - RNA, 19 nt, Artificial Sequence
  Description of Artificial Sequence: Synthetic oligonucleotide
uaugcgagcuuucagcuuc

SEQ ID NO: 574687 - RNA, 19 nt, Artificial Sequence
  Description of Artificial Sequence: Synthetic oligonucleotide
cuaccauucucccaaauuc

SEQ ID NO: 574688 - RNA, 19 nt, Artificial Sequence
  Description of Artificial Sequence: Synthetic oligonucleotide
uucuguaccauuagaugca

SEQ ID NO: 574689 - RNA, 19 nt, Artificial Sequence
  Description of Artificial Sequence: Synthetic oligonucleotide
uauggacucguuuugccug

SEQ ID NO: 574690 - RNA, 19 nt, Artificial Sequence
  Description of Artificial Sequence: Synthetic oligonucleotide
aaggaaaucauugucucau

SEQ ID NO: 574691 - RNA, 19 nt, Artificial Sequence
  Description of Artificial Sequence: Synthetic oligonucleotide
uugccuguaggaaugucag

SEQ ID NO: 574692 - RNA, 19 nt, Artificial Sequence
  Description of Artificial Sequence: Synthetic oligonucleotide
acaaugcucuacuuugagg

SEQ ID NO: 574693 - RNA, 19 nt, Artificial Sequence
  Description of Artificial Sequence: Synthetic oligonucleotide
auguugacuucucacugac

SEQ ID NO: 574694 - RNA, 19 nt, Artificial Sequence
  Description of Artificial Sequence: Synthetic oligonucleotide
acauuugacuacugccacc

SEQ ID NO: 574695 - RNA, 19 nt, Artificial Sequence
  Description of Artificial Sequence: Synthetic oligonucleotide
uuucagucauuaauuuagc

SEQ ID NO: 574696 - RNA, 19 nt, Artificial Sequence
  Description of Artificial Sequence: Synthetic oligonucleotide
uacaaugcucuacuuugag

SEQ ID NO: 574697 - RNA, 19 nt, Artificial Sequence
  Description of Artificial Sequence: Synthetic oligonucleotide
agauguugacuucucacug

SEQ ID NO: 574698 - RNA, 19 nt, Artificial Sequence
  Description of Artificial Sequence: Synthetic oligonucleotide
ucagacgagcaacuuguag

SEQ ID NO: 574699 - RNA, 19 nt, Artificial Sequence
  Description of Artificial Sequence: Synthetic oligonucleotide
caagaguuuguacuugacc

SEQ ID NO: 574700 - RNA, 19 nt, Artificial Sequence
  Description of Artificial Sequence: Synthetic oligonucleotide
uccuguuuuaauccuuuca

SEQ ID NO: 574701 - RNA, 19 nt, Artificial Sequence
  Description of Artificial Sequence: Synthetic oligonucleotide
guucugaucggcaugguag

SEQ ID NO: 574702 - RNA, 19 nt, Artificial Sequence
  Description of Artificial Sequence: Synthetic oligonucleotide
auuagaugcagcucccucu

SEQ ID NO: 574703 - RNA, 19 nt, Artificial Sequence
  Description of Artificial Sequence: Synthetic oligonucleotide
uggcuuauaagcagggaac

SEQ ID NO: 574704 - RNA, 19 nt, Artificial Sequence
  Description of Artificial Sequence: Synthetic oligonucleotide
uguaugcgagcuuucagcu

SEQ ID NO: 574705 - RNA, 19 nt, Artificial Sequence
  Description of Artificial Sequence: Synthetic oligonucleotide
ugcaauguuuucuuugccu

SEQ ID NO: 574706 - RNA, 19 nt, Artificial Sequence
  Description of Artificial Sequence: Synthetic oligonucleotide
uguucuugaccuuuaaguu

SEQ ID NO: 574707 - RNA, 19 nt, Artificial Sequence
  Description of Artificial Sequence: Synthetic oligonucleotide
acaacuuuauuuuccccug

SEQ ID NO: 574708 - RNA, 19 nt, Artificial Sequence
  Description of Artificial Sequence: Synthetic oligonucleotide
uuuaaugcucaaguccucc

SEQ ID NO: 574709 - RNA, 19 nt, Artificial Sequence
  Description of Artificial Sequence: Synthetic oligonucleotide
uuagaugcagcucccucug

SEQ ID NO: 574710 - RNA, 19 nt, Artificial Sequence
  Description of Artificial Sequence: Synthetic oligonucleotide
uccgucuucaucaauccaa

SEQ ID NO: 574711 - RNA, 19 nt, Artificial Sequence
  Description of Artificial Sequence: Synthetic oligonucleotide
aucccacuaacuucugcgc

SEQ ID NO: 574712 - RNA, 19 nt, Artificial Sequence
  Description of Artificial Sequence: Synthetic oligonucleotide
uucucccaaauuccgcugg

SEQ ID NO: 574713 - RNA, 19 nt, Artificial Sequence
  Description of Artificial Sequence: Synthetic oligonucleotide
uuagcuacauuaucaccca

SEQ ID NO: 574714 - RNA, 19 nt, Artificial Sequence
  Description of Artificial Sequence: Synthetic oligonucleotide
uuuacuuuggccagauguu

SEQ ID NO: 574715 - RNA, 19 nt, Artificial Sequence
  Description of Artificial Sequence: Synthetic oligonucleotide
gacucguuuugccuguagg

SEQ ID NO: 574716 - RNA, 19 nt, Artificial Sequence
  Description of Artificial Sequence: Synthetic oligonucleotide
acuucugcgcagcaaggcg

SEQ ID NO: 574717 - RNA, 19 nt, Artificial Sequence
  Description of Artificial Sequence: Synthetic oligonucleotide
aucggcaugguaguucucc

SEQ ID NO: 574718 - RNA, 19 nt, Artificial Sequence
  Description of Artificial Sequence: Synthetic oligonucleotide
uuaucacccacaacaguac

SEQ ID NO: 574719 - RNA, 19 nt, Artificial Sequence
  Description of Artificial Sequence: Synthetic oligonucleotide
cugcauaaugcuuacuuuc

SEQ ID NO: 574720 - RNA, 19 nt, Artificial Sequence
  Description of Artificial Sequence: Synthetic oligonucleotide
ugaacucagacgagcaacu

SEQ ID NO: 574721 - RNA, 19 nt, Artificial Sequence
  Description of Artificial Sequence: Synthetic oligonucleotide
agagcucugcugaacaacc

SEQ ID NO: 574722 - RNA, 19 nt, Artificial Sequence
  Description of Artificial Sequence: Synthetic oligonucleotide
uuauucuuggucucaccga

SEQ ID NO: 574723 - RNA, 19 nt, Artificial Sequence
  Description of Artificial Sequence: Synthetic oligonucleotide
ucuagacucuguucuuggg

SEQ ID NO: 574724 - RNA, 19 nt, Artificial Sequence
  Description of Artificial Sequence: Synthetic oligonucleotide
gaacuuuuaauucuucggu

SEQ ID NO: 574725 - RNA, 19 nt, Artificial Sequence
  Description of Artificial Sequence: Synthetic oligonucleotide
uucagucauuaauuuagcu

SEQ ID NO: 574726 - RNA, 19 nt, Artificial Sequence
  Description of Artificial Sequence: Synthetic oligonucleotide
uggagaugguccuggaacc

SEQ ID NO: 574727 - RNA, 19 nt, Artificial Sequence
  Description of Artificial Sequence: Synthetic oligonucleotide
acauuacaggcugugagag

SEQ ID NO: 574728 - RNA, 19 nt, Artificial Sequence
  Description of Artificial Sequence: Synthetic oligonucleotide
aaccuugaccuuuugugau

SEQ ID NO: 574729 - RNA, 19 nt, Artificial Sequence
  Description of Artificial Sequence: Synthetic oligonucleotide
auggcuuauaagcagggaa

SEQ ID NO: 574730 - RNA, 19 nt, Artificial Sequence
  Description of Artificial Sequence: Synthetic oligonucleotide
uuggacacgacaguuuuca

SEQ ID NO: 574731 - RNA, 19 nt, Artificial Sequence
  Description of Artificial Sequence: Synthetic oligonucleotide
uguuaauucuuugcacaag

SEQ ID NO: 574732 - RNA, 19 nt, Artificial Sequence
  Description of Artificial Sequence: Synthetic oligonucleotide
uugauugguggguuaggcc

SEQ ID NO: 574733 - RNA, 19 nt, Artificial Sequence
  Description of Artificial Sequence: Synthetic oligonucleotide
cuucugcgcagcaaggcgg

SEQ ID NO: 574734 - RNA, 19 nt, Artificial Sequence
  Description of Artificial Sequence: Synthetic oligonucleotide
uaaugcuuacuuucccuca

SEQ ID NO: 574735 - RNA, 19 nt, Artificial Sequence
  Description of Artificial Sequence: Synthetic oligonucleotide
cuacuggaacuuuuaauuc

SEQ ID NO: 574736 - RNA, 19 nt, Artificial Sequence
  Description of Artificial Sequence: Synthetic oligonucleotide
aggaaugucagcaaacccu

SEQ ID NO: 574737 - RNA, 19 nt, Artificial Sequence
  Description of Artificial Sequence: Synthetic oligonucleotide
ucauugauugguggguuag

SEQ ID NO: 574738 - RNA, 19 nt, Artificial Sequence
  Description of Artificial Sequence: Synthetic oligonucleotide
ugcucaaguccuccguggg

SEQ ID NO: 574739 - RNA, 19 nt, Artificial Sequence
  Description of Artificial Sequence: Synthetic oligonucleotide
acgagcaacuuguaguucu

SEQ ID NO: 574740 - RNA, 19 nt, Artificial Sequence
  Description of Artificial Sequence: Synthetic oligonucleotide
uuuuacgacuucugggagu

SEQ ID NO: 574741 - RNA, 19 nt, Artificial Sequence
  Description of Artificial Sequence: Synthetic oligonucleotide
ugaccuuuugugaucugcu

SEQ ID NO: 574742 - RNA, 19 nt, Artificial Sequence
  Description of Artificial Sequence: Synthetic oligonucleotide
auuaucacccacaacagua

SEQ ID NO: 574743 - RNA, 19 nt, Artificial Sequence
  Description of Artificial Sequence: Synthetic oligonucleotide
caaguacuuaucugcuucc

SEQ ID NO: 574744 - RNA, 19 nt, Artificial Sequence
  Description of Artificial Sequence: Synthetic oligonucleotide
uuaauucuucgguuagccu

SEQ ID NO: 574745 - RNA, 19 nt, Artificial Sequence
  Description of Artificial Sequence: Synthetic oligonucleotide
uaucacccacaacaguacc

SEQ ID NO: 574746 - RNA, 19 nt, Artificial Sequence
  Description of Artificial Sequence: Synthetic oligonucleotide
uccaagcucacuuucuaaa

SEQ ID NO: 574747 - RNA, 19 nt, Artificial Sequence
  Description of Artificial Sequence: Synthetic oligonucleotide
uacuuugagguucuuuaau

SEQ ID NO: 574748 - RNA, 19 nt, Artificial Sequence
  Description of Artificial Sequence: Synthetic oligonucleotide
gaaccgaagaauucaguaa

SEQ ID NO: 574749 - RNA, 19 nt, Artificial Sequence
  Description of Artificial Sequence: Synthetic oligonucleotide
uuacuuuggccagauguug

SEQ ID NO: 574750 - RNA, 19 nt, Artificial Sequence
  Description of Artificial Sequence: Synthetic oligonucleotide
agucccucuaguucaaacu

SEQ ID NO: 574751 - RNA, 19 nt, Artificial Sequence
  Description of Artificial Sequence: Synthetic oligonucleotide
cugugagagacuucucuag

SEQ ID NO: 574752 - RNA, 19 nt, Artificial Sequence
  Description of Artificial Sequence: Synthetic oligonucleotide
cugacaucucauuggacac

SEQ ID NO: 574753 - RNA, 19 nt, Artificial Sequence
  Description of Artificial Sequence: Synthetic oligonucleotide
uccuuucauaagauuuuca

SEQ ID NO: 574754 - RNA, 19 nt, Artificial Sequence
  Description of Artificial Sequence: Synthetic oligonucleotide
uguugugaacucagacgag

SEQ ID NO: 574755 - RNA, 19 nt, Artificial Sequence
  Description of Artificial Sequence: Synthetic oligonucleotide
uacuuuucaagggaugcac

SEQ ID NO: 574756 - RNA, 19 nt, Artificial Sequence
  Description of Artificial Sequence: Synthetic oligonucleotide
ucuucgguuagccuauuuu

SEQ ID NO: 574757 - RNA, 19 nt, Artificial Sequence
  Description of Artificial Sequence: Synthetic oligonucleotide
cugagcacgcugaaauucc

SEQ ID NO: 574758 - RNA, 19 nt, Artificial Sequence
  Description of Artificial Sequence: Synthetic oligonucleotide
caugguaguucuccgcagg

SEQ ID NO: 574759 - RNA, 19 nt, Artificial Sequence
  Description of Artificial Sequence: Synthetic oligonucleotide
uggucauuacacagggcug

SEQ ID NO: 574760 - RNA, 19 nt, Artificial Sequence
  Description of Artificial Sequence: Synthetic oligonucleotide
uuuacgacuucugggaguc

SEQ ID NO: 574761 - RNA, 19 nt, Artificial Sequence
  Description of Artificial Sequence: Synthetic oligonucleotide
ugaucggcaugguaguucu

SEQ ID NO: 574762 - RNA, 19 nt, Artificial Sequence
  Description of Artificial Sequence: Synthetic oligonucleotide
augcuuacuuucccucagc

SEQ ID NO: 574763 - RNA, 19 nt, Artificial Sequence
  Description of Artificial Sequence: Synthetic oligonucleotide
uaaugcucaaguccuccgu

SEQ ID NO: 574764 - RNA, 19 nt, Artificial Sequence
  Description of Artificial Sequence: Synthetic oligonucleotide
uccgcaggauauauggacu

SEQ ID NO: 574765 - RNA, 19 nt, Artificial Sequence
  Description of Artificial Sequence: Synthetic oligonucleotide
ucaccgaaauccugcagca

SEQ ID NO: 574766 - RNA, 19 nt, Artificial Sequence
  Description of Artificial Sequence: Synthetic oligonucleotide
ugcuuacuuucccucagcu

SEQ ID NO: 574767 - RNA, 19 nt, Artificial Sequence
  Description of Artificial Sequence: Synthetic oligonucleotide
ucucuaggcuuucugguau

SEQ ID NO: 574768 - RNA, 19 nt, Artificial Sequence
  Description of Artificial Sequence: Synthetic oligonucleotide
gucuagacucuguucuugg

SEQ ID NO: 574769 - RNA, 19 nt, Artificial Sequence
  Description of Artificial Sequence: Synthetic oligonucleotide
guugugaacucagacgagc

SEQ ID NO: 574770 - RNA, 19 nt, Artificial Sequence
  Description of Artificial Sequence: Synthetic oligonucleotide
caaugcucuacuuugaggu

SEQ ID NO: 574771 - RNA, 19 nt, Artificial Sequence
  Description of Artificial Sequence: Synthetic oligonucleotide
gauguugacuucucacuga

SEQ ID NO: 574772 - RNA, 19 nt, Artificial Sequence
  Description of Artificial Sequence: Synthetic oligonucleotide
ucauuaauuuagcuacauu

SEQ ID NO: 574773 - RNA, 19 nt, Artificial Sequence
  Description of Artificial Sequence: Synthetic oligonucleotide
uggaccuuugucucuugcc

SEQ ID NO: 574774 - RNA, 19 nt, Artificial Sequence
  Description of Artificial Sequence: Synthetic oligonucleotide
cuccgcaggauauauggac

SEQ ID NO: 574775 - RNA, 19 nt, Artificial Sequence
  Description of Artificial Sequence: Synthetic oligonucleotide
uuuuggauugcagcacuug

SEQ ID NO: 574776 - RNA, 19 nt, Artificial Sequence
  Description of Artificial Sequence: Synthetic oligonucleotide
uucugcgcagcaaggcggg

SEQ ID NO: 574777 - RNA, 19 nt, Artificial Sequence
  Description of Artificial Sequence: Synthetic oligonucleotide
ugacaucucauuggacacg

SEQ ID NO: 574778 - RNA, 19 nt, Artificial Sequence
  Description of Artificial Sequence: Synthetic oligonucleotide
ucuugccugaaguuuuacu

SEQ ID NO: 574779 - RNA, 19 nt, Artificial Sequence
  Description of Artificial Sequence: Synthetic oligonucleotide
aauuccgcuggaccuuugu

SEQ ID NO: 574780 - RNA, 19 nt, Artificial Sequence
  Description of Artificial Sequence: Synthetic oligonucleotide
gaugcacgcuacuauugac

SEQ ID NO: 574781 - RNA, 19 nt, Artificial Sequence
  Description of Artificial Sequence: Synthetic oligonucleotide
cuuguuguuuucuguacca

SEQ ID NO: 574782 - RNA, 19 nt, Artificial Sequence
  Description of Artificial Sequence: Synthetic oligonucleotide
uccgcagaguuucucccag

SEQ ID NO: 574783 - RNA, 19 nt, Artificial Sequence
  Description of Artificial Sequence: Synthetic oligonucleotide
augcucuacuuugagguuc

SEQ ID NO: 574784 - RNA, 19 nt, Artificial Sequence
  Description of Artificial Sequence: Synthetic oligonucleotide
cacauuugacuacugccac

SEQ ID NO: 574785 - RNA, 19 nt, Artificial Sequence
  Description of Artificial Sequence: Synthetic oligonucleotide
ucuaggcuuucugguaugg

SEQ ID NO: 574786 - RNA, 19 nt, Artificial Sequence
  Description of Artificial Sequence: Synthetic oligonucleotide
uuccaacugggaaaguuua

SEQ ID NO: 574787 - RNA, 19 nt, Artificial Sequence
  Description of Artificial Sequence: Synthetic oligonucleotide
cagauuuacaaugcucuac

SEQ ID NO: 574788 - RNA, 19 nt, Artificial Sequence
  Description of Artificial Sequence: Synthetic oligonucleotide
agauuugagcaacaacuuu

SEQ ID NO: 574789 - RNA, 19 nt, Artificial Sequence
  Description of Artificial Sequence: Synthetic oligonucleotide
acauaucggagaccugaag

SEQ ID NO: 574790 - RNA, 19 nt, Artificial Sequence
  Description of Artificial Sequence: Synthetic oligonucleotide
aauucuucgguuagccuau

SEQ ID NO: 574791 - RNA, 19 nt, Artificial Sequence
  Description of Artificial Sequence: Synthetic oligonucleotide
acucagacgagcaacuugu

SEQ ID NO: 574792 - RNA, 19 nt, Artificial Sequence
  Description of Artificial Sequence: Synthetic oligonucleotide
uaucggagaccugaaggcc

SEQ ID NO: 574793 - RNA, 19 nt, Artificial Sequence
  Description of Artificial Sequence: Synthetic oligonucleotide
acuaccauucucccaaauu

SEQ ID NO: 574794 - RNA, 19 nt, Artificial Sequence
  Description of Artificial Sequence: Synthetic oligonucleotide
ucggcaugguaguucuccg

SEQ ID NO: 574795 - RNA, 19 nt, Artificial Sequence
  Description of Artificial Sequence: Synthetic oligonucleotide
cuggaaccgaagaauucag

SEQ ID NO: 574796 - RNA, 19 nt, Artificial Sequence
  Description of Artificial Sequence: Synthetic oligonucleotide
aaugcucuacuuugagguu

SEQ ID NO: 574797 - RNA, 19 nt, Artificial Sequence
  Description of Artificial Sequence: Synthetic oligonucleotide
auuccgcuggaccuuuguc

SEQ ID NO: 574798 - RNA, 19 nt, Artificial Sequence
  Description of Artificial Sequence: Synthetic oligonucleotide
aaaugucucuggugcacaa

SEQ ID NO: 574799 - RNA, 19 nt, Artificial Sequence
  Description of Artificial Sequence: Synthetic oligonucleotide
gggucuucgagguuccugg

SEQ ID NO: 574800 - RNA, 19 nt, Artificial Sequence
  Description of Artificial Sequence: Synthetic oligonucleotide
uccuccguggggcucuccg

SEQ ID NO: 574801 - RNA, 19 nt, Artificial Sequence
  Description of Artificial Sequence: Synthetic oligonucleotide
uucugaucggcaugguagu

SEQ ID NO: 574802 - RNA, 19 nt, Artificial Sequence
  Description of Artificial Sequence: Synthetic oligonucleotide
ucuguaccauuagaugcag

SEQ ID NO: 574803 - RNA, 19 nt, Artificial Sequence
  Description of Artificial Sequence: Synthetic oligonucleotide
ucguuuugccuguaggaau

SEQ ID NO: 574804 - RNA, 19 nt, Artificial Sequence
  Description of Artificial Sequence: Synthetic oligonucleotide
ucgcuuuuguuccuguuuu

SEQ ID NO: 574805 - RNA, 19 nt, Artificial Sequence
  Description of Artificial Sequence: Synthetic oligonucleotide
uuauuucuugagugaggac

SEQ ID NO: 574806 - RNA, 19 nt, Artificial Sequence
  Description of Artificial Sequence: Synthetic oligonucleotide
uuggauuguugugaacuca

SEQ ID NO: 574807 - RNA, 19 nt, Artificial Sequence
  Description of Artificial Sequence: Synthetic oligonucleotide
ugaacaaccuugaccuuuu

SEQ ID NO: 574808 - RNA, 19 nt, Artificial Sequence
  Description of Artificial Sequence: Synthetic oligonucleotide
ucucaacucuguccuuaag

SEQ ID NO: 574809 - RNA, 19 nt, Artificial Sequence
  Description of Artificial Sequence: Synthetic oligonucleotide
gcuguuuacaagauuugag

SEQ ID NO: 574810 - RNA, 19 nt, Artificial Sequence
  Description of Artificial Sequence: Synthetic oligonucleotide
agacgagcaacuuguaguu

SEQ ID NO: 574811 - RNA, 19 nt, Artificial Sequence
  Description of Artificial Sequence: Synthetic oligonucleotide
accauuagaugcagcuccc

SEQ ID NO: 574812 - RNA, 19 nt, Artificial Sequence
  Description of Artificial Sequence: Synthetic oligonucleotide
gaggacauuuacagaagac

SEQ ID NO: 574813 - RNA, 19 nt, Artificial Sequence
  Description of Artificial Sequence: Synthetic oligonucleotide
uggaaccgaagaauucagu

SEQ ID NO: 574814 - RNA, 19 nt, Artificial Sequence
  Description of Artificial Sequence: Synthetic oligonucleotide
uacauaucggagaccugaa

SEQ ID NO: 574815 - RNA, 19 nt, Artificial Sequence
  Description of Artificial Sequence: Synthetic oligonucleotide
caguucuacuuucuguuuc

SEQ ID NO: 574816 - RNA, 19 nt, Artificial Sequence
  Description of Artificial Sequence: Synthetic oligonucleotide
acgcuguuuggauuguugu

SEQ ID NO: 574817 - RNA, 19 nt, Artificial Sequence
  Description of Artificial Sequence: Synthetic oligonucleotide
ccuuuugugaucugcugcc

SEQ ID NO: 574818 - RNA, 19 nt, Artificial Sequence
  Description of Artificial Sequence: Synthetic oligonucleotide
cauuagaugcagcucccuc

SEQ ID NO: 574819 - RNA, 19 nt, Artificial Sequence
  Description of Artificial Sequence: Synthetic oligonucleotide
aguuuguacuugaccacuc

SEQ ID NO: 574820 - RNA, 19 nt, Artificial Sequence
  Description of Artificial Sequence: Synthetic oligonucleotide
gcuacuauugacuguuuuc

SEQ ID NO: 574821 - RNA, 19 nt, Artificial Sequence
  Description of Artificial Sequence: Synthetic oligonucleotide
aaguacuuaucugcuuccu

SEQ ID NO: 574822 - RNA, 19 nt, Artificial Sequence
  Description of Artificial Sequence: Synthetic oligonucleotide
gagucccucuaguucaaac

SEQ ID NO: 574823 - RNA, 19 nt, Artificial Sequence
  Description of Artificial Sequence: Synthetic oligonucleotide
gcuacuuuucaagggaugc

SEQ ID NO: 574824 - RNA, 19 nt, Artificial Sequence
  Description of Artificial Sequence: Synthetic oligonucleotide
ugagcacgcugaaauuccu

SEQ ID NO: 574825 - RNA, 19 nt, Artificial Sequence
  Description of Artificial Sequence: Synthetic oligonucleotide
uccgcuggaccuuugucuc

SEQ ID NO: 574826 - RNA, 19 nt, Artificial Sequence
  Description of Artificial Sequence: Synthetic oligonucleotide
ucuccgcaggauauaugga

SEQ ID NO: 574827 - RNA, 19 nt, Artificial Sequence
  Description of Artificial Sequence: Synthetic oligonucleotide
aggaacauuacaggcugug

SEQ ID NO: 574828 - RNA, 19 nt, Artificial Sequence
  Description of Artificial Sequence: Synthetic oligonucleotide
guguuaauucuuugcacaa

SEQ ID NO: 574829 - RNA, 19 nt, Artificial Sequence
  Description of Artificial Sequence: Synthetic oligonucleotide
ccauuguuauuuuggauuc

SEQ ID NO: 574830 - RNA, 19 nt, Artificial Sequence
  Description of Artificial Sequence: Synthetic oligonucleotide
gacgcuguuuggauuguug

SEQ ID NO: 574831 - RNA, 19 nt, Artificial Sequence
  Description of Artificial Sequence: Synthetic oligonucleotide
cuugggucuucgagguucc

SEQ ID NO: 574832 - RNA, 19 nt, Artificial Sequence
  Description of Artificial Sequence: Synthetic oligonucleotide
ugaauccacagagcucugc

SEQ ID NO: 574833 - RNA, 19 nt, Artificial Sequence
  Description of Artificial Sequence: Synthetic oligonucleotide
ucuuggucucaccgaaauc

SEQ ID NO: 574834 - RNA, 19 nt, Artificial Sequence
  Description of Artificial Sequence: Synthetic oligonucleotide
guuuacauacaagcuguuc

SEQ ID NO: 574835 - RNA, 19 nt, Artificial Sequence
  Description of Artificial Sequence: Synthetic oligonucleotide
cuuauccaaguacuuaucu

SEQ ID NO: 574836 - RNA, 19 nt, Artificial Sequence
  Description of Artificial Sequence: Synthetic oligonucleotide
ucucuuaauugaguuugaa

SEQ ID NO: 574837 - RNA, 19 nt, Artificial Sequence
  Description of Artificial Sequence: Synthetic oligonucleotide
ucucccaaauuccgcugga

SEQ ID NO: 574838 - RNA, 19 nt, Artificial Sequence
  Description of Artificial Sequence: Synthetic oligonucleotide
uggggaggaucccacuaac

SEQ ID NO: 574839 - RNA, 19 nt, Artificial Sequence
  Description of Artificial Sequence: Synthetic oligonucleotide
cuacuuucuguuucugcca

SEQ ID NO: 574840 - RNA, 19 nt, Artificial Sequence
  Description of Artificial Sequence: Synthetic oligonucleotide
aaguuuuacuuuggccaga

SEQ ID NO: 574841 - RNA, 19 nt, Artificial Sequence
  Description of Artificial Sequence: Synthetic oligonucleotide
acgcugaaauuccuucuca

SEQ ID NO: 574842 - RNA, 19 nt, Artificial Sequence
  Description of Artificial Sequence: Synthetic oligonucleotide
cagacgagcaacuuguagu

SEQ ID NO: 574843 - RNA, 19 nt, Artificial Sequence
  Description of Artificial Sequence: Synthetic oligonucleotide
agaagacugcaaacuaaug

SEQ ID NO: 574844 - RNA, 19 nt, Artificial Sequence
  Description of Artificial Sequence: Synthetic oligonucleotide
ugucucuugccugaaguuu

SEQ ID NO: 574845 - RNA, 19 nt, Artificial Sequence
  Description of Artificial Sequence: Synthetic oligonucleotide
ggaaccgaagaauucagua

SEQ ID NO: 574846 - RNA, 19 nt, Artificial Sequence
  Description of Artificial Sequence: Synthetic oligonucleotide
agggcugcacuaaagccag

SEQ ID NO: 574847 - RNA, 19 nt, Artificial Sequence
  Description of Artificial Sequence: Synthetic oligonucleotide
uacuauugacuguuuucuu

SEQ ID NO: 574848 - RNA, 19 nt, Artificial Sequence
  Description of Artificial Sequence: Synthetic oligonucleotide
gcauaaugcuuacuuuccc

SEQ ID NO: 574849 - RNA, 19 nt, Artificial Sequence
  Description of Artificial Sequence: Synthetic oligonucleotide
agcuacauuaucacccaca

SEQ ID NO: 574850 - RNA, 19 nt, Artificial Sequence
  Description of Artificial Sequence: Synthetic oligonucleotide
uuaagcacaucugcauaau

SEQ ID NO: 574851 - RNA, 19 nt, Artificial Sequence
  Description of Artificial Sequence: Synthetic oligonucleotide
ggucauuacacagggcugc

SEQ ID NO: 574852 - RNA, 19 nt, Artificial Sequence
  Description of Artificial Sequence: Synthetic oligonucleotide
gaacaguacuuauccaagu

SEQ ID NO: 574853 - RNA, 19 nt, Artificial Sequence
  Description of Artificial Sequence: Synthetic oligonucleotide
gaauccacagagcucugcu

SEQ ID NO: 574854 - RNA, 19 nt, Artificial Sequence
  Description of Artificial Sequence: Synthetic oligonucleotide
cuuacauaucggagaccug

SEQ ID NO: 574855 - RNA, 19 nt, Artificial Sequence
  Description of Artificial Sequence: Synthetic oligonucleotide
accgaagaauucaguaaag

SEQ ID NO: 574856 - RNA, 19 nt, Artificial Sequence
  Description of Artificial Sequence: Synthetic oligonucleotide
cauaaugcuuacuuucccu

SEQ ID NO: 574857 - RNA, 19 nt, Artificial Sequence
  Description of Artificial Sequence: Synthetic oligonucleotide
acagaagacugcaaacuaa

SEQ ID NO: 574858 - RNA, 19 nt, Artificial Sequence
  Description of Artificial Sequence: Synthetic oligonucleotide
uugucucuugccugaaguu

SEQ ID NO: 574859 - RNA, 19 nt, Artificial Sequence
  Description of Artificial Sequence: Synthetic oligonucleotide
cagugcuucaaaggugugc

SEQ ID NO: 574860 - RNA, 19 nt, Artificial Sequence
  Description of Artificial Sequence: Synthetic oligonucleotide
cacuuucuaaacuuuugua

SEQ ID NO: 574861 - RNA, 19 nt, Artificial Sequence
  Description of Artificial Sequence: Synthetic oligonucleotide
cuacuauugacuguuuucu

SEQ ID NO: 574862 - RNA, 19 nt, Artificial Sequence
  Description of Artificial Sequence: Synthetic oligonucleotide
agggaacaguacuuaucca

SEQ ID NO: 574863 - RNA, 19 nt, Artificial Sequence
  Description of Artificial Sequence: Synthetic oligonucleotide
ucggagaccugaaggccac

SEQ ID NO: 574864 - RNA, 19 nt, Artificial Sequence
  Description of Artificial Sequence: Synthetic oligonucleotide
ccuuguuguuuucuguacc

SEQ ID NO: 574865 - RNA, 19 nt, Artificial Sequence
  Description of Artificial Sequence: Synthetic oligonucleotide
uccaaguacuuaucugcuu

SEQ ID NO: 574866 - RNA, 19 nt, Artificial Sequence
  Description of Artificial Sequence: Synthetic oligonucleotide
cuuuggucuuauaggccuc

SEQ ID NO: 574867 - RNA, 19 nt, Artificial Sequence
  Description of Artificial Sequence: Synthetic oligonucleotide
gagcaacuuguaguucuag

SEQ ID NO: 574868 - RNA, 19 nt, Artificial Sequence
  Description of Artificial Sequence: Synthetic oligonucleotide
auggcagugcaugaaucca

SEQ ID NO: 574869 - RNA, 19 nt, Artificial Sequence
  Description of Artificial Sequence: Synthetic oligonucleotide
aguucaaacuuagucucuu

SEQ ID NO: 574870 - RNA, 19 nt, Artificial Sequence
  Description of Artificial Sequence: Synthetic oligonucleotide
agcagggaacaguacuuau

SEQ ID NO: 574871 - RNA, 19 nt, Artificial Sequence
  Description of Artificial Sequence: Synthetic oligonucleotide
aguuuuacuuuggccagau

SEQ ID NO: 574872 - RNA, 19 nt, Artificial Sequence
  Description of Artificial Sequence: Synthetic oligonucleotide
uagcuacauuaucacccac

SEQ ID NO: 574873 - RNA, 19 nt, Artificial Sequence
  Description of Artificial Sequence: Synthetic oligonucleotide
agcuucugaaugcuacuuu

SEQ ID NO: 574874 - RNA, 19 nt, Artificial Sequence
  Description of Artificial Sequence: Synthetic oligonucleotide
cuguaccauuagaugcagc

SEQ ID NO: 574875 - RNA, 19 nt, Artificial Sequence
  Description of Artificial Sequence: Synthetic oligonucleotide
ugccuguaggaaugucagc

SEQ ID NO: 574876 - RNA, 19 nt, Artificial Sequence
  Description of Artificial Sequence: Synthetic oligonucleotide
ggauauauggacucguuuu

SEQ ID NO: 574877 - RNA, 19 nt, Artificial Sequence
  Description of Artificial Sequence: Synthetic oligonucleotide
aggaugcacgcuacuauug

SEQ ID NO: 574878 - RNA, 19 nt, Artificial Sequence
  Description of Artificial Sequence: Synthetic oligonucleotide
augcacgcuacuauugacu

SEQ ID NO: 574879 - RNA, 19 nt, Artificial Sequence
  Description of Artificial Sequence: Synthetic oligonucleotide
ggguagcccuguuuaaugc

SEQ ID NO: 574880 - RNA, 19 nt, Artificial Sequence
  Description of Artificial Sequence: Synthetic oligonucleotide
cuuugcacaaguugauacu

SEQ ID NO: 574881 - RNA, 19 nt, Artificial Sequence
  Description of Artificial Sequence: Synthetic oligonucleotide
cuacuuugagguucuuuaa

SEQ ID NO: 574882 - RNA, 19 nt, Artificial Sequence
  Description of Artificial Sequence: Synthetic oligonucleotide
caacaguaccagcuuucug

SEQ ID NO: 574883 - RNA, 19 nt, Artificial Sequence
  Description of Artificial Sequence: Synthetic oligonucleotide
uuguuguuuucuguaccau

SEQ ID NO: 574884 - RNA, 19 nt, Artificial Sequence
  Description of Artificial Sequence: Synthetic oligonucleotide
ucucuugccugaaguuuua

SEQ ID NO: 574885 - RNA, 19 nt, Artificial Sequence
  Description of Artificial Sequence: Synthetic oligonucleotide
uacaggcugugagagacuu

SEQ ID NO: 574886 - RNA, 19 nt, Artificial Sequence
  Description of Artificial Sequence: Synthetic oligonucleotide
ucccacuaccauucuccca

SEQ ID NO: 574887 - RNA, 19 nt, Artificial Sequence
  Description of Artificial Sequence: Synthetic oligonucleotide
guauggcagugcaugaauc

SEQ ID NO: 574888 - RNA, 19 nt, Artificial Sequence
  Description of Artificial Sequence: Synthetic oligonucleotide
cuaggcuuucugguauggc

SEQ ID NO: 574889 - RNA, 19 nt, Artificial Sequence
  Description of Artificial Sequence: Synthetic oligonucleotide
ucagcuguccgaggaggca

SEQ ID NO: 574890 - RNA, 19 nt, Artificial Sequence
  Description of Artificial Sequence: Synthetic oligonucleotide
cucuaggcuuucugguaug

SEQ ID NO: 574891 - RNA, 19 nt, Artificial Sequence
  Description of Artificial Sequence: Synthetic oligonucleotide
cugaucggcaugguaguuc

SEQ ID NO: 574892 - RNA, 19 nt, Artificial Sequence
  Description of Artificial Sequence: Synthetic oligonucleotide
gcuuacuuucccucagcug

SEQ ID NO: 574893 - RNA, 19 nt, Artificial Sequence
  Description of Artificial Sequence: Synthetic oligonucleotide
cauugcacaaggaaaucau

SEQ ID NO: 574894 - RNA, 19 nt, Artificial Sequence
  Description of Artificial Sequence: Synthetic oligonucleotide
aucggagaccugaaggcca

SEQ ID NO: 574895 - RNA, 19 nt, Artificial Sequence
  Description of Artificial Sequence: Synthetic oligonucleotide
cuucuacuggaacuuuuaa

SEQ ID NO: 574896 - RNA, 19 nt, Artificial Sequence
  Description of Artificial Sequence: Synthetic oligonucleotide
guuuuacuuuggccagaug

SEQ ID NO: 574897 - RNA, 19 nt, Artificial Sequence
  Description of Artificial Sequence: Synthetic oligonucleotide
gcuucaaguuggcagaucu

SEQ ID NO: 574898 - RNA, 19 nt, Artificial Sequence
  Description of Artificial Sequence: Synthetic oligonucleotide
cuuggucauugcacaagga

SEQ ID NO: 574899 - RNA, 19 nt, Artificial Sequence
  Description of Artificial Sequence: Synthetic oligonucleotide
ggagaugguccuggaaccg

SEQ ID NO: 574900 - RNA, 19 nt, Artificial Sequence
  Description of Artificial Sequence: Synthetic oligonucleotide
aggaaaucauugucucauu

SEQ ID NO: 574901 - RNA, 19 nt, Artificial Sequence
  Description of Artificial Sequence: Synthetic oligonucleotide
cuagacucuguucuugggu

SEQ ID NO: 574902 - RNA, 19 nt, Artificial Sequence
  Description of Artificial Sequence: Synthetic oligonucleotide
cuacuuuucaagggaugca

SEQ ID NO: 574903 - RNA, 19 nt, Artificial Sequence
  Description of Artificial Sequence: Synthetic oligonucleotide
auugcacaaggaaaucauu

SEQ ID NO: 574904 - RNA, 19 nt, Artificial Sequence
  Description of Artificial Sequence: Synthetic oligonucleotide
ggaugcacgcuacuauuga

SEQ ID NO: 574905 - RNA, 19 nt, Artificial Sequence
  Description of Artificial Sequence: Synthetic oligonucleotide
cuugaccuuuaaguugguc

SEQ ID NO: 574906 - RNA, 19 nt, Artificial Sequence
  Description of Artificial Sequence: Synthetic oligonucleotide
cucucuuaauugaguuuga

SEQ ID NO: 574907 - RNA, 19 nt, Artificial Sequence
  Description of Artificial Sequence: Synthetic oligonucleotide
uccguggggcucuccgcag

SEQ ID NO: 574908 - RNA, 19 nt, Artificial Sequence
  Description of Artificial Sequence: Synthetic oligonucleotide
uucuucgguuagccuauuu

SEQ ID NO: 574909 - RNA, 19 nt, Artificial Sequence
  Description of Artificial Sequence: Synthetic oligonucleotide
gucucaccgaaauccugca

SEQ ID NO: 574910 - RNA, 19 nt, Artificial Sequence
  Description of Artificial Sequence: Synthetic oligonucleotide
cucguuuugccuguaggaa

SEQ ID NO: 574911 - RNA, 19 nt, Artificial Sequence
  Description of Artificial Sequence: Synthetic oligonucleotide
uggucuagacucuguucuu

SEQ ID NO: 574912 - RNA, 19 nt, Artificial Sequence
  Description of Artificial Sequence: Synthetic oligonucleotide
cagcuguccgaggaggcag

SEQ ID NO: 574913 - RNA, 19 nt, Artificial Sequence
  Description of Artificial Sequence: Synthetic oligonucleotide
aagacgcuguuuggauugu

SEQ ID NO: 574914 - RNA, 19 nt, Artificial Sequence
  Description of Artificial Sequence: Synthetic oligonucleotide
acacgacaguuuucauuga

SEQ ID NO: 574915 - RNA, 19 nt, Artificial Sequence
  Description of Artificial Sequence: Synthetic oligonucleotide
gagaugguccuggaaccga

SEQ ID NO: 574916 - RNA, 19 nt, Artificial Sequence
  Description of Artificial Sequence: Synthetic oligonucleotide
gucuucgagguuccugguc

SEQ ID NO: 574917 - RNA, 19 nt, Artificial Sequence
  Description of Artificial Sequence: Synthetic oligonucleotide
ggucuagacucuguucuug

SEQ ID NO: 574918 - RNA, 19 nt, Artificial Sequence
  Description of Artificial Sequence: Synthetic oligonucleotide
ggaucccacuaacuucugc

SEQ ID NO: 574919 - RNA, 19 nt, Artificial Sequence
  Description of Artificial Sequence: Synthetic oligonucleotide
caucuguaccuuuucuugu

SEQ ID NO: 574920 - RNA, 19 nt, Artificial Sequence
  Description of Artificial Sequence: Synthetic oligonucleotide
cuuuucaagggaugcacuu

SEQ ID NO: 574921 - RNA, 19 nt, Artificial Sequence
  Description of Artificial Sequence: Synthetic oligonucleotide
cuuguaguucuagcaucuc

SEQ ID NO: 574922 - RNA, 19 nt, Artificial Sequence
  Description of Artificial Sequence: Synthetic oligonucleotide
gcagugcaugaauccacag

SEQ ID NO: 574923 - RNA, 19 nt, Artificial Sequence
  Description of Artificial Sequence: Synthetic oligonucleotide
cagauuucccaguucuacu

SEQ ID NO: 574924 - RNA, 19 nt, Artificial Sequence
  Description of Artificial Sequence: Synthetic oligonucleotide
gacgagcaacuuguaguuc

SEQ ID NO: 574925 - RNA, 19 nt, Artificial Sequence
  Description of Artificial Sequence: Synthetic oligonucleotide
guucucaacucuguccuua

SEQ ID NO: 574926 - RNA, 19 nt, Artificial Sequence
  Description of Artificial Sequence: Synthetic oligonucleotide
ggaccuuugucucuugccu

SEQ ID NO: 574927 - RNA, 19 nt, Artificial Sequence
  Description of Artificial Sequence: Synthetic oligonucleotide
aaauuccgcuggaccuuug

SEQ ID NO: 574928 - RNA, 19 nt, Artificial Sequence
  Description of Artificial Sequence: Synthetic oligonucleotide
gugaagacgcuguuuggau

SEQ ID NO: 574929 - RNA, 19 nt, Artificial Sequence
  Description of Artificial Sequence: Synthetic oligonucleotide
cccacuaccauucucccaa

SEQ ID NO: 574930 - RNA, 19 nt, Artificial Sequence
  Description of Artificial Sequence: Synthetic oligonucleotide
ucccaaucauuguguuaau

SEQ ID NO: 574931 - RNA, 19 nt, Artificial Sequence
  Description of Artificial Sequence: Synthetic oligonucleotide
guucuccgcaggauauaug

SEQ ID NO: 574932 - RNA, 19 nt, Artificial Sequence
  Description of Artificial Sequence: Synthetic oligonucleotide
aagcugauucacagauuua

SEQ ID NO: 574933 - RNA, 19 nt, Artificial Sequence
  Description of Artificial Sequence: Synthetic oligonucleotide
gucauuaauuuagcuacau

SEQ ID NO: 574934 - RNA, 19 nt, Artificial Sequence
  Description of Artificial Sequence: Synthetic oligonucleotide
cuuuugugaucugcugcca

SEQ ID NO: 574935 - RNA, 19 nt, Artificial Sequence
  Description of Artificial Sequence: Synthetic oligonucleotide
cucccaaauuccgcuggac

SEQ ID NO: 574936 - RNA, 19 nt, Artificial Sequence
  Description of Artificial Sequence: Synthetic oligonucleotide
guaguucuagcaucucuuu

SEQ ID NO: 574937 - RNA, 19 nt, Artificial Sequence
  Description of Artificial Sequence: Synthetic oligonucleotide
ggaaaucauugucucauuu

SEQ ID NO: 574938 - RNA, 19 nt, Artificial Sequence
  Description of Artificial Sequence: Synthetic oligonucleotide
ucugaucggcaugguaguu

SEQ ID NO: 574939 - RNA, 19 nt, Artificial Sequence
  Description of Artificial Sequence: Synthetic oligonucleotide
ggacucguuuugccuguag

SEQ ID NO: 574940 - RNA, 19 nt, Artificial Sequence
  Description of Artificial Sequence: Synthetic oligonucleotide
uuacgacuucugggagucc

SEQ ID NO: 574941 - RNA, 19 nt, Artificial Sequence
  Description of Artificial Sequence: Synthetic oligonucleotide
cucuugccugaaguuuuac

SEQ ID NO: 574942 - RNA, 19 nt, Artificial Sequence
  Description of Artificial Sequence: Synthetic oligonucleotide
aguuuacauacaagcuguu

SEQ ID NO: 574943 - RNA, 19 nt, Artificial Sequence
  Description of Artificial Sequence: Synthetic oligonucleotide
guaguucuccgcaggauau

SEQ ID NO: 574944 - RNA, 19 nt, Artificial Sequence
  Description of Artificial Sequence: Synthetic oligonucleotide
cuccgcagaguuucuccca

SEQ ID NO: 574945 - RNA, 19 nt, Artificial Sequence
  Description of Artificial Sequence: Synthetic oligonucleotide
cuccgucuucaucaaucca

SEQ ID NO: 574946 - RNA, 19 nt, Artificial Sequence
  Description of Artificial Sequence: Synthetic oligonucleotide
gguauggcagugcaugaau

SEQ ID NO: 574947 - RNA, 19 nt, Artificial Sequence
  Description of Artificial Sequence: Synthetic oligonucleotide
uaguucuccgcaggauaua

SEQ ID NO: 574948 - RNA, 19 nt, Artificial Sequence
  Description of Artificial Sequence: Synthetic oligonucleotide
gguagcccuguuuaaugcu

SEQ ID NO: 574949 - RNA, 19 nt, Artificial Sequence
  Description of Artificial Sequence: Synthetic oligonucleotide
cuccguggggcucuccgca

SEQ ID NO: 574950 - RNA, 19 nt, Artificial Sequence
  Description of Artificial Sequence: Synthetic oligonucleotide
ccgcaggauauauggacuc

SEQ ID NO: 574951 - RNA, 19 nt, Artificial Sequence
  Description of Artificial Sequence: Synthetic oligonucleotide
ggagaccugaaggccacac

SEQ ID NO: 574952 - RNA, 19 nt, Artificial Sequence
  Description of Artificial Sequence: Synthetic oligonucleotide
gcuuucugguauggcagug

SEQ ID NO: 574953 - RNA, 19 nt, Artificial Sequence
  Description of Artificial Sequence: Synthetic oligonucleotide
cacgcuacuauugacuguu

SEQ ID NO: 574954 - RNA, 19 nt, Artificial Sequence
  Description of Artificial Sequence: Synthetic oligonucleotide
cuuucccaaucauuguguu

SEQ ID NO: 574955 - RNA, 19 nt, Artificial Sequence
  Description of Artificial Sequence: Synthetic oligonucleotide
gcauguaugcgagcuuuca

SEQ ID NO: 574956 - RNA, 19 nt, Artificial Sequence
  Description of Artificial Sequence: Synthetic oligonucleotide
augaauccacagagcucug

SEQ ID NO: 574957 - RNA, 19 nt, Artificial Sequence
  Description of Artificial Sequence: Synthetic oligonucleotide
ggauuguugugaacucaga

SEQ ID NO: 574958 - RNA, 19 nt, Artificial Sequence
  Description of Artificial Sequence: Synthetic oligonucleotide
uuccccugccuggucuaga

SEQ ID NO: 574959 - RNA, 19 nt, Artificial Sequence
  Description of Artificial Sequence: Synthetic oligonucleotide
cacaagguggugucccacu

SEQ ID NO: 574960 - RNA, 19 nt, Artificial Sequence
  Description of Artificial Sequence: Synthetic oligonucleotide
cagccuuguuguuuucugu

SEQ ID NO: 574961 - RNA, 19 nt, Artificial Sequence
  Description of Artificial Sequence: Synthetic oligonucleotide
cgcaggauauauggacucg

SEQ ID NO: 574962 - RNA, 19 nt, Artificial Sequence
  Description of Artificial Sequence: Synthetic oligonucleotide
gcgagcuuucagcuucuga

SEQ ID NO: 574963 - RNA, 19 nt, Artificial Sequence
  Description of Artificial Sequence: Synthetic oligonucleotide
agagucucuuuuagcucuu

SEQ ID NO: 574964 - RNA, 19 nt, Artificial Sequence
  Description of Artificial Sequence: Synthetic oligonucleotide
cucagacgagcaacuugua

SEQ ID NO: 574965 - RNA, 19 nt, Artificial Sequence
  Description of Artificial Sequence: Synthetic oligonucleotide
uugggucuucgagguuccu

SEQ ID NO: 574966 - RNA, 19 nt, Artificial Sequence
  Description of Artificial Sequence: Synthetic oligonucleotide
guaugcgagcuuucagcuu

SEQ ID NO: 574967 - RNA, 19 nt, Artificial Sequence
  Description of Artificial Sequence: Synthetic oligonucleotide
gagcucugcugaacaaccu

SEQ ID NO: 574968 - RNA, 19 nt, Artificial Sequence
  Description of Artificial Sequence: Synthetic oligonucleotide
guccuggaaccgaagaauu

SEQ ID NO: 574969 - RNA, 19 nt, Artificial Sequence
  Description of Artificial Sequence: Synthetic oligonucleotide
ccgcagaguuucucccagg

SEQ ID NO: 574970 - RNA, 19 nt, Artificial Sequence
  Description of Artificial Sequence: Synthetic oligonucleotide
gaucggcaugguaguucuc

SEQ ID NO: 574971 - RNA, 19 nt, Artificial Sequence
  Description of Artificial Sequence: Synthetic oligonucleotide
gugcuucuuucccaaucau

SEQ ID NO: 574972 - RNA, 19 nt, Artificial Sequence
  Description of Artificial Sequence: Synthetic oligonucleotide
gaacucagacgagcaacuu

SEQ ID NO: 574973 - RNA, 19 nt, Artificial Sequence
  Description of Artificial Sequence: Synthetic oligonucleotide
cggcaugguaguucuccgc

SEQ ID NO: 574974 - RNA, 19 nt, Artificial Sequence
  Description of Artificial Sequence: Synthetic oligonucleotide
ggugugcugcaaagcgcug

SEQ ID NO: 574975 - RNA, 19 nt, Artificial Sequence
  Description of Artificial Sequence: Synthetic oligonucleotide
gcaggguagcccuguuuaa

SEQ ID NO: 574976 - RNA, 19 nt, Artificial Sequence
  Description of Artificial Sequence: Synthetic oligonucleotide
uggacucguuuugccugua

SEQ ID NO: 574977 - RNA, 19 nt, Artificial Sequence
  Description of Artificial Sequence: Synthetic oligonucleotide
cagaacccugacaucucau

SEQ ID NO: 574978 - RNA, 19 nt, Artificial Sequence
  Description of Artificial Sequence: Synthetic oligonucleotide
gcagugcuucaaaggugug

SEQ ID NO: 574979 - RNA, 19 nt, Artificial Sequence
  Description of Artificial Sequence: Synthetic oligonucleotide
auucuucgguuagccuauu

SEQ ID NO: 574980 - RNA, 19 nt, Artificial Sequence
  Description of Artificial Sequence: Synthetic oligonucleotide
cuucgagguuccuggucau

SEQ ID NO: 574981 - RNA, 19 nt, Artificial Sequence
  Description of Artificial Sequence: Synthetic oligonucleotide
caggguagcccuguuuaau

SEQ ID NO: 574982 - RNA, 19 nt, Artificial Sequence
  Description of Artificial Sequence: Synthetic oligonucleotide
ccccugagcacgcugaaau

SEQ ID NO: 574983 - RNA, 19 nt, Artificial Sequence
  Description of Artificial Sequence: Synthetic oligonucleotide
caaauuccgcuggaccuuu

SEQ ID NO: 574984 - RNA, 19 nt, Artificial Sequence
  Description of Artificial Sequence: Synthetic oligonucleotide
gcacgcuacuauugacugu

SEQ ID NO: 574985 - RNA, 19 nt, Artificial Sequence
  Description of Artificial Sequence: Synthetic oligonucleotide
acgcuacuauugacuguuu

SEQ ID NO: 574986 - RNA, 19 nt, Artificial Sequence
  Description of Artificial Sequence: Synthetic oligonucleotide
gcucuccgcagaguuucuc

SEQ ID NO: 574987 - RNA, 19 nt, Artificial Sequence
  Description of Artificial Sequence: Synthetic oligonucleotide
cgagcaacuuguaguucua

SEQ ID NO: 574988 - RNA, 19 nt, Artificial Sequence
  Description of Artificial Sequence: Synthetic oligonucleotide
ccacuaccauucucccaaa

SEQ ID NO: 574989 - RNA, 19 nt, Artificial Sequence
  Description of Artificial Sequence: Synthetic oligonucleotide
cgcuuuuguuccuguuuua

SEQ ID NO: 574990 - RNA, 19 nt, Artificial Sequence
  Description of Artificial Sequence: Synthetic oligonucleotide
ccauuagaugcagcucccu

SEQ ID NO: 574991 - RNA, 19 nt, Artificial Sequence
  Description of Artificial Sequence: Synthetic oligonucleotide
ccucaguaggaugcacgcu

SEQ ID NO: 574992 - RNA, 19 nt, Artificial Sequence
  Description of Artificial Sequence: Synthetic oligonucleotide
cgcuacuauugacuguuuu

SEQ ID NO: 574993 - RNA, 19 nt, Artificial Sequence
  Description of Artificial Sequence: Synthetic oligonucleotide
ccgcuggaccuuugucucu

SEQ ID NO: 574994 - RNA, 19 nt, Artificial Sequence
  Description of Artificial Sequence: Synthetic oligonucleotide
ccccugccuggucuagacu

SEQ ID NO: 574995 - RNA, 19 nt, Artificial Sequence
  Description of Artificial Sequence: Synthetic oligonucleotide
cggagaccugaaggccaca

SEQ ID NO: 574996 - RNA, 19 nt, Artificial Sequence
  Description of Artificial Sequence: Synthetic oligonucleotide
aaauuauugucucaugacc

SEQ ID NO: 574997 - RNA, 19 nt, Artificial Sequence
  Description of Artificial Sequence: Synthetic oligonucleotide
aauaagauccauuagauaa

SEQ ID NO: 574998 - RNA, 19 nt, Artificial Sequence
  Description of Artificial Sequence: Synthetic oligonucleotide
aacuguuucaugcacacuc

SEQ ID NO: 574999 - RNA, 19 nt, Artificial Sequence
  Description of Artificial Sequence: Synthetic oligonucleotide
uuaacuugaauauaaauaa

SEQ ID NO: 575000 - RNA, 19 nt, Artificial Sequence
  Description of Artificial Sequence: Synthetic oligonucleotide
uaagcaucgguaaacaggg

SEQ ID NO: 575001 - RNA, 19 nt, Artificial Sequence
  Description of Artificial Sequence: Synthetic oligonucleotide
aaguagaaaguccauagag

SEQ ID NO: 575002 - RNA, 19 nt, Artificial Sequence
  Description of Artificial Sequence: Synthetic oligonucleotide
uguaauguuagugauaaag

SEQ ID NO: 575003 - RNA, 19 nt, Artificial Sequence
  Description of Artificial Sequence: Synthetic oligonucleotide
aauaagguucaguaaacag

SEQ ID NO: 575004 - RNA, 19 nt, Artificial Sequence
  Description of Artificial Sequence: Synthetic oligonucleotide
auuaauaagauccauuaga

SEQ ID NO: 575005 - RNA, 19 nt, Artificial Sequence
  Description of Artificial Sequence: Synthetic oligonucleotide
auuugagugaaauaucuuc

SEQ ID NO: 575006 - RNA, 19 nt, Artificial Sequence
  Description of Artificial Sequence: Synthetic oligonucleotide
uuuaugaugaucuguacca

SEQ ID NO: 575007 - RNA, 19 nt, Artificial Sequence
  Description of Artificial Sequence: Synthetic oligonucleotide
aaggucuggaucuugaaag

SEQ ID NO: 575008 - RNA, 19 nt, Artificial Sequence
  Description of Artificial Sequence: Synthetic oligonucleotide
ugacuugaaaaccauaacc

SEQ ID NO: 575009 - RNA, 19 nt, Artificial Sequence
  Description of Artificial Sequence: Synthetic oligonucleotide
agauccauuagauaaccac

SEQ ID NO: 575010 - RNA, 19 nt, Artificial Sequence
  Description of Artificial Sequence: Synthetic oligonucleotide
gaacccuacaauuugagug

SEQ ID NO: 575011 - RNA, 19 nt, Artificial Sequence
  Description of Artificial Sequence: Synthetic oligonucleotide
agaugagugagcucgaagg

SEQ ID NO: 575012 - RNA, 19 nt, Artificial Sequence
  Description of Artificial Sequence: Synthetic oligonucleotide
aauuaucuuugagagggcc

SEQ ID NO: 575013 - RNA, 19 nt, Artificial Sequence
  Description of Artificial Sequence: Synthetic oligonucleotide
auaguauucaauuauuuaa

SEQ ID NO: 575014 - RNA, 19 nt, Artificial Sequence
  Description of Artificial Sequence: Synthetic oligonucleotide
auaagguucaguaaacagc

SEQ ID NO: 575015 - RNA, 19 nt, Artificial Sequence
  Description of Artificial Sequence: Synthetic oligonucleotide
uuagauaaccacuugcucu

SEQ ID NO: 575016 - RNA, 19 nt, Artificial Sequence
  Description of Artificial Sequence: Synthetic oligonucleotide
uaagguucaguaaacagcu

SEQ ID NO: 575017 - RNA, 19 nt, Artificial Sequence
  Description of Artificial Sequence: Synthetic oligonucleotide
uguugugccuguuucaugg

SEQ ID NO: 575018 - RNA, 19 nt, Artificial Sequence
  Description of Artificial Sequence: Synthetic oligonucleotide
aguucaucaguguacgccc

SEQ ID NO: 575019 - RNA, 19 nt, Artificial Sequence
  Description of Artificial Sequence: Synthetic oligonucleotide
uuuccuaagcauaucaucu

SEQ ID NO: 575020 - RNA, 19 nt, Artificial Sequence
  Description of Artificial Sequence: Synthetic oligonucleotide
aaggcuggcauaaauaaac

SEQ ID NO: 575021 - RNA, 19 nt, Artificial Sequence
  Description of Artificial Sequence: Synthetic oligonucleotide
aaguuaaacugcugaacgg

SEQ ID NO: 575022 - RNA, 19 nt, Artificial Sequence
  Description of Artificial Sequence: Synthetic oligonucleotide
agguaaguggaccaguccc

SEQ ID NO: 575023 - RNA, 19 nt, Artificial Sequence
  Description of Artificial Sequence: Synthetic oligonucleotide
auuggauuuauauauuaca

SEQ ID NO: 575024 - RNA, 19 nt, Artificial Sequence
  Description of Artificial Sequence: Synthetic oligonucleotide
uugaaaaccauaacccugc

SEQ ID NO: 575025 - RNA, 19 nt, Artificial Sequence
  Description of Artificial Sequence: Synthetic oligonucleotide
uuugagugaaauaucuucu

SEQ ID NO: 575026 - RNA, 19 nt, Artificial Sequence
  Description of Artificial Sequence: Synthetic oligonucleotide
uuugauauccucucggagu

SEQ ID NO: 575027 - RNA, 19 nt, Artificial Sequence
  Description of Artificial Sequence: Synthetic oligonucleotide
ugucugaggucgaugaacg

SEQ ID NO: 575028 - RNA, 19 nt, Artificial Sequence
  Description of Artificial Sequence: Synthetic oligonucleotide
ugagaaauauuuguaaugu

SEQ ID NO: 575029 - RNA, 19 nt, Artificial Sequence
  Description of Artificial Sequence: Synthetic oligonucleotide
auauauuacacuuucgauu

SEQ ID NO: 575030 - RNA, 19 nt, Artificial Sequence
  Description of Artificial Sequence: Synthetic oligonucleotide
agguucaguaaacagcuac

SEQ ID NO: 575031 - RNA, 19 nt, Artificial Sequence
  Description of Artificial Sequence: Synthetic oligonucleotide
auuagauaaccacuugcuc

SEQ ID NO: 575032 - RNA, 19 nt, Artificial Sequence
  Description of Artificial Sequence: Synthetic oligonucleotide
aacaguuaagaccuccucu

SEQ ID NO: 575033 - RNA, 19 nt, Artificial Sequence
  Description of Artificial Sequence: Synthetic oligonucleotide
agucgguugacuugaaaac

SEQ ID NO: 575034 - RNA, 19 nt, Artificial Sequence
  Description of Artificial Sequence: Synthetic oligonucleotide
aaugauguuuguuaccaau

SEQ ID NO: 575035 - RNA, 19 nt, Artificial Sequence
  Description of Artificial Sequence: Synthetic oligonucleotide
cauuguccagucauaaucg

SEQ ID NO: 575036 - RNA, 19 nt, Artificial Sequence
  Description of Artificial Sequence: Synthetic oligonucleotide
aacaggggaaaagucaacg

SEQ ID NO: 575037 - RNA, 19 nt, Artificial Sequence
  Description of Artificial Sequence: Synthetic oligonucleotide
uaaggauguugacagaugu

SEQ ID NO: 575038 - RNA, 19 nt, Artificial Sequence
  Description of Artificial Sequence: Synthetic oligonucleotide
aauguguaagcaucgguaa

SEQ ID NO: 575039 - RNA, 19 nt, Artificial Sequence
  Description of Artificial Sequence: Synthetic oligonucleotide
ucgaaugcuuuccaggaag

SEQ ID NO: 575040 - RNA, 19 nt, Artificial Sequence
  Description of Artificial Sequence: Synthetic oligonucleotide
cauggagacgcacucaugg

SEQ ID NO: 575041 - RNA, 19 nt, Artificial Sequence
  Description of Artificial Sequence: Synthetic oligonucleotide
guaagcaucgguaaacagg

SEQ ID NO: 575042 - RNA, 19 nt, Artificial Sequence
  Description of Artificial Sequence: Synthetic oligonucleotide
aaaccuauaugagguuucc

SEQ ID NO: 575043 - RNA, 19 nt, Artificial Sequence
  Description of Artificial Sequence: Synthetic oligonucleotide
uagugauaaagucuuccag

SEQ ID NO: 575044 - RNA, 19 nt, Artificial Sequence
  Description of Artificial Sequence: Synthetic oligonucleotide
aacccuacaauuugaguga

SEQ ID NO: 575045 - RNA, 19 nt, Artificial Sequence
  Description of Artificial Sequence: Synthetic oligonucleotide
aagucgguugacuugaaaa

SEQ ID NO: 575046 - RNA, 19 nt, Artificial Sequence
  Description of Artificial Sequence: Synthetic oligonucleotide
ucaacgagaucuugaacag

SEQ ID NO: 575047 - RNA, 19 nt, Artificial Sequence
  Description of Artificial Sequence: Synthetic oligonucleotide
acuuguuuaagcccucauc

SEQ ID NO: 575048 - RNA, 19 nt, Artificial Sequence
  Description of Artificial Sequence: Synthetic oligonucleotide
uccaagagaguaagggccg

SEQ ID NO: 575049 - RNA, 19 nt, Artificial Sequence
  Description of Artificial Sequence: Synthetic oligonucleotide
uuaggaagagugucuauca

SEQ ID NO: 575050 - RNA, 19 nt, Artificial Sequence
  Description of Artificial Sequence: Synthetic oligonucleotide
uguuuaagcccucaucagu

SEQ ID NO: 575051 - RNA, 19 nt, Artificial Sequence
  Description of Artificial Sequence: Synthetic oligonucleotide
auagccaucaacuguuuca

SEQ ID NO: 575052 - RNA, 19 nt, Artificial Sequence
  Description of Artificial Sequence: Synthetic oligonucleotide
ucagaaugcuuucgaaugc

SEQ ID NO: 575053 - RNA, 19 nt, Artificial Sequence
  Description of Artificial Sequence: Synthetic oligonucleotide
uuuaaggcuggcauaaaua

SEQ ID NO: 575054 - RNA, 19 nt, Artificial Sequence
  Description of Artificial Sequence: Synthetic oligonucleotide
ugucgagcauccuuaaaag

SEQ ID NO: 575055 - RNA, 19 nt, Artificial Sequence
  Description of Artificial Sequence: Synthetic oligonucleotide
gucauaaucggccagcuga

SEQ ID NO: 575056 - RNA, 19 nt, Artificial Sequence
  Description of Artificial Sequence: Synthetic oligonucleotide
ucuguuuuaacucgcuguc

SEQ ID NO: 575057 - RNA, 19 nt, Artificial Sequence
  Description of Artificial Sequence: Synthetic oligonucleotide
acauguuuacaugugcugg

SEQ ID NO: 575058 - RNA, 19 nt, Artificial Sequence
  Description of Artificial Sequence: Synthetic oligonucleotide
ucuaaguuaaacugcugaa

SEQ ID NO: 575059 - RNA, 19 nt, Artificial Sequence
  Description of Artificial Sequence: Synthetic oligonucleotide
acacgaagguacuuggagg

SEQ ID NO: 575060 - RNA, 19 nt, Artificial Sequence
  Description of Artificial Sequence: Synthetic oligonucleotide
aagaugagugagcucgaag

SEQ ID NO: 575061 - RNA, 19 nt, Artificial Sequence
  Description of Artificial Sequence: Synthetic oligonucleotide
ucgagcauccuuaaaagua

SEQ ID NO: 575062 - RNA, 19 nt, Artificial Sequence
  Description of Artificial Sequence: Synthetic oligonucleotide
accauaacccugcaaagug

SEQ ID NO: 575063 - RNA, 19 nt, Artificial Sequence
  Description of Artificial Sequence: Synthetic oligonucleotide
cauguuuacaugugcuggg

SEQ ID NO: 575064 - RNA, 19 nt, Artificial Sequence
  Description of Artificial Sequence: Synthetic oligonucleotide
ugagugagcucgaaggaca

SEQ ID NO: 575065 - RNA, 19 nt, Artificial Sequence
  Description of Artificial Sequence: Synthetic oligonucleotide
auaagauccauuagauaac

SEQ ID NO: 575066 - RNA, 19 nt, Artificial Sequence
  Description of Artificial Sequence: Synthetic oligonucleotide
aucuguuuuaacucgcugu

SEQ ID NO: 575067 - RNA, 19 nt, Artificial Sequence
  Description of Artificial Sequence: Synthetic oligonucleotide
uccucuaccguauuuucug

SEQ ID NO: 575068 - RNA, 19 nt, Artificial Sequence
  Description of Artificial Sequence: Synthetic oligonucleotide
uaacacugaagcuuuucug

SEQ ID NO: 575069 - RNA, 19 nt, Artificial Sequence
  Description of Artificial Sequence: Synthetic oligonucleotide
uaagauccauuagauaacc

SEQ ID NO: 575070 - RNA, 19 nt, Artificial Sequence
  Description of Artificial Sequence: Synthetic oligonucleotide
guuacuaauccuuggguca

SEQ ID NO: 575071 - RNA, 19 nt, Artificial Sequence
  Description of Artificial Sequence: Synthetic oligonucleotide
uuaccaauacuuguuuaag

SEQ ID NO: 575072 - RNA, 19 nt, Artificial Sequence
  Description of Artificial Sequence: Synthetic oligonucleotide
agcaauuaucuuugagagg

SEQ ID NO: 575073 - RNA, 19 nt, Artificial Sequence
  Description of Artificial Sequence: Synthetic oligonucleotide
aguggaccagucccaaacc

SEQ ID NO: 575074 - RNA, 19 nt, Artificial Sequence
  Description of Artificial Sequence: Synthetic oligonucleotide
cacgaagguacuuggaggc

SEQ ID NO: 575075 - RNA, 19 nt, Artificial Sequence
  Description of Artificial Sequence: Synthetic oligonucleotide
uguaagcaucgguaaacag

SEQ ID NO: 575076 - RNA, 19 nt, Artificial Sequence
  Description of Artificial Sequence: Synthetic oligonucleotide
guuagugauaaagucuucc

SEQ ID NO: 575077 - RNA, 19 nt, Artificial Sequence
  Description of Artificial Sequence: Synthetic oligonucleotide
gucaggagcagauuuguug

SEQ ID NO: 575078 - RNA, 19 nt, Artificial Sequence
  Description of Artificial Sequence: Synthetic oligonucleotide
ucgguugacuugaaaacca

SEQ ID NO: 575079 - RNA, 19 nt, Artificial Sequence
  Description of Artificial Sequence: Synthetic oligonucleotide
ugucauuaucuacaugcgu

SEQ ID NO: 575080 - RNA, 19 nt, Artificial Sequence
  Description of Artificial Sequence: Synthetic oligonucleotide
aagucaacgagaucuugaa

SEQ ID NO: 575081 - RNA, 19 nt, Artificial Sequence
  Description of Artificial Sequence: Synthetic oligonucleotide
uguguuuaugaugaucugu

SEQ ID NO: 575082 - RNA, 19 nt, Artificial Sequence
  Description of Artificial Sequence: Synthetic oligonucleotide
ugggcgaauauauuauucu

SEQ ID NO: 575083 - RNA, 19 nt, Artificial Sequence
  Description of Artificial Sequence: Synthetic oligonucleotide
uuguuuaagcccucaucag

SEQ ID NO: 575084 - RNA, 19 nt, Artificial Sequence
  Description of Artificial Sequence: Synthetic oligonucleotide
ggacauaccagucaccaag

SEQ ID NO: 575085 - RNA, 19 nt, Artificial Sequence
  Description of Artificial Sequence: Synthetic oligonucleotide
uuuaggaagagugucuauc

SEQ ID NO: 575086 - RNA, 19 nt, Artificial Sequence
  Description of Artificial Sequence: Synthetic oligonucleotide
uaacucgcuguccaguagc

SEQ ID NO: 575087 - RNA, 19 nt, Artificial Sequence
  Description of Artificial Sequence: Synthetic oligonucleotide
agggaaauuuacugaugac

SEQ ID NO: 575088 - RNA, 19 nt, Artificial Sequence
  Description of Artificial Sequence: Synthetic oligonucleotide
ugguguauauuucuccuuc

SEQ ID NO: 575089 - RNA, 19 nt, Artificial Sequence
  Description of Artificial Sequence: Synthetic oligonucleotide
ugagugaaauaucuucuau

SEQ ID NO: 575090 - RNA, 19 nt, Artificial Sequence
  Description of Artificial Sequence: Synthetic oligonucleotide
ugaacaguuaagaccuccu

SEQ ID NO: 575091 - RNA, 19 nt, Artificial Sequence
  Description of Artificial Sequence: Synthetic oligonucleotide
auaaucggccagcugaaca

SEQ ID NO: 575092 - RNA, 19 nt, Artificial Sequence
  Description of Artificial Sequence: Synthetic oligonucleotide
acauaccagucaccaagcc

SEQ ID NO: 575093 - RNA, 19 nt, Artificial Sequence
  Description of Artificial Sequence: Synthetic oligonucleotide
auuaucuacaugcguauuu

SEQ ID NO: 575094 - RNA, 19 nt, Artificial Sequence
  Description of Artificial Sequence: Synthetic oligonucleotide
ucauggacauguuuacaug

SEQ ID NO: 575095 - RNA, 19 nt, Artificial Sequence
  Description of Artificial Sequence: Synthetic oligonucleotide
cugucauuaucuacaugcg

SEQ ID NO: 575096 - RNA, 19 nt, Artificial Sequence
  Description of Artificial Sequence: Synthetic oligonucleotide
augucgagcauccuuaaaa

SEQ ID NO: 575097 - RNA, 19 nt, Artificial Sequence
  Description of Artificial Sequence: Synthetic oligonucleotide
caccuauuuugucagaaug

SEQ ID NO: 575098 - RNA, 19 nt, Artificial Sequence
  Description of Artificial Sequence: Synthetic oligonucleotide
auaucuucuauagccauca

SEQ ID NO: 575099 - RNA, 19 nt, Artificial Sequence
  Description of Artificial Sequence: Synthetic oligonucleotide
cuaaguuaaacugcugaac

SEQ ID NO: 575100 - RNA, 19 nt, Artificial Sequence
  Description of Artificial Sequence: Synthetic oligonucleotide
guugacagauguuggcagg

SEQ ID NO: 575101 - RNA, 19 nt, Artificial Sequence
  Description of Artificial Sequence: Synthetic oligonucleotide
agguuuccuaauaagguuc

SEQ ID NO: 575102 - RNA, 19 nt, Artificial Sequence
  Description of Artificial Sequence: Synthetic oligonucleotide
agucaacgagaucuugaac

SEQ ID NO: 575103 - RNA, 19 nt, Artificial Sequence
  Description of Artificial Sequence: Synthetic oligonucleotide
cuacucagaauucugguca

SEQ ID NO: 575104 - RNA, 19 nt, Artificial Sequence
  Description of Artificial Sequence: Synthetic oligonucleotide
gaaauaucuucuauagcca

SEQ ID NO: 575105 - RNA, 19 nt, Artificial Sequence
  Description of Artificial Sequence: Synthetic oligonucleotide
ggaaaagucaacgagaucu

SEQ ID NO: 575106 - RNA, 19 nt, Artificial Sequence
  Description of Artificial Sequence: Synthetic oligonucleotide
uuugcuucugcagaauaac

SEQ ID NO: 575107 - RNA, 19 nt, Artificial Sequence
  Description of Artificial Sequence: Synthetic oligonucleotide
ucuaccguauuuucugacu

SEQ ID NO: 575108 - RNA, 19 nt, Artificial Sequence
  Description of Artificial Sequence: Synthetic oligonucleotide
uuaacucgcuguccaguag

SEQ ID NO: 575109 - RNA, 19 nt, Artificial Sequence
  Description of Artificial Sequence: Synthetic oligonucleotide
ugucagaaugcuuucgaau

SEQ ID NO: 575110 - RNA, 19 nt, Artificial Sequence
  Description of Artificial Sequence: Synthetic oligonucleotide
agcaucgguaaacagggga

SEQ ID NO: 575111 - RNA, 19 nt, Artificial Sequence
  Description of Artificial Sequence: Synthetic oligonucleotide
uugauauccucucggaguu

SEQ ID NO: 575112 - RNA, 19 nt, Artificial Sequence
  Description of Artificial Sequence: Synthetic oligonucleotide
agaucagacauggagauuu

SEQ ID NO: 575113 - RNA, 19 nt, Artificial Sequence
  Description of Artificial Sequence: Synthetic oligonucleotide
auuuaaggcuggcauaaau

SEQ ID NO: 575114 - RNA, 19 nt, Artificial Sequence
  Description of Artificial Sequence: Synthetic oligonucleotide
cacacgaagguacuuggag

SEQ ID NO: 575115 - RNA, 19 nt, Artificial Sequence
  Description of Artificial Sequence: Synthetic oligonucleotide
guaaacaggggaaaaguca

SEQ ID NO: 575116 - RNA, 19 nt, Artificial Sequence
  Description of Artificial Sequence: Synthetic oligonucleotide
aaaugaguaaacacuugaa

SEQ ID NO: 575117 - RNA, 19 nt, Artificial Sequence
  Description of Artificial Sequence: Synthetic oligonucleotide
uguuuaugaugaucuguac

SEQ ID NO: 575118 - RNA, 19 nt, Artificial Sequence
  Description of Artificial Sequence: Synthetic oligonucleotide
ccgguaguaauuuucaaag

SEQ ID NO: 575119 - RNA, 19 nt, Artificial Sequence
  Description of Artificial Sequence: Synthetic oligonucleotide
uggagacgcacucauggac

SEQ ID NO: 575120 - RNA, 19 nt, Artificial Sequence
  Description of Artificial Sequence: Synthetic oligonucleotide
ucccugaaaauaccagccc

SEQ ID NO: 575121 - RNA, 19 nt, Artificial Sequence
  Description of Artificial Sequence: Synthetic oligonucleotide
uaaucggccagcugaacaa

SEQ ID NO: 575122 - RNA, 19 nt, Artificial Sequence
  Description of Artificial Sequence: Synthetic oligonucleotide
guuaccaauacuuguuuaa

SEQ ID NO: 575123 - RNA, 19 nt, Artificial Sequence
  Description of Artificial Sequence: Synthetic oligonucleotide
uagauaaccacuugcucuu

SEQ ID NO: 575124 - RNA, 19 nt, Artificial Sequence
  Description of Artificial Sequence: Synthetic oligonucleotide
caguucaucaguguacgcc

SEQ ID NO: 575125 - RNA, 19 nt, Artificial Sequence
  Description of Artificial Sequence: Synthetic oligonucleotide
accuauaugagguuuccua

SEQ ID NO: 575126 - RNA, 19 nt, Artificial Sequence
  Description of Artificial Sequence: Synthetic oligonucleotide
aaccauaacccugcaaagu

SEQ ID NO: 575127 - RNA, 19 nt, Artificial Sequence
  Description of Artificial Sequence: Synthetic oligonucleotide
uguuuacaugugcugggac

SEQ ID NO: 575128 - RNA, 19 nt, Artificial Sequence
  Description of Artificial Sequence: Synthetic oligonucleotide
uccuaauaagguucaguaa

SEQ ID NO: 575129 - RNA, 19 nt, Artificial Sequence
  Description of Artificial Sequence: Synthetic oligonucleotide
gaaaucccggcacaggcuc

SEQ ID NO: 575130 - RNA, 19 nt, Artificial Sequence
  Description of Artificial Sequence: Synthetic oligonucleotide
acugccaauagggaucggg

SEQ ID NO: 575131 - RNA, 19 nt, Artificial Sequence
  Description of Artificial Sequence: Synthetic oligonucleotide
caauguuucauuguauuga

SEQ ID NO: 575132 - RNA, 19 nt, Artificial Sequence
  Description of Artificial Sequence: Synthetic oligonucleotide
uccuaagcauaucaucuau

SEQ ID NO: 575133 - RNA, 19 nt, Artificial Sequence
  Description of Artificial Sequence: Synthetic oligonucleotide
aggcaaaugaguaaacacu

SEQ ID NO: 575134 - RNA, 19 nt, Artificial Sequence
  Description of Artificial Sequence: Synthetic oligonucleotide
ugggacauaccagucacca

SEQ ID NO: 575135 - RNA, 19 nt, Artificial Sequence
  Description of Artificial Sequence: Synthetic oligonucleotide
gguacuuggaggcuggcug

SEQ ID NO: 575136 - RNA, 19 nt, Artificial Sequence
  Description of Artificial Sequence: Synthetic oligonucleotide
uugagcuucgguguaguga

SEQ ID NO: 575137 - RNA, 19 nt, Artificial Sequence
  Description of Artificial Sequence: Synthetic oligonucleotide
uacucagaauucuggucag

SEQ ID NO: 575138 - RNA, 19 nt, Artificial Sequence
  Description of Artificial Sequence: Synthetic oligonucleotide
aaacaggggaaaagucaac

SEQ ID NO: 575139 - RNA, 19 nt, Artificial Sequence
  Description of Artificial Sequence: Synthetic oligonucleotide
aaccuugcauuguuuugcu

SEQ ID NO: 575140 - RNA, 19 nt, Artificial Sequence
  Description of Artificial Sequence: Synthetic oligonucleotide
ucgguaaacaggggaaaag

SEQ ID NO: 575141 - RNA, 19 nt, Artificial Sequence
  Description of Artificial Sequence: Synthetic oligonucleotide
cugccaauagggaucgggc

SEQ ID NO: 575142 - RNA, 19 nt, Artificial Sequence
  Description of Artificial Sequence: Synthetic oligonucleotide
caaaccuauaugagguuuc

SEQ ID NO: 575143 - RNA, 19 nt, Artificial Sequence
  Description of Artificial Sequence: Synthetic oligonucleotide
gaacugggcgaauauauua

SEQ ID NO: 575144 - RNA, 19 nt, Artificial Sequence
  Description of Artificial Sequence: Synthetic oligonucleotide
uggaucuugaaagggaaau

SEQ ID NO: 575145 - RNA, 19 nt, Artificial Sequence
  Description of Artificial Sequence: Synthetic oligonucleotide
auagggaucgggcuguaau

SEQ ID NO: 575146 - RNA, 19 nt, Artificial Sequence
  Description of Artificial Sequence: Synthetic oligonucleotide
uguccccuugaaaucccgg

SEQ ID NO: 575147 - RNA, 19 nt, Artificial Sequence
  Description of Artificial Sequence: Synthetic oligonucleotide
uugagugaaauaucuucua

SEQ ID NO: 575148 - RNA, 19 nt, Artificial Sequence
  Description of Artificial Sequence: Synthetic oligonucleotide
ucauaaucggccagcugaa

SEQ ID NO: 575149 - RNA, 19 nt, Artificial Sequence
  Description of Artificial Sequence: Synthetic oligonucleotide
uaacccugcaaagugucug

SEQ ID NO: 575150 - RNA, 19 nt, Artificial Sequence
  Description of Artificial Sequence: Synthetic oligonucleotide
aguaagggccguguguggg

SEQ ID NO: 575151 - RNA, 19 nt, Artificial Sequence
  Description of Artificial Sequence: Synthetic oligonucleotide
agaacccuacaauuugagu

SEQ ID NO: 575152 - RNA, 19 nt, Artificial Sequence
  Description of Artificial Sequence: Synthetic oligonucleotide
agcuacucagaauucuggu

SEQ ID NO: 575153 - RNA, 19 nt, Artificial Sequence
  Description of Artificial Sequence: Synthetic oligonucleotide
guuuuaacucgcuguccag

SEQ ID NO: 575154 - RNA, 19 nt, Artificial Sequence
  Description of Artificial Sequence: Synthetic oligonucleotide
ucgggcuguaauuaucuuc

SEQ ID NO: 575155 - RNA, 19 nt, Artificial Sequence
  Description of Artificial Sequence: Synthetic oligonucleotide
acuguuucaugcacacucg

SEQ ID NO: 575156 - RNA, 19 nt, Artificial Sequence
  Description of Artificial Sequence: Synthetic oligonucleotide
gguuacuaauccuuggguc

SEQ ID NO: 575157 - RNA, 19 nt, Artificial Sequence
  Description of Artificial Sequence: Synthetic oligonucleotide
uucgguguagugacucuga

SEQ ID NO: 575158 - RNA, 19 nt, Artificial Sequence
  Description of Artificial Sequence: Synthetic oligonucleotide
ucaaaccuauaugagguuu

SEQ ID NO: 575159 - RNA, 19 nt, Artificial Sequence
  Description of Artificial Sequence: Synthetic oligonucleotide
caggucaaggaguugucug

SEQ ID NO: 575160 - RNA, 19 nt, Artificial Sequence
  Description of Artificial Sequence: Synthetic oligonucleotide
uuaagcccucaucaguuua

SEQ ID NO: 575161 - RNA, 19 nt, Artificial Sequence
  Description of Artificial Sequence: Synthetic oligonucleotide
ggauuuauauauuacacuu

SEQ ID NO: 575162 - RNA, 19 nt, Artificial Sequence
  Description of Artificial Sequence: Synthetic oligonucleotide
gucgguugacuugaaaacc

SEQ ID NO: 575163 - RNA, 19 nt, Artificial Sequence
  Description of Artificial Sequence: Synthetic oligonucleotide
cucaugaccagugcuggcc

SEQ ID NO: 575164 - RNA, 19 nt, Artificial Sequence
  Description of Artificial Sequence: Synthetic oligonucleotide
uuaucuacaugcguauuuu

SEQ ID NO: 575165 - RNA, 19 nt, Artificial Sequence
  Description of Artificial Sequence: Synthetic oligonucleotide
aagagaguaagggccgugu

SEQ ID NO: 575166 - RNA, 19 nt, Artificial Sequence
  Description of Artificial Sequence: Synthetic oligonucleotide
uucaccuauuuugucagaa

SEQ ID NO: 575167 - RNA, 19 nt, Artificial Sequence
  Description of Artificial Sequence: Synthetic oligonucleotide
cuugaaaucccggcacagg

SEQ ID NO: 575168 - RNA, 19 nt, Artificial Sequence
  Description of Artificial Sequence: Synthetic oligonucleotide
aaagucgguugacuugaaa

SEQ ID NO: 575169 - RNA, 19 nt, Artificial Sequence
  Description of Artificial Sequence: Synthetic oligonucleotide
aauuugagugaaauaucuu

SEQ ID NO: 575170 - RNA, 19 nt, Artificial Sequence
  Description of Artificial Sequence: Synthetic oligonucleotide
uuacuaauccuugggucac

SEQ ID NO: 575171 - RNA, 19 nt, Artificial Sequence
  Description of Artificial Sequence: Synthetic oligonucleotide
aacugggcgaauauauuau

SEQ ID NO: 575172 - RNA, 19 nt, Artificial Sequence
  Description of Artificial Sequence: Synthetic oligonucleotide
agcauaucaucuauuucug

SEQ ID NO: 575173 - RNA, 19 nt, Artificial Sequence
  Description of Artificial Sequence: Synthetic oligonucleotide
ucuaucagcuucugccuau

SEQ ID NO: 575174 - RNA, 19 nt, Artificial Sequence
  Description of Artificial Sequence: Synthetic oligonucleotide
ccuaauaagguucaguaaa

SEQ ID NO: 575175 - RNA, 19 nt, Artificial Sequence
  Description of Artificial Sequence: Synthetic oligonucleotide
aggaagagugucuaucauu

SEQ ID NO: 575176 - RNA, 19 nt, Artificial Sequence
  Description of Artificial Sequence: Synthetic oligonucleotide
uuauugucucaugaccagu

SEQ ID NO: 575177 - RNA, 19 nt, Artificial Sequence
  Description of Artificial Sequence: Synthetic oligonucleotide
agagaguaagggccgugug

SEQ ID NO: 575178 - RNA, 19 nt, Artificial Sequence
  Description of Artificial Sequence: Synthetic oligonucleotide
auaccagcccauuucuuaa

SEQ ID NO: 575179 - RNA, 19 nt, Artificial Sequence
  Description of Artificial Sequence: Synthetic oligonucleotide
aggucgaugaacgccagcu

SEQ ID NO: 575180 - RNA, 19 nt, Artificial Sequence
  Description of Artificial Sequence: Synthetic oligonucleotide
uucgaaugcuuuccaggaa

SEQ ID NO: 575181 - RNA, 19 nt, Artificial Sequence
  Description of Artificial Sequence: Synthetic oligonucleotide
ucacacgaagguacuugga

SEQ ID NO: 575182 - RNA, 19 nt, Artificial Sequence
  Description of Artificial Sequence: Synthetic oligonucleotide
agcuucgguguagugacuc

SEQ ID NO: 575183 - RNA, 19 nt, Artificial Sequence
  Description of Artificial Sequence: Synthetic oligonucleotide
uuccuaagcauaucaucua

SEQ ID NO: 575184 - RNA, 19 nt, Artificial Sequence
  Description of Artificial Sequence: Synthetic oligonucleotide
aggggaaaagucaacgaga

SEQ ID NO: 575185 - RNA, 19 nt, Artificial Sequence
  Description of Artificial Sequence: Synthetic oligonucleotide
ccuugcauuguuuugcuuc

SEQ ID NO: 575186 - RNA, 19 nt, Artificial Sequence
  Description of Artificial Sequence: Synthetic oligonucleotide
cuucuccaagagaguaagg

SEQ ID NO: 575187 - RNA, 19 nt, Artificial Sequence
  Description of Artificial Sequence: Synthetic oligonucleotide
cugaaaauuuaaggcuggc

SEQ ID NO: 575188 - RNA, 19 nt, Artificial Sequence
  Description of Artificial Sequence: Synthetic oligonucleotide
ggauguugacagauguugg

SEQ ID NO: 575189 - RNA, 19 nt, Artificial Sequence
  Description of Artificial Sequence: Synthetic oligonucleotide
ugggcaacuuucccaggca

SEQ ID NO: 575190 - RNA, 19 nt, Artificial Sequence
  Description of Artificial Sequence: Synthetic oligonucleotide
accguauuuucugacuucu

SEQ ID NO: 575191 - RNA, 19 nt, Artificial Sequence
  Description of Artificial Sequence: Synthetic oligonucleotide
uaccagcccauuucuuaag

SEQ ID NO: 575192 - RNA, 19 nt, Artificial Sequence
  Description of Artificial Sequence: Synthetic oligonucleotide
uggaccagucccaaaccau

SEQ ID NO: 575193 - RNA, 19 nt, Artificial Sequence
  Description of Artificial Sequence: Synthetic oligonucleotide
aagguacuuggaggcuggc

SEQ ID NO: 575194 - RNA, 19 nt, Artificial Sequence
  Description of Artificial Sequence: Synthetic oligonucleotide
ucaccuauuuugucagaau

SEQ ID NO: 575195 - RNA, 19 nt, Artificial Sequence
  Description of Artificial Sequence: Synthetic oligonucleotide
guguggguucacacgaagg

SEQ ID NO: 575196 - RNA, 19 nt, Artificial Sequence
  Description of Artificial Sequence: Synthetic oligonucleotide
uacuuguuuaagcccucau

SEQ ID NO: 575197 - RNA, 19 nt, Artificial Sequence
  Description of Artificial Sequence: Synthetic oligonucleotide
guccccuugaaaucccggc

SEQ ID NO: 575198 - RNA, 19 nt, Artificial Sequence
  Description of Artificial Sequence: Synthetic oligonucleotide
aagauccauuagauaacca

SEQ ID NO: 575199 - RNA, 19 nt, Artificial Sequence
  Description of Artificial Sequence: Synthetic oligonucleotide
auggcuguuucaccuauuu

SEQ ID NO: 575200 - RNA, 19 nt, Artificial Sequence
  Description of Artificial Sequence: Synthetic oligonucleotide
auguguaagcaucgguaaa

SEQ ID NO: 575201 - RNA, 19 nt, Artificial Sequence
  Description of Artificial Sequence: Synthetic oligonucleotide
ucucaugaccagugcuggc

SEQ ID NO: 575202 - RNA, 19 nt, Artificial Sequence
  Description of Artificial Sequence: Synthetic oligonucleotide
aguuuaggaagagugucua

SEQ ID NO: 575203 - RNA, 19 nt, Artificial Sequence
  Description of Artificial Sequence: Synthetic oligonucleotide
uaccguauuuucugacuuc

SEQ ID NO: 575204 - RNA, 19 nt, Artificial Sequence
  Description of Artificial Sequence: Synthetic oligonucleotide
cuugguguauauuucuccu

SEQ ID NO: 575205 - RNA, 19 nt, Artificial Sequence
  Description of Artificial Sequence: Synthetic oligonucleotide
cugccuaucucugucguuc

SEQ ID NO: 575206 - RNA, 19 nt, Artificial Sequence
  Description of Artificial Sequence: Synthetic oligonucleotide
uugguguauauuucuccuu

SEQ ID NO: 575207 - RNA, 19 nt, Artificial Sequence
  Description of Artificial Sequence: Synthetic oligonucleotide
aaccuauaugagguuuccu

SEQ ID NO: 575208 - RNA, 19 nt, Artificial Sequence
  Description of Artificial Sequence: Synthetic oligonucleotide
uguacgcccggguuacuaa

SEQ ID NO: 575209 - RNA, 19 nt, Artificial Sequence
  Description of Artificial Sequence: Synthetic oligonucleotide
auggagacgcacucaugga

SEQ ID NO: 575210 - RNA, 19 nt, Artificial Sequence
  Description of Artificial Sequence: Synthetic oligonucleotide
acaugugcugggacauacc

SEQ ID NO: 575211 - RNA, 19 nt, Artificial Sequence
  Description of Artificial Sequence: Synthetic oligonucleotide
cagaaccagacgugcuugc

SEQ ID NO: 575212 - RNA, 19 nt, Artificial Sequence
  Description of Artificial Sequence: Synthetic oligonucleotide
auggacauguuuacaugug

SEQ ID NO: 575213 - RNA, 19 nt, Artificial Sequence
  Description of Artificial Sequence: Synthetic oligonucleotide
uagggaucgggcuguaauu

SEQ ID NO: 575214 - RNA, 19 nt, Artificial Sequence
  Description of Artificial Sequence: Synthetic oligonucleotide
uccggaacugggcgaauau

SEQ ID NO: 575215 - RNA, 19 nt, Artificial Sequence
  Description of Artificial Sequence: Synthetic oligonucleotide
aucaguguacgcccggguu

SEQ ID NO: 575216 - RNA, 19 nt, Artificial Sequence
  Description of Artificial Sequence: Synthetic oligonucleotide
ugucguucuuccggaacug

SEQ ID NO: 575217 - RNA, 19 nt, Artificial Sequence
  Description of Artificial Sequence: Synthetic oligonucleotide
ggaagagugucuaucauua

SEQ ID NO: 575218 - RNA, 19 nt, Artificial Sequence
  Description of Artificial Sequence: Synthetic oligonucleotide
acugggcgaauauauuauu

SEQ ID NO: 575219 - RNA, 19 nt, Artificial Sequence
  Description of Artificial Sequence: Synthetic oligonucleotide
ucuuguggugugagcaguu

SEQ ID NO: 575220 - RNA, 19 nt, Artificial Sequence
  Description of Artificial Sequence: Synthetic oligonucleotide
uuccgguaguaauuuucaa

SEQ ID NO: 575221 - RNA, 19 nt, Artificial Sequence
  Description of Artificial Sequence: Synthetic oligonucleotide
gucagugcaguaagaugag

SEQ ID NO: 575222 - RNA, 19 nt, Artificial Sequence
  Description of Artificial Sequence: Synthetic oligonucleotide
uguugagcuucgguguagu

SEQ ID NO: 575223 - RNA, 19 nt, Artificial Sequence
  Description of Artificial Sequence: Synthetic oligonucleotide
caccgucucuaucagcuuc

SEQ ID NO: 575224 - RNA, 19 nt, Artificial Sequence
  Description of Artificial Sequence: Synthetic oligonucleotide
uucauggcuguuucaccua

SEQ ID NO: 575225 - RNA, 19 nt, Artificial Sequence
  Description of Artificial Sequence: Synthetic oligonucleotide
aaaugacaaugagauucuu

SEQ ID NO: 575226 - RNA, 19 nt, Artificial Sequence
  Description of Artificial Sequence: Synthetic oligonucleotide
cugggacauaccagucacc

SEQ ID NO: 575227 - RNA, 19 nt, Artificial Sequence
  Description of Artificial Sequence: Synthetic oligonucleotide
agauaaccacuugcucuuc

SEQ ID NO: 575228 - RNA, 19 nt, Artificial Sequence
  Description of Artificial Sequence: Synthetic oligonucleotide
cucucggaguuuaggaaga

SEQ ID NO: 575229 - RNA, 19 nt, Artificial Sequence
  Description of Artificial Sequence: Synthetic oligonucleotide
cuucgguguagugacucug

SEQ ID NO: 575230 - RNA, 19 nt, Artificial Sequence
  Description of Artificial Sequence: Synthetic oligonucleotide
aagcaucgguaaacagggg

SEQ ID NO: 575231 - RNA, 19 nt, Artificial Sequence
  Description of Artificial Sequence: Synthetic oligonucleotide
ccaaaccauaaacagguca

SEQ ID NO: 575232 - RNA, 19 nt, Artificial Sequence
  Description of Artificial Sequence: Synthetic oligonucleotide
cuugcauuguuuugcuucu

SEQ ID NO: 575233 - RNA, 19 nt, Artificial Sequence
  Description of Artificial Sequence: Synthetic oligonucleotide
uaagaugagugagcucgaa

SEQ ID NO: 575234 - RNA, 19 nt, Artificial Sequence
  Description of Artificial Sequence: Synthetic oligonucleotide
guugagcuucgguguagug

SEQ ID NO: 575235 - RNA, 19 nt, Artificial Sequence
  Description of Artificial Sequence: Synthetic oligonucleotide
aaggauguugacagauguu

SEQ ID NO: 575236 - RNA, 19 nt, Artificial Sequence
  Description of Artificial Sequence: Synthetic oligonucleotide
agcgagguaaguggaccag

SEQ ID NO: 575237 - RNA, 19 nt, Artificial Sequence
  Description of Artificial Sequence: Synthetic oligonucleotide
ugccuaucucugucguucu

SEQ ID NO: 575238 - RNA, 19 nt, Artificial Sequence
  Description of Artificial Sequence: Synthetic oligonucleotide
gaucgggcuguaauuaucu

SEQ ID NO: 575239 - RNA, 19 nt, Artificial Sequence
  Description of Artificial Sequence: Synthetic oligonucleotide
guuaagaccuccucuucau

SEQ ID NO: 575240 - RNA, 19 nt, Artificial Sequence
  Description of Artificial Sequence: Synthetic oligonucleotide
acacaauuuauuggauuua

SEQ ID NO: 575241 - RNA, 19 nt, Artificial Sequence
  Description of Artificial Sequence: Synthetic oligonucleotide
uacgcccggguuacuaauc

SEQ ID NO: 575242 - RNA, 19 nt, Artificial Sequence
  Description of Artificial Sequence: Synthetic oligonucleotide
ucggccagcugaacaaauu

SEQ ID NO: 575243 - RNA, 19 nt, Artificial Sequence
  Description of Artificial Sequence: Synthetic oligonucleotide
aaucggccagcugaacaaa

SEQ ID NO: 575244 - RNA, 19 nt, Artificial Sequence
  Description of Artificial Sequence: Synthetic oligonucleotide
uggcuguuucaccuauuuu

SEQ ID NO: 575245 - RNA, 19 nt, Artificial Sequence
  Description of Artificial Sequence: Synthetic oligonucleotide
aucgguaaacaggggaaaa

SEQ ID NO: 575246 - RNA, 19 nt, Artificial Sequence
  Description of Artificial Sequence: Synthetic oligonucleotide
gucugaggucgaugaacgc

SEQ ID NO: 575247 - RNA, 19 nt, Artificial Sequence
  Description of Artificial Sequence: Synthetic oligonucleotide
caacuuucccaggcaaaug

SEQ ID NO: 575248 - RNA, 19 nt, Artificial Sequence
  Description of Artificial Sequence: Synthetic oligonucleotide
cgguaguaauuuucaaagg

SEQ ID NO: 575249 - RNA, 19 nt, Artificial Sequence
  Description of Artificial Sequence: Synthetic oligonucleotide
gucacauguaaaaugugau

SEQ ID NO: 575250 - RNA, 19 nt, Artificial Sequence
  Description of Artificial Sequence: Synthetic oligonucleotide
ccuauaugagguuuccuaa

SEQ ID NO: 575251 - RNA, 19 nt, Artificial Sequence
  Description of Artificial Sequence: Synthetic oligonucleotide
agaaccagacgugcuugcu

SEQ ID NO: 575252 - RNA, 19 nt, Artificial Sequence
  Description of Artificial Sequence: Synthetic oligonucleotide
uugcuuccgguaguaauuu

SEQ ID NO: 575253 - RNA, 19 nt, Artificial Sequence
  Description of Artificial Sequence: Synthetic oligonucleotide
aggcuggcauaaauaaacu

SEQ ID NO: 575254 - RNA, 19 nt, Artificial Sequence
  Description of Artificial Sequence: Synthetic oligonucleotide
cuuugcuuccgguaguaau

SEQ ID NO: 575255 - RNA, 19 nt, Artificial Sequence
  Description of Artificial Sequence: Synthetic oligonucleotide
gucgagcauccuuaaaagu

SEQ ID NO: 575256 - RNA, 19 nt, Artificial Sequence
  Description of Artificial Sequence: Synthetic oligonucleotide
cagacgugcuugcuucuuc

SEQ ID NO: 575257 - RNA, 19 nt, Artificial Sequence
  Description of Artificial Sequence: Synthetic oligonucleotide
cauaaucggccagcugaac

SEQ ID NO: 575258 - RNA, 19 nt, Artificial Sequence
  Description of Artificial Sequence: Synthetic oligonucleotide
caguguacgcccggguuac

SEQ ID NO: 575259 - RNA, 19 nt, Artificial Sequence
  Description of Artificial Sequence: Synthetic oligonucleotide
ccauagucagcgagguaag

SEQ ID NO: 575260 - RNA, 19 nt, Artificial Sequence
  Description of Artificial Sequence: Synthetic oligonucleotide
ucugccuaucucugucguu

SEQ ID NO: 575261 - RNA, 19 nt, Artificial Sequence
  Description of Artificial Sequence: Synthetic oligonucleotide
caagagaguaagggccgug

SEQ ID NO: 575262 - RNA, 19 nt, Artificial Sequence
  Description of Artificial Sequence: Synthetic oligonucleotide
ccggguuacuaauccuugg

SEQ ID NO: 575263 - RNA, 19 nt, Artificial Sequence
  Description of Artificial Sequence: Synthetic oligonucleotide
acucgacugcggcugcaga

SEQ ID NO: 575264 - RNA, 19 nt, Artificial Sequence
  Description of Artificial Sequence: Synthetic oligonucleotide
cuggaucuugaaagggaaa

SEQ ID NO: 575265 - RNA, 19 nt, Artificial Sequence
  Description of Artificial Sequence: Synthetic oligonucleotide
ggagacgcacucauggaca

SEQ ID NO: 575266 - RNA, 19 nt, Artificial Sequence
  Description of Artificial Sequence: Synthetic oligonucleotide
auauccucucggaguuuag

SEQ ID NO: 575267 - RNA, 19 nt, Artificial Sequence
  Description of Artificial Sequence: Synthetic oligonucleotide
aaaagucgguugacuugaa

SEQ ID NO: 575268 - RNA, 19 nt, Artificial Sequence
  Description of Artificial Sequence: Synthetic oligonucleotide
ugcaagcuguuugggcaac

SEQ ID NO: 575269 - RNA, 19 nt, Artificial Sequence
  Description of Artificial Sequence: Synthetic oligonucleotide
cucgacugcggcugcagaa

SEQ ID NO: 575270 - RNA, 19 nt, Artificial Sequence
  Description of Artificial Sequence: Synthetic oligonucleotide
ugacuccgccauuguccag

SEQ ID NO: 575271 - RNA, 19 nt, Artificial Sequence
  Description of Artificial Sequence: Synthetic oligonucleotide
guaagaugagugagcucga

SEQ ID NO: 575272 - RNA, 19 nt, Artificial Sequence
  Description of Artificial Sequence: Synthetic oligonucleotide
gaaaagucaacgagaucuu

SEQ ID NO: 575273 - RNA, 19 nt, Artificial Sequence
  Description of Artificial Sequence: Synthetic oligonucleotide
aagcccucaucaguuuauu

SEQ ID NO: 575274 - RNA, 19 nt, Artificial Sequence
  Description of Artificial Sequence: Synthetic oligonucleotide
cugucguucuuccggaacu

SEQ ID NO: 575275 - RNA, 19 nt, Artificial Sequence
  Description of Artificial Sequence: Synthetic oligonucleotide
guacuuggaggcuggcugu

SEQ ID NO: 575276 - RNA, 19 nt, Artificial Sequence
  Description of Artificial Sequence: Synthetic oligonucleotide
aucgggcuguaauuaucuu

SEQ ID NO: 575277 - RNA, 19 nt, Artificial Sequence
  Description of Artificial Sequence: Synthetic oligonucleotide
cccugaaaauaccagccca

SEQ ID NO: 575278 - RNA, 19 nt, Artificial Sequence
  Description of Artificial Sequence: Synthetic oligonucleotide
gucagcgagguaaguggac

SEQ ID NO: 575279 - RNA, 19 nt, Artificial Sequence
  Description of Artificial Sequence: Synthetic oligonucleotide
cuaccguauuuucugacuu

SEQ ID NO: 575280 - RNA, 19 nt, Artificial Sequence
  Description of Artificial Sequence: Synthetic oligonucleotide
gagacgcacucauggacau

SEQ ID NO: 575281 - RNA, 19 nt, Artificial Sequence
  Description of Artificial Sequence: Synthetic oligonucleotide
aagguucaguaaacagcua

SEQ ID NO: 575282 - RNA, 19 nt, Artificial Sequence
  Description of Artificial Sequence: Synthetic oligonucleotide
uuccggaacugggcgaaua

SEQ ID NO: 575283 - RNA, 19 nt, Artificial Sequence
  Description of Artificial Sequence: Synthetic oligonucleotide
ccccuugaaaucccggcac

SEQ ID NO: 575284 - RNA, 19 nt, Artificial Sequence
  Description of Artificial Sequence: Synthetic oligonucleotide
caucgguaaacaggggaaa

SEQ ID NO: 575285 - RNA, 19 nt, Artificial Sequence
  Description of Artificial Sequence: Synthetic oligonucleotide
cccggguuacuaauccuug

SEQ ID NO: 575286 - RNA, 19 nt, Artificial Sequence
  Description of Artificial Sequence: Synthetic oligonucleotide
ccuaucucugucguucuuc

SEQ ID NO: 575287 - RNA, 19 nt, Artificial Sequence
  Description of Artificial Sequence: Synthetic oligonucleotide
uaagggccguguguggguu

SEQ ID NO: 575288 - RNA, 19 nt, Artificial Sequence
  Description of Artificial Sequence: Synthetic oligonucleotide
gcaucgguaaacaggggaa

SEQ ID NO: 575289 - RNA, 19 nt, Artificial Sequence
  Description of Artificial Sequence: Synthetic oligonucleotide
cacucgacugcggcugcag

SEQ ID NO: 575290 - RNA, 19 nt, Artificial Sequence
  Description of Artificial Sequence: Synthetic oligonucleotide
gccguguguggguucacac

SEQ ID NO: 575291 - RNA, 19 nt, Artificial Sequence
  Description of Artificial Sequence: Synthetic oligonucleotide
caugucgagcauccuuaaa

SEQ ID NO: 575292 - RNA, 19 nt, Artificial Sequence
  Description of Artificial Sequence: Synthetic oligonucleotide
ggaucgggcuguaauuauc

SEQ ID NO: 575293 - RNA, 19 nt, Artificial Sequence
  Description of Artificial Sequence: Synthetic oligonucleotide
aggucggggucagugcagu

SEQ ID NO: 575294 - RNA, 19 nt, Artificial Sequence
  Description of Artificial Sequence: Synthetic oligonucleotide
guaagggccgugugugggu

SEQ ID NO: 575295 - RNA, 19 nt, Artificial Sequence
  Description of Artificial Sequence: Synthetic oligonucleotide
gggaaacuucuuugggaaa

SEQ ID NO: 575296 - RNA, 19 nt, Artificial Sequence
  Description of Artificial Sequence: Synthetic oligonucleotide
agggccguguguggguuca

SEQ ID NO: 575297 - RNA, 19 nt, Artificial Sequence
  Description of Artificial Sequence: Synthetic oligonucleotide
agacgcacucauggacaug

SEQ ID NO: 575298 - RNA, 19 nt, Artificial Sequence
  Description of Artificial Sequence: Synthetic oligonucleotide
ggggaaaagucaacgagau

SEQ ID NO: 575299 - RNA, 19 nt, Artificial Sequence
  Description of Artificial Sequence: Synthetic oligonucleotide
gcucgaaggacagcaauua

SEQ ID NO: 575300 - RNA, 19 nt, Artificial Sequence
  Description of Artificial Sequence: Synthetic oligonucleotide
cuucgagcacauguuucaa

SEQ ID NO: 575301 - RNA, 19 nt, Artificial Sequence
  Description of Artificial Sequence: Synthetic oligonucleotide
ccguauuuucugacuucug

SEQ ID NO: 575302 - RNA, 19 nt, Artificial Sequence
  Description of Artificial Sequence: Synthetic oligonucleotide
acgagaucuugaacaguua

SEQ ID NO: 575303 - RNA, 19 nt, Artificial Sequence
  Description of Artificial Sequence: Synthetic oligonucleotide
aggaguugucugaggucga

SEQ ID NO: 575304 - RNA, 19 nt, Artificial Sequence
  Description of Artificial Sequence: Synthetic oligonucleotide
gucuuguggugugagcagu

SEQ ID NO: 575305 - RNA, 19 nt, Artificial Sequence
  Description of Artificial Sequence: Synthetic oligonucleotide
cgaagguacuuggaggcug

SEQ ID NO: 575306 - RNA, 19 nt, Artificial Sequence
  Description of Artificial Sequence: Synthetic oligonucleotide
ggaccagucccaaaccaua

SEQ ID NO: 575307 - RNA, 19 nt, Artificial Sequence
  Description of Artificial Sequence: Synthetic oligonucleotide
cucgaaggacagcaauuau

SEQ ID NO: 575308 - RNA, 19 nt, Artificial Sequence
  Description of Artificial Sequence: Synthetic oligonucleotide
gggacauaccagucaccaa

SEQ ID NO: 575309 - RNA, 19 nt, Artificial Sequence
  Description of Artificial Sequence: Synthetic oligonucleotide
guacgcccggguuacuaau

SEQ ID NO: 575310 - RNA, 19 nt, Artificial Sequence
  Description of Artificial Sequence: Synthetic oligonucleotide
ccauaacccugcaaagugu

SEQ ID NO: 575311 - RNA, 19 nt, Artificial Sequence
  Description of Artificial Sequence: Synthetic oligonucleotide
cuauagccaucaacuguuu

SEQ ID NO: 575312 - RNA, 19 nt, Artificial Sequence
  Description of Artificial Sequence: Synthetic oligonucleotide
acacucgacugcggcugca

SEQ ID NO: 575313 - RNA, 19 nt, Artificial Sequence
  Description of Artificial Sequence: Synthetic oligonucleotide
guguacgcccggguuacua

SEQ ID NO: 575314 - RNA, 19 nt, Artificial Sequence
  Description of Artificial Sequence: Synthetic oligonucleotide
gcaggguguccccuugaaa

SEQ ID NO: 575315 - RNA, 19 nt, Artificial Sequence
  Description of Artificial Sequence: Synthetic oligonucleotide
cauuaucuacaugcguauu

SEQ ID NO: 575316 - RNA, 19 nt, Artificial Sequence
  Description of Artificial Sequence: Synthetic oligonucleotide
aguguacgcccggguuacu

SEQ ID NO: 575317 - RNA, 19 nt, Artificial Sequence
  Description of Artificial Sequence: Synthetic oligonucleotide
gggaucgggcuguaauuau

SEQ ID NO: 575318 - RNA, 19 nt, Artificial Sequence
  Description of Artificial Sequence: Synthetic oligonucleotide
ccuaagcauaucaucuauu

SEQ ID NO: 575319 - RNA, 19 nt, Artificial Sequence
  Description of Artificial Sequence: Synthetic oligonucleotide
gcuucgguguagugacucu

SEQ ID NO: 575320 - RNA, 19 nt, Artificial Sequence
  Description of Artificial Sequence: Synthetic oligonucleotide
ggaacugggcgaauauauu

SEQ ID NO: 575321 - RNA, 19 nt, Artificial Sequence
  Description of Artificial Sequence: Synthetic oligonucleotide
ccuugagaucagacaugga

SEQ ID NO: 575322 - RNA, 19 nt, Artificial Sequence
  Description of Artificial Sequence: Synthetic oligonucleotide
ggcaaacaauucacacugu

SEQ ID NO: 575323 - RNA, 19 nt, Artificial Sequence
  Description of Artificial Sequence: Synthetic oligonucleotide
ggccguguguggguucaca

SEQ ID NO: 575324 - RNA, 19 nt, Artificial Sequence
  Description of Artificial Sequence: Synthetic oligonucleotide
cccuacaauuugagugaaa

SEQ ID NO: 575325 - RNA, 19 nt, Artificial Sequence
  Description of Artificial Sequence: Synthetic oligonucleotide
gagcuucgguguagugacu

SEQ ID NO: 575326 - RNA, 19 nt, Artificial Sequence
  Description of Artificial Sequence: Synthetic oligonucleotide
gcgagguaaguggaccagu

SEQ ID NO: 575327 - RNA, 19 nt, Artificial Sequence
  Description of Artificial Sequence: Synthetic oligonucleotide
ggaguugucugaggucgau

SEQ ID NO: 575328 - RNA, 19 nt, Artificial Sequence
  Description of Artificial Sequence: Synthetic oligonucleotide
ccgucucuaucagcuucug

SEQ ID NO: 575329 - RNA, 19 nt, Artificial Sequence
  Description of Artificial Sequence: Synthetic oligonucleotide
acgcacucauggacauguu

SEQ ID NO: 575330 - RNA, 19 nt, Artificial Sequence
  Description of Artificial Sequence: Synthetic oligonucleotide
ggucggggucagugcagua

SEQ ID NO: 575331 - RNA, 19 nt, Artificial Sequence
  Description of Artificial Sequence: Synthetic oligonucleotide
gggacaugggaaacuucuu

SEQ ID NO: 575332 - RNA, 19 nt, Artificial Sequence
  Description of Artificial Sequence: Synthetic oligonucleotide
gcccggguuacuaauccuu

SEQ ID NO: 575333 - RNA, 19 nt, Artificial Sequence
  Description of Artificial Sequence: Synthetic oligonucleotide
cgccauuguccagucauaa

SEQ ID NO: 575334 - RNA, 19 nt, Artificial Sequence
  Description of Artificial Sequence: Synthetic oligonucleotide
ggucaggagcagauuuguu

SEQ ID NO: 575335 - RNA, 19 nt, Artificial Sequence
  Description of Artificial Sequence: Synthetic oligonucleotide
gggccguguguggguucac

SEQ ID NO: 575336 - RNA, 19 nt, Artificial Sequence
  Description of Artificial Sequence: Synthetic oligonucleotide
  modified_base (10)..(10): a, c, u, g, unknown or other
aacuuguccnguuaagugc

SEQ ID NO: 575337 - RNA, 19 nt, Artificial Sequence
  Description of Artificial Sequence: Synthetic oligonucleotide
agauguacaguauucaggg

SEQ ID NO: 575338 - RNA, 19 nt, Artificial Sequence
  Description of Artificial Sequence: Synthetic oligonucleotide
uuuauuaacauauaauaua

SEQ ID NO: 575339 - RNA, 19 nt, Artificial Sequence
  Description of Artificial Sequence: Synthetic oligonucleotide
cauaguaugggucaaauug

SEQ ID NO: 575340 - RNA, 19 nt, Artificial Sequence
  Description of Artificial Sequence: Synthetic oligonucleotide
auguacaguauucaggggc

SEQ ID NO: 575341 - RNA, 19 nt, Artificial Sequence
  Description of Artificial Sequence: Synthetic oligonucleotide
ugauauuggguccugagcc

SEQ ID NO: 575342 - RNA, 19 nt, Artificial Sequence
  Description of Artificial Sequence: Synthetic oligonucleotide
guugggauuacuuagggag

SEQ ID NO: 575343 - RNA, 19 nt, Artificial Sequence
  Description of Artificial Sequence: Synthetic oligonucleotide
ucuccuuagagaaaccugg

SEQ ID NO: 575344 - RNA, 19 nt, Artificial Sequence
  Description of Artificial Sequence: Synthetic oligonucleotide
agacagaccauuuucaaag

SEQ ID NO: 575345 - RNA, 19 nt, Artificial Sequence
  Description of Artificial Sequence: Synthetic oligonucleotide
  modified_base (4)..(4): a, c, u, g, unknown or other
uccnguuaagugcaguugg

SEQ ID NO: 575346 - RNA, 19 nt, Artificial Sequence
  Description of Artificial Sequence: Synthetic oligonucleotide
guaugggucaaauuggagg

SEQ ID NO: 575347 - RNA, 19 nt, Artificial Sequence
  Description of Artificial Sequence: Synthetic oligonucleotide
agaguagucucuccuagcc

SEQ ID NO: 575348 - RNA, 19 nt, Artificial Sequence
  Description of Artificial Sequence: Synthetic oligonucleotide
uuaacauauaauauauuua

SEQ ID NO: 575349 - RNA, 19 nt, Artificial Sequence
  Description of Artificial Sequence: Synthetic oligonucleotide
aauuggagguacuguugcc

SEQ ID NO: 575350 - RNA, 19 nt, Artificial Sequence
  Description of Artificial Sequence: Synthetic oligonucleotide
ugcuguagagauuuugggg

SEQ ID NO: 575351 - RNA, 19 nt, Artificial Sequence
  Description of Artificial Sequence: Synthetic oligonucleotide
gugaguaugauauuggguc

SEQ ID NO: 575352 - RNA, 19 nt, Artificial Sequence
  Description of Artificial Sequence: Synthetic oligonucleotide
augauauuggguccugagc

SEQ ID NO: 575353 - RNA, 19 nt, Artificial Sequence
  Description of Artificial Sequence: Synthetic oligonucleotide
cauugcaaggggaagagag

SEQ ID NO: 575354 - RNA, 19 nt, Artificial Sequence
  Description of Artificial Sequence: Synthetic oligonucleotide
aaaugggucauaguauggg

SEQ ID NO: 575355 - RNA, 19 nt, Artificial Sequence
  Description of Artificial Sequence: Synthetic oligonucleotide
aaugugacguccugccugg

SEQ ID NO: 575356 - RNA, 19 nt, Artificial Sequence
  Description of Artificial Sequence: Synthetic oligonucleotide
acuaacugaucccucacuc

SEQ ID NO: 575357 - RNA, 19 nt, Artificial Sequence
  Description of Artificial Sequence: Synthetic oligonucleotide
cauaaugugacguccugcc

SEQ ID NO: 575358 - RNA, 19 nt, Artificial Sequence
  Description of Artificial Sequence: Synthetic oligonucleotide
uaugggucaaauuggaggu

SEQ ID NO: 575359 - RNA, 19 nt, Artificial Sequence
  Description of Artificial Sequence: Synthetic oligonucleotide
augguuaguccuuccaggc

SEQ ID NO: 575360 - RNA, 19 nt, Artificial Sequence
  Description of Artificial Sequence: Synthetic oligonucleotide
ugaagucauuuauuggccg

SEQ ID NO: 575361 - RNA, 19 nt, Artificial Sequence
  Description of Artificial Sequence: Synthetic oligonucleotide
aagauguugauuccaggga

SEQ ID NO: 575362 - RNA, 19 nt, Artificial Sequence
  Description of Artificial Sequence: Synthetic oligonucleotide
aguaggcagggcuauaggg

SEQ ID NO: 575363 - RNA, 19 nt, Artificial Sequence
  Description of Artificial Sequence: Synthetic oligonucleotide
gguauaaccagacuuggag

SEQ ID NO: 575364 - RNA, 19 nt, Artificial Sequence
  Description of Artificial Sequence: Synthetic oligonucleotide
aguuuacugguauccaagg

SEQ ID NO: 575365 - RNA, 19 nt, Artificial Sequence
  Description of Artificial Sequence: Synthetic oligonucleotide
acuguagccggucacuacg

SEQ ID NO: 575366 - RNA, 19 nt, Artificial Sequence
  Description of Artificial Sequence: Synthetic oligonucleotide
gaauaagugacugggguug

SEQ ID NO: 575367 - RNA, 19 nt, Artificial Sequence
  Description of Artificial Sequence: Synthetic oligonucleotide
uugggauuacuuagggagg

SEQ ID NO: 575368 - RNA, 19 nt, Artificial Sequence
  Description of Artificial Sequence: Synthetic oligonucleotide
acaacugccccuucucagc

SEQ ID NO: 575369 - RNA, 19 nt, Artificial Sequence
  Description of Artificial Sequence: Synthetic oligonucleotide
ugaguaugauauugggucc

SEQ ID NO: 575370 - RNA, 19 nt, Artificial Sequence
  Description of Artificial Sequence: Synthetic oligonucleotide
caugguuaguccuuccagg

SEQ ID NO: 575371 - RNA, 19 nt, Artificial Sequence
  Description of Artificial Sequence: Synthetic oligonucleotide
aagugcuuuaggcccuccc

SEQ ID NO: 575372 - RNA, 19 nt, Artificial Sequence
  Description of Artificial Sequence: Synthetic oligonucleotide
guauucaggggccaccugg

SEQ ID NO: 575373 - RNA, 19 nt, Artificial Sequence
  Description of Artificial Sequence: Synthetic oligonucleotide
agcccuaccuccaagauuc

SEQ ID NO: 575374 - RNA, 19 nt, Artificial Sequence
  Description of Artificial Sequence: Synthetic oligonucleotide
auuacuuagggaggacugc

SEQ ID NO: 575375 - RNA, 19 nt, Artificial Sequence
  Description of Artificial Sequence: Synthetic oligonucleotide
uccuucgccagccagacuc

SEQ ID NO: 575376 - RNA, 19 nt, Artificial Sequence
  Description of Artificial Sequence: Synthetic oligonucleotide
cacuaagcaggccugagag

SEQ ID NO: 575377 - RNA, 19 nt, Artificial Sequence
  Description of Artificial Sequence: Synthetic oligonucleotide
ucaaauuggagguacuguu

SEQ ID NO: 575378 - RNA, 19 nt, Artificial Sequence
  Description of Artificial Sequence: Synthetic oligonucleotide
aaguuacaagugcuuuagg

SEQ ID NO: 575379 - RNA, 19 nt, Artificial Sequence
  Description of Artificial Sequence: Synthetic oligonucleotide
uccugcuacaucauagcug

SEQ ID NO: 575380 - RNA, 19 nt, Artificial Sequence
  Description of Artificial Sequence: Synthetic oligonucleotide
uacggaaugaauccuccac

SEQ ID NO: 575381 - RNA, 19 nt, Artificial Sequence
  Description of Artificial Sequence: Synthetic oligonucleotide
ccugcuacaucauagcugg

SEQ ID NO: 575382 - RNA, 19 nt, Artificial Sequence
  Description of Artificial Sequence: Synthetic oligonucleotide
uacaccuugcuuuccaaca

SEQ ID NO: 575383 - RNA, 19 nt, Artificial Sequence
  Description of Artificial Sequence: Synthetic oligonucleotide
uacagugccccauaaugug

SEQ ID NO: 575384 - RNA, 19 nt, Artificial Sequence
  Description of Artificial Sequence: Synthetic oligonucleotide
gaacugucaauguggcggg

SEQ ID NO: 575385 - RNA, 19 nt, Artificial Sequence
  Description of Artificial Sequence: Synthetic oligonucleotide
guuggcgaaaacuguuugg

SEQ ID NO: 575386 - RNA, 19 nt, Artificial Sequence
  Description of Artificial Sequence: Synthetic oligonucleotide
aggauauccagaaaaccuc

SEQ ID NO: 575387 - RNA, 19 nt, Artificial Sequence
  Description of Artificial Sequence: Synthetic oligonucleotide
uguuggcgaaaacuguuug

SEQ ID NO: 575388 - RNA, 19 nt, Artificial Sequence
  Description of Artificial Sequence: Synthetic oligonucleotide
aguaaaguccccucacugu

SEQ ID NO: 575389 - RNA, 19 nt, Artificial Sequence
  Description of Artificial Sequence: Synthetic oligonucleotide
agugaaguccugcuacauc

SEQ ID NO: 575390 - RNA, 19 nt, Artificial Sequence
  Description of Artificial Sequence: Synthetic oligonucleotide
aaucuccuuagagaaaccu

SEQ ID NO: 575391 - RNA, 19 nt, Artificial Sequence
  Description of Artificial Sequence: Synthetic oligonucleotide
aauaagugacugggguugg

SEQ ID NO: 575392 - RNA, 19 nt, Artificial Sequence
  Description of Artificial Sequence: Synthetic oligonucleotide
gauaggggaggguugguac

SEQ ID NO: 575393 - RNA, 19 nt, Artificial Sequence
  Description of Artificial Sequence: Synthetic oligonucleotide
caaaugggucauaguaugg

SEQ ID NO: 575394 - RNA, 19 nt, Artificial Sequence
  Description of Artificial Sequence: Synthetic oligonucleotide
guugaggacaugaggaucc

SEQ ID NO: 575395 - RNA, 19 nt, Artificial Sequence
  Description of Artificial Sequence: Synthetic oligonucleotide
acuacggaaugaauccucc

SEQ ID NO: 575396 - RNA, 19 nt, Artificial Sequence
  Description of Artificial Sequence: Synthetic oligonucleotide
uccugugaguaugauauug

SEQ ID NO: 575397 - RNA, 19 nt, Artificial Sequence
  Description of Artificial Sequence: Synthetic oligonucleotide
uuuauuggccggugguaag

SEQ ID NO: 575398 - RNA, 19 nt, Artificial Sequence
  Description of Artificial Sequence: Synthetic oligonucleotide
gacuaugggaacccugcag

SEQ ID NO: 575399 - RNA, 19 nt, Artificial Sequence
  Description of Artificial Sequence: Synthetic oligonucleotide
uacaucauagcuggguccc

SEQ ID NO: 575400 - RNA, 19 nt, Artificial Sequence
  Description of Artificial Sequence: Synthetic oligonucleotide
cuuuccaacaggcucugac

SEQ ID NO: 575401 - RNA, 19 nt, Artificial Sequence
  Description of Artificial Sequence: Synthetic oligonucleotide
cuacaucauagcugggucc

SEQ ID NO: 575402 - RNA, 19 nt, Artificial Sequence
  Description of Artificial Sequence: Synthetic oligonucleotide
agguugggauuacuuaggg

SEQ ID NO: 575403 - RNA, 19 nt, Artificial Sequence
  Description of Artificial Sequence: Synthetic oligonucleotide
ucgagaggaggauauccag

SEQ ID NO: 575404 - RNA, 19 nt, Artificial Sequence
  Description of Artificial Sequence: Synthetic oligonucleotide
uuauuggccggugguaagg

SEQ ID NO: 575405 - RNA, 19 nt, Artificial Sequence
  Description of Artificial Sequence: Synthetic oligonucleotide
ggagguugggauuacuuag

SEQ ID NO: 575406 - RNA, 19 nt, Artificial Sequence
  Description of Artificial Sequence: Synthetic oligonucleotide
uucaaaguuacaagugcuu

SEQ ID NO: 575407 - RNA, 19 nt, Artificial Sequence
  Description of Artificial Sequence: Synthetic oligonucleotide
uuuuaggauccuucauuca

SEQ ID NO: 575408 - RNA, 19 nt, Artificial Sequence
  Description of Artificial Sequence: Synthetic oligonucleotide
auggcgagaacaguggguc

SEQ ID NO: 575409 - RNA, 19 nt, Artificial Sequence
  Description of Artificial Sequence: Synthetic oligonucleotide
ggauccuucauucauauua

SEQ ID NO: 575410 - RNA, 19 nt, Artificial Sequence
  Description of Artificial Sequence: Synthetic oligonucleotide
agcagagaguagucucucc

SEQ ID NO: 575411 - RNA, 19 nt, Artificial Sequence
  Description of Artificial Sequence: Synthetic oligonucleotide
uuuaggcccucccuugagc

SEQ ID NO: 575412 - RNA, 19 nt, Artificial Sequence
  Description of Artificial Sequence: Synthetic oligonucleotide
acugguauccaaggggacg

SEQ ID NO: 575413 - RNA, 19 nt, Artificial Sequence
  Description of Artificial Sequence: Synthetic oligonucleotide
uguugggaccuucuggcgu

SEQ ID NO: 575414 - RNA, 19 nt, Artificial Sequence
  Description of Artificial Sequence: Synthetic oligonucleotide
ugugacguccugccugggg

SEQ ID NO: 575415 - RNA, 19 nt, Artificial Sequence
  Description of Artificial Sequence: Synthetic oligonucleotide
agagauaggggaggguugg

SEQ ID NO: 575416 - RNA, 19 nt, Artificial Sequence
  Description of Artificial Sequence: Synthetic oligonucleotide
aggaggauauccagaaaac

SEQ ID NO: 575417 - RNA, 19 nt, Artificial Sequence
  Description of Artificial Sequence: Synthetic oligonucleotide
agagauuuugggguggaug

SEQ ID NO: 575418 - RNA, 19 nt, Artificial Sequence
  Description of Artificial Sequence: Synthetic oligonucleotide
gagauaaguaggcagggcu

SEQ ID NO: 575419 - RNA, 19 nt, Artificial Sequence
  Description of Artificial Sequence: Synthetic oligonucleotide
agggagaacugucaaugug

SEQ ID NO: 575420 - RNA, 19 nt, Artificial Sequence
  Description of Artificial Sequence: Synthetic oligonucleotide
gagguugggauuacuuagg

SEQ ID NO: 575421 - RNA, 19 nt, Artificial Sequence
  Description of Artificial Sequence: Synthetic oligonucleotide
agucgaaacaacugccccu

SEQ ID NO: 575422 - RNA, 19 nt, Artificial Sequence
  Description of Artificial Sequence: Synthetic oligonucleotide
acggaaugaauccuccaca

SEQ ID NO: 575423 - RNA, 19 nt, Artificial Sequence
  Description of Artificial Sequence: Synthetic oligonucleotide
cuaagugacggguggcccc

SEQ ID NO: 575424 - RNA, 19 nt, Artificial Sequence
  Description of Artificial Sequence: Synthetic oligonucleotide
uacuuagggaggacugcag

SEQ ID NO: 575425 - RNA, 19 nt, Artificial Sequence
  Description of Artificial Sequence: Synthetic oligonucleotide
uuaggcccucccuugagcu

SEQ ID NO: 575426 - RNA, 19 nt, Artificial Sequence
  Description of Artificial Sequence: Synthetic oligonucleotide
ugaggacugcuuagggaag

SEQ ID NO: 575427 - RNA, 19 nt, Artificial Sequence
  Description of Artificial Sequence: Synthetic oligonucleotide
acccuuaucuggacaagcc

SEQ ID NO: 575428 - RNA, 19 nt, Artificial Sequence
  Description of Artificial Sequence: Synthetic oligonucleotide
uuacuuagggaggacugca

SEQ ID NO: 575429 - RNA, 19 nt, Artificial Sequence
  Description of Artificial Sequence: Synthetic oligonucleotide
uauagggagaacugucaau

SEQ ID NO: 575430 - RNA, 19 nt, Artificial Sequence
  Description of Artificial Sequence: Synthetic oligonucleotide
caguaaaguccccucacug

SEQ ID NO: 575431 - RNA, 19 nt, Artificial Sequence
  Description of Artificial Sequence: Synthetic oligonucleotide
cuccuuagagaaaccuggg

SEQ ID NO: 575432 - RNA, 19 nt, Artificial Sequence
  Description of Artificial Sequence: Synthetic oligonucleotide
uaauauccacucuggcucu

SEQ ID NO: 575433 - RNA, 19 nt, Artificial Sequence
  Description of Artificial Sequence: Synthetic oligonucleotide
ugcaguuggcagucgaaac

SEQ ID NO: 575434 - RNA, 19 nt, Artificial Sequence
  Description of Artificial Sequence: Synthetic oligonucleotide
aggaucgaggucgagagga

SEQ ID NO: 575435 - RNA, 19 nt, Artificial Sequence
  Description of Artificial Sequence: Synthetic oligonucleotide
gcaaucgcuggucaguagg

SEQ ID NO: 575436 - RNA, 19 nt, Artificial Sequence
  Description of Artificial Sequence: Synthetic oligonucleotide
ugagugaaguccugcuaca

SEQ ID NO: 575437 - RNA, 19 nt, Artificial Sequence
  Description of Artificial Sequence: Synthetic oligonucleotide
cagucgaaacaacugcccc

SEQ ID NO: 575438 - RNA, 19 nt, Artificial Sequence
  Description of Artificial Sequence: Synthetic oligonucleotide
gaggauauccagaaaaccu

SEQ ID NO: 575439 - RNA, 19 nt, Artificial Sequence
  Description of Artificial Sequence: Synthetic oligonucleotide
ugcuuuaggcccucccuug

SEQ ID NO: 575440 - RNA, 19 nt, Artificial Sequence
  Description of Artificial Sequence: Synthetic oligonucleotide
gugacuaugggaacccugc

SEQ ID NO: 575441 - RNA, 19 nt, Artificial Sequence
  Description of Artificial Sequence: Synthetic oligonucleotide
caaucgcuggucaguaggc

SEQ ID NO: 575442 - RNA, 19 nt, Artificial Sequence
  Description of Artificial Sequence: Synthetic oligonucleotide
ggcacuaagugacgggugg

SEQ ID NO: 575443 - RNA, 19 nt, Artificial Sequence
  Description of Artificial Sequence: Synthetic oligonucleotide
uguacccguuccaccaacc

SEQ ID NO: 575444 - RNA, 19 nt, Artificial Sequence
  Description of Artificial Sequence: Synthetic oligonucleotide
uggacaagcccuaccucca

SEQ ID NO: 575445 - RNA, 19 nt, Artificial Sequence
  Description of Artificial Sequence: Synthetic oligonucleotide
uacccguuccaccaaccca

SEQ ID NO: 575446 - RNA, 19 nt, Artificial Sequence
  Description of Artificial Sequence: Synthetic oligonucleotide
uggcgaaaacuguuugggc

SEQ ID NO: 575447 - RNA, 19 nt, Artificial Sequence
  Description of Artificial Sequence: Synthetic oligonucleotide
ugggauuacuuagggagga

SEQ ID NO: 575448 - RNA, 19 nt, Artificial Sequence
  Description of Artificial Sequence: Synthetic oligonucleotide
ugaagaaggauggcaguaa

SEQ ID NO: 575449 - RNA, 19 nt, Artificial Sequence
  Description of Artificial Sequence: Synthetic oligonucleotide
uggagguugggauuacuua

SEQ ID NO: 575450 - RNA, 19 nt, Artificial Sequence
  Description of Artificial Sequence: Synthetic oligonucleotide
uucgccagccagacucugg

SEQ ID NO: 575451 - RNA, 19 nt, Artificial Sequence
  Description of Artificial Sequence: Synthetic oligonucleotide
  modified_base (6)..(6): a, c, u, g, unknown or other
uguccnguuaagugcaguu

SEQ ID NO: 575452 - RNA, 19 nt, Artificial Sequence
  Description of Artificial Sequence: Synthetic oligonucleotide
uggcaguaaaguccccuca

SEQ ID NO: 575453 - RNA, 19 nt, Artificial Sequence
  Description of Artificial Sequence: Synthetic oligonucleotide
agcagagucagaacuuguc

SEQ ID NO: 575454 - RNA, 19 nt, Artificial Sequence
  Description of Artificial Sequence: Synthetic oligonucleotide
gugaauaagugacuggggu

SEQ ID NO: 575455 - RNA, 19 nt, Artificial Sequence
  Description of Artificial Sequence: Synthetic oligonucleotide
  modified_base (9)..(9): a, c, u, g, unknown or other
acuuguccnguuaagugca

SEQ ID NO: 575456 - RNA, 19 nt, Artificial Sequence
  Description of Artificial Sequence: Synthetic oligonucleotide
gagggcuauauggguaugg

SEQ ID NO: 575457 - RNA, 19 nt, Artificial Sequence
  Description of Artificial Sequence: Synthetic oligonucleotide
auaaugugacguccugccu

SEQ ID NO: 575458 - RNA, 19 nt, Artificial Sequence
  Description of Artificial Sequence: Synthetic oligonucleotide
uggucaguaggcaguuuac

SEQ ID NO: 575459 - RNA, 19 nt, Artificial Sequence
  Description of Artificial Sequence: Synthetic oligonucleotide
ccugugaguaugauauugg

SEQ ID NO: 575460 - RNA, 19 nt, Artificial Sequence
  Description of Artificial Sequence: Synthetic oligonucleotide
ggcgaaaacuguuugggca

SEQ ID NO: 575461 - RNA, 19 nt, Artificial Sequence
  Description of Artificial Sequence: Synthetic oligonucleotide
uugcaaggggaagagagau

SEQ ID NO: 575462 - RNA, 19 nt, Artificial Sequence
  Description of Artificial Sequence: Synthetic oligonucleotide
uuggagggcuauaugggua

SEQ ID NO: 575463 - RNA, 19 nt, Artificial Sequence
  Description of Artificial Sequence: Synthetic oligonucleotide
caccagauguacaguauuc

SEQ ID NO: 575464 - RNA, 19 nt, Artificial Sequence
  Description of Artificial Sequence: Synthetic oligonucleotide
ucggcgacugggcagggac

SEQ ID NO: 575465 - RNA, 19 nt, Artificial Sequence
  Description of Artificial Sequence: Synthetic oligonucleotide
gaagaaggauggcaguaaa

SEQ ID NO: 575466 - RNA, 19 nt, Artificial Sequence
  Description of Artificial Sequence: Synthetic oligonucleotide
agagcagagucagaacuug

SEQ ID NO: 575467 - RNA, 19 nt, Artificial Sequence
  Description of Artificial Sequence: Synthetic oligonucleotide
ugacuaugggaacccugca

SEQ ID NO: 575468 - RNA, 19 nt, Artificial Sequence
  Description of Artificial Sequence: Synthetic oligonucleotide
auuuauuggccggugguaa

SEQ ID NO: 575469 - RNA, 19 nt, Artificial Sequence
  Description of Artificial Sequence: Synthetic oligonucleotide
aggcccucccuugagcucc

SEQ ID NO: 575470 - RNA, 19 nt, Artificial Sequence
  Description of Artificial Sequence: Synthetic oligonucleotide
ugcugacaccucaaagcca

SEQ ID NO: 575471 - RNA, 19 nt, Artificial Sequence
  Description of Artificial Sequence: Synthetic oligonucleotide
gcgaaaacuguuugggcag

SEQ ID NO: 575472 - RNA, 19 nt, Artificial Sequence
  Description of Artificial Sequence: Synthetic oligonucleotide
cuaagaggugagugaaguc

SEQ ID NO: 575473 - RNA, 19 nt, Artificial Sequence
  Description of Artificial Sequence: Synthetic oligonucleotide
ugaucccucacucccuaaa

SEQ ID NO: 575474 - RNA, 19 nt, Artificial Sequence
  Description of Artificial Sequence: Synthetic oligonucleotide
gguucgaucacacuugugu

SEQ ID NO: 575475 - RNA, 19 nt, Artificial Sequence
  Description of Artificial Sequence: Synthetic oligonucleotide
acucagcaugguuaguccu

SEQ ID NO: 575476 - RNA, 19 nt, Artificial Sequence
  Description of Artificial Sequence: Synthetic oligonucleotide
uauccaaggggacgcccug

SEQ ID NO: 575477 - RNA, 19 nt, Artificial Sequence
  Description of Artificial Sequence: Synthetic oligonucleotide
uuguuggcgaaaacuguuu

SEQ ID NO: 575478 - RNA, 19 nt, Artificial Sequence
  Description of Artificial Sequence: Synthetic oligonucleotide
auaggggaggguugguacu

SEQ ID NO: 575479 - RNA, 19 nt, Artificial Sequence
  Description of Artificial Sequence: Synthetic oligonucleotide
guaaaguccccucacugua

SEQ ID NO: 575480 - RNA, 19 nt, Artificial Sequence
  Description of Artificial Sequence: Synthetic oligonucleotide
ggaggauauccagaaaacc

SEQ ID NO: 575481 - RNA, 19 nt, Artificial Sequence
  Description of Artificial Sequence: Synthetic oligonucleotide
gcaaucuccuuagagaaac

SEQ ID NO: 575482 - RNA, 19 nt, Artificial Sequence
  Description of Artificial Sequence: Synthetic oligonucleotide
guuaagugcaguuggcagu

SEQ ID NO: 575483 - RNA, 19 nt, Artificial Sequence
  Description of Artificial Sequence: Synthetic oligonucleotide
cagaccauuuucaaaguua

SEQ ID NO: 575484 - RNA, 19 nt, Artificial Sequence
  Description of Artificial Sequence: Synthetic oligonucleotide
gagagauaggggaggguug

SEQ ID NO: 575485 - RNA, 19 nt, Artificial Sequence
  Description of Artificial Sequence: Synthetic oligonucleotide
cacuacggaaugaauccuc

SEQ ID NO: 575486 - RNA, 19 nt, Artificial Sequence
  Description of Artificial Sequence: Synthetic oligonucleotide
aggacugcuuagggaagcc

SEQ ID NO: 575487 - RNA, 19 nt, Artificial Sequence
  Description of Artificial Sequence: Synthetic oligonucleotide
ccaagauuccccucuacac

SEQ ID NO: 575488 - RNA, 19 nt, Artificial Sequence
  Description of Artificial Sequence: Synthetic oligonucleotide
guccccucacuguagccgg

SEQ ID NO: 575489 - RNA, 19 nt, Artificial Sequence
  Description of Artificial Sequence: Synthetic oligonucleotide
agugccccauaaugugacg

SEQ ID NO: 575490 - RNA, 19 nt, Artificial Sequence
  Description of Artificial Sequence: Synthetic oligonucleotide
uucacaggaucgaggucga

SEQ ID NO: 575491 - RNA, 19 nt, Artificial Sequence
  Description of Artificial Sequence: Synthetic oligonucleotide
uggagggcuauauggguau

SEQ ID NO: 575492 - RNA, 19 nt, Artificial Sequence
  Description of Artificial Sequence: Synthetic oligonucleotide
ggauauccagaaaaccucc

SEQ ID NO: 575493 - RNA, 19 nt, Artificial Sequence
  Description of Artificial Sequence: Synthetic oligonucleotide
aagcccuaccuccaagauu

SEQ ID NO: 575494 - RNA, 19 nt, Artificial Sequence
  Description of Artificial Sequence: Synthetic oligonucleotide
ggucacucagcaugguuag

SEQ ID NO: 575495 - RNA, 19 nt, Artificial Sequence
  Description of Artificial Sequence: Synthetic oligonucleotide
agacuuggagggcuauaug

SEQ ID NO: 575496 - RNA, 19 nt, Artificial Sequence
  Description of Artificial Sequence: Synthetic oligonucleotide
ucuacaccuugcuuuccaa

SEQ ID NO: 575497 - RNA, 19 nt, Artificial Sequence
  Description of Artificial Sequence: Synthetic oligonucleotide
ugggucaaguucugguggu

SEQ ID NO: 575498 - RNA, 19 nt, Artificial Sequence
  Description of Artificial Sequence: Synthetic oligonucleotide
uugcccaugcccacuggac

SEQ ID NO: 575499 - RNA, 19 nt, Artificial Sequence
  Description of Artificial Sequence: Synthetic oligonucleotide
ccgugaauaagugacuggg

SEQ ID NO: 575500 - RNA, 19 nt, Artificial Sequence
  Description of Artificial Sequence: Synthetic oligonucleotide
uauuggccggugguaaggc

SEQ ID NO: 575501 - RNA, 19 nt, Artificial Sequence
  Description of Artificial Sequence: Synthetic oligonucleotide
ucgcuggucaguaggcagu

SEQ ID NO: 575502 - RNA, 19 nt, Artificial Sequence
  Description of Artificial Sequence: Synthetic oligonucleotide
uagucggcgaaguggggac

SEQ ID NO: 575503 - RNA, 19 nt, Artificial Sequence
  Description of Artificial Sequence: Synthetic oligonucleotide
gauuccccaggcugaaguc

SEQ ID NO: 575504 - RNA, 19 nt, Artificial Sequence
  Description of Artificial Sequence: Synthetic oligonucleotide
aaucgcuggucaguaggca

SEQ ID NO: 575505 - RNA, 19 nt, Artificial Sequence
  Description of Artificial Sequence: Synthetic oligonucleotide
cagugccccauaaugugac

SEQ ID NO: 575506 - RNA, 19 nt, Artificial Sequence
  Description of Artificial Sequence: Synthetic oligonucleotide
gguugaugggcucuccaug

SEQ ID NO: 575507 - RNA, 19 nt, Artificial Sequence
  Description of Artificial Sequence: Synthetic oligonucleotide
uuccccucuacaccuugcu

SEQ ID NO: 575508 - RNA, 19 nt, Artificial Sequence
  Description of Artificial Sequence: Synthetic oligonucleotide
agggcuauagggagaacug

SEQ ID NO: 575509 - RNA, 19 nt, Artificial Sequence
  Description of Artificial Sequence: Synthetic oligonucleotide
uguagccggucacuacgga

SEQ ID NO: 575510 - RNA, 19 nt, Artificial Sequence
  Description of Artificial Sequence: Synthetic oligonucleotide
augcccaaaugggucauag

SEQ ID NO: 575511 - RNA, 19 nt, Artificial Sequence
  Description of Artificial Sequence: Synthetic oligonucleotide
cuuagggaagccuggaggu

SEQ ID NO: 575512 - RNA, 19 nt, Artificial Sequence
  Description of Artificial Sequence: Synthetic oligonucleotide
cuuuaggcccucccuugag

SEQ ID NO: 575513 - RNA, 19 nt, Artificial Sequence
  Description of Artificial Sequence: Synthetic oligonucleotide
  modified_base (5)..(5): a, c, u, g, unknown or other
guccnguuaagugcaguug

SEQ ID NO: 575514 - RNA, 19 nt, Artificial Sequence
  Description of Artificial Sequence: Synthetic oligonucleotide
gaguagucucuccuagcca

SEQ ID NO: 575515 - RNA, 19 nt, Artificial Sequence
  Description of Artificial Sequence: Synthetic oligonucleotide
guacccguuccaccaaccc

SEQ ID NO: 575516 - RNA, 19 nt, Artificial Sequence
  Description of Artificial Sequence: Synthetic oligonucleotide
cacuaagugacggguggcc

SEQ ID NO: 575517 - RNA, 19 nt, Artificial Sequence
  Description of Artificial Sequence: Synthetic oligonucleotide
auaagugacugggguuggg

SEQ ID NO: 575518 - RNA, 19 nt, Artificial Sequence
  Description of Artificial Sequence: Synthetic oligonucleotide
ggaaugaauccuccacagc

SEQ ID NO: 575519 - RNA, 19 nt, Artificial Sequence
  Description of Artificial Sequence: Synthetic oligonucleotide
guaggcagggcuauaggga

SEQ ID NO: 575520 - RNA, 19 nt, Artificial Sequence
  Description of Artificial Sequence: Synthetic oligonucleotide
aguauucaggggccaccug

SEQ ID NO: 575521 - RNA, 19 nt, Artificial Sequence
  Description of Artificial Sequence: Synthetic oligonucleotide
  modified_base (7)..(7): a, c, u, g, unknown or other
uuguccnguuaagugcagu

SEQ ID NO: 575522 - RNA, 19 nt, Artificial Sequence
  Description of Artificial Sequence: Synthetic oligonucleotide
gguggcuaagaggugagug

SEQ ID NO: 575523 - RNA, 19 nt, Artificial Sequence
  Description of Artificial Sequence: Synthetic oligonucleotide
aguaugauauuggguccug

SEQ ID NO: 575524 - RNA, 19 nt, Artificial Sequence
  Description of Artificial Sequence: Synthetic oligonucleotide
gguagacugucuccucagg

SEQ ID NO: 575525 - RNA, 19 nt, Artificial Sequence
  Description of Artificial Sequence: Synthetic oligonucleotide
agggcaacugcuguagaga

SEQ ID NO: 575526 - RNA, 19 nt, Artificial Sequence
  Description of Artificial Sequence: Synthetic oligonucleotide
gcuacaucauagcuggguc

SEQ ID NO: 575527 - RNA, 19 nt, Artificial Sequence
  Description of Artificial Sequence: Synthetic oligonucleotide
agguaggaaggcuggguaa

SEQ ID NO: 575528 - RNA, 19 nt, Artificial Sequence
  Description of Artificial Sequence: Synthetic oligonucleotide
guugggaccuucuggcguc

SEQ ID NO: 575529 - RNA, 19 nt, Artificial Sequence
  Description of Artificial Sequence: Synthetic oligonucleotide
uggggacaccauucuucgg

SEQ ID NO: 575530 - RNA, 19 nt, Artificial Sequence
  Description of Artificial Sequence: Synthetic oligonucleotide
cacccuuaucuggacaagc

SEQ ID NO: 575531 - RNA, 19 nt, Artificial Sequence
  Description of Artificial Sequence: Synthetic oligonucleotide
cuauagggagaacugucaa

SEQ ID NO: 575532 - RNA, 19 nt, Artificial Sequence
  Description of Artificial Sequence: Synthetic oligonucleotide
ggggccgugaauaagugac

SEQ ID NO: 575533 - RNA, 19 nt, Artificial Sequence
  Description of Artificial Sequence: Synthetic oligonucleotide
auugcaaggggaagagaga

SEQ ID NO: 575534 - RNA, 19 nt, Artificial Sequence
  Description of Artificial Sequence: Synthetic oligonucleotide
  modified_base (8)..(8): a, c, u, g, unknown or other
cuuguccnguuaagugcag

SEQ ID NO: 575535 - RNA, 19 nt, Artificial Sequence
  Description of Artificial Sequence: Synthetic oligonucleotide
cugaugcccaaauggguca

SEQ ID NO: 575536 - RNA, 19 nt, Artificial Sequence
  Description of Artificial Sequence: Synthetic oligonucleotide
ugccccauaaugugacguc

SEQ ID NO: 575537 - RNA, 19 nt, Artificial Sequence
  Description of Artificial Sequence: Synthetic oligonucleotide
agucauuuauuggccggug

SEQ ID NO: 575538 - RNA, 19 nt, Artificial Sequence
  Description of Artificial Sequence: Synthetic oligonucleotide
uuaucuggacaagcccuac

SEQ ID NO: 575539 - RNA, 19 nt, Artificial Sequence
  Description of Artificial Sequence: Synthetic oligonucleotide
guacugcccacccuuaucu

SEQ ID NO: 575540 - RNA, 19 nt, Artificial Sequence
  Description of Artificial Sequence: Synthetic oligonucleotide
augaggacaggaccaugaa

SEQ ID NO: 575541 - RNA, 19 nt, Artificial Sequence
  Description of Artificial Sequence: Synthetic oligonucleotide
ggucaaauuggagguacug

SEQ ID NO: 575542 - RNA, 19 nt, Artificial Sequence
  Description of Artificial Sequence: Synthetic oligonucleotide
ugcaaggggaagagagaua

SEQ ID NO: 575543 - RNA, 19 nt, Artificial Sequence
  Description of Artificial Sequence: Synthetic oligonucleotide
uggggccgugaauaaguga

SEQ ID NO: 575544 - RNA, 19 nt, Artificial Sequence
  Description of Artificial Sequence: Synthetic oligonucleotide
gccgugaauaagugacugg

SEQ ID NO: 575545 - RNA, 19 nt, Artificial Sequence
  Description of Artificial Sequence: Synthetic oligonucleotide
  modified_base (3)..(3): a, c, u, g, unknown or other
ccnguuaagugcaguuggc

SEQ ID NO: 575546 - RNA, 19 nt, Artificial Sequence
  Description of Artificial Sequence: Synthetic oligonucleotide
gaaguggggacaccauucu

SEQ ID NO: 575547 - RNA, 19 nt, Artificial Sequence
  Description of Artificial Sequence: Synthetic oligonucleotide
aacugaucccucacucccu

SEQ ID NO: 575548 - RNA, 19 nt, Artificial Sequence
  Description of Artificial Sequence: Synthetic oligonucleotide
ggcagucgaaacaacugcc

SEQ ID NO: 575549 - RNA, 19 nt, Artificial Sequence
  Description of Artificial Sequence: Synthetic oligonucleotide
cuuaucuggacaagcccua

SEQ ID NO: 575550 - RNA, 19 nt, Artificial Sequence
  Description of Artificial Sequence: Synthetic oligonucleotide
ggcaguaaaguccccucac

SEQ ID NO: 575551 - RNA, 19 nt, Artificial Sequence
  Description of Artificial Sequence: Synthetic oligonucleotide
gcaguuggcagucgaaaca

SEQ ID NO: 575552 - RNA, 19 nt, Artificial Sequence
  Description of Artificial Sequence: Synthetic oligonucleotide
uggccggugguaaggcugu

SEQ ID NO: 575553 - RNA, 19 nt, Artificial Sequence
  Description of Artificial Sequence: Synthetic oligonucleotide
cauccuucgccagccagac

SEQ ID NO: 575554 - RNA, 19 nt, Artificial Sequence
  Description of Artificial Sequence: Synthetic oligonucleotide
agccggucacuacggaaug

SEQ ID NO: 575555 - RNA, 19 nt, Artificial Sequence
  Description of Artificial Sequence: Synthetic oligonucleotide
cugggagcagagaguaguc

SEQ ID NO: 575556 - RNA, 19 nt, Artificial Sequence
  Description of Artificial Sequence: Synthetic oligonucleotide
ccguguucauggcaggugg

SEQ ID NO: 575557 - RNA, 19 nt, Artificial Sequence
  Description of Artificial Sequence: Synthetic oligonucleotide
auuggccggugguaaggcu

SEQ ID NO: 575558 - RNA, 19 nt, Artificial Sequence
  Description of Artificial Sequence: Synthetic oligonucleotide
cgugaauaagugacugggg

SEQ ID NO: 575559 - RNA, 19 nt, Artificial Sequence
  Description of Artificial Sequence: Synthetic oligonucleotide
gggguugaggacugcuuag

SEQ ID NO: 575560 - RNA, 19 nt, Artificial Sequence
  Description of Artificial Sequence: Synthetic oligonucleotide
gauguugauuccagggacu

SEQ ID NO: 575561 - RNA, 19 nt, Artificial Sequence
  Description of Artificial Sequence: Synthetic oligonucleotide
cacuguagccggucacuac

SEQ ID NO: 575562 - RNA, 19 nt, Artificial Sequence
  Description of Artificial Sequence: Synthetic oligonucleotide
cccuuaucuggacaagccc

SEQ ID NO: 575563 - RNA, 19 nt, Artificial Sequence
  Description of Artificial Sequence: Synthetic oligonucleotide
  modified_base (2)..(2): a, c, u, g, unknown or other
cnguuaagugcaguuggca

SEQ ID NO: 575564 - RNA, 19 nt, Artificial Sequence
  Description of Artificial Sequence: Synthetic oligonucleotide
acugaucccucacucccua

SEQ ID NO: 575565 - RNA, 19 nt, Artificial Sequence
  Description of Artificial Sequence: Synthetic oligonucleotide
gucgagaggaggauaucca

SEQ ID NO: 575566 - RNA, 19 nt, Artificial Sequence
  Description of Artificial Sequence: Synthetic oligonucleotide
uggcgagaacaguggguca

SEQ ID NO: 575567 - RNA, 19 nt, Artificial Sequence
  Description of Artificial Sequence: Synthetic oligonucleotide
caggaucgaggucgagagg

SEQ ID NO: 575568 - RNA, 19 nt, Artificial Sequence
  Description of Artificial Sequence: Synthetic oligonucleotide
ggguagacugucuccucag

SEQ ID NO: 575569 - RNA, 19 nt, Artificial Sequence
  Description of Artificial Sequence: Synthetic oligonucleotide
cuggucaguaggcaguuua

SEQ ID NO: 575570 - RNA, 19 nt, Artificial Sequence
  Description of Artificial Sequence: Synthetic oligonucleotide
cucuacaccuugcuuucca

SEQ ID NO: 575571 - RNA, 19 nt, Artificial Sequence
  Description of Artificial Sequence: Synthetic oligonucleotide
uguugauuccagggacuuc

SEQ ID NO: 575572 - RNA, 19 nt, Artificial Sequence
  Description of Artificial Sequence: Synthetic oligonucleotide
guagccggucacuacggaa

SEQ ID NO: 575573 - RNA, 19 nt, Artificial Sequence
  Description of Artificial Sequence: Synthetic oligonucleotide
gucaaauuggagguacugu

SEQ ID NO: 575574 - RNA, 19 nt, Artificial Sequence
  Description of Artificial Sequence: Synthetic oligonucleotide
ccggugguaaggcuguugc

SEQ ID NO: 575575 - RNA, 19 nt, Artificial Sequence
  Description of Artificial Sequence: Synthetic oligonucleotide
cuccucggcgacugggcag

SEQ ID NO: 575576 - RNA, 19 nt, Artificial Sequence
  Description of Artificial Sequence: Synthetic oligonucleotide
ggagauaaguaggcagggc

SEQ ID NO: 575577 - RNA, 19 nt, Artificial Sequence
  Description of Artificial Sequence: Synthetic oligonucleotide
agguuggugaggucaggua

SEQ ID NO: 575578 - RNA, 19 nt, Artificial Sequence
  Description of Artificial Sequence: Synthetic oligonucleotide
gaguaugauauuggguccu

SEQ ID NO: 575579 - RNA, 19 nt, Artificial Sequence
  Description of Artificial Sequence: Synthetic oligonucleotide
gccauggcgagaacagugg

SEQ ID NO: 575580 - RNA, 19 nt, Artificial Sequence
  Description of Artificial Sequence: Synthetic oligonucleotide
gucgcuguacccguuccac

SEQ ID NO: 575581 - RNA, 19 nt, Artificial Sequence
  Description of Artificial Sequence: Synthetic oligonucleotide
gguugggauuacuuaggga

SEQ ID NO: 575582 - RNA, 19 nt, Artificial Sequence
  Description of Artificial Sequence: Synthetic oligonucleotide
ggucaaguucuggugguug

SEQ ID NO: 575583 - RNA, 19 nt, Artificial Sequence
  Description of Artificial Sequence: Synthetic oligonucleotide
gauauccagaaaaccuccu

SEQ ID NO: 575584 - RNA, 19 nt, Artificial Sequence
  Description of Artificial Sequence: Synthetic oligonucleotide
ccaacaggcucugaccucc

SEQ ID NO: 575585 - RNA, 19 nt, Artificial Sequence
  Description of Artificial Sequence: Synthetic oligonucleotide
gacgcccugagugauggaa

SEQ ID NO: 575586 - RNA, 19 nt, Artificial Sequence
  Description of Artificial Sequence: Synthetic oligonucleotide
auggguggguggguauaac

SEQ ID NO: 575587 - RNA, 19 nt, Artificial Sequence
  Description of Artificial Sequence: Synthetic oligonucleotide
gggacgcccugagugaugg

SEQ ID NO: 575588 - RNA, 19 nt, Artificial Sequence
  Description of Artificial Sequence: Synthetic oligonucleotide
aucauagcuggguccccaa

SEQ ID NO: 575589 - RNA, 19 nt, Artificial Sequence
  Description of Artificial Sequence: Synthetic oligonucleotide
cagcaugguuaguccuucc

SEQ ID NO: 575590 - RNA, 19 nt, Artificial Sequence
  Description of Artificial Sequence: Synthetic oligonucleotide
guacagugccccauaaugu

SEQ ID NO: 575591 - RNA, 19 nt, Artificial Sequence
  Description of Artificial Sequence: Synthetic oligonucleotide
cuccaagauuccccucuac

SEQ ID NO: 575592 - RNA, 19 nt, Artificial Sequence
  Description of Artificial Sequence: Synthetic oligonucleotide
cuccaacccagaugcugac

SEQ ID NO: 575593 - RNA, 19 nt, Artificial Sequence
  Description of Artificial Sequence: Synthetic oligonucleotide
cuguacccguuccaccaac

SEQ ID NO: 575594 - RNA, 19 nt, Artificial Sequence
  Description of Artificial Sequence: Synthetic oligonucleotide
ggugacuaugggaacccug

SEQ ID NO: 575595 - RNA, 19 nt, Artificial Sequence
  Description of Artificial Sequence: Synthetic oligonucleotide
cuccauugcaaggggaaga

SEQ ID NO: 575596 - RNA, 19 nt, Artificial Sequence
  Description of Artificial Sequence: Synthetic oligonucleotide
ggggucgucgcuguacccg

SEQ ID NO: 575597 - RNA, 19 nt, Artificial Sequence
  Description of Artificial Sequence: Synthetic oligonucleotide
uugggaccuucuggcgucg

SEQ ID NO: 575598 - RNA, 19 nt, Artificial Sequence
  Description of Artificial Sequence: Synthetic oligonucleotide
cacaggaucgaggucgaga

SEQ ID NO: 575599 - RNA, 19 nt, Artificial Sequence
  Description of Artificial Sequence: Synthetic oligonucleotide
ccauaaugugacguccugc

SEQ ID NO: 575600 - RNA, 19 nt, Artificial Sequence
  Description of Artificial Sequence: Synthetic oligonucleotide
gguugaggacaugaggauc

SEQ ID NO: 575601 - RNA, 19 nt, Artificial Sequence
  Description of Artificial Sequence: Synthetic oligonucleotide
gggacuucacaggaucgag

SEQ ID NO: 575602 - RNA, 19 nt, Artificial Sequence
  Description of Artificial Sequence: Synthetic oligonucleotide
gagcagagaguagucucuc

SEQ ID NO: 575603 - RNA, 19 nt, Artificial Sequence
  Description of Artificial Sequence: Synthetic oligonucleotide
uggccaagccccuucccuu

SEQ ID NO: 575604 - RNA, 19 nt, Artificial Sequence
  Description of Artificial Sequence: Synthetic oligonucleotide
cuguccaccugagggcugc

SEQ ID NO: 575605 - RNA, 19 nt, Artificial Sequence
  Description of Artificial Sequence: Synthetic oligonucleotide
ggacacugggagguguggg

SEQ ID NO: 575606 - RNA, 19 nt, Artificial Sequence
  Description of Artificial Sequence: Synthetic oligonucleotide
gcaguuuacugguauccaa

SEQ ID NO: 575607 - RNA, 19 nt, Artificial Sequence
  Description of Artificial Sequence: Synthetic oligonucleotide
ccugagagggcaacugcug

SEQ ID NO: 575608 - RNA, 19 nt, Artificial Sequence
  Description of Artificial Sequence: Synthetic oligonucleotide
gguacugcccacccuuauc

SEQ ID NO: 575609 - RNA, 19 nt, Artificial Sequence
  Description of Artificial Sequence: Synthetic oligonucleotide
gagaacagugggucaaguu

SEQ ID NO: 575610 - RNA, 19 nt, Artificial Sequence
  Description of Artificial Sequence: Synthetic oligonucleotide
guaugauauuggguccuga

SEQ ID NO: 575611 - RNA, 19 nt, Artificial Sequence
  Description of Artificial Sequence: Synthetic oligonucleotide
caguuggcagucgaaacaa

SEQ ID NO: 575612 - RNA, 19 nt, Artificial Sequence
  Description of Artificial Sequence: Synthetic oligonucleotide
ccauggcgagaacaguggg

SEQ ID NO: 575613 - RNA, 19 nt, Artificial Sequence
  Description of Artificial Sequence: Synthetic oligonucleotide
agauaggggaggguuggua

SEQ ID NO: 575614 - RNA, 19 nt, Artificial Sequence
  Description of Artificial Sequence: Synthetic oligonucleotide
aggucgagaggaggauauc

SEQ ID NO: 575615 - RNA, 19 nt, Artificial Sequence
  Description of Artificial Sequence: Synthetic oligonucleotide
cgaaguggggacaccauuc

SEQ ID NO: 575616 - RNA, 19 nt, Artificial Sequence
  Description of Artificial Sequence: Synthetic oligonucleotide
cauuuauuggccgguggua

SEQ ID NO: 575617 - RNA, 19 nt, Artificial Sequence
  Description of Artificial Sequence: Synthetic oligonucleotide
cccgcgggcaagcucaggg

SEQ ID NO: 575618 - RNA, 19 nt, Artificial Sequence
  Description of Artificial Sequence: Synthetic oligonucleotide
gcuaagaggugagugaagu

SEQ ID NO: 575619 - RNA, 19 nt, Artificial Sequence
  Description of Artificial Sequence: Synthetic oligonucleotide
ucgaggucgagaggaggau

SEQ ID NO: 575620 - RNA, 19 nt, Artificial Sequence
  Description of Artificial Sequence: Synthetic oligonucleotide
ggcaaucgcuggucaguag

SEQ ID NO: 575621 - RNA, 19 nt, Artificial Sequence
  Description of Artificial Sequence: Synthetic oligonucleotide
ucuggugguugaggacaug

SEQ ID NO: 575622 - RNA, 19 nt, Artificial Sequence
  Description of Artificial Sequence: Synthetic oligonucleotide
guguggggccgugaauaag

SEQ ID NO: 575623 - RNA, 19 nt, Artificial Sequence
  Description of Artificial Sequence: Synthetic oligonucleotide
ccuuaucuggacaagcccu

SEQ ID NO: 575624 - RNA, 19 nt, Artificial Sequence
  Description of Artificial Sequence: Synthetic oligonucleotide
gaaaacuguuugggcagcu

SEQ ID NO: 575625 - RNA, 19 nt, Artificial Sequence
  Description of Artificial Sequence: Synthetic oligonucleotide
guuaguccuuccaggccca

SEQ ID NO: 575626 - RNA, 19 nt, Artificial Sequence
  Description of Artificial Sequence: Synthetic oligonucleotide
gucgucgcuguacccguuc

SEQ ID NO: 575627 - RNA, 19 nt, Artificial Sequence
  Description of Artificial Sequence: Synthetic oligonucleotide
uagagauuuugggguggau

SEQ ID NO: 575628 - RNA, 19 nt, Artificial Sequence
  Description of Artificial Sequence: Synthetic oligonucleotide
gcugcacuaagcaggccug

SEQ ID NO: 575629 - RNA, 19 nt, Artificial Sequence
  Description of Artificial Sequence: Synthetic oligonucleotide
ucggcugggcccgcgggca

SEQ ID NO: 575630 - RNA, 19 nt, Artificial Sequence
  Description of Artificial Sequence: Synthetic oligonucleotide
ucacaggaucgaggucgag

SEQ ID NO: 575631 - RNA, 19 nt, Artificial Sequence
  Description of Artificial Sequence: Synthetic oligonucleotide
guccaagggagugggcaac

SEQ ID NO: 575632 - RNA, 19 nt, Artificial Sequence
  Description of Artificial Sequence: Synthetic oligonucleotide
gccccuucucagcugggag

SEQ ID NO: 575633 - RNA, 19 nt, Artificial Sequence
  Description of Artificial Sequence: Synthetic oligonucleotide
ggcuaagaggugagugaag

SEQ ID NO: 575634 - RNA, 19 nt, Artificial Sequence
  Description of Artificial Sequence: Synthetic oligonucleotide
cccauaaugugacguccug

SEQ ID NO: 575635 - RNA, 19 nt, Artificial Sequence
  Description of Artificial Sequence: Synthetic oligonucleotide
auaaguaggcagggcuaua

SEQ ID NO: 575636 - RNA, 19 nt, Artificial Sequence
  Description of Artificial Sequence: Synthetic oligonucleotide
ugggaccuucuggcgucgg

SEQ ID NO: 575637 - RNA, 19 nt, Artificial Sequence
  Description of Artificial Sequence: Synthetic oligonucleotide
ggauuacuuagggaggacu

SEQ ID NO: 575638 - RNA, 19 nt, Artificial Sequence
  Description of Artificial Sequence: Synthetic oligonucleotide
agaccuccacugaugccca

SEQ ID NO: 575639 - RNA, 19 nt, Artificial Sequence
  Description of Artificial Sequence: Synthetic oligonucleotide
ggcaguuuacugguaucca

SEQ ID NO: 575640 - RNA, 19 nt, Artificial Sequence
  Description of Artificial Sequence: Synthetic oligonucleotide
uccccucacuguagccggu

SEQ ID NO: 575641 - RNA, 19 nt, Artificial Sequence
  Description of Artificial Sequence: Synthetic oligonucleotide
aggggccaccuggccaagc

SEQ ID NO: 575642 - RNA, 19 nt, Artificial Sequence
  Description of Artificial Sequence: Synthetic oligonucleotide
cacuaacugaucccucacu

SEQ ID NO: 575643 - RNA, 19 nt, Artificial Sequence
  Description of Artificial Sequence: Synthetic oligonucleotide
ggaucgaggucgagaggag

SEQ ID NO: 575644 - RNA, 19 nt, Artificial Sequence
  Description of Artificial Sequence: Synthetic oligonucleotide
ggguccugagccauggcga

SEQ ID NO: 575645 - RNA, 19 nt, Artificial Sequence
  Description of Artificial Sequence: Synthetic oligonucleotide
guauccaaggggacgcccu

SEQ ID NO: 575646 - RNA, 19 nt, Artificial Sequence
  Description of Artificial Sequence: Synthetic oligonucleotide
ggcgucaggacaggagaug

SEQ ID NO: 575647 - RNA, 19 nt, Artificial Sequence
  Description of Artificial Sequence: Synthetic oligonucleotide
ugggcccgcgggcaagcuc

SEQ ID NO: 575648 - RNA, 19 nt, Artificial Sequence
  Description of Artificial Sequence: Synthetic oligonucleotide
auccaaggggacgcccuga

SEQ ID NO: 575649 - RNA, 19 nt, Artificial Sequence
  Description of Artificial Sequence: Synthetic oligonucleotide
gcuuuaggcccucccuuga

SEQ ID NO: 575650 - RNA, 19 nt, Artificial Sequence
  Description of Artificial Sequence: Synthetic oligonucleotide
aaccagacuuggagggcua

SEQ ID NO: 575651 - RNA, 19 nt, Artificial Sequence
  Description of Artificial Sequence: Synthetic oligonucleotide
augggucaaauuggaggua

SEQ ID NO: 575652 - RNA, 19 nt, Artificial Sequence
  Description of Artificial Sequence: Synthetic oligonucleotide
guggguacagugccccaua

SEQ ID NO: 575653 - RNA, 19 nt, Artificial Sequence
  Description of Artificial Sequence: Synthetic oligonucleotide
gcacuaagugacggguggc

SEQ ID NO: 575654 - RNA, 19 nt, Artificial Sequence
  Description of Artificial Sequence: Synthetic oligonucleotide
ccagaccuccacugaugcc

SEQ ID NO: 575655 - RNA, 19 nt, Artificial Sequence
  Description of Artificial Sequence: Synthetic oligonucleotide
gcgucaggacaggagauga

SEQ ID NO: 575656 - RNA, 19 nt, Artificial Sequence
  Description of Artificial Sequence: Synthetic oligonucleotide
agucggcgaaguggggaca

SEQ ID NO: 575657 - RNA, 19 nt, Artificial Sequence
  Description of Artificial Sequence: Synthetic oligonucleotide
gucgaaacaacugccccuu

SEQ ID NO: 575658 - RNA, 19 nt, Artificial Sequence
  Description of Artificial Sequence: Synthetic oligonucleotide
ggcgacugggcagggacac

SEQ ID NO: 575659 - RNA, 19 nt, Artificial Sequence
  Description of Artificial Sequence: Synthetic oligonucleotide
ggguauaaccagacuugga

SEQ ID NO: 575660 - RNA, 19 nt, Artificial Sequence
  Description of Artificial Sequence: Synthetic oligonucleotide
gcaguaaaguccccucacu

SEQ ID NO: 575661 - RNA, 19 nt, Artificial Sequence
  Description of Artificial Sequence: Synthetic oligonucleotide
augugacguccugccuggg

SEQ ID NO: 575662 - RNA, 19 nt, Artificial Sequence
  Description of Artificial Sequence: Synthetic oligonucleotide
gagugaaguccugcuacau

SEQ ID NO: 575663 - RNA, 19 nt, Artificial Sequence
  Description of Artificial Sequence: Synthetic oligonucleotide
gugccccauaaugugacgu

SEQ ID NO: 575664 - RNA, 19 nt, Artificial Sequence
  Description of Artificial Sequence: Synthetic oligonucleotide
gguguggggccgugaauaa

SEQ ID NO: 575665 - RNA, 19 nt, Artificial Sequence
  Description of Artificial Sequence: Synthetic oligonucleotide
cagacuuggagggcuauau

SEQ ID NO: 575666 - RNA, 19 nt, Artificial Sequence
  Description of Artificial Sequence: Synthetic oligonucleotide
gugcuuuaggcccucccuu

SEQ ID NO: 575667 - RNA, 19 nt, Artificial Sequence
  Description of Artificial Sequence: Synthetic oligonucleotide
gggcacuaagugacgggug

SEQ ID NO: 575668 - RNA, 19 nt, Artificial Sequence
  Description of Artificial Sequence: Synthetic oligonucleotide
gggauuacuuagggaggac

SEQ ID NO: 575669 - RNA, 19 nt, Artificial Sequence
  Description of Artificial Sequence: Synthetic oligonucleotide
aggggacgcccugagugau

SEQ ID NO: 575670 - RNA, 19 nt, Artificial Sequence
  Description of Artificial Sequence: Synthetic oligonucleotide
gcgagaacagugggucaag

SEQ ID NO: 575671 - RNA, 19 nt, Artificial Sequence
  Description of Artificial Sequence: Synthetic oligonucleotide
ccgcgggcaagcucagggg

SEQ ID NO: 575672 - RNA, 19 nt, Artificial Sequence
  Description of Artificial Sequence: Synthetic oligonucleotide
cccaaaugggucauaguau

SEQ ID NO: 575673 - RNA, 19 nt, Artificial Sequence
  Description of Artificial Sequence: Synthetic oligonucleotide
cgaaaacuguuugggcagc

SEQ ID NO: 575674 - RNA, 19 nt, Artificial Sequence
  Description of Artificial Sequence: Synthetic oligonucleotide
gggaacccugcagcugggg

SEQ ID NO: 575675 - RNA, 19 nt, Artificial Sequence
  Description of Artificial Sequence: Synthetic oligonucleotide
caagcccuaccuccaagau

SEQ ID NO: 575676 - RNA, 19 nt, Artificial Sequence
  Description of Artificial Sequence: Synthetic oligonucleotide
ggucaguaggcaguuuacu

SEQ ID NO: 575677 - RNA, 19 nt, Artificial Sequence
  Description of Artificial Sequence: Synthetic oligonucleotide
gaugcccaaaugggucaua

SEQ ID NO: 575678 - RNA, 19 nt, Artificial Sequence
  Description of Artificial Sequence: Synthetic oligonucleotide
ggagggcuauauggguaug

SEQ ID NO: 575679 - RNA, 19 nt, Artificial Sequence
  Description of Artificial Sequence: Synthetic oligonucleotide
cugaucccucacucccuaa

SEQ ID NO: 575680 - RNA, 19 nt, Artificial Sequence
  Description of Artificial Sequence: Synthetic oligonucleotide
ggggcacuaagugacgggu

SEQ ID NO: 575681 - RNA, 19 nt, Artificial Sequence
  Description of Artificial Sequence: Synthetic oligonucleotide
ggguucgaucacacuugug

SEQ ID NO: 575682 - RNA, 19 nt, Artificial Sequence
  Description of Artificial Sequence: Synthetic oligonucleotide
gagauaggggaggguuggu

SEQ ID NO: 575683 - RNA, 19 nt, Artificial Sequence
  Description of Artificial Sequence: Synthetic oligonucleotide
cagcugggagguugcccca

SEQ ID NO: 575684 - RNA, 19 nt, Artificial Sequence
  Description of Artificial Sequence: Synthetic oligonucleotide
ccacccuuaucuggacaag

SEQ ID NO: 575685 - RNA, 19 nt, Artificial Sequence
  Description of Artificial Sequence: Synthetic oligonucleotide
gcuguacccguuccaccaa

SEQ ID NO: 575686 - RNA, 19 nt, Artificial Sequence
  Description of Artificial Sequence: Synthetic oligonucleotide
cgaucacacuugugugaag

SEQ ID NO: 575687 - RNA, 19 nt, Artificial Sequence
  Description of Artificial Sequence: Synthetic oligonucleotide
ggggcacacggcgguggcg

SEQ ID NO: 575688 - RNA, 19 nt, Artificial Sequence
  Description of Artificial Sequence: Synthetic oligonucleotide
gccggugguaaggcuguug

SEQ ID NO: 575689 - RNA, 19 nt, Artificial Sequence
  Description of Artificial Sequence: Synthetic oligonucleotide
gggcuauagggagaacugu

SEQ ID NO: 575690 - RNA, 19 nt, Artificial Sequence
  Description of Artificial Sequence: Synthetic oligonucleotide
ccccucuacaccuugcuuu

SEQ ID NO: 575691 - RNA, 19 nt, Artificial Sequence
  Description of Artificial Sequence: Synthetic oligonucleotide
ggggcaaucgcuggucagu

SEQ ID NO: 575692 - RNA, 19 nt, Artificial Sequence
  Description of Artificial Sequence: Synthetic oligonucleotide
gcgucggcugggcccgcgg

SEQ ID NO: 575693 - RNA, 19 nt, Artificial Sequence
  Description of Artificial Sequence: Synthetic oligonucleotide
gggucgucgcuguacccgu

SEQ ID NO: 575694 - RNA, 19 nt, Artificial Sequence
  Description of Artificial Sequence: Synthetic oligonucleotide
gggcaaucgcuggucagua

SEQ ID NO: 575695 - RNA, 19 nt, Artificial Sequence
  Description of Artificial Sequence: Synthetic oligonucleotide
ccggucacuacggaaugaa

SEQ ID NO: 575696 - RNA, 19 nt, Artificial Sequence
  Description of Artificial Sequence: Synthetic oligonucleotide
gcgaaguggggacaccauu

SEQ ID NO: 575697 - RNA, 19 nt, Artificial Sequence
  Description of Artificial Sequence: Synthetic oligonucleotide
ggggacgcccugagugaug

SEQ ID NO: 575698 - RNA, 19 nt, Artificial Sequence
  Description of Artificial Sequence: Synthetic oligonucleotide
ccccauaaugugacguccu

SEQ ID NO: 575699 - RNA, 19 nt, Artificial Sequence
  Description of Artificial Sequence: Synthetic oligonucleotide
ccuccucggcgacugggca

SEQ ID NO: 575700 - RNA, 19 nt, Artificial Sequence
  Description of Artificial Sequence: Synthetic oligonucleotide
gccggucacuacggaauga

SEQ ID NO: 575701 - RNA, 19 nt, Artificial Sequence
  Description of Artificial Sequence: Synthetic oligonucleotide
cuccugugaguaugauauu

SEQ ID NO: 575702 - RNA, 19 nt, Artificial Sequence
  Description of Artificial Sequence: Synthetic oligonucleotide
gggucaaauuggagguacu

SEQ ID NO: 575703 - RNA, 19 nt, Artificial Sequence
  Description of Artificial Sequence: Synthetic oligonucleotide
ccaccagauguacaguauu

SEQ ID NO: 575704 - RNA, 19 nt, Artificial Sequence
  Description of Artificial Sequence: Synthetic oligonucleotide
cccucacuguagccgguca

SEQ ID NO: 575705 - RNA, 19 nt, Artificial Sequence
  Description of Artificial Sequence: Synthetic oligonucleotide
ccugagccauggcgagaac

SEQ ID NO: 575706 - RNA, 19 nt, Artificial Sequence
  Description of Artificial Sequence: Synthetic oligonucleotide
cccaccagauguacaguau

SEQ ID NO: 575707 - RNA, 19 nt, Artificial Sequence
  Description of Artificial Sequence: Synthetic oligonucleotide
cugcagggauggguggcua

SEQ ID NO: 575708 - RNA, 19 nt, Artificial Sequence
  Description of Artificial Sequence: Synthetic oligonucleotide
cucggcgacugggcaggga

SEQ ID NO: 575709 - RNA, 19 nt, Artificial Sequence
  Description of Artificial Sequence: Synthetic oligonucleotide
gggccgugaauaagugacu

SEQ ID NO: 575710 - RNA, 19 nt, Artificial Sequence
  Description of Artificial Sequence: Synthetic oligonucleotide
ggcgucggcugggcccgcg

SEQ ID NO: 575711 - RNA, 19 nt, Artificial Sequence
  Description of Artificial Sequence: Synthetic oligonucleotide
gcccuaccuccaagauucc

SEQ ID NO: 575712 - RNA, 19 nt, Artificial Sequence
  Description of Artificial Sequence: Synthetic oligonucleotide
ggccaagccccuucccuuu

SEQ ID NO: 575713 - RNA, 19 nt, Artificial Sequence
  Description of Artificial Sequence: Synthetic oligonucleotide
ggacgcccugagugaugga

SEQ ID NO: 575714 - RNA, 19 nt, Artificial Sequence
  Description of Artificial Sequence: Synthetic oligonucleotide
ggcaacugcuguagagauu

SEQ ID NO: 575715 - RNA, 19 nt, Artificial Sequence
  Description of Artificial Sequence: Synthetic oligonucleotide
ggcgaaguggggacaccau

SEQ ID NO: 575716 - RNA, 19 nt, Artificial Sequence
  Description of Artificial Sequence: Synthetic oligonucleotide
cggcgaaguggggacacca

SEQ ID NO: 575717 - RNA, 19 nt, Artificial Sequence
  Description of Artificial Sequence: Synthetic oligonucleotide
ggcccgcgggcaagcucag

SEQ ID NO: 575718 - RNA, 19 nt, Artificial Sequence
  Description of Artificial Sequence: Synthetic oligonucleotide
gcccgcgggcaagcucagg

SEQ ID NO: 575719 - RNA, 19 nt, Artificial Sequence
  Description of Artificial Sequence: Synthetic oligonucleotide
ggguggcuaagaggugagu

SEQ ID NO: 575720 - RNA, 19 nt, Artificial Sequence
  Description of Artificial Sequence: Synthetic oligonucleotide
ccucggcgacugggcaggg

SEQ ID NO: 575721 - RNA, 19 nt, Artificial Sequence
  Description of Artificial Sequence: Synthetic oligonucleotide
gggucaaguucuggugguu

SEQ ID NO: 575722 - RNA, 19 nt, Artificial Sequence
  Description of Artificial Sequence: Synthetic oligonucleotide
cggcgacugggcagggaca

SEQ ID NO: 575723 - RNA, 19 nt, Artificial Sequence
  Description of Artificial Sequence: Synthetic oligonucleotide
cggucacuacggaaugaau

SEQ ID NO: 575724 - RNA, 19 nt, Artificial Sequence
  Description of Artificial Sequence: Synthetic oligonucleotide
cugggcccgcgggcaagcu

SEQ ID NO: 575725 - RNA, 19 nt, Artificial Sequence
  Description of Artificial Sequence: Synthetic oligonucleotide
cggcgucaggacaggagau

SEQ ID NO: 575726 - RNA, 19 nt, Artificial Sequence
  Description of Artificial Sequence: Synthetic oligonucleotide
ggucgucgcuguacccguu

SEQ ID NO: 575727 - RNA, 19 nt, Artificial Sequence
  Description of Artificial Sequence: Synthetic oligonucleotide
ggccggugguaaggcuguu

SEQ ID NO: 575728 - RNA, 19 nt, Artificial Sequence
  Description of Artificial Sequence: Synthetic oligonucleotide
  modified_base (1)..(1): a, c, u, g, unknown or other
nguuaagugcaguuggcag

SEQ ID NO: 575729 - RNA, 19 nt, Artificial Sequence
  Description of Artificial Sequence: Synthetic oligonucleotide
ugcgacaccagcuucaugg

SEQ ID NO: 575730 - RNA, 19 nt, Artificial Sequence
  Description of Artificial Sequence: Synthetic oligonucleotide
acaucuacaaagcccaggc

SEQ ID NO: 575731 - RNA, 19 nt, Artificial Sequence
  Description of Artificial Sequence: Synthetic oligonucleotide
guugguaagauugagggcg

SEQ ID NO: 575732 - RNA, 19 nt, Artificial Sequence
  Description of Artificial Sequence: Synthetic oligonucleotide
aggauauugagugugggcc

SEQ ID NO: 575733 - RNA, 19 nt, Artificial Sequence
  Description of Artificial Sequence: Synthetic oligonucleotide
gaagaagucgcucacuuug

SEQ ID NO: 575734 - RNA, 19 nt, Artificial Sequence
  Description of Artificial Sequence: Synthetic oligonucleotide
uguagaauagcucgugagc

SEQ ID NO: 575735 - RNA, 19 nt, Artificial Sequence
  Description of Artificial Sequence: Synthetic oligonucleotide
cucguaguaggccagaggg

SEQ ID NO: 575736 - RNA, 19 nt, Artificial Sequence
  Description of Artificial Sequence: Synthetic oligonucleotide
aacaggaggucauacacca

SEQ ID NO: 575737 - RNA, 19 nt, Artificial Sequence
  Description of Artificial Sequence: Synthetic oligonucleotide
aaggcacuaagguaaacug

SEQ ID NO: 575738 - RNA, 19 nt, Artificial Sequence
  Description of Artificial Sequence: Synthetic oligonucleotide
cuugacacggaccagcacg

SEQ ID NO: 575739 - RNA, 19 nt, Artificial Sequence
  Description of Artificial Sequence: Synthetic oligonucleotide
uaaaugaguggcauacugc

SEQ ID NO: 575740 - RNA, 19 nt, Artificial Sequence
  Description of Artificial Sequence: Synthetic oligonucleotide
uucaugacggugacgaugc

SEQ ID NO: 575741 - RNA, 19 nt, Artificial Sequence
  Description of Artificial Sequence: Synthetic oligonucleotide
aacacgaucuuguugguaa

SEQ ID NO: 575742 - RNA, 19 nt, Artificial Sequence
  Description of Artificial Sequence: Synthetic oligonucleotide
cugagcauggaagagaugc

SEQ ID NO: 575743 - RNA, 19 nt, Artificial Sequence
  Description of Artificial Sequence: Synthetic oligonucleotide
uagcucgugagcaaagagg

SEQ ID NO: 575744 - RNA, 19 nt, Artificial Sequence
  Description of Artificial Sequence: Synthetic oligonucleotide
aagaggaaccccacgaugg

SEQ ID NO: 575745 - RNA, 19 nt, Artificial Sequence
  Description of Artificial Sequence: Synthetic oligonucleotide
ucaagggacgucuaagcag

SEQ ID NO: 575746 - RNA, 19 nt, Artificial Sequence
  Description of Artificial Sequence: Synthetic oligonucleotide
uugagugugggcccaaugc

SEQ ID NO: 575747 - RNA, 19 nt, Artificial Sequence
  Description of Artificial Sequence: Synthetic oligonucleotide
acuucuaggaucucgggca

SEQ ID NO: 575748 - RNA, 19 nt, Artificial Sequence
  Description of Artificial Sequence: Synthetic oligonucleotide
caagggacgucuaagcagg

SEQ ID NO: 575749 - RNA, 19 nt, Artificial Sequence
  Description of Artificial Sequence: Synthetic oligonucleotide
uaaacagcgucuccucacg

SEQ ID NO: 575750 - RNA, 19 nt, Artificial Sequence
  Description of Artificial Sequence: Synthetic oligonucleotide
cuacaugugcccacaaacg

SEQ ID NO: 575751 - RNA, 19 nt, Artificial Sequence
  Description of Artificial Sequence: Synthetic oligonucleotide
uagcgcuuggugaacaggg

SEQ ID NO: 575752 - RNA, 19 nt, Artificial Sequence
  Description of Artificial Sequence: Synthetic oligonucleotide
uagagugguucucaggcag

SEQ ID NO: 575753 - RNA, 19 nt, Artificial Sequence
  Description of Artificial Sequence: Synthetic oligonucleotide
aguggcauacugcgaagcc

SEQ ID NO: 575754 - RNA, 19 nt, Artificial Sequence
  Description of Artificial Sequence: Synthetic oligonucleotide
uucgcgugggcucaccucg

SEQ ID NO: 575755 - RNA, 19 nt, Artificial Sequence
  Description of Artificial Sequence: Synthetic oligonucleotide
augaagguaccacgguugc

SEQ ID NO: 575756 - RNA, 19 nt, Artificial Sequence
  Description of Artificial Sequence: Synthetic oligonucleotide
accuaguguccucuaaggc

SEQ ID NO: 575757 - RNA, 19 nt, Artificial Sequence
  Description of Artificial Sequence: Synthetic oligonucleotide
guaaacuaguaugagggcc

SEQ ID NO: 575758 - RNA, 19 nt, Artificial Sequence
  Description of Artificial Sequence: Synthetic oligonucleotide
cuaguguccucuaaggcac

SEQ ID NO: 575759 - RNA, 19 nt, Artificial Sequence
  Description of Artificial Sequence: Synthetic oligonucleotide
ucgucuacuucuaggaucu

SEQ ID NO: 575760 - RNA, 19 nt, Artificial Sequence
  Description of Artificial Sequence: Synthetic oligonucleotide
aguaugagggccaggaggg

SEQ ID NO: 575761 - RNA, 19 nt, Artificial Sequence
  Description of Artificial Sequence: Synthetic oligonucleotide
cauguugugcuccagcuug

SEQ ID NO: 575762 - RNA, 19 nt, Artificial Sequence
  Description of Artificial Sequence: Synthetic oligonucleotide
ucuaucuuguccccgcuac

SEQ ID NO: 575763 - RNA, 19 nt, Artificial Sequence
  Description of Artificial Sequence: Synthetic oligonucleotide
ucggucuuguucuugacac

SEQ ID NO: 575764 - RNA, 19 nt, Artificial Sequence
  Description of Artificial Sequence: Synthetic oligonucleotide
uacuucuaggaucucgggc

SEQ ID NO: 575765 - RNA, 19 nt, Artificial Sequence
  Description of Artificial Sequence: Synthetic oligonucleotide
uguuguggcccacuucgcg

SEQ ID NO: 575766 - RNA, 19 nt, Artificial Sequence
  Description of Artificial Sequence: Synthetic oligonucleotide
gaccuaguguccucuaagg

SEQ ID NO: 575767 - RNA, 19 nt, Artificial Sequence
  Description of Artificial Sequence: Synthetic oligonucleotide
uucaagggacgucuaagca

SEQ ID NO: 575768 - RNA, 19 nt, Artificial Sequence
  Description of Artificial Sequence: Synthetic oligonucleotide
uguccucuaaggcacuaag

SEQ ID NO: 575769 - RNA, 19 nt, Artificial Sequence
  Description of Artificial Sequence: Synthetic oligonucleotide
agcgagaugaguggggagc

SEQ ID NO: 575770 - RNA, 19 nt, Artificial Sequence
  Description of Artificial Sequence: Synthetic oligonucleotide
uccgugggaaccaauccag

SEQ ID NO: 575771 - RNA, 19 nt, Artificial Sequence
  Description of Artificial Sequence: Synthetic oligonucleotide
cacuaagguaaacugaguc

SEQ ID NO: 575772 - RNA, 19 nt, Artificial Sequence
  Description of Artificial Sequence: Synthetic oligonucleotide
cuguagaauagcucgugag

SEQ ID NO: 575773 - RNA, 19 nt, Artificial Sequence
  Description of Artificial Sequence: Synthetic oligonucleotide
cauacugcgaagccggcgc

SEQ ID NO: 575774 - RNA, 19 nt, Artificial Sequence
  Description of Artificial Sequence: Synthetic oligonucleotide
cucuaaggcacuaagguaa

SEQ ID NO: 575775 - RNA, 19 nt, Artificial Sequence
  Description of Artificial Sequence: Synthetic oligonucleotide
ucucguaguaggccagagg

SEQ ID NO: 575776 - RNA, 19 nt, Artificial Sequence
  Description of Artificial Sequence: Synthetic oligonucleotide
auucggaucucauucugcu

SEQ ID NO: 575777 - RNA, 19 nt, Artificial Sequence
  Description of Artificial Sequence: Synthetic oligonucleotide
cucgugagcaaagaggccc

SEQ ID NO: 575778 - RNA, 19 nt, Artificial Sequence
  Description of Artificial Sequence: Synthetic oligonucleotide
cacggaugaagguaccacg

SEQ ID NO: 575779 - RNA, 19 nt, Artificial Sequence
  Description of Artificial Sequence: Synthetic oligonucleotide
acuaguaugagggccagga

SEQ ID NO: 575780 - RNA, 19 nt, Artificial Sequence
  Description of Artificial Sequence: Synthetic oligonucleotide
gacauuaaacagcgucucc

SEQ ID NO: 575781 - RNA, 19 nt, Artificial Sequence
  Description of Artificial Sequence: Synthetic oligonucleotide
accacgguugcccacgaag

SEQ ID NO: 575782 - RNA, 19 nt, Artificial Sequence
  Description of Artificial Sequence: Synthetic oligonucleotide
uggucgaagaagucgcuca

SEQ ID NO: 575783 - RNA, 19 nt, Artificial Sequence
  Description of Artificial Sequence: Synthetic oligonucleotide
ugcucugccguaccccucg

SEQ ID NO: 575784 - RNA, 19 nt, Artificial Sequence
  Description of Artificial Sequence: Synthetic oligonucleotide
ucaugguggagccaaguuu

SEQ ID NO: 575785 - RNA, 19 nt, Artificial Sequence
  Description of Artificial Sequence: Synthetic oligonucleotide
augaguggcauacugcgaa

SEQ ID NO: 575786 - RNA, 19 nt, Artificial Sequence
  Description of Artificial Sequence: Synthetic oligonucleotide
cuugcggaggaugucaccc

SEQ ID NO: 575787 - RNA, 19 nt, Artificial Sequence
  Description of Artificial Sequence: Synthetic oligonucleotide
accuccguugcgcaguccg

SEQ ID NO: 575788 - RNA, 19 nt, Artificial Sequence
  Description of Artificial Sequence: Synthetic oligonucleotide
caggauauugagugugggc

SEQ ID NO: 575789 - RNA, 19 nt, Artificial Sequence
  Description of Artificial Sequence: Synthetic oligonucleotide
ucuacaaagcccaggcguu

SEQ ID NO: 575790 - RNA, 19 nt, Artificial Sequence
  Description of Artificial Sequence: Synthetic oligonucleotide
gaagucgcucacuuugcug

SEQ ID NO: 575791 - RNA, 19 nt, Artificial Sequence
  Description of Artificial Sequence: Synthetic oligonucleotide
ggacgcacccucuacauag

SEQ ID NO: 575792 - RNA, 19 nt, Artificial Sequence
  Description of Artificial Sequence: Synthetic oligonucleotide
acauagggguagaagaaag

SEQ ID NO: 575793 - RNA, 19 nt, Artificial Sequence
  Description of Artificial Sequence: Synthetic oligonucleotide
cucucagcggcugauacag

SEQ ID NO: 575794 - RNA, 19 nt, Artificial Sequence
  Description of Artificial Sequence: Synthetic oligonucleotide
aauagcucgugagcaaaga

SEQ ID NO: 575795 - RNA, 19 nt, Artificial Sequence
  Description of Artificial Sequence: Synthetic oligonucleotide
ugguucucguaguaggcca

SEQ ID NO: 575796 - RNA, 19 nt, Artificial Sequence
  Description of Artificial Sequence: Synthetic oligonucleotide
uaagauugagggcgcccag

SEQ ID NO: 575797 - RNA, 19 nt, Artificial Sequence
  Description of Artificial Sequence: Synthetic oligonucleotide
uugguaagauugagggcgc

SEQ ID NO: 575798 - RNA, 19 nt, Artificial Sequence
  Description of Artificial Sequence: Synthetic oligonucleotide
aguccgugguucaugacgg

SEQ ID NO: 575799 - RNA, 19 nt, Artificial Sequence
  Description of Artificial Sequence: Synthetic oligonucleotide
auggagcguagaaugagcg

SEQ ID NO: 575800 - RNA, 19 nt, Artificial Sequence
  Description of Artificial Sequence: Synthetic oligonucleotide
ucgaagaagucgcucacuu

SEQ ID NO: 575801 - RNA, 19 nt, Artificial Sequence
  Description of Artificial Sequence: Synthetic oligonucleotide
gauggagcguagaaugagc

SEQ ID NO: 575802 - RNA, 19 nt, Artificial Sequence
  Description of Artificial Sequence: Synthetic oligonucleotide
uggccuuauagccacggau

SEQ ID NO: 575803 - RNA, 19 nt, Artificial Sequence
  Description of Artificial Sequence: Synthetic oligonucleotide
aagagccggugcuuggucu

SEQ ID NO: 575804 - RNA, 19 nt, Artificial Sequence
  Description of Artificial Sequence: Synthetic oligonucleotide
uccucgaaggacaccgucu

SEQ ID NO: 575805 - RNA, 19 nt, Artificial Sequence
  Description of Artificial Sequence: Synthetic oligonucleotide
ucggucuugccgcacaauc

SEQ ID NO: 575806 - RNA, 19 nt, Artificial Sequence
  Description of Artificial Sequence: Synthetic oligonucleotide
aaguaguagauggagcgua

SEQ ID NO: 575807 - RNA, 19 nt, Artificial Sequence
  Description of Artificial Sequence: Synthetic oligonucleotide
cuacuucuaggaucucggg

SEQ ID NO: 575808 - RNA, 19 nt, Artificial Sequence
  Description of Artificial Sequence: Synthetic oligonucleotide
cucuagagugguucucagg

SEQ ID NO: 575809 - RNA, 19 nt, Artificial Sequence
  Description of Artificial Sequence: Synthetic oligonucleotide
gauucggaucucauucugc

SEQ ID NO: 575810 - RNA, 19 nt, Artificial Sequence
  Description of Artificial Sequence: Synthetic oligonucleotide
cauccgugggaaccaaucc

SEQ ID NO: 575811 - RNA, 19 nt, Artificial Sequence
  Description of Artificial Sequence: Synthetic oligonucleotide
caucuacaaagcccaggcg

SEQ ID NO: 575812 - RNA, 19 nt, Artificial Sequence
  Description of Artificial Sequence: Synthetic oligonucleotide
ugaguggcauacugcgaag

SEQ ID NO: 575813 - RNA, 19 nt, Artificial Sequence
  Description of Artificial Sequence: Synthetic oligonucleotide
ggagcguagaaugagcgcc

SEQ ID NO: 575814 - RNA, 19 nt, Artificial Sequence
  Description of Artificial Sequence: Synthetic oligonucleotide
acucgucaggauguagccc

SEQ ID NO: 575815 - RNA, 19 nt, Artificial Sequence
  Description of Artificial Sequence: Synthetic oligonucleotide
uggagcguagaaugagcgc

SEQ ID NO: 575816 - RNA, 19 nt, Artificial Sequence
  Description of Artificial Sequence: Synthetic oligonucleotide
auccgugggaaccaaucca

SEQ ID NO: 575817 - RNA, 19 nt, Artificial Sequence
  Description of Artificial Sequence: Synthetic oligonucleotide
gguaaacuaguaugagggc

SEQ ID NO: 575818 - RNA, 19 nt, Artificial Sequence
  Description of Artificial Sequence: Synthetic oligonucleotide
uagaauagcucgugagcaa

SEQ ID NO: 575819 - RNA, 19 nt, Artificial Sequence
  Description of Artificial Sequence: Synthetic oligonucleotide
cucuacauagggguagaag

SEQ ID NO: 575820 - RNA, 19 nt, Artificial Sequence
  Description of Artificial Sequence: Synthetic oligonucleotide
uacauagggguagaagaaa

SEQ ID NO: 575821 - RNA, 19 nt, Artificial Sequence
  Description of Artificial Sequence: Synthetic oligonucleotide
cagucuaucuuguccccgc

SEQ ID NO: 575822 - RNA, 19 nt, Artificial Sequence
  Description of Artificial Sequence: Synthetic oligonucleotide
uccguugcgcaguccgugg

SEQ ID NO: 575823 - RNA, 19 nt, Artificial Sequence
  Description of Artificial Sequence: Synthetic oligonucleotide
cacaucuacaaagcccagg

SEQ ID NO: 575824 - RNA, 19 nt, Artificial Sequence
  Description of Artificial Sequence: Synthetic oligonucleotide
uugagggcgcccaggauau

SEQ ID NO: 575825 - RNA, 19 nt, Artificial Sequence
  Description of Artificial Sequence: Synthetic oligonucleotide
agagccggugcuuggucuc

SEQ ID NO: 575826 - RNA, 19 nt, Artificial Sequence
  Description of Artificial Sequence: Synthetic oligonucleotide
gacgaugcacaugaguaga

SEQ ID NO: 575827 - RNA, 19 nt, Artificial Sequence
  Description of Artificial Sequence: Synthetic oligonucleotide
uaugagggccaggagggca

SEQ ID NO: 575828 - RNA, 19 nt, Artificial Sequence
  Description of Artificial Sequence: Synthetic oligonucleotide
aaugaguggcauacugcga

SEQ ID NO: 575829 - RNA, 19 nt, Artificial Sequence
  Description of Artificial Sequence: Synthetic oligonucleotide
acaaacguggcaguuccgu

SEQ ID NO: 575830 - RNA, 19 nt, Artificial Sequence
  Description of Artificial Sequence: Synthetic oligonucleotide
agucggucuuguucuugac

SEQ ID NO: 575831 - RNA, 19 nt, Artificial Sequence
  Description of Artificial Sequence: Synthetic oligonucleotide
ucgugagcaaagaggccca

SEQ ID NO: 575832 - RNA, 19 nt, Artificial Sequence
  Description of Artificial Sequence: Synthetic oligonucleotide
ucuugccgcacaaucucaa

SEQ ID NO: 575833 - RNA, 19 nt, Artificial Sequence
  Description of Artificial Sequence: Synthetic oligonucleotide
uuccguguggcaugcccag

SEQ ID NO: 575834 - RNA, 19 nt, Artificial Sequence
  Description of Artificial Sequence: Synthetic oligonucleotide
acagucuaucuuguccccg

SEQ ID NO: 575835 - RNA, 19 nt, Artificial Sequence
  Description of Artificial Sequence: Synthetic oligonucleotide
aagccggcgcugccauucc

SEQ ID NO: 575836 - RNA, 19 nt, Artificial Sequence
  Description of Artificial Sequence: Synthetic oligonucleotide
ugcccaaguaguagaugga

SEQ ID NO: 575837 - RNA, 19 nt, Artificial Sequence
  Description of Artificial Sequence: Synthetic oligonucleotide
agaagucgcucacuuugcu

SEQ ID NO: 575838 - RNA, 19 nt, Artificial Sequence
  Description of Artificial Sequence: Synthetic oligonucleotide
uuguggcccacuucgcgug

SEQ ID NO: 575839 - RNA, 19 nt, Artificial Sequence
  Description of Artificial Sequence: Synthetic oligonucleotide
acacgaucuuguugguaag

SEQ ID NO: 575840 - RNA, 19 nt, Artificial Sequence
  Description of Artificial Sequence: Synthetic oligonucleotide
ucguaguaggccagagggu

SEQ ID NO: 575841 - RNA, 19 nt, Artificial Sequence
  Description of Artificial Sequence: Synthetic oligonucleotide
acaugaguagagugucaca

SEQ ID NO: 575842 - RNA, 19 nt, Artificial Sequence
  Description of Artificial Sequence: Synthetic oligonucleotide
agguaguuccacauguugu

SEQ ID NO: 575843 - RNA, 19 nt, Artificial Sequence
  Description of Artificial Sequence: Synthetic oligonucleotide
cuuguuguugaggcugagc

SEQ ID NO: 575844 - RNA, 19 nt, Artificial Sequence
  Description of Artificial Sequence: Synthetic oligonucleotide
caaacguggcaguuccgug

SEQ ID NO: 575845 - RNA, 19 nt, Artificial Sequence
  Description of Artificial Sequence: Synthetic oligonucleotide
acgucuaagcaggacuguc

SEQ ID NO: 575846 - RNA, 19 nt, Artificial Sequence
  Description of Artificial Sequence: Synthetic oligonucleotide
aggccagagggucuuccuc

SEQ ID NO: 575847 - RNA, 19 nt, Artificial Sequence
  Description of Artificial Sequence: Synthetic oligonucleotide
aacuaguaugagggccagg

SEQ ID NO: 575848 - RNA, 19 nt, Artificial Sequence
  Description of Artificial Sequence: Synthetic oligonucleotide
uuguugugccuggaaagcu

SEQ ID NO: 575849 - RNA, 19 nt, Artificial Sequence
  Description of Artificial Sequence: Synthetic oligonucleotide
uguggcccacuucgcgugg

SEQ ID NO: 575850 - RNA, 19 nt, Artificial Sequence
  Description of Artificial Sequence: Synthetic oligonucleotide
ggaccuaguguccucuaag

SEQ ID NO: 575851 - RNA, 19 nt, Artificial Sequence
  Description of Artificial Sequence: Synthetic oligonucleotide
agaauagcucgugagcaaa

SEQ ID NO: 575852 - RNA, 19 nt, Artificial Sequence
  Description of Artificial Sequence: Synthetic oligonucleotide
acgcacccucuacauaggg

SEQ ID NO: 575853 - RNA, 19 nt, Artificial Sequence
  Description of Artificial Sequence: Synthetic oligonucleotide
uccgaggcacagucuaucu

SEQ ID NO: 575854 - RNA, 19 nt, Artificial Sequence
  Description of Artificial Sequence: Synthetic oligonucleotide
aggcguugccuccguuucc

SEQ ID NO: 575855 - RNA, 19 nt, Artificial Sequence
  Description of Artificial Sequence: Synthetic oligonucleotide
guaagauugagggcgccca

SEQ ID NO: 575856 - RNA, 19 nt, Artificial Sequence
  Description of Artificial Sequence: Synthetic oligonucleotide
gaguggcauacugcgaagc

SEQ ID NO: 575857 - RNA, 19 nt, Artificial Sequence
  Description of Artificial Sequence: Synthetic oligonucleotide
guagcgcuuggugaacagg

SEQ ID NO: 575858 - RNA, 19 nt, Artificial Sequence
  Description of Artificial Sequence: Synthetic oligonucleotide
cugccguaccccucgcugg

SEQ ID NO: 575859 - RNA, 19 nt, Artificial Sequence
  Description of Artificial Sequence: Synthetic oligonucleotide
ucacgguagaugaggucaa

SEQ ID NO: 575860 - RNA, 19 nt, Artificial Sequence
  Description of Artificial Sequence: Synthetic oligonucleotide
gaucaccccaaagaugaga

SEQ ID NO: 575861 - RNA, 19 nt, Artificial Sequence
  Description of Artificial Sequence: Synthetic oligonucleotide
ugcggaggaugucacccac

SEQ ID NO: 575862 - RNA, 19 nt, Artificial Sequence
  Description of Artificial Sequence: Synthetic oligonucleotide
cucggaguucucccgcucc

SEQ ID NO: 575863 - RNA, 19 nt, Artificial Sequence
  Description of Artificial Sequence: Synthetic oligonucleotide
cuucuaggaucucgggcac

SEQ ID NO: 575864 - RNA, 19 nt, Artificial Sequence
  Description of Artificial Sequence: Synthetic oligonucleotide
cucagggcccguguagucg

SEQ ID NO: 575865 - RNA, 19 nt, Artificial Sequence
  Description of Artificial Sequence: Synthetic oligonucleotide
ugaggaccuaguguccucu

SEQ ID NO: 575866 - RNA, 19 nt, Artificial Sequence
  Description of Artificial Sequence: Synthetic oligonucleotide
ccuaguguccucuaaggca

SEQ ID NO: 575867 - RNA, 19 nt, Artificial Sequence
  Description of Artificial Sequence: Synthetic oligonucleotide
gaaggaggacuggucgaag

SEQ ID NO: 575868 - RNA, 19 nt, Artificial Sequence
  Description of Artificial Sequence: Synthetic oligonucleotide
agcgcuuggugaacagggc

SEQ ID NO: 575869 - RNA, 19 nt, Artificial Sequence
  Description of Artificial Sequence: Synthetic oligonucleotide
gaacagggccgcgauggag

SEQ ID NO: 575870 - RNA, 19 nt, Artificial Sequence
  Description of Artificial Sequence: Synthetic oligonucleotide
ggugaggugcgacaccagc

SEQ ID NO: 575871 - RNA, 19 nt, Artificial Sequence
  Description of Artificial Sequence: Synthetic oligonucleotide
guugugcuccagcuugaug

SEQ ID NO: 575872 - RNA, 19 nt, Artificial Sequence
  Description of Artificial Sequence: Synthetic oligonucleotide
guagagugucacaggcccg

SEQ ID NO: 575873 - RNA, 19 nt, Artificial Sequence
  Description of Artificial Sequence: Synthetic oligonucleotide
gugguucucguaguaggcc

SEQ ID NO: 575874 - RNA, 19 nt, Artificial Sequence
  Description of Artificial Sequence: Synthetic oligonucleotide
gacauggcacgcauccgug

SEQ ID NO: 575875 - RNA, 19 nt, Artificial Sequence
  Description of Artificial Sequence: Synthetic oligonucleotide
acccucuacauagggguag

SEQ ID NO: 575876 - RNA, 19 nt, Artificial Sequence
  Description of Artificial Sequence: Synthetic oligonucleotide
gguaccacgguugcccacg

SEQ ID NO: 575877 - RNA, 19 nt, Artificial Sequence
  Description of Artificial Sequence: Synthetic oligonucleotide
ugccguaccccucgcuggc

SEQ ID NO: 575878 - RNA, 19 nt, Artificial Sequence
  Description of Artificial Sequence: Synthetic oligonucleotide
ggccuuauagccacggaug

SEQ ID NO: 575879 - RNA, 19 nt, Artificial Sequence
  Description of Artificial Sequence: Synthetic oligonucleotide
gacacucgucaggauguag

SEQ ID NO: 575880 - RNA, 19 nt, Artificial Sequence
  Description of Artificial Sequence: Synthetic oligonucleotide
cacaaacguggcaguuccg

SEQ ID NO: 575881 - RNA, 19 nt, Artificial Sequence
  Description of Artificial Sequence: Synthetic oligonucleotide
gagggcgcccaggauauug

SEQ ID NO: 575882 - RNA, 19 nt, Artificial Sequence
  Description of Artificial Sequence: Synthetic oligonucleotide
ucgcucacuuugcugcccu

SEQ ID NO: 575883 - RNA, 19 nt, Artificial Sequence
  Description of Artificial Sequence: Synthetic oligonucleotide
ggaacagagacucaucuuu

SEQ ID NO: 575884 - RNA, 19 nt, Artificial Sequence
  Description of Artificial Sequence: Synthetic oligonucleotide
aggcacuaagguaaacuga

SEQ ID NO: 575885 - RNA, 19 nt, Artificial Sequence
  Description of Artificial Sequence: Synthetic oligonucleotide
aaacacgaucuuguuggua

SEQ ID NO: 575886 - RNA, 19 nt, Artificial Sequence
  Description of Artificial Sequence: Synthetic oligonucleotide
ugcuccaugcuucggucuu

SEQ ID NO: 575887 - RNA, 19 nt, Artificial Sequence
  Description of Artificial Sequence: Synthetic oligonucleotide
agguaccacgguugcccac

SEQ ID NO: 575888 - RNA, 19 nt, Artificial Sequence
  Description of Artificial Sequence: Synthetic oligonucleotide
uggugaacagggccgcgau

SEQ ID NO: 575889 - RNA, 19 nt, Artificial Sequence
  Description of Artificial Sequence: Synthetic oligonucleotide
agucuaucuuguccccgcu

SEQ ID NO: 575890 - RNA, 19 nt, Artificial Sequence
  Description of Artificial Sequence: Synthetic oligonucleotide
ugggcggugaggugcgaca

SEQ ID NO: 575891 - RNA, 19 nt, Artificial Sequence
  Description of Artificial Sequence: Synthetic oligonucleotide
gucggucuuguucuugaca

SEQ ID NO: 575892 - RNA, 19 nt, Artificial Sequence
  Description of Artificial Sequence: Synthetic oligonucleotide
agcguagaaugagcgccac

SEQ ID NO: 575893 - RNA, 19 nt, Artificial Sequence
  Description of Artificial Sequence: Synthetic oligonucleotide
gagaugaguggggagccca

SEQ ID NO: 575894 - RNA, 19 nt, Artificial Sequence
  Description of Artificial Sequence: Synthetic oligonucleotide
uugcggaggaugucaccca

SEQ ID NO: 575895 - RNA, 19 nt, Artificial Sequence
  Description of Artificial Sequence: Synthetic oligonucleotide
caugcggcgggagaaccag

SEQ ID NO: 575896 - RNA, 19 nt, Artificial Sequence
  Description of Artificial Sequence: Synthetic oligonucleotide
gacgcacccucuacauagg

SEQ ID NO: 575897 - RNA, 19 nt, Artificial Sequence
  Description of Artificial Sequence: Synthetic oligonucleotide
cuaagguaaacugagucuu

SEQ ID NO: 575898 - RNA, 19 nt, Artificial Sequence
  Description of Artificial Sequence: Synthetic oligonucleotide
ugcuucucgcugcgcaggu

SEQ ID NO: 575899 - RNA, 19 nt, Artificial Sequence
  Description of Artificial Sequence: Synthetic oligonucleotide
guagcccacaugguacaag

SEQ ID NO: 575900 - RNA, 19 nt, Artificial Sequence
  Description of Artificial Sequence: Synthetic oligonucleotide
agaaggaggacuggucgaa

SEQ ID NO: 575901 - RNA, 19 nt, Artificial Sequence
  Description of Artificial Sequence: Synthetic oligonucleotide
gcacugggaacacaaucug

SEQ ID NO: 575902 - RNA, 19 nt, Artificial Sequence
  Description of Artificial Sequence: Synthetic oligonucleotide
cagaaggaggacuggucga

SEQ ID NO: 575903 - RNA, 19 nt, Artificial Sequence
  Description of Artificial Sequence: Synthetic oligonucleotide
gaggugcgacaccagcuuc

SEQ ID NO: 575904 - RNA, 19 nt, Artificial Sequence
  Description of Artificial Sequence: Synthetic oligonucleotide
gguaagauugagggcgccc

SEQ ID NO: 575905 - RNA, 19 nt, Artificial Sequence
  Description of Artificial Sequence: Synthetic oligonucleotide
ccgggcagggaacagagac

SEQ ID NO: 575906 - RNA, 19 nt, Artificial Sequence
  Description of Artificial Sequence: Synthetic oligonucleotide
acuucgcgugggcucaccu

SEQ ID NO: 575907 - RNA, 19 nt, Artificial Sequence
  Description of Artificial Sequence: Synthetic oligonucleotide
ucgcgugggcucaccucgg

SEQ ID NO: 575908 - RNA, 19 nt, Artificial Sequence
  Description of Artificial Sequence: Synthetic oligonucleotide
ccacgguugcccacgaagc

SEQ ID NO: 575909 - RNA, 19 nt, Artificial Sequence
  Description of Artificial Sequence: Synthetic oligonucleotide
ugguaagauugagggcgcc

SEQ ID NO: 575910 - RNA, 19 nt, Artificial Sequence
  Description of Artificial Sequence: Synthetic oligonucleotide
aggaccuaguguccucuaa

SEQ ID NO: 575911 - RNA, 19 nt, Artificial Sequence
  Description of Artificial Sequence: Synthetic oligonucleotide
auacugcgaagccggcgcu

SEQ ID NO: 575912 - RNA, 19 nt, Artificial Sequence
  Description of Artificial Sequence: Synthetic oligonucleotide
guagucggucuuguucuug

SEQ ID NO: 575913 - RNA, 19 nt, Artificial Sequence
  Description of Artificial Sequence: Synthetic oligonucleotide
ggugaagagccggugcuug

SEQ ID NO: 575914 - RNA, 19 nt, Artificial Sequence
  Description of Artificial Sequence: Synthetic oligonucleotide
cuccucgaaggacaccguc

SEQ ID NO: 575915 - RNA, 19 nt, Artificial Sequence
  Description of Artificial Sequence: Synthetic oligonucleotide
uggcaguuccguguggcau

SEQ ID NO: 575916 - RNA, 19 nt, Artificial Sequence
  Description of Artificial Sequence: Synthetic oligonucleotide
gucaugcggcgggagaacc

SEQ ID NO: 575917 - RNA, 19 nt, Artificial Sequence
  Description of Artificial Sequence: Synthetic oligonucleotide
gcgcuuggugaacagggcc

SEQ ID NO: 575918 - RNA, 19 nt, Artificial Sequence
  Description of Artificial Sequence: Synthetic oligonucleotide
cuucgcgugggcucaccuc

SEQ ID NO: 575919 - RNA, 19 nt, Artificial Sequence
  Description of Artificial Sequence: Synthetic oligonucleotide
cguguagucggucuuguuc

SEQ ID NO: 575920 - RNA, 19 nt, Artificial Sequence
  Description of Artificial Sequence: Synthetic oligonucleotide
auggcacgcauccguggga

SEQ ID NO: 575921 - RNA, 19 nt, Artificial Sequence
  Description of Artificial Sequence: Synthetic oligonucleotide
ggucgaagaagucgcucac

SEQ ID NO: 575922 - RNA, 19 nt, Artificial Sequence
  Description of Artificial Sequence: Synthetic oligonucleotide
cagcgagaugaguggggag

SEQ ID NO: 575923 - RNA, 19 nt, Artificial Sequence
  Description of Artificial Sequence: Synthetic oligonucleotide
ucgucaggauguagcccac

SEQ ID NO: 575924 - RNA, 19 nt, Artificial Sequence
  Description of Artificial Sequence: Synthetic oligonucleotide
uggacgcacccucuacaua

SEQ ID NO: 575925 - RNA, 19 nt, Artificial Sequence
  Description of Artificial Sequence: Synthetic oligonucleotide
cuuccacggcuccucucag

SEQ ID NO: 575926 - RNA, 19 nt, Artificial Sequence
  Description of Artificial Sequence: Synthetic oligonucleotide
augugcccacaaacguggc

SEQ ID NO: 575927 - RNA, 19 nt, Artificial Sequence
  Description of Artificial Sequence: Synthetic oligonucleotide
guuguggcccacuucgcgu

SEQ ID NO: 575928 - RNA, 19 nt, Artificial Sequence
  Description of Artificial Sequence: Synthetic oligonucleotide
agcacgccuguggacgcac

SEQ ID NO: 575929 - RNA, 19 nt, Artificial Sequence
  Description of Artificial Sequence: Synthetic oligonucleotide
ggcguugccuccguuuccg

SEQ ID NO: 575930 - RNA, 19 nt, Artificial Sequence
  Description of Artificial Sequence: Synthetic oligonucleotide
uccguguggcaugcccagg

SEQ ID NO: 575931 - RNA, 19 nt, Artificial Sequence
  Description of Artificial Sequence: Synthetic oligonucleotide
gcucuagagugguucucag

SEQ ID NO: 575932 - RNA, 19 nt, Artificial Sequence
  Description of Artificial Sequence: Synthetic oligonucleotide
gagcguagaaugagcgcca

SEQ ID NO: 575933 - RNA, 19 nt, Artificial Sequence
  Description of Artificial Sequence: Synthetic oligonucleotide
ggaaagcugaagggcuagg

SEQ ID NO: 575934 - RNA, 19 nt, Artificial Sequence
  Description of Artificial Sequence: Synthetic oligonucleotide
guugcgcaguccgugguuc

SEQ ID NO: 575935 - RNA, 19 nt, Artificial Sequence
  Description of Artificial Sequence: Synthetic oligonucleotide
cuggucgaagaagucgcuc

SEQ ID NO: 575936 - RNA, 19 nt, Artificial Sequence
  Description of Artificial Sequence: Synthetic oligonucleotide
cugaggaccuaguguccuc

SEQ ID NO: 575937 - RNA, 19 nt, Artificial Sequence
  Description of Artificial Sequence: Synthetic oligonucleotide
uggaugcguuucacaggcu

SEQ ID NO: 575938 - RNA, 19 nt, Artificial Sequence
  Description of Artificial Sequence: Synthetic oligonucleotide
ccaggauauugaguguggg

SEQ ID NO: 575939 - RNA, 19 nt, Artificial Sequence
  Description of Artificial Sequence: Synthetic oligonucleotide
acguggcaguuccgugugg

SEQ ID NO: 575940 - RNA, 19 nt, Artificial Sequence
  Description of Artificial Sequence: Synthetic oligonucleotide
gcggcugauacaguucugc

SEQ ID NO: 575941 - RNA, 19 nt, Artificial Sequence
  Description of Artificial Sequence: Synthetic oligonucleotide
ccauuccaucucauugugc

SEQ ID NO: 575942 - RNA, 19 nt, Artificial Sequence
  Description of Artificial Sequence: Synthetic oligonucleotide
gaaccccacgauggagaag

SEQ ID NO: 575943 - RNA, 19 nt, Artificial Sequence
  Description of Artificial Sequence: Synthetic oligonucleotide
cuaucuuguccccgcuaca

SEQ ID NO: 575944 - RNA, 19 nt, Artificial Sequence
  Description of Artificial Sequence: Synthetic oligonucleotide
aggaucucgggcacagaga

SEQ ID NO: 575945 - RNA, 19 nt, Artificial Sequence
  Description of Artificial Sequence: Synthetic oligonucleotide
uggcacgcauccgugggaa

SEQ ID NO: 575946 - RNA, 19 nt, Artificial Sequence
  Description of Artificial Sequence: Synthetic oligonucleotide
acggaccagcacgaugaag

SEQ ID NO: 575947 - RNA, 19 nt, Artificial Sequence
  Description of Artificial Sequence: Synthetic oligonucleotide
agggcuugcggaggauguc

SEQ ID NO: 575948 - RNA, 19 nt, Artificial Sequence
  Description of Artificial Sequence: Synthetic oligonucleotide
cccaaugcccaaguaguag

SEQ ID NO: 575949 - RNA, 19 nt, Artificial Sequence
  Description of Artificial Sequence: Synthetic oligonucleotide
uggcccacuucgcgugggc

SEQ ID NO: 575950 - RNA, 19 nt, Artificial Sequence
  Description of Artificial Sequence: Synthetic oligonucleotide
uaccccucgcuggccagag

SEQ ID NO: 575951 - RNA, 19 nt, Artificial Sequence
  Description of Artificial Sequence: Synthetic oligonucleotide
aggugcgacaccagcuuca

SEQ ID NO: 575952 - RNA, 19 nt, Artificial Sequence
  Description of Artificial Sequence: Synthetic oligonucleotide
cuccguugcgcaguccgug

SEQ ID NO: 575953 - RNA, 19 nt, Artificial Sequence
  Description of Artificial Sequence: Synthetic oligonucleotide
gcccaggauauugagugug

SEQ ID NO: 575954 - RNA, 19 nt, Artificial Sequence
  Description of Artificial Sequence: Synthetic oligonucleotide
acagggccgcgauggagaa

SEQ ID NO: 575955 - RNA, 19 nt, Artificial Sequence
  Description of Artificial Sequence: Synthetic oligonucleotide
cuccgaggcacagucuauc

SEQ ID NO: 575956 - RNA, 19 nt, Artificial Sequence
  Description of Artificial Sequence: Synthetic oligonucleotide
gcguuucacaggcuucagc

SEQ ID NO: 575957 - RNA, 19 nt, Artificial Sequence
  Description of Artificial Sequence: Synthetic oligonucleotide
cccacagcgucaugcggcg

SEQ ID NO: 575958 - RNA, 19 nt, Artificial Sequence
  Description of Artificial Sequence: Synthetic oligonucleotide
cguaguaggccagaggguc

SEQ ID NO: 575959 - RNA, 19 nt, Artificial Sequence
  Description of Artificial Sequence: Synthetic oligonucleotide
gcacgcauccgugggaacc

SEQ ID NO: 575960 - RNA, 19 nt, Artificial Sequence
  Description of Artificial Sequence: Synthetic oligonucleotide
cguagaaugagcgccacga

SEQ ID NO: 575961 - RNA, 19 nt, Artificial Sequence
  Description of Artificial Sequence: Synthetic oligonucleotide
guaugagggccaggagggc

SEQ ID NO: 575962 - RNA, 19 nt, Artificial Sequence
  Description of Artificial Sequence: Synthetic oligonucleotide
gcguagaaugagcgccacg

SEQ ID NO: 575963 - RNA, 19 nt, Artificial Sequence
  Description of Artificial Sequence: Synthetic oligonucleotide
cacgaucuuguugguaaga

SEQ ID NO: 575964 - RNA, 19 nt, Artificial Sequence
  Description of Artificial Sequence: Synthetic oligonucleotide
acuggucgaagaagucgcu

SEQ ID NO: 575965 - RNA, 19 nt, Artificial Sequence
  Description of Artificial Sequence: Synthetic oligonucleotide
accccucgcuggccagagc

SEQ ID NO: 575966 - RNA, 19 nt, Artificial Sequence
  Description of Artificial Sequence: Synthetic oligonucleotide
aagggacgucuaagcagga

SEQ ID NO: 575967 - RNA, 19 nt, Artificial Sequence
  Description of Artificial Sequence: Synthetic oligonucleotide
gccgcgauggagaagcaga

SEQ ID NO: 575968 - RNA, 19 nt, Artificial Sequence
  Description of Artificial Sequence: Synthetic oligonucleotide
gcgggagaaccaguaaaug

SEQ ID NO: 575969 - RNA, 19 nt, Artificial Sequence
  Description of Artificial Sequence: Synthetic oligonucleotide
gucuugccgcacaaucuca

SEQ ID NO: 575970 - RNA, 19 nt, Artificial Sequence
  Description of Artificial Sequence: Synthetic oligonucleotide
ccgugggaaccaauccagg

SEQ ID NO: 575971 - RNA, 19 nt, Artificial Sequence
  Description of Artificial Sequence: Synthetic oligonucleotide
auguugugcuccagcuuga

SEQ ID NO: 575972 - RNA, 19 nt, Artificial Sequence
  Description of Artificial Sequence: Synthetic oligonucleotide
caccaccuccguugcgcag

SEQ ID NO: 575973 - RNA, 19 nt, Artificial Sequence
  Description of Artificial Sequence: Synthetic oligonucleotide
gcgagaugaguggggagcc

SEQ ID NO: 575974 - RNA, 19 nt, Artificial Sequence
  Description of Artificial Sequence: Synthetic oligonucleotide
agaugagauucagcacgau

SEQ ID NO: 575975 - RNA, 19 nt, Artificial Sequence
  Description of Artificial Sequence: Synthetic oligonucleotide
gcauccgugggaaccaauc

SEQ ID NO: 575976 - RNA, 19 nt, Artificial Sequence
  Description of Artificial Sequence: Synthetic oligonucleotide
gucuaucuuguccccgcua

SEQ ID NO: 575977 - RNA, 19 nt, Artificial Sequence
  Description of Artificial Sequence: Synthetic oligonucleotide
guagaaugagcgccacgau

SEQ ID NO: 575978 - RNA, 19 nt, Artificial Sequence
  Description of Artificial Sequence: Synthetic oligonucleotide
cagcggcugauacaguucu

SEQ ID NO: 575979 - RNA, 19 nt, Artificial Sequence
  Description of Artificial Sequence: Synthetic oligonucleotide
gaggcacagucuaucuugu

SEQ ID NO: 575980 - RNA, 19 nt, Artificial Sequence
  Description of Artificial Sequence: Synthetic oligonucleotide
accacccgggcagggaaca

SEQ ID NO: 575981 - RNA, 19 nt, Artificial Sequence
  Description of Artificial Sequence: Synthetic oligonucleotide
ggaugaagguaccacgguu

SEQ ID NO: 575982 - RNA, 19 nt, Artificial Sequence
  Description of Artificial Sequence: Synthetic oligonucleotide
caaguaguagauggagcgu

SEQ ID NO: 575983 - RNA, 19 nt, Artificial Sequence
  Description of Artificial Sequence: Synthetic oligonucleotide
gugaggugcgacaccagcu

SEQ ID NO: 575984 - RNA, 19 nt, Artificial Sequence
  Description of Artificial Sequence: Synthetic oligonucleotide
caccacccgggcagggaac

SEQ ID NO: 575985 - RNA, 19 nt, Artificial Sequence
  Description of Artificial Sequence: Synthetic oligonucleotide
ccucuaaggcacuaaggua

SEQ ID NO: 575986 - RNA, 19 nt, Artificial Sequence
  Description of Artificial Sequence: Synthetic oligonucleotide
gcccacgaagcucaccaca

SEQ ID NO: 575987 - RNA, 19 nt, Artificial Sequence
  Description of Artificial Sequence: Synthetic oligonucleotide
caggcgcggaggacuugag

SEQ ID NO: 575988 - RNA, 19 nt, Artificial Sequence
  Description of Artificial Sequence: Synthetic oligonucleotide
aguguccucuaaggcacua

SEQ ID NO: 575989 - RNA, 19 nt, Artificial Sequence
  Description of Artificial Sequence: Synthetic oligonucleotide
uaccacgguugcccacgaa

SEQ ID NO: 575990 - RNA, 19 nt, Artificial Sequence
  Description of Artificial Sequence: Synthetic oligonucleotide
ccacggaugaagguaccac

SEQ ID NO: 575991 - RNA, 19 nt, Artificial Sequence
  Description of Artificial Sequence: Synthetic oligonucleotide
agggcccguguagucgguc

SEQ ID NO: 575992 - RNA, 19 nt, Artificial Sequence
  Description of Artificial Sequence: Synthetic oligonucleotide
gauugagggcgcccaggau

SEQ ID NO: 575993 - RNA, 19 nt, Artificial Sequence
  Description of Artificial Sequence: Synthetic oligonucleotide
cacgcauccgugggaacca

SEQ ID NO: 575994 - RNA, 19 nt, Artificial Sequence
  Description of Artificial Sequence: Synthetic oligonucleotide
agggcgcccaggauauuga

SEQ ID NO: 575995 - RNA, 19 nt, Artificial Sequence
  Description of Artificial Sequence: Synthetic oligonucleotide
guggacgcacccucuacau

SEQ ID NO: 575996 - RNA, 19 nt, Artificial Sequence
  Description of Artificial Sequence: Synthetic oligonucleotide
gaggaccuaguguccucua

SEQ ID NO: 575997 - RNA, 19 nt, Artificial Sequence
  Description of Artificial Sequence: Synthetic oligonucleotide
cuggcucuagagugguucu

SEQ ID NO: 575998 - RNA, 19 nt, Artificial Sequence
  Description of Artificial Sequence: Synthetic oligonucleotide
ucgcugcgcaggucagcga

SEQ ID NO: 575999 - RNA, 19 nt, Artificial Sequence
  Description of Artificial Sequence: Synthetic oligonucleotide
gcucaccucggaguucucc

SEQ ID NO: 576000 - RNA, 19 nt, Artificial Sequence
  Description of Artificial Sequence: Synthetic oligonucleotide
ugcgcaguccgugguucau

SEQ ID NO: 576001 - RNA, 19 nt, Artificial Sequence
  Description of Artificial Sequence: Synthetic oligonucleotide
gugcgacaccagcuucaug

SEQ ID NO: 576002 - RNA, 19 nt, Artificial Sequence
  Description of Artificial Sequence: Synthetic oligonucleotide
gacgucuaagcaggacugu

SEQ ID NO: 576003 - RNA, 19 nt, Artificial Sequence
  Description of Artificial Sequence: Synthetic oligonucleotide
ggaugcguuucacaggcuu

SEQ ID NO: 576004 - RNA, 19 nt, Artificial Sequence
  Description of Artificial Sequence: Synthetic oligonucleotide
guaguaggccagagggucu

SEQ ID NO: 576005 - RNA, 19 nt, Artificial Sequence
  Description of Artificial Sequence: Synthetic oligonucleotide
cuucggucuugccgcacaa

SEQ ID NO: 576006 - RNA, 19 nt, Artificial Sequence
  Description of Artificial Sequence: Synthetic oligonucleotide
guaccacgguugcccacga

SEQ ID NO: 576007 - RNA, 19 nt, Artificial Sequence
  Description of Artificial Sequence: Synthetic oligonucleotide
cugcucugccguaccccuc

SEQ ID NO: 576008 - RNA, 19 nt, Artificial Sequence
  Description of Artificial Sequence: Synthetic oligonucleotide
agcggcugauacaguucug

SEQ ID NO: 576009 - RNA, 19 nt, Artificial Sequence
  Description of Artificial Sequence: Synthetic oligonucleotide
cacgguugcccacgaagcu

SEQ ID NO: 576010 - RNA, 19 nt, Artificial Sequence
  Description of Artificial Sequence: Synthetic oligonucleotide
gggcuugcggaggauguca

SEQ ID NO: 576011 - RNA, 19 nt, Artificial Sequence
  Description of Artificial Sequence: Synthetic oligonucleotide
agccggcgcugccauucca

SEQ ID NO: 576012 - RNA, 19 nt, Artificial Sequence
  Description of Artificial Sequence: Synthetic oligonucleotide
cacccucuacauaggggua

SEQ ID NO: 576013 - RNA, 19 nt, Artificial Sequence
  Description of Artificial Sequence: Synthetic oligonucleotide
ccucacgguagaugagguc

SEQ ID NO: 576014 - RNA, 19 nt, Artificial Sequence
  Description of Artificial Sequence: Synthetic oligonucleotide
gcacaucuacaaagcccag

SEQ ID NO: 576015 - RNA, 19 nt, Artificial Sequence
  Description of Artificial Sequence: Synthetic oligonucleotide
guguccucuaaggcacuaa

SEQ ID NO: 576016 - RNA, 19 nt, Artificial Sequence
  Description of Artificial Sequence: Synthetic oligonucleotide
gugggcucaccucggaguu

SEQ ID NO: 576017 - RNA, 19 nt, Artificial Sequence
  Description of Artificial Sequence: Synthetic oligonucleotide
cacuucgcgugggcucacc

SEQ ID NO: 576018 - RNA, 19 nt, Artificial Sequence
  Description of Artificial Sequence: Synthetic oligonucleotide
ggccgcgauggagaagcag

SEQ ID NO: 576019 - RNA, 19 nt, Artificial Sequence
  Description of Artificial Sequence: Synthetic oligonucleotide
cuguccggcuccucgucua

SEQ ID NO: 576020 - RNA, 19 nt, Artificial Sequence
  Description of Artificial Sequence: Synthetic oligonucleotide
ggcgggagaaccaguaaau

SEQ ID NO: 576021 - RNA, 19 nt, Artificial Sequence
  Description of Artificial Sequence: Synthetic oligonucleotide
ggcacgcauccgugggaac

SEQ ID NO: 576022 - RNA, 19 nt, Artificial Sequence
  Description of Artificial Sequence: Synthetic oligonucleotide
gcaggcgcggaggacuuga

SEQ ID NO: 576023 - RNA, 19 nt, Artificial Sequence
  Description of Artificial Sequence: Synthetic oligonucleotide
guaccccucgcuggccaga

SEQ ID NO: 576024 - RNA, 19 nt, Artificial Sequence
  Description of Artificial Sequence: Synthetic oligonucleotide
cagggccgcgauggagaag

SEQ ID NO: 576025 - RNA, 19 nt, Artificial Sequence
  Description of Artificial Sequence: Synthetic oligonucleotide
ccucgcuggccagagccug

SEQ ID NO: 576026 - RNA, 19 nt, Artificial Sequence
  Description of Artificial Sequence: Synthetic oligonucleotide
cacgguagaugaggucaaa

SEQ ID NO: 576027 - RNA, 19 nt, Artificial Sequence
  Description of Artificial Sequence: Synthetic oligonucleotide
caguuccguguggcaugcc

SEQ ID NO: 576028 - RNA, 19 nt, Artificial Sequence
  Description of Artificial Sequence: Synthetic oligonucleotide
gcgucaugcggcgggagaa

SEQ ID NO: 576029 - RNA, 19 nt, Artificial Sequence
  Description of Artificial Sequence: Synthetic oligonucleotide
cacggaccagcacgaugaa

SEQ ID NO: 576030 - RNA, 19 nt, Artificial Sequence
  Description of Artificial Sequence: Synthetic oligonucleotide
gcguugccuccguuuccgc

SEQ ID NO: 576031 - RNA, 19 nt, Artificial Sequence
  Description of Artificial Sequence: Synthetic oligonucleotide
augcggcgggagaaccagu

SEQ ID NO: 576032 - RNA, 19 nt, Artificial Sequence
  Description of Artificial Sequence: Synthetic oligonucleotide
ggacaccgucuuguuguca

SEQ ID NO: 576033 - RNA, 19 nt, Artificial Sequence
  Description of Artificial Sequence: Synthetic oligonucleotide
gggcucaccucggaguucu

SEQ ID NO: 576034 - RNA, 19 nt, Artificial Sequence
  Description of Artificial Sequence: Synthetic oligonucleotide
cgucuaagcaggacugucu

SEQ ID NO: 576035 - RNA, 19 nt, Artificial Sequence
  Description of Artificial Sequence: Synthetic oligonucleotide
cgugggaaccaauccaggu

SEQ ID NO: 576036 - RNA, 19 nt, Artificial Sequence
  Description of Artificial Sequence: Synthetic oligonucleotide
gcucauugagcugggcggu

SEQ ID NO: 576037 - RNA, 19 nt, Artificial Sequence
  Description of Artificial Sequence: Synthetic oligonucleotide
gcacuaagguaaacugagu

SEQ ID NO: 576038 - RNA, 19 nt, Artificial Sequence
  Description of Artificial Sequence: Synthetic oligonucleotide
caccuccguugcgcagucc

SEQ ID NO: 576039 - RNA, 19 nt, Artificial Sequence
  Description of Artificial Sequence: Synthetic oligonucleotide
gcucugccguaccccucgc

SEQ ID NO: 576040 - RNA, 19 nt, Artificial Sequence
  Description of Artificial Sequence: Synthetic oligonucleotide
gcccagcacgccuguggac

SEQ ID NO: 576041 - RNA, 19 nt, Artificial Sequence
  Description of Artificial Sequence: Synthetic oligonucleotide
gaccuccgaggcacagucu

SEQ ID NO: 576042 - RNA, 19 nt, Artificial Sequence
  Description of Artificial Sequence: Synthetic oligonucleotide
gggcccguguagucggucu

SEQ ID NO: 576043 - RNA, 19 nt, Artificial Sequence
  Description of Artificial Sequence: Synthetic oligonucleotide
gcggaggaugucacccaca

SEQ ID NO: 576044 - RNA, 19 nt, Artificial Sequence
  Description of Artificial Sequence: Synthetic oligonucleotide
cggcgggagaaccaguaaa

SEQ ID NO: 576045 - RNA, 19 nt, Artificial Sequence
  Description of Artificial Sequence: Synthetic oligonucleotide
ggcgcccaggauauugagu

SEQ ID NO: 576046 - RNA, 19 nt, Artificial Sequence
  Description of Artificial Sequence: Synthetic oligonucleotide
ugagggcgcccaggauauu

SEQ ID NO: 576047 - RNA, 19 nt, Artificial Sequence
  Description of Artificial Sequence: Synthetic oligonucleotide
cucugccguaccccucgcu

SEQ ID NO: 576048 - RNA, 19 nt, Artificial Sequence
  Description of Artificial Sequence: Synthetic oligonucleotide
cccucuacauagggguaga

SEQ ID NO: 576049 - RNA, 19 nt, Artificial Sequence
  Description of Artificial Sequence: Synthetic oligonucleotide
ccaccuccguugcgcaguc

SEQ ID NO: 576050 - RNA, 19 nt, Artificial Sequence
  Description of Artificial Sequence: Synthetic oligonucleotide
gccguaccccucgcuggcc

SEQ ID NO: 576051 - RNA, 19 nt, Artificial Sequence
  Description of Artificial Sequence: Synthetic oligonucleotide
ccucgaaggacaccgucuu

SEQ ID NO: 576052 - RNA, 19 nt, Artificial Sequence
  Description of Artificial Sequence: Synthetic oligonucleotide
cccgcuacaugugcccaca

SEQ ID NO: 576053 - RNA, 19 nt, Artificial Sequence
  Description of Artificial Sequence: Synthetic oligonucleotide
cggucuugccgcacaaucu

SEQ ID NO: 576054 - RNA, 19 nt, Artificial Sequence
  Description of Artificial Sequence: Synthetic oligonucleotide
cggugaggugcgacaccag

SEQ ID NO: 576055 - RNA, 19 nt, Artificial Sequence
  Description of Artificial Sequence: Synthetic oligonucleotide
ggugcgacaccagcuucau

SEQ ID NO: 576056 - RNA, 19 nt, Artificial Sequence
  Description of Artificial Sequence: Synthetic oligonucleotide
cgucaugcggcgggagaac

SEQ ID NO: 576057 - RNA, 19 nt, Artificial Sequence
  Description of Artificial Sequence: Synthetic oligonucleotide
ccguaccccucgcuggcca

SEQ ID NO: 576058 - RNA, 19 nt, Artificial Sequence
  Description of Artificial Sequence: Synthetic oligonucleotide
ggacacucgucaggaugua

SEQ ID NO: 576059 - RNA, 19 nt, Artificial Sequence
  Description of Artificial Sequence: Synthetic oligonucleotide
cgaucuuguugguaagauu

SEQ ID NO: 576060 - RNA, 19 nt, Artificial Sequence
  Description of Artificial Sequence: Synthetic oligonucleotide
ccaggcguugccuccguuu

SEQ ID NO: 576061 - RNA, 19 nt, Artificial Sequence
  Description of Artificial Sequence: Synthetic oligonucleotide
ccgcgauggagaagcagau

SEQ ID NO: 576062 - RNA, 19 nt, Artificial Sequence
  Description of Artificial Sequence: Synthetic oligonucleotide
cggaugaagguaccacggu

SEQ ID NO: 576063 - RNA, 19 nt, Artificial Sequence
  Description of Artificial Sequence: Synthetic oligonucleotide
ccucuacauagggguagaa

SEQ ID NO: 576064 - RNA, 19 nt, Artificial Sequence
  Description of Artificial Sequence: Synthetic oligonucleotide
ggcccacuucgcgugggcu

SEQ ID NO: 576065 - RNA, 19 nt, Artificial Sequence
  Description of Artificial Sequence: Synthetic oligonucleotide
ggcccguguagucggucuu

SEQ ID NO: 576066 - RNA, 19 nt, Artificial Sequence
  Description of Artificial Sequence: Synthetic oligonucleotide
cccgggcagggaacagaga

SEQ ID NO: 576067 - RNA, 19 nt, Artificial Sequence
  Description of Artificial Sequence: Synthetic oligonucleotide
ccuccguugcgcaguccgu

SEQ ID NO: 576068 - RNA, 19 nt, Artificial Sequence
  Description of Artificial Sequence: Synthetic oligonucleotide
ccgaggcacagucuaucuu

SEQ ID NO: 576069 - RNA, 19 nt, Artificial Sequence
  Description of Artificial Sequence: Synthetic oligonucleotide
ccuccgaggcacagucuau

SEQ ID NO: 576070 - RNA, 19 nt, Artificial Sequence
  Description of Artificial Sequence: Synthetic oligonucleotide
ccgcuacaugugcccacaa

SEQ ID NO: 576071 - RNA, 19 nt, Artificial Sequence
  Description of Artificial Sequence: Synthetic oligonucleotide
ggcucaccucggaguucuc

SEQ ID NO: 576072 - RNA, 19 nt, Artificial Sequence
  Description of Artificial Sequence: Synthetic oligonucleotide
cgucuacuucuaggaucuc

SEQ ID NO: 576073 - RNA, 19 nt, Artificial Sequence
  Description of Artificial Sequence: Synthetic oligonucleotide
cgcccaggauauugagugu

SEQ ID NO: 576074 - RNA, 19 nt, Artificial Sequence
  Description of Artificial Sequence: Synthetic oligonucleotide
cgcgugggcucaccucgga

SEQ ID NO: 576075 - RNA, 19 nt, Artificial Sequence
  Description of Artificial Sequence: Synthetic oligonucleotide
gcccaggcguugccuccgu

SEQ ID NO: 576076 - RNA, 19 nt, Artificial Sequence
  Description of Artificial Sequence: Synthetic oligonucleotide
ggcggacacuguagcgcuu

SEQ ID NO: 576077 - RNA, 19 nt, Artificial Sequence
  Description of Artificial Sequence: Synthetic oligonucleotide
cgcggaggacuugagcauu

SEQ ID NO: 576078 - RNA, 19 nt, Artificial Sequence
  Description of Artificial Sequence: Synthetic oligonucleotide
cccaggcguugccuccguu

SEQ ID NO: 576079 - RNA, 19 nt, Artificial Sequence
  Description of Artificial Sequence: Synthetic oligonucleotide
cgaagccggcgcugccauu

SEQ ID NO: 576080 - RNA, 19 nt, Artificial Sequence
  Description of Artificial Sequence: Synthetic oligonucleotide
aauuaaauagcacucggcc

SEQ ID NO: 576081 - RNA, 19 nt, Artificial Sequence
  Description of Artificial Sequence: Synthetic oligonucleotide
acaacuaugggccacaucc

SEQ ID NO: 576082 - RNA, 19 nt, Artificial Sequence
  Description of Artificial Sequence: Synthetic oligonucleotide
uguacagauucauagaggg

SEQ ID NO: 576083 - RNA, 19 nt, Artificial Sequence
  Description of Artificial Sequence: Synthetic oligonucleotide
ugugaaaugaguuggggcg

SEQ ID NO: 576084 - RNA, 19 nt, Artificial Sequence
  Description of Artificial Sequence: Synthetic oligonucleotide
cuuacuagcaacuuauucc

SEQ ID NO: 576085 - RNA, 19 nt, Artificial Sequence
  Description of Artificial Sequence: Synthetic oligonucleotide
uaaauuaaauagcacucgg

SEQ ID NO: 576086 - RNA, 19 nt, Artificial Sequence
  Description of Artificial Sequence: Synthetic oligonucleotide
agugauaaggaaugguggc

SEQ ID NO: 576087 - RNA, 19 nt, Artificial Sequence
  Description of Artificial Sequence: Synthetic oligonucleotide
aagaacgagagggaaagcc

SEQ ID NO: 576088 - RNA, 19 nt, Artificial Sequence
  Description of Artificial Sequence: Synthetic oligonucleotide
aaauuaaauagcacucggc

SEQ ID NO: 576089 - RNA, 19 nt, Artificial Sequence
  Description of Artificial Sequence: Synthetic oligonucleotide
aaauggaagcucuuugguc

SEQ ID NO: 576090 - RNA, 19 nt, Artificial Sequence
  Description of Artificial Sequence: Synthetic oligonucleotide
uuugcuuacagcccuaucu

SEQ ID NO: 576091 - RNA, 19 nt, Artificial Sequence
  Description of Artificial Sequence: Synthetic oligonucleotide
aaugcaaccugcucaauca

SEQ ID NO: 576092 - RNA, 19 nt, Artificial Sequence
  Description of Artificial Sequence: Synthetic oligonucleotide
uuacuagcaacuuauuccc

SEQ ID NO: 576093 - RNA, 19 nt, Artificial Sequence
  Description of Artificial Sequence: Synthetic oligonucleotide
uguacaacgucauggaucu

SEQ ID NO: 576094 - RNA, 19 nt, Artificial Sequence
  Description of Artificial Sequence: Synthetic oligonucleotide
auaaauuaaauagcacucg

SEQ ID NO: 576095 - RNA, 19 nt, Artificial Sequence
  Description of Artificial Sequence: Synthetic oligonucleotide
aacaagauauuuggaaccg

SEQ ID NO: 576096 - RNA, 19 nt, Artificial Sequence
  Description of Artificial Sequence: Synthetic oligonucleotide
auagcacucggccaauucc

SEQ ID NO: 576097 - RNA, 19 nt, Artificial Sequence
  Description of Artificial Sequence: Synthetic oligonucleotide
uguagucacgaacagugag

SEQ ID NO: 576098 - RNA, 19 nt, Artificial Sequence
  Description of Artificial Sequence: Synthetic oligonucleotide
uauuuggaaccgcagacca

SEQ ID NO: 576099 - RNA, 19 nt, Artificial Sequence
  Description of Artificial Sequence: Synthetic oligonucleotide
cuaugucacaacuaugggc

SEQ ID NO: 576100 - RNA, 19 nt, Artificial Sequence
  Description of Artificial Sequence: Synthetic oligonucleotide
ucccauuuuaaucugguuc

SEQ ID NO: 576101 - RNA, 19 nt, Artificial Sequence
  Description of Artificial Sequence: Synthetic oligonucleotide
auauuauggcuugagagag

SEQ ID NO: 576102 - RNA, 19 nt, Artificial Sequence
  Description of Artificial Sequence: Synthetic oligonucleotide
ucgaacaagauauuuggaa

SEQ ID NO: 576103 - RNA, 19 nt, Artificial Sequence
  Description of Artificial Sequence: Synthetic oligonucleotide
ugugcucaugaaauggaag

SEQ ID NO: 576104 - RNA, 19 nt, Artificial Sequence
  Description of Artificial Sequence: Synthetic oligonucleotide
agcccaagaauuccggccc

SEQ ID NO: 576105 - RNA, 19 nt, Artificial Sequence
  Description of Artificial Sequence: Synthetic oligonucleotide
ucuaccacauagauaggug

SEQ ID NO: 576106 - RNA, 19 nt, Artificial Sequence
  Description of Artificial Sequence: Synthetic oligonucleotide
uacagguccccucaauagg

SEQ ID NO: 576107 - RNA, 19 nt, Artificial Sequence
  Description of Artificial Sequence: Synthetic oligonucleotide
auauuuggaaccgcagacc

SEQ ID NO: 576108 - RNA, 19 nt, Artificial Sequence
  Description of Artificial Sequence: Synthetic oligonucleotide
aggaaggauucuuuucccc

SEQ ID NO: 576109 - RNA, 19 nt, Artificial Sequence
  Description of Artificial Sequence: Synthetic oligonucleotide
aauucccgggcccugagca

SEQ ID NO: 576110 - RNA, 19 nt, Artificial Sequence
  Description of Artificial Sequence: Synthetic oligonucleotide
ugucuuaaucaaaaccaga

SEQ ID NO: 576111 - RNA, 19 nt, Artificial Sequence
  Description of Artificial Sequence: Synthetic oligonucleotide
auuuuaaucugguuccgga

SEQ ID NO: 576112 - RNA, 19 nt, Artificial Sequence
  Description of Artificial Sequence: Synthetic oligonucleotide
guaaacuccacacucuuca

SEQ ID NO: 576113 - RNA, 19 nt, Artificial Sequence
  Description of Artificial Sequence: Synthetic oligonucleotide
uuuggaaccgcagaccacc

SEQ ID NO: 576114 - RNA, 19 nt, Artificial Sequence
  Description of Artificial Sequence: Synthetic oligonucleotide
auagggugccaacucaggg

SEQ ID NO: 576115 - RNA, 19 nt, Artificial Sequence
  Description of Artificial Sequence: Synthetic oligonucleotide
cauauuauggcuugagaga

SEQ ID NO: 576116 - RNA, 19 nt, Artificial Sequence
  Description of Artificial Sequence: Synthetic oligonucleotide
aaaguaaauccaggcuuac

SEQ ID NO: 576117 - RNA, 19 nt, Artificial Sequence
  Description of Artificial Sequence: Synthetic oligonucleotide
agauauuuggaaccgcaga

SEQ ID NO: 576118 - RNA, 19 nt, Artificial Sequence
  Description of Artificial Sequence: Synthetic oligonucleotide
aagcccaauagccauugca

SEQ ID NO: 576119 - RNA, 19 nt, Artificial Sequence
  Description of Artificial Sequence: Synthetic oligonucleotide
aaggcgauagagguuauca

SEQ ID NO: 576120 - RNA, 19 nt, Artificial Sequence
  Description of Artificial Sequence: Synthetic oligonucleotide
uugcauggacaauacgccg

SEQ ID NO: 576121 - RNA, 19 nt, Artificial Sequence
  Description of Artificial Sequence: Synthetic oligonucleotide
ggccauaucuaccacauag

SEQ ID NO: 576122 - RNA, 19 nt, Artificial Sequence
  Description of Artificial Sequence: Synthetic oligonucleotide
ucuuaaucaaaaccagaua

SEQ ID NO: 576123 - RNA, 19 nt, Artificial Sequence
  Description of Artificial Sequence: Synthetic oligonucleotide
uugcuuacagcccuaucug

SEQ ID NO: 576124 - RNA, 19 nt, Artificial Sequence
  Description of Artificial Sequence: Synthetic oligonucleotide
ccauauuauggcuugagag

SEQ ID NO: 576125 - RNA, 19 nt, Artificial Sequence
  Description of Artificial Sequence: Synthetic oligonucleotide
auggacaauacgccgugcg

SEQ ID NO: 576126 - RNA, 19 nt, Artificial Sequence
  Description of Artificial Sequence: Synthetic oligonucleotide
ggauguaggguacaguuag

SEQ ID NO: 576127 - RNA, 19 nt, Artificial Sequence
  Description of Artificial Sequence: Synthetic oligonucleotide
uaccacauagauagguggc

SEQ ID NO: 576128 - RNA, 19 nt, Artificial Sequence
  Description of Artificial Sequence: Synthetic oligonucleotide
caccauaggagcuaaguuc

SEQ ID NO: 576129 - RNA, 19 nt, Artificial Sequence
  Description of Artificial Sequence: Synthetic oligonucleotide
uguaggggaaugcaaccug

SEQ ID NO: 576130 - RNA, 19 nt, Artificial Sequence
  Description of Artificial Sequence: Synthetic oligonucleotide
acgauggaggcauagggug

SEQ ID NO: 576131 - RNA, 19 nt, Artificial Sequence
  Description of Artificial Sequence: Synthetic oligonucleotide
cuuguaggggaaugcaacc

SEQ ID NO: 576132 - RNA, 19 nt, Artificial Sequence
  Description of Artificial Sequence: Synthetic oligonucleotide
ggcgauagagguuaucacg

SEQ ID NO: 576133 - RNA, 19 nt, Artificial Sequence
  Description of Artificial Sequence: Synthetic oligonucleotide
guuaucacggaugaccacc

SEQ ID NO: 576134 - RNA, 19 nt, Artificial Sequence
  Description of Artificial Sequence: Synthetic oligonucleotide
agaauuccggcccagguaa

SEQ ID NO: 576135 - RNA, 19 nt, Artificial Sequence
  Description of Artificial Sequence: Synthetic oligonucleotide
cuguacaacgucauggauc

SEQ ID NO: 576136 - RNA, 19 nt, Artificial Sequence
  Description of Artificial Sequence: Synthetic oligonucleotide
ugauggggaugcuuguagg

SEQ ID NO: 576137 - RNA, 19 nt, Artificial Sequence
  Description of Artificial Sequence: Synthetic oligonucleotide
aacggaggcaucaaauuug

SEQ ID NO: 576138 - RNA, 19 nt, Artificial Sequence
  Description of Artificial Sequence: Synthetic oligonucleotide
uagauagguggccaauggc

SEQ ID NO: 576139 - RNA, 19 nt, Artificial Sequence
  Description of Artificial Sequence: Synthetic oligonucleotide
auaaugcugguccaagagu

SEQ ID NO: 576140 - RNA, 19 nt, Artificial Sequence
  Description of Artificial Sequence: Synthetic oligonucleotide
accacaguuccucucauga

SEQ ID NO: 576141 - RNA, 19 nt, Artificial Sequence
  Description of Artificial Sequence: Synthetic oligonucleotide
cuaaguuccucaagcuugc

SEQ ID NO: 576142 - RNA, 19 nt, Artificial Sequence
  Description of Artificial Sequence: Synthetic oligonucleotide
acuagcaacuuauucccca

SEQ ID NO: 576143 - RNA, 19 nt, Artificial Sequence
  Description of Artificial Sequence: Synthetic oligonucleotide
aaagcccaauagccauugc

SEQ ID NO: 576144 - RNA, 19 nt, Artificial Sequence
  Description of Artificial Sequence: Synthetic oligonucleotide
guuagcaguggccagagaa

SEQ ID NO: 576145 - RNA, 19 nt, Artificial Sequence
  Description of Artificial Sequence: Synthetic oligonucleotide
ugauaaggaaugguggcca

SEQ ID NO: 576146 - RNA, 19 nt, Artificial Sequence
  Description of Artificial Sequence: Synthetic oligonucleotide
aaaaguaaauccaggcuua

SEQ ID NO: 576147 - RNA, 19 nt, Artificial Sequence
  Description of Artificial Sequence: Synthetic oligonucleotide
acuuauuccccacauuaaa

SEQ ID NO: 576148 - RNA, 19 nt, Artificial Sequence
  Description of Artificial Sequence: Synthetic oligonucleotide
guugacaauuucucggcug

SEQ ID NO: 576149 - RNA, 19 nt, Artificial Sequence
  Description of Artificial Sequence: Synthetic oligonucleotide
acaagauauuuggaaccgc

SEQ ID NO: 576150 - RNA, 19 nt, Artificial Sequence
  Description of Artificial Sequence: Synthetic oligonucleotide
cugagcaaaccacaggcac

SEQ ID NO: 576151 - RNA, 19 nt, Artificial Sequence
  Description of Artificial Sequence: Synthetic oligonucleotide
gaaugcaaccugcucaauc

SEQ ID NO: 576152 - RNA, 19 nt, Artificial Sequence
  Description of Artificial Sequence: Synthetic oligonucleotide
aaauccaggcuuacuagca

SEQ ID NO: 576153 - RNA, 19 nt, Artificial Sequence
  Description of Artificial Sequence: Synthetic oligonucleotide
guagauguccaugaagcug

SEQ ID NO: 576154 - RNA, 19 nt, Artificial Sequence
  Description of Artificial Sequence: Synthetic oligonucleotide
caauaggucugccuugggc

SEQ ID NO: 576155 - RNA, 19 nt, Artificial Sequence
  Description of Artificial Sequence: Synthetic oligonucleotide
guaauaguggguggcauug

SEQ ID NO: 576156 - RNA, 19 nt, Artificial Sequence
  Description of Artificial Sequence: Synthetic oligonucleotide
aauuccggcccagguaaac

SEQ ID NO: 576157 - RNA, 19 nt, Artificial Sequence
  Description of Artificial Sequence: Synthetic oligonucleotide
uuaucacggaugaccaccu

SEQ ID NO: 576158 - RNA, 19 nt, Artificial Sequence
  Description of Artificial Sequence: Synthetic oligonucleotide
caagcuugcagguacccuc

SEQ ID NO: 576159 - RNA, 19 nt, Artificial Sequence
  Description of Artificial Sequence: Synthetic oligonucleotide
gaugcuuguaggggaaugc

SEQ ID NO: 576160 - RNA, 19 nt, Artificial Sequence
  Description of Artificial Sequence: Synthetic oligonucleotide
cacugugcucaugaaaugg

SEQ ID NO: 576161 - RNA, 19 nt, Artificial Sequence
  Description of Artificial Sequence: Synthetic oligonucleotide
auaacggaggcaucaaauu

SEQ ID NO: 576162 - RNA, 19 nt, Artificial Sequence
  Description of Artificial Sequence: Synthetic oligonucleotide
ucacagaagggaguuuucc

SEQ ID NO: 576163 - RNA, 19 nt, Artificial Sequence
  Description of Artificial Sequence: Synthetic oligonucleotide
uagucacgaacagugagac

SEQ ID NO: 576164 - RNA, 19 nt, Artificial Sequence
  Description of Artificial Sequence: Synthetic oligonucleotide
cauagggugccaacucagg

SEQ ID NO: 576165 - RNA, 19 nt, Artificial Sequence
  Description of Artificial Sequence: Synthetic oligonucleotide
caacuuauuccccacauua

SEQ ID NO: 576166 - RNA, 19 nt, Artificial Sequence
  Description of Artificial Sequence: Synthetic oligonucleotide
uauuauggcuugagagaga

SEQ ID NO: 576167 - RNA, 19 nt, Artificial Sequence
  Description of Artificial Sequence: Synthetic oligonucleotide
acaacgucauggaucugcc

SEQ ID NO: 576168 - RNA, 19 nt, Artificial Sequence
  Description of Artificial Sequence: Synthetic oligonucleotide
ucugacuagucagcucugg

SEQ ID NO: 576169 - RNA, 19 nt, Artificial Sequence
  Description of Artificial Sequence: Synthetic oligonucleotide
augcaaccugcucaaucac

SEQ ID NO: 576170 - RNA, 19 nt, Artificial Sequence
  Description of Artificial Sequence: Synthetic oligonucleotide
agggcuagagaaacagccc

SEQ ID NO: 576171 - RNA, 19 nt, Artificial Sequence
  Description of Artificial Sequence: Synthetic oligonucleotide
cucaauaggucugccuugg

SEQ ID NO: 576172 - RNA, 19 nt, Artificial Sequence
  Description of Artificial Sequence: Synthetic oligonucleotide
caugaggcgguuguagagg

SEQ ID NO: 576173 - RNA, 19 nt, Artificial Sequence
  Description of Artificial Sequence: Synthetic oligonucleotide
gcuaaguuccucaagcuug

SEQ ID NO: 576174 - RNA, 19 nt, Artificial Sequence
  Description of Artificial Sequence: Synthetic oligonucleotide
ucguccaaaaguccuccac

SEQ ID NO: 576175 - RNA, 19 nt, Artificial Sequence
  Description of Artificial Sequence: Synthetic oligonucleotide
cuggagcccaagaauuccg

SEQ ID NO: 576176 - RNA, 19 nt, Artificial Sequence
  Description of Artificial Sequence: Synthetic oligonucleotide
cauagcgccacuggugugg

SEQ ID NO: 576177 - RNA, 19 nt, Artificial Sequence
  Description of Artificial Sequence: Synthetic oligonucleotide
ucacggaugaccaccucuc

SEQ ID NO: 576178 - RNA, 19 nt, Artificial Sequence
  Description of Artificial Sequence: Synthetic oligonucleotide
aaaugaguuggggcggucu

SEQ ID NO: 576179 - RNA, 19 nt, Artificial Sequence
  Description of Artificial Sequence: Synthetic oligonucleotide
cuagcaacuuauuccccac

SEQ ID NO: 576180 - RNA, 19 nt, Artificial Sequence
  Description of Artificial Sequence: Synthetic oligonucleotide
caggcuucguguuugcaug

SEQ ID NO: 576181 - RNA, 19 nt, Artificial Sequence
  Description of Artificial Sequence: Synthetic oligonucleotide
uucucggcuggugaggaag

SEQ ID NO: 576182 - RNA, 19 nt, Artificial Sequence
  Description of Artificial Sequence: Synthetic oligonucleotide
uacuagcaacuuauucccc

SEQ ID NO: 576183 - RNA, 19 nt, Artificial Sequence
  Description of Artificial Sequence: Synthetic oligonucleotide
ucucucggauucagcagag

SEQ ID NO: 576184 - RNA, 19 nt, Artificial Sequence
  Description of Artificial Sequence: Synthetic oligonucleotide
uugacgaccacaguuccuc

SEQ ID NO: 576185 - RNA, 19 nt, Artificial Sequence
  Description of Artificial Sequence: Synthetic oligonucleotide
cugacuagucagcucuggg

SEQ ID NO: 576186 - RNA, 19 nt, Artificial Sequence
  Description of Artificial Sequence: Synthetic oligonucleotide
cugagcaaccccaaggcga

SEQ ID NO: 576187 - RNA, 19 nt, Artificial Sequence
  Description of Artificial Sequence: Synthetic oligonucleotide
gugaaaugaguuggggcgg

SEQ ID NO: 576188 - RNA, 19 nt, Artificial Sequence
  Description of Artificial Sequence: Synthetic oligonucleotide
agcaacuuauuccccacau

SEQ ID NO: 576189 - RNA, 19 nt, Artificial Sequence
  Description of Artificial Sequence: Synthetic oligonucleotide
gugauaaggaaugguggcc

SEQ ID NO: 576190 - RNA, 19 nt, Artificial Sequence
  Description of Artificial Sequence: Synthetic oligonucleotide
ucaugucauuguagucacg

SEQ ID NO: 576191 - RNA, 19 nt, Artificial Sequence
  Description of Artificial Sequence: Synthetic oligonucleotide
ugccgguugacaauuucuc

SEQ ID NO: 576192 - RNA, 19 nt, Artificial Sequence
  Description of Artificial Sequence: Synthetic oligonucleotide
gcgauagagguuaucacgg

SEQ ID NO: 576193 - RNA, 19 nt, Artificial Sequence
  Description of Artificial Sequence: Synthetic oligonucleotide
ugcagguacccuccugcag

SEQ ID NO: 576194 - RNA, 19 nt, Artificial Sequence
  Description of Artificial Sequence: Synthetic oligonucleotide
ugagcaaccccaaggcgau

SEQ ID NO: 576195 - RNA, 19 nt, Artificial Sequence
  Description of Artificial Sequence: Synthetic oligonucleotide
aauacgccgugcgguaguc

SEQ ID NO: 576196 - RNA, 19 nt, Artificial Sequence
  Description of Artificial Sequence: Synthetic oligonucleotide
gaacgagagggaaagccac

SEQ ID NO: 576197 - RNA, 19 nt, Artificial Sequence
  Description of Artificial Sequence: Synthetic oligonucleotide
cacucggccaauucccggg

SEQ ID NO: 576198 - RNA, 19 nt, Artificial Sequence
  Description of Artificial Sequence: Synthetic oligonucleotide
agaggucagcacauagcgc

SEQ ID NO: 576199 - RNA, 19 nt, Artificial Sequence
  Description of Artificial Sequence: Synthetic oligonucleotide
gacaauuucucggcuggug

SEQ ID NO: 576200 - RNA, 19 nt, Artificial Sequence
  Description of Artificial Sequence: Synthetic oligonucleotide
caacuaugggccacauccc

SEQ ID NO: 576201 - RNA, 19 nt, Artificial Sequence
  Description of Artificial Sequence: Synthetic oligonucleotide
aauagguacuguaguuccu

SEQ ID NO: 576202 - RNA, 19 nt, Artificial Sequence
  Description of Artificial Sequence: Synthetic oligonucleotide
ugucguccaaaaguccucc

SEQ ID NO: 576203 - RNA, 19 nt, Artificial Sequence
  Description of Artificial Sequence: Synthetic oligonucleotide
gcaagggccauauuauggc

SEQ ID NO: 576204 - RNA, 19 nt, Artificial Sequence
  Description of Artificial Sequence: Synthetic oligonucleotide
uccacgauggaggcauagg

SEQ ID NO: 576205 - RNA, 19 nt, Artificial Sequence
  Description of Artificial Sequence: Synthetic oligonucleotide
agagccaaacaaugagggu

SEQ ID NO: 576206 - RNA, 19 nt, Artificial Sequence
  Description of Artificial Sequence: Synthetic oligonucleotide
aauggcgggaagaggcaag

SEQ ID NO: 576207 - RNA, 19 nt, Artificial Sequence
  Description of Artificial Sequence: Synthetic oligonucleotide
gaaggauucuuuuccccaa

SEQ ID NO: 576208 - RNA, 19 nt, Artificial Sequence
  Description of Artificial Sequence: Synthetic oligonucleotide
cauagauagguggccaaug

SEQ ID NO: 576209 - RNA, 19 nt, Artificial Sequence
  Description of Artificial Sequence: Synthetic oligonucleotide
agcgauaacggaggcauca

SEQ ID NO: 576210 - RNA, 19 nt, Artificial Sequence
  Description of Artificial Sequence: Synthetic oligonucleotide
cgaacaagauauuuggaac

SEQ ID NO: 576211 - RNA, 19 nt, Artificial Sequence
  Description of Artificial Sequence: Synthetic oligonucleotide
ggggccacaccgcagaucc

SEQ ID NO: 576212 - RNA, 19 nt, Artificial Sequence
  Description of Artificial Sequence: Synthetic oligonucleotide
agaacgagagggaaagcca

SEQ ID NO: 576213 - RNA, 19 nt, Artificial Sequence
  Description of Artificial Sequence: Synthetic oligonucleotide
cuggcuuauucugccaccg

SEQ ID NO: 576214 - RNA, 19 nt, Artificial Sequence
  Description of Artificial Sequence: Synthetic oligonucleotide
gucacgggcacuuucaccu

SEQ ID NO: 576215 - RNA, 19 nt, Artificial Sequence
  Description of Artificial Sequence: Synthetic oligonucleotide
cugguguggccauaucuac

SEQ ID NO: 576216 - RNA, 19 nt, Artificial Sequence
  Description of Artificial Sequence: Synthetic oligonucleotide
ggcuuauucugccaccgag

SEQ ID NO: 576217 - RNA, 19 nt, Artificial Sequence
  Description of Artificial Sequence: Synthetic oligonucleotide
agcuaaguuccucaagcuu

SEQ ID NO: 576218 - RNA, 19 nt, Artificial Sequence
  Description of Artificial Sequence: Synthetic oligonucleotide
uccggcccagguaaacucc

SEQ ID NO: 576219 - RNA, 19 nt, Artificial Sequence
  Description of Artificial Sequence: Synthetic oligonucleotide
gaggauguaggguacaguu

SEQ ID NO: 576220 - RNA, 19 nt, Artificial Sequence
  Description of Artificial Sequence: Synthetic oligonucleotide
guacaguuagcaguggcca

SEQ ID NO: 576221 - RNA, 19 nt, Artificial Sequence
  Description of Artificial Sequence: Synthetic oligonucleotide
agaagggaguuuuccuacu

SEQ ID NO: 576222 - RNA, 19 nt, Artificial Sequence
  Description of Artificial Sequence: Synthetic oligonucleotide
uugucguccaaaaguccuc

SEQ ID NO: 576223 - RNA, 19 nt, Artificial Sequence
  Description of Artificial Sequence: Synthetic oligonucleotide
cauaucuaccacauagaua

SEQ ID NO: 576224 - RNA, 19 nt, Artificial Sequence
  Description of Artificial Sequence: Synthetic oligonucleotide
uggguagcagaggucagca

SEQ ID NO: 576225 - RNA, 19 nt, Artificial Sequence
  Description of Artificial Sequence: Synthetic oligonucleotide
ggucaguuccagcagucag

SEQ ID NO: 576226 - RNA, 19 nt, Artificial Sequence
  Description of Artificial Sequence: Synthetic oligonucleotide
uuggucaguuccagcaguc

SEQ ID NO: 576227 - RNA, 19 nt, Artificial Sequence
  Description of Artificial Sequence: Synthetic oligonucleotide
ucggccaauucccgggccc

SEQ ID NO: 576228 - RNA, 19 nt, Artificial Sequence
  Description of Artificial Sequence: Synthetic oligonucleotide
ucugccgguugacaauuuc

SEQ ID NO: 576229 - RNA, 19 nt, Artificial Sequence
  Description of Artificial Sequence: Synthetic oligonucleotide
ggggaaugcaaccugcuca

SEQ ID NO: 576230 - RNA, 19 nt, Artificial Sequence
  Description of Artificial Sequence: Synthetic oligonucleotide
cuacaggggacuacagguc

SEQ ID NO: 576231 - RNA, 19 nt, Artificial Sequence
  Description of Artificial Sequence: Synthetic oligonucleotide
ucacgaacagugagacacu

SEQ ID NO: 576232 - RNA, 19 nt, Artificial Sequence
  Description of Artificial Sequence: Synthetic oligonucleotide
auuuggaaccgcagaccac

SEQ ID NO: 576233 - RNA, 19 nt, Artificial Sequence
  Description of Artificial Sequence: Synthetic oligonucleotide
gauaacggaggcaucaaau

SEQ ID NO: 576234 - RNA, 19 nt, Artificial Sequence
  Description of Artificial Sequence: Synthetic oligonucleotide
guaggggaaugcaaccugc

SEQ ID NO: 576235 - RNA, 19 nt, Artificial Sequence
  Description of Artificial Sequence: Synthetic oligonucleotide
ccauugucguccaaaaguc

SEQ ID NO: 576236 - RNA, 19 nt, Artificial Sequence
  Description of Artificial Sequence: Synthetic oligonucleotide
guagucacgaacagugaga

SEQ ID NO: 576237 - RNA, 19 nt, Artificial Sequence
  Description of Artificial Sequence: Synthetic oligonucleotide
cuaugggccacauccccuc

SEQ ID NO: 576238 - RNA, 19 nt, Artificial Sequence
  Description of Artificial Sequence: Synthetic oligonucleotide
aggcuuacuagcaacuuau

SEQ ID NO: 576239 - RNA, 19 nt, Artificial Sequence
  Description of Artificial Sequence: Synthetic oligonucleotide
auugcacaacagcuccugu

SEQ ID NO: 576240 - RNA, 19 nt, Artificial Sequence
  Description of Artificial Sequence: Synthetic oligonucleotide
aggcccuguacaugacaac

SEQ ID NO: 576241 - RNA, 19 nt, Artificial Sequence
  Description of Artificial Sequence: Synthetic oligonucleotide
cucaugaaauggaagcucu

SEQ ID NO: 576242 - RNA, 19 nt, Artificial Sequence
  Description of Artificial Sequence: Synthetic oligonucleotide
auaggucugccuugggcaa

SEQ ID NO: 576243 - RNA, 19 nt, Artificial Sequence
  Description of Artificial Sequence: Synthetic oligonucleotide
accuaucccacccucucaa

SEQ ID NO: 576244 - RNA, 19 nt, Artificial Sequence
  Description of Artificial Sequence: Synthetic oligonucleotide
guacagauucauagagggc

SEQ ID NO: 576245 - RNA, 19 nt, Artificial Sequence
  Description of Artificial Sequence: Synthetic oligonucleotide
cucucucggauucagcaga

SEQ ID NO: 576246 - RNA, 19 nt, Artificial Sequence
  Description of Artificial Sequence: Synthetic oligonucleotide
agacauuuugggguccucu

SEQ ID NO: 576247 - RNA, 19 nt, Artificial Sequence
  Description of Artificial Sequence: Synthetic oligonucleotide
cacuuuggggccacaccgc

SEQ ID NO: 576248 - RNA, 19 nt, Artificial Sequence
  Description of Artificial Sequence: Synthetic oligonucleotide
gcucuguagggcuagagaa

SEQ ID NO: 576249 - RNA, 19 nt, Artificial Sequence
  Description of Artificial Sequence: Synthetic oligonucleotide
cuagucagcucuggguagc

SEQ ID NO: 576250 - RNA, 19 nt, Artificial Sequence
  Description of Artificial Sequence: Synthetic oligonucleotide
uaggagcuaaguuccucaa

SEQ ID NO: 576251 - RNA, 19 nt, Artificial Sequence
  Description of Artificial Sequence: Synthetic oligonucleotide
ugaaaugaguuggggcggu

SEQ ID NO: 576252 - RNA, 19 nt, Artificial Sequence
  Description of Artificial Sequence: Synthetic oligonucleotide
acaguuagcaguggccaga

SEQ ID NO: 576253 - RNA, 19 nt, Artificial Sequence
  Description of Artificial Sequence: Synthetic oligonucleotide
auagcgccacugguguggc

SEQ ID NO: 576254 - RNA, 19 nt, Artificial Sequence
  Description of Artificial Sequence: Synthetic oligonucleotide
guguugacgaccacaguuc

SEQ ID NO: 576255 - RNA, 19 nt, Artificial Sequence
  Description of Artificial Sequence: Synthetic oligonucleotide
caacgucauggaucugccg

SEQ ID NO: 576256 - RNA, 19 nt, Artificial Sequence
  Description of Artificial Sequence: Synthetic oligonucleotide
agccaccuaucccacccuc

SEQ ID NO: 576257 - RNA, 19 nt, Artificial Sequence
  Description of Artificial Sequence: Synthetic oligonucleotide
ucggcuggugaggaagucc

SEQ ID NO: 576258 - RNA, 19 nt, Artificial Sequence
  Description of Artificial Sequence: Synthetic oligonucleotide
uccaaaaguccuccacguu

SEQ ID NO: 576259 - RNA, 19 nt, Artificial Sequence
  Description of Artificial Sequence: Synthetic oligonucleotide
uuccggcccagguaaacuc

SEQ ID NO: 576260 - RNA, 19 nt, Artificial Sequence
  Description of Artificial Sequence: Synthetic oligonucleotide
ugucacaacuaugggccac

SEQ ID NO: 576261 - RNA, 19 nt, Artificial Sequence
  Description of Artificial Sequence: Synthetic oligonucleotide
ucccuacaggggacuacag

SEQ ID NO: 576262 - RNA, 19 nt, Artificial Sequence
  Description of Artificial Sequence: Synthetic oligonucleotide
uugcagguacccuccugca

SEQ ID NO: 576263 - RNA, 19 nt, Artificial Sequence
  Description of Artificial Sequence: Synthetic oligonucleotide
cagcuaugucacaacuaug

SEQ ID NO: 576264 - RNA, 19 nt, Artificial Sequence
  Description of Artificial Sequence: Synthetic oligonucleotide
gaagaacgagagggaaagc

SEQ ID NO: 576265 - RNA, 19 nt, Artificial Sequence
  Description of Artificial Sequence: Synthetic oligonucleotide
cacuggagcccaagaauuc

SEQ ID NO: 576266 - RNA, 19 nt, Artificial Sequence
  Description of Artificial Sequence: Synthetic oligonucleotide
gcgguuguagagguaauag

SEQ ID NO: 576267 - RNA, 19 nt, Artificial Sequence
  Description of Artificial Sequence: Synthetic oligonucleotide
gacaauacgccgugcggua

SEQ ID NO: 576268 - RNA, 19 nt, Artificial Sequence
  Description of Artificial Sequence: Synthetic oligonucleotide
agcacuagggucacuggga

SEQ ID NO: 576269 - RNA, 19 nt, Artificial Sequence
  Description of Artificial Sequence: Synthetic oligonucleotide
aggcccucccuacagggga

SEQ ID NO: 576270 - RNA, 19 nt, Artificial Sequence
  Description of Artificial Sequence: Synthetic oligonucleotide
uuggaaccgcagaccaccu

SEQ ID NO: 576271 - RNA, 19 nt, Artificial Sequence
  Description of Artificial Sequence: Synthetic oligonucleotide
uggaaccgcagaccaccug

SEQ ID NO: 576272 - RNA, 19 nt, Artificial Sequence
  Description of Artificial Sequence: Synthetic oligonucleotide
guagggcuagagaaacagc

SEQ ID NO: 576273 - RNA, 19 nt, Artificial Sequence
  Description of Artificial Sequence: Synthetic oligonucleotide
acaauacgccgugcgguag

SEQ ID NO: 576274 - RNA, 19 nt, Artificial Sequence
  Description of Artificial Sequence: Synthetic oligonucleotide
cagacuucagcacaacacu

SEQ ID NO: 576275 - RNA, 19 nt, Artificial Sequence
  Description of Artificial Sequence: Synthetic oligonucleotide
uugccagcuaugucacaac

SEQ ID NO: 576276 - RNA, 19 nt, Artificial Sequence
  Description of Artificial Sequence: Synthetic oligonucleotide
gguacccuccugcagcagc

SEQ ID NO: 576277 - RNA, 19 nt, Artificial Sequence
  Description of Artificial Sequence: Synthetic oligonucleotide
acgagagggaaagccaccu

SEQ ID NO: 576278 - RNA, 19 nt, Artificial Sequence
  Description of Artificial Sequence: Synthetic oligonucleotide
acugguguggccauaucua

SEQ ID NO: 576279 - RNA, 19 nt, Artificial Sequence
  Description of Artificial Sequence: Synthetic oligonucleotide
gacgaccacaguuccucuc

SEQ ID NO: 576280 - RNA, 19 nt, Artificial Sequence
  Description of Artificial Sequence: Synthetic oligonucleotide
uacgccgugcgguagucuu

SEQ ID NO: 576281 - RNA, 19 nt, Artificial Sequence
  Description of Artificial Sequence: Synthetic oligonucleotide
augcuuguaggggaaugca

SEQ ID NO: 576282 - RNA, 19 nt, Artificial Sequence
  Description of Artificial Sequence: Synthetic oligonucleotide
gaaugguggccagcacuag

SEQ ID NO: 576283 - RNA, 19 nt, Artificial Sequence
  Description of Artificial Sequence: Synthetic oligonucleotide
cacggaugaccaccucucc

SEQ ID NO: 576284 - RNA, 19 nt, Artificial Sequence
  Description of Artificial Sequence: Synthetic oligonucleotide
guuuuccuacugcuugcca

SEQ ID NO: 576285 - RNA, 19 nt, Artificial Sequence
  Description of Artificial Sequence: Synthetic oligonucleotide
agccgguuagcugucagaa

SEQ ID NO: 576286 - RNA, 19 nt, Artificial Sequence
  Description of Artificial Sequence: Synthetic oligonucleotide
agggcacagugauaaggaa

SEQ ID NO: 576287 - RNA, 19 nt, Artificial Sequence
  Description of Artificial Sequence: Synthetic oligonucleotide
agucacgaacagugagaca

SEQ ID NO: 576288 - RNA, 19 nt, Artificial Sequence
  Description of Artificial Sequence: Synthetic oligonucleotide
acucacaacuggcucugua

SEQ ID NO: 576289 - RNA, 19 nt, Artificial Sequence
  Description of Artificial Sequence: Synthetic oligonucleotide
gggacuacagguccccuca

SEQ ID NO: 576290 - RNA, 19 nt, Artificial Sequence
  Description of Artificial Sequence: Synthetic oligonucleotide
gcucucucggauucagcag

SEQ ID NO: 576291 - RNA, 19 nt, Artificial Sequence
  Description of Artificial Sequence: Synthetic oligonucleotide
caauucccgggcccugagc

SEQ ID NO: 576292 - RNA, 19 nt, Artificial Sequence
  Description of Artificial Sequence: Synthetic oligonucleotide
cugugcucaugaaauggaa

SEQ ID NO: 576293 - RNA, 19 nt, Artificial Sequence
  Description of Artificial Sequence: Synthetic oligonucleotide
gcauggacaauacgccgug

SEQ ID NO: 576294 - RNA, 19 nt, Artificial Sequence
  Description of Artificial Sequence: Synthetic oligonucleotide
ggcaccugagccuguguug

SEQ ID NO: 576295 - RNA, 19 nt, Artificial Sequence
  Description of Artificial Sequence: Synthetic oligonucleotide
guuugcuuacagcccuauc

SEQ ID NO: 576296 - RNA, 19 nt, Artificial Sequence
  Description of Artificial Sequence: Synthetic oligonucleotide
cacgaacagugagacacuc

SEQ ID NO: 576297 - RNA, 19 nt, Artificial Sequence
  Description of Artificial Sequence: Synthetic oligonucleotide
auggucacgggcacuuuca

SEQ ID NO: 576298 - RNA, 19 nt, Artificial Sequence
  Description of Artificial Sequence: Synthetic oligonucleotide
cacauagcgccacuggugu

SEQ ID NO: 576299 - RNA, 19 nt, Artificial Sequence
  Description of Artificial Sequence: Synthetic oligonucleotide
aaauagcacucggccaauu

SEQ ID NO: 576300 - RNA, 19 nt, Artificial Sequence
  Description of Artificial Sequence: Synthetic oligonucleotide
cauggacaauacgccgugc

SEQ ID NO: 576301 - RNA, 19 nt, Artificial Sequence
  Description of Artificial Sequence: Synthetic oligonucleotide
agguaauaguggguggcau

SEQ ID NO: 576302 - RNA, 19 nt, Artificial Sequence
  Description of Artificial Sequence: Synthetic oligonucleotide
gcggacacuggugaguuug

SEQ ID NO: 576303 - RNA, 19 nt, Artificial Sequence
  Description of Artificial Sequence: Synthetic oligonucleotide
gugagggucugagggcccg

SEQ ID NO: 576304 - RNA, 19 nt, Artificial Sequence
  Description of Artificial Sequence: Synthetic oligonucleotide
ccuacaggggacuacaggu

SEQ ID NO: 576305 - RNA, 19 nt, Artificial Sequence
  Description of Artificial Sequence: Synthetic oligonucleotide
ggauucagcagagguuccc

SEQ ID NO: 576306 - RNA, 19 nt, Artificial Sequence
  Description of Artificial Sequence: Synthetic oligonucleotide
cccuacaggggacuacagg

SEQ ID NO: 576307 - RNA, 19 nt, Artificial Sequence
  Description of Artificial Sequence: Synthetic oligonucleotide
ccucaauaggucugccuug

SEQ ID NO: 576308 - RNA, 19 nt, Artificial Sequence
  Description of Artificial Sequence: Synthetic oligonucleotide
ggcucuguagggcuagaga

SEQ ID NO: 576309 - RNA, 19 nt, Artificial Sequence
  Description of Artificial Sequence: Synthetic oligonucleotide
caagaauuccggcccaggu

SEQ ID NO: 576310 - RNA, 19 nt, Artificial Sequence
  Description of Artificial Sequence: Synthetic oligonucleotide
gcacauagcgccacuggug

SEQ ID NO: 576311 - RNA, 19 nt, Artificial Sequence
  Description of Artificial Sequence: Synthetic oligonucleotide
cacaacuaugggccacauc

SEQ ID NO: 576312 - RNA, 19 nt, Artificial Sequence
  Description of Artificial Sequence: Synthetic oligonucleotide
cucggccaauucccgggcc

SEQ ID NO: 576313 - RNA, 19 nt, Artificial Sequence
  Description of Artificial Sequence: Synthetic oligonucleotide
gugcgguagucuuggugac

SEQ ID NO: 576314 - RNA, 19 nt, Artificial Sequence
  Description of Artificial Sequence: Synthetic oligonucleotide
caggggacuacaggucccc

SEQ ID NO: 576315 - RNA, 19 nt, Artificial Sequence
  Description of Artificial Sequence: Synthetic oligonucleotide
cacugguguggccauaucu

SEQ ID NO: 576316 - RNA, 19 nt, Artificial Sequence
  Description of Artificial Sequence: Synthetic oligonucleotide
cgugcgguagucuugguga

SEQ ID NO: 576317 - RNA, 19 nt, Artificial Sequence
  Description of Artificial Sequence: Synthetic oligonucleotide
ccuggcuuauucugccacc

SEQ ID NO: 576318 - RNA, 19 nt, Artificial Sequence
  Description of Artificial Sequence: Synthetic oligonucleotide
cacuagggucacugggauc

SEQ ID NO: 576319 - RNA, 19 nt, Artificial Sequence
  Description of Artificial Sequence: Synthetic oligonucleotide
ggagcgauaacggaggcau

SEQ ID NO: 576320 - RNA, 19 nt, Artificial Sequence
  Description of Artificial Sequence: Synthetic oligonucleotide
caggcuuacuagcaacuua

SEQ ID NO: 576321 - RNA, 19 nt, Artificial Sequence
  Description of Artificial Sequence: Synthetic oligonucleotide
ugcgguagucuuggugacu

SEQ ID NO: 576322 - RNA, 19 nt, Artificial Sequence
  Description of Artificial Sequence: Synthetic oligonucleotide
ggaggcauagggugccaac

SEQ ID NO: 576323 - RNA, 19 nt, Artificial Sequence
  Description of Artificial Sequence: Synthetic oligonucleotide
acgaacagugagacacuca

SEQ ID NO: 576324 - RNA, 19 nt, Artificial Sequence
  Description of Artificial Sequence: Synthetic oligonucleotide
gcacucggccaauucccgg

SEQ ID NO: 576325 - RNA, 19 nt, Artificial Sequence
  Description of Artificial Sequence: Synthetic oligonucleotide
gaaaugaguuggggcgguc

SEQ ID NO: 576326 - RNA, 19 nt, Artificial Sequence
  Description of Artificial Sequence: Synthetic oligonucleotide
ggcuagagaaacagcccug

SEQ ID NO: 576327 - RNA, 19 nt, Artificial Sequence
  Description of Artificial Sequence: Synthetic oligonucleotide
gaugcuggacagaguucuc

SEQ ID NO: 576328 - RNA, 19 nt, Artificial Sequence
  Description of Artificial Sequence: Synthetic oligonucleotide
ucguguuugcauggacaau

SEQ ID NO: 576329 - RNA, 19 nt, Artificial Sequence
  Description of Artificial Sequence: Synthetic oligonucleotide
gggcuagagaaacagcccu

SEQ ID NO: 576330 - RNA, 19 nt, Artificial Sequence
  Description of Artificial Sequence: Synthetic oligonucleotide
cugccgguugacaauuucu

SEQ ID NO: 576331 - RNA, 19 nt, Artificial Sequence
  Description of Artificial Sequence: Synthetic oligonucleotide
cucccuacaggggacuaca

SEQ ID NO: 576332 - RNA, 19 nt, Artificial Sequence
  Description of Artificial Sequence: Synthetic oligonucleotide
uggcggacacuggugaguu

SEQ ID NO: 576333 - RNA, 19 nt, Artificial Sequence
  Description of Artificial Sequence: Synthetic oligonucleotide
aaugggccgcuggcggaca

SEQ ID NO: 576334 - RNA, 19 nt, Artificial Sequence
  Description of Artificial Sequence: Synthetic oligonucleotide
gucguccaaaaguccucca

SEQ ID NO: 576335 - RNA, 19 nt, Artificial Sequence
  Description of Artificial Sequence: Synthetic oligonucleotide
gggcacuuucaccucgaac

SEQ ID NO: 576336 - RNA, 19 nt, Artificial Sequence
  Description of Artificial Sequence: Synthetic oligonucleotide
ucccacagaucaugucauu

SEQ ID NO: 576337 - RNA, 19 nt, Artificial Sequence
  Description of Artificial Sequence: Synthetic oligonucleotide
uggccauaucuaccacaua

SEQ ID NO: 576338 - RNA, 19 nt, Artificial Sequence
  Description of Artificial Sequence: Synthetic oligonucleotide
cucaccaaggcgcugccau

SEQ ID NO: 576339 - RNA, 19 nt, Artificial Sequence
  Description of Artificial Sequence: Synthetic oligonucleotide
uccccucaauaggucugcc

SEQ ID NO: 576340 - RNA, 19 nt, Artificial Sequence
  Description of Artificial Sequence: Synthetic oligonucleotide
ccuccacaugcucucucgg

SEQ ID NO: 576341 - RNA, 19 nt, Artificial Sequence
  Description of Artificial Sequence: Synthetic oligonucleotide
gccgguuagcugucagaag

SEQ ID NO: 576342 - RNA, 19 nt, Artificial Sequence
  Description of Artificial Sequence: Synthetic oligonucleotide
cguucaccucacuggagcc

SEQ ID NO: 576343 - RNA, 19 nt, Artificial Sequence
  Description of Artificial Sequence: Synthetic oligonucleotide
caaggcgauagagguuauc

SEQ ID NO: 576344 - RNA, 19 nt, Artificial Sequence
  Description of Artificial Sequence: Synthetic oligonucleotide
guggccauaucuaccacau

SEQ ID NO: 576345 - RNA, 19 nt, Artificial Sequence
  Description of Artificial Sequence: Synthetic oligonucleotide
gcagccgguuagcugucag

SEQ ID NO: 576346 - RNA, 19 nt, Artificial Sequence
  Description of Artificial Sequence: Synthetic oligonucleotide
gcuggcggacacuggugag

SEQ ID NO: 576347 - RNA, 19 nt, Artificial Sequence
  Description of Artificial Sequence: Synthetic oligonucleotide
caccuaucccacccucuca

SEQ ID NO: 576348 - RNA, 19 nt, Artificial Sequence
  Description of Artificial Sequence: Synthetic oligonucleotide
aggucagcacauagcgcca

SEQ ID NO: 576349 - RNA, 19 nt, Artificial Sequence
  Description of Artificial Sequence: Synthetic oligonucleotide
ccagcuaugucacaacuau

SEQ ID NO: 576350 - RNA, 19 nt, Artificial Sequence
  Description of Artificial Sequence: Synthetic oligonucleotide
gacuacagguccccucaau

SEQ ID NO: 576351 - RNA, 19 nt, Artificial Sequence
  Description of Artificial Sequence: Synthetic oligonucleotide
ggacaauacgccgugcggu

SEQ ID NO: 576352 - RNA, 19 nt, Artificial Sequence
  Description of Artificial Sequence: Synthetic oligonucleotide
gggcacacuuuguagauuu

SEQ ID NO: 576353 - RNA, 19 nt, Artificial Sequence
  Description of Artificial Sequence: Synthetic oligonucleotide
cagccgguuagcugucaga

SEQ ID NO: 576354 - RNA, 19 nt, Artificial Sequence
  Description of Artificial Sequence: Synthetic oligonucleotide
gccauaggggaugccacac

SEQ ID NO: 576355 - RNA, 19 nt, Artificial Sequence
  Description of Artificial Sequence: Synthetic oligonucleotide
cuagagaaacagcccuggu

SEQ ID NO: 576356 - RNA, 19 nt, Artificial Sequence
  Description of Artificial Sequence: Synthetic oligonucleotide
gguaauaguggguggcauu

SEQ ID NO: 576357 - RNA, 19 nt, Artificial Sequence
  Description of Artificial Sequence: Synthetic oligonucleotide
ggggacuacagguccccuc

SEQ ID NO: 576358 - RNA, 19 nt, Artificial Sequence
  Description of Artificial Sequence: Synthetic oligonucleotide
ccacccucucaauaaauua

SEQ ID NO: 576359 - RNA, 19 nt, Artificial Sequence
  Description of Artificial Sequence: Synthetic oligonucleotide
cugucuguuccugcacaga

SEQ ID NO: 576360 - RNA, 19 nt, Artificial Sequence
  Description of Artificial Sequence: Synthetic oligonucleotide
caaaagcccaauagccauu

SEQ ID NO: 576361 - RNA, 19 nt, Artificial Sequence
  Description of Artificial Sequence: Synthetic oligonucleotide
gaauuccggcccagguaaa

SEQ ID NO: 576362 - RNA, 19 nt, Artificial Sequence
  Description of Artificial Sequence: Synthetic oligonucleotide
auacgccgugcgguagucu

SEQ ID NO: 576363 - RNA, 19 nt, Artificial Sequence
  Description of Artificial Sequence: Synthetic oligonucleotide
ccgugcgguagucuuggug

SEQ ID NO: 576364 - RNA, 19 nt, Artificial Sequence
  Description of Artificial Sequence: Synthetic oligonucleotide
cucggcuggugaggaaguc

SEQ ID NO: 576365 - RNA, 19 nt, Artificial Sequence
  Description of Artificial Sequence: Synthetic oligonucleotide
gguggccaauggcgggaag

SEQ ID NO: 576366 - RNA, 19 nt, Artificial Sequence
  Description of Artificial Sequence: Synthetic oligonucleotide
caauacgccgugcgguagu

SEQ ID NO: 576367 - RNA, 19 nt, Artificial Sequence
  Description of Artificial Sequence: Synthetic oligonucleotide
ccaauucccgggcccugag

SEQ ID NO: 576368 - RNA, 19 nt, Artificial Sequence
  Description of Artificial Sequence: Synthetic oligonucleotide
acgguccuggagggagcuc

SEQ ID NO: 576369 - RNA, 19 nt, Artificial Sequence
  Description of Artificial Sequence: Synthetic oligonucleotide
ccuacugcuugccagcuau

SEQ ID NO: 576370 - RNA, 19 nt, Artificial Sequence
  Description of Artificial Sequence: Synthetic oligonucleotide
acgccgugcgguagucuug

SEQ ID NO: 576371 - RNA, 19 nt, Artificial Sequence
  Description of Artificial Sequence: Synthetic oligonucleotide
gacgguccuggagggagcu

SEQ ID NO: 576372 - RNA, 19 nt, Artificial Sequence
  Description of Artificial Sequence: Synthetic oligonucleotide
gcaaccugcucaaucacuu

SEQ ID NO: 576373 - RNA, 19 nt, Artificial Sequence
  Description of Artificial Sequence: Synthetic oligonucleotide
gggagcgauaacggaggca

SEQ ID NO: 576374 - RNA, 19 nt, Artificial Sequence
  Description of Artificial Sequence: Synthetic oligonucleotide
cggacacuggugaguuugc

SEQ ID NO: 576375 - RNA, 19 nt, Artificial Sequence
  Description of Artificial Sequence: Synthetic oligonucleotide
gaaccgcagaccaccugau

SEQ ID NO: 576376 - RNA, 19 nt, Artificial Sequence
  Description of Artificial Sequence: Synthetic oligonucleotide
cccaagaauuccggcccag

SEQ ID NO: 576377 - RNA, 19 nt, Artificial Sequence
  Description of Artificial Sequence: Synthetic oligonucleotide
gcccaagaauuccggccca

SEQ ID NO: 576378 - RNA, 19 nt, Artificial Sequence
  Description of Artificial Sequence: Synthetic oligonucleotide
cgauagagguuaucacgga

SEQ ID NO: 576379 - RNA, 19 nt, Artificial Sequence
  Description of Artificial Sequence: Synthetic oligonucleotide
cccucaauaggucugccuu

SEQ ID NO: 576380 - RNA, 19 nt, Artificial Sequence
  Description of Artificial Sequence: Synthetic oligonucleotide
gccagcuaugucacaacua

SEQ ID NO: 576381 - RNA, 19 nt, Artificial Sequence
  Description of Artificial Sequence: Synthetic oligonucleotide
ggcgguuguagagguaaua

SEQ ID NO: 576382 - RNA, 19 nt, Artificial Sequence
  Description of Artificial Sequence: Synthetic oligonucleotide
gcaacuuauuccccacauu

SEQ ID NO: 576383 - RNA, 19 nt, Artificial Sequence
  Description of Artificial Sequence: Synthetic oligonucleotide
acauggucacgggcacuuu

SEQ ID NO: 576384 - RNA, 19 nt, Artificial Sequence
  Description of Artificial Sequence: Synthetic oligonucleotide
cuggcggacacuggugagu

SEQ ID NO: 576385 - RNA, 19 nt, Artificial Sequence
  Description of Artificial Sequence: Synthetic oligonucleotide
ggacuacagguccccucaa

SEQ ID NO: 576386 - RNA, 19 nt, Artificial Sequence
  Description of Artificial Sequence: Synthetic oligonucleotide
cgccgugcgguagucuugg

SEQ ID NO: 576387 - RNA, 19 nt, Artificial Sequence
  Description of Artificial Sequence: Synthetic oligonucleotide
gcaagcagauccacauggu

SEQ ID NO: 576388 - RNA, 19 nt, Artificial Sequence
  Description of Artificial Sequence: Synthetic oligonucleotide
caguguugacgaccacagu

SEQ ID NO: 576389 - RNA, 19 nt, Artificial Sequence
  Description of Artificial Sequence: Synthetic oligonucleotide
uggagucuucugggccaua

SEQ ID NO: 576390 - RNA, 19 nt, Artificial Sequence
  Description of Artificial Sequence: Synthetic oligonucleotide
gcgauaacggaggcaucaa

SEQ ID NO: 576391 - RNA, 19 nt, Artificial Sequence
  Description of Artificial Sequence: Synthetic oligonucleotide
ccucccuacaggggacuac

SEQ ID NO: 576392 - RNA, 19 nt, Artificial Sequence
  Description of Artificial Sequence: Synthetic oligonucleotide
cccaccauaggagcuaagu

SEQ ID NO: 576393 - RNA, 19 nt, Artificial Sequence
  Description of Artificial Sequence: Synthetic oligonucleotide
gggccauauuauggcuuga

SEQ ID NO: 576394 - RNA, 19 nt, Artificial Sequence
  Description of Artificial Sequence: Synthetic oligonucleotide
gcugaucccuggagucuuc

SEQ ID NO: 576395 - RNA, 19 nt, Artificial Sequence
  Description of Artificial Sequence: Synthetic oligonucleotide
cccacccucucaauaaauu

SEQ ID NO: 576396 - RNA, 19 nt, Artificial Sequence
  Description of Artificial Sequence: Synthetic oligonucleotide
cacaggcaccugagccugu

SEQ ID NO: 576397 - RNA, 19 nt, Artificial Sequence
  Description of Artificial Sequence: Synthetic oligonucleotide
caccugcagccgguuagcu

SEQ ID NO: 576398 - RNA, 19 nt, Artificial Sequence
  Description of Artificial Sequence: Synthetic oligonucleotide
ccuaucccacccucucaau

SEQ ID NO: 576399 - RNA, 19 nt, Artificial Sequence
  Description of Artificial Sequence: Synthetic oligonucleotide
ccaggcuuacuagcaacuu

SEQ ID NO: 576400 - RNA, 19 nt, Artificial Sequence
  Description of Artificial Sequence: Synthetic oligonucleotide
ggcggacacuggugaguuu

SEQ ID NO: 576401 - RNA, 19 nt, Artificial Sequence
  Description of Artificial Sequence: Synthetic oligonucleotide
ccaaggcgauagagguuau

SEQ ID NO: 576402 - RNA, 19 nt, Artificial Sequence
  Description of Artificial Sequence: Synthetic oligonucleotide
gccgugcgguagucuuggu

SEQ ID NO: 576403 - RNA, 19 nt, Artificial Sequence
  Description of Artificial Sequence: Synthetic oligonucleotide
cgaccacaguuccucucau

SEQ ID NO: 576404 - RNA, 19 nt, Artificial Sequence
  Description of Artificial Sequence: Synthetic oligonucleotide
aaucauaccaguuauauua

SEQ ID NO: 576405 - RNA, 19 nt, Artificial Sequence
  Description of Artificial Sequence: Synthetic oligonucleotide
uccauuaugaauaacaaua

SEQ ID NO: 576406 - RNA, 19 nt, Artificial Sequence
  Description of Artificial Sequence: Synthetic oligonucleotide
acaaucuuuaaauacagug

SEQ ID NO: 576407 - RNA, 19 nt, Artificial Sequence
  Description of Artificial Sequence: Synthetic oligonucleotide
aauaugaucuguagaaagc

SEQ ID NO: 576408 - RNA, 19 nt, Artificial Sequence
  Description of Artificial Sequence: Synthetic oligonucleotide
aagguaguaaaacugacgu

SEQ ID NO: 576409 - RNA, 19 nt, Artificial Sequence
  Description of Artificial Sequence: Synthetic oligonucleotide
aagauauugaaauacuuau

SEQ ID NO: 576410 - RNA, 19 nt, Artificial Sequence
  Description of Artificial Sequence: Synthetic oligonucleotide
aaaguguguuaguuaaagc

SEQ ID NO: 576411 - RNA, 19 nt, Artificial Sequence
  Description of Artificial Sequence: Synthetic oligonucleotide
aaccacuugcuguagagcg

SEQ ID NO: 576412 - RNA, 19 nt, Artificial Sequence
  Description of Artificial Sequence: Synthetic oligonucleotide
ucuccuuacaguaacgaag

SEQ ID NO: 576413 - RNA, 19 nt, Artificial Sequence
  Description of Artificial Sequence: Synthetic oligonucleotide
guaacgaagacccaucagg

SEQ ID NO: 576414 - RNA, 19 nt, Artificial Sequence
  Description of Artificial Sequence: Synthetic oligonucleotide
aaaaucucuuuaccauucc

SEQ ID NO: 576415 - RNA, 19 nt, Artificial Sequence
  Description of Artificial Sequence: Synthetic oligonucleotide
ucucucgugauauagaacu

SEQ ID NO: 576416 - RNA, 19 nt, Artificial Sequence
  Description of Artificial Sequence: Synthetic oligonucleotide
auagugauagccucuuccc

SEQ ID NO: 576417 - RNA, 19 nt, Artificial Sequence
  Description of Artificial Sequence: Synthetic oligonucleotide
uucacaauaaacaggucca

SEQ ID NO: 576418 - RNA, 19 nt, Artificial Sequence
  Description of Artificial Sequence: Synthetic oligonucleotide
uguacaucaaauucuauau

SEQ ID NO: 576419 - RNA, 19 nt, Artificial Sequence
  Description of Artificial Sequence: Synthetic oligonucleotide
agaaagaccaacuuacaug

SEQ ID NO: 576420 - RNA, 19 nt, Artificial Sequence
  Description of Artificial Sequence: Synthetic oligonucleotide
cuauccaagaacacgauug

SEQ ID NO: 576421 - RNA, 19 nt, Artificial Sequence
  Description of Artificial Sequence: Synthetic oligonucleotide
uguuggauaacucucucca

SEQ ID NO: 576422 - RNA, 19 nt, Artificial Sequence
  Description of Artificial Sequence: Synthetic oligonucleotide
uaacgaagacccaucaggg

SEQ ID NO: 576423 - RNA, 19 nt, Artificial Sequence
  Description of Artificial Sequence: Synthetic oligonucleotide
acauguagcauagugauag

SEQ ID NO: 576424 - RNA, 19 nt, Artificial Sequence
  Description of Artificial Sequence: Synthetic oligonucleotide
auuaaugugaaccccacaa

SEQ ID NO: 576425 - RNA, 19 nt, Artificial Sequence
  Description of Artificial Sequence: Synthetic oligonucleotide
ucucgcaugaugaucauga

SEQ ID NO: 576426 - RNA, 19 nt, Artificial Sequence
  Description of Artificial Sequence: Synthetic oligonucleotide
aauuggaugucaugaacca

SEQ ID NO: 576427 - RNA, 19 nt, Artificial Sequence
  Description of Artificial Sequence: Synthetic oligonucleotide
aaagucauagccuuugcuu

SEQ ID NO: 576428 - RNA, 19 nt, Artificial Sequence
  Description of Artificial Sequence: Synthetic oligonucleotide
uuauugcuauagaauaucc

SEQ ID NO: 576429 - RNA, 19 nt, Artificial Sequence
  Description of Artificial Sequence: Synthetic oligonucleotide
caagacuauuucuauaccc

SEQ ID NO: 576430 - RNA, 19 nt, Artificial Sequence
  Description of Artificial Sequence: Synthetic oligonucleotide
acaguuccgguauagucgc

SEQ ID NO: 576431 - RNA, 19 nt, Artificial Sequence
  Description of Artificial Sequence: Synthetic oligonucleotide
caagauguacaucaaauuc

SEQ ID NO: 576432 - RNA, 19 nt, Artificial Sequence
  Description of Artificial Sequence: Synthetic oligonucleotide
ugucgugcuguccacacgg

SEQ ID NO: 576433 - RNA, 19 nt, Artificial Sequence
  Description of Artificial Sequence: Synthetic oligonucleotide
guuaguuaaagcuuuccac

SEQ ID NO: 576434 - RNA, 19 nt, Artificial Sequence
  Description of Artificial Sequence: Synthetic oligonucleotide
agaguaaacaaagucauga

SEQ ID NO: 576435 - RNA, 19 nt, Artificial Sequence
  Description of Artificial Sequence: Synthetic oligonucleotide
uuggauaacucucuccacc

SEQ ID NO: 576436 - RNA, 19 nt, Artificial Sequence
  Description of Artificial Sequence: Synthetic oligonucleotide
aacggguaugagcuauucc

SEQ ID NO: 576437 - RNA, 19 nt, Artificial Sequence
  Description of Artificial Sequence: Synthetic oligonucleotide
aagauguacaucaaauucu

SEQ ID NO: 576438 - RNA, 19 nt, Artificial Sequence
  Description of Artificial Sequence: Synthetic oligonucleotide
cacaguuccgguauagucg

SEQ ID NO: 576439 - RNA, 19 nt, Artificial Sequence
  Description of Artificial Sequence: Synthetic oligonucleotide
uguagcauagugauagccu

SEQ ID NO: 576440 - RNA, 19 nt, Artificial Sequence
  Description of Artificial Sequence: Synthetic oligonucleotide
gacuguauuuguuaucccc

SEQ ID NO: 576441 - RNA, 19 nt, Artificial Sequence
  Description of Artificial Sequence: Synthetic oligonucleotide
gguaguaaaacugacgucc

SEQ ID NO: 576442 - RNA, 19 nt, Artificial Sequence
  Description of Artificial Sequence: Synthetic oligonucleotide
uccucaacggggaaaaggc

SEQ ID NO: 576443 - RNA, 19 nt, Artificial Sequence
  Description of Artificial Sequence: Synthetic oligonucleotide
uaaacagguaaccuuaguu

SEQ ID NO: 576444 - RNA, 19 nt, Artificial Sequence
  Description of Artificial Sequence: Synthetic oligonucleotide
cauagcaaccugcucaugg

SEQ ID NO: 576445 - RNA, 19 nt, Artificial Sequence
  Description of Artificial Sequence: Synthetic oligonucleotide
caagguaguaaaacugacg

SEQ ID NO: 576446 - RNA, 19 nt, Artificial Sequence
  Description of Artificial Sequence: Synthetic oligonucleotide
gaaagaccaacuuacaugu

SEQ ID NO: 576447 - RNA, 19 nt, Artificial Sequence
  Description of Artificial Sequence: Synthetic oligonucleotide
aguuaaggcuccucucucc

SEQ ID NO: 576448 - RNA, 19 nt, Artificial Sequence
  Description of Artificial Sequence: Synthetic oligonucleotide
agucgcuggauuuaacagg

SEQ ID NO: 576449 - RNA, 19 nt, Artificial Sequence
  Description of Artificial Sequence: Synthetic oligonucleotide
acacgggagagauugcagc

SEQ ID NO: 576450 - RNA, 19 nt, Artificial Sequence
  Description of Artificial Sequence: Synthetic oligonucleotide
uuuguuauccccacaguua

SEQ ID NO: 576451 - RNA, 19 nt, Artificial Sequence
  Description of Artificial Sequence: Synthetic oligonucleotide
cauguaaguaaucuccuug

SEQ ID NO: 576452 - RNA, 19 nt, Artificial Sequence
  Description of Artificial Sequence: Synthetic oligonucleotide
aaguauaauuuaaacaaau

SEQ ID NO: 576453 - RNA, 19 nt, Artificial Sequence
  Description of Artificial Sequence: Synthetic oligonucleotide
caagacauguagcauagug

SEQ ID NO: 576454 - RNA, 19 nt, Artificial Sequence
  Description of Artificial Sequence: Synthetic oligonucleotide
gauauagaacugccgacug

SEQ ID NO: 576455 - RNA, 19 nt, Artificial Sequence
  Description of Artificial Sequence: Synthetic oligonucleotide
ucuggaaccuaguacaaaa

SEQ ID NO: 576456 - RNA, 19 nt, Artificial Sequence
  Description of Artificial Sequence: Synthetic oligonucleotide
ugcccaacggguaugagcu

SEQ ID NO: 576457 - RNA, 19 nt, Artificial Sequence
  Description of Artificial Sequence: Synthetic oligonucleotide
uauugcuauagaauauccu

SEQ ID NO: 576458 - RNA, 19 nt, Artificial Sequence
  Description of Artificial Sequence: Synthetic oligonucleotide
uuggugugcucuaucacag

SEQ ID NO: 576459 - RNA, 19 nt, Artificial Sequence
  Description of Artificial Sequence: Synthetic oligonucleotide
acggguaugagcuauucca

SEQ ID NO: 576460 - RNA, 19 nt, Artificial Sequence
  Description of Artificial Sequence: Synthetic oligonucleotide
uuauucacaguuccgguau

SEQ ID NO: 576461 - RNA, 19 nt, Artificial Sequence
  Description of Artificial Sequence: Synthetic oligonucleotide
cuguaagggaaucacacug

SEQ ID NO: 576462 - RNA, 19 nt, Artificial Sequence
  Description of Artificial Sequence: Synthetic oligonucleotide
caauuuauucacaguuccg

SEQ ID NO: 576463 - RNA, 19 nt, Artificial Sequence
  Description of Artificial Sequence: Synthetic oligonucleotide
caaucuuuaaauacaguga

SEQ ID NO: 576464 - RNA, 19 nt, Artificial Sequence
  Description of Artificial Sequence: Synthetic oligonucleotide
auguagcauagugauagcc

SEQ ID NO: 576465 - RNA, 19 nt, Artificial Sequence
  Description of Artificial Sequence: Synthetic oligonucleotide
acggggaaaaggcaugucg

SEQ ID NO: 576466 - RNA, 19 nt, Artificial Sequence
  Description of Artificial Sequence: Synthetic oligonucleotide
aacacgauuggugugcucu

SEQ ID NO: 576467 - RNA, 19 nt, Artificial Sequence
  Description of Artificial Sequence: Synthetic oligonucleotide
guuauccccacaguuaagg

SEQ ID NO: 576468 - RNA, 19 nt, Artificial Sequence
  Description of Artificial Sequence: Synthetic oligonucleotide
uaugagcuauuccaagaug

SEQ ID NO: 576469 - RNA, 19 nt, Artificial Sequence
  Description of Artificial Sequence: Synthetic oligonucleotide
gaaagcuuaugcucacucc

SEQ ID NO: 576470 - RNA, 19 nt, Artificial Sequence
  Description of Artificial Sequence: Synthetic oligonucleotide
aagcuaugaagauauugaa

SEQ ID NO: 576471 - RNA, 19 nt, Artificial Sequence
  Description of Artificial Sequence: Synthetic oligonucleotide
aggcccgugcuuuagcucc

SEQ ID NO: 576472 - RNA, 19 nt, Artificial Sequence
  Description of Artificial Sequence: Synthetic oligonucleotide
uggucucgcaugaugauca

SEQ ID NO: 576473 - RNA, 19 nt, Artificial Sequence
  Description of Artificial Sequence: Synthetic oligonucleotide
ucgugauauagaacugccg

SEQ ID NO: 576474 - RNA, 19 nt, Artificial Sequence
  Description of Artificial Sequence: Synthetic oligonucleotide
acgaagacccaucagggug

SEQ ID NO: 576475 - RNA, 19 nt, Artificial Sequence
  Description of Artificial Sequence: Synthetic oligonucleotide
cugguauaagccuuuguac

SEQ ID NO: 576476 - RNA, 19 nt, Artificial Sequence
  Description of Artificial Sequence: Synthetic oligonucleotide
uugcuauagaauauccuaa

SEQ ID NO: 576477 - RNA, 19 nt, Artificial Sequence
  Description of Artificial Sequence: Synthetic oligonucleotide
ugagaaauuggaugucaug

SEQ ID NO: 576478 - RNA, 19 nt, Artificial Sequence
  Description of Artificial Sequence: Synthetic oligonucleotide
auaaccaucuggcucagaa

SEQ ID NO: 576479 - RNA, 19 nt, Artificial Sequence
  Description of Artificial Sequence: Synthetic oligonucleotide
agaauuggaauaugaucug

SEQ ID NO: 576480 - RNA, 19 nt, Artificial Sequence
  Description of Artificial Sequence: Synthetic oligonucleotide
aaucucuuuaccauucccu

SEQ ID NO: 576481 - RNA, 19 nt, Artificial Sequence
  Description of Artificial Sequence: Synthetic oligonucleotide
ugugccaacugcuugccca

SEQ ID NO: 576482 - RNA, 19 nt, Artificial Sequence
  Description of Artificial Sequence: Synthetic oligonucleotide
accaaaaucucuuuaccau

SEQ ID NO: 576483 - RNA, 19 nt, Artificial Sequence
  Description of Artificial Sequence: Synthetic oligonucleotide
auguaaguaaucuccuuga

SEQ ID NO: 576484 - RNA, 19 nt, Artificial Sequence
  Description of Artificial Sequence: Synthetic oligonucleotide
guaaguguggucucgcaug

SEQ ID NO: 576485 - RNA, 19 nt, Artificial Sequence
  Description of Artificial Sequence: Synthetic oligonucleotide
auagucgcuggauuuaaca

SEQ ID NO: 576486 - RNA, 19 nt, Artificial Sequence
  Description of Artificial Sequence: Synthetic oligonucleotide
aauaaacagguaaccuuag

SEQ ID NO: 576487 - RNA, 19 nt, Artificial Sequence
  Description of Artificial Sequence: Synthetic oligonucleotide
gcaauuuauucacaguucc

SEQ ID NO: 576488 - RNA, 19 nt, Artificial Sequence
  Description of Artificial Sequence: Synthetic oligonucleotide
ugauauagaacugccgacu

SEQ ID NO: 576489 - RNA, 19 nt, Artificial Sequence
  Description of Artificial Sequence: Synthetic oligonucleotide
uuucuauacccacucugga

SEQ ID NO: 576490 - RNA, 19 nt, Artificial Sequence
  Description of Artificial Sequence: Synthetic oligonucleotide
cuuccuaaauucaauguga

SEQ ID NO: 576491 - RNA, 19 nt, Artificial Sequence
  Description of Artificial Sequence: Synthetic oligonucleotide
cagaucacgacacggggcg

SEQ ID NO: 576492 - RNA, 19 nt, Artificial Sequence
  Description of Artificial Sequence: Synthetic oligonucleotide
aucaugagggcaaacauca

SEQ ID NO: 576493 - RNA, 19 nt, Artificial Sequence
  Description of Artificial Sequence: Synthetic oligonucleotide
aacaagcuaaugugaaaau

SEQ ID NO: 576494 - RNA, 19 nt, Artificial Sequence
  Description of Artificial Sequence: Synthetic oligonucleotide
gugcauguaaguaaucucc

SEQ ID NO: 576495 - RNA, 19 nt, Artificial Sequence
  Description of Artificial Sequence: Synthetic oligonucleotide
agugagaaagaccaacuua

SEQ ID NO: 576496 - RNA, 19 nt, Artificial Sequence
  Description of Artificial Sequence: Synthetic oligonucleotide
cucgugauauagaacugcc

SEQ ID NO: 576497 - RNA, 19 nt, Artificial Sequence
  Description of Artificial Sequence: Synthetic oligonucleotide
acaguuaaggcuccucucu

SEQ ID NO: 576498 - RNA, 19 nt, Artificial Sequence
  Description of Artificial Sequence: Synthetic oligonucleotide
ugcauguaaguaaucuccu

SEQ ID NO: 576499 - RNA, 19 nt, Artificial Sequence
  Description of Artificial Sequence: Synthetic oligonucleotide
ugucaucacacaucaugag

SEQ ID NO: 576500 - RNA, 19 nt, Artificial Sequence
  Description of Artificial Sequence: Synthetic oligonucleotide
auaacucucuccaccaagg

SEQ ID NO: 576501 - RNA, 19 nt, Artificial Sequence
  Description of Artificial Sequence: Synthetic oligonucleotide
uggauaacucucuccacca

SEQ ID NO: 576502 - RNA, 19 nt, Artificial Sequence
  Description of Artificial Sequence: Synthetic oligonucleotide
ucgcaugaugaucaugaug

SEQ ID NO: 576503 - RNA, 19 nt, Artificial Sequence
  Description of Artificial Sequence: Synthetic oligonucleotide
uccuuaucacagaucacga

SEQ ID NO: 576504 - RNA, 19 nt, Artificial Sequence
  Description of Artificial Sequence: Synthetic oligonucleotide
uuaaugugaaccccacaau

SEQ ID NO: 576505 - RNA, 19 nt, Artificial Sequence
  Description of Artificial Sequence: Synthetic oligonucleotide
caccaagguaguaaaacug

SEQ ID NO: 576506 - RNA, 19 nt, Artificial Sequence
  Description of Artificial Sequence: Synthetic oligonucleotide
ugucaugaaccaaaaucuc

SEQ ID NO: 576507 - RNA, 19 nt, Artificial Sequence
  Description of Artificial Sequence: Synthetic oligonucleotide
aguaacgaagacccaucag

SEQ ID NO: 576508 - RNA, 19 nt, Artificial Sequence
  Description of Artificial Sequence: Synthetic oligonucleotide
gacaugagaaugaaauaac

SEQ ID NO: 576509 - RNA, 19 nt, Artificial Sequence
  Description of Artificial Sequence: Synthetic oligonucleotide
ucaacggggaaaaggcaug

SEQ ID NO: 576510 - RNA, 19 nt, Artificial Sequence
  Description of Artificial Sequence: Synthetic oligonucleotide
aguaaaacugacguccuga

SEQ ID NO: 576511 - RNA, 19 nt, Artificial Sequence
  Description of Artificial Sequence: Synthetic oligonucleotide
ugucucucgugauauagaa

SEQ ID NO: 576512 - RNA, 19 nt, Artificial Sequence
  Description of Artificial Sequence: Synthetic oligonucleotide
agguaguaaaacugacguc

SEQ ID NO: 576513 - RNA, 19 nt, Artificial Sequence
  Description of Artificial Sequence: Synthetic oligonucleotide
gacguccugacuuucccag

SEQ ID NO: 576514 - RNA, 19 nt, Artificial Sequence
  Description of Artificial Sequence: Synthetic oligonucleotide
uuccuaaauucaaugugaa

SEQ ID NO: 576515 - RNA, 19 nt, Artificial Sequence
  Description of Artificial Sequence: Synthetic oligonucleotide
uaaccuuaguuucuuuuau

SEQ ID NO: 576516 - RNA, 19 nt, Artificial Sequence
  Description of Artificial Sequence: Synthetic oligonucleotide
ugucauacauguacuugac

SEQ ID NO: 576517 - RNA, 19 nt, Artificial Sequence
  Description of Artificial Sequence: Synthetic oligonucleotide
uuucccaguugucauacau

SEQ ID NO: 576518 - RNA, 19 nt, Artificial Sequence
  Description of Artificial Sequence: Synthetic oligonucleotide
uaaguguggucucgcauga

SEQ ID NO: 576519 - RNA, 19 nt, Artificial Sequence
  Description of Artificial Sequence: Synthetic oligonucleotide
caagcaguccacugagugg

SEQ ID NO: 576520 - RNA, 19 nt, Artificial Sequence
  Description of Artificial Sequence: Synthetic oligonucleotide
uuaugcucacuccgcaccc

SEQ ID NO: 576521 - RNA, 19 nt, Artificial Sequence
  Description of Artificial Sequence: Synthetic oligonucleotide
ucucgugauauagaacugc

SEQ ID NO: 576522 - RNA, 19 nt, Artificial Sequence
  Description of Artificial Sequence: Synthetic oligonucleotide
guauaagccuuuguacugg

SEQ ID NO: 576523 - RNA, 19 nt, Artificial Sequence
  Description of Artificial Sequence: Synthetic oligonucleotide
uuacgccucucuugcaugg

SEQ ID NO: 576524 - RNA, 19 nt, Artificial Sequence
  Description of Artificial Sequence: Synthetic oligonucleotide
uauuuguuauccccacagu

SEQ ID NO: 576525 - RNA, 19 nt, Artificial Sequence
  Description of Artificial Sequence: Synthetic oligonucleotide
aaacagagcaaugauuauu

SEQ ID NO: 576526 - RNA, 19 nt, Artificial Sequence
  Description of Artificial Sequence: Synthetic oligonucleotide
ugacuauugacaggacuag

SEQ ID NO: 576527 - RNA, 19 nt, Artificial Sequence
  Description of Artificial Sequence: Synthetic oligonucleotide
aacgaagacccaucagggu

SEQ ID NO: 576528 - RNA, 19 nt, Artificial Sequence
  Description of Artificial Sequence: Synthetic oligonucleotide
ugcuauagaauauccuaau

SEQ ID NO: 576529 - RNA, 19 nt, Artificial Sequence
  Description of Artificial Sequence: Synthetic oligonucleotide
uccauguguugcccaacgg

SEQ ID NO: 576530 - RNA, 19 nt, Artificial Sequence
  Description of Artificial Sequence: Synthetic oligonucleotide
uauagaacugccgacugua

SEQ ID NO: 576531 - RNA, 19 nt, Artificial Sequence
  Description of Artificial Sequence: Synthetic oligonucleotide
gucaugagaaauuggaugu

SEQ ID NO: 576532 - RNA, 19 nt, Artificial Sequence
  Description of Artificial Sequence: Synthetic oligonucleotide
augaugacaggcaucaacu

SEQ ID NO: 576533 - RNA, 19 nt, Artificial Sequence
  Description of Artificial Sequence: Synthetic oligonucleotide
gguauaagccuuuguacug

SEQ ID NO: 576534 - RNA, 19 nt, Artificial Sequence
  Description of Artificial Sequence: Synthetic oligonucleotide
uguaaguaaucuccuugau

SEQ ID NO: 576535 - RNA, 19 nt, Artificial Sequence
  Description of Artificial Sequence: Synthetic oligonucleotide
uucuauacccacucuggaa

SEQ ID NO: 576536 - RNA, 19 nt, Artificial Sequence
  Description of Artificial Sequence: Synthetic oligonucleotide
ugaucuguagaaagcuuau

SEQ ID NO: 576537 - RNA, 19 nt, Artificial Sequence
  Description of Artificial Sequence: Synthetic oligonucleotide
agugauagccucuucccau

SEQ ID NO: 576538 - RNA, 19 nt, Artificial Sequence
  Description of Artificial Sequence: Synthetic oligonucleotide
uagugauagccucuuccca

SEQ ID NO: 576539 - RNA, 19 nt, Artificial Sequence
  Description of Artificial Sequence: Synthetic oligonucleotide
caucaugagggcaaacauc

SEQ ID NO: 576540 - RNA, 19 nt, Artificial Sequence
  Description of Artificial Sequence: Synthetic oligonucleotide
uugcccaacggguaugagc

SEQ ID NO: 576541 - RNA, 19 nt, Artificial Sequence
  Description of Artificial Sequence: Synthetic oligonucleotide
acuauugacaggacuaggu

SEQ ID NO: 576542 - RNA, 19 nt, Artificial Sequence
  Description of Artificial Sequence: Synthetic oligonucleotide
cuauacccacucuggaacc

SEQ ID NO: 576543 - RNA, 19 nt, Artificial Sequence
  Description of Artificial Sequence: Synthetic oligonucleotide
ucgccgugcaaccacuugc

SEQ ID NO: 576544 - RNA, 19 nt, Artificial Sequence
  Description of Artificial Sequence: Synthetic oligonucleotide
aacugaaaguguguuaguu

SEQ ID NO: 576545 - RNA, 19 nt, Artificial Sequence
  Description of Artificial Sequence: Synthetic oligonucleotide
cuguucuguacagaauugg

SEQ ID NO: 576546 - RNA, 19 nt, Artificial Sequence
  Description of Artificial Sequence: Synthetic oligonucleotide
gugauauagaacugccgac

SEQ ID NO: 576547 - RNA, 19 nt, Artificial Sequence
  Description of Artificial Sequence: Synthetic oligonucleotide
uguaucuguuucagauuca

SEQ ID NO: 576548 - RNA, 19 nt, Artificial Sequence
  Description of Artificial Sequence: Synthetic oligonucleotide
auaaacagguaaccuuagu

SEQ ID NO: 576549 - RNA, 19 nt, Artificial Sequence
  Description of Artificial Sequence: Synthetic oligonucleotide
gacuauugacaggacuagg

SEQ ID NO: 576550 - RNA, 19 nt, Artificial Sequence
  Description of Artificial Sequence: Synthetic oligonucleotide
aaucucaggaccagcauua

SEQ ID NO: 576551 - RNA, 19 nt, Artificial Sequence
  Description of Artificial Sequence: Synthetic oligonucleotide
auagcaaccugcucaugga

SEQ ID NO: 576552 - RNA, 19 nt, Artificial Sequence
  Description of Artificial Sequence: Synthetic oligonucleotide
uaguaaaacugacguccug

SEQ ID NO: 576553 - RNA, 19 nt, Artificial Sequence
  Description of Artificial Sequence: Synthetic oligonucleotide
guccacacgggagagauug

SEQ ID NO: 576554 - RNA, 19 nt, Artificial Sequence
  Description of Artificial Sequence: Synthetic oligonucleotide
cuccuuacaguaacgaaga

SEQ ID NO: 576555 - RNA, 19 nt, Artificial Sequence
  Description of Artificial Sequence: Synthetic oligonucleotide
uguguuaguuaaagcuuuc

SEQ ID NO: 576556 - RNA, 19 nt, Artificial Sequence
  Description of Artificial Sequence: Synthetic oligonucleotide
uuuagcuccccagcaagga

SEQ ID NO: 576557 - RNA, 19 nt, Artificial Sequence
  Description of Artificial Sequence: Synthetic oligonucleotide
augacauugugcuuuuauu

SEQ ID NO: 576558 - RNA, 19 nt, Artificial Sequence
  Description of Artificial Sequence: Synthetic oligonucleotide
caagcuuagcaaugguuuc

SEQ ID NO: 576559 - RNA, 19 nt, Artificial Sequence
  Description of Artificial Sequence: Synthetic oligonucleotide
guacaucaaauucuauauc

SEQ ID NO: 576560 - RNA, 19 nt, Artificial Sequence
  Description of Artificial Sequence: Synthetic oligonucleotide
uucagagugcauguaagua

SEQ ID NO: 576561 - RNA, 19 nt, Artificial Sequence
  Description of Artificial Sequence: Synthetic oligonucleotide
ucucgaaagacuggagugu

SEQ ID NO: 576562 - RNA, 19 nt, Artificial Sequence
  Description of Artificial Sequence: Synthetic oligonucleotide
acaguaacgaagacccauc

SEQ ID NO: 576563 - RNA, 19 nt, Artificial Sequence
  Description of Artificial Sequence: Synthetic oligonucleotide
cucgccuugugccaacugc

SEQ ID NO: 576564 - RNA, 19 nt, Artificial Sequence
  Description of Artificial Sequence: Synthetic oligonucleotide
guuccgguauagucgcugg

SEQ ID NO: 576565 - RNA, 19 nt, Artificial Sequence
  Description of Artificial Sequence: Synthetic oligonucleotide
ucaucaagcuaugaagaua

SEQ ID NO: 576566 - RNA, 19 nt, Artificial Sequence
  Description of Artificial Sequence: Synthetic oligonucleotide
ugcucauggaaagccagca

SEQ ID NO: 576567 - RNA, 19 nt, Artificial Sequence
  Description of Artificial Sequence: Synthetic oligonucleotide
caucaagcuaugaagauau

SEQ ID NO: 576568 - RNA, 19 nt, Artificial Sequence
  Description of Artificial Sequence: Synthetic oligonucleotide
acgauuggugugcucuauc

SEQ ID NO: 576569 - RNA, 19 nt, Artificial Sequence
  Description of Artificial Sequence: Synthetic oligonucleotide
accaagguaguaaaacuga

SEQ ID NO: 576570 - RNA, 19 nt, Artificial Sequence
  Description of Artificial Sequence: Synthetic oligonucleotide
uauagucgcuggauuuaac

SEQ ID NO: 576571 - RNA, 19 nt, Artificial Sequence
  Description of Artificial Sequence: Synthetic oligonucleotide
agcauuaaugugaacccca

SEQ ID NO: 576572 - RNA, 19 nt, Artificial Sequence
  Description of Artificial Sequence: Synthetic oligonucleotide
uguguucuuaauggucuca

SEQ ID NO: 576573 - RNA, 19 nt, Artificial Sequence
  Description of Artificial Sequence: Synthetic oligonucleotide
aguguguuaguuaaagcuu

SEQ ID NO: 576574 - RNA, 19 nt, Artificial Sequence
  Description of Artificial Sequence: Synthetic oligonucleotide
uaaucaagucuggcagccg

SEQ ID NO: 576575 - RNA, 19 nt, Artificial Sequence
  Description of Artificial Sequence: Synthetic oligonucleotide
uccuaaauucaaugugaau

SEQ ID NO: 576576 - RNA, 19 nt, Artificial Sequence
  Description of Artificial Sequence: Synthetic oligonucleotide
aaacugacguccugacuuu

SEQ ID NO: 576577 - RNA, 19 nt, Artificial Sequence
  Description of Artificial Sequence: Synthetic oligonucleotide
ucgccuugugccaacugcu

SEQ ID NO: 576578 - RNA, 19 nt, Artificial Sequence
  Description of Artificial Sequence: Synthetic oligonucleotide
gguaugagcuauuccaaga

SEQ ID NO: 576579 - RNA, 19 nt, Artificial Sequence
  Description of Artificial Sequence: Synthetic oligonucleotide
gagcguucuggcgacuugg

SEQ ID NO: 576580 - RNA, 19 nt, Artificial Sequence
  Description of Artificial Sequence: Synthetic oligonucleotide
gaucuguagaaagcuuaug

SEQ ID NO: 576581 - RNA, 19 nt, Artificial Sequence
  Description of Artificial Sequence: Synthetic oligonucleotide
auucacaguuccgguauag

SEQ ID NO: 576582 - RNA, 19 nt, Artificial Sequence
  Description of Artificial Sequence: Synthetic oligonucleotide
augauuccauuaugaauaa

SEQ ID NO: 576583 - RNA, 19 nt, Artificial Sequence
  Description of Artificial Sequence: Synthetic oligonucleotide
caugucgugcuguccacac

SEQ ID NO: 576584 - RNA, 19 nt, Artificial Sequence
  Description of Artificial Sequence: Synthetic oligonucleotide
caagcuaaugugaaaauuu

SEQ ID NO: 576585 - RNA, 19 nt, Artificial Sequence
  Description of Artificial Sequence: Synthetic oligonucleotide
agcauagcaaccugcucau

SEQ ID NO: 576586 - RNA, 19 nt, Artificial Sequence
  Description of Artificial Sequence: Synthetic oligonucleotide
cugacguccugacuuuccc

SEQ ID NO: 576587 - RNA, 19 nt, Artificial Sequence
  Description of Artificial Sequence: Synthetic oligonucleotide
acaagcuaaugugaaaauu

SEQ ID NO: 576588 - RNA, 19 nt, Artificial Sequence
  Description of Artificial Sequence: Synthetic oligonucleotide
uucuauccaagaacacgau

SEQ ID NO: 576589 - RNA, 19 nt, Artificial Sequence
  Description of Artificial Sequence: Synthetic oligonucleotide
cauguagcauagugauagc

SEQ ID NO: 576590 - RNA, 19 nt, Artificial Sequence
  Description of Artificial Sequence: Synthetic oligonucleotide
ggugaugauuccauuauga

SEQ ID NO: 576591 - RNA, 19 nt, Artificial Sequence
  Description of Artificial Sequence: Synthetic oligonucleotide
auagaauauccuaauugua

SEQ ID NO: 576592 - RNA, 19 nt, Artificial Sequence
  Description of Artificial Sequence: Synthetic oligonucleotide
guuggauaacucucuccac

SEQ ID NO: 576593 - RNA, 19 nt, Artificial Sequence
  Description of Artificial Sequence: Synthetic oligonucleotide
cuguagagcguucuggcga

SEQ ID NO: 576594 - RNA, 19 nt, Artificial Sequence
  Description of Artificial Sequence: Synthetic oligonucleotide
aacugacguccugacuuuc

SEQ ID NO: 576595 - RNA, 19 nt, Artificial Sequence
  Description of Artificial Sequence: Synthetic oligonucleotide
aguccacugaguggggcac

SEQ ID NO: 576596 - RNA, 19 nt, Artificial Sequence
  Description of Artificial Sequence: Synthetic oligonucleotide
gugacuauugacaggacua

SEQ ID NO: 576597 - RNA, 19 nt, Artificial Sequence
  Description of Artificial Sequence: Synthetic oligonucleotide
ccauguguugcccaacggg

SEQ ID NO: 576598 - RNA, 19 nt, Artificial Sequence
  Description of Artificial Sequence: Synthetic oligonucleotide
ucauaccaguuauauuaua

SEQ ID NO: 576599 - RNA, 19 nt, Artificial Sequence
  Description of Artificial Sequence: Synthetic oligonucleotide
ccuuacaguaacgaagacc

SEQ ID NO: 576600 - RNA, 19 nt, Artificial Sequence
  Description of Artificial Sequence: Synthetic oligonucleotide
cucaccugauugacuaaug

SEQ ID NO: 576601 - RNA, 19 nt, Artificial Sequence
  Description of Artificial Sequence: Synthetic oligonucleotide
aacggggaaaaggcauguc

SEQ ID NO: 576602 - RNA, 19 nt, Artificial Sequence
  Description of Artificial Sequence: Synthetic oligonucleotide
cucucgugauauagaacug

SEQ ID NO: 576603 - RNA, 19 nt, Artificial Sequence
  Description of Artificial Sequence: Synthetic oligonucleotide
cagcauuaaugugaacccc

SEQ ID NO: 576604 - RNA, 19 nt, Artificial Sequence
  Description of Artificial Sequence: Synthetic oligonucleotide
ccgacuguauuuguuaucc

SEQ ID NO: 576605 - RNA, 19 nt, Artificial Sequence
  Description of Artificial Sequence: Synthetic oligonucleotide
ugacguccugacuuuccca

SEQ ID NO: 576606 - RNA, 19 nt, Artificial Sequence
  Description of Artificial Sequence: Synthetic oligonucleotide
uccuuacaguaacgaagac

SEQ ID NO: 576607 - RNA, 19 nt, Artificial Sequence
  Description of Artificial Sequence: Synthetic oligonucleotide
augucgugcuguccacacg

SEQ ID NO: 576608 - RNA, 19 nt, Artificial Sequence
  Description of Artificial Sequence: Synthetic oligonucleotide
aguuccgguauagucgcug

SEQ ID NO: 576609 - RNA, 19 nt, Artificial Sequence
  Description of Artificial Sequence: Synthetic oligonucleotide
ucucaccugauugacuaau

SEQ ID NO: 576610 - RNA, 19 nt, Artificial Sequence
  Description of Artificial Sequence: Synthetic oligonucleotide
aucacacaucaugagggca

SEQ ID NO: 576611 - RNA, 19 nt, Artificial Sequence
  Description of Artificial Sequence: Synthetic oligonucleotide
ucucaggaccagcauuaau

SEQ ID NO: 576612 - RNA, 19 nt, Artificial Sequence
  Description of Artificial Sequence: Synthetic oligonucleotide
ccuucagagugcauguaag

SEQ ID NO: 576613 - RNA, 19 nt, Artificial Sequence
  Description of Artificial Sequence: Synthetic oligonucleotide
agcuuagcaaugguuucug

SEQ ID NO: 576614 - RNA, 19 nt, Artificial Sequence
  Description of Artificial Sequence: Synthetic oligonucleotide
cagagcaaugauuauucua

SEQ ID NO: 576615 - RNA, 19 nt, Artificial Sequence
  Description of Artificial Sequence: Synthetic oligonucleotide
uauucacaguuccgguaua

SEQ ID NO: 576616 - RNA, 19 nt, Artificial Sequence
  Description of Artificial Sequence: Synthetic oligonucleotide
cauguguugcccaacgggu

SEQ ID NO: 576617 - RNA, 19 nt, Artificial Sequence
  Description of Artificial Sequence: Synthetic oligonucleotide
uggcguaaguguggucucg

SEQ ID NO: 576618 - RNA, 19 nt, Artificial Sequence
  Description of Artificial Sequence: Synthetic oligonucleotide
gaucacgacacggggcggc

SEQ ID NO: 576619 - RNA, 19 nt, Artificial Sequence
  Description of Artificial Sequence: Synthetic oligonucleotide
uuccgguauagucgcugga

SEQ ID NO: 576620 - RNA, 19 nt, Artificial Sequence
  Description of Artificial Sequence: Synthetic oligonucleotide
uccgguauagucgcuggau

SEQ ID NO: 576621 - RNA, 19 nt, Artificial Sequence
  Description of Artificial Sequence: Synthetic oligonucleotide
cuuggcguaaguguggucu

SEQ ID NO: 576622 - RNA, 19 nt, Artificial Sequence
  Description of Artificial Sequence: Synthetic oligonucleotide
ugauuccauuaugaauaac

SEQ ID NO: 576623 - RNA, 19 nt, Artificial Sequence
  Description of Artificial Sequence: Synthetic oligonucleotide
guaaguaaucuccuugauu

SEQ ID NO: 576624 - RNA, 19 nt, Artificial Sequence
  Description of Artificial Sequence: Synthetic oligonucleotide
guaugagcuauuccaagau

SEQ ID NO: 576625 - RNA, 19 nt, Artificial Sequence
  Description of Artificial Sequence: Synthetic oligonucleotide
acgccucucuugcauggag

SEQ ID NO: 576626 - RNA, 19 nt, Artificial Sequence
  Description of Artificial Sequence: Synthetic oligonucleotide
aguggggcaccuugauugu

SEQ ID NO: 576627 - RNA, 19 nt, Artificial Sequence
  Description of Artificial Sequence: Synthetic oligonucleotide
aucacgacacggggcggcc

SEQ ID NO: 576628 - RNA, 19 nt, Artificial Sequence
  Description of Artificial Sequence: Synthetic oligonucleotide
uguugcccaacggguauga

SEQ ID NO: 576629 - RNA, 19 nt, Artificial Sequence
  Description of Artificial Sequence: Synthetic oligonucleotide
agagugcauguaaguaauc

SEQ ID NO: 576630 - RNA, 19 nt, Artificial Sequence
  Description of Artificial Sequence: Synthetic oligonucleotide
agagcguucuggcgacuug

SEQ ID NO: 576631 - RNA, 19 nt, Artificial Sequence
  Description of Artificial Sequence: Synthetic oligonucleotide
ugaguggggcaccuugauu

SEQ ID NO: 576632 - RNA, 19 nt, Artificial Sequence
  Description of Artificial Sequence: Synthetic oligonucleotide
cuccgcaccccaaucaaga

SEQ ID NO: 576633 - RNA, 19 nt, Artificial Sequence
  Description of Artificial Sequence: Synthetic oligonucleotide
cauuaaugugaaccccaca

SEQ ID NO: 576634 - RNA, 19 nt, Artificial Sequence
  Description of Artificial Sequence: Synthetic oligonucleotide
uuggcguaaguguggucuc

SEQ ID NO: 576635 - RNA, 19 nt, Artificial Sequence
  Description of Artificial Sequence: Synthetic oligonucleotide
cgugauauagaacugccga

SEQ ID NO: 576636 - RNA, 19 nt, Artificial Sequence
  Description of Artificial Sequence: Synthetic oligonucleotide
gucaugaaccaaaaucucu

SEQ ID NO: 576637 - RNA, 19 nt, Artificial Sequence
  Description of Artificial Sequence: Synthetic oligonucleotide
agcguucuggcgacuuggc

SEQ ID NO: 576638 - RNA, 19 nt, Artificial Sequence
  Description of Artificial Sequence: Synthetic oligonucleotide
ucucuugcauggagauccu

SEQ ID NO: 576639 - RNA, 19 nt, Artificial Sequence
  Description of Artificial Sequence: Synthetic oligonucleotide
uaugcucacuccgcacccc

SEQ ID NO: 576640 - RNA, 19 nt, Artificial Sequence
  Description of Artificial Sequence: Synthetic oligonucleotide
augagaaauuggaugucau

SEQ ID NO: 576641 - RNA, 19 nt, Artificial Sequence
  Description of Artificial Sequence: Synthetic oligonucleotide
uccacacgggagagauugc

SEQ ID NO: 576642 - RNA, 19 nt, Artificial Sequence
  Description of Artificial Sequence: Synthetic oligonucleotide
acacaucaugagggcaaac

SEQ ID NO: 576643 - RNA, 19 nt, Artificial Sequence
  Description of Artificial Sequence: Synthetic oligonucleotide
ggagauccugucaucacac

SEQ ID NO: 576644 - RNA, 19 nt, Artificial Sequence
  Description of Artificial Sequence: Synthetic oligonucleotide
caguaacgaagacccauca

SEQ ID NO: 576645 - RNA, 19 nt, Artificial Sequence
  Description of Artificial Sequence: Synthetic oligonucleotide
ucgaaagacuggaguguuu

SEQ ID NO: 576646 - RNA, 19 nt, Artificial Sequence
  Description of Artificial Sequence: Synthetic oligonucleotide
caucucgaaagacuggagu

SEQ ID NO: 576647 - RNA, 19 nt, Artificial Sequence
  Description of Artificial Sequence: Synthetic oligonucleotide
ccuccuuaaucaagucugg

SEQ ID NO: 576648 - RNA, 19 nt, Artificial Sequence
  Description of Artificial Sequence: Synthetic oligonucleotide
cucuccuuacaguaacgaa

SEQ ID NO: 576649 - RNA, 19 nt, Artificial Sequence
  Description of Artificial Sequence: Synthetic oligonucleotide
agaaugccuugcaagcagu

SEQ ID NO: 576650 - RNA, 19 nt, Artificial Sequence
  Description of Artificial Sequence: Synthetic oligonucleotide
cuauuccaagauguacauc

SEQ ID NO: 576651 - RNA, 19 nt, Artificial Sequence
  Description of Artificial Sequence: Synthetic oligonucleotide
ucuggcgacuuggcguaag

SEQ ID NO: 576652 - RNA, 19 nt, Artificial Sequence
  Description of Artificial Sequence: Synthetic oligonucleotide
uggcgacuuggcguaagug

SEQ ID NO: 576653 - RNA, 19 nt, Artificial Sequence
  Description of Artificial Sequence: Synthetic oligonucleotide
cugucucucgugauauaga

SEQ ID NO: 576654 - RNA, 19 nt, Artificial Sequence
  Description of Artificial Sequence: Synthetic oligonucleotide
gcagcuguaagggaaucac

SEQ ID NO: 576655 - RNA, 19 nt, Artificial Sequence
  Description of Artificial Sequence: Synthetic oligonucleotide
ccuuaucacagaucacgac

SEQ ID NO: 576656 - RNA, 19 nt, Artificial Sequence
  Description of Artificial Sequence: Synthetic oligonucleotide
agaacacgauuggugugcu

SEQ ID NO: 576657 - RNA, 19 nt, Artificial Sequence
  Description of Artificial Sequence: Synthetic oligonucleotide
uggcagccgcuucaaucca

SEQ ID NO: 576658 - RNA, 19 nt, Artificial Sequence
  Description of Artificial Sequence: Synthetic oligonucleotide
caaagucauagccuuugcu

SEQ ID NO: 576659 - RNA, 19 nt, Artificial Sequence
  Description of Artificial Sequence: Synthetic oligonucleotide
cuucagagugcauguaagu

SEQ ID NO: 576660 - RNA, 19 nt, Artificial Sequence
  Description of Artificial Sequence: Synthetic oligonucleotide
agcauagugauagccucuu

SEQ ID NO: 576661 - RNA, 19 nt, Artificial Sequence
  Description of Artificial Sequence: Synthetic oligonucleotide
ggugacuauugacaggacu

SEQ ID NO: 576662 - RNA, 19 nt, Artificial Sequence
  Description of Artificial Sequence: Synthetic oligonucleotide
cacgacacggggcggcccc

SEQ ID NO: 576663 - RNA, 19 nt, Artificial Sequence
  Description of Artificial Sequence: Synthetic oligonucleotide
gcgacuuggcguaagugug

SEQ ID NO: 576664 - RNA, 19 nt, Artificial Sequence
  Description of Artificial Sequence: Synthetic oligonucleotide
aauaaccaucuggcucaga

SEQ ID NO: 576665 - RNA, 19 nt, Artificial Sequence
  Description of Artificial Sequence: Synthetic oligonucleotide
gucucucgugauauagaac

SEQ ID NO: 576666 - RNA, 19 nt, Artificial Sequence
  Description of Artificial Sequence: Synthetic oligonucleotide
agaucacgacacggggcgg

SEQ ID NO: 576667 - RNA, 19 nt, Artificial Sequence
  Description of Artificial Sequence: Synthetic oligonucleotide
gaggcccgugcuuuagcuc

SEQ ID NO: 576668 - RNA, 19 nt, Artificial Sequence
  Description of Artificial Sequence: Synthetic oligonucleotide
cgugcuuuagcuccccagc

SEQ ID NO: 576669 - RNA, 19 nt, Artificial Sequence
  Description of Artificial Sequence: Synthetic oligonucleotide
guauagucgcuggauuuaa

SEQ ID NO: 576670 - RNA, 19 nt, Artificial Sequence
  Description of Artificial Sequence: Synthetic oligonucleotide
cagggacaacacgaacugc

SEQ ID NO: 576671 - RNA, 19 nt, Artificial Sequence
  Description of Artificial Sequence: Synthetic oligonucleotide
cuauugacaggacuagguu

SEQ ID NO: 576672 - RNA, 19 nt, Artificial Sequence
  Description of Artificial Sequence: Synthetic oligonucleotide
cagccgcuucaauccaagc

SEQ ID NO: 576673 - RNA, 19 nt, Artificial Sequence
  Description of Artificial Sequence: Synthetic oligonucleotide
cugccgacuguauuuguua

SEQ ID NO: 576674 - RNA, 19 nt, Artificial Sequence
  Description of Artificial Sequence: Synthetic oligonucleotide
ggcgacuuggcguaagugu

SEQ ID NO: 576675 - RNA, 19 nt, Artificial Sequence
  Description of Artificial Sequence: Synthetic oligonucleotide
acgaacugcccugaagauu

SEQ ID NO: 576676 - RNA, 19 nt, Artificial Sequence
  Description of Artificial Sequence: Synthetic oligonucleotide
cagaggcccgugcuuuagc

SEQ ID NO: 576677 - RNA, 19 nt, Artificial Sequence
  Description of Artificial Sequence: Synthetic oligonucleotide
caacggguaugagcuauuc

SEQ ID NO: 576678 - RNA, 19 nt, Artificial Sequence
  Description of Artificial Sequence: Synthetic oligonucleotide
guaguaaaacugacguccu

SEQ ID NO: 576679 - RNA, 19 nt, Artificial Sequence
  Description of Artificial Sequence: Synthetic oligonucleotide
caguccacugaguggggca

SEQ ID NO: 576680 - RNA, 19 nt, Artificial Sequence
  Description of Artificial Sequence: Synthetic oligonucleotide
acuccgcaccccaaucaag

SEQ ID NO: 576681 - RNA, 19 nt, Artificial Sequence
  Description of Artificial Sequence: Synthetic oligonucleotide
gcguucuggcgacuuggcg

SEQ ID NO: 576682 - RNA, 19 nt, Artificial Sequence
  Description of Artificial Sequence: Synthetic oligonucleotide
gaacacgauuggugugcuc

SEQ ID NO: 576683 - RNA, 19 nt, Artificial Sequence
  Description of Artificial Sequence: Synthetic oligonucleotide
gcauuaaugugaaccccac

SEQ ID NO: 576684 - RNA, 19 nt, Artificial Sequence
  Description of Artificial Sequence: Synthetic oligonucleotide
auagaacugccgacuguau

SEQ ID NO: 576685 - RNA, 19 nt, Artificial Sequence
  Description of Artificial Sequence: Synthetic oligonucleotide
ccuugauuuucagggcucc

SEQ ID NO: 576686 - RNA, 19 nt, Artificial Sequence
  Description of Artificial Sequence: Synthetic oligonucleotide
caucagggugucagcuguc

SEQ ID NO: 576687 - RNA, 19 nt, Artificial Sequence
  Description of Artificial Sequence: Synthetic oligonucleotide
agguaaccuuaguuucuuu

SEQ ID NO: 576688 - RNA, 19 nt, Artificial Sequence
  Description of Artificial Sequence: Synthetic oligonucleotide
guguguuaguuaaagcuuu

SEQ ID NO: 576689 - RNA, 19 nt, Artificial Sequence
  Description of Artificial Sequence: Synthetic oligonucleotide
caccuccuuaaucaagucu

SEQ ID NO: 576690 - RNA, 19 nt, Artificial Sequence
  Description of Artificial Sequence: Synthetic oligonucleotide
acugccgacuguauuuguu

SEQ ID NO: 576691 - RNA, 19 nt, Artificial Sequence
  Description of Artificial Sequence: Synthetic oligonucleotide
accccacaaucugucucuc

SEQ ID NO: 576692 - RNA, 19 nt, Artificial Sequence
  Description of Artificial Sequence: Synthetic oligonucleotide
uagagcguucuggcgacuu

SEQ ID NO: 576693 - RNA, 19 nt, Artificial Sequence
  Description of Artificial Sequence: Synthetic oligonucleotide
uacgccucucuugcaugga

SEQ ID NO: 576694 - RNA, 19 nt, Artificial Sequence
  Description of Artificial Sequence: Synthetic oligonucleotide
gguauagucgcuggauuua

SEQ ID NO: 576695 - RNA, 19 nt, Artificial Sequence
  Description of Artificial Sequence: Synthetic oligonucleotide
uccugucaucacacaucau

SEQ ID NO: 576696 - RNA, 19 nt, Artificial Sequence
  Description of Artificial Sequence: Synthetic oligonucleotide
gaagacccaucaggguguc

SEQ ID NO: 576697 - RNA, 19 nt, Artificial Sequence
  Description of Artificial Sequence: Synthetic oligonucleotide
guugcccaacggguaugag

SEQ ID NO: 576698 - RNA, 19 nt, Artificial Sequence
  Description of Artificial Sequence: Synthetic oligonucleotide
gacugacuucuggugguaa

SEQ ID NO: 576699 - RNA, 19 nt, Artificial Sequence
  Description of Artificial Sequence: Synthetic oligonucleotide
guguugcccaacggguaug

SEQ ID NO: 576700 - RNA, 19 nt, Artificial Sequence
  Description of Artificial Sequence: Synthetic oligonucleotide
aaguguggucucgcaugau

SEQ ID NO: 576701 - RNA, 19 nt, Artificial Sequence
  Description of Artificial Sequence: Synthetic oligonucleotide
cccauuaucaggacugacu

SEQ ID NO: 576702 - RNA, 19 nt, Artificial Sequence
  Description of Artificial Sequence: Synthetic oligonucleotide
auguguugcccaacgggua

SEQ ID NO: 576703 - RNA, 19 nt, Artificial Sequence
  Description of Artificial Sequence: Synthetic oligonucleotide
auacagugagaaagaccaa

SEQ ID NO: 576704 - RNA, 19 nt, Artificial Sequence
  Description of Artificial Sequence: Synthetic oligonucleotide
uguccacacgggagagauu

SEQ ID NO: 576705 - RNA, 19 nt, Artificial Sequence
  Description of Artificial Sequence: Synthetic oligonucleotide
gacuuggcguaaguguggu

SEQ ID NO: 576706 - RNA, 19 nt, Artificial Sequence
  Description of Artificial Sequence: Synthetic oligonucleotide
aucugucucucgugauaua

SEQ ID NO: 576707 - RNA, 19 nt, Artificial Sequence
  Description of Artificial Sequence: Synthetic oligonucleotide
aagacccaucaggguguca

SEQ ID NO: 576708 - RNA, 19 nt, Artificial Sequence
  Description of Artificial Sequence: Synthetic oligonucleotide
ggcguaaguguggucucgc

SEQ ID NO: 576709 - RNA, 19 nt, Artificial Sequence
  Description of Artificial Sequence: Synthetic oligonucleotide
gugcaaccacuugcuguag

SEQ ID NO: 576710 - RNA, 19 nt, Artificial Sequence
  Description of Artificial Sequence: Synthetic oligonucleotide
gccgacuguauuuguuauc

SEQ ID NO: 576711 - RNA, 19 nt, Artificial Sequence
  Description of Artificial Sequence: Synthetic oligonucleotide
auacccacucuggaaccua

SEQ ID NO: 576712 - RNA, 19 nt, Artificial Sequence
  Description of Artificial Sequence: Synthetic oligonucleotide
aucucaggaccagcauuaa

SEQ ID NO: 576713 - RNA, 19 nt, Artificial Sequence
  Description of Artificial Sequence: Synthetic oligonucleotide
cucuggaaccuaguacaaa

SEQ ID NO: 576714 - RNA, 19 nt, Artificial Sequence
  Description of Artificial Sequence: Synthetic oligonucleotide
ggacaacacgaacugcccu

SEQ ID NO: 576715 - RNA, 19 nt, Artificial Sequence
  Description of Artificial Sequence: Synthetic oligonucleotide
cgacuguauuuguuauccc

SEQ ID NO: 576716 - RNA, 19 nt, Artificial Sequence
  Description of Artificial Sequence: Synthetic oligonucleotide
cacucucccaccugagccu

SEQ ID NO: 576717 - RNA, 19 nt, Artificial Sequence
  Description of Artificial Sequence: Synthetic oligonucleotide
cuguccacacgggagagau

SEQ ID NO: 576718 - RNA, 19 nt, Artificial Sequence
  Description of Artificial Sequence: Synthetic oligonucleotide
ucccucgccuugugccaac

SEQ ID NO: 576719 - RNA, 19 nt, Artificial Sequence
  Description of Artificial Sequence: Synthetic oligonucleotide
cacacaucaugagggcaaa

SEQ ID NO: 576720 - RNA, 19 nt, Artificial Sequence
  Description of Artificial Sequence: Synthetic oligonucleotide
ccucaacggggaaaaggca

SEQ ID NO: 576721 - RNA, 19 nt, Artificial Sequence
  Description of Artificial Sequence: Synthetic oligonucleotide
cgugcaaccacuugcugua

SEQ ID NO: 576722 - RNA, 19 nt, Artificial Sequence
  Description of Artificial Sequence: Synthetic oligonucleotide
aucaagcuaugaagauauu

SEQ ID NO: 576723 - RNA, 19 nt, Artificial Sequence
  Description of Artificial Sequence: Synthetic oligonucleotide
ggagagauugcagcuuccu

SEQ ID NO: 576724 - RNA, 19 nt, Artificial Sequence
  Description of Artificial Sequence: Synthetic oligonucleotide
gcguaaguguggucucgca

SEQ ID NO: 576725 - RNA, 19 nt, Artificial Sequence
  Description of Artificial Sequence: Synthetic oligonucleotide
acccacucuggaaccuagu

SEQ ID NO: 576726 - RNA, 19 nt, Artificial Sequence
  Description of Artificial Sequence: Synthetic oligonucleotide
cucgaaagacuggaguguu

SEQ ID NO: 576727 - RNA, 19 nt, Artificial Sequence
  Description of Artificial Sequence: Synthetic oligonucleotide
cguucuggcgacuuggcgu

SEQ ID NO: 576728 - RNA, 19 nt, Artificial Sequence
  Description of Artificial Sequence: Synthetic oligonucleotide
gcucccucgccuugugcca

SEQ ID NO: 576729 - RNA, 19 nt, Artificial Sequence
  Description of Artificial Sequence: Synthetic oligonucleotide
caacggggaaaaggcaugu

SEQ ID NO: 576730 - RNA, 19 nt, Artificial Sequence
  Description of Artificial Sequence: Synthetic oligonucleotide
cucgcaugaugaucaugau

SEQ ID NO: 576731 - RNA, 19 nt, Artificial Sequence
  Description of Artificial Sequence: Synthetic oligonucleotide
uucuggcgacuuggcguaa

SEQ ID NO: 576732 - RNA, 19 nt, Artificial Sequence
  Description of Artificial Sequence: Synthetic oligonucleotide
ccgugcaaccacuugcugu

SEQ ID NO: 576733 - RNA, 19 nt, Artificial Sequence
  Description of Artificial Sequence: Synthetic oligonucleotide
gcaccccaaucaagagggg

SEQ ID NO: 576734 - RNA, 19 nt, Artificial Sequence
  Description of Artificial Sequence: Synthetic oligonucleotide
cagguaaccuuaguuucuu

SEQ ID NO: 576735 - RNA, 19 nt, Artificial Sequence
  Description of Artificial Sequence: Synthetic oligonucleotide
ccacacgggagagauugca

SEQ ID NO: 576736 - RNA, 19 nt, Artificial Sequence
  Description of Artificial Sequence: Synthetic oligonucleotide
gcauagcaaccugcucaug

SEQ ID NO: 576737 - RNA, 19 nt, Artificial Sequence
  Description of Artificial Sequence: Synthetic oligonucleotide
cuggcgacuuggcguaagu

SEQ ID NO: 576738 - RNA, 19 nt, Artificial Sequence
  Description of Artificial Sequence: Synthetic oligonucleotide
cgcuucaauccaagcagga

SEQ ID NO: 576739 - RNA, 19 nt, Artificial Sequence
  Description of Artificial Sequence: Synthetic oligonucleotide
gcaugucgugcuguccaca

SEQ ID NO: 576740 - RNA, 19 nt, Artificial Sequence
  Description of Artificial Sequence: Synthetic oligonucleotide
gggugacuauugacaggac

SEQ ID NO: 576741 - RNA, 19 nt, Artificial Sequence
  Description of Artificial Sequence: Synthetic oligonucleotide
ccucgccuugugccaacug

SEQ ID NO: 576742 - RNA, 19 nt, Artificial Sequence
  Description of Artificial Sequence: Synthetic oligonucleotide
ccugagccuucacaauaaa

SEQ ID NO: 576743 - RNA, 19 nt, Artificial Sequence
  Description of Artificial Sequence: Synthetic oligonucleotide
ggcccgugcuuuagcuccc

SEQ ID NO: 576744 - RNA, 19 nt, Artificial Sequence
  Description of Artificial Sequence: Synthetic oligonucleotide
cucccucgccuugugccaa

SEQ ID NO: 576745 - RNA, 19 nt, Artificial Sequence
  Description of Artificial Sequence: Synthetic oligonucleotide
ccuucaagacauguagcau

SEQ ID NO: 576746 - RNA, 19 nt, Artificial Sequence
  Description of Artificial Sequence: Synthetic oligonucleotide
cacgauuggugugcucuau

SEQ ID NO: 576747 - RNA, 19 nt, Artificial Sequence
  Description of Artificial Sequence: Synthetic oligonucleotide
ggacugacuucugguggua

SEQ ID NO: 576748 - RNA, 19 nt, Artificial Sequence
  Description of Artificial Sequence: Synthetic oligonucleotide
cguaaguguggucucgcau

SEQ ID NO: 576749 - RNA, 19 nt, Artificial Sequence
  Description of Artificial Sequence: Synthetic oligonucleotide
ggucucgcaugaugaucau

SEQ ID NO: 576750 - RNA, 19 nt, Artificial Sequence
  Description of Artificial Sequence: Synthetic oligonucleotide
cgguauagucgcuggauuu

SEQ ID NO: 576751 - RNA, 19 nt, Artificial Sequence
  Description of Artificial Sequence: Synthetic oligonucleotide
gcccgugcuuuagcucccc

SEQ ID NO: 576752 - RNA, 19 nt, Artificial Sequence
  Description of Artificial Sequence: Synthetic oligonucleotide
cccaacggguaugagcuau

SEQ ID NO: 576753 - RNA, 19 nt, Artificial Sequence
  Description of Artificial Sequence: Synthetic oligonucleotide
gcccaacggguaugagcua

SEQ ID NO: 576754 - RNA, 19 nt, Artificial Sequence
  Description of Artificial Sequence: Synthetic oligonucleotide
ccaacggguaugagcuauu

SEQ ID NO: 576755 - RNA, 19 nt, Artificial Sequence
  Description of Artificial Sequence: Synthetic oligonucleotide
cccucgccgugcaaccacu

SEQ ID NO: 576756 - RNA, 19 nt, Artificial Sequence
  Description of Artificial Sequence: Synthetic oligonucleotide
ccucgccgugcaaccacuu

SEQ ID NO: 576757 - RNA, 19 nt, Artificial Sequence
  Description of Artificial Sequence: Synthetic oligonucleotide
cccucgccuugugccaacu

SEQ ID NO: 576758 - RNA, 19 nt, Artificial Sequence
  Description of Artificial Sequence: Synthetic oligonucleotide
ugaauuuaaaggcagacug

SEQ ID NO: 576759 - RNA, 19 nt, Artificial Sequence
  Description of Artificial Sequence: Synthetic oligonucleotide
aagaacgugaaacacgcuc

SEQ ID NO: 576760 - RNA, 19 nt, Artificial Sequence
  Description of Artificial Sequence: Synthetic oligonucleotide
acgugaaacacgcucaucc

SEQ ID NO: 576761 - RNA, 19 nt, Artificial Sequence
  Description of Artificial Sequence: Synthetic oligonucleotide
auaaaacucaggcaaucgc

SEQ ID NO: 576762 - RNA, 19 nt, Artificial Sequence
  Description of Artificial Sequence: Synthetic oligonucleotide
aaaaccguacuucucuggg

SEQ ID NO: 576763 - RNA, 19 nt, Artificial Sequence
  Description of Artificial Sequence: Synthetic oligonucleotide
auaagaacgugaaacacgc

SEQ ID NO: 576764 - RNA, 19 nt, Artificial Sequence
  Description of Artificial Sequence: Synthetic oligonucleotide
auugauauagcgaacgaac

SEQ ID NO: 576765 - RNA, 19 nt, Artificial Sequence
  Description of Artificial Sequence: Synthetic oligonucleotide
uuaaucaugucaucuaaca

SEQ ID NO: 576766 - RNA, 19 nt, Artificial Sequence
  Description of Artificial Sequence: Synthetic oligonucleotide
gauaagaacgugaaacacg

SEQ ID NO: 576767 - RNA, 19 nt, Artificial Sequence
  Description of Artificial Sequence: Synthetic oligonucleotide
uaucucacagaauacaugu

SEQ ID NO: 576768 - RNA, 19 nt, Artificial Sequence
  Description of Artificial Sequence: Synthetic oligonucleotide
aacgaaagcucagggaugc

SEQ ID NO: 576769 - RNA, 19 nt, Artificial Sequence
  Description of Artificial Sequence: Synthetic oligonucleotide
aauauauguacagcaauca

SEQ ID NO: 576770 - RNA, 19 nt, Artificial Sequence
  Description of Artificial Sequence: Synthetic oligonucleotide
auagcgaacgaacugcuuc

SEQ ID NO: 576771 - RNA, 19 nt, Artificial Sequence
  Description of Artificial Sequence: Synthetic oligonucleotide
uguacagcaaucaggcucc

SEQ ID NO: 576772 - RNA, 19 nt, Artificial Sequence
  Description of Artificial Sequence: Synthetic oligonucleotide
gaguacagggcucauaaag

SEQ ID NO: 576773 - RNA, 19 nt, Artificial Sequence
  Description of Artificial Sequence: Synthetic oligonucleotide
gaugugauaacgaauggug

SEQ ID NO: 576774 - RNA, 19 nt, Artificial Sequence
  Description of Artificial Sequence: Synthetic oligonucleotide
uguuaguugguccaacagc

SEQ ID NO: 576775 - RNA, 19 nt, Artificial Sequence
  Description of Artificial Sequence: Synthetic oligonucleotide
ucgacaucuguauagaacu

SEQ ID NO: 576776 - RNA, 19 nt, Artificial Sequence
  Description of Artificial Sequence: Synthetic oligonucleotide
cauauugauauagcgaacg

SEQ ID NO: 576777 - RNA, 19 nt, Artificial Sequence
  Description of Artificial Sequence: Synthetic oligonucleotide
caggcaaucguaaaacucg

SEQ ID NO: 576778 - RNA, 19 nt, Artificial Sequence
  Description of Artificial Sequence: Synthetic oligonucleotide
ucauaaagcaccugaggag

SEQ ID NO: 576779 - RNA, 19 nt, Artificial Sequence
  Description of Artificial Sequence: Synthetic oligonucleotide
agcauauugauauagcgaa

SEQ ID NO: 576780 - RNA, 19 nt, Artificial Sequence
  Description of Artificial Sequence: Synthetic oligonucleotide
cuucuuuggcucaaaaccg

SEQ ID NO: 576781 - RNA, 19 nt, Artificial Sequence
  Description of Artificial Sequence: Synthetic oligonucleotide
uguagucaauuucugcccg

SEQ ID NO: 576782 - RNA, 19 nt, Artificial Sequence
  Description of Artificial Sequence: Synthetic oligonucleotide
agauggaacaugucaacgg

SEQ ID NO: 576783 - RNA, 19 nt, Artificial Sequence
  Description of Artificial Sequence: Synthetic oligonucleotide
gauauagcgaacgaacugc

SEQ ID NO: 576784 - RNA, 19 nt, Artificial Sequence
  Description of Artificial Sequence: Synthetic oligonucleotide
aaggucgugucauuuauca

SEQ ID NO: 576785 - RNA, 19 nt, Artificial Sequence
  Description of Artificial Sequence: Synthetic oligonucleotide
uaaaacucaggcaaucgcu

SEQ ID NO: 576786 - RNA, 19 nt, Artificial Sequence
  Description of Artificial Sequence: Synthetic oligonucleotide
aacgguuucagucgccagg

SEQ ID NO: 576787 - RNA, 19 nt, Artificial Sequence
  Description of Artificial Sequence: Synthetic oligonucleotide
uagaacuucaugagggaag

SEQ ID NO: 576788 - RNA, 19 nt, Artificial Sequence
  Description of Artificial Sequence: Synthetic oligonucleotide
aaucguaaaacucgucccu

SEQ ID NO: 576789 - RNA, 19 nt, Artificial Sequence
  Description of Artificial Sequence: Synthetic oligonucleotide
aaaaggaaacgaaagcuca

SEQ ID NO: 576790 - RNA, 19 nt, Artificial Sequence
  Description of Artificial Sequence: Synthetic oligonucleotide
ggacaucugaauuuaaagg

SEQ ID NO: 576791 - RNA, 19 nt, Artificial Sequence
  Description of Artificial Sequence: Synthetic oligonucleotide
aacucaggcaaucgcucgc

SEQ ID NO: 576792 - RNA, 19 nt, Artificial Sequence
  Description of Artificial Sequence: Synthetic oligonucleotide
ucuaaacucauccggggca

SEQ ID NO: 576793 - RNA, 19 nt, Artificial Sequence
  Description of Artificial Sequence: Synthetic oligonucleotide
aaauguccgaguucucuag

SEQ ID NO: 576794 - RNA, 19 nt, Artificial Sequence
  Description of Artificial Sequence: Synthetic oligonucleotide
augucaacgguuucagucg

SEQ ID NO: 576795 - RNA, 19 nt, Artificial Sequence
  Description of Artificial Sequence: Synthetic oligonucleotide
ucuagcagagacaugcgac

SEQ ID NO: 576796 - RNA, 19 nt, Artificial Sequence
  Description of Artificial Sequence: Synthetic oligonucleotide
uuaucucacagaauacaug

SEQ ID NO: 576797 - RNA, 19 nt, Artificial Sequence
  Description of Artificial Sequence: Synthetic oligonucleotide
agucaaacaagucccgauc

SEQ ID NO: 576798 - RNA, 19 nt, Artificial Sequence
  Description of Artificial Sequence: Synthetic oligonucleotide
ucucuagucacauggagaa

SEQ ID NO: 576799 - RNA, 19 nt, Artificial Sequence
  Description of Artificial Sequence: Synthetic oligonucleotide
aguacagggcucauaaagc

SEQ ID NO: 576800 - RNA, 19 nt, Artificial Sequence
  Description of Artificial Sequence: Synthetic oligonucleotide
uaaucaugucaucuaacac

SEQ ID NO: 576801 - RNA, 19 nt, Artificial Sequence
  Description of Artificial Sequence: Synthetic oligonucleotide
acgaucccaagauuaacac

SEQ ID NO: 576802 - RNA, 19 nt, Artificial Sequence
  Description of Artificial Sequence: Synthetic oligonucleotide
caaucguaaaacucguccc

SEQ ID NO: 576803 - RNA, 19 nt, Artificial Sequence
  Description of Artificial Sequence: Synthetic oligonucleotide
uacgaucccaagauuaaca

SEQ ID NO: 576804 - RNA, 19 nt, Artificial Sequence
  Description of Artificial Sequence: Synthetic oligonucleotide
aaggaaacgaaagcucagg

SEQ ID NO: 576805 - RNA, 19 nt, Artificial Sequence
  Description of Artificial Sequence: Synthetic oligonucleotide
agguaugugaauaugauau

SEQ ID NO: 576806 - RNA, 19 nt, Artificial Sequence
  Description of Artificial Sequence: Synthetic oligonucleotide
gauggaucgguccauuaug

SEQ ID NO: 576807 - RNA, 19 nt, Artificial Sequence
  Description of Artificial Sequence: Synthetic oligonucleotide
agcuuaaacuucucuauug

SEQ ID NO: 576808 - RNA, 19 nt, Artificial Sequence
  Description of Artificial Sequence: Synthetic oligonucleotide
ugugauaacgaauggugaa

SEQ ID NO: 576809 - RNA, 19 nt, Artificial Sequence
  Description of Artificial Sequence: Synthetic oligonucleotide
uugaauguuugucacuuaa

SEQ ID NO: 576810 - RNA, 19 nt, Artificial Sequence
  Description of Artificial Sequence: Synthetic oligonucleotide
uugccaaaggcucuuaaaa

SEQ ID NO: 576811 - RNA, 19 nt, Artificial Sequence
  Description of Artificial Sequence: Synthetic oligonucleotide
acuguuuggucacucgggg

SEQ ID NO: 576812 - RNA, 19 nt, Artificial Sequence
  Description of Artificial Sequence: Synthetic oligonucleotide
uuuagcgaagcgagcacag

SEQ ID NO: 576813 - RNA, 19 nt, Artificial Sequence
  Description of Artificial Sequence: Synthetic oligonucleotide
ucuacuguuuggucacucg

SEQ ID NO: 576814 - RNA, 19 nt, Artificial Sequence
  Description of Artificial Sequence: Synthetic oligonucleotide
uucucuagucacauggaga

SEQ ID NO: 576815 - RNA, 19 nt, Artificial Sequence
  Description of Artificial Sequence: Synthetic oligonucleotide
uuauuaaucaugucaucua

SEQ ID NO: 576816 - RNA, 19 nt, Artificial Sequence
  Description of Artificial Sequence: Synthetic oligonucleotide
caucugaauuuaaaggcag

SEQ ID NO: 576817 - RNA, 19 nt, Artificial Sequence
  Description of Artificial Sequence: Synthetic oligonucleotide
aaacacgcucauccugagc

SEQ ID NO: 576818 - RNA, 19 nt, Artificial Sequence
  Description of Artificial Sequence: Synthetic oligonucleotide
gcaaguaaauaucuguuag

SEQ ID NO: 576819 - RNA, 19 nt, Artificial Sequence
  Description of Artificial Sequence: Synthetic oligonucleotide
acaucuggcgguugaaggg

SEQ ID NO: 576820 - RNA, 19 nt, Artificial Sequence
  Description of Artificial Sequence: Synthetic oligonucleotide
aaauacgaucccaagauua

SEQ ID NO: 576821 - RNA, 19 nt, Artificial Sequence
  Description of Artificial Sequence: Synthetic oligonucleotide
uuaauccagggcucgguag

SEQ ID NO: 576822 - RNA, 19 nt, Artificial Sequence
  Description of Artificial Sequence: Synthetic oligonucleotide
ugaacuuaucauagaacuc

SEQ ID NO: 576823 - RNA, 19 nt, Artificial Sequence
  Description of Artificial Sequence: Synthetic oligonucleotide
uaacgaauggugaacuuau

SEQ ID NO: 576824 - RNA, 19 nt, Artificial Sequence
  Description of Artificial Sequence: Synthetic oligonucleotide
uaaucgggguccaaguucu

SEQ ID NO: 576825 - RNA, 19 nt, Artificial Sequence
  Description of Artificial Sequence: Synthetic oligonucleotide
ucuagucacauggagaaaa

SEQ ID NO: 576826 - RNA, 19 nt, Artificial Sequence
  Description of Artificial Sequence: Synthetic oligonucleotide
aacaagucccgaucguuca

SEQ ID NO: 576827 - RNA, 19 nt, Artificial Sequence
  Description of Artificial Sequence: Synthetic oligonucleotide
aacagguaugugaauauga

SEQ ID NO: 576828 - RNA, 19 nt, Artificial Sequence
  Description of Artificial Sequence: Synthetic oligonucleotide
aguuucaaagggcuauuug

SEQ ID NO: 576829 - RNA, 19 nt, Artificial Sequence
  Description of Artificial Sequence: Synthetic oligonucleotide
aggagaauauuguacaaua

SEQ ID NO: 576830 - RNA, 19 nt, Artificial Sequence
  Description of Artificial Sequence: Synthetic oligonucleotide
aacgaggaacacaacaaug

SEQ ID NO: 576831 - RNA, 19 nt, Artificial Sequence
  Description of Artificial Sequence: Synthetic oligonucleotide
gagggauuggucaugaaca

SEQ ID NO: 576832 - RNA, 19 nt, Artificial Sequence
  Description of Artificial Sequence: Synthetic oligonucleotide
ggucgugucauuuaucagc

SEQ ID NO: 576833 - RNA, 19 nt, Artificial Sequence
  Description of Artificial Sequence: Synthetic oligonucleotide
gcaaucguaaaacucgucc

SEQ ID NO: 576834 - RNA, 19 nt, Artificial Sequence
  Description of Artificial Sequence: Synthetic oligonucleotide
ugugacgggcgaaggacgg

SEQ ID NO: 576835 - RNA, 19 nt, Artificial Sequence
  Description of Artificial Sequence: Synthetic oligonucleotide
aaaggaaacgaaagcucag

SEQ ID NO: 576836 - RNA, 19 nt, Artificial Sequence
  Description of Artificial Sequence: Synthetic oligonucleotide
agcaagaagcuuaaacuuc

SEQ ID NO: 576837 - RNA, 19 nt, Artificial Sequence
  Description of Artificial Sequence: Synthetic oligonucleotide
cucgacaucuguauagaac

SEQ ID NO: 576838 - RNA, 19 nt, Artificial Sequence
  Description of Artificial Sequence: Synthetic oligonucleotide
aaaauacgaucccaagauu

SEQ ID NO: 576839 - RNA, 19 nt, Artificial Sequence
  Description of Artificial Sequence: Synthetic oligonucleotide
uugugacgggcgaaggacg

SEQ ID NO: 576840 - RNA, 19 nt, Artificial Sequence
  Description of Artificial Sequence: Synthetic oligonucleotide
uagugcugaugugauaacg

SEQ ID NO: 576841 - RNA, 19 nt, Artificial Sequence
  Description of Artificial Sequence: Synthetic oligonucleotide
aaaauagugcugaugugau

SEQ ID NO: 576842 - RNA, 19 nt, Artificial Sequence
  Description of Artificial Sequence: Synthetic oligonucleotide
gggacaucugaauuuaaag

SEQ ID NO: 576843 - RNA, 19 nt, Artificial Sequence
  Description of Artificial Sequence: Synthetic oligonucleotide
agaucucuacuguuugguc

SEQ ID NO: 576844 - RNA, 19 nt, Artificial Sequence
  Description of Artificial Sequence: Synthetic oligonucleotide
cugguugcagguuugagca

SEQ ID NO: 576845 - RNA, 19 nt, Artificial Sequence
  Description of Artificial Sequence: Synthetic oligonucleotide
auuauggugccagagggca

SEQ ID NO: 576846 - RNA, 19 nt, Artificial Sequence
  Description of Artificial Sequence: Synthetic oligonucleotide
auauugauauagcgaacga

SEQ ID NO: 576847 - RNA, 19 nt, Artificial Sequence
  Description of Artificial Sequence: Synthetic oligonucleotide
uauugauauagcgaacgaa

SEQ ID NO: 576848 - RNA, 19 nt, Artificial Sequence
  Description of Artificial Sequence: Synthetic oligonucleotide
ugauaacgaauggugaacu

SEQ ID NO: 576849 - RNA, 19 nt, Artificial Sequence
  Description of Artificial Sequence: Synthetic oligonucleotide
uaauccagggcucgguaga

SEQ ID NO: 576850 - RNA, 19 nt, Artificial Sequence
  Description of Artificial Sequence: Synthetic oligonucleotide
aaacagguaugugaauaug

SEQ ID NO: 576851 - RNA, 19 nt, Artificial Sequence
  Description of Artificial Sequence: Synthetic oligonucleotide
ugaugugauaacgaauggu

SEQ ID NO: 576852 - RNA, 19 nt, Artificial Sequence
  Description of Artificial Sequence: Synthetic oligonucleotide
gaucuuaauccagggcucg

SEQ ID NO: 576853 - RNA, 19 nt, Artificial Sequence
  Description of Artificial Sequence: Synthetic oligonucleotide
ucguucagccauccugucg

SEQ ID NO: 576854 - RNA, 19 nt, Artificial Sequence
  Description of Artificial Sequence: Synthetic oligonucleotide
ccagcaauuugguagagag

SEQ ID NO: 576855 - RNA, 19 nt, Artificial Sequence
  Description of Artificial Sequence: Synthetic oligonucleotide
uacuacacaggcaaucgua

SEQ ID NO: 576856 - RNA, 19 nt, Artificial Sequence
  Description of Artificial Sequence: Synthetic oligonucleotide
aacaugaccuccaccagcu

SEQ ID NO: 576857 - RNA, 19 nt, Artificial Sequence
  Description of Artificial Sequence: Synthetic oligonucleotide
uguccgaguucucuaguca

SEQ ID NO: 576858 - RNA, 19 nt, Artificial Sequence
  Description of Artificial Sequence: Synthetic oligonucleotide
aaggacgggcuuuacuaca

SEQ ID NO: 576859 - RNA, 19 nt, Artificial Sequence
  Description of Artificial Sequence: Synthetic oligonucleotide
auagugcugaugugauaac

SEQ ID NO: 576860 - RNA, 19 nt, Artificial Sequence
  Description of Artificial Sequence: Synthetic oligonucleotide
uagcgaacgaacugcuucc

SEQ ID NO: 576861 - RNA, 19 nt, Artificial Sequence
  Description of Artificial Sequence: Synthetic oligonucleotide
gaagcgagcacaguccagc

SEQ ID NO: 576862 - RNA, 19 nt, Artificial Sequence
  Description of Artificial Sequence: Synthetic oligonucleotide
gcugaugugauaacgaaug

SEQ ID NO: 576863 - RNA, 19 nt, Artificial Sequence
  Description of Artificial Sequence: Synthetic oligonucleotide
agguuaaaguucagcaugg

SEQ ID NO: 576864 - RNA, 19 nt, Artificial Sequence
  Description of Artificial Sequence: Synthetic oligonucleotide
cuaaucgggguccaaguuc

SEQ ID NO: 576865 - RNA, 19 nt, Artificial Sequence
  Description of Artificial Sequence: Synthetic oligonucleotide
ugucaacgguuucagucgc

SEQ ID NO: 576866 - RNA, 19 nt, Artificial Sequence
  Description of Artificial Sequence: Synthetic oligonucleotide
agacaugcgacagggacag

SEQ ID NO: 576867 - RNA, 19 nt, Artificial Sequence
  Description of Artificial Sequence: Synthetic oligonucleotide
cucagucaacaucuggcgg

SEQ ID NO: 576868 - RNA, 19 nt, Artificial Sequence
  Description of Artificial Sequence: Synthetic oligonucleotide
aaccguacuucucuggguu

SEQ ID NO: 576869 - RNA, 19 nt, Artificial Sequence
  Description of Artificial Sequence: Synthetic oligonucleotide
aaaccguacuucucugggu

SEQ ID NO: 576870 - RNA, 19 nt, Artificial Sequence
  Description of Artificial Sequence: Synthetic oligonucleotide
aagcuuaaacuucucuauu

SEQ ID NO: 576871 - RNA, 19 nt, Artificial Sequence
  Description of Artificial Sequence: Synthetic oligonucleotide
ucucuauugcaauggugga

SEQ ID NO: 576872 - RNA, 19 nt, Artificial Sequence
  Description of Artificial Sequence: Synthetic oligonucleotide
aauacgaucccaagauuaa

SEQ ID NO: 576873 - RNA, 19 nt, Artificial Sequence
  Description of Artificial Sequence: Synthetic oligonucleotide
uauggguuucggauguagu

SEQ ID NO: 576874 - RNA, 19 nt, Artificial Sequence
  Description of Artificial Sequence: Synthetic oligonucleotide
auguccgaguucucuaguc

SEQ ID NO: 576875 - RNA, 19 nt, Artificial Sequence
  Description of Artificial Sequence: Synthetic oligonucleotide
ccauuauggugccagaggg

SEQ ID NO: 576876 - RNA, 19 nt, Artificial Sequence
  Description of Artificial Sequence: Synthetic oligonucleotide
cauuauggugccagagggc

SEQ ID NO: 576877 - RNA, 19 nt, Artificial Sequence
  Description of Artificial Sequence: Synthetic oligonucleotide
cucgcaaaugccuugggga

SEQ ID NO: 576878 - RNA, 19 nt, Artificial Sequence
  Description of Artificial Sequence: Synthetic oligonucleotide
ugauggaucgguccauuau

SEQ ID NO: 576879 - RNA, 19 nt, Artificial Sequence
  Description of Artificial Sequence: Synthetic oligonucleotide
acuucugaguccgaggcug

SEQ ID NO: 576880 - RNA, 19 nt, Artificial Sequence
  Description of Artificial Sequence: Synthetic oligonucleotide
gugcucgacaucuguauag

SEQ ID NO: 576881 - RNA, 19 nt, Artificial Sequence
  Description of Artificial Sequence: Synthetic oligonucleotide
agggacagcuuaguggucg

SEQ ID NO: 576882 - RNA, 19 nt, Artificial Sequence
  Description of Artificial Sequence: Synthetic oligonucleotide
auacgaucccaagauuaac

SEQ ID NO: 576883 - RNA, 19 nt, Artificial Sequence
  Description of Artificial Sequence: Synthetic oligonucleotide
uagcgaagcgagcacaguc

SEQ ID NO: 576884 - RNA, 19 nt, Artificial Sequence
  Description of Artificial Sequence: Synthetic oligonucleotide
cuuuggcucaaaaccguac

SEQ ID NO: 576885 - RNA, 19 nt, Artificial Sequence
  Description of Artificial Sequence: Synthetic oligonucleotide
ucgcaaaugccuuggggac

SEQ ID NO: 576886 - RNA, 19 nt, Artificial Sequence
  Description of Artificial Sequence: Synthetic oligonucleotide
auggaucgguccauuaugg

SEQ ID NO: 576887 - RNA, 19 nt, Artificial Sequence
  Description of Artificial Sequence: Synthetic oligonucleotide
gugaaacacgcucauccug

SEQ ID NO: 576888 - RNA, 19 nt, Artificial Sequence
  Description of Artificial Sequence: Synthetic oligonucleotide
gaaggacgggcuuuacuac

SEQ ID NO: 576889 - RNA, 19 nt, Artificial Sequence
  Description of Artificial Sequence: Synthetic oligonucleotide
cagcauauugauauagcga

SEQ ID NO: 576890 - RNA, 19 nt, Artificial Sequence
  Description of Artificial Sequence: Synthetic oligonucleotide
aagaaggucgugucauuua

SEQ ID NO: 576891 - RNA, 19 nt, Artificial Sequence
  Description of Artificial Sequence: Synthetic oligonucleotide
gcagcuucgagguggaugc

SEQ ID NO: 576892 - RNA, 19 nt, Artificial Sequence
  Description of Artificial Sequence: Synthetic oligonucleotide
cauaaagcaccugaggaga

SEQ ID NO: 576893 - RNA, 19 nt, Artificial Sequence
  Description of Artificial Sequence: Synthetic oligonucleotide
cgagauaagaacgugaaac

SEQ ID NO: 576894 - RNA, 19 nt, Artificial Sequence
  Description of Artificial Sequence: Synthetic oligonucleotide
ucguaaaacucgucccuca

SEQ ID NO: 576895 - RNA, 19 nt, Artificial Sequence
  Description of Artificial Sequence: Synthetic oligonucleotide
uggauuugaucccugccuu

SEQ ID NO: 576896 - RNA, 19 nt, Artificial Sequence
  Description of Artificial Sequence: Synthetic oligonucleotide
agguauggguuucggaugu

SEQ ID NO: 576897 - RNA, 19 nt, Artificial Sequence
  Description of Artificial Sequence: Synthetic oligonucleotide
agaacgugaaacacgcuca

SEQ ID NO: 576898 - RNA, 19 nt, Artificial Sequence
  Description of Artificial Sequence: Synthetic oligonucleotide
ugcuaaucgggguccaagu

SEQ ID NO: 576899 - RNA, 19 nt, Artificial Sequence
  Description of Artificial Sequence: Synthetic oligonucleotide
gucaauuucugcccgugca

SEQ ID NO: 576900 - RNA, 19 nt, Artificial Sequence
  Description of Artificial Sequence: Synthetic oligonucleotide
gauggaacaugucaacggu

SEQ ID NO: 576901 - RNA, 19 nt, Artificial Sequence
  Description of Artificial Sequence: Synthetic oligonucleotide
aacgugaaacacgcucauc

SEQ ID NO: 576902 - RNA, 19 nt, Artificial Sequence
  Description of Artificial Sequence: Synthetic oligonucleotide
ggcuuuacuacacaggcaa

SEQ ID NO: 576903 - RNA, 19 nt, Artificial Sequence
  Description of Artificial Sequence: Synthetic oligonucleotide
acgguuucagucgccaggg

SEQ ID NO: 576904 - RNA, 19 nt, Artificial Sequence
  Description of Artificial Sequence: Synthetic oligonucleotide
auaacgaauggugaacuua

SEQ ID NO: 576905 - RNA, 19 nt, Artificial Sequence
  Description of Artificial Sequence: Synthetic oligonucleotide
cagacuuccguugccacag

SEQ ID NO: 576906 - RNA, 19 nt, Artificial Sequence
  Description of Artificial Sequence: Synthetic oligonucleotide
agugcugaugugauaacga

SEQ ID NO: 576907 - RNA, 19 nt, Artificial Sequence
  Description of Artificial Sequence: Synthetic oligonucleotide
uccaugaaagugccauggu

SEQ ID NO: 576908 - RNA, 19 nt, Artificial Sequence
  Description of Artificial Sequence: Synthetic oligonucleotide
uccgcaucuuugaaaugac

SEQ ID NO: 576909 - RNA, 19 nt, Artificial Sequence
  Description of Artificial Sequence: Synthetic oligonucleotide
ucaacgguuucagucgcca

SEQ ID NO: 576910 - RNA, 19 nt, Artificial Sequence
  Description of Artificial Sequence: Synthetic oligonucleotide
agagagaggaugguucuca

SEQ ID NO: 576911 - RNA, 19 nt, Artificial Sequence
  Description of Artificial Sequence: Synthetic oligonucleotide
gugauaacgaauggugaac

SEQ ID NO: 576912 - RNA, 19 nt, Artificial Sequence
  Description of Artificial Sequence: Synthetic oligonucleotide
ucgucccucaagcuuuuga

SEQ ID NO: 576913 - RNA, 19 nt, Artificial Sequence
  Description of Artificial Sequence: Synthetic oligonucleotide
guugugacgggcgaaggac

SEQ ID NO: 576914 - RNA, 19 nt, Artificial Sequence
  Description of Artificial Sequence: Synthetic oligonucleotide
acaugcgacagggacagcu

SEQ ID NO: 576915 - RNA, 19 nt, Artificial Sequence
  Description of Artificial Sequence: Synthetic oligonucleotide
aacugcuucccggaauuga

SEQ ID NO: 576916 - RNA, 19 nt, Artificial Sequence
  Description of Artificial Sequence: Synthetic oligonucleotide
ugccgcaggaugauggauc

SEQ ID NO: 576917 - RNA, 19 nt, Artificial Sequence
  Description of Artificial Sequence: Synthetic oligonucleotide
ucgcuguagucaauuucug

SEQ ID NO: 576918 - RNA, 19 nt, Artificial Sequence
  Description of Artificial Sequence: Synthetic oligonucleotide
gaacgaacugcuucccgga

SEQ ID NO: 576919 - RNA, 19 nt, Artificial Sequence
  Description of Artificial Sequence: Synthetic oligonucleotide
ucauccggggcaucgcugu

SEQ ID NO: 576920 - RNA, 19 nt, Artificial Sequence
  Description of Artificial Sequence: Synthetic oligonucleotide
uuaucagcauauugauaua

SEQ ID NO: 576921 - RNA, 19 nt, Artificial Sequence
  Description of Artificial Sequence: Synthetic oligonucleotide
ccagggcgagauaagaacg

SEQ ID NO: 576922 - RNA, 19 nt, Artificial Sequence
  Description of Artificial Sequence: Synthetic oligonucleotide
cuagguauggguuucggau

SEQ ID NO: 576923 - RNA, 19 nt, Artificial Sequence
  Description of Artificial Sequence: Synthetic oligonucleotide
gacuuccguugccacagcc

SEQ ID NO: 576924 - RNA, 19 nt, Artificial Sequence
  Description of Artificial Sequence: Synthetic oligonucleotide
augugauaacgaaugguga

SEQ ID NO: 576925 - RNA, 19 nt, Artificial Sequence
  Description of Artificial Sequence: Synthetic oligonucleotide
gggucucuaaacucauccg

SEQ ID NO: 576926 - RNA, 19 nt, Artificial Sequence
  Description of Artificial Sequence: Synthetic oligonucleotide
auagaacuucaugagggaa

SEQ ID NO: 576927 - RNA, 19 nt, Artificial Sequence
  Description of Artificial Sequence: Synthetic oligonucleotide
gacagcuuaguggucgcug

SEQ ID NO: 576928 - RNA, 19 nt, Artificial Sequence
  Description of Artificial Sequence: Synthetic oligonucleotide
aucucuggucaucagcaau

SEQ ID NO: 576929 - RNA, 19 nt, Artificial Sequence
  Description of Artificial Sequence: Synthetic oligonucleotide
aggucgugucauuuaucag

SEQ ID NO: 576930 - RNA, 19 nt, Artificial Sequence
  Description of Artificial Sequence: Synthetic oligonucleotide
gcgagcacaguccagcugc

SEQ ID NO: 576931 - RNA, 19 nt, Artificial Sequence
  Description of Artificial Sequence: Synthetic oligonucleotide
ucuuaauccagggcucggu

SEQ ID NO: 576932 - RNA, 19 nt, Artificial Sequence
  Description of Artificial Sequence: Synthetic oligonucleotide
uaagaacgugaaacacgcu

SEQ ID NO: 576933 - RNA, 19 nt, Artificial Sequence
  Description of Artificial Sequence: Synthetic oligonucleotide
cucaaaaccguacuucucu

SEQ ID NO: 576934 - RNA, 19 nt, Artificial Sequence
  Description of Artificial Sequence: Synthetic oligonucleotide
auacauguuuggagggccg

SEQ ID NO: 576935 - RNA, 19 nt, Artificial Sequence
  Description of Artificial Sequence: Synthetic oligonucleotide
gggaguugagcagaugccg

SEQ ID NO: 576936 - RNA, 19 nt, Artificial Sequence
  Description of Artificial Sequence: Synthetic oligonucleotide
uagucaauuucugcccgug

SEQ ID NO: 576937 - RNA, 19 nt, Artificial Sequence
  Description of Artificial Sequence: Synthetic oligonucleotide
ccagcugcaaguaaauauc

SEQ ID NO: 576938 - RNA, 19 nt, Artificial Sequence
  Description of Artificial Sequence: Synthetic oligonucleotide
cuucugaguccgaggcugg

SEQ ID NO: 576939 - RNA, 19 nt, Artificial Sequence
  Description of Artificial Sequence: Synthetic oligonucleotide
agcgaacgaacugcuuccc

SEQ ID NO: 576940 - RNA, 19 nt, Artificial Sequence
  Description of Artificial Sequence: Synthetic oligonucleotide
ggcaaucgcucgcaaaugc

SEQ ID NO: 576941 - RNA, 19 nt, Artificial Sequence
  Description of Artificial Sequence: Synthetic oligonucleotide
guccgaguucucuagucac

SEQ ID NO: 576942 - RNA, 19 nt, Artificial Sequence
  Description of Artificial Sequence: Synthetic oligonucleotide
acagguaugugaauaugau

SEQ ID NO: 576943 - RNA, 19 nt, Artificial Sequence
  Description of Artificial Sequence: Synthetic oligonucleotide
aacgaacugcuucccggaa

SEQ ID NO: 576944 - RNA, 19 nt, Artificial Sequence
  Description of Artificial Sequence: Synthetic oligonucleotide
agggauuggucaugaacau

SEQ ID NO: 576945 - RNA, 19 nt, Artificial Sequence
  Description of Artificial Sequence: Synthetic oligonucleotide
ugcucgacaucuguauaga

SEQ ID NO: 576946 - RNA, 19 nt, Artificial Sequence
  Description of Artificial Sequence: Synthetic oligonucleotide
gguggaugcugcuucggcc

SEQ ID NO: 576947 - RNA, 19 nt, Artificial Sequence
  Description of Artificial Sequence: Synthetic oligonucleotide
gguggauuugaucccugcc

SEQ ID NO: 576948 - RNA, 19 nt, Artificial Sequence
  Description of Artificial Sequence: Synthetic oligonucleotide
ggaagguaccagcaauuug

SEQ ID NO: 576949 - RNA, 19 nt, Artificial Sequence
  Description of Artificial Sequence: Synthetic oligonucleotide
gucgugucauuuaucagca

SEQ ID NO: 576950 - RNA, 19 nt, Artificial Sequence
  Description of Artificial Sequence: Synthetic oligonucleotide
acgggcuuuacuacacagg

SEQ ID NO: 576951 - RNA, 19 nt, Artificial Sequence
  Description of Artificial Sequence: Synthetic oligonucleotide
aucgcucgcaaaugccuug

SEQ ID NO: 576952 - RNA, 19 nt, Artificial Sequence
  Description of Artificial Sequence: Synthetic oligonucleotide
ucaggcaaucgcucgcaaa

SEQ ID NO: 576953 - RNA, 19 nt, Artificial Sequence
  Description of Artificial Sequence: Synthetic oligonucleotide
aggacgggcuuuacuacac

SEQ ID NO: 576954 - RNA, 19 nt, Artificial Sequence
  Description of Artificial Sequence: Synthetic oligonucleotide
uauagcgaacgaacugcuu

SEQ ID NO: 576955 - RNA, 19 nt, Artificial Sequence
  Description of Artificial Sequence: Synthetic oligonucleotide
caaguaaauaucuguuagu

SEQ ID NO: 576956 - RNA, 19 nt, Artificial Sequence
  Description of Artificial Sequence: Synthetic oligonucleotide
auauagcgaacgaacugcu

SEQ ID NO: 576957 - RNA, 19 nt, Artificial Sequence
  Description of Artificial Sequence: Synthetic oligonucleotide
uggaucgguccauuauggu

SEQ ID NO: 576958 - RNA, 19 nt, Artificial Sequence
  Description of Artificial Sequence: Synthetic oligonucleotide
ucgcucgcaaaugccuugg

SEQ ID NO: 576959 - RNA, 19 nt, Artificial Sequence
  Description of Artificial Sequence: Synthetic oligonucleotide
uggcuuuagcgaagcgagc

SEQ ID NO: 576960 - RNA, 19 nt, Artificial Sequence
  Description of Artificial Sequence: Synthetic oligonucleotide
acuacacaggcaaucguaa

SEQ ID NO: 576961 - RNA, 19 nt, Artificial Sequence
  Description of Artificial Sequence: Synthetic oligonucleotide
accagucaaacaagucccg

SEQ ID NO: 576962 - RNA, 19 nt, Artificial Sequence
  Description of Artificial Sequence: Synthetic oligonucleotide
accgcugucaucacagacu

SEQ ID NO: 576963 - RNA, 19 nt, Artificial Sequence
  Description of Artificial Sequence: Synthetic oligonucleotide
uguugcaggcacaguuauc

SEQ ID NO: 576964 - RNA, 19 nt, Artificial Sequence
  Description of Artificial Sequence: Synthetic oligonucleotide
uuucagucgccagggcgag

SEQ ID NO: 576965 - RNA, 19 nt, Artificial Sequence
  Description of Artificial Sequence: Synthetic oligonucleotide
gcagacuguuucuaacuug

SEQ ID NO: 576966 - RNA, 19 nt, Artificial Sequence
  Description of Artificial Sequence: Synthetic oligonucleotide
ugacgggcgaaggacgggc

SEQ ID NO: 576967 - RNA, 19 nt, Artificial Sequence
  Description of Artificial Sequence: Synthetic oligonucleotide
acgcucauccugagcaagc

SEQ ID NO: 576968 - RNA, 19 nt, Artificial Sequence
  Description of Artificial Sequence: Synthetic oligonucleotide
gcaccugaggagaauauug

SEQ ID NO: 576969 - RNA, 19 nt, Artificial Sequence
  Description of Artificial Sequence: Synthetic oligonucleotide
agacuuccguugccacagc

SEQ ID NO: 576970 - RNA, 19 nt, Artificial Sequence
  Description of Artificial Sequence: Synthetic oligonucleotide
gcucgcaaaugccuugggg

SEQ ID NO: 576971 - RNA, 19 nt, Artificial Sequence
  Description of Artificial Sequence: Synthetic oligonucleotide
ugaguacagggcucauaaa

SEQ ID NO: 576972 - RNA, 19 nt, Artificial Sequence
  Description of Artificial Sequence: Synthetic oligonucleotide
gaucguucagccauccugu

SEQ ID NO: 576973 - RNA, 19 nt, Artificial Sequence
  Description of Artificial Sequence: Synthetic oligonucleotide
cuuaguggucgcugcucug

SEQ ID NO: 576974 - RNA, 19 nt, Artificial Sequence
  Description of Artificial Sequence: Synthetic oligonucleotide
gguugcagguuugagcagc

SEQ ID NO: 576975 - RNA, 19 nt, Artificial Sequence
  Description of Artificial Sequence: Synthetic oligonucleotide
cucuugcaccucauggauc

SEQ ID NO: 576976 - RNA, 19 nt, Artificial Sequence
  Description of Artificial Sequence: Synthetic oligonucleotide
uugcaccucauggauccgc

SEQ ID NO: 576977 - RNA, 19 nt, Artificial Sequence
  Description of Artificial Sequence: Synthetic oligonucleotide
aaaguucagcauggcugcu

SEQ ID NO: 576978 - RNA, 19 nt, Artificial Sequence
  Description of Artificial Sequence: Synthetic oligonucleotide
cugcuaaucgggguccaag

SEQ ID NO: 576979 - RNA, 19 nt, Artificial Sequence
  Description of Artificial Sequence: Synthetic oligonucleotide
cuggcguggcuguuucuag

SEQ ID NO: 576980 - RNA, 19 nt, Artificial Sequence
  Description of Artificial Sequence: Synthetic oligonucleotide
cugcuucccggaauugaac

SEQ ID NO: 576981 - RNA, 19 nt, Artificial Sequence
  Description of Artificial Sequence: Synthetic oligonucleotide
cgaacgaacugcuucccgg

SEQ ID NO: 576982 - RNA, 19 nt, Artificial Sequence
  Description of Artificial Sequence: Synthetic oligonucleotide
agcugcaaguaaauaucug

SEQ ID NO: 576983 - RNA, 19 nt, Artificial Sequence
  Description of Artificial Sequence: Synthetic oligonucleotide
cuuuagcgaagcgagcaca

SEQ ID NO: 576984 - RNA, 19 nt, Artificial Sequence
  Description of Artificial Sequence: Synthetic oligonucleotide
cccggaauugaacuccucc

SEQ ID NO: 576985 - RNA, 19 nt, Artificial Sequence
  Description of Artificial Sequence: Synthetic oligonucleotide
guuaucucacagaauacau

SEQ ID NO: 576986 - RNA, 19 nt, Artificial Sequence
  Description of Artificial Sequence: Synthetic oligonucleotide
agcuuggccacuagguaug

SEQ ID NO: 576987 - RNA, 19 nt, Artificial Sequence
  Description of Artificial Sequence: Synthetic oligonucleotide
gccagggcgagauaagaac

SEQ ID NO: 576988 - RNA, 19 nt, Artificial Sequence
  Description of Artificial Sequence: Synthetic oligonucleotide
aaucgcucgcaaaugccuu

SEQ ID NO: 576989 - RNA, 19 nt, Artificial Sequence
  Description of Artificial Sequence: Synthetic oligonucleotide
caccgcugucaucacagac

SEQ ID NO: 576990 - RNA, 19 nt, Artificial Sequence
  Description of Artificial Sequence: Synthetic oligonucleotide
gcugcuucggccuggcgug

SEQ ID NO: 576991 - RNA, 19 nt, Artificial Sequence
  Description of Artificial Sequence: Synthetic oligonucleotide
gagguggaugcugcuucgg

SEQ ID NO: 576992 - RNA, 19 nt, Artificial Sequence
  Description of Artificial Sequence: Synthetic oligonucleotide
caacgguuucagucgccag

SEQ ID NO: 576993 - RNA, 19 nt, Artificial Sequence
  Description of Artificial Sequence: Synthetic oligonucleotide
uccggggcaucgcuguagu

SEQ ID NO: 576994 - RNA, 19 nt, Artificial Sequence
  Description of Artificial Sequence: Synthetic oligonucleotide
cacuagguauggguuucgg

SEQ ID NO: 576995 - RNA, 19 nt, Artificial Sequence
  Description of Artificial Sequence: Synthetic oligonucleotide
cucauccggggcaucgcug

SEQ ID NO: 576996 - RNA, 19 nt, Artificial Sequence
  Description of Artificial Sequence: Synthetic oligonucleotide
uuagcgaagcgagcacagu

SEQ ID NO: 576997 - RNA, 19 nt, Artificial Sequence
  Description of Artificial Sequence: Synthetic oligonucleotide
uggcugcuaaucggggucc

SEQ ID NO: 576998 - RNA, 19 nt, Artificial Sequence
  Description of Artificial Sequence: Synthetic oligonucleotide
cagguugugacgggcgaag

SEQ ID NO: 576999 - RNA, 19 nt, Artificial Sequence
  Description of Artificial Sequence: Synthetic oligonucleotide
auguuuugccaaaggcucu

SEQ ID NO: 577000 - RNA, 19 nt, Artificial Sequence
  Description of Artificial Sequence: Synthetic oligonucleotide
agguugugacgggcgaagg

SEQ ID NO: 577001 - RNA, 19 nt, Artificial Sequence
  Description of Artificial Sequence: Synthetic oligonucleotide
agggcgagauaagaacgug

SEQ ID NO: 577002 - RNA, 19 nt, Artificial Sequence
  Description of Artificial Sequence: Synthetic oligonucleotide
agucgccagggcgagauaa

SEQ ID NO: 577003 - RNA, 19 nt, Artificial Sequence
  Description of Artificial Sequence: Synthetic oligonucleotide
gauaacgaauggugaacuu

SEQ ID NO: 577004 - RNA, 19 nt, Artificial Sequence
  Description of Artificial Sequence: Synthetic oligonucleotide
augauggaucgguccauua

SEQ ID NO: 577005 - RNA, 19 nt, Artificial Sequence
  Description of Artificial Sequence: Synthetic oligonucleotide
cgaucguucagccauccug

SEQ ID NO: 577006 - RNA, 19 nt, Artificial Sequence
  Description of Artificial Sequence: Synthetic oligonucleotide
uuccguugccacagcccca

SEQ ID NO: 577007 - RNA, 19 nt, Artificial Sequence
  Description of Artificial Sequence: Synthetic oligonucleotide
ggcuuuagcgaagcgagca

SEQ ID NO: 577008 - RNA, 19 nt, Artificial Sequence
  Description of Artificial Sequence: Synthetic oligonucleotide
ugccauggugagcaauguu

SEQ ID NO: 577009 - RNA, 19 nt, Artificial Sequence
  Description of Artificial Sequence: Synthetic oligonucleotide
ucgccagggcgagauaaga

SEQ ID NO: 577010 - RNA, 19 nt, Artificial Sequence
  Description of Artificial Sequence: Synthetic oligonucleotide
caaucgcucgcaaaugccu

SEQ ID NO: 577011 - RNA, 19 nt, Artificial Sequence
  Description of Artificial Sequence: Synthetic oligonucleotide
gaggagaauauuguacaau

SEQ ID NO: 577012 - RNA, 19 nt, Artificial Sequence
  Description of Artificial Sequence: Synthetic oligonucleotide
cuuaauccagggcucggua

SEQ ID NO: 577013 - RNA, 19 nt, Artificial Sequence
  Description of Artificial Sequence: Synthetic oligonucleotide
gagagaggaugguucucaa

SEQ ID NO: 577014 - RNA, 19 nt, Artificial Sequence
  Description of Artificial Sequence: Synthetic oligonucleotide
ugagcagaugccgcaggau

SEQ ID NO: 577015 - RNA, 19 nt, Artificial Sequence
  Description of Artificial Sequence: Synthetic oligonucleotide
gguaugugaauaugauaua

SEQ ID NO: 577016 - RNA, 19 nt, Artificial Sequence
  Description of Artificial Sequence: Synthetic oligonucleotide
uggcgguugaaggggucag

SEQ ID NO: 577017 - RNA, 19 nt, Artificial Sequence
  Description of Artificial Sequence: Synthetic oligonucleotide
cuacacaggcaaucguaaa

SEQ ID NO: 577018 - RNA, 19 nt, Artificial Sequence
  Description of Artificial Sequence: Synthetic oligonucleotide
auaaagcaccugaggagaa

SEQ ID NO: 577019 - RNA, 19 nt, Artificial Sequence
  Description of Artificial Sequence: Synthetic oligonucleotide
aggcaaucgcucgcaaaug

SEQ ID NO: 577020 - RNA, 19 nt, Artificial Sequence
  Description of Artificial Sequence: Synthetic oligonucleotide
ggaucuuaauccagggcuc

SEQ ID NO: 577021 - RNA, 19 nt, Artificial Sequence
  Description of Artificial Sequence: Synthetic oligonucleotide
cucaucgugucccucagau

SEQ ID NO: 577022 - RNA, 19 nt, Artificial Sequence
  Description of Artificial Sequence: Synthetic oligonucleotide
gcgaacgaacugcuucccg

SEQ ID NO: 577023 - RNA, 19 nt, Artificial Sequence
  Description of Artificial Sequence: Synthetic oligonucleotide
acucacugguggcuccagu

SEQ ID NO: 577024 - RNA, 19 nt, Artificial Sequence
  Description of Artificial Sequence: Synthetic oligonucleotide
gaggaugguucucaaucau

SEQ ID NO: 577025 - RNA, 19 nt, Artificial Sequence
  Description of Artificial Sequence: Synthetic oligonucleotide
gcaaucgcucgcaaaugcc

SEQ ID NO: 577026 - RNA, 19 nt, Artificial Sequence
  Description of Artificial Sequence: Synthetic oligonucleotide
cucuacuguuuggucacuc

SEQ ID NO: 577027 - RNA, 19 nt, Artificial Sequence
  Description of Artificial Sequence: Synthetic oligonucleotide
gaacgugaaacacgcucau

SEQ ID NO: 577028 - RNA, 19 nt, Artificial Sequence
  Description of Artificial Sequence: Synthetic oligonucleotide
ggcgagauaagaacgugaa

SEQ ID NO: 577029 - RNA, 19 nt, Artificial Sequence
  Description of Artificial Sequence: Synthetic oligonucleotide
aucgugucccucagaucuc

SEQ ID NO: 577030 - RNA, 19 nt, Artificial Sequence
  Description of Artificial Sequence: Synthetic oligonucleotide
gaggaacggcuucuggacu

SEQ ID NO: 577031 - RNA, 19 nt, Artificial Sequence
  Description of Artificial Sequence: Synthetic oligonucleotide
ggauuugaucccugccuuc

SEQ ID NO: 577032 - RNA, 19 nt, Artificial Sequence
  Description of Artificial Sequence: Synthetic oligonucleotide
caggcaaucgcucgcaaau

SEQ ID NO: 577033 - RNA, 19 nt, Artificial Sequence
  Description of Artificial Sequence: Synthetic oligonucleotide
auccggggcaucgcuguag

SEQ ID NO: 577034 - RNA, 19 nt, Artificial Sequence
  Description of Artificial Sequence: Synthetic oligonucleotide
gaacggcuucuggacuugc

SEQ ID NO: 577035 - RNA, 19 nt, Artificial Sequence
  Description of Artificial Sequence: Synthetic oligonucleotide
agcaccugaggagaauauu

SEQ ID NO: 577036 - RNA, 19 nt, Artificial Sequence
  Description of Artificial Sequence: Synthetic oligonucleotide
gcauauugauauagcgaac

SEQ ID NO: 577037 - RNA, 19 nt, Artificial Sequence
  Description of Artificial Sequence: Synthetic oligonucleotide
accguacuucucuggguuu

SEQ ID NO: 577038 - RNA, 19 nt, Artificial Sequence
  Description of Artificial Sequence: Synthetic oligonucleotide
gggauuggucaugaacaug

SEQ ID NO: 577039 - RNA, 19 nt, Artificial Sequence
  Description of Artificial Sequence: Synthetic oligonucleotide
gcaagaagcuuaaacuucu

SEQ ID NO: 577040 - RNA, 19 nt, Artificial Sequence
  Description of Artificial Sequence: Synthetic oligonucleotide
ccggaauugaacuccucca

SEQ ID NO: 577041 - RNA, 19 nt, Artificial Sequence
  Description of Artificial Sequence: Synthetic oligonucleotide
ucucuacuguuuggucacu

SEQ ID NO: 577042 - RNA, 19 nt, Artificial Sequence
  Description of Artificial Sequence: Synthetic oligonucleotide
guagucaauuucugcccgu

SEQ ID NO: 577043 - RNA, 19 nt, Artificial Sequence
  Description of Artificial Sequence: Synthetic oligonucleotide
gcuucccggaauugaacuc

SEQ ID NO: 577044 - RNA, 19 nt, Artificial Sequence
  Description of Artificial Sequence: Synthetic oligonucleotide
ggggugggcucucaggauc

SEQ ID NO: 577045 - RNA, 19 nt, Artificial Sequence
  Description of Artificial Sequence: Synthetic oligonucleotide
ucccgaucguucagccauc

SEQ ID NO: 577046 - RNA, 19 nt, Artificial Sequence
  Description of Artificial Sequence: Synthetic oligonucleotide
gucaacgguuucagucgcc

SEQ ID NO: 577047 - RNA, 19 nt, Artificial Sequence
  Description of Artificial Sequence: Synthetic oligonucleotide
caacgaggaacacaacaau

SEQ ID NO: 577048 - RNA, 19 nt, Artificial Sequence
  Description of Artificial Sequence: Synthetic oligonucleotide
gugacgggcgaaggacggg

SEQ ID NO: 577049 - RNA, 19 nt, Artificial Sequence
  Description of Artificial Sequence: Synthetic oligonucleotide
gucgccagggcgagauaag

SEQ ID NO: 577050 - RNA, 19 nt, Artificial Sequence
  Description of Artificial Sequence: Synthetic oligonucleotide
cagucaaacaagucccgau

SEQ ID NO: 577051 - RNA, 19 nt, Artificial Sequence
  Description of Artificial Sequence: Synthetic oligonucleotide
ggacuugcuuggugaggag

SEQ ID NO: 577052 - RNA, 19 nt, Artificial Sequence
  Description of Artificial Sequence: Synthetic oligonucleotide
uggcuguuucuagcagaga

SEQ ID NO: 577053 - RNA, 19 nt, Artificial Sequence
  Description of Artificial Sequence: Synthetic oligonucleotide
acccaccgcugucaucaca

SEQ ID NO: 577054 - RNA, 19 nt, Artificial Sequence
  Description of Artificial Sequence: Synthetic oligonucleotide
aguggucgcugcucugcuu

SEQ ID NO: 577055 - RNA, 19 nt, Artificial Sequence
  Description of Artificial Sequence: Synthetic oligonucleotide
cagggcgagauaagaacgu

SEQ ID NO: 577056 - RNA, 19 nt, Artificial Sequence
  Description of Artificial Sequence: Synthetic oligonucleotide
cccaccagucaaacaaguc

SEQ ID NO: 577057 - RNA, 19 nt, Artificial Sequence
  Description of Artificial Sequence: Synthetic oligonucleotide
cgaaggacgggcuuuacua

SEQ ID NO: 577058 - RNA, 19 nt, Artificial Sequence
  Description of Artificial Sequence: Synthetic oligonucleotide
gggcgagauaagaacguga

SEQ ID NO: 577059 - RNA, 19 nt, Artificial Sequence
  Description of Artificial Sequence: Synthetic oligonucleotide
gcguggcuguuucuagcag

SEQ ID NO: 577060 - RNA, 19 nt, Artificial Sequence
  Description of Artificial Sequence: Synthetic oligonucleotide
cuggcgguugaagggguca

SEQ ID NO: 577061 - RNA, 19 nt, Artificial Sequence
  Description of Artificial Sequence: Synthetic oligonucleotide
auccaugcuugaaucuguu

SEQ ID NO: 577062 - RNA, 19 nt, Artificial Sequence
  Description of Artificial Sequence: Synthetic oligonucleotide
gccacuagguauggguuuc

SEQ ID NO: 577063 - RNA, 19 nt, Artificial Sequence
  Description of Artificial Sequence: Synthetic oligonucleotide
cgguccauuauggugccag

SEQ ID NO: 577064 - RNA, 19 nt, Artificial Sequence
  Description of Artificial Sequence: Synthetic oligonucleotide
augccgcaggaugauggau

SEQ ID NO: 577065 - RNA, 19 nt, Artificial Sequence
  Description of Artificial Sequence: Synthetic oligonucleotide
gcuuaguggucgcugcucu

SEQ ID NO: 577066 - RNA, 19 nt, Artificial Sequence
  Description of Artificial Sequence: Synthetic oligonucleotide
cucuauugcaaugguggau

SEQ ID NO: 577067 - RNA, 19 nt, Artificial Sequence
  Description of Artificial Sequence: Synthetic oligonucleotide
cuaaacucauccggggcau

SEQ ID NO: 577068 - RNA, 19 nt, Artificial Sequence
  Description of Artificial Sequence: Synthetic oligonucleotide
ggcaaucguaaaacucguc

SEQ ID NO: 577069 - RNA, 19 nt, Artificial Sequence
  Description of Artificial Sequence: Synthetic oligonucleotide
gcucgacaucuguauagaa

SEQ ID NO: 577070 - RNA, 19 nt, Artificial Sequence
  Description of Artificial Sequence: Synthetic oligonucleotide
gccuuccgcaucuuugaaa

SEQ ID NO: 577071 - RNA, 19 nt, Artificial Sequence
  Description of Artificial Sequence: Synthetic oligonucleotide
caagaaggucgugucauuu

SEQ ID NO: 577072 - RNA, 19 nt, Artificial Sequence
  Description of Artificial Sequence: Synthetic oligonucleotide
gggcagucucacuggguca

SEQ ID NO: 577073 - RNA, 19 nt, Artificial Sequence
  Description of Artificial Sequence: Synthetic oligonucleotide
ggagauucuuuagcagcaa

SEQ ID NO: 577074 - RNA, 19 nt, Artificial Sequence
  Description of Artificial Sequence: Synthetic oligonucleotide
ggacgggcuuuacuacaca

SEQ ID NO: 577075 - RNA, 19 nt, Artificial Sequence
  Description of Artificial Sequence: Synthetic oligonucleotide
ucgguccauuauggugcca

SEQ ID NO: 577076 - RNA, 19 nt, Artificial Sequence
  Description of Artificial Sequence: Synthetic oligonucleotide
ccacuagguauggguuucg

SEQ ID NO: 577077 - RNA, 19 nt, Artificial Sequence
  Description of Artificial Sequence: Synthetic oligonucleotide
caugcgacagggacagcuu

SEQ ID NO: 577078 - RNA, 19 nt, Artificial Sequence
  Description of Artificial Sequence: Synthetic oligonucleotide
gacaugcgacagggacagc

SEQ ID NO: 577079 - RNA, 19 nt, Artificial Sequence
  Description of Artificial Sequence: Synthetic oligonucleotide
gcuaaucgggguccaaguu

SEQ ID NO: 577080 - RNA, 19 nt, Artificial Sequence
  Description of Artificial Sequence: Synthetic oligonucleotide
cgaguucucuagucacaug

SEQ ID NO: 577081 - RNA, 19 nt, Artificial Sequence
  Description of Artificial Sequence: Synthetic oligonucleotide
ccggcacuuggguccacac

SEQ ID NO: 577082 - RNA, 19 nt, Artificial Sequence
  Description of Artificial Sequence: Synthetic oligonucleotide
cugggucagucaucagggu

SEQ ID NO: 577083 - RNA, 19 nt, Artificial Sequence
  Description of Artificial Sequence: Synthetic oligonucleotide
cccgaucguucagccaucc

SEQ ID NO: 577084 - RNA, 19 nt, Artificial Sequence
  Description of Artificial Sequence: Synthetic oligonucleotide
gcuggcguggcuguuucua

SEQ ID NO: 577085 - RNA, 19 nt, Artificial Sequence
  Description of Artificial Sequence: Synthetic oligonucleotide
ccauggugagcaauguuuu

SEQ ID NO: 577086 - RNA, 19 nt, Artificial Sequence
  Description of Artificial Sequence: Synthetic oligonucleotide
gcgaaggacgggcuuuacu

SEQ ID NO: 577087 - RNA, 19 nt, Artificial Sequence
  Description of Artificial Sequence: Synthetic oligonucleotide
gucacucggggugggcucu

SEQ ID NO: 577088 - RNA, 19 nt, Artificial Sequence
  Description of Artificial Sequence: Synthetic oligonucleotide
ggccacuagguauggguuu

SEQ ID NO: 577089 - RNA, 19 nt, Artificial Sequence
  Description of Artificial Sequence: Synthetic oligonucleotide
ccucuugcaccucauggau

SEQ ID NO: 577090 - RNA, 19 nt, Artificial Sequence
  Description of Artificial Sequence: Synthetic oligonucleotide
gacgggcgaaggacgggcu

SEQ ID NO: 577091 - RNA, 19 nt, Artificial Sequence
  Description of Artificial Sequence: Synthetic oligonucleotide
caaaugccuuggggacauc

SEQ ID NO: 577092 - RNA, 19 nt, Artificial Sequence
  Description of Artificial Sequence: Synthetic oligonucleotide
cgcucgcaaaugccuuggg

SEQ ID NO: 577093 - RNA, 19 nt, Artificial Sequence
  Description of Artificial Sequence: Synthetic oligonucleotide
ggcugcuaaucggggucca

SEQ ID NO: 577094 - RNA, 19 nt, Artificial Sequence
  Description of Artificial Sequence: Synthetic oligonucleotide
ccgcaggaugauggaucgg

SEQ ID NO: 577095 - RNA, 19 nt, Artificial Sequence
  Description of Artificial Sequence: Synthetic oligonucleotide
cggaauugaacuccuccau

SEQ ID NO: 577096 - RNA, 19 nt, Artificial Sequence
  Description of Artificial Sequence: Synthetic oligonucleotide
gcuuuacuacacaggcaau

SEQ ID NO: 577097 - RNA, 19 nt, Artificial Sequence
  Description of Artificial Sequence: Synthetic oligonucleotide
gcgacagggacagcuuagu

SEQ ID NO: 577098 - RNA, 19 nt, Artificial Sequence
  Description of Artificial Sequence: Synthetic oligonucleotide
ccgaggcuggacagaggga

SEQ ID NO: 577099 - RNA, 19 nt, Artificial Sequence
  Description of Artificial Sequence: Synthetic oligonucleotide
cgcaggaugauggaucggu

SEQ ID NO: 577100 - RNA, 19 nt, Artificial Sequence
  Description of Artificial Sequence: Synthetic oligonucleotide
gcugcuaaucgggguccaa

SEQ ID NO: 577101 - RNA, 19 nt, Artificial Sequence
  Description of Artificial Sequence: Synthetic oligonucleotide
cacucggggugggcucuca

SEQ ID NO: 577102 - RNA, 19 nt, Artificial Sequence
  Description of Artificial Sequence: Synthetic oligonucleotide
ccgaguucucuagucacau

SEQ ID NO: 577103 - RNA, 19 nt, Artificial Sequence
  Description of Artificial Sequence: Synthetic oligonucleotide
ggacagcuuaguggucgcu

SEQ ID NO: 577104 - RNA, 19 nt, Artificial Sequence
  Description of Artificial Sequence: Synthetic oligonucleotide
ccggggcaucgcuguaguc

SEQ ID NO: 577105 - RNA, 19 nt, Artificial Sequence
  Description of Artificial Sequence: Synthetic oligonucleotide
gggcgaaggacgggcuuua

SEQ ID NO: 577106 - RNA, 19 nt, Artificial Sequence
  Description of Artificial Sequence: Synthetic oligonucleotide
gcuucggccuggcguggcu

SEQ ID NO: 577107 - RNA, 19 nt, Artificial Sequence
  Description of Artificial Sequence: Synthetic oligonucleotide
cagucgccagggcgagaua

SEQ ID NO: 577108 - RNA, 19 nt, Artificial Sequence
  Description of Artificial Sequence: Synthetic oligonucleotide
ccgggaaaggagucugguu

SEQ ID NO: 577109 - RNA, 19 nt, Artificial Sequence
  Description of Artificial Sequence: Synthetic oligonucleotide
ccguacuucucuggguuuu

SEQ ID NO: 577110 - RNA, 19 nt, Artificial Sequence
  Description of Artificial Sequence: Synthetic oligonucleotide
ccgaucguucagccauccu

SEQ ID NO: 577111 - RNA, 19 nt, Artificial Sequence
  Description of Artificial Sequence: Synthetic oligonucleotide
cgggcgaaggacgggcuuu

SEQ ID NO: 577112 - RNA, 19 nt, Artificial Sequence
  Description of Artificial Sequence: Synthetic oligonucleotide
uuucacgaaacauagacgg

SEQ ID NO: 577113 - RNA, 19 nt, Artificial Sequence
  Description of Artificial Sequence: Synthetic oligonucleotide
aacacaaugaaggacaggg

SEQ ID NO: 577114 - RNA, 19 nt, Artificial Sequence
  Description of Artificial Sequence: Synthetic oligonucleotide
aagcacucgaaacugacgc

SEQ ID NO: 577115 - RNA, 19 nt, Artificial Sequence
  Description of Artificial Sequence: Synthetic oligonucleotide
aaucgguugaaguaguagg

SEQ ID NO: 577116 - RNA, 19 nt, Artificial Sequence
  Description of Artificial Sequence: Synthetic oligonucleotide
aaacugacgccaaagaguc

SEQ ID NO: 577117 - RNA, 19 nt, Artificial Sequence
  Description of Artificial Sequence: Synthetic oligonucleotide
uugucuacuacuuugcgcu

SEQ ID NO: 577118 - RNA, 19 nt, Artificial Sequence
  Description of Artificial Sequence: Synthetic oligonucleotide
ugaaugguccuuccgaagc

SEQ ID NO: 577119 - RNA, 19 nt, Artificial Sequence
  Description of Artificial Sequence: Synthetic oligonucleotide
acaacuguagcgauaaagg

SEQ ID NO: 577120 - RNA, 19 nt, Artificial Sequence
  Description of Artificial Sequence: Synthetic oligonucleotide
agaguugccgcuuucuggg

SEQ ID NO: 577121 - RNA, 19 nt, Artificial Sequence
  Description of Artificial Sequence: Synthetic oligonucleotide
ucgacuagggcccugcucc

SEQ ID NO: 577122 - RNA, 19 nt, Artificial Sequence
  Description of Artificial Sequence: Synthetic oligonucleotide
aacuguagcgauaaaggag

SEQ ID NO: 577123 - RNA, 19 nt, Artificial Sequence
  Description of Artificial Sequence: Synthetic oligonucleotide
guagcaguacaccaggcgg

SEQ ID NO: 577124 - RNA, 19 nt, Artificial Sequence
  Description of Artificial Sequence: Synthetic oligonucleotide
uuauaccggaugcagacca

SEQ ID NO: 577125 - RNA, 19 nt, Artificial Sequence
  Description of Artificial Sequence: Synthetic oligonucleotide
uuugucuacuacuuugcgc

SEQ ID NO: 577126 - RNA, 19 nt, Artificial Sequence
  Description of Artificial Sequence: Synthetic oligonucleotide
agcagauccaccccaaauc

SEQ ID NO: 577127 - RNA, 19 nt, Artificial Sequence
  Description of Artificial Sequence: Synthetic oligonucleotide
uugauucuggauaaccuga

SEQ ID NO: 577128 - RNA, 19 nt, Artificial Sequence
  Description of Artificial Sequence: Synthetic oligonucleotide
ugggguugcauucagcccc

SEQ ID NO: 577129 - RNA, 19 nt, Artificial Sequence
  Description of Artificial Sequence: Synthetic oligonucleotide
uacucgugcucaaaggcgg

SEQ ID NO: 577130 - RNA, 19 nt, Artificial Sequence
  Description of Artificial Sequence: Synthetic oligonucleotide
agacguuuggcuuccuccc

SEQ ID NO: 577131 - RNA, 19 nt, Artificial Sequence
  Description of Artificial Sequence: Synthetic oligonucleotide
aacgguugaaagauucucg

SEQ ID NO: 577132 - RNA, 19 nt, Artificial Sequence
  Description of Artificial Sequence: Synthetic oligonucleotide
ucggggaugaacacaauga

SEQ ID NO: 577133 - RNA, 19 nt, Artificial Sequence
  Description of Artificial Sequence: Synthetic oligonucleotide
ucccaguacaccucggugg

SEQ ID NO: 577134 - RNA, 19 nt, Artificial Sequence
  Description of Artificial Sequence: Synthetic oligonucleotide
ucugauuggaggugccugg

SEQ ID NO: 577135 - RNA, 19 nt, Artificial Sequence
  Description of Artificial Sequence: Synthetic oligonucleotide
ucucccuuauaccggaugc

SEQ ID NO: 577136 - RNA, 19 nt, Artificial Sequence
  Description of Artificial Sequence: Synthetic oligonucleotide
aggggaugcacuccuagac

SEQ ID NO: 577137 - RNA, 19 nt, Artificial Sequence
  Description of Artificial Sequence: Synthetic oligonucleotide
gagaguugccgcuuucugg

SEQ ID NO: 577138 - RNA, 19 nt, Artificial Sequence
  Description of Artificial Sequence: Synthetic oligonucleotide
aagacgugcacaggcagcg

SEQ ID NO: 577139 - RNA, 19 nt, Artificial Sequence
  Description of Artificial Sequence: Synthetic oligonucleotide
uggguagcaguacaccagg

SEQ ID NO: 577140 - RNA, 19 nt, Artificial Sequence
  Description of Artificial Sequence: Synthetic oligonucleotide
aaagccggggucguucugc

SEQ ID NO: 577141 - RNA, 19 nt, Artificial Sequence
  Description of Artificial Sequence: Synthetic oligonucleotide
agagucaucaacacaacug

SEQ ID NO: 577142 - RNA, 19 nt, Artificial Sequence
  Description of Artificial Sequence: Synthetic oligonucleotide
augaacacaaugaaggaca

SEQ ID NO: 577143 - RNA, 19 nt, Artificial Sequence
  Description of Artificial Sequence: Synthetic oligonucleotide
uucuuuacaccguugccac

SEQ ID NO: 577144 - RNA, 19 nt, Artificial Sequence
  Description of Artificial Sequence: Synthetic oligonucleotide
ucaucugguaccgacggag

SEQ ID NO: 577145 - RNA, 19 nt, Artificial Sequence
  Description of Artificial Sequence: Synthetic oligonucleotide
uccaacgguugaaagauuc

SEQ ID NO: 577146 - RNA, 19 nt, Artificial Sequence
  Description of Artificial Sequence: Synthetic oligonucleotide
ucaaagacgugcacaggca

SEQ ID NO: 577147 - RNA, 19 nt, Artificial Sequence
  Description of Artificial Sequence: Synthetic oligonucleotide
gagaccauagcguccauga

SEQ ID NO: 577148 - RNA, 19 nt, Artificial Sequence
  Description of Artificial Sequence: Synthetic oligonucleotide
aggacuuagucccagcagu

SEQ ID NO: 577149 - RNA, 19 nt, Artificial Sequence
  Description of Artificial Sequence: Synthetic oligonucleotide
caaaguagccaucuguguc

SEQ ID NO: 577150 - RNA, 19 nt, Artificial Sequence
  Description of Artificial Sequence: Synthetic oligonucleotide
agcuagacggacuggguag

SEQ ID NO: 577151 - RNA, 19 nt, Artificial Sequence
  Description of Artificial Sequence: Synthetic oligonucleotide
aggguccgaaagcacaucg

SEQ ID NO: 577152 - RNA, 19 nt, Artificial Sequence
  Description of Artificial Sequence: Synthetic oligonucleotide
augggguugcauucagccc

SEQ ID NO: 577153 - RNA, 19 nt, Artificial Sequence
  Description of Artificial Sequence: Synthetic oligonucleotide
guacggacuggcuuguggg

SEQ ID NO: 577154 - RNA, 19 nt, Artificial Sequence
  Description of Artificial Sequence: Synthetic oligonucleotide
ugaaggaccccugugcuug

SEQ ID NO: 577155 - RNA, 19 nt, Artificial Sequence
  Description of Artificial Sequence: Synthetic oligonucleotide
gaaucgguugaaguaguag

SEQ ID NO: 577156 - RNA, 19 nt, Artificial Sequence
  Description of Artificial Sequence: Synthetic oligonucleotide
cagacguuuggcuuccucc

SEQ ID NO: 577157 - RNA, 19 nt, Artificial Sequence
  Description of Artificial Sequence: Synthetic oligonucleotide
ugcuccauucgggugagcg

SEQ ID NO: 577158 - RNA, 19 nt, Artificial Sequence
  Description of Artificial Sequence: Synthetic oligonucleotide
gacgccaaagagucggugc

SEQ ID NO: 577159 - RNA, 19 nt, Artificial Sequence
  Description of Artificial Sequence: Synthetic oligonucleotide
ugguuggugaaucgguuga

SEQ ID NO: 577160 - RNA, 19 nt, Artificial Sequence
  Description of Artificial Sequence: Synthetic oligonucleotide
acggugacacaacuggauc

SEQ ID NO: 577161 - RNA, 19 nt, Artificial Sequence
  Description of Artificial Sequence: Synthetic oligonucleotide
uucucgagguggcucaacc

SEQ ID NO: 577162 - RNA, 19 nt, Artificial Sequence
  Description of Artificial Sequence: Synthetic oligonucleotide
gauccguuugacauacucc

SEQ ID NO: 577163 - RNA, 19 nt, Artificial Sequence
  Description of Artificial Sequence: Synthetic oligonucleotide
guagcgauaaaggagccac

SEQ ID NO: 577164 - RNA, 19 nt, Artificial Sequence
  Description of Artificial Sequence: Synthetic oligonucleotide
aagugagagaccauagcgu

SEQ ID NO: 577165 - RNA, 19 nt, Artificial Sequence
  Description of Artificial Sequence: Synthetic oligonucleotide
aucgguugaaguaguaggg

SEQ ID NO: 577166 - RNA, 19 nt, Artificial Sequence
  Description of Artificial Sequence: Synthetic oligonucleotide
aaguaguagggacggcucu

SEQ ID NO: 577167 - RNA, 19 nt, Artificial Sequence
  Description of Artificial Sequence: Synthetic oligonucleotide
gaggcgaagcacucgaaac

SEQ ID NO: 577168 - RNA, 19 nt, Artificial Sequence
  Description of Artificial Sequence: Synthetic oligonucleotide
agaacggaggguuggccuc

SEQ ID NO: 577169 - RNA, 19 nt, Artificial Sequence
  Description of Artificial Sequence: Synthetic oligonucleotide
gaaugguccuuccgaagcc

SEQ ID NO: 577170 - RNA, 19 nt, Artificial Sequence
  Description of Artificial Sequence: Synthetic oligonucleotide
ugagagaccauagcgucca

SEQ ID NO: 577171 - RNA, 19 nt, Artificial Sequence
  Description of Artificial Sequence: Synthetic oligonucleotide
ugugguagaucuugcuaca

SEQ ID NO: 577172 - RNA, 19 nt, Artificial Sequence
  Description of Artificial Sequence: Synthetic oligonucleotide
gaagcacucgaaacugacg

SEQ ID NO: 577173 - RNA, 19 nt, Artificial Sequence
  Description of Artificial Sequence: Synthetic oligonucleotide
gaggacuuagucccagcag

SEQ ID NO: 577174 - RNA, 19 nt, Artificial Sequence
  Description of Artificial Sequence: Synthetic oligonucleotide
caucucucccuuauaccgg

SEQ ID NO: 577175 - RNA, 19 nt, Artificial Sequence
  Description of Artificial Sequence: Synthetic oligonucleotide
gguacucgugcucaaaggc

SEQ ID NO: 577176 - RNA, 19 nt, Artificial Sequence
  Description of Artificial Sequence: Synthetic oligonucleotide
uggugaaucgguugaagua

SEQ ID NO: 577177 - RNA, 19 nt, Artificial Sequence
  Description of Artificial Sequence: Synthetic oligonucleotide
ugguagaucuugcuacaga

SEQ ID NO: 577178 - RNA, 19 nt, Artificial Sequence
  Description of Artificial Sequence: Synthetic oligonucleotide
acgaaacauagacggugac

SEQ ID NO: 577179 - RNA, 19 nt, Artificial Sequence
  Description of Artificial Sequence: Synthetic oligonucleotide
uacaccguugccacuuggc

SEQ ID NO: 577180 - RNA, 19 nt, Artificial Sequence
  Description of Artificial Sequence: Synthetic oligonucleotide
gguagcaguacaccaggcg

SEQ ID NO: 577181 - RNA, 19 nt, Artificial Sequence
  Description of Artificial Sequence: Synthetic oligonucleotide
uguuaaguggggugaggcu

SEQ ID NO: 577182 - RNA, 19 nt, Artificial Sequence
  Description of Artificial Sequence: Synthetic oligonucleotide
gagucaucaacacaacugu

SEQ ID NO: 577183 - RNA, 19 nt, Artificial Sequence
  Description of Artificial Sequence: Synthetic oligonucleotide
guacucgugcucaaaggcg

SEQ ID NO: 577184 - RNA, 19 nt, Artificial Sequence
  Description of Artificial Sequence: Synthetic oligonucleotide
ucccggaacuugauucugg

SEQ ID NO: 577185 - RNA, 19 nt, Artificial Sequence
  Description of Artificial Sequence: Synthetic oligonucleotide
agcgauaaaggagccacag

SEQ ID NO: 577186 - RNA, 19 nt, Artificial Sequence
  Description of Artificial Sequence: Synthetic oligonucleotide
uuacaccguugccacuugg

SEQ ID NO: 577187 - RNA, 19 nt, Artificial Sequence
  Description of Artificial Sequence: Synthetic oligonucleotide
ucugguaccgacggagaag

SEQ ID NO: 577188 - RNA, 19 nt, Artificial Sequence
  Description of Artificial Sequence: Synthetic oligonucleotide
uucacgaaacauagacggu

SEQ ID NO: 577189 - RNA, 19 nt, Artificial Sequence
  Description of Artificial Sequence: Synthetic oligonucleotide
cuggguagcaguacaccag

SEQ ID NO: 577190 - RNA, 19 nt, Artificial Sequence
  Description of Artificial Sequence: Synthetic oligonucleotide
guaccgacggagaagacac

SEQ ID NO: 577191 - RNA, 19 nt, Artificial Sequence
  Description of Artificial Sequence: Synthetic oligonucleotide
cuagacucgaugagccgcc

SEQ ID NO: 577192 - RNA, 19 nt, Artificial Sequence
  Description of Artificial Sequence: Synthetic oligonucleotide
ugcuuguaggcagugguga

SEQ ID NO: 577193 - RNA, 19 nt, Artificial Sequence
  Description of Artificial Sequence: Synthetic oligonucleotide
gacguuuggcuuccucccg

SEQ ID NO: 577194 - RNA, 19 nt, Artificial Sequence
  Description of Artificial Sequence: Synthetic oligonucleotide
ugaggcgaagcacucgaaa

SEQ ID NO: 577195 - RNA, 19 nt, Artificial Sequence
  Description of Artificial Sequence: Synthetic oligonucleotide
ugucaggggaugcacuccu

SEQ ID NO: 577196 - RNA, 19 nt, Artificial Sequence
  Description of Artificial Sequence: Synthetic oligonucleotide
guuaaguggggugaggcuc

SEQ ID NO: 577197 - RNA, 19 nt, Artificial Sequence
  Description of Artificial Sequence: Synthetic oligonucleotide
uucgggugagcgcuggugu

SEQ ID NO: 577198 - RNA, 19 nt, Artificial Sequence
  Description of Artificial Sequence: Synthetic oligonucleotide
cuggguacggacuggcuug

SEQ ID NO: 577199 - RNA, 19 nt, Artificial Sequence
  Description of Artificial Sequence: Synthetic oligonucleotide
aggcgaagcacucgaaacu

SEQ ID NO: 577200 - RNA, 19 nt, Artificial Sequence
  Description of Artificial Sequence: Synthetic oligonucleotide
cuucuuuacaccguugcca

SEQ ID NO: 577201 - RNA, 19 nt, Artificial Sequence
  Description of Artificial Sequence: Synthetic oligonucleotide
caacuguagcgauaaagga

SEQ ID NO: 577202 - RNA, 19 nt, Artificial Sequence
  Description of Artificial Sequence: Synthetic oligonucleotide
ucauacaggcccacgccaa

SEQ ID NO: 577203 - RNA, 19 nt, Artificial Sequence
  Description of Artificial Sequence: Synthetic oligonucleotide
ucacagguauuucaaucuu

SEQ ID NO: 577204 - RNA, 19 nt, Artificial Sequence
  Description of Artificial Sequence: Synthetic oligonucleotide
cucggggaugaacacaaug

SEQ ID NO: 577205 - RNA, 19 nt, Artificial Sequence
  Description of Artificial Sequence: Synthetic oligonucleotide
gucgcucuggcguuggccc

SEQ ID NO: 577206 - RNA, 19 nt, Artificial Sequence
  Description of Artificial Sequence: Synthetic oligonucleotide
uuuacaccguugccacuug

SEQ ID NO: 577207 - RNA, 19 nt, Artificial Sequence
  Description of Artificial Sequence: Synthetic oligonucleotide
gaucccugcaggccagucc

SEQ ID NO: 577208 - RNA, 19 nt, Artificial Sequence
  Description of Artificial Sequence: Synthetic oligonucleotide
ccuuauaccggaugcagac

SEQ ID NO: 577209 - RNA, 19 nt, Artificial Sequence
  Description of Artificial Sequence: Synthetic oligonucleotide
uggcucaaccucacgcugc

SEQ ID NO: 577210 - RNA, 19 nt, Artificial Sequence
  Description of Artificial Sequence: Synthetic oligonucleotide
cugguuggugaaucgguug

SEQ ID NO: 577211 - RNA, 19 nt, Artificial Sequence
  Description of Artificial Sequence: Synthetic oligonucleotide
aggcucucgacuagggccc

SEQ ID NO: 577212 - RNA, 19 nt, Artificial Sequence
  Description of Artificial Sequence: Synthetic oligonucleotide
aaagauucucgagguggcu

SEQ ID NO: 577213 - RNA, 19 nt, Artificial Sequence
  Description of Artificial Sequence: Synthetic oligonucleotide
aacaguacuggcggaagua

SEQ ID NO: 577214 - RNA, 19 nt, Artificial Sequence
  Description of Artificial Sequence: Synthetic oligonucleotide
gguacggacuggcuugugg

SEQ ID NO: 577215 - RNA, 19 nt, Artificial Sequence
  Description of Artificial Sequence: Synthetic oligonucleotide
ggcuucuuuacaccguugc

SEQ ID NO: 577216 - RNA, 19 nt, Artificial Sequence
  Description of Artificial Sequence: Synthetic oligonucleotide
uggaucacaguugcuuggc

SEQ ID NO: 577217 - RNA, 19 nt, Artificial Sequence
  Description of Artificial Sequence: Synthetic oligonucleotide
cugccugcuguuuaucuuc

SEQ ID NO: 577218 - RNA, 19 nt, Artificial Sequence
  Description of Artificial Sequence: Synthetic oligonucleotide
agcggcucugcuccauucg

SEQ ID NO: 577219 - RNA, 19 nt, Artificial Sequence
  Description of Artificial Sequence: Synthetic oligonucleotide
cuccucgcagaacggaggg

SEQ ID NO: 577220 - RNA, 19 nt, Artificial Sequence
  Description of Artificial Sequence: Synthetic oligonucleotide
cuuauaccggaugcagacc

SEQ ID NO: 577221 - RNA, 19 nt, Artificial Sequence
  Description of Artificial Sequence: Synthetic oligonucleotide
aaaggguccgaaagcacau

SEQ ID NO: 577222 - RNA, 19 nt, Artificial Sequence
  Description of Artificial Sequence: Synthetic oligonucleotide
cacuccuagacucgaugag

SEQ ID NO: 577223 - RNA, 19 nt, Artificial Sequence
  Description of Artificial Sequence: Synthetic oligonucleotide
gguccgaaagcacaucgug

SEQ ID NO: 577224 - RNA, 19 nt, Artificial Sequence
  Description of Artificial Sequence: Synthetic oligonucleotide
gaaguaguagggacggcuc

SEQ ID NO: 577225 - RNA, 19 nt, Artificial Sequence
  Description of Artificial Sequence: Synthetic oligonucleotide
uguagcgauaaaggagcca

SEQ ID NO: 577226 - RNA, 19 nt, Artificial Sequence
  Description of Artificial Sequence: Synthetic oligonucleotide
ugcuggcguagcuucagga

SEQ ID NO: 577227 - RNA, 19 nt, Artificial Sequence
  Description of Artificial Sequence: Synthetic oligonucleotide
aggcggacuggcuuuggag

SEQ ID NO: 577228 - RNA, 19 nt, Artificial Sequence
  Description of Artificial Sequence: Synthetic oligonucleotide
uguggacggccuuguagug

SEQ ID NO: 577229 - RNA, 19 nt, Artificial Sequence
  Description of Artificial Sequence: Synthetic oligonucleotide
uauaccggaugcagaccac

SEQ ID NO: 577230 - RNA, 19 nt, Artificial Sequence
  Description of Artificial Sequence: Synthetic oligonucleotide
caacgguugaaagauucuc

SEQ ID NO: 577231 - RNA, 19 nt, Artificial Sequence
  Description of Artificial Sequence: Synthetic oligonucleotide
cuguagcgauaaaggagcc

SEQ ID NO: 577232 - RNA, 19 nt, Artificial Sequence
  Description of Artificial Sequence: Synthetic oligonucleotide
aggcugaaugguccuuccg

SEQ ID NO: 577233 - RNA, 19 nt, Artificial Sequence
  Description of Artificial Sequence: Synthetic oligonucleotide
agucuuggggcaauggggu

SEQ ID NO: 577234 - RNA, 19 nt, Artificial Sequence
  Description of Artificial Sequence: Synthetic oligonucleotide
guagggacggcucucccuc

SEQ ID NO: 577235 - RNA, 19 nt, Artificial Sequence
  Description of Artificial Sequence: Synthetic oligonucleotide
ugaaucgguugaaguagua

SEQ ID NO: 577236 - RNA, 19 nt, Artificial Sequence
  Description of Artificial Sequence: Synthetic oligonucleotide
aaggguccgaaagcacauc

SEQ ID NO: 577237 - RNA, 19 nt, Artificial Sequence
  Description of Artificial Sequence: Synthetic oligonucleotide
ucgcagaacggaggguugg

SEQ ID NO: 577238 - RNA, 19 nt, Artificial Sequence
  Description of Artificial Sequence: Synthetic oligonucleotide
gugcaggaccucaaagacg

SEQ ID NO: 577239 - RNA, 19 nt, Artificial Sequence
  Description of Artificial Sequence: Synthetic oligonucleotide
cacgaaacauagacgguga

SEQ ID NO: 577240 - RNA, 19 nt, Artificial Sequence
  Description of Artificial Sequence: Synthetic oligonucleotide
agcacaucgugcuggccca

SEQ ID NO: 577241 - RNA, 19 nt, Artificial Sequence
  Description of Artificial Sequence: Synthetic oligonucleotide
auagacggugacacaacug

SEQ ID NO: 577242 - RNA, 19 nt, Artificial Sequence
  Description of Artificial Sequence: Synthetic oligonucleotide
acgccaaacaucaucuggu

SEQ ID NO: 577243 - RNA, 19 nt, Artificial Sequence
  Description of Artificial Sequence: Synthetic oligonucleotide
gaccucaaagacgugcaca

SEQ ID NO: 577244 - RNA, 19 nt, Artificial Sequence
  Description of Artificial Sequence: Synthetic oligonucleotide
uccaccaagcuugagucuu

SEQ ID NO: 577245 - RNA, 19 nt, Artificial Sequence
  Description of Artificial Sequence: Synthetic oligonucleotide
uccuccccgaaggauaugu

SEQ ID NO: 577246 - RNA, 19 nt, Artificial Sequence
  Description of Artificial Sequence: Synthetic oligonucleotide
cacggcuguguuguggacg

SEQ ID NO: 577247 - RNA, 19 nt, Artificial Sequence
  Description of Artificial Sequence: Synthetic oligonucleotide
cagucagucacagcacccc

SEQ ID NO: 577248 - RNA, 19 nt, Artificial Sequence
  Description of Artificial Sequence: Synthetic oligonucleotide
ugggcuucuuuacaccguu

SEQ ID NO: 577249 - RNA, 19 nt, Artificial Sequence
  Description of Artificial Sequence: Synthetic oligonucleotide
ggagagugacuuagaaggg

SEQ ID NO: 577250 - RNA, 19 nt, Artificial Sequence
  Description of Artificial Sequence: Synthetic oligonucleotide
ggugcagacacagcuagac

SEQ ID NO: 577251 - RNA, 19 nt, Artificial Sequence
  Description of Artificial Sequence: Synthetic oligonucleotide
gggaugcacuccuagacuc

SEQ ID NO: 577252 - RNA, 19 nt, Artificial Sequence
  Description of Artificial Sequence: Synthetic oligonucleotide
uacggacuggcuugugggu

SEQ ID NO: 577253 - RNA, 19 nt, Artificial Sequence
  Description of Artificial Sequence: Synthetic oligonucleotide
ccugacugcuuguaggcag

SEQ ID NO: 577254 - RNA, 19 nt, Artificial Sequence
  Description of Artificial Sequence: Synthetic oligonucleotide
ccagacucgaggcaggaac

SEQ ID NO: 577255 - RNA, 19 nt, Artificial Sequence
  Description of Artificial Sequence: Synthetic oligonucleotide
aacugacgccaaagagucg

SEQ ID NO: 577256 - RNA, 19 nt, Artificial Sequence
  Description of Artificial Sequence: Synthetic oligonucleotide
gccacugcgguacucgugc

SEQ ID NO: 577257 - RNA, 19 nt, Artificial Sequence
  Description of Artificial Sequence: Synthetic oligonucleotide
accgacggagaagacacca

SEQ ID NO: 577258 - RNA, 19 nt, Artificial Sequence
  Description of Artificial Sequence: Synthetic oligonucleotide
ucuuuacaccguugccacu

SEQ ID NO: 577259 - RNA, 19 nt, Artificial Sequence
  Description of Artificial Sequence: Synthetic oligonucleotide
guggcugcggccugacugc

SEQ ID NO: 577260 - RNA, 19 nt, Artificial Sequence
  Description of Artificial Sequence: Synthetic oligonucleotide
gcauccaacgguugaaaga

SEQ ID NO: 577261 - RNA, 19 nt, Artificial Sequence
  Description of Artificial Sequence: Synthetic oligonucleotide
accucugaaggaccccugu

SEQ ID NO: 577262 - RNA, 19 nt, Artificial Sequence
  Description of Artificial Sequence: Synthetic oligonucleotide
ucgggugagcgcuggugug

SEQ ID NO: 577263 - RNA, 19 nt, Artificial Sequence
  Description of Artificial Sequence: Synthetic oligonucleotide
agggacggcucucccuccg

SEQ ID NO: 577264 - RNA, 19 nt, Artificial Sequence
  Description of Artificial Sequence: Synthetic oligonucleotide
ugucuacuacuuugcgcuc

SEQ ID NO: 577265 - RNA, 19 nt, Artificial Sequence
  Description of Artificial Sequence: Synthetic oligonucleotide
gugguagaucuugcuacag

SEQ ID NO: 577266 - RNA, 19 nt, Artificial Sequence
  Description of Artificial Sequence: Synthetic oligonucleotide
ggcgggcaagaccagcugg

SEQ ID NO: 577267 - RNA, 19 nt, Artificial Sequence
  Description of Artificial Sequence: Synthetic oligonucleotide
auucgggugagcgcuggug

SEQ ID NO: 577268 - RNA, 19 nt, Artificial Sequence
  Description of Artificial Sequence: Synthetic oligonucleotide
cagcucaaccucaggggug

SEQ ID NO: 577269 - RNA, 19 nt, Artificial Sequence
  Description of Artificial Sequence: Synthetic oligonucleotide
ccuagacucgaugagccgc

SEQ ID NO: 577270 - RNA, 19 nt, Artificial Sequence
  Description of Artificial Sequence: Synthetic oligonucleotide
ggccugacugcuuguaggc

SEQ ID NO: 577271 - RNA, 19 nt, Artificial Sequence
  Description of Artificial Sequence: Synthetic oligonucleotide
cucagcggggcgaagucca

SEQ ID NO: 577272 - RNA, 19 nt, Artificial Sequence
  Description of Artificial Sequence: Synthetic oligonucleotide
ggacugguuggugaaucgg

SEQ ID NO: 577273 - RNA, 19 nt, Artificial Sequence
  Description of Artificial Sequence: Synthetic oligonucleotide
gaguugccgcuuucugggc

SEQ ID NO: 577274 - RNA, 19 nt, Artificial Sequence
  Description of Artificial Sequence: Synthetic oligonucleotide
ggcgaagcacucgaaacug

SEQ ID NO: 577275 - RNA, 19 nt, Artificial Sequence
  Description of Artificial Sequence: Synthetic oligonucleotide
gaagccagcugaagguguc

SEQ ID NO: 577276 - RNA, 19 nt, Artificial Sequence
  Description of Artificial Sequence: Synthetic oligonucleotide
auaccggaugcagaccaca

SEQ ID NO: 577277 - RNA, 19 nt, Artificial Sequence
  Description of Artificial Sequence: Synthetic oligonucleotide
cauccaacgguugaaagau

SEQ ID NO: 577278 - RNA, 19 nt, Artificial Sequence
  Description of Artificial Sequence: Synthetic oligonucleotide
gcgguacucgugcucaaag

SEQ ID NO: 577279 - RNA, 19 nt, Artificial Sequence
  Description of Artificial Sequence: Synthetic oligonucleotide
uaccgacggagaagacacc

SEQ ID NO: 577280 - RNA, 19 nt, Artificial Sequence
  Description of Artificial Sequence: Synthetic oligonucleotide
ugguggcguuugaagcggc

SEQ ID NO: 577281 - RNA, 19 nt, Artificial Sequence
  Description of Artificial Sequence: Synthetic oligonucleotide
auagcguccaugagcuccu

SEQ ID NO: 577282 - RNA, 19 nt, Artificial Sequence
  Description of Artificial Sequence: Synthetic oligonucleotide
ggcggacuggcuuuggaga

SEQ ID NO: 577283 - RNA, 19 nt, Artificial Sequence
  Description of Artificial Sequence: Synthetic oligonucleotide
cucgacuagggcccugcuc

SEQ ID NO: 577284 - RNA, 19 nt, Artificial Sequence
  Description of Artificial Sequence: Synthetic oligonucleotide
gguaccgacggagaagaca

SEQ ID NO: 577285 - RNA, 19 nt, Artificial Sequence
  Description of Artificial Sequence: Synthetic oligonucleotide
ggauaaccugaugggaaug

SEQ ID NO: 577286 - RNA, 19 nt, Artificial Sequence
  Description of Artificial Sequence: Synthetic oligonucleotide
gugcuggcguagcuucagg

SEQ ID NO: 577287 - RNA, 19 nt, Artificial Sequence
  Description of Artificial Sequence: Synthetic oligonucleotide
caaaggcgggcaagaccag

SEQ ID NO: 577288 - RNA, 19 nt, Artificial Sequence
  Description of Artificial Sequence: Synthetic oligonucleotide
acggccuuguagugcauuu

SEQ ID NO: 577289 - RNA, 19 nt, Artificial Sequence
  Description of Artificial Sequence: Synthetic oligonucleotide
guacaccucggugggucgg

SEQ ID NO: 577290 - RNA, 19 nt, Artificial Sequence
  Description of Artificial Sequence: Synthetic oligonucleotide
gaccccugugcuugaugac

SEQ ID NO: 577291 - RNA, 19 nt, Artificial Sequence
  Description of Artificial Sequence: Synthetic oligonucleotide
cucucgacuagggcccugc

SEQ ID NO: 577292 - RNA, 19 nt, Artificial Sequence
  Description of Artificial Sequence: Synthetic oligonucleotide
gcacuccuagacucgauga

SEQ ID NO: 577293 - RNA, 19 nt, Artificial Sequence
  Description of Artificial Sequence: Synthetic oligonucleotide
ucucgacuagggcccugcu

SEQ ID NO: 577294 - RNA, 19 nt, Artificial Sequence
  Description of Artificial Sequence: Synthetic oligonucleotide
caucugguaccgacggaga

SEQ ID NO: 577295 - RNA, 19 nt, Artificial Sequence
  Description of Artificial Sequence: Synthetic oligonucleotide
ggaacuggguacggacugg

SEQ ID NO: 577296 - RNA, 19 nt, Artificial Sequence
  Description of Artificial Sequence: Synthetic oligonucleotide
cuugagucuuggggcaaug

SEQ ID NO: 577297 - RNA, 19 nt, Artificial Sequence
  Description of Artificial Sequence: Synthetic oligonucleotide
gcugcggccugacugcuug

SEQ ID NO: 577298 - RNA, 19 nt, Artificial Sequence
  Description of Artificial Sequence: Synthetic oligonucleotide
uaccaggcggacuggcuuu

SEQ ID NO: 577299 - RNA, 19 nt, Artificial Sequence
  Description of Artificial Sequence: Synthetic oligonucleotide
ccagccugcguguaccagc

SEQ ID NO: 577300 - RNA, 19 nt, Artificial Sequence
  Description of Artificial Sequence: Synthetic oligonucleotide
acgugcacaggcagcgauc

SEQ ID NO: 577301 - RNA, 19 nt, Artificial Sequence
  Description of Artificial Sequence: Synthetic oligonucleotide
cucgaggcaggaaccucuc

SEQ ID NO: 577302 - RNA, 19 nt, Artificial Sequence
  Description of Artificial Sequence: Synthetic oligonucleotide
uagggacggcucucccucc

SEQ ID NO: 577303 - RNA, 19 nt, Artificial Sequence
  Description of Artificial Sequence: Synthetic oligonucleotide
cacacugccuccgcaggug

SEQ ID NO: 577304 - RNA, 19 nt, Artificial Sequence
  Description of Artificial Sequence: Synthetic oligonucleotide
cccgcgggagccaaaguag

SEQ ID NO: 577305 - RNA, 19 nt, Artificial Sequence
  Description of Artificial Sequence: Synthetic oligonucleotide
gacugguuggugaaucggu

SEQ ID NO: 577306 - RNA, 19 nt, Artificial Sequence
  Description of Artificial Sequence: Synthetic oligonucleotide
acugguuggugaaucgguu

SEQ ID NO: 577307 - RNA, 19 nt, Artificial Sequence
  Description of Artificial Sequence: Synthetic oligonucleotide
cacucagcggggcgaaguc

SEQ ID NO: 577308 - RNA, 19 nt, Artificial Sequence
  Description of Artificial Sequence: Synthetic oligonucleotide
gggcaaugggguugcauuc

SEQ ID NO: 577309 - RNA, 19 nt, Artificial Sequence
  Description of Artificial Sequence: Synthetic oligonucleotide
agucaucaacacaacugua

SEQ ID NO: 577310 - RNA, 19 nt, Artificial Sequence
  Description of Artificial Sequence: Synthetic oligonucleotide
cgaagcacucgaaacugac

SEQ ID NO: 577311 - RNA, 19 nt, Artificial Sequence
  Description of Artificial Sequence: Synthetic oligonucleotide
cuagggcccugcucccggc

SEQ ID NO: 577312 - RNA, 19 nt, Artificial Sequence
  Description of Artificial Sequence: Synthetic oligonucleotide
uacaccucggugggucgga

SEQ ID NO: 577313 - RNA, 19 nt, Artificial Sequence
  Description of Artificial Sequence: Synthetic oligonucleotide
gcuccucgcagaacggagg

SEQ ID NO: 577314 - RNA, 19 nt, Artificial Sequence
  Description of Artificial Sequence: Synthetic oligonucleotide
gaccucugaaggaccccug

SEQ ID NO: 577315 - RNA, 19 nt, Artificial Sequence
  Description of Artificial Sequence: Synthetic oligonucleotide
ugguaccgacggagaagac

SEQ ID NO: 577316 - RNA, 19 nt, Artificial Sequence
  Description of Artificial Sequence: Synthetic oligonucleotide
cagaacggaggguuggccu

SEQ ID NO: 577317 - RNA, 19 nt, Artificial Sequence
  Description of Artificial Sequence: Synthetic oligonucleotide
gaacggaggguuggccuca

SEQ ID NO: 577318 - RNA, 19 nt, Artificial Sequence
  Description of Artificial Sequence: Synthetic oligonucleotide
cgguacucgugcucaaagg

SEQ ID NO: 577319 - RNA, 19 nt, Artificial Sequence
  Description of Artificial Sequence: Synthetic oligonucleotide
gcagcgaucccugcaggcc

SEQ ID NO: 577320 - RNA, 19 nt, Artificial Sequence
  Description of Artificial Sequence: Synthetic oligonucleotide
cacugcgguacucgugcuc

SEQ ID NO: 577321 - RNA, 19 nt, Artificial Sequence
  Description of Artificial Sequence: Synthetic oligonucleotide
cgguugaaagauucucgag

SEQ ID NO: 577322 - RNA, 19 nt, Artificial Sequence
  Description of Artificial Sequence: Synthetic oligonucleotide
agaccacacuguucuccau

SEQ ID NO: 577323 - RNA, 19 nt, Artificial Sequence
  Description of Artificial Sequence: Synthetic oligonucleotide
ggacaggggcucuggugag

SEQ ID NO: 577324 - RNA, 19 nt, Artificial Sequence
  Description of Artificial Sequence: Synthetic oligonucleotide
gcucugcuccauucgggug

SEQ ID NO: 577325 - RNA, 19 nt, Artificial Sequence
  Description of Artificial Sequence: Synthetic oligonucleotide
gcuagacggacuggguagc

SEQ ID NO: 577326 - RNA, 19 nt, Artificial Sequence
  Description of Artificial Sequence: Synthetic oligonucleotide
ggacuuagucccagcaguc

SEQ ID NO: 577327 - RNA, 19 nt, Artificial Sequence
  Description of Artificial Sequence: Synthetic oligonucleotide
caaagccggggucguucug

SEQ ID NO: 577328 - RNA, 19 nt, Artificial Sequence
  Description of Artificial Sequence: Synthetic oligonucleotide
cucccuccggcuccagcac

SEQ ID NO: 577329 - RNA, 19 nt, Artificial Sequence
  Description of Artificial Sequence: Synthetic oligonucleotide
uagacucgaugagccgccu

SEQ ID NO: 577330 - RNA, 19 nt, Artificial Sequence
  Description of Artificial Sequence: Synthetic oligonucleotide
cgaugagccgccuggcagc

SEQ ID NO: 577331 - RNA, 19 nt, Artificial Sequence
  Description of Artificial Sequence: Synthetic oligonucleotide
cucccuuauaccggaugca

SEQ ID NO: 577332 - RNA, 19 nt, Artificial Sequence
  Description of Artificial Sequence: Synthetic oligonucleotide
uccucgcagaacggagggu

SEQ ID NO: 577333 - RNA, 19 nt, Artificial Sequence
  Description of Artificial Sequence: Synthetic oligonucleotide
agcgaucccugcaggccag

SEQ ID NO: 577334 - RNA, 19 nt, Artificial Sequence
  Description of Artificial Sequence: Synthetic oligonucleotide
cauacaggcccacgccaaa

SEQ ID NO: 577335 - RNA, 19 nt, Artificial Sequence
  Description of Artificial Sequence: Synthetic oligonucleotide
cugauuggaggugccugga

SEQ ID NO: 577336 - RNA, 19 nt, Artificial Sequence
  Description of Artificial Sequence: Synthetic oligonucleotide
gggugagcgcugguguggg

SEQ ID NO: 577337 - RNA, 19 nt, Artificial Sequence
  Description of Artificial Sequence: Synthetic oligonucleotide
ccgacggagaagacaccag

SEQ ID NO: 577338 - RNA, 19 nt, Artificial Sequence
  Description of Artificial Sequence: Synthetic oligonucleotide
cgugcacaggcagcgaucc

SEQ ID NO: 577339 - RNA, 19 nt, Artificial Sequence
  Description of Artificial Sequence: Synthetic oligonucleotide
gugaaucgguugaaguagu

SEQ ID NO: 577340 - RNA, 19 nt, Artificial Sequence
  Description of Artificial Sequence: Synthetic oligonucleotide
ggacuggguagcaguacac

SEQ ID NO: 577341 - RNA, 19 nt, Artificial Sequence
  Description of Artificial Sequence: Synthetic oligonucleotide
gggugaggcgaagcacucg

SEQ ID NO: 577342 - RNA, 19 nt, Artificial Sequence
  Description of Artificial Sequence: Synthetic oligonucleotide
cugacugcuuguaggcagu

SEQ ID NO: 577343 - RNA, 19 nt, Artificial Sequence
  Description of Artificial Sequence: Synthetic oligonucleotide
cuacuuugcgcuccagcau

SEQ ID NO: 577344 - RNA, 19 nt, Artificial Sequence
  Description of Artificial Sequence: Synthetic oligonucleotide
gugcacaggcagcgauccc

SEQ ID NO: 577345 - RNA, 19 nt, Artificial Sequence
  Description of Artificial Sequence: Synthetic oligonucleotide
ucccgguagugcuggcgua

SEQ ID NO: 577346 - RNA, 19 nt, Artificial Sequence
  Description of Artificial Sequence: Synthetic oligonucleotide
agccacugcgguacucgug

SEQ ID NO: 577347 - RNA, 19 nt, Artificial Sequence
  Description of Artificial Sequence: Synthetic oligonucleotide
ggcguuugaagcggcucug

SEQ ID NO: 577348 - RNA, 19 nt, Artificial Sequence
  Description of Artificial Sequence: Synthetic oligonucleotide
ggugagcgcuggugugggg

SEQ ID NO: 577349 - RNA, 19 nt, Artificial Sequence
  Description of Artificial Sequence: Synthetic oligonucleotide
ccgcgggagccaaaguagc

SEQ ID NO: 577350 - RNA, 19 nt, Artificial Sequence
  Description of Artificial Sequence: Synthetic oligonucleotide
ugacagcauuggucuggau

SEQ ID NO: 577351 - RNA, 19 nt, Artificial Sequence
  Description of Artificial Sequence: Synthetic oligonucleotide
gggacggcucucccuccgg

SEQ ID NO: 577352 - RNA, 19 nt, Artificial Sequence
  Description of Artificial Sequence: Synthetic oligonucleotide
gauucucgagguggcucaa

SEQ ID NO: 577353 - RNA, 19 nt, Artificial Sequence
  Description of Artificial Sequence: Synthetic oligonucleotide
ggacggcucucccuccggc

SEQ ID NO: 577354 - RNA, 19 nt, Artificial Sequence
  Description of Artificial Sequence: Synthetic oligonucleotide
ugcggccugacugcuugua

SEQ ID NO: 577355 - RNA, 19 nt, Artificial Sequence
  Description of Artificial Sequence: Synthetic oligonucleotide
cuagacggacuggguagca

SEQ ID NO: 577356 - RNA, 19 nt, Artificial Sequence
  Description of Artificial Sequence: Synthetic oligonucleotide
ggggaugcacuccuagacu

SEQ ID NO: 577357 - RNA, 19 nt, Artificial Sequence
  Description of Artificial Sequence: Synthetic oligonucleotide
cccacgccaaacaucaucu

SEQ ID NO: 577358 - RNA, 19 nt, Artificial Sequence
  Description of Artificial Sequence: Synthetic oligonucleotide
ccgaaagcacaucgugcug

SEQ ID NO: 577359 - RNA, 19 nt, Artificial Sequence
  Description of Artificial Sequence: Synthetic oligonucleotide
gcggacuggcuuuggagaa

SEQ ID NO: 577360 - RNA, 19 nt, Artificial Sequence
  Description of Artificial Sequence: Synthetic oligonucleotide
cccuuauaccggaugcaga

SEQ ID NO: 577361 - RNA, 19 nt, Artificial Sequence
  Description of Artificial Sequence: Synthetic oligonucleotide
gcgggagccaaaguagcca

SEQ ID NO: 577362 - RNA, 19 nt, Artificial Sequence
  Description of Artificial Sequence: Synthetic oligonucleotide
cagccugcguguaccagcu

SEQ ID NO: 577363 - RNA, 19 nt, Artificial Sequence
  Description of Artificial Sequence: Synthetic oligonucleotide
aacggaggguuggccucaa

SEQ ID NO: 577364 - RNA, 19 nt, Artificial Sequence
  Description of Artificial Sequence: Synthetic oligonucleotide
cgaaacauagacggugaca

SEQ ID NO: 577365 - RNA, 19 nt, Artificial Sequence
  Description of Artificial Sequence: Synthetic oligonucleotide
gcacuucucccagccugcg

SEQ ID NO: 577366 - RNA, 19 nt, Artificial Sequence
  Description of Artificial Sequence: Synthetic oligonucleotide
gguugcauucagccccaaa

SEQ ID NO: 577367 - RNA, 19 nt, Artificial Sequence
  Description of Artificial Sequence: Synthetic oligonucleotide
caggcggacuggcuuugga

SEQ ID NO: 577368 - RNA, 19 nt, Artificial Sequence
  Description of Artificial Sequence: Synthetic oligonucleotide
cgcgggagccaaaguagcc

SEQ ID NO: 577369 - RNA, 19 nt, Artificial Sequence
  Description of Artificial Sequence: Synthetic oligonucleotide
cugcguguaccagcuccuc

SEQ ID NO: 577370 - RNA, 19 nt, Artificial Sequence
  Description of Artificial Sequence: Synthetic oligonucleotide
ucccgccacucggggauga

SEQ ID NO: 577371 - RNA, 19 nt, Artificial Sequence
  Description of Artificial Sequence: Synthetic oligonucleotide
gggcucccgccacucgggg

SEQ ID NO: 577372 - RNA, 19 nt, Artificial Sequence
  Description of Artificial Sequence: Synthetic oligonucleotide
gugggucggaggagagcug

SEQ ID NO: 577373 - RNA, 19 nt, Artificial Sequence
  Description of Artificial Sequence: Synthetic oligonucleotide
ccauucgggugagcgcugg

SEQ ID NO: 577374 - RNA, 19 nt, Artificial Sequence
  Description of Artificial Sequence: Synthetic oligonucleotide
gguuggugaaucgguugaa

SEQ ID NO: 577375 - RNA, 19 nt, Artificial Sequence
  Description of Artificial Sequence: Synthetic oligonucleotide
ccgcuuucugggcuuguuc

SEQ ID NO: 577376 - RNA, 19 nt, Artificial Sequence
  Description of Artificial Sequence: Synthetic oligonucleotide
gcgauaaaggagccacagu

SEQ ID NO: 577377 - RNA, 19 nt, Artificial Sequence
  Description of Artificial Sequence: Synthetic oligonucleotide
auccaacgguugaaagauu

SEQ ID NO: 577378 - RNA, 19 nt, Artificial Sequence
  Description of Artificial Sequence: Synthetic oligonucleotide
cuuugcgcuccagcaucca

SEQ ID NO: 577379 - RNA, 19 nt, Artificial Sequence
  Description of Artificial Sequence: Synthetic oligonucleotide
cccgguagugcuggcguag

SEQ ID NO: 577380 - RNA, 19 nt, Artificial Sequence
  Description of Artificial Sequence: Synthetic oligonucleotide
gcccgcgggagccaaagua

SEQ ID NO: 577381 - RNA, 19 nt, Artificial Sequence
  Description of Artificial Sequence: Synthetic oligonucleotide
gggcuucuuuacaccguug

SEQ ID NO: 577382 - RNA, 19 nt, Artificial Sequence
  Description of Artificial Sequence: Synthetic oligonucleotide
gcuucucucggauccguuu

SEQ ID NO: 577383 - RNA, 19 nt, Artificial Sequence
  Description of Artificial Sequence: Synthetic oligonucleotide
guguuguggacggccuugu

SEQ ID NO: 577384 - RNA, 19 nt, Artificial Sequence
  Description of Artificial Sequence: Synthetic oligonucleotide
gcaaagccggggucguucu

SEQ ID NO: 577385 - RNA, 19 nt, Artificial Sequence
  Description of Artificial Sequence: Synthetic oligonucleotide
acggaggguuggccucaaa

SEQ ID NO: 577386 - RNA, 19 nt, Artificial Sequence
  Description of Artificial Sequence: Synthetic oligonucleotide
ccgguagugcuggcguagc

SEQ ID NO: 577387 - RNA, 19 nt, Artificial Sequence
  Description of Artificial Sequence: Synthetic oligonucleotide
gacggccuuguagugcauu

SEQ ID NO: 577388 - RNA, 19 nt, Artificial Sequence
  Description of Artificial Sequence: Synthetic oligonucleotide
cuucugagaguugccgcuu

SEQ ID NO: 577389 - RNA, 19 nt, Artificial Sequence
  Description of Artificial Sequence: Synthetic oligonucleotide
ggcucccgccacucgggga

SEQ ID NO: 577390 - RNA, 19 nt, Artificial Sequence
  Description of Artificial Sequence: Synthetic oligonucleotide
gagagaccauagcguccau

SEQ ID NO: 577391 - RNA, 19 nt, Artificial Sequence
  Description of Artificial Sequence: Synthetic oligonucleotide
ccacucggggaugaacaca

SEQ ID NO: 577392 - RNA, 19 nt, Artificial Sequence
  Description of Artificial Sequence: Synthetic oligonucleotide
cucccgccacucggggaug

SEQ ID NO: 577393 - RNA, 19 nt, Artificial Sequence
  Description of Artificial Sequence: Synthetic oligonucleotide
cccgaaggauauguuaagu

SEQ ID NO: 577394 - RNA, 19 nt, Artificial Sequence
  Description of Artificial Sequence: Synthetic oligonucleotide
cgccaaagagucggugcag

SEQ ID NO: 577395 - RNA, 19 nt, Artificial Sequence
  Description of Artificial Sequence: Synthetic oligonucleotide
cugcuccauucgggugagc

SEQ ID NO: 577396 - RNA, 19 nt, Artificial Sequence
  Description of Artificial Sequence: Synthetic oligonucleotide
ggguccgaaagcacaucgu

SEQ ID NO: 577397 - RNA, 19 nt, Artificial Sequence
  Description of Artificial Sequence: Synthetic oligonucleotide
cauucgggugagcgcuggu

SEQ ID NO: 577398 - RNA, 19 nt, Artificial Sequence
  Description of Artificial Sequence: Synthetic oligonucleotide
ccugcguguaccagcuccu

SEQ ID NO: 577399 - RNA, 19 nt, Artificial Sequence
  Description of Artificial Sequence: Synthetic oligonucleotide
gcggggcgaaguccaggca

SEQ ID NO: 577400 - RNA, 19 nt, Artificial Sequence
  Description of Artificial Sequence: Synthetic oligonucleotide
cugcagucgcucuggcguu

SEQ ID NO: 577401 - RNA, 19 nt, Artificial Sequence
  Description of Artificial Sequence: Synthetic oligonucleotide
ggguacggacuggcuugug

SEQ ID NO: 577402 - RNA, 19 nt, Artificial Sequence
  Description of Artificial Sequence: Synthetic oligonucleotide
ccgccacucggggaugaac

SEQ ID NO: 577403 - RNA, 19 nt, Artificial Sequence
  Description of Artificial Sequence: Synthetic oligonucleotide
gcgggcaagaccagcuggu

SEQ ID NO: 577404 - RNA, 19 nt, Artificial Sequence
  Description of Artificial Sequence: Synthetic oligonucleotide
cccugaggacuuaguccca

SEQ ID NO: 577405 - RNA, 19 nt, Artificial Sequence
  Description of Artificial Sequence: Synthetic oligonucleotide
ccucgcagaacggaggguu

SEQ ID NO: 577406 - RNA, 19 nt, Artificial Sequence
  Description of Artificial Sequence: Synthetic oligonucleotide
gcucucgacuagggcccug

SEQ ID NO: 577407 - RNA, 19 nt, Artificial Sequence
  Description of Artificial Sequence: Synthetic oligonucleotide
cugcggccugacugcuugu

SEQ ID NO: 577408 - RNA, 19 nt, Artificial Sequence
  Description of Artificial Sequence: Synthetic oligonucleotide
gagccgccuggcagccucu

SEQ ID NO: 577409 - RNA, 19 nt, Artificial Sequence
  Description of Artificial Sequence: Synthetic oligonucleotide
ccacugcgguacucgugcu

SEQ ID NO: 577410 - RNA, 19 nt, Artificial Sequence
  Description of Artificial Sequence: Synthetic oligonucleotide
ggcccgcgggagccaaagu

SEQ ID NO: 577411 - RNA, 19 nt, Artificial Sequence
  Description of Artificial Sequence: Synthetic oligonucleotide
ggguugcauucagccccaa

SEQ ID NO: 577412 - RNA, 19 nt, Artificial Sequence
  Description of Artificial Sequence: Synthetic oligonucleotide
ggcucucgacuagggcccu

SEQ ID NO: 577413 - RNA, 19 nt, Artificial Sequence
  Description of Artificial Sequence: Synthetic oligonucleotide
ccuccccgaaggauauguu

SEQ ID NO: 577414 - RNA, 19 nt, Artificial Sequence
  Description of Artificial Sequence: Synthetic oligonucleotide
cgguagugcuggcguagcu

SEQ ID NO: 577415 - RNA, 19 nt, Artificial Sequence
  Description of Artificial Sequence: Synthetic oligonucleotide
cccgguccuuggccucuga

SEQ ID NO: 577416 - RNA, 19 nt, Artificial Sequence
  Description of Artificial Sequence: Synthetic oligonucleotide
gcgaucccugcaggccagu

SEQ ID NO: 577417 - RNA, 19 nt, Artificial Sequence
  Description of Artificial Sequence: Synthetic oligonucleotide
cccgccacucggggaugaa

SEQ ID NO: 577418 - RNA, 19 nt, Artificial Sequence
  Description of Artificial Sequence: Synthetic oligonucleotide
cggauccguuugacauacu

SEQ ID NO: 577419 - RNA, 19 nt, Artificial Sequence
  Description of Artificial Sequence: Synthetic oligonucleotide
uauauauauauauauacag

SEQ ID NO: 577420 - RNA, 19 nt, Artificial Sequence
  Description of Artificial Sequence: Synthetic oligonucleotide
uauauauauauacagaaac

SEQ ID NO: 577421 - RNA, 19 nt, Artificial Sequence
  Description of Artificial Sequence: Synthetic oligonucleotide
ucgaaauaaaaccagauca

SEQ ID NO: 577422 - RNA, 19 nt, Artificial Sequence
  Description of Artificial Sequence: Synthetic oligonucleotide
aauaaaguguaagugaagg

SEQ ID NO: 577423 - RNA, 19 nt, Artificial Sequence
  Description of Artificial Sequence: Synthetic oligonucleotide
agguuaaguaccuugaggc

SEQ ID NO: 577424 - RNA, 19 nt, Artificial Sequence
  Description of Artificial Sequence: Synthetic oligonucleotide
cauauauauauauauauac

SEQ ID NO: 577425 - RNA, 19 nt, Artificial Sequence
  Description of Artificial Sequence: Synthetic oligonucleotide
uauauauauauauacagaa

SEQ ID NO: 577426 - RNA, 19 nt, Artificial Sequence
  Description of Artificial Sequence: Synthetic oligonucleotide
acuaaaacgagguagccag

SEQ ID NO: 577427 - RNA, 19 nt, Artificial Sequence
  Description of Artificial Sequence: Synthetic oligonucleotide
auuaaaucaagauuuagaa

SEQ ID NO: 577428 - RNA, 19 nt, Artificial Sequence
  Description of Artificial Sequence: Synthetic oligonucleotide
acaguauccaaauaaagug

SEQ ID NO: 577429 - RNA, 19 nt, Artificial Sequence
  Description of Artificial Sequence: Synthetic oligonucleotide
uauauaauacuccucuuca

SEQ ID NO: 577430 - RNA, 19 nt, Artificial Sequence
  Description of Artificial Sequence: Synthetic oligonucleotide
aaaguaaacuaaaacgagg

SEQ ID NO: 577431 - RNA, 19 nt, Artificial Sequence
  Description of Artificial Sequence: Synthetic oligonucleotide
agguuaaggcucuugaggc

SEQ ID NO: 577432 - RNA, 19 nt, Artificial Sequence
  Description of Artificial Sequence: Synthetic oligonucleotide
auaaaguguaagugaaggc

SEQ ID NO: 577433 - RNA, 19 nt, Artificial Sequence
  Description of Artificial Sequence: Synthetic oligonucleotide
uauaaacguuuuaagagga

SEQ ID NO: 577434 - RNA, 19 nt, Artificial Sequence
  Description of Artificial Sequence: Synthetic oligonucleotide
uuaugaacagaacacagau

SEQ ID NO: 577435 - RNA, 19 nt, Artificial Sequence
  Description of Artificial Sequence: Synthetic oligonucleotide
uacauccuacucaaaagcg

SEQ ID NO: 577436 - RNA, 19 nt, Artificial Sequence
  Description of Artificial Sequence: Synthetic oligonucleotide
ugaaucagucuccauaccc

SEQ ID NO: 577437 - RNA, 19 nt, Artificial Sequence
  Description of Artificial Sequence: Synthetic oligonucleotide
uguaagugaaggcagacau

SEQ ID NO: 577438 - RNA, 19 nt, Artificial Sequence
  Description of Artificial Sequence: Synthetic oligonucleotide
uaaaguguaagugaaggca

SEQ ID NO: 577439 - RNA, 19 nt, Artificial Sequence
  Description of Artificial Sequence: Synthetic oligonucleotide
uuacuguaagaauauaaac

SEQ ID NO: 577440 - RNA, 19 nt, Artificial Sequence
  Description of Artificial Sequence: Synthetic oligonucleotide
aucauuuauacaaauucac

SEQ ID NO: 577441 - RNA, 19 nt, Artificial Sequence
  Description of Artificial Sequence: Synthetic oligonucleotide
  modified_base (5)..(5): a, c, u, g, unknown or other
ucagngaaagauccgugag

SEQ ID NO: 577442 - RNA, 19 nt, Artificial Sequence
  Description of Artificial Sequence: Synthetic oligonucleotide
aaggccgcguccgagaugc

SEQ ID NO: 577443 - RNA, 19 nt, Artificial Sequence
  Description of Artificial Sequence: Synthetic oligonucleotide
aaguaaacuaaaacgaggu

SEQ ID NO: 577444 - RNA, 19 nt, Artificial Sequence
  Description of Artificial Sequence: Synthetic oligonucleotide
gacugguuuacaaaguggg

SEQ ID NO: 577445 - RNA, 19 nt, Artificial Sequence
  Description of Artificial Sequence: Synthetic oligonucleotide
cauuucgaaauaaaaccag

SEQ ID NO: 577446 - RNA, 19 nt, Artificial Sequence
  Description of Artificial Sequence: Synthetic oligonucleotide
caugguugggucuucaaag

SEQ ID NO: 577447 - RNA, 19 nt, Artificial Sequence
  Description of Artificial Sequence: Synthetic oligonucleotide
uucgaaauaaaaccagauc

SEQ ID NO: 577448 - RNA, 19 nt, Artificial Sequence
  Description of Artificial Sequence: Synthetic oligonucleotide
uuuagaaacaugguugggu

SEQ ID NO: 577449 - RNA, 19 nt, Artificial Sequence
  Description of Artificial Sequence: Synthetic oligonucleotide
gacauauauauauauauau

SEQ ID NO: 577450 - RNA, 19 nt, Artificial Sequence
  Description of Artificial Sequence: Synthetic oligonucleotide
uugcauauauaauacuccu

SEQ ID NO: 577451 - RNA, 19 nt, Artificial Sequence
  Description of Artificial Sequence: Synthetic oligonucleotide
uuagaaacaugguuggguc

SEQ ID NO: 577452 - RNA, 19 nt, Artificial Sequence
  Description of Artificial Sequence: Synthetic oligonucleotide
aaacguuuuaagaggaucu

SEQ ID NO: 577453 - RNA, 19 nt, Artificial Sequence
  Description of Artificial Sequence: Synthetic oligonucleotide
uccgucaucugccagaguc

SEQ ID NO: 577454 - RNA, 19 nt, Artificial Sequence
  Description of Artificial Sequence: Synthetic oligonucleotide
auauauauauauauauaca

SEQ ID NO: 577455 - RNA, 19 nt, Artificial Sequence
  Description of Artificial Sequence: Synthetic oligonucleotide
uauguaagccagacucugg

SEQ ID NO: 577456 - RNA, 19 nt, Artificial Sequence
  Description of Artificial Sequence: Synthetic oligonucleotide
acugccaugaacguguaag

SEQ ID NO: 577457 - RNA, 19 nt, Artificial Sequence
  Description of Artificial Sequence: Synthetic oligonucleotide
uuaagaggaucuuuguuau

SEQ ID NO: 577458 - RNA, 19 nt, Artificial Sequence
  Description of Artificial Sequence: Synthetic oligonucleotide
uaugaacagaacacagaug

SEQ ID NO: 577459 - RNA, 19 nt, Artificial Sequence
  Description of Artificial Sequence: Synthetic oligonucleotide
auauauauauauauacaga

SEQ ID NO: 577460 - RNA, 19 nt, Artificial Sequence
  Description of Artificial Sequence: Synthetic oligonucleotide
cacuguccgauguugagcg

SEQ ID NO: 577461 - RNA, 19 nt, Artificial Sequence
  Description of Artificial Sequence: Synthetic oligonucleotide
agccguacaggucuaugcc

SEQ ID NO: 577462 - RNA, 19 nt, Artificial Sequence
  Description of Artificial Sequence: Synthetic oligonucleotide
ucgugggaggaacagggcg

SEQ ID NO: 577463 - RNA, 19 nt, Artificial Sequence
  Description of Artificial Sequence: Synthetic oligonucleotide
  modified_base (6)..(6): a, c, u, g, unknown or other
uucagngaaagauccguga

SEQ ID NO: 577464 - RNA, 19 nt, Artificial Sequence
  Description of Artificial Sequence: Synthetic oligonucleotide
ucaccugaccuucucacug

SEQ ID NO: 577465 - RNA, 19 nt, Artificial Sequence
  Description of Artificial Sequence: Synthetic oligonucleotide
  modified_base (14)..(14): a, c, u, g, unknown or other
agaugugcuucagngaaag

SEQ ID NO: 577466 - RNA, 19 nt, Artificial Sequence
  Description of Artificial Sequence: Synthetic oligonucleotide
agugugcgggaacaguggc

SEQ ID NO: 577467 - RNA, 19 nt, Artificial Sequence
  Description of Artificial Sequence: Synthetic oligonucleotide
aguuuaaccuuuuacugua

SEQ ID NO: 577468 - RNA, 19 nt, Artificial Sequence
  Description of Artificial Sequence: Synthetic oligonucleotide
uuugugcuauaaauuaaau

SEQ ID NO: 577469 - RNA, 19 nt, Artificial Sequence
  Description of Artificial Sequence: Synthetic oligonucleotide
auaucucucuuguagaauu

SEQ ID NO: 577470 - RNA, 19 nt, Artificial Sequence
  Description of Artificial Sequence: Synthetic oligonucleotide
uggggcauaauuugcauau

SEQ ID NO: 577471 - RNA, 19 nt, Artificial Sequence
  Description of Artificial Sequence: Synthetic oligonucleotide
gaacguguaagugcgcgcg

SEQ ID NO: 577472 - RNA, 19 nt, Artificial Sequence
  Description of Artificial Sequence: Synthetic oligonucleotide
aacuaaaacgagguagcca

SEQ ID NO: 577473 - RNA, 19 nt, Artificial Sequence
  Description of Artificial Sequence: Synthetic oligonucleotide
ucuauuccuccauucagaa

SEQ ID NO: 577474 - RNA, 19 nt, Artificial Sequence
  Description of Artificial Sequence: Synthetic oligonucleotide
aaagagcccgggcuucgcg

SEQ ID NO: 577475 - RNA, 19 nt, Artificial Sequence
  Description of Artificial Sequence: Synthetic oligonucleotide
ugcauauauaauacuccuc

SEQ ID NO: 577476 - RNA, 19 nt, Artificial Sequence
  Description of Artificial Sequence: Synthetic oligonucleotide
ucucucauguugcugugga

SEQ ID NO: 577477 - RNA, 19 nt, Artificial Sequence
  Description of Artificial Sequence: Synthetic oligonucleotide
  modified_base (9)..(9): a, c, u, g, unknown or other
ugcuucagngaaagauccg

SEQ ID NO: 577478 - RNA, 19 nt, Artificial Sequence
  Description of Artificial Sequence: Synthetic oligonucleotide
  modified_base (7)..(7): a, c, u, g, unknown or other
cuucagngaaagauccgug

SEQ ID NO: 577479 - RNA, 19 nt, Artificial Sequence
  Description of Artificial Sequence: Synthetic oligonucleotide
agaagaaccccagacgcag

SEQ ID NO: 577480 - RNA, 19 nt, Artificial Sequence
  Description of Artificial Sequence: Synthetic oligonucleotide
ugaaggcagacaucuuucc

SEQ ID NO: 577481 - RNA, 19 nt, Artificial Sequence
  Description of Artificial Sequence: Synthetic oligonucleotide
ucggugaucugcuugcaga

SEQ ID NO: 577482 - RNA, 19 nt, Artificial Sequence
  Description of Artificial Sequence: Synthetic oligonucleotide
ugguugggucuucaaagcc

SEQ ID NO: 577483 - RNA, 19 nt, Artificial Sequence
  Description of Artificial Sequence: Synthetic oligonucleotide
aggucuaugcccgugagcu

SEQ ID NO: 577484 - RNA, 19 nt, Artificial Sequence
  Description of Artificial Sequence: Synthetic oligonucleotide
augaacguguaagugcgcg

SEQ ID NO: 577485 - RNA, 19 nt, Artificial Sequence
  Description of Artificial Sequence: Synthetic oligonucleotide
guugaugccgucgucacug

SEQ ID NO: 577486 - RNA, 19 nt, Artificial Sequence
  Description of Artificial Sequence: Synthetic oligonucleotide
aaaugcagugccccgggau

SEQ ID NO: 577487 - RNA, 19 nt, Artificial Sequence
  Description of Artificial Sequence: Synthetic oligonucleotide
uggcagaguaccgaagggg

SEQ ID NO: 577488 - RNA, 19 nt, Artificial Sequence
  Description of Artificial Sequence: Synthetic oligonucleotide
ccaugaacguguaagugcg

SEQ ID NO: 577489 - RNA, 19 nt, Artificial Sequence
  Description of Artificial Sequence: Synthetic oligonucleotide
uaaaacgagguagccagac

SEQ ID NO: 577490 - RNA, 19 nt, Artificial Sequence
  Description of Artificial Sequence: Synthetic oligonucleotide
auauauauauauacagaaa

SEQ ID NO: 577491 - RNA, 19 nt, Artificial Sequence
  Description of Artificial Sequence: Synthetic oligonucleotide
  modified_base (3)..(3): a, c, u, g, unknown or other
agngaaagauccgugaguu

SEQ ID NO: 577492 - RNA, 19 nt, Artificial Sequence
  Description of Artificial Sequence: Synthetic oligonucleotide
ugaaacgccgagucccucc

SEQ ID NO: 577493 - RNA, 19 nt, Artificial Sequence
  Description of Artificial Sequence: Synthetic oligonucleotide
cagacauauauauauauau

SEQ ID NO: 577494 - RNA, 19 nt, Artificial Sequence
  Description of Artificial Sequence: Synthetic oligonucleotide
auauaauacuccucuucaa

SEQ ID NO: 577495 - RNA, 19 nt, Artificial Sequence
  Description of Artificial Sequence: Synthetic oligonucleotide
uccaaaugcagugccccgg

SEQ ID NO: 577496 - RNA, 19 nt, Artificial Sequence
  Description of Artificial Sequence: Synthetic oligonucleotide
guaagugcgcgcgugagug

SEQ ID NO: 577497 - RNA, 19 nt, Artificial Sequence
  Description of Artificial Sequence: Synthetic oligonucleotide
guuaaggcucuugaggcgc

SEQ ID NO: 577498 - RNA, 19 nt, Artificial Sequence
  Description of Artificial Sequence: Synthetic oligonucleotide
auuucgaaauaaaaccaga

SEQ ID NO: 577499 - RNA, 19 nt, Artificial Sequence
  Description of Artificial Sequence: Synthetic oligonucleotide
ugaacguguaagugcgcgc

SEQ ID NO: 577500 - RNA, 19 nt, Artificial Sequence
  Description of Artificial Sequence: Synthetic oligonucleotide
acauauauauauauauaua

SEQ ID NO: 577501 - RNA, 19 nt, Artificial Sequence
  Description of Artificial Sequence: Synthetic oligonucleotide
aguaaacuaaaacgaggua

SEQ ID NO: 577502 - RNA, 19 nt, Artificial Sequence
  Description of Artificial Sequence: Synthetic oligonucleotide
cagaaacgaagugaguggc

SEQ ID NO: 577503 - RNA, 19 nt, Artificial Sequence
  Description of Artificial Sequence: Synthetic oligonucleotide
ugcuuucuacacauuucga

SEQ ID NO: 577504 - RNA, 19 nt, Artificial Sequence
  Description of Artificial Sequence: Synthetic oligonucleotide
augccgucgucacugaugu

SEQ ID NO: 577505 - RNA, 19 nt, Artificial Sequence
  Description of Artificial Sequence: Synthetic oligonucleotide
auuugugcuauaaauuaaa

SEQ ID NO: 577506 - RNA, 19 nt, Artificial Sequence
  Description of Artificial Sequence: Synthetic oligonucleotide
agucccgugggcuauguaa

SEQ ID NO: 577507 - RNA, 19 nt, Artificial Sequence
  Description of Artificial Sequence: Synthetic oligonucleotide
uguccgauguugagcgugc

SEQ ID NO: 577508 - RNA, 19 nt, Artificial Sequence
  Description of Artificial Sequence: Synthetic oligonucleotide
gccaugaacguguaagugc

SEQ ID NO: 577509 - RNA, 19 nt, Artificial Sequence
  Description of Artificial Sequence: Synthetic oligonucleotide
agucgggcuugcuuucuac

SEQ ID NO: 577510 - RNA, 19 nt, Artificial Sequence
  Description of Artificial Sequence: Synthetic oligonucleotide
uaagccagacucugguccu

SEQ ID NO: 577511 - RNA, 19 nt, Artificial Sequence
  Description of Artificial Sequence: Synthetic oligonucleotide
uuggagucgggcuugcuuu

SEQ ID NO: 577512 - RNA, 19 nt, Artificial Sequence
  Description of Artificial Sequence: Synthetic oligonucleotide
uguaagugcgcgcgugagu

SEQ ID NO: 577513 - RNA, 19 nt, Artificial Sequence
  Description of Artificial Sequence: Synthetic oligonucleotide
acguccgagagguggcggc

SEQ ID NO: 577514 - RNA, 19 nt, Artificial Sequence
  Description of Artificial Sequence: Synthetic oligonucleotide
gguuaaggcucuugaggcg

SEQ ID NO: 577515 - RNA, 19 nt, Artificial Sequence
  Description of Artificial Sequence: Synthetic oligonucleotide
gaaacgccgagucccuccc

SEQ ID NO: 577516 - RNA, 19 nt, Artificial Sequence
  Description of Artificial Sequence: Synthetic oligonucleotide
ucgucacugauguggcaag

SEQ ID NO: 577517 - RNA, 19 nt, Artificial Sequence
  Description of Artificial Sequence: Synthetic oligonucleotide
acaugguugggucuucaaa

SEQ ID NO: 577518 - RNA, 19 nt, Artificial Sequence
  Description of Artificial Sequence: Synthetic oligonucleotide
gagucccagguuaaguacc

SEQ ID NO: 577519 - RNA, 19 nt, Artificial Sequence
  Description of Artificial Sequence: Synthetic oligonucleotide
gagugugcgggaacagugg

SEQ ID NO: 577520 - RNA, 19 nt, Artificial Sequence
  Description of Artificial Sequence: Synthetic oligonucleotide
aacgccgagucccucccca

SEQ ID NO: 577521 - RNA, 19 nt, Artificial Sequence
  Description of Artificial Sequence: Synthetic oligonucleotide
accgaaggggcagugauga

SEQ ID NO: 577522 - RNA, 19 nt, Artificial Sequence
  Description of Artificial Sequence: Synthetic oligonucleotide
ucgcgucacggccccaucg

SEQ ID NO: 577523 - RNA, 19 nt, Artificial Sequence
  Description of Artificial Sequence: Synthetic oligonucleotide
gaugcccacguccgagagg

SEQ ID NO: 577524 - RNA, 19 nt, Artificial Sequence
  Description of Artificial Sequence: Synthetic oligonucleotide
ucgggcuugcuuucuacac

SEQ ID NO: 577525 - RNA, 19 nt, Artificial Sequence
  Description of Artificial Sequence: Synthetic oligonucleotide
agacauauauauauauaua

SEQ ID NO: 577526 - RNA, 19 nt, Artificial Sequence
  Description of Artificial Sequence: Synthetic oligonucleotide
guugagcgugcgcagcccg

SEQ ID NO: 577527 - RNA, 19 nt, Artificial Sequence
  Description of Artificial Sequence: Synthetic oligonucleotide
ggucgugggaggaacaggg

SEQ ID NO: 577528 - RNA, 19 nt, Artificial Sequence
  Description of Artificial Sequence: Synthetic oligonucleotide
aagagcccgggcuucgcgu

SEQ ID NO: 577529 - RNA, 19 nt, Artificial Sequence
  Description of Artificial Sequence: Synthetic oligonucleotide
uccgauguugagcgugcgc

SEQ ID NO: 577530 - RNA, 19 nt, Artificial Sequence
  Description of Artificial Sequence: Synthetic oligonucleotide
ucccauacauuugugcuau

SEQ ID NO: 577531 - RNA, 19 nt, Artificial Sequence
  Description of Artificial Sequence: Synthetic oligonucleotide
uguccgucaucugccagag

SEQ ID NO: 577532 - RNA, 19 nt, Artificial Sequence
  Description of Artificial Sequence: Synthetic oligonucleotide
ggacucggagaaaagagcc

SEQ ID NO: 577533 - RNA, 19 nt, Artificial Sequence
  Description of Artificial Sequence: Synthetic oligonucleotide
aacguuuuaagaggaucuu

SEQ ID NO: 577534 - RNA, 19 nt, Artificial Sequence
  Description of Artificial Sequence: Synthetic oligonucleotide
aaguguaagugaaggcaga

SEQ ID NO: 577535 - RNA, 19 nt, Artificial Sequence
  Description of Artificial Sequence: Synthetic oligonucleotide
cguuuuaagaggaucuuug

SEQ ID NO: 577536 - RNA, 19 nt, Artificial Sequence
  Description of Artificial Sequence: Synthetic oligonucleotide
gccgucgucacugaugugg

SEQ ID NO: 577537 - RNA, 19 nt, Artificial Sequence
  Description of Artificial Sequence: Synthetic oligonucleotide
gauccgugaguuucuggca

SEQ ID NO: 577538 - RNA, 19 nt, Artificial Sequence
  Description of Artificial Sequence: Synthetic oligonucleotide
aagccucacuauguaaccu

SEQ ID NO: 577539 - RNA, 19 nt, Artificial Sequence
  Description of Artificial Sequence: Synthetic oligonucleotide
aacguguaagugcgcgcgu

SEQ ID NO: 577540 - RNA, 19 nt, Artificial Sequence
  Description of Artificial Sequence: Synthetic oligonucleotide
cuauuccuccauucagaac

SEQ ID NO: 577541 - RNA, 19 nt, Artificial Sequence
  Description of Artificial Sequence: Synthetic oligonucleotide
gcggccacugccaugaacg

SEQ ID NO: 577542 - RNA, 19 nt, Artificial Sequence
  Description of Artificial Sequence: Synthetic oligonucleotide
augcccacguccgagaggu

SEQ ID NO: 577543 - RNA, 19 nt, Artificial Sequence
  Description of Artificial Sequence: Synthetic oligonucleotide
augugcgacagguggagaa

SEQ ID NO: 577544 - RNA, 19 nt, Artificial Sequence
  Description of Artificial Sequence: Synthetic oligonucleotide
aagugcgcgcgugagugug

SEQ ID NO: 577545 - RNA, 19 nt, Artificial Sequence
  Description of Artificial Sequence: Synthetic oligonucleotide
uuaaggcucuugaggcgcu

SEQ ID NO: 577546 - RNA, 19 nt, Artificial Sequence
  Description of Artificial Sequence: Synthetic oligonucleotide
uaccgaaggggcagugaug

SEQ ID NO: 577547 - RNA, 19 nt, Artificial Sequence
  Description of Artificial Sequence: Synthetic oligonucleotide
augcccgugagcuggcuca

SEQ ID NO: 577548 - RNA, 19 nt, Artificial Sequence
  Description of Artificial Sequence: Synthetic oligonucleotide
uacaguuggcgguggcuga

SEQ ID NO: 577549 - RNA, 19 nt, Artificial Sequence
  Description of Artificial Sequence: Synthetic oligonucleotide
cacacaaacccagugggca

SEQ ID NO: 577550 - RNA, 19 nt, Artificial Sequence
  Description of Artificial Sequence: Synthetic oligonucleotide
aacugccgcccucaccuga

SEQ ID NO: 577551 - RNA, 19 nt, Artificial Sequence
  Description of Artificial Sequence: Synthetic oligonucleotide
gaugagacguggaguucag

SEQ ID NO: 577552 - RNA, 19 nt, Artificial Sequence
  Description of Artificial Sequence: Synthetic oligonucleotide
caugaacguguaagugcgc

SEQ ID NO: 577553 - RNA, 19 nt, Artificial Sequence
  Description of Artificial Sequence: Synthetic oligonucleotide
gggugaaacgccgaguccc

SEQ ID NO: 577554 - RNA, 19 nt, Artificial Sequence
  Description of Artificial Sequence: Synthetic oligonucleotide
ugcaucuccggcgaacaaa

SEQ ID NO: 577555 - RNA, 19 nt, Artificial Sequence
  Description of Artificial Sequence: Synthetic oligonucleotide
gaaucagucuccauacccu

SEQ ID NO: 577556 - RNA, 19 nt, Artificial Sequence
  Description of Artificial Sequence: Synthetic oligonucleotide
guaccuugaggcagggcag

SEQ ID NO: 577557 - RNA, 19 nt, Artificial Sequence
  Description of Artificial Sequence: Synthetic oligonucleotide
ccguacaggucuaugcccg

SEQ ID NO: 577558 - RNA, 19 nt, Artificial Sequence
  Description of Artificial Sequence: Synthetic oligonucleotide
acguggaguucagucuccc

SEQ ID NO: 577559 - RNA, 19 nt, Artificial Sequence
  Description of Artificial Sequence: Synthetic oligonucleotide
gcagcugcggagguuaagg

SEQ ID NO: 577560 - RNA, 19 nt, Artificial Sequence
  Description of Artificial Sequence: Synthetic oligonucleotide
gugcgacagguggagaagg

SEQ ID NO: 577561 - RNA, 19 nt, Artificial Sequence
  Description of Artificial Sequence: Synthetic oligonucleotide
  modified_base (18)..(18): a, c, u, g, unknown or other
cgcgagaugugcuucagng

SEQ ID NO: 577562 - RNA, 19 nt, Artificial Sequence
  Description of Artificial Sequence: Synthetic oligonucleotide
gcucucauuucucccauac

SEQ ID NO: 577563 - RNA, 19 nt, Artificial Sequence
  Description of Artificial Sequence: Synthetic oligonucleotide
cucucauguugcuguggag

SEQ ID NO: 577564 - RNA, 19 nt, Artificial Sequence
  Description of Artificial Sequence: Synthetic oligonucleotide
uccuacucaaaagcguuuu

SEQ ID NO: 577565 - RNA, 19 nt, Artificial Sequence
  Description of Artificial Sequence: Synthetic oligonucleotide
agaucacaguauccaaaua

SEQ ID NO: 577566 - RNA, 19 nt, Artificial Sequence
  Description of Artificial Sequence: Synthetic oligonucleotide
cagcugcggagguuaaggc

SEQ ID NO: 577567 - RNA, 19 nt, Artificial Sequence
  Description of Artificial Sequence: Synthetic oligonucleotide
ggcacuccgcgucaugccg

SEQ ID NO: 577568 - RNA, 19 nt, Artificial Sequence
  Description of Artificial Sequence: Synthetic oligonucleotide
ccggacucggagaaaagag

SEQ ID NO: 577569 - RNA, 19 nt, Artificial Sequence
  Description of Artificial Sequence: Synthetic oligonucleotide
ucccgugggcuauguaagc

SEQ ID NO: 577570 - RNA, 19 nt, Artificial Sequence
  Description of Artificial Sequence: Synthetic oligonucleotide
gucccgugggcuauguaag

SEQ ID NO: 577571 - RNA, 19 nt, Artificial Sequence
  Description of Artificial Sequence: Synthetic oligonucleotide
uccgcgucaugccggccag

SEQ ID NO: 577572 - RNA, 19 nt, Artificial Sequence
  Description of Artificial Sequence: Synthetic oligonucleotide
uaugcccgugagcuggcuc

SEQ ID NO: 577573 - RNA, 19 nt, Artificial Sequence
  Description of Artificial Sequence: Synthetic oligonucleotide
cuguccgauguugagcgug

SEQ ID NO: 577574 - RNA, 19 nt, Artificial Sequence
  Description of Artificial Sequence: Synthetic oligonucleotide
gucacggccccaucgcggc

SEQ ID NO: 577575 - RNA, 19 nt, Artificial Sequence
  Description of Artificial Sequence: Synthetic oligonucleotide
aggggcgccggacucggag

SEQ ID NO: 577576 - RNA, 19 nt, Artificial Sequence
  Description of Artificial Sequence: Synthetic oligonucleotide
agacccacaagcuccccuu

SEQ ID NO: 577577 - RNA, 19 nt, Artificial Sequence
  Description of Artificial Sequence: Synthetic oligonucleotide
ucagcccucgcgagaugug

SEQ ID NO: 577578 - RNA, 19 nt, Artificial Sequence
  Description of Artificial Sequence: Synthetic oligonucleotide
  modified_base (19)..(19): a, c, u, g, unknown or other
ucgcgagaugugcuucagn

SEQ ID NO: 577579 - RNA, 19 nt, Artificial Sequence
  Description of Artificial Sequence: Synthetic oligonucleotide
cgucaugccggccaggugc

SEQ ID NO: 577580 - RNA, 19 nt, Artificial Sequence
  Description of Artificial Sequence: Synthetic oligonucleotide
caggucuaugcccgugagc

SEQ ID NO: 577581 - RNA, 19 nt, Artificial Sequence
  Description of Artificial Sequence: Synthetic oligonucleotide
aggugcucagcgaucagcu

SEQ ID NO: 577582 - RNA, 19 nt, Artificial Sequence
  Description of Artificial Sequence: Synthetic oligonucleotide
cagcccgugcaucugccgc

SEQ ID NO: 577583 - RNA, 19 nt, Artificial Sequence
  Description of Artificial Sequence: Synthetic oligonucleotide
auaaacguuuuaagaggau

SEQ ID NO: 577584 - RNA, 19 nt, Artificial Sequence
  Description of Artificial Sequence: Synthetic oligonucleotide
guguaagugcgcgcgugag

SEQ ID NO: 577585 - RNA, 19 nt, Artificial Sequence
  Description of Artificial Sequence: Synthetic oligonucleotide
cagaagaaccccagacgca

SEQ ID NO: 577586 - RNA, 19 nt, Artificial Sequence
  Description of Artificial Sequence: Synthetic oligonucleotide
  modified_base (16)..(16): a, c, u, g, unknown or other
cgagaugugcuucagngaa

SEQ ID NO: 577587 - RNA, 19 nt, Artificial Sequence
  Description of Artificial Sequence: Synthetic oligonucleotide
acguuuuaagaggaucuuu

SEQ ID NO: 577588 - RNA, 19 nt, Artificial Sequence
  Description of Artificial Sequence: Synthetic oligonucleotide
gccguacaggucuaugccc

SEQ ID NO: 577589 - RNA, 19 nt, Artificial Sequence
  Description of Artificial Sequence: Synthetic oligonucleotide
cuaaaacgagguagccaga

SEQ ID NO: 577590 - RNA, 19 nt, Artificial Sequence
  Description of Artificial Sequence: Synthetic oligonucleotide
gacguggaguucagucucc

SEQ ID NO: 577591 - RNA, 19 nt, Artificial Sequence
  Description of Artificial Sequence: Synthetic oligonucleotide
uggcaguccugcagcguga

SEQ ID NO: 577592 - RNA, 19 nt, Artificial Sequence
  Description of Artificial Sequence: Synthetic oligonucleotide
uaagugcgcgcgugagugu

SEQ ID NO: 577593 - RNA, 19 nt, Artificial Sequence
  Description of Artificial Sequence: Synthetic oligonucleotide
aggccgcgcuuggugaucc

SEQ ID NO: 577594 - RNA, 19 nt, Artificial Sequence
  Description of Artificial Sequence: Synthetic oligonucleotide
  modified_base (4)..(4): a, c, u, g, unknown or other
cagngaaagauccgugagu

SEQ ID NO: 577595 - RNA, 19 nt, Artificial Sequence
  Description of Artificial Sequence: Synthetic oligonucleotide
aacgagguagccagacaua

SEQ ID NO: 577596 - RNA, 19 nt, Artificial Sequence
  Description of Artificial Sequence: Synthetic oligonucleotide
ugcgcacacacuguccgau

SEQ ID NO: 577597 - RNA, 19 nt, Artificial Sequence
  Description of Artificial Sequence: Synthetic oligonucleotide
gccaucuauuccuccauuc

SEQ ID NO: 577598 - RNA, 19 nt, Artificial Sequence
  Description of Artificial Sequence: Synthetic oligonucleotide
aguaccgaaggggcaguga

SEQ ID NO: 577599 - RNA, 19 nt, Artificial Sequence
  Description of Artificial Sequence: Synthetic oligonucleotide
ccgugaugcgcacacacug

SEQ ID NO: 577600 - RNA, 19 nt, Artificial Sequence
  Description of Artificial Sequence: Synthetic oligonucleotide
uggagucgggcuugcuuuc

SEQ ID NO: 577601 - RNA, 19 nt, Artificial Sequence
  Description of Artificial Sequence: Synthetic oligonucleotide
gauacaguuggcgguggcu

SEQ ID NO: 577602 - RNA, 19 nt, Artificial Sequence
  Description of Artificial Sequence: Synthetic oligonucleotide
acguguaagugcgcgcgug

SEQ ID NO: 577603 - RNA, 19 nt, Artificial Sequence
  Description of Artificial Sequence: Synthetic oligonucleotide
cauccuacucaaaagcguu

SEQ ID NO: 577604 - RNA, 19 nt, Artificial Sequence
  Description of Artificial Sequence: Synthetic oligonucleotide
gaggccguccagucccgug

SEQ ID NO: 577605 - RNA, 19 nt, Artificial Sequence
  Description of Artificial Sequence: Synthetic oligonucleotide
gucgggcuugcuuucuaca

SEQ ID NO: 577606 - RNA, 19 nt, Artificial Sequence
  Description of Artificial Sequence: Synthetic oligonucleotide
gcugcggagguuaaggcuc

SEQ ID NO: 577607 - RNA, 19 nt, Artificial Sequence
  Description of Artificial Sequence: Synthetic oligonucleotide
cuucaagccucacuaugua

SEQ ID NO: 577608 - RNA, 19 nt, Artificial Sequence
  Description of Artificial Sequence: Synthetic oligonucleotide
gaaggccgcguccgagaug

SEQ ID NO: 577609 - RNA, 19 nt, Artificial Sequence
  Description of Artificial Sequence: Synthetic oligonucleotide
acgccgagucccuccccac

SEQ ID NO: 577610 - RNA, 19 nt, Artificial Sequence
  Description of Artificial Sequence: Synthetic oligonucleotide
agcccgugcaucugccgca

SEQ ID NO: 577611 - RNA, 19 nt, Artificial Sequence
  Description of Artificial Sequence: Synthetic oligonucleotide
agugcgcgcgugagugugc

SEQ ID NO: 577612 - RNA, 19 nt, Artificial Sequence
  Description of Artificial Sequence: Synthetic oligonucleotide
gccagacauauauauauau

SEQ ID NO: 577613 - RNA, 19 nt, Artificial Sequence
  Description of Artificial Sequence: Synthetic oligonucleotide
cugccagagucccagguua

SEQ ID NO: 577614 - RNA, 19 nt, Artificial Sequence
  Description of Artificial Sequence: Synthetic oligonucleotide
gcuguggaggacucuaaaa

SEQ ID NO: 577615 - RNA, 19 nt, Artificial Sequence
  Description of Artificial Sequence: Synthetic oligonucleotide
cggacucggagaaaagagc

SEQ ID NO: 577616 - RNA, 19 nt, Artificial Sequence
  Description of Artificial Sequence: Synthetic oligonucleotide
guggggcauaauuugcaua

SEQ ID NO: 577617 - RNA, 19 nt, Artificial Sequence
  Description of Artificial Sequence: Synthetic oligonucleotide
ccagacauauauauauaua

SEQ ID NO: 577618 - RNA, 19 nt, Artificial Sequence
  Description of Artificial Sequence: Synthetic oligonucleotide
guacaggucuaugcccgug

SEQ ID NO: 577619 - RNA, 19 nt, Artificial Sequence
  Description of Artificial Sequence: Synthetic oligonucleotide
acgcaguggggaggggcgc

SEQ ID NO: 577620 - RNA, 19 nt, Artificial Sequence
  Description of Artificial Sequence: Synthetic oligonucleotide
guaccgaaggggcagugau

SEQ ID NO: 577621 - RNA, 19 nt, Artificial Sequence
  Description of Artificial Sequence: Synthetic oligonucleotide
guccgagaugccgccacag

SEQ ID NO: 577622 - RNA, 19 nt, Artificial Sequence
  Description of Artificial Sequence: Synthetic oligonucleotide
cagcccucgcgagaugugc

SEQ ID NO: 577623 - RNA, 19 nt, Artificial Sequence
  Description of Artificial Sequence: Synthetic oligonucleotide
aggagccggaggccgucag

SEQ ID NO: 577624 - RNA, 19 nt, Artificial Sequence
  Description of Artificial Sequence: Synthetic oligonucleotide
acaguacaauuaauugaua

SEQ ID NO: 577625 - RNA, 19 nt, Artificial Sequence
  Description of Artificial Sequence: Synthetic oligonucleotide
agcgugcgcagcccgugca

SEQ ID NO: 577626 - RNA, 19 nt, Artificial Sequence
  Description of Artificial Sequence: Synthetic oligonucleotide
ggggugaaacgccgagucc

SEQ ID NO: 577627 - RNA, 19 nt, Artificial Sequence
  Description of Artificial Sequence: Synthetic oligonucleotide
acuguccgauguugagcgu

SEQ ID NO: 577628 - RNA, 19 nt, Artificial Sequence
  Description of Artificial Sequence: Synthetic oligonucleotide
ggauacaguuggcgguggc

SEQ ID NO: 577629 - RNA, 19 nt, Artificial Sequence
  Description of Artificial Sequence: Synthetic oligonucleotide
agggagcagaagaacccca

SEQ ID NO: 577630 - RNA, 19 nt, Artificial Sequence
  Description of Artificial Sequence: Synthetic oligonucleotide
  modified_base (15)..(15): a, c, u, g, unknown or other
gagaugugcuucagngaaa

SEQ ID NO: 577631 - RNA, 19 nt, Artificial Sequence
  Description of Artificial Sequence: Synthetic oligonucleotide
gaguaccgaaggggcagug

SEQ ID NO: 577632 - RNA, 19 nt, Artificial Sequence
  Description of Artificial Sequence: Synthetic oligonucleotide
agaguaccgaaggggcagu

SEQ ID NO: 577633 - RNA, 19 nt, Artificial Sequence
  Description of Artificial Sequence: Synthetic oligonucleotide
agcccucggcggcacuccg

SEQ ID NO: 577634 - RNA, 19 nt, Artificial Sequence
  Description of Artificial Sequence: Synthetic oligonucleotide
aggugcccgaugcccacgu

SEQ ID NO: 577635 - RNA, 19 nt, Artificial Sequence
  Description of Artificial Sequence: Synthetic oligonucleotide
gcgaugagcaggaggccgg

SEQ ID NO: 577636 - RNA, 19 nt, Artificial Sequence
  Description of Artificial Sequence: Synthetic oligonucleotide
gggcauaauuugcauauau

SEQ ID NO: 577637 - RNA, 19 nt, Artificial Sequence
  Description of Artificial Sequence: Synthetic oligonucleotide
cacguccgagagguggcgg

SEQ ID NO: 577638 - RNA, 19 nt, Artificial Sequence
  Description of Artificial Sequence: Synthetic oligonucleotide
acccugcagaagagugggc

SEQ ID NO: 577639 - RNA, 19 nt, Artificial Sequence
  Description of Artificial Sequence: Synthetic oligonucleotide
cccagguuaaguaccuuga

SEQ ID NO: 577640 - RNA, 19 nt, Artificial Sequence
  Description of Artificial Sequence: Synthetic oligonucleotide
gugcgcgcgugagugugcg

SEQ ID NO: 577641 - RNA, 19 nt, Artificial Sequence
  Description of Artificial Sequence: Synthetic oligonucleotide
ccugaccuucucacugucc

SEQ ID NO: 577642 - RNA, 19 nt, Artificial Sequence
  Description of Artificial Sequence: Synthetic oligonucleotide
cucgcgagaugugcuucag

SEQ ID NO: 577643 - RNA, 19 nt, Artificial Sequence
  Description of Artificial Sequence: Synthetic oligonucleotide
ccagaucacaguauccaaa

SEQ ID NO: 577644 - RNA, 19 nt, Artificial Sequence
  Description of Artificial Sequence: Synthetic oligonucleotide
guccgauguugagcgugcg

SEQ ID NO: 577645 - RNA, 19 nt, Artificial Sequence
  Description of Artificial Sequence: Synthetic oligonucleotide
gcgugaugcgcuccaggcc

SEQ ID NO: 577646 - RNA, 19 nt, Artificial Sequence
  Description of Artificial Sequence: Synthetic oligonucleotide
  modified_base (17)..(17): a, c, u, g, unknown or other
gcgagaugugcuucagnga

SEQ ID NO: 577647 - RNA, 19 nt, Artificial Sequence
  Description of Artificial Sequence: Synthetic oligonucleotide
  modified_base (2)..(2): a, c, u, g, unknown or other
gngaaagauccgugaguuu

SEQ ID NO: 577648 - RNA, 19 nt, Artificial Sequence
  Description of Artificial Sequence: Synthetic oligonucleotide
  modified_base (8)..(8): a, c, u, g, unknown or other
gcuucagngaaagauccgu

SEQ ID NO: 577649 - RNA, 19 nt, Artificial Sequence
  Description of Artificial Sequence: Synthetic oligonucleotide
uucgcgucacggccccauc

SEQ ID NO: 577650 - RNA, 19 nt, Artificial Sequence
  Description of Artificial Sequence: Synthetic oligonucleotide
ggucuaugcccgugagcug

SEQ ID NO: 577651 - RNA, 19 nt, Artificial Sequence
  Description of Artificial Sequence: Synthetic oligonucleotide
cuccgcgucaugccggcca

SEQ ID NO: 577652 - RNA, 19 nt, Artificial Sequence
  Description of Artificial Sequence: Synthetic oligonucleotide
auccuacucaaaagcguuu

SEQ ID NO: 577653 - RNA, 19 nt, Artificial Sequence
  Description of Artificial Sequence: Synthetic oligonucleotide
gccgccacagaagcugagg

SEQ ID NO: 577654 - RNA, 19 nt, Artificial Sequence
  Description of Artificial Sequence: Synthetic oligonucleotide
gcgucacggccccaucgcg

SEQ ID NO: 577655 - RNA, 19 nt, Artificial Sequence
  Description of Artificial Sequence: Synthetic oligonucleotide
acaguuggcgguggcugaa

SEQ ID NO: 577656 - RNA, 19 nt, Artificial Sequence
  Description of Artificial Sequence: Synthetic oligonucleotide
caucgcggccacugccaug

SEQ ID NO: 577657 - RNA, 19 nt, Artificial Sequence
  Description of Artificial Sequence: Synthetic oligonucleotide
gcaucuccggcgaacaaaa

SEQ ID NO: 577658 - RNA, 19 nt, Artificial Sequence
  Description of Artificial Sequence: Synthetic oligonucleotide
ggccguccagucccguggg

SEQ ID NO: 577659 - RNA, 19 nt, Artificial Sequence
  Description of Artificial Sequence: Synthetic oligonucleotide
acuccgcgucaugccggcc

SEQ ID NO: 577660 - RNA, 19 nt, Artificial Sequence
  Description of Artificial Sequence: Synthetic oligonucleotide
cucaccugaccuucucacu

SEQ ID NO: 577661 - RNA, 19 nt, Artificial Sequence
  Description of Artificial Sequence: Synthetic oligonucleotide
cgggcuucgcgucacggcc

SEQ ID NO: 577662 - RNA, 19 nt, Artificial Sequence
  Description of Artificial Sequence: Synthetic oligonucleotide
cccgugggcuauguaagcc

SEQ ID NO: 577663 - RNA, 19 nt, Artificial Sequence
  Description of Artificial Sequence: Synthetic oligonucleotide
agcccgggcuucgcgucac

SEQ ID NO: 577664 - RNA, 19 nt, Artificial Sequence
  Description of Artificial Sequence: Synthetic oligonucleotide
ggguggggcauaauuugca

SEQ ID NO: 577665 - RNA, 19 nt, Artificial Sequence
  Description of Artificial Sequence: Synthetic oligonucleotide
ggcuucgcgucacggcccc

SEQ ID NO: 577666 - RNA, 19 nt, Artificial Sequence
  Description of Artificial Sequence: Synthetic oligonucleotide
gagucgggcuugcuuucua

SEQ ID NO: 577667 - RNA, 19 nt, Artificial Sequence
  Description of Artificial Sequence: Synthetic oligonucleotide
ggaggggcgccggacucgg

SEQ ID NO: 577668 - RNA, 19 nt, Artificial Sequence
  Description of Artificial Sequence: Synthetic oligonucleotide
gcggcacuccgcgucaugc

SEQ ID NO: 577669 - RNA, 19 nt, Artificial Sequence
  Description of Artificial Sequence: Synthetic oligonucleotide
ugccgucgucacugaugug

SEQ ID NO: 577670 - RNA, 19 nt, Artificial Sequence
  Description of Artificial Sequence: Synthetic oligonucleotide
agcccucgcgagaugugcu

SEQ ID NO: 577671 - RNA, 19 nt, Artificial Sequence
  Description of Artificial Sequence: Synthetic oligonucleotide
gccggacucggagaaaaga

SEQ ID NO: 577672 - RNA, 19 nt, Artificial Sequence
  Description of Artificial Sequence: Synthetic oligonucleotide
gucagcccucgcgagaugu

SEQ ID NO: 577673 - RNA, 19 nt, Artificial Sequence
  Description of Artificial Sequence: Synthetic oligonucleotide
cugccgcccucaccugacc

SEQ ID NO: 577674 - RNA, 19 nt, Artificial Sequence
  Description of Artificial Sequence: Synthetic oligonucleotide
gccgcguccgagaugccgc

SEQ ID NO: 577675 - RNA, 19 nt, Artificial Sequence
  Description of Artificial Sequence: Synthetic oligonucleotide
cccuuguccgugaugcgca

SEQ ID NO: 577676 - RNA, 19 nt, Artificial Sequence
  Description of Artificial Sequence: Synthetic oligonucleotide
gaagaaccccagacgcagu

SEQ ID NO: 577677 - RNA, 19 nt, Artificial Sequence
  Description of Artificial Sequence: Synthetic oligonucleotide
ggcaguccugcagcgugag

SEQ ID NO: 577678 - RNA, 19 nt, Artificial Sequence
  Description of Artificial Sequence: Synthetic oligonucleotide
gcagaguaccgaaggggca

SEQ ID NO: 577679 - RNA, 19 nt, Artificial Sequence
  Description of Artificial Sequence: Synthetic oligonucleotide
ccccgggauacaguuggcg

SEQ ID NO: 577680 - RNA, 19 nt, Artificial Sequence
  Description of Artificial Sequence: Synthetic oligonucleotide
agguugggaagaagccaaa

SEQ ID NO: 577681 - RNA, 19 nt, Artificial Sequence
  Description of Artificial Sequence: Synthetic oligonucleotide
gguggggcauaauuugcau

SEQ ID NO: 577682 - RNA, 19 nt, Artificial Sequence
  Description of Artificial Sequence: Synthetic oligonucleotide
gcggucgugggaggaacag

SEQ ID NO: 577683 - RNA, 19 nt, Artificial Sequence
  Description of Artificial Sequence: Synthetic oligonucleotide
gcagccguacaggucuaug

SEQ ID NO: 577684 - RNA, 19 nt, Artificial Sequence
  Description of Artificial Sequence: Synthetic oligonucleotide
gugaaacgccgagucccuc

SEQ ID NO: 577685 - RNA, 19 nt, Artificial Sequence
  Description of Artificial Sequence: Synthetic oligonucleotide
ugcagccguacaggucuau

SEQ ID NO: 577686 - RNA, 19 nt, Artificial Sequence
  Description of Artificial Sequence: Synthetic oligonucleotide
ccgugggcuauguaagcca

SEQ ID NO: 577687 - RNA, 19 nt, Artificial Sequence
  Description of Artificial Sequence: Synthetic oligonucleotide
ccgggcuucgcgucacggc

SEQ ID NO: 577688 - RNA, 19 nt, Artificial Sequence
  Description of Artificial Sequence: Synthetic oligonucleotide
gcguccgagaugccgccac

SEQ ID NO: 577689 - RNA, 19 nt, Artificial Sequence
  Description of Artificial Sequence: Synthetic oligonucleotide
gccccuuguccgugaugcg

SEQ ID NO: 577690 - RNA, 19 nt, Artificial Sequence
  Description of Artificial Sequence: Synthetic oligonucleotide
gggaggggcgccggacucg

SEQ ID NO: 577691 - RNA, 19 nt, Artificial Sequence
  Description of Artificial Sequence: Synthetic oligonucleotide
ccccaucgcggccacugcc

SEQ ID NO: 577692 - RNA, 19 nt, Artificial Sequence
  Description of Artificial Sequence: Synthetic oligonucleotide
cugccgcaccaugcgguug

SEQ ID NO: 577693 - RNA, 19 nt, Artificial Sequence
  Description of Artificial Sequence: Synthetic oligonucleotide
gcgugagugugcgggaaca

SEQ ID NO: 577694 - RNA, 19 nt, Artificial Sequence
  Description of Artificial Sequence: Synthetic oligonucleotide
cugcaucuccggcgaacaa

SEQ ID NO: 577695 - RNA, 19 nt, Artificial Sequence
  Description of Artificial Sequence: Synthetic oligonucleotide
cugcggagguuaaggcucu

SEQ ID NO: 577696 - RNA, 19 nt, Artificial Sequence
  Description of Artificial Sequence: Synthetic oligonucleotide
cgcgucacggccccaucgc

SEQ ID NO: 577697 - RNA, 19 nt, Artificial Sequence
  Description of Artificial Sequence: Synthetic oligonucleotide
ccacguccgagagguggcg

SEQ ID NO: 577698 - RNA, 19 nt, Artificial Sequence
  Description of Artificial Sequence: Synthetic oligonucleotide
gcgucaugccggccaggug

SEQ ID NO: 577699 - RNA, 19 nt, Artificial Sequence
  Description of Artificial Sequence: Synthetic oligonucleotide
ccgaaggggcagugaugag

SEQ ID NO: 577700 - RNA, 19 nt, Artificial Sequence
  Description of Artificial Sequence: Synthetic oligonucleotide
ggugaaacgccgagucccu

SEQ ID NO: 577701 - RNA, 19 nt, Artificial Sequence
  Description of Artificial Sequence: Synthetic oligonucleotide
ccucgcgagaugugcuuca

SEQ ID NO: 577702 - RNA, 19 nt, Artificial Sequence
  Description of Artificial Sequence: Synthetic oligonucleotide
caggccgcgcuuggugauc

SEQ ID NO: 577703 - RNA, 19 nt, Artificial Sequence
  Description of Artificial Sequence: Synthetic oligonucleotide
ggccggagaggcgcaggag

SEQ ID NO: 577704 - RNA, 19 nt, Artificial Sequence
  Description of Artificial Sequence: Synthetic oligonucleotide
ccgugaguuucuggcaguc

SEQ ID NO: 577705 - RNA, 19 nt, Artificial Sequence
  Description of Artificial Sequence: Synthetic oligonucleotide
gccgcgcuuggugauccug

SEQ ID NO: 577706 - RNA, 19 nt, Artificial Sequence
  Description of Artificial Sequence: Synthetic oligonucleotide
guccaucucuccacccacu

SEQ ID NO: 577707 - RNA, 19 nt, Artificial Sequence
  Description of Artificial Sequence: Synthetic oligonucleotide
ccgcguccgagaugccgcc

SEQ ID NO: 577708 - RNA, 19 nt, Artificial Sequence
  Description of Artificial Sequence: Synthetic oligonucleotide
cguguaagugcgcgcguga

SEQ ID NO: 577709 - RNA, 19 nt, Artificial Sequence
  Description of Artificial Sequence: Synthetic oligonucleotide
cggcacuccgcgucaugcc

SEQ ID NO: 577710 - RNA, 19 nt, Artificial Sequence
  Description of Artificial Sequence: Synthetic oligonucleotide
cggucgugggaggaacagg

SEQ ID NO: 577711 - RNA, 19 nt, Artificial Sequence
  Description of Artificial Sequence: Synthetic oligonucleotide
cccgggcuucgcgucacgg

SEQ ID NO: 577712 - RNA, 19 nt, Artificial Sequence
  Description of Artificial Sequence: Synthetic oligonucleotide
gcggcagcugcggagguua

SEQ ID NO: 577713 - RNA, 19 nt, Artificial Sequence
  Description of Artificial Sequence: Synthetic oligonucleotide
gccccaucgcggccacugc

SEQ ID NO: 577714 - RNA, 19 nt, Artificial Sequence
  Description of Artificial Sequence: Synthetic oligonucleotide
gcgccggacucggagaaaa

SEQ ID NO: 577715 - RNA, 19 nt, Artificial Sequence
  Description of Artificial Sequence: Synthetic oligonucleotide
gcccucaccugaccuucuc

SEQ ID NO: 577716 - RNA, 19 nt, Artificial Sequence
  Description of Artificial Sequence: Synthetic oligonucleotide
ggggcauaauuugcauaua

SEQ ID NO: 577717 - RNA, 19 nt, Artificial Sequence
  Description of Artificial Sequence: Synthetic oligonucleotide
gcugcgcaggcugcccaug

SEQ ID NO: 577718 - RNA, 19 nt, Artificial Sequence
  Description of Artificial Sequence: Synthetic oligonucleotide
ucgcggccacugccaugaa

SEQ ID NO: 577719 - RNA, 19 nt, Artificial Sequence
  Description of Artificial Sequence: Synthetic oligonucleotide
ggugcccgaugcccacguc

SEQ ID NO: 577720 - RNA, 19 nt, Artificial Sequence
  Description of Artificial Sequence: Synthetic oligonucleotide
cccucgcgagaugugcuuc

SEQ ID NO: 577721 - RNA, 19 nt, Artificial Sequence
  Description of Artificial Sequence: Synthetic oligonucleotide
ccggaggccgucagcccuc

SEQ ID NO: 577722 - RNA, 19 nt, Artificial Sequence
  Description of Artificial Sequence: Synthetic oligonucleotide
ggcggucgugggaggaaca

SEQ ID NO: 577723 - RNA, 19 nt, Artificial Sequence
  Description of Artificial Sequence: Synthetic oligonucleotide
cgcgugagugugcgggaac

SEQ ID NO: 577724 - RNA, 19 nt, Artificial Sequence
  Description of Artificial Sequence: Synthetic oligonucleotide
ccgcccucaccugaccuuc

SEQ ID NO: 577725 - RNA, 19 nt, Artificial Sequence
  Description of Artificial Sequence: Synthetic oligonucleotide
cgccgagucccuccccacc

SEQ ID NO: 577726 - RNA, 19 nt, Artificial Sequence
  Description of Artificial Sequence: Synthetic oligonucleotide
cagugccccgggauacagu

SEQ ID NO: 577727 - RNA, 19 nt, Artificial Sequence
  Description of Artificial Sequence: Synthetic oligonucleotide
cgccggacucggagaaaag

SEQ ID NO: 577728 - RNA, 19 nt, Artificial Sequence
  Description of Artificial Sequence: Synthetic oligonucleotide
gcccgugcaucugccgcac

SEQ ID NO: 577729 - RNA, 19 nt, Artificial Sequence
  Description of Artificial Sequence: Synthetic oligonucleotide
gcccgggcuucgcgucacg

SEQ ID NO: 577730 - RNA, 19 nt, Artificial Sequence
  Description of Artificial Sequence: Synthetic oligonucleotide
ggaggccgucagcccucgc

SEQ ID NO: 577731 - RNA, 19 nt, Artificial Sequence
  Description of Artificial Sequence: Synthetic oligonucleotide
ggagucgggcuugcuuucu

SEQ ID NO: 577732 - RNA, 19 nt, Artificial Sequence
  Description of Artificial Sequence: Synthetic oligonucleotide
ccacaagcuccccuuuuau

SEQ ID NO: 577733 - RNA, 19 nt, Artificial Sequence
  Description of Artificial Sequence: Synthetic oligonucleotide
cacuggguagauggagguu

SEQ ID NO: 577734 - RNA, 19 nt, Artificial Sequence
  Description of Artificial Sequence: Synthetic oligonucleotide
cccgugcaucugccgcacc

SEQ ID NO: 577735 - RNA, 19 nt, Artificial Sequence
  Description of Artificial Sequence: Synthetic oligonucleotide
cgcaguggggaggggcgcc

SEQ ID NO: 577736 - RNA, 19 nt, Artificial Sequence
  Description of Artificial Sequence: Synthetic oligonucleotide
gccccgggauacaguuggc

SEQ ID NO: 577737 - RNA, 19 nt, Artificial Sequence
  Description of Artificial Sequence: Synthetic oligonucleotide
gcccucggcggcacuccgc

SEQ ID NO: 577738 - RNA, 19 nt, Artificial Sequence
  Description of Artificial Sequence: Synthetic oligonucleotide
gugcagccguacaggucua

SEQ ID NO: 577739 - RNA, 19 nt, Artificial Sequence
  Description of Artificial Sequence: Synthetic oligonucleotide
gaggggcgccggacucgga

SEQ ID NO: 577740 - RNA, 19 nt, Artificial Sequence
  Description of Artificial Sequence: Synthetic oligonucleotide
gucccagguuaaguaccuu

SEQ ID NO: 577741 - RNA, 19 nt, Artificial Sequence
  Description of Artificial Sequence: Synthetic oligonucleotide
gcgcgugagugugcgggaa

SEQ ID NO: 577742 - RNA, 19 nt, Artificial Sequence
  Description of Artificial Sequence: Synthetic oligonucleotide
caguuggcgguggcugaau

SEQ ID NO: 577743 - RNA, 19 nt, Artificial Sequence
  Description of Artificial Sequence: Synthetic oligonucleotide
gcccucgcgagaugugcuu

SEQ ID NO: 577744 - RNA, 19 nt, Artificial Sequence
  Description of Artificial Sequence: Synthetic oligonucleotide
cguccgagaugccgccaca

SEQ ID NO: 577745 - RNA, 19 nt, Artificial Sequence
  Description of Artificial Sequence: Synthetic oligonucleotide
cguacaggucuaugcccgu

SEQ ID NO: 577746 - RNA, 19 nt, Artificial Sequence
  Description of Artificial Sequence: Synthetic oligonucleotide
cggaggccgucagcccucg

SEQ ID NO: 577747 - RNA, 19 nt, Artificial Sequence
  Description of Artificial Sequence: Synthetic oligonucleotide
cgucagcccucgcgagaug

SEQ ID NO: 577748 - RNA, 19 nt, Artificial Sequence
  Description of Artificial Sequence: Synthetic oligonucleotide
cgcgcgugagugugcggga

SEQ ID NO: 577749 - RNA, 19 nt, Artificial Sequence
  Description of Artificial Sequence: Synthetic oligonucleotide
ccgucagcccucgcgagau

SEQ ID NO: 577750 - RNA, 19 nt, Artificial Sequence
  Description of Artificial Sequence: Synthetic oligonucleotide
ggaggccguccagucccgu

SEQ ID NO: 577751 - RNA, 19 nt, Artificial Sequence
  Description of Artificial Sequence: Synthetic oligonucleotide
ggccgcgcuuggugauccu

SEQ ID NO: 577752 - RNA, 19 nt, Artificial Sequence
  Description of Artificial Sequence: Synthetic oligonucleotide
  modified_base (1)..(1): a, c, u, g, unknown or other
ngaaagauccgugaguuuc

SEQ ID NO: 577753 - RNA, 19 nt, Artificial Sequence
  Description of Artificial Sequence: Synthetic oligonucleotide
aagacucacaauuaaucac

SEQ ID NO: 577754 - RNA, 19 nt, Artificial Sequence
  Description of Artificial Sequence: Synthetic oligonucleotide
ucuuaaauagcuguagucg

SEQ ID NO: 577755 - RNA, 19 nt, Artificial Sequence
  Description of Artificial Sequence: Synthetic oligonucleotide
ugauuuaagagcaaagccu

SEQ ID NO: 577756 - RNA, 19 nt, Artificial Sequence
  Description of Artificial Sequence: Synthetic oligonucleotide
uugauuuaagagcaaagcc

SEQ ID NO: 577757 - RNA, 19 nt, Artificial Sequence
  Description of Artificial Sequence: Synthetic oligonucleotide
aaagacucacaauuaauca

SEQ ID NO: 577758 - RNA, 19 nt, Artificial Sequence
  Description of Artificial Sequence: Synthetic oligonucleotide
ugauuuaauagcaauccca

SEQ ID NO: 577759 - RNA, 19 nt, Artificial Sequence
  Description of Artificial Sequence: Synthetic oligonucleotide
ugaagcucaauccugaggu

SEQ ID NO: 577760 - RNA, 19 nt, Artificial Sequence
  Description of Artificial Sequence: Synthetic oligonucleotide
uguagcaagacucuucacc

SEQ ID NO: 577761 - RNA, 19 nt, Artificial Sequence
  Description of Artificial Sequence: Synthetic oligonucleotide
aaaaucaucugucaggauu

SEQ ID NO: 577762 - RNA, 19 nt, Artificial Sequence
  Description of Artificial Sequence: Synthetic oligonucleotide
ugauuuuacugccaccugg

SEQ ID NO: 577763 - RNA, 19 nt, Artificial Sequence
  Description of Artificial Sequence: Synthetic oligonucleotide
aacauuuggaggcccaagg

SEQ ID NO: 577764 - RNA, 19 nt, Artificial Sequence
  Description of Artificial Sequence: Synthetic oligonucleotide
aagucgccgacuuuggggc

SEQ ID NO: 577765 - RNA, 19 nt, Artificial Sequence
  Description of Artificial Sequence: Synthetic oligonucleotide
ucuacuagcaacuggagaa

SEQ ID NO: 577766 - RNA, 19 nt, Artificial Sequence
  Description of Artificial Sequence: Synthetic oligonucleotide
ugaguauccacgaagacau

SEQ ID NO: 577767 - RNA, 19 nt, Artificial Sequence
  Description of Artificial Sequence: Synthetic oligonucleotide
ucaauccugagguagaggc

SEQ ID NO: 577768 - RNA, 19 nt, Artificial Sequence
  Description of Artificial Sequence: Synthetic oligonucleotide
aauuauuucuguaggcugg

SEQ ID NO: 577769 - RNA, 19 nt, Artificial Sequence
  Description of Artificial Sequence: Synthetic oligonucleotide
agaaguuaucaucagagcu

SEQ ID NO: 577770 - RNA, 19 nt, Artificial Sequence
  Description of Artificial Sequence: Synthetic oligonucleotide
uccguuuuccuucugaccc

SEQ ID NO: 577771 - RNA, 19 nt, Artificial Sequence
  Description of Artificial Sequence: Synthetic oligonucleotide
ugaaucaauacugaggaca

SEQ ID NO: 577772 - RNA, 19 nt, Artificial Sequence
  Description of Artificial Sequence: Synthetic oligonucleotide
aguuuuacuagauggucgg

SEQ ID NO: 577773 - RNA, 19 nt, Artificial Sequence
  Description of Artificial Sequence: Synthetic oligonucleotide
aacuaacgcacccagggag

SEQ ID NO: 577774 - RNA, 19 nt, Artificial Sequence
  Description of Artificial Sequence: Synthetic oligonucleotide
caaacuaacgcacccaggg

SEQ ID NO: 577775 - RNA, 19 nt, Artificial Sequence
  Description of Artificial Sequence: Synthetic oligonucleotide
agucaucgccaucagagcc

SEQ ID NO: 577776 - RNA, 19 nt, Artificial Sequence
  Description of Artificial Sequence: Synthetic oligonucleotide
ucacuauucuugaaggaag

SEQ ID NO: 577777 - RNA, 19 nt, Artificial Sequence
  Description of Artificial Sequence: Synthetic oligonucleotide
gaguagaagccccaagucg

SEQ ID NO: 577778 - RNA, 19 nt, Artificial Sequence
  Description of Artificial Sequence: Synthetic oligonucleotide
aggaaucucaauuauuucu

SEQ ID NO: 577779 - RNA, 19 nt, Artificial Sequence
  Description of Artificial Sequence: Synthetic oligonucleotide
aagaucgugaguauccacg

SEQ ID NO: 577780 - RNA, 19 nt, Artificial Sequence
  Description of Artificial Sequence: Synthetic oligonucleotide
uuuuacuagauggucggcg

SEQ ID NO: 577781 - RNA, 19 nt, Artificial Sequence
  Description of Artificial Sequence: Synthetic oligonucleotide
aguagaagccccaagucgc

SEQ ID NO: 577782 - RNA, 19 nt, Artificial Sequence
  Description of Artificial Sequence: Synthetic oligonucleotide
acugucaugauacugcagu

SEQ ID NO: 577783 - RNA, 19 nt, Artificial Sequence
  Description of Artificial Sequence: Synthetic oligonucleotide
aauagcuguagucgaaccu

SEQ ID NO: 577784 - RNA, 19 nt, Artificial Sequence
  Description of Artificial Sequence: Synthetic oligonucleotide
auagcaaucccauggguug

SEQ ID NO: 577785 - RNA, 19 nt, Artificial Sequence
  Description of Artificial Sequence: Synthetic oligonucleotide
auagcuacgccacacugag

SEQ ID NO: 577786 - RNA, 19 nt, Artificial Sequence
  Description of Artificial Sequence: Synthetic oligonucleotide
uagguugccuucaaguuug

SEQ ID NO: 577787 - RNA, 19 nt, Artificial Sequence
  Description of Artificial Sequence: Synthetic oligonucleotide
uauccuuccuuaaaauucu

SEQ ID NO: 577788 - RNA, 19 nt, Artificial Sequence
  Description of Artificial Sequence: Synthetic oligonucleotide
agcaaacccaccuucacug

SEQ ID NO: 577789 - RNA, 19 nt, Artificial Sequence
  Description of Artificial Sequence: Synthetic oligonucleotide
uccaaacuaacgcacccag

SEQ ID NO: 577790 - RNA, 19 nt, Artificial Sequence
  Description of Artificial Sequence: Synthetic oligonucleotide
aagcgauuugugcacaugu

SEQ ID NO: 577791 - RNA, 19 nt, Artificial Sequence
  Description of Artificial Sequence: Synthetic oligonucleotide
gaguucaagcgucaggaag

SEQ ID NO: 577792 - RNA, 19 nt, Artificial Sequence
  Description of Artificial Sequence: Synthetic oligonucleotide
gauuuaagagcaaagccuc

SEQ ID NO: 577793 - RNA, 19 nt, Artificial Sequence
  Description of Artificial Sequence: Synthetic oligonucleotide
cucggguugauuuuacugc

SEQ ID NO: 577794 - RNA, 19 nt, Artificial Sequence
  Description of Artificial Sequence: Synthetic oligonucleotide
caauuauuucuguaggcug

SEQ ID NO: 577795 - RNA, 19 nt, Artificial Sequence
  Description of Artificial Sequence: Synthetic oligonucleotide
uucccguuagagaagacgu

SEQ ID NO: 577796 - RNA, 19 nt, Artificial Sequence
  Description of Artificial Sequence: Synthetic oligonucleotide
auaucaucaggguuggacu

SEQ ID NO: 577797 - RNA, 19 nt, Artificial Sequence
  Description of Artificial Sequence: Synthetic oligonucleotide
agcuacgccacacugagcu

SEQ ID NO: 577798 - RNA, 19 nt, Artificial Sequence
  Description of Artificial Sequence: Synthetic oligonucleotide
aucgugaguauccacgaag

SEQ ID NO: 577799 - RNA, 19 nt, Artificial Sequence
  Description of Artificial Sequence: Synthetic oligonucleotide
uuuacuagauggucggcga

SEQ ID NO: 577800 - RNA, 19 nt, Artificial Sequence
  Description of Artificial Sequence: Synthetic oligonucleotide
auagaaguuuuacuagaug

SEQ ID NO: 577801 - RNA, 19 nt, Artificial Sequence
  Description of Artificial Sequence: Synthetic oligonucleotide
auagagauacccaagcucu

SEQ ID NO: 577802 - RNA, 19 nt, Artificial Sequence
  Description of Artificial Sequence: Synthetic oligonucleotide
acucacaauuaaucacugc

SEQ ID NO: 577803 - RNA, 19 nt, Artificial Sequence
  Description of Artificial Sequence: Synthetic oligonucleotide
ugucuuaaauagcuguagu

SEQ ID NO: 577804 - RNA, 19 nt, Artificial Sequence
  Description of Artificial Sequence: Synthetic oligonucleotide
cauagagauacccaagcuc

SEQ ID NO: 577805 - RNA, 19 nt, Artificial Sequence
  Description of Artificial Sequence: Synthetic oligonucleotide
uguguucuuacgaacuggu

SEQ ID NO: 577806 - RNA, 19 nt, Artificial Sequence
  Description of Artificial Sequence: Synthetic oligonucleotide
gauuguguccauaauucug

SEQ ID NO: 577807 - RNA, 19 nt, Artificial Sequence
  Description of Artificial Sequence: Synthetic oligonucleotide
uccacgcucacuauucuug

SEQ ID NO: 577808 - RNA, 19 nt, Artificial Sequence
  Description of Artificial Sequence: Synthetic oligonucleotide
ucuuagucugcuuauuguc

SEQ ID NO: 577809 - RNA, 19 nt, Artificial Sequence
  Description of Artificial Sequence: Synthetic oligonucleotide
uaauucugagagcuuucag

SEQ ID NO: 577810 - RNA, 19 nt, Artificial Sequence
  Description of Artificial Sequence: Synthetic oligonucleotide
uggacugaguagaagcccc

SEQ ID NO: 577811 - RNA, 19 nt, Artificial Sequence
  Description of Artificial Sequence: Synthetic oligonucleotide
uuaaauagcuguagucgaa

SEQ ID NO: 577812 - RNA, 19 nt, Artificial Sequence
  Description of Artificial Sequence: Synthetic oligonucleotide
ugcaccaagcgauuugugc

SEQ ID NO: 577813 - RNA, 19 nt, Artificial Sequence
  Description of Artificial Sequence: Synthetic oligonucleotide
ugcauccaaacuaacgcac

SEQ ID NO: 577814 - RNA, 19 nt, Artificial Sequence
  Description of Artificial Sequence: Synthetic oligonucleotide
cuuaaauagcuguagucga

SEQ ID NO: 577815 - RNA, 19 nt, Artificial Sequence
  Description of Artificial Sequence: Synthetic oligonucleotide
agagcuuucagugacuacu

SEQ ID NO: 577816 - RNA, 19 nt, Artificial Sequence
  Description of Artificial Sequence: Synthetic oligonucleotide
gucaugauacugcaguccc

SEQ ID NO: 577817 - RNA, 19 nt, Artificial Sequence
  Description of Artificial Sequence: Synthetic oligonucleotide
acauaagccaccucagacu

SEQ ID NO: 577818 - RNA, 19 nt, Artificial Sequence
  Description of Artificial Sequence: Synthetic oligonucleotide
uccauguugcaccaagcga

SEQ ID NO: 577819 - RNA, 19 nt, Artificial Sequence
  Description of Artificial Sequence: Synthetic oligonucleotide
agugacuacugacaucuug

SEQ ID NO: 577820 - RNA, 19 nt, Artificial Sequence
  Description of Artificial Sequence: Synthetic oligonucleotide
uucuuagucugcuuauugu

SEQ ID NO: 577821 - RNA, 19 nt, Artificial Sequence
  Description of Artificial Sequence: Synthetic oligonucleotide
ucggucaucaggauccucu

SEQ ID NO: 577822 - RNA, 19 nt, Artificial Sequence
  Description of Artificial Sequence: Synthetic oligonucleotide
ugaguagaagccccaaguc

SEQ ID NO: 577823 - RNA, 19 nt, Artificial Sequence
  Description of Artificial Sequence: Synthetic oligonucleotide
aaagcuacaucagagccuu

SEQ ID NO: 577824 - RNA, 19 nt, Artificial Sequence
  Description of Artificial Sequence: Synthetic oligonucleotide
auccaagcagcggauaccc

SEQ ID NO: 577825 - RNA, 19 nt, Artificial Sequence
  Description of Artificial Sequence: Synthetic oligonucleotide
ucgugaguauccacgaaga

SEQ ID NO: 577826 - RNA, 19 nt, Artificial Sequence
  Description of Artificial Sequence: Synthetic oligonucleotide
acgucuccaacucugcuag

SEQ ID NO: 577827 - RNA, 19 nt, Artificial Sequence
  Description of Artificial Sequence: Synthetic oligonucleotide
gauuuuacugccaccuggc

SEQ ID NO: 577828 - RNA, 19 nt, Artificial Sequence
  Description of Artificial Sequence: Synthetic oligonucleotide
uuuugccugcauaaauaca

SEQ ID NO: 577829 - RNA, 19 nt, Artificial Sequence
  Description of Artificial Sequence: Synthetic oligonucleotide
agagcaaagccucggguug

SEQ ID NO: 577830 - RNA, 19 nt, Artificial Sequence
  Description of Artificial Sequence: Synthetic oligonucleotide
gaagcgaagaucgugagua

SEQ ID NO: 577831 - RNA, 19 nt, Artificial Sequence
  Description of Artificial Sequence: Synthetic oligonucleotide
gaaguuuuacuagaugguc

SEQ ID NO: 577832 - RNA, 19 nt, Artificial Sequence
  Description of Artificial Sequence: Synthetic oligonucleotide
aaacuaacgcacccaggga

SEQ ID NO: 577833 - RNA, 19 nt, Artificial Sequence
  Description of Artificial Sequence: Synthetic oligonucleotide
acuagauggucggcgaagc

SEQ ID NO: 577834 - RNA, 19 nt, Artificial Sequence
  Description of Artificial Sequence: Synthetic oligonucleotide
auuuuacugccaccuggcg

SEQ ID NO: 577835 - RNA, 19 nt, Artificial Sequence
  Description of Artificial Sequence: Synthetic oligonucleotide
guucuuacgaacuggugca

SEQ ID NO: 577836 - RNA, 19 nt, Artificial Sequence
  Description of Artificial Sequence: Synthetic oligonucleotide
ucggguugauuuuacugcc

SEQ ID NO: 577837 - RNA, 19 nt, Artificial Sequence
  Description of Artificial Sequence: Synthetic oligonucleotide
ugcagccugaaucaauacu

SEQ ID NO: 577838 - RNA, 19 nt, Artificial Sequence
  Description of Artificial Sequence: Synthetic oligonucleotide
uguugcaccaagcgauuug

SEQ ID NO: 577839 - RNA, 19 nt, Artificial Sequence
  Description of Artificial Sequence: Synthetic oligonucleotide
ugucaugauacugcagucc

SEQ ID NO: 577840 - RNA, 19 nt, Artificial Sequence
  Description of Artificial Sequence: Synthetic oligonucleotide
cacacugcccacuucguag

SEQ ID NO: 577841 - RNA, 19 nt, Artificial Sequence
  Description of Artificial Sequence: Synthetic oligonucleotide
guugguugauuuaauagca

SEQ ID NO: 577842 - RNA, 19 nt, Artificial Sequence
  Description of Artificial Sequence: Synthetic oligonucleotide
ugguugauuuaauagcaau

SEQ ID NO: 577843 - RNA, 19 nt, Artificial Sequence
  Description of Artificial Sequence: Synthetic oligonucleotide
uaguuguagucccaaguaa

SEQ ID NO: 577844 - RNA, 19 nt, Artificial Sequence
  Description of Artificial Sequence: Synthetic oligonucleotide
cagaaguuaucaucagagc

SEQ ID NO: 577845 - RNA, 19 nt, Artificial Sequence
  Description of Artificial Sequence: Synthetic oligonucleotide
uauccacgaagacauucug

SEQ ID NO: 577846 - RNA, 19 nt, Artificial Sequence
  Description of Artificial Sequence: Synthetic oligonucleotide
ucggcgaagcccaucagac

SEQ ID NO: 577847 - RNA, 19 nt, Artificial Sequence
  Description of Artificial Sequence: Synthetic oligonucleotide
uugauuuuacugccaccug

SEQ ID NO: 577848 - RNA, 19 nt, Artificial Sequence
  Description of Artificial Sequence: Synthetic oligonucleotide
cauccaaacuaacgcaccc

SEQ ID NO: 577849 - RNA, 19 nt, Artificial Sequence
  Description of Artificial Sequence: Synthetic oligonucleotide
uugugcacauguuuggguc

SEQ ID NO: 577850 - RNA, 19 nt, Artificial Sequence
  Description of Artificial Sequence: Synthetic oligonucleotide
uguuucggucaucaggauc

SEQ ID NO: 577851 - RNA, 19 nt, Artificial Sequence
  Description of Artificial Sequence: Synthetic oligonucleotide
cuugcgcugcuguauacag

SEQ ID NO: 577852 - RNA, 19 nt, Artificial Sequence
  Description of Artificial Sequence: Synthetic oligonucleotide
agacucacaauuaaucacu

SEQ ID NO: 577853 - RNA, 19 nt, Artificial Sequence
  Description of Artificial Sequence: Synthetic oligonucleotide
uagauggucggcgaagccc

SEQ ID NO: 577854 - RNA, 19 nt, Artificial Sequence
  Description of Artificial Sequence: Synthetic oligonucleotide
uguccauaauucugagagc

SEQ ID NO: 577855 - RNA, 19 nt, Artificial Sequence
  Description of Artificial Sequence: Synthetic oligonucleotide
ugugcacauguuuggguca

SEQ ID NO: 577856 - RNA, 19 nt, Artificial Sequence
  Description of Artificial Sequence: Synthetic oligonucleotide
aguucaagcgucaggaaga

SEQ ID NO: 577857 - RNA, 19 nt, Artificial Sequence
  Description of Artificial Sequence: Synthetic oligonucleotide
aacgcacccagggagggag

SEQ ID NO: 577858 - RNA, 19 nt, Artificial Sequence
  Description of Artificial Sequence: Synthetic oligonucleotide
acuggcguguguucuuacg

SEQ ID NO: 577859 - RNA, 19 nt, Artificial Sequence
  Description of Artificial Sequence: Synthetic oligonucleotide
guuguagucccaaguaagc

SEQ ID NO: 577860 - RNA, 19 nt, Artificial Sequence
  Description of Artificial Sequence: Synthetic oligonucleotide
gagaagacguccucugcac

SEQ ID NO: 577861 - RNA, 19 nt, Artificial Sequence
  Description of Artificial Sequence: Synthetic oligonucleotide
acgaagacauucuggacaa

SEQ ID NO: 577862 - RNA, 19 nt, Artificial Sequence
  Description of Artificial Sequence: Synthetic oligonucleotide
cagucaugucuucagaguc

SEQ ID NO: 577863 - RNA, 19 nt, Artificial Sequence
  Description of Artificial Sequence: Synthetic oligonucleotide
cuccggguagcauagcuac

SEQ ID NO: 577864 - RNA, 19 nt, Artificial Sequence
  Description of Artificial Sequence: Synthetic oligonucleotide
gaagacguccucugcacuc

SEQ ID NO: 577865 - RNA, 19 nt, Artificial Sequence
  Description of Artificial Sequence: Synthetic oligonucleotide
ggaaucucaauuauuucug

SEQ ID NO: 577866 - RNA, 19 nt, Artificial Sequence
  Description of Artificial Sequence: Synthetic oligonucleotide
gacgggaguccuuggaagc

SEQ ID NO: 577867 - RNA, 19 nt, Artificial Sequence
  Description of Artificial Sequence: Synthetic oligonucleotide
agccugaaucaauacugag

SEQ ID NO: 577868 - RNA, 19 nt, Artificial Sequence
  Description of Artificial Sequence: Synthetic oligonucleotide
ccugaaucaauacugagga

SEQ ID NO: 577869 - RNA, 19 nt, Artificial Sequence
  Description of Artificial Sequence: Synthetic oligonucleotide
uuuggggcauagaaguuuu

SEQ ID NO: 577870 - RNA, 19 nt, Artificial Sequence
  Description of Artificial Sequence: Synthetic oligonucleotide
uggcgaaguuccuccauag

SEQ ID NO: 577871 - RNA, 19 nt, Artificial Sequence
  Description of Artificial Sequence: Synthetic oligonucleotide
uuuccuagcucuucaucaa

SEQ ID NO: 577872 - RNA, 19 nt, Artificial Sequence
  Description of Artificial Sequence: Synthetic oligonucleotide
aguagaaauccuucaccaa

SEQ ID NO: 577873 - RNA, 19 nt, Artificial Sequence
  Description of Artificial Sequence: Synthetic oligonucleotide
acguccucugcacucaaug

SEQ ID NO: 577874 - RNA, 19 nt, Artificial Sequence
  Description of Artificial Sequence: Synthetic oligonucleotide
gaagaucgugaguauccac

SEQ ID NO: 577875 - RNA, 19 nt, Artificial Sequence
  Description of Artificial Sequence: Synthetic oligonucleotide
agccccuacagauacugca

SEQ ID NO: 577876 - RNA, 19 nt, Artificial Sequence
  Description of Artificial Sequence: Synthetic oligonucleotide
agagccuuuggcaauguca

SEQ ID NO: 577877 - RNA, 19 nt, Artificial Sequence
  Description of Artificial Sequence: Synthetic oligonucleotide
aaagccucggguugauuuu

SEQ ID NO: 577878 - RNA, 19 nt, Artificial Sequence
  Description of Artificial Sequence: Synthetic oligonucleotide
uacuagauggucggcgaag

SEQ ID NO: 577879 - RNA, 19 nt, Artificial Sequence
  Description of Artificial Sequence: Synthetic oligonucleotide
cuacgccacacugagcugg

SEQ ID NO: 577880 - RNA, 19 nt, Artificial Sequence
  Description of Artificial Sequence: Synthetic oligonucleotide
gcuacaacugugauugagg

SEQ ID NO: 577881 - RNA, 19 nt, Artificial Sequence
  Description of Artificial Sequence: Synthetic oligonucleotide
uugccugcauaaauacaga

SEQ ID NO: 577882 - RNA, 19 nt, Artificial Sequence
  Description of Artificial Sequence: Synthetic oligonucleotide
caauccugagguagaggcc

SEQ ID NO: 577883 - RNA, 19 nt, Artificial Sequence
  Description of Artificial Sequence: Synthetic oligonucleotide
ucaugauacugcaguccca

SEQ ID NO: 577884 - RNA, 19 nt, Artificial Sequence
  Description of Artificial Sequence: Synthetic oligonucleotide
ccauggguugauuuaagag

SEQ ID NO: 577885 - RNA, 19 nt, Artificial Sequence
  Description of Artificial Sequence: Synthetic oligonucleotide
gguugauuuaagagcaaag

SEQ ID NO: 577886 - RNA, 19 nt, Artificial Sequence
  Description of Artificial Sequence: Synthetic oligonucleotide
ggagcuggucaacauaagc

SEQ ID NO: 577887 - RNA, 19 nt, Artificial Sequence
  Description of Artificial Sequence: Synthetic oligonucleotide
gacucacaauuaaucacug

SEQ ID NO: 577888 - RNA, 19 nt, Artificial Sequence
  Description of Artificial Sequence: Synthetic oligonucleotide
cccaaguaagcucuguucc

SEQ ID NO: 577889 - RNA, 19 nt, Artificial Sequence
  Description of Artificial Sequence: Synthetic oligonucleotide
acuaacgcacccagggagg

SEQ ID NO: 577890 - RNA, 19 nt, Artificial Sequence
  Description of Artificial Sequence: Synthetic oligonucleotide
ucggcugauuccacuuucc

SEQ ID NO: 577891 - RNA, 19 nt, Artificial Sequence
  Description of Artificial Sequence: Synthetic oligonucleotide
uuccuccauagagauaccc

SEQ ID NO: 577892 - RNA, 19 nt, Artificial Sequence
  Description of Artificial Sequence: Synthetic oligonucleotide
agcgaagaucgugaguauc

SEQ ID NO: 577893 - RNA, 19 nt, Artificial Sequence
  Description of Artificial Sequence: Synthetic oligonucleotide
cacuguugcagcucaacca

SEQ ID NO: 577894 - RNA, 19 nt, Artificial Sequence
  Description of Artificial Sequence: Synthetic oligonucleotide
uucggcugauuccacuuuc

SEQ ID NO: 577895 - RNA, 19 nt, Artificial Sequence
  Description of Artificial Sequence: Synthetic oligonucleotide
ucccauggguugauuuaag

SEQ ID NO: 577896 - RNA, 19 nt, Artificial Sequence
  Description of Artificial Sequence: Synthetic oligonucleotide
uuacuagauggucggcgaa

SEQ ID NO: 577897 - RNA, 19 nt, Artificial Sequence
  Description of Artificial Sequence: Synthetic oligonucleotide
ucgccaucagagccagagg

SEQ ID NO: 577898 - RNA, 19 nt, Artificial Sequence
  Description of Artificial Sequence: Synthetic oligonucleotide
uccggguagcauagcuacg

SEQ ID NO: 577899 - RNA, 19 nt, Artificial Sequence
  Description of Artificial Sequence: Synthetic oligonucleotide
gcugguucccguuagagaa

SEQ ID NO: 577900 - RNA, 19 nt, Artificial Sequence
  Description of Artificial Sequence: Synthetic oligonucleotide
aucaaugaacuggcgaagu

SEQ ID NO: 577901 - RNA, 19 nt, Artificial Sequence
  Description of Artificial Sequence: Synthetic oligonucleotide
ugaacuggcgaaguuccuc

SEQ ID NO: 577902 - RNA, 19 nt, Artificial Sequence
  Description of Artificial Sequence: Synthetic oligonucleotide
cugucuccggguagcauag

SEQ ID NO: 577903 - RNA, 19 nt, Artificial Sequence
  Description of Artificial Sequence: Synthetic oligonucleotide
ucauuggacucuucaggau

SEQ ID NO: 577904 - RNA, 19 nt, Artificial Sequence
  Description of Artificial Sequence: Synthetic oligonucleotide
cauagcuacgccacacuga

SEQ ID NO: 577905 - RNA, 19 nt, Artificial Sequence
  Description of Artificial Sequence: Synthetic oligonucleotide
gcauagaaguuuuacuaga

SEQ ID NO: 577906 - RNA, 19 nt, Artificial Sequence
  Description of Artificial Sequence: Synthetic oligonucleotide
aaacccaccuucacugaca

SEQ ID NO: 577907 - RNA, 19 nt, Artificial Sequence
  Description of Artificial Sequence: Synthetic oligonucleotide
agaagacguccucugcacu

SEQ ID NO: 577908 - RNA, 19 nt, Artificial Sequence
  Description of Artificial Sequence: Synthetic oligonucleotide
cugaaucaauacugaggac

SEQ ID NO: 577909 - RNA, 19 nt, Artificial Sequence
  Description of Artificial Sequence: Synthetic oligonucleotide
caccaagcgauuugugcac

SEQ ID NO: 577910 - RNA, 19 nt, Artificial Sequence
  Description of Artificial Sequence: Synthetic oligonucleotide
ggcgacaucacucucauau

SEQ ID NO: 577911 - RNA, 19 nt, Artificial Sequence
  Description of Artificial Sequence: Synthetic oligonucleotide
cugucaugauacugcaguc

SEQ ID NO: 577912 - RNA, 19 nt, Artificial Sequence
  Description of Artificial Sequence: Synthetic oligonucleotide
ucgaaccuguaguccaugu

SEQ ID NO: 577913 - RNA, 19 nt, Artificial Sequence
  Description of Artificial Sequence: Synthetic oligonucleotide
gguagcauagcuacgccac

SEQ ID NO: 577914 - RNA, 19 nt, Artificial Sequence
  Description of Artificial Sequence: Synthetic oligonucleotide
gauugagguagcggccuag

SEQ ID NO: 577915 - RNA, 19 nt, Artificial Sequence
  Description of Artificial Sequence: Synthetic oligonucleotide
cuagauggucggcgaagcc

SEQ ID NO: 577916 - RNA, 19 nt, Artificial Sequence
  Description of Artificial Sequence: Synthetic oligonucleotide
cacggguucucagagugag

SEQ ID NO: 577917 - RNA, 19 nt, Artificial Sequence
  Description of Artificial Sequence: Synthetic oligonucleotide
gaggauuguguccauaauu

SEQ ID NO: 577918 - RNA, 19 nt, Artificial Sequence
  Description of Artificial Sequence: Synthetic oligonucleotide
cuuagucugcuuauugucu

SEQ ID NO: 577919 - RNA, 19 nt, Artificial Sequence
  Description of Artificial Sequence: Synthetic oligonucleotide
cucacuauucuugaaggaa

SEQ ID NO: 577920 - RNA, 19 nt, Artificial Sequence
  Description of Artificial Sequence: Synthetic oligonucleotide
ucuuacgaacuggugcacu

SEQ ID NO: 577921 - RNA, 19 nt, Artificial Sequence
  Description of Artificial Sequence: Synthetic oligonucleotide
uagaagccccaagucgccg

SEQ ID NO: 577922 - RNA, 19 nt, Artificial Sequence
  Description of Artificial Sequence: Synthetic oligonucleotide
agcauagcuacgccacacu

SEQ ID NO: 577923 - RNA, 19 nt, Artificial Sequence
  Description of Artificial Sequence: Synthetic oligonucleotide
cuaacgcacccagggaggg

SEQ ID NO: 577924 - RNA, 19 nt, Artificial Sequence
  Description of Artificial Sequence: Synthetic oligonucleotide
ucuuugccuuccacacugc

SEQ ID NO: 577925 - RNA, 19 nt, Artificial Sequence
  Description of Artificial Sequence: Synthetic oligonucleotide
ugagagcuuucagugacua

SEQ ID NO: 577926 - RNA, 19 nt, Artificial Sequence
  Description of Artificial Sequence: Synthetic oligonucleotide
acgaacuggugcacucucc

SEQ ID NO: 577927 - RNA, 19 nt, Artificial Sequence
  Description of Artificial Sequence: Synthetic oligonucleotide
cagaaucagcaaacccacc

SEQ ID NO: 577928 - RNA, 19 nt, Artificial Sequence
  Description of Artificial Sequence: Synthetic oligonucleotide
cucggagcuacugucauga

SEQ ID NO: 577929 - RNA, 19 nt, Artificial Sequence
  Description of Artificial Sequence: Synthetic oligonucleotide
ugacuacugacaucuuguu

SEQ ID NO: 577930 - RNA, 19 nt, Artificial Sequence
  Description of Artificial Sequence: Synthetic oligonucleotide
gguugauuuuacugccacc

SEQ ID NO: 577931 - RNA, 19 nt, Artificial Sequence
  Description of Artificial Sequence: Synthetic oligonucleotide
aagcgaagaucgugaguau

SEQ ID NO: 577932 - RNA, 19 nt, Artificial Sequence
  Description of Artificial Sequence: Synthetic oligonucleotide
gcaccaagcgauuugugca

SEQ ID NO: 577933 - RNA, 19 nt, Artificial Sequence
  Description of Artificial Sequence: Synthetic oligonucleotide
gacacuguugcagcucaac

SEQ ID NO: 577934 - RNA, 19 nt, Artificial Sequence
  Description of Artificial Sequence: Synthetic oligonucleotide
cuacaacugugauugaggu

SEQ ID NO: 577935 - RNA, 19 nt, Artificial Sequence
  Description of Artificial Sequence: Synthetic oligonucleotide
agacuucauaggaggauug

SEQ ID NO: 577936 - RNA, 19 nt, Artificial Sequence
  Description of Artificial Sequence: Synthetic oligonucleotide
uggcguguguucuuacgaa

SEQ ID NO: 577937 - RNA, 19 nt, Artificial Sequence
  Description of Artificial Sequence: Synthetic oligonucleotide
agaagagggcugguucccg

SEQ ID NO: 577938 - RNA, 19 nt, Artificial Sequence
  Description of Artificial Sequence: Synthetic oligonucleotide
agauggucggcgaagccca

SEQ ID NO: 577939 - RNA, 19 nt, Artificial Sequence
  Description of Artificial Sequence: Synthetic oligonucleotide
uacugacaucuuguuucgg

SEQ ID NO: 577940 - RNA, 19 nt, Artificial Sequence
  Description of Artificial Sequence: Synthetic oligonucleotide
uugcagccugaaucaauac

SEQ ID NO: 577941 - RNA, 19 nt, Artificial Sequence
  Description of Artificial Sequence: Synthetic oligonucleotide
ucugaccccgagucugucu

SEQ ID NO: 577942 - RNA, 19 nt, Artificial Sequence
  Description of Artificial Sequence: Synthetic oligonucleotide
ggacgggaguccuuggaag

SEQ ID NO: 577943 - RNA, 19 nt, Artificial Sequence
  Description of Artificial Sequence: Synthetic oligonucleotide
ucccguuagagaagacguc

SEQ ID NO: 577944 - RNA, 19 nt, Artificial Sequence
  Description of Artificial Sequence: Synthetic oligonucleotide
cgcucacuauucuugaagg

SEQ ID NO: 577945 - RNA, 19 nt, Artificial Sequence
  Description of Artificial Sequence: Synthetic oligonucleotide
gcgaagaucgugaguaucc

SEQ ID NO: 577946 - RNA, 19 nt, Artificial Sequence
  Description of Artificial Sequence: Synthetic oligonucleotide
guuuuacuagauggucggc

SEQ ID NO: 577947 - RNA, 19 nt, Artificial Sequence
  Description of Artificial Sequence: Synthetic oligonucleotide
gcauagcuacgccacacug

SEQ ID NO: 577948 - RNA, 19 nt, Artificial Sequence
  Description of Artificial Sequence: Synthetic oligonucleotide
ggguugauuuuacugccac

SEQ ID NO: 577949 - RNA, 19 nt, Artificial Sequence
  Description of Artificial Sequence: Synthetic oligonucleotide
cauagaaguuuuacuagau

SEQ ID NO: 577950 - RNA, 19 nt, Artificial Sequence
  Description of Artificial Sequence: Synthetic oligonucleotide
aaacagguuggggcuacaa

SEQ ID NO: 577951 - RNA, 19 nt, Artificial Sequence
  Description of Artificial Sequence: Synthetic oligonucleotide
gaacuggcgacaucacucu

SEQ ID NO: 577952 - RNA, 19 nt, Artificial Sequence
  Description of Artificial Sequence: Synthetic oligonucleotide
auacugcagucccagcuua

SEQ ID NO: 577953 - RNA, 19 nt, Artificial Sequence
  Description of Artificial Sequence: Synthetic oligonucleotide
ggcuacaacugugauugag

SEQ ID NO: 577954 - RNA, 19 nt, Artificial Sequence
  Description of Artificial Sequence: Synthetic oligonucleotide
uggguugauuuaagagcaa

SEQ ID NO: 577955 - RNA, 19 nt, Artificial Sequence
  Description of Artificial Sequence: Synthetic oligonucleotide
caacugugauugagguagc

SEQ ID NO: 577956 - RNA, 19 nt, Artificial Sequence
  Description of Artificial Sequence: Synthetic oligonucleotide
cuuucaaugugguccagau

SEQ ID NO: 577957 - RNA, 19 nt, Artificial Sequence
  Description of Artificial Sequence: Synthetic oligonucleotide
ccucggguugauuuuacug

SEQ ID NO: 577958 - RNA, 19 nt, Artificial Sequence
  Description of Artificial Sequence: Synthetic oligonucleotide
aaagagccuuuggcaaugu

SEQ ID NO: 577959 - RNA, 19 nt, Artificial Sequence
  Description of Artificial Sequence: Synthetic oligonucleotide
auccaaacuaacgcaccca

SEQ ID NO: 577960 - RNA, 19 nt, Artificial Sequence
  Description of Artificial Sequence: Synthetic oligonucleotide
uugcgcugcuguauacagu

SEQ ID NO: 577961 - RNA, 19 nt, Artificial Sequence
  Description of Artificial Sequence: Synthetic oligonucleotide
cuggcguguguucuuacga

SEQ ID NO: 577962 - RNA, 19 nt, Artificial Sequence
  Description of Artificial Sequence: Synthetic oligonucleotide
cuuuugcccucagccagcc

SEQ ID NO: 577963 - RNA, 19 nt, Artificial Sequence
  Description of Artificial Sequence: Synthetic oligonucleotide
cccguuagagaagacgucc

SEQ ID NO: 577964 - RNA, 19 nt, Artificial Sequence
  Description of Artificial Sequence: Synthetic oligonucleotide
cuguauacaguccaucuuu

SEQ ID NO: 577965 - RNA, 19 nt, Artificial Sequence
  Description of Artificial Sequence: Synthetic oligonucleotide
uucuuacgaacuggugcac

SEQ ID NO: 577966 - RNA, 19 nt, Artificial Sequence
  Description of Artificial Sequence: Synthetic oligonucleotide
gucggcgaagcccaucaga

SEQ ID NO: 577967 - RNA, 19 nt, Artificial Sequence
  Description of Artificial Sequence: Synthetic oligonucleotide
agcuuagaguagaaauccu

SEQ ID NO: 577968 - RNA, 19 nt, Artificial Sequence
  Description of Artificial Sequence: Synthetic oligonucleotide
gcacucaauggccccacag

SEQ ID NO: 577969 - RNA, 19 nt, Artificial Sequence
  Description of Artificial Sequence: Synthetic oligonucleotide
guuggggcuacaacuguga

SEQ ID NO: 577970 - RNA, 19 nt, Artificial Sequence
  Description of Artificial Sequence: Synthetic oligonucleotide
guucaagcgucaggaagac

SEQ ID NO: 577971 - RNA, 19 nt, Artificial Sequence
  Description of Artificial Sequence: Synthetic oligonucleotide
gaucgugaguauccacgaa

SEQ ID NO: 577972 - RNA, 19 nt, Artificial Sequence
  Description of Artificial Sequence: Synthetic oligonucleotide
gggaagcgaagaucgugag

SEQ ID NO: 577973 - RNA, 19 nt, Artificial Sequence
  Description of Artificial Sequence: Synthetic oligonucleotide
aucccauggguugauuuaa

SEQ ID NO: 577974 - RNA, 19 nt, Artificial Sequence
  Description of Artificial Sequence: Synthetic oligonucleotide
guagcauagcuacgccaca

SEQ ID NO: 577975 - RNA, 19 nt, Artificial Sequence
  Description of Artificial Sequence: Synthetic oligonucleotide
uacgccacacugagcuggu

SEQ ID NO: 577976 - RNA, 19 nt, Artificial Sequence
  Description of Artificial Sequence: Synthetic oligonucleotide
caagcgauuugugcacaug

SEQ ID NO: 577977 - RNA, 19 nt, Artificial Sequence
  Description of Artificial Sequence: Synthetic oligonucleotide
gaaucagcaaacccaccuu

SEQ ID NO: 577978 - RNA, 19 nt, Artificial Sequence
  Description of Artificial Sequence: Synthetic oligonucleotide
ggcguguguucuuacgaac

SEQ ID NO: 577979 - RNA, 19 nt, Artificial Sequence
  Description of Artificial Sequence: Synthetic oligonucleotide
gaagcucaauccugaggua

SEQ ID NO: 577980 - RNA, 19 nt, Artificial Sequence
  Description of Artificial Sequence: Synthetic oligonucleotide
caccaaagacucacaauua

SEQ ID NO: 577981 - RNA, 19 nt, Artificial Sequence
  Description of Artificial Sequence: Synthetic oligonucleotide
uuguuucggucaucaggau

SEQ ID NO: 577982 - RNA, 19 nt, Artificial Sequence
  Description of Artificial Sequence: Synthetic oligonucleotide
agcccggauccucuugcug

SEQ ID NO: 577983 - RNA, 19 nt, Artificial Sequence
  Description of Artificial Sequence: Synthetic oligonucleotide
ggcaaagaaggccacccaa

SEQ ID NO: 577984 - RNA, 19 nt, Artificial Sequence
  Description of Artificial Sequence: Synthetic oligonucleotide
gucaucgccaucagagcca

SEQ ID NO: 577985 - RNA, 19 nt, Artificial Sequence
  Description of Artificial Sequence: Synthetic oligonucleotide
uagcuacgccacacugagc

SEQ ID NO: 577986 - RNA, 19 nt, Artificial Sequence
  Description of Artificial Sequence: Synthetic oligonucleotide
agcucaauccugagguaga

SEQ ID NO: 577987 - RNA, 19 nt, Artificial Sequence
  Description of Artificial Sequence: Synthetic oligonucleotide
acccacgucuccaacucug

SEQ ID NO: 577988 - RNA, 19 nt, Artificial Sequence
  Description of Artificial Sequence: Synthetic oligonucleotide
guauccacgaagacauucu

SEQ ID NO: 577989 - RNA, 19 nt, Artificial Sequence
  Description of Artificial Sequence: Synthetic oligonucleotide
ucguuggaccagucaaguu

SEQ ID NO: 577990 - RNA, 19 nt, Artificial Sequence
  Description of Artificial Sequence: Synthetic oligonucleotide
gguauggauggucacgggu

SEQ ID NO: 577991 - RNA, 19 nt, Artificial Sequence
  Description of Artificial Sequence: Synthetic oligonucleotide
cuucguaguuguaguccca

SEQ ID NO: 577992 - RNA, 19 nt, Artificial Sequence
  Description of Artificial Sequence: Synthetic oligonucleotide
ggguagcauagcuacgcca

SEQ ID NO: 577993 - RNA, 19 nt, Artificial Sequence
  Description of Artificial Sequence: Synthetic oligonucleotide
gcucacuauucuugaagga

SEQ ID NO: 577994 - RNA, 19 nt, Artificial Sequence
  Description of Artificial Sequence: Synthetic oligonucleotide
cagccccuacagauacugc

SEQ ID NO: 577995 - RNA, 19 nt, Artificial Sequence
  Description of Artificial Sequence: Synthetic oligonucleotide
ggauuguguccauaauucu

SEQ ID NO: 577996 - RNA, 19 nt, Artificial Sequence
  Description of Artificial Sequence: Synthetic oligonucleotide
gacaguccguuuuccuucu

SEQ ID NO: 577997 - RNA, 19 nt, Artificial Sequence
  Description of Artificial Sequence: Synthetic oligonucleotide
cagcucaaccacgaggcca

SEQ ID NO: 577998 - RNA, 19 nt, Artificial Sequence
  Description of Artificial Sequence: Synthetic oligonucleotide
accaagcgauuugugcaca

SEQ ID NO: 577999 - RNA, 19 nt, Artificial Sequence
  Description of Artificial Sequence: Synthetic oligonucleotide
ccggguagcauagcuacgc

SEQ ID NO: 578000 - RNA, 19 nt, Artificial Sequence
  Description of Artificial Sequence: Synthetic oligonucleotide
uggcgcuucguuggaccag

SEQ ID NO: 578001 - RNA, 19 nt, Artificial Sequence
  Description of Artificial Sequence: Synthetic oligonucleotide
gugcacauguuugggucac

SEQ ID NO: 578002 - RNA, 19 nt, Artificial Sequence
  Description of Artificial Sequence: Synthetic oligonucleotide
cgaaguuccuccauagaga

SEQ ID NO: 578003 - RNA, 19 nt, Artificial Sequence
  Description of Artificial Sequence: Synthetic oligonucleotide
cuacuagcaacuggagaaa

SEQ ID NO: 578004 - RNA, 19 nt, Artificial Sequence
  Description of Artificial Sequence: Synthetic oligonucleotide
gccauguugguugauuuaa

SEQ ID NO: 578005 - RNA, 19 nt, Artificial Sequence
  Description of Artificial Sequence: Synthetic oligonucleotide
cuucuugcgcugcuguaua

SEQ ID NO: 578006 - RNA, 19 nt, Artificial Sequence
  Description of Artificial Sequence: Synthetic oligonucleotide
gggucgucuucagaugaag

SEQ ID NO: 578007 - RNA, 19 nt, Artificial Sequence
  Description of Artificial Sequence: Synthetic oligonucleotide
gccccuacagauacugcag

SEQ ID NO: 578008 - RNA, 19 nt, Artificial Sequence
  Description of Artificial Sequence: Synthetic oligonucleotide
guauggauggucacggguu

SEQ ID NO: 578009 - RNA, 19 nt, Artificial Sequence
  Description of Artificial Sequence: Synthetic oligonucleotide
agucgccgacuuuggggca

SEQ ID NO: 578010 - RNA, 19 nt, Artificial Sequence
  Description of Artificial Sequence: Synthetic oligonucleotide
agcgauuugugcacauguu

SEQ ID NO: 578011 - RNA, 19 nt, Artificial Sequence
  Description of Artificial Sequence: Synthetic oligonucleotide
ggcugguucccguuagaga

SEQ ID NO: 578012 - RNA, 19 nt, Artificial Sequence
  Description of Artificial Sequence: Synthetic oligonucleotide
cauagaacuggcguguguu

SEQ ID NO: 578013 - RNA, 19 nt, Artificial Sequence
  Description of Artificial Sequence: Synthetic oligonucleotide
ccguuuuccuucugacccc

SEQ ID NO: 578014 - RNA, 19 nt, Artificial Sequence
  Description of Artificial Sequence: Synthetic oligonucleotide
uaacgcacccagggaggga

SEQ ID NO: 578015 - RNA, 19 nt, Artificial Sequence
  Description of Artificial Sequence: Synthetic oligonucleotide
cuggcgcuucguuggacca

SEQ ID NO: 578016 - RNA, 19 nt, Artificial Sequence
  Description of Artificial Sequence: Synthetic oligonucleotide
ggguugauuuaagagcaaa

SEQ ID NO: 578017 - RNA, 19 nt, Artificial Sequence
  Description of Artificial Sequence: Synthetic oligonucleotide
ggcgaagcccaucagacuu

SEQ ID NO: 578018 - RNA, 19 nt, Artificial Sequence
  Description of Artificial Sequence: Synthetic oligonucleotide
agggcugguucccguuaga

SEQ ID NO: 578019 - RNA, 19 nt, Artificial Sequence
  Description of Artificial Sequence: Synthetic oligonucleotide
cuuucggcugauuccacuu

SEQ ID NO: 578020 - RNA, 19 nt, Artificial Sequence
  Description of Artificial Sequence: Synthetic oligonucleotide
gaacuggcguguguucuua

SEQ ID NO: 578021 - RNA, 19 nt, Artificial Sequence
  Description of Artificial Sequence: Synthetic oligonucleotide
agucgaaccuguaguccau

SEQ ID NO: 578022 - RNA, 19 nt, Artificial Sequence
  Description of Artificial Sequence: Synthetic oligonucleotide
cuuuggggcauagaaguuu

SEQ ID NO: 578023 - RNA, 19 nt, Artificial Sequence
  Description of Artificial Sequence: Synthetic oligonucleotide
agcaaucccauggguugau

SEQ ID NO: 578024 - RNA, 19 nt, Artificial Sequence
  Description of Artificial Sequence: Synthetic oligonucleotide
gguggcuugcagccccuac

SEQ ID NO: 578025 - RNA, 19 nt, Artificial Sequence
  Description of Artificial Sequence: Synthetic oligonucleotide
ugucuccggguagcauagc

SEQ ID NO: 578026 - RNA, 19 nt, Artificial Sequence
  Description of Artificial Sequence: Synthetic oligonucleotide
ggccuagguugccuucaag

SEQ ID NO: 578027 - RNA, 19 nt, Artificial Sequence
  Description of Artificial Sequence: Synthetic oligonucleotide
cugaaccgcuguugccauc

SEQ ID NO: 578028 - RNA, 19 nt, Artificial Sequence
  Description of Artificial Sequence: Synthetic oligonucleotide
uucggucaucaggauccuc

SEQ ID NO: 578029 - RNA, 19 nt, Artificial Sequence
  Description of Artificial Sequence: Synthetic oligonucleotide
agguugccuucaaguuugg

SEQ ID NO: 578030 - RNA, 19 nt, Artificial Sequence
  Description of Artificial Sequence: Synthetic oligonucleotide
ucggagcuacugucaugau

SEQ ID NO: 578031 - RNA, 19 nt, Artificial Sequence
  Description of Artificial Sequence: Synthetic oligonucleotide
cauuugcagccugaaucaa

SEQ ID NO: 578032 - RNA, 19 nt, Artificial Sequence
  Description of Artificial Sequence: Synthetic oligonucleotide
cacgcucacuauucuugaa

SEQ ID NO: 578033 - RNA, 19 nt, Artificial Sequence
  Description of Artificial Sequence: Synthetic oligonucleotide
cccauggguugauuuaaga

SEQ ID NO: 578034 - RNA, 19 nt, Artificial Sequence
  Description of Artificial Sequence: Synthetic oligonucleotide
gcgauuugugcacauguuu

SEQ ID NO: 578035 - RNA, 19 nt, Artificial Sequence
  Description of Artificial Sequence: Synthetic oligonucleotide
gcuacgccacacugagcug

SEQ ID NO: 578036 - RNA, 19 nt, Artificial Sequence
  Description of Artificial Sequence: Synthetic oligonucleotide
cccuacagauacugcagga

SEQ ID NO: 578037 - RNA, 19 nt, Artificial Sequence
  Description of Artificial Sequence: Synthetic oligonucleotide
ggaagcgaagaucgugagu

SEQ ID NO: 578038 - RNA, 19 nt, Artificial Sequence
  Description of Artificial Sequence: Synthetic oligonucleotide
ggauccucugaaccgcugu

SEQ ID NO: 578039 - RNA, 19 nt, Artificial Sequence
  Description of Artificial Sequence: Synthetic oligonucleotide
ccacacuuucaaugugguc

SEQ ID NO: 578040 - RNA, 19 nt, Artificial Sequence
  Description of Artificial Sequence: Synthetic oligonucleotide
agcaaagccucggguugau

SEQ ID NO: 578041 - RNA, 19 nt, Artificial Sequence
  Description of Artificial Sequence: Synthetic oligonucleotide
caaaaucaucugucaggau

SEQ ID NO: 578042 - RNA, 19 nt, Artificial Sequence
  Description of Artificial Sequence: Synthetic oligonucleotide
ugcccacuucguaguugua

SEQ ID NO: 578043 - RNA, 19 nt, Artificial Sequence
  Description of Artificial Sequence: Synthetic oligonucleotide
gcggauaccccagcccuug

SEQ ID NO: 578044 - RNA, 19 nt, Artificial Sequence
  Description of Artificial Sequence: Synthetic oligonucleotide
ggucggcgaagcccaucag

SEQ ID NO: 578045 - RNA, 19 nt, Artificial Sequence
  Description of Artificial Sequence: Synthetic oligonucleotide
cuggcgacaucacucucau

SEQ ID NO: 578046 - RNA, 19 nt, Artificial Sequence
  Description of Artificial Sequence: Synthetic oligonucleotide
ccacgcucacuauucuuga

SEQ ID NO: 578047 - RNA, 19 nt, Artificial Sequence
  Description of Artificial Sequence: Synthetic oligonucleotide
ggaggauuguguccauaau

SEQ ID NO: 578048 - RNA, 19 nt, Artificial Sequence
  Description of Artificial Sequence: Synthetic oligonucleotide
gguagcggccuagguugcc

SEQ ID NO: 578049 - RNA, 19 nt, Artificial Sequence
  Description of Artificial Sequence: Synthetic oligonucleotide
acggguucucagagugaga

SEQ ID NO: 578050 - RNA, 19 nt, Artificial Sequence
  Description of Artificial Sequence: Synthetic oligonucleotide
gcuuucggcugauuccacu

SEQ ID NO: 578051 - RNA, 19 nt, Artificial Sequence
  Description of Artificial Sequence: Synthetic oligonucleotide
gcguguguucuuacgaacu

SEQ ID NO: 578052 - RNA, 19 nt, Artificial Sequence
  Description of Artificial Sequence: Synthetic oligonucleotide
guagcggccuagguugccu

SEQ ID NO: 578053 - RNA, 19 nt, Artificial Sequence
  Description of Artificial Sequence: Synthetic oligonucleotide
cggguagcauagcuacgcc

SEQ ID NO: 578054 - RNA, 19 nt, Artificial Sequence
  Description of Artificial Sequence: Synthetic oligonucleotide
uggcgacaucacucucaua

SEQ ID NO: 578055 - RNA, 19 nt, Artificial Sequence
  Description of Artificial Sequence: Synthetic oligonucleotide
cguuggaccagucaaguuu

SEQ ID NO: 578056 - RNA, 19 nt, Artificial Sequence
  Description of Artificial Sequence: Synthetic oligonucleotide
caaacagguuggggcuaca

SEQ ID NO: 578057 - RNA, 19 nt, Artificial Sequence
  Description of Artificial Sequence: Synthetic oligonucleotide
agcggauaccccagcccuu

SEQ ID NO: 578058 - RNA, 19 nt, Artificial Sequence
  Description of Artificial Sequence: Synthetic oligonucleotide
gagugagaagagggcuggu

SEQ ID NO: 578059 - RNA, 19 nt, Artificial Sequence
  Description of Artificial Sequence: Synthetic oligonucleotide
cuccacgcucacuauucuu

SEQ ID NO: 578060 - RNA, 19 nt, Artificial Sequence
  Description of Artificial Sequence: Synthetic oligonucleotide
cugcccggccugccccagc

SEQ ID NO: 578061 - RNA, 19 nt, Artificial Sequence
  Description of Artificial Sequence: Synthetic oligonucleotide
ggucacggguucucagagu

SEQ ID NO: 578062 - RNA, 19 nt, Artificial Sequence
  Description of Artificial Sequence: Synthetic oligonucleotide
ccguuagagaagacguccu

SEQ ID NO: 578063 - RNA, 19 nt, Artificial Sequence
  Description of Artificial Sequence: Synthetic oligonucleotide
gcgcugcuguauacagucc

SEQ ID NO: 578064 - RNA, 19 nt, Artificial Sequence
  Description of Artificial Sequence: Synthetic oligonucleotide
caccuggcgcuucguugga

SEQ ID NO: 578065 - RNA, 19 nt, Artificial Sequence
  Description of Artificial Sequence: Synthetic oligonucleotide
cgaagaucgugaguaucca

SEQ ID NO: 578066 - RNA, 19 nt, Artificial Sequence
  Description of Artificial Sequence: Synthetic oligonucleotide
ggcuuucggcugauuccac

SEQ ID NO: 578067 - RNA, 19 nt, Artificial Sequence
  Description of Artificial Sequence: Synthetic oligonucleotide
ucgccgacuuuggggcaua

SEQ ID NO: 578068 - RNA, 19 nt, Artificial Sequence
  Description of Artificial Sequence: Synthetic oligonucleotide
gcgucaggaagacccaguu

SEQ ID NO: 578069 - RNA, 19 nt, Artificial Sequence
  Description of Artificial Sequence: Synthetic oligonucleotide
agugggcuuucggcugauu

SEQ ID NO: 578070 - RNA, 19 nt, Artificial Sequence
  Description of Artificial Sequence: Synthetic oligonucleotide
gcacauguuugggucacau

SEQ ID NO: 578071 - RNA, 19 nt, Artificial Sequence
  Description of Artificial Sequence: Synthetic oligonucleotide
cggguugauuuuacugcca

SEQ ID NO: 578072 - RNA, 19 nt, Artificial Sequence
  Description of Artificial Sequence: Synthetic oligonucleotide
cacccacgucuccaacucu

SEQ ID NO: 578073 - RNA, 19 nt, Artificial Sequence
  Description of Artificial Sequence: Synthetic oligonucleotide
gacguccucugcacucaau

SEQ ID NO: 578074 - RNA, 19 nt, Artificial Sequence
  Description of Artificial Sequence: Synthetic oligonucleotide
ggauaccccagcccuuguu

SEQ ID NO: 578075 - RNA, 19 nt, Artificial Sequence
  Description of Artificial Sequence: Synthetic oligonucleotide
ggggucgucuucagaugaa

SEQ ID NO: 578076 - RNA, 19 nt, Artificial Sequence
  Description of Artificial Sequence: Synthetic oligonucleotide
ggcgcuucguuggaccagu

SEQ ID NO: 578077 - RNA, 19 nt, Artificial Sequence
  Description of Artificial Sequence: Synthetic oligonucleotide
cgucuccaacucugcuagc

SEQ ID NO: 578078 - RNA, 19 nt, Artificial Sequence
  Description of Artificial Sequence: Synthetic oligonucleotide
caucgccaucagagccaga

SEQ ID NO: 578079 - RNA, 19 nt, Artificial Sequence
  Description of Artificial Sequence: Synthetic oligonucleotide
gccucggguugauuuuacu

SEQ ID NO: 578080 - RNA, 19 nt, Artificial Sequence
  Description of Artificial Sequence: Synthetic oligonucleotide
cagcccggauccucuugcu

SEQ ID NO: 578081 - RNA, 19 nt, Artificial Sequence
  Description of Artificial Sequence: Synthetic oligonucleotide
gucgccgacuuuggggcau

SEQ ID NO: 578082 - RNA, 19 nt, Artificial Sequence
  Description of Artificial Sequence: Synthetic oligonucleotide
gaaccgcuguugccaucuu

SEQ ID NO: 578083 - RNA, 19 nt, Artificial Sequence
  Description of Artificial Sequence: Synthetic oligonucleotide
caccucagacaguccguuu

SEQ ID NO: 578084 - RNA, 19 nt, Artificial Sequence
  Description of Artificial Sequence: Synthetic oligonucleotide
cgcuucguuggaccaguca

SEQ ID NO: 578085 - RNA, 19 nt, Artificial Sequence
  Description of Artificial Sequence: Synthetic oligonucleotide
gcucaaccacgaggccacc

SEQ ID NO: 578086 - RNA, 19 nt, Artificial Sequence
  Description of Artificial Sequence: Synthetic oligonucleotide
gccgacuuuggggcauaga

SEQ ID NO: 578087 - RNA, 19 nt, Artificial Sequence
  Description of Artificial Sequence: Synthetic oligonucleotide
gauggucggcgaagcccau

SEQ ID NO: 578088 - RNA, 19 nt, Artificial Sequence
  Description of Artificial Sequence: Synthetic oligonucleotide
cgaagcccaucagacuuca

SEQ ID NO: 578089 - RNA, 19 nt, Artificial Sequence
  Description of Artificial Sequence: Synthetic oligonucleotide
cagugacuacugacaucuu

SEQ ID NO: 578090 - RNA, 19 nt, Artificial Sequence
  Description of Artificial Sequence: Synthetic oligonucleotide
gcgcuucguuggaccaguc

SEQ ID NO: 578091 - RNA, 19 nt, Artificial Sequence
  Description of Artificial Sequence: Synthetic oligonucleotide
ccggauccucuugcuggca

SEQ ID NO: 578092 - RNA, 19 nt, Artificial Sequence
  Description of Artificial Sequence: Synthetic oligonucleotide
gcaaucccauggguugauu

SEQ ID NO: 578093 - RNA, 19 nt, Artificial Sequence
  Description of Artificial Sequence: Synthetic oligonucleotide
cgccgacuuuggggcauag

SEQ ID NO: 578094 - RNA, 19 nt, Artificial Sequence
  Description of Artificial Sequence: Synthetic oligonucleotide
cggccuagguugccuucaa

SEQ ID NO: 578095 - RNA, 19 nt, Artificial Sequence
  Description of Artificial Sequence: Synthetic oligonucleotide
cggauaccccagcccuugu

SEQ ID NO: 578096 - RNA, 19 nt, Artificial Sequence
  Description of Artificial Sequence: Synthetic oligonucleotide
aacuauuagauuuggugcc

SEQ ID NO: 578097 - RNA, 19 nt, Artificial Sequence
  Description of Artificial Sequence: Synthetic oligonucleotide
aacagauaggcuucuaacc

SEQ ID NO: 578098 - RNA, 19 nt, Artificial Sequence
  Description of Artificial Sequence: Synthetic oligonucleotide
aaugaaaagaguuggucuc

SEQ ID NO: 578099 - RNA, 19 nt, Artificial Sequence
  Description of Artificial Sequence: Synthetic oligonucleotide
auagccuuuacacacacac

SEQ ID NO: 578100 - RNA, 19 nt, Artificial Sequence
  Description of Artificial Sequence: Synthetic oligonucleotide
ugcuguauggaucugaucu

SEQ ID NO: 578101 - RNA, 19 nt, Artificial Sequence
  Description of Artificial Sequence: Synthetic oligonucleotide
auugcuagaacacuaagca

SEQ ID NO: 578102 - RNA, 19 nt, Artificial Sequence
  Description of Artificial Sequence: Synthetic oligonucleotide
aggacugcuagauaaagac

SEQ ID NO: 578103 - RNA, 19 nt, Artificial Sequence
  Description of Artificial Sequence: Synthetic oligonucleotide
aaauaaaauaaaauaaaau

SEQ ID NO: 578104 - RNA, 19 nt, Artificial Sequence
  Description of Artificial Sequence: Synthetic oligonucleotide
gaugcuguaacucagcuga

SEQ ID NO: 578105 - RNA, 19 nt, Artificial Sequence
  Description of Artificial Sequence: Synthetic oligonucleotide
aaaauaaaauaaaauaaaa

SEQ ID NO: 578106 - RNA, 19 nt, Artificial Sequence
  Description of Artificial Sequence: Synthetic oligonucleotide
gaagcucacgcucauaacg

SEQ ID NO: 578107 - RNA, 19 nt, Artificial Sequence
  Description of Artificial Sequence: Synthetic oligonucleotide
agccuuuacacacacacac

SEQ ID NO: 578108 - RNA, 19 nt, Artificial Sequence
  Description of Artificial Sequence: Synthetic oligonucleotide
acacauuccuugcugagcc

SEQ ID NO: 578109 - RNA, 19 nt, Artificial Sequence
  Description of Artificial Sequence: Synthetic oligonucleotide
aguaggugcagcuuguagg

SEQ ID NO: 578110 - RNA, 19 nt, Artificial Sequence
  Description of Artificial Sequence: Synthetic oligonucleotide
uaagcaauggacugcaccc

SEQ ID NO: 578111 - RNA, 19 nt, Artificial Sequence
  Description of Artificial Sequence: Synthetic oligonucleotide
uuuaccuccugcuucaggc

SEQ ID NO: 578112 - RNA, 19 nt, Artificial Sequence
  Description of Artificial Sequence: Synthetic oligonucleotide
gugaguucaucucagagag

SEQ ID NO: 578113 - RNA, 19 nt, Artificial Sequence
  Description of Artificial Sequence: Synthetic oligonucleotide
ugaaaguaggugcagcuug

SEQ ID NO: 578114 - RNA, 19 nt, Artificial Sequence
  Description of Artificial Sequence: Synthetic oligonucleotide
auauucagccugccgaugc

SEQ ID NO: 578115 - RNA, 19 nt, Artificial Sequence
  Description of Artificial Sequence: Synthetic oligonucleotide
ucccauaagaucuucauau

SEQ ID NO: 578116 - RNA, 19 nt, Artificial Sequence
  Description of Artificial Sequence: Synthetic oligonucleotide
uuuacacacacacacucac

SEQ ID NO: 578117 - RNA, 19 nt, Artificial Sequence
  Description of Artificial Sequence: Synthetic oligonucleotide
ucaagcgccguucaaacca

SEQ ID NO: 578118 - RNA, 19 nt, Artificial Sequence
  Description of Artificial Sequence: Synthetic oligonucleotide
aauccggcuguccaugacg

SEQ ID NO: 578119 - RNA, 19 nt, Artificial Sequence
  Description of Artificial Sequence: Synthetic oligonucleotide
uaccauaugauugggauca

SEQ ID NO: 578120 - RNA, 19 nt, Artificial Sequence
  Description of Artificial Sequence: Synthetic oligonucleotide
cauggaguguaccugagcc

SEQ ID NO: 578121 - RNA, 19 nt, Artificial Sequence
  Description of Artificial Sequence: Synthetic oligonucleotide
ucuaccauaugauugggau

SEQ ID NO: 578122 - RNA, 19 nt, Artificial Sequence
  Description of Artificial Sequence: Synthetic oligonucleotide
cucauaacgagcucgcacc

SEQ ID NO: 578123 - RNA, 19 nt, Artificial Sequence
  Description of Artificial Sequence: Synthetic oligonucleotide
acucuuccgagcuucgugc

SEQ ID NO: 578124 - RNA, 19 nt, Artificial Sequence
  Description of Artificial Sequence: Synthetic oligonucleotide
aaugucaaucucccaaacu

SEQ ID NO: 578125 - RNA, 19 nt, Artificial Sequence
  Description of Artificial Sequence: Synthetic oligonucleotide
cauugcuagaacacuaagc

SEQ ID NO: 578126 - RNA, 19 nt, Artificial Sequence
  Description of Artificial Sequence: Synthetic oligonucleotide
uagaacuuccauauccuug

SEQ ID NO: 578127 - RNA, 19 nt, Artificial Sequence
  Description of Artificial Sequence: Synthetic oligonucleotide
ugggauagaacuuccauau

SEQ ID NO: 578128 - RNA, 19 nt, Artificial Sequence
  Description of Artificial Sequence: Synthetic oligonucleotide
uacacacacacacucacac

SEQ ID NO: 578129 - RNA, 19 nt, Artificial Sequence
  Description of Artificial Sequence: Synthetic oligonucleotide
agacacaucaauccggcug

SEQ ID NO: 578130 - RNA, 19 nt, Artificial Sequence
  Description of Artificial Sequence: Synthetic oligonucleotide
gauccuuccuccccaaggg

SEQ ID NO: 578131 - RNA, 19 nt, Artificial Sequence
  Description of Artificial Sequence: Synthetic oligonucleotide
aaucggacagcucccagcu

SEQ ID NO: 578132 - RNA, 19 nt, Artificial Sequence
  Description of Artificial Sequence: Synthetic oligonucleotide
aauggggugaaaguaggug

SEQ ID NO: 578133 - RNA, 19 nt, Artificial Sequence
  Description of Artificial Sequence: Synthetic oligonucleotide
agaggcgcugcucaccucc

SEQ ID NO: 578134 - RNA, 19 nt, Artificial Sequence
  Description of Artificial Sequence: Synthetic oligonucleotide
uuauuggcccuuaaugacu

SEQ ID NO: 578135 - RNA, 19 nt, Artificial Sequence
  Description of Artificial Sequence: Synthetic oligonucleotide
aaagaccuggcugguaugg

SEQ ID NO: 578136 - RNA, 19 nt, Artificial Sequence
  Description of Artificial Sequence: Synthetic oligonucleotide
uggugaguucaucucagag

SEQ ID NO: 578137 - RNA, 19 nt, Artificial Sequence
  Description of Artificial Sequence: Synthetic oligonucleotide
caugacguaggucucaaug

SEQ ID NO: 578138 - RNA, 19 nt, Artificial Sequence
  Description of Artificial Sequence: Synthetic oligonucleotide
guuauuggcccuuaaugac

SEQ ID NO: 578139 - RNA, 19 nt, Artificial Sequence
  Description of Artificial Sequence: Synthetic oligonucleotide
aucccaaaugcagaguagc

SEQ ID NO: 578140 - RNA, 19 nt, Artificial Sequence
  Description of Artificial Sequence: Synthetic oligonucleotide
ucuuaguugucuucuccag

SEQ ID NO: 578141 - RNA, 19 nt, Artificial Sequence
  Description of Artificial Sequence: Synthetic oligonucleotide
uuagauuuggugccagccu

SEQ ID NO: 578142 - RNA, 19 nt, Artificial Sequence
  Description of Artificial Sequence: Synthetic oligonucleotide
uuaaugucaaucucccaaa

SEQ ID NO: 578143 - RNA, 19 nt, Artificial Sequence
  Description of Artificial Sequence: Synthetic oligonucleotide
ugcuagauaaagaccuggc

SEQ ID NO: 578144 - RNA, 19 nt, Artificial Sequence
  Description of Artificial Sequence: Synthetic oligonucleotide
augucaaucucccaaacua

SEQ ID NO: 578145 - RNA, 19 nt, Artificial Sequence
  Description of Artificial Sequence: Synthetic oligonucleotide
uguucgagccuucuccucc

SEQ ID NO: 578146 - RNA, 19 nt, Artificial Sequence
  Description of Artificial Sequence: Synthetic oligonucleotide
cacacacacacucacacac

SEQ ID NO: 578147 - RNA, 19 nt, Artificial Sequence
  Description of Artificial Sequence: Synthetic oligonucleotide
ugacaauucaguggucugg

SEQ ID NO: 578148 - RNA, 19 nt, Artificial Sequence
  Description of Artificial Sequence: Synthetic oligonucleotide
aacaccagcaacagauagg

SEQ ID NO: 578149 - RNA, 19 nt, Artificial Sequence
  Description of Artificial Sequence: Synthetic oligonucleotide
ucuuuuccaggauacgcug

SEQ ID NO: 578150 - RNA, 19 nt, Artificial Sequence
  Description of Artificial Sequence: Synthetic oligonucleotide
uguaacucagcugacaauu

SEQ ID NO: 578151 - RNA, 19 nt, Artificial Sequence
  Description of Artificial Sequence: Synthetic oligonucleotide
ucuggguccggcuugguga

SEQ ID NO: 578152 - RNA, 19 nt, Artificial Sequence
  Description of Artificial Sequence: Synthetic oligonucleotide
ucucaugccguaaucggac

SEQ ID NO: 578153 - RNA, 19 nt, Artificial Sequence
  Description of Artificial Sequence: Synthetic oligonucleotide
ucuggaauggggugaaagu

SEQ ID NO: 578154 - RNA, 19 nt, Artificial Sequence
  Description of Artificial Sequence: Synthetic oligonucleotide
agagucuccauuucccuug

SEQ ID NO: 578155 - RNA, 19 nt, Artificial Sequence
  Description of Artificial Sequence: Synthetic oligonucleotide
caacagauaggcuucuaac

SEQ ID NO: 578156 - RNA, 19 nt, Artificial Sequence
  Description of Artificial Sequence: Synthetic oligonucleotide
gcucaugcagaguugaagg

SEQ ID NO: 578157 - RNA, 19 nt, Artificial Sequence
  Description of Artificial Sequence: Synthetic oligonucleotide
uccucugccauagaggcgc

SEQ ID NO: 578158 - RNA, 19 nt, Artificial Sequence
  Description of Artificial Sequence: Synthetic oligonucleotide
ucccaaacuauuagauuug

SEQ ID NO: 578159 - RNA, 19 nt, Artificial Sequence
  Description of Artificial Sequence: Synthetic oligonucleotide
uguagggcccgcaaugcug

SEQ ID NO: 578160 - RNA, 19 nt, Artificial Sequence
  Description of Artificial Sequence: Synthetic oligonucleotide
ucaaucucccaaacuauua

SEQ ID NO: 578161 - RNA, 19 nt, Artificial Sequence
  Description of Artificial Sequence: Synthetic oligonucleotide
acacuaagcaauggacugc

SEQ ID NO: 578162 - RNA, 19 nt, Artificial Sequence
  Description of Artificial Sequence: Synthetic oligonucleotide
gauugggaucaucaacacc

SEQ ID NO: 578163 - RNA, 19 nt, Artificial Sequence
  Description of Artificial Sequence: Synthetic oligonucleotide
aacucagcugacaauucag

SEQ ID NO: 578164 - RNA, 19 nt, Artificial Sequence
  Description of Artificial Sequence: Synthetic oligonucleotide
cuccauugcuagcucaucg

SEQ ID NO: 578165 - RNA, 19 nt, Artificial Sequence
  Description of Artificial Sequence: Synthetic oligonucleotide
uaaucggacagcucccagc

SEQ ID NO: 578166 - RNA, 19 nt, Artificial Sequence
  Description of Artificial Sequence: Synthetic oligonucleotide
ucauaacgagcucgcaccc

SEQ ID NO: 578167 - RNA, 19 nt, Artificial Sequence
  Description of Artificial Sequence: Synthetic oligonucleotide
uucucaugccguaaucgga

SEQ ID NO: 578168 - RNA, 19 nt, Artificial Sequence
  Description of Artificial Sequence: Synthetic oligonucleotide
uaaugucaaucucccaaac

SEQ ID NO: 578169 - RNA, 19 nt, Artificial Sequence
  Description of Artificial Sequence: Synthetic oligonucleotide
ucccaaaugcagaguagcc

SEQ ID NO: 578170 - RNA, 19 nt, Artificial Sequence
  Description of Artificial Sequence: Synthetic oligonucleotide
ugugcaagugcauauucuu

SEQ ID NO: 578171 - RNA, 19 nt, Artificial Sequence
  Description of Artificial Sequence: Synthetic oligonucleotide
cagauaggcuucuaacccc

SEQ ID NO: 578172 - RNA, 19 nt, Artificial Sequence
  Description of Artificial Sequence: Synthetic oligonucleotide
ugucaaucucccaaacuau

SEQ ID NO: 578173 - RNA, 19 nt, Artificial Sequence
  Description of Artificial Sequence: Synthetic oligonucleotide
aagcauguucaguucuugu

SEQ ID NO: 578174 - RNA, 19 nt, Artificial Sequence
  Description of Artificial Sequence: Synthetic oligonucleotide
ucaugccguaaucggacag

SEQ ID NO: 578175 - RNA, 19 nt, Artificial Sequence
  Description of Artificial Sequence: Synthetic oligonucleotide
ugagccguacaauuuccug

SEQ ID NO: 578176 - RNA, 19 nt, Artificial Sequence
  Description of Artificial Sequence: Synthetic oligonucleotide
gguuauuggcccuuaauga

SEQ ID NO: 578177 - RNA, 19 nt, Artificial Sequence
  Description of Artificial Sequence: Synthetic oligonucleotide
guacaauuuccugggauag

SEQ ID NO: 578178 - RNA, 19 nt, Artificial Sequence
  Description of Artificial Sequence: Synthetic oligonucleotide
gaucucuuagcucugccaa

SEQ ID NO: 578179 - RNA, 19 nt, Artificial Sequence
  Description of Artificial Sequence: Synthetic oligonucleotide
aggcagaugccccugggag

SEQ ID NO: 578180 - RNA, 19 nt, Artificial Sequence
  Description of Artificial Sequence: Synthetic oligonucleotide
uauuugggcugcauagccu

SEQ ID NO: 578181 - RNA, 19 nt, Artificial Sequence
  Description of Artificial Sequence: Synthetic oligonucleotide
ucaggauccuuccucccca

SEQ ID NO: 578182 - RNA, 19 nt, Artificial Sequence
  Description of Artificial Sequence: Synthetic oligonucleotide
aaggucuuugagcgcagca

SEQ ID NO: 578183 - RNA, 19 nt, Artificial Sequence
  Description of Artificial Sequence: Synthetic oligonucleotide
uuugucagugggugggccc

SEQ ID NO: 578184 - RNA, 19 nt, Artificial Sequence
  Description of Artificial Sequence: Synthetic oligonucleotide
ccuuuaaugucaaucuccc

SEQ ID NO: 578185 - RNA, 19 nt, Artificial Sequence
  Description of Artificial Sequence: Synthetic oligonucleotide
uuacacacacacacucaca

SEQ ID NO: 578186 - RNA, 19 nt, Artificial Sequence
  Description of Artificial Sequence: Synthetic oligonucleotide
agaguugaaggcagaugcc

SEQ ID NO: 578187 - RNA, 19 nt, Artificial Sequence
  Description of Artificial Sequence: Synthetic oligonucleotide
auaacgagcucgcacccca

SEQ ID NO: 578188 - RNA, 19 nt, Artificial Sequence
  Description of Artificial Sequence: Synthetic oligonucleotide
gacugcuagauaaagaccu

SEQ ID NO: 578189 - RNA, 19 nt, Artificial Sequence
  Description of Artificial Sequence: Synthetic oligonucleotide
uguauggaucugaucuugu

SEQ ID NO: 578190 - RNA, 19 nt, Artificial Sequence
  Description of Artificial Sequence: Synthetic oligonucleotide
ugacguaggucucaaugau

SEQ ID NO: 578191 - RNA, 19 nt, Artificial Sequence
  Description of Artificial Sequence: Synthetic oligonucleotide
auauccuugugcaagugca

SEQ ID NO: 578192 - RNA, 19 nt, Artificial Sequence
  Description of Artificial Sequence: Synthetic oligonucleotide
gccguaaucggacagcucc

SEQ ID NO: 578193 - RNA, 19 nt, Artificial Sequence
  Description of Artificial Sequence: Synthetic oligonucleotide
uccauugcuagcucaucga

SEQ ID NO: 578194 - RNA, 19 nt, Artificial Sequence
  Description of Artificial Sequence: Synthetic oligonucleotide
aguugcuccuccaacaugu

SEQ ID NO: 578195 - RNA, 19 nt, Artificial Sequence
  Description of Artificial Sequence: Synthetic oligonucleotide
ucccgguagcugaaggagg

SEQ ID NO: 578196 - RNA, 19 nt, Artificial Sequence
  Description of Artificial Sequence: Synthetic oligonucleotide
gauggucuucacaugacca

SEQ ID NO: 578197 - RNA, 19 nt, Artificial Sequence
  Description of Artificial Sequence: Synthetic oligonucleotide
cauccccaaucccaaaugc

SEQ ID NO: 578198 - RNA, 19 nt, Artificial Sequence
  Description of Artificial Sequence: Synthetic oligonucleotide
ggcugcauagccuuuacac

SEQ ID NO: 578199 - RNA, 19 nt, Artificial Sequence
  Description of Artificial Sequence: Synthetic oligonucleotide
uguaccugagccugaaguu

SEQ ID NO: 578200 - RNA, 19 nt, Artificial Sequence
  Description of Artificial Sequence: Synthetic oligonucleotide
ucaaaccagcccuuggcuc

SEQ ID NO: 578201 - RNA, 19 nt, Artificial Sequence
  Description of Artificial Sequence: Synthetic oligonucleotide
ugcugagccguacaauuuc

SEQ ID NO: 578202 - RNA, 19 nt, Artificial Sequence
  Description of Artificial Sequence: Synthetic oligonucleotide
ugcuagcucaucgagcaug

SEQ ID NO: 578203 - RNA, 19 nt, Artificial Sequence
  Description of Artificial Sequence: Synthetic oligonucleotide
cccuuuaaugucaaucucc

SEQ ID NO: 578204 - RNA, 19 nt, Artificial Sequence
  Description of Artificial Sequence: Synthetic oligonucleotide
ugugccuuugcuguaugga

SEQ ID NO: 578205 - RNA, 19 nt, Artificial Sequence
  Description of Artificial Sequence: Synthetic oligonucleotide
cuuaaggucuuugagcgca

SEQ ID NO: 578206 - RNA, 19 nt, Artificial Sequence
  Description of Artificial Sequence: Synthetic oligonucleotide
auaugauugggaucaucaa

SEQ ID NO: 578207 - RNA, 19 nt, Artificial Sequence
  Description of Artificial Sequence: Synthetic oligonucleotide
uuaaggucuuugagcgcag

SEQ ID NO: 578208 - RNA, 19 nt, Artificial Sequence
  Description of Artificial Sequence: Synthetic oligonucleotide
caggauacgcugcccaucc

SEQ ID NO: 578209 - RNA, 19 nt, Artificial Sequence
  Description of Artificial Sequence: Synthetic oligonucleotide
cgcuuaaggucuuugagcg

SEQ ID NO: 578210 - RNA, 19 nt, Artificial Sequence
  Description of Artificial Sequence: Synthetic oligonucleotide
agacgcuacuacugucccc

SEQ ID NO: 578211 - RNA, 19 nt, Artificial Sequence
  Description of Artificial Sequence: Synthetic oligonucleotide
uaggucuuaguugucuucu

SEQ ID NO: 578212 - RNA, 19 nt, Artificial Sequence
  Description of Artificial Sequence: Synthetic oligonucleotide
cugcuagauaaagaccugg

SEQ ID NO: 578213 - RNA, 19 nt, Artificial Sequence
  Description of Artificial Sequence: Synthetic oligonucleotide
gagacgcuacuacuguccc

SEQ ID NO: 578214 - RNA, 19 nt, Artificial Sequence
  Description of Artificial Sequence: Synthetic oligonucleotide
auagaggcgcugcucaccu

SEQ ID NO: 578215 - RNA, 19 nt, Artificial Sequence
  Description of Artificial Sequence: Synthetic oligonucleotide
ugcugaagagucuccauuu

SEQ ID NO: 578216 - RNA, 19 nt, Artificial Sequence
  Description of Artificial Sequence: Synthetic oligonucleotide
ugccgaugcuguaacucag

SEQ ID NO: 578217 - RNA, 19 nt, Artificial Sequence
  Description of Artificial Sequence: Synthetic oligonucleotide
cuaccauaugauugggauc

SEQ ID NO: 578218 - RNA, 19 nt, Artificial Sequence
  Description of Artificial Sequence: Synthetic oligonucleotide
aacgagcucgcaccccaag

SEQ ID NO: 578219 - RNA, 19 nt, Artificial Sequence
  Description of Artificial Sequence: Synthetic oligonucleotide
cuuugagcgcagcacugcc

SEQ ID NO: 578220 - RNA, 19 nt, Artificial Sequence
  Description of Artificial Sequence: Synthetic oligonucleotide
uaaagaccuggcugguaug

SEQ ID NO: 578221 - RNA, 19 nt, Artificial Sequence
  Description of Artificial Sequence: Synthetic oligonucleotide
uucaagcgccguucaaacc

SEQ ID NO: 578222 - RNA, 19 nt, Artificial Sequence
  Description of Artificial Sequence: Synthetic oligonucleotide
acaauucaguggucugguc

SEQ ID NO: 578223 - RNA, 19 nt, Artificial Sequence
  Description of Artificial Sequence: Synthetic oligonucleotide
agcucaucgagcauggccu

SEQ ID NO: 578224 - RNA, 19 nt, Artificial Sequence
  Description of Artificial Sequence: Synthetic oligonucleotide
agguucuaggucuggguca

SEQ ID NO: 578225 - RNA, 19 nt, Artificial Sequence
  Description of Artificial Sequence: Synthetic oligonucleotide
ucgagcauggccuuccguu

SEQ ID NO: 578226 - RNA, 19 nt, Artificial Sequence
  Description of Artificial Sequence: Synthetic oligonucleotide
uccccaaggggccucuacc

SEQ ID NO: 578227 - RNA, 19 nt, Artificial Sequence
  Description of Artificial Sequence: Synthetic oligonucleotide
ugaggucaucuuucagucc

SEQ ID NO: 578228 - RNA, 19 nt, Artificial Sequence
  Description of Artificial Sequence: Synthetic oligonucleotide
aucucccgguagcugaagg

SEQ ID NO: 578229 - RNA, 19 nt, Artificial Sequence
  Description of Artificial Sequence: Synthetic oligonucleotide
aggagacgcuacuacuguc

SEQ ID NO: 578230 - RNA, 19 nt, Artificial Sequence
  Description of Artificial Sequence: Synthetic oligonucleotide
gagccgagggccaagaaga

SEQ ID NO: 578231 - RNA, 19 nt, Artificial Sequence
  Description of Artificial Sequence: Synthetic oligonucleotide
ggcccguuuggccacaugg

SEQ ID NO: 578232 - RNA, 19 nt, Artificial Sequence
  Description of Artificial Sequence: Synthetic oligonucleotide
gucuuaguugucuucucca

SEQ ID NO: 578233 - RNA, 19 nt, Artificial Sequence
  Description of Artificial Sequence: Synthetic oligonucleotide
gaagcauguucaguucuug

SEQ ID NO: 578234 - RNA, 19 nt, Artificial Sequence
  Description of Artificial Sequence: Synthetic oligonucleotide
uguucauuucccgaagguu

SEQ ID NO: 578235 - RNA, 19 nt, Artificial Sequence
  Description of Artificial Sequence: Synthetic oligonucleotide
aucugaucuuguagggccc

SEQ ID NO: 578236 - RNA, 19 nt, Artificial Sequence
  Description of Artificial Sequence: Synthetic oligonucleotide
cuuuacacacacacacuca

SEQ ID NO: 578237 - RNA, 19 nt, Artificial Sequence
  Description of Artificial Sequence: Synthetic oligonucleotide
uuccugggauagaacuucc

SEQ ID NO: 578238 - RNA, 19 nt, Artificial Sequence
  Description of Artificial Sequence: Synthetic oligonucleotide
aggaggagacgcuacuacu

SEQ ID NO: 578239 - RNA, 19 nt, Artificial Sequence
  Description of Artificial Sequence: Synthetic oligonucleotide
ugccgcugaucucuuagcu

SEQ ID NO: 578240 - RNA, 19 nt, Artificial Sequence
  Description of Artificial Sequence: Synthetic oligonucleotide
caggggaccccacacauuc

SEQ ID NO: 578241 - RNA, 19 nt, Artificial Sequence
  Description of Artificial Sequence: Synthetic oligonucleotide
gacacaucaauccggcugu

SEQ ID NO: 578242 - RNA, 19 nt, Artificial Sequence
  Description of Artificial Sequence: Synthetic oligonucleotide
uauucagccugccgaugcu

SEQ ID NO: 578243 - RNA, 19 nt, Artificial Sequence
  Description of Artificial Sequence: Synthetic oligonucleotide
gaaagcucaugcagaguug

SEQ ID NO: 578244 - RNA, 19 nt, Artificial Sequence
  Description of Artificial Sequence: Synthetic oligonucleotide
aggucuuaguugucuucuc

SEQ ID NO: 578245 - RNA, 19 nt, Artificial Sequence
  Description of Artificial Sequence: Synthetic oligonucleotide
augcagaguagccaggcuu

SEQ ID NO: 578246 - RNA, 19 nt, Artificial Sequence
  Description of Artificial Sequence: Synthetic oligonucleotide
acuauuagauuuggugcca

SEQ ID NO: 578247 - RNA, 19 nt, Artificial Sequence
  Description of Artificial Sequence: Synthetic oligonucleotide
ucaucgagcauggccuucc

SEQ ID NO: 578248 - RNA, 19 nt, Artificial Sequence
  Description of Artificial Sequence: Synthetic oligonucleotide
ucucccgguagcugaagga

SEQ ID NO: 578249 - RNA, 19 nt, Artificial Sequence
  Description of Artificial Sequence: Synthetic oligonucleotide
auggucuucacaugaccau

SEQ ID NO: 578250 - RNA, 19 nt, Artificial Sequence
  Description of Artificial Sequence: Synthetic oligonucleotide
aggggccucuaccauauga

SEQ ID NO: 578251 - RNA, 19 nt, Artificial Sequence
  Description of Artificial Sequence: Synthetic oligonucleotide
agcucacgcucauaacgag

SEQ ID NO: 578252 - RNA, 19 nt, Artificial Sequence
  Description of Artificial Sequence: Synthetic oligonucleotide
augaaaagaguuggucucu

SEQ ID NO: 578253 - RNA, 19 nt, Artificial Sequence
  Description of Artificial Sequence: Synthetic oligonucleotide
cucccaaacuauuagauuu

SEQ ID NO: 578254 - RNA, 19 nt, Artificial Sequence
  Description of Artificial Sequence: Synthetic oligonucleotide
cuauuagauuuggugccag

SEQ ID NO: 578255 - RNA, 19 nt, Artificial Sequence
  Description of Artificial Sequence: Synthetic oligonucleotide
cccuuaaugacuccuggag

SEQ ID NO: 578256 - RNA, 19 nt, Artificial Sequence
  Description of Artificial Sequence: Synthetic oligonucleotide
auuccuugcugagccguac

SEQ ID NO: 578257 - RNA, 19 nt, Artificial Sequence
  Description of Artificial Sequence: Synthetic oligonucleotide
ccuuuacacacacacacuc

SEQ ID NO: 578258 - RNA, 19 nt, Artificial Sequence
  Description of Artificial Sequence: Synthetic oligonucleotide
agcgccguucaaaccagcc

SEQ ID NO: 578259 - RNA, 19 nt, Artificial Sequence
  Description of Artificial Sequence: Synthetic oligonucleotide
guaaucggacagcucccag

SEQ ID NO: 578260 - RNA, 19 nt, Artificial Sequence
  Description of Artificial Sequence: Synthetic oligonucleotide
uauccuugugcaagugcau

SEQ ID NO: 578261 - RNA, 19 nt, Artificial Sequence
  Description of Artificial Sequence: Synthetic oligonucleotide
uugucagcgcgcuuccgcu

SEQ ID NO: 578262 - RNA, 19 nt, Artificial Sequence
  Description of Artificial Sequence: Synthetic oligonucleotide
uggcccuuaaugacuccug

SEQ ID NO: 578263 - RNA, 19 nt, Artificial Sequence
  Description of Artificial Sequence: Synthetic oligonucleotide
cagcucgcgaagcucacgc

SEQ ID NO: 578264 - RNA, 19 nt, Artificial Sequence
  Description of Artificial Sequence: Synthetic oligonucleotide
ugcaaggauuccucagccu

SEQ ID NO: 578265 - RNA, 19 nt, Artificial Sequence
  Description of Artificial Sequence: Synthetic oligonucleotide
uucaacucagcagcaugcu

SEQ ID NO: 578266 - RNA, 19 nt, Artificial Sequence
  Description of Artificial Sequence: Synthetic oligonucleotide
aucucccaaacuauuagau

SEQ ID NO: 578267 - RNA, 19 nt, Artificial Sequence
  Description of Artificial Sequence: Synthetic oligonucleotide
cacucuuccgagcuucgug

SEQ ID NO: 578268 - RNA, 19 nt, Artificial Sequence
  Description of Artificial Sequence: Synthetic oligonucleotide
acacacacacacucacaca

SEQ ID NO: 578269 - RNA, 19 nt, Artificial Sequence
  Description of Artificial Sequence: Synthetic oligonucleotide
uacgcugcccauccacugu

SEQ ID NO: 578270 - RNA, 19 nt, Artificial Sequence
  Description of Artificial Sequence: Synthetic oligonucleotide
acgcucauaacgagcucgc

SEQ ID NO: 578271 - RNA, 19 nt, Artificial Sequence
  Description of Artificial Sequence: Synthetic oligonucleotide
ucaauccggcuguccauga

SEQ ID NO: 578272 - RNA, 19 nt, Artificial Sequence
  Description of Artificial Sequence: Synthetic oligonucleotide
auacauugcuagaacacua

SEQ ID NO: 578273 - RNA, 19 nt, Artificial Sequence
  Description of Artificial Sequence: Synthetic oligonucleotide
ucggccagucucugaaaca

SEQ ID NO: 578274 - RNA, 19 nt, Artificial Sequence
  Description of Artificial Sequence: Synthetic oligonucleotide
uguucaguucuugugccuu

SEQ ID NO: 578275 - RNA, 19 nt, Artificial Sequence
  Description of Artificial Sequence: Synthetic oligonucleotide
cugugucucggccagucuc

SEQ ID NO: 578276 - RNA, 19 nt, Artificial Sequence
  Description of Artificial Sequence: Synthetic oligonucleotide
uuggugaguucaucucaga

SEQ ID NO: 578277 - RNA, 19 nt, Artificial Sequence
  Description of Artificial Sequence: Synthetic oligonucleotide
cauagaggcgcugcucacc

SEQ ID NO: 578278 - RNA, 19 nt, Artificial Sequence
  Description of Artificial Sequence: Synthetic oligonucleotide
caagcgccguucaaaccag

SEQ ID NO: 578279 - RNA, 19 nt, Artificial Sequence
  Description of Artificial Sequence: Synthetic oligonucleotide
uuggcccuuaaugacuccu

SEQ ID NO: 578280 - RNA, 19 nt, Artificial Sequence
  Description of Artificial Sequence: Synthetic oligonucleotide
guaggugcagcuuguaggu

SEQ ID NO: 578281 - RNA, 19 nt, Artificial Sequence
  Description of Artificial Sequence: Synthetic oligonucleotide
cucccgguagcugaaggag

SEQ ID NO: 578282 - RNA, 19 nt, Artificial Sequence
  Description of Artificial Sequence: Synthetic oligonucleotide
uugcugagccguacaauuu

SEQ ID NO: 578283 - RNA, 19 nt, Artificial Sequence
  Description of Artificial Sequence: Synthetic oligonucleotide
gaggacugcuagauaaaga

SEQ ID NO: 578284 - RNA, 19 nt, Artificial Sequence
  Description of Artificial Sequence: Synthetic oligonucleotide
ggcccuuaaugacuccugg

SEQ ID NO: 578285 - RNA, 19 nt, Artificial Sequence
  Description of Artificial Sequence: Synthetic oligonucleotide
ggagacgcuacuacugucc

SEQ ID NO: 578286 - RNA, 19 nt, Artificial Sequence
  Description of Artificial Sequence: Synthetic oligonucleotide
uucagucccauaagaucuu

SEQ ID NO: 578287 - RNA, 19 nt, Artificial Sequence
  Description of Artificial Sequence: Synthetic oligonucleotide
acauuccuugcugagccgu

SEQ ID NO: 578288 - RNA, 19 nt, Artificial Sequence
  Description of Artificial Sequence: Synthetic oligonucleotide
ccuucucaugccguaaucg

SEQ ID NO: 578289 - RNA, 19 nt, Artificial Sequence
  Description of Artificial Sequence: Synthetic oligonucleotide
cagcccaaguggcaguggc

SEQ ID NO: 578290 - RNA, 19 nt, Artificial Sequence
  Description of Artificial Sequence: Synthetic oligonucleotide
gcuagaacacuaagcaaug

SEQ ID NO: 578291 - RNA, 19 nt, Artificial Sequence
  Description of Artificial Sequence: Synthetic oligonucleotide
uccauccauggaguguacc

SEQ ID NO: 578292 - RNA, 19 nt, Artificial Sequence
  Description of Artificial Sequence: Synthetic oligonucleotide
cucacgcucauaacgagcu

SEQ ID NO: 578293 - RNA, 19 nt, Artificial Sequence
  Description of Artificial Sequence: Synthetic oligonucleotide
caucgccuggcuucacuag

SEQ ID NO: 578294 - RNA, 19 nt, Artificial Sequence
  Description of Artificial Sequence: Synthetic oligonucleotide
gguauuugggcugcauagc

SEQ ID NO: 578295 - RNA, 19 nt, Artificial Sequence
  Description of Artificial Sequence: Synthetic oligonucleotide
gacgcuacuacuguccccu

SEQ ID NO: 578296 - RNA, 19 nt, Artificial Sequence
  Description of Artificial Sequence: Synthetic oligonucleotide
cagcagccgguuauuggcc

SEQ ID NO: 578297 - RNA, 19 nt, Artificial Sequence
  Description of Artificial Sequence: Synthetic oligonucleotide
aucuuguagggcccgcaau

SEQ ID NO: 578298 - RNA, 19 nt, Artificial Sequence
  Description of Artificial Sequence: Synthetic oligonucleotide
cauaacgagcucgcacccc

SEQ ID NO: 578299 - RNA, 19 nt, Artificial Sequence
  Description of Artificial Sequence: Synthetic oligonucleotide
acugcuagauaaagaccug

SEQ ID NO: 578300 - RNA, 19 nt, Artificial Sequence
  Description of Artificial Sequence: Synthetic oligonucleotide
ugaucccgcacauccugaa

SEQ ID NO: 578301 - RNA, 19 nt, Artificial Sequence
  Description of Artificial Sequence: Synthetic oligonucleotide
gucagcgcgcuuccgcucc

SEQ ID NO: 578302 - RNA, 19 nt, Artificial Sequence
  Description of Artificial Sequence: Synthetic oligonucleotide
uaaggucuuugagcgcagc

SEQ ID NO: 578303 - RNA, 19 nt, Artificial Sequence
  Description of Artificial Sequence: Synthetic oligonucleotide
ggauacgcugcccauccac

SEQ ID NO: 578304 - RNA, 19 nt, Artificial Sequence
  Description of Artificial Sequence: Synthetic oligonucleotide
gcuguaacucagcugacaa

SEQ ID NO: 578305 - RNA, 19 nt, Artificial Sequence
  Description of Artificial Sequence: Synthetic oligonucleotide
cagcugacaauucaguggu

SEQ ID NO: 578306 - RNA, 19 nt, Artificial Sequence
  Description of Artificial Sequence: Synthetic oligonucleotide
uccguuucucagcacucuu

SEQ ID NO: 578307 - RNA, 19 nt, Artificial Sequence
  Description of Artificial Sequence: Synthetic oligonucleotide
ggaaagcucaugcagaguu

SEQ ID NO: 578308 - RNA, 19 nt, Artificial Sequence
  Description of Artificial Sequence: Synthetic oligonucleotide
aagcgccguucaaaccagc

SEQ ID NO: 578309 - RNA, 19 nt, Artificial Sequence
  Description of Artificial Sequence: Synthetic oligonucleotide
ugggcugcauagccuuuac

SEQ ID NO: 578310 - RNA, 19 nt, Artificial Sequence
  Description of Artificial Sequence: Synthetic oligonucleotide
cgguuauuggcccuuaaug

SEQ ID NO: 578311 - RNA, 19 nt, Artificial Sequence
  Description of Artificial Sequence: Synthetic oligonucleotide
cugccgcugaucucuuagc

SEQ ID NO: 578312 - RNA, 19 nt, Artificial Sequence
  Description of Artificial Sequence: Synthetic oligonucleotide
cauacauugcuagaacacu

SEQ ID NO: 578313 - RNA, 19 nt, Artificial Sequence
  Description of Artificial Sequence: Synthetic oligonucleotide
cacuaagcaauggacugca

SEQ ID NO: 578314 - RNA, 19 nt, Artificial Sequence
  Description of Artificial Sequence: Synthetic oligonucleotide
gcugguauggcugagcucu

SEQ ID NO: 578315 - RNA, 19 nt, Artificial Sequence
  Description of Artificial Sequence: Synthetic oligonucleotide
guauggaucugaucuugua

SEQ ID NO: 578316 - RNA, 19 nt, Artificial Sequence
  Description of Artificial Sequence: Synthetic oligonucleotide
acuaagcaauggacugcac

SEQ ID NO: 578317 - RNA, 19 nt, Artificial Sequence
  Description of Artificial Sequence: Synthetic oligonucleotide
ggauuccucagccuccuuc

SEQ ID NO: 578318 - RNA, 19 nt, Artificial Sequence
  Description of Artificial Sequence: Synthetic oligonucleotide
guagccaggcuuccagaca

SEQ ID NO: 578319 - RNA, 19 nt, Artificial Sequence
  Description of Artificial Sequence: Synthetic oligonucleotide
gaggagacgcuacuacugu

SEQ ID NO: 578320 - RNA, 19 nt, Artificial Sequence
  Description of Artificial Sequence: Synthetic oligonucleotide
cucgcgaagcucacgcuca

SEQ ID NO: 578321 - RNA, 19 nt, Artificial Sequence
  Description of Artificial Sequence: Synthetic oligonucleotide
cuugcugagccguacaauu

SEQ ID NO: 578322 - RNA, 19 nt, Artificial Sequence
  Description of Artificial Sequence: Synthetic oligonucleotide
ccuucaacucagcagcaug

SEQ ID NO: 578323 - RNA, 19 nt, Artificial Sequence
  Description of Artificial Sequence: Synthetic oligonucleotide
cuccauuucccuuguucga

SEQ ID NO: 578324 - RNA, 19 nt, Artificial Sequence
  Description of Artificial Sequence: Synthetic oligonucleotide
cucaugcagcucgcgaagc

SEQ ID NO: 578325 - RNA, 19 nt, Artificial Sequence
  Description of Artificial Sequence: Synthetic oligonucleotide
cucuaccauaugauuggga

SEQ ID NO: 578326 - RNA, 19 nt, Artificial Sequence
  Description of Artificial Sequence: Synthetic oligonucleotide
ccauugcuagcucaucgag

SEQ ID NO: 578327 - RNA, 19 nt, Artificial Sequence
  Description of Artificial Sequence: Synthetic oligonucleotide
gcuacuacuguccccuguc

SEQ ID NO: 578328 - RNA, 19 nt, Artificial Sequence
  Description of Artificial Sequence: Synthetic oligonucleotide
ucaaggccugagcggcucu

SEQ ID NO: 578329 - RNA, 19 nt, Artificial Sequence
  Description of Artificial Sequence: Synthetic oligonucleotide
caccccaagcaucuccuuc

SEQ ID NO: 578330 - RNA, 19 nt, Artificial Sequence
  Description of Artificial Sequence: Synthetic oligonucleotide
cuccacauuuucccaccac

SEQ ID NO: 578331 - RNA, 19 nt, Artificial Sequence
  Description of Artificial Sequence: Synthetic oligonucleotide
ucagucccauaagaucuuc

SEQ ID NO: 578332 - RNA, 19 nt, Artificial Sequence
  Description of Artificial Sequence: Synthetic oligonucleotide
aaaccagcccuuggcucca

SEQ ID NO: 578333 - RNA, 19 nt, Artificial Sequence
  Description of Artificial Sequence: Synthetic oligonucleotide
uguuuccagcagccgguua

SEQ ID NO: 578334 - RNA, 19 nt, Artificial Sequence
  Description of Artificial Sequence: Synthetic oligonucleotide
gaaaguaggugcagcuugu

SEQ ID NO: 578335 - RNA, 19 nt, Artificial Sequence
  Description of Artificial Sequence: Synthetic oligonucleotide
gcugccacguucuucugca

SEQ ID NO: 578336 - RNA, 19 nt, Artificial Sequence
  Description of Artificial Sequence: Synthetic oligonucleotide
caucgagcauggccuuccg

SEQ ID NO: 578337 - RNA, 19 nt, Artificial Sequence
  Description of Artificial Sequence: Synthetic oligonucleotide
ucacgcucauaacgagcuc

SEQ ID NO: 578338 - RNA, 19 nt, Artificial Sequence
  Description of Artificial Sequence: Synthetic oligonucleotide
ugcagcucgcgaagcucac

SEQ ID NO: 578339 - RNA, 19 nt, Artificial Sequence
  Description of Artificial Sequence: Synthetic oligonucleotide
aucgagcauggccuuccgu

SEQ ID NO: 578340 - RNA, 19 nt, Artificial Sequence
  Description of Artificial Sequence: Synthetic oligonucleotide
accccacacauuccuugcu

SEQ ID NO: 578341 - RNA, 19 nt, Artificial Sequence
  Description of Artificial Sequence: Synthetic oligonucleotide
guucggucuguguggccug

SEQ ID NO: 578342 - RNA, 19 nt, Artificial Sequence
  Description of Artificial Sequence: Synthetic oligonucleotide
ugucucggccagucucuga

SEQ ID NO: 578343 - RNA, 19 nt, Artificial Sequence
  Description of Artificial Sequence: Synthetic oligonucleotide
gcuagauaaagaccuggcu

SEQ ID NO: 578344 - RNA, 19 nt, Artificial Sequence
  Description of Artificial Sequence: Synthetic oligonucleotide
gaaggaggagacgcuacua

SEQ ID NO: 578345 - RNA, 19 nt, Artificial Sequence
  Description of Artificial Sequence: Synthetic oligonucleotide
uccugccguuucuuguccu

SEQ ID NO: 578346 - RNA, 19 nt, Artificial Sequence
  Description of Artificial Sequence: Synthetic oligonucleotide
agcgcgcuuccgcuccagg

SEQ ID NO: 578347 - RNA, 19 nt, Artificial Sequence
  Description of Artificial Sequence: Synthetic oligonucleotide
auccggcuguccaugacgu

SEQ ID NO: 578348 - RNA, 19 nt, Artificial Sequence
  Description of Artificial Sequence: Synthetic oligonucleotide
aggggaccccacacauucc

SEQ ID NO: 578349 - RNA, 19 nt, Artificial Sequence
  Description of Artificial Sequence: Synthetic oligonucleotide
uaacgagcucgcaccccaa

SEQ ID NO: 578350 - RNA, 19 nt, Artificial Sequence
  Description of Artificial Sequence: Synthetic oligonucleotide
gauacgcugcccauccacu

SEQ ID NO: 578351 - RNA, 19 nt, Artificial Sequence
  Description of Artificial Sequence: Synthetic oligonucleotide
cucaugccguaaucggaca

SEQ ID NO: 578352 - RNA, 19 nt, Artificial Sequence
  Description of Artificial Sequence: Synthetic oligonucleotide
cugaggacugcuagauaaa

SEQ ID NO: 578353 - RNA, 19 nt, Artificial Sequence
  Description of Artificial Sequence: Synthetic oligonucleotide
ugccauagaggcgcugcuc

SEQ ID NO: 578354 - RNA, 19 nt, Artificial Sequence
  Description of Artificial Sequence: Synthetic oligonucleotide
ugccguaaucggacagcuc

SEQ ID NO: 578355 - RNA, 19 nt, Artificial Sequence
  Description of Artificial Sequence: Synthetic oligonucleotide
auccuugugcaagugcaua

SEQ ID NO: 578356 - RNA, 19 nt, Artificial Sequence
  Description of Artificial Sequence: Synthetic oligonucleotide
cucuugccccauuucuuga

SEQ ID NO: 578357 - RNA, 19 nt, Artificial Sequence
  Description of Artificial Sequence: Synthetic oligonucleotide
acacacacacucacacaca

SEQ ID NO: 578358 - RNA, 19 nt, Artificial Sequence
  Description of Artificial Sequence: Synthetic oligonucleotide
aaggggccucuaccauaug

SEQ ID NO: 578359 - RNA, 19 nt, Artificial Sequence
  Description of Artificial Sequence: Synthetic oligonucleotide
ugccaagcucugcucucuc

SEQ ID NO: 578360 - RNA, 19 nt, Artificial Sequence
  Description of Artificial Sequence: Synthetic oligonucleotide
agcucgcgaagcucacgcu

SEQ ID NO: 578361 - RNA, 19 nt, Artificial Sequence
  Description of Artificial Sequence: Synthetic oligonucleotide
uugcuagcucaucgagcau

SEQ ID NO: 578362 - RNA, 19 nt, Artificial Sequence
  Description of Artificial Sequence: Synthetic oligonucleotide
ccacacauuccuugcugag

SEQ ID NO: 578363 - RNA, 19 nt, Artificial Sequence
  Description of Artificial Sequence: Synthetic oligonucleotide
gcugagccguacaauuucc

SEQ ID NO: 578364 - RNA, 19 nt, Artificial Sequence
  Description of Artificial Sequence: Synthetic oligonucleotide
gccacaugguauuugggcu

SEQ ID NO: 578365 - RNA, 19 nt, Artificial Sequence
  Description of Artificial Sequence: Synthetic oligonucleotide
uccccugucuggguccggc

SEQ ID NO: 578366 - RNA, 19 nt, Artificial Sequence
  Description of Artificial Sequence: Synthetic oligonucleotide
cugcagcuugucagcgcgc

SEQ ID NO: 578367 - RNA, 19 nt, Artificial Sequence
  Description of Artificial Sequence: Synthetic oligonucleotide
agcgcagcacugcccuucu

SEQ ID NO: 578368 - RNA, 19 nt, Artificial Sequence
  Description of Artificial Sequence: Synthetic oligonucleotide
ucuugcuguuggugaggau

SEQ ID NO: 578369 - RNA, 19 nt, Artificial Sequence
  Description of Artificial Sequence: Synthetic oligonucleotide
cucuuccgagcuucgugca

SEQ ID NO: 578370 - RNA, 19 nt, Artificial Sequence
  Description of Artificial Sequence: Synthetic oligonucleotide
gcgccguucaaaccagccc

SEQ ID NO: 578371 - RNA, 19 nt, Artificial Sequence
  Description of Artificial Sequence: Synthetic oligonucleotide
caguggcauucuggaaugg

SEQ ID NO: 578372 - RNA, 19 nt, Artificial Sequence
  Description of Artificial Sequence: Synthetic oligonucleotide
ccguaaucggacagcuccc

SEQ ID NO: 578373 - RNA, 19 nt, Artificial Sequence
  Description of Artificial Sequence: Synthetic oligonucleotide
cccgcaaugcugcugcaug

SEQ ID NO: 578374 - RNA, 19 nt, Artificial Sequence
  Description of Artificial Sequence: Synthetic oligonucleotide
ccggcuguccaugacguag

SEQ ID NO: 578375 - RNA, 19 nt, Artificial Sequence
  Description of Artificial Sequence: Synthetic oligonucleotide
cuccccaaggggccucuac

SEQ ID NO: 578376 - RNA, 19 nt, Artificial Sequence
  Description of Artificial Sequence: Synthetic oligonucleotide
gcucacgcucauaacgagc

SEQ ID NO: 578377 - RNA, 19 nt, Artificial Sequence
  Description of Artificial Sequence: Synthetic oligonucleotide
gggauagaacuuccauauc

SEQ ID NO: 578378 - RNA, 19 nt, Artificial Sequence
  Description of Artificial Sequence: Synthetic oligonucleotide
cuugagggcuuccucuugu

SEQ ID NO: 578379 - RNA, 19 nt, Artificial Sequence
  Description of Artificial Sequence: Synthetic oligonucleotide
agcugacaauucagugguc

SEQ ID NO: 578380 - RNA, 19 nt, Artificial Sequence
  Description of Artificial Sequence: Synthetic oligonucleotide
aggauacgcugcccaucca

SEQ ID NO: 578381 - RNA, 19 nt, Artificial Sequence
  Description of Artificial Sequence: Synthetic oligonucleotide
cacacacacucacacacau

SEQ ID NO: 578382 - RNA, 19 nt, Artificial Sequence
  Description of Artificial Sequence: Synthetic oligonucleotide
gcucgcgaagcucacgcuc

SEQ ID NO: 578383 - RNA, 19 nt, Artificial Sequence
  Description of Artificial Sequence: Synthetic oligonucleotide
gaauggggugaaaguaggu

SEQ ID NO: 578384 - RNA, 19 nt, Artificial Sequence
  Description of Artificial Sequence: Synthetic oligonucleotide
cucaaggccugagcggcuc

SEQ ID NO: 578385 - RNA, 19 nt, Artificial Sequence
  Description of Artificial Sequence: Synthetic oligonucleotide
cuagcucaucgagcauggc

SEQ ID NO: 578386 - RNA, 19 nt, Artificial Sequence
  Description of Artificial Sequence: Synthetic oligonucleotide
ccgcaaugcugcugcaugc

SEQ ID NO: 578387 - RNA, 19 nt, Artificial Sequence
  Description of Artificial Sequence: Synthetic oligonucleotide
cugcauugacuccauugcu

SEQ ID NO: 578388 - RNA, 19 nt, Artificial Sequence
  Description of Artificial Sequence: Synthetic oligonucleotide
ucgcgaagcucacgcucau

SEQ ID NO: 578389 - RNA, 19 nt, Artificial Sequence
  Description of Artificial Sequence: Synthetic oligonucleotide
gaguguaccugagccugaa

SEQ ID NO: 578390 - RNA, 19 nt, Artificial Sequence
  Description of Artificial Sequence: Synthetic oligonucleotide
ccccuuuaaugucaaucuc

SEQ ID NO: 578391 - RNA, 19 nt, Artificial Sequence
  Description of Artificial Sequence: Synthetic oligonucleotide
gccgcugaucucuuagcuc

SEQ ID NO: 578392 - RNA, 19 nt, Artificial Sequence
  Description of Artificial Sequence: Synthetic oligonucleotide
ccucuaccauaugauuggg

SEQ ID NO: 578393 - RNA, 19 nt, Artificial Sequence
  Description of Artificial Sequence: Synthetic oligonucleotide
gcccuuaaugacuccugga

SEQ ID NO: 578394 - RNA, 19 nt, Artificial Sequence
  Description of Artificial Sequence: Synthetic oligonucleotide
cucaucgagcauggccuuc

SEQ ID NO: 578395 - RNA, 19 nt, Artificial Sequence
  Description of Artificial Sequence: Synthetic oligonucleotide
agagguccucugccauaga

SEQ ID NO: 578396 - RNA, 19 nt, Artificial Sequence
  Description of Artificial Sequence: Synthetic oligonucleotide
cguacaauuuccugggaua

SEQ ID NO: 578397 - RNA, 19 nt, Artificial Sequence
  Description of Artificial Sequence: Synthetic oligonucleotide
cccaaaugcagaguagcca

SEQ ID NO: 578398 - RNA, 19 nt, Artificial Sequence
  Description of Artificial Sequence: Synthetic oligonucleotide
ccugucuggguccggcuug

SEQ ID NO: 578399 - RNA, 19 nt, Artificial Sequence
  Description of Artificial Sequence: Synthetic oligonucleotide
cagugcugccacguucuuc

SEQ ID NO: 578400 - RNA, 19 nt, Artificial Sequence
  Description of Artificial Sequence: Synthetic oligonucleotide
acgcuacuacuguccccug

SEQ ID NO: 578401 - RNA, 19 nt, Artificial Sequence
  Description of Artificial Sequence: Synthetic oligonucleotide
cagagagaaccagcuccuc

SEQ ID NO: 578402 - RNA, 19 nt, Artificial Sequence
  Description of Artificial Sequence: Synthetic oligonucleotide
ccgcugaucucuuagcucu

SEQ ID NO: 578403 - RNA, 19 nt, Artificial Sequence
  Description of Artificial Sequence: Synthetic oligonucleotide
cauuccuugcugagccgua

SEQ ID NO: 578404 - RNA, 19 nt, Artificial Sequence
  Description of Artificial Sequence: Synthetic oligonucleotide
gagcucgcaccccaagcau

SEQ ID NO: 578405 - RNA, 19 nt, Artificial Sequence
  Description of Artificial Sequence: Synthetic oligonucleotide
uagaggcgcugcucaccuc

SEQ ID NO: 578406 - RNA, 19 nt, Artificial Sequence
  Description of Artificial Sequence: Synthetic oligonucleotide
ggugggcccguuuggccac

SEQ ID NO: 578407 - RNA, 19 nt, Artificial Sequence
  Description of Artificial Sequence: Synthetic oligonucleotide
cccgguagcugaaggagga

SEQ ID NO: 578408 - RNA, 19 nt, Artificial Sequence
  Description of Artificial Sequence: Synthetic oligonucleotide
cuacuacuguccccugucu

SEQ ID NO: 578409 - RNA, 19 nt, Artificial Sequence
  Description of Artificial Sequence: Synthetic oligonucleotide
uagggcccgcaaugcugcu

SEQ ID NO: 578410 - RNA, 19 nt, Artificial Sequence
  Description of Artificial Sequence: Synthetic oligonucleotide
cagcaugcuccucccggca

SEQ ID NO: 578411 - RNA, 19 nt, Artificial Sequence
  Description of Artificial Sequence: Synthetic oligonucleotide
acacacacucacacacaua

SEQ ID NO: 578412 - RNA, 19 nt, Artificial Sequence
  Description of Artificial Sequence: Synthetic oligonucleotide
cucuuagcucugccaagcu

SEQ ID NO: 578413 - RNA, 19 nt, Artificial Sequence
  Description of Artificial Sequence: Synthetic oligonucleotide
ggggaccccacacauuccu

SEQ ID NO: 578414 - RNA, 19 nt, Artificial Sequence
  Description of Artificial Sequence: Synthetic oligonucleotide
ccuucaagcgccguucaaa

SEQ ID NO: 578415 - RNA, 19 nt, Artificial Sequence
  Description of Artificial Sequence: Synthetic oligonucleotide
cagcccaguucggucugug

SEQ ID NO: 578416 - RNA, 19 nt, Artificial Sequence
  Description of Artificial Sequence: Synthetic oligonucleotide
uccuccccaaggggccucu

SEQ ID NO: 578417 - RNA, 19 nt, Artificial Sequence
  Description of Artificial Sequence: Synthetic oligonucleotide
gggcugcauagccuuuaca

SEQ ID NO: 578418 - RNA, 19 nt, Artificial Sequence
  Description of Artificial Sequence: Synthetic oligonucleotide
cgcgcuuccgcuccaggug

SEQ ID NO: 578419 - RNA, 19 nt, Artificial Sequence
  Description of Artificial Sequence: Synthetic oligonucleotide
ccaggauacgcugcccauc

SEQ ID NO: 578420 - RNA, 19 nt, Artificial Sequence
  Description of Artificial Sequence: Synthetic oligonucleotide
gagcuucgugcagguccug

SEQ ID NO: 578421 - RNA, 19 nt, Artificial Sequence
  Description of Artificial Sequence: Synthetic oligonucleotide
gccaggcuuccagacauaa

SEQ ID NO: 578422 - RNA, 19 nt, Artificial Sequence
  Description of Artificial Sequence: Synthetic oligonucleotide
gccguacaauuuccuggga

SEQ ID NO: 578423 - RNA, 19 nt, Artificial Sequence
  Description of Artificial Sequence: Synthetic oligonucleotide
gcagagguccucugccaua

SEQ ID NO: 578424 - RNA, 19 nt, Artificial Sequence
  Description of Artificial Sequence: Synthetic oligonucleotide
ccguucaaaccagcccuug

SEQ ID NO: 578425 - RNA, 19 nt, Artificial Sequence
  Description of Artificial Sequence: Synthetic oligonucleotide
ggggccucuaccauaugau

SEQ ID NO: 578426 - RNA, 19 nt, Artificial Sequence
  Description of Artificial Sequence: Synthetic oligonucleotide
gcucaccuccagguguuuc

SEQ ID NO: 578427 - RNA, 19 nt, Artificial Sequence
  Description of Artificial Sequence: Synthetic oligonucleotide
cucgcaccccaagcaucuc

SEQ ID NO: 578428 - RNA, 19 nt, Artificial Sequence
  Description of Artificial Sequence: Synthetic oligonucleotide
gguccggcuuggugaguuc

SEQ ID NO: 578429 - RNA, 19 nt, Artificial Sequence
  Description of Artificial Sequence: Synthetic oligonucleotide
gccuuuacacacacacacu

SEQ ID NO: 578430 - RNA, 19 nt, Artificial Sequence
  Description of Artificial Sequence: Synthetic oligonucleotide
ccguuuggccacaugguau

SEQ ID NO: 578431 - RNA, 19 nt, Artificial Sequence
  Description of Artificial Sequence: Synthetic oligonucleotide
ccgcuggagcugaucccgc

SEQ ID NO: 578432 - RNA, 19 nt, Artificial Sequence
  Description of Artificial Sequence: Synthetic oligonucleotide
ccguacaauuuccugggau

SEQ ID NO: 578433 - RNA, 19 nt, Artificial Sequence
  Description of Artificial Sequence: Synthetic oligonucleotide
ccuccacauuuucccacca

SEQ ID NO: 578434 - RNA, 19 nt, Artificial Sequence
  Description of Artificial Sequence: Synthetic oligonucleotide
cuaggucucucaggacacu

SEQ ID NO: 578435 - RNA, 19 nt, Artificial Sequence
  Description of Artificial Sequence: Synthetic oligonucleotide
ccgguagcugaaggaggag

SEQ ID NO: 578436 - RNA, 19 nt, Artificial Sequence
  Description of Artificial Sequence: Synthetic oligonucleotide
cgcugaucucuuagcucug

SEQ ID NO: 578437 - RNA, 19 nt, Artificial Sequence
  Description of Artificial Sequence: Synthetic oligonucleotide
cagcgcgcuuccgcuccag

SEQ ID NO: 578438 - RNA, 19 nt, Artificial Sequence
  Description of Artificial Sequence: Synthetic oligonucleotide
agccgguuauuggcccuua

SEQ ID NO: 578439 - RNA, 19 nt, Artificial Sequence
  Description of Artificial Sequence: Synthetic oligonucleotide
cccauaagaucuucauauu

SEQ ID NO: 578440 - RNA, 19 nt, Artificial Sequence
  Description of Artificial Sequence: Synthetic oligonucleotide
ccggcuuggugaguucauc

SEQ ID NO: 578441 - RNA, 19 nt, Artificial Sequence
  Description of Artificial Sequence: Synthetic oligonucleotide
cguaaucggacagcuccca

SEQ ID NO: 578442 - RNA, 19 nt, Artificial Sequence
  Description of Artificial Sequence: Synthetic oligonucleotide
cgguagcugaaggaggaga

SEQ ID NO: 578443 - RNA, 19 nt, Artificial Sequence
  Description of Artificial Sequence: Synthetic oligonucleotide
gcccuucaacucagcagca

SEQ ID NO: 578444 - RNA, 19 nt, Artificial Sequence
  Description of Artificial Sequence: Synthetic oligonucleotide
gccgagggccaagaagaaa

SEQ ID NO: 578445 - RNA, 19 nt, Artificial Sequence
  Description of Artificial Sequence: Synthetic oligonucleotide
gcagccgguuauuggcccu

SEQ ID NO: 578446 - RNA, 19 nt, Artificial Sequence
  Description of Artificial Sequence: Synthetic oligonucleotide
gccgguuauuggcccuuaa

SEQ ID NO: 578447 - RNA, 19 nt, Artificial Sequence
  Description of Artificial Sequence: Synthetic oligonucleotide
ccgguuauuggcccuuaau

SEQ ID NO: 578448 - RNA, 19 nt, Artificial Sequence
  Description of Artificial Sequence: Synthetic oligonucleotide
cgagcuucgugcagguccu

SEQ ID NO: 578449 - RNA, 19 nt, Artificial Sequence
  Description of Artificial Sequence: Synthetic oligonucleotide
gcucaucgagcauggccuu

SEQ ID NO: 578450 - RNA, 19 nt, Artificial Sequence
  Description of Artificial Sequence: Synthetic oligonucleotide
gugggcccguuuggccaca

SEQ ID NO: 578451 - RNA, 19 nt, Artificial Sequence
  Description of Artificial Sequence: Synthetic oligonucleotide
ggguccggcuuggugaguu

SEQ ID NO: 578452 - RNA, 19 nt, Artificial Sequence
  Description of Artificial Sequence: Synthetic oligonucleotide
gcacucuuccgagcuucgu

SEQ ID NO: 578453 - RNA, 19 nt, Artificial Sequence
  Description of Artificial Sequence: Synthetic oligonucleotide
cccaaggggccucuaccau

SEQ ID NO: 578454 - RNA, 19 nt, Artificial Sequence
  Description of Artificial Sequence: Synthetic oligonucleotide
ccucaaggccugagcggcu

SEQ ID NO: 578455 - RNA, 19 nt, Artificial Sequence
  Description of Artificial Sequence: Synthetic oligonucleotide
gcagcuugucagcgcgcuu

SEQ ID NO: 578456 - RNA, 19 nt, Artificial Sequence
  Description of Artificial Sequence: Synthetic oligonucleotide
cgcucauaacgagcucgca

SEQ ID NO: 578457 - RNA, 19 nt, Artificial Sequence
  Description of Artificial Sequence: Synthetic oligonucleotide
gccguucaaaccagcccuu

SEQ ID NO: 578458 - RNA, 19 nt, Artificial Sequence
  Description of Artificial Sequence: Synthetic oligonucleotide
cagccgguuauuggcccuu

SEQ ID NO: 578459 - RNA, 19 nt, Artificial Sequence
  Description of Artificial Sequence: Synthetic oligonucleotide
cgcaaugcugcugcaugcu

SEQ ID NO: 578460 - RNA, 19 nt, Artificial Sequence
  Description of Artificial Sequence: Synthetic oligonucleotide
cgcuacuacuguccccugu

SEQ ID NO: 578461 - RNA, 19 nt, Artificial Sequence
  Description of Artificial Sequence: Synthetic oligonucleotide
gggaccccacacauuccuu

SEQ ID NO: 578462 - RNA, 19 nt, Artificial Sequence
  Description of Artificial Sequence: Synthetic oligonucleotide
ccaugacguaggucucaau

SEQ ID NO: 578463 - RNA, 19 nt, Artificial Sequence
  Description of Artificial Sequence: Synthetic oligonucleotide
cccuucaacucagcagcau

SEQ ID NO: 578464 - RNA, 19 nt, Artificial Sequence
  Description of Artificial Sequence: Synthetic oligonucleotide
ccccugucuggguccggcu

SEQ ID NO: 578465 - RNA, 19 nt, Artificial Sequence
  Description of Artificial Sequence: Synthetic oligonucleotide
cccugccgcugaucucuua

SEQ ID NO: 578466 - RNA, 19 nt, Artificial Sequence
  Description of Artificial Sequence: Synthetic oligonucleotide
guaucaacagccuacaggg

SEQ ID NO: 578467 - RNA, 19 nt, Artificial Sequence
  Description of Artificial Sequence: Synthetic oligonucleotide
uauaagaaacacaaugagc

SEQ ID NO: 578468 - RNA, 19 nt, Artificial Sequence
  Description of Artificial Sequence: Synthetic oligonucleotide
acuaaaucaacucugagau

SEQ ID NO: 578469 - RNA, 19 nt, Artificial Sequence
  Description of Artificial Sequence: Synthetic oligonucleotide
aauccugaagacugggagc

SEQ ID NO: 578470 - RNA, 19 nt, Artificial Sequence
  Description of Artificial Sequence: Synthetic oligonucleotide
ucuaguuuagguucacugg

SEQ ID NO: 578471 - RNA, 19 nt, Artificial Sequence
  Description of Artificial Sequence: Synthetic oligonucleotide
ugacucaggaggaagaaag

SEQ ID NO: 578472 - RNA, 19 nt, Artificial Sequence
  Description of Artificial Sequence: Synthetic oligonucleotide
ugacuuuucgacaguaagg

SEQ ID NO: 578473 - RNA, 19 nt, Artificial Sequence
  Description of Artificial Sequence: Synthetic oligonucleotide
ucagguuuccaccacgcgg

SEQ ID NO: 578474 - RNA, 19 nt, Artificial Sequence
  Description of Artificial Sequence: Synthetic oligonucleotide
uguugcuaagaacugagcu

SEQ ID NO: 578475 - RNA, 19 nt, Artificial Sequence
  Description of Artificial Sequence: Synthetic oligonucleotide
uacuaaaucaacucugaga

SEQ ID NO: 578476 - RNA, 19 nt, Artificial Sequence
  Description of Artificial Sequence: Synthetic oligonucleotide
uagauuccaguauacacag

SEQ ID NO: 578477 - RNA, 19 nt, Artificial Sequence
  Description of Artificial Sequence: Synthetic oligonucleotide
gauauuguccuguuccugc

SEQ ID NO: 578478 - RNA, 19 nt, Artificial Sequence
  Description of Artificial Sequence: Synthetic oligonucleotide
uccauugacugucuguggg

SEQ ID NO: 578479 - RNA, 19 nt, Artificial Sequence
  Description of Artificial Sequence: Synthetic oligonucleotide
uacuagagcacacuauaag

SEQ ID NO: 578480 - RNA, 19 nt, Artificial Sequence
  Description of Artificial Sequence: Synthetic oligonucleotide
acugguuaagaccaggucu

SEQ ID NO: 578481 - RNA, 19 nt, Artificial Sequence
  Description of Artificial Sequence: Synthetic oligonucleotide
  modified_base (5)..(5): a, c, u, g, unknown or other
uacunuccccacaucaagg

SEQ ID NO: 578482 - RNA, 19 nt, Artificial Sequence
  Description of Artificial Sequence: Synthetic oligonucleotide
agguuagaagaacaacccc

SEQ ID NO: 578483 - RNA, 19 nt, Artificial Sequence
  Description of Artificial Sequence: Synthetic oligonucleotide
gacuuuucgacaguaaggc

SEQ ID NO: 578484 - RNA, 19 nt, Artificial Sequence
  Description of Artificial Sequence: Synthetic oligonucleotide
ugguacuaaaucaacucug

SEQ ID NO: 578485 - RNA, 19 nt, Artificial Sequence
  Description of Artificial Sequence: Synthetic oligonucleotide
  modified_base (8)..(8): a, c, u, g, unknown or other
gaauacunuccccacauca

SEQ ID NO: 578486 - RNA, 19 nt, Artificial Sequence
  Description of Artificial Sequence: Synthetic oligonucleotide
aaaacacuccugauugccc

SEQ ID NO: 578487 - RNA, 19 nt, Artificial Sequence
  Description of Artificial Sequence: Synthetic oligonucleotide
acuagagcacacuauaaga

SEQ ID NO: 578488 - RNA, 19 nt, Artificial Sequence
  Description of Artificial Sequence: Synthetic oligonucleotide
agagaaugaccagaggagc

SEQ ID NO: 578489 - RNA, 19 nt, Artificial Sequence
  Description of Artificial Sequence: Synthetic oligonucleotide
agucaugcaggugucagcc

SEQ ID NO: 578490 - RNA, 19 nt, Artificial Sequence
  Description of Artificial Sequence: Synthetic oligonucleotide
uuuucgacaguaaggcuug

SEQ ID NO: 578491 - RNA, 19 nt, Artificial Sequence
  Description of Artificial Sequence: Synthetic oligonucleotide
acuauaagaaacacaauga

SEQ ID NO: 578492 - RNA, 19 nt, Artificial Sequence
  Description of Artificial Sequence: Synthetic oligonucleotide
uguaagcaaaaccagcaau

SEQ ID NO: 578493 - RNA, 19 nt, Artificial Sequence
  Description of Artificial Sequence: Synthetic oligonucleotide
cagucagcguucuugaucc

SEQ ID NO: 578494 - RNA, 19 nt, Artificial Sequence
  Description of Artificial Sequence: Synthetic oligonucleotide
ugaagggccacauuacucu

SEQ ID NO: 578495 - RNA, 19 nt, Artificial Sequence
  Description of Artificial Sequence: Synthetic oligonucleotide
  modified_base (10)..(10): a, c, u, g, unknown or other
agccuuuucncuuucugcu

SEQ ID NO: 578496 - RNA, 19 nt, Artificial Sequence
  Description of Artificial Sequence: Synthetic oligonucleotide
guuaagaccaggucuggcc

SEQ ID NO: 578497 - RNA, 19 nt, Artificial Sequence
  Description of Artificial Sequence: Synthetic oligonucleotide
uuaagaccaggucuggcca

SEQ ID NO: 578498 - RNA, 19 nt, Artificial Sequence
  Description of Artificial Sequence: Synthetic oligonucleotide
ucgacaguaaggcuugaug

SEQ ID NO: 578499 - RNA, 19 nt, Artificial Sequence
  Description of Artificial Sequence: Synthetic oligonucleotide
aaagccauuuggcuuuucu

SEQ ID NO: 578500 - RNA, 19 nt, Artificial Sequence
  Description of Artificial Sequence: Synthetic oligonucleotide
aucaagguaagcccaaaca

SEQ ID NO: 578501 - RNA, 19 nt, Artificial Sequence
  Description of Artificial Sequence: Synthetic oligonucleotide
uuuagguucacugguuaag

SEQ ID NO: 578502 - RNA, 19 nt, Artificial Sequence
  Description of Artificial Sequence: Synthetic oligonucleotide
ugaguugugagcugacuca

SEQ ID NO: 578503 - RNA, 19 nt, Artificial Sequence
  Description of Artificial Sequence: Synthetic oligonucleotide
  modified_base (2)..(2): a, c, u, g, unknown or other
unuccccacaucaagguaa

SEQ ID NO: 578504 - RNA, 19 nt, Artificial Sequence
  Description of Artificial Sequence: Synthetic oligonucleotide
cuagauuccaguauacaca

SEQ ID NO: 578505 - RNA, 19 nt, Artificial Sequence
  Description of Artificial Sequence: Synthetic oligonucleotide
cuauuuauggccucaagaa

SEQ ID NO: 578506 - RNA, 19 nt, Artificial Sequence
  Description of Artificial Sequence: Synthetic oligonucleotide
uucggcuucucgcugauac

SEQ ID NO: 578507 - RNA, 19 nt, Artificial Sequence
  Description of Artificial Sequence: Synthetic oligonucleotide
uguagagagucaugggacc

SEQ ID NO: 578508 - RNA, 19 nt, Artificial Sequence
  Description of Artificial Sequence: Synthetic oligonucleotide
uggauuccugucaagcuug

SEQ ID NO: 578509 - RNA, 19 nt, Artificial Sequence
  Description of Artificial Sequence: Synthetic oligonucleotide
  modified_base (6)..(6): a, c, u, g, unknown or other
auacunuccccacaucaag

SEQ ID NO: 578510 - RNA, 19 nt, Artificial Sequence
  Description of Artificial Sequence: Synthetic oligonucleotide
ggccacauuacucuguucg

SEQ ID NO: 578511 - RNA, 19 nt, Artificial Sequence
  Description of Artificial Sequence: Synthetic oligonucleotide
  modified_base (12)..(12): a, c, u, g, unknown or other
accagaauacunuccccac

SEQ ID NO: 578512 - RNA, 19 nt, Artificial Sequence
  Description of Artificial Sequence: Synthetic oligonucleotide
aagguaagcccaaacaccu

SEQ ID NO: 578513 - RNA, 19 nt, Artificial Sequence
  Description of Artificial Sequence: Synthetic oligonucleotide
uucccugacuuuucgacag

SEQ ID NO: 578514 - RNA, 19 nt, Artificial Sequence
  Description of Artificial Sequence: Synthetic oligonucleotide
cugacuuuucgacaguaag

SEQ ID NO: 578515 - RNA, 19 nt, Artificial Sequence
  Description of Artificial Sequence: Synthetic oligonucleotide
ucaggacuugcuccgauca

SEQ ID NO: 578516 - RNA, 19 nt, Artificial Sequence
  Description of Artificial Sequence: Synthetic oligonucleotide
ugucaacuauuuauggccu

SEQ ID NO: 578517 - RNA, 19 nt, Artificial Sequence
  Description of Artificial Sequence: Synthetic oligonucleotide
uccugauugcccuauuccc

SEQ ID NO: 578518 - RNA, 19 nt, Artificial Sequence
  Description of Artificial Sequence: Synthetic oligonucleotide
gaugguuuugcugggacug

SEQ ID NO: 578519 - RNA, 19 nt, Artificial Sequence
  Description of Artificial Sequence: Synthetic oligonucleotide
uuuucuaguaccaccugua

SEQ ID NO: 578520 - RNA, 19 nt, Artificial Sequence
  Description of Artificial Sequence: Synthetic oligonucleotide
cuugcuccgaucacuauac

SEQ ID NO: 578521 - RNA, 19 nt, Artificial Sequence
  Description of Artificial Sequence: Synthetic oligonucleotide
  modified_base (7)..(7): a, c, u, g, unknown or other
aauacunuccccacaucaa

SEQ ID NO: 578522 - RNA, 19 nt, Artificial Sequence
  Description of Artificial Sequence: Synthetic oligonucleotide
gagaaugaccagaggagcg

SEQ ID NO: 578523 - RNA, 19 nt, Artificial Sequence
  Description of Artificial Sequence: Synthetic oligonucleotide
ugcccuauucccuggacag

SEQ ID NO: 578524 - RNA, 19 nt, Artificial Sequence
  Description of Artificial Sequence: Synthetic oligonucleotide
aaacuagccuccugaguug

SEQ ID NO: 578525 - RNA, 19 nt, Artificial Sequence
  Description of Artificial Sequence: Synthetic oligonucleotide
  modified_base (6)..(6): a, c, u, g, unknown or other
auuucngcuccacucuguc

SEQ ID NO: 578526 - RNA, 19 nt, Artificial Sequence
  Description of Artificial Sequence: Synthetic oligonucleotide
cugguuaagaccaggucug

SEQ ID NO: 578527 - RNA, 19 nt, Artificial Sequence
  Description of Artificial Sequence: Synthetic oligonucleotide
ugaccaaagccauuuggcu

SEQ ID NO: 578528 - RNA, 19 nt, Artificial Sequence
  Description of Artificial Sequence: Synthetic oligonucleotide
agcacacuauaagaaacac

SEQ ID NO: 578529 - RNA, 19 nt, Artificial Sequence
  Description of Artificial Sequence: Synthetic oligonucleotide
  modified_base (4)..(4): a, c, u, g, unknown or other
acunuccccacaucaaggu

SEQ ID NO: 578530 - RNA, 19 nt, Artificial Sequence
  Description of Artificial Sequence: Synthetic oligonucleotide
agacaaauuuugucacuuc

SEQ ID NO: 578531 - RNA, 19 nt, Artificial Sequence
  Description of Artificial Sequence: Synthetic oligonucleotide
aacuuuccgcugcuggcuc

SEQ ID NO: 578532 - RNA, 19 nt, Artificial Sequence
  Description of Artificial Sequence: Synthetic oligonucleotide
ugcuacuuauguccucccg

SEQ ID NO: 578533 - RNA, 19 nt, Artificial Sequence
  Description of Artificial Sequence: Synthetic oligonucleotide
  modified_base (5)..(5): a, c, u, g, unknown or other
uuucncuuucugcuuggca

SEQ ID NO: 578534 - RNA, 19 nt, Artificial Sequence
  Description of Artificial Sequence: Synthetic oligonucleotide
agcgaucagacaccauggc

SEQ ID NO: 578535 - RNA, 19 nt, Artificial Sequence
  Description of Artificial Sequence: Synthetic oligonucleotide
aggugucagccucaggugg

SEQ ID NO: 578536 - RNA, 19 nt, Artificial Sequence
  Description of Artificial Sequence: Synthetic oligonucleotide
aguaacugggaguaaggau

SEQ ID NO: 578537 - RNA, 19 nt, Artificial Sequence
  Description of Artificial Sequence: Synthetic oligonucleotide
ugcucuaucaucugccgaa

SEQ ID NO: 578538 - RNA, 19 nt, Artificial Sequence
  Description of Artificial Sequence: Synthetic oligonucleotide
aagacaaauuuugucacuu

SEQ ID NO: 578539 - RNA, 19 nt, Artificial Sequence
  Description of Artificial Sequence: Synthetic oligonucleotide
auggcacaaggguggagcc

SEQ ID NO: 578540 - RNA, 19 nt, Artificial Sequence
  Description of Artificial Sequence: Synthetic oligonucleotide
uaucaacagccuacagggg

SEQ ID NO: 578541 - RNA, 19 nt, Artificial Sequence
  Description of Artificial Sequence: Synthetic oligonucleotide
ucuugaauggugguguccu

SEQ ID NO: 578542 - RNA, 19 nt, Artificial Sequence
  Description of Artificial Sequence: Synthetic oligonucleotide
aucauccugucuccugacc

SEQ ID NO: 578543 - RNA, 19 nt, Artificial Sequence
  Description of Artificial Sequence: Synthetic oligonucleotide
  modified_base (9)..(9): a, c, u, g, unknown or other
agaauacunuccccacauc

SEQ ID NO: 578544 - RNA, 19 nt, Artificial Sequence
  Description of Artificial Sequence: Synthetic oligonucleotide
uggggacuaagacaaauuu

SEQ ID NO: 578545 - RNA, 19 nt, Artificial Sequence
  Description of Artificial Sequence: Synthetic oligonucleotide
gauccgaagcuccucuaag

SEQ ID NO: 578546 - RNA, 19 nt, Artificial Sequence
  Description of Artificial Sequence: Synthetic oligonucleotide
gaaacuagccuccugaguu

SEQ ID NO: 578547 - RNA, 19 nt, Artificial Sequence
  Description of Artificial Sequence: Synthetic oligonucleotide
ugauguccggaggagacag

SEQ ID NO: 578548 - RNA, 19 nt, Artificial Sequence
  Description of Artificial Sequence: Synthetic oligonucleotide
guacuaaaucaacucugag

SEQ ID NO: 578549 - RNA, 19 nt, Artificial Sequence
  Description of Artificial Sequence: Synthetic oligonucleotide
aaucccugcacagucuucu

SEQ ID NO: 578550 - RNA, 19 nt, Artificial Sequence
  Description of Artificial Sequence: Synthetic oligonucleotide
ucucgcugauaccacccgg

SEQ ID NO: 578551 - RNA, 19 nt, Artificial Sequence
  Description of Artificial Sequence: Synthetic oligonucleotide
ucaacuauuuauggccuca

SEQ ID NO: 578552 - RNA, 19 nt, Artificial Sequence
  Description of Artificial Sequence: Synthetic oligonucleotide
aaggcgccaaccagaauac

SEQ ID NO: 578553 - RNA, 19 nt, Artificial Sequence
  Description of Artificial Sequence: Synthetic oligonucleotide
uuagguucacugguuaaga

SEQ ID NO: 578554 - RNA, 19 nt, Artificial Sequence
  Description of Artificial Sequence: Synthetic oligonucleotide
gauauccggacacugccca

SEQ ID NO: 578555 - RNA, 19 nt, Artificial Sequence
  Description of Artificial Sequence: Synthetic oligonucleotide
caguuuguugcuaagaacu

SEQ ID NO: 578556 - RNA, 19 nt, Artificial Sequence
  Description of Artificial Sequence: Synthetic oligonucleotide
gguucagagagguuagaag

SEQ ID NO: 578557 - RNA, 19 nt, Artificial Sequence
  Description of Artificial Sequence: Synthetic oligonucleotide
aggggaguucuguuacacc

SEQ ID NO: 578558 - RNA, 19 nt, Artificial Sequence
  Description of Artificial Sequence: Synthetic oligonucleotide
acuccugauugcccuauuc

SEQ ID NO: 578559 - RNA, 19 nt, Artificial Sequence
  Description of Artificial Sequence: Synthetic oligonucleotide
accauggcguaaguguucc

SEQ ID NO: 578560 - RNA, 19 nt, Artificial Sequence
  Description of Artificial Sequence: Synthetic oligonucleotide
uucucgcugauaccacccg

SEQ ID NO: 578561 - RNA, 19 nt, Artificial Sequence
  Description of Artificial Sequence: Synthetic oligonucleotide
acaccuuaaugaucucuuc

SEQ ID NO: 578562 - RNA, 19 nt, Artificial Sequence
  Description of Artificial Sequence: Synthetic oligonucleotide
  modified_base (10)..(10): a, c, u, g, unknown or other
gcagauuucngcuccacuc

SEQ ID NO: 578563 - RNA, 19 nt, Artificial Sequence
  Description of Artificial Sequence: Synthetic oligonucleotide
cuagagcacacuauaagaa

SEQ ID NO: 578564 - RNA, 19 nt, Artificial Sequence
  Description of Artificial Sequence: Synthetic oligonucleotide
gcuacuuauguccucccgg

SEQ ID NO: 578565 - RNA, 19 nt, Artificial Sequence
  Description of Artificial Sequence: Synthetic oligonucleotide
ucacugguuaagaccaggu

SEQ ID NO: 578566 - RNA, 19 nt, Artificial Sequence
  Description of Artificial Sequence: Synthetic oligonucleotide
gagcgaucagacaccaugg

SEQ ID NO: 578567 - RNA, 19 nt, Artificial Sequence
  Description of Artificial Sequence: Synthetic oligonucleotide
gucaguaucaacagccuac

SEQ ID NO: 578568 - RNA, 19 nt, Artificial Sequence
  Description of Artificial Sequence: Synthetic oligonucleotide
auugacugucugugggagg

SEQ ID NO: 578569 - RNA, 19 nt, Artificial Sequence
  Description of Artificial Sequence: Synthetic oligonucleotide
guccggaggagacagacac

SEQ ID NO: 578570 - RNA, 19 nt, Artificial Sequence
  Description of Artificial Sequence: Synthetic oligonucleotide
ugcagcuuggcaagcaauc

SEQ ID NO: 578571 - RNA, 19 nt, Artificial Sequence
  Description of Artificial Sequence: Synthetic oligonucleotide
cuucucgcugauaccaccc

SEQ ID NO: 578572 - RNA, 19 nt, Artificial Sequence
  Description of Artificial Sequence: Synthetic oligonucleotide
  modified_base (3)..(3): a, c, u, g, unknown or other
ucncuuucugcuuggcagu

SEQ ID NO: 578573 - RNA, 19 nt, Artificial Sequence
  Description of Artificial Sequence: Synthetic oligonucleotide
ugaccucccuuucaaguac

SEQ ID NO: 578574 - RNA, 19 nt, Artificial Sequence
  Description of Artificial Sequence: Synthetic oligonucleotide
gguacggucaggaagucag

SEQ ID NO: 578575 - RNA, 19 nt, Artificial Sequence
  Description of Artificial Sequence: Synthetic oligonucleotide
  modified_base (8)..(8): a, c, u, g, unknown or other
agauuucngcuccacucug

SEQ ID NO: 578576 - RNA, 19 nt, Artificial Sequence
  Description of Artificial Sequence: Synthetic oligonucleotide
uguagcuccccaacuucug

SEQ ID NO: 578577 - RNA, 19 nt, Artificial Sequence
  Description of Artificial Sequence: Synthetic oligonucleotide
uaagcccaaacaccucagc

SEQ ID NO: 578578 - RNA, 19 nt, Artificial Sequence
  Description of Artificial Sequence: Synthetic oligonucleotide
cugaguugugagcugacuc

SEQ ID NO: 578579 - RNA, 19 nt, Artificial Sequence
  Description of Artificial Sequence: Synthetic oligonucleotide
auugcccuauucccuggac

SEQ ID NO: 578580 - RNA, 19 nt, Artificial Sequence
  Description of Artificial Sequence: Synthetic oligonucleotide
uacuuauguccucccggag

SEQ ID NO: 578581 - RNA, 19 nt, Artificial Sequence
  Description of Artificial Sequence: Synthetic oligonucleotide
uaccacccgguccugacug

SEQ ID NO: 578582 - RNA, 19 nt, Artificial Sequence
  Description of Artificial Sequence: Synthetic oligonucleotide
cugggacugaugaggaagc

SEQ ID NO: 578583 - RNA, 19 nt, Artificial Sequence
  Description of Artificial Sequence: Synthetic oligonucleotide
acaguaacugggaguaagg

SEQ ID NO: 578584 - RNA, 19 nt, Artificial Sequence
  Description of Artificial Sequence: Synthetic oligonucleotide
ugagcuguguuugcagaag

SEQ ID NO: 578585 - RNA, 19 nt, Artificial Sequence
  Description of Artificial Sequence: Synthetic oligonucleotide
auguccggaggagacagac

SEQ ID NO: 578586 - RNA, 19 nt, Artificial Sequence
  Description of Artificial Sequence: Synthetic oligonucleotide
agcucagguuuccaccacg

SEQ ID NO: 578587 - RNA, 19 nt, Artificial Sequence
  Description of Artificial Sequence: Synthetic oligonucleotide
gaugagaggcauaggcuug

SEQ ID NO: 578588 - RNA, 19 nt, Artificial Sequence
  Description of Artificial Sequence: Synthetic oligonucleotide
ggguaucuaguuuagguuc

SEQ ID NO: 578589 - RNA, 19 nt, Artificial Sequence
  Description of Artificial Sequence: Synthetic oligonucleotide
uugcccuauucccuggaca

SEQ ID NO: 578590 - RNA, 19 nt, Artificial Sequence
  Description of Artificial Sequence: Synthetic oligonucleotide
cugauugcccuauucccug

SEQ ID NO: 578591 - RNA, 19 nt, Artificial Sequence
  Description of Artificial Sequence: Synthetic oligonucleotide
aaucaacucugagauguaa

SEQ ID NO: 578592 - RNA, 19 nt, Artificial Sequence
  Description of Artificial Sequence: Synthetic oligonucleotide
ugucaagcuugcuacuuau

SEQ ID NO: 578593 - RNA, 19 nt, Artificial Sequence
  Description of Artificial Sequence: Synthetic oligonucleotide
uacggucaggaagucagag

SEQ ID NO: 578594 - RNA, 19 nt, Artificial Sequence
  Description of Artificial Sequence: Synthetic oligonucleotide
cugaagggccacauuacuc

SEQ ID NO: 578595 - RNA, 19 nt, Artificial Sequence
  Description of Artificial Sequence: Synthetic oligonucleotide
uagguucacugguuaagac

SEQ ID NO: 578596 - RNA, 19 nt, Artificial Sequence
  Description of Artificial Sequence: Synthetic oligonucleotide
cagaaacuagccuccugag

SEQ ID NO: 578597 - RNA, 19 nt, Artificial Sequence
  Description of Artificial Sequence: Synthetic oligonucleotide
agcaauaacuuaacaaaau

SEQ ID NO: 578598 - RNA, 19 nt, Artificial Sequence
  Description of Artificial Sequence: Synthetic oligonucleotide
ucagcguucuugauccgaa

SEQ ID NO: 578599 - RNA, 19 nt, Artificial Sequence
  Description of Artificial Sequence: Synthetic oligonucleotide
caaauuuugucacuucucu

SEQ ID NO: 578600 - RNA, 19 nt, Artificial Sequence
  Description of Artificial Sequence: Synthetic oligonucleotide
caucugccgaacuuuccgc

SEQ ID NO: 578601 - RNA, 19 nt, Artificial Sequence
  Description of Artificial Sequence: Synthetic oligonucleotide
ugcuagcaggagaaugucu

SEQ ID NO: 578602 - RNA, 19 nt, Artificial Sequence
  Description of Artificial Sequence: Synthetic oligonucleotide
acuuuucgacaguaaggcu

SEQ ID NO: 578603 - RNA, 19 nt, Artificial Sequence
  Description of Artificial Sequence: Synthetic oligonucleotide
gcggaugagaggcauaggc

SEQ ID NO: 578604 - RNA, 19 nt, Artificial Sequence
  Description of Artificial Sequence: Synthetic oligonucleotide
cauugacugucugugggag

SEQ ID NO: 578605 - RNA, 19 nt, Artificial Sequence
  Description of Artificial Sequence: Synthetic oligonucleotide
ucuccugaccucccuuuca

SEQ ID NO: 578606 - RNA, 19 nt, Artificial Sequence
  Description of Artificial Sequence: Synthetic oligonucleotide
ggggacagaaacuagccuc

SEQ ID NO: 578607 - RNA, 19 nt, Artificial Sequence
  Description of Artificial Sequence: Synthetic oligonucleotide
cgacaguaaggcuugaugc

SEQ ID NO: 578608 - RNA, 19 nt, Artificial Sequence
  Description of Artificial Sequence: Synthetic oligonucleotide
uaaguguuccugcccgccu

SEQ ID NO: 578609 - RNA, 19 nt, Artificial Sequence
  Description of Artificial Sequence: Synthetic oligonucleotide
uugaugcucuucucgugga

SEQ ID NO: 578610 - RNA, 19 nt, Artificial Sequence
  Description of Artificial Sequence: Synthetic oligonucleotide
ggaguaaggauauuguccu

SEQ ID NO: 578611 - RNA, 19 nt, Artificial Sequence
  Description of Artificial Sequence: Synthetic oligonucleotide
ugaggcuacuagagcacac

SEQ ID NO: 578612 - RNA, 19 nt, Artificial Sequence
  Description of Artificial Sequence: Synthetic oligonucleotide
acuugcuccgaucacuaua

SEQ ID NO: 578613 - RNA, 19 nt, Artificial Sequence
  Description of Artificial Sequence: Synthetic oligonucleotide
cauuacucuguucggcuuc

SEQ ID NO: 578614 - RNA, 19 nt, Artificial Sequence
  Description of Artificial Sequence: Synthetic oligonucleotide
uuuucgagagcagcagccu

SEQ ID NO: 578615 - RNA, 19 nt, Artificial Sequence
  Description of Artificial Sequence: Synthetic oligonucleotide
gcgaucagacaccauggcg

SEQ ID NO: 578616 - RNA, 19 nt, Artificial Sequence
  Description of Artificial Sequence: Synthetic oligonucleotide
cuccauugacugucugugg

SEQ ID NO: 578617 - RNA, 19 nt, Artificial Sequence
  Description of Artificial Sequence: Synthetic oligonucleotide
cuacuuauguccucccgga

SEQ ID NO: 578618 - RNA, 19 nt, Artificial Sequence
  Description of Artificial Sequence: Synthetic oligonucleotide
gcguaaguguuccugcccg

SEQ ID NO: 578619 - RNA, 19 nt, Artificial Sequence
  Description of Artificial Sequence: Synthetic oligonucleotide
cuaguuuagguucacuggu

SEQ ID NO: 578620 - RNA, 19 nt, Artificial Sequence
  Description of Artificial Sequence: Synthetic oligonucleotide
gaguaaggauauuguccug

SEQ ID NO: 578621 - RNA, 19 nt, Artificial Sequence
  Description of Artificial Sequence: Synthetic oligonucleotide
uggcguaaguguuccugcc

SEQ ID NO: 578622 - RNA, 19 nt, Artificial Sequence
  Description of Artificial Sequence: Synthetic oligonucleotide
auacagugaugguuuugcu

SEQ ID NO: 578623 - RNA, 19 nt, Artificial Sequence
  Description of Artificial Sequence: Synthetic oligonucleotide
  modified_base (6)..(6): a, c, u, g, unknown or other
uuuucncuuucugcuuggc

SEQ ID NO: 578624 - RNA, 19 nt, Artificial Sequence
  Description of Artificial Sequence: Synthetic oligonucleotide
caagguacggucaggaagu

SEQ ID NO: 578625 - RNA, 19 nt, Artificial Sequence
  Description of Artificial Sequence: Synthetic oligonucleotide
ccagagaaugaccagagga

SEQ ID NO: 578626 - RNA, 19 nt, Artificial Sequence
  Description of Artificial Sequence: Synthetic oligonucleotide
cucagguuuccaccacgcg

SEQ ID NO: 578627 - RNA, 19 nt, Artificial Sequence
  Description of Artificial Sequence: Synthetic oligonucleotide
cagcaagcgccucuguagc

SEQ ID NO: 578628 - RNA, 19 nt, Artificial Sequence
  Description of Artificial Sequence: Synthetic oligonucleotide
uuucgagagcagcagccuu

SEQ ID NO: 578629 - RNA, 19 nt, Artificial Sequence
  Description of Artificial Sequence: Synthetic oligonucleotide
agucaguaucaacagccua

SEQ ID NO: 578630 - RNA, 19 nt, Artificial Sequence
  Description of Artificial Sequence: Synthetic oligonucleotide
gucaugcauuucuaaguuc

SEQ ID NO: 578631 - RNA, 19 nt, Artificial Sequence
  Description of Artificial Sequence: Synthetic oligonucleotide
uugaggcuacuagagcaca

SEQ ID NO: 578632 - RNA, 19 nt, Artificial Sequence
  Description of Artificial Sequence: Synthetic oligonucleotide
uuuccaugacugaccugcu

SEQ ID NO: 578633 - RNA, 19 nt, Artificial Sequence
  Description of Artificial Sequence: Synthetic oligonucleotide
uugcuacuuauguccuccc

SEQ ID NO: 578634 - RNA, 19 nt, Artificial Sequence
  Description of Artificial Sequence: Synthetic oligonucleotide
uaucuaguuuagguucacu

SEQ ID NO: 578635 - RNA, 19 nt, Artificial Sequence
  Description of Artificial Sequence: Synthetic oligonucleotide
auauccggacacugcccag

SEQ ID NO: 578636 - RNA, 19 nt, Artificial Sequence
  Description of Artificial Sequence: Synthetic oligonucleotide
aggggaaauccugaagacu

SEQ ID NO: 578637 - RNA, 19 nt, Artificial Sequence
  Description of Artificial Sequence: Synthetic oligonucleotide
acgcggaugagaggcauag

SEQ ID NO: 578638 - RNA, 19 nt, Artificial Sequence
  Description of Artificial Sequence: Synthetic oligonucleotide
aagguacggucaggaaguc

SEQ ID NO: 578639 - RNA, 19 nt, Artificial Sequence
  Description of Artificial Sequence: Synthetic oligonucleotide
aggacuugcuccgaucacu

SEQ ID NO: 578640 - RNA, 19 nt, Artificial Sequence
  Description of Artificial Sequence: Synthetic oligonucleotide
ugacuggugccgccgcuca

SEQ ID NO: 578641 - RNA, 19 nt, Artificial Sequence
  Description of Artificial Sequence: Synthetic oligonucleotide
  modified_base (10)..(10): a, c, u, g, unknown or other
cagaauacunuccccacau

SEQ ID NO: 578642 - RNA, 19 nt, Artificial Sequence
  Description of Artificial Sequence: Synthetic oligonucleotide
ugcggucaugcauuucuaa

SEQ ID NO: 578643 - RNA, 19 nt, Artificial Sequence
  Description of Artificial Sequence: Synthetic oligonucleotide
uguccggaggagacagaca

SEQ ID NO: 578644 - RNA, 19 nt, Artificial Sequence
  Description of Artificial Sequence: Synthetic oligonucleotide
guaaguguuccugcccgcc

SEQ ID NO: 578645 - RNA, 19 nt, Artificial Sequence
  Description of Artificial Sequence: Synthetic oligonucleotide
uccugaccucccuuucaag

SEQ ID NO: 578646 - RNA, 19 nt, Artificial Sequence
  Description of Artificial Sequence: Synthetic oligonucleotide
gguacuaaaucaacucuga

SEQ ID NO: 578647 - RNA, 19 nt, Artificial Sequence
  Description of Artificial Sequence: Synthetic oligonucleotide
cucuugaaugguggugucc

SEQ ID NO: 578648 - RNA, 19 nt, Artificial Sequence
  Description of Artificial Sequence: Synthetic oligonucleotide
cuacuagagcacacuauaa

SEQ ID NO: 578649 - RNA, 19 nt, Artificial Sequence
  Description of Artificial Sequence: Synthetic oligonucleotide
ggucauucggggcugggac

SEQ ID NO: 578650 - RNA, 19 nt, Artificial Sequence
  Description of Artificial Sequence: Synthetic oligonucleotide
gcuacuagagcacacuaua

SEQ ID NO: 578651 - RNA, 19 nt, Artificial Sequence
  Description of Artificial Sequence: Synthetic oligonucleotide
ccagcaagcgccucuguag

SEQ ID NO: 578652 - RNA, 19 nt, Artificial Sequence
  Description of Artificial Sequence: Synthetic oligonucleotide
cuucccugacuuuucgaca

SEQ ID NO: 578653 - RNA, 19 nt, Artificial Sequence
  Description of Artificial Sequence: Synthetic oligonucleotide
caugcggucaugcauuucu

SEQ ID NO: 578654 - RNA, 19 nt, Artificial Sequence
  Description of Artificial Sequence: Synthetic oligonucleotide
gucaacuauuuauggccuc

SEQ ID NO: 578655 - RNA, 19 nt, Artificial Sequence
  Description of Artificial Sequence: Synthetic oligonucleotide
ucggcuucucgcugauacc

SEQ ID NO: 578656 - RNA, 19 nt, Artificial Sequence
  Description of Artificial Sequence: Synthetic oligonucleotide
ggcaaggguaucuaguuua

SEQ ID NO: 578657 - RNA, 19 nt, Artificial Sequence
  Description of Artificial Sequence: Synthetic oligonucleotide
ggacacaguugguuauggg

SEQ ID NO: 578658 - RNA, 19 nt, Artificial Sequence
  Description of Artificial Sequence: Synthetic oligonucleotide
aggucuggccagcuggccu

SEQ ID NO: 578659 - RNA, 19 nt, Artificial Sequence
  Description of Artificial Sequence: Synthetic oligonucleotide
cucaagaaccuuccuacua

SEQ ID NO: 578660 - RNA, 19 nt, Artificial Sequence
  Description of Artificial Sequence: Synthetic oligonucleotide
ugaugcucuucucguggau

SEQ ID NO: 578661 - RNA, 19 nt, Artificial Sequence
  Description of Artificial Sequence: Synthetic oligonucleotide
ccaguauacacagcagggg

SEQ ID NO: 578662 - RNA, 19 nt, Artificial Sequence
  Description of Artificial Sequence: Synthetic oligonucleotide
uuuuggggacuaagacaaa

SEQ ID NO: 578663 - RNA, 19 nt, Artificial Sequence
  Description of Artificial Sequence: Synthetic oligonucleotide
uccugucaagcuugcuacu

SEQ ID NO: 578664 - RNA, 19 nt, Artificial Sequence
  Description of Artificial Sequence: Synthetic oligonucleotide
  modified_base (8)..(8): a, c, u, g, unknown or other
ccuuuucncuuucugcuug

SEQ ID NO: 578665 - RNA, 19 nt, Artificial Sequence
  Description of Artificial Sequence: Synthetic oligonucleotide
gcuccgaucacuauacauc

SEQ ID NO: 578666 - RNA, 19 nt, Artificial Sequence
  Description of Artificial Sequence: Synthetic oligonucleotide
ggcuuggauauccggacac

SEQ ID NO: 578667 - RNA, 19 nt, Artificial Sequence
  Description of Artificial Sequence: Synthetic oligonucleotide
ucggggcugggacacaguu

SEQ ID NO: 578668 - RNA, 19 nt, Artificial Sequence
  Description of Artificial Sequence: Synthetic oligonucleotide
ggagacugcagagcacugg

SEQ ID NO: 578669 - RNA, 19 nt, Artificial Sequence
  Description of Artificial Sequence: Synthetic oligonucleotide
caguugguuaugggguggg

SEQ ID NO: 578670 - RNA, 19 nt, Artificial Sequence
  Description of Artificial Sequence: Synthetic oligonucleotide
caacagccuacaggggugg

SEQ ID NO: 578671 - RNA, 19 nt, Artificial Sequence
  Description of Artificial Sequence: Synthetic oligonucleotide
aggcuacuagagcacacua

SEQ ID NO: 578672 - RNA, 19 nt, Artificial Sequence
  Description of Artificial Sequence: Synthetic oligonucleotide
agucagcguucuugauccg

SEQ ID NO: 578673 - RNA, 19 nt, Artificial Sequence
  Description of Artificial Sequence: Synthetic oligonucleotide
caggggaguucuguuacac

SEQ ID NO: 578674 - RNA, 19 nt, Artificial Sequence
  Description of Artificial Sequence: Synthetic oligonucleotide
guucucugucuuggcacgg

SEQ ID NO: 578675 - RNA, 19 nt, Artificial Sequence
  Description of Artificial Sequence: Synthetic oligonucleotide
agcaagcgccucuguagcu

SEQ ID NO: 578676 - RNA, 19 nt, Artificial Sequence
  Description of Artificial Sequence: Synthetic oligonucleotide
uucauucccucaggacuug

SEQ ID NO: 578677 - RNA, 19 nt, Artificial Sequence
  Description of Artificial Sequence: Synthetic oligonucleotide
cacauuacucuguucggcu

SEQ ID NO: 578678 - RNA, 19 nt, Artificial Sequence
  Description of Artificial Sequence: Synthetic oligonucleotide
ggcguaaguguuccugccc

SEQ ID NO: 578679 - RNA, 19 nt, Artificial Sequence
  Description of Artificial Sequence: Synthetic oligonucleotide
gguaucuaguuuagguuca

SEQ ID NO: 578680 - RNA, 19 nt, Artificial Sequence
  Description of Artificial Sequence: Synthetic oligonucleotide
gcggggagaagucauguca

SEQ ID NO: 578681 - RNA, 19 nt, Artificial Sequence
  Description of Artificial Sequence: Synthetic oligonucleotide
aaaucaacucugagaugua

SEQ ID NO: 578682 - RNA, 19 nt, Artificial Sequence
  Description of Artificial Sequence: Synthetic oligonucleotide
ggggcuuggauauccggac

SEQ ID NO: 578683 - RNA, 19 nt, Artificial Sequence
  Description of Artificial Sequence: Synthetic oligonucleotide
gcagcuagauuccaguaua

SEQ ID NO: 578684 - RNA, 19 nt, Artificial Sequence
  Description of Artificial Sequence: Synthetic oligonucleotide
  modified_base (7)..(7): a, c, u, g, unknown or other
gauuucngcuccacucugu

SEQ ID NO: 578685 - RNA, 19 nt, Artificial Sequence
  Description of Artificial Sequence: Synthetic oligonucleotide
ccgaagcuccucuaaggcc

SEQ ID NO: 578686 - RNA, 19 nt, Artificial Sequence
  Description of Artificial Sequence: Synthetic oligonucleotide
aaacaguaacugggaguaa

SEQ ID NO: 578687 - RNA, 19 nt, Artificial Sequence
  Description of Artificial Sequence: Synthetic oligonucleotide
gcugauaccacccgguccu

SEQ ID NO: 578688 - RNA, 19 nt, Artificial Sequence
  Description of Artificial Sequence: Synthetic oligonucleotide
gcaugagcccaagaccugg

SEQ ID NO: 578689 - RNA, 19 nt, Artificial Sequence
  Description of Artificial Sequence: Synthetic oligonucleotide
  modified_base (9)..(9): a, c, u, g, unknown or other
cagauuucngcuccacucu

SEQ ID NO: 578690 - RNA, 19 nt, Artificial Sequence
  Description of Artificial Sequence: Synthetic oligonucleotide
gucauucggggcugggaca

SEQ ID NO: 578691 - RNA, 19 nt, Artificial Sequence
  Description of Artificial Sequence: Synthetic oligonucleotide
aggcaaggguaucuaguuu

SEQ ID NO: 578692 - RNA, 19 nt, Artificial Sequence
  Description of Artificial Sequence: Synthetic oligonucleotide
agccuacaggggugguggg

SEQ ID NO: 578693 - RNA, 19 nt, Artificial Sequence
  Description of Artificial Sequence: Synthetic oligonucleotide
caguaacugggaguaagga

SEQ ID NO: 578694 - RNA, 19 nt, Artificial Sequence
  Description of Artificial Sequence: Synthetic oligonucleotide
agguaagcccaaacaccuc

SEQ ID NO: 578695 - RNA, 19 nt, Artificial Sequence
  Description of Artificial Sequence: Synthetic oligonucleotide
ggcuugaugcuccgucucc

SEQ ID NO: 578696 - RNA, 19 nt, Artificial Sequence
  Description of Artificial Sequence: Synthetic oligonucleotide
guaucuaguuuagguucac

SEQ ID NO: 578697 - RNA, 19 nt, Artificial Sequence
  Description of Artificial Sequence: Synthetic oligonucleotide
agcuugcuacuuauguccu

SEQ ID NO: 578698 - RNA, 19 nt, Artificial Sequence
  Description of Artificial Sequence: Synthetic oligonucleotide
acagccuacagggguggug

SEQ ID NO: 578699 - RNA, 19 nt, Artificial Sequence
  Description of Artificial Sequence: Synthetic oligonucleotide
gcaaggguaucuaguuuag

SEQ ID NO: 578700 - RNA, 19 nt, Artificial Sequence
  Description of Artificial Sequence: Synthetic oligonucleotide
uucgacaguaaggcuugau

SEQ ID NO: 578701 - RNA, 19 nt, Artificial Sequence
  Description of Artificial Sequence: Synthetic oligonucleotide
gaggagcgaucagacacca

SEQ ID NO: 578702 - RNA, 19 nt, Artificial Sequence
  Description of Artificial Sequence: Synthetic oligonucleotide
cuaguaccaccuguaucuc

SEQ ID NO: 578703 - RNA, 19 nt, Artificial Sequence
  Description of Artificial Sequence: Synthetic oligonucleotide
aucauggacuccaccaguu

SEQ ID NO: 578704 - RNA, 19 nt, Artificial Sequence
  Description of Artificial Sequence: Synthetic oligonucleotide
cuaaggccaucuccccuuc

SEQ ID NO: 578705 - RNA, 19 nt, Artificial Sequence
  Description of Artificial Sequence: Synthetic oligonucleotide
ccacauuacucuguucggc

SEQ ID NO: 578706 - RNA, 19 nt, Artificial Sequence
  Description of Artificial Sequence: Synthetic oligonucleotide
cgaacuuuccgcugcuggc

SEQ ID NO: 578707 - RNA, 19 nt, Artificial Sequence
  Description of Artificial Sequence: Synthetic oligonucleotide
ugguuuugcugggacugau

SEQ ID NO: 578708 - RNA, 19 nt, Artificial Sequence
  Description of Artificial Sequence: Synthetic oligonucleotide
gaccaggucuggccagcug

SEQ ID NO: 578709 - RNA, 19 nt, Artificial Sequence
  Description of Artificial Sequence: Synthetic oligonucleotide
guccugacuggugccgccg

SEQ ID NO: 578710 - RNA, 19 nt, Artificial Sequence
  Description of Artificial Sequence: Synthetic oligonucleotide
uccaugcggucaugcauuu

SEQ ID NO: 578711 - RNA, 19 nt, Artificial Sequence
  Description of Artificial Sequence: Synthetic oligonucleotide
gacuggugccgccgcucag

SEQ ID NO: 578712 - RNA, 19 nt, Artificial Sequence
  Description of Artificial Sequence: Synthetic oligonucleotide
gucagcguucuugauccga

SEQ ID NO: 578713 - RNA, 19 nt, Artificial Sequence
  Description of Artificial Sequence: Synthetic oligonucleotide
gaugcuccaugcggucaug

SEQ ID NO: 578714 - RNA, 19 nt, Artificial Sequence
  Description of Artificial Sequence: Synthetic oligonucleotide
  modified_base (3)..(3): a, c, u, g, unknown or other
cunuccccacaucaaggua

SEQ ID NO: 578715 - RNA, 19 nt, Artificial Sequence
  Description of Artificial Sequence: Synthetic oligonucleotide
gaggcuacuagagcacacu

SEQ ID NO: 578716 - RNA, 19 nt, Artificial Sequence
  Description of Artificial Sequence: Synthetic oligonucleotide
cucuguucggcuucucgcu

SEQ ID NO: 578717 - RNA, 19 nt, Artificial Sequence
  Description of Artificial Sequence: Synthetic oligonucleotide
guaaggauauuguccuguu

SEQ ID NO: 578718 - RNA, 19 nt, Artificial Sequence
  Description of Artificial Sequence: Synthetic oligonucleotide
aacagccuacagggguggu

SEQ ID NO: 578719 - RNA, 19 nt, Artificial Sequence
  Description of Artificial Sequence: Synthetic oligonucleotide
uuucgacaguaaggcuuga

SEQ ID NO: 578720 - RNA, 19 nt, Artificial Sequence
  Description of Artificial Sequence: Synthetic oligonucleotide
gaccucccuuucaaguaca

SEQ ID NO: 578721 - RNA, 19 nt, Artificial Sequence
  Description of Artificial Sequence: Synthetic oligonucleotide
cugucaagcuugcuacuua

SEQ ID NO: 578722 - RNA, 19 nt, Artificial Sequence
  Description of Artificial Sequence: Synthetic oligonucleotide
agguacggucaggaaguca

SEQ ID NO: 578723 - RNA, 19 nt, Artificial Sequence
  Description of Artificial Sequence: Synthetic oligonucleotide
cucgcugauaccacccggu

SEQ ID NO: 578724 - RNA, 19 nt, Artificial Sequence
  Description of Artificial Sequence: Synthetic oligonucleotide
ggugugcuuuucaggacac

SEQ ID NO: 578725 - RNA, 19 nt, Artificial Sequence
  Description of Artificial Sequence: Synthetic oligonucleotide
gcacugguacuaaaucaac

SEQ ID NO: 578726 - RNA, 19 nt, Artificial Sequence
  Description of Artificial Sequence: Synthetic oligonucleotide
agggucauucggggcuggg

SEQ ID NO: 578727 - RNA, 19 nt, Artificial Sequence
  Description of Artificial Sequence: Synthetic oligonucleotide
gggcaugagcccaagaccu

SEQ ID NO: 578728 - RNA, 19 nt, Artificial Sequence
  Description of Artificial Sequence: Synthetic oligonucleotide
gugauguccggaggagaca

SEQ ID NO: 578729 - RNA, 19 nt, Artificial Sequence
  Description of Artificial Sequence: Synthetic oligonucleotide
cgaucagacaccauggcgu

SEQ ID NO: 578730 - RNA, 19 nt, Artificial Sequence
  Description of Artificial Sequence: Synthetic oligonucleotide
caacuauuuauggccucaa

SEQ ID NO: 578731 - RNA, 19 nt, Artificial Sequence
  Description of Artificial Sequence: Synthetic oligonucleotide
cacccgguccugacuggug

SEQ ID NO: 578732 - RNA, 19 nt, Artificial Sequence
  Description of Artificial Sequence: Synthetic oligonucleotide
cugcagagcacugguacua

SEQ ID NO: 578733 - RNA, 19 nt, Artificial Sequence
  Description of Artificial Sequence: Synthetic oligonucleotide
  modified_base (19)..(19): a, c, u, g, unknown or other
ggcgccaaccagaauacun

SEQ ID NO: 578734 - RNA, 19 nt, Artificial Sequence
  Description of Artificial Sequence: Synthetic oligonucleotide
cucuaaggccaucuccccu

SEQ ID NO: 578735 - RNA, 19 nt, Artificial Sequence
  Description of Artificial Sequence: Synthetic oligonucleotide
cuguuccugcuagcaggag

SEQ ID NO: 578736 - RNA, 19 nt, Artificial Sequence
  Description of Artificial Sequence: Synthetic oligonucleotide
ccauuuggcuuuucuagua

SEQ ID NO: 578737 - RNA, 19 nt, Artificial Sequence
  Description of Artificial Sequence: Synthetic oligonucleotide
cauucccucaggacuugcu

SEQ ID NO: 578738 - RNA, 19 nt, Artificial Sequence
  Description of Artificial Sequence: Synthetic oligonucleotide
ccauugacugucuguggga

SEQ ID NO: 578739 - RNA, 19 nt, Artificial Sequence
  Description of Artificial Sequence: Synthetic oligonucleotide
gauguccggaggagacaga

SEQ ID NO: 578740 - RNA, 19 nt, Artificial Sequence
  Description of Artificial Sequence: Synthetic oligonucleotide
acuagccuccugaguugug

SEQ ID NO: 578741 - RNA, 19 nt, Artificial Sequence
  Description of Artificial Sequence: Synthetic oligonucleotide
uggcacgggucugcgugcu

SEQ ID NO: 578742 - RNA, 19 nt, Artificial Sequence
  Description of Artificial Sequence: Synthetic oligonucleotide
ccugauugcccuauucccu

SEQ ID NO: 578743 - RNA, 19 nt, Artificial Sequence
  Description of Artificial Sequence: Synthetic oligonucleotide
guacggucaggaagucaga

SEQ ID NO: 578744 - RNA, 19 nt, Artificial Sequence
  Description of Artificial Sequence: Synthetic oligonucleotide
ccccuucccugacuuuucg

SEQ ID NO: 578745 - RNA, 19 nt, Artificial Sequence
  Description of Artificial Sequence: Synthetic oligonucleotide
ggcaugagcccaagaccug

SEQ ID NO: 578746 - RNA, 19 nt, Artificial Sequence
  Description of Artificial Sequence: Synthetic oligonucleotide
gguuuccaccacgcggaug

SEQ ID NO: 578747 - RNA, 19 nt, Artificial Sequence
  Description of Artificial Sequence: Synthetic oligonucleotide
cugauaccacccgguccug

SEQ ID NO: 578748 - RNA, 19 nt, Artificial Sequence
  Description of Artificial Sequence: Synthetic oligonucleotide
agccuccaaauaggcaauu

SEQ ID NO: 578749 - RNA, 19 nt, Artificial Sequence
  Description of Artificial Sequence: Synthetic oligonucleotide
ggacuugcuccgaucacua

SEQ ID NO: 578750 - RNA, 19 nt, Artificial Sequence
  Description of Artificial Sequence: Synthetic oligonucleotide
accacgcggaugagaggca

SEQ ID NO: 578751 - RNA, 19 nt, Artificial Sequence
  Description of Artificial Sequence: Synthetic oligonucleotide
augcggucaugcauuucua

SEQ ID NO: 578752 - RNA, 19 nt, Artificial Sequence
  Description of Artificial Sequence: Synthetic oligonucleotide
gccuacagggguggugggc

SEQ ID NO: 578753 - RNA, 19 nt, Artificial Sequence
  Description of Artificial Sequence: Synthetic oligonucleotide
aggcgccaaccagaauacu

SEQ ID NO: 578754 - RNA, 19 nt, Artificial Sequence
  Description of Artificial Sequence: Synthetic oligonucleotide
  modified_base (17)..(17): a, c, u, g, unknown or other
cgccaaccagaauacunuc

SEQ ID NO: 578755 - RNA, 19 nt, Artificial Sequence
  Description of Artificial Sequence: Synthetic oligonucleotide
ccgaaacccagccacuucu

SEQ ID NO: 578756 - RNA, 19 nt, Artificial Sequence
  Description of Artificial Sequence: Synthetic oligonucleotide
cccgaaacccagccacuuc

SEQ ID NO: 578757 - RNA, 19 nt, Artificial Sequence
  Description of Artificial Sequence: Synthetic oligonucleotide
ccgguccugacuggugccg

SEQ ID NO: 578758 - RNA, 19 nt, Artificial Sequence
  Description of Artificial Sequence: Synthetic oligonucleotide
gcccuauucccuggacagc

SEQ ID NO: 578759 - RNA, 19 nt, Artificial Sequence
  Description of Artificial Sequence: Synthetic oligonucleotide
  modified_base (18)..(18): a, c, u, g, unknown or other
gcgccaaccagaauacunu

SEQ ID NO: 578760 - RNA, 19 nt, Artificial Sequence
  Description of Artificial Sequence: Synthetic oligonucleotide
gggucauucggggcuggga

SEQ ID NO: 578761 - RNA, 19 nt, Artificial Sequence
  Description of Artificial Sequence: Synthetic oligonucleotide
gcacgggucugcgugcuga

SEQ ID NO: 578762 - RNA, 19 nt, Artificial Sequence
  Description of Artificial Sequence: Synthetic oligonucleotide
cuugaauggugguguccuu

SEQ ID NO: 578763 - RNA, 19 nt, Artificial Sequence
  Description of Artificial Sequence: Synthetic oligonucleotide
ggcuacuagagcacacuau

SEQ ID NO: 578764 - RNA, 19 nt, Artificial Sequence
  Description of Artificial Sequence: Synthetic oligonucleotide
cacgcggaugagaggcaua

SEQ ID NO: 578765 - RNA, 19 nt, Artificial Sequence
  Description of Artificial Sequence: Synthetic oligonucleotide
cacgggucugcgugcugaa

SEQ ID NO: 578766 - RNA, 19 nt, Artificial Sequence
  Description of Artificial Sequence: Synthetic oligonucleotide
cccuuucaaguacaccuua

SEQ ID NO: 578767 - RNA, 19 nt, Artificial Sequence
  Description of Artificial Sequence: Synthetic oligonucleotide
  modified_base (9)..(9): a, c, u, g, unknown or other
gccuuuucncuuucugcuu

SEQ ID NO: 578768 - RNA, 19 nt, Artificial Sequence
  Description of Artificial Sequence: Synthetic oligonucleotide
cagcggggagaagucaugu

SEQ ID NO: 578769 - RNA, 19 nt, Artificial Sequence
  Description of Artificial Sequence: Synthetic oligonucleotide
ggguggagccaaguagaaa

SEQ ID NO: 578770 - RNA, 19 nt, Artificial Sequence
  Description of Artificial Sequence: Synthetic oligonucleotide
ggggccaccaagguacggu

SEQ ID NO: 578771 - RNA, 19 nt, Artificial Sequence
  Description of Artificial Sequence: Synthetic oligonucleotide
ggcacgggucugcgugcug

SEQ ID NO: 578772 - RNA, 19 nt, Artificial Sequence
  Description of Artificial Sequence: Synthetic oligonucleotide
cgcggaugagaggcauagg

SEQ ID NO: 578773 - RNA, 19 nt, Artificial Sequence
  Description of Artificial Sequence: Synthetic oligonucleotide
ccaugcggucaugcauuuc

SEQ ID NO: 578774 - RNA, 19 nt, Artificial Sequence
  Description of Artificial Sequence: Synthetic oligonucleotide
gccuccaaauaggcaauuu

SEQ ID NO: 578775 - RNA, 19 nt, Artificial Sequence
  Description of Artificial Sequence: Synthetic oligonucleotide
cacuccugauugcccuauu

SEQ ID NO: 578776 - RNA, 19 nt, Artificial Sequence
  Description of Artificial Sequence: Synthetic oligonucleotide
gggaggguucagagagguu

SEQ ID NO: 578777 - RNA, 19 nt, Artificial Sequence
  Description of Artificial Sequence: Synthetic oligonucleotide
ccacgcggaugagaggcau

SEQ ID NO: 578778 - RNA, 19 nt, Artificial Sequence
  Description of Artificial Sequence: Synthetic oligonucleotide
uagacuauaaauuagacaa

SEQ ID NO: 578779 - RNA, 19 nt, Artificial Sequence
  Description of Artificial Sequence: Synthetic oligonucleotide
uauacuagaaauaugcuca

SEQ ID NO: 578780 - RNA, 19 nt, Artificial Sequence
  Description of Artificial Sequence: Synthetic oligonucleotide
uggguuuuaauucagacag

SEQ ID NO: 578781 - RNA, 19 nt, Artificial Sequence
  Description of Artificial Sequence: Synthetic oligonucleotide
caugauaacccuaaaaugg

SEQ ID NO: 578782 - RNA, 19 nt, Artificial Sequence
  Description of Artificial Sequence: Synthetic oligonucleotide
agauauacuagaaauaugc

SEQ ID NO: 578783 - RNA, 19 nt, Artificial Sequence
  Description of Artificial Sequence: Synthetic oligonucleotide
aaugauauguuccugaaau

SEQ ID NO: 578784 - RNA, 19 nt, Artificial Sequence
  Description of Artificial Sequence: Synthetic oligonucleotide
ucuuaaauuauacugcuug

SEQ ID NO: 578785 - RNA, 19 nt, Artificial Sequence
  Description of Artificial Sequence: Synthetic oligonucleotide
aauacuauaggcauuaaug

SEQ ID NO: 578786 - RNA, 19 nt, Artificial Sequence
  Description of Artificial Sequence: Synthetic oligonucleotide
uauacuaagauauacuaga

SEQ ID NO: 578787 - RNA, 19 nt, Artificial Sequence
  Description of Artificial Sequence: Synthetic oligonucleotide
uucucuuacagcaagacca

SEQ ID NO: 578788 - RNA, 19 nt, Artificial Sequence
  Description of Artificial Sequence: Synthetic oligonucleotide
uuuauuuuggcucacaguu

SEQ ID NO: 578789 - RNA, 19 nt, Artificial Sequence
  Description of Artificial Sequence: Synthetic oligonucleotide
aaaauagagccauaaguug

SEQ ID NO: 578790 - RNA, 19 nt, Artificial Sequence
  Description of Artificial Sequence: Synthetic oligonucleotide
aaaugaaucuguuagcagu

SEQ ID NO: 578791 - RNA, 19 nt, Artificial Sequence
  Description of Artificial Sequence: Synthetic oligonucleotide
auugauacuucuuagauau

SEQ ID NO: 578792 - RNA, 19 nt, Artificial Sequence
  Description of Artificial Sequence: Synthetic oligonucleotide
auauacuagaaauaugcuc

SEQ ID NO: 578793 - RNA, 19 nt, Artificial Sequence
  Description of Artificial Sequence: Synthetic oligonucleotide
aauugauugcaaaugaauc

SEQ ID NO: 578794 - RNA, 19 nt, Artificial Sequence
  Description of Artificial Sequence: Synthetic oligonucleotide
uuucaacaaagcuacacgg

SEQ ID NO: 578795 - RNA, 19 nt, Artificial Sequence
  Description of Artificial Sequence: Synthetic oligonucleotide
ucacccaacauccuaaagg

SEQ ID NO: 578796 - RNA, 19 nt, Artificial Sequence
  Description of Artificial Sequence: Synthetic oligonucleotide
acuaagauauacuagaaau

SEQ ID NO: 578797 - RNA, 19 nt, Artificial Sequence
  Description of Artificial Sequence: Synthetic oligonucleotide
cuugacaaauacuauaggc

SEQ ID NO: 578798 - RNA, 19 nt, Artificial Sequence
  Description of Artificial Sequence: Synthetic oligonucleotide
aaaggcucacccaacaucc

SEQ ID NO: 578799 - RNA, 19 nt, Artificial Sequence
  Description of Artificial Sequence: Synthetic oligonucleotide
uugacaaauacuauaggca

SEQ ID NO: 578800 - RNA, 19 nt, Artificial Sequence
  Description of Artificial Sequence: Synthetic oligonucleotide
uguagaauccuuaaaggcu

SEQ ID NO: 578801 - RNA, 19 nt, Artificial Sequence
  Description of Artificial Sequence: Synthetic oligonucleotide
aaauugauacuucuuagau

SEQ ID NO: 578802 - RNA, 19 nt, Artificial Sequence
  Description of Artificial Sequence: Synthetic oligonucleotide
gaaguaaccaccucauagg

SEQ ID NO: 578803 - RNA, 19 nt, Artificial Sequence
  Description of Artificial Sequence: Synthetic oligonucleotide
uacucuuaugaaaugauga

SEQ ID NO: 578804 - RNA, 19 nt, Artificial Sequence
  Description of Artificial Sequence: Synthetic oligonucleotide
uuuauacuaagauauacua

SEQ ID NO: 578805 - RNA, 19 nt, Artificial Sequence
  Description of Artificial Sequence: Synthetic oligonucleotide
ugcuugacaaauacuauag

SEQ ID NO: 578806 - RNA, 19 nt, Artificial Sequence
  Description of Artificial Sequence: Synthetic oligonucleotide
uacaaugugaacauuuaac

SEQ ID NO: 578807 - RNA, 19 nt, Artificial Sequence
  Description of Artificial Sequence: Synthetic oligonucleotide
aaguaaccaccucauaggg

SEQ ID NO: 578808 - RNA, 19 nt, Artificial Sequence
  Description of Artificial Sequence: Synthetic oligonucleotide
augaaauacagguacaccu

SEQ ID NO: 578809 - RNA, 19 nt, Artificial Sequence
  Description of Artificial Sequence: Synthetic oligonucleotide
uauacugcuugacaaauac

SEQ ID NO: 578810 - RNA, 19 nt, Artificial Sequence
  Description of Artificial Sequence: Synthetic oligonucleotide
auuuaguuaacacaccaca

SEQ ID NO: 578811 - RNA, 19 nt, Artificial Sequence
  Description of Artificial Sequence: Synthetic oligonucleotide
ucaugauaacccuaaaaug

SEQ ID NO: 578812 - RNA, 19 nt, Artificial Sequence
  Description of Artificial Sequence: Synthetic oligonucleotide
ucaagguuaguacuacagg

SEQ ID NO: 578813 - RNA, 19 nt, Artificial Sequence
  Description of Artificial Sequence: Synthetic oligonucleotide
uugcuuuaccauuuaaggg

SEQ ID NO: 578814 - RNA, 19 nt, Artificial Sequence
  Description of Artificial Sequence: Synthetic oligonucleotide
uuuaacaguguacuauuug

SEQ ID NO: 578815 - RNA, 19 nt, Artificial Sequence
  Description of Artificial Sequence: Synthetic oligonucleotide
aguacuacaggaaguaacc

SEQ ID NO: 578816 - RNA, 19 nt, Artificial Sequence
  Description of Artificial Sequence: Synthetic oligonucleotide
agauauucaagaauuacag

SEQ ID NO: 578817 - RNA, 19 nt, Artificial Sequence
  Description of Artificial Sequence: Synthetic oligonucleotide
cuauguuucugcuagugag

SEQ ID NO: 578818 - RNA, 19 nt, Artificial Sequence
  Description of Artificial Sequence: Synthetic oligonucleotide
augauauacacagacuucg

SEQ ID NO: 578819 - RNA, 19 nt, Artificial Sequence
  Description of Artificial Sequence: Synthetic oligonucleotide
uuuagacuauaaauuagac

SEQ ID NO: 578820 - RNA, 19 nt, Artificial Sequence
  Description of Artificial Sequence: Synthetic oligonucleotide
uaagauauacuagaaauau

SEQ ID NO: 578821 - RNA, 19 nt, Artificial Sequence
  Description of Artificial Sequence: Synthetic oligonucleotide
guaacaacuauguuucugc

SEQ ID NO: 578822 - RNA, 19 nt, Artificial Sequence
  Description of Artificial Sequence: Synthetic oligonucleotide
ugguuuaggggcuugaaug

SEQ ID NO: 578823 - RNA, 19 nt, Artificial Sequence
  Description of Artificial Sequence: Synthetic oligonucleotide
uguagucuugacuucaggc

SEQ ID NO: 578824 - RNA, 19 nt, Artificial Sequence
  Description of Artificial Sequence: Synthetic oligonucleotide
auacuauaggcauuaaugu

SEQ ID NO: 578825 - RNA, 19 nt, Artificial Sequence
  Description of Artificial Sequence: Synthetic oligonucleotide
auauacacagacuucgucu

SEQ ID NO: 578826 - RNA, 19 nt, Artificial Sequence
  Description of Artificial Sequence: Synthetic oligonucleotide
uguacuauuugcuucuacu

SEQ ID NO: 578827 - RNA, 19 nt, Artificial Sequence
  Description of Artificial Sequence: Synthetic oligonucleotide
cagaaugauauacacagac

SEQ ID NO: 578828 - RNA, 19 nt, Artificial Sequence
  Description of Artificial Sequence: Synthetic oligonucleotide
aagauauucaagaauuaca

SEQ ID NO: 578829 - RNA, 19 nt, Artificial Sequence
  Description of Artificial Sequence: Synthetic oligonucleotide
uucgucuaaacucuguaga

SEQ ID NO: 578830 - RNA, 19 nt, Artificial Sequence
  Description of Artificial Sequence: Synthetic oligonucleotide
guuuauaauggcugugacg

SEQ ID NO: 578831 - RNA, 19 nt, Artificial Sequence
  Description of Artificial Sequence: Synthetic oligonucleotide
ucaagccucacacauauau

SEQ ID NO: 578832 - RNA, 19 nt, Artificial Sequence
  Description of Artificial Sequence: Synthetic oligonucleotide
acguguuucccuuuuguac

SEQ ID NO: 578833 - RNA, 19 nt, Artificial Sequence
  Description of Artificial Sequence: Synthetic oligonucleotide
ccauuuaaggguaacagcg

SEQ ID NO: 578834 - RNA, 19 nt, Artificial Sequence
  Description of Artificial Sequence: Synthetic oligonucleotide
uauagucuuaaauuauacu

SEQ ID NO: 578835 - RNA, 19 nt, Artificial Sequence
  Description of Artificial Sequence: Synthetic oligonucleotide
gauuuagacuauaaauuag

SEQ ID NO: 578836 - RNA, 19 nt, Artificial Sequence
  Description of Artificial Sequence: Synthetic oligonucleotide
acaguguacuauuugcuuc

SEQ ID NO: 578837 - RNA, 19 nt, Artificial Sequence
  Description of Artificial Sequence: Synthetic oligonucleotide
aguuuauaauggcugugac

SEQ ID NO: 578838 - RNA, 19 nt, Artificial Sequence
  Description of Artificial Sequence: Synthetic oligonucleotide
uacacggucacaauuuuac

SEQ ID NO: 578839 - RNA, 19 nt, Artificial Sequence
  Description of Artificial Sequence: Synthetic oligonucleotide
uauuucucugcuuauaaua

SEQ ID NO: 578840 - RNA, 19 nt, Artificial Sequence
  Description of Artificial Sequence: Synthetic oligonucleotide
ucuacauggaacaacuuuu

SEQ ID NO: 578841 - RNA, 19 nt, Artificial Sequence
  Description of Artificial Sequence: Synthetic oligonucleotide
uuuuagcauacacugagau

SEQ ID NO: 578842 - RNA, 19 nt, Artificial Sequence
  Description of Artificial Sequence: Synthetic oligonucleotide
acucuuaugaaaugaugag

SEQ ID NO: 578843 - RNA, 19 nt, Artificial Sequence
  Description of Artificial Sequence: Synthetic oligonucleotide
uguauuaaaaucugagguu

SEQ ID NO: 578844 - RNA, 19 nt, Artificial Sequence
  Description of Artificial Sequence: Synthetic oligonucleotide
gucuaaacucuguagaccc

SEQ ID NO: 578845 - RNA, 19 nt, Artificial Sequence
  Description of Artificial Sequence: Synthetic oligonucleotide
uuuauauuacaccuugcuu

SEQ ID NO: 578846 - RNA, 19 nt, Artificial Sequence
  Description of Artificial Sequence: Synthetic oligonucleotide
uauuuuggcucacaguuuc

SEQ ID NO: 578847 - RNA, 19 nt, Artificial Sequence
  Description of Artificial Sequence: Synthetic oligonucleotide
uuacucuuaugaaaugaug

SEQ ID NO: 578848 - RNA, 19 nt, Artificial Sequence
  Description of Artificial Sequence: Synthetic oligonucleotide
guguagaauccuuaaaggc

SEQ ID NO: 578849 - RNA, 19 nt, Artificial Sequence
  Description of Artificial Sequence: Synthetic oligonucleotide
aagacuugcccacugcaug

SEQ ID NO: 578850 - RNA, 19 nt, Artificial Sequence
  Description of Artificial Sequence: Synthetic oligonucleotide
cuauagucuuaaauuauac

SEQ ID NO: 578851 - RNA, 19 nt, Artificial Sequence
  Description of Artificial Sequence: Synthetic oligonucleotide
auugcuuacucuuaugaaa

SEQ ID NO: 578852 - RNA, 19 nt, Artificial Sequence
  Description of Artificial Sequence: Synthetic oligonucleotide
aggugaaacccacaccacc

SEQ ID NO: 578853 - RNA, 19 nt, Artificial Sequence
  Description of Artificial Sequence: Synthetic oligonucleotide
gugaucucaaucuuuguug

SEQ ID NO: 578854 - RNA, 19 nt, Artificial Sequence
  Description of Artificial Sequence: Synthetic oligonucleotide
uauuacaccuugcuuuacc

SEQ ID NO: 578855 - RNA, 19 nt, Artificial Sequence
  Description of Artificial Sequence: Synthetic oligonucleotide
gauaacccuaaaauggaag

SEQ ID NO: 578856 - RNA, 19 nt, Artificial Sequence
  Description of Artificial Sequence: Synthetic oligonucleotide
gguguagaauccuuaaagg

SEQ ID NO: 578857 - RNA, 19 nt, Artificial Sequence
  Description of Artificial Sequence: Synthetic oligonucleotide
aagauuacagcagcaagcu

SEQ ID NO: 578858 - RNA, 19 nt, Artificial Sequence
  Description of Artificial Sequence: Synthetic oligonucleotide
aaauugauugcaaaugaau

SEQ ID NO: 578859 - RNA, 19 nt, Artificial Sequence
  Description of Artificial Sequence: Synthetic oligonucleotide
ucuauagucuuaaauuaua

SEQ ID NO: 578860 - RNA, 19 nt, Artificial Sequence
  Description of Artificial Sequence: Synthetic oligonucleotide
uaaauugauugcaaaugaa

SEQ ID NO: 578861 - RNA, 19 nt, Artificial Sequence
  Description of Artificial Sequence: Synthetic oligonucleotide
uuuguacagccuacaaugc

SEQ ID NO: 578862 - RNA, 19 nt, Artificial Sequence
  Description of Artificial Sequence: Synthetic oligonucleotide
gaaaauagguacuccagaa

SEQ ID NO: 578863 - RNA, 19 nt, Artificial Sequence
  Description of Artificial Sequence: Synthetic oligonucleotide
agaagcgccauuccguuuc

SEQ ID NO: 578864 - RNA, 19 nt, Artificial Sequence
  Description of Artificial Sequence: Synthetic oligonucleotide
auauauuucaacaaagcua

SEQ ID NO: 578865 - RNA, 19 nt, Artificial Sequence
  Description of Artificial Sequence: Synthetic oligonucleotide
uguuaugccuaccuuuugu

SEQ ID NO: 578866 - RNA, 19 nt, Artificial Sequence
  Description of Artificial Sequence: Synthetic oligonucleotide
aacgaacagacuuuggcuu

SEQ ID NO: 578867 - RNA, 19 nt, Artificial Sequence
  Description of Artificial Sequence: Synthetic oligonucleotide
aauaaucaucuuacagaac

SEQ ID NO: 578868 - RNA, 19 nt, Artificial Sequence
  Description of Artificial Sequence: Synthetic oligonucleotide
gcgguuguaacacagaagc

SEQ ID NO: 578869 - RNA, 19 nt, Artificial Sequence
  Description of Artificial Sequence: Synthetic oligonucleotide
gauauguuccugaaauuug

SEQ ID NO: 578870 - RNA, 19 nt, Artificial Sequence
  Description of Artificial Sequence: Synthetic oligonucleotide
uugcuuacucuuaugaaau

SEQ ID NO: 578871 - RNA, 19 nt, Artificial Sequence
  Description of Artificial Sequence: Synthetic oligonucleotide
ugacuacacugcuucaagg

SEQ ID NO: 578872 - RNA, 19 nt, Artificial Sequence
  Description of Artificial Sequence: Synthetic oligonucleotide
uacuaagauauacuagaaa

SEQ ID NO: 578873 - RNA, 19 nt, Artificial Sequence
  Description of Artificial Sequence: Synthetic oligonucleotide
uucaacaaagcuacacggu

SEQ ID NO: 578874 - RNA, 19 nt, Artificial Sequence
  Description of Artificial Sequence: Synthetic oligonucleotide
gaggauuuagacuauaaau

SEQ ID NO: 578875 - RNA, 19 nt, Artificial Sequence
  Description of Artificial Sequence: Synthetic oligonucleotide
acuccguuuaacaucaauc

SEQ ID NO: 578876 - RNA, 19 nt, Artificial Sequence
  Description of Artificial Sequence: Synthetic oligonucleotide
aacaguguacuauuugcuu

SEQ ID NO: 578877 - RNA, 19 nt, Artificial Sequence
  Description of Artificial Sequence: Synthetic oligonucleotide
uuagcaguacccacagaug

SEQ ID NO: 578878 - RNA, 19 nt, Artificial Sequence
  Description of Artificial Sequence: Synthetic oligonucleotide
aguacccacagauggugac

SEQ ID NO: 578879 - RNA, 19 nt, Artificial Sequence
  Description of Artificial Sequence: Synthetic oligonucleotide
agaccaacccuucagggca

SEQ ID NO: 578880 - RNA, 19 nt, Artificial Sequence
  Description of Artificial Sequence: Synthetic oligonucleotide
ucaagacuugcccacugca

SEQ ID NO: 578881 - RNA, 19 nt, Artificial Sequence
  Description of Artificial Sequence: Synthetic oligonucleotide
aaaguuuauuuuggcucac

SEQ ID NO: 578882 - RNA, 19 nt, Artificial Sequence
  Description of Artificial Sequence: Synthetic oligonucleotide
caaaugaaucuguuagcag

SEQ ID NO: 578883 - RNA, 19 nt, Artificial Sequence
  Description of Artificial Sequence: Synthetic oligonucleotide
gauagauaucaucccuaag

SEQ ID NO: 578884 - RNA, 19 nt, Artificial Sequence
  Description of Artificial Sequence: Synthetic oligonucleotide
aaacaccccuuuuauuucu

SEQ ID NO: 578885 - RNA, 19 nt, Artificial Sequence
  Description of Artificial Sequence: Synthetic oligonucleotide
aacuauguuucugcuagug

SEQ ID NO: 578886 - RNA, 19 nt, Artificial Sequence
  Description of Artificial Sequence: Synthetic oligonucleotide
ucaucuuacagaacucaaa

SEQ ID NO: 578887 - RNA, 19 nt, Artificial Sequence
  Description of Artificial Sequence: Synthetic oligonucleotide
auuacaccuugcuuuacca

SEQ ID NO: 578888 - RNA, 19 nt, Artificial Sequence
  Description of Artificial Sequence: Synthetic oligonucleotide
augugaacauuuaacagug

SEQ ID NO: 578889 - RNA, 19 nt, Artificial Sequence
  Description of Artificial Sequence: Synthetic oligonucleotide
guaacagcgauaucaggac

SEQ ID NO: 578890 - RNA, 19 nt, Artificial Sequence
  Description of Artificial Sequence: Synthetic oligonucleotide
acuauaggcauuaauguaa

SEQ ID NO: 578891 - RNA, 19 nt, Artificial Sequence
  Description of Artificial Sequence: Synthetic oligonucleotide
uccuaggugaaacccacac

SEQ ID NO: 578892 - RNA, 19 nt, Artificial Sequence
  Description of Artificial Sequence: Synthetic oligonucleotide
auaacuccguuuaacauca

SEQ ID NO: 578893 - RNA, 19 nt, Artificial Sequence
  Description of Artificial Sequence: Synthetic oligonucleotide
ugauugcaaaugaaucugu

SEQ ID NO: 578894 - RNA, 19 nt, Artificial Sequence
  Description of Artificial Sequence: Synthetic oligonucleotide
uacuauaggcauuaaugua

SEQ ID NO: 578895 - RNA, 19 nt, Artificial Sequence
  Description of Artificial Sequence: Synthetic oligonucleotide
aggauuuagacuauaaauu

SEQ ID NO: 578896 - RNA, 19 nt, Artificial Sequence
  Description of Artificial Sequence: Synthetic oligonucleotide
uuuuaauuccaaguuuguc

SEQ ID NO: 578897 - RNA, 19 nt, Artificial Sequence
  Description of Artificial Sequence: Synthetic oligonucleotide
aauguaaccuucugacauu

SEQ ID NO: 578898 - RNA, 19 nt, Artificial Sequence
  Description of Artificial Sequence: Synthetic oligonucleotide
uuacauaacuccguuuaac

SEQ ID NO: 578899 - RNA, 19 nt, Artificial Sequence
  Description of Artificial Sequence: Synthetic oligonucleotide
ucgucuaaacucuguagac

SEQ ID NO: 578900 - RNA, 19 nt, Artificial Sequence
  Description of Artificial Sequence: Synthetic oligonucleotide
uuguucuacagccuucaaa

SEQ ID NO: 578901 - RNA, 19 nt, Artificial Sequence
  Description of Artificial Sequence: Synthetic oligonucleotide
uuaugccuaccuuuuguac

SEQ ID NO: 578902 - RNA, 19 nt, Artificial Sequence
  Description of Artificial Sequence: Synthetic oligonucleotide
cuucauguuggguaacaac

SEQ ID NO: 578903 - RNA, 19 nt, Artificial Sequence
  Description of Artificial Sequence: Synthetic oligonucleotide
agaggauuuagacuauaaa

SEQ ID NO: 578904 - RNA, 19 nt, Artificial Sequence
  Description of Artificial Sequence: Synthetic oligonucleotide
ugaagaaccucaugauaac

SEQ ID NO: 578905 - RNA, 19 nt, Artificial Sequence
  Description of Artificial Sequence: Synthetic oligonucleotide
uuagccucggggucgaaac

SEQ ID NO: 578906 - RNA, 19 nt, Artificial Sequence
  Description of Artificial Sequence: Synthetic oligonucleotide
ugguaugucuuugaacacc

SEQ ID NO: 578907 - RNA, 19 nt, Artificial Sequence
  Description of Artificial Sequence: Synthetic oligonucleotide
caaauugauacuucuuaga

SEQ ID NO: 578908 - RNA, 19 nt, Artificial Sequence
  Description of Artificial Sequence: Synthetic oligonucleotide
ugauaacccuaaaauggaa

SEQ ID NO: 578909 - RNA, 19 nt, Artificial Sequence
  Description of Artificial Sequence: Synthetic oligonucleotide
caugaaauacagguacacc

SEQ ID NO: 578910 - RNA, 19 nt, Artificial Sequence
  Description of Artificial Sequence: Synthetic oligonucleotide
ugggcuaagaauguauuaa

SEQ ID NO: 578911 - RNA, 19 nt, Artificial Sequence
  Description of Artificial Sequence: Synthetic oligonucleotide
cuucucuuacagcaagacc

SEQ ID NO: 578912 - RNA, 19 nt, Artificial Sequence
  Description of Artificial Sequence: Synthetic oligonucleotide
gagcacgggacagaggugg

SEQ ID NO: 578913 - RNA, 19 nt, Artificial Sequence
  Description of Artificial Sequence: Synthetic oligonucleotide
aacaacuauguuucugcua

SEQ ID NO: 578914 - RNA, 19 nt, Artificial Sequence
  Description of Artificial Sequence: Synthetic oligonucleotide
auugcaaaugaaucuguua

SEQ ID NO: 578915 - RNA, 19 nt, Artificial Sequence
  Description of Artificial Sequence: Synthetic oligonucleotide
cauuccguuuccuagguga

SEQ ID NO: 578916 - RNA, 19 nt, Artificial Sequence
  Description of Artificial Sequence: Synthetic oligonucleotide
acauaacuccguuuaacau

SEQ ID NO: 578917 - RNA, 19 nt, Artificial Sequence
  Description of Artificial Sequence: Synthetic oligonucleotide
ugcuagugaggacacuuga

SEQ ID NO: 578918 - RNA, 19 nt, Artificial Sequence
  Description of Artificial Sequence: Synthetic oligonucleotide
ccucauggaaaauagguac

SEQ ID NO: 578919 - RNA, 19 nt, Artificial Sequence
  Description of Artificial Sequence: Synthetic oligonucleotide
uccaauauuucauccccuc

SEQ ID NO: 578920 - RNA, 19 nt, Artificial Sequence
  Description of Artificial Sequence: Synthetic oligonucleotide
uuaccauuuaaggguaaca

SEQ ID NO: 578921 - RNA, 19 nt, Artificial Sequence
  Description of Artificial Sequence: Synthetic oligonucleotide
uaacagcgauaucaggaca

SEQ ID NO: 578922 - RNA, 19 nt, Artificial Sequence
  Description of Artificial Sequence: Synthetic oligonucleotide
ugugacggcagcacugaga

SEQ ID NO: 578923 - RNA, 19 nt, Artificial Sequence
  Description of Artificial Sequence: Synthetic oligonucleotide
ucauguuggguaacaacua

SEQ ID NO: 578924 - RNA, 19 nt, Artificial Sequence
  Description of Artificial Sequence: Synthetic oligonucleotide
uuuaaggguaacagcgaua

SEQ ID NO: 578925 - RNA, 19 nt, Artificial Sequence
  Description of Artificial Sequence: Synthetic oligonucleotide
uaacaacuauguuucugcu

SEQ ID NO: 578926 - RNA, 19 nt, Artificial Sequence
  Description of Artificial Sequence: Synthetic oligonucleotide
aaagcuacacggucacaau

SEQ ID NO: 578927 - RNA, 19 nt, Artificial Sequence
  Description of Artificial Sequence: Synthetic oligonucleotide
ugaugaguuuuaaccaaau

SEQ ID NO: 578928 - RNA, 19 nt, Artificial Sequence
  Description of Artificial Sequence: Synthetic oligonucleotide
ccuaagaggauuuagacua

SEQ ID NO: 578929 - RNA, 19 nt, Artificial Sequence
  Description of Artificial Sequence: Synthetic oligonucleotide
ggauuuagacuauaaauua

SEQ ID NO: 578930 - RNA, 19 nt, Artificial Sequence
  Description of Artificial Sequence: Synthetic oligonucleotide
guuagcaguacccacagau

SEQ ID NO: 578931 - RNA, 19 nt, Artificial Sequence
  Description of Artificial Sequence: Synthetic oligonucleotide
caagcuacuacuucaccca

SEQ ID NO: 578932 - RNA, 19 nt, Artificial Sequence
  Description of Artificial Sequence: Synthetic oligonucleotide
gagagcacgggacagaggu

SEQ ID NO: 578933 - RNA, 19 nt, Artificial Sequence
  Description of Artificial Sequence: Synthetic oligonucleotide
uccuaaagguuguucuaca

SEQ ID NO: 578934 - RNA, 19 nt, Artificial Sequence
  Description of Artificial Sequence: Synthetic oligonucleotide
uggaaaggccaauuaaauu

SEQ ID NO: 578935 - RNA, 19 nt, Artificial Sequence
  Description of Artificial Sequence: Synthetic oligonucleotide
aacuccguuuaacaucaau

SEQ ID NO: 578936 - RNA, 19 nt, Artificial Sequence
  Description of Artificial Sequence: Synthetic oligonucleotide
aagguuaguacuacaggaa

SEQ ID NO: 578937 - RNA, 19 nt, Artificial Sequence
  Description of Artificial Sequence: Synthetic oligonucleotide
uacaccuugcuuuaccauu

SEQ ID NO: 578938 - RNA, 19 nt, Artificial Sequence
  Description of Artificial Sequence: Synthetic oligonucleotide
agggcaucaugaaauacag

SEQ ID NO: 578939 - RNA, 19 nt, Artificial Sequence
  Description of Artificial Sequence: Synthetic oligonucleotide
uccccucauggaaaauagg

SEQ ID NO: 578940 - RNA, 19 nt, Artificial Sequence
  Description of Artificial Sequence: Synthetic oligonucleotide
uuguuugagggaagcagau

SEQ ID NO: 578941 - RNA, 19 nt, Artificial Sequence
  Description of Artificial Sequence: Synthetic oligonucleotide
uuuggcucacaguuucaga

SEQ ID NO: 578942 - RNA, 19 nt, Artificial Sequence
  Description of Artificial Sequence: Synthetic oligonucleotide
augauaacccuaaaaugga

SEQ ID NO: 578943 - RNA, 19 nt, Artificial Sequence
  Description of Artificial Sequence: Synthetic oligonucleotide
aagcuacacggucacaauu

SEQ ID NO: 578944 - RNA, 19 nt, Artificial Sequence
  Description of Artificial Sequence: Synthetic oligonucleotide
uacacugagaugguaacuu

SEQ ID NO: 578945 - RNA, 19 nt, Artificial Sequence
  Description of Artificial Sequence: Synthetic oligonucleotide
aacagcgauaucaggacaa

SEQ ID NO: 578946 - RNA, 19 nt, Artificial Sequence
  Description of Artificial Sequence: Synthetic oligonucleotide
agaaugauauacacagacu

SEQ ID NO: 578947 - RNA, 19 nt, Artificial Sequence
  Description of Artificial Sequence: Synthetic oligonucleotide
aaacucuguagacccuggu

SEQ ID NO: 578948 - RNA, 19 nt, Artificial Sequence
  Description of Artificial Sequence: Synthetic oligonucleotide
uuucugcuagugaggacac

SEQ ID NO: 578949 - RNA, 19 nt, Artificial Sequence
  Description of Artificial Sequence: Synthetic oligonucleotide
guuugagggaagcagauau

SEQ ID NO: 578950 - RNA, 19 nt, Artificial Sequence
  Description of Artificial Sequence: Synthetic oligonucleotide
agaauguauuaaaaucuga

SEQ ID NO: 578951 - RNA, 19 nt, Artificial Sequence
  Description of Artificial Sequence: Synthetic oligonucleotide
ugcguuagccucggggucg

SEQ ID NO: 578952 - RNA, 19 nt, Artificial Sequence
  Description of Artificial Sequence: Synthetic oligonucleotide
cucggggucgaaacgcugg

SEQ ID NO: 578953 - RNA, 19 nt, Artificial Sequence
  Description of Artificial Sequence: Synthetic oligonucleotide
uuauacugcuugacaaaua

SEQ ID NO: 578954 - RNA, 19 nt, Artificial Sequence
  Description of Artificial Sequence: Synthetic oligonucleotide
gugaaacccacaccaccgg

SEQ ID NO: 578955 - RNA, 19 nt, Artificial Sequence
  Description of Artificial Sequence: Synthetic oligonucleotide
gguuacauaacuccguuua

SEQ ID NO: 578956 - RNA, 19 nt, Artificial Sequence
  Description of Artificial Sequence: Synthetic oligonucleotide
cagggcaucaugaaauaca

SEQ ID NO: 578957 - RNA, 19 nt, Artificial Sequence
  Description of Artificial Sequence: Synthetic oligonucleotide
auccuuaaaggcucaccca

SEQ ID NO: 578958 - RNA, 19 nt, Artificial Sequence
  Description of Artificial Sequence: Synthetic oligonucleotide
ugugaacauuuaacagugu

SEQ ID NO: 578959 - RNA, 19 nt, Artificial Sequence
  Description of Artificial Sequence: Synthetic oligonucleotide
guagucuugacuucaggcu

SEQ ID NO: 578960 - RNA, 19 nt, Artificial Sequence
  Description of Artificial Sequence: Synthetic oligonucleotide
acuacacugcuucaagguu

SEQ ID NO: 578961 - RNA, 19 nt, Artificial Sequence
  Description of Artificial Sequence: Synthetic oligonucleotide
ucacaugcccugacuggag

SEQ ID NO: 578962 - RNA, 19 nt, Artificial Sequence
  Description of Artificial Sequence: Synthetic oligonucleotide
aagaggauuuagacuauaa

SEQ ID NO: 578963 - RNA, 19 nt, Artificial Sequence
  Description of Artificial Sequence: Synthetic oligonucleotide
aguuuuaaccaaauugaua

SEQ ID NO: 578964 - RNA, 19 nt, Artificial Sequence
  Description of Artificial Sequence: Synthetic oligonucleotide
cagccuacaaugcuuagga

SEQ ID NO: 578965 - RNA, 19 nt, Artificial Sequence
  Description of Artificial Sequence: Synthetic oligonucleotide
auacuagaaauaugcucau

SEQ ID NO: 578966 - RNA, 19 nt, Artificial Sequence
  Description of Artificial Sequence: Synthetic oligonucleotide
aaagguuguucuacagccu

SEQ ID NO: 578967 - RNA, 19 nt, Artificial Sequence
  Description of Artificial Sequence: Synthetic oligonucleotide
gacuacacugcuucaaggu

SEQ ID NO: 578968 - RNA, 19 nt, Artificial Sequence
  Description of Artificial Sequence: Synthetic oligonucleotide
gaaugauauguuccugaaa

SEQ ID NO: 578969 - RNA, 19 nt, Artificial Sequence
  Description of Artificial Sequence: Synthetic oligonucleotide
aaccucaugauaacccuaa

SEQ ID NO: 578970 - RNA, 19 nt, Artificial Sequence
  Description of Artificial Sequence: Synthetic oligonucleotide
ggcuugaaugauauguucc

SEQ ID NO: 578971 - RNA, 19 nt, Artificial Sequence
  Description of Artificial Sequence: Synthetic oligonucleotide
cugggugguaugugcaagc

SEQ ID NO: 578972 - RNA, 19 nt, Artificial Sequence
  Description of Artificial Sequence: Synthetic oligonucleotide
accagcacgccaauugccg

SEQ ID NO: 578973 - RNA, 19 nt, Artificial Sequence
  Description of Artificial Sequence: Synthetic oligonucleotide
aggugguucacaugcccug

SEQ ID NO: 578974 - RNA, 19 nt, Artificial Sequence
  Description of Artificial Sequence: Synthetic oligonucleotide
aggacacuugaauaaucau

SEQ ID NO: 578975 - RNA, 19 nt, Artificial Sequence
  Description of Artificial Sequence: Synthetic oligonucleotide
uagccucggggucgaaacg

SEQ ID NO: 578976 - RNA, 19 nt, Artificial Sequence
  Description of Artificial Sequence: Synthetic oligonucleotide
gcuuguuugagggaagcag

SEQ ID NO: 578977 - RNA, 19 nt, Artificial Sequence
  Description of Artificial Sequence: Synthetic oligonucleotide
auauuacaccuugcuuuac

SEQ ID NO: 578978 - RNA, 19 nt, Artificial Sequence
  Description of Artificial Sequence: Synthetic oligonucleotide
uucauccccucauggaaaa

SEQ ID NO: 578979 - RNA, 19 nt, Artificial Sequence
  Description of Artificial Sequence: Synthetic oligonucleotide
aggguaacagcgauaucag

SEQ ID NO: 578980 - RNA, 19 nt, Artificial Sequence
  Description of Artificial Sequence: Synthetic oligonucleotide
uuacaccuugcuuuaccau

SEQ ID NO: 578981 - RNA, 19 nt, Artificial Sequence
  Description of Artificial Sequence: Synthetic oligonucleotide
ugccgcacuacggugcagg

SEQ ID NO: 578982 - RNA, 19 nt, Artificial Sequence
  Description of Artificial Sequence: Synthetic oligonucleotide
cacuugaauaaucaucuua

SEQ ID NO: 578983 - RNA, 19 nt, Artificial Sequence
  Description of Artificial Sequence: Synthetic oligonucleotide
ggugguaugugcaagcauc

SEQ ID NO: 578984 - RNA, 19 nt, Artificial Sequence
  Description of Artificial Sequence: Synthetic oligonucleotide
gguaugugcaagcaucguc

SEQ ID NO: 578985 - RNA, 19 nt, Artificial Sequence
  Description of Artificial Sequence: Synthetic oligonucleotide
aggcuugacugguucaggu

SEQ ID NO: 578986 - RNA, 19 nt, Artificial Sequence
  Description of Artificial Sequence: Synthetic oligonucleotide
guauuaaaaucugagguuu

SEQ ID NO: 578987 - RNA, 19 nt, Artificial Sequence
  Description of Artificial Sequence: Synthetic oligonucleotide
caucgucugcguuagccuc

SEQ ID NO: 578988 - RNA, 19 nt, Artificial Sequence
  Description of Artificial Sequence: Synthetic oligonucleotide
caauugccgcacuacggug

SEQ ID NO: 578989 - RNA, 19 nt, Artificial Sequence
  Description of Artificial Sequence: Synthetic oligonucleotide
caucccuaagaggauuuag

SEQ ID NO: 578990 - RNA, 19 nt, Artificial Sequence
  Description of Artificial Sequence: Synthetic oligonucleotide
guuuauuuuggcucacagu

SEQ ID NO: 578991 - RNA, 19 nt, Artificial Sequence
  Description of Artificial Sequence: Synthetic oligonucleotide
auccccucauggaaaauag

SEQ ID NO: 578992 - RNA, 19 nt, Artificial Sequence
  Description of Artificial Sequence: Synthetic oligonucleotide
uacaggaaguaaccaccuc

SEQ ID NO: 578993 - RNA, 19 nt, Artificial Sequence
  Description of Artificial Sequence: Synthetic oligonucleotide
cuaccuuuuguacagccua

SEQ ID NO: 578994 - RNA, 19 nt, Artificial Sequence
  Description of Artificial Sequence: Synthetic oligonucleotide
auguuggguaacaacuaug

SEQ ID NO: 578995 - RNA, 19 nt, Artificial Sequence
  Description of Artificial Sequence: Synthetic oligonucleotide
uucagggcaucaugaaaua

SEQ ID NO: 578996 - RNA, 19 nt, Artificial Sequence
  Description of Artificial Sequence: Synthetic oligonucleotide
cuacacugcuucaagguua

SEQ ID NO: 578997 - RNA, 19 nt, Artificial Sequence
  Description of Artificial Sequence: Synthetic oligonucleotide
guuaugccuaccuuuugua

SEQ ID NO: 578998 - RNA, 19 nt, Artificial Sequence
  Description of Artificial Sequence: Synthetic oligonucleotide
guaugugcaagcaucgucu

SEQ ID NO: 578999 - RNA, 19 nt, Artificial Sequence
  Description of Artificial Sequence: Synthetic oligonucleotide
caaagcuacacggucacaa

SEQ ID NO: 579000 - RNA, 19 nt, Artificial Sequence
  Description of Artificial Sequence: Synthetic oligonucleotide
ucacuguuaugccuaccuu

SEQ ID NO: 579001 - RNA, 19 nt, Artificial Sequence
  Description of Artificial Sequence: Synthetic oligonucleotide
cagacuucgucuaaacucu

SEQ ID NO: 579002 - RNA, 19 nt, Artificial Sequence
  Description of Artificial Sequence: Synthetic oligonucleotide
acagaagcgccauuccguu

SEQ ID NO: 579003 - RNA, 19 nt, Artificial Sequence
  Description of Artificial Sequence: Synthetic oligonucleotide
cugagagcacgggacagag

SEQ ID NO: 579004 - RNA, 19 nt, Artificial Sequence
  Description of Artificial Sequence: Synthetic oligonucleotide
cucacccaacauccuaaag

SEQ ID NO: 579005 - RNA, 19 nt, Artificial Sequence
  Description of Artificial Sequence: Synthetic oligonucleotide
cugcuugacaaauacuaua

SEQ ID NO: 579006 - RNA, 19 nt, Artificial Sequence
  Description of Artificial Sequence: Synthetic oligonucleotide
aaucuuuguugcagucaug

SEQ ID NO: 579007 - RNA, 19 nt, Artificial Sequence
  Description of Artificial Sequence: Synthetic oligonucleotide
cuuacucuuaugaaaugau

SEQ ID NO: 579008 - RNA, 19 nt, Artificial Sequence
  Description of Artificial Sequence: Synthetic oligonucleotide
cuacuucacccacacauaa

SEQ ID NO: 579009 - RNA, 19 nt, Artificial Sequence
  Description of Artificial Sequence: Synthetic oligonucleotide
cacccaacauccuaaaggu

SEQ ID NO: 579010 - RNA, 19 nt, Artificial Sequence
  Description of Artificial Sequence: Synthetic oligonucleotide
acgccaauugccgcacuac

SEQ ID NO: 579011 - RNA, 19 nt, Artificial Sequence
  Description of Artificial Sequence: Synthetic oligonucleotide
uguaaccuucugacauuaa

SEQ ID NO: 579012 - RNA, 19 nt, Artificial Sequence
  Description of Artificial Sequence: Synthetic oligonucleotide
gggacgacaaggaaaccag

SEQ ID NO: 579013 - RNA, 19 nt, Artificial Sequence
  Description of Artificial Sequence: Synthetic oligonucleotide
agccucacacauauauauc

SEQ ID NO: 579014 - RNA, 19 nt, Artificial Sequence
  Description of Artificial Sequence: Synthetic oligonucleotide
gaaacccacaccaccggga

SEQ ID NO: 579015 - RNA, 19 nt, Artificial Sequence
  Description of Artificial Sequence: Synthetic oligonucleotide
acuguuaugccuaccuuuu

SEQ ID NO: 579016 - RNA, 19 nt, Artificial Sequence
  Description of Artificial Sequence: Synthetic oligonucleotide
auugccgcacuacggugca

SEQ ID NO: 579017 - RNA, 19 nt, Artificial Sequence
  Description of Artificial Sequence: Synthetic oligonucleotide
cgcacuacggugcaggccg

SEQ ID NO: 579018 - RNA, 19 nt, Artificial Sequence
  Description of Artificial Sequence: Synthetic oligonucleotide
aagcaucgucugcguuagc

SEQ ID NO: 579019 - RNA, 19 nt, Artificial Sequence
  Description of Artificial Sequence: Synthetic oligonucleotide
uaucaucccuaagaggauu

SEQ ID NO: 579020 - RNA, 19 nt, Artificial Sequence
  Description of Artificial Sequence: Synthetic oligonucleotide
aguuuaucaagugcuuguu

SEQ ID NO: 579021 - RNA, 19 nt, Artificial Sequence
  Description of Artificial Sequence: Synthetic oligonucleotide
uucucacuguuaugccuac

SEQ ID NO: 579022 - RNA, 19 nt, Artificial Sequence
  Description of Artificial Sequence: Synthetic oligonucleotide
gaugaguuuuaaccaaauu

SEQ ID NO: 579023 - RNA, 19 nt, Artificial Sequence
  Description of Artificial Sequence: Synthetic oligonucleotide
ggguaacagcgauaucagg

SEQ ID NO: 579024 - RNA, 19 nt, Artificial Sequence
  Description of Artificial Sequence: Synthetic oligonucleotide
uuccuaggugaaacccaca

SEQ ID NO: 579025 - RNA, 19 nt, Artificial Sequence
  Description of Artificial Sequence: Synthetic oligonucleotide
ccggcaaggguguagaauc

SEQ ID NO: 579026 - RNA, 19 nt, Artificial Sequence
  Description of Artificial Sequence: Synthetic oligonucleotide
ugcuuguuugagggaagca

SEQ ID NO: 579027 - RNA, 19 nt, Artificial Sequence
  Description of Artificial Sequence: Synthetic oligonucleotide
uaagaggauuuagacuaua

SEQ ID NO: 579028 - RNA, 19 nt, Artificial Sequence
  Description of Artificial Sequence: Synthetic oligonucleotide
aguccacacguguuucccu

SEQ ID NO: 579029 - RNA, 19 nt, Artificial Sequence
  Description of Artificial Sequence: Synthetic oligonucleotide
guguacuauuugcuucuac

SEQ ID NO: 579030 - RNA, 19 nt, Artificial Sequence
  Description of Artificial Sequence: Synthetic oligonucleotide
cuucaagguuaguacuaca

SEQ ID NO: 579031 - RNA, 19 nt, Artificial Sequence
  Description of Artificial Sequence: Synthetic oligonucleotide
caauauuucauccccucau

SEQ ID NO: 579032 - RNA, 19 nt, Artificial Sequence
  Description of Artificial Sequence: Synthetic oligonucleotide
ggauagauaucaucccuaa

SEQ ID NO: 579033 - RNA, 19 nt, Artificial Sequence
  Description of Artificial Sequence: Synthetic oligonucleotide
ugucuacauggaacaacuu

SEQ ID NO: 579034 - RNA, 19 nt, Artificial Sequence
  Description of Artificial Sequence: Synthetic oligonucleotide
gcuuacucuuaugaaauga

SEQ ID NO: 579035 - RNA, 19 nt, Artificial Sequence
  Description of Artificial Sequence: Synthetic oligonucleotide
aagccggcaaggguguaga

SEQ ID NO: 579036 - RNA, 19 nt, Artificial Sequence
  Description of Artificial Sequence: Synthetic oligonucleotide
augaugaguuuuaaccaaa

SEQ ID NO: 579037 - RNA, 19 nt, Artificial Sequence
  Description of Artificial Sequence: Synthetic oligonucleotide
acccacagauggugacuac

SEQ ID NO: 579038 - RNA, 19 nt, Artificial Sequence
  Description of Artificial Sequence: Synthetic oligonucleotide
cuguuaugccuaccuuuug

SEQ ID NO: 579039 - RNA, 19 nt, Artificial Sequence
  Description of Artificial Sequence: Synthetic oligonucleotide
agcacgccaauugccgcac

SEQ ID NO: 579040 - RNA, 19 nt, Artificial Sequence
  Description of Artificial Sequence: Synthetic oligonucleotide
aguucaagacuugcccacu

SEQ ID NO: 579041 - RNA, 19 nt, Artificial Sequence
  Description of Artificial Sequence: Synthetic oligonucleotide
agcuacacggucacaauuu

SEQ ID NO: 579042 - RNA, 19 nt, Artificial Sequence
  Description of Artificial Sequence: Synthetic oligonucleotide
gccaauugccgcacuacgg

SEQ ID NO: 579043 - RNA, 19 nt, Artificial Sequence
  Description of Artificial Sequence: Synthetic oligonucleotide
guacuacaggaaguaacca

SEQ ID NO: 579044 - RNA, 19 nt, Artificial Sequence
  Description of Artificial Sequence: Synthetic oligonucleotide
caaugcuuaggaagucaga

SEQ ID NO: 579045 - RNA, 19 nt, Artificial Sequence
  Description of Artificial Sequence: Synthetic oligonucleotide
gaguuuuaaccaaauugau

SEQ ID NO: 579046 - RNA, 19 nt, Artificial Sequence
  Description of Artificial Sequence: Synthetic oligonucleotide
uaaggguaacagcgauauc

SEQ ID NO: 579047 - RNA, 19 nt, Artificial Sequence
  Description of Artificial Sequence: Synthetic oligonucleotide
auguaaccuucugacauua

SEQ ID NO: 579048 - RNA, 19 nt, Artificial Sequence
  Description of Artificial Sequence: Synthetic oligonucleotide
cuacaaugcuuaggaaguc

SEQ ID NO: 579049 - RNA, 19 nt, Artificial Sequence
  Description of Artificial Sequence: Synthetic oligonucleotide
cuucacccacacauaagaa

SEQ ID NO: 579050 - RNA, 19 nt, Artificial Sequence
  Description of Artificial Sequence: Synthetic oligonucleotide
ccuaggugaaacccacacc

SEQ ID NO: 579051 - RNA, 19 nt, Artificial Sequence
  Description of Artificial Sequence: Synthetic oligonucleotide
ggggcauuccacauucaag

SEQ ID NO: 579052 - RNA, 19 nt, Artificial Sequence
  Description of Artificial Sequence: Synthetic oligonucleotide
gggcuugaaugauauguuc

SEQ ID NO: 579053 - RNA, 19 nt, Artificial Sequence
  Description of Artificial Sequence: Synthetic oligonucleotide
gugcuuguuugagggaagc

SEQ ID NO: 579054 - RNA, 19 nt, Artificial Sequence
  Description of Artificial Sequence: Synthetic oligonucleotide
gccuaccuuuuguacagcc

SEQ ID NO: 579055 - RNA, 19 nt, Artificial Sequence
  Description of Artificial Sequence: Synthetic oligonucleotide
caguguacuauuugcuucu

SEQ ID NO: 579056 - RNA, 19 nt, Artificial Sequence
  Description of Artificial Sequence: Synthetic oligonucleotide
cugccuuucucauagugau

SEQ ID NO: 579057 - RNA, 19 nt, Artificial Sequence
  Description of Artificial Sequence: Synthetic oligonucleotide
gcgccauuccguuuccuag

SEQ ID NO: 579058 - RNA, 19 nt, Artificial Sequence
  Description of Artificial Sequence: Synthetic oligonucleotide
ugaugccagucaugucuac

SEQ ID NO: 579059 - RNA, 19 nt, Artificial Sequence
  Description of Artificial Sequence: Synthetic oligonucleotide
caccaccgggacgacaagg

SEQ ID NO: 579060 - RNA, 19 nt, Artificial Sequence
  Description of Artificial Sequence: Synthetic oligonucleotide
gggcuaagaauguauuaaa

SEQ ID NO: 579061 - RNA, 19 nt, Artificial Sequence
  Description of Artificial Sequence: Synthetic oligonucleotide
cuucugacauuaaauugau

SEQ ID NO: 579062 - RNA, 19 nt, Artificial Sequence
  Description of Artificial Sequence: Synthetic oligonucleotide
ucucacuguuaugccuacc

SEQ ID NO: 579063 - RNA, 19 nt, Artificial Sequence
  Description of Artificial Sequence: Synthetic oligonucleotide
cugaaauuuggguuuuaau

SEQ ID NO: 579064 - RNA, 19 nt, Artificial Sequence
  Description of Artificial Sequence: Synthetic oligonucleotide
caggcuugacugguucagg

SEQ ID NO: 579065 - RNA, 19 nt, Artificial Sequence
  Description of Artificial Sequence: Synthetic oligonucleotide
caagccucacacauauaua

SEQ ID NO: 579066 - RNA, 19 nt, Artificial Sequence
  Description of Artificial Sequence: Synthetic oligonucleotide
cacacguguuucccuuuug

SEQ ID NO: 579067 - RNA, 19 nt, Artificial Sequence
  Description of Artificial Sequence: Synthetic oligonucleotide
agcaguacccacagauggu

SEQ ID NO: 579068 - RNA, 19 nt, Artificial Sequence
  Description of Artificial Sequence: Synthetic oligonucleotide
caccgggacgacaaggaaa

SEQ ID NO: 579069 - RNA, 19 nt, Artificial Sequence
  Description of Artificial Sequence: Synthetic oligonucleotide
caagccggcaaggguguag

SEQ ID NO: 579070 - RNA, 19 nt, Artificial Sequence
  Description of Artificial Sequence: Synthetic oligonucleotide
cuuuaccauuuaaggguaa

SEQ ID NO: 579071 - RNA, 19 nt, Artificial Sequence
  Description of Artificial Sequence: Synthetic oligonucleotide
gaaccucaugauaacccua

SEQ ID NO: 579072 - RNA, 19 nt, Artificial Sequence
  Description of Artificial Sequence: Synthetic oligonucleotide
accucauaggggaaacaaa

SEQ ID NO: 579073 - RNA, 19 nt, Artificial Sequence
  Description of Artificial Sequence: Synthetic oligonucleotide
cugcuucaagguuaguacu

SEQ ID NO: 579074 - RNA, 19 nt, Artificial Sequence
  Description of Artificial Sequence: Synthetic oligonucleotide
caccucauaggggaaacaa

SEQ ID NO: 579075 - RNA, 19 nt, Artificial Sequence
  Description of Artificial Sequence: Synthetic oligonucleotide
agccgcgguuguaacacag

SEQ ID NO: 579076 - RNA, 19 nt, Artificial Sequence
  Description of Artificial Sequence: Synthetic oligonucleotide
cguuuccuaggugaaaccc

SEQ ID NO: 579077 - RNA, 19 nt, Artificial Sequence
  Description of Artificial Sequence: Synthetic oligonucleotide
aaggcucacccaacauccu

SEQ ID NO: 579078 - RNA, 19 nt, Artificial Sequence
  Description of Artificial Sequence: Synthetic oligonucleotide
uucaagccucacacauaua

SEQ ID NO: 579079 - RNA, 19 nt, Artificial Sequence
  Description of Artificial Sequence: Synthetic oligonucleotide
ucaucccuaagaggauuua

SEQ ID NO: 579080 - RNA, 19 nt, Artificial Sequence
  Description of Artificial Sequence: Synthetic oligonucleotide
cauguuggguaacaacuau

SEQ ID NO: 579081 - RNA, 19 nt, Artificial Sequence
  Description of Artificial Sequence: Synthetic oligonucleotide
aucaucccuaagaggauuu

SEQ ID NO: 579082 - RNA, 19 nt, Artificial Sequence
  Description of Artificial Sequence: Synthetic oligonucleotide
cuguagacccugguauguc

SEQ ID NO: 579083 - RNA, 19 nt, Artificial Sequence
  Description of Artificial Sequence: Synthetic oligonucleotide
caggaaguaaccaccucau

SEQ ID NO: 579084 - RNA, 19 nt, Artificial Sequence
  Description of Artificial Sequence: Synthetic oligonucleotide
agacuucgucuaaacucug

SEQ ID NO: 579085 - RNA, 19 nt, Artificial Sequence
  Description of Artificial Sequence: Synthetic oligonucleotide
cgguuguaacacagaagcg

SEQ ID NO: 579086 - RNA, 19 nt, Artificial Sequence
  Description of Artificial Sequence: Synthetic oligonucleotide
gggcaucaugaaauacagg

SEQ ID NO: 579087 - RNA, 19 nt, Artificial Sequence
  Description of Artificial Sequence: Synthetic oligonucleotide
gcagccgcgguuguaacac

SEQ ID NO: 579088 - RNA, 19 nt, Artificial Sequence
  Description of Artificial Sequence: Synthetic oligonucleotide
gguuaguacuacaggaagu

SEQ ID NO: 579089 - RNA, 19 nt, Artificial Sequence
  Description of Artificial Sequence: Synthetic oligonucleotide
cugugacggcagcacugag

SEQ ID NO: 579090 - RNA, 19 nt, Artificial Sequence
  Description of Artificial Sequence: Synthetic oligonucleotide
cauccccucauggaaaaua

SEQ ID NO: 579091 - RNA, 19 nt, Artificial Sequence
  Description of Artificial Sequence: Synthetic oligonucleotide
ugccuaccuuuuguacagc

SEQ ID NO: 579092 - RNA, 19 nt, Artificial Sequence
  Description of Artificial Sequence: Synthetic oligonucleotide
acaaagcuacacggucaca

SEQ ID NO: 579093 - RNA, 19 nt, Artificial Sequence
  Description of Artificial Sequence: Synthetic oligonucleotide
cagcacgccaauugccgca

SEQ ID NO: 579094 - RNA, 19 nt, Artificial Sequence
  Description of Artificial Sequence: Synthetic oligonucleotide
cccaguuugaugccaguca

SEQ ID NO: 579095 - RNA, 19 nt, Artificial Sequence
  Description of Artificial Sequence: Synthetic oligonucleotide
ccucauaggggaaacaaau

SEQ ID NO: 579096 - RNA, 19 nt, Artificial Sequence
  Description of Artificial Sequence: Synthetic oligonucleotide
cuccaauauuucauccccu

SEQ ID NO: 579097 - RNA, 19 nt, Artificial Sequence
  Description of Artificial Sequence: Synthetic oligonucleotide
ccguuuccuaggugaaacc

SEQ ID NO: 579098 - RNA, 19 nt, Artificial Sequence
  Description of Artificial Sequence: Synthetic oligonucleotide
ccagcacgccaauugccgc

SEQ ID NO: 579099 - RNA, 19 nt, Artificial Sequence
  Description of Artificial Sequence: Synthetic oligonucleotide
ugacugguucagguggcuu

SEQ ID NO: 579100 - RNA, 19 nt, Artificial Sequence
  Description of Artificial Sequence: Synthetic oligonucleotide
uaacuccguuuaacaucaa

SEQ ID NO: 579101 - RNA, 19 nt, Artificial Sequence
  Description of Artificial Sequence: Synthetic oligonucleotide
gggauagauaucaucccua

SEQ ID NO: 579102 - RNA, 19 nt, Artificial Sequence
  Description of Artificial Sequence: Synthetic oligonucleotide
agagcacgggacagaggug

SEQ ID NO: 579103 - RNA, 19 nt, Artificial Sequence
  Description of Artificial Sequence: Synthetic oligonucleotide
acggcagcacugagagcac

SEQ ID NO: 579104 - RNA, 19 nt, Artificial Sequence
  Description of Artificial Sequence: Synthetic oligonucleotide
ccccucauggaaaauaggu

SEQ ID NO: 579105 - RNA, 19 nt, Artificial Sequence
  Description of Artificial Sequence: Synthetic oligonucleotide
gacuucgucuaaacucugu

SEQ ID NO: 579106 - RNA, 19 nt, Artificial Sequence
  Description of Artificial Sequence: Synthetic oligonucleotide
aguguacuauuugcuucua

SEQ ID NO: 579107 - RNA, 19 nt, Artificial Sequence
  Description of Artificial Sequence: Synthetic oligonucleotide
cgccaauugccgcacuacg

SEQ ID NO: 579108 - RNA, 19 nt, Artificial Sequence
  Description of Artificial Sequence: Synthetic oligonucleotide
cgcgguuguaacacagaag

SEQ ID NO: 579109 - RNA, 19 nt, Artificial Sequence
  Description of Artificial Sequence: Synthetic oligonucleotide
caaucacaccccauaguuu

SEQ ID NO: 579110 - RNA, 19 nt, Artificial Sequence
  Description of Artificial Sequence: Synthetic oligonucleotide
cagcaagaccaacccuuca

SEQ ID NO: 579111 - RNA, 19 nt, Artificial Sequence
  Description of Artificial Sequence: Synthetic oligonucleotide
guuagccucggggucgaaa

SEQ ID NO: 579112 - RNA, 19 nt, Artificial Sequence
  Description of Artificial Sequence: Synthetic oligonucleotide
cccucauggaaaauaggua

SEQ ID NO: 579113 - RNA, 19 nt, Artificial Sequence
  Description of Artificial Sequence: Synthetic oligonucleotide
cauuggcucaucugggcuu

SEQ ID NO: 579114 - RNA, 19 nt, Artificial Sequence
  Description of Artificial Sequence: Synthetic oligonucleotide
ggugguucacaugcccuga

SEQ ID NO: 579115 - RNA, 19 nt, Artificial Sequence
  Description of Artificial Sequence: Synthetic oligonucleotide
ccaauugccgcacuacggu

SEQ ID NO: 579116 - RNA, 19 nt, Artificial Sequence
  Description of Artificial Sequence: Synthetic oligonucleotide
guacccacagauggugacu

SEQ ID NO: 579117 - RNA, 19 nt, Artificial Sequence
  Description of Artificial Sequence: Synthetic oligonucleotide
ggucgaaacgcuggccgca

SEQ ID NO: 579118 - RNA, 19 nt, Artificial Sequence
  Description of Artificial Sequence: Synthetic oligonucleotide
cacgccaauugccgcacua

SEQ ID NO: 579119 - RNA, 19 nt, Artificial Sequence
  Description of Artificial Sequence: Synthetic oligonucleotide
uugccgcacuacggugcag

SEQ ID NO: 579120 - RNA, 19 nt, Artificial Sequence
  Description of Artificial Sequence: Synthetic oligonucleotide
cggcaaggguguagaaucc

SEQ ID NO: 579121 - RNA, 19 nt, Artificial Sequence
  Description of Artificial Sequence: Synthetic oligonucleotide
guccacacguguuucccuu

SEQ ID NO: 579122 - RNA, 19 nt, Artificial Sequence
  Description of Artificial Sequence: Synthetic oligonucleotide
gccgcacuacggugcaggc

SEQ ID NO: 579123 - RNA, 19 nt, Artificial Sequence
  Description of Artificial Sequence: Synthetic oligonucleotide
agccggcaaggguguagaa

SEQ ID NO: 579124 - RNA, 19 nt, Artificial Sequence
  Description of Artificial Sequence: Synthetic oligonucleotide
agcacgggacagagguggu

SEQ ID NO: 579125 - RNA, 19 nt, Artificial Sequence
  Description of Artificial Sequence: Synthetic oligonucleotide
ccauuccguuuccuaggug

SEQ ID NO: 579126 - RNA, 19 nt, Artificial Sequence
  Description of Artificial Sequence: Synthetic oligonucleotide
guaugucuuugaacacccu

SEQ ID NO: 579127 - RNA, 19 nt, Artificial Sequence
  Description of Artificial Sequence: Synthetic oligonucleotide
ccgcgguuguaacacagaa

SEQ ID NO: 579128 - RNA, 19 nt, Artificial Sequence
  Description of Artificial Sequence: Synthetic oligonucleotide
acacugcuucaagguuagu

SEQ ID NO: 579129 - RNA, 19 nt, Artificial Sequence
  Description of Artificial Sequence: Synthetic oligonucleotide
cagccgcgguuguaacaca

SEQ ID NO: 579130 - RNA, 19 nt, Artificial Sequence
  Description of Artificial Sequence: Synthetic oligonucleotide
ccgcacuacggugcaggcc

SEQ ID NO: 579131 - RNA, 19 nt, Artificial Sequence
  Description of Artificial Sequence: Synthetic oligonucleotide
cagaagcgccauuccguuu

SEQ ID NO: 579132 - RNA, 19 nt, Artificial Sequence
  Description of Artificial Sequence: Synthetic oligonucleotide
gccgcgguuguaacacaga

SEQ ID NO: 579133 - RNA, 19 nt, Artificial Sequence
  Description of Artificial Sequence: Synthetic oligonucleotide
gcacuacggugcaggccgc

SEQ ID NO: 579134 - RNA, 19 nt, Artificial Sequence
  Description of Artificial Sequence: Synthetic oligonucleotide
ccgcagccgcgguuguaac

SEQ ID NO: 579135 - RNA, 19 nt, Artificial Sequence
  Description of Artificial Sequence: Synthetic oligonucleotide
gccggcaaggguguagaau

SEQ ID NO: 579136 - RNA, 19 nt, Artificial Sequence
  Description of Artificial Sequence: Synthetic oligonucleotide
ccgggacgacaaggaaacc

SEQ ID NO: 579137 - RNA, 19 nt, Artificial Sequence
  Description of Artificial Sequence: Synthetic oligonucleotide
cggggucgaaacgcuggcc

SEQ ID NO: 579138 - RNA, 19 nt, Artificial Sequence
  Description of Artificial Sequence: Synthetic oligonucleotide
caacauccuaaagguuguu

SEQ ID NO: 579139 - RNA, 19 nt, Artificial Sequence
  Description of Artificial Sequence: Synthetic oligonucleotide
cgcagccgcgguuguaaca

SEQ ID NO: 579140 - RNA, 19 nt, Artificial Sequence
  Description of Artificial Sequence: Synthetic oligonucleotide
gcguuagccucggggucga

SEQ ID NO: 579141 - RNA, 19 nt, Artificial Sequence
  Description of Artificial Sequence: Synthetic oligonucleotide
cgucugcguuagccucggg

SEQ ID NO: 579142 - RNA, 19 nt, Artificial Sequence
  Description of Artificial Sequence: Synthetic oligonucleotide
gcuggccgcagccgcgguu

SEQ ID NO: 579143 - RNA, 19 nt, Artificial Sequence
  Description of Artificial Sequence: Synthetic oligonucleotide
ugaacuaaaagugauacag

SEQ ID NO: 579144 - RNA, 19 nt, Artificial Sequence
  Description of Artificial Sequence: Synthetic oligonucleotide
aaggaugaggacuugugcc

SEQ ID NO: 579145 - RNA, 19 nt, Artificial Sequence
  Description of Artificial Sequence: Synthetic oligonucleotide
acagaaucgaaacaaggcc

SEQ ID NO: 579146 - RNA, 19 nt, Artificial Sequence
  Description of Artificial Sequence: Synthetic oligonucleotide
aacagaaucgaaacaaggc

SEQ ID NO: 579147 - RNA, 19 nt, Artificial Sequence
  Description of Artificial Sequence: Synthetic oligonucleotide
uaugauuagaauuauuuaa

SEQ ID NO: 579148 - RNA, 19 nt, Artificial Sequence
  Description of Artificial Sequence: Synthetic oligonucleotide
aaaucuacuaggcaggcca

SEQ ID NO: 579149 - RNA, 19 nt, Artificial Sequence
  Description of Artificial Sequence: Synthetic oligonucleotide
aauuuauuuggauacugcu

SEQ ID NO: 579150 - RNA, 19 nt, Artificial Sequence
  Description of Artificial Sequence: Synthetic oligonucleotide
ugaguuacuuucuuaaucc

SEQ ID NO: 579151 - RNA, 19 nt, Artificial Sequence
  Description of Artificial Sequence: Synthetic oligonucleotide
uuucaaaagauuuccguag

SEQ ID NO: 579152 - RNA, 19 nt, Artificial Sequence
  Description of Artificial Sequence: Synthetic oligonucleotide
ugggaaaucaaacagguaa

SEQ ID NO: 579153 - RNA, 19 nt, Artificial Sequence
  Description of Artificial Sequence: Synthetic oligonucleotide
uuuaguguccaccugacgu

SEQ ID NO: 579154 - RNA, 19 nt, Artificial Sequence
  Description of Artificial Sequence: Synthetic oligonucleotide
uuagaauuauuuaaagccu

SEQ ID NO: 579155 - RNA, 19 nt, Artificial Sequence
  Description of Artificial Sequence: Synthetic oligonucleotide
aaucuuuauaccuaugaaa

SEQ ID NO: 579156 - RNA, 19 nt, Artificial Sequence
  Description of Artificial Sequence: Synthetic oligonucleotide
ucuccaauguacaaaaugu

SEQ ID NO: 579157 - RNA, 19 nt, Artificial Sequence
  Description of Artificial Sequence: Synthetic oligonucleotide
ugugcacaaaccaagaggu

SEQ ID NO: 579158 - RNA, 19 nt, Artificial Sequence
  Description of Artificial Sequence: Synthetic oligonucleotide
uaaaaucagaucaaaguaa

SEQ ID NO: 579159 - RNA, 19 nt, Artificial Sequence
  Description of Artificial Sequence: Synthetic oligonucleotide
aauucaaaccccugugguc

SEQ ID NO: 579160 - RNA, 19 nt, Artificial Sequence
  Description of Artificial Sequence: Synthetic oligonucleotide
uuugacuacauacuucuca

SEQ ID NO: 579161 - RNA, 19 nt, Artificial Sequence
  Description of Artificial Sequence: Synthetic oligonucleotide
uguacaaaaugucuuugcc

SEQ ID NO: 579162 - RNA, 19 nt, Artificial Sequence
  Description of Artificial Sequence: Synthetic oligonucleotide
cuuacauccuggaacaugc

SEQ ID NO: 579163 - RNA, 19 nt, Artificial Sequence
  Description of Artificial Sequence: Synthetic oligonucleotide
augaguuacuuucuuaauc

SEQ ID NO: 579164 - RNA, 19 nt, Artificial Sequence
  Description of Artificial Sequence: Synthetic oligonucleotide
uaaaaucacuccagcaagg

SEQ ID NO: 579165 - RNA, 19 nt, Artificial Sequence
  Description of Artificial Sequence: Synthetic oligonucleotide
uggaacuaaugucugggcg

SEQ ID NO: 579166 - RNA, 19 nt, Artificial Sequence
  Description of Artificial Sequence: Synthetic oligonucleotide
aauguagcaaggaugagga

SEQ ID NO: 579167 - RNA, 19 nt, Artificial Sequence
  Description of Artificial Sequence: Synthetic oligonucleotide
uaucagaugagccuccuga

SEQ ID NO: 579168 - RNA, 19 nt, Artificial Sequence
  Description of Artificial Sequence: Synthetic oligonucleotide
uuauagucacuguuagugg

SEQ ID NO: 579169 - RNA, 19 nt, Artificial Sequence
  Description of Artificial Sequence: Synthetic oligonucleotide
aaccaagagguuuccauag

SEQ ID NO: 579170 - RNA, 19 nt, Artificial Sequence
  Description of Artificial Sequence: Synthetic oligonucleotide
agcgacauuccccaaaagg

SEQ ID NO: 579171 - RNA, 19 nt, Artificial Sequence
  Description of Artificial Sequence: Synthetic oligonucleotide
uguacauaagagcauguuc

SEQ ID NO: 579172 - RNA, 19 nt, Artificial Sequence
  Description of Artificial Sequence: Synthetic oligonucleotide
agaaaaguguuccaagugu

SEQ ID NO: 579173 - RNA, 19 nt, Artificial Sequence
  Description of Artificial Sequence: Synthetic oligonucleotide
uuauaccuaugaaacacug

SEQ ID NO: 579174 - RNA, 19 nt, Artificial Sequence
  Description of Artificial Sequence: Synthetic oligonucleotide
aagauuuccguagagugug

SEQ ID NO: 579175 - RNA, 19 nt, Artificial Sequence
  Description of Artificial Sequence: Synthetic oligonucleotide
agcaugccaagccuaaagc

SEQ ID NO: 579176 - RNA, 19 nt, Artificial Sequence
  Description of Artificial Sequence: Synthetic oligonucleotide
ucuagucuaaaaucacucc

SEQ ID NO: 579177 - RNA, 19 nt, Artificial Sequence
  Description of Artificial Sequence: Synthetic oligonucleotide
uuaaucucacuaacggacc

SEQ ID NO: 579178 - RNA, 19 nt, Artificial Sequence
  Description of Artificial Sequence: Synthetic oligonucleotide
acagauauaguuagcaauc

SEQ ID NO: 579179 - RNA, 19 nt, Artificial Sequence
  Description of Artificial Sequence: Synthetic oligonucleotide
cuuuacuaagcucuagagc

SEQ ID NO: 579180 - RNA, 19 nt, Artificial Sequence
  Description of Artificial Sequence: Synthetic oligonucleotide
aaacagguaagucaugauu

SEQ ID NO: 579181 - RNA, 19 nt, Artificial Sequence
  Description of Artificial Sequence: Synthetic oligonucleotide
gucagcauuagacauacac

SEQ ID NO: 579182 - RNA, 19 nt, Artificial Sequence
  Description of Artificial Sequence: Synthetic oligonucleotide
aaguguuccaaguguuggg

SEQ ID NO: 579183 - RNA, 19 nt, Artificial Sequence
  Description of Artificial Sequence: Synthetic oligonucleotide
aagauugaauaguguguuc

SEQ ID NO: 579184 - RNA, 19 nt, Artificial Sequence
  Description of Artificial Sequence: Synthetic oligonucleotide
ucuagagcagccaguaccc

SEQ ID NO: 579185 - RNA, 19 nt, Artificial Sequence
  Description of Artificial Sequence: Synthetic oligonucleotide
uuaucuguguauuuauagu

SEQ ID NO: 579186 - RNA, 19 nt, Artificial Sequence
  Description of Artificial Sequence: Synthetic oligonucleotide
ugucacaacugguauaucu

SEQ ID NO: 579187 - RNA, 19 nt, Artificial Sequence
  Description of Artificial Sequence: Synthetic oligonucleotide
uguggucuagucuaaaauc

SEQ ID NO: 579188 - RNA, 19 nt, Artificial Sequence
  Description of Artificial Sequence: Synthetic oligonucleotide
gaacggguaguacagcagg

SEQ ID NO: 579189 - RNA, 19 nt, Artificial Sequence
  Description of Artificial Sequence: Synthetic oligonucleotide
aaaaucuacuaggcaggcc

SEQ ID NO: 579190 - RNA, 19 nt, Artificial Sequence
  Description of Artificial Sequence: Synthetic oligonucleotide
ucacuaacggaccuuguga

SEQ ID NO: 579191 - RNA, 19 nt, Artificial Sequence
  Description of Artificial Sequence: Synthetic oligonucleotide
aaucaaacagguaagucau

SEQ ID NO: 579192 - RNA, 19 nt, Artificial Sequence
  Description of Artificial Sequence: Synthetic oligonucleotide
aaacaaggccacccuugcc

SEQ ID NO: 579193 - RNA, 19 nt, Artificial Sequence
  Description of Artificial Sequence: Synthetic oligonucleotide
uaggacauaaagagguccc

SEQ ID NO: 579194 - RNA, 19 nt, Artificial Sequence
  Description of Artificial Sequence: Synthetic oligonucleotide
uacccuagugaccagggcc

SEQ ID NO: 579195 - RNA, 19 nt, Artificial Sequence
  Description of Artificial Sequence: Synthetic oligonucleotide
cacuguugauucaugaggc

SEQ ID NO: 579196 - RNA, 19 nt, Artificial Sequence
  Description of Artificial Sequence: Synthetic oligonucleotide
aagagguuuccauaggcau

SEQ ID NO: 579197 - RNA, 19 nt, Artificial Sequence
  Description of Artificial Sequence: Synthetic oligonucleotide
ucuucagcgacauucccca

SEQ ID NO: 579198 - RNA, 19 nt, Artificial Sequence
  Description of Artificial Sequence: Synthetic oligonucleotide
aguuuuaguguccaccuga

SEQ ID NO: 579199 - RNA, 19 nt, Artificial Sequence
  Description of Artificial Sequence: Synthetic oligonucleotide
auaccuaugaaacacugua

SEQ ID NO: 579200 - RNA, 19 nt, Artificial Sequence
  Description of Artificial Sequence: Synthetic oligonucleotide
gaaguuaaauccaugugca

SEQ ID NO: 579201 - RNA, 19 nt, Artificial Sequence
  Description of Artificial Sequence: Synthetic oligonucleotide
gacuacauacuucucaaga

SEQ ID NO: 579202 - RNA, 19 nt, Artificial Sequence
  Description of Artificial Sequence: Synthetic oligonucleotide
uucagaauguaaaaccuuu

SEQ ID NO: 579203 - RNA, 19 nt, Artificial Sequence
  Description of Artificial Sequence: Synthetic oligonucleotide
uccauaggcaucaacuuuc

SEQ ID NO: 579204 - RNA, 19 nt, Artificial Sequence
  Description of Artificial Sequence: Synthetic oligonucleotide
gaguuacuuucuuaauccg

SEQ ID NO: 579205 - RNA, 19 nt, Artificial Sequence
  Description of Artificial Sequence: Synthetic oligonucleotide
ugaugaaagacgcugcgua

SEQ ID NO: 579206 - RNA, 19 nt, Artificial Sequence
  Description of Artificial Sequence: Synthetic oligonucleotide
uggaacaugcuccgguagg

SEQ ID NO: 579207 - RNA, 19 nt, Artificial Sequence
  Description of Artificial Sequence: Synthetic oligonucleotide
caaguguugggcaacuccc

SEQ ID NO: 579208 - RNA, 19 nt, Artificial Sequence
  Description of Artificial Sequence: Synthetic oligonucleotide
uacuaggcaggccaacagg

SEQ ID NO: 579209 - RNA, 19 nt, Artificial Sequence
  Description of Artificial Sequence: Synthetic oligonucleotide
agaucguaucagaugagcc

SEQ ID NO: 579210 - RNA, 19 nt, Artificial Sequence
  Description of Artificial Sequence: Synthetic oligonucleotide
gaugaaagacgcugcguag

SEQ ID NO: 579211 - RNA, 19 nt, Artificial Sequence
  Description of Artificial Sequence: Synthetic oligonucleotide
ugaaagacgcugcguagag

SEQ ID NO: 579212 - RNA, 19 nt, Artificial Sequence
  Description of Artificial Sequence: Synthetic oligonucleotide
gaagcaacggcaauuuccc

SEQ ID NO: 579213 - RNA, 19 nt, Artificial Sequence
  Description of Artificial Sequence: Synthetic oligonucleotide
agaccaacggcugugacag

SEQ ID NO: 579214 - RNA, 19 nt, Artificial Sequence
  Description of Artificial Sequence: Synthetic oligonucleotide
uguagguaccgauuuucag

SEQ ID NO: 579215 - RNA, 19 nt, Artificial Sequence
  Description of Artificial Sequence: Synthetic oligonucleotide
acuaacggaccuugugagc

SEQ ID NO: 579216 - RNA, 19 nt, Artificial Sequence
  Description of Artificial Sequence: Synthetic oligonucleotide
auguacuucugaugagggc

SEQ ID NO: 579217 - RNA, 19 nt, Artificial Sequence
  Description of Artificial Sequence: Synthetic oligonucleotide
aguccagacgugaagcucc

SEQ ID NO: 579218 - RNA, 19 nt, Artificial Sequence
  Description of Artificial Sequence: Synthetic oligonucleotide
ucccuaacagaaucgaaac

SEQ ID NO: 579219 - RNA, 19 nt, Artificial Sequence
  Description of Artificial Sequence: Synthetic oligonucleotide
aagcauuugugcuaccaau

SEQ ID NO: 579220 - RNA, 19 nt, Artificial Sequence
  Description of Artificial Sequence: Synthetic oligonucleotide
acuacauacuucucaagau

SEQ ID NO: 579221 - RNA, 19 nt, Artificial Sequence
  Description of Artificial Sequence: Synthetic oligonucleotide
uaauggacccagucgacug

SEQ ID NO: 579222 - RNA, 19 nt, Artificial Sequence
  Description of Artificial Sequence: Synthetic oligonucleotide
ugcaagcucaggaaucacc

SEQ ID NO: 579223 - RNA, 19 nt, Artificial Sequence
  Description of Artificial Sequence: Synthetic oligonucleotide
uguugauucaugaggcauc

SEQ ID NO: 579224 - RNA, 19 nt, Artificial Sequence
  Description of Artificial Sequence: Synthetic oligonucleotide
uagucggugucuuugaaau

SEQ ID NO: 579225 - RNA, 19 nt, Artificial Sequence
  Description of Artificial Sequence: Synthetic oligonucleotide
ucaugauuuuaucugugua

SEQ ID NO: 579226 - RNA, 19 nt, Artificial Sequence
  Description of Artificial Sequence: Synthetic oligonucleotide
acagaugugcgguuccggg

SEQ ID NO: 579227 - RNA, 19 nt, Artificial Sequence
  Description of Artificial Sequence: Synthetic oligonucleotide
gaaacaaggccacccuugc

SEQ ID NO: 579228 - RNA, 19 nt, Artificial Sequence
  Description of Artificial Sequence: Synthetic oligonucleotide
ugaacggguaguacagcag

SEQ ID NO: 579229 - RNA, 19 nt, Artificial Sequence
  Description of Artificial Sequence: Synthetic oligonucleotide
accagcuaugauuagaauu

SEQ ID NO: 579230 - RNA, 19 nt, Artificial Sequence
  Description of Artificial Sequence: Synthetic oligonucleotide
aucguaucagaugagccuc

SEQ ID NO: 579231 - RNA, 19 nt, Artificial Sequence
  Description of Artificial Sequence: Synthetic oligonucleotide
ucccuuacauccuggaaca

SEQ ID NO: 579232 - RNA, 19 nt, Artificial Sequence
  Description of Artificial Sequence: Synthetic oligonucleotide
agaaucgaaacaaggccac

SEQ ID NO: 579233 - RNA, 19 nt, Artificial Sequence
  Description of Artificial Sequence: Synthetic oligonucleotide
aagacugccacggucgaug

SEQ ID NO: 579234 - RNA, 19 nt, Artificial Sequence
  Description of Artificial Sequence: Synthetic oligonucleotide
ucagcauaccucaucacuu

SEQ ID NO: 579235 - RNA, 19 nt, Artificial Sequence
  Description of Artificial Sequence: Synthetic oligonucleotide
auaccucaucacuugacug

SEQ ID NO: 579236 - RNA, 19 nt, Artificial Sequence
  Description of Artificial Sequence: Synthetic oligonucleotide
auucaaaccccuguggucu

SEQ ID NO: 579237 - RNA, 19 nt, Artificial Sequence
  Description of Artificial Sequence: Synthetic oligonucleotide
gagaggggauuccaucucg

SEQ ID NO: 579238 - RNA, 19 nt, Artificial Sequence
  Description of Artificial Sequence: Synthetic oligonucleotide
cuagucuaaaaucacucca

SEQ ID NO: 579239 - RNA, 19 nt, Artificial Sequence
  Description of Artificial Sequence: Synthetic oligonucleotide
aguucagccaagaaaauau

SEQ ID NO: 579240 - RNA, 19 nt, Artificial Sequence
  Description of Artificial Sequence: Synthetic oligonucleotide
uaaucucacuaacggaccu

SEQ ID NO: 579241 - RNA, 19 nt, Artificial Sequence
  Description of Artificial Sequence: Synthetic oligonucleotide
caaggaugaggacuugugc

SEQ ID NO: 579242 - RNA, 19 nt, Artificial Sequence
  Description of Artificial Sequence: Synthetic oligonucleotide
gagcaugccaagccuaaag

SEQ ID NO: 579243 - RNA, 19 nt, Artificial Sequence
  Description of Artificial Sequence: Synthetic oligonucleotide
uuuaguuugccuccuuauu

SEQ ID NO: 579244 - RNA, 19 nt, Artificial Sequence
  Description of Artificial Sequence: Synthetic oligonucleotide
cacuaacggaccuugugag

SEQ ID NO: 579245 - RNA, 19 nt, Artificial Sequence
  Description of Artificial Sequence: Synthetic oligonucleotide
ggaacuaaugucugggcgc

SEQ ID NO: 579246 - RNA, 19 nt, Artificial Sequence
  Description of Artificial Sequence: Synthetic oligonucleotide
agugauacagauauaguua

SEQ ID NO: 579247 - RNA, 19 nt, Artificial Sequence
  Description of Artificial Sequence: Synthetic oligonucleotide
uuaagggagcccuuguaau

SEQ ID NO: 579248 - RNA, 19 nt, Artificial Sequence
  Description of Artificial Sequence: Synthetic oligonucleotide
ucucgcuggauaaauuuau

SEQ ID NO: 579249 - RNA, 19 nt, Artificial Sequence
  Description of Artificial Sequence: Synthetic oligonucleotide
guaggacauaaagaggucc

SEQ ID NO: 579250 - RNA, 19 nt, Artificial Sequence
  Description of Artificial Sequence: Synthetic oligonucleotide
guuacuuucuuaauccguc

SEQ ID NO: 579251 - RNA, 19 nt, Artificial Sequence
  Description of Artificial Sequence: Synthetic oligonucleotide
uggucuagucuaaaaucac

SEQ ID NO: 579252 - RNA, 19 nt, Artificial Sequence
  Description of Artificial Sequence: Synthetic oligonucleotide
ccgauuuucaguuuuccag

SEQ ID NO: 579253 - RNA, 19 nt, Artificial Sequence
  Description of Artificial Sequence: Synthetic oligonucleotide
aggacauaaagaggucccc

SEQ ID NO: 579254 - RNA, 19 nt, Artificial Sequence
  Description of Artificial Sequence: Synthetic oligonucleotide
uagguaccgauuuucaguu

SEQ ID NO: 579255 - RNA, 19 nt, Artificial Sequence
  Description of Artificial Sequence: Synthetic oligonucleotide
uguaauggacccagucgac

SEQ ID NO: 579256 - RNA, 19 nt, Artificial Sequence
  Description of Artificial Sequence: Synthetic oligonucleotide
gagcccuuguaauggaccc

SEQ ID NO: 579257 - RNA, 19 nt, Artificial Sequence
  Description of Artificial Sequence: Synthetic oligonucleotide
ucagcgacauuccccaaaa

SEQ ID NO: 579258 - RNA, 19 nt, Artificial Sequence
  Description of Artificial Sequence: Synthetic oligonucleotide
guaagucaugauuuuaucu

SEQ ID NO: 579259 - RNA, 19 nt, Artificial Sequence
  Description of Artificial Sequence: Synthetic oligonucleotide
cuaugauuagaauuauuua

SEQ ID NO: 579260 - RNA, 19 nt, Artificial Sequence
  Description of Artificial Sequence: Synthetic oligonucleotide
guagacgaugccaugcugc

SEQ ID NO: 579261 - RNA, 19 nt, Artificial Sequence
  Description of Artificial Sequence: Synthetic oligonucleotide
guacauaagagcauguucu

SEQ ID NO: 579262 - RNA, 19 nt, Artificial Sequence
  Description of Artificial Sequence: Synthetic oligonucleotide
ggcaucaggacaugggcgg

SEQ ID NO: 579263 - RNA, 19 nt, Artificial Sequence
  Description of Artificial Sequence: Synthetic oligonucleotide
cagaauguaaaaccuuuca

SEQ ID NO: 579264 - RNA, 19 nt, Artificial Sequence
  Description of Artificial Sequence: Synthetic oligonucleotide
uccguagagugugucaaag

SEQ ID NO: 579265 - RNA, 19 nt, Artificial Sequence
  Description of Artificial Sequence: Synthetic oligonucleotide
agguugggcggcuuaaucu

SEQ ID NO: 579266 - RNA, 19 nt, Artificial Sequence
  Description of Artificial Sequence: Synthetic oligonucleotide
ugguauaucuuggacaauu

SEQ ID NO: 579267 - RNA, 19 nt, Artificial Sequence
  Description of Artificial Sequence: Synthetic oligonucleotide
cagacuugcugaugggugc

SEQ ID NO: 579268 - RNA, 19 nt, Artificial Sequence
  Description of Artificial Sequence: Synthetic oligonucleotide
ugucugggcgcucauugcu

SEQ ID NO: 579269 - RNA, 19 nt, Artificial Sequence
  Description of Artificial Sequence: Synthetic oligonucleotide
gagguagcugaacggguag

SEQ ID NO: 579270 - RNA, 19 nt, Artificial Sequence
  Description of Artificial Sequence: Synthetic oligonucleotide
uuuccguagagugugucaa

SEQ ID NO: 579271 - RNA, 19 nt, Artificial Sequence
  Description of Artificial Sequence: Synthetic oligonucleotide
ggaaucaccaagaaaguuc

SEQ ID NO: 579272 - RNA, 19 nt, Artificial Sequence
  Description of Artificial Sequence: Synthetic oligonucleotide
ucuacuaggcaggccaaca

SEQ ID NO: 579273 - RNA, 19 nt, Artificial Sequence
  Description of Artificial Sequence: Synthetic oligonucleotide
aacggaccuugugagcugg

SEQ ID NO: 579274 - RNA, 19 nt, Artificial Sequence
  Description of Artificial Sequence: Synthetic oligonucleotide
uuaguguccaccugacgua

SEQ ID NO: 579275 - RNA, 19 nt, Artificial Sequence
  Description of Artificial Sequence: Synthetic oligonucleotide
agcaacggcaauuucccau

SEQ ID NO: 579276 - RNA, 19 nt, Artificial Sequence
  Description of Artificial Sequence: Synthetic oligonucleotide
ggcaaagagugucugccgg

SEQ ID NO: 579277 - RNA, 19 nt, Artificial Sequence
  Description of Artificial Sequence: Synthetic oligonucleotide
cuuucuuaauccgucucug

SEQ ID NO: 579278 - RNA, 19 nt, Artificial Sequence
  Description of Artificial Sequence: Synthetic oligonucleotide
cagccaguacccuagugac

SEQ ID NO: 579279 - RNA, 19 nt, Artificial Sequence
  Description of Artificial Sequence: Synthetic oligonucleotide
ucgcuggauaaauuuauuu

SEQ ID NO: 579280 - RNA, 19 nt, Artificial Sequence
  Description of Artificial Sequence: Synthetic oligonucleotide
guggucuagucuaaaauca

SEQ ID NO: 579281 - RNA, 19 nt, Artificial Sequence
  Description of Artificial Sequence: Synthetic oligonucleotide
aguagacgaugccaugcug

SEQ ID NO: 579282 - RNA, 19 nt, Artificial Sequence
  Description of Artificial Sequence: Synthetic oligonucleotide
aucgaaacaaggccacccu

SEQ ID NO: 579283 - RNA, 19 nt, Artificial Sequence
  Description of Artificial Sequence: Synthetic oligonucleotide
uuuacacaagagugguguc

SEQ ID NO: 579284 - RNA, 19 nt, Artificial Sequence
  Description of Artificial Sequence: Synthetic oligonucleotide
ugcauccacuaaaaucaga

SEQ ID NO: 579285 - RNA, 19 nt, Artificial Sequence
  Description of Artificial Sequence: Synthetic oligonucleotide
accgauuuucaguuuucca

SEQ ID NO: 579286 - RNA, 19 nt, Artificial Sequence
  Description of Artificial Sequence: Synthetic oligonucleotide
guagguaccgauuuucagu

SEQ ID NO: 579287 - RNA, 19 nt, Artificial Sequence
  Description of Artificial Sequence: Synthetic oligonucleotide
cagaucguaucagaugagc

SEQ ID NO: 579288 - RNA, 19 nt, Artificial Sequence
  Description of Artificial Sequence: Synthetic oligonucleotide
uucagcgacauuccccaaa

SEQ ID NO: 579289 - RNA, 19 nt, Artificial Sequence
  Description of Artificial Sequence: Synthetic oligonucleotide
ugggcaacucccugcacug

SEQ ID NO: 579290 - RNA, 19 nt, Artificial Sequence
  Description of Artificial Sequence: Synthetic oligonucleotide
caacugguauaucuuggac

SEQ ID NO: 579291 - RNA, 19 nt, Artificial Sequence
  Description of Artificial Sequence: Synthetic oligonucleotide
agagugguuuccgugcauc

SEQ ID NO: 579292 - RNA, 19 nt, Artificial Sequence
  Description of Artificial Sequence: Synthetic oligonucleotide
auauccacgugugugugcu

SEQ ID NO: 579293 - RNA, 19 nt, Artificial Sequence
  Description of Artificial Sequence: Synthetic oligonucleotide
agccuaaagccaucugcag

SEQ ID NO: 579294 - RNA, 19 nt, Artificial Sequence
  Description of Artificial Sequence: Synthetic oligonucleotide
acuguugauucaugaggca

SEQ ID NO: 579295 - RNA, 19 nt, Artificial Sequence
  Description of Artificial Sequence: Synthetic oligonucleotide
cuacuaggcaggccaacag

SEQ ID NO: 579296 - RNA, 19 nt, Artificial Sequence
  Description of Artificial Sequence: Synthetic oligonucleotide
ugagagcaugccaagccua

SEQ ID NO: 579297 - RNA, 19 nt, Artificial Sequence
  Description of Artificial Sequence: Synthetic oligonucleotide
ucguaucagaugagccucc

SEQ ID NO: 579298 - RNA, 19 nt, Artificial Sequence
  Description of Artificial Sequence: Synthetic oligonucleotide
gaaagacgcugcguagagg

SEQ ID NO: 579299 - RNA, 19 nt, Artificial Sequence
  Description of Artificial Sequence: Synthetic oligonucleotide
gcuccgguaggacauaaag

SEQ ID NO: 579300 - RNA, 19 nt, Artificial Sequence
  Description of Artificial Sequence: Synthetic oligonucleotide
uacauaagagcauguucuu

SEQ ID NO: 579301 - RNA, 19 nt, Artificial Sequence
  Description of Artificial Sequence: Synthetic oligonucleotide
ugggcggcucugaagaggu

SEQ ID NO: 579302 - RNA, 19 nt, Artificial Sequence
  Description of Artificial Sequence: Synthetic oligonucleotide
ugucaugaguuacuuucuu

SEQ ID NO: 579303 - RNA, 19 nt, Artificial Sequence
  Description of Artificial Sequence: Synthetic oligonucleotide
uuauuuggauacugcucuc

SEQ ID NO: 579304 - RNA, 19 nt, Artificial Sequence
  Description of Artificial Sequence: Synthetic oligonucleotide
uaccgauuuucaguuuucc

SEQ ID NO: 579305 - RNA, 19 nt, Artificial Sequence
  Description of Artificial Sequence: Synthetic oligonucleotide
gcaagaaacacuuucccua

SEQ ID NO: 579306 - RNA, 19 nt, Artificial Sequence
  Description of Artificial Sequence: Synthetic oligonucleotide
aggacuugugccucaaauu

SEQ ID NO: 579307 - RNA, 19 nt, Artificial Sequence
  Description of Artificial Sequence: Synthetic oligonucleotide
uguagucggugucuuugaa

SEQ ID NO: 579308 - RNA, 19 nt, Artificial Sequence
  Description of Artificial Sequence: Synthetic oligonucleotide
augaaagcuaaagcaagaa

SEQ ID NO: 579309 - RNA, 19 nt, Artificial Sequence
  Description of Artificial Sequence: Synthetic oligonucleotide
uuccgugcauccacuaaaa

SEQ ID NO: 579310 - RNA, 19 nt, Artificial Sequence
  Description of Artificial Sequence: Synthetic oligonucleotide
cugugcaagcucaggaauc

SEQ ID NO: 579311 - RNA, 19 nt, Artificial Sequence
  Description of Artificial Sequence: Synthetic oligonucleotide
uccggcucagaagcaacgg

SEQ ID NO: 579312 - RNA, 19 nt, Artificial Sequence
  Description of Artificial Sequence: Synthetic oligonucleotide
aucucacuaacggaccuug

SEQ ID NO: 579313 - RNA, 19 nt, Artificial Sequence
  Description of Artificial Sequence: Synthetic oligonucleotide
agcugaacggguaguacag

SEQ ID NO: 579314 - RNA, 19 nt, Artificial Sequence
  Description of Artificial Sequence: Synthetic oligonucleotide
agucgacugcaucccuuac

SEQ ID NO: 579315 - RNA, 19 nt, Artificial Sequence
  Description of Artificial Sequence: Synthetic oligonucleotide
agacugccacggucgaugg

SEQ ID NO: 579316 - RNA, 19 nt, Artificial Sequence
  Description of Artificial Sequence: Synthetic oligonucleotide
cagcauaccucaucacuug

SEQ ID NO: 579317 - RNA, 19 nt, Artificial Sequence
  Description of Artificial Sequence: Synthetic oligonucleotide
ccugacguagcacugugcc

SEQ ID NO: 579318 - RNA, 19 nt, Artificial Sequence
  Description of Artificial Sequence: Synthetic oligonucleotide
cugaacggguaguacagca

SEQ ID NO: 579319 - RNA, 19 nt, Artificial Sequence
  Description of Artificial Sequence: Synthetic oligonucleotide
cuaaagcaagaaucuagaa

SEQ ID NO: 579320 - RNA, 19 nt, Artificial Sequence
  Description of Artificial Sequence: Synthetic oligonucleotide
gguaagucaugauuuuauc

SEQ ID NO: 579321 - RNA, 19 nt, Artificial Sequence
  Description of Artificial Sequence: Synthetic oligonucleotide
acuaaugucugggcgcuca

SEQ ID NO: 579322 - RNA, 19 nt, Artificial Sequence
  Description of Artificial Sequence: Synthetic oligonucleotide
agcauaccucaucacuuga

SEQ ID NO: 579323 - RNA, 19 nt, Artificial Sequence
  Description of Artificial Sequence: Synthetic oligonucleotide
cauugcuacugcugucaag

SEQ ID NO: 579324 - RNA, 19 nt, Artificial Sequence
  Description of Artificial Sequence: Synthetic oligonucleotide
ccaagagguuuccauaggc

SEQ ID NO: 579325 - RNA, 19 nt, Artificial Sequence
  Description of Artificial Sequence: Synthetic oligonucleotide
ucuugucaguccagacgug

SEQ ID NO: 579326 - RNA, 19 nt, Artificial Sequence
  Description of Artificial Sequence: Synthetic oligonucleotide
aaucaccaagaaaguucuc

SEQ ID NO: 579327 - RNA, 19 nt, Artificial Sequence
  Description of Artificial Sequence: Synthetic oligonucleotide
acccagucgacugcauccc

SEQ ID NO: 579328 - RNA, 19 nt, Artificial Sequence
  Description of Artificial Sequence: Synthetic oligonucleotide
ugcggaagaggcuucccau

SEQ ID NO: 579329 - RNA, 19 nt, Artificial Sequence
  Description of Artificial Sequence: Synthetic oligonucleotide
ucugggcgcucauugcuac

SEQ ID NO: 579330 - RNA, 19 nt, Artificial Sequence
  Description of Artificial Sequence: Synthetic oligonucleotide
ugcgguuccggguggcgag

SEQ ID NO: 579331 - RNA, 19 nt, Artificial Sequence
  Description of Artificial Sequence: Synthetic oligonucleotide
aagcaacggcaauuuccca

SEQ ID NO: 579332 - RNA, 19 nt, Artificial Sequence
  Description of Artificial Sequence: Synthetic oligonucleotide
uucauccggcucagaagca

SEQ ID NO: 579333 - RNA, 19 nt, Artificial Sequence
  Description of Artificial Sequence: Synthetic oligonucleotide
guuuuaguguccaccugac

SEQ ID NO: 579334 - RNA, 19 nt, Artificial Sequence
  Description of Artificial Sequence: Synthetic oligonucleotide
caggucacagaucguauca

SEQ ID NO: 579335 - RNA, 19 nt, Artificial Sequence
  Description of Artificial Sequence: Synthetic oligonucleotide
ucgaaacaaggccacccuu

SEQ ID NO: 579336 - RNA, 19 nt, Artificial Sequence
  Description of Artificial Sequence: Synthetic oligonucleotide
ucaucucgcuggauaaauu

SEQ ID NO: 579337 - RNA, 19 nt, Artificial Sequence
  Description of Artificial Sequence: Synthetic oligonucleotide
aacggcugugacaguugac

SEQ ID NO: 579338 - RNA, 19 nt, Artificial Sequence
  Description of Artificial Sequence: Synthetic oligonucleotide
agacgcugcguagagguca

SEQ ID NO: 579339 - RNA, 19 nt, Artificial Sequence
  Description of Artificial Sequence: Synthetic oligonucleotide
gagguugggcggcuuaauc

SEQ ID NO: 579340 - RNA, 19 nt, Artificial Sequence
  Description of Artificial Sequence: Synthetic oligonucleotide
aucuacuaggcaggccaac

SEQ ID NO: 579341 - RNA, 19 nt, Artificial Sequence
  Description of Artificial Sequence: Synthetic oligonucleotide
cucguugauauccacgugu

SEQ ID NO: 579342 - RNA, 19 nt, Artificial Sequence
  Description of Artificial Sequence: Synthetic oligonucleotide
uaacggaccuugugagcug

SEQ ID NO: 579343 - RNA, 19 nt, Artificial Sequence
  Description of Artificial Sequence: Synthetic oligonucleotide
gcuaaagcaagaaucuaga

SEQ ID NO: 579344 - RNA, 19 nt, Artificial Sequence
  Description of Artificial Sequence: Synthetic oligonucleotide
aacggguaguacagcaggu

SEQ ID NO: 579345 - RNA, 19 nt, Artificial Sequence
  Description of Artificial Sequence: Synthetic oligonucleotide
cacaagaguggugucagca

SEQ ID NO: 579346 - RNA, 19 nt, Artificial Sequence
  Description of Artificial Sequence: Synthetic oligonucleotide
ugggcgcucauugcuacug

SEQ ID NO: 579347 - RNA, 19 nt, Artificial Sequence
  Description of Artificial Sequence: Synthetic oligonucleotide
gcgacauuccccaaaagga

SEQ ID NO: 579348 - RNA, 19 nt, Artificial Sequence
  Description of Artificial Sequence: Synthetic oligonucleotide
uaauccgucucuggaugga

SEQ ID NO: 579349 - RNA, 19 nt, Artificial Sequence
  Description of Artificial Sequence: Synthetic oligonucleotide
agccaguacccuagugacc

SEQ ID NO: 579350 - RNA, 19 nt, Artificial Sequence
  Description of Artificial Sequence: Synthetic oligonucleotide
uugggcggcuuaaucucac

SEQ ID NO: 579351 - RNA, 19 nt, Artificial Sequence
  Description of Artificial Sequence: Synthetic oligonucleotide
aacuaaugucugggcgcuc

SEQ ID NO: 579352 - RNA, 19 nt, Artificial Sequence
  Description of Artificial Sequence: Synthetic oligonucleotide
aaucucacuaacggaccuu

SEQ ID NO: 579353 - RNA, 19 nt, Artificial Sequence
  Description of Artificial Sequence: Synthetic oligonucleotide
guaucagaugagccuccug

SEQ ID NO: 579354 - RNA, 19 nt, Artificial Sequence
  Description of Artificial Sequence: Synthetic oligonucleotide
guaggaauguagaaucaua

SEQ ID NO: 579355 - RNA, 19 nt, Artificial Sequence
  Description of Artificial Sequence: Synthetic oligonucleotide
acuguacauaagagcaugu

SEQ ID NO: 579356 - RNA, 19 nt, Artificial Sequence
  Description of Artificial Sequence: Synthetic oligonucleotide
aggaaucaccaagaaaguu

SEQ ID NO: 579357 - RNA, 19 nt, Artificial Sequence
  Description of Artificial Sequence: Synthetic oligonucleotide
gguugggcggcuuaaucuc

SEQ ID NO: 579358 - RNA, 19 nt, Artificial Sequence
  Description of Artificial Sequence: Synthetic oligonucleotide
guagcugaacggguaguac

SEQ ID NO: 579359 - RNA, 19 nt, Artificial Sequence
  Description of Artificial Sequence: Synthetic oligonucleotide
uccgugcauccacuaaaau

SEQ ID NO: 579360 - RNA, 19 nt, Artificial Sequence
  Description of Artificial Sequence: Synthetic oligonucleotide
ccagacuugcugaugggug

SEQ ID NO: 579361 - RNA, 19 nt, Artificial Sequence
  Description of Artificial Sequence: Synthetic oligonucleotide
ccgguaggacauaaagagg

SEQ ID NO: 579362 - RNA, 19 nt, Artificial Sequence
  Description of Artificial Sequence: Synthetic oligonucleotide
cuaacggaccuugugagcu

SEQ ID NO: 579363 - RNA, 19 nt, Artificial Sequence
  Description of Artificial Sequence: Synthetic oligonucleotide
aauccgucucuggauggaa

SEQ ID NO: 579364 - RNA, 19 nt, Artificial Sequence
  Description of Artificial Sequence: Synthetic oligonucleotide
aucaggacaugggcggcuc

SEQ ID NO: 579365 - RNA, 19 nt, Artificial Sequence
  Description of Artificial Sequence: Synthetic oligonucleotide
aucacuugacuggcaaaga

SEQ ID NO: 579366 - RNA, 19 nt, Artificial Sequence
  Description of Artificial Sequence: Synthetic oligonucleotide
accugacguagcacugugc

SEQ ID NO: 579367 - RNA, 19 nt, Artificial Sequence
  Description of Artificial Sequence: Synthetic oligonucleotide
gaugagccuccugaguaga

SEQ ID NO: 579368 - RNA, 19 nt, Artificial Sequence
  Description of Artificial Sequence: Synthetic oligonucleotide
ugccgcuuguagucggugu

SEQ ID NO: 579369 - RNA, 19 nt, Artificial Sequence
  Description of Artificial Sequence: Synthetic oligonucleotide
gaacaugcuccgguaggac

SEQ ID NO: 579370 - RNA, 19 nt, Artificial Sequence
  Description of Artificial Sequence: Synthetic oligonucleotide
aagagguugggcggcuuaa

SEQ ID NO: 579371 - RNA, 19 nt, Artificial Sequence
  Description of Artificial Sequence: Synthetic oligonucleotide
auccggcucagaagcaacg

SEQ ID NO: 579372 - RNA, 19 nt, Artificial Sequence
  Description of Artificial Sequence: Synthetic oligonucleotide
gcgggaagagguugggcgg

SEQ ID NO: 579373 - RNA, 19 nt, Artificial Sequence
  Description of Artificial Sequence: Synthetic oligonucleotide
guacccuagugaccagggc

SEQ ID NO: 579374 - RNA, 19 nt, Artificial Sequence
  Description of Artificial Sequence: Synthetic oligonucleotide
ucaaaccccuguggucuag

SEQ ID NO: 579375 - RNA, 19 nt, Artificial Sequence
  Description of Artificial Sequence: Synthetic oligonucleotide
gcggcuuaaucucacuaac

SEQ ID NO: 579376 - RNA, 19 nt, Artificial Sequence
  Description of Artificial Sequence: Synthetic oligonucleotide
ugugcgguuccggguggcg

SEQ ID NO: 579377 - RNA, 19 nt, Artificial Sequence
  Description of Artificial Sequence: Synthetic oligonucleotide
gacugccacggucgauggg

SEQ ID NO: 579378 - RNA, 19 nt, Artificial Sequence
  Description of Artificial Sequence: Synthetic oligonucleotide
uuccguagagugugucaaa

SEQ ID NO: 579379 - RNA, 19 nt, Artificial Sequence
  Description of Artificial Sequence: Synthetic oligonucleotide
gaguagacgaugccaugcu

SEQ ID NO: 579380 - RNA, 19 nt, Artificial Sequence
  Description of Artificial Sequence: Synthetic oligonucleotide
ggagcccuuguaauggacc

SEQ ID NO: 579381 - RNA, 19 nt, Artificial Sequence
  Description of Artificial Sequence: Synthetic oligonucleotide
gccaguacccuagugacca

SEQ ID NO: 579382 - RNA, 19 nt, Artificial Sequence
  Description of Artificial Sequence: Synthetic oligonucleotide
gaacuaaugucugggcgcu

SEQ ID NO: 579383 - RNA, 19 nt, Artificial Sequence
  Description of Artificial Sequence: Synthetic oligonucleotide
ggcaacucccugcacuggc

SEQ ID NO: 579384 - RNA, 19 nt, Artificial Sequence
  Description of Artificial Sequence: Synthetic oligonucleotide
gacgcugcguagaggucag

SEQ ID NO: 579385 - RNA, 19 nt, Artificial Sequence
  Description of Artificial Sequence: Synthetic oligonucleotide
caccugacguagcacugug

SEQ ID NO: 579386 - RNA, 19 nt, Artificial Sequence
  Description of Artificial Sequence: Synthetic oligonucleotide
caccccugccguuucuuug

SEQ ID NO: 579387 - RNA, 19 nt, Artificial Sequence
  Description of Artificial Sequence: Synthetic oligonucleotide
gccuaaagccaucugcaga

SEQ ID NO: 579388 - RNA, 19 nt, Artificial Sequence
  Description of Artificial Sequence: Synthetic oligonucleotide
agcauuagacauacacuuu

SEQ ID NO: 579389 - RNA, 19 nt, Artificial Sequence
  Description of Artificial Sequence: Synthetic oligonucleotide
ugugugcuccacuguugau

SEQ ID NO: 579390 - RNA, 19 nt, Artificial Sequence
  Description of Artificial Sequence: Synthetic oligonucleotide
guguagguaccgauuuuca

SEQ ID NO: 579391 - RNA, 19 nt, Artificial Sequence
  Description of Artificial Sequence: Synthetic oligonucleotide
agacuugcugaugggugcu

SEQ ID NO: 579392 - RNA, 19 nt, Artificial Sequence
  Description of Artificial Sequence: Synthetic oligonucleotide
gacaguugacagcuguuuu

SEQ ID NO: 579393 - RNA, 19 nt, Artificial Sequence
  Description of Artificial Sequence: Synthetic oligonucleotide
gacguagcacugugccuuc

SEQ ID NO: 579394 - RNA, 19 nt, Artificial Sequence
  Description of Artificial Sequence: Synthetic oligonucleotide
uucaaaccccuguggucua

SEQ ID NO: 579395 - RNA, 19 nt, Artificial Sequence
  Description of Artificial Sequence: Synthetic oligonucleotide
caucuuugacuacauacuu

SEQ ID NO: 579396 - RNA, 19 nt, Artificial Sequence
  Description of Artificial Sequence: Synthetic oligonucleotide
cggcuuaaucucacuaacg

SEQ ID NO: 579397 - RNA, 19 nt, Artificial Sequence
  Description of Artificial Sequence: Synthetic oligonucleotide
gagagcaugccaagccuaa

SEQ ID NO: 579398 - RNA, 19 nt, Artificial Sequence
  Description of Artificial Sequence: Synthetic oligonucleotide
aucucgcuggauaaauuua

SEQ ID NO: 579399 - RNA, 19 nt, Artificial Sequence
  Description of Artificial Sequence: Synthetic oligonucleotide
ugccaagccuaaagccauc

SEQ ID NO: 579400 - RNA, 19 nt, Artificial Sequence
  Description of Artificial Sequence: Synthetic oligonucleotide
guaccgauuuucaguuuuc

SEQ ID NO: 579401 - RNA, 19 nt, Artificial Sequence
  Description of Artificial Sequence: Synthetic oligonucleotide
ugcuccgguaggacauaaa

SEQ ID NO: 579402 - RNA, 19 nt, Artificial Sequence
  Description of Artificial Sequence: Synthetic oligonucleotide
cauguccaugucaugaguu

SEQ ID NO: 579403 - RNA, 19 nt, Artificial Sequence
  Description of Artificial Sequence: Synthetic oligonucleotide
ggcggcuuaaucucacuaa

SEQ ID NO: 579404 - RNA, 19 nt, Artificial Sequence
  Description of Artificial Sequence: Synthetic oligonucleotide
caacggcugugacaguuga

SEQ ID NO: 579405 - RNA, 19 nt, Artificial Sequence
  Description of Artificial Sequence: Synthetic oligonucleotide
uggcgagaggggauuccau

SEQ ID NO: 579406 - RNA, 19 nt, Artificial Sequence
  Description of Artificial Sequence: Synthetic oligonucleotide
ugccacggucgaugggagc

SEQ ID NO: 579407 - RNA, 19 nt, Artificial Sequence
  Description of Artificial Sequence: Synthetic oligonucleotide
ccuuacauccuggaacaug

SEQ ID NO: 579408 - RNA, 19 nt, Artificial Sequence
  Description of Artificial Sequence: Synthetic oligonucleotide
ggcgagaggggauuccauc

SEQ ID NO: 579409 - RNA, 19 nt, Artificial Sequence
  Description of Artificial Sequence: Synthetic oligonucleotide
ugggcggcuuaaucucacu

SEQ ID NO: 579410 - RNA, 19 nt, Artificial Sequence
  Description of Artificial Sequence: Synthetic oligonucleotide
cuugccccgugaguccugc

SEQ ID NO: 579411 - RNA, 19 nt, Artificial Sequence
  Description of Artificial Sequence: Synthetic oligonucleotide
agcuaugauuagaauuauu

SEQ ID NO: 579412 - RNA, 19 nt, Artificial Sequence
  Description of Artificial Sequence: Synthetic oligonucleotide
acggucgaugggagcuucc

SEQ ID NO: 579413 - RNA, 19 nt, Artificial Sequence
  Description of Artificial Sequence: Synthetic oligonucleotide
ggucgaugggagcuuccug

SEQ ID NO: 579414 - RNA, 19 nt, Artificial Sequence
  Description of Artificial Sequence: Synthetic oligonucleotide
gcauccacuaaaaucagau

SEQ ID NO: 579415 - RNA, 19 nt, Artificial Sequence
  Description of Artificial Sequence: Synthetic oligonucleotide
guaauggacccagucgacu

SEQ ID NO: 579416 - RNA, 19 nt, Artificial Sequence
  Description of Artificial Sequence: Synthetic oligonucleotide
cagauauaguuagcaaucu

SEQ ID NO: 579417 - RNA, 19 nt, Artificial Sequence
  Description of Artificial Sequence: Synthetic oligonucleotide
caucccuuacauccuggaa

SEQ ID NO: 579418 - RNA, 19 nt, Artificial Sequence
  Description of Artificial Sequence: Synthetic oligonucleotide
ugucugccgggagccacug

SEQ ID NO: 579419 - RNA, 19 nt, Artificial Sequence
  Description of Artificial Sequence: Synthetic oligonucleotide
cagcgacauuccccaaaag

SEQ ID NO: 579420 - RNA, 19 nt, Artificial Sequence
  Description of Artificial Sequence: Synthetic oligonucleotide
gguaggacauaaagagguc

SEQ ID NO: 579421 - RNA, 19 nt, Artificial Sequence
  Description of Artificial Sequence: Synthetic oligonucleotide
gguaccgauuuucaguuuu

SEQ ID NO: 579422 - RNA, 19 nt, Artificial Sequence
  Description of Artificial Sequence: Synthetic oligonucleotide
cacugcggaagaggcuucc

SEQ ID NO: 579423 - RNA, 19 nt, Artificial Sequence
  Description of Artificial Sequence: Synthetic oligonucleotide
guugggcggcuuaaucuca

SEQ ID NO: 579424 - RNA, 19 nt, Artificial Sequence
  Description of Artificial Sequence: Synthetic oligonucleotide
caucauggcaguguguaau

SEQ ID NO: 579425 - RNA, 19 nt, Artificial Sequence
  Description of Artificial Sequence: Synthetic oligonucleotide
gguauaucuuggacaauua

SEQ ID NO: 579426 - RNA, 19 nt, Artificial Sequence
  Description of Artificial Sequence: Synthetic oligonucleotide
cuugugccucaaauucaaa

SEQ ID NO: 579427 - RNA, 19 nt, Artificial Sequence
  Description of Artificial Sequence: Synthetic oligonucleotide
cuguugauucaugaggcau

SEQ ID NO: 579428 - RNA, 19 nt, Artificial Sequence
  Description of Artificial Sequence: Synthetic oligonucleotide
gugcucaggguuuuaguuu

SEQ ID NO: 579429 - RNA, 19 nt, Artificial Sequence
  Description of Artificial Sequence: Synthetic oligonucleotide
acggguaguacagcagguu

SEQ ID NO: 579430 - RNA, 19 nt, Artificial Sequence
  Description of Artificial Sequence: Synthetic oligonucleotide
agauuuccguagagugugu

SEQ ID NO: 579431 - RNA, 19 nt, Artificial Sequence
  Description of Artificial Sequence: Synthetic oligonucleotide
cggguaguacagcagguug

SEQ ID NO: 579432 - RNA, 19 nt, Artificial Sequence
  Description of Artificial Sequence: Synthetic oligonucleotide
ggcagucacaugacuucag

SEQ ID NO: 579433 - RNA, 19 nt, Artificial Sequence
  Description of Artificial Sequence: Synthetic oligonucleotide
agguaccgauuuucaguuu

SEQ ID NO: 579434 - RNA, 19 nt, Artificial Sequence
  Description of Artificial Sequence: Synthetic oligonucleotide
cagucgacugcaucccuua

SEQ ID NO: 579435 - RNA, 19 nt, Artificial Sequence
  Description of Artificial Sequence: Synthetic oligonucleotide
cugaugggugcucaggguu

SEQ ID NO: 579436 - RNA, 19 nt, Artificial Sequence
  Description of Artificial Sequence: Synthetic oligonucleotide
ccaacggcugugacaguug

SEQ ID NO: 579437 - RNA, 19 nt, Artificial Sequence
  Description of Artificial Sequence: Synthetic oligonucleotide
guggcgagaggggauucca

SEQ ID NO: 579438 - RNA, 19 nt, Artificial Sequence
  Description of Artificial Sequence: Synthetic oligonucleotide
uggacccagucgacugcau

SEQ ID NO: 579439 - RNA, 19 nt, Artificial Sequence
  Description of Artificial Sequence: Synthetic oligonucleotide
gucaucucgcuggauaaau

SEQ ID NO: 579440 - RNA, 19 nt, Artificial Sequence
  Description of Artificial Sequence: Synthetic oligonucleotide
gguuccggguggcgagagg

SEQ ID NO: 579441 - RNA, 19 nt, Artificial Sequence
  Description of Artificial Sequence: Synthetic oligonucleotide
ggauacugcucucuaguuu

SEQ ID NO: 579442 - RNA, 19 nt, Artificial Sequence
  Description of Artificial Sequence: Synthetic oligonucleotide
gcugaacggguaguacagc

SEQ ID NO: 579443 - RNA, 19 nt, Artificial Sequence
  Description of Artificial Sequence: Synthetic oligonucleotide
gguaggaauguagaaucau

SEQ ID NO: 579444 - RNA, 19 nt, Artificial Sequence
  Description of Artificial Sequence: Synthetic oligonucleotide
gccaccagcuaugauuaga

SEQ ID NO: 579445 - RNA, 19 nt, Artificial Sequence
  Description of Artificial Sequence: Synthetic oligonucleotide
gugcaagcucaggaaucac

SEQ ID NO: 579446 - RNA, 19 nt, Artificial Sequence
  Description of Artificial Sequence: Synthetic oligonucleotide
gggcgcucauugcuacugc

SEQ ID NO: 579447 - RNA, 19 nt, Artificial Sequence
  Description of Artificial Sequence: Synthetic oligonucleotide
cacggucgaugggagcuuc

SEQ ID NO: 579448 - RNA, 19 nt, Artificial Sequence
  Description of Artificial Sequence: Synthetic oligonucleotide
cucgcuggauaaauuuauu

SEQ ID NO: 579449 - RNA, 19 nt, Artificial Sequence
  Description of Artificial Sequence: Synthetic oligonucleotide
uccaccccugccguuucuu

SEQ ID NO: 579450 - RNA, 19 nt, Artificial Sequence
  Description of Artificial Sequence: Synthetic oligonucleotide
cuguacauaagagcauguu

SEQ ID NO: 579451 - RNA, 19 nt, Artificial Sequence
  Description of Artificial Sequence: Synthetic oligonucleotide
gguuuccgugcauccacua

SEQ ID NO: 579452 - RNA, 19 nt, Artificial Sequence
  Description of Artificial Sequence: Synthetic oligonucleotide
gggcaacucccugcacugg

SEQ ID NO: 579453 - RNA, 19 nt, Artificial Sequence
  Description of Artificial Sequence: Synthetic oligonucleotide
cuacuuccuucauccggcu

SEQ ID NO: 579454 - RNA, 19 nt, Artificial Sequence
  Description of Artificial Sequence: Synthetic oligonucleotide
acguagcacugugccuucu

SEQ ID NO: 579455 - RNA, 19 nt, Artificial Sequence
  Description of Artificial Sequence: Synthetic oligonucleotide
guccucuuaugaaguuaaa

SEQ ID NO: 579456 - RNA, 19 nt, Artificial Sequence
  Description of Artificial Sequence: Synthetic oligonucleotide
gugcgguuccggguggcga

SEQ ID NO: 579457 - RNA, 19 nt, Artificial Sequence
  Description of Artificial Sequence: Synthetic oligonucleotide
cuucagcgacauuccccaa

SEQ ID NO: 579458 - RNA, 19 nt, Artificial Sequence
  Description of Artificial Sequence: Synthetic oligonucleotide
gcaacucccugcacuggca

SEQ ID NO: 579459 - RNA, 19 nt, Artificial Sequence
  Description of Artificial Sequence: Synthetic oligonucleotide
gccacggucgaugggagcu

SEQ ID NO: 579460 - RNA, 19 nt, Artificial Sequence
  Description of Artificial Sequence: Synthetic oligonucleotide
ccuuaagggagcccuugua

SEQ ID NO: 579461 - RNA, 19 nt, Artificial Sequence
  Description of Artificial Sequence: Synthetic oligonucleotide
ccuagugaccagggccaag

SEQ ID NO: 579462 - RNA, 19 nt, Artificial Sequence
  Description of Artificial Sequence: Synthetic oligonucleotide
cauuccccaaaaggauugu

SEQ ID NO: 579463 - RNA, 19 nt, Artificial Sequence
  Description of Artificial Sequence: Synthetic oligonucleotide
cuuucccuacuuccuucau

SEQ ID NO: 579464 - RNA, 19 nt, Artificial Sequence
  Description of Artificial Sequence: Synthetic oligonucleotide
cagcuaugauuagaauuau

SEQ ID NO: 579465 - RNA, 19 nt, Artificial Sequence
  Description of Artificial Sequence: Synthetic oligonucleotide
cuguguagguaccgauuuu

SEQ ID NO: 579466 - RNA, 19 nt, Artificial Sequence
  Description of Artificial Sequence: Synthetic oligonucleotide
caucaggacaugggcggcu

SEQ ID NO: 579467 - RNA, 19 nt, Artificial Sequence
  Description of Artificial Sequence: Synthetic oligonucleotide
cccgugaguccugccagac

SEQ ID NO: 579468 - RNA, 19 nt, Artificial Sequence
  Description of Artificial Sequence: Synthetic oligonucleotide
gccacugcggaagaggcuu

SEQ ID NO: 579469 - RNA, 19 nt, Artificial Sequence
  Description of Artificial Sequence: Synthetic oligonucleotide
cccucccuaacagaaucga

SEQ ID NO: 579470 - RNA, 19 nt, Artificial Sequence
  Description of Artificial Sequence: Synthetic oligonucleotide
gccagacuugcugaugggu

SEQ ID NO: 579471 - RNA, 19 nt, Artificial Sequence
  Description of Artificial Sequence: Synthetic oligonucleotide
cgacauuccccaaaaggau

SEQ ID NO: 579472 - RNA, 19 nt, Artificial Sequence
  Description of Artificial Sequence: Synthetic oligonucleotide
cgugaguccugccagacuu

SEQ ID NO: 579473 - RNA, 19 nt, Artificial Sequence
  Description of Artificial Sequence: Synthetic oligonucleotide
acggaccuugugagcuggu

SEQ ID NO: 579474 - RNA, 19 nt, Artificial Sequence
  Description of Artificial Sequence: Synthetic oligonucleotide
ccacugcggaagaggcuuc

SEQ ID NO: 579475 - RNA, 19 nt, Artificial Sequence
  Description of Artificial Sequence: Synthetic oligonucleotide
gccaagccuaaagccaucu

SEQ ID NO: 579476 - RNA, 19 nt, Artificial Sequence
  Description of Artificial Sequence: Synthetic oligonucleotide
caugcuccgguaggacaua

SEQ ID NO: 579477 - RNA, 19 nt, Artificial Sequence
  Description of Artificial Sequence: Synthetic oligonucleotide
guccagacgugaagcuccu

SEQ ID NO: 579478 - RNA, 19 nt, Artificial Sequence
  Description of Artificial Sequence: Synthetic oligonucleotide
cugggcgcucauugcuacu

SEQ ID NO: 579479 - RNA, 19 nt, Artificial Sequence
  Description of Artificial Sequence: Synthetic oligonucleotide
gagccagcgggaagagguu

SEQ ID NO: 579480 - RNA, 19 nt, Artificial Sequence
  Description of Artificial Sequence: Synthetic oligonucleotide
ccccgugaguccugccaga

SEQ ID NO: 579481 - RNA, 19 nt, Artificial Sequence
  Description of Artificial Sequence: Synthetic oligonucleotide
ccagucgacugcaucccuu

SEQ ID NO: 579482 - RNA, 19 nt, Artificial Sequence
  Description of Artificial Sequence: Synthetic oligonucleotide
gcgguuccggguggcgaga

SEQ ID NO: 579483 - RNA, 19 nt, Artificial Sequence
  Description of Artificial Sequence: Synthetic oligonucleotide
cccuguggucuagucuaaa

SEQ ID NO: 579484 - RNA, 19 nt, Artificial Sequence
  Description of Artificial Sequence: Synthetic oligonucleotide
cccagucgacugcaucccu

SEQ ID NO: 579485 - RNA, 19 nt, Artificial Sequence
  Description of Artificial Sequence: Synthetic oligonucleotide
cguaucagaugagccuccu

SEQ ID NO: 579486 - RNA, 19 nt, Artificial Sequence
  Description of Artificial Sequence: Synthetic oligonucleotide
cggucgaugggagcuuccu

SEQ ID NO: 579487 - RNA, 19 nt, Artificial Sequence
  Description of Artificial Sequence: Synthetic oligonucleotide
cccuuacauccuggaacau

SEQ ID NO: 579488 - RNA, 19 nt, Artificial Sequence
  Description of Artificial Sequence: Synthetic oligonucleotide
cgcuuguagucggugucuu

SEQ ID NO: 579489 - RNA, 19 nt, Artificial Sequence
  Description of Artificial Sequence: Synthetic oligonucleotide
ccacggucgaugggagcuu

SEQ ID NO: 579490 - RNA, 19 nt, Artificial Sequence
  Description of Artificial Sequence: Synthetic oligonucleotide
uuugauuugauaauggugg

SEQ ID NO: 579491 - RNA, 19 nt, Artificial Sequence
  Description of Artificial Sequence: Synthetic oligonucleotide
aaucacuuggcacaugucc

SEQ ID NO: 579492 - RNA, 19 nt, Artificial Sequence
  Description of Artificial Sequence: Synthetic oligonucleotide
aauucauuaguuuccacag

SEQ ID NO: 579493 - RNA, 19 nt, Artificial Sequence
  Description of Artificial Sequence: Synthetic oligonucleotide
ucuuaugccuuacauaugg

SEQ ID NO: 579494 - RNA, 19 nt, Artificial Sequence
  Description of Artificial Sequence: Synthetic oligonucleotide
auguuuagaaucuuaugcc

SEQ ID NO: 579495 - RNA, 19 nt, Artificial Sequence
  Description of Artificial Sequence: Synthetic oligonucleotide
auaucagugagugagagac

SEQ ID NO: 579496 - RNA, 19 nt, Artificial Sequence
  Description of Artificial Sequence: Synthetic oligonucleotide
ucaggauugacauauccgg

SEQ ID NO: 579497 - RNA, 19 nt, Artificial Sequence
  Description of Artificial Sequence: Synthetic oligonucleotide
aacaguauccauaucgacc

SEQ ID NO: 579498 - RNA, 19 nt, Artificial Sequence
  Description of Artificial Sequence: Synthetic oligonucleotide
uuuagauugaggacaagcc

SEQ ID NO: 579499 - RNA, 19 nt, Artificial Sequence
  Description of Artificial Sequence: Synthetic oligonucleotide
aaugcugaggcauuaagga

SEQ ID NO: 579500 - RNA, 19 nt, Artificial Sequence
  Description of Artificial Sequence: Synthetic oligonucleotide
uagauugaggacaagcccg

SEQ ID NO: 579501 - RNA, 19 nt, Artificial Sequence
  Description of Artificial Sequence: Synthetic oligonucleotide
gauuugauaaugguggugg

SEQ ID NO: 579502 - RNA, 19 nt, Artificial Sequence
  Description of Artificial Sequence: Synthetic oligonucleotide
aguacaaguccacagcacc

SEQ ID NO: 579503 - RNA, 19 nt, Artificial Sequence
  Description of Artificial Sequence: Synthetic oligonucleotide
acccuuauggcucucaagc

SEQ ID NO: 579504 - RNA, 19 nt, Artificial Sequence
  Description of Artificial Sequence: Synthetic oligonucleotide
uuacauauggaacaggguc

SEQ ID NO: 579505 - RNA, 19 nt, Artificial Sequence
  Description of Artificial Sequence: Synthetic oligonucleotide
uuaaguuauccaaaguucu

SEQ ID NO: 579506 - RNA, 19 nt, Artificial Sequence
  Description of Artificial Sequence: Synthetic oligonucleotide
uuugugguugguaugaugu

SEQ ID NO: 579507 - RNA, 19 nt, Artificial Sequence
  Description of Artificial Sequence: Synthetic oligonucleotide
aacaggaaggucuacugag

SEQ ID NO: 579508 - RNA, 19 nt, Artificial Sequence
  Description of Artificial Sequence: Synthetic oligonucleotide
aaauugcaacaucaaaauc

SEQ ID NO: 579509 - RNA, 19 nt, Artificial Sequence
  Description of Artificial Sequence: Synthetic oligonucleotide
uucuucgcaagacagaagc

SEQ ID NO: 579510 - RNA, 19 nt, Artificial Sequence
  Description of Artificial Sequence: Synthetic oligonucleotide
agauaguuacauuaaaugu

SEQ ID NO: 579511 - RNA, 19 nt, Artificial Sequence
  Description of Artificial Sequence: Synthetic oligonucleotide
ugaaucauauuaaguagcc

SEQ ID NO: 579512 - RNA, 19 nt, Artificial Sequence
  Description of Artificial Sequence: Synthetic oligonucleotide
agguguaacagaauuagcc

SEQ ID NO: 579513 - RNA, 19 nt, Artificial Sequence
  Description of Artificial Sequence: Synthetic oligonucleotide
uuagauugaggacaagccc

SEQ ID NO: 579514 - RNA, 19 nt, Artificial Sequence
  Description of Artificial Sequence: Synthetic oligonucleotide
aauuagucgaacaucagga

SEQ ID NO: 579515 - RNA, 19 nt, Artificial Sequence
  Description of Artificial Sequence: Synthetic oligonucleotide
aaauggcggauucuuaguc

SEQ ID NO: 579516 - RNA, 19 nt, Artificial Sequence
  Description of Artificial Sequence: Synthetic oligonucleotide
ucagcauaggauuugaaaa

SEQ ID NO: 579517 - RNA, 19 nt, Artificial Sequence
  Description of Artificial Sequence: Synthetic oligonucleotide
uuaguguaauccacaacgg

SEQ ID NO: 579518 - RNA, 19 nt, Artificial Sequence
  Description of Artificial Sequence: Synthetic oligonucleotide
uuaccuauucccuuucggg

SEQ ID NO: 579519 - RNA, 19 nt, Artificial Sequence
  Description of Artificial Sequence: Synthetic oligonucleotide
uaaauugcaacaucaaaau

SEQ ID NO: 579520 - RNA, 19 nt, Artificial Sequence
  Description of Artificial Sequence: Synthetic oligonucleotide
guauauacugcccacauuc

SEQ ID NO: 579521 - RNA, 19 nt, Artificial Sequence
  Description of Artificial Sequence: Synthetic oligonucleotide
gauauuuagaaagcccugg

SEQ ID NO: 579522 - RNA, 19 nt, Artificial Sequence
  Description of Artificial Sequence: Synthetic oligonucleotide
uuuuagauugaggacaagc

SEQ ID NO: 579523 - RNA, 19 nt, Artificial Sequence
  Description of Artificial Sequence: Synthetic oligonucleotide
uucaugaaaacacugggua

SEQ ID NO: 579524 - RNA, 19 nt, Artificial Sequence
  Description of Artificial Sequence: Synthetic oligonucleotide
guaaccuccagucaugugc

SEQ ID NO: 579525 - RNA, 19 nt, Artificial Sequence
  Description of Artificial Sequence: Synthetic oligonucleotide
gacuccuuaccaaacaucg

SEQ ID NO: 579526 - RNA, 19 nt, Artificial Sequence
  Description of Artificial Sequence: Synthetic oligonucleotide
ugacaucucuuucauagcc

SEQ ID NO: 579527 - RNA, 19 nt, Artificial Sequence
  Description of Artificial Sequence: Synthetic oligonucleotide
uuucaagcauaccugaccu

SEQ ID NO: 579528 - RNA, 19 nt, Artificial Sequence
  Description of Artificial Sequence: Synthetic oligonucleotide
acaguauccauaucgaccu

SEQ ID NO: 579529 - RNA, 19 nt, Artificial Sequence
  Description of Artificial Sequence: Synthetic oligonucleotide
aguaccagaauucauuagu

SEQ ID NO: 579530 - RNA, 19 nt, Artificial Sequence
  Description of Artificial Sequence: Synthetic oligonucleotide
ucuacuagggcuucauugc

SEQ ID NO: 579531 - RNA, 19 nt, Artificial Sequence
  Description of Artificial Sequence: Synthetic oligonucleotide
uucuuagucaacauguuua

SEQ ID NO: 579532 - RNA, 19 nt, Artificial Sequence
  Description of Artificial Sequence: Synthetic oligonucleotide
agccuuauaucacagagga

SEQ ID NO: 579533 - RNA, 19 nt, Artificial Sequence
  Description of Artificial Sequence: Synthetic oligonucleotide
aguuauccaaaguucuaac

SEQ ID NO: 579534 - RNA, 19 nt, Artificial Sequence
  Description of Artificial Sequence: Synthetic oligonucleotide
uacauauggaacaggguca

SEQ ID NO: 579535 - RNA, 19 nt, Artificial Sequence
  Description of Artificial Sequence: Synthetic oligonucleotide
uauacugcccacauucagc

SEQ ID NO: 579536 - RNA, 19 nt, Artificial Sequence
  Description of Artificial Sequence: Synthetic oligonucleotide
ucaaagauaguuacauuaa

SEQ ID NO: 579537 - RNA, 19 nt, Artificial Sequence
  Description of Artificial Sequence: Synthetic oligonucleotide
uccacaguugaucuacuag

SEQ ID NO: 579538 - RNA, 19 nt, Artificial Sequence
  Description of Artificial Sequence: Synthetic oligonucleotide
aucuacuagggcuucauug

SEQ ID NO: 579539 - RNA, 19 nt, Artificial Sequence
  Description of Artificial Sequence: Synthetic oligonucleotide
uguaacagaauuagccaga

SEQ ID NO: 579540 - RNA, 19 nt, Artificial Sequence
  Description of Artificial Sequence: Synthetic oligonucleotide
aaaaucagccugcucaaau

SEQ ID NO: 579541 - RNA, 19 nt, Artificial Sequence
  Description of Artificial Sequence: Synthetic oligonucleotide
uagugugccuguaacuugg

SEQ ID NO: 579542 - RNA, 19 nt, Artificial Sequence
  Description of Artificial Sequence: Synthetic oligonucleotide
uggaauuaugguaggauuc

SEQ ID NO: 579543 - RNA, 19 nt, Artificial Sequence
  Description of Artificial Sequence: Synthetic oligonucleotide
ugcacacucaucuccaaag

SEQ ID NO: 579544 - RNA, 19 nt, Artificial Sequence
  Description of Artificial Sequence: Synthetic oligonucleotide
aggacguagacuccuuacc

SEQ ID NO: 579545 - RNA, 19 nt, Artificial Sequence
  Description of Artificial Sequence: Synthetic oligonucleotide
uugcucauaaugauggcac

SEQ ID NO: 579546 - RNA, 19 nt, Artificial Sequence
  Description of Artificial Sequence: Synthetic oligonucleotide
uucaguccgagagugacgg

SEQ ID NO: 579547 - RNA, 19 nt, Artificial Sequence
  Description of Artificial Sequence: Synthetic oligonucleotide
cucaggauugacauauccg

SEQ ID NO: 579548 - RNA, 19 nt, Artificial Sequence
  Description of Artificial Sequence: Synthetic oligonucleotide
auagcaaaggggaaucagc

SEQ ID NO: 579549 - RNA, 19 nt, Artificial Sequence
  Description of Artificial Sequence: Synthetic oligonucleotide
uguuccguguauauacugc

SEQ ID NO: 579550 - RNA, 19 nt, Artificial Sequence
  Description of Artificial Sequence: Synthetic oligonucleotide
gaaugcugaggcauuaagg

SEQ ID NO: 579551 - RNA, 19 nt, Artificial Sequence
  Description of Artificial Sequence: Synthetic oligonucleotide
aaagauaguuacauuaaau

SEQ ID NO: 579552 - RNA, 19 nt, Artificial Sequence
  Description of Artificial Sequence: Synthetic oligonucleotide
ugucuuucugcccaugaca

SEQ ID NO: 579553 - RNA, 19 nt, Artificial Sequence
  Description of Artificial Sequence: Synthetic oligonucleotide
ggaaaugaaggccugacug

SEQ ID NO: 579554 - RNA, 19 nt, Artificial Sequence
  Description of Artificial Sequence: Synthetic oligonucleotide
aauuaugguaggauucaag

SEQ ID NO: 579555 - RNA, 19 nt, Artificial Sequence
  Description of Artificial Sequence: Synthetic oligonucleotide
gucuagaggacguagacuc

SEQ ID NO: 579556 - RNA, 19 nt, Artificial Sequence
  Description of Artificial Sequence: Synthetic oligonucleotide
auauggaacagggucaguc

SEQ ID NO: 579557 - RNA, 19 nt, Artificial Sequence
  Description of Artificial Sequence: Synthetic oligonucleotide
ugaugggcgauauuuagaa

SEQ ID NO: 579558 - RNA, 19 nt, Artificial Sequence
  Description of Artificial Sequence: Synthetic oligonucleotide
uggcacuuacuuucuaugg

SEQ ID NO: 579559 - RNA, 19 nt, Artificial Sequence
  Description of Artificial Sequence: Synthetic oligonucleotide
aauggcggauucuuaguca

SEQ ID NO: 579560 - RNA, 19 nt, Artificial Sequence
  Description of Artificial Sequence: Synthetic oligonucleotide
uucuauggcuaacacaaaa

SEQ ID NO: 579561 - RNA, 19 nt, Artificial Sequence
  Description of Artificial Sequence: Synthetic oligonucleotide
ugcacgguaauaguuaucu

SEQ ID NO: 579562 - RNA, 19 nt, Artificial Sequence
  Description of Artificial Sequence: Synthetic oligonucleotide
accuauucccuuucgggac

SEQ ID NO: 579563 - RNA, 19 nt, Artificial Sequence
  Description of Artificial Sequence: Synthetic oligonucleotide
gaaaugcccauacucagca

SEQ ID NO: 579564 - RNA, 19 nt, Artificial Sequence
  Description of Artificial Sequence: Synthetic oligonucleotide
ugaccuugguauuccauag

SEQ ID NO: 579565 - RNA, 19 nt, Artificial Sequence
  Description of Artificial Sequence: Synthetic oligonucleotide
cauugcauaagggagacuc

SEQ ID NO: 579566 - RNA, 19 nt, Artificial Sequence
  Description of Artificial Sequence: Synthetic oligonucleotide
agaggaauuuuagaagggg

SEQ ID NO: 579567 - RNA, 19 nt, Artificial Sequence
  Description of Artificial Sequence: Synthetic oligonucleotide
cuugaugggcgauauuuag

SEQ ID NO: 579568 - RNA, 19 nt, Artificial Sequence
  Description of Artificial Sequence: Synthetic oligonucleotide
cacaguugaucuacuaggg

SEQ ID NO: 579569 - RNA, 19 nt, Artificial Sequence
  Description of Artificial Sequence: Synthetic oligonucleotide
augccuuacauauggaaca

SEQ ID NO: 579570 - RNA, 19 nt, Artificial Sequence
  Description of Artificial Sequence: Synthetic oligonucleotide
uggcuguucugcuaaauug

SEQ ID NO: 579571 - RNA, 19 nt, Artificial Sequence
  Description of Artificial Sequence: Synthetic oligonucleotide
gaaguacaaguccacagca

SEQ ID NO: 579572 - RNA, 19 nt, Artificial Sequence
  Description of Artificial Sequence: Synthetic oligonucleotide
uagucgaacaucaggauuu

SEQ ID NO: 579573 - RNA, 19 nt, Artificial Sequence
  Description of Artificial Sequence: Synthetic oligonucleotide
uucgcaagacagaagcagc

SEQ ID NO: 579574 - RNA, 19 nt, Artificial Sequence
  Description of Artificial Sequence: Synthetic oligonucleotide
guuacucgaggauuccugg

SEQ ID NO: 579575 - RNA, 19 nt, Artificial Sequence
  Description of Artificial Sequence: Synthetic oligonucleotide
ucauuaguuuccacaguug

SEQ ID NO: 579576 - RNA, 19 nt, Artificial Sequence
  Description of Artificial Sequence: Synthetic oligonucleotide
ucaugaaaacacuggguac

SEQ ID NO: 579577 - RNA, 19 nt, Artificial Sequence
  Description of Artificial Sequence: Synthetic oligonucleotide
ucuuuuagauugaggacaa

SEQ ID NO: 579578 - RNA, 19 nt, Artificial Sequence
  Description of Artificial Sequence: Synthetic oligonucleotide
guucuauccuuauccauag

SEQ ID NO: 579579 - RNA, 19 nt, Artificial Sequence
  Description of Artificial Sequence: Synthetic oligonucleotide
cagaauuagucgaacauca

SEQ ID NO: 579580 - RNA, 19 nt, Artificial Sequence
  Description of Artificial Sequence: Synthetic oligonucleotide
cugacagugauagugugcc

SEQ ID NO: 579581 - RNA, 19 nt, Artificial Sequence
  Description of Artificial Sequence: Synthetic oligonucleotide
acaucgagagcggagcugc

SEQ ID NO: 579582 - RNA, 19 nt, Artificial Sequence
  Description of Artificial Sequence: Synthetic oligonucleotide
ggauuuaaguuauccaaag

SEQ ID NO: 579583 - RNA, 19 nt, Artificial Sequence
  Description of Artificial Sequence: Synthetic oligonucleotide
ugggcgauauuuagaaagc

SEQ ID NO: 579584 - RNA, 19 nt, Artificial Sequence
  Description of Artificial Sequence: Synthetic oligonucleotide
uuaugccuuacauauggaa

SEQ ID NO: 579585 - RNA, 19 nt, Artificial Sequence
  Description of Artificial Sequence: Synthetic oligonucleotide
auuagccagagcaucaauc

SEQ ID NO: 579586 - RNA, 19 nt, Artificial Sequence
  Description of Artificial Sequence: Synthetic oligonucleotide
uccuaucucucaaaugcug

SEQ ID NO: 579587 - RNA, 19 nt, Artificial Sequence
  Description of Artificial Sequence: Synthetic oligonucleotide
uuuagaaucuuaugccuua

SEQ ID NO: 579588 - RNA, 19 nt, Artificial Sequence
  Description of Artificial Sequence: Synthetic oligonucleotide
uggccuuucaagcauguuc

SEQ ID NO: 579589 - RNA, 19 nt, Artificial Sequence
  Description of Artificial Sequence: Synthetic oligonucleotide
uccguguauauacugccca

SEQ ID NO: 579590 - RNA, 19 nt, Artificial Sequence
  Description of Artificial Sequence: Synthetic oligonucleotide
acgaaaugcccauacucag

SEQ ID NO: 579591 - RNA, 19 nt, Artificial Sequence
  Description of Artificial Sequence: Synthetic oligonucleotide
auaugaaggcuuuuguaaa

SEQ ID NO: 579592 - RNA, 19 nt, Artificial Sequence
  Description of Artificial Sequence: Synthetic oligonucleotide
uucuucuucuucuucuugu

SEQ ID NO: 579593 - RNA, 19 nt, Artificial Sequence
  Description of Artificial Sequence: Synthetic oligonucleotide
aguguaauccacaacggcu

SEQ ID NO: 579594 - RNA, 19 nt, Artificial Sequence
  Description of Artificial Sequence: Synthetic oligonucleotide
augugaauggaccuggcaa

SEQ ID NO: 579595 - RNA, 19 nt, Artificial Sequence
  Description of Artificial Sequence: Synthetic oligonucleotide
auauuuagaaagcccugga

SEQ ID NO: 579596 - RNA, 19 nt, Artificial Sequence
  Description of Artificial Sequence: Synthetic oligonucleotide
uuuuagaaggggugcuuug

SEQ ID NO: 579597 - RNA, 19 nt, Artificial Sequence
  Description of Artificial Sequence: Synthetic oligonucleotide
uuagucgaacaucaggauu

SEQ ID NO: 579598 - RNA, 19 nt, Artificial Sequence
  Description of Artificial Sequence: Synthetic oligonucleotide
guuacucagcacuucauga

SEQ ID NO: 579599 - RNA, 19 nt, Artificial Sequence
  Description of Artificial Sequence: Synthetic oligonucleotide
uuaaguagccacugaaguu

SEQ ID NO: 579600 - RNA, 19 nt, Artificial Sequence
  Description of Artificial Sequence: Synthetic oligonucleotide
acuuucuauggcuaacaca

SEQ ID NO: 579601 - RNA, 19 nt, Artificial Sequence
  Description of Artificial Sequence: Synthetic oligonucleotide
aucacagaggaauuuuaga

SEQ ID NO: 579602 - RNA, 19 nt, Artificial Sequence
  Description of Artificial Sequence: Synthetic oligonucleotide
aaaucagccugcucaaauu

SEQ ID NO: 579603 - RNA, 19 nt, Artificial Sequence
  Description of Artificial Sequence: Synthetic oligonucleotide
uaccuauucccuuucggga

SEQ ID NO: 579604 - RNA, 19 nt, Artificial Sequence
  Description of Artificial Sequence: Synthetic oligonucleotide
auacugcccacauucagca

SEQ ID NO: 579605 - RNA, 19 nt, Artificial Sequence
  Description of Artificial Sequence: Synthetic oligonucleotide
ugugucuagaggacguaga

SEQ ID NO: 579606 - RNA, 19 nt, Artificial Sequence
  Description of Artificial Sequence: Synthetic oligonucleotide
guuccguguauauacugcc

SEQ ID NO: 579607 - RNA, 19 nt, Artificial Sequence
  Description of Artificial Sequence: Synthetic oligonucleotide
aaguuauccaaaguucuaa

SEQ ID NO: 579608 - RNA, 19 nt, Artificial Sequence
  Description of Artificial Sequence: Synthetic oligonucleotide
cagaggaauuuuagaaggg

SEQ ID NO: 579609 - RNA, 19 nt, Artificial Sequence
  Description of Artificial Sequence: Synthetic oligonucleotide
cagucugaaucauauuaag

SEQ ID NO: 579610 - RNA, 19 nt, Artificial Sequence
  Description of Artificial Sequence: Synthetic oligonucleotide
cacaccguaaccuccaguc

SEQ ID NO: 579611 - RNA, 19 nt, Artificial Sequence
  Description of Artificial Sequence: Synthetic oligonucleotide
uccuuaccaaacaucgaga

SEQ ID NO: 579612 - RNA, 19 nt, Artificial Sequence
  Description of Artificial Sequence: Synthetic oligonucleotide
agcaccacaccguaaccuc

SEQ ID NO: 579613 - RNA, 19 nt, Artificial Sequence
  Description of Artificial Sequence: Synthetic oligonucleotide
caaacaucgagagcggagc

SEQ ID NO: 579614 - RNA, 19 nt, Artificial Sequence
  Description of Artificial Sequence: Synthetic oligonucleotide
ugcuucuucuucuucuucu

SEQ ID NO: 579615 - RNA, 19 nt, Artificial Sequence
  Description of Artificial Sequence: Synthetic oligonucleotide
agcucauacugccacauaa

SEQ ID NO: 579616 - RNA, 19 nt, Artificial Sequence
  Description of Artificial Sequence: Synthetic oligonucleotide
ugauagugugccuguaacu

SEQ ID NO: 579617 - RNA, 19 nt, Artificial Sequence
  Description of Artificial Sequence: Synthetic oligonucleotide
uaaguuauccaaaguucua

SEQ ID NO: 579618 - RNA, 19 nt, Artificial Sequence
  Description of Artificial Sequence: Synthetic oligonucleotide
agagcaucaaucauuucug

SEQ ID NO: 579619 - RNA, 19 nt, Artificial Sequence
  Description of Artificial Sequence: Synthetic oligonucleotide
uagucaacauguuuagaau

SEQ ID NO: 579620 - RNA, 19 nt, Artificial Sequence
  Description of Artificial Sequence: Synthetic oligonucleotide
uaaauggcggauucuuagu

SEQ ID NO: 579621 - RNA, 19 nt, Artificial Sequence
  Description of Artificial Sequence: Synthetic oligonucleotide
auuucugcacgguaauagu

SEQ ID NO: 579622 - RNA, 19 nt, Artificial Sequence
  Description of Artificial Sequence: Synthetic oligonucleotide
uuugauaauggugguggac

SEQ ID NO: 579623 - RNA, 19 nt, Artificial Sequence
  Description of Artificial Sequence: Synthetic oligonucleotide
aggaauuuuagaaggggug

SEQ ID NO: 579624 - RNA, 19 nt, Artificial Sequence
  Description of Artificial Sequence: Synthetic oligonucleotide
auagugugccuguaacuug

SEQ ID NO: 579625 - RNA, 19 nt, Artificial Sequence
  Description of Artificial Sequence: Synthetic oligonucleotide
uaccaaacaucgagagcgg

SEQ ID NO: 579626 - RNA, 19 nt, Artificial Sequence
  Description of Artificial Sequence: Synthetic oligonucleotide
uuacuuucuauggcuaaca

SEQ ID NO: 579627 - RNA, 19 nt, Artificial Sequence
  Description of Artificial Sequence: Synthetic oligonucleotide
acggggagcgcacagaccu

SEQ ID NO: 579628 - RNA, 19 nt, Artificial Sequence
  Description of Artificial Sequence: Synthetic oligonucleotide
uucugcacgguaauaguua

SEQ ID NO: 579629 - RNA, 19 nt, Artificial Sequence
  Description of Artificial Sequence: Synthetic oligonucleotide
uacuuucuauggcuaacac

SEQ ID NO: 579630 - RNA, 19 nt, Artificial Sequence
  Description of Artificial Sequence: Synthetic oligonucleotide
cauucacuuuuacuuaaug

SEQ ID NO: 579631 - RNA, 19 nt, Artificial Sequence
  Description of Artificial Sequence: Synthetic oligonucleotide
ugauuugauaaugguggug

SEQ ID NO: 579632 - RNA, 19 nt, Artificial Sequence
  Description of Artificial Sequence: Synthetic oligonucleotide
ccacaguugaucuacuagg

SEQ ID NO: 579633 - RNA, 19 nt, Artificial Sequence
  Description of Artificial Sequence: Synthetic oligonucleotide
cagccuuauaucacagagg

SEQ ID NO: 579634 - RNA, 19 nt, Artificial Sequence
  Description of Artificial Sequence: Synthetic oligonucleotide
uuguuccguguauauacug

SEQ ID NO: 579635 - RNA, 19 nt, Artificial Sequence
  Description of Artificial Sequence: Synthetic oligonucleotide
uagaaucuuaugccuuaca

SEQ ID NO: 579636 - RNA, 19 nt, Artificial Sequence
  Description of Artificial Sequence: Synthetic oligonucleotide
auuccgagugguguuacuc

SEQ ID NO: 579637 - RNA, 19 nt, Artificial Sequence
  Description of Artificial Sequence: Synthetic oligonucleotide
gccuaaugaaugcugaggc

SEQ ID NO: 579638 - RNA, 19 nt, Artificial Sequence
  Description of Artificial Sequence: Synthetic oligonucleotide
uuucugcacgguaauaguu

SEQ ID NO: 579639 - RNA, 19 nt, Artificial Sequence
  Description of Artificial Sequence: Synthetic oligonucleotide
ugcuccuuaccuauucccu

SEQ ID NO: 579640 - RNA, 19 nt, Artificial Sequence
  Description of Artificial Sequence: Synthetic oligonucleotide
agcgagcugagcaugagag

SEQ ID NO: 579641 - RNA, 19 nt, Artificial Sequence
  Description of Artificial Sequence: Synthetic oligonucleotide
uguaaauggcggauucuua

SEQ ID NO: 579642 - RNA, 19 nt, Artificial Sequence
  Description of Artificial Sequence: Synthetic oligonucleotide
uuccguguauauacugccc

SEQ ID NO: 579643 - RNA, 19 nt, Artificial Sequence
  Description of Artificial Sequence: Synthetic oligonucleotide
gaccuugguauuccauagg

SEQ ID NO: 579644 - RNA, 19 nt, Artificial Sequence
  Description of Artificial Sequence: Synthetic oligonucleotide
agucaugugcaguaccaga

SEQ ID NO: 579645 - RNA, 19 nt, Artificial Sequence
  Description of Artificial Sequence: Synthetic oligonucleotide
uaacuugggagaagcuucu

SEQ ID NO: 579646 - RNA, 19 nt, Artificial Sequence
  Description of Artificial Sequence: Synthetic oligonucleotide
uucauugcauaagggagac

SEQ ID NO: 579647 - RNA, 19 nt, Artificial Sequence
  Description of Artificial Sequence: Synthetic oligonucleotide
uccgagugguguuacucag

SEQ ID NO: 579648 - RNA, 19 nt, Artificial Sequence
  Description of Artificial Sequence: Synthetic oligonucleotide
agagugaaguacaagucca

SEQ ID NO: 579649 - RNA, 19 nt, Artificial Sequence
  Description of Artificial Sequence: Synthetic oligonucleotide
ucgcaagacagaagcagcu

SEQ ID NO: 579650 - RNA, 19 nt, Artificial Sequence
  Description of Artificial Sequence: Synthetic oligonucleotide
uuuagaaggggugcuuugu

SEQ ID NO: 579651 - RNA, 19 nt, Artificial Sequence
  Description of Artificial Sequence: Synthetic oligonucleotide
auuagucgaacaucaggau

SEQ ID NO: 579652 - RNA, 19 nt, Artificial Sequence
  Description of Artificial Sequence: Synthetic oligonucleotide
aucagccugcucaaauucc

SEQ ID NO: 579653 - RNA, 19 nt, Artificial Sequence
  Description of Artificial Sequence: Synthetic oligonucleotide
cacgaaaugcccauacuca

SEQ ID NO: 579654 - RNA, 19 nt, Artificial Sequence
  Description of Artificial Sequence: Synthetic oligonucleotide
aaccggguuauuucuucca

SEQ ID NO: 579655 - RNA, 19 nt, Artificial Sequence
  Description of Artificial Sequence: Synthetic oligonucleotide
guagauggccuuucaagca

SEQ ID NO: 579656 - RNA, 19 nt, Artificial Sequence
  Description of Artificial Sequence: Synthetic oligonucleotide
caagcauaccugaccuugg

SEQ ID NO: 579657 - RNA, 19 nt, Artificial Sequence
  Description of Artificial Sequence: Synthetic oligonucleotide
ucaagcauguucagaugau

SEQ ID NO: 579658 - RNA, 19 nt, Artificial Sequence
  Description of Artificial Sequence: Synthetic oligonucleotide
cacagcaccacaccguaac

SEQ ID NO: 579659 - RNA, 19 nt, Artificial Sequence
  Description of Artificial Sequence: Synthetic oligonucleotide
aagcauaccugaccuuggu

SEQ ID NO: 579660 - RNA, 19 nt, Artificial Sequence
  Description of Artificial Sequence: Synthetic oligonucleotide
aucauauuaaguagccacu

SEQ ID NO: 579661 - RNA, 19 nt, Artificial Sequence
  Description of Artificial Sequence: Synthetic oligonucleotide
uauccauagcaaaggggaa

SEQ ID NO: 579662 - RNA, 19 nt, Artificial Sequence
  Description of Artificial Sequence: Synthetic oligonucleotide
uguaggguaaaaggaaaua

SEQ ID NO: 579663 - RNA, 19 nt, Artificial Sequence
  Description of Artificial Sequence: Synthetic oligonucleotide
acauauccgguucuauccu

SEQ ID NO: 579664 - RNA, 19 nt, Artificial Sequence
  Description of Artificial Sequence: Synthetic oligonucleotide
agcauaggauuugaaaaga

SEQ ID NO: 579665 - RNA, 19 nt, Artificial Sequence
  Description of Artificial Sequence: Synthetic oligonucleotide
gcagguguaacagaauuag

SEQ ID NO: 579666 - RNA, 19 nt, Artificial Sequence
  Description of Artificial Sequence: Synthetic oligonucleotide
uuccgagugguguuacuca

SEQ ID NO: 579667 - RNA, 19 nt, Artificial Sequence
  Description of Artificial Sequence: Synthetic oligonucleotide
uguaauccacaacggcuuc

SEQ ID NO: 579668 - RNA, 19 nt, Artificial Sequence
  Description of Artificial Sequence: Synthetic oligonucleotide
ugguaugaugucacagccu

SEQ ID NO: 579669 - RNA, 19 nt, Artificial Sequence
  Description of Artificial Sequence: Synthetic oligonucleotide
cuuggaaaaggguucugga

SEQ ID NO: 579670 - RNA, 19 nt, Artificial Sequence
  Description of Artificial Sequence: Synthetic oligonucleotide
gugcuuauguuugugcuug

SEQ ID NO: 579671 - RNA, 19 nt, Artificial Sequence
  Description of Artificial Sequence: Synthetic oligonucleotide
gaggacguagacuccuuac

SEQ ID NO: 579672 - RNA, 19 nt, Artificial Sequence
  Description of Artificial Sequence: Synthetic oligonucleotide
ucugcacgguaauaguuau

SEQ ID NO: 579673 - RNA, 19 nt, Artificial Sequence
  Description of Artificial Sequence: Synthetic oligonucleotide
auuugauaaugguggugga

SEQ ID NO: 579674 - RNA, 19 nt, Artificial Sequence
  Description of Artificial Sequence: Synthetic oligonucleotide
aggauugacauauccgguu

SEQ ID NO: 579675 - RNA, 19 nt, Artificial Sequence
  Description of Artificial Sequence: Synthetic oligonucleotide
auaccugaccuugguauuc

SEQ ID NO: 579676 - RNA, 19 nt, Artificial Sequence
  Description of Artificial Sequence: Synthetic oligonucleotide
cuuacuuucuauggcuaac

SEQ ID NO: 579677 - RNA, 19 nt, Artificial Sequence
  Description of Artificial Sequence: Synthetic oligonucleotide
gggacuacaggcaagcagc

SEQ ID NO: 579678 - RNA, 19 nt, Artificial Sequence
  Description of Artificial Sequence: Synthetic oligonucleotide
aucagugagugagagacau

SEQ ID NO: 579679 - RNA, 19 nt, Artificial Sequence
  Description of Artificial Sequence: Synthetic oligonucleotide
cuuugcucauaaugauggc

SEQ ID NO: 579680 - RNA, 19 nt, Artificial Sequence
  Description of Artificial Sequence: Synthetic oligonucleotide
accggguuauuucuuccag

SEQ ID NO: 579681 - RNA, 19 nt, Artificial Sequence
  Description of Artificial Sequence: Synthetic oligonucleotide
uccggcuucuggaauuaug

SEQ ID NO: 579682 - RNA, 19 nt, Artificial Sequence
  Description of Artificial Sequence: Synthetic oligonucleotide
aauuuuagaaggggugcuu

SEQ ID NO: 579683 - RNA, 19 nt, Artificial Sequence
  Description of Artificial Sequence: Synthetic oligonucleotide
cucagcauaggauuugaaa

SEQ ID NO: 579684 - RNA, 19 nt, Artificial Sequence
  Description of Artificial Sequence: Synthetic oligonucleotide
auagauuccugcugagcaa

SEQ ID NO: 579685 - RNA, 19 nt, Artificial Sequence
  Description of Artificial Sequence: Synthetic oligonucleotide
uagaaagcccuggaguaga

SEQ ID NO: 579686 - RNA, 19 nt, Artificial Sequence
  Description of Artificial Sequence: Synthetic oligonucleotide
ccuuaccaaacaucgagag

SEQ ID NO: 579687 - RNA, 19 nt, Artificial Sequence
  Description of Artificial Sequence: Synthetic oligonucleotide
cagguguaacagaauuagc

SEQ ID NO: 579688 - RNA, 19 nt, Artificial Sequence
  Description of Artificial Sequence: Synthetic oligonucleotide
acuaucaaagauaguuaca

SEQ ID NO: 579689 - RNA, 19 nt, Artificial Sequence
  Description of Artificial Sequence: Synthetic oligonucleotide
ggcacuuacuuucuauggc

SEQ ID NO: 579690 - RNA, 19 nt, Artificial Sequence
  Description of Artificial Sequence: Synthetic oligonucleotide
uuguaaauggcggauucuu

SEQ ID NO: 579691 - RNA, 19 nt, Artificial Sequence
  Description of Artificial Sequence: Synthetic oligonucleotide
agugauagugugccuguaa

SEQ ID NO: 579692 - RNA, 19 nt, Artificial Sequence
  Description of Artificial Sequence: Synthetic oligonucleotide
aauuccgagugguguuacu

SEQ ID NO: 579693 - RNA, 19 nt, Artificial Sequence
  Description of Artificial Sequence: Synthetic oligonucleotide
ucaaucauuucugcacggu

SEQ ID NO: 579694 - RNA, 19 nt, Artificial Sequence
  Description of Artificial Sequence: Synthetic oligonucleotide
ugugcuuauguuugugcuu

SEQ ID NO: 579695 - RNA, 19 nt, Artificial Sequence
  Description of Artificial Sequence: Synthetic oligonucleotide
uucuuuguaaauggcggau

SEQ ID NO: 579696 - RNA, 19 nt, Artificial Sequence
  Description of Artificial Sequence: Synthetic oligonucleotide
guuauccaaaguucuaacu

SEQ ID NO: 579697 - RNA, 19 nt, Artificial Sequence
  Description of Artificial Sequence: Synthetic oligonucleotide
uuagaaggggugcuuuguu

SEQ ID NO: 579698 - RNA, 19 nt, Artificial Sequence
  Description of Artificial Sequence: Synthetic oligonucleotide
ugucuagaggacguagacu

SEQ ID NO: 579699 - RNA, 19 nt, Artificial Sequence
  Description of Artificial Sequence: Synthetic oligonucleotide
cuggguuacucgaggauuc

SEQ ID NO: 579700 - RNA, 19 nt, Artificial Sequence
  Description of Artificial Sequence: Synthetic oligonucleotide
caguaccagaauucauuag

SEQ ID NO: 579701 - RNA, 19 nt, Artificial Sequence
  Description of Artificial Sequence: Synthetic oligonucleotide
agacuccuuaccaaacauc

SEQ ID NO: 579702 - RNA, 19 nt, Artificial Sequence
  Description of Artificial Sequence: Synthetic oligonucleotide
gugucuagaggacguagac

SEQ ID NO: 579703 - RNA, 19 nt, Artificial Sequence
  Description of Artificial Sequence: Synthetic oligonucleotide
aaaucaccaaaugcacuau

SEQ ID NO: 579704 - RNA, 19 nt, Artificial Sequence
  Description of Artificial Sequence: Synthetic oligonucleotide
gacuguaggguaaaaggaa

SEQ ID NO: 579705 - RNA, 19 nt, Artificial Sequence
  Description of Artificial Sequence: Synthetic oligonucleotide
ccggcuucuggaauuaugg

SEQ ID NO: 579706 - RNA, 19 nt, Artificial Sequence
  Description of Artificial Sequence: Synthetic oligonucleotide
uaucagugagugagagaca

SEQ ID NO: 579707 - RNA, 19 nt, Artificial Sequence
  Description of Artificial Sequence: Synthetic oligonucleotide
cucuuucauagccaagcuc

SEQ ID NO: 579708 - RNA, 19 nt, Artificial Sequence
  Description of Artificial Sequence: Synthetic oligonucleotide
uccacgaaaugcccauacu

SEQ ID NO: 579709 - RNA, 19 nt, Artificial Sequence
  Description of Artificial Sequence: Synthetic oligonucleotide
aggauagauuccugcugag

SEQ ID NO: 579710 - RNA, 19 nt, Artificial Sequence
  Description of Artificial Sequence: Synthetic oligonucleotide
cauauuaaguagccacuga

SEQ ID NO: 579711 - RNA, 19 nt, Artificial Sequence
  Description of Artificial Sequence: Synthetic oligonucleotide
ugcucauaaugauggcacu

SEQ ID NO: 579712 - RNA, 19 nt, Artificial Sequence
  Description of Artificial Sequence: Synthetic oligonucleotide
agccgcuauccugaugucc

SEQ ID NO: 579713 - RNA, 19 nt, Artificial Sequence
  Description of Artificial Sequence: Synthetic oligonucleotide
uuacucgaggauuccuggu

SEQ ID NO: 579714 - RNA, 19 nt, Artificial Sequence
  Description of Artificial Sequence: Synthetic oligonucleotide
caaagauaguuacauuaaa

SEQ ID NO: 579715 - RNA, 19 nt, Artificial Sequence
  Description of Artificial Sequence: Synthetic oligonucleotide
acaacuccgguccacuuua

SEQ ID NO: 579716 - RNA, 19 nt, Artificial Sequence
  Description of Artificial Sequence: Synthetic oligonucleotide
agaauuagucgaacaucag

SEQ ID NO: 579717 - RNA, 19 nt, Artificial Sequence
  Description of Artificial Sequence: Synthetic oligonucleotide
cuucuucuucuucuucuug

SEQ ID NO: 579718 - RNA, 19 nt, Artificial Sequence
  Description of Artificial Sequence: Synthetic oligonucleotide
acguagacuccuuaccaaa

SEQ ID NO: 579719 - RNA, 19 nt, Artificial Sequence
  Description of Artificial Sequence: Synthetic oligonucleotide
ccuuauccauagcaaaggg

SEQ ID NO: 579720 - RNA, 19 nt, Artificial Sequence
  Description of Artificial Sequence: Synthetic oligonucleotide
auaucgaccuccuccucau

SEQ ID NO: 579721 - RNA, 19 nt, Artificial Sequence
  Description of Artificial Sequence: Synthetic oligonucleotide
gguugguaugaugucacag

SEQ ID NO: 579722 - RNA, 19 nt, Artificial Sequence
  Description of Artificial Sequence: Synthetic oligonucleotide
uuucuauggcuaacacaaa

SEQ ID NO: 579723 - RNA, 19 nt, Artificial Sequence
  Description of Artificial Sequence: Synthetic oligonucleotide
cucgaggauuccugguugc

SEQ ID NO: 579724 - RNA, 19 nt, Artificial Sequence
  Description of Artificial Sequence: Synthetic oligonucleotide
aacuccgguccacuuuagu

SEQ ID NO: 579725 - RNA, 19 nt, Artificial Sequence
  Description of Artificial Sequence: Synthetic oligonucleotide
ccuggcaauggauaugaag

SEQ ID NO: 579726 - RNA, 19 nt, Artificial Sequence
  Description of Artificial Sequence: Synthetic oligonucleotide
gauaauggugguggaccug

SEQ ID NO: 579727 - RNA, 19 nt, Artificial Sequence
  Description of Artificial Sequence: Synthetic oligonucleotide
auacugccacauaaaauca

SEQ ID NO: 579728 - RNA, 19 nt, Artificial Sequence
  Description of Artificial Sequence: Synthetic oligonucleotide
gacguagacuccuuaccaa

SEQ ID NO: 579729 - RNA, 19 nt, Artificial Sequence
  Description of Artificial Sequence: Synthetic oligonucleotide
gcuaaauugcaacaucaaa

SEQ ID NO: 579730 - RNA, 19 nt, Artificial Sequence
  Description of Artificial Sequence: Synthetic oligonucleotide
cauaucgaccuccuccuca

SEQ ID NO: 579731 - RNA, 19 nt, Artificial Sequence
  Description of Artificial Sequence: Synthetic oligonucleotide
uagauuccugcugagcaau

SEQ ID NO: 579732 - RNA, 19 nt, Artificial Sequence
  Description of Artificial Sequence: Synthetic oligonucleotide
uucuggaauuaugguagga

SEQ ID NO: 579733 - RNA, 19 nt, Artificial Sequence
  Description of Artificial Sequence: Synthetic oligonucleotide
uacucagcauaggauuuga

SEQ ID NO: 579734 - RNA, 19 nt, Artificial Sequence
  Description of Artificial Sequence: Synthetic oligonucleotide
acagccuaaugaaugcuga

SEQ ID NO: 579735 - RNA, 19 nt, Artificial Sequence
  Description of Artificial Sequence: Synthetic oligonucleotide
gauagugugccuguaacuu

SEQ ID NO: 579736 - RNA, 19 nt, Artificial Sequence
  Description of Artificial Sequence: Synthetic oligonucleotide
guccacgaaaugcccauac

SEQ ID NO: 579737 - RNA, 19 nt, Artificial Sequence
  Description of Artificial Sequence: Synthetic oligonucleotide
auguccacgaaaugcccau

SEQ ID NO: 579738 - RNA, 19 nt, Artificial Sequence
  Description of Artificial Sequence: Synthetic oligonucleotide
uugugguugguaugauguc

SEQ ID NO: 579739 - RNA, 19 nt, Artificial Sequence
  Description of Artificial Sequence: Synthetic oligonucleotide
ggauugacauauccgguuc

SEQ ID NO: 579740 - RNA, 19 nt, Artificial Sequence
  Description of Artificial Sequence: Synthetic oligonucleotide
agaauaucagugagugaga

SEQ ID NO: 579741 - RNA, 19 nt, Artificial Sequence
  Description of Artificial Sequence: Synthetic oligonucleotide
ccaaggccaggauagauuc

SEQ ID NO: 579742 - RNA, 19 nt, Artificial Sequence
  Description of Artificial Sequence: Synthetic oligonucleotide
uuuuggacuguaggguaaa

SEQ ID NO: 579743 - RNA, 19 nt, Artificial Sequence
  Description of Artificial Sequence: Synthetic oligonucleotide
ccaaacaucgagagcggag

SEQ ID NO: 579744 - RNA, 19 nt, Artificial Sequence
  Description of Artificial Sequence: Synthetic oligonucleotide
ucugcccaugacauccauc

SEQ ID NO: 579745 - RNA, 19 nt, Artificial Sequence
  Description of Artificial Sequence: Synthetic oligonucleotide
ggaauuaugguaggauuca

SEQ ID NO: 579746 - RNA, 19 nt, Artificial Sequence
  Description of Artificial Sequence: Synthetic oligonucleotide
aauggauaugaaggcuuuu

SEQ ID NO: 579747 - RNA, 19 nt, Artificial Sequence
  Description of Artificial Sequence: Synthetic oligonucleotide
gagagugacggggagcgca

SEQ ID NO: 579748 - RNA, 19 nt, Artificial Sequence
  Description of Artificial Sequence: Synthetic oligonucleotide
gagugaaguacaaguccac

SEQ ID NO: 579749 - RNA, 19 nt, Artificial Sequence
  Description of Artificial Sequence: Synthetic oligonucleotide
gaauuuuagaaggggugcu

SEQ ID NO: 579750 - RNA, 19 nt, Artificial Sequence
  Description of Artificial Sequence: Synthetic oligonucleotide
cugugucuagaggacguag

SEQ ID NO: 579751 - RNA, 19 nt, Artificial Sequence
  Description of Artificial Sequence: Synthetic oligonucleotide
gcauaggauuugaaaagag

SEQ ID NO: 579752 - RNA, 19 nt, Artificial Sequence
  Description of Artificial Sequence: Synthetic oligonucleotide
auguucagaugaugggaaa

SEQ ID NO: 579753 - RNA, 19 nt, Artificial Sequence
  Description of Artificial Sequence: Synthetic oligonucleotide
ggacguagacuccuuacca

SEQ ID NO: 579754 - RNA, 19 nt, Artificial Sequence
  Description of Artificial Sequence: Synthetic oligonucleotide
ccaaagagagugaaguaca

SEQ ID NO: 579755 - RNA, 19 nt, Artificial Sequence
  Description of Artificial Sequence: Synthetic oligonucleotide
gguuuugugguugguauga

SEQ ID NO: 579756 - RNA, 19 nt, Artificial Sequence
  Description of Artificial Sequence: Synthetic oligonucleotide
cacccuuauggcucucaag

SEQ ID NO: 579757 - RNA, 19 nt, Artificial Sequence
  Description of Artificial Sequence: Synthetic oligonucleotide
ccacgaaaugcccauacuc

SEQ ID NO: 579758 - RNA, 19 nt, Artificial Sequence
  Description of Artificial Sequence: Synthetic oligonucleotide
caaagagagugaaguacaa

SEQ ID NO: 579759 - RNA, 19 nt, Artificial Sequence
  Description of Artificial Sequence: Synthetic oligonucleotide
ggauaugaaggcuuuugua

SEQ ID NO: 579760 - RNA, 19 nt, Artificial Sequence
  Description of Artificial Sequence: Synthetic oligonucleotide
caggaugugaauggaccug

SEQ ID NO: 579761 - RNA, 19 nt, Artificial Sequence
  Description of Artificial Sequence: Synthetic oligonucleotide
cacuggguaccacagaucu

SEQ ID NO: 579762 - RNA, 19 nt, Artificial Sequence
  Description of Artificial Sequence: Synthetic oligonucleotide
ggacuguaggguaaaagga

SEQ ID NO: 579763 - RNA, 19 nt, Artificial Sequence
  Description of Artificial Sequence: Synthetic oligonucleotide
ugucgugcuuguguuugug

SEQ ID NO: 579764 - RNA, 19 nt, Artificial Sequence
  Description of Artificial Sequence: Synthetic oligonucleotide
ucaguccgagagugacggg

SEQ ID NO: 579765 - RNA, 19 nt, Artificial Sequence
  Description of Artificial Sequence: Synthetic oligonucleotide
acauguccguucuucugaa

SEQ ID NO: 579766 - RNA, 19 nt, Artificial Sequence
  Description of Artificial Sequence: Synthetic oligonucleotide
gguuacucgaggauuccug

SEQ ID NO: 579767 - RNA, 19 nt, Artificial Sequence
  Description of Artificial Sequence: Synthetic oligonucleotide
agagugacggggagcgcac

SEQ ID NO: 579768 - RNA, 19 nt, Artificial Sequence
  Description of Artificial Sequence: Synthetic oligonucleotide
caccaggcagccuuauauc

SEQ ID NO: 579769 - RNA, 19 nt, Artificial Sequence
  Description of Artificial Sequence: Synthetic oligonucleotide
agauugaggacaagcccga

SEQ ID NO: 579770 - RNA, 19 nt, Artificial Sequence
  Description of Artificial Sequence: Synthetic oligonucleotide
uugacauauccgguucuau

SEQ ID NO: 579771 - RNA, 19 nt, Artificial Sequence
  Description of Artificial Sequence: Synthetic oligonucleotide
gaugggcgauauuuagaaa

SEQ ID NO: 579772 - RNA, 19 nt, Artificial Sequence
  Description of Artificial Sequence: Synthetic oligonucleotide
ucgaggauuccugguugcc

SEQ ID NO: 579773 - RNA, 19 nt, Artificial Sequence
  Description of Artificial Sequence: Synthetic oligonucleotide
gaauuagccagagcaucaa

SEQ ID NO: 579774 - RNA, 19 nt, Artificial Sequence
  Description of Artificial Sequence: Synthetic oligonucleotide
ggccuuucaagcauguuca

SEQ ID NO: 579775 - RNA, 19 nt, Artificial Sequence
  Description of Artificial Sequence: Synthetic oligonucleotide
cuacuagggcuucauugca

SEQ ID NO: 579776 - RNA, 19 nt, Artificial Sequence
  Description of Artificial Sequence: Synthetic oligonucleotide
aucgagagcggagcugcuc

SEQ ID NO: 579777 - RNA, 19 nt, Artificial Sequence
  Description of Artificial Sequence: Synthetic oligonucleotide
uccgagagugacggggagc

SEQ ID NO: 579778 - RNA, 19 nt, Artificial Sequence
  Description of Artificial Sequence: Synthetic oligonucleotide
uggguuacucgaggauucc

SEQ ID NO: 579779 - RNA, 19 nt, Artificial Sequence
  Description of Artificial Sequence: Synthetic oligonucleotide
cuuauaucacagaggaauu

SEQ ID NO: 579780 - RNA, 19 nt, Artificial Sequence
  Description of Artificial Sequence: Synthetic oligonucleotide
ccuuauaucacagaggaau

SEQ ID NO: 579781 - RNA, 19 nt, Artificial Sequence
  Description of Artificial Sequence: Synthetic oligonucleotide
uucaagcauaccugaccuu

SEQ ID NO: 579782 - RNA, 19 nt, Artificial Sequence
  Description of Artificial Sequence: Synthetic oligonucleotide
agcauaccugaccuuggua

SEQ ID NO: 579783 - RNA, 19 nt, Artificial Sequence
  Description of Artificial Sequence: Synthetic oligonucleotide
acacuggguaccacagauc

SEQ ID NO: 579784 - RNA, 19 nt, Artificial Sequence
  Description of Artificial Sequence: Synthetic oligonucleotide
ugacagugauagugugccu

SEQ ID NO: 579785 - RNA, 19 nt, Artificial Sequence
  Description of Artificial Sequence: Synthetic oligonucleotide
ggauagauuccugcugagc

SEQ ID NO: 579786 - RNA, 19 nt, Artificial Sequence
  Description of Artificial Sequence: Synthetic oligonucleotide
cagucaugugcaguaccag

SEQ ID NO: 579787 - RNA, 19 nt, Artificial Sequence
  Description of Artificial Sequence: Synthetic oligonucleotide
aagcucauacugccacaua

SEQ ID NO: 579788 - RNA, 19 nt, Artificial Sequence
  Description of Artificial Sequence: Synthetic oligonucleotide
ucauuucugcacgguaaua

SEQ ID NO: 579789 - RNA, 19 nt, Artificial Sequence
  Description of Artificial Sequence: Synthetic oligonucleotide
cuuuuagauugaggacaag

SEQ ID NO: 579790 - RNA, 19 nt, Artificial Sequence
  Description of Artificial Sequence: Synthetic oligonucleotide
auugacauauccgguucua

SEQ ID NO: 579791 - RNA, 19 nt, Artificial Sequence
  Description of Artificial Sequence: Synthetic oligonucleotide
ugauggcacuuacuuucua

SEQ ID NO: 579792 - RNA, 19 nt, Artificial Sequence
  Description of Artificial Sequence: Synthetic oligonucleotide
agcgcacagaccugccgcu

SEQ ID NO: 579793 - RNA, 19 nt, Artificial Sequence
  Description of Artificial Sequence: Synthetic oligonucleotide
uggcggauucuuagucaac

SEQ ID NO: 579794 - RNA, 19 nt, Artificial Sequence
  Description of Artificial Sequence: Synthetic oligonucleotide
ugcuccggcuucuggaauu

SEQ ID NO: 579795 - RNA, 19 nt, Artificial Sequence
  Description of Artificial Sequence: Synthetic oligonucleotide
ugguggucgcugugucuag

SEQ ID NO: 579796 - RNA, 19 nt, Artificial Sequence
  Description of Artificial Sequence: Synthetic oligonucleotide
cuggaauuaugguaggauu

SEQ ID NO: 579797 - RNA, 19 nt, Artificial Sequence
  Description of Artificial Sequence: Synthetic oligonucleotide
uuuggacuguaggguaaaa

SEQ ID NO: 579798 - RNA, 19 nt, Artificial Sequence
  Description of Artificial Sequence: Synthetic oligonucleotide
cuauucccuuucgggacag

SEQ ID NO: 579799 - RNA, 19 nt, Artificial Sequence
  Description of Artificial Sequence: Synthetic oligonucleotide
ccgagagugacggggagcg

SEQ ID NO: 579800 - RNA, 19 nt, Artificial Sequence
  Description of Artificial Sequence: Synthetic oligonucleotide
gucgcugugucuagaggac

SEQ ID NO: 579801 - RNA, 19 nt, Artificial Sequence
  Description of Artificial Sequence: Synthetic oligonucleotide
ggucgcucuguguuuucag

SEQ ID NO: 579802 - RNA, 19 nt, Artificial Sequence
  Description of Artificial Sequence: Synthetic oligonucleotide
gcgauauuuagaaagcccu

SEQ ID NO: 579803 - RNA, 19 nt, Artificial Sequence
  Description of Artificial Sequence: Synthetic oligonucleotide
cgauauuuagaaagcccug

SEQ ID NO: 579804 - RNA, 19 nt, Artificial Sequence
  Description of Artificial Sequence: Synthetic oligonucleotide
gggcgauauuuagaaagcc

SEQ ID NO: 579805 - RNA, 19 nt, Artificial Sequence
  Description of Artificial Sequence: Synthetic oligonucleotide
ugccuguaacuugggagaa

SEQ ID NO: 579806 - RNA, 19 nt, Artificial Sequence
  Description of Artificial Sequence: Synthetic oligonucleotide
agcagguguaacagaauua

SEQ ID NO: 579807 - RNA, 19 nt, Artificial Sequence
  Description of Artificial Sequence: Synthetic oligonucleotide
uggucgcucuguguuuuca

SEQ ID NO: 579808 - RNA, 19 nt, Artificial Sequence
  Description of Artificial Sequence: Synthetic oligonucleotide
ugguguuacucagcacuuc

SEQ ID NO: 579809 - RNA, 19 nt, Artificial Sequence
  Description of Artificial Sequence: Synthetic oligonucleotide
gaagcacccuuauggcucu

SEQ ID NO: 579810 - RNA, 19 nt, Artificial Sequence
  Description of Artificial Sequence: Synthetic oligonucleotide
accguaaccuccagucaug

SEQ ID NO: 579811 - RNA, 19 nt, Artificial Sequence
  Description of Artificial Sequence: Synthetic oligonucleotide
ggcggauucuuagucaaca

SEQ ID NO: 579812 - RNA, 19 nt, Artificial Sequence
  Description of Artificial Sequence: Synthetic oligonucleotide
cugcacgguaauaguuauc

SEQ ID NO: 579813 - RNA, 19 nt, Artificial Sequence
  Description of Artificial Sequence: Synthetic oligonucleotide
ccguucuucugaagcaccc

SEQ ID NO: 579814 - RNA, 19 nt, Artificial Sequence
  Description of Artificial Sequence: Synthetic oligonucleotide
ccuuaccuauucccuuucg

SEQ ID NO: 579815 - RNA, 19 nt, Artificial Sequence
  Description of Artificial Sequence: Synthetic oligonucleotide
gagcggagcugcucccaug

SEQ ID NO: 579816 - RNA, 19 nt, Artificial Sequence
  Description of Artificial Sequence: Synthetic oligonucleotide
caacuccgguccacuuuag

SEQ ID NO: 579817 - RNA, 19 nt, Artificial Sequence
  Description of Artificial Sequence: Synthetic oligonucleotide
cuagggcuucauugcauaa

SEQ ID NO: 579818 - RNA, 19 nt, Artificial Sequence
  Description of Artificial Sequence: Synthetic oligonucleotide
ucauugcauaagggagacu

SEQ ID NO: 579819 - RNA, 19 nt, Artificial Sequence
  Description of Artificial Sequence: Synthetic oligonucleotide
aggcauuaaggaagaccug

SEQ ID NO: 579820 - RNA, 19 nt, Artificial Sequence
  Description of Artificial Sequence: Synthetic oligonucleotide
gggauuaguccuauagaaa

SEQ ID NO: 579821 - RNA, 19 nt, Artificial Sequence
  Description of Artificial Sequence: Synthetic oligonucleotide
agagcggagcugcucccau

SEQ ID NO: 579822 - RNA, 19 nt, Artificial Sequence
  Description of Artificial Sequence: Synthetic oligonucleotide
guauuccauaggagaccag

SEQ ID NO: 579823 - RNA, 19 nt, Artificial Sequence
  Description of Artificial Sequence: Synthetic oligonucleotide
cguagacuccuuaccaaac

SEQ ID NO: 579824 - RNA, 19 nt, Artificial Sequence
  Description of Artificial Sequence: Synthetic oligonucleotide
aguggucgcucuguguuuu

SEQ ID NO: 579825 - RNA, 19 nt, Artificial Sequence
  Description of Artificial Sequence: Synthetic oligonucleotide
auauccgguucuauccuua

SEQ ID NO: 579826 - RNA, 19 nt, Artificial Sequence
  Description of Artificial Sequence: Synthetic oligonucleotide
caacggcuuccagagccgc

SEQ ID NO: 579827 - RNA, 19 nt, Artificial Sequence
  Description of Artificial Sequence: Synthetic oligonucleotide
aacggcuuccagagccgcu

SEQ ID NO: 579828 - RNA, 19 nt, Artificial Sequence
  Description of Artificial Sequence: Synthetic oligonucleotide
caaggguaaacaggaaggu

SEQ ID NO: 579829 - RNA, 19 nt, Artificial Sequence
  Description of Artificial Sequence: Synthetic oligonucleotide
gcuuauguuugugcuugug

SEQ ID NO: 579830 - RNA, 19 nt, Artificial Sequence
  Description of Artificial Sequence: Synthetic oligonucleotide
ccguguauauacugcccac

SEQ ID NO: 579831 - RNA, 19 nt, Artificial Sequence
  Description of Artificial Sequence: Synthetic oligonucleotide
agggagacuccauguucuu

SEQ ID NO: 579832 - RNA, 19 nt, Artificial Sequence
  Description of Artificial Sequence: Synthetic oligonucleotide
ccuuauggcucucaagcaa

SEQ ID NO: 579833 - RNA, 19 nt, Artificial Sequence
  Description of Artificial Sequence: Synthetic oligonucleotide
gccgcuauccugaugucca

SEQ ID NO: 579834 - RNA, 19 nt, Artificial Sequence
  Description of Artificial Sequence: Synthetic oligonucleotide
gcgagcugagcaugagagc

SEQ ID NO: 579835 - RNA, 19 nt, Artificial Sequence
  Description of Artificial Sequence: Synthetic oligonucleotide
gcacuaucaaagauaguua

SEQ ID NO: 579836 - RNA, 19 nt, Artificial Sequence
  Description of Artificial Sequence: Synthetic oligonucleotide
caauggauaugaaggcuuu

SEQ ID NO: 579837 - RNA, 19 nt, Artificial Sequence
  Description of Artificial Sequence: Synthetic oligonucleotide
caguauccauaucgaccuc

SEQ ID NO: 579838 - RNA, 19 nt, Artificial Sequence
  Description of Artificial Sequence: Synthetic oligonucleotide
agucgaacaucaggauuua

SEQ ID NO: 579839 - RNA, 19 nt, Artificial Sequence
  Description of Artificial Sequence: Synthetic oligonucleotide
uguccacgaaaugcccaua

SEQ ID NO: 579840 - RNA, 19 nt, Artificial Sequence
  Description of Artificial Sequence: Synthetic oligonucleotide
uuggcacauguccguucuu

SEQ ID NO: 579841 - RNA, 19 nt, Artificial Sequence
  Description of Artificial Sequence: Synthetic oligonucleotide
ccgagugguguuacucagc

SEQ ID NO: 579842 - RNA, 19 nt, Artificial Sequence
  Description of Artificial Sequence: Synthetic oligonucleotide
ccgaguucuggcaagggua

SEQ ID NO: 579843 - RNA, 19 nt, Artificial Sequence
  Description of Artificial Sequence: Synthetic oligonucleotide
gaaggucuacugaggccaa

SEQ ID NO: 579844 - RNA, 19 nt, Artificial Sequence
  Description of Artificial Sequence: Synthetic oligonucleotide
ggcaauggauaugaaggcu

SEQ ID NO: 579845 - RNA, 19 nt, Artificial Sequence
  Description of Artificial Sequence: Synthetic oligonucleotide
ggaugugaauggaccuggc

SEQ ID NO: 579846 - RNA, 19 nt, Artificial Sequence
  Description of Artificial Sequence: Synthetic oligonucleotide
gagagcggagcugcuccca

SEQ ID NO: 579847 - RNA, 19 nt, Artificial Sequence
  Description of Artificial Sequence: Synthetic oligonucleotide
agaaagcccuggaguagau

SEQ ID NO: 579848 - RNA, 19 nt, Artificial Sequence
  Description of Artificial Sequence: Synthetic oligonucleotide
gggaaaugaaggccugacu

SEQ ID NO: 579849 - RNA, 19 nt, Artificial Sequence
  Description of Artificial Sequence: Synthetic oligonucleotide
cugaggcauuaaggaagac

SEQ ID NO: 579850 - RNA, 19 nt, Artificial Sequence
  Description of Artificial Sequence: Synthetic oligonucleotide
caucuugauuugauuugau

SEQ ID NO: 579851 - RNA, 19 nt, Artificial Sequence
  Description of Artificial Sequence: Synthetic oligonucleotide
cggguuauuucuuccagaa

SEQ ID NO: 579852 - RNA, 19 nt, Artificial Sequence
  Description of Artificial Sequence: Synthetic oligonucleotide
gcaauggauaugaaggcuu

SEQ ID NO: 579853 - RNA, 19 nt, Artificial Sequence
  Description of Artificial Sequence: Synthetic oligonucleotide
auaguccacugggguuuug

SEQ ID NO: 579854 - RNA, 19 nt, Artificial Sequence
  Description of Artificial Sequence: Synthetic oligonucleotide
cuccuuaccuauucccuuu

SEQ ID NO: 579855 - RNA, 19 nt, Artificial Sequence
  Description of Artificial Sequence: Synthetic oligonucleotide
ccuauucccuuucgggaca

SEQ ID NO: 579856 - RNA, 19 nt, Artificial Sequence
  Description of Artificial Sequence: Synthetic oligonucleotide
cauauccgguucuauccuu

SEQ ID NO: 579857 - RNA, 19 nt, Artificial Sequence
  Description of Artificial Sequence: Synthetic oligonucleotide
gugacggggagcgcacaga

SEQ ID NO: 579858 - RNA, 19 nt, Artificial Sequence
  Description of Artificial Sequence: Synthetic oligonucleotide
gccuguaacuugggagaag

SEQ ID NO: 579859 - RNA, 19 nt, Artificial Sequence
  Description of Artificial Sequence: Synthetic oligonucleotide
ccgguucuauccuuaucca

SEQ ID NO: 579860 - RNA, 19 nt, Artificial Sequence
  Description of Artificial Sequence: Synthetic oligonucleotide
guggucgcucuguguuuuc

SEQ ID NO: 579861 - RNA, 19 nt, Artificial Sequence
  Description of Artificial Sequence: Synthetic oligonucleotide
cgcacagaccugccgcugg

SEQ ID NO: 579862 - RNA, 19 nt, Artificial Sequence
  Description of Artificial Sequence: Synthetic oligonucleotide
gucgaacaucaggauuuaa

SEQ ID NO: 579863 - RNA, 19 nt, Artificial Sequence
  Description of Artificial Sequence: Synthetic oligonucleotide
ccggguuauuucuuccaga

SEQ ID NO: 579864 - RNA, 19 nt, Artificial Sequence
  Description of Artificial Sequence: Synthetic oligonucleotide
cagcaccacaccguaaccu

SEQ ID NO: 579865 - RNA, 19 nt, Artificial Sequence
  Description of Artificial Sequence: Synthetic oligonucleotide
auggccuuucaagcauguu

SEQ ID NO: 579866 - RNA, 19 nt, Artificial Sequence
  Description of Artificial Sequence: Synthetic oligonucleotide
gagugacggggagcgcaca

SEQ ID NO: 579867 - RNA, 19 nt, Artificial Sequence
  Description of Artificial Sequence: Synthetic oligonucleotide
gugguguuacucagcacuu

SEQ ID NO: 579868 - RNA, 19 nt, Artificial Sequence
  Description of Artificial Sequence: Synthetic oligonucleotide
ccaaaguucuaacuucauu

SEQ ID NO: 579869 - RNA, 19 nt, Artificial Sequence
  Description of Artificial Sequence: Synthetic oligonucleotide
gcuucuucuucuucuucuu

SEQ ID NO: 579870 - RNA, 19 nt, Artificial Sequence
  Description of Artificial Sequence: Synthetic oligonucleotide
gcuccuuaccuauucccuu

SEQ ID NO: 579871 - RNA, 19 nt, Artificial Sequence
  Description of Artificial Sequence: Synthetic oligonucleotide
caagagggauuaguccuau

SEQ ID NO: 579872 - RNA, 19 nt, Artificial Sequence
  Description of Artificial Sequence: Synthetic oligonucleotide
gcucauaaugauggcacuu

SEQ ID NO: 579873 - RNA, 19 nt, Artificial Sequence
  Description of Artificial Sequence: Synthetic oligonucleotide
gguggucgcugugucuaga

SEQ ID NO: 579874 - RNA, 19 nt, Artificial Sequence
  Description of Artificial Sequence: Synthetic oligonucleotide
ccaugcaaugcacacucau

SEQ ID NO: 579875 - RNA, 19 nt, Artificial Sequence
  Description of Artificial Sequence: Synthetic oligonucleotide
ccgcuauccugauguccac

SEQ ID NO: 579876 - RNA, 19 nt, Artificial Sequence
  Description of Artificial Sequence: Synthetic oligonucleotide
cagugauagugugccugua

SEQ ID NO: 579877 - RNA, 19 nt, Artificial Sequence
  Description of Artificial Sequence: Synthetic oligonucleotide
cauauggaacagggucagu

SEQ ID NO: 579878 - RNA, 19 nt, Artificial Sequence
  Description of Artificial Sequence: Synthetic oligonucleotide
ggguuacucgaggauuccu

SEQ ID NO: 579879 - RNA, 19 nt, Artificial Sequence
  Description of Artificial Sequence: Synthetic oligonucleotide
caucgagagcggagcugcu

SEQ ID NO: 579880 - RNA, 19 nt, Artificial Sequence
  Description of Artificial Sequence: Synthetic oligonucleotide
uggcccggguggggaauuu

SEQ ID NO: 579881 - RNA, 19 nt, Artificial Sequence
  Description of Artificial Sequence: Synthetic oligonucleotide
gcuccggcuucuggaauua

SEQ ID NO: 579882 - RNA, 19 nt, Artificial Sequence
  Description of Artificial Sequence: Synthetic oligonucleotide
cauaguccacugggguuuu

SEQ ID NO: 579883 - RNA, 19 nt, Artificial Sequence
  Description of Artificial Sequence: Synthetic oligonucleotide
ccacaccguaaccuccagu

SEQ ID NO: 579884 - RNA, 19 nt, Artificial Sequence
  Description of Artificial Sequence: Synthetic oligonucleotide
ccguaaccuccagucaugu

SEQ ID NO: 579885 - RNA, 19 nt, Artificial Sequence
  Description of Artificial Sequence: Synthetic oligonucleotide
cuccggcuucuggaauuau

SEQ ID NO: 579886 - RNA, 19 nt, Artificial Sequence
  Description of Artificial Sequence: Synthetic oligonucleotide
ccacugggguuuugugguu

SEQ ID NO: 579887 - RNA, 19 nt, Artificial Sequence
  Description of Artificial Sequence: Synthetic oligonucleotide
aauaauggcaccucgauug

SEQ ID NO: 579888 - RNA, 19 nt, Artificial Sequence
  Description of Artificial Sequence: Synthetic oligonucleotide
ucuuagaugacacuuuagg

SEQ ID NO: 579889 - RNA, 19 nt, Artificial Sequence
  Description of Artificial Sequence: Synthetic oligonucleotide
ucuauuaaccauuugagaa

SEQ ID NO: 579890 - RNA, 19 nt, Artificial Sequence
  Description of Artificial Sequence: Synthetic oligonucleotide
aauuaauucugaucgaagu

SEQ ID NO: 579891 - RNA, 19 nt, Artificial Sequence
  Description of Artificial Sequence: Synthetic oligonucleotide
aaagaauaauggcaccucg

SEQ ID NO: 579892 - RNA, 19 nt, Artificial Sequence
  Description of Artificial Sequence: Synthetic oligonucleotide
uuuacuuaguucaaccaag

SEQ ID NO: 579893 - RNA, 19 nt, Artificial Sequence
  Description of Artificial Sequence: Synthetic oligonucleotide
cuuaguucaaccaagucac

SEQ ID NO: 579894 - RNA, 19 nt, Artificial Sequence
  Description of Artificial Sequence: Synthetic oligonucleotide
aacguguucccauagagcu

SEQ ID NO: 579895 - RNA, 19 nt, Artificial Sequence
  Description of Artificial Sequence: Synthetic oligonucleotide
aaugugcuuugcucgaacc

SEQ ID NO: 579896 - RNA, 19 nt, Artificial Sequence
  Description of Artificial Sequence: Synthetic oligonucleotide
uccauaauaagcucuagcu

SEQ ID NO: 579897 - RNA, 19 nt, Artificial Sequence
  Description of Artificial Sequence: Synthetic oligonucleotide
uuuuaugaaaucuagucuu

SEQ ID NO: 579898 - RNA, 19 nt, Artificial Sequence
  Description of Artificial Sequence: Synthetic oligonucleotide
uuagaaacaacuuuauaua

SEQ ID NO: 579899 - RNA, 19 nt, Artificial Sequence
  Description of Artificial Sequence: Synthetic oligonucleotide
uugaagucaucccauuugg

SEQ ID NO: 579900 - RNA, 19 nt, Artificial Sequence
  Description of Artificial Sequence: Synthetic oligonucleotide
ucaacguaugucuucauug

SEQ ID NO: 579901 - RNA, 19 nt, Artificial Sequence
  Description of Artificial Sequence: Synthetic oligonucleotide
gauucuaagagcucacgcc

SEQ ID NO: 579902 - RNA, 19 nt, Artificial Sequence
  Description of Artificial Sequence: Synthetic oligonucleotide
ugauucgucgcuuuuacca

SEQ ID NO: 579903 - RNA, 19 nt, Artificial Sequence
  Description of Artificial Sequence: Synthetic oligonucleotide
ucugaucgaaguuuugggg

SEQ ID NO: 579904 - RNA, 19 nt, Artificial Sequence
  Description of Artificial Sequence: Synthetic oligonucleotide
aauacauguuuagaguguc

SEQ ID NO: 579905 - RNA, 19 nt, Artificial Sequence
  Description of Artificial Sequence: Synthetic oligonucleotide
cacuuuauggaccagggag

SEQ ID NO: 579906 - RNA, 19 nt, Artificial Sequence
  Description of Artificial Sequence: Synthetic oligonucleotide
auccauaauaagcucuagc

SEQ ID NO: 579907 - RNA, 19 nt, Artificial Sequence
  Description of Artificial Sequence: Synthetic oligonucleotide
agaguauuggccauuggcc

SEQ ID NO: 579908 - RNA, 19 nt, Artificial Sequence
  Description of Artificial Sequence: Synthetic oligonucleotide
aguaaaaccaaaugagagu

SEQ ID NO: 579909 - RNA, 19 nt, Artificial Sequence
  Description of Artificial Sequence: Synthetic oligonucleotide
gaaacguguucccauagag

SEQ ID NO: 579910 - RNA, 19 nt, Artificial Sequence
  Description of Artificial Sequence: Synthetic oligonucleotide
ucgagcauguccuugcagg

SEQ ID NO: 579911 - RNA, 19 nt, Artificial Sequence
  Description of Artificial Sequence: Synthetic oligonucleotide
cugcaaaucacucaucagc

SEQ ID NO: 579912 - RNA, 19 nt, Artificial Sequence
  Description of Artificial Sequence: Synthetic oligonucleotide
ucccauuuggguuucuugg

SEQ ID NO: 579913 - RNA, 19 nt, Artificial Sequence
  Description of Artificial Sequence: Synthetic oligonucleotide
uucugaucgaaguuuuggg

SEQ ID NO: 579914 - RNA, 19 nt, Artificial Sequence
  Description of Artificial Sequence: Synthetic oligonucleotide
uuugcucgaaccacgaugu

SEQ ID NO: 579915 - RNA, 19 nt, Artificial Sequence
  Description of Artificial Sequence: Synthetic oligonucleotide
ucauuuacgaugcugggua

SEQ ID NO: 579916 - RNA, 19 nt, Artificial Sequence
  Description of Artificial Sequence: Synthetic oligonucleotide
ugcaaaucacucaucagcu

SEQ ID NO: 579917 - RNA, 19 nt, Artificial Sequence
  Description of Artificial Sequence: Synthetic oligonucleotide
uucugauaugauuaucugc

SEQ ID NO: 579918 - RNA, 19 nt, Artificial Sequence
  Description of Artificial Sequence: Synthetic oligonucleotide
uccaucauagcaauucgca

SEQ ID NO: 579919 - RNA, 19 nt, Artificial Sequence
  Description of Artificial Sequence: Synthetic oligonucleotide
uccaacguuggaaucaggc

SEQ ID NO: 579920 - RNA, 19 nt, Artificial Sequence
  Description of Artificial Sequence: Synthetic oligonucleotide
uuuugaguacgguggaucc

SEQ ID NO: 579921 - RNA, 19 nt, Artificial Sequence
  Description of Artificial Sequence: Synthetic oligonucleotide
aaacguguucccauagagc

SEQ ID NO: 579922 - RNA, 19 nt, Artificial Sequence
  Description of Artificial Sequence: Synthetic oligonucleotide
uucccuugaaucaauuucu

SEQ ID NO: 579923 - RNA, 19 nt, Artificial Sequence
  Description of Artificial Sequence: Synthetic oligonucleotide
aacacuuuauggaccaggg

SEQ ID NO: 579924 - RNA, 19 nt, Artificial Sequence
  Description of Artificial Sequence: Synthetic oligonucleotide
uuguuuacaacuuccuggu

SEQ ID NO: 579925 - RNA, 19 nt, Artificial Sequence
  Description of Artificial Sequence: Synthetic oligonucleotide
ucauuguacgcauacucca

SEQ ID NO: 579926 - RNA, 19 nt, Artificial Sequence
  Description of Artificial Sequence: Synthetic oligonucleotide
uuucuuacugugugcauug

SEQ ID NO: 579927 - RNA, 19 nt, Artificial Sequence
  Description of Artificial Sequence: Synthetic oligonucleotide
ugauaugauuaucugcuuc

SEQ ID NO: 579928 - RNA, 19 nt, Artificial Sequence
  Description of Artificial Sequence: Synthetic oligonucleotide
uuucugauaugauuaucug

SEQ ID NO: 579929 - RNA, 19 nt, Artificial Sequence
  Description of Artificial Sequence: Synthetic oligonucleotide
uuaaccauuugagaacgag

SEQ ID NO: 579930 - RNA, 19 nt, Artificial Sequence
  Description of Artificial Sequence: Synthetic oligonucleotide
ucgaugauuucucggacug

SEQ ID NO: 579931 - RNA, 19 nt, Artificial Sequence
  Description of Artificial Sequence: Synthetic oligonucleotide
auuguacgcauacuccacg

SEQ ID NO: 579932 - RNA, 19 nt, Artificial Sequence
  Description of Artificial Sequence: Synthetic oligonucleotide
aguauuggccauuggccac

SEQ ID NO: 579933 - RNA, 19 nt, Artificial Sequence
  Description of Artificial Sequence: Synthetic oligonucleotide
acacuuuagggccaccuuc

SEQ ID NO: 579934 - RNA, 19 nt, Artificial Sequence
  Description of Artificial Sequence: Synthetic oligonucleotide
caauuaauucugaucgaag

SEQ ID NO: 579935 - RNA, 19 nt, Artificial Sequence
  Description of Artificial Sequence: Synthetic oligonucleotide
agaguguccaguuuugagu

SEQ ID NO: 579936 - RNA, 19 nt, Artificial Sequence
  Description of Artificial Sequence: Synthetic oligonucleotide
guuuacaacuuccugguca

SEQ ID NO: 579937 - RNA, 19 nt, Artificial Sequence
  Description of Artificial Sequence: Synthetic oligonucleotide
cuagguauaccacugcuuc

SEQ ID NO: 579938 - RNA, 19 nt, Artificial Sequence
  Description of Artificial Sequence: Synthetic oligonucleotide
ucaugugcgaaagcaauag

SEQ ID NO: 579939 - RNA, 19 nt, Artificial Sequence
  Description of Artificial Sequence: Synthetic oligonucleotide
uaagagcucacgccggcgg

SEQ ID NO: 579940 - RNA, 19 nt, Artificial Sequence
  Description of Artificial Sequence: Synthetic oligonucleotide
uuuacgaugcuggguaagg

SEQ ID NO: 579941 - RNA, 19 nt, Artificial Sequence
  Description of Artificial Sequence: Synthetic oligonucleotide
aaucaggcuuuucagucca

SEQ ID NO: 579942 - RNA, 19 nt, Artificial Sequence
  Description of Artificial Sequence: Synthetic oligonucleotide
uggaauuuguccuucgguc

SEQ ID NO: 579943 - RNA, 19 nt, Artificial Sequence
  Description of Artificial Sequence: Synthetic oligonucleotide
ucccauauuugucauuuac

SEQ ID NO: 579944 - RNA, 19 nt, Artificial Sequence
  Description of Artificial Sequence: Synthetic oligonucleotide
uguccuucgguccuuugcc

SEQ ID NO: 579945 - RNA, 19 nt, Artificial Sequence
  Description of Artificial Sequence: Synthetic oligonucleotide
aguugggugaucugcugac

SEQ ID NO: 579946 - RNA, 19 nt, Artificial Sequence
  Description of Artificial Sequence: Synthetic oligonucleotide
aaccauuugagaacgagau

SEQ ID NO: 579947 - RNA, 19 nt, Artificial Sequence
  Description of Artificial Sequence: Synthetic oligonucleotide
uuaauucugaucgaaguuu

SEQ ID NO: 579948 - RNA, 19 nt, Artificial Sequence
  Description of Artificial Sequence: Synthetic oligonucleotide
auuaauucugaucgaaguu

SEQ ID NO: 579949 - RNA, 19 nt, Artificial Sequence
  Description of Artificial Sequence: Synthetic oligonucleotide
ugugcgaaagcaauaguuu

SEQ ID NO: 579950 - RNA, 19 nt, Artificial Sequence
  Description of Artificial Sequence: Synthetic oligonucleotide
cuuguaaagcugaaacgug

SEQ ID NO: 579951 - RNA, 19 nt, Artificial Sequence
  Description of Artificial Sequence: Synthetic oligonucleotide
uucuaagagcucacgccgg

SEQ ID NO: 579952 - RNA, 19 nt, Artificial Sequence
  Description of Artificial Sequence: Synthetic oligonucleotide
cuuugcucgaaccacgaug

SEQ ID NO: 579953 - RNA, 19 nt, Artificial Sequence
  Description of Artificial Sequence: Synthetic oligonucleotide
uuguugaauguauuuggcu

SEQ ID NO: 579954 - RNA, 19 nt, Artificial Sequence
  Description of Artificial Sequence: Synthetic oligonucleotide
aagucaucccauuuggguu

SEQ ID NO: 579955 - RNA, 19 nt, Artificial Sequence
  Description of Artificial Sequence: Synthetic oligonucleotide
gaagcucgaugauuucucg

SEQ ID NO: 579956 - RNA, 19 nt, Artificial Sequence
  Description of Artificial Sequence: Synthetic oligonucleotide
uuacuuaguucaaccaagu

SEQ ID NO: 579957 - RNA, 19 nt, Artificial Sequence
  Description of Artificial Sequence: Synthetic oligonucleotide
ucaauuaauucugaucgaa

SEQ ID NO: 579958 - RNA, 19 nt, Artificial Sequence
  Description of Artificial Sequence: Synthetic oligonucleotide
ugguuuacuuccauacaug

SEQ ID NO: 579959 - RNA, 19 nt, Artificial Sequence
  Description of Artificial Sequence: Synthetic oligonucleotide
ucuuacugugugcauugcc

SEQ ID NO: 579960 - RNA, 19 nt, Artificial Sequence
  Description of Artificial Sequence: Synthetic oligonucleotide
aauauuccuggaauauuug

SEQ ID NO: 579961 - RNA, 19 nt, Artificial Sequence
  Description of Artificial Sequence: Synthetic oligonucleotide
uauaccacugcuucccgga

SEQ ID NO: 579962 - RNA, 19 nt, Artificial Sequence
  Description of Artificial Sequence: Synthetic oligonucleotide
uucuuagaugacacuuuag

SEQ ID NO: 579963 - RNA, 19 nt, Artificial Sequence
  Description of Artificial Sequence: Synthetic oligonucleotide
auccgugggaagcagguuc

SEQ ID NO: 579964 - RNA, 19 nt, Artificial Sequence
  Description of Artificial Sequence: Synthetic oligonucleotide
gaaucaggcuuuucagucc

SEQ ID NO: 579965 - RNA, 19 nt, Artificial Sequence
  Description of Artificial Sequence: Synthetic oligonucleotide
aagcucuagcuuucccggc

SEQ ID NO: 579966 - RNA, 19 nt, Artificial Sequence
  Description of Artificial Sequence: Synthetic oligonucleotide
ucuacuccuuugcuggugc

SEQ ID NO: 579967 - RNA, 19 nt, Artificial Sequence
  Description of Artificial Sequence: Synthetic oligonucleotide
aaugucgcagcaucuuccu

SEQ ID NO: 579968 - RNA, 19 nt, Artificial Sequence
  Description of Artificial Sequence: Synthetic oligonucleotide
aaucaaaugcugccaguaa

SEQ ID NO: 579969 - RNA, 19 nt, Artificial Sequence
  Description of Artificial Sequence: Synthetic oligonucleotide
uugagaacgagauguccug

SEQ ID NO: 579970 - RNA, 19 nt, Artificial Sequence
  Description of Artificial Sequence: Synthetic oligonucleotide
ugugccagaagcucgcaga

SEQ ID NO: 579971 - RNA, 19 nt, Artificial Sequence
  Description of Artificial Sequence: Synthetic oligonucleotide
aaguucuuagaugacacuu

SEQ ID NO: 579972 - RNA, 19 nt, Artificial Sequence
  Description of Artificial Sequence: Synthetic oligonucleotide
cucacgugaccuuuaaaac

SEQ ID NO: 579973 - RNA, 19 nt, Artificial Sequence
  Description of Artificial Sequence: Synthetic oligonucleotide
cacuggaucacacgugucg

SEQ ID NO: 579974 - RNA, 19 nt, Artificial Sequence
  Description of Artificial Sequence: Synthetic oligonucleotide
agaauaauggcaccucgau

SEQ ID NO: 579975 - RNA, 19 nt, Artificial Sequence
  Description of Artificial Sequence: Synthetic oligonucleotide
aacgagauguccugcggga

SEQ ID NO: 579976 - RNA, 19 nt, Artificial Sequence
  Description of Artificial Sequence: Synthetic oligonucleotide
uuauggaccagggagugcu

SEQ ID NO: 579977 - RNA, 19 nt, Artificial Sequence
  Description of Artificial Sequence: Synthetic oligonucleotide
guuuucacgaucacuuucc

SEQ ID NO: 579978 - RNA, 19 nt, Artificial Sequence
  Description of Artificial Sequence: Synthetic oligonucleotide
uuauccgugggaagcaggu

SEQ ID NO: 579979 - RNA, 19 nt, Artificial Sequence
  Description of Artificial Sequence: Synthetic oligonucleotide
cuuaucacugagcugccug

SEQ ID NO: 579980 - RNA, 19 nt, Artificial Sequence
  Description of Artificial Sequence: Synthetic oligonucleotide
cauacugaaugaagcacug

SEQ ID NO: 579981 - RNA, 19 nt, Artificial Sequence
  Description of Artificial Sequence: Synthetic oligonucleotide
cuuggguguaccaugccac

SEQ ID NO: 579982 - RNA, 19 nt, Artificial Sequence
  Description of Artificial Sequence: Synthetic oligonucleotide
uggaaagaauaauggcacc

SEQ ID NO: 579983 - RNA, 19 nt, Artificial Sequence
  Description of Artificial Sequence: Synthetic oligonucleotide
gaguauuggccauuggcca

SEQ ID NO: 579984 - RNA, 19 nt, Artificial Sequence
  Description of Artificial Sequence: Synthetic oligonucleotide
uuuugaagucaucccauuu

SEQ ID NO: 579985 - RNA, 19 nt, Artificial Sequence
  Description of Artificial Sequence: Synthetic oligonucleotide
ucugaaugucgcagcaucu

SEQ ID NO: 579986 - RNA, 19 nt, Artificial Sequence
  Description of Artificial Sequence: Synthetic oligonucleotide
aucaaaugcugccaguaaa

SEQ ID NO: 579987 - RNA, 19 nt, Artificial Sequence
  Description of Artificial Sequence: Synthetic oligonucleotide
uaauucugaucgaaguuuu

SEQ ID NO: 579988 - RNA, 19 nt, Artificial Sequence
  Description of Artificial Sequence: Synthetic oligonucleotide
uucuagcagaauuucuacu

SEQ ID NO: 579989 - RNA, 19 nt, Artificial Sequence
  Description of Artificial Sequence: Synthetic oligonucleotide
uuguccagcgcgccuaugc

SEQ ID NO: 579990 - RNA, 19 nt, Artificial Sequence
  Description of Artificial Sequence: Synthetic oligonucleotide
gaugucagacaccaacaca

SEQ ID NO: 579991 - RNA, 19 nt, Artificial Sequence
  Description of Artificial Sequence: Synthetic oligonucleotide
ugaaacguguucccauaga

SEQ ID NO: 579992 - RNA, 19 nt, Artificial Sequence
  Description of Artificial Sequence: Synthetic oligonucleotide
gaugcucggcaacaugaag

SEQ ID NO: 579993 - RNA, 19 nt, Artificial Sequence
  Description of Artificial Sequence: Synthetic oligonucleotide
ugguuuagcaaagcuggag

SEQ ID NO: 579994 - RNA, 19 nt, Artificial Sequence
  Description of Artificial Sequence: Synthetic oligonucleotide
uuugaguacgguggauccg

SEQ ID NO: 579995 - RNA, 19 nt, Artificial Sequence
  Description of Artificial Sequence: Synthetic oligonucleotide
uuucauccauaauaagcuc

SEQ ID NO: 579996 - RNA, 19 nt, Artificial Sequence
  Description of Artificial Sequence: Synthetic oligonucleotide
ugaaugucgcagcaucuuc

SEQ ID NO: 579997 - RNA, 19 nt, Artificial Sequence
  Description of Artificial Sequence: Synthetic oligonucleotide
ggaauuuguccuucggucc

SEQ ID NO: 579998 - RNA, 19 nt, Artificial Sequence
  Description of Artificial Sequence: Synthetic oligonucleotide
ugcgaaagcaauaguuuua

SEQ ID NO: 579999 - RNA, 19 nt, Artificial Sequence
  Description of Artificial Sequence: Synthetic oligonucleotide
gaaugucgcagcaucuucc

SEQ ID NO: 580000 - RNA, 19 nt, Artificial Sequence
  Description of Artificial Sequence: Synthetic oligonucleotide
uucucaagcucucccaaau

SEQ ID NO: 580001 - RNA, 19 nt, Artificial Sequence
  Description of Artificial Sequence: Synthetic oligonucleotide
uugaguacgguggauccgc

SEQ ID NO: 580002 - RNA, 19 nt, Artificial Sequence
  Description of Artificial Sequence: Synthetic oligonucleotide
cuuauccgugggaagcagg

SEQ ID NO: 580003 - RNA, 19 nt, Artificial Sequence
  Description of Artificial Sequence: Synthetic oligonucleotide
cauaauaagcucuagcuuu

SEQ ID NO: 580004 - RNA, 19 nt, Artificial Sequence
  Description of Artificial Sequence: Synthetic oligonucleotide
aagaauaauggcaccucga

SEQ ID NO: 580005 - RNA, 19 nt, Artificial Sequence
  Description of Artificial Sequence: Synthetic oligonucleotide
uuuccaacguuggaaucag

SEQ ID NO: 580006 - RNA, 19 nt, Artificial Sequence
  Description of Artificial Sequence: Synthetic oligonucleotide
aauucgcacacgugugcca

SEQ ID NO: 580007 - RNA, 19 nt, Artificial Sequence
  Description of Artificial Sequence: Synthetic oligonucleotide
ugugcuuugcucgaaccac

SEQ ID NO: 580008 - RNA, 19 nt, Artificial Sequence
  Description of Artificial Sequence: Synthetic oligonucleotide
gucauuguacgcauacucc

SEQ ID NO: 580009 - RNA, 19 nt, Artificial Sequence
  Description of Artificial Sequence: Synthetic oligonucleotide
agaagcucgaugauuucuc

SEQ ID NO: 580010 - RNA, 19 nt, Artificial Sequence
  Description of Artificial Sequence: Synthetic oligonucleotide
agcacuggaucacacgugu

SEQ ID NO: 580011 - RNA, 19 nt, Artificial Sequence
  Description of Artificial Sequence: Synthetic oligonucleotide
aguacgguggauccgcccu

SEQ ID NO: 580012 - RNA, 19 nt, Artificial Sequence
  Description of Artificial Sequence: Synthetic oligonucleotide
ugacaauauuccuggaaua

SEQ ID NO: 580013 - RNA, 19 nt, Artificial Sequence
  Description of Artificial Sequence: Synthetic oligonucleotide
caugagaaauuucuugaca

SEQ ID NO: 580014 - RNA, 19 nt, Artificial Sequence
  Description of Artificial Sequence: Synthetic oligonucleotide
uggauucuaagagcucacg

SEQ ID NO: 580015 - RNA, 19 nt, Artificial Sequence
  Description of Artificial Sequence: Synthetic oligonucleotide
ugcucggcaacaugaagcu

SEQ ID NO: 580016 - RNA, 19 nt, Artificial Sequence
  Description of Artificial Sequence: Synthetic oligonucleotide
ggagagauggauucuaaga

SEQ ID NO: 580017 - RNA, 19 nt, Artificial Sequence
  Description of Artificial Sequence: Synthetic oligonucleotide
uuucacgaucacuuuccug

SEQ ID NO: 580018 - RNA, 19 nt, Artificial Sequence
  Description of Artificial Sequence: Synthetic oligonucleotide
gauggcauccauggcaggc

SEQ ID NO: 580019 - RNA, 19 nt, Artificial Sequence
  Description of Artificial Sequence: Synthetic oligonucleotide
uagguauaccacugcuucc

SEQ ID NO: 580020 - RNA, 19 nt, Artificial Sequence
  Description of Artificial Sequence: Synthetic oligonucleotide
cucuauuaaccauuugaga

SEQ ID NO: 580021 - RNA, 19 nt, Artificial Sequence
  Description of Artificial Sequence: Synthetic oligonucleotide
cacgugugccagaagcucg

SEQ ID NO: 580022 - RNA, 19 nt, Artificial Sequence
  Description of Artificial Sequence: Synthetic oligonucleotide
uuaguucaaccaagucacc

SEQ ID NO: 580023 - RNA, 19 nt, Artificial Sequence
  Description of Artificial Sequence: Synthetic oligonucleotide
cauuguacgcauacuccac

SEQ ID NO: 580024 - RNA, 19 nt, Artificial Sequence
  Description of Artificial Sequence: Synthetic oligonucleotide
gaaaguuggcauaaagcaa

SEQ ID NO: 580025 - RNA, 19 nt, Artificial Sequence
  Description of Artificial Sequence: Synthetic oligonucleotide
aacguaugucuucauuguu

SEQ ID NO: 580026 - RNA, 19 nt, Artificial Sequence
  Description of Artificial Sequence: Synthetic oligonucleotide
uuuucacgaucacuuuccu

SEQ ID NO: 580027 - RNA, 19 nt, Artificial Sequence
  Description of Artificial Sequence: Synthetic oligonucleotide
uuguacgcauacuccacga

SEQ ID NO: 580028 - RNA, 19 nt, Artificial Sequence
  Description of Artificial Sequence: Synthetic oligonucleotide
ggauucuaagagcucacgc

SEQ ID NO: 580029 - RNA, 19 nt, Artificial Sequence
  Description of Artificial Sequence: Synthetic oligonucleotide
caaccaagucaccuuguag

SEQ ID NO: 580030 - RNA, 19 nt, Artificial Sequence
  Description of Artificial Sequence: Synthetic oligonucleotide
guuuacuuccauacaugag

SEQ ID NO: 580031 - RNA, 19 nt, Artificial Sequence
  Description of Artificial Sequence: Synthetic oligonucleotide
accucgauugaugcuggcc

SEQ ID NO: 580032 - RNA, 19 nt, Artificial Sequence
  Description of Artificial Sequence: Synthetic oligonucleotide
uucaacguaugucuucauu

SEQ ID NO: 580033 - RNA, 19 nt, Artificial Sequence
  Description of Artificial Sequence: Synthetic oligonucleotide
uacgaugcuggguaaggaa

SEQ ID NO: 580034 - RNA, 19 nt, Artificial Sequence
  Description of Artificial Sequence: Synthetic oligonucleotide
uccgugggaagcagguucc

SEQ ID NO: 580035 - RNA, 19 nt, Artificial Sequence
  Description of Artificial Sequence: Synthetic oligonucleotide
acgaucacuuuccuguccu

SEQ ID NO: 580036 - RNA, 19 nt, Artificial Sequence
  Description of Artificial Sequence: Synthetic oligonucleotide
gugucuuuuagaaacaacu

SEQ ID NO: 580037 - RNA, 19 nt, Artificial Sequence
  Description of Artificial Sequence: Synthetic oligonucleotide
guauaccacugcuucccgg

SEQ ID NO: 580038 - RNA, 19 nt, Artificial Sequence
  Description of Artificial Sequence: Synthetic oligonucleotide
gauccgcccuucuuauccg

SEQ ID NO: 580039 - RNA, 19 nt, Artificial Sequence
  Description of Artificial Sequence: Synthetic oligonucleotide
aucccauuuggguuucuug

SEQ ID NO: 580040 - RNA, 19 nt, Artificial Sequence
  Description of Artificial Sequence: Synthetic oligonucleotide
gaguguccaguuuugagua

SEQ ID NO: 580041 - RNA, 19 nt, Artificial Sequence
  Description of Artificial Sequence: Synthetic oligonucleotide
gguuuacuuccauacauga

SEQ ID NO: 580042 - RNA, 19 nt, Artificial Sequence
  Description of Artificial Sequence: Synthetic oligonucleotide
ggauccgcccuucuuaucc

SEQ ID NO: 580043 - RNA, 19 nt, Artificial Sequence
  Description of Artificial Sequence: Synthetic oligonucleotide
gguuuagcaaagcuggaga

SEQ ID NO: 580044 - RNA, 19 nt, Artificial Sequence
  Description of Artificial Sequence: Synthetic oligonucleotide
ucaaccaagucaccuugua

SEQ ID NO: 580045 - RNA, 19 nt, Artificial Sequence
  Description of Artificial Sequence: Synthetic oligonucleotide
acuuuauggaccagggagu

SEQ ID NO: 580046 - RNA, 19 nt, Artificial Sequence
  Description of Artificial Sequence: Synthetic oligonucleotide
cauuugagaacgagauguc

SEQ ID NO: 580047 - RNA, 19 nt, Artificial Sequence
  Description of Artificial Sequence: Synthetic oligonucleotide
ucccggauggcuucaauua

SEQ ID NO: 580048 - RNA, 19 nt, Artificial Sequence
  Description of Artificial Sequence: Synthetic oligonucleotide
cuuuauggaccagggagug

SEQ ID NO: 580049 - RNA, 19 nt, Artificial Sequence
  Description of Artificial Sequence: Synthetic oligonucleotide
auacugaaugaagcacugg

SEQ ID NO: 580050 - RNA, 19 nt, Artificial Sequence
  Description of Artificial Sequence: Synthetic oligonucleotide
auaauggcaccucgauuga

SEQ ID NO: 580051 - RNA, 19 nt, Artificial Sequence
  Description of Artificial Sequence: Synthetic oligonucleotide
uguuuagaguguccaguuu

SEQ ID NO: 580052 - RNA, 19 nt, Artificial Sequence
  Description of Artificial Sequence: Synthetic oligonucleotide
auuuacgaugcuggguaag

SEQ ID NO: 580053 - RNA, 19 nt, Artificial Sequence
  Description of Artificial Sequence: Synthetic oligonucleotide
uccagcgcgccuaugcagu

SEQ ID NO: 580054 - RNA, 19 nt, Artificial Sequence
  Description of Artificial Sequence: Synthetic oligonucleotide
ugcuuugcucgaaccacga

SEQ ID NO: 580055 - RNA, 19 nt, Artificial Sequence
  Description of Artificial Sequence: Synthetic oligonucleotide
uccuggaauauuuggcuuu

SEQ ID NO: 580056 - RNA, 19 nt, Artificial Sequence
  Description of Artificial Sequence: Synthetic oligonucleotide
agcgcgccuaugcaguuag

SEQ ID NO: 580057 - RNA, 19 nt, Artificial Sequence
  Description of Artificial Sequence: Synthetic oligonucleotide
uguccagcgcgccuaugca

SEQ ID NO: 580058 - RNA, 19 nt, Artificial Sequence
  Description of Artificial Sequence: Synthetic oligonucleotide
caguuagcuuuucuagcag

SEQ ID NO: 580059 - RNA, 19 nt, Artificial Sequence
  Description of Artificial Sequence: Synthetic oligonucleotide
cuuugacuuccaucauagc

SEQ ID NO: 580060 - RNA, 19 nt, Artificial Sequence
  Description of Artificial Sequence: Synthetic oligonucleotide
caauucgcacacgugugcc

SEQ ID NO: 580061 - RNA, 19 nt, Artificial Sequence
  Description of Artificial Sequence: Synthetic oligonucleotide
ucuuauccgugggaagcag

SEQ ID NO: 580062 - RNA, 19 nt, Artificial Sequence
  Description of Artificial Sequence: Synthetic oligonucleotide
uguccuugcaggugguuua

SEQ ID NO: 580063 - RNA, 19 nt, Artificial Sequence
  Description of Artificial Sequence: Synthetic oligonucleotide
gaucacacgugucgaguca

SEQ ID NO: 580064 - RNA, 19 nt, Artificial Sequence
  Description of Artificial Sequence: Synthetic oligonucleotide
uguacgcauacuccacgau

SEQ ID NO: 580065 - RNA, 19 nt, Artificial Sequence
  Description of Artificial Sequence: Synthetic oligonucleotide
uguuuacaacuuccugguc

SEQ ID NO: 580066 - RNA, 19 nt, Artificial Sequence
  Description of Artificial Sequence: Synthetic oligonucleotide
auucgcacacgugugccag

SEQ ID NO: 580067 - RNA, 19 nt, Artificial Sequence
  Description of Artificial Sequence: Synthetic oligonucleotide
gccaacccgcucuauaagg

SEQ ID NO: 580068 - RNA, 19 nt, Artificial Sequence
  Description of Artificial Sequence: Synthetic oligonucleotide
uuccaacguuggaaucagg

SEQ ID NO: 580069 - RNA, 19 nt, Artificial Sequence
  Description of Artificial Sequence: Synthetic oligonucleotide
cugauucgucgcuuuuacc

SEQ ID NO: 580070 - RNA, 19 nt, Artificial Sequence
  Description of Artificial Sequence: Synthetic oligonucleotide
ccucgauugaugcuggccc

SEQ ID NO: 580071 - RNA, 19 nt, Artificial Sequence
  Description of Artificial Sequence: Synthetic oligonucleotide
gcaguuagcuuuucuagca

SEQ ID NO: 580072 - RNA, 19 nt, Artificial Sequence
  Description of Artificial Sequence: Synthetic oligonucleotide
ugacacuuuagggccaccu

SEQ ID NO: 580073 - RNA, 19 nt, Artificial Sequence
  Description of Artificial Sequence: Synthetic oligonucleotide
uuacgaugcuggguaagga

SEQ ID NO: 580074 - RNA, 19 nt, Artificial Sequence
  Description of Artificial Sequence: Synthetic oligonucleotide
augugcgaaagcaauaguu

SEQ ID NO: 580075 - RNA, 19 nt, Artificial Sequence
  Description of Artificial Sequence: Synthetic oligonucleotide
ugcuaucugugguuuacuu

SEQ ID NO: 580076 - RNA, 19 nt, Artificial Sequence
  Description of Artificial Sequence: Synthetic oligonucleotide
acacgugucgagucaugug

SEQ ID NO: 580077 - RNA, 19 nt, Artificial Sequence
  Description of Artificial Sequence: Synthetic oligonucleotide
gaugccucugaaugucgca

SEQ ID NO: 580078 - RNA, 19 nt, Artificial Sequence
  Description of Artificial Sequence: Synthetic oligonucleotide
gucgagucaugugcgaaag

SEQ ID NO: 580079 - RNA, 19 nt, Artificial Sequence
  Description of Artificial Sequence: Synthetic oligonucleotide
augagaguauuggccauug

SEQ ID NO: 580080 - RNA, 19 nt, Artificial Sequence
  Description of Artificial Sequence: Synthetic oligonucleotide
agcaauucgcacacgugug

SEQ ID NO: 580081 - RNA, 19 nt, Artificial Sequence
  Description of Artificial Sequence: Synthetic oligonucleotide
cuucacaagcuuaguguca

SEQ ID NO: 580082 - RNA, 19 nt, Artificial Sequence
  Description of Artificial Sequence: Synthetic oligonucleotide
agcaaguacagcaggacuu

SEQ ID NO: 580083 - RNA, 19 nt, Artificial Sequence
  Description of Artificial Sequence: Synthetic oligonucleotide
aggacuugagguucuucau

SEQ ID NO: 580084 - RNA, 19 nt, Artificial Sequence
  Description of Artificial Sequence: Synthetic oligonucleotide
ugaguacgguggauccgcc

SEQ ID NO: 580085 - RNA, 19 nt, Artificial Sequence
  Description of Artificial Sequence: Synthetic oligonucleotide
aagcugaaacguguuccca

SEQ ID NO: 580086 - RNA, 19 nt, Artificial Sequence
  Description of Artificial Sequence: Synthetic oligonucleotide
gugguuuacuuccauacau

SEQ ID NO: 580087 - RNA, 19 nt, Artificial Sequence
  Description of Artificial Sequence: Synthetic oligonucleotide
accaucgugugugugggcu

SEQ ID NO: 580088 - RNA, 19 nt, Artificial Sequence
  Description of Artificial Sequence: Synthetic oligonucleotide
acgugugccagaagcucgc

SEQ ID NO: 580089 - RNA, 19 nt, Artificial Sequence
  Description of Artificial Sequence: Synthetic oligonucleotide
gugcuuugcucgaaccacg

SEQ ID NO: 580090 - RNA, 19 nt, Artificial Sequence
  Description of Artificial Sequence: Synthetic oligonucleotide
ccaacccgcucuauaaggg

SEQ ID NO: 580091 - RNA, 19 nt, Artificial Sequence
  Description of Artificial Sequence: Synthetic oligonucleotide
cacacgcagacuuguccag

SEQ ID NO: 580092 - RNA, 19 nt, Artificial Sequence
  Description of Artificial Sequence: Synthetic oligonucleotide
ucgauugaugcuggcccag

SEQ ID NO: 580093 - RNA, 19 nt, Artificial Sequence
  Description of Artificial Sequence: Synthetic oligonucleotide
gaguacgguggauccgccc

SEQ ID NO: 580094 - RNA, 19 nt, Artificial Sequence
  Description of Artificial Sequence: Synthetic oligonucleotide
acgugucgagucaugugcg

SEQ ID NO: 580095 - RNA, 19 nt, Artificial Sequence
  Description of Artificial Sequence: Synthetic oligonucleotide
guauuggccauuggccacc

SEQ ID NO: 580096 - RNA, 19 nt, Artificial Sequence
  Description of Artificial Sequence: Synthetic oligonucleotide
ggccaucggagucagaauc

SEQ ID NO: 580097 - RNA, 19 nt, Artificial Sequence
  Description of Artificial Sequence: Synthetic oligonucleotide
gcuaucugugguuuacuuc

SEQ ID NO: 580098 - RNA, 19 nt, Artificial Sequence
  Description of Artificial Sequence: Synthetic oligonucleotide
aguucuuagaugacacuuu

SEQ ID NO: 580099 - RNA, 19 nt, Artificial Sequence
  Description of Artificial Sequence: Synthetic oligonucleotide
gcugauucgucgcuuuuac

SEQ ID NO: 580100 - RNA, 19 nt, Artificial Sequence
  Description of Artificial Sequence: Synthetic oligonucleotide
uccuuggguguaccaugcc

SEQ ID NO: 580101 - RNA, 19 nt, Artificial Sequence
  Description of Artificial Sequence: Synthetic oligonucleotide
ccagcuugcuuguccagcg

SEQ ID NO: 580102 - RNA, 19 nt, Artificial Sequence
  Description of Artificial Sequence: Synthetic oligonucleotide
gcaauucgcacacgugugc

SEQ ID NO: 580103 - RNA, 19 nt, Artificial Sequence
  Description of Artificial Sequence: Synthetic oligonucleotide
uccgcccuucuuauccgug

SEQ ID NO: 580104 - RNA, 19 nt, Artificial Sequence
  Description of Artificial Sequence: Synthetic oligonucleotide
cucgagcauguccuugcag

SEQ ID NO: 580105 - RNA, 19 nt, Artificial Sequence
  Description of Artificial Sequence: Synthetic oligonucleotide
guccagcgcgccuaugcag

SEQ ID NO: 580106 - RNA, 19 nt, Artificial Sequence
  Description of Artificial Sequence: Synthetic oligonucleotide
uucuuacugugugcauugc

SEQ ID NO: 580107 - RNA, 19 nt, Artificial Sequence
  Description of Artificial Sequence: Synthetic oligonucleotide
gauucgucgcuuuuaccau

SEQ ID NO: 580108 - RNA, 19 nt, Artificial Sequence
  Description of Artificial Sequence: Synthetic oligonucleotide
cuugugcugucuuuggacu

SEQ ID NO: 580109 - RNA, 19 nt, Artificial Sequence
  Description of Artificial Sequence: Synthetic oligonucleotide
uuucucggacugugugggc

SEQ ID NO: 580110 - RNA, 19 nt, Artificial Sequence
  Description of Artificial Sequence: Synthetic oligonucleotide
ggguguaccaugccacaag

SEQ ID NO: 580111 - RNA, 19 nt, Artificial Sequence
  Description of Artificial Sequence: Synthetic oligonucleotide
aaacuggcgauggcaucca

SEQ ID NO: 580112 - RNA, 19 nt, Artificial Sequence
  Description of Artificial Sequence: Synthetic oligonucleotide
ucuuccucacgugaccuuu

SEQ ID NO: 580113 - RNA, 19 nt, Artificial Sequence
  Description of Artificial Sequence: Synthetic oligonucleotide
cacucuggcaccaucgugu

SEQ ID NO: 580114 - RNA, 19 nt, Artificial Sequence
  Description of Artificial Sequence: Synthetic oligonucleotide
gaauaauggcaccucgauu

SEQ ID NO: 580115 - RNA, 19 nt, Artificial Sequence
  Description of Artificial Sequence: Synthetic oligonucleotide
agcucacgccggcggaugg

SEQ ID NO: 580116 - RNA, 19 nt, Artificial Sequence
  Description of Artificial Sequence: Synthetic oligonucleotide
cagcuuugacuuuguuuac

SEQ ID NO: 580117 - RNA, 19 nt, Artificial Sequence
  Description of Artificial Sequence: Synthetic oligonucleotide
caucgugugugugggcuag

SEQ ID NO: 580118 - RNA, 19 nt, Artificial Sequence
  Description of Artificial Sequence: Synthetic oligonucleotide
uuucaacguaugucuucau

SEQ ID NO: 580119 - RNA, 19 nt, Artificial Sequence
  Description of Artificial Sequence: Synthetic oligonucleotide
caacguaugucuucauugu

SEQ ID NO: 580120 - RNA, 19 nt, Artificial Sequence
  Description of Artificial Sequence: Synthetic oligonucleotide
guaguucuacugcugccaa

SEQ ID NO: 580121 - RNA, 19 nt, Artificial Sequence
  Description of Artificial Sequence: Synthetic oligonucleotide
agcaccuugcccagaguug

SEQ ID NO: 580122 - RNA, 19 nt, Artificial Sequence
  Description of Artificial Sequence: Synthetic oligonucleotide
aacccgcucuauaaggguu

SEQ ID NO: 580123 - RNA, 19 nt, Artificial Sequence
  Description of Artificial Sequence: Synthetic oligonucleotide
uucccggcugcaccuccag

SEQ ID NO: 580124 - RNA, 19 nt, Artificial Sequence
  Description of Artificial Sequence: Synthetic oligonucleotide
caacguuggaaucaggcuu

SEQ ID NO: 580125 - RNA, 19 nt, Artificial Sequence
  Description of Artificial Sequence: Synthetic oligonucleotide
ggaaagaauaauggcaccu

SEQ ID NO: 580126 - RNA, 19 nt, Artificial Sequence
  Description of Artificial Sequence: Synthetic oligonucleotide
cacgugaccuuuaaaacuu

SEQ ID NO: 580127 - RNA, 19 nt, Artificial Sequence
  Description of Artificial Sequence: Synthetic oligonucleotide
acguguucccauagagcuc

SEQ ID NO: 580128 - RNA, 19 nt, Artificial Sequence
  Description of Artificial Sequence: Synthetic oligonucleotide
caguuuugaguacggugga

SEQ ID NO: 580129 - RNA, 19 nt, Artificial Sequence
  Description of Artificial Sequence: Synthetic oligonucleotide
acgugaccuuuaaaacuuc

SEQ ID NO: 580130 - RNA, 19 nt, Artificial Sequence
  Description of Artificial Sequence: Synthetic oligonucleotide
auuaaccauuugagaacga

SEQ ID NO: 580131 - RNA, 19 nt, Artificial Sequence
  Description of Artificial Sequence: Synthetic oligonucleotide
gggaugcucggcaacauga

SEQ ID NO: 580132 - RNA, 19 nt, Artificial Sequence
  Description of Artificial Sequence: Synthetic oligonucleotide
aguuuugaguacgguggau

SEQ ID NO: 580133 - RNA, 19 nt, Artificial Sequence
  Description of Artificial Sequence: Synthetic oligonucleotide
uggguguaccaugccacaa

SEQ ID NO: 580134 - RNA, 19 nt, Artificial Sequence
  Description of Artificial Sequence: Synthetic oligonucleotide
ccaccucucgagcaugucc

SEQ ID NO: 580135 - RNA, 19 nt, Artificial Sequence
  Description of Artificial Sequence: Synthetic oligonucleotide
ucgugugugugggcuaggu

SEQ ID NO: 580136 - RNA, 19 nt, Artificial Sequence
  Description of Artificial Sequence: Synthetic oligonucleotide
gguggauccgcccuucuua

SEQ ID NO: 580137 - RNA, 19 nt, Artificial Sequence
  Description of Artificial Sequence: Synthetic oligonucleotide
gcgauggcauccauggcag

SEQ ID NO: 580138 - RNA, 19 nt, Artificial Sequence
  Description of Artificial Sequence: Synthetic oligonucleotide
guagcagaucccaggaugu

SEQ ID NO: 580139 - RNA, 19 nt, Artificial Sequence
  Description of Artificial Sequence: Synthetic oligonucleotide
auaccacugcuucccggau

SEQ ID NO: 580140 - RNA, 19 nt, Artificial Sequence
  Description of Artificial Sequence: Synthetic oligonucleotide
uucgcacacgugugccaga

SEQ ID NO: 580141 - RNA, 19 nt, Artificial Sequence
  Description of Artificial Sequence: Synthetic oligonucleotide
cauuguuuucacgaucacu

SEQ ID NO: 580142 - RNA, 19 nt, Artificial Sequence
  Description of Artificial Sequence: Synthetic oligonucleotide
gucauuuacgaugcugggu

SEQ ID NO: 580143 - RNA, 19 nt, Artificial Sequence
  Description of Artificial Sequence: Synthetic oligonucleotide
ccauagagcuccucgguca

SEQ ID NO: 580144 - RNA, 19 nt, Artificial Sequence
  Description of Artificial Sequence: Synthetic oligonucleotide
ucgcacacgugugccagaa

SEQ ID NO: 580145 - RNA, 19 nt, Artificial Sequence
  Description of Artificial Sequence: Synthetic oligonucleotide
uugccaccaggauguaguu

SEQ ID NO: 580146 - RNA, 19 nt, Artificial Sequence
  Description of Artificial Sequence: Synthetic oligonucleotide
uauuggccauuggccaccu

SEQ ID NO: 580147 - RNA, 19 nt, Artificial Sequence
  Description of Artificial Sequence: Synthetic oligonucleotide
auccgcccuucuuauccgu

SEQ ID NO: 580148 - RNA, 19 nt, Artificial Sequence
  Description of Artificial Sequence: Synthetic oligonucleotide
aucuuccucacgugaccuu

SEQ ID NO: 580149 - RNA, 19 nt, Artificial Sequence
  Description of Artificial Sequence: Synthetic oligonucleotide
uugcucgaaccacgauguc

SEQ ID NO: 580150 - RNA, 19 nt, Artificial Sequence
  Description of Artificial Sequence: Synthetic oligonucleotide
gcgaaagcaauaguuuuaa

SEQ ID NO: 580151 - RNA, 19 nt, Artificial Sequence
  Description of Artificial Sequence: Synthetic oligonucleotide
uggccaccuuuucaacgua

SEQ ID NO: 580152 - RNA, 19 nt, Artificial Sequence
  Description of Artificial Sequence: Synthetic oligonucleotide
ccauacugaaugaagcacu

SEQ ID NO: 580153 - RNA, 19 nt, Artificial Sequence
  Description of Artificial Sequence: Synthetic oligonucleotide
gguaaggaacugaugauuu

SEQ ID NO: 580154 - RNA, 19 nt, Artificial Sequence
  Description of Artificial Sequence: Synthetic oligonucleotide
caccucgauugaugcuggc

SEQ ID NO: 580155 - RNA, 19 nt, Artificial Sequence
  Description of Artificial Sequence: Synthetic oligonucleotide
gaaccagaaucacgguuuu

SEQ ID NO: 580156 - RNA, 19 nt, Artificial Sequence
  Description of Artificial Sequence: Synthetic oligonucleotide
gagcucacgccggcggaug

SEQ ID NO: 580157 - RNA, 19 nt, Artificial Sequence
  Description of Artificial Sequence: Synthetic oligonucleotide
gcucuagcuuucccggcug

SEQ ID NO: 580158 - RNA, 19 nt, Artificial Sequence
  Description of Artificial Sequence: Synthetic oligonucleotide
caccaucgugugugugggc

SEQ ID NO: 580159 - RNA, 19 nt, Artificial Sequence
  Description of Artificial Sequence: Synthetic oligonucleotide
ccgcccuucuuauccgugg

SEQ ID NO: 580160 - RNA, 19 nt, Artificial Sequence
  Description of Artificial Sequence: Synthetic oligonucleotide
gcugaaacguguucccaua

SEQ ID NO: 580161 - RNA, 19 nt, Artificial Sequence
  Description of Artificial Sequence: Synthetic oligonucleotide
caugugcgaaagcaauagu

SEQ ID NO: 580162 - RNA, 19 nt, Artificial Sequence
  Description of Artificial Sequence: Synthetic oligonucleotide
gcaccucgauugaugcugg

SEQ ID NO: 580163 - RNA, 19 nt, Artificial Sequence
  Description of Artificial Sequence: Synthetic oligonucleotide
ggcuagguauaccacugcu

SEQ ID NO: 580164 - RNA, 19 nt, Artificial Sequence
  Description of Artificial Sequence: Synthetic oligonucleotide
uuuuaccaucuggcuggaa

SEQ ID NO: 580165 - RNA, 19 nt, Artificial Sequence
  Description of Artificial Sequence: Synthetic oligonucleotide
caacccgcucuauaagggu

SEQ ID NO: 580166 - RNA, 19 nt, Artificial Sequence
  Description of Artificial Sequence: Synthetic oligonucleotide
gugucgagucaugugcgaa

SEQ ID NO: 580167 - RNA, 19 nt, Artificial Sequence
  Description of Artificial Sequence: Synthetic oligonucleotide
caaaugugcuuugcucgaa

SEQ ID NO: 580168 - RNA, 19 nt, Artificial Sequence
  Description of Artificial Sequence: Synthetic oligonucleotide
caugaagcucuccauccuu

SEQ ID NO: 580169 - RNA, 19 nt, Artificial Sequence
  Description of Artificial Sequence: Synthetic oligonucleotide
agagcucacgccggcggau

SEQ ID NO: 580170 - RNA, 19 nt, Artificial Sequence
  Description of Artificial Sequence: Synthetic oligonucleotide
guggauccgcccuucuuau

SEQ ID NO: 580171 - RNA, 19 nt, Artificial Sequence
  Description of Artificial Sequence: Synthetic oligonucleotide
gucaucccauuuggguuuc

SEQ ID NO: 580172 - RNA, 19 nt, Artificial Sequence
  Description of Artificial Sequence: Synthetic oligonucleotide
ccaacguuggaaucaggcu

SEQ ID NO: 580173 - RNA, 19 nt, Artificial Sequence
  Description of Artificial Sequence: Synthetic oligonucleotide
ccacucuggcaccaucgug

SEQ ID NO: 580174 - RNA, 19 nt, Artificial Sequence
  Description of Artificial Sequence: Synthetic oligonucleotide
acccgcucuauaaggguuu

SEQ ID NO: 580175 - RNA, 19 nt, Artificial Sequence
  Description of Artificial Sequence: Synthetic oligonucleotide
cucacgccggcggauggca

SEQ ID NO: 580176 - RNA, 19 nt, Artificial Sequence
  Description of Artificial Sequence: Synthetic oligonucleotide
ggguaaggaacugaugauu

SEQ ID NO: 580177 - RNA, 19 nt, Artificial Sequence
  Description of Artificial Sequence: Synthetic oligonucleotide
ccacgauggcugaugccuc

SEQ ID NO: 580178 - RNA, 19 nt, Artificial Sequence
  Description of Artificial Sequence: Synthetic oligonucleotide
cccagaguugggugaucug

SEQ ID NO: 580179 - RNA, 19 nt, Artificial Sequence
  Description of Artificial Sequence: Synthetic oligonucleotide
ggaugcucggcaacaugaa

SEQ ID NO: 580180 - RNA, 19 nt, Artificial Sequence
  Description of Artificial Sequence: Synthetic oligonucleotide
cuacuccuuugcuggugcu

SEQ ID NO: 580181 - RNA, 19 nt, Artificial Sequence
  Description of Artificial Sequence: Synthetic oligonucleotide
acguuggaaucaggcuuuu

SEQ ID NO: 580182 - RNA, 19 nt, Artificial Sequence
  Description of Artificial Sequence: Synthetic oligonucleotide
cugcuaucugugguuuacu

SEQ ID NO: 580183 - RNA, 19 nt, Artificial Sequence
  Description of Artificial Sequence: Synthetic oligonucleotide
caccaccucucgagcaugu

SEQ ID NO: 580184 - RNA, 19 nt, Artificial Sequence
  Description of Artificial Sequence: Synthetic oligonucleotide
gccggcggauggcaguguc

SEQ ID NO: 580185 - RNA, 19 nt, Artificial Sequence
  Description of Artificial Sequence: Synthetic oligonucleotide
guacgguggauccgcccuu

SEQ ID NO: 580186 - RNA, 19 nt, Artificial Sequence
  Description of Artificial Sequence: Synthetic oligonucleotide
gcgccuaugcaguuagcuu

SEQ ID NO: 580187 - RNA, 19 nt, Artificial Sequence
  Description of Artificial Sequence: Synthetic oligonucleotide
gcucacgccggcggauggc

SEQ ID NO: 580188 - RNA, 19 nt, Artificial Sequence
  Description of Artificial Sequence: Synthetic oligonucleotide
ggugaucugcugacuugua

SEQ ID NO: 580189 - RNA, 19 nt, Artificial Sequence
  Description of Artificial Sequence: Synthetic oligonucleotide
cgccuaugcaguuagcuuu

SEQ ID NO: 580190 - RNA, 19 nt, Artificial Sequence
  Description of Artificial Sequence: Synthetic oligonucleotide
cgugaccuuuaaaacuucu

SEQ ID NO: 580191 - RNA, 19 nt, Artificial Sequence
  Description of Artificial Sequence: Synthetic oligonucleotide
gcucggcaacaugaagcuc

SEQ ID NO: 580192 - RNA, 19 nt, Artificial Sequence
  Description of Artificial Sequence: Synthetic oligonucleotide
cgugucgagucaugugcga

SEQ ID NO: 580193 - RNA, 19 nt, Artificial Sequence
  Description of Artificial Sequence: Synthetic oligonucleotide
ccggauggcuucaauuaau

SEQ ID NO: 580194 - RNA, 19 nt, Artificial Sequence
  Description of Artificial Sequence: Synthetic oligonucleotide
gcuuugcucgaaccacgau

SEQ ID NO: 580195 - RNA, 19 nt, Artificial Sequence
  Description of Artificial Sequence: Synthetic oligonucleotide
caucccauuuggguuucuu

SEQ ID NO: 580196 - RNA, 19 nt, Artificial Sequence
  Description of Artificial Sequence: Synthetic oligonucleotide
cucuggcaccaucgugugu

SEQ ID NO: 580197 - RNA, 19 nt, Artificial Sequence
  Description of Artificial Sequence: Synthetic oligonucleotide
ccaucgugugugugggcua

SEQ ID NO: 580198 - RNA, 19 nt, Artificial Sequence
  Description of Artificial Sequence: Synthetic oligonucleotide
gggccaucggagucagaau

SEQ ID NO: 580199 - RNA, 19 nt, Artificial Sequence
  Description of Artificial Sequence: Synthetic oligonucleotide
gccuaugcaguuagcuuuu

SEQ ID NO: 580200 - RNA, 19 nt, Artificial Sequence
  Description of Artificial Sequence: Synthetic oligonucleotide
ggauggcagugucuuucuu

SEQ ID NO: 580201 - RNA, 19 nt, Artificial Sequence
  Description of Artificial Sequence: Synthetic oligonucleotide
ggaccagggagugcuuaau

SEQ ID NO: 580202 - RNA, 19 nt, Artificial Sequence
  Description of Artificial Sequence: Synthetic oligonucleotide
cguuggaaucaggcuuuuc

SEQ ID NO: 580203 - RNA, 19 nt, Artificial Sequence
  Description of Artificial Sequence: Synthetic oligonucleotide
cagcgcgccuaugcaguua

SEQ ID NO: 580204 - RNA, 19 nt, Artificial Sequence
  Description of Artificial Sequence: Synthetic oligonucleotide
cgcgccuaugcaguuagcu

SEQ ID NO: 580205 - RNA, 19 nt, Artificial Sequence
  Description of Artificial Sequence: Synthetic oligonucleotide
cggcaacaugaagcucucc

SEQ ID NO: 580206 - RNA, 19 nt, Artificial Sequence
  Description of Artificial Sequence: Synthetic oligonucleotide
gcgcgccuaugcaguuagc

SEQ ID NO: 580207 - RNA, 19 nt, Artificial Sequence
  Description of Artificial Sequence: Synthetic oligonucleotide
ccacgaugucauaguuggu

SEQ ID NO: 580208 - RNA, 19 nt, Artificial Sequence
  Description of Artificial Sequence: Synthetic oligonucleotide
ggcggauggcagugucuuu

SEQ ID NO: 580209 - RNA, 19 nt, Artificial Sequence
  Description of Artificial Sequence: Synthetic oligonucleotide
ccggcggauggcagugucu

SEQ ID NO: 580210 - RNA, 19 nt, Artificial Sequence
  Description of Artificial Sequence: Synthetic oligonucleotide
ccagcgcgccuaugcaguu

SEQ ID NO: 580211 - RNA, 19 nt, Artificial Sequence
  Description of Artificial Sequence: Synthetic oligonucleotide
cccgcucuauaaggguuuu

SEQ ID NO: 580212 - RNA, 19 nt, Artificial Sequence
  Description of Artificial Sequence: Synthetic oligonucleotide
aaauggauagacuggaagg

SEQ ID NO: 580213 - RNA, 19 nt, Artificial Sequence
  Description of Artificial Sequence: Synthetic oligonucleotide
gaucuaaagaucuagggag

SEQ ID NO: 580214 - RNA, 19 nt, Artificial Sequence
  Description of Artificial Sequence: Synthetic oligonucleotide
uaucccauuagcuaggugg

SEQ ID NO: 580215 - RNA, 19 nt, Artificial Sequence
  Description of Artificial Sequence: Synthetic oligonucleotide
uaacaguauacucaggugg

SEQ ID NO: 580216 - RNA, 19 nt, Artificial Sequence
  Description of Artificial Sequence: Synthetic oligonucleotide
aacacacacacacacacac

SEQ ID NO: 580217 - RNA, 19 nt, Artificial Sequence
  Description of Artificial Sequence: Synthetic oligonucleotide
gaaaacgucauuuaaaguc

SEQ ID NO: 580218 - RNA, 19 nt, Artificial Sequence
  Description of Artificial Sequence: Synthetic oligonucleotide
aaaacgucauuuaaagucc

SEQ ID NO: 580219 - RNA, 19 nt, Artificial Sequence
  Description of Artificial Sequence: Synthetic oligonucleotide
cacuuaucuauuaagaggg

SEQ ID NO: 580220 - RNA, 19 nt, Artificial Sequence
  Description of Artificial Sequence: Synthetic oligonucleotide
uagucaugaauuaagaaca

SEQ ID NO: 580221 - RNA, 19 nt, Artificial Sequence
  Description of Artificial Sequence: Synthetic oligonucleotide
acucuaauccuauuuaugg

SEQ ID NO: 580222 - RNA, 19 nt, Artificial Sequence
  Description of Artificial Sequence: Synthetic oligonucleotide
gaaauagccagcaaggccg

SEQ ID NO: 580223 - RNA, 19 nt, Artificial Sequence
  Description of Artificial Sequence: Synthetic oligonucleotide
cauaagaacacacacacac

SEQ ID NO: 580224 - RNA, 19 nt, Artificial Sequence
  Description of Artificial Sequence: Synthetic oligonucleotide
ugaugaaauggauagacug

SEQ ID NO: 580225 - RNA, 19 nt, Artificial Sequence
  Description of Artificial Sequence: Synthetic oligonucleotide
agaacacacacacacacac

SEQ ID NO: 580226 - RNA, 19 nt, Artificial Sequence
  Description of Artificial Sequence: Synthetic oligonucleotide
ucuauuaagagggugacug

SEQ ID NO: 580227 - RNA, 19 nt, Artificial Sequence
  Description of Artificial Sequence: Synthetic oligonucleotide
uuaucuauuaagaggguga

SEQ ID NO: 580228 - RNA, 19 nt, Artificial Sequence
  Description of Artificial Sequence: Synthetic oligonucleotide
aaguacacauaaaaguagc

SEQ ID NO: 580229 - RNA, 19 nt, Artificial Sequence
  Description of Artificial Sequence: Synthetic oligonucleotide
ugaucuaaagaucuaggga

SEQ ID NO: 580230 - RNA, 19 nt, Artificial Sequence
  Description of Artificial Sequence: Synthetic oligonucleotide
ugugaucuaaagaucuagg

SEQ ID NO: 580231 - RNA, 19 nt, Artificial Sequence
  Description of Artificial Sequence: Synthetic oligonucleotide
uaagaacacacacacacac

SEQ ID NO: 580232 - RNA, 19 nt, Artificial Sequence
  Description of Artificial Sequence: Synthetic oligonucleotide
uuacccauaaauaaaguua

SEQ ID NO: 580233 - RNA, 19 nt, Artificial Sequence
  Description of Artificial Sequence: Synthetic oligonucleotide
aggauaaacauuauccacc

SEQ ID NO: 580234 - RNA, 19 nt, Artificial Sequence
  Description of Artificial Sequence: Synthetic oligonucleotide
uccuuuaguacagaguucg

SEQ ID NO: 580235 - RNA, 19 nt, Artificial Sequence
  Description of Artificial Sequence: Synthetic oligonucleotide
auacuugaagaacucauag

SEQ ID NO: 580236 - RNA, 19 nt, Artificial Sequence
  Description of Artificial Sequence: Synthetic oligonucleotide
uuauccaccuauuuuagac

SEQ ID NO: 580237 - RNA, 19 nt, Artificial Sequence
  Description of Artificial Sequence: Synthetic oligonucleotide
agcuauauuuaauccauuc

SEQ ID NO: 580238 - RNA, 19 nt, Artificial Sequence
  Description of Artificial Sequence: Synthetic oligonucleotide
aaaccuuacuagcauagca

SEQ ID NO: 580239 - RNA, 19 nt, Artificial Sequence
  Description of Artificial Sequence: Synthetic oligonucleotide
ucauagacggaccaggaga

SEQ ID NO: 580240 - RNA, 19 nt, Artificial Sequence
  Description of Artificial Sequence: Synthetic oligonucleotide
ucuaauccuauuuauggac

SEQ ID NO: 580241 - RNA, 19 nt, Artificial Sequence
  Description of Artificial Sequence: Synthetic oligonucleotide
uucguaaggaaauacuuga

SEQ ID NO: 580242 - RNA, 19 nt, Artificial Sequence
  Description of Artificial Sequence: Synthetic oligonucleotide
aacaguauacucagguggc

SEQ ID NO: 580243 - RNA, 19 nt, Artificial Sequence
  Description of Artificial Sequence: Synthetic oligonucleotide
aguuguacaucuguaagcg

SEQ ID NO: 580244 - RNA, 19 nt, Artificial Sequence
  Description of Artificial Sequence: Synthetic oligonucleotide
uuuagucuauaauaaauua

SEQ ID NO: 580245 - RNA, 19 nt, Artificial Sequence
  Description of Artificial Sequence: Synthetic oligonucleotide
agguacaucaucccaacuc

SEQ ID NO: 580246 - RNA, 19 nt, Artificial Sequence
  Description of Artificial Sequence: Synthetic oligonucleotide
gugaucuaaagaucuaggg

SEQ ID NO: 580247 - RNA, 19 nt, Artificial Sequence
  Description of Artificial Sequence: Synthetic oligonucleotide
uauaacuccuguagaaggc

SEQ ID NO: 580248 - RNA, 19 nt, Artificial Sequence
  Description of Artificial Sequence: Synthetic oligonucleotide
aguguuacaacuguagcag

SEQ ID NO: 580249 - RNA, 19 nt, Artificial Sequence
  Description of Artificial Sequence: Synthetic oligonucleotide
uggcuguuaagacaugggg

SEQ ID NO: 580250 - RNA, 19 nt, Artificial Sequence
  Description of Artificial Sequence: Synthetic oligonucleotide
aaaagcaacuucucauucu

SEQ ID NO: 580251 - RNA, 19 nt, Artificial Sequence
  Description of Artificial Sequence: Synthetic oligonucleotide
uacccauaaauaaaguuaa

SEQ ID NO: 580252 - RNA, 19 nt, Artificial Sequence
  Description of Artificial Sequence: Synthetic oligonucleotide
uuuacugugucaccgcucu

SEQ ID NO: 580253 - RNA, 19 nt, Artificial Sequence
  Description of Artificial Sequence: Synthetic oligonucleotide
ugcggugugaucuaaagau

SEQ ID NO: 580254 - RNA, 19 nt, Artificial Sequence
  Description of Artificial Sequence: Synthetic oligonucleotide
uuaacaguauacucaggug

SEQ ID NO: 580255 - RNA, 19 nt, Artificial Sequence
  Description of Artificial Sequence: Synthetic oligonucleotide
gacacaauuacccauaaau

SEQ ID NO: 580256 - RNA, 19 nt, Artificial Sequence
  Description of Artificial Sequence: Synthetic oligonucleotide
guccggauacaauugaggg

SEQ ID NO: 580257 - RNA, 19 nt, Artificial Sequence
  Description of Artificial Sequence: Synthetic oligonucleotide
uguuacaacuguagcagca

SEQ ID NO: 580258 - RNA, 19 nt, Artificial Sequence
  Description of Artificial Sequence: Synthetic oligonucleotide
aauuggcucacaaguacac

SEQ ID NO: 580259 - RNA, 19 nt, Artificial Sequence
  Description of Artificial Sequence: Synthetic oligonucleotide
uucauuacugcaucgugga

SEQ ID NO: 580260 - RNA, 19 nt, Artificial Sequence
  Description of Artificial Sequence: Synthetic oligonucleotide
aguucggcucuccagcugc

SEQ ID NO: 580261 - RNA, 19 nt, Artificial Sequence
  Description of Artificial Sequence: Synthetic oligonucleotide
ucagcugugugguauaacu

SEQ ID NO: 580262 - RNA, 19 nt, Artificial Sequence
  Description of Artificial Sequence: Synthetic oligonucleotide
uauagucaugaauuaagaa

SEQ ID NO: 580263 - RNA, 19 nt, Artificial Sequence
  Description of Artificial Sequence: Synthetic oligonucleotide
gaguuguacaucuguaagc

SEQ ID NO: 580264 - RNA, 19 nt, Artificial Sequence
  Description of Artificial Sequence: Synthetic oligonucleotide
agauuguggcuguuaagac

SEQ ID NO: 580265 - RNA, 19 nt, Artificial Sequence
  Description of Artificial Sequence: Synthetic oligonucleotide
uacaacuguagcagcacag

SEQ ID NO: 580266 - RNA, 19 nt, Artificial Sequence
  Description of Artificial Sequence: Synthetic oligonucleotide
aaccuuacuagcauagcag

SEQ ID NO: 580267 - RNA, 19 nt, Artificial Sequence
  Description of Artificial Sequence: Synthetic oligonucleotide
acaauugagggcugacugg

SEQ ID NO: 580268 - RNA, 19 nt, Artificial Sequence
  Description of Artificial Sequence: Synthetic oligonucleotide
auaacuccuguagaaggcc

SEQ ID NO: 580269 - RNA, 19 nt, Artificial Sequence
  Description of Artificial Sequence: Synthetic oligonucleotide
auacauggcaugugcgggc

SEQ ID NO: 580270 - RNA, 19 nt, Artificial Sequence
  Description of Artificial Sequence: Synthetic oligonucleotide
uuuuagacuggguaauggu

SEQ ID NO: 580271 - RNA, 19 nt, Artificial Sequence
  Description of Artificial Sequence: Synthetic oligonucleotide
auuacccauaaauaaaguu

SEQ ID NO: 580272 - RNA, 19 nt, Artificial Sequence
  Description of Artificial Sequence: Synthetic oligonucleotide
cacacacacacacacacag

SEQ ID NO: 580273 - RNA, 19 nt, Artificial Sequence
  Description of Artificial Sequence: Synthetic oligonucleotide
cacaauuacccauaaauaa

SEQ ID NO: 580274 - RNA, 19 nt, Artificial Sequence
  Description of Artificial Sequence: Synthetic oligonucleotide
uauacuacagcuccccaua

SEQ ID NO: 580275 - RNA, 19 nt, Artificial Sequence
  Description of Artificial Sequence: Synthetic oligonucleotide
auucauuacugcaucgugg

SEQ ID NO: 580276 - RNA, 19 nt, Artificial Sequence
  Description of Artificial Sequence: Synthetic oligonucleotide
acacagcucaaguauuaac

SEQ ID NO: 580277 - RNA, 19 nt, Artificial Sequence
  Description of Artificial Sequence: Synthetic oligonucleotide
aauauacuacagcucccca

SEQ ID NO: 580278 - RNA, 19 nt, Artificial Sequence
  Description of Artificial Sequence: Synthetic oligonucleotide
cuucuuuacugugucaccg

SEQ ID NO: 580279 - RNA, 19 nt, Artificial Sequence
  Description of Artificial Sequence: Synthetic oligonucleotide
aaagcuacacuccccuaga

SEQ ID NO: 580280 - RNA, 19 nt, Artificial Sequence
  Description of Artificial Sequence: Synthetic oligonucleotide
uuacuagcauagcagugug

SEQ ID NO: 580281 - RNA, 19 nt, Artificial Sequence
  Description of Artificial Sequence: Synthetic oligonucleotide
aguaggguggccauacccc

SEQ ID NO: 580282 - RNA, 19 nt, Artificial Sequence
  Description of Artificial Sequence: Synthetic oligonucleotide
caaccgaccauugacauug

SEQ ID NO: 580283 - RNA, 19 nt, Artificial Sequence
  Description of Artificial Sequence: Synthetic oligonucleotide
ucucguaguccuccgaccc

SEQ ID NO: 580284 - RNA, 19 nt, Artificial Sequence
  Description of Artificial Sequence: Synthetic oligonucleotide
ugaaaacgucauuuaaagu

SEQ ID NO: 580285 - RNA, 19 nt, Artificial Sequence
  Description of Artificial Sequence: Synthetic oligonucleotide
ucugccggauucauuacug

SEQ ID NO: 580286 - RNA, 19 nt, Artificial Sequence
  Description of Artificial Sequence: Synthetic oligonucleotide
aaacauuauccaccuauuu

SEQ ID NO: 580287 - RNA, 19 nt, Artificial Sequence
  Description of Artificial Sequence: Synthetic oligonucleotide
gaguccaacggguacauga

SEQ ID NO: 580288 - RNA, 19 nt, Artificial Sequence
  Description of Artificial Sequence: Synthetic oligonucleotide
ucguaggugaugaaaugga

SEQ ID NO: 580289 - RNA, 19 nt, Artificial Sequence
  Description of Artificial Sequence: Synthetic oligonucleotide
uaugagaacaaggggugag

SEQ ID NO: 580290 - RNA, 19 nt, Artificial Sequence
  Description of Artificial Sequence: Synthetic oligonucleotide
aacucuaauccuauuuaug

SEQ ID NO: 580291 - RNA, 19 nt, Artificial Sequence
  Description of Artificial Sequence: Synthetic oligonucleotide
cauuauccaccuauuuuag

SEQ ID NO: 580292 - RNA, 19 nt, Artificial Sequence
  Description of Artificial Sequence: Synthetic oligonucleotide
uuagcuagguggcuguuuc

SEQ ID NO: 580293 - RNA, 19 nt, Artificial Sequence
  Description of Artificial Sequence: Synthetic oligonucleotide
gauuguggcuguuaagaca

SEQ ID NO: 580294 - RNA, 19 nt, Artificial Sequence
  Description of Artificial Sequence: Synthetic oligonucleotide
aaugacucgagcguggaua

SEQ ID NO: 580295 - RNA, 19 nt, Artificial Sequence
  Description of Artificial Sequence: Synthetic oligonucleotide
ugguauaacuccuguagaa

SEQ ID NO: 580296 - RNA, 19 nt, Artificial Sequence
  Description of Artificial Sequence: Synthetic oligonucleotide
accuauuuuagacugggua

SEQ ID NO: 580297 - RNA, 19 nt, Artificial Sequence
  Description of Artificial Sequence: Synthetic oligonucleotide
gauaccuuugaaauagcca

SEQ ID NO: 580298 - RNA, 19 nt, Artificial Sequence
  Description of Artificial Sequence: Synthetic oligonucleotide
aacuguagcagcacagcag

SEQ ID NO: 580299 - RNA, 19 nt, Artificial Sequence
  Description of Artificial Sequence: Synthetic oligonucleotide
gaagauuguggcuguuaag

SEQ ID NO: 580300 - RNA, 19 nt, Artificial Sequence
  Description of Artificial Sequence: Synthetic oligonucleotide
uuucgcaguggguugaccu

SEQ ID NO: 580301 - RNA, 19 nt, Artificial Sequence
  Description of Artificial Sequence: Synthetic oligonucleotide
uacacuccccuagagacag

SEQ ID NO: 580302 - RNA, 19 nt, Artificial Sequence
  Description of Artificial Sequence: Synthetic oligonucleotide
cucguaggugaugaaaugg

SEQ ID NO: 580303 - RNA, 19 nt, Artificial Sequence
  Description of Artificial Sequence: Synthetic oligonucleotide
cuuaucuauuaagagggug

SEQ ID NO: 580304 - RNA, 19 nt, Artificial Sequence
  Description of Artificial Sequence: Synthetic oligonucleotide
uuggagauacagccuuggg

SEQ ID NO: 580305 - RNA, 19 nt, Artificial Sequence
  Description of Artificial Sequence: Synthetic oligonucleotide
aguccuuuucauguuuucg

SEQ ID NO: 580306 - RNA, 19 nt, Artificial Sequence
  Description of Artificial Sequence: Synthetic oligonucleotide
uuacaacuguagcagcaca

SEQ ID NO: 580307 - RNA, 19 nt, Artificial Sequence
  Description of Artificial Sequence: Synthetic oligonucleotide
uccguuuguaugaucuucu

SEQ ID NO: 580308 - RNA, 19 nt, Artificial Sequence
  Description of Artificial Sequence: Synthetic oligonucleotide
aauuacccauaaauaaagu

SEQ ID NO: 580309 - RNA, 19 nt, Artificial Sequence
  Description of Artificial Sequence: Synthetic oligonucleotide
ucuuuacugugucaccgcu

SEQ ID NO: 580310 - RNA, 19 nt, Artificial Sequence
  Description of Artificial Sequence: Synthetic oligonucleotide
gaaggguauguucaugguc

SEQ ID NO: 580311 - RNA, 19 nt, Artificial Sequence
  Description of Artificial Sequence: Synthetic oligonucleotide
gaggcaggaacaaaagaug

SEQ ID NO: 580312 - RNA, 19 nt, Artificial Sequence
  Description of Artificial Sequence: Synthetic oligonucleotide
uacaucaucccaacucuaa

SEQ ID NO: 580313 - RNA, 19 nt, Artificial Sequence
  Description of Artificial Sequence: Synthetic oligonucleotide
accuuacuagcauagcagu

SEQ ID NO: 580314 - RNA, 19 nt, Artificial Sequence
  Description of Artificial Sequence: Synthetic oligonucleotide
uaucuauuaagagggugac

SEQ ID NO: 580315 - RNA, 19 nt, Artificial Sequence
  Description of Artificial Sequence: Synthetic oligonucleotide
uccccauccauccuccggc

SEQ ID NO: 580316 - RNA, 19 nt, Artificial Sequence
  Description of Artificial Sequence: Synthetic oligonucleotide
gcuacacuccccuagagac

SEQ ID NO: 580317 - RNA, 19 nt, Artificial Sequence
  Description of Artificial Sequence: Synthetic oligonucleotide
uguaagcguugcuucacca

SEQ ID NO: 580318 - RNA, 19 nt, Artificial Sequence
  Description of Artificial Sequence: Synthetic oligonucleotide
cuaauccuauuuauggaca

SEQ ID NO: 580319 - RNA, 19 nt, Artificial Sequence
  Description of Artificial Sequence: Synthetic oligonucleotide
uccugcguguugaggaggg

SEQ ID NO: 580320 - RNA, 19 nt, Artificial Sequence
  Description of Artificial Sequence: Synthetic oligonucleotide
auauagucaugaauuaaga

SEQ ID NO: 580321 - RNA, 19 nt, Artificial Sequence
  Description of Artificial Sequence: Synthetic oligonucleotide
uucuuuacugugucaccgc

SEQ ID NO: 580322 - RNA, 19 nt, Artificial Sequence
  Description of Artificial Sequence: Synthetic oligonucleotide
auacucagguggcaugguc

SEQ ID NO: 580323 - RNA, 19 nt, Artificial Sequence
  Description of Artificial Sequence: Synthetic oligonucleotide
auaaaaccuuacuagcaua

SEQ ID NO: 580324 - RNA, 19 nt, Artificial Sequence
  Description of Artificial Sequence: Synthetic oligonucleotide
uauuuuagacuggguaaug

SEQ ID NO: 580325 - RNA, 19 nt, Artificial Sequence
  Description of Artificial Sequence: Synthetic oligonucleotide
cagaguucggcucuccagc

SEQ ID NO: 580326 - RNA, 19 nt, Artificial Sequence
  Description of Artificial Sequence: Synthetic oligonucleotide
ggugaugaaauggauagac

SEQ ID NO: 580327 - RNA, 19 nt, Artificial Sequence
  Description of Artificial Sequence: Synthetic oligonucleotide
gagggugacugccauggcc

SEQ ID NO: 580328 - RNA, 19 nt, Artificial Sequence
  Description of Artificial Sequence: Synthetic oligonucleotide
auauacuacagcuccccau

SEQ ID NO: 580329 - RNA, 19 nt, Artificial Sequence
  Description of Artificial Sequence: Synthetic oligonucleotide
uuaagagggugacugccau

SEQ ID NO: 580330 - RNA, 19 nt, Artificial Sequence
  Description of Artificial Sequence: Synthetic oligonucleotide
uguagcagcacagcagaca

SEQ ID NO: 580331 - RNA, 19 nt, Artificial Sequence
  Description of Artificial Sequence: Synthetic oligonucleotide
gagaugaugugagacugug

SEQ ID NO: 580332 - RNA, 19 nt, Artificial Sequence
  Description of Artificial Sequence: Synthetic oligonucleotide
uccccuagagacaggagaa

SEQ ID NO: 580333 - RNA, 19 nt, Artificial Sequence
  Description of Artificial Sequence: Synthetic oligonucleotide
aagcuacacuccccuagag

SEQ ID NO: 580334 - RNA, 19 nt, Artificial Sequence
  Description of Artificial Sequence: Synthetic oligonucleotide
ucauuacugcaucguggag

SEQ ID NO: 580335 - RNA, 19 nt, Artificial Sequence
  Description of Artificial Sequence: Synthetic oligonucleotide
gugugaucuaaagaucuag

SEQ ID NO: 580336 - RNA, 19 nt, Artificial Sequence
  Description of Artificial Sequence: Synthetic oligonucleotide
auuauccaccuauuuuaga

SEQ ID NO: 580337 - RNA, 19 nt, Artificial Sequence
  Description of Artificial Sequence: Synthetic oligonucleotide
ucgagcguggauaccuuug

SEQ ID NO: 580338 - RNA, 19 nt, Artificial Sequence
  Description of Artificial Sequence: Synthetic oligonucleotide
ucguaaggaaauacuugaa

SEQ ID NO: 580339 - RNA, 19 nt, Artificial Sequence
  Description of Artificial Sequence: Synthetic oligonucleotide
auguuuucguagcaggcaa

SEQ ID NO: 580340 - RNA, 19 nt, Artificial Sequence
  Description of Artificial Sequence: Synthetic oligonucleotide
cacacacacacacagcuca

SEQ ID NO: 580341 - RNA, 19 nt, Artificial Sequence
  Description of Artificial Sequence: Synthetic oligonucleotide
uggaccacucuuaucccac

SEQ ID NO: 580342 - RNA, 19 nt, Artificial Sequence
  Description of Artificial Sequence: Synthetic oligonucleotide
gggaucuggauucaaacuc

SEQ ID NO: 580343 - RNA, 19 nt, Artificial Sequence
  Description of Artificial Sequence: Synthetic oligonucleotide
uucucguaguccuccgacc

SEQ ID NO: 580344 - RNA, 19 nt, Artificial Sequence
  Description of Artificial Sequence: Synthetic oligonucleotide
acuagcauagcaguguguu

SEQ ID NO: 580345 - RNA, 19 nt, Artificial Sequence
  Description of Artificial Sequence: Synthetic oligonucleotide
uucugccggauucauuacu

SEQ ID NO: 580346 - RNA, 19 nt, Artificial Sequence
  Description of Artificial Sequence: Synthetic oligonucleotide
cucuaauccuauuuaugga

SEQ ID NO: 580347 - RNA, 19 nt, Artificial Sequence
  Description of Artificial Sequence: Synthetic oligonucleotide
gauacaauugagggcugac

SEQ ID NO: 580348 - RNA, 19 nt, Artificial Sequence
  Description of Artificial Sequence: Synthetic oligonucleotide
aguacacauaaaaguagcu

SEQ ID NO: 580349 - RNA, 19 nt, Artificial Sequence
  Description of Artificial Sequence: Synthetic oligonucleotide
ggcgcgagcacccugcagg

SEQ ID NO: 580350 - RNA, 19 nt, Artificial Sequence
  Description of Artificial Sequence: Synthetic oligonucleotide
cucauagacggaccaggag

SEQ ID NO: 580351 - RNA, 19 nt, Artificial Sequence
  Description of Artificial Sequence: Synthetic oligonucleotide
aguccaacggguacaugac

SEQ ID NO: 580352 - RNA, 19 nt, Artificial Sequence
  Description of Artificial Sequence: Synthetic oligonucleotide
agcguggauaccuuugaaa

SEQ ID NO: 580353 - RNA, 19 nt, Artificial Sequence
  Description of Artificial Sequence: Synthetic oligonucleotide
ucgcaguccccauccaucc

SEQ ID NO: 580354 - RNA, 19 nt, Artificial Sequence
  Description of Artificial Sequence: Synthetic oligonucleotide
acaccguccggauacaauu

SEQ ID NO: 580355 - RNA, 19 nt, Artificial Sequence
  Description of Artificial Sequence: Synthetic oligonucleotide
aagaacacacacacacaca

SEQ ID NO: 580356 - RNA, 19 nt, Artificial Sequence
  Description of Artificial Sequence: Synthetic oligonucleotide
uucgugucuucacggaguc

SEQ ID NO: 580357 - RNA, 19 nt, Artificial Sequence
  Description of Artificial Sequence: Synthetic oligonucleotide
ccuggguaugagaacaagg

SEQ ID NO: 580358 - RNA, 19 nt, Artificial Sequence
  Description of Artificial Sequence: Synthetic oligonucleotide
guaagcguugcuucaccac

SEQ ID NO: 580359 - RNA, 19 nt, Artificial Sequence
  Description of Artificial Sequence: Synthetic oligonucleotide
ugcuuguauacuuggcuuu

SEQ ID NO: 580360 - RNA, 19 nt, Artificial Sequence
  Description of Artificial Sequence: Synthetic oligonucleotide
gguaaaugacucgagcgug

SEQ ID NO: 580361 - RNA, 19 nt, Artificial Sequence
  Description of Artificial Sequence: Synthetic oligonucleotide
cuuguauacuuggcuuugg

SEQ ID NO: 580362 - RNA, 19 nt, Artificial Sequence
  Description of Artificial Sequence: Synthetic oligonucleotide
cuagcauagcaguguguug

SEQ ID NO: 580363 - RNA, 19 nt, Artificial Sequence
  Description of Artificial Sequence: Synthetic oligonucleotide
gcaucugguaaaugacucg

SEQ ID NO: 580364 - RNA, 19 nt, Artificial Sequence
  Description of Artificial Sequence: Synthetic oligonucleotide
gaacucauagacggaccag

SEQ ID NO: 580365 - RNA, 19 nt, Artificial Sequence
  Description of Artificial Sequence: Synthetic oligonucleotide
agcuacacuccccuagaga

SEQ ID NO: 580366 - RNA, 19 nt, Artificial Sequence
  Description of Artificial Sequence: Synthetic oligonucleotide
agaaucccagccaucgcuc

SEQ ID NO: 580367 - RNA, 19 nt, Artificial Sequence
  Description of Artificial Sequence: Synthetic oligonucleotide
auaagaacacacacacaca

SEQ ID NO: 580368 - RNA, 19 nt, Artificial Sequence
  Description of Artificial Sequence: Synthetic oligonucleotide
gacccggcguccuugcugc

SEQ ID NO: 580369 - RNA, 19 nt, Artificial Sequence
  Description of Artificial Sequence: Synthetic oligonucleotide
gauagacuggaaggguaug

SEQ ID NO: 580370 - RNA, 19 nt, Artificial Sequence
  Description of Artificial Sequence: Synthetic oligonucleotide
uccccauacucagaaguca

SEQ ID NO: 580371 - RNA, 19 nt, Artificial Sequence
  Description of Artificial Sequence: Synthetic oligonucleotide
ugccgcuucguaaggaaau

SEQ ID NO: 580372 - RNA, 19 nt, Artificial Sequence
  Description of Artificial Sequence: Synthetic oligonucleotide
ggcuuugggaucuggauuc

SEQ ID NO: 580373 - RNA, 19 nt, Artificial Sequence
  Description of Artificial Sequence: Synthetic oligonucleotide
acacacacacacacacagc

SEQ ID NO: 580374 - RNA, 19 nt, Artificial Sequence
  Description of Artificial Sequence: Synthetic oligonucleotide
acggaguguuccagaaucc

SEQ ID NO: 580375 - RNA, 19 nt, Artificial Sequence
  Description of Artificial Sequence: Synthetic oligonucleotide
ccugaacauaagaacacac

SEQ ID NO: 580376 - RNA, 19 nt, Artificial Sequence
  Description of Artificial Sequence: Synthetic oligonucleotide
auacuuggcuuugggaucu

SEQ ID NO: 580377 - RNA, 19 nt, Artificial Sequence
  Description of Artificial Sequence: Synthetic oligonucleotide
ugucauguggguggacacc

SEQ ID NO: 580378 - RNA, 19 nt, Artificial Sequence
  Description of Artificial Sequence: Synthetic oligonucleotide
cuuuacugugucaccgcuc

SEQ ID NO: 580379 - RNA, 19 nt, Artificial Sequence
  Description of Artificial Sequence: Synthetic oligonucleotide
uggaguaggguggccauac

SEQ ID NO: 580380 - RNA, 19 nt, Artificial Sequence
  Description of Artificial Sequence: Synthetic oligonucleotide
aggguauguucauggucag

SEQ ID NO: 580381 - RNA, 19 nt, Artificial Sequence
  Description of Artificial Sequence: Synthetic oligonucleotide
cuguaagcguugcuucacc

SEQ ID NO: 580382 - RNA, 19 nt, Artificial Sequence
  Description of Artificial Sequence: Synthetic oligonucleotide
gacggaccaggagauggcg

SEQ ID NO: 580383 - RNA, 19 nt, Artificial Sequence
  Description of Artificial Sequence: Synthetic oligonucleotide
auuaagagggugacugcca

SEQ ID NO: 580384 - RNA, 19 nt, Artificial Sequence
  Description of Artificial Sequence: Synthetic oligonucleotide
ggucgguagguucucguag

SEQ ID NO: 580385 - RNA, 19 nt, Artificial Sequence
  Description of Artificial Sequence: Synthetic oligonucleotide
uguugaggagggucuugca

SEQ ID NO: 580386 - RNA, 19 nt, Artificial Sequence
  Description of Artificial Sequence: Synthetic oligonucleotide
cugucauguggguggacac

SEQ ID NO: 580387 - RNA, 19 nt, Artificial Sequence
  Description of Artificial Sequence: Synthetic oligonucleotide
gauacagccuugggaauga

SEQ ID NO: 580388 - RNA, 19 nt, Artificial Sequence
  Description of Artificial Sequence: Synthetic oligonucleotide
acacuggaccacucuuauc

SEQ ID NO: 580389 - RNA, 19 nt, Artificial Sequence
  Description of Artificial Sequence: Synthetic oligonucleotide
auugcuuuugcagcaggau

SEQ ID NO: 580390 - RNA, 19 nt, Artificial Sequence
  Description of Artificial Sequence: Synthetic oligonucleotide
guagcuauauuuaauccau

SEQ ID NO: 580391 - RNA, 19 nt, Artificial Sequence
  Description of Artificial Sequence: Synthetic oligonucleotide
ggauaccuuugaaauagcc

SEQ ID NO: 580392 - RNA, 19 nt, Artificial Sequence
  Description of Artificial Sequence: Synthetic oligonucleotide
cuccccuagagacaggaga

SEQ ID NO: 580393 - RNA, 19 nt, Artificial Sequence
  Description of Artificial Sequence: Synthetic oligonucleotide
ugacugguacugugaguug

SEQ ID NO: 580394 - RNA, 19 nt, Artificial Sequence
  Description of Artificial Sequence: Synthetic oligonucleotide
cacacacacacacacagcu

SEQ ID NO: 580395 - RNA, 19 nt, Artificial Sequence
  Description of Artificial Sequence: Synthetic oligonucleotide
ccuauuuuagacuggguaa

SEQ ID NO: 580396 - RNA, 19 nt, Artificial Sequence
  Description of Artificial Sequence: Synthetic oligonucleotide
agcuaucccauuagcuagg

SEQ ID NO: 580397 - RNA, 19 nt, Artificial Sequence
  Description of Artificial Sequence: Synthetic oligonucleotide
aggccguugagcugguaga

SEQ ID NO: 580398 - RNA, 19 nt, Artificial Sequence
  Description of Artificial Sequence: Synthetic oligonucleotide
auucgugucuucacggagu

SEQ ID NO: 580399 - RNA, 19 nt, Artificial Sequence
  Description of Artificial Sequence: Synthetic oligonucleotide
uggcucacaaguacacaua

SEQ ID NO: 580400 - RNA, 19 nt, Artificial Sequence
  Description of Artificial Sequence: Synthetic oligonucleotide
aaauagccagcaaggccgu

SEQ ID NO: 580401 - RNA, 19 nt, Artificial Sequence
  Description of Artificial Sequence: Synthetic oligonucleotide
cugccggauucauuacugc

SEQ ID NO: 580402 - RNA, 19 nt, Artificial Sequence
  Description of Artificial Sequence: Synthetic oligonucleotide
cuuacuagcauagcagugu

SEQ ID NO: 580403 - RNA, 19 nt, Artificial Sequence
  Description of Artificial Sequence: Synthetic oligonucleotide
ggguaaugguacuuuuaug

SEQ ID NO: 580404 - RNA, 19 nt, Artificial Sequence
  Description of Artificial Sequence: Synthetic oligonucleotide
agggugacugccauggccu

SEQ ID NO: 580405 - RNA, 19 nt, Artificial Sequence
  Description of Artificial Sequence: Synthetic oligonucleotide
uagcuauauuuaauccauu

SEQ ID NO: 580406 - RNA, 19 nt, Artificial Sequence
  Description of Artificial Sequence: Synthetic oligonucleotide
caacggguacaugacggag

SEQ ID NO: 580407 - RNA, 19 nt, Artificial Sequence
  Description of Artificial Sequence: Synthetic oligonucleotide
ggaagauuguggcuguuaa

SEQ ID NO: 580408 - RNA, 19 nt, Artificial Sequence
  Description of Artificial Sequence: Synthetic oligonucleotide
augacauuuggaagauugu

SEQ ID NO: 580409 - RNA, 19 nt, Artificial Sequence
  Description of Artificial Sequence: Synthetic oligonucleotide
agcugguagaccguccuga

SEQ ID NO: 580410 - RNA, 19 nt, Artificial Sequence
  Description of Artificial Sequence: Synthetic oligonucleotide
acacacacacacacagcuc

SEQ ID NO: 580411 - RNA, 19 nt, Artificial Sequence
  Description of Artificial Sequence: Synthetic oligonucleotide
agcuagguggcuguuucca

SEQ ID NO: 580412 - RNA, 19 nt, Artificial Sequence
  Description of Artificial Sequence: Synthetic oligonucleotide
ucgguagguucucguaguc

SEQ ID NO: 580413 - RNA, 19 nt, Artificial Sequence
  Description of Artificial Sequence: Synthetic oligonucleotide
uagcuagguggcuguuucc

SEQ ID NO: 580414 - RNA, 19 nt, Artificial Sequence
  Description of Artificial Sequence: Synthetic oligonucleotide
acacacacaagcacacaca

SEQ ID NO: 580415 - RNA, 19 nt, Artificial Sequence
  Description of Artificial Sequence: Synthetic oligonucleotide
acgucauuuaaaguccuuu

SEQ ID NO: 580416 - RNA, 19 nt, Artificial Sequence
  Description of Artificial Sequence: Synthetic oligonucleotide
cugguagaccguccugaag

SEQ ID NO: 580417 - RNA, 19 nt, Artificial Sequence
  Description of Artificial Sequence: Synthetic oligonucleotide
caccguccggauacaauug

SEQ ID NO: 580418 - RNA, 19 nt, Artificial Sequence
  Description of Artificial Sequence: Synthetic oligonucleotide
cacggaguccaacggguac

SEQ ID NO: 580419 - RNA, 19 nt, Artificial Sequence
  Description of Artificial Sequence: Synthetic oligonucleotide
cugugggacuggcagcggc

SEQ ID NO: 580420 - RNA, 19 nt, Artificial Sequence
  Description of Artificial Sequence: Synthetic oligonucleotide
augguacuuuuauguacau

SEQ ID NO: 580421 - RNA, 19 nt, Artificial Sequence
  Description of Artificial Sequence: Synthetic oligonucleotide
ugacggaguguuccagaau

SEQ ID NO: 580422 - RNA, 19 nt, Artificial Sequence
  Description of Artificial Sequence: Synthetic oligonucleotide
gguagguucucguaguccu

SEQ ID NO: 580423 - RNA, 19 nt, Artificial Sequence
  Description of Artificial Sequence: Synthetic oligonucleotide
aguuucgcaguggguugac

SEQ ID NO: 580424 - RNA, 19 nt, Artificial Sequence
  Description of Artificial Sequence: Synthetic oligonucleotide
ucaaccgaccauugacauu

SEQ ID NO: 580425 - RNA, 19 nt, Artificial Sequence
  Description of Artificial Sequence: Synthetic oligonucleotide
gaacacacacacacacaca

SEQ ID NO: 580426 - RNA, 19 nt, Artificial Sequence
  Description of Artificial Sequence: Synthetic oligonucleotide
cauuacugcaucguggagu

SEQ ID NO: 580427 - RNA, 19 nt, Artificial Sequence
  Description of Artificial Sequence: Synthetic oligonucleotide
gaguucggcucuccagcug

SEQ ID NO: 580428 - RNA, 19 nt, Artificial Sequence
  Description of Artificial Sequence: Synthetic oligonucleotide
ccuuacuagcauagcagug

SEQ ID NO: 580429 - RNA, 19 nt, Artificial Sequence
  Description of Artificial Sequence: Synthetic oligonucleotide
ugucaccgcucuccucugc

SEQ ID NO: 580430 - RNA, 19 nt, Artificial Sequence
  Description of Artificial Sequence: Synthetic oligonucleotide
ucauguggguggacaccga

SEQ ID NO: 580431 - RNA, 19 nt, Artificial Sequence
  Description of Artificial Sequence: Synthetic oligonucleotide
uggaagauuguggcuguua

SEQ ID NO: 580432 - RNA, 19 nt, Artificial Sequence
  Description of Artificial Sequence: Synthetic oligonucleotide
acuuaucuauuaagagggu

SEQ ID NO: 580433 - RNA, 19 nt, Artificial Sequence
  Description of Artificial Sequence: Synthetic oligonucleotide
aggggcaauuggcucacaa

SEQ ID NO: 580434 - RNA, 19 nt, Artificial Sequence
  Description of Artificial Sequence: Synthetic oligonucleotide
cuaaagaucuagggagaga

SEQ ID NO: 580435 - RNA, 19 nt, Artificial Sequence
  Description of Artificial Sequence: Synthetic oligonucleotide
cacacacacacagcucaag

SEQ ID NO: 580436 - RNA, 19 nt, Artificial Sequence
  Description of Artificial Sequence: Synthetic oligonucleotide
acugcccguuccuuuagua

SEQ ID NO: 580437 - RNA, 19 nt, Artificial Sequence
  Description of Artificial Sequence: Synthetic oligonucleotide
cguccggauacaauugagg

SEQ ID NO: 580438 - RNA, 19 nt, Artificial Sequence
  Description of Artificial Sequence: Synthetic oligonucleotide
ccgucaaccgaccauugac

SEQ ID NO: 580439 - RNA, 19 nt, Artificial Sequence
  Description of Artificial Sequence: Synthetic oligonucleotide
uggucgguagguucucgua

SEQ ID NO: 580440 - RNA, 19 nt, Artificial Sequence
  Description of Artificial Sequence: Synthetic oligonucleotide
ucacggaguccaacgggua

SEQ ID NO: 580441 - RNA, 19 nt, Artificial Sequence
  Description of Artificial Sequence: Synthetic oligonucleotide
cauagacggaccaggagau

SEQ ID NO: 580442 - RNA, 19 nt, Artificial Sequence
  Description of Artificial Sequence: Synthetic oligonucleotide
cuaucccauuagcuaggug

SEQ ID NO: 580443 - RNA, 19 nt, Artificial Sequence
  Description of Artificial Sequence: Synthetic oligonucleotide
gacucgagcguggauaccu

SEQ ID NO: 580444 - RNA, 19 nt, Artificial Sequence
  Description of Artificial Sequence: Synthetic oligonucleotide
agaccgcccgagaugaugu

SEQ ID NO: 580445 - RNA, 19 nt, Artificial Sequence
  Description of Artificial Sequence: Synthetic oligonucleotide
cuacacuccccuagagaca

SEQ ID NO: 580446 - RNA, 19 nt, Artificial Sequence
  Description of Artificial Sequence: Synthetic oligonucleotide
cuggaccacucuuauccca

SEQ ID NO: 580447 - RNA, 19 nt, Artificial Sequence
  Description of Artificial Sequence: Synthetic oligonucleotide
ccauccauccuccggcccg

SEQ ID NO: 580448 - RNA, 19 nt, Artificial Sequence
  Description of Artificial Sequence: Synthetic oligonucleotide
ccuuuaguacagaguucgg

SEQ ID NO: 580449 - RNA, 19 nt, Artificial Sequence
  Description of Artificial Sequence: Synthetic oligonucleotide
acggaguccaacggguaca

SEQ ID NO: 580450 - RNA, 19 nt, Artificial Sequence
  Description of Artificial Sequence: Synthetic oligonucleotide
guaugagaacaagggguga

SEQ ID NO: 580451 - RNA, 19 nt, Artificial Sequence
  Description of Artificial Sequence: Synthetic oligonucleotide
gcuuguauacuuggcuuug

SEQ ID NO: 580452 - RNA, 19 nt, Artificial Sequence
  Description of Artificial Sequence: Synthetic oligonucleotide
cuauuuuagacuggguaau

SEQ ID NO: 580453 - RNA, 19 nt, Artificial Sequence
  Description of Artificial Sequence: Synthetic oligonucleotide
aggugaugaaauggauaga

SEQ ID NO: 580454 - RNA, 19 nt, Artificial Sequence
  Description of Artificial Sequence: Synthetic oligonucleotide
auuagcuagguggcuguuu

SEQ ID NO: 580455 - RNA, 19 nt, Artificial Sequence
  Description of Artificial Sequence: Synthetic oligonucleotide
ccgagaugaugugagacug

SEQ ID NO: 580456 - RNA, 19 nt, Artificial Sequence
  Description of Artificial Sequence: Synthetic oligonucleotide
agaugccaaugacaauauu

SEQ ID NO: 580457 - RNA, 19 nt, Artificial Sequence
  Description of Artificial Sequence: Synthetic oligonucleotide
cugcggugugaucuaaaga

SEQ ID NO: 580458 - RNA, 19 nt, Artificial Sequence
  Description of Artificial Sequence: Synthetic oligonucleotide
ccgcgauggagcuccaucc

SEQ ID NO: 580459 - RNA, 19 nt, Artificial Sequence
  Description of Artificial Sequence: Synthetic oligonucleotide
gguccucccuuucucgggc

SEQ ID NO: 580460 - RNA, 19 nt, Artificial Sequence
  Description of Artificial Sequence: Synthetic oligonucleotide
cguuuguaugaucuucuug

SEQ ID NO: 580461 - RNA, 19 nt, Artificial Sequence
  Description of Artificial Sequence: Synthetic oligonucleotide
ugcccgucaaccgaccauu

SEQ ID NO: 580462 - RNA, 19 nt, Artificial Sequence
  Description of Artificial Sequence: Synthetic oligonucleotide
gucaaccgaccauugacau

SEQ ID NO: 580463 - RNA, 19 nt, Artificial Sequence
  Description of Artificial Sequence: Synthetic oligonucleotide
gcguggauaccuuugaaau

SEQ ID NO: 580464 - RNA, 19 nt, Artificial Sequence
  Description of Artificial Sequence: Synthetic oligonucleotide
cagaccgcccgagaugaug

SEQ ID NO: 580465 - RNA, 19 nt, Artificial Sequence
  Description of Artificial Sequence: Synthetic oligonucleotide
uuacugugucaccgcucuc

SEQ ID NO: 580466 - RNA, 19 nt, Artificial Sequence
  Description of Artificial Sequence: Synthetic oligonucleotide
ucgguccgccacaccgucc

SEQ ID NO: 580467 - RNA, 19 nt, Artificial Sequence
  Description of Artificial Sequence: Synthetic oligonucleotide
augcccgucaaccgaccau

SEQ ID NO: 580468 - RNA, 19 nt, Artificial Sequence
  Description of Artificial Sequence: Synthetic oligonucleotide
ccccauacucagaagucac

SEQ ID NO: 580469 - RNA, 19 nt, Artificial Sequence
  Description of Artificial Sequence: Synthetic oligonucleotide
acacacacacacacacaca

SEQ ID NO: 580470 - RNA, 19 nt, Artificial Sequence
  Description of Artificial Sequence: Synthetic oligonucleotide
ccuuccguuuguaugaucu

SEQ ID NO: 580471 - RNA, 19 nt, Artificial Sequence
  Description of Artificial Sequence: Synthetic oligonucleotide
aauugagggcugacuggua

SEQ ID NO: 580472 - RNA, 19 nt, Artificial Sequence
  Description of Artificial Sequence: Synthetic oligonucleotide
gcaccggccagaccgcccg

SEQ ID NO: 580473 - RNA, 19 nt, Artificial Sequence
  Description of Artificial Sequence: Synthetic oligonucleotide
ccaacucuaauccuauuua

SEQ ID NO: 580474 - RNA, 19 nt, Artificial Sequence
  Description of Artificial Sequence: Synthetic oligonucleotide
gucgguagguucucguagu

SEQ ID NO: 580475 - RNA, 19 nt, Artificial Sequence
  Description of Artificial Sequence: Synthetic oligonucleotide
caauugagggcugacuggu

SEQ ID NO: 580476 - RNA, 19 nt, Artificial Sequence
  Description of Artificial Sequence: Synthetic oligonucleotide
gugaugaaauggauagacu

SEQ ID NO: 580477 - RNA, 19 nt, Artificial Sequence
  Description of Artificial Sequence: Synthetic oligonucleotide
caucgcucccgcugucaug

SEQ ID NO: 580478 - RNA, 19 nt, Artificial Sequence
  Description of Artificial Sequence: Synthetic oligonucleotide
guuucgcaguggguugacc

SEQ ID NO: 580479 - RNA, 19 nt, Artificial Sequence
  Description of Artificial Sequence: Synthetic oligonucleotide
caaccccucgguccgccac

SEQ ID NO: 580480 - RNA, 19 nt, Artificial Sequence
  Description of Artificial Sequence: Synthetic oligonucleotide
cauccauccuccggcccgc

SEQ ID NO: 580481 - RNA, 19 nt, Artificial Sequence
  Description of Artificial Sequence: Synthetic oligonucleotide
guacagaguucggcucucc

SEQ ID NO: 580482 - RNA, 19 nt, Artificial Sequence
  Description of Artificial Sequence: Synthetic oligonucleotide
cucgguccgccacaccguc

SEQ ID NO: 580483 - RNA, 19 nt, Artificial Sequence
  Description of Artificial Sequence: Synthetic oligonucleotide
cacuccccuagagacagga

SEQ ID NO: 580484 - RNA, 19 nt, Artificial Sequence
  Description of Artificial Sequence: Synthetic oligonucleotide
gauggcgguggaaggcauc

SEQ ID NO: 580485 - RNA, 19 nt, Artificial Sequence
  Description of Artificial Sequence: Synthetic oligonucleotide
cccauuagcuagguggcug

SEQ ID NO: 580486 - RNA, 19 nt, Artificial Sequence
  Description of Artificial Sequence: Synthetic oligonucleotide
ggaucuggauucaaacucu

SEQ ID NO: 580487 - RNA, 19 nt, Artificial Sequence
  Description of Artificial Sequence: Synthetic oligonucleotide
ccguccggauacaauugag

SEQ ID NO: 580488 - RNA, 19 nt, Artificial Sequence
  Description of Artificial Sequence: Synthetic oligonucleotide
gugucaccgcucuccucug

SEQ ID NO: 580489 - RNA, 19 nt, Artificial Sequence
  Description of Artificial Sequence: Synthetic oligonucleotide
ggccagaccgcccgagaug

SEQ ID NO: 580490 - RNA, 19 nt, Artificial Sequence
  Description of Artificial Sequence: Synthetic oligonucleotide
gccgccgcgauggagcucc

SEQ ID NO: 580491 - RNA, 19 nt, Artificial Sequence
  Description of Artificial Sequence: Synthetic oligonucleotide
caugcccgucaaccgacca

SEQ ID NO: 580492 - RNA, 19 nt, Artificial Sequence
  Description of Artificial Sequence: Synthetic oligonucleotide
cagcggcacaucuguuuuc

SEQ ID NO: 580493 - RNA, 19 nt, Artificial Sequence
  Description of Artificial Sequence: Synthetic oligonucleotide
ggcaugguccauccuugga

SEQ ID NO: 580494 - RNA, 19 nt, Artificial Sequence
  Description of Artificial Sequence: Synthetic oligonucleotide
gcccguuccuuuaguacag

SEQ ID NO: 580495 - RNA, 19 nt, Artificial Sequence
  Description of Artificial Sequence: Synthetic oligonucleotide
aauagccagcaaggccguu

SEQ ID NO: 580496 - RNA, 19 nt, Artificial Sequence
  Description of Artificial Sequence: Synthetic oligonucleotide
gcaugguccauccuuggau

SEQ ID NO: 580497 - RNA, 19 nt, Artificial Sequence
  Description of Artificial Sequence: Synthetic oligonucleotide
ggagagcgccauguuuucc

SEQ ID NO: 580498 - RNA, 19 nt, Artificial Sequence
  Description of Artificial Sequence: Synthetic oligonucleotide
gccagaccgcccgagauga

SEQ ID NO: 580499 - RNA, 19 nt, Artificial Sequence
  Description of Artificial Sequence: Synthetic oligonucleotide
ggccaugcccgucaaccga

SEQ ID NO: 580500 - RNA, 19 nt, Artificial Sequence
  Description of Artificial Sequence: Synthetic oligonucleotide
cuccauccgcagccccgcg

SEQ ID NO: 580501 - RNA, 19 nt, Artificial Sequence
  Description of Artificial Sequence: Synthetic oligonucleotide
agggcgccauagaugcuug

SEQ ID NO: 580502 - RNA, 19 nt, Artificial Sequence
  Description of Artificial Sequence: Synthetic oligonucleotide
gccgcgauggagcuccauc

SEQ ID NO: 580503 - RNA, 19 nt, Artificial Sequence
  Description of Artificial Sequence: Synthetic oligonucleotide
ggguauguucauggucagc

SEQ ID NO: 580504 - RNA, 19 nt, Artificial Sequence
  Description of Artificial Sequence: Synthetic oligonucleotide
acacacacacacagcucaa

SEQ ID NO: 580505 - RNA, 19 nt, Artificial Sequence
  Description of Artificial Sequence: Synthetic oligonucleotide
gccuggguaugagaacaag

SEQ ID NO: 580506 - RNA, 19 nt, Artificial Sequence
  Description of Artificial Sequence: Synthetic oligonucleotide
gucaugaauuaagaacauu

SEQ ID NO: 580507 - RNA, 19 nt, Artificial Sequence
  Description of Artificial Sequence: Synthetic oligonucleotide
cgccacaccguccggauac

SEQ ID NO: 580508 - RNA, 19 nt, Artificial Sequence
  Description of Artificial Sequence: Synthetic oligonucleotide
gcggugugaucuaaagauc

SEQ ID NO: 580509 - RNA, 19 nt, Artificial Sequence
  Description of Artificial Sequence: Synthetic oligonucleotide
cgucaaccgaccauugaca

SEQ ID NO: 580510 - RNA, 19 nt, Artificial Sequence
  Description of Artificial Sequence: Synthetic oligonucleotide
cgcgauggagcuccauccg

SEQ ID NO: 580511 - RNA, 19 nt, Artificial Sequence
  Description of Artificial Sequence: Synthetic oligonucleotide
gcugccgcuucguaaggaa

SEQ ID NO: 580512 - RNA, 19 nt, Artificial Sequence
  Description of Artificial Sequence: Synthetic oligonucleotide
gcuggucgguagguucucg

SEQ ID NO: 580513 - RNA, 19 nt, Artificial Sequence
  Description of Artificial Sequence: Synthetic oligonucleotide
ccccacgccgccgcgaugg

SEQ ID NO: 580514 - RNA, 19 nt, Artificial Sequence
  Description of Artificial Sequence: Synthetic oligonucleotide
ggugugaucuaaagaucua

SEQ ID NO: 580515 - RNA, 19 nt, Artificial Sequence
  Description of Artificial Sequence: Synthetic oligonucleotide
cgguccgccacaccguccg

SEQ ID NO: 580516 - RNA, 19 nt, Artificial Sequence
  Description of Artificial Sequence: Synthetic oligonucleotide
cucugcggugugaucuaaa

SEQ ID NO: 580517 - RNA, 19 nt, Artificial Sequence
  Description of Artificial Sequence: Synthetic oligonucleotide
uagcaguguguuggagaua

SEQ ID NO: 580518 - RNA, 19 nt, Artificial Sequence
  Description of Artificial Sequence: Synthetic oligonucleotide
cccauacucagaagucaca

SEQ ID NO: 580519 - RNA, 19 nt, Artificial Sequence
  Description of Artificial Sequence: Synthetic oligonucleotide
gcugguagaccguccugaa

SEQ ID NO: 580520 - RNA, 19 nt, Artificial Sequence
  Description of Artificial Sequence: Synthetic oligonucleotide
cggugugaucuaaagaucu

SEQ ID NO: 580521 - RNA, 19 nt, Artificial Sequence
  Description of Artificial Sequence: Synthetic oligonucleotide
agccuuccguuuguaugau

SEQ ID NO: 580522 - RNA, 19 nt, Artificial Sequence
  Description of Artificial Sequence: Synthetic oligonucleotide
cuggucgguagguucucgu

SEQ ID NO: 580523 - RNA, 19 nt, Artificial Sequence
  Description of Artificial Sequence: Synthetic oligonucleotide
ggauagacuggaaggguau

SEQ ID NO: 580524 - RNA, 19 nt, Artificial Sequence
  Description of Artificial Sequence: Synthetic oligonucleotide
ccgcuucguaaggaaauac

SEQ ID NO: 580525 - RNA, 19 nt, Artificial Sequence
  Description of Artificial Sequence: Synthetic oligonucleotide
cuccgacccggcguccuug

SEQ ID NO: 580526 - RNA, 19 nt, Artificial Sequence
  Description of Artificial Sequence: Synthetic oligonucleotide
caccuauuuuagacugggu

SEQ ID NO: 580527 - RNA, 19 nt, Artificial Sequence
  Description of Artificial Sequence: Synthetic oligonucleotide
cccggcgcgagcacccugc

SEQ ID NO: 580528 - RNA, 19 nt, Artificial Sequence
  Description of Artificial Sequence: Synthetic oligonucleotide
gccaugcccgucaaccgac

SEQ ID NO: 580529 - RNA, 19 nt, Artificial Sequence
  Description of Artificial Sequence: Synthetic oligonucleotide
gccauguuuuccugcgugu

SEQ ID NO: 580530 - RNA, 19 nt, Artificial Sequence
  Description of Artificial Sequence: Synthetic oligonucleotide
acacuccccuagagacagg

SEQ ID NO: 580531 - RNA, 19 nt, Artificial Sequence
  Description of Artificial Sequence: Synthetic oligonucleotide
ucgcucccgcugucaugug

SEQ ID NO: 580532 - RNA, 19 nt, Artificial Sequence
  Description of Artificial Sequence: Synthetic oligonucleotide
cgguagguucucguagucc

SEQ ID NO: 580533 - RNA, 19 nt, Artificial Sequence
  Description of Artificial Sequence: Synthetic oligonucleotide
cagguacaucaucccaacu

SEQ ID NO: 580534 - RNA, 19 nt, Artificial Sequence
  Description of Artificial Sequence: Synthetic oligonucleotide
cccaacucuaauccuauuu

SEQ ID NO: 580535 - RNA, 19 nt, Artificial Sequence
  Description of Artificial Sequence: Synthetic oligonucleotide
acucgagcguggauaccuu

SEQ ID NO: 580536 - RNA, 19 nt, Artificial Sequence
  Description of Artificial Sequence: Synthetic oligonucleotide
gguccgccacaccguccgg

SEQ ID NO: 580537 - RNA, 19 nt, Artificial Sequence
  Description of Artificial Sequence: Synthetic oligonucleotide
cgaggcgcuggucgguagg

SEQ ID NO: 580538 - RNA, 19 nt, Artificial Sequence
  Description of Artificial Sequence: Synthetic oligonucleotide
cgcucccgcugucaugugg

SEQ ID NO: 580539 - RNA, 19 nt, Artificial Sequence
  Description of Artificial Sequence: Synthetic oligonucleotide
ggcgccauagaugcuugua

SEQ ID NO: 580540 - RNA, 19 nt, Artificial Sequence
  Description of Artificial Sequence: Synthetic oligonucleotide
ccauuagcuagguggcugu

SEQ ID NO: 580541 - RNA, 19 nt, Artificial Sequence
  Description of Artificial Sequence: Synthetic oligonucleotide
gcagcggcacaucuguuuu

SEQ ID NO: 580542 - RNA, 19 nt, Artificial Sequence
  Description of Artificial Sequence: Synthetic oligonucleotide
gcgcgagcacccugcagga

SEQ ID NO: 580543 - RNA, 19 nt, Artificial Sequence
  Description of Artificial Sequence: Synthetic oligonucleotide
gccuuccguuuguaugauc

SEQ ID NO: 580544 - RNA, 19 nt, Artificial Sequence
  Description of Artificial Sequence: Synthetic oligonucleotide
cgccauagaugcuuguaua

SEQ ID NO: 580545 - RNA, 19 nt, Artificial Sequence
  Description of Artificial Sequence: Synthetic oligonucleotide
guggaguaggguggccaua

SEQ ID NO: 580546 - RNA, 19 nt, Artificial Sequence
  Description of Artificial Sequence: Synthetic oligonucleotide
cgcuucguaaggaaauacu

SEQ ID NO: 580547 - RNA, 19 nt, Artificial Sequence
  Description of Artificial Sequence: Synthetic oligonucleotide
cucgagcguggauaccuuu

SEQ ID NO: 580548 - RNA, 19 nt, Artificial Sequence
  Description of Artificial Sequence: Synthetic oligonucleotide
cgacccggcguccuugcug

SEQ ID NO: 580549 - RNA, 19 nt, Artificial Sequence
  Description of Artificial Sequence: Synthetic oligonucleotide
cuucccggcaguggaggcu

SEQ ID NO: 580550 - RNA, 19 nt, Artificial Sequence
  Description of Artificial Sequence: Synthetic oligonucleotide
cccgucaaccgaccauuga

SEQ ID NO: 580551 - RNA, 19 nt, Artificial Sequence
  Description of Artificial Sequence: Synthetic oligonucleotide
ccgaggcgcuggucgguag

SEQ ID NO: 580552 - RNA, 19 nt, Artificial Sequence
  Description of Artificial Sequence: Synthetic oligonucleotide
gcccgucaaccgaccauug

SEQ ID NO: 580553 - RNA, 19 nt, Artificial Sequence
  Description of Artificial Sequence: Synthetic oligonucleotide
gcuaucccauuagcuaggu

SEQ ID NO: 580554 - RNA, 19 nt, Artificial Sequence
  Description of Artificial Sequence: Synthetic oligonucleotide
cgcaccggccagaccgccc

SEQ ID NO: 580555 - RNA, 19 nt, Artificial Sequence
  Description of Artificial Sequence: Synthetic oligonucleotide
cugcaucguggaguagggu

SEQ ID NO: 580556 - RNA, 19 nt, Artificial Sequence
  Description of Artificial Sequence: Synthetic oligonucleotide
cauuagcuagguggcuguu

SEQ ID NO: 580557 - RNA, 19 nt, Artificial Sequence
  Description of Artificial Sequence: Synthetic oligonucleotide
cuccccacgccgccgcgau

SEQ ID NO: 580558 - RNA, 19 nt, Artificial Sequence
  Description of Artificial Sequence: Synthetic oligonucleotide
caccggccagaccgcccga

SEQ ID NO: 580559 - RNA, 19 nt, Artificial Sequence
  Description of Artificial Sequence: Synthetic oligonucleotide
gccacaccguccggauaca

SEQ ID NO: 580560 - RNA, 19 nt, Artificial Sequence
  Description of Artificial Sequence: Synthetic oligonucleotide
ccguuuguaugaucuucuu

SEQ ID NO: 580561 - RNA, 19 nt, Artificial Sequence
  Description of Artificial Sequence: Synthetic oligonucleotide
ggguggacaccgaggcgcu

SEQ ID NO: 580562 - RNA, 19 nt, Artificial Sequence
  Description of Artificial Sequence: Synthetic oligonucleotide
cccguuccuuuaguacaga

SEQ ID NO: 580563 - RNA, 19 nt, Artificial Sequence
  Description of Artificial Sequence: Synthetic oligonucleotide
gggcgccauagaugcuugu

SEQ ID NO: 580564 - RNA, 19 nt, Artificial Sequence
  Description of Artificial Sequence: Synthetic oligonucleotide
ccggccagaccgcccgaga

SEQ ID NO: 580565 - RNA, 19 nt, Artificial Sequence
  Description of Artificial Sequence: Synthetic oligonucleotide
gcuccccacgccgccgcga

SEQ ID NO: 580566 - RNA, 19 nt, Artificial Sequence
  Description of Artificial Sequence: Synthetic oligonucleotide
ccccucgguccgccacacc

SEQ ID NO: 580567 - RNA, 19 nt, Artificial Sequence
  Description of Artificial Sequence: Synthetic oligonucleotide
caaggccguugagcuggua

SEQ ID NO: 580568 - RNA, 19 nt, Artificial Sequence
  Description of Artificial Sequence: Synthetic oligonucleotide
cggcgcgagcacccugcag

SEQ ID NO: 580569 - RNA, 19 nt, Artificial Sequence
  Description of Artificial Sequence: Synthetic oligonucleotide
ccucugcggugugaucuaa

SEQ ID NO: 580570 - RNA, 19 nt, Artificial Sequence
  Description of Artificial Sequence: Synthetic oligonucleotide
ccccaaccccucgguccgc

SEQ ID NO: 580571 - RNA, 19 nt, Artificial Sequence
  Description of Artificial Sequence: Synthetic oligonucleotide
ccgcugucaugugggugga

SEQ ID NO: 580572 - RNA, 19 nt, Artificial Sequence
  Description of Artificial Sequence: Synthetic oligonucleotide
cgcuggucgguagguucuc

SEQ ID NO: 580573 - RNA, 19 nt, Artificial Sequence
  Description of Artificial Sequence: Synthetic oligonucleotide
ccggcgcgagcacccugca

SEQ ID NO: 580574 - RNA, 19 nt, Artificial Sequence
  Description of Artificial Sequence: Synthetic oligonucleotide
ccgcucuccucugcggugu

SEQ ID NO: 580575 - RNA, 19 nt, Artificial Sequence
  Description of Artificial Sequence: Synthetic oligonucleotide
gcaaggccguugagcuggu

SEQ ID NO: 580576 - RNA, 19 nt, Artificial Sequence
  Description of Artificial Sequence: Synthetic oligonucleotide
ccugcguguugaggagggu

SEQ ID NO: 580577 - RNA, 19 nt, Artificial Sequence
  Description of Artificial Sequence: Synthetic oligonucleotide
cggaguccaacggguacau

SEQ ID NO: 580578 - RNA, 19 nt, Artificial Sequence
  Description of Artificial Sequence: Synthetic oligonucleotide
ccagaccgcccgagaugau

SEQ ID NO: 580579 - RNA, 19 nt, Artificial Sequence
  Description of Artificial Sequence: Synthetic oligonucleotide
ccgacccggcguccuugcu

SEQ ID NO: 580580 - RNA, 19 nt, Artificial Sequence
  Description of Artificial Sequence: Synthetic oligonucleotide
ccuccgacccggcguccuu

SEQ ID NO: 580581 - RNA, 19 nt, Artificial Sequence
  Description of Artificial Sequence: Synthetic oligonucleotide
ccgccgcgauggagcucca

SEQ ID NO: 580582 - RNA, 19 nt, Artificial Sequence
  Description of Artificial Sequence: Synthetic oligonucleotide
cgccgcgauggagcuccau

SEQ ID NO: 580583 - RNA, 19 nt, Artificial Sequence
  Description of Artificial Sequence: Synthetic oligonucleotide
aauauaaguaggcacagcc

SEQ ID NO: 580584 - RNA, 19 nt, Artificial Sequence
  Description of Artificial Sequence: Synthetic oligonucleotide
uuuaacuuaacccaugugg

SEQ ID NO: 580585 - RNA, 19 nt, Artificial Sequence
  Description of Artificial Sequence: Synthetic oligonucleotide
uuaacuaagaacaacuuca

SEQ ID NO: 580586 - RNA, 19 nt, Artificial Sequence
  Description of Artificial Sequence: Synthetic oligonucleotide
aucuacuggacuuagaagc

SEQ ID NO: 580587 - RNA, 19 nt, Artificial Sequence
  Description of Artificial Sequence: Synthetic oligonucleotide
guaauagaaacucaagugg

SEQ ID NO: 580588 - RNA, 19 nt, Artificial Sequence
  Description of Artificial Sequence: Synthetic oligonucleotide
uguaccaccaccuaguuca

SEQ ID NO: 580589 - RNA, 19 nt, Artificial Sequence
  Description of Artificial Sequence: Synthetic oligonucleotide
acuuccggcaauuauaaac

SEQ ID NO: 580590 - RNA, 19 nt, Artificial Sequence
  Description of Artificial Sequence: Synthetic oligonucleotide
aaacaaacauccuaucuug

SEQ ID NO: 580591 - RNA, 19 nt, Artificial Sequence
  Description of Artificial Sequence: Synthetic oligonucleotide
ucucuaaauaaccauccgg

SEQ ID NO: 580592 - RNA, 19 nt, Artificial Sequence
  Description of Artificial Sequence: Synthetic oligonucleotide
aaugcauuauuggcgaugc

SEQ ID NO: 580593 - RNA, 19 nt, Artificial Sequence
  Description of Artificial Sequence: Synthetic oligonucleotide
aagacuccguccuugaggg

SEQ ID NO: 580594 - RNA, 19 nt, Artificial Sequence
  Description of Artificial Sequence: Synthetic oligonucleotide
ugugacuuagcucuguaag

SEQ ID NO: 580595 - RNA, 19 nt, Artificial Sequence
  Description of Artificial Sequence: Synthetic oligonucleotide
uaaauaaccauccgggugu

SEQ ID NO: 580596 - RNA, 19 nt, Artificial Sequence
  Description of Artificial Sequence: Synthetic oligonucleotide
aagaaucccgaguaugucg

SEQ ID NO: 580597 - RNA, 19 nt, Artificial Sequence
  Description of Artificial Sequence: Synthetic oligonucleotide
aaacauccuaucuugaagu

SEQ ID NO: 580598 - RNA, 19 nt, Artificial Sequence
  Description of Artificial Sequence: Synthetic oligonucleotide
aggacauggauuuuaacuc

SEQ ID NO: 580599 - RNA, 19 nt, Artificial Sequence
  Description of Artificial Sequence: Synthetic oligonucleotide
uuuaauuaguucuuguaaa

SEQ ID NO: 580600 - RNA, 19 nt, Artificial Sequence
  Description of Artificial Sequence: Synthetic oligonucleotide
aacuuaacccaugugguac

SEQ ID NO: 580601 - RNA, 19 nt, Artificial Sequence
  Description of Artificial Sequence: Synthetic oligonucleotide
uuaacuuaacccauguggu

SEQ ID NO: 580602 - RNA, 19 nt, Artificial Sequence
  Description of Artificial Sequence: Synthetic oligonucleotide
uuuacuggaaagaugcaga

SEQ ID NO: 580603 - RNA, 19 nt, Artificial Sequence
  Description of Artificial Sequence: Synthetic oligonucleotide
uuuauguaacaaauugggc

SEQ ID NO: 580604 - RNA, 19 nt, Artificial Sequence
  Description of Artificial Sequence: Synthetic oligonucleotide
uuauuaucugaaccaaugc

SEQ ID NO: 580605 - RNA, 19 nt, Artificial Sequence
  Description of Artificial Sequence: Synthetic oligonucleotide
aauaaaucccuagcaugcc

SEQ ID NO: 580606 - RNA, 19 nt, Artificial Sequence
  Description of Artificial Sequence: Synthetic oligonucleotide
uuugcgucucuaaauaacc

SEQ ID NO: 580607 - RNA, 19 nt, Artificial Sequence
  Description of Artificial Sequence: Synthetic oligonucleotide
gaagcgaagaacuugcuca

SEQ ID NO: 580608 - RNA, 19 nt, Artificial Sequence
  Description of Artificial Sequence: Synthetic oligonucleotide
aaucuacuggacuuagaag

SEQ ID NO: 580609 - RNA, 19 nt, Artificial Sequence
  Description of Artificial Sequence: Synthetic oligonucleotide
auaaaucccuagcaugccc

SEQ ID NO: 580610 - RNA, 19 nt, Artificial Sequence
  Description of Artificial Sequence: Synthetic oligonucleotide
ugaaccaaugcccacgaug

SEQ ID NO: 580611 - RNA, 19 nt, Artificial Sequence
  Description of Artificial Sequence: Synthetic oligonucleotide
ugaaguucucauuuguacc

SEQ ID NO: 580612 - RNA, 19 nt, Artificial Sequence
  Description of Artificial Sequence: Synthetic oligonucleotide
aguggugaagacuccgucc

SEQ ID NO: 580613 - RNA, 19 nt, Artificial Sequence
  Description of Artificial Sequence: Synthetic oligonucleotide
agagugagaaagucugacc

SEQ ID NO: 580614 - RNA, 19 nt, Artificial Sequence
  Description of Artificial Sequence: Synthetic oligonucleotide
auaaauaaaucccuagcau

SEQ ID NO: 580615 - RNA, 19 nt, Artificial Sequence
  Description of Artificial Sequence: Synthetic oligonucleotide
aaauauaaguaggcacagc

SEQ ID NO: 580616 - RNA, 19 nt, Artificial Sequence
  Description of Artificial Sequence: Synthetic oligonucleotide
uauucuauguucuuacaaa

SEQ ID NO: 580617 - RNA, 19 nt, Artificial Sequence
  Description of Artificial Sequence: Synthetic oligonucleotide
aagucggaggcccaaagug

SEQ ID NO: 580618 - RNA, 19 nt, Artificial Sequence
  Description of Artificial Sequence: Synthetic oligonucleotide
agagacauggccaauaaug

SEQ ID NO: 580619 - RNA, 19 nt, Artificial Sequence
  Description of Artificial Sequence: Synthetic oligonucleotide
gaaagucugaccaucauca

SEQ ID NO: 580620 - RNA, 19 nt, Artificial Sequence
  Description of Artificial Sequence: Synthetic oligonucleotide
uugcacaucagaauugugu

SEQ ID NO: 580621 - RNA, 19 nt, Artificial Sequence
  Description of Artificial Sequence: Synthetic oligonucleotide
uauuuuaacuuaacccaug

SEQ ID NO: 580622 - RNA, 19 nt, Artificial Sequence
  Description of Artificial Sequence: Synthetic oligonucleotide
cuaaauaaccauccgggug

SEQ ID NO: 580623 - RNA, 19 nt, Artificial Sequence
  Description of Artificial Sequence: Synthetic oligonucleotide
aacgauaaugagugacuag

SEQ ID NO: 580624 - RNA, 19 nt, Artificial Sequence
  Description of Artificial Sequence: Synthetic oligonucleotide
uauaaguaggcacagccuu

SEQ ID NO: 580625 - RNA, 19 nt, Artificial Sequence
  Description of Artificial Sequence: Synthetic oligonucleotide
ucagcauucggccuuaaau

SEQ ID NO: 580626 - RNA, 19 nt, Artificial Sequence
  Description of Artificial Sequence: Synthetic oligonucleotide
cagaauugugugaucaccg

SEQ ID NO: 580627 - RNA, 19 nt, Artificial Sequence
  Description of Artificial Sequence: Synthetic oligonucleotide
aguuagacaauuccagaug

SEQ ID NO: 580628 - RNA, 19 nt, Artificial Sequence
  Description of Artificial Sequence: Synthetic oligonucleotide
ucuacuggacuuagaagcc

SEQ ID NO: 580629 - RNA, 19 nt, Artificial Sequence
  Description of Artificial Sequence: Synthetic oligonucleotide
aacaaauugggcauauuga

SEQ ID NO: 580630 - RNA, 19 nt, Artificial Sequence
  Description of Artificial Sequence: Synthetic oligonucleotide
aaagucugaccaucaucac

SEQ ID NO: 580631 - RNA, 19 nt, Artificial Sequence
  Description of Artificial Sequence: Synthetic oligonucleotide
gaaccaguacuccagggcc

SEQ ID NO: 580632 - RNA, 19 nt, Artificial Sequence
  Description of Artificial Sequence: Synthetic oligonucleotide
gagugagaaagucugacca

SEQ ID NO: 580633 - RNA, 19 nt, Artificial Sequence
  Description of Artificial Sequence: Synthetic oligonucleotide
aaugcauggucaucccauc

SEQ ID NO: 580634 - RNA, 19 nt, Artificial Sequence
  Description of Artificial Sequence: Synthetic oligonucleotide
ucggccuuaaauauaagua

SEQ ID NO: 580635 - RNA, 19 nt, Artificial Sequence
  Description of Artificial Sequence: Synthetic oligonucleotide
uggaacgguagagacaugg

SEQ ID NO: 580636 - RNA, 19 nt, Artificial Sequence
  Description of Artificial Sequence: Synthetic oligonucleotide
gaguaugucgcaguaacag

SEQ ID NO: 580637 - RNA, 19 nt, Artificial Sequence
  Description of Artificial Sequence: Synthetic oligonucleotide
aauuacuuccggcaauuau

SEQ ID NO: 580638 - RNA, 19 nt, Artificial Sequence
  Description of Artificial Sequence: Synthetic oligonucleotide
aaugguuccuagacuuucc

SEQ ID NO: 580639 - RNA, 19 nt, Artificial Sequence
  Description of Artificial Sequence: Synthetic oligonucleotide
aauugugugaucaccguga

SEQ ID NO: 580640 - RNA, 19 nt, Artificial Sequence
  Description of Artificial Sequence: Synthetic oligonucleotide
aucuucgucaacugacuac

SEQ ID NO: 580641 - RNA, 19 nt, Artificial Sequence
  Description of Artificial Sequence: Synthetic oligonucleotide
ucuuccaagcccuuaugcc

SEQ ID NO: 580642 - RNA, 19 nt, Artificial Sequence
  Description of Artificial Sequence: Synthetic oligonucleotide
uucgucaacugacuacccg

SEQ ID NO: 580643 - RNA, 19 nt, Artificial Sequence
  Description of Artificial Sequence: Synthetic oligonucleotide
ugcgcugggagccaaagga

SEQ ID NO: 580644 - RNA, 19 nt, Artificial Sequence
  Description of Artificial Sequence: Synthetic oligonucleotide
uuauuggcgaugcaucugu

SEQ ID NO: 580645 - RNA, 19 nt, Artificial Sequence
  Description of Artificial Sequence: Synthetic oligonucleotide
ucuucgucaacugacuacc

SEQ ID NO: 580646 - RNA, 19 nt, Artificial Sequence
  Description of Artificial Sequence: Synthetic oligonucleotide
gaacgguagagacauggcc

SEQ ID NO: 580647 - RNA, 19 nt, Artificial Sequence
  Description of Artificial Sequence: Synthetic oligonucleotide
ugcuaaguuuauuaucuga

SEQ ID NO: 580648 - RNA, 19 nt, Artificial Sequence
  Description of Artificial Sequence: Synthetic oligonucleotide
uucuuccaagcccuuaugc

SEQ ID NO: 580649 - RNA, 19 nt, Artificial Sequence
  Description of Artificial Sequence: Synthetic oligonucleotide
cugacuacccguaaucuac

SEQ ID NO: 580650 - RNA, 19 nt, Artificial Sequence
  Description of Artificial Sequence: Synthetic oligonucleotide
ucuaaauaaccauccgggu

SEQ ID NO: 580651 - RNA, 19 nt, Artificial Sequence
  Description of Artificial Sequence: Synthetic oligonucleotide
ucucacaugcgcaugaguu

SEQ ID NO: 580652 - RNA, 19 nt, Artificial Sequence
  Description of Artificial Sequence: Synthetic oligonucleotide
uccuaaugcauggucaucc

SEQ ID NO: 580653 - RNA, 19 nt, Artificial Sequence
  Description of Artificial Sequence: Synthetic oligonucleotide
uccucgcuguaguagaagg

SEQ ID NO: 580654 - RNA, 19 nt, Artificial Sequence
  Description of Artificial Sequence: Synthetic oligonucleotide
ucuggaacgguagagacau

SEQ ID NO: 580655 - RNA, 19 nt, Artificial Sequence
  Description of Artificial Sequence: Synthetic oligonucleotide
uuacuuccggcaauuauaa

SEQ ID NO: 580656 - RNA, 19 nt, Artificial Sequence
  Description of Artificial Sequence: Synthetic oligonucleotide
caugugguacuuuaacuac

SEQ ID NO: 580657 - RNA, 19 nt, Artificial Sequence
  Description of Artificial Sequence: Synthetic oligonucleotide
agaaucccgaguaugucgc

SEQ ID NO: 580658 - RNA, 19 nt, Artificial Sequence
  Description of Artificial Sequence: Synthetic oligonucleotide
ucaccgugaagccagucug

SEQ ID NO: 580659 - RNA, 19 nt, Artificial Sequence
  Description of Artificial Sequence: Synthetic oligonucleotide
guaccuucagcauucggcc

SEQ ID NO: 580660 - RNA, 19 nt, Artificial Sequence
  Description of Artificial Sequence: Synthetic oligonucleotide
agcccuuaugccucugucc

SEQ ID NO: 580661 - RNA, 19 nt, Artificial Sequence
  Description of Artificial Sequence: Synthetic oligonucleotide
acuacccguaaucuacugg

SEQ ID NO: 580662 - RNA, 19 nt, Artificial Sequence
  Description of Artificial Sequence: Synthetic oligonucleotide
uauguaugccaaaggcuug

SEQ ID NO: 580663 - RNA, 19 nt, Artificial Sequence
  Description of Artificial Sequence: Synthetic oligonucleotide
ugucgcucaucgaaacugg

SEQ ID NO: 580664 - RNA, 19 nt, Artificial Sequence
  Description of Artificial Sequence: Synthetic oligonucleotide
aacgguagagacauggcca

SEQ ID NO: 580665 - RNA, 19 nt, Artificial Sequence
  Description of Artificial Sequence: Synthetic oligonucleotide
cacuaucucaguuaccaug

SEQ ID NO: 580666 - RNA, 19 nt, Artificial Sequence
  Description of Artificial Sequence: Synthetic oligonucleotide
ugggcuccaucucacaugc

SEQ ID NO: 580667 - RNA, 19 nt, Artificial Sequence
  Description of Artificial Sequence: Synthetic oligonucleotide
guuuacuggaaagaugcag

SEQ ID NO: 580668 - RNA, 19 nt, Artificial Sequence
  Description of Artificial Sequence: Synthetic oligonucleotide
gaauugugugaucaccgug

SEQ ID NO: 580669 - RNA, 19 nt, Artificial Sequence
  Description of Artificial Sequence: Synthetic oligonucleotide
gaaggcgcccuccaugacg

SEQ ID NO: 580670 - RNA, 19 nt, Artificial Sequence
  Description of Artificial Sequence: Synthetic oligonucleotide
uucaugugagcguaaggcu

SEQ ID NO: 580671 - RNA, 19 nt, Artificial Sequence
  Description of Artificial Sequence: Synthetic oligonucleotide
aauuguccggcuuguccag

SEQ ID NO: 580672 - RNA, 19 nt, Artificial Sequence
  Description of Artificial Sequence: Synthetic oligonucleotide
acgauaaugagugacuagu

SEQ ID NO: 580673 - RNA, 19 nt, Artificial Sequence
  Description of Artificial Sequence: Synthetic oligonucleotide
aaccagaucuucgucaacu

SEQ ID NO: 580674 - RNA, 19 nt, Artificial Sequence
  Description of Artificial Sequence: Synthetic oligonucleotide
ucucacgccaucagaacca

SEQ ID NO: 580675 - RNA, 19 nt, Artificial Sequence
  Description of Artificial Sequence: Synthetic oligonucleotide
caaugcuaaguuuauuauc

SEQ ID NO: 580676 - RNA, 19 nt, Artificial Sequence
  Description of Artificial Sequence: Synthetic oligonucleotide
aaagucggaggcccaaagu

SEQ ID NO: 580677 - RNA, 19 nt, Artificial Sequence
  Description of Artificial Sequence: Synthetic oligonucleotide
agacaacucaacuggugag

SEQ ID NO: 580678 - RNA, 19 nt, Artificial Sequence
  Description of Artificial Sequence: Synthetic oligonucleotide
ugcucauuggacaagccuu

SEQ ID NO: 580679 - RNA, 19 nt, Artificial Sequence
  Description of Artificial Sequence: Synthetic oligonucleotide
agcaaucucccagaggacg

SEQ ID NO: 580680 - RNA, 19 nt, Artificial Sequence
  Description of Artificial Sequence: Synthetic oligonucleotide
caauaaugcgcugggagcc

SEQ ID NO: 580681 - RNA, 19 nt, Artificial Sequence
  Description of Artificial Sequence: Synthetic oligonucleotide
aagcccuuaugccucuguc

SEQ ID NO: 580682 - RNA, 19 nt, Artificial Sequence
  Description of Artificial Sequence: Synthetic oligonucleotide
ggacuuagaagcccgauug

SEQ ID NO: 580683 - RNA, 19 nt, Artificial Sequence
  Description of Artificial Sequence: Synthetic oligonucleotide
uaaaccagaucuucgucaa

SEQ ID NO: 580684 - RNA, 19 nt, Artificial Sequence
  Description of Artificial Sequence: Synthetic oligonucleotide
aaaccagaucuucgucaac

SEQ ID NO: 580685 - RNA, 19 nt, Artificial Sequence
  Description of Artificial Sequence: Synthetic oligonucleotide
gacgaagcgaagaacuugc

SEQ ID NO: 580686 - RNA, 19 nt, Artificial Sequence
  Description of Artificial Sequence: Synthetic oligonucleotide
uggccaauaaugcgcuggg

SEQ ID NO: 580687 - RNA, 19 nt, Artificial Sequence
  Description of Artificial Sequence: Synthetic oligonucleotide
agaguaauagaaacucaag

SEQ ID NO: 580688 - RNA, 19 nt, Artificial Sequence
  Description of Artificial Sequence: Synthetic oligonucleotide
uagcuuuagccauucaaaa

SEQ ID NO: 580689 - RNA, 19 nt, Artificial Sequence
  Description of Artificial Sequence: Synthetic oligonucleotide
ucuuguaaaccagaucuuc

SEQ ID NO: 580690 - RNA, 19 nt, Artificial Sequence
  Description of Artificial Sequence: Synthetic oligonucleotide
acaacucaacuggugaggg

SEQ ID NO: 580691 - RNA, 19 nt, Artificial Sequence
  Description of Artificial Sequence: Synthetic oligonucleotide
gucacuaucucaguuacca

SEQ ID NO: 580692 - RNA, 19 nt, Artificial Sequence
  Description of Artificial Sequence: Synthetic oligonucleotide
agaguuuguucuguauugg

SEQ ID NO: 580693 - RNA, 19 nt, Artificial Sequence
  Description of Artificial Sequence: Synthetic oligonucleotide
ugugguacuuuaacuacua

SEQ ID NO: 580694 - RNA, 19 nt, Artificial Sequence
  Description of Artificial Sequence: Synthetic oligonucleotide
ucacguccaaauguggucc

SEQ ID NO: 580695 - RNA, 19 nt, Artificial Sequence
  Description of Artificial Sequence: Synthetic oligonucleotide
uccaugacgaagcgaagaa

SEQ ID NO: 580696 - RNA, 19 nt, Artificial Sequence
  Description of Artificial Sequence: Synthetic oligonucleotide
aguguagcaaucucccaga

SEQ ID NO: 580697 - RNA, 19 nt, Artificial Sequence
  Description of Artificial Sequence: Synthetic oligonucleotide
ucgucaacugacuacccgu

SEQ ID NO: 580698 - RNA, 19 nt, Artificial Sequence
  Description of Artificial Sequence: Synthetic oligonucleotide
ugcauuauuggcgaugcau

SEQ ID NO: 580699 - RNA, 19 nt, Artificial Sequence
  Description of Artificial Sequence: Synthetic oligonucleotide
uugcgucucuaaauaacca

SEQ ID NO: 580700 - RNA, 19 nt, Artificial Sequence
  Description of Artificial Sequence: Synthetic oligonucleotide
uggaaagaugcagacacaa

SEQ ID NO: 580701 - RNA, 19 nt, Artificial Sequence
  Description of Artificial Sequence: Synthetic oligonucleotide
auggccaauaaugcgcugg

SEQ ID NO: 580702 - RNA, 19 nt, Artificial Sequence
  Description of Artificial Sequence: Synthetic oligonucleotide
ucacaugcgcaugaguuca

SEQ ID NO: 580703 - RNA, 19 nt, Artificial Sequence
  Description of Artificial Sequence: Synthetic oligonucleotide
ucaacugacuacccguaau

SEQ ID NO: 580704 - RNA, 19 nt, Artificial Sequence
  Description of Artificial Sequence: Synthetic oligonucleotide
agaauugugugaucaccgu

SEQ ID NO: 580705 - RNA, 19 nt, Artificial Sequence
  Description of Artificial Sequence: Synthetic oligonucleotide
aacugacuacccguaaucu

SEQ ID NO: 580706 - RNA, 19 nt, Artificial Sequence
  Description of Artificial Sequence: Synthetic oligonucleotide
aaacgauaaugagugacua

SEQ ID NO: 580707 - RNA, 19 nt, Artificial Sequence
  Description of Artificial Sequence: Synthetic oligonucleotide
ggccuuaaauauaaguagg

SEQ ID NO: 580708 - RNA, 19 nt, Artificial Sequence
  Description of Artificial Sequence: Synthetic oligonucleotide
uguuuacuggaaagaugca

SEQ ID NO: 580709 - RNA, 19 nt, Artificial Sequence
  Description of Artificial Sequence: Synthetic oligonucleotide
guaguagaaggagaccucc

SEQ ID NO: 580710 - RNA, 19 nt, Artificial Sequence
  Description of Artificial Sequence: Synthetic oligonucleotide
aaccauccgggugucaaag

SEQ ID NO: 580711 - RNA, 19 nt, Artificial Sequence
  Description of Artificial Sequence: Synthetic oligonucleotide
gucucacgccaucagaacc

SEQ ID NO: 580712 - RNA, 19 nt, Artificial Sequence
  Description of Artificial Sequence: Synthetic oligonucleotide
cuacccguaaucuacugga

SEQ ID NO: 580713 - RNA, 19 nt, Artificial Sequence
  Description of Artificial Sequence: Synthetic oligonucleotide
caaauugggcauauugaca

SEQ ID NO: 580714 - RNA, 19 nt, Artificial Sequence
  Description of Artificial Sequence: Synthetic oligonucleotide
ugacgaagcgaagaacuug

SEQ ID NO: 580715 - RNA, 19 nt, Artificial Sequence
  Description of Artificial Sequence: Synthetic oligonucleotide
gccaauaaugcgcugggag

SEQ ID NO: 580716 - RNA, 19 nt, Artificial Sequence
  Description of Artificial Sequence: Synthetic oligonucleotide
uccacaugugacuuagcuc

SEQ ID NO: 580717 - RNA, 19 nt, Artificial Sequence
  Description of Artificial Sequence: Synthetic oligonucleotide
agcuuuagccauucaaaau

SEQ ID NO: 580718 - RNA, 19 nt, Artificial Sequence
  Description of Artificial Sequence: Synthetic oligonucleotide
ucgacguggucucacgcca

SEQ ID NO: 580719 - RNA, 19 nt, Artificial Sequence
  Description of Artificial Sequence: Synthetic oligonucleotide
cagaguaauagaaacucaa

SEQ ID NO: 580720 - RNA, 19 nt, Artificial Sequence
  Description of Artificial Sequence: Synthetic oligonucleotide
cauuuaauuaguucuugua

SEQ ID NO: 580721 - RNA, 19 nt, Artificial Sequence
  Description of Artificial Sequence: Synthetic oligonucleotide
gugagcguaaggcugucgc

SEQ ID NO: 580722 - RNA, 19 nt, Artificial Sequence
  Description of Artificial Sequence: Synthetic oligonucleotide
ugcgucucuaaauaaccau

SEQ ID NO: 580723 - RNA, 19 nt, Artificial Sequence
  Description of Artificial Sequence: Synthetic oligonucleotide
uagaaggagaccuccugaa

SEQ ID NO: 580724 - RNA, 19 nt, Artificial Sequence
  Description of Artificial Sequence: Synthetic oligonucleotide
aaucccgaguaugucgcag

SEQ ID NO: 580725 - RNA, 19 nt, Artificial Sequence
  Description of Artificial Sequence: Synthetic oligonucleotide
aaaucccuagcaugcccca

SEQ ID NO: 580726 - RNA, 19 nt, Artificial Sequence
  Description of Artificial Sequence: Synthetic oligonucleotide
caaugguaucuucuggaac

SEQ ID NO: 580727 - RNA, 19 nt, Artificial Sequence
  Description of Artificial Sequence: Synthetic oligonucleotide
ucaugucacuaucucaguu

SEQ ID NO: 580728 - RNA, 19 nt, Artificial Sequence
  Description of Artificial Sequence: Synthetic oligonucleotide
auuacuuccggcaauuaua

SEQ ID NO: 580729 - RNA, 19 nt, Artificial Sequence
  Description of Artificial Sequence: Synthetic oligonucleotide
aagcgaagaacuugcucau

SEQ ID NO: 580730 - RNA, 19 nt, Artificial Sequence
  Description of Artificial Sequence: Synthetic oligonucleotide
agcgguacgcucuccaugu

SEQ ID NO: 580731 - RNA, 19 nt, Artificial Sequence
  Description of Artificial Sequence: Synthetic oligonucleotide
aaaaugcauuauuggcgau

SEQ ID NO: 580732 - RNA, 19 nt, Artificial Sequence
  Description of Artificial Sequence: Synthetic oligonucleotide
aucaccgugaagccagucu

SEQ ID NO: 580733 - RNA, 19 nt, Artificial Sequence
  Description of Artificial Sequence: Synthetic oligonucleotide
cagaaaguuauuuuaugua

SEQ ID NO: 580734 - RNA, 19 nt, Artificial Sequence
  Description of Artificial Sequence: Synthetic oligonucleotide
uccaucaacccaacccaca

SEQ ID NO: 580735 - RNA, 19 nt, Artificial Sequence
  Description of Artificial Sequence: Synthetic oligonucleotide
caugacgaagcgaagaacu

SEQ ID NO: 580736 - RNA, 19 nt, Artificial Sequence
  Description of Artificial Sequence: Synthetic oligonucleotide
auaaguaggcacagccuuc

SEQ ID NO: 580737 - RNA, 19 nt, Artificial Sequence
  Description of Artificial Sequence: Synthetic oligonucleotide
ggaaacgauaaugagugac

SEQ ID NO: 580738 - RNA, 19 nt, Artificial Sequence
  Description of Artificial Sequence: Synthetic oligonucleotide
cccauaguuagacaauucc

SEQ ID NO: 580739 - RNA, 19 nt, Artificial Sequence
  Description of Artificial Sequence: Synthetic oligonucleotide
guaugucgcaguaacagga

SEQ ID NO: 580740 - RNA, 19 nt, Artificial Sequence
  Description of Artificial Sequence: Synthetic oligonucleotide
caauuguccggcuugucca

SEQ ID NO: 580741 - RNA, 19 nt, Artificial Sequence
  Description of Artificial Sequence: Synthetic oligonucleotide
agaagcccgauuggaaacg

SEQ ID NO: 580742 - RNA, 19 nt, Artificial Sequence
  Description of Artificial Sequence: Synthetic oligonucleotide
ucauuggacaagccuuggu

SEQ ID NO: 580743 - RNA, 19 nt, Artificial Sequence
  Description of Artificial Sequence: Synthetic oligonucleotide
aacccaacccacaaauggu

SEQ ID NO: 580744 - RNA, 19 nt, Artificial Sequence
  Description of Artificial Sequence: Synthetic oligonucleotide
uaacuuaacccauguggua

SEQ ID NO: 580745 - RNA, 19 nt, Artificial Sequence
  Description of Artificial Sequence: Synthetic oligonucleotide
uguaacaaauugggcauau

SEQ ID NO: 580746 - RNA, 19 nt, Artificial Sequence
  Description of Artificial Sequence: Synthetic oligonucleotide
aacaaacauccuaucuuga

SEQ ID NO: 580747 - RNA, 19 nt, Artificial Sequence
  Description of Artificial Sequence: Synthetic oligonucleotide
ugacuuagcucuguaaguu

SEQ ID NO: 580748 - RNA, 19 nt, Artificial Sequence
  Description of Artificial Sequence: Synthetic oligonucleotide
caacugacuacccguaauc

SEQ ID NO: 580749 - RNA, 19 nt, Artificial Sequence
  Description of Artificial Sequence: Synthetic oligonucleotide
gaguuugcgucucuaaaua

SEQ ID NO: 580750 - RNA, 19 nt, Artificial Sequence
  Description of Artificial Sequence: Synthetic oligonucleotide
guuugcgucucuaaauaac

SEQ ID NO: 580751 - RNA, 19 nt, Artificial Sequence
  Description of Artificial Sequence: Synthetic oligonucleotide
agugagaaagucugaccau

SEQ ID NO: 580752 - RNA, 19 nt, Artificial Sequence
  Description of Artificial Sequence: Synthetic oligonucleotide
cauccuaucuugaaguucu

SEQ ID NO: 580753 - RNA, 19 nt, Artificial Sequence
  Description of Artificial Sequence: Synthetic oligonucleotide
aguuugcgucucuaaauaa

SEQ ID NO: 580754 - RNA, 19 nt, Artificial Sequence
  Description of Artificial Sequence: Synthetic oligonucleotide
auuauuggcgaugcaucug

SEQ ID NO: 580755 - RNA, 19 nt, Artificial Sequence
  Description of Artificial Sequence: Synthetic oligonucleotide
ugacuacccguaaucuacu

SEQ ID NO: 580756 - RNA, 19 nt, Artificial Sequence
  Description of Artificial Sequence: Synthetic oligonucleotide
uugugugaucaccgugaag

SEQ ID NO: 580757 - RNA, 19 nt, Artificial Sequence
  Description of Artificial Sequence: Synthetic oligonucleotide
cucacaugcgcaugaguuc

SEQ ID NO: 580758 - RNA, 19 nt, Artificial Sequence
  Description of Artificial Sequence: Synthetic oligonucleotide
caaagucggaggcccaaag

SEQ ID NO: 580759 - RNA, 19 nt, Artificial Sequence
  Description of Artificial Sequence: Synthetic oligonucleotide
cucgacguggucucacgcc

SEQ ID NO: 580760 - RNA, 19 nt, Artificial Sequence
  Description of Artificial Sequence: Synthetic oligonucleotide
acccguaaucuacuggacu

SEQ ID NO: 580761 - RNA, 19 nt, Artificial Sequence
  Description of Artificial Sequence: Synthetic oligonucleotide
cuuccggcaauuauaaacu

SEQ ID NO: 580762 - RNA, 19 nt, Artificial Sequence
  Description of Artificial Sequence: Synthetic oligonucleotide
caugcgcaugaguucaaac

SEQ ID NO: 580763 - RNA, 19 nt, Artificial Sequence
  Description of Artificial Sequence: Synthetic oligonucleotide
uggacuuagaagcccgauu

SEQ ID NO: 580764 - RNA, 19 nt, Artificial Sequence
  Description of Artificial Sequence: Synthetic oligonucleotide
gcaauuguccggcuugucc

SEQ ID NO: 580765 - RNA, 19 nt, Artificial Sequence
  Description of Artificial Sequence: Synthetic oligonucleotide
gaaacgauaaugagugacu

SEQ ID NO: 580766 - RNA, 19 nt, Artificial Sequence
  Description of Artificial Sequence: Synthetic oligonucleotide
accaucacguccaaaugug

SEQ ID NO: 580767 - RNA, 19 nt, Artificial Sequence
  Description of Artificial Sequence: Synthetic oligonucleotide
aagaagcccucugaacugu

SEQ ID NO: 580768 - RNA, 19 nt, Artificial Sequence
  Description of Artificial Sequence: Synthetic oligonucleotide
uaucugaaccaaugcccac

SEQ ID NO: 580769 - RNA, 19 nt, Artificial Sequence
  Description of Artificial Sequence: Synthetic oligonucleotide
ggucucuaucuucaguacc

SEQ ID NO: 580770 - RNA, 19 nt, Artificial Sequence
  Description of Artificial Sequence: Synthetic oligonucleotide
agagcacaaugcuaaguuu

SEQ ID NO: 580771 - RNA, 19 nt, Artificial Sequence
  Description of Artificial Sequence: Synthetic oligonucleotide
ugagcguaaggcugucgcu

SEQ ID NO: 580772 - RNA, 19 nt, Artificial Sequence
  Description of Artificial Sequence: Synthetic oligonucleotide
aggcacauauguauguaug

SEQ ID NO: 580773 - RNA, 19 nt, Artificial Sequence
  Description of Artificial Sequence: Synthetic oligonucleotide
uccuaucuugaaguucuca

SEQ ID NO: 580774 - RNA, 19 nt, Artificial Sequence
  Description of Artificial Sequence: Synthetic oligonucleotide
acagaguaauagaaacuca

SEQ ID NO: 580775 - RNA, 19 nt, Artificial Sequence
  Description of Artificial Sequence: Synthetic oligonucleotide
gacuacccguaaucuacug

SEQ ID NO: 580776 - RNA, 19 nt, Artificial Sequence
  Description of Artificial Sequence: Synthetic oligonucleotide
acugacuacccguaaucua

SEQ ID NO: 580777 - RNA, 19 nt, Artificial Sequence
  Description of Artificial Sequence: Synthetic oligonucleotide
acgccaucagaaccaucac

SEQ ID NO: 580778 - RNA, 19 nt, Artificial Sequence
  Description of Artificial Sequence: Synthetic oligonucleotide
gagcacaaugcuaaguuua

SEQ ID NO: 580779 - RNA, 19 nt, Artificial Sequence
  Description of Artificial Sequence: Synthetic oligonucleotide
auaaccauccgggugucaa

SEQ ID NO: 580780 - RNA, 19 nt, Artificial Sequence
  Description of Artificial Sequence: Synthetic oligonucleotide
cuugcacaucagaauugug

SEQ ID NO: 580781 - RNA, 19 nt, Artificial Sequence
  Description of Artificial Sequence: Synthetic oligonucleotide
gcaagagagguucacuuca

SEQ ID NO: 580782 - RNA, 19 nt, Artificial Sequence
  Description of Artificial Sequence: Synthetic oligonucleotide
auugugugaucaccgugaa

SEQ ID NO: 580783 - RNA, 19 nt, Artificial Sequence
  Description of Artificial Sequence: Synthetic oligonucleotide
cauuggacaagccuuggua

SEQ ID NO: 580784 - RNA, 19 nt, Artificial Sequence
  Description of Artificial Sequence: Synthetic oligonucleotide
cuacuggacuuagaagccc

SEQ ID NO: 580785 - RNA, 19 nt, Artificial Sequence
  Description of Artificial Sequence: Synthetic oligonucleotide
cuucgucaacugacuaccc

SEQ ID NO: 580786 - RNA, 19 nt, Artificial Sequence
  Description of Artificial Sequence: Synthetic oligonucleotide
uacccguaaucuacuggac

SEQ ID NO: 580787 - RNA, 19 nt, Artificial Sequence
  Description of Artificial Sequence: Synthetic oligonucleotide
gaguggugaagacuccguc

SEQ ID NO: 580788 - RNA, 19 nt, Artificial Sequence
  Description of Artificial Sequence: Synthetic oligonucleotide
acauauuugcacacacaga

SEQ ID NO: 580789 - RNA, 19 nt, Artificial Sequence
  Description of Artificial Sequence: Synthetic oligonucleotide
cagcauucggccuuaaaua

SEQ ID NO: 580790 - RNA, 19 nt, Artificial Sequence
  Description of Artificial Sequence: Synthetic oligonucleotide
aaucccuagcaugccccag

SEQ ID NO: 580791 - RNA, 19 nt, Artificial Sequence
  Description of Artificial Sequence: Synthetic oligonucleotide
gcccuuaugccucuguccc

SEQ ID NO: 580792 - RNA, 19 nt, Artificial Sequence
  Description of Artificial Sequence: Synthetic oligonucleotide
acgguagagacauggccaa

SEQ ID NO: 580793 - RNA, 19 nt, Artificial Sequence
  Description of Artificial Sequence: Synthetic oligonucleotide
acaagccuugguauggcug

SEQ ID NO: 580794 - RNA, 19 nt, Artificial Sequence
  Description of Artificial Sequence: Synthetic oligonucleotide
ugugagcguaaggcugucg

SEQ ID NO: 580795 - RNA, 19 nt, Artificial Sequence
  Description of Artificial Sequence: Synthetic oligonucleotide
uggaaacgauaaugaguga

SEQ ID NO: 580796 - RNA, 19 nt, Artificial Sequence
  Description of Artificial Sequence: Synthetic oligonucleotide
agcguaaggcugucgcuca

SEQ ID NO: 580797 - RNA, 19 nt, Artificial Sequence
  Description of Artificial Sequence: Synthetic oligonucleotide
ucccaaugcugcugcuuag

SEQ ID NO: 580798 - RNA, 19 nt, Artificial Sequence
  Description of Artificial Sequence: Synthetic oligonucleotide
ccgauuggaaacgauaaug

SEQ ID NO: 580799 - RNA, 19 nt, Artificial Sequence
  Description of Artificial Sequence: Synthetic oligonucleotide
ucaaggaguuugcgucucu

SEQ ID NO: 580800 - RNA, 19 nt, Artificial Sequence
  Description of Artificial Sequence: Synthetic oligonucleotide
ucggaggcccaaagugaag

SEQ ID NO: 580801 - RNA, 19 nt, Artificial Sequence
  Description of Artificial Sequence: Synthetic oligonucleotide
gcucaucgaaacuggcacg

SEQ ID NO: 580802 - RNA, 19 nt, Artificial Sequence
  Description of Artificial Sequence: Synthetic oligonucleotide
cagcaugucagggcaauug

SEQ ID NO: 580803 - RNA, 19 nt, Artificial Sequence
  Description of Artificial Sequence: Synthetic oligonucleotide
ugagugcuuucuggcagag

SEQ ID NO: 580804 - RNA, 19 nt, Artificial Sequence
  Description of Artificial Sequence: Synthetic oligonucleotide
ugggcauauugacauucuu

SEQ ID NO: 580805 - RNA, 19 nt, Artificial Sequence
  Description of Artificial Sequence: Synthetic oligonucleotide
ugaguucaaacagcauguc

SEQ ID NO: 580806 - RNA, 19 nt, Artificial Sequence
  Description of Artificial Sequence: Synthetic oligonucleotide
agaaggcgcccuccaugac

SEQ ID NO: 580807 - RNA, 19 nt, Artificial Sequence
  Description of Artificial Sequence: Synthetic oligonucleotide
uccaucucacaugcgcaug

SEQ ID NO: 580808 - RNA, 19 nt, Artificial Sequence
  Description of Artificial Sequence: Synthetic oligonucleotide
ccuagcaugccccagacaa

SEQ ID NO: 580809 - RNA, 19 nt, Artificial Sequence
  Description of Artificial Sequence: Synthetic oligonucleotide
gagcguaaggcugucgcuc

SEQ ID NO: 580810 - RNA, 19 nt, Artificial Sequence
  Description of Artificial Sequence: Synthetic oligonucleotide
ccgaguaugucgcaguaac

SEQ ID NO: 580811 - RNA, 19 nt, Artificial Sequence
  Description of Artificial Sequence: Synthetic oligonucleotide
augugguacuuuaacuacu

SEQ ID NO: 580812 - RNA, 19 nt, Artificial Sequence
  Description of Artificial Sequence: Synthetic oligonucleotide
cuuagcccaggaaaugaaa

SEQ ID NO: 580813 - RNA, 19 nt, Artificial Sequence
  Description of Artificial Sequence: Synthetic oligonucleotide
aucccuagcaugccccaga

SEQ ID NO: 580814 - RNA, 19 nt, Artificial Sequence
  Description of Artificial Sequence: Synthetic oligonucleotide
uucagcauucggccuuaaa

SEQ ID NO: 580815 - RNA, 19 nt, Artificial Sequence
  Description of Artificial Sequence: Synthetic oligonucleotide
cauuauuggcgaugcaucu

SEQ ID NO: 580816 - RNA, 19 nt, Artificial Sequence
  Description of Artificial Sequence: Synthetic oligonucleotide
aaccaguacuccagggccu

SEQ ID NO: 580817 - RNA, 19 nt, Artificial Sequence
  Description of Artificial Sequence: Synthetic oligonucleotide
gucgcaguaacaggaauaa

SEQ ID NO: 580818 - RNA, 19 nt, Artificial Sequence
  Description of Artificial Sequence: Synthetic oligonucleotide
uuccggcaauuauaaacua

SEQ ID NO: 580819 - RNA, 19 nt, Artificial Sequence
  Description of Artificial Sequence: Synthetic oligonucleotide
ucagaaggaguggaucuuu

SEQ ID NO: 580820 - RNA, 19 nt, Artificial Sequence
  Description of Artificial Sequence: Synthetic oligonucleotide
caccuaguucagagcagag

SEQ ID NO: 580821 - RNA, 19 nt, Artificial Sequence
  Description of Artificial Sequence: Synthetic oligonucleotide
cagaaggcgcccuccauga

SEQ ID NO: 580822 - RNA, 19 nt, Artificial Sequence
  Description of Artificial Sequence: Synthetic oligonucleotide
agucggaggcccaaaguga

SEQ ID NO: 580823 - RNA, 19 nt, Artificial Sequence
  Description of Artificial Sequence: Synthetic oligonucleotide
cacggagaaccaguacucc

SEQ ID NO: 580824 - RNA, 19 nt, Artificial Sequence
  Description of Artificial Sequence: Synthetic oligonucleotide
uaaggcugucgcucaucga

SEQ ID NO: 580825 - RNA, 19 nt, Artificial Sequence
  Description of Artificial Sequence: Synthetic oligonucleotide
gggaaaaguguuuuaaauu

SEQ ID NO: 580826 - RNA, 19 nt, Artificial Sequence
  Description of Artificial Sequence: Synthetic oligonucleotide
cagugauuaugaaguucuc

SEQ ID NO: 580827 - RNA, 19 nt, Artificial Sequence
  Description of Artificial Sequence: Synthetic oligonucleotide
cugaagcccucccauaaaa

SEQ ID NO: 580828 - RNA, 19 nt, Artificial Sequence
  Description of Artificial Sequence: Synthetic oligonucleotide
gguucagaaggaguggauc

SEQ ID NO: 580829 - RNA, 19 nt, Artificial Sequence
  Description of Artificial Sequence: Synthetic oligonucleotide
ccaucacguccaaaugugg

SEQ ID NO: 580830 - RNA, 19 nt, Artificial Sequence
  Description of Artificial Sequence: Synthetic oligonucleotide
ccuaaugcauggucauccc

SEQ ID NO: 580831 - RNA, 19 nt, Artificial Sequence
  Description of Artificial Sequence: Synthetic oligonucleotide
ggggaaaaguguuuuaaau

SEQ ID NO: 580832 - RNA, 19 nt, Artificial Sequence
  Description of Artificial Sequence: Synthetic oligonucleotide
uuguccggcuuguccagaa

SEQ ID NO: 580833 - RNA, 19 nt, Artificial Sequence
  Description of Artificial Sequence: Synthetic oligonucleotide
aggggugauggagucugag

SEQ ID NO: 580834 - RNA, 19 nt, Artificial Sequence
  Description of Artificial Sequence: Synthetic oligonucleotide
uuaugccucuguccccaau

SEQ ID NO: 580835 - RNA, 19 nt, Artificial Sequence
  Description of Artificial Sequence: Synthetic oligonucleotide
ucaaagucggaggcccaaa

SEQ ID NO: 580836 - RNA, 19 nt, Artificial Sequence
  Description of Artificial Sequence: Synthetic oligonucleotide
ccagacaacucaacuggug

SEQ ID NO: 580837 - RNA, 19 nt, Artificial Sequence
  Description of Artificial Sequence: Synthetic oligonucleotide
caucacguccaaauguggu

SEQ ID NO: 580838 - RNA, 19 nt, Artificial Sequence
  Description of Artificial Sequence: Synthetic oligonucleotide
ggcacggagaaccaguacu

SEQ ID NO: 580839 - RNA, 19 nt, Artificial Sequence
  Description of Artificial Sequence: Synthetic oligonucleotide
cagcgguacgcucuccaug

SEQ ID NO: 580840 - RNA, 19 nt, Artificial Sequence
  Description of Artificial Sequence: Synthetic oligonucleotide
ccagaggacgaccccaaag

SEQ ID NO: 580841 - RNA, 19 nt, Artificial Sequence
  Description of Artificial Sequence: Synthetic oligonucleotide
ugaucaccgugaagccagu

SEQ ID NO: 580842 - RNA, 19 nt, Artificial Sequence
  Description of Artificial Sequence: Synthetic oligonucleotide
uauuggcgaugcaucuguu

SEQ ID NO: 580843 - RNA, 19 nt, Artificial Sequence
  Description of Artificial Sequence: Synthetic oligonucleotide
gaaucccgaguaugucgca

SEQ ID NO: 580844 - RNA, 19 nt, Artificial Sequence
  Description of Artificial Sequence: Synthetic oligonucleotide
ggccuuguguccugagugc

SEQ ID NO: 580845 - RNA, 19 nt, Artificial Sequence
  Description of Artificial Sequence: Synthetic oligonucleotide
caugugagcguaaggcugu

SEQ ID NO: 580846 - RNA, 19 nt, Artificial Sequence
  Description of Artificial Sequence: Synthetic oligonucleotide
accaccuaguucagagcag

SEQ ID NO: 580847 - RNA, 19 nt, Artificial Sequence
  Description of Artificial Sequence: Synthetic oligonucleotide
cgcucaucgaaacuggcac

SEQ ID NO: 580848 - RNA, 19 nt, Artificial Sequence
  Description of Artificial Sequence: Synthetic oligonucleotide
agaagcccucugaacuguc

SEQ ID NO: 580849 - RNA, 19 nt, Artificial Sequence
  Description of Artificial Sequence: Synthetic oligonucleotide
caagagagguucacuucaa

SEQ ID NO: 580850 - RNA, 19 nt, Artificial Sequence
  Description of Artificial Sequence: Synthetic oligonucleotide
gaagcccgauuggaaacga

SEQ ID NO: 580851 - RNA, 19 nt, Artificial Sequence
  Description of Artificial Sequence: Synthetic oligonucleotide
ggaacgguagagacauggc

SEQ ID NO: 580852 - RNA, 19 nt, Artificial Sequence
  Description of Artificial Sequence: Synthetic oligonucleotide
ggucucacgccaucagaac

SEQ ID NO: 580853 - RNA, 19 nt, Artificial Sequence
  Description of Artificial Sequence: Synthetic oligonucleotide
cacaucagaauugugugau

SEQ ID NO: 580854 - RNA, 19 nt, Artificial Sequence
  Description of Artificial Sequence: Synthetic oligonucleotide
cauggccaauaaugcgcug

SEQ ID NO: 580855 - RNA, 19 nt, Artificial Sequence
  Description of Artificial Sequence: Synthetic oligonucleotide
augcauuauuggcgaugca

SEQ ID NO: 580856 - RNA, 19 nt, Artificial Sequence
  Description of Artificial Sequence: Synthetic oligonucleotide
agccucgacguggucucac

SEQ ID NO: 580857 - RNA, 19 nt, Artificial Sequence
  Description of Artificial Sequence: Synthetic oligonucleotide
cuccucgcuguaguagaag

SEQ ID NO: 580858 - RNA, 19 nt, Artificial Sequence
  Description of Artificial Sequence: Synthetic oligonucleotide
gcgucucuaaauaaccauc

SEQ ID NO: 580859 - RNA, 19 nt, Artificial Sequence
  Description of Artificial Sequence: Synthetic oligonucleotide
augacgaagcgaagaacuu

SEQ ID NO: 580860 - RNA, 19 nt, Artificial Sequence
  Description of Artificial Sequence: Synthetic oligonucleotide
gacaagccuugguauggcu

SEQ ID NO: 580861 - RNA, 19 nt, Artificial Sequence
  Description of Artificial Sequence: Synthetic oligonucleotide
aacccacaaaugguuccua

SEQ ID NO: 580862 - RNA, 19 nt, Artificial Sequence
  Description of Artificial Sequence: Synthetic oligonucleotide
agcccgauuggaaacgaua

SEQ ID NO: 580863 - RNA, 19 nt, Artificial Sequence
  Description of Artificial Sequence: Synthetic oligonucleotide
auucggccuuaaauauaag

SEQ ID NO: 580864 - RNA, 19 nt, Artificial Sequence
  Description of Artificial Sequence: Synthetic oligonucleotide
ggcugucgcucaucgaaac

SEQ ID NO: 580865 - RNA, 19 nt, Artificial Sequence
  Description of Artificial Sequence: Synthetic oligonucleotide
auccuaucuugaaguucuc

SEQ ID NO: 580866 - RNA, 19 nt, Artificial Sequence
  Description of Artificial Sequence: Synthetic oligonucleotide
acguccaaaugugguccag

SEQ ID NO: 580867 - RNA, 19 nt, Artificial Sequence
  Description of Artificial Sequence: Synthetic oligonucleotide
cgaugcaucuguuccauca

SEQ ID NO: 580868 - RNA, 19 nt, Artificial Sequence
  Description of Artificial Sequence: Synthetic oligonucleotide
agcaugccccagacaacuc

SEQ ID NO: 580869 - RNA, 19 nt, Artificial Sequence
  Description of Artificial Sequence: Synthetic oligonucleotide
ucgcaguaacaggaauaaa

SEQ ID NO: 580870 - RNA, 19 nt, Artificial Sequence
  Description of Artificial Sequence: Synthetic oligonucleotide
cguucaugugagcguaagg

SEQ ID NO: 580871 - RNA, 19 nt, Artificial Sequence
  Description of Artificial Sequence: Synthetic oligonucleotide
cgcaugaguucaaacagca

SEQ ID NO: 580872 - RNA, 19 nt, Artificial Sequence
  Description of Artificial Sequence: Synthetic oligonucleotide
uccgggugucaaagucgga

SEQ ID NO: 580873 - RNA, 19 nt, Artificial Sequence
  Description of Artificial Sequence: Synthetic oligonucleotide
acgaccccaaaggaccaga

SEQ ID NO: 580874 - RNA, 19 nt, Artificial Sequence
  Description of Artificial Sequence: Synthetic oligonucleotide
gucggaggcccaaagugaa

SEQ ID NO: 580875 - RNA, 19 nt, Artificial Sequence
  Description of Artificial Sequence: Synthetic oligonucleotide
gcgcaugaguucaaacagc

SEQ ID NO: 580876 - RNA, 19 nt, Artificial Sequence
  Description of Artificial Sequence: Synthetic oligonucleotide
cguaaucuacuggacuuag

SEQ ID NO: 580877 - RNA, 19 nt, Artificial Sequence
  Description of Artificial Sequence: Synthetic oligonucleotide
cacguccaaauguggucca

SEQ ID NO: 580878 - RNA, 19 nt, Artificial Sequence
  Description of Artificial Sequence: Synthetic oligonucleotide
auuguccggcuuguccaga

SEQ ID NO: 580879 - RNA, 19 nt, Artificial Sequence
  Description of Artificial Sequence: Synthetic oligonucleotide
gaucaccgugaagccaguc

SEQ ID NO: 580880 - RNA, 19 nt, Artificial Sequence
  Description of Artificial Sequence: Synthetic oligonucleotide
acguggucucacgccauca

SEQ ID NO: 580881 - RNA, 19 nt, Artificial Sequence
  Description of Artificial Sequence: Synthetic oligonucleotide
cauucuggccuuguguccu

SEQ ID NO: 580882 - RNA, 19 nt, Artificial Sequence
  Description of Artificial Sequence: Synthetic oligonucleotide
acgaagcgaagaacuugcu

SEQ ID NO: 580883 - RNA, 19 nt, Artificial Sequence
  Description of Artificial Sequence: Synthetic oligonucleotide
aagcccgauuggaaacgau

SEQ ID NO: 580884 - RNA, 19 nt, Artificial Sequence
  Description of Artificial Sequence: Synthetic oligonucleotide
gguacgcucuccauguucu

SEQ ID NO: 580885 - RNA, 19 nt, Artificial Sequence
  Description of Artificial Sequence: Synthetic oligonucleotide
gcacggagaaccaguacuc

SEQ ID NO: 580886 - RNA, 19 nt, Artificial Sequence
  Description of Artificial Sequence: Synthetic oligonucleotide
cucaacuggugagggguga

SEQ ID NO: 580887 - RNA, 19 nt, Artificial Sequence
  Description of Artificial Sequence: Synthetic oligonucleotide
guacgcucuccauguucuc

SEQ ID NO: 580888 - RNA, 19 nt, Artificial Sequence
  Description of Artificial Sequence: Synthetic oligonucleotide
cgaagcgaagaacuugcuc

SEQ ID NO: 580889 - RNA, 19 nt, Artificial Sequence
  Description of Artificial Sequence: Synthetic oligonucleotide
gcccgauuggaaacgauaa

SEQ ID NO: 580890 - RNA, 19 nt, Artificial Sequence
  Description of Artificial Sequence: Synthetic oligonucleotide
ccaugacgaagcgaagaac

SEQ ID NO: 580891 - RNA, 19 nt, Artificial Sequence
  Description of Artificial Sequence: Synthetic oligonucleotide
uccguccuugaggggacuc

SEQ ID NO: 580892 - RNA, 19 nt, Artificial Sequence
  Description of Artificial Sequence: Synthetic oligonucleotide
gcuccaucucacaugcgca

SEQ ID NO: 580893 - RNA, 19 nt, Artificial Sequence
  Description of Artificial Sequence: Synthetic oligonucleotide
ccucgacguggucucacgc

SEQ ID NO: 580894 - RNA, 19 nt, Artificial Sequence
  Description of Artificial Sequence: Synthetic oligonucleotide
ggcgcccuccaugacgaag

SEQ ID NO: 580895 - RNA, 19 nt, Artificial Sequence
  Description of Artificial Sequence: Synthetic oligonucleotide
aggcugucgcucaucgaaa

SEQ ID NO: 580896 - RNA, 19 nt, Artificial Sequence
  Description of Artificial Sequence: Synthetic oligonucleotide
cuccaucucacaugcgcau

SEQ ID NO: 580897 - RNA, 19 nt, Artificial Sequence
  Description of Artificial Sequence: Synthetic oligonucleotide
ccucgcuguaguagaagga

SEQ ID NO: 580898 - RNA, 19 nt, Artificial Sequence
  Description of Artificial Sequence: Synthetic oligonucleotide
accucuggcaagagagguu

SEQ ID NO: 580899 - RNA, 19 nt, Artificial Sequence
  Description of Artificial Sequence: Synthetic oligonucleotide
agggguccagcgguacgcu

SEQ ID NO: 580900 - RNA, 19 nt, Artificial Sequence
  Description of Artificial Sequence: Synthetic oligonucleotide
caacccacaaaugguuccu

SEQ ID NO: 580901 - RNA, 19 nt, Artificial Sequence
  Description of Artificial Sequence: Synthetic oligonucleotide
ccguucaugugagcguaag

SEQ ID NO: 580902 - RNA, 19 nt, Artificial Sequence
  Description of Artificial Sequence: Synthetic oligonucleotide
cguggucucacgccaucag

SEQ ID NO: 580903 - RNA, 19 nt, Artificial Sequence
  Description of Artificial Sequence: Synthetic oligonucleotide
gguccagcgguacgcucuc

SEQ ID NO: 580904 - RNA, 19 nt, Artificial Sequence
  Description of Artificial Sequence: Synthetic oligonucleotide
cuuaugccucuguccccaa

SEQ ID NO: 580905 - RNA, 19 nt, Artificial Sequence
  Description of Artificial Sequence: Synthetic oligonucleotide
caccgugaagccagucugu

SEQ ID NO: 580906 - RNA, 19 nt, Artificial Sequence
  Description of Artificial Sequence: Synthetic oligonucleotide
cccguaaucuacuggacuu

SEQ ID NO: 580907 - RNA, 19 nt, Artificial Sequence
  Description of Artificial Sequence: Synthetic oligonucleotide
gcgcugggagccaaaggac

SEQ ID NO: 580908 - RNA, 19 nt, Artificial Sequence
  Description of Artificial Sequence: Synthetic oligonucleotide
cgaguaugucgcaguaaca

SEQ ID NO: 580909 - RNA, 19 nt, Artificial Sequence
  Description of Artificial Sequence: Synthetic oligonucleotide
gcugucgcucaucgaaacu

SEQ ID NO: 580910 - RNA, 19 nt, Artificial Sequence
  Description of Artificial Sequence: Synthetic oligonucleotide
cgagggguccagcgguacg

SEQ ID NO: 580911 - RNA, 19 nt, Artificial Sequence
  Description of Artificial Sequence: Synthetic oligonucleotide
ggccaauaaugcgcuggga

SEQ ID NO: 580912 - RNA, 19 nt, Artificial Sequence
  Description of Artificial Sequence: Synthetic oligonucleotide
ggguccagcgguacgcucu

SEQ ID NO: 580913 - RNA, 19 nt, Artificial Sequence
  Description of Artificial Sequence: Synthetic oligonucleotide
cuggacuuagaagcccgau

SEQ ID NO: 580914 - RNA, 19 nt, Artificial Sequence
  Description of Artificial Sequence: Synthetic oligonucleotide
caguuaccauggcuuccua

SEQ ID NO: 580915 - RNA, 19 nt, Artificial Sequence
  Description of Artificial Sequence: Synthetic oligonucleotide
cugaaccaaugcccacgau

SEQ ID NO: 580916 - RNA, 19 nt, Artificial Sequence
  Description of Artificial Sequence: Synthetic oligonucleotide
ccguaaucuacuggacuua

SEQ ID NO: 580917 - RNA, 19 nt, Artificial Sequence
  Description of Artificial Sequence: Synthetic oligonucleotide
aggcgcccuccaugacgaa

SEQ ID NO: 580918 - RNA, 19 nt, Artificial Sequence
  Description of Artificial Sequence: Synthetic oligonucleotide
cuucagcauucggccuuaa

SEQ ID NO: 580919 - RNA, 19 nt, Artificial Sequence
  Description of Artificial Sequence: Synthetic oligonucleotide
cccgauuggaaacgauaau

SEQ ID NO: 580920 - RNA, 19 nt, Artificial Sequence
  Description of Artificial Sequence: Synthetic oligonucleotide
ccgagggguccagcgguac

SEQ ID NO: 580921 - RNA, 19 nt, Artificial Sequence
  Description of Artificial Sequence: Synthetic oligonucleotide
cccgaguaugucgcaguaa

SEQ ID NO: 580922 - RNA, 19 nt, Artificial Sequence
  Description of Artificial Sequence: Synthetic oligonucleotide
cccguucaugugagcguaa

SEQ ID NO: 580923 - RNA, 19 nt, Artificial Sequence
  Description of Artificial Sequence: Synthetic oligonucleotide
cagccucgacguggucuca

SEQ ID NO: 580924 - RNA, 19 nt, Artificial Sequence
  Description of Artificial Sequence: Synthetic oligonucleotide
ccuucagcauucggccuua

SEQ ID NO: 580925 - RNA, 19 nt, Artificial Sequence
  Description of Artificial Sequence: Synthetic oligonucleotide
ggccuuagcuuuagccauu

SEQ ID NO: 580926 - RNA, 19 nt, Artificial Sequence
  Description of Artificial Sequence: Synthetic oligonucleotide
gcguaaggcugucgcucau

SEQ ID NO: 580927 - RNA, 19 nt, Artificial Sequence
  Description of Artificial Sequence: Synthetic oligonucleotide
cuccguccuugaggggacu

SEQ ID NO: 580928 - RNA, 19 nt, Artificial Sequence
  Description of Artificial Sequence: Synthetic oligonucleotide
gcgguacgcucuccauguu

SEQ ID NO: 580929 - RNA, 19 nt, Artificial Sequence
  Description of Artificial Sequence: Synthetic oligonucleotide
aauuugacauaucugaacc

SEQ ID NO: 580930 - RNA, 19 nt, Artificial Sequence
  Description of Artificial Sequence: Synthetic oligonucleotide
aauucuauugccuuuacug

SEQ ID NO: 580931 - RNA, 19 nt, Artificial Sequence
  Description of Artificial Sequence: Synthetic oligonucleotide
augauuuguaaacaaaacc

SEQ ID NO: 580932 - RNA, 19 nt, Artificial Sequence
  Description of Artificial Sequence: Synthetic oligonucleotide
aauuauuaauacuggagag

SEQ ID NO: 580933 - RNA, 19 nt, Artificial Sequence
  Description of Artificial Sequence: Synthetic oligonucleotide
uuuacuguuaauuugacau

SEQ ID NO: 580934 - RNA, 19 nt, Artificial Sequence
  Description of Artificial Sequence: Synthetic oligonucleotide
uauguuauuuaccaaggag

SEQ ID NO: 580935 - RNA, 19 nt, Artificial Sequence
  Description of Artificial Sequence: Synthetic oligonucleotide
accauuuaagccucuaucc

SEQ ID NO: 580936 - RNA, 19 nt, Artificial Sequence
  Description of Artificial Sequence: Synthetic oligonucleotide
acuacuacaauucuaauaa

SEQ ID NO: 580937 - RNA, 19 nt, Artificial Sequence
  Description of Artificial Sequence: Synthetic oligonucleotide
uuucauacaguacucaucu

SEQ ID NO: 580938 - RNA, 19 nt, Artificial Sequence
  Description of Artificial Sequence: Synthetic oligonucleotide
uauuauauuuguauaccag

SEQ ID NO: 580939 - RNA, 19 nt, Artificial Sequence
  Description of Artificial Sequence: Synthetic oligonucleotide
aacuaauggaguuucaagu

SEQ ID NO: 580940 - RNA, 19 nt, Artificial Sequence
  Description of Artificial Sequence: Synthetic oligonucleotide
aguaugcaaauuuacagag

SEQ ID NO: 580941 - RNA, 19 nt, Artificial Sequence
  Description of Artificial Sequence: Synthetic oligonucleotide
uuugaagcaauuuucccag

SEQ ID NO: 580942 - RNA, 19 nt, Artificial Sequence
  Description of Artificial Sequence: Synthetic oligonucleotide
aagguauuguccguaaagc

SEQ ID NO: 580943 - RNA, 19 nt, Artificial Sequence
  Description of Artificial Sequence: Synthetic oligonucleotide
gaauuauuaauacuggaga

SEQ ID NO: 580944 - RNA, 19 nt, Artificial Sequence
  Description of Artificial Sequence: Synthetic oligonucleotide
uuauauuuguauaccagga

SEQ ID NO: 580945 - RNA, 19 nt, Artificial Sequence
  Description of Artificial Sequence: Synthetic oligonucleotide
auauacuagugucuuagac

SEQ ID NO: 580946 - RNA, 19 nt, Artificial Sequence
  Description of Artificial Sequence: Synthetic oligonucleotide
aacaaaucauuaccuguac

SEQ ID NO: 580947 - RNA, 19 nt, Artificial Sequence
  Description of Artificial Sequence: Synthetic oligonucleotide
uauacuagugucuuagaca

SEQ ID NO: 580948 - RNA, 19 nt, Artificial Sequence
  Description of Artificial Sequence: Synthetic oligonucleotide
caugaauuauuaauacugg

SEQ ID NO: 580949 - RNA, 19 nt, Artificial Sequence
  Description of Artificial Sequence: Synthetic oligonucleotide
aauuagacuacauaccauu

SEQ ID NO: 580950 - RNA, 19 nt, Artificial Sequence
  Description of Artificial Sequence: Synthetic oligonucleotide
uuugauaugcaaaagcauu

SEQ ID NO: 580951 - RNA, 19 nt, Artificial Sequence
  Description of Artificial Sequence: Synthetic oligonucleotide
uguguauuauuucaauucu

SEQ ID NO: 580952 - RNA, 19 nt, Artificial Sequence
  Description of Artificial Sequence: Synthetic oligonucleotide
acauaucugaaccaaagca

SEQ ID NO: 580953 - RNA, 19 nt, Artificial Sequence
  Description of Artificial Sequence: Synthetic oligonucleotide
agaccuauguaaaagcugc

SEQ ID NO: 580954 - RNA, 19 nt, Artificial Sequence
  Description of Artificial Sequence: Synthetic oligonucleotide
ucucauaccgagcagcaag

SEQ ID NO: 580955 - RNA, 19 nt, Artificial Sequence
  Description of Artificial Sequence: Synthetic oligonucleotide
uuauuaauacuggagaggu

SEQ ID NO: 580956 - RNA, 19 nt, Artificial Sequence
  Description of Artificial Sequence: Synthetic oligonucleotide
auuauuaauacuggagagg

SEQ ID NO: 580957 - RNA, 19 nt, Artificial Sequence
  Description of Artificial Sequence: Synthetic oligonucleotide
aguuggaucagguaggaca

SEQ ID NO: 580958 - RNA, 19 nt, Artificial Sequence
  Description of Artificial Sequence: Synthetic oligonucleotide
uuagacuacauaccauuag

SEQ ID NO: 580959 - RNA, 19 nt, Artificial Sequence
  Description of Artificial Sequence: Synthetic oligonucleotide
ugaagcaauuuucccaggg

SEQ ID NO: 580960 - RNA, 19 nt, Artificial Sequence
  Description of Artificial Sequence: Synthetic oligonucleotide
uagcauugggugaacaacg

SEQ ID NO: 580961 - RNA, 19 nt, Artificial Sequence
  Description of Artificial Sequence: Synthetic oligonucleotide
aauaacgcgaggccaugcg

SEQ ID NO: 580962 - RNA, 19 nt, Artificial Sequence
  Description of Artificial Sequence: Synthetic oligonucleotide
acuuucaucacacaucagu

SEQ ID NO: 580963 - RNA, 19 nt, Artificial Sequence
  Description of Artificial Sequence: Synthetic oligonucleotide
uauuuguauaccaggauau

SEQ ID NO: 580964 - RNA, 19 nt, Artificial Sequence
  Description of Artificial Sequence: Synthetic oligonucleotide
agaagaguaagguauauuu

SEQ ID NO: 580965 - RNA, 19 nt, Artificial Sequence
  Description of Artificial Sequence: Synthetic oligonucleotide
uguccgaagagccagccag

SEQ ID NO: 580966 - RNA, 19 nt, Artificial Sequence
  Description of Artificial Sequence: Synthetic oligonucleotide
uucuugaagcccuaaaugu

SEQ ID NO: 580967 - RNA, 19 nt, Artificial Sequence
  Description of Artificial Sequence: Synthetic oligonucleotide
uucauuaagucuguuaaca

SEQ ID NO: 580968 - RNA, 19 nt, Artificial Sequence
  Description of Artificial Sequence: Synthetic oligonucleotide
gaagaguauugccaguccg

SEQ ID NO: 580969 - RNA, 19 nt, Artificial Sequence
  Description of Artificial Sequence: Synthetic oligonucleotide
uguauaccaggauauuuag

SEQ ID NO: 580970 - RNA, 19 nt, Artificial Sequence
  Description of Artificial Sequence: Synthetic oligonucleotide
gaugguacugucccuaugc

SEQ ID NO: 580971 - RNA, 19 nt, Artificial Sequence
  Description of Artificial Sequence: Synthetic oligonucleotide
aaucauuaccuguacaguu

SEQ ID NO: 580972 - RNA, 19 nt, Artificial Sequence
  Description of Artificial Sequence: Synthetic oligonucleotide
aaaucuuaaguaguugucu

SEQ ID NO: 580973 - RNA, 19 nt, Artificial Sequence
  Description of Artificial Sequence: Synthetic oligonucleotide
auuaaaaccuucauuaagu

SEQ ID NO: 580974 - RNA, 19 nt, Artificial Sequence
  Description of Artificial Sequence: Synthetic oligonucleotide
aagcaauuuucccagggca

SEQ ID NO: 580975 - RNA, 19 nt, Artificial Sequence
  Description of Artificial Sequence: Synthetic oligonucleotide
gacauuaucagauaguaau

SEQ ID NO: 580976 - RNA, 19 nt, Artificial Sequence
  Description of Artificial Sequence: Synthetic oligonucleotide
gcaacguucaaauaacgcg

SEQ ID NO: 580977 - RNA, 19 nt, Artificial Sequence
  Description of Artificial Sequence: Synthetic oligonucleotide
aaccucucaagguauuguc

SEQ ID NO: 580978 - RNA, 19 nt, Artificial Sequence
  Description of Artificial Sequence: Synthetic oligonucleotide
aucaggacuucucauuuac

SEQ ID NO: 580979 - RNA, 19 nt, Artificial Sequence
  Description of Artificial Sequence: Synthetic oligonucleotide
aggauaauguacuauaauu

SEQ ID NO: 580980 - RNA, 19 nt, Artificial Sequence
  Description of Artificial Sequence: Synthetic oligonucleotide
caugauuuguaaacaaaac

SEQ ID NO: 580981 - RNA, 19 nt, Artificial Sequence
  Description of Artificial Sequence: Synthetic oligonucleotide
accaaacauaaaucaaaac

SEQ ID NO: 580982 - RNA, 19 nt, Artificial Sequence
  Description of Artificial Sequence: Synthetic oligonucleotide
aagaguauugccaguccgc

SEQ ID NO: 580983 - RNA, 19 nt, Artificial Sequence
  Description of Artificial Sequence: Synthetic oligonucleotide
cauuaucagauaguaaucc

SEQ ID NO: 580984 - RNA, 19 nt, Artificial Sequence
  Description of Artificial Sequence: Synthetic oligonucleotide
uuucuuauccccugaauuc

SEQ ID NO: 580985 - RNA, 19 nt, Artificial Sequence
  Description of Artificial Sequence: Synthetic oligonucleotide
aaguaguugucucacagua

SEQ ID NO: 580986 - RNA, 19 nt, Artificial Sequence
  Description of Artificial Sequence: Synthetic oligonucleotide
acuagcaccguauccagag

SEQ ID NO: 580987 - RNA, 19 nt, Artificial Sequence
  Description of Artificial Sequence: Synthetic oligonucleotide
agaauauuauauuuguaua

SEQ ID NO: 580988 - RNA, 19 nt, Artificial Sequence
  Description of Artificial Sequence: Synthetic oligonucleotide
uagacuacauaccauuagu

SEQ ID NO: 580989 - RNA, 19 nt, Artificial Sequence
  Description of Artificial Sequence: Synthetic oligonucleotide
gauaguaauccaaaagaac

SEQ ID NO: 580990 - RNA, 19 nt, Artificial Sequence
  Description of Artificial Sequence: Synthetic oligonucleotide
auaccaggauauuuaguac

SEQ ID NO: 580991 - RNA, 19 nt, Artificial Sequence
  Description of Artificial Sequence: Synthetic oligonucleotide
ucacucuaguuaauguggg

SEQ ID NO: 580992 - RNA, 19 nt, Artificial Sequence
  Description of Artificial Sequence: Synthetic oligonucleotide
cauaugagaauauauuaca

SEQ ID NO: 580993 - RNA, 19 nt, Artificial Sequence
  Description of Artificial Sequence: Synthetic oligonucleotide
uuguccguaaagcuccacg

SEQ ID NO: 580994 - RNA, 19 nt, Artificial Sequence
  Description of Artificial Sequence: Synthetic oligonucleotide
aguauugccaguccgcucu

SEQ ID NO: 580995 - RNA, 19 nt, Artificial Sequence
  Description of Artificial Sequence: Synthetic oligonucleotide
caugcgaaaagucaaugac

SEQ ID NO: 580996 - RNA, 19 nt, Artificial Sequence
  Description of Artificial Sequence: Synthetic oligonucleotide
ggauauuuaguacauugag

SEQ ID NO: 580997 - RNA, 19 nt, Artificial Sequence
  Description of Artificial Sequence: Synthetic oligonucleotide
ugucuuagacauaaccaca

SEQ ID NO: 580998 - RNA, 19 nt, Artificial Sequence
  Description of Artificial Sequence: Synthetic oligonucleotide
gaguaagguauauuuagca

SEQ ID NO: 580999 - RNA, 19 nt, Artificial Sequence
  Description of Artificial Sequence: Synthetic oligonucleotide
ugcuauuuccaguuucuag

SEQ ID NO: 581000 - RNA, 19 nt, Artificial Sequence
  Description of Artificial Sequence: Synthetic oligonucleotide
ucaauauuugggaaugcau

SEQ ID NO: 581001 - RNA, 19 nt, Artificial Sequence
  Description of Artificial Sequence: Synthetic oligonucleotide
ugaauugcuuuagauauac

SEQ ID NO: 581002 - RNA, 19 nt, Artificial Sequence
  Description of Artificial Sequence: Synthetic oligonucleotide
acauuuguuguuuuacugu

SEQ ID NO: 581003 - RNA, 19 nt, Artificial Sequence
  Description of Artificial Sequence: Synthetic oligonucleotide
gaaaaucuuaaguaguugu

SEQ ID NO: 581004 - RNA, 19 nt, Artificial Sequence
  Description of Artificial Sequence: Synthetic oligonucleotide
ugcgaaaagucaaugacuu

SEQ ID NO: 581005 - RNA, 19 nt, Artificial Sequence
  Description of Artificial Sequence: Synthetic oligonucleotide
uauauuuguauaccaggau

SEQ ID NO: 581006 - RNA, 19 nt, Artificial Sequence
  Description of Artificial Sequence: Synthetic oligonucleotide
cauugggugaacaacgcac

SEQ ID NO: 581007 - RNA, 19 nt, Artificial Sequence
  Description of Artificial Sequence: Synthetic oligonucleotide
aagacuacuacaauucuaa

SEQ ID NO: 581008 - RNA, 19 nt, Artificial Sequence
  Description of Artificial Sequence: Synthetic oligonucleotide
agaguaagguauauuuagc

SEQ ID NO: 581009 - RNA, 19 nt, Artificial Sequence
  Description of Artificial Sequence: Synthetic oligonucleotide
gacauaucugaaccaaagc

SEQ ID NO: 581010 - RNA, 19 nt, Artificial Sequence
  Description of Artificial Sequence: Synthetic oligonucleotide
gguuuuauguuauuuacca

SEQ ID NO: 581011 - RNA, 19 nt, Artificial Sequence
  Description of Artificial Sequence: Synthetic oligonucleotide
uccguaaagcuccacguca

SEQ ID NO: 581012 - RNA, 19 nt, Artificial Sequence
  Description of Artificial Sequence: Synthetic oligonucleotide
aaacauacaagcaauucua

SEQ ID NO: 581013 - RNA, 19 nt, Artificial Sequence
  Description of Artificial Sequence: Synthetic oligonucleotide
uacaauuaauccgggaccc

SEQ ID NO: 581014 - RNA, 19 nt, Artificial Sequence
  Description of Artificial Sequence: Synthetic oligonucleotide
gagauuuugucaauauuug

SEQ ID NO: 581015 - RNA, 19 nt, Artificial Sequence
  Description of Artificial Sequence: Synthetic oligonucleotide
uugcauacaaaaucauucu

SEQ ID NO: 581016 - RNA, 19 nt, Artificial Sequence
  Description of Artificial Sequence: Synthetic oligonucleotide
aaauaacgcgaggccaugc

SEQ ID NO: 581017 - RNA, 19 nt, Artificial Sequence
  Description of Artificial Sequence: Synthetic oligonucleotide
auggcugguaaguuaacag

SEQ ID NO: 581018 - RNA, 19 nt, Artificial Sequence
  Description of Artificial Sequence: Synthetic oligonucleotide
aaaacagccaagguggaaa

SEQ ID NO: 581019 - RNA, 19 nt, Artificial Sequence
  Description of Artificial Sequence: Synthetic oligonucleotide
cucuaguuaaugugggugc

SEQ ID NO: 581020 - RNA, 19 nt, Artificial Sequence
  Description of Artificial Sequence: Synthetic oligonucleotide
auuaccuguacaguuauga

SEQ ID NO: 581021 - RNA, 19 nt, Artificial Sequence
  Description of Artificial Sequence: Synthetic oligonucleotide
uguacuauaauuggagaau

SEQ ID NO: 581022 - RNA, 19 nt, Artificial Sequence
  Description of Artificial Sequence: Synthetic oligonucleotide
caagguauuguccguaaag

SEQ ID NO: 581023 - RNA, 19 nt, Artificial Sequence
  Description of Artificial Sequence: Synthetic oligonucleotide
gauauuuaguacauugaga

SEQ ID NO: 581024 - RNA, 19 nt, Artificial Sequence
  Description of Artificial Sequence: Synthetic oligonucleotide
acugguuaauauaaaaugu

SEQ ID NO: 581025 - RNA, 19 nt, Artificial Sequence
  Description of Artificial Sequence: Synthetic oligonucleotide
caacuaauggaguuucaag

SEQ ID NO: 581026 - RNA, 19 nt, Artificial Sequence
  Description of Artificial Sequence: Synthetic oligonucleotide
gugucuuagacauaaccac

SEQ ID NO: 581027 - RNA, 19 nt, Artificial Sequence
  Description of Artificial Sequence: Synthetic oligonucleotide
aguaagguauauuuagcau

SEQ ID NO: 581028 - RNA, 19 nt, Artificial Sequence
  Description of Artificial Sequence: Synthetic oligonucleotide
uguguaaguuggaucaggu

SEQ ID NO: 581029 - RNA, 19 nt, Artificial Sequence
  Description of Artificial Sequence: Synthetic oligonucleotide
ggauaauguacuauaauug

SEQ ID NO: 581030 - RNA, 19 nt, Artificial Sequence
  Description of Artificial Sequence: Synthetic oligonucleotide
guauuguccguaaagcucc

SEQ ID NO: 581031 - RNA, 19 nt, Artificial Sequence
  Description of Artificial Sequence: Synthetic oligonucleotide
uuuuaaccucucaagguau

SEQ ID NO: 581032 - RNA, 19 nt, Artificial Sequence
  Description of Artificial Sequence: Synthetic oligonucleotide
gaacaacgcacaaacauac

SEQ ID NO: 581033 - RNA, 19 nt, Artificial Sequence
  Description of Artificial Sequence: Synthetic oligonucleotide
acuauaauuggagaauaca

SEQ ID NO: 581034 - RNA, 19 nt, Artificial Sequence
  Description of Artificial Sequence: Synthetic oligonucleotide
uugcuuuugauaugcaaaa

SEQ ID NO: 581035 - RNA, 19 nt, Artificial Sequence
  Description of Artificial Sequence: Synthetic oligonucleotide
uuagagauuuugucaauau

SEQ ID NO: 581036 - RNA, 19 nt, Artificial Sequence
  Description of Artificial Sequence: Synthetic oligonucleotide
uuacuauacugguuaauau

SEQ ID NO: 581037 - RNA, 19 nt, Artificial Sequence
  Description of Artificial Sequence: Synthetic oligonucleotide
uuagcauugggugaacaac

SEQ ID NO: 581038 - RNA, 19 nt, Artificial Sequence
  Description of Artificial Sequence: Synthetic oligonucleotide
agcuccacgucauuguguc

SEQ ID NO: 581039 - RNA, 19 nt, Artificial Sequence
  Description of Artificial Sequence: Synthetic oligonucleotide
uacaguuuauucugaguac

SEQ ID NO: 581040 - RNA, 19 nt, Artificial Sequence
  Description of Artificial Sequence: Synthetic oligonucleotide
uacuauaauuggagaauac

SEQ ID NO: 581041 - RNA, 19 nt, Artificial Sequence
  Description of Artificial Sequence: Synthetic oligonucleotide
gcuuuugauaugcaaaagc

SEQ ID NO: 581042 - RNA, 19 nt, Artificial Sequence
  Description of Artificial Sequence: Synthetic oligonucleotide
ugguaaguuaacagauggc

SEQ ID NO: 581043 - RNA, 19 nt, Artificial Sequence
  Description of Artificial Sequence: Synthetic oligonucleotide
acaacgcacaaacauacaa

SEQ ID NO: 581044 - RNA, 19 nt, Artificial Sequence
  Description of Artificial Sequence: Synthetic oligonucleotide
uucauauaaggaagacuac

SEQ ID NO: 581045 - RNA, 19 nt, Artificial Sequence
  Description of Artificial Sequence: Synthetic oligonucleotide
aacuacauaaggccuuaaa

SEQ ID NO: 581046 - RNA, 19 nt, Artificial Sequence
  Description of Artificial Sequence: Synthetic oligonucleotide
ucuuauccccugaauucag

SEQ ID NO: 581047 - RNA, 19 nt, Artificial Sequence
  Description of Artificial Sequence: Synthetic oligonucleotide
ucucacaguaccaaacaua

SEQ ID NO: 581048 - RNA, 19 nt, Artificial Sequence
  Description of Artificial Sequence: Synthetic oligonucleotide
uugucucacaguaccaaac

SEQ ID NO: 581049 - RNA, 19 nt, Artificial Sequence
  Description of Artificial Sequence: Synthetic oligonucleotide
ugauaugcaaaagcauuug

SEQ ID NO: 581050 - RNA, 19 nt, Artificial Sequence
  Description of Artificial Sequence: Synthetic oligonucleotide
ugugacacaaacuguuuua

SEQ ID NO: 581051 - RNA, 19 nt, Artificial Sequence
  Description of Artificial Sequence: Synthetic oligonucleotide
aacccaugacauuaucaga

SEQ ID NO: 581052 - RNA, 19 nt, Artificial Sequence
  Description of Artificial Sequence: Synthetic oligonucleotide
gagagguuaucuuagagau

SEQ ID NO: 581053 - RNA, 19 nt, Artificial Sequence
  Description of Artificial Sequence: Synthetic oligonucleotide
ucuuaaguaguugucucac

SEQ ID NO: 581054 - RNA, 19 nt, Artificial Sequence
  Description of Artificial Sequence: Synthetic oligonucleotide
acuagugucuuagacauaa

SEQ ID NO: 581055 - RNA, 19 nt, Artificial Sequence
  Description of Artificial Sequence: Synthetic oligonucleotide
acucuaguuaaugugggug

SEQ ID NO: 581056 - RNA, 19 nt, Artificial Sequence
  Description of Artificial Sequence: Synthetic oligonucleotide
acgucauuguguccugccc

SEQ ID NO: 581057 - RNA, 19 nt, Artificial Sequence
  Description of Artificial Sequence: Synthetic oligonucleotide
uacuugaauugcuuuagau

SEQ ID NO: 581058 - RNA, 19 nt, Artificial Sequence
  Description of Artificial Sequence: Synthetic oligonucleotide
uaauccgggaccccagacc

SEQ ID NO: 581059 - RNA, 19 nt, Artificial Sequence
  Description of Artificial Sequence: Synthetic oligonucleotide
uggccauauauaaucacau

SEQ ID NO: 581060 - RNA, 19 nt, Artificial Sequence
  Description of Artificial Sequence: Synthetic oligonucleotide
cucacaguaccaaacauaa

SEQ ID NO: 581061 - RNA, 19 nt, Artificial Sequence
  Description of Artificial Sequence: Synthetic oligonucleotide
auacaugauuuguaaacaa

SEQ ID NO: 581062 - RNA, 19 nt, Artificial Sequence
  Description of Artificial Sequence: Synthetic oligonucleotide
uguccguaaagcuccacgu

SEQ ID NO: 581063 - RNA, 19 nt, Artificial Sequence
  Description of Artificial Sequence: Synthetic oligonucleotide
aagcaacucgcauuccuga

SEQ ID NO: 581064 - RNA, 19 nt, Artificial Sequence
  Description of Artificial Sequence: Synthetic oligonucleotide
caacguucaaauaacgcga

SEQ ID NO: 581065 - RNA, 19 nt, Artificial Sequence
  Description of Artificial Sequence: Synthetic oligonucleotide
agguauuguccguaaagcu

SEQ ID NO: 581066 - RNA, 19 nt, Artificial Sequence
  Description of Artificial Sequence: Synthetic oligonucleotide
uuuaccaaggagugcaguu

SEQ ID NO: 581067 - RNA, 19 nt, Artificial Sequence
  Description of Artificial Sequence: Synthetic oligonucleotide
gacuacuacaauucuaaua

SEQ ID NO: 581068 - RNA, 19 nt, Artificial Sequence
  Description of Artificial Sequence: Synthetic oligonucleotide
aaucagcgccaucaggacu

SEQ ID NO: 581069 - RNA, 19 nt, Artificial Sequence
  Description of Artificial Sequence: Synthetic oligonucleotide
uagucuugaagaacaacua

SEQ ID NO: 581070 - RNA, 19 nt, Artificial Sequence
  Description of Artificial Sequence: Synthetic oligonucleotide
acgaaugccguaucuuguc

SEQ ID NO: 581071 - RNA, 19 nt, Artificial Sequence
  Description of Artificial Sequence: Synthetic oligonucleotide
uuuacugguucuugucaug

SEQ ID NO: 581072 - RNA, 19 nt, Artificial Sequence
  Description of Artificial Sequence: Synthetic oligonucleotide
ugaggucaaaggagaauga

SEQ ID NO: 581073 - RNA, 19 nt, Artificial Sequence
  Description of Artificial Sequence: Synthetic oligonucleotide
aucuuaaguaguugucuca

SEQ ID NO: 581074 - RNA, 19 nt, Artificial Sequence
  Description of Artificial Sequence: Synthetic oligonucleotide
aacguucaaauaacgcgag

SEQ ID NO: 581075 - RNA, 19 nt, Artificial Sequence
  Description of Artificial Sequence: Synthetic oligonucleotide
aguguguauuauuucaauu

SEQ ID NO: 581076 - RNA, 19 nt, Artificial Sequence
  Description of Artificial Sequence: Synthetic oligonucleotide
ucauuaccuguacaguuau

SEQ ID NO: 581077 - RNA, 19 nt, Artificial Sequence
  Description of Artificial Sequence: Synthetic oligonucleotide
uucuuauccccugaauuca

SEQ ID NO: 581078 - RNA, 19 nt, Artificial Sequence
  Description of Artificial Sequence: Synthetic oligonucleotide
uguaaaguccagcggcuuc

SEQ ID NO: 581079 - RNA, 19 nt, Artificial Sequence
  Description of Artificial Sequence: Synthetic oligonucleotide
cagccugacugcaugauac

SEQ ID NO: 581080 - RNA, 19 nt, Artificial Sequence
  Description of Artificial Sequence: Synthetic oligonucleotide
gaauucaggagugaaccca

SEQ ID NO: 581081 - RNA, 19 nt, Artificial Sequence
  Description of Artificial Sequence: Synthetic oligonucleotide
ugacauuaucagauaguaa

SEQ ID NO: 581082 - RNA, 19 nt, Artificial Sequence
  Description of Artificial Sequence: Synthetic oligonucleotide
aguauucauauaaggaaga

SEQ ID NO: 581083 - RNA, 19 nt, Artificial Sequence
  Description of Artificial Sequence: Synthetic oligonucleotide
gguaaguuaacagauggca

SEQ ID NO: 581084 - RNA, 19 nt, Artificial Sequence
  Description of Artificial Sequence: Synthetic oligonucleotide
aauuaauccgggaccccag

SEQ ID NO: 581085 - RNA, 19 nt, Artificial Sequence
  Description of Artificial Sequence: Synthetic oligonucleotide
acugucccuaugcucuggc

SEQ ID NO: 581086 - RNA, 19 nt, Artificial Sequence
  Description of Artificial Sequence: Synthetic oligonucleotide
ucuaucccuguacaacaga

SEQ ID NO: 581087 - RNA, 19 nt, Artificial Sequence
  Description of Artificial Sequence: Synthetic oligonucleotide
uacugcuauuuccaguuuc

SEQ ID NO: 581088 - RNA, 19 nt, Artificial Sequence
  Description of Artificial Sequence: Synthetic oligonucleotide
aagccucuaucccuguaca

SEQ ID NO: 581089 - RNA, 19 nt, Artificial Sequence
  Description of Artificial Sequence: Synthetic oligonucleotide
aauuuucccagggcaaggu

SEQ ID NO: 581090 - RNA, 19 nt, Artificial Sequence
  Description of Artificial Sequence: Synthetic oligonucleotide
uuacuguuaauuugacaua

SEQ ID NO: 581091 - RNA, 19 nt, Artificial Sequence
  Description of Artificial Sequence: Synthetic oligonucleotide
uugccaugugagaagagua

SEQ ID NO: 581092 - RNA, 19 nt, Artificial Sequence
  Description of Artificial Sequence: Synthetic oligonucleotide
ucuauugccuuuacugguu

SEQ ID NO: 581093 - RNA, 19 nt, Artificial Sequence
  Description of Artificial Sequence: Synthetic oligonucleotide
auacugguuaauauaaaau

SEQ ID NO: 581094 - RNA, 19 nt, Artificial Sequence
  Description of Artificial Sequence: Synthetic oligonucleotide
aaauuagacuacauaccau

SEQ ID NO: 581095 - RNA, 19 nt, Artificial Sequence
  Description of Artificial Sequence: Synthetic oligonucleotide
ugcuuuugauaugcaaaag

SEQ ID NO: 581096 - RNA, 19 nt, Artificial Sequence
  Description of Artificial Sequence: Synthetic oligonucleotide
cauuccugaggucaaagga

SEQ ID NO: 581097 - RNA, 19 nt, Artificial Sequence
  Description of Artificial Sequence: Synthetic oligonucleotide
agcggcuuccacuuucauc

SEQ ID NO: 581098 - RNA, 19 nt, Artificial Sequence
  Description of Artificial Sequence: Synthetic oligonucleotide
gggugaacaacgcacaaac

SEQ ID NO: 581099 - RNA, 19 nt, Artificial Sequence
  Description of Artificial Sequence: Synthetic oligonucleotide
uauguaaaagcugcucauc

SEQ ID NO: 581100 - RNA, 19 nt, Artificial Sequence
  Description of Artificial Sequence: Synthetic oligonucleotide
uuaauccgggaccccagac

SEQ ID NO: 581101 - RNA, 19 nt, Artificial Sequence
  Description of Artificial Sequence: Synthetic oligonucleotide
cauaaccacagaacaagca

SEQ ID NO: 581102 - RNA, 19 nt, Artificial Sequence
  Description of Artificial Sequence: Synthetic oligonucleotide
acaauuaauccgggacccc

SEQ ID NO: 581103 - RNA, 19 nt, Artificial Sequence
  Description of Artificial Sequence: Synthetic oligonucleotide
agcauugggugaacaacgc

SEQ ID NO: 581104 - RNA, 19 nt, Artificial Sequence
  Description of Artificial Sequence: Synthetic oligonucleotide
auguaugacauguuuucuu

SEQ ID NO: 581105 - RNA, 19 nt, Artificial Sequence
  Description of Artificial Sequence: Synthetic oligonucleotide
uuuaguacauugagauguu

SEQ ID NO: 581106 - RNA, 19 nt, Artificial Sequence
  Description of Artificial Sequence: Synthetic oligonucleotide
ggucacucuaguuaaugug

SEQ ID NO: 581107 - RNA, 19 nt, Artificial Sequence
  Description of Artificial Sequence: Synthetic oligonucleotide
auauuacaauuaauccggg

SEQ ID NO: 581108 - RNA, 19 nt, Artificial Sequence
  Description of Artificial Sequence: Synthetic oligonucleotide
cagguguaaaguccagcgg

SEQ ID NO: 581109 - RNA, 19 nt, Artificial Sequence
  Description of Artificial Sequence: Synthetic oligonucleotide
caagaucaacagcauugcc

SEQ ID NO: 581110 - RNA, 19 nt, Artificial Sequence
  Description of Artificial Sequence: Synthetic oligonucleotide
aguaccaaacauaaaucaa

SEQ ID NO: 581111 - RNA, 19 nt, Artificial Sequence
  Description of Artificial Sequence: Synthetic oligonucleotide
acguucaaauaacgcgagg

SEQ ID NO: 581112 - RNA, 19 nt, Artificial Sequence
  Description of Artificial Sequence: Synthetic oligonucleotide
ucuaguuaaugugggugcu

SEQ ID NO: 581113 - RNA, 19 nt, Artificial Sequence
  Description of Artificial Sequence: Synthetic oligonucleotide
guauucauauaaggaagac

SEQ ID NO: 581114 - RNA, 19 nt, Artificial Sequence
  Description of Artificial Sequence: Synthetic oligonucleotide
agcaacucgcauuccugag

SEQ ID NO: 581115 - RNA, 19 nt, Artificial Sequence
  Description of Artificial Sequence: Synthetic oligonucleotide
agggaaagcaacucgcauu

SEQ ID NO: 581116 - RNA, 19 nt, Artificial Sequence
  Description of Artificial Sequence: Synthetic oligonucleotide
caaggagugcaguucagca

SEQ ID NO: 581117 - RNA, 19 nt, Artificial Sequence
  Description of Artificial Sequence: Synthetic oligonucleotide
acccaguaugcaaauuuac

SEQ ID NO: 581118 - RNA, 19 nt, Artificial Sequence
  Description of Artificial Sequence: Synthetic oligonucleotide
guuaaugugggugcuuuca

SEQ ID NO: 581119 - RNA, 19 nt, Artificial Sequence
  Description of Artificial Sequence: Synthetic oligonucleotide
acucgcauuccugagguca

SEQ ID NO: 581120 - RNA, 19 nt, Artificial Sequence
  Description of Artificial Sequence: Synthetic oligonucleotide
aaguuggaucagguaggac

SEQ ID NO: 581121 - RNA, 19 nt, Artificial Sequence
  Description of Artificial Sequence: Synthetic oligonucleotide
uagcaccguauccagagua

SEQ ID NO: 581122 - RNA, 19 nt, Artificial Sequence
  Description of Artificial Sequence: Synthetic oligonucleotide
uuuaaccucucaagguauu

SEQ ID NO: 581123 - RNA, 19 nt, Artificial Sequence
  Description of Artificial Sequence: Synthetic oligonucleotide
augaauggcugguaaguua

SEQ ID NO: 581124 - RNA, 19 nt, Artificial Sequence
  Description of Artificial Sequence: Synthetic oligonucleotide
cucuaucccuguacaacag

SEQ ID NO: 581125 - RNA, 19 nt, Artificial Sequence
  Description of Artificial Sequence: Synthetic oligonucleotide
guguguaaguuggaucagg

SEQ ID NO: 581126 - RNA, 19 nt, Artificial Sequence
  Description of Artificial Sequence: Synthetic oligonucleotide
agagcauaggucacucuag

SEQ ID NO: 581127 - RNA, 19 nt, Artificial Sequence
  Description of Artificial Sequence: Synthetic oligonucleotide
gaggccaugcgaaaaguca

SEQ ID NO: 581128 - RNA, 19 nt, Artificial Sequence
  Description of Artificial Sequence: Synthetic oligonucleotide
ccauuuaagccucuauccc

SEQ ID NO: 581129 - RNA, 19 nt, Artificial Sequence
  Description of Artificial Sequence: Synthetic oligonucleotide
auaacgcgaggccaugcga

SEQ ID NO: 581130 - RNA, 19 nt, Artificial Sequence
  Description of Artificial Sequence: Synthetic oligonucleotide
augcgaaaagucaaugacu

SEQ ID NO: 581131 - RNA, 19 nt, Artificial Sequence
  Description of Artificial Sequence: Synthetic oligonucleotide
ugucaauauuugggaaugc

SEQ ID NO: 581132 - RNA, 19 nt, Artificial Sequence
  Description of Artificial Sequence: Synthetic oligonucleotide
gaagaaugacagcagcacu

SEQ ID NO: 581133 - RNA, 19 nt, Artificial Sequence
  Description of Artificial Sequence: Synthetic oligonucleotide
acaacuaauggaguuucaa

SEQ ID NO: 581134 - RNA, 19 nt, Artificial Sequence
  Description of Artificial Sequence: Synthetic oligonucleotide
gcucuggccauauauaauc

SEQ ID NO: 581135 - RNA, 19 nt, Artificial Sequence
  Description of Artificial Sequence: Synthetic oligonucleotide
cacucucauaccgagcagc

SEQ ID NO: 581136 - RNA, 19 nt, Artificial Sequence
  Description of Artificial Sequence: Synthetic oligonucleotide
agaacaacuaauggaguuu

SEQ ID NO: 581137 - RNA, 19 nt, Artificial Sequence
  Description of Artificial Sequence: Synthetic oligonucleotide
uucugguaauuaaaaccuu

SEQ ID NO: 581138 - RNA, 19 nt, Artificial Sequence
  Description of Artificial Sequence: Synthetic oligonucleotide
uucaggacgaaugccguau

SEQ ID NO: 581139 - RNA, 19 nt, Artificial Sequence
  Description of Artificial Sequence: Synthetic oligonucleotide
auuaauccgggaccccaga

SEQ ID NO: 581140 - RNA, 19 nt, Artificial Sequence
  Description of Artificial Sequence: Synthetic oligonucleotide
ucuuguccgaagagccagc

SEQ ID NO: 581141 - RNA, 19 nt, Artificial Sequence
  Description of Artificial Sequence: Synthetic oligonucleotide
agcccuaaaugucuuuuaa

SEQ ID NO: 581142 - RNA, 19 nt, Artificial Sequence
  Description of Artificial Sequence: Synthetic oligonucleotide
aguuucuaguucugguaau

SEQ ID NO: 581143 - RNA, 19 nt, Artificial Sequence
  Description of Artificial Sequence: Synthetic oligonucleotide
gagugaacccaugacauua

SEQ ID NO: 581144 - RNA, 19 nt, Artificial Sequence
  Description of Artificial Sequence: Synthetic oligonucleotide
cacgucauuguguccugcc

SEQ ID NO: 581145 - RNA, 19 nt, Artificial Sequence
  Description of Artificial Sequence: Synthetic oligonucleotide
aggagugaacccaugacau

SEQ ID NO: 581146 - RNA, 19 nt, Artificial Sequence
  Description of Artificial Sequence: Synthetic oligonucleotide
uuauucaggcaagauucau

SEQ ID NO: 581147 - RNA, 19 nt, Artificial Sequence
  Description of Artificial Sequence: Synthetic oligonucleotide
acuguuaauuugacauauc

SEQ ID NO: 581148 - RNA, 19 nt, Artificial Sequence
  Description of Artificial Sequence: Synthetic oligonucleotide
agaguauugccaguccgcu

SEQ ID NO: 581149 - RNA, 19 nt, Artificial Sequence
  Description of Artificial Sequence: Synthetic oligonucleotide
gucaauauuugggaaugca

SEQ ID NO: 581150 - RNA, 19 nt, Artificial Sequence
  Description of Artificial Sequence: Synthetic oligonucleotide
aagcccuaaaugucuuuua

SEQ ID NO: 581151 - RNA, 19 nt, Artificial Sequence
  Description of Artificial Sequence: Synthetic oligonucleotide
uugggugaacaacgcacaa

SEQ ID NO: 581152 - RNA, 19 nt, Artificial Sequence
  Description of Artificial Sequence: Synthetic oligonucleotide
cauuuaagccucuaucccu

SEQ ID NO: 581153 - RNA, 19 nt, Artificial Sequence
  Description of Artificial Sequence: Synthetic oligonucleotide
ccugacugcaugauacugc

SEQ ID NO: 581154 - RNA, 19 nt, Artificial Sequence
  Description of Artificial Sequence: Synthetic oligonucleotide
uauuguccguaaagcucca

SEQ ID NO: 581155 - RNA, 19 nt, Artificial Sequence
  Description of Artificial Sequence: Synthetic oligonucleotide
uugccuuuacugguucuug

SEQ ID NO: 581156 - RNA, 19 nt, Artificial Sequence
  Description of Artificial Sequence: Synthetic oligonucleotide
aacaacuaauggaguuuca

SEQ ID NO: 581157 - RNA, 19 nt, Artificial Sequence
  Description of Artificial Sequence: Synthetic oligonucleotide
uugaagcccuaaaugucuu

SEQ ID NO: 581158 - RNA, 19 nt, Artificial Sequence
  Description of Artificial Sequence: Synthetic oligonucleotide
aguguguaaguuggaucag

SEQ ID NO: 581159 - RNA, 19 nt, Artificial Sequence
  Description of Artificial Sequence: Synthetic oligonucleotide
cguucaaauaacgcgaggc

SEQ ID NO: 581160 - RNA, 19 nt, Artificial Sequence
  Description of Artificial Sequence: Synthetic oligonucleotide
cuauugccuuuacugguuc

SEQ ID NO: 581161 - RNA, 19 nt, Artificial Sequence
  Description of Artificial Sequence: Synthetic oligonucleotide
aacaacgcacaaacauaca

SEQ ID NO: 581162 - RNA, 19 nt, Artificial Sequence
  Description of Artificial Sequence: Synthetic oligonucleotide
ggcaacguucaaauaacgc

SEQ ID NO: 581163 - RNA, 19 nt, Artificial Sequence
  Description of Artificial Sequence: Synthetic oligonucleotide
guuggaucagguaggacaa

SEQ ID NO: 581164 - RNA, 19 nt, Artificial Sequence
  Description of Artificial Sequence: Synthetic oligonucleotide
aguugucucacaguaccaa

SEQ ID NO: 581165 - RNA, 19 nt, Artificial Sequence
  Description of Artificial Sequence: Synthetic oligonucleotide
auacuggagagguuaucuu

SEQ ID NO: 581166 - RNA, 19 nt, Artificial Sequence
  Description of Artificial Sequence: Synthetic oligonucleotide
auuagacuacauaccauua

SEQ ID NO: 581167 - RNA, 19 nt, Artificial Sequence
  Description of Artificial Sequence: Synthetic oligonucleotide
cccagaccuauguaaaagc

SEQ ID NO: 581168 - RNA, 19 nt, Artificial Sequence
  Description of Artificial Sequence: Synthetic oligonucleotide
cauuuauucaggcaagauu

SEQ ID NO: 581169 - RNA, 19 nt, Artificial Sequence
  Description of Artificial Sequence: Synthetic oligonucleotide
aacgcgaggccaugcgaaa

SEQ ID NO: 581170 - RNA, 19 nt, Artificial Sequence
  Description of Artificial Sequence: Synthetic oligonucleotide
cuuguccgaagagccagcc

SEQ ID NO: 581171 - RNA, 19 nt, Artificial Sequence
  Description of Artificial Sequence: Synthetic oligonucleotide
cauauacuagugucuuaga

SEQ ID NO: 581172 - RNA, 19 nt, Artificial Sequence
  Description of Artificial Sequence: Synthetic oligonucleotide
uuguccgaagagccagcca

SEQ ID NO: 581173 - RNA, 19 nt, Artificial Sequence
  Description of Artificial Sequence: Synthetic oligonucleotide
agacuacuacaauucuaau

SEQ ID NO: 581174 - RNA, 19 nt, Artificial Sequence
  Description of Artificial Sequence: Synthetic oligonucleotide
uuaagccucuaucccugua

SEQ ID NO: 581175 - RNA, 19 nt, Artificial Sequence
  Description of Artificial Sequence: Synthetic oligonucleotide
gcagcacucucauaccgag

SEQ ID NO: 581176 - RNA, 19 nt, Artificial Sequence
  Description of Artificial Sequence: Synthetic oligonucleotide
agcgccaucaggacuucuc

SEQ ID NO: 581177 - RNA, 19 nt, Artificial Sequence
  Description of Artificial Sequence: Synthetic oligonucleotide
aucauauacuagugucuua

SEQ ID NO: 581178 - RNA, 19 nt, Artificial Sequence
  Description of Artificial Sequence: Synthetic oligonucleotide
aucauuaccuguacaguua

SEQ ID NO: 581179 - RNA, 19 nt, Artificial Sequence
  Description of Artificial Sequence: Synthetic oligonucleotide
aggcaacauacaugauuug

SEQ ID NO: 581180 - RNA, 19 nt, Artificial Sequence
  Description of Artificial Sequence: Synthetic oligonucleotide
cucuggccauauauaauca

SEQ ID NO: 581181 - RNA, 19 nt, Artificial Sequence
  Description of Artificial Sequence: Synthetic oligonucleotide
guacuugaauugcuuuaga

SEQ ID NO: 581182 - RNA, 19 nt, Artificial Sequence
  Description of Artificial Sequence: Synthetic oligonucleotide
acauaccauuaguuuaauu

SEQ ID NO: 581183 - RNA, 19 nt, Artificial Sequence
  Description of Artificial Sequence: Synthetic oligonucleotide
ucaggacgaaugccguauc

SEQ ID NO: 581184 - RNA, 19 nt, Artificial Sequence
  Description of Artificial Sequence: Synthetic oligonucleotide
caauuaauccgggacccca

SEQ ID NO: 581185 - RNA, 19 nt, Artificial Sequence
  Description of Artificial Sequence: Synthetic oligonucleotide
cuagugucuuagacauaac

SEQ ID NO: 581186 - RNA, 19 nt, Artificial Sequence
  Description of Artificial Sequence: Synthetic oligonucleotide
caaauuuacagaguaguuu

SEQ ID NO: 581187 - RNA, 19 nt, Artificial Sequence
  Description of Artificial Sequence: Synthetic oligonucleotide
cuuagagauuuugucaaua

SEQ ID NO: 581188 - RNA, 19 nt, Artificial Sequence
  Description of Artificial Sequence: Synthetic oligonucleotide
aguacucaucuugauguuu

SEQ ID NO: 581189 - RNA, 19 nt, Artificial Sequence
  Description of Artificial Sequence: Synthetic oligonucleotide
auuguccguaaagcuccac

SEQ ID NO: 581190 - RNA, 19 nt, Artificial Sequence
  Description of Artificial Sequence: Synthetic oligonucleotide
cuaauggaguuucaaguau

SEQ ID NO: 581191 - RNA, 19 nt, Artificial Sequence
  Description of Artificial Sequence: Synthetic oligonucleotide
cagagcauaggucacucua

SEQ ID NO: 581192 - RNA, 19 nt, Artificial Sequence
  Description of Artificial Sequence: Synthetic oligonucleotide
ugggugaacaacgcacaaa

SEQ ID NO: 581193 - RNA, 19 nt, Artificial Sequence
  Description of Artificial Sequence: Synthetic oligonucleotide
uuaguacauugagauguuu

SEQ ID NO: 581194 - RNA, 19 nt, Artificial Sequence
  Description of Artificial Sequence: Synthetic oligonucleotide
auuuguauaccaggauauu

SEQ ID NO: 581195 - RNA, 19 nt, Artificial Sequence
  Description of Artificial Sequence: Synthetic oligonucleotide
ugaaggcaacauacaugau

SEQ ID NO: 581196 - RNA, 19 nt, Artificial Sequence
  Description of Artificial Sequence: Synthetic oligonucleotide
uccacgucauuguguccug

SEQ ID NO: 581197 - RNA, 19 nt, Artificial Sequence
  Description of Artificial Sequence: Synthetic oligonucleotide
caaauaacgcgaggccaug

SEQ ID NO: 581198 - RNA, 19 nt, Artificial Sequence
  Description of Artificial Sequence: Synthetic oligonucleotide
cuaugcucuggccauauau

SEQ ID NO: 581199 - RNA, 19 nt, Artificial Sequence
  Description of Artificial Sequence: Synthetic oligonucleotide
guccguaaagcuccacguc

SEQ ID NO: 581200 - RNA, 19 nt, Artificial Sequence
  Description of Artificial Sequence: Synthetic oligonucleotide
acucucauaccgagcagca

SEQ ID NO: 581201 - RNA, 19 nt, Artificial Sequence
  Description of Artificial Sequence: Synthetic oligonucleotide
gugacacaaacuguuuuaa

SEQ ID NO: 581202 - RNA, 19 nt, Artificial Sequence
  Description of Artificial Sequence: Synthetic oligonucleotide
uuacagcaucugauuuuau

SEQ ID NO: 581203 - RNA, 19 nt, Artificial Sequence
  Description of Artificial Sequence: Synthetic oligonucleotide
acgcacaaacauacaagca

SEQ ID NO: 581204 - RNA, 19 nt, Artificial Sequence
  Description of Artificial Sequence: Synthetic oligonucleotide
aacuagcaccguauccaga

SEQ ID NO: 581205 - RNA, 19 nt, Artificial Sequence
  Description of Artificial Sequence: Synthetic oligonucleotide
cauugcauacaaaaucauu

SEQ ID NO: 581206 - RNA, 19 nt, Artificial Sequence
  Description of Artificial Sequence: Synthetic oligonucleotide
cuuuacugguucuugucau

SEQ ID NO: 581207 - RNA, 19 nt, Artificial Sequence
  Description of Artificial Sequence: Synthetic oligonucleotide
agccugacugcaugauacu

SEQ ID NO: 581208 - RNA, 19 nt, Artificial Sequence
  Description of Artificial Sequence: Synthetic oligonucleotide
gagcauaggucacucuagu

SEQ ID NO: 581209 - RNA, 19 nt, Artificial Sequence
  Description of Artificial Sequence: Synthetic oligonucleotide
cagaguaguuuacaaauuu

SEQ ID NO: 581210 - RNA, 19 nt, Artificial Sequence
  Description of Artificial Sequence: Synthetic oligonucleotide
cguaucuuguccgaagagc

SEQ ID NO: 581211 - RNA, 19 nt, Artificial Sequence
  Description of Artificial Sequence: Synthetic oligonucleotide
gaaccaaagcauucacaau

SEQ ID NO: 581212 - RNA, 19 nt, Artificial Sequence
  Description of Artificial Sequence: Synthetic oligonucleotide
cacuuucaucacacaucag

SEQ ID NO: 581213 - RNA, 19 nt, Artificial Sequence
  Description of Artificial Sequence: Synthetic oligonucleotide
aaacuacauaaggccuuaa

SEQ ID NO: 581214 - RNA, 19 nt, Artificial Sequence
  Description of Artificial Sequence: Synthetic oligonucleotide
uacauaccauuaguuuaau

SEQ ID NO: 581215 - RNA, 19 nt, Artificial Sequence
  Description of Artificial Sequence: Synthetic oligonucleotide
gugaacccaugacauuauc

SEQ ID NO: 581216 - RNA, 19 nt, Artificial Sequence
  Description of Artificial Sequence: Synthetic oligonucleotide
gcaagauccacagauggua

SEQ ID NO: 581217 - RNA, 19 nt, Artificial Sequence
  Description of Artificial Sequence: Synthetic oligonucleotide
accccagaccuauguaaaa

SEQ ID NO: 581218 - RNA, 19 nt, Artificial Sequence
  Description of Artificial Sequence: Synthetic oligonucleotide
gaccccagaccuauguaaa

SEQ ID NO: 581219 - RNA, 19 nt, Artificial Sequence
  Description of Artificial Sequence: Synthetic oligonucleotide
caacucgcauuccugaggu

SEQ ID NO: 581220 - RNA, 19 nt, Artificial Sequence
  Description of Artificial Sequence: Synthetic oligonucleotide
ucauaccgagcagcaagau

SEQ ID NO: 581221 - RNA, 19 nt, Artificial Sequence
  Description of Artificial Sequence: Synthetic oligonucleotide
ggaccccagaccuauguaa

SEQ ID NO: 581222 - RNA, 19 nt, Artificial Sequence
  Description of Artificial Sequence: Synthetic oligonucleotide
ccucuaucccuguacaaca

SEQ ID NO: 581223 - RNA, 19 nt, Artificial Sequence
  Description of Artificial Sequence: Synthetic oligonucleotide
cagcauugccaugugagaa

SEQ ID NO: 581224 - RNA, 19 nt, Artificial Sequence
  Description of Artificial Sequence: Synthetic oligonucleotide
agccucuaucccuguacaa

SEQ ID NO: 581225 - RNA, 19 nt, Artificial Sequence
  Description of Artificial Sequence: Synthetic oligonucleotide
gacgaaugccguaucuugu

SEQ ID NO: 581226 - RNA, 19 nt, Artificial Sequence
  Description of Artificial Sequence: Synthetic oligonucleotide
gcagaacaauuaaaacuac

SEQ ID NO: 581227 - RNA, 19 nt, Artificial Sequence
  Description of Artificial Sequence: Synthetic oligonucleotide
aggacgaaugccguaucuu

SEQ ID NO: 581228 - RNA, 19 nt, Artificial Sequence
  Description of Artificial Sequence: Synthetic oligonucleotide
agugaacccaugacauuau

SEQ ID NO: 581229 - RNA, 19 nt, Artificial Sequence
  Description of Artificial Sequence: Synthetic oligonucleotide
acacaucaguguguaaguu

SEQ ID NO: 581230 - RNA, 19 nt, Artificial Sequence
  Description of Artificial Sequence: Synthetic oligonucleotide
gccaagguggaaagggacc

SEQ ID NO: 581231 - RNA, 19 nt, Artificial Sequence
  Description of Artificial Sequence: Synthetic oligonucleotide
gaugaauggcugguaaguu

SEQ ID NO: 581232 - RNA, 19 nt, Artificial Sequence
  Description of Artificial Sequence: Synthetic oligonucleotide
ccaugcgaaaagucaauga

SEQ ID NO: 581233 - RNA, 19 nt, Artificial Sequence
  Description of Artificial Sequence: Synthetic oligonucleotide
gccucuaucccuguacaac

SEQ ID NO: 581234 - RNA, 19 nt, Artificial Sequence
  Description of Artificial Sequence: Synthetic oligonucleotide
aguuaacagauggcauaaa

SEQ ID NO: 581235 - RNA, 19 nt, Artificial Sequence
  Description of Artificial Sequence: Synthetic oligonucleotide
gccaugcgaaaagucaaug

SEQ ID NO: 581236 - RNA, 19 nt, Artificial Sequence
  Description of Artificial Sequence: Synthetic oligonucleotide
agcaccguauccagaguaa

SEQ ID NO: 581237 - RNA, 19 nt, Artificial Sequence
  Description of Artificial Sequence: Synthetic oligonucleotide
gguaucagggaaagcaacu

SEQ ID NO: 581238 - RNA, 19 nt, Artificial Sequence
  Description of Artificial Sequence: Synthetic oligonucleotide
gccguaucuuguccgaaga

SEQ ID NO: 581239 - RNA, 19 nt, Artificial Sequence
  Description of Artificial Sequence: Synthetic oligonucleotide
gcauugggugaacaacgca

SEQ ID NO: 581240 - RNA, 19 nt, Artificial Sequence
  Description of Artificial Sequence: Synthetic oligonucleotide
ccccagaccuauguaaaag

SEQ ID NO: 581241 - RNA, 19 nt, Artificial Sequence
  Description of Artificial Sequence: Synthetic oligonucleotide
guauaccaggauauuuagu

SEQ ID NO: 581242 - RNA, 19 nt, Artificial Sequence
  Description of Artificial Sequence: Synthetic oligonucleotide
cucgcauuccugaggucaa

SEQ ID NO: 581243 - RNA, 19 nt, Artificial Sequence
  Description of Artificial Sequence: Synthetic oligonucleotide
caguguguauuauuucaau

SEQ ID NO: 581244 - RNA, 19 nt, Artificial Sequence
  Description of Artificial Sequence: Synthetic oligonucleotide
agagguuaucuuagagauu

SEQ ID NO: 581245 - RNA, 19 nt, Artificial Sequence
  Description of Artificial Sequence: Synthetic oligonucleotide
ccguaucuuguccgaagag

SEQ ID NO: 581246 - RNA, 19 nt, Artificial Sequence
  Description of Artificial Sequence: Synthetic oligonucleotide
gcgaaaagucaaugacuuc

SEQ ID NO: 581247 - RNA, 19 nt, Artificial Sequence
  Description of Artificial Sequence: Synthetic oligonucleotide
gccugacugcaugauacug

SEQ ID NO: 581248 - RNA, 19 nt, Artificial Sequence
  Description of Artificial Sequence: Synthetic oligonucleotide
uuggaucagguaggacaaa

SEQ ID NO: 581249 - RNA, 19 nt, Artificial Sequence
  Description of Artificial Sequence: Synthetic oligonucleotide
cuacuacaauucuaauaau

SEQ ID NO: 581250 - RNA, 19 nt, Artificial Sequence
  Description of Artificial Sequence: Synthetic oligonucleotide
ggugaacaacgcacaaaca

SEQ ID NO: 581251 - RNA, 19 nt, Artificial Sequence
  Description of Artificial Sequence: Synthetic oligonucleotide
cagucccaugaauuauuaa

SEQ ID NO: 581252 - RNA, 19 nt, Artificial Sequence
  Description of Artificial Sequence: Synthetic oligonucleotide
cugccccuucaacccacag

SEQ ID NO: 581253 - RNA, 19 nt, Artificial Sequence
  Description of Artificial Sequence: Synthetic oligonucleotide
ggaaagcaacucgcauucc

SEQ ID NO: 581254 - RNA, 19 nt, Artificial Sequence
  Description of Artificial Sequence: Synthetic oligonucleotide
auaggucacucuaguuaau

SEQ ID NO: 581255 - RNA, 19 nt, Artificial Sequence
  Description of Artificial Sequence: Synthetic oligonucleotide
cugugacacaaacuguuuu

SEQ ID NO: 581256 - RNA, 19 nt, Artificial Sequence
  Description of Artificial Sequence: Synthetic oligonucleotide
caguccgcucuuucugaca

SEQ ID NO: 581257 - RNA, 19 nt, Artificial Sequence
  Description of Artificial Sequence: Synthetic oligonucleotide
cacucuaguuaaugugggu

SEQ ID NO: 581258 - RNA, 19 nt, Artificial Sequence
  Description of Artificial Sequence: Synthetic oligonucleotide
gcgccaucaggacuucuca

SEQ ID NO: 581259 - RNA, 19 nt, Artificial Sequence
  Description of Artificial Sequence: Synthetic oligonucleotide
ucgcauuccugaggucaaa

SEQ ID NO: 581260 - RNA, 19 nt, Artificial Sequence
  Description of Artificial Sequence: Synthetic oligonucleotide
gguguaaaguccagcggcu

SEQ ID NO: 581261 - RNA, 19 nt, Artificial Sequence
  Description of Artificial Sequence: Synthetic oligonucleotide
ccaguccgcucuuucugac

SEQ ID NO: 581262 - RNA, 19 nt, Artificial Sequence
  Description of Artificial Sequence: Synthetic oligonucleotide
ucauuguguccugccccuu

SEQ ID NO: 581263 - RNA, 19 nt, Artificial Sequence
  Description of Artificial Sequence: Synthetic oligonucleotide
augccguaucuuguccgaa

SEQ ID NO: 581264 - RNA, 19 nt, Artificial Sequence
  Description of Artificial Sequence: Synthetic oligonucleotide
acgcgaggccaugcgaaaa

SEQ ID NO: 581265 - RNA, 19 nt, Artificial Sequence
  Description of Artificial Sequence: Synthetic oligonucleotide
cgaggccaugcgaaaaguc

SEQ ID NO: 581266 - RNA, 19 nt, Artificial Sequence
  Description of Artificial Sequence: Synthetic oligonucleotide
cucucauaccgagcagcaa

SEQ ID NO: 581267 - RNA, 19 nt, Artificial Sequence
  Description of Artificial Sequence: Synthetic oligonucleotide
agguuaucuuagagauuuu

SEQ ID NO: 581268 - RNA, 19 nt, Artificial Sequence
  Description of Artificial Sequence: Synthetic oligonucleotide
gcaucugauuuuauagaau

SEQ ID NO: 581269 - RNA, 19 nt, Artificial Sequence
  Description of Artificial Sequence: Synthetic oligonucleotide
ggagugcaguucagcaaga

SEQ ID NO: 581270 - RNA, 19 nt, Artificial Sequence
  Description of Artificial Sequence: Synthetic oligonucleotide
caguacucaucuugauguu

SEQ ID NO: 581271 - RNA, 19 nt, Artificial Sequence
  Description of Artificial Sequence: Synthetic oligonucleotide
cuaguuaaugugggugcuu

SEQ ID NO: 581272 - RNA, 19 nt, Artificial Sequence
  Description of Artificial Sequence: Synthetic oligonucleotide
guguaaaguccagcggcuu

SEQ ID NO: 581273 - RNA, 19 nt, Artificial Sequence
  Description of Artificial Sequence: Synthetic oligonucleotide
ccacgucauuguguccugc

SEQ ID NO: 581274 - RNA, 19 nt, Artificial Sequence
  Description of Artificial Sequence: Synthetic oligonucleotide
ccagcggcuuccacuuuca

SEQ ID NO: 581275 - RNA, 19 nt, Artificial Sequence
  Description of Artificial Sequence: Synthetic oligonucleotide
cgaugaauggcugguaagu

SEQ ID NO: 581276 - RNA, 19 nt, Artificial Sequence
  Description of Artificial Sequence: Synthetic oligonucleotide
ccgcucuuucugacaggug

SEQ ID NO: 581277 - RNA, 19 nt, Artificial Sequence
  Description of Artificial Sequence: Synthetic oligonucleotide
ccgaagagccagccaggca

SEQ ID NO: 581278 - RNA, 19 nt, Artificial Sequence
  Description of Artificial Sequence: Synthetic oligonucleotide
ccguaaagcuccacgucau

SEQ ID NO: 581279 - RNA, 19 nt, Artificial Sequence
  Description of Artificial Sequence: Synthetic oligonucleotide
gcaccguauccagaguaau

SEQ ID NO: 581280 - RNA, 19 nt, Artificial Sequence
  Description of Artificial Sequence: Synthetic oligonucleotide
ccguauccagaguaaucau

SEQ ID NO: 581281 - RNA, 19 nt, Artificial Sequence
  Description of Artificial Sequence: Synthetic oligonucleotide
gcgaggccaugcgaaaagu

SEQ ID NO: 581282 - RNA, 19 nt, Artificial Sequence
  Description of Artificial Sequence: Synthetic oligonucleotide
ccgggaccccagaccuaug

SEQ ID NO: 581283 - RNA, 19 nt, Artificial Sequence
  Description of Artificial Sequence: Synthetic oligonucleotide
ccuaugcucuggccauaua

SEQ ID NO: 581284 - RNA, 19 nt, Artificial Sequence
  Description of Artificial Sequence: Synthetic oligonucleotide
cagcggcuuccacuuucau

SEQ ID NO: 581285 - RNA, 19 nt, Artificial Sequence
  Description of Artificial Sequence: Synthetic oligonucleotide
cguaaagcuccacgucauu

SEQ ID NO: 581286 - RNA, 19 nt, Artificial Sequence
  Description of Artificial Sequence: Synthetic oligonucleotide
aaggaaagcaucuaaagga

SEQ ID NO: 581287 - RNA, 19 nt, Artificial Sequence
  Description of Artificial Sequence: Synthetic oligonucleotide
ugugauagugaucaucugg

SEQ ID NO: 581288 - RNA, 19 nt, Artificial Sequence
  Description of Artificial Sequence: Synthetic oligonucleotide
uucuacacgaaucuaauug

SEQ ID NO: 581289 - RNA, 19 nt, Artificial Sequence
  Description of Artificial Sequence: Synthetic oligonucleotide
aaucuaauuguucugggca

SEQ ID NO: 581290 - RNA, 19 nt, Artificial Sequence
  Description of Artificial Sequence: Synthetic oligonucleotide
aauuuggagggacaguuuc

SEQ ID NO: 581291 - RNA, 19 nt, Artificial Sequence
  Description of Artificial Sequence: Synthetic oligonucleotide
auacagaugauccaugcgg

SEQ ID NO: 581292 - RNA, 19 nt, Artificial Sequence
  Description of Artificial Sequence: Synthetic oligonucleotide
gaaugaguacuucagggcg

SEQ ID NO: 581293 - RNA, 19 nt, Artificial Sequence
  Description of Artificial Sequence: Synthetic oligonucleotide
aauaaaggugccgucauuc

SEQ ID NO: 581294 - RNA, 19 nt, Artificial Sequence
  Description of Artificial Sequence: Synthetic oligonucleotide
uuggaugaaauaaauuaag

SEQ ID NO: 581295 - RNA, 19 nt, Artificial Sequence
  Description of Artificial Sequence: Synthetic oligonucleotide
aauaccuggugucagucuc

SEQ ID NO: 581296 - RNA, 19 nt, Artificial Sequence
  Description of Artificial Sequence: Synthetic oligonucleotide
aauguauuccccucguuug

SEQ ID NO: 581297 - RNA, 19 nt, Artificial Sequence
  Description of Artificial Sequence: Synthetic oligonucleotide
uggaaugaguacuucaggg

SEQ ID NO: 581298 - RNA, 19 nt, Artificial Sequence
  Description of Artificial Sequence: Synthetic oligonucleotide
ucuguuaucuugaugugcc

SEQ ID NO: 581299 - RNA, 19 nt, Artificial Sequence
  Description of Artificial Sequence: Synthetic oligonucleotide
agauacagaugauccaugc

SEQ ID NO: 581300 - RNA, 19 nt, Artificial Sequence
  Description of Artificial Sequence: Synthetic oligonucleotide
cuucacaauggcuacgucg

SEQ ID NO: 581301 - RNA, 19 nt, Artificial Sequence
  Description of Artificial Sequence: Synthetic oligonucleotide
auggcuacgucguucaugg

SEQ ID NO: 581302 - RNA, 19 nt, Artificial Sequence
  Description of Artificial Sequence: Synthetic oligonucleotide
auagugaucaucugggcug

SEQ ID NO: 581303 - RNA, 19 nt, Artificial Sequence
  Description of Artificial Sequence: Synthetic oligonucleotide
uacagaugauccaugcggg

SEQ ID NO: 581304 - RNA, 19 nt, Artificial Sequence
  Description of Artificial Sequence: Synthetic oligonucleotide
aauuguucugggcacugag

SEQ ID NO: 581305 - RNA, 19 nt, Artificial Sequence
  Description of Artificial Sequence: Synthetic oligonucleotide
aggucgauggaacagugac

SEQ ID NO: 581306 - RNA, 19 nt, Artificial Sequence
  Description of Artificial Sequence: Synthetic oligonucleotide
acgcucacgggauagaugg

SEQ ID NO: 581307 - RNA, 19 nt, Artificial Sequence
  Description of Artificial Sequence: Synthetic oligonucleotide
aaaggacaagugcuaagag

SEQ ID NO: 581308 - RNA, 19 nt, Artificial Sequence
  Description of Artificial Sequence: Synthetic oligonucleotide
aaccccaggauaauuuucc

SEQ ID NO: 581309 - RNA, 19 nt, Artificial Sequence
  Description of Artificial Sequence: Synthetic oligonucleotide
ugaggauaagcucgaacag

SEQ ID NO: 581310 - RNA, 19 nt, Artificial Sequence
  Description of Artificial Sequence: Synthetic oligonucleotide
ucaucgaaauaccuggugu

SEQ ID NO: 581311 - RNA, 19 nt, Artificial Sequence
  Description of Artificial Sequence: Synthetic oligonucleotide
aucuaauuguucugggcac

SEQ ID NO: 581312 - RNA, 19 nt, Artificial Sequence
  Description of Artificial Sequence: Synthetic oligonucleotide
aaggacaagugcuaagaga

SEQ ID NO: 581313 - RNA, 19 nt, Artificial Sequence
  Description of Artificial Sequence: Synthetic oligonucleotide
ucuacacgaaucuaauugu

SEQ ID NO: 581314 - RNA, 19 nt, Artificial Sequence
  Description of Artificial Sequence: Synthetic oligonucleotide
ucuugaggaggaaguagcg

SEQ ID NO: 581315 - RNA, 19 nt, Artificial Sequence
  Description of Artificial Sequence: Synthetic oligonucleotide
aaaacgacauggugcagca

SEQ ID NO: 581316 - RNA, 19 nt, Artificial Sequence
  Description of Artificial Sequence: Synthetic oligonucleotide
cuucauaguggcaccaucc

SEQ ID NO: 581317 - RNA, 19 nt, Artificial Sequence
  Description of Artificial Sequence: Synthetic oligonucleotide
gaaucuaauuguucugggc

SEQ ID NO: 581318 - RNA, 19 nt, Artificial Sequence
  Description of Artificial Sequence: Synthetic oligonucleotide
ugaugaagguguugggacg

SEQ ID NO: 581319 - RNA, 19 nt, Artificial Sequence
  Description of Artificial Sequence: Synthetic oligonucleotide
aacgacauggugcagcaau

SEQ ID NO: 581320 - RNA, 19 nt, Artificial Sequence
  Description of Artificial Sequence: Synthetic oligonucleotide
acacgaaucuaauuguucu

SEQ ID NO: 581321 - RNA, 19 nt, Artificial Sequence
  Description of Artificial Sequence: Synthetic oligonucleotide
aguuucuuauuauaauagu

SEQ ID NO: 581322 - RNA, 19 nt, Artificial Sequence
  Description of Artificial Sequence: Synthetic oligonucleotide
uaaaggacaagugcuaaga

SEQ ID NO: 581323 - RNA, 19 nt, Artificial Sequence
  Description of Artificial Sequence: Synthetic oligonucleotide
caaugcaaaggagugauag

SEQ ID NO: 581324 - RNA, 19 nt, Artificial Sequence
  Description of Artificial Sequence: Synthetic oligonucleotide
aaugaguacuucagggcgg

SEQ ID NO: 581325 - RNA, 19 nt, Artificial Sequence
  Description of Artificial Sequence: Synthetic oligonucleotide
aauuuuccuccugaccugg

SEQ ID NO: 581326 - RNA, 19 nt, Artificial Sequence
  Description of Artificial Sequence: Synthetic oligonucleotide
uaauguauuccccucguuu

SEQ ID NO: 581327 - RNA, 19 nt, Artificial Sequence
  Description of Artificial Sequence: Synthetic oligonucleotide
uggacgguggcccuggacc

SEQ ID NO: 581328 - RNA, 19 nt, Artificial Sequence
  Description of Artificial Sequence: Synthetic oligonucleotide
gacccaugagcccacauug

SEQ ID NO: 581329 - RNA, 19 nt, Artificial Sequence
  Description of Artificial Sequence: Synthetic oligonucleotide
gucgauggaacagugacag

SEQ ID NO: 581330 - RNA, 19 nt, Artificial Sequence
  Description of Artificial Sequence: Synthetic oligonucleotide
acgaaucuaauuguucugg

SEQ ID NO: 581331 - RNA, 19 nt, Artificial Sequence
  Description of Artificial Sequence: Synthetic oligonucleotide
cacgauguuggcaaagaag

SEQ ID NO: 581332 - RNA, 19 nt, Artificial Sequence
  Description of Artificial Sequence: Synthetic oligonucleotide
aguugucacugggagaacc

SEQ ID NO: 581333 - RNA, 19 nt, Artificial Sequence
  Description of Artificial Sequence: Synthetic oligonucleotide
uauugaauuuggagggaca

SEQ ID NO: 581334 - RNA, 19 nt, Artificial Sequence
  Description of Artificial Sequence: Synthetic oligonucleotide
uuccaagaaacaaaaccau

SEQ ID NO: 581335 - RNA, 19 nt, Artificial Sequence
  Description of Artificial Sequence: Synthetic oligonucleotide
aggagugauagcugccagc

SEQ ID NO: 581336 - RNA, 19 nt, Artificial Sequence
  Description of Artificial Sequence: Synthetic oligonucleotide
cucgcaaugcaaaggagug

SEQ ID NO: 581337 - RNA, 19 nt, Artificial Sequence
  Description of Artificial Sequence: Synthetic oligonucleotide
gaaacauucuccccugguc

SEQ ID NO: 581338 - RNA, 19 nt, Artificial Sequence
  Description of Artificial Sequence: Synthetic oligonucleotide
agguuuuaauguauucccc

SEQ ID NO: 581339 - RNA, 19 nt, Artificial Sequence
  Description of Artificial Sequence: Synthetic oligonucleotide
aagcaucuaaaggacaagu

SEQ ID NO: 581340 - RNA, 19 nt, Artificial Sequence
  Description of Artificial Sequence: Synthetic oligonucleotide
aaauaccuggugucagucu

SEQ ID NO: 581341 - RNA, 19 nt, Artificial Sequence
  Description of Artificial Sequence: Synthetic oligonucleotide
cucaaauuggaugaaauaa

SEQ ID NO: 581342 - RNA, 19 nt, Artificial Sequence
  Description of Artificial Sequence: Synthetic oligonucleotide
uucagguacucaaacucgu

SEQ ID NO: 581343 - RNA, 19 nt, Artificial Sequence
  Description of Artificial Sequence: Synthetic oligonucleotide
agguacucaaacucguuca

SEQ ID NO: 581344 - RNA, 19 nt, Artificial Sequence
  Description of Artificial Sequence: Synthetic oligonucleotide
uucaugguauccguggccc

SEQ ID NO: 581345 - RNA, 19 nt, Artificial Sequence
  Description of Artificial Sequence: Synthetic oligonucleotide
gacaggacccaccuagacc

SEQ ID NO: 581346 - RNA, 19 nt, Artificial Sequence
  Description of Artificial Sequence: Synthetic oligonucleotide
ugaaguugacuguuguaaa

SEQ ID NO: 581347 - RNA, 19 nt, Artificial Sequence
  Description of Artificial Sequence: Synthetic oligonucleotide
cucgcgaugcuccacgucc

SEQ ID NO: 581348 - RNA, 19 nt, Artificial Sequence
  Description of Artificial Sequence: Synthetic oligonucleotide
aauggcuacgucguucaug

SEQ ID NO: 581349 - RNA, 19 nt, Artificial Sequence
  Description of Artificial Sequence: Synthetic oligonucleotide
aguccaucgucucuuccuc

SEQ ID NO: 581350 - RNA, 19 nt, Artificial Sequence
  Description of Artificial Sequence: Synthetic oligonucleotide
cuggaaugaguacuucagg

SEQ ID NO: 581351 - RNA, 19 nt, Artificial Sequence
  Description of Artificial Sequence: Synthetic oligonucleotide
cuaagagaagagcucauga

SEQ ID NO: 581352 - RNA, 19 nt, Artificial Sequence
  Description of Artificial Sequence: Synthetic oligonucleotide
aaaccccaggauaauuuuc

SEQ ID NO: 581353 - RNA, 19 nt, Artificial Sequence
  Description of Artificial Sequence: Synthetic oligonucleotide
uguuaucuugaugugccca

SEQ ID NO: 581354 - RNA, 19 nt, Artificial Sequence
  Description of Artificial Sequence: Synthetic oligonucleotide
ucggaaaacacacgcucac

SEQ ID NO: 581355 - RNA, 19 nt, Artificial Sequence
  Description of Artificial Sequence: Synthetic oligonucleotide
guucucaguaagugugugg

SEQ ID NO: 581356 - RNA, 19 nt, Artificial Sequence
  Description of Artificial Sequence: Synthetic oligonucleotide
gaguuucagguacucaaac

SEQ ID NO: 581357 - RNA, 19 nt, Artificial Sequence
  Description of Artificial Sequence: Synthetic oligonucleotide
aagcucgaacagcuucucg

SEQ ID NO: 581358 - RNA, 19 nt, Artificial Sequence
  Description of Artificial Sequence: Synthetic oligonucleotide
ugauagugaucaucugggc

SEQ ID NO: 581359 - RNA, 19 nt, Artificial Sequence
  Description of Artificial Sequence: Synthetic oligonucleotide
acagaugauccaugcgggg

SEQ ID NO: 581360 - RNA, 19 nt, Artificial Sequence
  Description of Artificial Sequence: Synthetic oligonucleotide
aaauuggaugaaauaaauu

SEQ ID NO: 581361 - RNA, 19 nt, Artificial Sequence
  Description of Artificial Sequence: Synthetic oligonucleotide
ggcugugaauuccucaucg

SEQ ID NO: 581362 - RNA, 19 nt, Artificial Sequence
  Description of Artificial Sequence: Synthetic oligonucleotide
ggaaugaguacuucagggc

SEQ ID NO: 581363 - RNA, 19 nt, Artificial Sequence
  Description of Artificial Sequence: Synthetic oligonucleotide
uggacucgcaaugcaaagg

SEQ ID NO: 581364 - RNA, 19 nt, Artificial Sequence
  Description of Artificial Sequence: Synthetic oligonucleotide
uuuauugaauuuggaggga

SEQ ID NO: 581365 - RNA, 19 nt, Artificial Sequence
  Description of Artificial Sequence: Synthetic oligonucleotide
ugaucggaaguccaucguc

SEQ ID NO: 581366 - RNA, 19 nt, Artificial Sequence
  Description of Artificial Sequence: Synthetic oligonucleotide
cucggguguuuccacaugg

SEQ ID NO: 581367 - RNA, 19 nt, Artificial Sequence
  Description of Artificial Sequence: Synthetic oligonucleotide
ugucacugggagaaccuga

SEQ ID NO: 581368 - RNA, 19 nt, Artificial Sequence
  Description of Artificial Sequence: Synthetic oligonucleotide
gauagugaucaucugggcu

SEQ ID NO: 581369 - RNA, 19 nt, Artificial Sequence
  Description of Artificial Sequence: Synthetic oligonucleotide
guccucggaaaacacacgc

SEQ ID NO: 581370 - RNA, 19 nt, Artificial Sequence
  Description of Artificial Sequence: Synthetic oligonucleotide
agucucagaggugaccugg

SEQ ID NO: 581371 - RNA, 19 nt, Artificial Sequence
  Description of Artificial Sequence: Synthetic oligonucleotide
gaaguugacuguuguaaaa

SEQ ID NO: 581372 - RNA, 19 nt, Artificial Sequence
  Description of Artificial Sequence: Synthetic oligonucleotide
auaaaggugccgucauucu

SEQ ID NO: 581373 - RNA, 19 nt, Artificial Sequence
  Description of Artificial Sequence: Synthetic oligonucleotide
ucacgggauagauggaaga

SEQ ID NO: 581374 - RNA, 19 nt, Artificial Sequence
  Description of Artificial Sequence: Synthetic oligonucleotide
ucuucauaguggcaccauc

SEQ ID NO: 581375 - RNA, 19 nt, Artificial Sequence
  Description of Artificial Sequence: Synthetic oligonucleotide
ucaugggucuggaaugagu

SEQ ID NO: 581376 - RNA, 19 nt, Artificial Sequence
  Description of Artificial Sequence: Synthetic oligonucleotide
ucgaaauaccuggugucag

SEQ ID NO: 581377 - RNA, 19 nt, Artificial Sequence
  Description of Artificial Sequence: Synthetic oligonucleotide
uagccaauaaaggugccgu

SEQ ID NO: 581378 - RNA, 19 nt, Artificial Sequence
  Description of Artificial Sequence: Synthetic oligonucleotide
guauaccacauucuucuca

SEQ ID NO: 581379 - RNA, 19 nt, Artificial Sequence
  Description of Artificial Sequence: Synthetic oligonucleotide
guagccaauaaaggugccg

SEQ ID NO: 581380 - RNA, 19 nt, Artificial Sequence
  Description of Artificial Sequence: Synthetic oligonucleotide
ucgcugucuacacacucca

SEQ ID NO: 581381 - RNA, 19 nt, Artificial Sequence
  Description of Artificial Sequence: Synthetic oligonucleotide
caucuaaaggacaagugcu

SEQ ID NO: 581382 - RNA, 19 nt, Artificial Sequence
  Description of Artificial Sequence: Synthetic oligonucleotide
agguguuccgcagaagguc

SEQ ID NO: 581383 - RNA, 19 nt, Artificial Sequence
  Description of Artificial Sequence: Synthetic oligonucleotide
auccaugcggggcuucugg

SEQ ID NO: 581384 - RNA, 19 nt, Artificial Sequence
  Description of Artificial Sequence: Synthetic oligonucleotide
uguagccaauaaaggugcc

SEQ ID NO: 581385 - RNA, 19 nt, Artificial Sequence
  Description of Artificial Sequence: Synthetic oligonucleotide
aucggaaguccaucgucuc

SEQ ID NO: 581386 - RNA, 19 nt, Artificial Sequence
  Description of Artificial Sequence: Synthetic oligonucleotide
acgaugcuugggcuuggcc

SEQ ID NO: 581387 - RNA, 19 nt, Artificial Sequence
  Description of Artificial Sequence: Synthetic oligonucleotide
cacgaaucuaauuguucug

SEQ ID NO: 581388 - RNA, 19 nt, Artificial Sequence
  Description of Artificial Sequence: Synthetic oligonucleotide
agguacucagguguuccgc

SEQ ID NO: 581389 - RNA, 19 nt, Artificial Sequence
  Description of Artificial Sequence: Synthetic oligonucleotide
ggaggaaguagcguggccg

SEQ ID NO: 581390 - RNA, 19 nt, Artificial Sequence
  Description of Artificial Sequence: Synthetic oligonucleotide
cauugugccacugagaagu

SEQ ID NO: 581391 - RNA, 19 nt, Artificial Sequence
  Description of Artificial Sequence: Synthetic oligonucleotide
agacagcggaugaugaagg

SEQ ID NO: 581392 - RNA, 19 nt, Artificial Sequence
  Description of Artificial Sequence: Synthetic oligonucleotide
agucuguuaucuugaugug

SEQ ID NO: 581393 - RNA, 19 nt, Artificial Sequence
  Description of Artificial Sequence: Synthetic oligonucleotide
gaaauaccuggugucaguc

SEQ ID NO: 581394 - RNA, 19 nt, Artificial Sequence
  Description of Artificial Sequence: Synthetic oligonucleotide
ucucaguaagugugugggc

SEQ ID NO: 581395 - RNA, 19 nt, Artificial Sequence
  Description of Artificial Sequence: Synthetic oligonucleotide
ucuaauuguucugggcacu

SEQ ID NO: 581396 - RNA, 19 nt, Artificial Sequence
  Description of Artificial Sequence: Synthetic oligonucleotide
cagacagcggaugaugaag

SEQ ID NO: 581397 - RNA, 19 nt, Artificial Sequence
  Description of Artificial Sequence: Synthetic oligonucleotide
gacccuaaagacagguggc

SEQ ID NO: 581398 - RNA, 19 nt, Artificial Sequence
  Description of Artificial Sequence: Synthetic oligonucleotide
cucacgggauagauggaag

SEQ ID NO: 581399 - RNA, 19 nt, Artificial Sequence
  Description of Artificial Sequence: Synthetic oligonucleotide
uaaaggugccgucauucuu

SEQ ID NO: 581400 - RNA, 19 nt, Artificial Sequence
  Description of Artificial Sequence: Synthetic oligonucleotide
ucuucucgcuccucgggug

SEQ ID NO: 581401 - RNA, 19 nt, Artificial Sequence
  Description of Artificial Sequence: Synthetic oligonucleotide
ucaguaagugugugggcaa

SEQ ID NO: 581402 - RNA, 19 nt, Artificial Sequence
  Description of Artificial Sequence: Synthetic oligonucleotide
acgucguucaugguauccg

SEQ ID NO: 581403 - RNA, 19 nt, Artificial Sequence
  Description of Artificial Sequence: Synthetic oligonucleotide
gauggaacagugacaggac

SEQ ID NO: 581404 - RNA, 19 nt, Artificial Sequence
  Description of Artificial Sequence: Synthetic oligonucleotide
cagguacucaaacucguuc

SEQ ID NO: 581405 - RNA, 19 nt, Artificial Sequence
  Description of Artificial Sequence: Synthetic oligonucleotide
uccgguuggacgguggccc

SEQ ID NO: 581406 - RNA, 19 nt, Artificial Sequence
  Description of Artificial Sequence: Synthetic oligonucleotide
agcaucuaaaggacaagug

SEQ ID NO: 581407 - RNA, 19 nt, Artificial Sequence
  Description of Artificial Sequence: Synthetic oligonucleotide
uccucggaaaacacacgcu

SEQ ID NO: 581408 - RNA, 19 nt, Artificial Sequence
  Description of Artificial Sequence: Synthetic oligonucleotide
gucuguuaucuugaugugc

SEQ ID NO: 581409 - RNA, 19 nt, Artificial Sequence
  Description of Artificial Sequence: Synthetic oligonucleotide
uggacccuaaagacaggug

SEQ ID NO: 581410 - RNA, 19 nt, Artificial Sequence
  Description of Artificial Sequence: Synthetic oligonucleotide
aagcggugcugcaugaucu

SEQ ID NO: 581411 - RNA, 19 nt, Artificial Sequence
  Description of Artificial Sequence: Synthetic oligonucleotide
gaagcgagcccgguccucg

SEQ ID NO: 581412 - RNA, 19 nt, Artificial Sequence
  Description of Artificial Sequence: Synthetic oligonucleotide
gguccauucuucucgcucc

SEQ ID NO: 581413 - RNA, 19 nt, Artificial Sequence
  Description of Artificial Sequence: Synthetic oligonucleotide
ugcgcucaaugacaguggu

SEQ ID NO: 581414 - RNA, 19 nt, Artificial Sequence
  Description of Artificial Sequence: Synthetic oligonucleotide
aaggugccgucauucuuga

SEQ ID NO: 581415 - RNA, 19 nt, Artificial Sequence
  Description of Artificial Sequence: Synthetic oligonucleotide
cagaugauccaugcggggc

SEQ ID NO: 581416 - RNA, 19 nt, Artificial Sequence
  Description of Artificial Sequence: Synthetic oligonucleotide
uuucuacacgaaucuaauu

SEQ ID NO: 581417 - RNA, 19 nt, Artificial Sequence
  Description of Artificial Sequence: Synthetic oligonucleotide
gaagcggugcugcaugauc

SEQ ID NO: 581418 - RNA, 19 nt, Artificial Sequence
  Description of Artificial Sequence: Synthetic oligonucleotide
ccucuugaguccaucagcc

SEQ ID NO: 581419 - RNA, 19 nt, Artificial Sequence
  Description of Artificial Sequence: Synthetic oligonucleotide
cuggacucgcaaugcaaag

SEQ ID NO: 581420 - RNA, 19 nt, Artificial Sequence
  Description of Artificial Sequence: Synthetic oligonucleotide
auguauuccccucguuugu

SEQ ID NO: 581421 - RNA, 19 nt, Artificial Sequence
  Description of Artificial Sequence: Synthetic oligonucleotide
uuaauguauuccccucguu

SEQ ID NO: 581422 - RNA, 19 nt, Artificial Sequence
  Description of Artificial Sequence: Synthetic oligonucleotide
acucgcaaugcaaaggagu

SEQ ID NO: 581423 - RNA, 19 nt, Artificial Sequence
  Description of Artificial Sequence: Synthetic oligonucleotide
ccagguuuuaauguauucc

SEQ ID NO: 581424 - RNA, 19 nt, Artificial Sequence
  Description of Artificial Sequence: Synthetic oligonucleotide
aucgaaauaccugguguca

SEQ ID NO: 581425 - RNA, 19 nt, Artificial Sequence
  Description of Artificial Sequence: Synthetic oligonucleotide
gaagguguugggacguggc

SEQ ID NO: 581426 - RNA, 19 nt, Artificial Sequence
  Description of Artificial Sequence: Synthetic oligonucleotide
uaagugugugggcaaccuc

SEQ ID NO: 581427 - RNA, 19 nt, Artificial Sequence
  Description of Artificial Sequence: Synthetic oligonucleotide
gaaguagcguggccgccag

SEQ ID NO: 581428 - RNA, 19 nt, Artificial Sequence
  Description of Artificial Sequence: Synthetic oligonucleotide
ucguuugugcagccagccc

SEQ ID NO: 581429 - RNA, 19 nt, Artificial Sequence
  Description of Artificial Sequence: Synthetic oligonucleotide
ggugcgcucaaugacagug

SEQ ID NO: 581430 - RNA, 19 nt, Artificial Sequence
  Description of Artificial Sequence: Synthetic oligonucleotide
uacgucguucaugguaucc

SEQ ID NO: 581431 - RNA, 19 nt, Artificial Sequence
  Description of Artificial Sequence: Synthetic oligonucleotide
ccuaaagacagguggcagc

SEQ ID NO: 581432 - RNA, 19 nt, Artificial Sequence
  Description of Artificial Sequence: Synthetic oligonucleotide
gugaauuccucaucgaaau

SEQ ID NO: 581433 - RNA, 19 nt, Artificial Sequence
  Description of Artificial Sequence: Synthetic oligonucleotide
cuguuaucuugaugugccc

SEQ ID NO: 581434 - RNA, 19 nt, Artificial Sequence
  Description of Artificial Sequence: Synthetic oligonucleotide
agaccgggguaacccaggg

SEQ ID NO: 581435 - RNA, 19 nt, Artificial Sequence
  Description of Artificial Sequence: Synthetic oligonucleotide
uggcauugugccacugaga

SEQ ID NO: 581436 - RNA, 19 nt, Artificial Sequence
  Description of Artificial Sequence: Synthetic oligonucleotide
caugggucuggaaugagua

SEQ ID NO: 581437 - RNA, 19 nt, Artificial Sequence
  Description of Artificial Sequence: Synthetic oligonucleotide
cccuggacccuaaagacag

SEQ ID NO: 581438 - RNA, 19 nt, Artificial Sequence
  Description of Artificial Sequence: Synthetic oligonucleotide
ggauaauuuuccuccugac

SEQ ID NO: 581439 - RNA, 19 nt, Artificial Sequence
  Description of Artificial Sequence: Synthetic oligonucleotide
ucccgguauaccacauucu

SEQ ID NO: 581440 - RNA, 19 nt, Artificial Sequence
  Description of Artificial Sequence: Synthetic oligonucleotide
cucguuugugcagccagcc

SEQ ID NO: 581441 - RNA, 19 nt, Artificial Sequence
  Description of Artificial Sequence: Synthetic oligonucleotide
uggccgccagguuuuaaug

SEQ ID NO: 581442 - RNA, 19 nt, Artificial Sequence
  Description of Artificial Sequence: Synthetic oligonucleotide
gaugcuccacgucccugag

SEQ ID NO: 581443 - RNA, 19 nt, Artificial Sequence
  Description of Artificial Sequence: Synthetic oligonucleotide
ugaggccguuccuuguagc

SEQ ID NO: 581444 - RNA, 19 nt, Artificial Sequence
  Description of Artificial Sequence: Synthetic oligonucleotide
caggauaauuuuccuccug

SEQ ID NO: 581445 - RNA, 19 nt, Artificial Sequence
  Description of Artificial Sequence: Synthetic oligonucleotide
cucggaaaacacacgcuca

SEQ ID NO: 581446 - RNA, 19 nt, Artificial Sequence
  Description of Artificial Sequence: Synthetic oligonucleotide
ucggguguuuccacaugga

SEQ ID NO: 581447 - RNA, 19 nt, Artificial Sequence
  Description of Artificial Sequence: Synthetic oligonucleotide
ucaugguauccguggcccc

SEQ ID NO: 581448 - RNA, 19 nt, Artificial Sequence
  Description of Artificial Sequence: Synthetic oligonucleotide
uugucacugggagaaccug

SEQ ID NO: 581449 - RNA, 19 nt, Artificial Sequence
  Description of Artificial Sequence: Synthetic oligonucleotide
gacucgcaaugcaaaggag

SEQ ID NO: 581450 - RNA, 19 nt, Artificial Sequence
  Description of Artificial Sequence: Synthetic oligonucleotide
ucaucuugaucaggcggug

SEQ ID NO: 581451 - RNA, 19 nt, Artificial Sequence
  Description of Artificial Sequence: Synthetic oligonucleotide
gugcuaagagaagagcuca

SEQ ID NO: 581452 - RNA, 19 nt, Artificial Sequence
  Description of Artificial Sequence: Synthetic oligonucleotide
accugaucggaaguccauc

SEQ ID NO: 581453 - RNA, 19 nt, Artificial Sequence
  Description of Artificial Sequence: Synthetic oligonucleotide
ggacucgcaaugcaaagga

SEQ ID NO: 581454 - RNA, 19 nt, Artificial Sequence
  Description of Artificial Sequence: Synthetic oligonucleotide
gccgucauucuugaggagg

SEQ ID NO: 581455 - RNA, 19 nt, Artificial Sequence
  Description of Artificial Sequence: Synthetic oligonucleotide
cucguucauggucacacga

SEQ ID NO: 581456 - RNA, 19 nt, Artificial Sequence
  Description of Artificial Sequence: Synthetic oligonucleotide
ugaggaucuucauggcaua

SEQ ID NO: 581457 - RNA, 19 nt, Artificial Sequence
  Description of Artificial Sequence: Synthetic oligonucleotide
cuccugaccuggcugggag

SEQ ID NO: 581458 - RNA, 19 nt, Artificial Sequence
  Description of Artificial Sequence: Synthetic oligonucleotide
acccaugagcccacauugc

SEQ ID NO: 581459 - RNA, 19 nt, Artificial Sequence
  Description of Artificial Sequence: Synthetic oligonucleotide
acacgauguuggcaaagaa

SEQ ID NO: 581460 - RNA, 19 nt, Artificial Sequence
  Description of Artificial Sequence: Synthetic oligonucleotide
agacccaugagcccacauu

SEQ ID NO: 581461 - RNA, 19 nt, Artificial Sequence
  Description of Artificial Sequence: Synthetic oligonucleotide
agcgcuuccaagaaacaaa

SEQ ID NO: 581462 - RNA, 19 nt, Artificial Sequence
  Description of Artificial Sequence: Synthetic oligonucleotide
ucgcgaugcuccacguccc

SEQ ID NO: 581463 - RNA, 19 nt, Artificial Sequence
  Description of Artificial Sequence: Synthetic oligonucleotide
ugggacguggccguucugu

SEQ ID NO: 581464 - RNA, 19 nt, Artificial Sequence
  Description of Artificial Sequence: Synthetic oligonucleotide
gaggcggucaugggucugg

SEQ ID NO: 581465 - RNA, 19 nt, Artificial Sequence
  Description of Artificial Sequence: Synthetic oligonucleotide
aggaaguagcguggccgcc

SEQ ID NO: 581466 - RNA, 19 nt, Artificial Sequence
  Description of Artificial Sequence: Synthetic oligonucleotide
aagcgagcccgguccucgg

SEQ ID NO: 581467 - RNA, 19 nt, Artificial Sequence
  Description of Artificial Sequence: Synthetic oligonucleotide
ggugcccuccgguuggacg

SEQ ID NO: 581468 - RNA, 19 nt, Artificial Sequence
  Description of Artificial Sequence: Synthetic oligonucleotide
uccucucgcugucuacaca

SEQ ID NO: 581469 - RNA, 19 nt, Artificial Sequence
  Description of Artificial Sequence: Synthetic oligonucleotide
acucgcgaugcuccacguc

SEQ ID NO: 581470 - RNA, 19 nt, Artificial Sequence
  Description of Artificial Sequence: Synthetic oligonucleotide
gacacucucaggagggaga

SEQ ID NO: 581471 - RNA, 19 nt, Artificial Sequence
  Description of Artificial Sequence: Synthetic oligonucleotide
ggccguucugucuucauca

SEQ ID NO: 581472 - RNA, 19 nt, Artificial Sequence
  Description of Artificial Sequence: Synthetic oligonucleotide
aaguagcguggccgccagg

SEQ ID NO: 581473 - RNA, 19 nt, Artificial Sequence
  Description of Artificial Sequence: Synthetic oligonucleotide
gugugauagugaucaucug

SEQ ID NO: 581474 - RNA, 19 nt, Artificial Sequence
  Description of Artificial Sequence: Synthetic oligonucleotide
uggccguucugucuucauc

SEQ ID NO: 581475 - RNA, 19 nt, Artificial Sequence
  Description of Artificial Sequence: Synthetic oligonucleotide
ucgcaaugcaaaggaguga

SEQ ID NO: 581476 - RNA, 19 nt, Artificial Sequence
  Description of Artificial Sequence: Synthetic oligonucleotide
uaccuggugucagucucag

SEQ ID NO: 581477 - RNA, 19 nt, Artificial Sequence
  Description of Artificial Sequence: Synthetic oligonucleotide
uggucucagaaguccuuaa

SEQ ID NO: 581478 - RNA, 19 nt, Artificial Sequence
  Description of Artificial Sequence: Synthetic oligonucleotide
gcaacgaugaccuccuucu

SEQ ID NO: 581479 - RNA, 19 nt, Artificial Sequence
  Description of Artificial Sequence: Synthetic oligonucleotide
cacacgaugcuugggcuug

SEQ ID NO: 581480 - RNA, 19 nt, Artificial Sequence
  Description of Artificial Sequence: Synthetic oligonucleotide
agauaguccagggcugaca

SEQ ID NO: 581481 - RNA, 19 nt, Artificial Sequence
  Description of Artificial Sequence: Synthetic oligonucleotide
cgaaucuaauuguucuggg

SEQ ID NO: 581482 - RNA, 19 nt, Artificial Sequence
  Description of Artificial Sequence: Synthetic oligonucleotide
ucacacgaugcuugggcuu

SEQ ID NO: 581483 - RNA, 19 nt, Artificial Sequence
  Description of Artificial Sequence: Synthetic oligonucleotide
caaugacagugguccacug

SEQ ID NO: 581484 - RNA, 19 nt, Artificial Sequence
  Description of Artificial Sequence: Synthetic oligonucleotide
aucuaaaggacaagugcua

SEQ ID NO: 581485 - RNA, 19 nt, Artificial Sequence
  Description of Artificial Sequence: Synthetic oligonucleotide
ggcccuggacccuaaagac

SEQ ID NO: 581486 - RNA, 19 nt, Artificial Sequence
  Description of Artificial Sequence: Synthetic oligonucleotide
caccuagacccaugagccc

SEQ ID NO: 581487 - RNA, 19 nt, Artificial Sequence
  Description of Artificial Sequence: Synthetic oligonucleotide
gaucggaaguccaucgucu

SEQ ID NO: 581488 - RNA, 19 nt, Artificial Sequence
  Description of Artificial Sequence: Synthetic oligonucleotide
uccccagcgcuuccaagaa

SEQ ID NO: 581489 - RNA, 19 nt, Artificial Sequence
  Description of Artificial Sequence: Synthetic oligonucleotide
cacgcucacgggauagaug

SEQ ID NO: 581490 - RNA, 19 nt, Artificial Sequence
  Description of Artificial Sequence: Synthetic oligonucleotide
acgcgguucucaguaagug

SEQ ID NO: 581491 - RNA, 19 nt, Artificial Sequence
  Description of Artificial Sequence: Synthetic oligonucleotide
acccuaaagacagguggca

SEQ ID NO: 581492 - RNA, 19 nt, Artificial Sequence
  Description of Artificial Sequence: Synthetic oligonucleotide
ccucggaaaacacacgcuc

SEQ ID NO: 581493 - RNA, 19 nt, Artificial Sequence
  Description of Artificial Sequence: Synthetic oligonucleotide
aaacucguucauggucaca

SEQ ID NO: 581494 - RNA, 19 nt, Artificial Sequence
  Description of Artificial Sequence: Synthetic oligonucleotide
gacccaccuagacccauga

SEQ ID NO: 581495 - RNA, 19 nt, Artificial Sequence
  Description of Artificial Sequence: Synthetic oligonucleotide
uuggacgguggcccuggac

SEQ ID NO: 581496 - RNA, 19 nt, Artificial Sequence
  Description of Artificial Sequence: Synthetic oligonucleotide
agagaccgggguaacccag

SEQ ID NO: 581497 - RNA, 19 nt, Artificial Sequence
  Description of Artificial Sequence: Synthetic oligonucleotide
uaagcucgaacagcuucuc

SEQ ID NO: 581498 - RNA, 19 nt, Artificial Sequence
  Description of Artificial Sequence: Synthetic oligonucleotide
gcucaugaggcagacacuc

SEQ ID NO: 581499 - RNA, 19 nt, Artificial Sequence
  Description of Artificial Sequence: Synthetic oligonucleotide
augacaaagcagaggcggu

SEQ ID NO: 581500 - RNA, 19 nt, Artificial Sequence
  Description of Artificial Sequence: Synthetic oligonucleotide
cauagucguuguccuccag

SEQ ID NO: 581501 - RNA, 19 nt, Artificial Sequence
  Description of Artificial Sequence: Synthetic oligonucleotide
cuccucucgcugucuacac

SEQ ID NO: 581502 - RNA, 19 nt, Artificial Sequence
  Description of Artificial Sequence: Synthetic oligonucleotide
ggacgcgguucucaguaag

SEQ ID NO: 581503 - RNA, 19 nt, Artificial Sequence
  Description of Artificial Sequence: Synthetic oligonucleotide
ugccgucauucuugaggag

SEQ ID NO: 581504 - RNA, 19 nt, Artificial Sequence
  Description of Artificial Sequence: Synthetic oligonucleotide
ccagagaccgggguaaccc

SEQ ID NO: 581505 - RNA, 19 nt, Artificial Sequence
  Description of Artificial Sequence: Synthetic oligonucleotide
gucguucaugguauccgug

SEQ ID NO: 581506 - RNA, 19 nt, Artificial Sequence
  Description of Artificial Sequence: Synthetic oligonucleotide
acccaccuagacccaugag

SEQ ID NO: 581507 - RNA, 19 nt, Artificial Sequence
  Description of Artificial Sequence: Synthetic oligonucleotide
ggcaacgaugaccuccuuc

SEQ ID NO: 581508 - RNA, 19 nt, Artificial Sequence
  Description of Artificial Sequence: Synthetic oligonucleotide
caguaagugugugggcaac

SEQ ID NO: 581509 - RNA, 19 nt, Artificial Sequence
  Description of Artificial Sequence: Synthetic oligonucleotide
gcauacaacagggaggugu

SEQ ID NO: 581510 - RNA, 19 nt, Artificial Sequence
  Description of Artificial Sequence: Synthetic oligonucleotide
gguucucaguaagugugug

SEQ ID NO: 581511 - RNA, 19 nt, Artificial Sequence
  Description of Artificial Sequence: Synthetic oligonucleotide
augagcccacauugcacau

SEQ ID NO: 581512 - RNA, 19 nt, Artificial Sequence
  Description of Artificial Sequence: Synthetic oligonucleotide
ggcuacgucguucauggua

SEQ ID NO: 581513 - RNA, 19 nt, Artificial Sequence
  Description of Artificial Sequence: Synthetic oligonucleotide
caggacgcgguucucagua

SEQ ID NO: 581514 - RNA, 19 nt, Artificial Sequence
  Description of Artificial Sequence: Synthetic oligonucleotide
ggagguaggcugcugccca

SEQ ID NO: 581515 - RNA, 19 nt, Artificial Sequence
  Description of Artificial Sequence: Synthetic oligonucleotide
gcauugugccacugagaag

SEQ ID NO: 581516 - RNA, 19 nt, Artificial Sequence
  Description of Artificial Sequence: Synthetic oligonucleotide
agaagcgagcccgguccuc

SEQ ID NO: 581517 - RNA, 19 nt, Artificial Sequence
  Description of Artificial Sequence: Synthetic oligonucleotide
gguauaccacauucuucuc

SEQ ID NO: 581518 - RNA, 19 nt, Artificial Sequence
  Description of Artificial Sequence: Synthetic oligonucleotide
cgguccucggaaaacacac

SEQ ID NO: 581519 - RNA, 19 nt, Artificial Sequence
  Description of Artificial Sequence: Synthetic oligonucleotide
agugugugggcaaccucgu

SEQ ID NO: 581520 - RNA, 19 nt, Artificial Sequence
  Description of Artificial Sequence: Synthetic oligonucleotide
gguccucggaaaacacacg

SEQ ID NO: 581521 - RNA, 19 nt, Artificial Sequence
  Description of Artificial Sequence: Synthetic oligonucleotide
auaccuggugucagucuca

SEQ ID NO: 581522 - RNA, 19 nt, Artificial Sequence
  Description of Artificial Sequence: Synthetic oligonucleotide
cauacaacagggagguguu

SEQ ID NO: 581523 - RNA, 19 nt, Artificial Sequence
  Description of Artificial Sequence: Synthetic oligonucleotide
uguugggacguggccguuc

SEQ ID NO: 581524 - RNA, 19 nt, Artificial Sequence
  Description of Artificial Sequence: Synthetic oligonucleotide
cccucguuugugcagccag

SEQ ID NO: 581525 - RNA, 19 nt, Artificial Sequence
  Description of Artificial Sequence: Synthetic oligonucleotide
ccgguauaccacauucuuc

SEQ ID NO: 581526 - RNA, 19 nt, Artificial Sequence
  Description of Artificial Sequence: Synthetic oligonucleotide
cguucauggucacacgaug

SEQ ID NO: 581527 - RNA, 19 nt, Artificial Sequence
  Description of Artificial Sequence: Synthetic oligonucleotide
cacgggauagauggaagaa

SEQ ID NO: 581528 - RNA, 19 nt, Artificial Sequence
  Description of Artificial Sequence: Synthetic oligonucleotide
augauccaugcggggcuuc

SEQ ID NO: 581529 - RNA, 19 nt, Artificial Sequence
  Description of Artificial Sequence: Synthetic oligonucleotide
gguuggacgguggcccugg

SEQ ID NO: 581530 - RNA, 19 nt, Artificial Sequence
  Description of Artificial Sequence: Synthetic oligonucleotide
cagagaccgggguaaccca

SEQ ID NO: 581531 - RNA, 19 nt, Artificial Sequence
  Description of Artificial Sequence: Synthetic oligonucleotide
gacguggccguucugucuu

SEQ ID NO: 581532 - RNA, 19 nt, Artificial Sequence
  Description of Artificial Sequence: Synthetic oligonucleotide
cuacacgaaucuaauuguu

SEQ ID NO: 581533 - RNA, 19 nt, Artificial Sequence
  Description of Artificial Sequence: Synthetic oligonucleotide
aaacgacauggugcagcaa

SEQ ID NO: 581534 - RNA, 19 nt, Artificial Sequence
  Description of Artificial Sequence: Synthetic oligonucleotide
acguggccguucugucuuc

SEQ ID NO: 581535 - RNA, 19 nt, Artificial Sequence
  Description of Artificial Sequence: Synthetic oligonucleotide
cccacauugcacauggucu

SEQ ID NO: 581536 - RNA, 19 nt, Artificial Sequence
  Description of Artificial Sequence: Synthetic oligonucleotide
gccguucugucuucaucag

SEQ ID NO: 581537 - RNA, 19 nt, Artificial Sequence
  Description of Artificial Sequence: Synthetic oligonucleotide
caggucgauggaacaguga

SEQ ID NO: 581538 - RNA, 19 nt, Artificial Sequence
  Description of Artificial Sequence: Synthetic oligonucleotide
acacgaugcuugggcuugg

SEQ ID NO: 581539 - RNA, 19 nt, Artificial Sequence
  Description of Artificial Sequence: Synthetic oligonucleotide
cuacgucguucaugguauc

SEQ ID NO: 581540 - RNA, 19 nt, Artificial Sequence
  Description of Artificial Sequence: Synthetic oligonucleotide
cuccgguuggacgguggcc

SEQ ID NO: 581541 - RNA, 19 nt, Artificial Sequence
  Description of Artificial Sequence: Synthetic oligonucleotide
ccaggucgauggaacagug

SEQ ID NO: 581542 - RNA, 19 nt, Artificial Sequence
  Description of Artificial Sequence: Synthetic oligonucleotide
ccucaaauuggaugaaaua

SEQ ID NO: 581543 - RNA, 19 nt, Artificial Sequence
  Description of Artificial Sequence: Synthetic oligonucleotide
uugggacguggccguucug

SEQ ID NO: 581544 - RNA, 19 nt, Artificial Sequence
  Description of Artificial Sequence: Synthetic oligonucleotide
gaccgggguaacccaggga

SEQ ID NO: 581545 - RNA, 19 nt, Artificial Sequence
  Description of Artificial Sequence: Synthetic oligonucleotide
cgaugcuugggcuuggcca

SEQ ID NO: 581546 - RNA, 19 nt, Artificial Sequence
  Description of Artificial Sequence: Synthetic oligonucleotide
ugcccacaguagaaacauu

SEQ ID NO: 581547 - RNA, 19 nt, Artificial Sequence
  Description of Artificial Sequence: Synthetic oligonucleotide
cgguauaccacauucuucu

SEQ ID NO: 581548 - RNA, 19 nt, Artificial Sequence
  Description of Artificial Sequence: Synthetic oligonucleotide
agcucaugaggcagacacu

SEQ ID NO: 581549 - RNA, 19 nt, Artificial Sequence
  Description of Artificial Sequence: Synthetic oligonucleotide
caugcggggcuucuggacu

SEQ ID NO: 581550 - RNA, 19 nt, Artificial Sequence
  Description of Artificial Sequence: Synthetic oligonucleotide
gggcuugaaaggugggcuc

SEQ ID NO: 581551 - RNA, 19 nt, Artificial Sequence
  Description of Artificial Sequence: Synthetic oligonucleotide
cagauaguccagggcugac

SEQ ID NO: 581552 - RNA, 19 nt, Artificial Sequence
  Description of Artificial Sequence: Synthetic oligonucleotide
guugggacguggccguucu

SEQ ID NO: 581553 - RNA, 19 nt, Artificial Sequence
  Description of Artificial Sequence: Synthetic oligonucleotide
cccuaaagacagguggcag

SEQ ID NO: 581554 - RNA, 19 nt, Artificial Sequence
  Description of Artificial Sequence: Synthetic oligonucleotide
ugcccucaaauuggaugaa

SEQ ID NO: 581555 - RNA, 19 nt, Artificial Sequence
  Description of Artificial Sequence: Synthetic oligonucleotide
aggacgcgguucucaguaa

SEQ ID NO: 581556 - RNA, 19 nt, Artificial Sequence
  Description of Artificial Sequence: Synthetic oligonucleotide
gcugaaguugacuguugua

SEQ ID NO: 581557 - RNA, 19 nt, Artificial Sequence
  Description of Artificial Sequence: Synthetic oligonucleotide
uaguggcaccauccuugau

SEQ ID NO: 581558 - RNA, 19 nt, Artificial Sequence
  Description of Artificial Sequence: Synthetic oligonucleotide
ggucgauggaacagugaca

SEQ ID NO: 581559 - RNA, 19 nt, Artificial Sequence
  Description of Artificial Sequence: Synthetic oligonucleotide
cagcgcuuccaagaaacaa

SEQ ID NO: 581560 - RNA, 19 nt, Artificial Sequence
  Description of Artificial Sequence: Synthetic oligonucleotide
ggagaaccugaucggaagu

SEQ ID NO: 581561 - RNA, 19 nt, Artificial Sequence
  Description of Artificial Sequence: Synthetic oligonucleotide
agaagcggugcugcaugau

SEQ ID NO: 581562 - RNA, 19 nt, Artificial Sequence
  Description of Artificial Sequence: Synthetic oligonucleotide
ccguucugucuucaucagc

SEQ ID NO: 581563 - RNA, 19 nt, Artificial Sequence
  Description of Artificial Sequence: Synthetic oligonucleotide
gaguugucacugggagaac

SEQ ID NO: 581564 - RNA, 19 nt, Artificial Sequence
  Description of Artificial Sequence: Synthetic oligonucleotide
gagcccgguccucggaaaa

SEQ ID NO: 581565 - RNA, 19 nt, Artificial Sequence
  Description of Artificial Sequence: Synthetic oligonucleotide
gaauuuggagggacaguuu

SEQ ID NO: 581566 - RNA, 19 nt, Artificial Sequence
  Description of Artificial Sequence: Synthetic oligonucleotide
aggugcgcucaaugacagu

SEQ ID NO: 581567 - RNA, 19 nt, Artificial Sequence
  Description of Artificial Sequence: Synthetic oligonucleotide
accucguccuuggcaacga

SEQ ID NO: 581568 - RNA, 19 nt, Artificial Sequence
  Description of Artificial Sequence: Synthetic oligonucleotide
gguguugggacguggccgu

SEQ ID NO: 581569 - RNA, 19 nt, Artificial Sequence
  Description of Artificial Sequence: Synthetic oligonucleotide
agcgagcccgguccucgga

SEQ ID NO: 581570 - RNA, 19 nt, Artificial Sequence
  Description of Artificial Sequence: Synthetic oligonucleotide
ggcuugaaaggugggcuca

SEQ ID NO: 581571 - RNA, 19 nt, Artificial Sequence
  Description of Artificial Sequence: Synthetic oligonucleotide
aauccacugcacggccaua

SEQ ID NO: 581572 - RNA, 19 nt, Artificial Sequence
  Description of Artificial Sequence: Synthetic oligonucleotide
cacgaugcuugggcuuggc

SEQ ID NO: 581573 - RNA, 19 nt, Artificial Sequence
  Description of Artificial Sequence: Synthetic oligonucleotide
gccacaugugcccucaaau

SEQ ID NO: 581574 - RNA, 19 nt, Artificial Sequence
  Description of Artificial Sequence: Synthetic oligonucleotide
ccaugcggggcuucuggac

SEQ ID NO: 581575 - RNA, 19 nt, Artificial Sequence
  Description of Artificial Sequence: Synthetic oligonucleotide
gcuacgucguucaugguau

SEQ ID NO: 581576 - RNA, 19 nt, Artificial Sequence
  Description of Artificial Sequence: Synthetic oligonucleotide
gacgcgguucucaguaagu

SEQ ID NO: 581577 - RNA, 19 nt, Artificial Sequence
  Description of Artificial Sequence: Synthetic oligonucleotide
agcauacaacagggaggug

SEQ ID NO: 581578 - RNA, 19 nt, Artificial Sequence
  Description of Artificial Sequence: Synthetic oligonucleotide
cugaucggaaguccaucgu

SEQ ID NO: 581579 - RNA, 19 nt, Artificial Sequence
  Description of Artificial Sequence: Synthetic oligonucleotide
gcgcuuccaagaaacaaaa

SEQ ID NO: 581580 - RNA, 19 nt, Artificial Sequence
  Description of Artificial Sequence: Synthetic oligonucleotide
guggccgccagguuuuaau

SEQ ID NO: 581581 - RNA, 19 nt, Artificial Sequence
  Description of Artificial Sequence: Synthetic oligonucleotide
agccagcauacaacaggga

SEQ ID NO: 581582 - RNA, 19 nt, Artificial Sequence
  Description of Artificial Sequence: Synthetic oligonucleotide
auacaacagggagguguuu

SEQ ID NO: 581583 - RNA, 19 nt, Artificial Sequence
  Description of Artificial Sequence: Synthetic oligonucleotide
gguguuccgcagaaggucu

SEQ ID NO: 581584 - RNA, 19 nt, Artificial Sequence
  Description of Artificial Sequence: Synthetic oligonucleotide
gcucacgggauagauggaa

SEQ ID NO: 581585 - RNA, 19 nt, Artificial Sequence
  Description of Artificial Sequence: Synthetic oligonucleotide
cacggccauagucguuguc

SEQ ID NO: 581586 - RNA, 19 nt, Artificial Sequence
  Description of Artificial Sequence: Synthetic oligonucleotide
ccacauggaaggugcgcuc

SEQ ID NO: 581587 - RNA, 19 nt, Artificial Sequence
  Description of Artificial Sequence: Synthetic oligonucleotide
uggcuacgucguucauggu

SEQ ID NO: 581588 - RNA, 19 nt, Artificial Sequence
  Description of Artificial Sequence: Synthetic oligonucleotide
gcgguaaggaagggaugcc

SEQ ID NO: 581589 - RNA, 19 nt, Artificial Sequence
  Description of Artificial Sequence: Synthetic oligonucleotide
cuugaucaggcggugugau

SEQ ID NO: 581590 - RNA, 19 nt, Artificial Sequence
  Description of Artificial Sequence: Synthetic oligonucleotide
gacucgcgaugcuccacgu

SEQ ID NO: 581591 - RNA, 19 nt, Artificial Sequence
  Description of Artificial Sequence: Synthetic oligonucleotide
ccacacgauguuggcaaag

SEQ ID NO: 581592 - RNA, 19 nt, Artificial Sequence
  Description of Artificial Sequence: Synthetic oligonucleotide
agcguggccgccagguuuu

SEQ ID NO: 581593 - RNA, 19 nt, Artificial Sequence
  Description of Artificial Sequence: Synthetic oligonucleotide
ggucucagaaguccuuaau

SEQ ID NO: 581594 - RNA, 19 nt, Artificial Sequence
  Description of Artificial Sequence: Synthetic oligonucleotide
agcuggcauugugccacug

SEQ ID NO: 581595 - RNA, 19 nt, Artificial Sequence
  Description of Artificial Sequence: Synthetic oligonucleotide
aggacccaccuagacccau

SEQ ID NO: 581596 - RNA, 19 nt, Artificial Sequence
  Description of Artificial Sequence: Synthetic oligonucleotide
ccuccgguuggacgguggc

SEQ ID NO: 581597 - RNA, 19 nt, Artificial Sequence
  Description of Artificial Sequence: Synthetic oligonucleotide
cuucucgcuccucgggugu

SEQ ID NO: 581598 - RNA, 19 nt, Artificial Sequence
  Description of Artificial Sequence: Synthetic oligonucleotide
ggccgccagguuuuaaugu

SEQ ID NO: 581599 - RNA, 19 nt, Artificial Sequence
  Description of Artificial Sequence: Synthetic oligonucleotide
cguuugugcagccagcccu

SEQ ID NO: 581600 - RNA, 19 nt, Artificial Sequence
  Description of Artificial Sequence: Synthetic oligonucleotide
gcccuggacccuaaagaca

SEQ ID NO: 581601 - RNA, 19 nt, Artificial Sequence
  Description of Artificial Sequence: Synthetic oligonucleotide
cccuccgguuggacggugg

SEQ ID NO: 581602 - RNA, 19 nt, Artificial Sequence
  Description of Artificial Sequence: Synthetic oligonucleotide
ugcccuccgguuggacggu

SEQ ID NO: 581603 - RNA, 19 nt, Artificial Sequence
  Description of Artificial Sequence: Synthetic oligonucleotide
gaugauccaugcggggcuu

SEQ ID NO: 581604 - RNA, 19 nt, Artificial Sequence
  Description of Artificial Sequence: Synthetic oligonucleotide
uggcaacgaugaccuccuu

SEQ ID NO: 581605 - RNA, 19 nt, Artificial Sequence
  Description of Artificial Sequence: Synthetic oligonucleotide
guuggacgguggcccugga

SEQ ID NO: 581606 - RNA, 19 nt, Artificial Sequence
  Description of Artificial Sequence: Synthetic oligonucleotide
ccgguccucggaaaacaca

SEQ ID NO: 581607 - RNA, 19 nt, Artificial Sequence
  Description of Artificial Sequence: Synthetic oligonucleotide
cucucgcugucuacacacu

SEQ ID NO: 581608 - RNA, 19 nt, Artificial Sequence
  Description of Artificial Sequence: Synthetic oligonucleotide
ccauagucguuguccucca

SEQ ID NO: 581609 - RNA, 19 nt, Artificial Sequence
  Description of Artificial Sequence: Synthetic oligonucleotide
caucuugaucaggcggugu

SEQ ID NO: 581610 - RNA, 19 nt, Artificial Sequence
  Description of Artificial Sequence: Synthetic oligonucleotide
gcuccacgucccugaggcc

SEQ ID NO: 581611 - RNA, 19 nt, Artificial Sequence
  Description of Artificial Sequence: Synthetic oligonucleotide
ggggacucgcgaugcucca

SEQ ID NO: 581612 - RNA, 19 nt, Artificial Sequence
  Description of Artificial Sequence: Synthetic oligonucleotide
cccagagaccgggguaacc

SEQ ID NO: 581613 - RNA, 19 nt, Artificial Sequence
  Description of Artificial Sequence: Synthetic oligonucleotide
aggcggucaugggucugga

SEQ ID NO: 581614 - RNA, 19 nt, Artificial Sequence
  Description of Artificial Sequence: Synthetic oligonucleotide
aguccagggcugacacgau

SEQ ID NO: 581615 - RNA, 19 nt, Artificial Sequence
  Description of Artificial Sequence: Synthetic oligonucleotide
gcgaugcuccacgucccug

SEQ ID NO: 581616 - RNA, 19 nt, Artificial Sequence
  Description of Artificial Sequence: Synthetic oligonucleotide
ccacaugugcccucaaauu

SEQ ID NO: 581617 - RNA, 19 nt, Artificial Sequence
  Description of Artificial Sequence: Synthetic oligonucleotide
cacuccaugcugucaucuu

SEQ ID NO: 581618 - RNA, 19 nt, Artificial Sequence
  Description of Artificial Sequence: Synthetic oligonucleotide
gggacucgcgaugcuccac

SEQ ID NO: 581619 - RNA, 19 nt, Artificial Sequence
  Description of Artificial Sequence: Synthetic oligonucleotide
gccaggucgauggaacagu

SEQ ID NO: 581620 - RNA, 19 nt, Artificial Sequence
  Description of Artificial Sequence: Synthetic oligonucleotide
gcccucaaauuggaugaaa

SEQ ID NO: 581621 - RNA, 19 nt, Artificial Sequence
  Description of Artificial Sequence: Synthetic oligonucleotide
cccgguauaccacauucuu

SEQ ID NO: 581622 - RNA, 19 nt, Artificial Sequence
  Description of Artificial Sequence: Synthetic oligonucleotide
cgaaauaccuggugucagu

SEQ ID NO: 581623 - RNA, 19 nt, Artificial Sequence
  Description of Artificial Sequence: Synthetic oligonucleotide
gacgguggcccuggacccu

SEQ ID NO: 581624 - RNA, 19 nt, Artificial Sequence
  Description of Artificial Sequence: Synthetic oligonucleotide
gcaaugcaaaggagugaua

SEQ ID NO: 581625 - RNA, 19 nt, Artificial Sequence
  Description of Artificial Sequence: Synthetic oligonucleotide
cccguggccuucuccuuca

SEQ ID NO: 581626 - RNA, 19 nt, Artificial Sequence
  Description of Artificial Sequence: Synthetic oligonucleotide
cgcaaugcaaaggagugau

SEQ ID NO: 581627 - RNA, 19 nt, Artificial Sequence
  Description of Artificial Sequence: Synthetic oligonucleotide
caucagccacagucuggau

SEQ ID NO: 581628 - RNA, 19 nt, Artificial Sequence
  Description of Artificial Sequence: Synthetic oligonucleotide
cgcgguucucaguaagugu

SEQ ID NO: 581629 - RNA, 19 nt, Artificial Sequence
  Description of Artificial Sequence: Synthetic oligonucleotide
gcggggcuucuggacucgc

SEQ ID NO: 581630 - RNA, 19 nt, Artificial Sequence
  Description of Artificial Sequence: Synthetic oligonucleotide
cugcacggccauagucguu

SEQ ID NO: 581631 - RNA, 19 nt, Artificial Sequence
  Description of Artificial Sequence: Synthetic oligonucleotide
gcccuccgguuggacggug

SEQ ID NO: 581632 - RNA, 19 nt, Artificial Sequence
  Description of Artificial Sequence: Synthetic oligonucleotide
cgcucacgggauagaugga

SEQ ID NO: 581633 - RNA, 19 nt, Artificial Sequence
  Description of Artificial Sequence: Synthetic oligonucleotide
cgagcccgguccucggaaa

SEQ ID NO: 581634 - RNA, 19 nt, Artificial Sequence
  Description of Artificial Sequence: Synthetic oligonucleotide
gcggugugauagugaucau

SEQ ID NO: 581635 - RNA, 19 nt, Artificial Sequence
  Description of Artificial Sequence: Synthetic oligonucleotide
cgguuggacgguggcccug

SEQ ID NO: 581636 - RNA, 19 nt, Artificial Sequence
  Description of Artificial Sequence: Synthetic oligonucleotide
ccguuccuuguagccaaua

SEQ ID NO: 581637 - RNA, 19 nt, Artificial Sequence
  Description of Artificial Sequence: Synthetic oligonucleotide
ccccucguuugugcagcca

SEQ ID NO: 581638 - RNA, 19 nt, Artificial Sequence
  Description of Artificial Sequence: Synthetic oligonucleotide
ccgguuggacgguggcccu

SEQ ID NO: 581639 - RNA, 19 nt, Artificial Sequence
  Description of Artificial Sequence: Synthetic oligonucleotide
guguugggacguggccguu

SEQ ID NO: 581640 - RNA, 19 nt, Artificial Sequence
  Description of Artificial Sequence: Synthetic oligonucleotide
ccccgccaagccucugugu

SEQ ID NO: 581641 - RNA, 19 nt, Artificial Sequence
  Description of Artificial Sequence: Synthetic oligonucleotide
ccucguccuuggcaacgau

SEQ ID NO: 581642 - RNA, 19 nt, Artificial Sequence
  Description of Artificial Sequence: Synthetic oligonucleotide
cgcgaugcuccacgucccu

SEQ ID NO: 581643 - RNA, 19 nt, Artificial Sequence
  Description of Artificial Sequence: Synthetic oligonucleotide
gccguuccuuguagccaau

SEQ ID NO: 581644 - RNA, 19 nt, Artificial Sequence
  Description of Artificial Sequence: Synthetic oligonucleotide
aaccgaauaaauaaagugc

SEQ ID NO: 581645 - RNA, 19 nt, Artificial Sequence
  Description of Artificial Sequence: Synthetic oligonucleotide
aaaggcugcacuuaucugg

SEQ ID NO: 581646 - RNA, 19 nt, Artificial Sequence
  Description of Artificial Sequence: Synthetic oligonucleotide
aauaaagugcaaccguggg

SEQ ID NO: 581647 - RNA, 19 nt, Artificial Sequence
  Description of Artificial Sequence: Synthetic oligonucleotide
uucuguuugaaguaagagg

SEQ ID NO: 581648 - RNA, 19 nt, Artificial Sequence
  Description of Artificial Sequence: Synthetic oligonucleotide
aaugauauguccauuccgg

SEQ ID NO: 581649 - RNA, 19 nt, Artificial Sequence
  Description of Artificial Sequence: Synthetic oligonucleotide
auaugugccauucuugugg

SEQ ID NO: 581650 - RNA, 19 nt, Artificial Sequence
  Description of Artificial Sequence: Synthetic oligonucleotide
acgaaagacgaguucaucc

SEQ ID NO: 581651 - RNA, 19 nt, Artificial Sequence
  Description of Artificial Sequence: Synthetic oligonucleotide
uagaguagcacugagagga

SEQ ID NO: 581652 - RNA, 19 nt, Artificial Sequence
  Description of Artificial Sequence: Synthetic oligonucleotide
cuagcaauaccucaggggc

SEQ ID NO: 581653 - RNA, 19 nt, Artificial Sequence
  Description of Artificial Sequence: Synthetic oligonucleotide
aauacauugguuguugcug

SEQ ID NO: 581654 - RNA, 19 nt, Artificial Sequence
  Description of Artificial Sequence: Synthetic oligonucleotide
uacuucaaggaccaguucc

SEQ ID NO: 581655 - RNA, 19 nt, Artificial Sequence
  Description of Artificial Sequence: Synthetic oligonucleotide
ugaaguaagaggcuuuucu

SEQ ID NO: 581656 - RNA, 19 nt, Artificial Sequence
  Description of Artificial Sequence: Synthetic oligonucleotide
uguacaccagcucauaugu

SEQ ID NO: 581657 - RNA, 19 nt, Artificial Sequence
  Description of Artificial Sequence: Synthetic oligonucleotide
agauugagcaccgaucucc

SEQ ID NO: 581658 - RNA, 19 nt, Artificial Sequence
  Description of Artificial Sequence: Synthetic oligonucleotide
ucuguuacuacaaucucgu

SEQ ID NO: 581659 - RNA, 19 nt, Artificial Sequence
  Description of Artificial Sequence: Synthetic oligonucleotide
uguuacuacaaucucguuc

SEQ ID NO: 581660 - RNA, 19 nt, Artificial Sequence
  Description of Artificial Sequence: Synthetic oligonucleotide
acuagcaauaccucagggg

SEQ ID NO: 581661 - RNA, 19 nt, Artificial Sequence
  Description of Artificial Sequence: Synthetic oligonucleotide
aagauuuguugucuaccac

SEQ ID NO: 581662 - RNA, 19 nt, Artificial Sequence
  Description of Artificial Sequence: Synthetic oligonucleotide
ucagcuacuaccacguggc

SEQ ID NO: 581663 - RNA, 19 nt, Artificial Sequence
  Description of Artificial Sequence: Synthetic oligonucleotide
guagcgauaggccuuaaag

SEQ ID NO: 581664 - RNA, 19 nt, Artificial Sequence
  Description of Artificial Sequence: Synthetic oligonucleotide
auaccucaggggcagaacc

SEQ ID NO: 581665 - RNA, 19 nt, Artificial Sequence
  Description of Artificial Sequence: Synthetic oligonucleotide
auaaagugcaaccgugggg

SEQ ID NO: 581666 - RNA, 19 nt, Artificial Sequence
  Description of Artificial Sequence: Synthetic oligonucleotide
aacacgaaagacgaguuca

SEQ ID NO: 581667 - RNA, 19 nt, Artificial Sequence
  Description of Artificial Sequence: Synthetic oligonucleotide
agcgauaggccuuaaagca

SEQ ID NO: 581668 - RNA, 19 nt, Artificial Sequence
  Description of Artificial Sequence: Synthetic oligonucleotide
gaaaucuguuacuacaauc

SEQ ID NO: 581669 - RNA, 19 nt, Artificial Sequence
  Description of Artificial Sequence: Synthetic oligonucleotide
aucagcuacuaccacgugg

SEQ ID NO: 581670 - RNA, 19 nt, Artificial Sequence
  Description of Artificial Sequence: Synthetic oligonucleotide
aaaucggaacuugaacugg

SEQ ID NO: 581671 - RNA, 19 nt, Artificial Sequence
  Description of Artificial Sequence: Synthetic oligonucleotide
aguagggcccuucugcagc

SEQ ID NO: 581672 - RNA, 19 nt, Artificial Sequence
  Description of Artificial Sequence: Synthetic oligonucleotide
acaccuugcaaauugguga

SEQ ID NO: 581673 - RNA, 19 nt, Artificial Sequence
  Description of Artificial Sequence: Synthetic oligonucleotide
cuguacauggaacugggcc

SEQ ID NO: 581674 - RNA, 19 nt, Artificial Sequence
  Description of Artificial Sequence: Synthetic oligonucleotide
gaaaaccugaauacauugg

SEQ ID NO: 581675 - RNA, 19 nt, Artificial Sequence
  Description of Artificial Sequence: Synthetic oligonucleotide
uguacauggaacugggccu

SEQ ID NO: 581676 - RNA, 19 nt, Artificial Sequence
  Description of Artificial Sequence: Synthetic oligonucleotide
agauuuguugucuaccaca

SEQ ID NO: 581677 - RNA, 19 nt, Artificial Sequence
  Description of Artificial Sequence: Synthetic oligonucleotide
uguccauagaguagcacug

SEQ ID NO: 581678 - RNA, 19 nt, Artificial Sequence
  Description of Artificial Sequence: Synthetic oligonucleotide
ucauaugugccauucuugu

SEQ ID NO: 581679 - RNA, 19 nt, Artificial Sequence
  Description of Artificial Sequence: Synthetic oligonucleotide
aaucggaacuugaacuggc

SEQ ID NO: 581680 - RNA, 19 nt, Artificial Sequence
  Description of Artificial Sequence: Synthetic oligonucleotide
caaugauauguccauuccg

SEQ ID NO: 581681 - RNA, 19 nt, Artificial Sequence
  Description of Artificial Sequence: Synthetic oligonucleotide
aagaugcugacccaacggu

SEQ ID NO: 581682 - RNA, 19 nt, Artificial Sequence
  Description of Artificial Sequence: Synthetic oligonucleotide
uaggccuuaaagcaguggu

SEQ ID NO: 581683 - RNA, 19 nt, Artificial Sequence
  Description of Artificial Sequence: Synthetic oligonucleotide
guuacuacaaucucguucu

SEQ ID NO: 581684 - RNA, 19 nt, Artificial Sequence
  Description of Artificial Sequence: Synthetic oligonucleotide
caaaguggcggucaguggc

SEQ ID NO: 581685 - RNA, 19 nt, Artificial Sequence
  Description of Artificial Sequence: Synthetic oligonucleotide
ugaacuggcccucauugga

SEQ ID NO: 581686 - RNA, 19 nt, Artificial Sequence
  Description of Artificial Sequence: Synthetic oligonucleotide
agacacaccuugcaaauug

SEQ ID NO: 581687 - RNA, 19 nt, Artificial Sequence
  Description of Artificial Sequence: Synthetic oligonucleotide
ugugccauucuuguggucc

SEQ ID NO: 581688 - RNA, 19 nt, Artificial Sequence
  Description of Artificial Sequence: Synthetic oligonucleotide
uguauggggugguagggag

SEQ ID NO: 581689 - RNA, 19 nt, Artificial Sequence
  Description of Artificial Sequence: Synthetic oligonucleotide
caaaucggaacuugaacug

SEQ ID NO: 581690 - RNA, 19 nt, Artificial Sequence
  Description of Artificial Sequence: Synthetic oligonucleotide
acaaucucguucuuguugu

SEQ ID NO: 581691 - RNA, 19 nt, Artificial Sequence
  Description of Artificial Sequence: Synthetic oligonucleotide
uguccgucccuccauaagc

SEQ ID NO: 581692 - RNA, 19 nt, Artificial Sequence
  Description of Artificial Sequence: Synthetic oligonucleotide
ugugggacgcuguaguugc

SEQ ID NO: 581693 - RNA, 19 nt, Artificial Sequence
  Description of Artificial Sequence: Synthetic oligonucleotide
accaccgggagacuugacc

SEQ ID NO: 581694 - RNA, 19 nt, Artificial Sequence
  Description of Artificial Sequence: Synthetic oligonucleotide
ugagugguuauggaaaucu

SEQ ID NO: 581695 - RNA, 19 nt, Artificial Sequence
  Description of Artificial Sequence: Synthetic oligonucleotide
aauucacccuucucccuuc

SEQ ID NO: 581696 - RNA, 19 nt, Artificial Sequence
  Description of Artificial Sequence: Synthetic oligonucleotide
ugugcauucucauguggcc

SEQ ID NO: 581697 - RNA, 19 nt, Artificial Sequence
  Description of Artificial Sequence: Synthetic oligonucleotide
ucgaauaccuggauucggc

SEQ ID NO: 581698 - RNA, 19 nt, Artificial Sequence
  Description of Artificial Sequence: Synthetic oligonucleotide
aauuggguuguccuuccgu

SEQ ID NO: 581699 - RNA, 19 nt, Artificial Sequence
  Description of Artificial Sequence: Synthetic oligonucleotide
gguuauggaaaucuguuac

SEQ ID NO: 581700 - RNA, 19 nt, Artificial Sequence
  Description of Artificial Sequence: Synthetic oligonucleotide
cuuuaggcucaugagaccc

SEQ ID NO: 581701 - RNA, 19 nt, Artificial Sequence
  Description of Artificial Sequence: Synthetic oligonucleotide
cuccauaagccaaguaggg

SEQ ID NO: 581702 - RNA, 19 nt, Artificial Sequence
  Description of Artificial Sequence: Synthetic oligonucleotide
gacccaacgguugucauag

SEQ ID NO: 581703 - RNA, 19 nt, Artificial Sequence
  Description of Artificial Sequence: Synthetic oligonucleotide
uccauagaguagcacugag

SEQ ID NO: 581704 - RNA, 19 nt, Artificial Sequence
  Description of Artificial Sequence: Synthetic oligonucleotide
ucggcuguugccccagucg

SEQ ID NO: 581705 - RNA, 19 nt, Artificial Sequence
  Description of Artificial Sequence: Synthetic oligonucleotide
accgaauaaauaaagugca

SEQ ID NO: 581706 - RNA, 19 nt, Artificial Sequence
  Description of Artificial Sequence: Synthetic oligonucleotide
aauaccucaggggcagaac

SEQ ID NO: 581707 - RNA, 19 nt, Artificial Sequence
  Description of Artificial Sequence: Synthetic oligonucleotide
guaguugcccaggugagcg

SEQ ID NO: 581708 - RNA, 19 nt, Artificial Sequence
  Description of Artificial Sequence: Synthetic oligonucleotide
gaauaccuggauucggcug

SEQ ID NO: 581709 - RNA, 19 nt, Artificial Sequence
  Description of Artificial Sequence: Synthetic oligonucleotide
uguguauggggugguaggg

SEQ ID NO: 581710 - RNA, 19 nt, Artificial Sequence
  Description of Artificial Sequence: Synthetic oligonucleotide
uccauuccgguccacggcc

SEQ ID NO: 581711 - RNA, 19 nt, Artificial Sequence
  Description of Artificial Sequence: Synthetic oligonucleotide
uggugagcaaugcacccag

SEQ ID NO: 581712 - RNA, 19 nt, Artificial Sequence
  Description of Artificial Sequence: Synthetic oligonucleotide
agugccugcucugcgaagc

SEQ ID NO: 581713 - RNA, 19 nt, Artificial Sequence
  Description of Artificial Sequence: Synthetic oligonucleotide
auacauugguuguugcugu

SEQ ID NO: 581714 - RNA, 19 nt, Artificial Sequence
  Description of Artificial Sequence: Synthetic oligonucleotide
gccaauguguuccugaccc

SEQ ID NO: 581715 - RNA, 19 nt, Artificial Sequence
  Description of Artificial Sequence: Synthetic oligonucleotide
cuugugguccaccacuggc

SEQ ID NO: 581716 - RNA, 19 nt, Artificial Sequence
  Description of Artificial Sequence: Synthetic oligonucleotide
acccaucuacuucaaggac

SEQ ID NO: 581717 - RNA, 19 nt, Artificial Sequence
  Description of Artificial Sequence: Synthetic oligonucleotide
uaccacguggccauccgag

SEQ ID NO: 581718 - RNA, 19 nt, Artificial Sequence
  Description of Artificial Sequence: Synthetic oligonucleotide
uaugcggccacugcuugcg

SEQ ID NO: 581719 - RNA, 19 nt, Artificial Sequence
  Description of Artificial Sequence: Synthetic oligonucleotide
ugucgaauaccuggauucg

SEQ ID NO: 581720 - RNA, 19 nt, Artificial Sequence
  Description of Artificial Sequence: Synthetic oligonucleotide
uggguuguccuuccguuug

SEQ ID NO: 581721 - RNA, 19 nt, Artificial Sequence
  Description of Artificial Sequence: Synthetic oligonucleotide
guguguauggggugguagg

SEQ ID NO: 581722 - RNA, 19 nt, Artificial Sequence
  Description of Artificial Sequence: Synthetic oligonucleotide
caacgguugucauagucug

SEQ ID NO: 581723 - RNA, 19 nt, Artificial Sequence
  Description of Artificial Sequence: Synthetic oligonucleotide
ggcgaacacauuuauuuag

SEQ ID NO: 581724 - RNA, 19 nt, Artificial Sequence
  Description of Artificial Sequence: Synthetic oligonucleotide
ucaauuggguuguccuucc

SEQ ID NO: 581725 - RNA, 19 nt, Artificial Sequence
  Description of Artificial Sequence: Synthetic oligonucleotide
ucuugugguccaccacugg

SEQ ID NO: 581726 - RNA, 19 nt, Artificial Sequence
  Description of Artificial Sequence: Synthetic oligonucleotide
aaguagggcccuucugcag

SEQ ID NO: 581727 - RNA, 19 nt, Artificial Sequence
  Description of Artificial Sequence: Synthetic oligonucleotide
caaugcacccagauugagc

SEQ ID NO: 581728 - RNA, 19 nt, Artificial Sequence
  Description of Artificial Sequence: Synthetic oligonucleotide
uccgaggucaaugccaagc

SEQ ID NO: 581729 - RNA, 19 nt, Artificial Sequence
  Description of Artificial Sequence: Synthetic oligonucleotide
caagauuuguugucuacca

SEQ ID NO: 581730 - RNA, 19 nt, Artificial Sequence
  Description of Artificial Sequence: Synthetic oligonucleotide
cacaccuugcaaauuggug

SEQ ID NO: 581731 - RNA, 19 nt, Artificial Sequence
  Description of Artificial Sequence: Synthetic oligonucleotide
caaagcaagaaccgaauaa

SEQ ID NO: 581732 - RNA, 19 nt, Artificial Sequence
  Description of Artificial Sequence: Synthetic oligonucleotide
ugugcgugcaguguacacc

SEQ ID NO: 581733 - RNA, 19 nt, Artificial Sequence
  Description of Artificial Sequence: Synthetic oligonucleotide
ucauuggagaaaaccugaa

SEQ ID NO: 581734 - RNA, 19 nt, Artificial Sequence
  Description of Artificial Sequence: Synthetic oligonucleotide
uuugcuuggccccgcaaau

SEQ ID NO: 581735 - RNA, 19 nt, Artificial Sequence
  Description of Artificial Sequence: Synthetic oligonucleotide
acggaccccaaaucggaac

SEQ ID NO: 581736 - RNA, 19 nt, Artificial Sequence
  Description of Artificial Sequence: Synthetic oligonucleotide
uccgcaacccaucuacuuc

SEQ ID NO: 581737 - RNA, 19 nt, Artificial Sequence
  Description of Artificial Sequence: Synthetic oligonucleotide
agggcacgcacacggaagg

SEQ ID NO: 581738 - RNA, 19 nt, Artificial Sequence
  Description of Artificial Sequence: Synthetic oligonucleotide
guguacaccagcucauaug

SEQ ID NO: 581739 - RNA, 19 nt, Artificial Sequence
  Description of Artificial Sequence: Synthetic oligonucleotide
uaugugccauucuuguggu

SEQ ID NO: 581740 - RNA, 19 nt, Artificial Sequence
  Description of Artificial Sequence: Synthetic oligonucleotide
acggcugccaacacgaaag

SEQ ID NO: 581741 - RNA, 19 nt, Artificial Sequence
  Description of Artificial Sequence: Synthetic oligonucleotide
ugaacuguccauugcccuc

SEQ ID NO: 581742 - RNA, 19 nt, Artificial Sequence
  Description of Artificial Sequence: Synthetic oligonucleotide
ugggguauugcugucucug

SEQ ID NO: 581743 - RNA, 19 nt, Artificial Sequence
  Description of Artificial Sequence: Synthetic oligonucleotide
agugcaaccgugggguugg

SEQ ID NO: 581744 - RNA, 19 nt, Artificial Sequence
  Description of Artificial Sequence: Synthetic oligonucleotide
ggcgcuucacaucaucugg

SEQ ID NO: 581745 - RNA, 19 nt, Artificial Sequence
  Description of Artificial Sequence: Synthetic oligonucleotide
ugguuauggaaaucuguua

SEQ ID NO: 581746 - RNA, 19 nt, Artificial Sequence
  Description of Artificial Sequence: Synthetic oligonucleotide
agugguuauggaaaucugu

SEQ ID NO: 581747 - RNA, 19 nt, Artificial Sequence
  Description of Artificial Sequence: Synthetic oligonucleotide
ugagcaaugcacccagauu

SEQ ID NO: 581748 - RNA, 19 nt, Artificial Sequence
  Description of Artificial Sequence: Synthetic oligonucleotide
cauaugugccauucuugug

SEQ ID NO: 581749 - RNA, 19 nt, Artificial Sequence
  Description of Artificial Sequence: Synthetic oligonucleotide
gacgaguucauccucaauu

SEQ ID NO: 581750 - RNA, 19 nt, Artificial Sequence
  Description of Artificial Sequence: Synthetic oligonucleotide
ugccuugcgcuccuguagc

SEQ ID NO: 581751 - RNA, 19 nt, Artificial Sequence
  Description of Artificial Sequence: Synthetic oligonucleotide
cauucagugcugcuggguc

SEQ ID NO: 581752 - RNA, 19 nt, Artificial Sequence
  Description of Artificial Sequence: Synthetic oligonucleotide
acugagugguuauggaaau

SEQ ID NO: 581753 - RNA, 19 nt, Artificial Sequence
  Description of Artificial Sequence: Synthetic oligonucleotide
uggcguacauggcugccag

SEQ ID NO: 581754 - RNA, 19 nt, Artificial Sequence
  Description of Artificial Sequence: Synthetic oligonucleotide
caugugcuuucucacuagc

SEQ ID NO: 581755 - RNA, 19 nt, Artificial Sequence
  Description of Artificial Sequence: Synthetic oligonucleotide
agucugccacaauaauguc

SEQ ID NO: 581756 - RNA, 19 nt, Artificial Sequence
  Description of Artificial Sequence: Synthetic oligonucleotide
cauugguuguugcugucug

SEQ ID NO: 581757 - RNA, 19 nt, Artificial Sequence
  Description of Artificial Sequence: Synthetic oligonucleotide
cccuccauaagccaaguag

SEQ ID NO: 581758 - RNA, 19 nt, Artificial Sequence
  Description of Artificial Sequence: Synthetic oligonucleotide
aacccagucucagugccug

SEQ ID NO: 581759 - RNA, 19 nt, Artificial Sequence
  Description of Artificial Sequence: Synthetic oligonucleotide
ugugucuaacugugucugc

SEQ ID NO: 581760 - RNA, 19 nt, Artificial Sequence
  Description of Artificial Sequence: Synthetic oligonucleotide
guagggagacaaccagagg

SEQ ID NO: 581761 - RNA, 19 nt, Artificial Sequence
  Description of Artificial Sequence: Synthetic oligonucleotide
gaauacauugguuguugcu

SEQ ID NO: 581762 - RNA, 19 nt, Artificial Sequence
  Description of Artificial Sequence: Synthetic oligonucleotide
aucggaacuugaacuggcc

SEQ ID NO: 581763 - RNA, 19 nt, Artificial Sequence
  Description of Artificial Sequence: Synthetic oligonucleotide
uugcggcagacacaccuug

SEQ ID NO: 581764 - RNA, 19 nt, Artificial Sequence
  Description of Artificial Sequence: Synthetic oligonucleotide
ccaccucuuagccagaccc

SEQ ID NO: 581765 - RNA, 19 nt, Artificial Sequence
  Description of Artificial Sequence: Synthetic oligonucleotide
cuacuggagguagcgauag

SEQ ID NO: 581766 - RNA, 19 nt, Artificial Sequence
  Description of Artificial Sequence: Synthetic oligonucleotide
acuaugcggccacugcuug

SEQ ID NO: 581767 - RNA, 19 nt, Artificial Sequence
  Description of Artificial Sequence: Synthetic oligonucleotide
cucaauuggguuguccuuc

SEQ ID NO: 581768 - RNA, 19 nt, Artificial Sequence
  Description of Artificial Sequence: Synthetic oligonucleotide
aaucaccccuauguccguc

SEQ ID NO: 581769 - RNA, 19 nt, Artificial Sequence
  Description of Artificial Sequence: Synthetic oligonucleotide
aguguacaccagcucauau

SEQ ID NO: 581770 - RNA, 19 nt, Artificial Sequence
  Description of Artificial Sequence: Synthetic oligonucleotide
cacugagugguuauggaaa

SEQ ID NO: 581771 - RNA, 19 nt, Artificial Sequence
  Description of Artificial Sequence: Synthetic oligonucleotide
gucgaauaccuggauucgg

SEQ ID NO: 581772 - RNA, 19 nt, Artificial Sequence
  Description of Artificial Sequence: Synthetic oligonucleotide
aagugcaaccgugggguug

SEQ ID NO: 581773 - RNA, 19 nt, Artificial Sequence
  Description of Artificial Sequence: Synthetic oligonucleotide
caggugagcgcccacggac

SEQ ID NO: 581774 - RNA, 19 nt, Artificial Sequence
  Description of Artificial Sequence: Synthetic oligonucleotide
acugucucaugugcagugg

SEQ ID NO: 581775 - RNA, 19 nt, Artificial Sequence
  Description of Artificial Sequence: Synthetic oligonucleotide
cugcuuuaggcucaugaga

SEQ ID NO: 581776 - RNA, 19 nt, Artificial Sequence
  Description of Artificial Sequence: Synthetic oligonucleotide
uuaguauggggugggguau

SEQ ID NO: 581777 - RNA, 19 nt, Artificial Sequence
  Description of Artificial Sequence: Synthetic oligonucleotide
gacccggcgcuucacauca

SEQ ID NO: 581778 - RNA, 19 nt, Artificial Sequence
  Description of Artificial Sequence: Synthetic oligonucleotide
uacuggagguagcgauagg

SEQ ID NO: 581779 - RNA, 19 nt, Artificial Sequence
  Description of Artificial Sequence: Synthetic oligonucleotide
agacccucuuguccaauca

SEQ ID NO: 581780 - RNA, 19 nt, Artificial Sequence
  Description of Artificial Sequence: Synthetic oligonucleotide
ugagcaccgaucuccgcaa

SEQ ID NO: 581781 - RNA, 19 nt, Artificial Sequence
  Description of Artificial Sequence: Synthetic oligonucleotide
auguccgucccuccauaag

SEQ ID NO: 581782 - RNA, 19 nt, Artificial Sequence
  Description of Artificial Sequence: Synthetic oligonucleotide
aagccaaguagggcccuuc

SEQ ID NO: 581783 - RNA, 19 nt, Artificial Sequence
  Description of Artificial Sequence: Synthetic oligonucleotide
uugucauagucugccacaa

SEQ ID NO: 581784 - RNA, 19 nt, Artificial Sequence
  Description of Artificial Sequence: Synthetic oligonucleotide
gacccucuuguccaaucac

SEQ ID NO: 581785 - RNA, 19 nt, Artificial Sequence
  Description of Artificial Sequence: Synthetic oligonucleotide
cuuggccccgcaaaugcuc

SEQ ID NO: 581786 - RNA, 19 nt, Artificial Sequence
  Description of Artificial Sequence: Synthetic oligonucleotide
ggcgcagugugucuaacug

SEQ ID NO: 581787 - RNA, 19 nt, Artificial Sequence
  Description of Artificial Sequence: Synthetic oligonucleotide
cacggaaggggcugccacg

SEQ ID NO: 581788 - RNA, 19 nt, Artificial Sequence
  Description of Artificial Sequence: Synthetic oligonucleotide
uucuggcguacauggcugc

SEQ ID NO: 581789 - RNA, 19 nt, Artificial Sequence
  Description of Artificial Sequence: Synthetic oligonucleotide
agcugugcauucucaugug

SEQ ID NO: 581790 - RNA, 19 nt, Artificial Sequence
  Description of Artificial Sequence: Synthetic oligonucleotide
aggugagcgcccacggacc

SEQ ID NO: 581791 - RNA, 19 nt, Artificial Sequence
  Description of Artificial Sequence: Synthetic oligonucleotide
caacacgaaagacgaguuc

SEQ ID NO: 581792 - RNA, 19 nt, Artificial Sequence
  Description of Artificial Sequence: Synthetic oligonucleotide
uauguccgucccuccauaa

SEQ ID NO: 581793 - RNA, 19 nt, Artificial Sequence
  Description of Artificial Sequence: Synthetic oligonucleotide
gguagggugaagcucugca

SEQ ID NO: 581794 - RNA, 19 nt, Artificial Sequence
  Description of Artificial Sequence: Synthetic oligonucleotide
aacgcccaaccagcuugcc

SEQ ID NO: 581795 - RNA, 19 nt, Artificial Sequence
  Description of Artificial Sequence: Synthetic oligonucleotide
ccaccgggagacuugaccc

SEQ ID NO: 581796 - RNA, 19 nt, Artificial Sequence
  Description of Artificial Sequence: Synthetic oligonucleotide
caugugagccaaauuugaa

SEQ ID NO: 581797 - RNA, 19 nt, Artificial Sequence
  Description of Artificial Sequence: Synthetic oligonucleotide
caccgggagacuugacccg

SEQ ID NO: 581798 - RNA, 19 nt, Artificial Sequence
  Description of Artificial Sequence: Synthetic oligonucleotide
cuuucuggcguacauggcu

SEQ ID NO: 581799 - RNA, 19 nt, Artificial Sequence
  Description of Artificial Sequence: Synthetic oligonucleotide
uguugcugucugcuaccac

SEQ ID NO: 581800 - RNA, 19 nt, Artificial Sequence
  Description of Artificial Sequence: Synthetic oligonucleotide
agcuacuaccacguggcca

SEQ ID NO: 581801 - RNA, 19 nt, Artificial Sequence
  Description of Artificial Sequence: Synthetic oligonucleotide
uacauugguuguugcuguc

SEQ ID NO: 581802 - RNA, 19 nt, Artificial Sequence
  Description of Artificial Sequence: Synthetic oligonucleotide
caauuggguuguccuuccg

SEQ ID NO: 581803 - RNA, 19 nt, Artificial Sequence
  Description of Artificial Sequence: Synthetic oligonucleotide
cuaugcggccacugcuugc

SEQ ID NO: 581804 - RNA, 19 nt, Artificial Sequence
  Description of Artificial Sequence: Synthetic oligonucleotide
ucuccgcaacccaucuacu

SEQ ID NO: 581805 - RNA, 19 nt, Artificial Sequence
  Description of Artificial Sequence: Synthetic oligonucleotide
auccacagcuacucccgug

SEQ ID NO: 581806 - RNA, 19 nt, Artificial Sequence
  Description of Artificial Sequence: Synthetic oligonucleotide
ccaaaucggaacuugaacu

SEQ ID NO: 581807 - RNA, 19 nt, Artificial Sequence
  Description of Artificial Sequence: Synthetic oligonucleotide
ugacccaacgguugucaua

SEQ ID NO: 581808 - RNA, 19 nt, Artificial Sequence
  Description of Artificial Sequence: Synthetic oligonucleotide
guugucuaccacaaugaua

SEQ ID NO: 581809 - RNA, 19 nt, Artificial Sequence
  Description of Artificial Sequence: Synthetic oligonucleotide
gauucggcuguugccccag

SEQ ID NO: 581810 - RNA, 19 nt, Artificial Sequence
  Description of Artificial Sequence: Synthetic oligonucleotide
uccgucccuccauaagcca

SEQ ID NO: 581811 - RNA, 19 nt, Artificial Sequence
  Description of Artificial Sequence: Synthetic oligonucleotide
accgggagacuugacccgg

SEQ ID NO: 581812 - RNA, 19 nt, Artificial Sequence
  Description of Artificial Sequence: Synthetic oligonucleotide
cuuugcuuggccccgcaaa

SEQ ID NO: 581813 - RNA, 19 nt, Artificial Sequence
  Description of Artificial Sequence: Synthetic oligonucleotide
acuggcaccgcaaggcgug

SEQ ID NO: 581814 - RNA, 19 nt, Artificial Sequence
  Description of Artificial Sequence: Synthetic oligonucleotide
ucugugcgugcaguguaca

SEQ ID NO: 581815 - RNA, 19 nt, Artificial Sequence
  Description of Artificial Sequence: Synthetic oligonucleotide
caccuugcaaauuggugaa

SEQ ID NO: 581816 - RNA, 19 nt, Artificial Sequence
  Description of Artificial Sequence: Synthetic oligonucleotide
uuggguuguccuuccguuu

SEQ ID NO: 581817 - RNA, 19 nt, Artificial Sequence
  Description of Artificial Sequence: Synthetic oligonucleotide
acauucagugcugcugggu

SEQ ID NO: 581818 - RNA, 19 nt, Artificial Sequence
  Description of Artificial Sequence: Synthetic oligonucleotide
cugugcgugcaguguacac

SEQ ID NO: 581819 - RNA, 19 nt, Artificial Sequence
  Description of Artificial Sequence: Synthetic oligonucleotide
ccuuaaagcagugguugcc

SEQ ID NO: 581820 - RNA, 19 nt, Artificial Sequence
  Description of Artificial Sequence: Synthetic oligonucleotide
guccgucccuccauaagcc

SEQ ID NO: 581821 - RNA, 19 nt, Artificial Sequence
  Description of Artificial Sequence: Synthetic oligonucleotide
cauccgaggucaaugccaa

SEQ ID NO: 581822 - RNA, 19 nt, Artificial Sequence
  Description of Artificial Sequence: Synthetic oligonucleotide
agucgcugaccagagccug

SEQ ID NO: 581823 - RNA, 19 nt, Artificial Sequence
  Description of Artificial Sequence: Synthetic oligonucleotide
aguauggggugggguauug

SEQ ID NO: 581824 - RNA, 19 nt, Artificial Sequence
  Description of Artificial Sequence: Synthetic oligonucleotide
gcuuuaggcucaugagacc

SEQ ID NO: 581825 - RNA, 19 nt, Artificial Sequence
  Description of Artificial Sequence: Synthetic oligonucleotide
ugagcgcccacggacccca

SEQ ID NO: 581826 - RNA, 19 nt, Artificial Sequence
  Description of Artificial Sequence: Synthetic oligonucleotide
gguugccagcaucagcuac

SEQ ID NO: 581827 - RNA, 19 nt, Artificial Sequence
  Description of Artificial Sequence: Synthetic oligonucleotide
gcaugugcuuucucacuag

SEQ ID NO: 581828 - RNA, 19 nt, Artificial Sequence
  Description of Artificial Sequence: Synthetic oligonucleotide
cccacggaccccaaaucgg

SEQ ID NO: 581829 - RNA, 19 nt, Artificial Sequence
  Description of Artificial Sequence: Synthetic oligonucleotide
gcuaccacuaugcggccac

SEQ ID NO: 581830 - RNA, 19 nt, Artificial Sequence
  Description of Artificial Sequence: Synthetic oligonucleotide
cccgcaaaugcucuccaag

SEQ ID NO: 581831 - RNA, 19 nt, Artificial Sequence
  Description of Artificial Sequence: Synthetic oligonucleotide
agaguagcacugagaggag

SEQ ID NO: 581832 - RNA, 19 nt, Artificial Sequence
  Description of Artificial Sequence: Synthetic oligonucleotide
ggccauccgaggucaaugc

SEQ ID NO: 581833 - RNA, 19 nt, Artificial Sequence
  Description of Artificial Sequence: Synthetic oligonucleotide
cccagauugagcaccgauc

SEQ ID NO: 581834 - RNA, 19 nt, Artificial Sequence
  Description of Artificial Sequence: Synthetic oligonucleotide
auguggccuuucugggaag

SEQ ID NO: 581835 - RNA, 19 nt, Artificial Sequence
  Description of Artificial Sequence: Synthetic oligonucleotide
cacgaaagacgaguucauc

SEQ ID NO: 581836 - RNA, 19 nt, Artificial Sequence
  Description of Artificial Sequence: Synthetic oligonucleotide
ugacccggcgcuucacauc

SEQ ID NO: 581837 - RNA, 19 nt, Artificial Sequence
  Description of Artificial Sequence: Synthetic oligonucleotide
cagauugagcaccgaucuc

SEQ ID NO: 581838 - RNA, 19 nt, Artificial Sequence
  Description of Artificial Sequence: Synthetic oligonucleotide
caggucgcagggcacgcac

SEQ ID NO: 581839 - RNA, 19 nt, Artificial Sequence
  Description of Artificial Sequence: Synthetic oligonucleotide
gagcugucgaauaccugga

SEQ ID NO: 581840 - RNA, 19 nt, Artificial Sequence
  Description of Artificial Sequence: Synthetic oligonucleotide
ggaaggggcugccacgaac

SEQ ID NO: 581841 - RNA, 19 nt, Artificial Sequence
  Description of Artificial Sequence: Synthetic oligonucleotide
acgcccaaccagcuugcca

SEQ ID NO: 581842 - RNA, 19 nt, Artificial Sequence
  Description of Artificial Sequence: Synthetic oligonucleotide
cacguggccauccgagguc

SEQ ID NO: 581843 - RNA, 19 nt, Artificial Sequence
  Description of Artificial Sequence: Synthetic oligonucleotide
cucucucgcaugugcuuuc

SEQ ID NO: 581844 - RNA, 19 nt, Artificial Sequence
  Description of Artificial Sequence: Synthetic oligonucleotide
guuccugacccuggcgcag

SEQ ID NO: 581845 - RNA, 19 nt, Artificial Sequence
  Description of Artificial Sequence: Synthetic oligonucleotide
cugcagcuacuggagguag

SEQ ID NO: 581846 - RNA, 19 nt, Artificial Sequence
  Description of Artificial Sequence: Synthetic oligonucleotide
ggugguagggagacaacca

SEQ ID NO: 581847 - RNA, 19 nt, Artificial Sequence
  Description of Artificial Sequence: Synthetic oligonucleotide
caugaggcggccagcucca

SEQ ID NO: 581848 - RNA, 19 nt, Artificial Sequence
  Description of Artificial Sequence: Synthetic oligonucleotide
ccaugugagccaaauuuga

SEQ ID NO: 581849 - RNA, 19 nt, Artificial Sequence
  Description of Artificial Sequence: Synthetic oligonucleotide
caggaccagugaucucugc

SEQ ID NO: 581850 - RNA, 19 nt, Artificial Sequence
  Description of Artificial Sequence: Synthetic oligonucleotide
ggguauugcugucucuguc

SEQ ID NO: 581851 - RNA, 19 nt, Artificial Sequence
  Description of Artificial Sequence: Synthetic oligonucleotide
gcagcuacugccaaugugu

SEQ ID NO: 581852 - RNA, 19 nt, Artificial Sequence
  Description of Artificial Sequence: Synthetic oligonucleotide
cugagugguuauggaaauc

SEQ ID NO: 581853 - RNA, 19 nt, Artificial Sequence
  Description of Artificial Sequence: Synthetic oligonucleotide
auaagccaaguagggcccu

SEQ ID NO: 581854 - RNA, 19 nt, Artificial Sequence
  Description of Artificial Sequence: Synthetic oligonucleotide
cuugcccucaggggagaag

SEQ ID NO: 581855 - RNA, 19 nt, Artificial Sequence
  Description of Artificial Sequence: Synthetic oligonucleotide
ucucucgcaugugcuuucu

SEQ ID NO: 581856 - RNA, 19 nt, Artificial Sequence
  Description of Artificial Sequence: Synthetic oligonucleotide
guacaccagcucauaugug

SEQ ID NO: 581857 - RNA, 19 nt, Artificial Sequence
  Description of Artificial Sequence: Synthetic oligonucleotide
ugcuaccacuaugcggcca

SEQ ID NO: 581858 - RNA, 19 nt, Artificial Sequence
  Description of Artificial Sequence: Synthetic oligonucleotide
gcuacuaccacguggccau

SEQ ID NO: 581859 - RNA, 19 nt, Artificial Sequence
  Description of Artificial Sequence: Synthetic oligonucleotide
ucgccaugugagccaaauu

SEQ ID NO: 581860 - RNA, 19 nt, Artificial Sequence
  Description of Artificial Sequence: Synthetic oligonucleotide
cuguuugaaguaagaggcu

SEQ ID NO: 581861 - RNA, 19 nt, Artificial Sequence
  Description of Artificial Sequence: Synthetic oligonucleotide
acacgaaagacgaguucau

SEQ ID NO: 581862 - RNA, 19 nt, Artificial Sequence
  Description of Artificial Sequence: Synthetic oligonucleotide
cugcuaccacuaugcggcc

SEQ ID NO: 581863 - RNA, 19 nt, Artificial Sequence
  Description of Artificial Sequence: Synthetic oligonucleotide
guggugagcaaugcaccca

SEQ ID NO: 581864 - RNA, 19 nt, Artificial Sequence
  Description of Artificial Sequence: Synthetic oligonucleotide
auccgaggucaaugccaag

SEQ ID NO: 581865 - RNA, 19 nt, Artificial Sequence
  Description of Artificial Sequence: Synthetic oligonucleotide
cauuggagaaaaccugaau

SEQ ID NO: 581866 - RNA, 19 nt, Artificial Sequence
  Description of Artificial Sequence: Synthetic oligonucleotide
ccauccgaggucaaugcca

SEQ ID NO: 581867 - RNA, 19 nt, Artificial Sequence
  Description of Artificial Sequence: Synthetic oligonucleotide
caucagcuacuaccacgug

SEQ ID NO: 581868 - RNA, 19 nt, Artificial Sequence
  Description of Artificial Sequence: Synthetic oligonucleotide
ucccuccauaagccaagua

SEQ ID NO: 581869 - RNA, 19 nt, Artificial Sequence
  Description of Artificial Sequence: Synthetic oligonucleotide
gcaccgaucuccgcaaccc

SEQ ID NO: 581870 - RNA, 19 nt, Artificial Sequence
  Description of Artificial Sequence: Synthetic oligonucleotide
cagcuacuaccacguggcc

SEQ ID NO: 581871 - RNA, 19 nt, Artificial Sequence
  Description of Artificial Sequence: Synthetic oligonucleotide
gcugccacgaacuggcugu

SEQ ID NO: 581872 - RNA, 19 nt, Artificial Sequence
  Description of Artificial Sequence: Synthetic oligonucleotide
ccguuugccaccagugcug

SEQ ID NO: 581873 - RNA, 19 nt, Artificial Sequence
  Description of Artificial Sequence: Synthetic oligonucleotide
gaacuugaacuggcccuca

SEQ ID NO: 581874 - RNA, 19 nt, Artificial Sequence
  Description of Artificial Sequence: Synthetic oligonucleotide
guguauggggugguaggga

SEQ ID NO: 581875 - RNA, 19 nt, Artificial Sequence
  Description of Artificial Sequence: Synthetic oligonucleotide
augcggccacugcuugcgg

SEQ ID NO: 581876 - RNA, 19 nt, Artificial Sequence
  Description of Artificial Sequence: Synthetic oligonucleotide
ggacgcuguaguugcccag

SEQ ID NO: 581877 - RNA, 19 nt, Artificial Sequence
  Description of Artificial Sequence: Synthetic oligonucleotide
gccauccgaggucaaugcc

SEQ ID NO: 581878 - RNA, 19 nt, Artificial Sequence
  Description of Artificial Sequence: Synthetic oligonucleotide
ccagauugagcaccgaucu

SEQ ID NO: 581879 - RNA, 19 nt, Artificial Sequence
  Description of Artificial Sequence: Synthetic oligonucleotide
ccauagaguagcacugaga

SEQ ID NO: 581880 - RNA, 19 nt, Artificial Sequence
  Description of Artificial Sequence: Synthetic oligonucleotide
ggucgcagggcacgcacac

SEQ ID NO: 581881 - RNA, 19 nt, Artificial Sequence
  Description of Artificial Sequence: Synthetic oligonucleotide
cacuagugccuggcgcagg

SEQ ID NO: 581882 - RNA, 19 nt, Artificial Sequence
  Description of Artificial Sequence: Synthetic oligonucleotide
agccaaauuugaagaggaa

SEQ ID NO: 581883 - RNA, 19 nt, Artificial Sequence
  Description of Artificial Sequence: Synthetic oligonucleotide
gcguacauggcugccagga

SEQ ID NO: 581884 - RNA, 19 nt, Artificial Sequence
  Description of Artificial Sequence: Synthetic oligonucleotide
aggcccucgccuguggcca

SEQ ID NO: 581885 - RNA, 19 nt, Artificial Sequence
  Description of Artificial Sequence: Synthetic oligonucleotide
ugccacgaacuggcugucc

SEQ ID NO: 581886 - RNA, 19 nt, Artificial Sequence
  Description of Artificial Sequence: Synthetic oligonucleotide
caccugugggacgcuguag

SEQ ID NO: 581887 - RNA, 19 nt, Artificial Sequence
  Description of Artificial Sequence: Synthetic oligonucleotide
aggccuuaaagcagugguu

SEQ ID NO: 581888 - RNA, 19 nt, Artificial Sequence
  Description of Artificial Sequence: Synthetic oligonucleotide
accgaucuccgcaacccau

SEQ ID NO: 581889 - RNA, 19 nt, Artificial Sequence
  Description of Artificial Sequence: Synthetic oligonucleotide
ccaacgguugucauagucu

SEQ ID NO: 581890 - RNA, 19 nt, Artificial Sequence
  Description of Artificial Sequence: Synthetic oligonucleotide
gagguagcgauaggccuua

SEQ ID NO: 581891 - RNA, 19 nt, Artificial Sequence
  Description of Artificial Sequence: Synthetic oligonucleotide
ggcguacauggcugccagg

SEQ ID NO: 581892 - RNA, 19 nt, Artificial Sequence
  Description of Artificial Sequence: Synthetic oligonucleotide
gcucauaugugccauucuu

SEQ ID NO: 581893 - RNA, 19 nt, Artificial Sequence
  Description of Artificial Sequence: Synthetic oligonucleotide
ccgaauaaauaaagugcaa

SEQ ID NO: 581894 - RNA, 19 nt, Artificial Sequence
  Description of Artificial Sequence: Synthetic oligonucleotide
cagcaagauuuguugucua

SEQ ID NO: 581895 - RNA, 19 nt, Artificial Sequence
  Description of Artificial Sequence: Synthetic oligonucleotide
cuaccacguggccauccga

SEQ ID NO: 581896 - RNA, 19 nt, Artificial Sequence
  Description of Artificial Sequence: Synthetic oligonucleotide
cuauguccgucccuccaua

SEQ ID NO: 581897 - RNA, 19 nt, Artificial Sequence
  Description of Artificial Sequence: Synthetic oligonucleotide
caauaccucaggggcagaa

SEQ ID NO: 581898 - RNA, 19 nt, Artificial Sequence
  Description of Artificial Sequence: Synthetic oligonucleotide
cgaggucaaugccaagccc

SEQ ID NO: 581899 - RNA, 19 nt, Artificial Sequence
  Description of Artificial Sequence: Synthetic oligonucleotide
ggcccacuagugccuggcg

SEQ ID NO: 581900 - RNA, 19 nt, Artificial Sequence
  Description of Artificial Sequence: Synthetic oligonucleotide
cacggccacaccuguggga

SEQ ID NO: 581901 - RNA, 19 nt, Artificial Sequence
  Description of Artificial Sequence: Synthetic oligonucleotide
cccacuagugccuggcgca

SEQ ID NO: 581902 - RNA, 19 nt, Artificial Sequence
  Description of Artificial Sequence: Synthetic oligonucleotide
gggacgcuguaguugccca

SEQ ID NO: 581903 - RNA, 19 nt, Artificial Sequence
  Description of Artificial Sequence: Synthetic oligonucleotide
cuuggcgaacacauuuauu

SEQ ID NO: 581904 - RNA, 19 nt, Artificial Sequence
  Description of Artificial Sequence: Synthetic oligonucleotide
gguagcgauaggccuuaaa

SEQ ID NO: 581905 - RNA, 19 nt, Artificial Sequence
  Description of Artificial Sequence: Synthetic oligonucleotide
cacugccugugcguaccag

SEQ ID NO: 581906 - RNA, 19 nt, Artificial Sequence
  Description of Artificial Sequence: Synthetic oligonucleotide
cuggcguacauggcugcca

SEQ ID NO: 581907 - RNA, 19 nt, Artificial Sequence
  Description of Artificial Sequence: Synthetic oligonucleotide
cacggaccccaaaucggaa

SEQ ID NO: 581908 - RNA, 19 nt, Artificial Sequence
  Description of Artificial Sequence: Synthetic oligonucleotide
caccgaucuccgcaaccca

SEQ ID NO: 581909 - RNA, 19 nt, Artificial Sequence
  Description of Artificial Sequence: Synthetic oligonucleotide
gcgaacacauuuauuuagu

SEQ ID NO: 581910 - RNA, 19 nt, Artificial Sequence
  Description of Artificial Sequence: Synthetic oligonucleotide
uggcaccgcaaggcgugug

SEQ ID NO: 581911 - RNA, 19 nt, Artificial Sequence
  Description of Artificial Sequence: Synthetic oligonucleotide
cgaaagacgaguucauccu

SEQ ID NO: 581912 - RNA, 19 nt, Artificial Sequence
  Description of Artificial Sequence: Synthetic oligonucleotide
ccgaucuccgcaacccauc

SEQ ID NO: 581913 - RNA, 19 nt, Artificial Sequence
  Description of Artificial Sequence: Synthetic oligonucleotide
ccacggaccccaaaucgga

SEQ ID NO: 581914 - RNA, 19 nt, Artificial Sequence
  Description of Artificial Sequence: Synthetic oligonucleotide
ugcguaccagccgcccauc

SEQ ID NO: 581915 - RNA, 19 nt, Artificial Sequence
  Description of Artificial Sequence: Synthetic oligonucleotide
cacuaugcggccacugcuu

SEQ ID NO: 581916 - RNA, 19 nt, Artificial Sequence
  Description of Artificial Sequence: Synthetic oligonucleotide
ggauucggcuguugcccca

SEQ ID NO: 581917 - RNA, 19 nt, Artificial Sequence
  Description of Artificial Sequence: Synthetic oligonucleotide
gucccaugaggcggccagc

SEQ ID NO: 581918 - RNA, 19 nt, Artificial Sequence
  Description of Artificial Sequence: Synthetic oligonucleotide
acccaacgguugucauagu

SEQ ID NO: 581919 - RNA, 19 nt, Artificial Sequence
  Description of Artificial Sequence: Synthetic oligonucleotide
gcggccacugcuugcggca

SEQ ID NO: 581920 - RNA, 19 nt, Artificial Sequence
  Description of Artificial Sequence: Synthetic oligonucleotide
gugagcgcccacggacccc

SEQ ID NO: 581921 - RNA, 19 nt, Artificial Sequence
  Description of Artificial Sequence: Synthetic oligonucleotide
auaccuggauucggcuguu

SEQ ID NO: 581922 - RNA, 19 nt, Artificial Sequence
  Description of Artificial Sequence: Synthetic oligonucleotide
cacuggcaccgcaaggcgu

SEQ ID NO: 581923 - RNA, 19 nt, Artificial Sequence
  Description of Artificial Sequence: Synthetic oligonucleotide
guccacggccacaccugug

SEQ ID NO: 581924 - RNA, 19 nt, Artificial Sequence
  Description of Artificial Sequence: Synthetic oligonucleotide
gugggacgcuguaguugcc

SEQ ID NO: 581925 - RNA, 19 nt, Artificial Sequence
  Description of Artificial Sequence: Synthetic oligonucleotide
cuccgcaacccaucuacuu

SEQ ID NO: 581926 - RNA, 19 nt, Artificial Sequence
  Description of Artificial Sequence: Synthetic oligonucleotide
ccgguccacggccacuccc

SEQ ID NO: 581927 - RNA, 19 nt, Artificial Sequence
  Description of Artificial Sequence: Synthetic oligonucleotide
cuugcggcagacacaccuu

SEQ ID NO: 581928 - RNA, 19 nt, Artificial Sequence
  Description of Artificial Sequence: Synthetic oligonucleotide
gcaccgcaaggcgugugcc

SEQ ID NO: 581929 - RNA, 19 nt, Artificial Sequence
  Description of Artificial Sequence: Synthetic oligonucleotide
caaaacgcccaaccagcuu

SEQ ID NO: 581930 - RNA, 19 nt, Artificial Sequence
  Description of Artificial Sequence: Synthetic oligonucleotide
gggguauugcugucucugu

SEQ ID NO: 581931 - RNA, 19 nt, Artificial Sequence
  Description of Artificial Sequence: Synthetic oligonucleotide
ggaccaccgggagacuuga

SEQ ID NO: 581932 - RNA, 19 nt, Artificial Sequence
  Description of Artificial Sequence: Synthetic oligonucleotide
cucgccaugugagccaaau

SEQ ID NO: 581933 - RNA, 19 nt, Artificial Sequence
  Description of Artificial Sequence: Synthetic oligonucleotide
gccugcgcacugcuuucug

SEQ ID NO: 581934 - RNA, 19 nt, Artificial Sequence
  Description of Artificial Sequence: Synthetic oligonucleotide
cugccacgaacuggcuguc

SEQ ID NO: 581935 - RNA, 19 nt, Artificial Sequence
  Description of Artificial Sequence: Synthetic oligonucleotide
caaucaccccuauguccgu

SEQ ID NO: 581936 - RNA, 19 nt, Artificial Sequence
  Description of Artificial Sequence: Synthetic oligonucleotide
ccacuagugccuggcgcag

SEQ ID NO: 581937 - RNA, 19 nt, Artificial Sequence
  Description of Artificial Sequence: Synthetic oligonucleotide
gaccaccgggagacuugac

SEQ ID NO: 581938 - RNA, 19 nt, Artificial Sequence
  Description of Artificial Sequence: Synthetic oligonucleotide
cuacuaccacguggccauc

SEQ ID NO: 581939 - RNA, 19 nt, Artificial Sequence
  Description of Artificial Sequence: Synthetic oligonucleotide
gggccugcgcacugcuuuc

SEQ ID NO: 581940 - RNA, 19 nt, Artificial Sequence
  Description of Artificial Sequence: Synthetic oligonucleotide
ccccuauguccgucccucc

SEQ ID NO: 581941 - RNA, 19 nt, Artificial Sequence
  Description of Artificial Sequence: Synthetic oligonucleotide
cugacccaacgguugucau

SEQ ID NO: 581942 - RNA, 19 nt, Artificial Sequence
  Description of Artificial Sequence: Synthetic oligonucleotide
uggcggucaguggccccac

SEQ ID NO: 581943 - RNA, 19 nt, Artificial Sequence
  Description of Artificial Sequence: Synthetic oligonucleotide
cccuauguccgucccucca

SEQ ID NO: 581944 - RNA, 19 nt, Artificial Sequence
  Description of Artificial Sequence: Synthetic oligonucleotide
ccgggagacuugacccggc

SEQ ID NO: 581945 - RNA, 19 nt, Artificial Sequence
  Description of Artificial Sequence: Synthetic oligonucleotide
cuuguccaaucaccccuau

SEQ ID NO: 581946 - RNA, 19 nt, Artificial Sequence
  Description of Artificial Sequence: Synthetic oligonucleotide
ggagguagcgauaggccuu

SEQ ID NO: 581947 - RNA, 19 nt, Artificial Sequence
  Description of Artificial Sequence: Synthetic oligonucleotide
cucugcgaagcugcagcua

SEQ ID NO: 581948 - RNA, 19 nt, Artificial Sequence
  Description of Artificial Sequence: Synthetic oligonucleotide
cuguuacuacaaucucguu

SEQ ID NO: 581949 - RNA, 19 nt, Artificial Sequence
  Description of Artificial Sequence: Synthetic oligonucleotide
gcucugcgaagcugcagcu

SEQ ID NO: 581950 - RNA, 19 nt, Artificial Sequence
  Description of Artificial Sequence: Synthetic oligonucleotide
ccgucccuccauaagccaa

SEQ ID NO: 581951 - RNA, 19 nt, Artificial Sequence
  Description of Artificial Sequence: Synthetic oligonucleotide
ccacuaugcggccacugcu

SEQ ID NO: 581952 - RNA, 19 nt, Artificial Sequence
  Description of Artificial Sequence: Synthetic oligonucleotide
ggugagcaaugcacccaga

SEQ ID NO: 581953 - RNA, 19 nt, Artificial Sequence
  Description of Artificial Sequence: Synthetic oligonucleotide
ggggugguagggagacaac

SEQ ID NO: 581954 - RNA, 19 nt, Artificial Sequence
  Description of Artificial Sequence: Synthetic oligonucleotide
caaucucguucuuguuguu

SEQ ID NO: 581955 - RNA, 19 nt, Artificial Sequence
  Description of Artificial Sequence: Synthetic oligonucleotide
cgaauaccuggauucggcu

SEQ ID NO: 581956 - RNA, 19 nt, Artificial Sequence
  Description of Artificial Sequence: Synthetic oligonucleotide
uagggcccuucugcagcua

SEQ ID NO: 581957 - RNA, 19 nt, Artificial Sequence
  Description of Artificial Sequence: Synthetic oligonucleotide
ccauuccgguccacggcca

SEQ ID NO: 581958 - RNA, 19 nt, Artificial Sequence
  Description of Artificial Sequence: Synthetic oligonucleotide
ccuuggcgaacacauuuau

SEQ ID NO: 581959 - RNA, 19 nt, Artificial Sequence
  Description of Artificial Sequence: Synthetic oligonucleotide
ccucaaaggcugcacuuau

SEQ ID NO: 581960 - RNA, 19 nt, Artificial Sequence
  Description of Artificial Sequence: Synthetic oligonucleotide
ggucaaugccaagcccugu

SEQ ID NO: 581961 - RNA, 19 nt, Artificial Sequence
  Description of Artificial Sequence: Synthetic oligonucleotide
agcuugccauugggcugga

SEQ ID NO: 581962 - RNA, 19 nt, Artificial Sequence
  Description of Artificial Sequence: Synthetic oligonucleotide
ccucaauuggguuguccuu

SEQ ID NO: 581963 - RNA, 19 nt, Artificial Sequence
  Description of Artificial Sequence: Synthetic oligonucleotide
ccacaccugugggacgcug

SEQ ID NO: 581964 - RNA, 19 nt, Artificial Sequence
  Description of Artificial Sequence: Synthetic oligonucleotide
ccacguggccauccgaggu

SEQ ID NO: 581965 - RNA, 19 nt, Artificial Sequence
  Description of Artificial Sequence: Synthetic oligonucleotide
cacccagauugagcaccga

SEQ ID NO: 581966 - RNA, 19 nt, Artificial Sequence
  Description of Artificial Sequence: Synthetic oligonucleotide
ccuauguccgucccuccau

SEQ ID NO: 581967 - RNA, 19 nt, Artificial Sequence
  Description of Artificial Sequence: Synthetic oligonucleotide
caccccuauguccgucccu

SEQ ID NO: 581968 - RNA, 19 nt, Artificial Sequence
  Description of Artificial Sequence: Synthetic oligonucleotide
cggaccccaaaucggaacu

SEQ ID NO: 581969 - RNA, 19 nt, Artificial Sequence
  Description of Artificial Sequence: Synthetic oligonucleotide
ccuuugcuuggccccgcaa

SEQ ID NO: 581970 - RNA, 19 nt, Artificial Sequence
  Description of Artificial Sequence: Synthetic oligonucleotide
cuaccacuaugcggccacu

SEQ ID NO: 581971 - RNA, 19 nt, Artificial Sequence
  Description of Artificial Sequence: Synthetic oligonucleotide
gcccugugggccauauagu

SEQ ID NO: 581972 - RNA, 19 nt, Artificial Sequence
  Description of Artificial Sequence: Synthetic oligonucleotide
gcguaccagccgcccaucu

SEQ ID NO: 581973 - RNA, 19 nt, Artificial Sequence
  Description of Artificial Sequence: Synthetic oligonucleotide
cgaucuccgcaacccaucu

SEQ ID NO: 581974 - RNA, 19 nt, Artificial Sequence
  Description of Artificial Sequence: Synthetic oligonucleotide
cggcugccaacacgaaaga

SEQ ID NO: 581975 - RNA, 19 nt, Artificial Sequence
  Description of Artificial Sequence: Synthetic oligonucleotide
cgcaacccaucuacuucaa

SEQ ID NO: 581976 - RNA, 19 nt, Artificial Sequence
  Description of Artificial Sequence: Synthetic oligonucleotide
gcgcaggcccucgccugug

SEQ ID NO: 581977 - RNA, 19 nt, Artificial Sequence
  Description of Artificial Sequence: Synthetic oligonucleotide
cuggcaccgcaaggcgugu

SEQ ID NO: 581978 - RNA, 19 nt, Artificial Sequence
  Description of Artificial Sequence: Synthetic oligonucleotide
cccucgccuguggccacug

SEQ ID NO: 581979 - RNA, 19 nt, Artificial Sequence
  Description of Artificial Sequence: Synthetic oligonucleotide
ggccugcgcacugcuuucu

SEQ ID NO: 581980 - RNA, 19 nt, Artificial Sequence
  Description of Artificial Sequence: Synthetic oligonucleotide
cguaccagccgcccaucuu

SEQ ID NO: 581981 - RNA, 19 nt, Artificial Sequence
  Description of Artificial Sequence: Synthetic oligonucleotide
ccucgccaugugagccaaa

SEQ ID NO: 581982 - RNA, 19 nt, Artificial Sequence
  Description of Artificial Sequence: Synthetic oligonucleotide
ccaagcccugugggccaua

SEQ ID NO: 581983 - RNA, 19 nt, Artificial Sequence
  Description of Artificial Sequence: Synthetic oligonucleotide
cuuuuagagaaucagaggg

SEQ ID NO: 581984 - RNA, 19 nt, Artificial Sequence
  Description of Artificial Sequence: Synthetic oligonucleotide
uuuauuacuacaaugguaa

SEQ ID NO: 581985 - RNA, 19 nt, Artificial Sequence
  Description of Artificial Sequence: Synthetic oligonucleotide
aaagcagagaaucaaagga

SEQ ID NO: 581986 - RNA, 19 nt, Artificial Sequence
  Description of Artificial Sequence: Synthetic oligonucleotide
uauacaagcauuccgaaga

SEQ ID NO: 581987 - RNA, 19 nt, Artificial Sequence
  Description of Artificial Sequence: Synthetic oligonucleotide
aauacuugggauuucauau

SEQ ID NO: 581988 - RNA, 19 nt, Artificial Sequence
  Description of Artificial Sequence: Synthetic oligonucleotide
auuaaucacagugagaaac

SEQ ID NO: 581989 - RNA, 19 nt, Artificial Sequence
  Description of Artificial Sequence: Synthetic oligonucleotide
uuaaucgcaauauugaggu

SEQ ID NO: 581990 - RNA, 19 nt, Artificial Sequence
  Description of Artificial Sequence: Synthetic oligonucleotide
aacaucaaucacucguucc

SEQ ID NO: 581991 - RNA, 19 nt, Artificial Sequence
  Description of Artificial Sequence: Synthetic oligonucleotide
aacauguugagaugaagag

SEQ ID NO: 581992 - RNA, 19 nt, Artificial Sequence
  Description of Artificial Sequence: Synthetic oligonucleotide
uuaauuaacuggaaaugag

SEQ ID NO: 581993 - RNA, 19 nt, Artificial Sequence
  Description of Artificial Sequence: Synthetic oligonucleotide
aaaggaaugaagcauacuu

SEQ ID NO: 581994 - RNA, 19 nt, Artificial Sequence
  Description of Artificial Sequence: Synthetic oligonucleotide
aaauaguccacuuguagcu

SEQ ID NO: 581995 - RNA, 19 nt, Artificial Sequence
  Description of Artificial Sequence: Synthetic oligonucleotide
uagaauuaaucacagugag

SEQ ID NO: 581996 - RNA, 19 nt, Artificial Sequence
  Description of Artificial Sequence: Synthetic oligonucleotide
ugugauuagcugaagacug

SEQ ID NO: 581997 - RNA, 19 nt, Artificial Sequence
  Description of Artificial Sequence: Synthetic oligonucleotide
gguagaauuaaucacagug

SEQ ID NO: 581998 - RNA, 19 nt, Artificial Sequence
  Description of Artificial Sequence: Synthetic oligonucleotide
guaauaaucaagaacggcc

SEQ ID NO: 581999 - RNA, 19 nt, Artificial Sequence
  Description of Artificial Sequence: Synthetic oligonucleotide
ugagauuuaaacccuucag

SEQ ID NO: 582000 - RNA, 19 nt, Artificial Sequence
  Description of Artificial Sequence: Synthetic oligonucleotide
ucuuguaacacagauuucc

SEQ ID NO: 582001 - RNA, 19 nt, Artificial Sequence
  Description of Artificial Sequence: Synthetic oligonucleotide
gaauuaaucacagugagaa

SEQ ID NO: 582002 - RNA, 19 nt, Artificial Sequence
  Description of Artificial Sequence: Synthetic oligonucleotide
uggucuguaauaaucaaga

SEQ ID NO: 582003 - RNA, 19 nt, Artificial Sequence
  Description of Artificial Sequence: Synthetic oligonucleotide
aaacccuucagccaugugu

SEQ ID NO: 582004 - RNA, 19 nt, Artificial Sequence
  Description of Artificial Sequence: Synthetic oligonucleotide
uaauaaucaagaacggcca

SEQ ID NO: 582005 - RNA, 19 nt, Artificial Sequence
  Description of Artificial Sequence: Synthetic oligonucleotide
aaaagcuccguguuggaug

SEQ ID NO: 582006 - RNA, 19 nt, Artificial Sequence
  Description of Artificial Sequence: Synthetic oligonucleotide
gaaacuuacuucaagugcc

SEQ ID NO: 582007 - RNA, 19 nt, Artificial Sequence
  Description of Artificial Sequence: Synthetic oligonucleotide
aguuaagugccacauguuc

SEQ ID NO: 582008 - RNA, 19 nt, Artificial Sequence
  Description of Artificial Sequence: Synthetic oligonucleotide
cauacuugccaucugaaag

SEQ ID NO: 582009 - RNA, 19 nt, Artificial Sequence
  Description of Artificial Sequence: Synthetic oligonucleotide
uugcaaucaacucagcaug

SEQ ID NO: 582010 - RNA, 19 nt, Artificial Sequence
  Description of Artificial Sequence: Synthetic oligonucleotide
agauugguagaauuaauca

SEQ ID NO: 582011 - RNA, 19 nt, Artificial Sequence
  Description of Artificial Sequence: Synthetic oligonucleotide
gauugguagaauuaaucac

SEQ ID NO: 582012 - RNA, 19 nt, Artificial Sequence
  Description of Artificial Sequence: Synthetic oligonucleotide
ucaagaacggccauucuga

SEQ ID NO: 582013 - RNA, 19 nt, Artificial Sequence
  Description of Artificial Sequence: Synthetic oligonucleotide
gacauuaaucgcaauauug

SEQ ID NO: 582014 - RNA, 19 nt, Artificial Sequence
  Description of Artificial Sequence: Synthetic oligonucleotide
acaguuaagugccacaugu

SEQ ID NO: 582015 - RNA, 19 nt, Artificial Sequence
  Description of Artificial Sequence: Synthetic oligonucleotide
uuggcuaucauaaugucua

SEQ ID NO: 582016 - RNA, 19 nt, Artificial Sequence
  Description of Artificial Sequence: Synthetic oligonucleotide
ugagaaacuuacuucaagu

SEQ ID NO: 582017 - RNA, 19 nt, Artificial Sequence
  Description of Artificial Sequence: Synthetic oligonucleotide
ugagauuucgcacagcaua

SEQ ID NO: 582018 - RNA, 19 nt, Artificial Sequence
  Description of Artificial Sequence: Synthetic oligonucleotide
gaauacauggcuuccacca

SEQ ID NO: 582019 - RNA, 19 nt, Artificial Sequence
  Description of Artificial Sequence: Synthetic oligonucleotide
acucuauacaagcauuccg

SEQ ID NO: 582020 - RNA, 19 nt, Artificial Sequence
  Description of Artificial Sequence: Synthetic oligonucleotide
uucgaugucaccuucugcu

SEQ ID NO: 582021 - RNA, 19 nt, Artificial Sequence
  Description of Artificial Sequence: Synthetic oligonucleotide
uuugcaaucaacucagcau

SEQ ID NO: 582022 - RNA, 19 nt, Artificial Sequence
  Description of Artificial Sequence: Synthetic oligonucleotide
cacauuccuacacugaucc

SEQ ID NO: 582023 - RNA, 19 nt, Artificial Sequence
  Description of Artificial Sequence: Synthetic oligonucleotide
accauaacgcccgacagcc

SEQ ID NO: 582024 - RNA, 19 nt, Artificial Sequence
  Description of Artificial Sequence: Synthetic oligonucleotide
acagauuuccaaucagacg

SEQ ID NO: 582025 - RNA, 19 nt, Artificial Sequence
  Description of Artificial Sequence: Synthetic oligonucleotide
uaugacauuaaucgcaaua

SEQ ID NO: 582026 - RNA, 19 nt, Artificial Sequence
  Description of Artificial Sequence: Synthetic oligonucleotide
auuaaucgcaauauugagg

SEQ ID NO: 582027 - RNA, 19 nt, Artificial Sequence
  Description of Artificial Sequence: Synthetic oligonucleotide
ucuuagccgaaccugacga

SEQ ID NO: 582028 - RNA, 19 nt, Artificial Sequence
  Description of Artificial Sequence: Synthetic oligonucleotide
acuuacuucaagugcccgc

SEQ ID NO: 582029 - RNA, 19 nt, Artificial Sequence
  Description of Artificial Sequence: Synthetic oligonucleotide
uguaauaaucaagaacggc

SEQ ID NO: 582030 - RNA, 19 nt, Artificial Sequence
  Description of Artificial Sequence: Synthetic oligonucleotide
cuuauccucagugugaggc

SEQ ID NO: 582031 - RNA, 19 nt, Artificial Sequence
  Description of Artificial Sequence: Synthetic oligonucleotide
ucguuauuagacuucagaa

SEQ ID NO: 582032 - RNA, 19 nt, Artificial Sequence
  Description of Artificial Sequence: Synthetic oligonucleotide
uauuacuacaaugguaagc

SEQ ID NO: 582033 - RNA, 19 nt, Artificial Sequence
  Description of Artificial Sequence: Synthetic oligonucleotide
cauuaaucgcaauauugag

SEQ ID NO: 582034 - RNA, 19 nt, Artificial Sequence
  Description of Artificial Sequence: Synthetic oligonucleotide
uugccacucacucuuagcc

SEQ ID NO: 582035 - RNA, 19 nt, Artificial Sequence
  Description of Artificial Sequence: Synthetic oligonucleotide
uguaacacagauuuccaau

SEQ ID NO: 582036 - RNA, 19 nt, Artificial Sequence
  Description of Artificial Sequence: Synthetic oligonucleotide
uuacgguacuccuugaaga

SEQ ID NO: 582037 - RNA, 19 nt, Artificial Sequence
  Description of Artificial Sequence: Synthetic oligonucleotide
agugagauuucgcacagca

SEQ ID NO: 582038 - RNA, 19 nt, Artificial Sequence
  Description of Artificial Sequence: Synthetic oligonucleotide
uagagaaucagagggacug

SEQ ID NO: 582039 - RNA, 19 nt, Artificial Sequence
  Description of Artificial Sequence: Synthetic oligonucleotide
uauggaauccauaacucua

SEQ ID NO: 582040 - RNA, 19 nt, Artificial Sequence
  Description of Artificial Sequence: Synthetic oligonucleotide
uugauuuuggcuguugucu

SEQ ID NO: 582041 - RNA, 19 nt, Artificial Sequence
  Description of Artificial Sequence: Synthetic oligonucleotide
uguucgagguaucuuuucc

SEQ ID NO: 582042 - RNA, 19 nt, Artificial Sequence
  Description of Artificial Sequence: Synthetic oligonucleotide
ucaacggcaacgccaauug

SEQ ID NO: 582043 - RNA, 19 nt, Artificial Sequence
  Description of Artificial Sequence: Synthetic oligonucleotide
cauuucacacagaacgucc

SEQ ID NO: 582044 - RNA, 19 nt, Artificial Sequence
  Description of Artificial Sequence: Synthetic oligonucleotide
gucuguaauaaucaagaac

SEQ ID NO: 582045 - RNA, 19 nt, Artificial Sequence
  Description of Artificial Sequence: Synthetic oligonucleotide
uucgucacccacuagcuug

SEQ ID NO: 582046 - RNA, 19 nt, Artificial Sequence
  Description of Artificial Sequence: Synthetic oligonucleotide
aaacuuacuucaagugccc

SEQ ID NO: 582047 - RNA, 19 nt, Artificial Sequence
  Description of Artificial Sequence: Synthetic oligonucleotide
auuguauccagguuccuga

SEQ ID NO: 582048 - RNA, 19 nt, Artificial Sequence
  Description of Artificial Sequence: Synthetic oligonucleotide
cuggaaaugagucauguca

SEQ ID NO: 582049 - RNA, 19 nt, Artificial Sequence
  Description of Artificial Sequence: Synthetic oligonucleotide
aagcauuccgaagacaucu

SEQ ID NO: 582050 - RNA, 19 nt, Artificial Sequence
  Description of Artificial Sequence: Synthetic oligonucleotide
acauaaagaguucugggaa

SEQ ID NO: 582051 - RNA, 19 nt, Artificial Sequence
  Description of Artificial Sequence: Synthetic oligonucleotide
ucacgaaagagaagaacca

SEQ ID NO: 582052 - RNA, 19 nt, Artificial Sequence
  Description of Artificial Sequence: Synthetic oligonucleotide
ucuaugacauuaaucgcaa

SEQ ID NO: 582053 - RNA, 19 nt, Artificial Sequence
  Description of Artificial Sequence: Synthetic oligonucleotide
aucaagaacggccauucug

SEQ ID NO: 582054 - RNA, 19 nt, Artificial Sequence
  Description of Artificial Sequence: Synthetic oligonucleotide
ugcaaucaacucagcaugg

SEQ ID NO: 582055 - RNA, 19 nt, Artificial Sequence
  Description of Artificial Sequence: Synthetic oligonucleotide
aauggauugggaaucuuca

SEQ ID NO: 582056 - RNA, 19 nt, Artificial Sequence
  Description of Artificial Sequence: Synthetic oligonucleotide
agaugcgucugccaacccc

SEQ ID NO: 582057 - RNA, 19 nt, Artificial Sequence
  Description of Artificial Sequence: Synthetic oligonucleotide
accaaaucaacggcaacgc

SEQ ID NO: 582058 - RNA, 19 nt, Artificial Sequence
  Description of Artificial Sequence: Synthetic oligonucleotide
caguguaacccuuuccugg

SEQ ID NO: 582059 - RNA, 19 nt, Artificial Sequence
  Description of Artificial Sequence: Synthetic oligonucleotide
aaccugacgaggcggagag

SEQ ID NO: 582060 - RNA, 19 nt, Artificial Sequence
  Description of Artificial Sequence: Synthetic oligonucleotide
gaguuugcaaucaacucag

SEQ ID NO: 582061 - RNA, 19 nt, Artificial Sequence
  Description of Artificial Sequence: Synthetic oligonucleotide
aaagcuccguguuggaugu

SEQ ID NO: 582062 - RNA, 19 nt, Artificial Sequence
  Description of Artificial Sequence: Synthetic oligonucleotide
acccguaaaacaucaauca

SEQ ID NO: 582063 - RNA, 19 nt, Artificial Sequence
  Description of Artificial Sequence: Synthetic oligonucleotide
ugagucaugucaauguuuu

SEQ ID NO: 582064 - RNA, 19 nt, Artificial Sequence
  Description of Artificial Sequence: Synthetic oligonucleotide
uccgaagacaucugaaaca

SEQ ID NO: 582065 - RNA, 19 nt, Artificial Sequence
  Description of Artificial Sequence: Synthetic oligonucleotide
aaucgcaauauugagguuu

SEQ ID NO: 582066 - RNA, 19 nt, Artificial Sequence
  Description of Artificial Sequence: Synthetic oligonucleotide
caauauugagguuuucuuc

SEQ ID NO: 582067 - RNA, 19 nt, Artificial Sequence
  Description of Artificial Sequence: Synthetic oligonucleotide
gagacaagcgacaggagag

SEQ ID NO: 582068 - RNA, 19 nt, Artificial Sequence
  Description of Artificial Sequence: Synthetic oligonucleotide
gauuuaaacccuucagcca

SEQ ID NO: 582069 - RNA, 19 nt, Artificial Sequence
  Description of Artificial Sequence: Synthetic oligonucleotide
gaucagaggaaugccaucc

SEQ ID NO: 582070 - RNA, 19 nt, Artificial Sequence
  Description of Artificial Sequence: Synthetic oligonucleotide
aauguuuuggaaaggcaga

SEQ ID NO: 582071 - RNA, 19 nt, Artificial Sequence
  Description of Artificial Sequence: Synthetic oligonucleotide
auacaagcauuccgaagac

SEQ ID NO: 582072 - RNA, 19 nt, Artificial Sequence
  Description of Artificial Sequence: Synthetic oligonucleotide
aauuguauccagguuccug

SEQ ID NO: 582073 - RNA, 19 nt, Artificial Sequence
  Description of Artificial Sequence: Synthetic oligonucleotide
cacagauuuccaaucagac

SEQ ID NO: 582074 - RNA, 19 nt, Artificial Sequence
  Description of Artificial Sequence: Synthetic oligonucleotide
uuccgugaggcaauguugc

SEQ ID NO: 582075 - RNA, 19 nt, Artificial Sequence
  Description of Artificial Sequence: Synthetic oligonucleotide
acauguugagaugaagagg

SEQ ID NO: 582076 - RNA, 19 nt, Artificial Sequence
  Description of Artificial Sequence: Synthetic oligonucleotide
caaucaacucagcauggcg

SEQ ID NO: 582077 - RNA, 19 nt, Artificial Sequence
  Description of Artificial Sequence: Synthetic oligonucleotide
agagaugcgucugccaacc

SEQ ID NO: 582078 - RNA, 19 nt, Artificial Sequence
  Description of Artificial Sequence: Synthetic oligonucleotide
guuacgguacuccuugaag

SEQ ID NO: 582079 - RNA, 19 nt, Artificial Sequence
  Description of Artificial Sequence: Synthetic oligonucleotide
aauaaucaagaacggccau

SEQ ID NO: 582080 - RNA, 19 nt, Artificial Sequence
  Description of Artificial Sequence: Synthetic oligonucleotide
aacaaagagucuuguucca

SEQ ID NO: 582081 - RNA, 19 nt, Artificial Sequence
  Description of Artificial Sequence: Synthetic oligonucleotide
acauuaaucgcaauauuga

SEQ ID NO: 582082 - RNA, 19 nt, Artificial Sequence
  Description of Artificial Sequence: Synthetic oligonucleotide
uuauuacuacaaugguaag

SEQ ID NO: 582083 - RNA, 19 nt, Artificial Sequence
  Description of Artificial Sequence: Synthetic oligonucleotide
cuauacaagcauuccgaag

SEQ ID NO: 582084 - RNA, 19 nt, Artificial Sequence
  Description of Artificial Sequence: Synthetic oligonucleotide
cauaacgcccgacagccgg

SEQ ID NO: 582085 - RNA, 19 nt, Artificial Sequence
  Description of Artificial Sequence: Synthetic oligonucleotide
aagagauugguagaauuaa

SEQ ID NO: 582086 - RNA, 19 nt, Artificial Sequence
  Description of Artificial Sequence: Synthetic oligonucleotide
caaaucaacggcaacgcca

SEQ ID NO: 582087 - RNA, 19 nt, Artificial Sequence
  Description of Artificial Sequence: Synthetic oligonucleotide
caaccugggaugcaaacag

SEQ ID NO: 582088 - RNA, 19 nt, Artificial Sequence
  Description of Artificial Sequence: Synthetic oligonucleotide
cauguugagaugaagaggu

SEQ ID NO: 582089 - RNA, 19 nt, Artificial Sequence
  Description of Artificial Sequence: Synthetic oligonucleotide
ucgcacagcauacaccacc

SEQ ID NO: 582090 - RNA, 19 nt, Artificial Sequence
  Description of Artificial Sequence: Synthetic oligonucleotide
uuagccgaaccugacgagg

SEQ ID NO: 582091 - RNA, 19 nt, Artificial Sequence
  Description of Artificial Sequence: Synthetic oligonucleotide
aagaaccaaaucaacggca

SEQ ID NO: 582092 - RNA, 19 nt, Artificial Sequence
  Description of Artificial Sequence: Synthetic oligonucleotide
uauagagaugucauccuuu

SEQ ID NO: 582093 - RNA, 19 nt, Artificial Sequence
  Description of Artificial Sequence: Synthetic oligonucleotide
augagauuuaaacccuuca

SEQ ID NO: 582094 - RNA, 19 nt, Artificial Sequence
  Description of Artificial Sequence: Synthetic oligonucleotide
aacagcgugaguagauuuc

SEQ ID NO: 582095 - RNA, 19 nt, Artificial Sequence
  Description of Artificial Sequence: Synthetic oligonucleotide
gagauugguagaauuaauc

SEQ ID NO: 582096 - RNA, 19 nt, Artificial Sequence
  Description of Artificial Sequence: Synthetic oligonucleotide
aauuaaucacagugagaaa

SEQ ID NO: 582097 - RNA, 19 nt, Artificial Sequence
  Description of Artificial Sequence: Synthetic oligonucleotide
cuuacuucaagugcccgcc

SEQ ID NO: 582098 - RNA, 19 nt, Artificial Sequence
  Description of Artificial Sequence: Synthetic oligonucleotide
guagaauuaaucacaguga

SEQ ID NO: 582099 - RNA, 19 nt, Artificial Sequence
  Description of Artificial Sequence: Synthetic oligonucleotide
uguucgaugucaccuucug

SEQ ID NO: 582100 - RNA, 19 nt, Artificial Sequence
  Description of Artificial Sequence: Synthetic oligonucleotide
uguucgucacccacuagcu

SEQ ID NO: 582101 - RNA, 19 nt, Artificial Sequence
  Description of Artificial Sequence: Synthetic oligonucleotide
cacucgaaguucacgaaag

SEQ ID NO: 582102 - RNA, 19 nt, Artificial Sequence
  Description of Artificial Sequence: Synthetic oligonucleotide
gguaaaugacuggaaagcg

SEQ ID NO: 582103 - RNA, 19 nt, Artificial Sequence
  Description of Artificial Sequence: Synthetic oligonucleotide
ucuucauuccgugaggcaa

SEQ ID NO: 582104 - RNA, 19 nt, Artificial Sequence
  Description of Artificial Sequence: Synthetic oligonucleotide
augacauuaaucgcaauau

SEQ ID NO: 582105 - RNA, 19 nt, Artificial Sequence
  Description of Artificial Sequence: Synthetic oligonucleotide
guaaaugacuggaaagcgc

SEQ ID NO: 582106 - RNA, 19 nt, Artificial Sequence
  Description of Artificial Sequence: Synthetic oligonucleotide
gucguuauuagacuucaga

SEQ ID NO: 582107 - RNA, 19 nt, Artificial Sequence
  Description of Artificial Sequence: Synthetic oligonucleotide
agauguucgagguaucuuu

SEQ ID NO: 582108 - RNA, 19 nt, Artificial Sequence
  Description of Artificial Sequence: Synthetic oligonucleotide
uggaauacauggcuuccac

SEQ ID NO: 582109 - RNA, 19 nt, Artificial Sequence
  Description of Artificial Sequence: Synthetic oligonucleotide
gucaauguuuuggaaaggc

SEQ ID NO: 582110 - RNA, 19 nt, Artificial Sequence
  Description of Artificial Sequence: Synthetic oligonucleotide
aaaacaucaaucacucguu

SEQ ID NO: 582111 - RNA, 19 nt, Artificial Sequence
  Description of Artificial Sequence: Synthetic oligonucleotide
uggaauccauaacucuaag

SEQ ID NO: 582112 - RNA, 19 nt, Artificial Sequence
  Description of Artificial Sequence: Synthetic oligonucleotide
ucugggugcuguuucccgg

SEQ ID NO: 582113 - RNA, 19 nt, Artificial Sequence
  Description of Artificial Sequence: Synthetic oligonucleotide
cauaaugucuaacagugua

SEQ ID NO: 582114 - RNA, 19 nt, Artificial Sequence
  Description of Artificial Sequence: Synthetic oligonucleotide
agagaagaggagacaagcg

SEQ ID NO: 582115 - RNA, 19 nt, Artificial Sequence
  Description of Artificial Sequence: Synthetic oligonucleotide
uggaaagcgcgcucuaccc

SEQ ID NO: 582116 - RNA, 19 nt, Artificial Sequence
  Description of Artificial Sequence: Synthetic oligonucleotide
uuagagaaucagagggacu

SEQ ID NO: 582117 - RNA, 19 nt, Artificial Sequence
  Description of Artificial Sequence: Synthetic oligonucleotide
cacccguaaaacaucaauc

SEQ ID NO: 582118 - RNA, 19 nt, Artificial Sequence
  Description of Artificial Sequence: Synthetic oligonucleotide
aaucacccguaaaacauca

SEQ ID NO: 582119 - RNA, 19 nt, Artificial Sequence
  Description of Artificial Sequence: Synthetic oligonucleotide
cagaggaaugccauccagc

SEQ ID NO: 582120 - RNA, 19 nt, Artificial Sequence
  Description of Artificial Sequence: Synthetic oligonucleotide
aaaucaacggcaacgccaa

SEQ ID NO: 582121 - RNA, 19 nt, Artificial Sequence
  Description of Artificial Sequence: Synthetic oligonucleotide
gagauucccgcaucugugc

SEQ ID NO: 582122 - RNA, 19 nt, Artificial Sequence
  Description of Artificial Sequence: Synthetic oligonucleotide
ucauaaugucuaacagugu

SEQ ID NO: 582123 - RNA, 19 nt, Artificial Sequence
  Description of Artificial Sequence: Synthetic oligonucleotide
uggauugggaaucuucauu

SEQ ID NO: 582124 - RNA, 19 nt, Artificial Sequence
  Description of Artificial Sequence: Synthetic oligonucleotide
aguguaacccuuuccuggu

SEQ ID NO: 582125 - RNA, 19 nt, Artificial Sequence
  Description of Artificial Sequence: Synthetic oligonucleotide
aucaacucagcauggcgca

SEQ ID NO: 582126 - RNA, 19 nt, Artificial Sequence
  Description of Artificial Sequence: Synthetic oligonucleotide
ucuuucacccauucucacu

SEQ ID NO: 582127 - RNA, 19 nt, Artificial Sequence
  Description of Artificial Sequence: Synthetic oligonucleotide
ccugauugaauucugguuc

SEQ ID NO: 582128 - RNA, 19 nt, Artificial Sequence
  Description of Artificial Sequence: Synthetic oligonucleotide
gaagacuggaagccaggug

SEQ ID NO: 582129 - RNA, 19 nt, Artificial Sequence
  Description of Artificial Sequence: Synthetic oligonucleotide
ucauaaagggguuguuguc

SEQ ID NO: 582130 - RNA, 19 nt, Artificial Sequence
  Description of Artificial Sequence: Synthetic oligonucleotide
ggugcuggcaccauaacgc

SEQ ID NO: 582131 - RNA, 19 nt, Artificial Sequence
  Description of Artificial Sequence: Synthetic oligonucleotide
augaaaagcagagaaucaa

SEQ ID NO: 582132 - RNA, 19 nt, Artificial Sequence
  Description of Artificial Sequence: Synthetic oligonucleotide
auguucgagguaucuuuuc

SEQ ID NO: 582133 - RNA, 19 nt, Artificial Sequence
  Description of Artificial Sequence: Synthetic oligonucleotide
uuguaacacagauuuccaa

SEQ ID NO: 582134 - RNA, 19 nt, Artificial Sequence
  Description of Artificial Sequence: Synthetic oligonucleotide
uccaauacuugggauuuca

SEQ ID NO: 582135 - RNA, 19 nt, Artificial Sequence
  Description of Artificial Sequence: Synthetic oligonucleotide
agcacauuccuacacugau

SEQ ID NO: 582136 - RNA, 19 nt, Artificial Sequence
  Description of Artificial Sequence: Synthetic oligonucleotide
agaaaguggucuguaauaa

SEQ ID NO: 582137 - RNA, 19 nt, Artificial Sequence
  Description of Artificial Sequence: Synthetic oligonucleotide
ugcaugaaaugaagaggga

SEQ ID NO: 582138 - RNA, 19 nt, Artificial Sequence
  Description of Artificial Sequence: Synthetic oligonucleotide
gagauuucgcacagcauac

SEQ ID NO: 582139 - RNA, 19 nt, Artificial Sequence
  Description of Artificial Sequence: Synthetic oligonucleotide
uguuucccgguuacgguac

SEQ ID NO: 582140 - RNA, 19 nt, Artificial Sequence
  Description of Artificial Sequence: Synthetic oligonucleotide
cuaagucaaccugggaugc

SEQ ID NO: 582141 - RNA, 19 nt, Artificial Sequence
  Description of Artificial Sequence: Synthetic oligonucleotide
ucaaccugggaugcaaaca

SEQ ID NO: 582142 - RNA, 19 nt, Artificial Sequence
  Description of Artificial Sequence: Synthetic oligonucleotide
agcauacaccacccacugc

SEQ ID NO: 582143 - RNA, 19 nt, Artificial Sequence
  Description of Artificial Sequence: Synthetic oligonucleotide
auauagagaugucauccuu

SEQ ID NO: 582144 - RNA, 19 nt, Artificial Sequence
  Description of Artificial Sequence: Synthetic oligonucleotide
ugauuagcugaagacugga

SEQ ID NO: 582145 - RNA, 19 nt, Artificial Sequence
  Description of Artificial Sequence: Synthetic oligonucleotide
cuggaaagcgcgcucuacc

SEQ ID NO: 582146 - RNA, 19 nt, Artificial Sequence
  Description of Artificial Sequence: Synthetic oligonucleotide
ggaaucugaacauguugag

SEQ ID NO: 582147 - RNA, 19 nt, Artificial Sequence
  Description of Artificial Sequence: Synthetic oligonucleotide
aucugaacauguugagaug

SEQ ID NO: 582148 - RNA, 19 nt, Artificial Sequence
  Description of Artificial Sequence: Synthetic oligonucleotide
acgccaauuguauccaggu

SEQ ID NO: 582149 - RNA, 19 nt, Artificial Sequence
  Description of Artificial Sequence: Synthetic oligonucleotide
cucuuagccgaaccugacg

SEQ ID NO: 582150 - RNA, 19 nt, Artificial Sequence
  Description of Artificial Sequence: Synthetic oligonucleotide
guuuauuacuacaauggua

SEQ ID NO: 582151 - RNA, 19 nt, Artificial Sequence
  Description of Artificial Sequence: Synthetic oligonucleotide
gaugagagauccaugagau

SEQ ID NO: 582152 - RNA, 19 nt, Artificial Sequence
  Description of Artificial Sequence: Synthetic oligonucleotide
auccauaacucuaagucaa

SEQ ID NO: 582153 - RNA, 19 nt, Artificial Sequence
  Description of Artificial Sequence: Synthetic oligonucleotide
agcuuggcuaucauaaugu

SEQ ID NO: 582154 - RNA, 19 nt, Artificial Sequence
  Description of Artificial Sequence: Synthetic oligonucleotide
ggaagaucguucugggugc

SEQ ID NO: 582155 - RNA, 19 nt, Artificial Sequence
  Description of Artificial Sequence: Synthetic oligonucleotide
gauuuuggcuguugucuuc

SEQ ID NO: 582156 - RNA, 19 nt, Artificial Sequence
  Description of Artificial Sequence: Synthetic oligonucleotide
agauggaaucugaacaugu

SEQ ID NO: 582157 - RNA, 19 nt, Artificial Sequence
  Description of Artificial Sequence: Synthetic oligonucleotide
gaugucguuauuagacuuc

SEQ ID NO: 582158 - RNA, 19 nt, Artificial Sequence
  Description of Artificial Sequence: Synthetic oligonucleotide
aaacuggaggccacaacga

SEQ ID NO: 582159 - RNA, 19 nt, Artificial Sequence
  Description of Artificial Sequence: Synthetic oligonucleotide
agacgaaugagaugagauu

SEQ ID NO: 582160 - RNA, 19 nt, Artificial Sequence
  Description of Artificial Sequence: Synthetic oligonucleotide
ugucguuauuagacuucag

SEQ ID NO: 582161 - RNA, 19 nt, Artificial Sequence
  Description of Artificial Sequence: Synthetic oligonucleotide
guaaggcagacaguuacac

SEQ ID NO: 582162 - RNA, 19 nt, Artificial Sequence
  Description of Artificial Sequence: Synthetic oligonucleotide
caagguaaaugacuggaaa

SEQ ID NO: 582163 - RNA, 19 nt, Artificial Sequence
  Description of Artificial Sequence: Synthetic oligonucleotide
caacgaaaagcugucaaca

SEQ ID NO: 582164 - RNA, 19 nt, Artificial Sequence
  Description of Artificial Sequence: Synthetic oligonucleotide
gugauuagcugaagacugg

SEQ ID NO: 582165 - RNA, 19 nt, Artificial Sequence
  Description of Artificial Sequence: Synthetic oligonucleotide
gaagcauacuugccaucug

SEQ ID NO: 582166 - RNA, 19 nt, Artificial Sequence
  Description of Artificial Sequence: Synthetic oligonucleotide
agcaagacauaaagaguuc

SEQ ID NO: 582167 - RNA, 19 nt, Artificial Sequence
  Description of Artificial Sequence: Synthetic oligonucleotide
cucugaagucaacuuuagc

SEQ ID NO: 582168 - RNA, 19 nt, Artificial Sequence
  Description of Artificial Sequence: Synthetic oligonucleotide
ggggaugucguuauuagac

SEQ ID NO: 582169 - RNA, 19 nt, Artificial Sequence
  Description of Artificial Sequence: Synthetic oligonucleotide
auuccgugaggcaauguug

SEQ ID NO: 582170 - RNA, 19 nt, Artificial Sequence
  Description of Artificial Sequence: Synthetic oligonucleotide
uccguguuggaugucauuu

SEQ ID NO: 582171 - RNA, 19 nt, Artificial Sequence
  Description of Artificial Sequence: Synthetic oligonucleotide
cauguucuuucacccauuc

SEQ ID NO: 582172 - RNA, 19 nt, Artificial Sequence
  Description of Artificial Sequence: Synthetic oligonucleotide
aaguaggggcuaugcccuc

SEQ ID NO: 582173 - RNA, 19 nt, Artificial Sequence
  Description of Artificial Sequence: Synthetic oligonucleotide
agaauuaaucacagugaga

SEQ ID NO: 582174 - RNA, 19 nt, Artificial Sequence
  Description of Artificial Sequence: Synthetic oligonucleotide
aacggcaacgccaauugua

SEQ ID NO: 582175 - RNA, 19 nt, Artificial Sequence
  Description of Artificial Sequence: Synthetic oligonucleotide
uucagcagagaugcgucug

SEQ ID NO: 582176 - RNA, 19 nt, Artificial Sequence
  Description of Artificial Sequence: Synthetic oligonucleotide
cugauugaauucugguuca

SEQ ID NO: 582177 - RNA, 19 nt, Artificial Sequence
  Description of Artificial Sequence: Synthetic oligonucleotide
cuuagccgaaccugacgag

SEQ ID NO: 582178 - RNA, 19 nt, Artificial Sequence
  Description of Artificial Sequence: Synthetic oligonucleotide
ugaagacuggaagccaggu

SEQ ID NO: 582179 - RNA, 19 nt, Artificial Sequence
  Description of Artificial Sequence: Synthetic oligonucleotide
cauaacucuaagucaaccu

SEQ ID NO: 582180 - RNA, 19 nt, Artificial Sequence
  Description of Artificial Sequence: Synthetic oligonucleotide
ucacucguuccaucaggcc

SEQ ID NO: 582181 - RNA, 19 nt, Artificial Sequence
  Description of Artificial Sequence: Synthetic oligonucleotide
ugucagcuguucgucaccc

SEQ ID NO: 582182 - RNA, 19 nt, Artificial Sequence
  Description of Artificial Sequence: Synthetic oligonucleotide
ucgagguaucuuuuccagu

SEQ ID NO: 582183 - RNA, 19 nt, Artificial Sequence
  Description of Artificial Sequence: Synthetic oligonucleotide
uuggaauacauggcuucca

SEQ ID NO: 582184 - RNA, 19 nt, Artificial Sequence
  Description of Artificial Sequence: Synthetic oligonucleotide
uuccaguuacaugaaucac

SEQ ID NO: 582185 - RNA, 19 nt, Artificial Sequence
  Description of Artificial Sequence: Synthetic oligonucleotide
gacgaaugagaugagauuu

SEQ ID NO: 582186 - RNA, 19 nt, Artificial Sequence
  Description of Artificial Sequence: Synthetic oligonucleotide
caaucacucguuccaucag

SEQ ID NO: 582187 - RNA, 19 nt, Artificial Sequence
  Description of Artificial Sequence: Synthetic oligonucleotide
ugguucacagagcacucua

SEQ ID NO: 582188 - RNA, 19 nt, Artificial Sequence
  Description of Artificial Sequence: Synthetic oligonucleotide
agcgugaguagauuucuuu

SEQ ID NO: 582189 - RNA, 19 nt, Artificial Sequence
  Description of Artificial Sequence: Synthetic oligonucleotide
gaaagcgcgcucuacccaa

SEQ ID NO: 582190 - RNA, 19 nt, Artificial Sequence
  Description of Artificial Sequence: Synthetic oligonucleotide
gaaucacccguaaaacauc

SEQ ID NO: 582191 - RNA, 19 nt, Artificial Sequence
  Description of Artificial Sequence: Synthetic oligonucleotide
acucguuccaucaggccag

SEQ ID NO: 582192 - RNA, 19 nt, Artificial Sequence
  Description of Artificial Sequence: Synthetic oligonucleotide
cacucguuccaucaggcca

SEQ ID NO: 582193 - RNA, 19 nt, Artificial Sequence
  Description of Artificial Sequence: Synthetic oligonucleotide
augucguuauuagacuuca

SEQ ID NO: 582194 - RNA, 19 nt, Artificial Sequence
  Description of Artificial Sequence: Synthetic oligonucleotide
guucgaugucaccuucugc

SEQ ID NO: 582195 - RNA, 19 nt, Artificial Sequence
  Description of Artificial Sequence: Synthetic oligonucleotide
caccauaacgcccgacagc

SEQ ID NO: 582196 - RNA, 19 nt, Artificial Sequence
  Description of Artificial Sequence: Synthetic oligonucleotide
gggugcuggcaccauaacg

SEQ ID NO: 582197 - RNA, 19 nt, Artificial Sequence
  Description of Artificial Sequence: Synthetic oligonucleotide
caggauuaagagaugugaa

SEQ ID NO: 582198 - RNA, 19 nt, Artificial Sequence
  Description of Artificial Sequence: Synthetic oligonucleotide
ugcaaacaguuaagugcca

SEQ ID NO: 582199 - RNA, 19 nt, Artificial Sequence
  Description of Artificial Sequence: Synthetic oligonucleotide
ggagacaagcgacaggaga

SEQ ID NO: 582200 - RNA, 19 nt, Artificial Sequence
  Description of Artificial Sequence: Synthetic oligonucleotide
acagcauacaccacccacu

SEQ ID NO: 582201 - RNA, 19 nt, Artificial Sequence
  Description of Artificial Sequence: Synthetic oligonucleotide
aggguagaaaagagauugg

SEQ ID NO: 582202 - RNA, 19 nt, Artificial Sequence
  Description of Artificial Sequence: Synthetic oligonucleotide
aagauguucgagguaucuu

SEQ ID NO: 582203 - RNA, 19 nt, Artificial Sequence
  Description of Artificial Sequence: Synthetic oligonucleotide
acgaggcggagagaagagc

SEQ ID NO: 582204 - RNA, 19 nt, Artificial Sequence
  Description of Artificial Sequence: Synthetic oligonucleotide
uuacuucaagugcccgcca

SEQ ID NO: 582205 - RNA, 19 nt, Artificial Sequence
  Description of Artificial Sequence: Synthetic oligonucleotide
agaaccaaaucaacggcaa

SEQ ID NO: 582206 - RNA, 19 nt, Artificial Sequence
  Description of Artificial Sequence: Synthetic oligonucleotide
uuaaacccuucagccaugu

SEQ ID NO: 582207 - RNA, 19 nt, Artificial Sequence
  Description of Artificial Sequence: Synthetic oligonucleotide
aucagaggaaugccaucca

SEQ ID NO: 582208 - RNA, 19 nt, Artificial Sequence
  Description of Artificial Sequence: Synthetic oligonucleotide
acagcgugaguagauuucu

SEQ ID NO: 582209 - RNA, 19 nt, Artificial Sequence
  Description of Artificial Sequence: Synthetic oligonucleotide
ugccaaguaggggcuaugc

SEQ ID NO: 582210 - RNA, 19 nt, Artificial Sequence
  Description of Artificial Sequence: Synthetic oligonucleotide
auaguccacuuguagcuua

SEQ ID NO: 582211 - RNA, 19 nt, Artificial Sequence
  Description of Artificial Sequence: Synthetic oligonucleotide
auggauugggaaucuucau

SEQ ID NO: 582212 - RNA, 19 nt, Artificial Sequence
  Description of Artificial Sequence: Synthetic oligonucleotide
uucccgguuacgguacucc

SEQ ID NO: 582213 - RNA, 19 nt, Artificial Sequence
  Description of Artificial Sequence: Synthetic oligonucleotide
gauccaaucaaggguccca

SEQ ID NO: 582214 - RNA, 19 nt, Artificial Sequence
  Description of Artificial Sequence: Synthetic oligonucleotide
acgaaagagaagaaccaaa

SEQ ID NO: 582215 - RNA, 19 nt, Artificial Sequence
  Description of Artificial Sequence: Synthetic oligonucleotide
caagcgacaggagaggaga

SEQ ID NO: 582216 - RNA, 19 nt, Artificial Sequence
  Description of Artificial Sequence: Synthetic oligonucleotide
auaaucaagaacggccauu

SEQ ID NO: 582217 - RNA, 19 nt, Artificial Sequence
  Description of Artificial Sequence: Synthetic oligonucleotide
uacaagcauuccgaagaca

SEQ ID NO: 582218 - RNA, 19 nt, Artificial Sequence
  Description of Artificial Sequence: Synthetic oligonucleotide
guagcccaaaagcuccgug

SEQ ID NO: 582219 - RNA, 19 nt, Artificial Sequence
  Description of Artificial Sequence: Synthetic oligonucleotide
acagaacguccagaagccg

SEQ ID NO: 582220 - RNA, 19 nt, Artificial Sequence
  Description of Artificial Sequence: Synthetic oligonucleotide
cagaacguccagaagccga

SEQ ID NO: 582221 - RNA, 19 nt, Artificial Sequence
  Description of Artificial Sequence: Synthetic oligonucleotide
auguuuuggaaaggcagaa

SEQ ID NO: 582222 - RNA, 19 nt, Artificial Sequence
  Description of Artificial Sequence: Synthetic oligonucleotide
uccacucgaaguucacgaa

SEQ ID NO: 582223 - RNA, 19 nt, Artificial Sequence
  Description of Artificial Sequence: Synthetic oligonucleotide
ugacuggaaagcgcgcucu

SEQ ID NO: 582224 - RNA, 19 nt, Artificial Sequence
  Description of Artificial Sequence: Synthetic oligonucleotide
agccgaaccugacgaggcg

SEQ ID NO: 582225 - RNA, 19 nt, Artificial Sequence
  Description of Artificial Sequence: Synthetic oligonucleotide
guuaagugccacauguucu

SEQ ID NO: 582226 - RNA, 19 nt, Artificial Sequence
  Description of Artificial Sequence: Synthetic oligonucleotide
ugcagagaugagagaucca

SEQ ID NO: 582227 - RNA, 19 nt, Artificial Sequence
  Description of Artificial Sequence: Synthetic oligonucleotide
uccgugaggcaauguugcc

SEQ ID NO: 582228 - RNA, 19 nt, Artificial Sequence
  Description of Artificial Sequence: Synthetic oligonucleotide
agccgaaugguagccagug

SEQ ID NO: 582229 - RNA, 19 nt, Artificial Sequence
  Description of Artificial Sequence: Synthetic oligonucleotide
caagggucccagucuuugc

SEQ ID NO: 582230 - RNA, 19 nt, Artificial Sequence
  Description of Artificial Sequence: Synthetic oligonucleotide
agaucguucugggugcugu

SEQ ID NO: 582231 - RNA, 19 nt, Artificial Sequence
  Description of Artificial Sequence: Synthetic oligonucleotide
uccagcucauucacuuuau

SEQ ID NO: 582232 - RNA, 19 nt, Artificial Sequence
  Description of Artificial Sequence: Synthetic oligonucleotide
acgcccgacagccgggagg

SEQ ID NO: 582233 - RNA, 19 nt, Artificial Sequence
  Description of Artificial Sequence: Synthetic oligonucleotide
aaggaugcacaggauccaa

SEQ ID NO: 582234 - RNA, 19 nt, Artificial Sequence
  Description of Artificial Sequence: Synthetic oligonucleotide
agagauugguagaauuaau

SEQ ID NO: 582235 - RNA, 19 nt, Artificial Sequence
  Description of Artificial Sequence: Synthetic oligonucleotide
cauguguucgaugucaccu

SEQ ID NO: 582236 - RNA, 19 nt, Artificial Sequence
  Description of Artificial Sequence: Synthetic oligonucleotide
cagagaugcgucugccaac

SEQ ID NO: 582237 - RNA, 19 nt, Artificial Sequence
  Description of Artificial Sequence: Synthetic oligonucleotide
agcccaaaagcuccguguu

SEQ ID NO: 582238 - RNA, 19 nt, Artificial Sequence
  Description of Artificial Sequence: Synthetic oligonucleotide
cgaggcggagagaagagcg

SEQ ID NO: 582239 - RNA, 19 nt, Artificial Sequence
  Description of Artificial Sequence: Synthetic oligonucleotide
guuacaugaaucacccgua

SEQ ID NO: 582240 - RNA, 19 nt, Artificial Sequence
  Description of Artificial Sequence: Synthetic oligonucleotide
cuggaugauuuaagcaaga

SEQ ID NO: 582241 - RNA, 19 nt, Artificial Sequence
  Description of Artificial Sequence: Synthetic oligonucleotide
cagacgaaugagaugagau

SEQ ID NO: 582242 - RNA, 19 nt, Artificial Sequence
  Description of Artificial Sequence: Synthetic oligonucleotide
ucaacagcgugaguagauu

SEQ ID NO: 582243 - RNA, 19 nt, Artificial Sequence
  Description of Artificial Sequence: Synthetic oligonucleotide
gcaccauaacgcccgacag

SEQ ID NO: 582244 - RNA, 19 nt, Artificial Sequence
  Description of Artificial Sequence: Synthetic oligonucleotide
ugcgucugccaaccccugc

SEQ ID NO: 582245 - RNA, 19 nt, Artificial Sequence
  Description of Artificial Sequence: Synthetic oligonucleotide
gaagauguucgagguaucu

SEQ ID NO: 582246 - RNA, 19 nt, Artificial Sequence
  Description of Artificial Sequence: Synthetic oligonucleotide
acuccuugaagagcgcggu

SEQ ID NO: 582247 - RNA, 19 nt, Artificial Sequence
  Description of Artificial Sequence: Synthetic oligonucleotide
ucgaugucaccuucugcuu

SEQ ID NO: 582248 - RNA, 19 nt, Artificial Sequence
  Description of Artificial Sequence: Synthetic oligonucleotide
uaagucaaccugggaugca

SEQ ID NO: 582249 - RNA, 19 nt, Artificial Sequence
  Description of Artificial Sequence: Synthetic oligonucleotide
ccauaacucuaagucaacc

SEQ ID NO: 582250 - RNA, 19 nt, Artificial Sequence
  Description of Artificial Sequence: Synthetic oligonucleotide
gagaaucagagggacugaa

SEQ ID NO: 582251 - RNA, 19 nt, Artificial Sequence
  Description of Artificial Sequence: Synthetic oligonucleotide
guaucuuuuccaguuacau

SEQ ID NO: 582252 - RNA, 19 nt, Artificial Sequence
  Description of Artificial Sequence: Synthetic oligonucleotide
agcuguucgucacccacua

SEQ ID NO: 582253 - RNA, 19 nt, Artificial Sequence
  Description of Artificial Sequence: Synthetic oligonucleotide
aucaacggcaacgccaauu

SEQ ID NO: 582254 - RNA, 19 nt, Artificial Sequence
  Description of Artificial Sequence: Synthetic oligonucleotide
agggguuguugucaucgau

SEQ ID NO: 582255 - RNA, 19 nt, Artificial Sequence
  Description of Artificial Sequence: Synthetic oligonucleotide
ucccgguuacgguacuccu

SEQ ID NO: 582256 - RNA, 19 nt, Artificial Sequence
  Description of Artificial Sequence: Synthetic oligonucleotide
ggcaccauaacgcccgaca

SEQ ID NO: 582257 - RNA, 19 nt, Artificial Sequence
  Description of Artificial Sequence: Synthetic oligonucleotide
gauccaugagauggaaucu

SEQ ID NO: 582258 - RNA, 19 nt, Artificial Sequence
  Description of Artificial Sequence: Synthetic oligonucleotide
cccguaaaacaucaaucac

SEQ ID NO: 582259 - RNA, 19 nt, Artificial Sequence
  Description of Artificial Sequence: Synthetic oligonucleotide
agugagaaacuuacuucaa

SEQ ID NO: 582260 - RNA, 19 nt, Artificial Sequence
  Description of Artificial Sequence: Synthetic oligonucleotide
uucgcacagcauacaccac

SEQ ID NO: 582261 - RNA, 19 nt, Artificial Sequence
  Description of Artificial Sequence: Synthetic oligonucleotide
gaugcgucugccaaccccu

SEQ ID NO: 582262 - RNA, 19 nt, Artificial Sequence
  Description of Artificial Sequence: Synthetic oligonucleotide
agauuucgcacagcauaca

SEQ ID NO: 582263 - RNA, 19 nt, Artificial Sequence
  Description of Artificial Sequence: Synthetic oligonucleotide
aacgcccgacagccgggag

SEQ ID NO: 582264 - RNA, 19 nt, Artificial Sequence
  Description of Artificial Sequence: Synthetic oligonucleotide
auaacgcccgacagccggg

SEQ ID NO: 582265 - RNA, 19 nt, Artificial Sequence
  Description of Artificial Sequence: Synthetic oligonucleotide
agagaaucagagggacuga

SEQ ID NO: 582266 - RNA, 19 nt, Artificial Sequence
  Description of Artificial Sequence: Synthetic oligonucleotide
caacgccaauuguauccag

SEQ ID NO: 582267 - RNA, 19 nt, Artificial Sequence
  Description of Artificial Sequence: Synthetic oligonucleotide
gcgcgcucuacccaagggg

SEQ ID NO: 582268 - RNA, 19 nt, Artificial Sequence
  Description of Artificial Sequence: Synthetic oligonucleotide
aacggccauucugacucug

SEQ ID NO: 582269 - RNA, 19 nt, Artificial Sequence
  Description of Artificial Sequence: Synthetic oligonucleotide
cugaaacauucugugauua

SEQ ID NO: 582270 - RNA, 19 nt, Artificial Sequence
  Description of Artificial Sequence: Synthetic oligonucleotide
aagaucguucugggugcug

SEQ ID NO: 582271 - RNA, 19 nt, Artificial Sequence
  Description of Artificial Sequence: Synthetic oligonucleotide
acggcaacgccaauuguau

SEQ ID NO: 582272 - RNA, 19 nt, Artificial Sequence
  Description of Artificial Sequence: Synthetic oligonucleotide
cgggcuuuucagaaagugg

SEQ ID NO: 582273 - RNA, 19 nt, Artificial Sequence
  Description of Artificial Sequence: Synthetic oligonucleotide
cugacgaggcggagagaag

SEQ ID NO: 582274 - RNA, 19 nt, Artificial Sequence
  Description of Artificial Sequence: Synthetic oligonucleotide
uaaucgcaauauugagguu

SEQ ID NO: 582275 - RNA, 19 nt, Artificial Sequence
  Description of Artificial Sequence: Synthetic oligonucleotide
cugugauuagcugaagacu

SEQ ID NO: 582276 - RNA, 19 nt, Artificial Sequence
  Description of Artificial Sequence: Synthetic oligonucleotide
agaacguccagaagccgaa

SEQ ID NO: 582277 - RNA, 19 nt, Artificial Sequence
  Description of Artificial Sequence: Synthetic oligonucleotide
uccgggcuuuucagaaagu

SEQ ID NO: 582278 - RNA, 19 nt, Artificial Sequence
  Description of Artificial Sequence: Synthetic oligonucleotide
ugggugcuggcaccauaac

SEQ ID NO: 582279 - RNA, 19 nt, Artificial Sequence
  Description of Artificial Sequence: Synthetic oligonucleotide
gaaccugacgaggcggaga

SEQ ID NO: 582280 - RNA, 19 nt, Artificial Sequence
  Description of Artificial Sequence: Synthetic oligonucleotide
guugagaugaagaggucau

SEQ ID NO: 582281 - RNA, 19 nt, Artificial Sequence
  Description of Artificial Sequence: Synthetic oligonucleotide
ccaaaucaacggcaacgcc

SEQ ID NO: 582282 - RNA, 19 nt, Artificial Sequence
  Description of Artificial Sequence: Synthetic oligonucleotide
aaucaacggcaacgccaau

SEQ ID NO: 582283 - RNA, 19 nt, Artificial Sequence
  Description of Artificial Sequence: Synthetic oligonucleotide
cuguuucccgguuacggua

SEQ ID NO: 582284 - RNA, 19 nt, Artificial Sequence
  Description of Artificial Sequence: Synthetic oligonucleotide
cacgaaagagaagaaccaa

SEQ ID NO: 582285 - RNA, 19 nt, Artificial Sequence
  Description of Artificial Sequence: Synthetic oligonucleotide
ccgguuacgguacuccuug

SEQ ID NO: 582286 - RNA, 19 nt, Artificial Sequence
  Description of Artificial Sequence: Synthetic oligonucleotide
gagaugcgucugccaaccc

SEQ ID NO: 582287 - RNA, 19 nt, Artificial Sequence
  Description of Artificial Sequence: Synthetic oligonucleotide
aguucacgaaagagaagaa

SEQ ID NO: 582288 - RNA, 19 nt, Artificial Sequence
  Description of Artificial Sequence: Synthetic oligonucleotide
aucgcaauauugagguuuu

SEQ ID NO: 582289 - RNA, 19 nt, Artificial Sequence
  Description of Artificial Sequence: Synthetic oligonucleotide
agcauuccgaagacaucug

SEQ ID NO: 582290 - RNA, 19 nt, Artificial Sequence
  Description of Artificial Sequence: Synthetic oligonucleotide
ggcagacaguuacacuuac

SEQ ID NO: 582291 - RNA, 19 nt, Artificial Sequence
  Description of Artificial Sequence: Synthetic oligonucleotide
acgaaugagaugagauuua

SEQ ID NO: 582292 - RNA, 19 nt, Artificial Sequence
  Description of Artificial Sequence: Synthetic oligonucleotide
cucacucuuagccgaaccu

SEQ ID NO: 582293 - RNA, 19 nt, Artificial Sequence
  Description of Artificial Sequence: Synthetic oligonucleotide
uccaaaggacagggcucag

SEQ ID NO: 582294 - RNA, 19 nt, Artificial Sequence
  Description of Artificial Sequence: Synthetic oligonucleotide
aguaggggcuaugcccuca

SEQ ID NO: 582295 - RNA, 19 nt, Artificial Sequence
  Description of Artificial Sequence: Synthetic oligonucleotide
cacauguucuuucacccau

SEQ ID NO: 582296 - RNA, 19 nt, Artificial Sequence
  Description of Artificial Sequence: Synthetic oligonucleotide
gcauuccgaagacaucuga

SEQ ID NO: 582297 - RNA, 19 nt, Artificial Sequence
  Description of Artificial Sequence: Synthetic oligonucleotide
auccagguuccugauugaa

SEQ ID NO: 582298 - RNA, 19 nt, Artificial Sequence
  Description of Artificial Sequence: Synthetic oligonucleotide
guagccagugcuuccuuau

SEQ ID NO: 582299 - RNA, 19 nt, Artificial Sequence
  Description of Artificial Sequence: Synthetic oligonucleotide
gccgaaccugacgaggcgg

SEQ ID NO: 582300 - RNA, 19 nt, Artificial Sequence
  Description of Artificial Sequence: Synthetic oligonucleotide
gcgugaguagauuucuuua

SEQ ID NO: 582301 - RNA, 19 nt, Artificial Sequence
  Description of Artificial Sequence: Synthetic oligonucleotide
ccauguguucgaugucacc

SEQ ID NO: 582302 - RNA, 19 nt, Artificial Sequence
  Description of Artificial Sequence: Synthetic oligonucleotide
cucaacagcgugaguagau

SEQ ID NO: 582303 - RNA, 19 nt, Artificial Sequence
  Description of Artificial Sequence: Synthetic oligonucleotide
caacuccgggcuuuucaga

SEQ ID NO: 582304 - RNA, 19 nt, Artificial Sequence
  Description of Artificial Sequence: Synthetic oligonucleotide
gcugagagauucccgcauc

SEQ ID NO: 582305 - RNA, 19 nt, Artificial Sequence
  Description of Artificial Sequence: Synthetic oligonucleotide
ccgacagccgggagggugg

SEQ ID NO: 582306 - RNA, 19 nt, Artificial Sequence
  Description of Artificial Sequence: Synthetic oligonucleotide
gguuacgguacuccuugaa

SEQ ID NO: 582307 - RNA, 19 nt, Artificial Sequence
  Description of Artificial Sequence: Synthetic oligonucleotide
uuccaauacuugggauuuc

SEQ ID NO: 582308 - RNA, 19 nt, Artificial Sequence
  Description of Artificial Sequence: Synthetic oligonucleotide
cauuccgugaggcaauguu

SEQ ID NO: 582309 - RNA, 19 nt, Artificial Sequence
  Description of Artificial Sequence: Synthetic oligonucleotide
gauguucgagguaucuuuu

SEQ ID NO: 582310 - RNA, 19 nt, Artificial Sequence
  Description of Artificial Sequence: Synthetic oligonucleotide
uaacgcccgacagccggga

SEQ ID NO: 582311 - RNA, 19 nt, Artificial Sequence
  Description of Artificial Sequence: Synthetic oligonucleotide
ggauccaaucaaggguccc

SEQ ID NO: 582312 - RNA, 19 nt, Artificial Sequence
  Description of Artificial Sequence: Synthetic oligonucleotide
uuucccgguuacgguacuc

SEQ ID NO: 582313 - RNA, 19 nt, Artificial Sequence
  Description of Artificial Sequence: Synthetic oligonucleotide
gccacaacgaaaagcuguc

SEQ ID NO: 582314 - RNA, 19 nt, Artificial Sequence
  Description of Artificial Sequence: Synthetic oligonucleotide
cacuagcuuggcuaucaua

SEQ ID NO: 582315 - RNA, 19 nt, Artificial Sequence
  Description of Artificial Sequence: Synthetic oligonucleotide
gugcuguuucccgguuacg

SEQ ID NO: 582316 - RNA, 19 nt, Artificial Sequence
  Description of Artificial Sequence: Synthetic oligonucleotide
gggaugucguuauuagacu

SEQ ID NO: 582317 - RNA, 19 nt, Artificial Sequence
  Description of Artificial Sequence: Synthetic oligonucleotide
gcgagagaagaggagacaa

SEQ ID NO: 582318 - RNA, 19 nt, Artificial Sequence
  Description of Artificial Sequence: Synthetic oligonucleotide
gauuuccaaucagacgaau

SEQ ID NO: 582319 - RNA, 19 nt, Artificial Sequence
  Description of Artificial Sequence: Synthetic oligonucleotide
gguggcauccugggcgccg

SEQ ID NO: 582320 - RNA, 19 nt, Artificial Sequence
  Description of Artificial Sequence: Synthetic oligonucleotide
cagugagauuucgcacagc

SEQ ID NO: 582321 - RNA, 19 nt, Artificial Sequence
  Description of Artificial Sequence: Synthetic oligonucleotide
ggccacaacgaaaagcugu

SEQ ID NO: 582322 - RNA, 19 nt, Artificial Sequence
  Description of Artificial Sequence: Synthetic oligonucleotide
ggaaaugagucaugucaau

SEQ ID NO: 582323 - RNA, 19 nt, Artificial Sequence
  Description of Artificial Sequence: Synthetic oligonucleotide
cuucagcagagaugcgucu

SEQ ID NO: 582324 - RNA, 19 nt, Artificial Sequence
  Description of Artificial Sequence: Synthetic oligonucleotide
aggaugcacaggauccaau

SEQ ID NO: 582325 - RNA, 19 nt, Artificial Sequence
  Description of Artificial Sequence: Synthetic oligonucleotide
gcaacgccaauuguaucca

SEQ ID NO: 582326 - RNA, 19 nt, Artificial Sequence
  Description of Artificial Sequence: Synthetic oligonucleotide
caacagcgugaguagauuu

SEQ ID NO: 582327 - RNA, 19 nt, Artificial Sequence
  Description of Artificial Sequence: Synthetic oligonucleotide
cacucacucuuagccgaac

SEQ ID NO: 582328 - RNA, 19 nt, Artificial Sequence
  Description of Artificial Sequence: Synthetic oligonucleotide
gagggaggguucucaaauu

SEQ ID NO: 582329 - RNA, 19 nt, Artificial Sequence
  Description of Artificial Sequence: Synthetic oligonucleotide
ucgcaauauugagguuuuc

SEQ ID NO: 582330 - RNA, 19 nt, Artificial Sequence
  Description of Artificial Sequence: Synthetic oligonucleotide
guaggggcuaugcccucaa

SEQ ID NO: 582331 - RNA, 19 nt, Artificial Sequence
  Description of Artificial Sequence: Synthetic oligonucleotide
agcugucaacaaagagucu

SEQ ID NO: 582332 - RNA, 19 nt, Artificial Sequence
  Description of Artificial Sequence: Synthetic oligonucleotide
ccguguuggaugucauuuc

SEQ ID NO: 582333 - RNA, 19 nt, Artificial Sequence
  Description of Artificial Sequence: Synthetic oligonucleotide
gggaugcaaacaguuaagu

SEQ ID NO: 582334 - RNA, 19 nt, Artificial Sequence
  Description of Artificial Sequence: Synthetic oligonucleotide
ccauaacgcccgacagccg

SEQ ID NO: 582335 - RNA, 19 nt, Artificial Sequence
  Description of Artificial Sequence: Synthetic oligonucleotide
ccugacgaggcggagagaa

SEQ ID NO: 582336 - RNA, 19 nt, Artificial Sequence
  Description of Artificial Sequence: Synthetic oligonucleotide
cugaaaggaugcacaggau

SEQ ID NO: 582337 - RNA, 19 nt, Artificial Sequence
  Description of Artificial Sequence: Synthetic oligonucleotide
gggcugagagauucccgca

SEQ ID NO: 582338 - RNA, 19 nt, Artificial Sequence
  Description of Artificial Sequence: Synthetic oligonucleotide
gaagaucguucugggugcu

SEQ ID NO: 582339 - RNA, 19 nt, Artificial Sequence
  Description of Artificial Sequence: Synthetic oligonucleotide
aucacccguaaaacaucaa

SEQ ID NO: 582340 - RNA, 19 nt, Artificial Sequence
  Description of Artificial Sequence: Synthetic oligonucleotide
ggaggguucucaaauuaau

SEQ ID NO: 582341 - RNA, 19 nt, Artificial Sequence
  Description of Artificial Sequence: Synthetic oligonucleotide
cauacaccacccacugcau

SEQ ID NO: 582342 - RNA, 19 nt, Artificial Sequence
  Description of Artificial Sequence: Synthetic oligonucleotide
ucguuccaucaggccagga

SEQ ID NO: 582343 - RNA, 19 nt, Artificial Sequence
  Description of Artificial Sequence: Synthetic oligonucleotide
ccacucgaaguucacgaaa

SEQ ID NO: 582344 - RNA, 19 nt, Artificial Sequence
  Description of Artificial Sequence: Synthetic oligonucleotide
cccgccagaguucagaaau

SEQ ID NO: 582345 - RNA, 19 nt, Artificial Sequence
  Description of Artificial Sequence: Synthetic oligonucleotide
cuaugacauuaaucgcaau

SEQ ID NO: 582346 - RNA, 19 nt, Artificial Sequence
  Description of Artificial Sequence: Synthetic oligonucleotide
caguuaagugccacauguu

SEQ ID NO: 582347 - RNA, 19 nt, Artificial Sequence
  Description of Artificial Sequence: Synthetic oligonucleotide
cagcuguucgucacccacu

SEQ ID NO: 582348 - RNA, 19 nt, Artificial Sequence
  Description of Artificial Sequence: Synthetic oligonucleotide
caucaaucacucguuccau

SEQ ID NO: 582349 - RNA, 19 nt, Artificial Sequence
  Description of Artificial Sequence: Synthetic oligonucleotide
cgcgcucuacccaagggga

SEQ ID NO: 582350 - RNA, 19 nt, Artificial Sequence
  Description of Artificial Sequence: Synthetic oligonucleotide
augcgucugccaaccccug

SEQ ID NO: 582351 - RNA, 19 nt, Artificial Sequence
  Description of Artificial Sequence: Synthetic oligonucleotide
guucgucacccacuagcuu

SEQ ID NO: 582352 - RNA, 19 nt, Artificial Sequence
  Description of Artificial Sequence: Synthetic oligonucleotide
ccgccagaguucagaaauc

SEQ ID NO: 582353 - RNA, 19 nt, Artificial Sequence
  Description of Artificial Sequence: Synthetic oligonucleotide
guuucccgguuacgguacu

SEQ ID NO: 582354 - RNA, 19 nt, Artificial Sequence
  Description of Artificial Sequence: Synthetic oligonucleotide
ggcugagagauucccgcau

SEQ ID NO: 582355 - RNA, 19 nt, Artificial Sequence
  Description of Artificial Sequence: Synthetic oligonucleotide
ccgaagacaucugaaacau

SEQ ID NO: 582356 - RNA, 19 nt, Artificial Sequence
  Description of Artificial Sequence: Synthetic oligonucleotide
ggcggagagaagagcgaga

SEQ ID NO: 582357 - RNA, 19 nt, Artificial Sequence
  Description of Artificial Sequence: Synthetic oligonucleotide
agugcccgccagaguucag

SEQ ID NO: 582358 - RNA, 19 nt, Artificial Sequence
  Description of Artificial Sequence: Synthetic oligonucleotide
gcucuacauuuccaauacu

SEQ ID NO: 582359 - RNA, 19 nt, Artificial Sequence
  Description of Artificial Sequence: Synthetic oligonucleotide
cgaaugagaugagauuuaa

SEQ ID NO: 582360 - RNA, 19 nt, Artificial Sequence
  Description of Artificial Sequence: Synthetic oligonucleotide
caacggcaacgccaauugu

SEQ ID NO: 582361 - RNA, 19 nt, Artificial Sequence
  Description of Artificial Sequence: Synthetic oligonucleotide
ccgaaccugacgaggcgga

SEQ ID NO: 582362 - RNA, 19 nt, Artificial Sequence
  Description of Artificial Sequence: Synthetic oligonucleotide
cgcaauauugagguuuucu

SEQ ID NO: 582363 - RNA, 19 nt, Artificial Sequence
  Description of Artificial Sequence: Synthetic oligonucleotide
gaacguccagaagccgaau

SEQ ID NO: 582364 - RNA, 19 nt, Artificial Sequence
  Description of Artificial Sequence: Synthetic oligonucleotide
guguaacccuuuccugguu

SEQ ID NO: 582365 - RNA, 19 nt, Artificial Sequence
  Description of Artificial Sequence: Synthetic oligonucleotide
caauuguauccagguuccu

SEQ ID NO: 582366 - RNA, 19 nt, Artificial Sequence
  Description of Artificial Sequence: Synthetic oligonucleotide
gcgcucuacccaaggggac

SEQ ID NO: 582367 - RNA, 19 nt, Artificial Sequence
  Description of Artificial Sequence: Synthetic oligonucleotide
cagcgugaguagauuucuu

SEQ ID NO: 582368 - RNA, 19 nt, Artificial Sequence
  Description of Artificial Sequence: Synthetic oligonucleotide
ccgggaggguggcauccug

SEQ ID NO: 582369 - RNA, 19 nt, Artificial Sequence
  Description of Artificial Sequence: Synthetic oligonucleotide
cagugacaacacagugcau

SEQ ID NO: 582370 - RNA, 19 nt, Artificial Sequence
  Description of Artificial Sequence: Synthetic oligonucleotide
ccacucacucuuagccgaa

SEQ ID NO: 582371 - RNA, 19 nt, Artificial Sequence
  Description of Artificial Sequence: Synthetic oligonucleotide
gcccgccagaguucagaaa

SEQ ID NO: 582372 - RNA, 19 nt, Artificial Sequence
  Description of Artificial Sequence: Synthetic oligonucleotide
ccgugaggcaauguugccu

SEQ ID NO: 582373 - RNA, 19 nt, Artificial Sequence
  Description of Artificial Sequence: Synthetic oligonucleotide
cgguuacgguacuccuuga

SEQ ID NO: 582374 - RNA, 19 nt, Artificial Sequence
  Description of Artificial Sequence: Synthetic oligonucleotide
cgccaauuguauccagguu

SEQ ID NO: 582375 - RNA, 19 nt, Artificial Sequence
  Description of Artificial Sequence: Synthetic oligonucleotide
gccgggaggguggcauccu

SEQ ID NO: 582376 - RNA, 19 nt, Artificial Sequence
  Description of Artificial Sequence: Synthetic oligonucleotide
ucuauauagauauuggucc

SEQ ID NO: 582377 - RNA, 19 nt, Artificial Sequence
  Description of Artificial Sequence: Synthetic oligonucleotide
ucuauaucaauuuauguca

SEQ ID NO: 582378 - RNA, 19 nt, Artificial Sequence
  Description of Artificial Sequence: Synthetic oligonucleotide
aucuauaucaauuuauguc

SEQ ID NO: 582379 - RNA, 19 nt, Artificial Sequence
  Description of Artificial Sequence: Synthetic oligonucleotide
aauuaagauaccuccuuac

SEQ ID NO: 582380 - RNA, 19 nt, Artificial Sequence
  Description of Artificial Sequence: Synthetic oligonucleotide
ugaacaguagcaaucaucc

SEQ ID NO: 582381 - RNA, 19 nt, Artificial Sequence
  Description of Artificial Sequence: Synthetic oligonucleotide
auaugcuaaauucauuccc

SEQ ID NO: 582382 - RNA, 19 nt, Artificial Sequence
  Description of Artificial Sequence: Synthetic oligonucleotide
aucagauuaagacauuuac

SEQ ID NO: 582383 - RNA, 19 nt, Artificial Sequence
  Description of Artificial Sequence: Synthetic oligonucleotide
agccguaccauauacaaac

SEQ ID NO: 582384 - RNA, 19 nt, Artificial Sequence
  Description of Artificial Sequence: Synthetic oligonucleotide
uucggaaaacaacagaccc

SEQ ID NO: 582385 - RNA, 19 nt, Artificial Sequence
  Description of Artificial Sequence: Synthetic oligonucleotide
uugaauaucucuacuaaac

SEQ ID NO: 582386 - RNA, 19 nt, Artificial Sequence
  Description of Artificial Sequence: Synthetic oligonucleotide
aucucuacuaaacugcacg

SEQ ID NO: 582387 - RNA, 19 nt, Artificial Sequence
  Description of Artificial Sequence: Synthetic oligonucleotide
auuguauaagcauauccag

SEQ ID NO: 582388 - RNA, 19 nt, Artificial Sequence
  Description of Artificial Sequence: Synthetic oligonucleotide
ucuaauuacaagcaucuau

SEQ ID NO: 582389 - RNA, 19 nt, Artificial Sequence
  Description of Artificial Sequence: Synthetic oligonucleotide
auuucggaaaacaacagac

SEQ ID NO: 582390 - RNA, 19 nt, Artificial Sequence
  Description of Artificial Sequence: Synthetic oligonucleotide
aaugacacagauuuugaau

SEQ ID NO: 582391 - RNA, 19 nt, Artificial Sequence
  Description of Artificial Sequence: Synthetic oligonucleotide
aaacuuuuggagagcaucc

SEQ ID NO: 582392 - RNA, 19 nt, Artificial Sequence
  Description of Artificial Sequence: Synthetic oligonucleotide
ucaauuuaugucaacacua

SEQ ID NO: 582393 - RNA, 19 nt, Artificial Sequence
  Description of Artificial Sequence: Synthetic oligonucleotide
uaucauguagcacuugcag

SEQ ID NO: 582394 - RNA, 19 nt, Artificial Sequence
  Description of Artificial Sequence: Synthetic oligonucleotide
uuaagguauacuauacugu

SEQ ID NO: 582395 - RNA, 19 nt, Artificial Sequence
  Description of Artificial Sequence: Synthetic oligonucleotide
uaaauuuaagguauacuau

SEQ ID NO: 582396 - RNA, 19 nt, Artificial Sequence
  Description of Artificial Sequence: Synthetic oligonucleotide
cuaugaaucacucuaaaga

SEQ ID NO: 582397 - RNA, 19 nt, Artificial Sequence
  Description of Artificial Sequence: Synthetic oligonucleotide
aaaggguaggagaugacac

SEQ ID NO: 582398 - RNA, 19 nt, Artificial Sequence
  Description of Artificial Sequence: Synthetic oligonucleotide
uucgucuaauaaaacagcc

SEQ ID NO: 582399 - RNA, 19 nt, Artificial Sequence
  Description of Artificial Sequence: Synthetic oligonucleotide
cagauuuugaaucauuaac

SEQ ID NO: 582400 - RNA, 19 nt, Artificial Sequence
  Description of Artificial Sequence: Synthetic oligonucleotide
aaacccgccagcuccaggg

SEQ ID NO: 582401 - RNA, 19 nt, Artificial Sequence
  Description of Artificial Sequence: Synthetic oligonucleotide
ugaauaucucuacuaaacu

SEQ ID NO: 582402 - RNA, 19 nt, Artificial Sequence
  Description of Artificial Sequence: Synthetic oligonucleotide
uaugacgagacaacaaacu

SEQ ID NO: 582403 - RNA, 19 nt, Artificial Sequence
  Description of Artificial Sequence: Synthetic oligonucleotide
acuaagcgauuguauaagc

SEQ ID NO: 582404 - RNA, 19 nt, Artificial Sequence
  Description of Artificial Sequence: Synthetic oligonucleotide
aauaacagccuguuuaauu

SEQ ID NO: 582405 - RNA, 19 nt, Artificial Sequence
  Description of Artificial Sequence: Synthetic oligonucleotide
aaaacagcuagccugccaa

SEQ ID NO: 582406 - RNA, 19 nt, Artificial Sequence
  Description of Artificial Sequence: Synthetic oligonucleotide
uuaagcauauuauggaauc

SEQ ID NO: 582407 - RNA, 19 nt, Artificial Sequence
  Description of Artificial Sequence: Synthetic oligonucleotide
uggaauagguuacccacgg

SEQ ID NO: 582408 - RNA, 19 nt, Artificial Sequence
  Description of Artificial Sequence: Synthetic oligonucleotide
cucuauauagauauugguc

SEQ ID NO: 582409 - RNA, 19 nt, Artificial Sequence
  Description of Artificial Sequence: Synthetic oligonucleotide
aacucaauccauucgaauu

SEQ ID NO: 582410 - RNA, 19 nt, Artificial Sequence
  Description of Artificial Sequence: Synthetic oligonucleotide
uuguaagaggugauaauca

SEQ ID NO: 582411 - RNA, 19 nt, Artificial Sequence
  Description of Artificial Sequence: Synthetic oligonucleotide
aaacuaagcgauuguauaa

SEQ ID NO: 582412 - RNA, 19 nt, Artificial Sequence
  Description of Artificial Sequence: Synthetic oligonucleotide
aaaugguucauagugaaua

SEQ ID NO: 582413 - RNA, 19 nt, Artificial Sequence
  Description of Artificial Sequence: Synthetic oligonucleotide
auaucuaauuacaagcauc

SEQ ID NO: 582414 - RNA, 19 nt, Artificial Sequence
  Description of Artificial Sequence: Synthetic oligonucleotide
aggagaaugauccuuggcu

SEQ ID NO: 582415 - RNA, 19 nt, Artificial Sequence
  Description of Artificial Sequence: Synthetic oligonucleotide
uuucggaaaacaacagacc

SEQ ID NO: 582416 - RNA, 19 nt, Artificial Sequence
  Description of Artificial Sequence: Synthetic oligonucleotide
aaugacuugacagucacua

SEQ ID NO: 582417 - RNA, 19 nt, Artificial Sequence
  Description of Artificial Sequence: Synthetic oligonucleotide
ucucuacuaaacugcacgg

SEQ ID NO: 582418 - RNA, 19 nt, Artificial Sequence
  Description of Artificial Sequence: Synthetic oligonucleotide
uuccgaaagaaagagcagg

SEQ ID NO: 582419 - RNA, 19 nt, Artificial Sequence
  Description of Artificial Sequence: Synthetic oligonucleotide
acuaugaaucacucuaaag

SEQ ID NO: 582420 - RNA, 19 nt, Artificial Sequence
  Description of Artificial Sequence: Synthetic oligonucleotide
aaacggaguuugcuuuucc

SEQ ID NO: 582421 - RNA, 19 nt, Artificial Sequence
  Description of Artificial Sequence: Synthetic oligonucleotide
gaauagguuacccacggca

SEQ ID NO: 582422 - RNA, 19 nt, Artificial Sequence
  Description of Artificial Sequence: Synthetic oligonucleotide
cacucuauauagauauugg

SEQ ID NO: 582423 - RNA, 19 nt, Artificial Sequence
  Description of Artificial Sequence: Synthetic oligonucleotide
acacaacuauucuaagugg

SEQ ID NO: 582424 - RNA, 19 nt, Artificial Sequence
  Description of Artificial Sequence: Synthetic oligonucleotide
aacuaagcgauuguauaag

SEQ ID NO: 582425 - RNA, 19 nt, Artificial Sequence
  Description of Artificial Sequence: Synthetic oligonucleotide
ugacuugacagucacuaac

SEQ ID NO: 582426 - RNA, 19 nt, Artificial Sequence
  Description of Artificial Sequence: Synthetic oligonucleotide
aagaggugauaaucacagc

SEQ ID NO: 582427 - RNA, 19 nt, Artificial Sequence
  Description of Artificial Sequence: Synthetic oligonucleotide
uuaugacgagacaacaaac

SEQ ID NO: 582428 - RNA, 19 nt, Artificial Sequence
  Description of Artificial Sequence: Synthetic oligonucleotide
auuuaagcauauuauggaa

SEQ ID NO: 582429 - RNA, 19 nt, Artificial Sequence
  Description of Artificial Sequence: Synthetic oligonucleotide
ucuacuaaacugcacggau

SEQ ID NO: 582430 - RNA, 19 nt, Artificial Sequence
  Description of Artificial Sequence: Synthetic oligonucleotide
uaagcgauuguauaagcau

SEQ ID NO: 582431 - RNA, 19 nt, Artificial Sequence
  Description of Artificial Sequence: Synthetic oligonucleotide
uguaagaggugauaaucac

SEQ ID NO: 582432 - RNA, 19 nt, Artificial Sequence
  Description of Artificial Sequence: Synthetic oligonucleotide
uugaaagcuucucuaagaa

SEQ ID NO: 582433 - RNA, 19 nt, Artificial Sequence
  Description of Artificial Sequence: Synthetic oligonucleotide
cuucgucuaauaaaacagc

SEQ ID NO: 582434 - RNA, 19 nt, Artificial Sequence
  Description of Artificial Sequence: Synthetic oligonucleotide
auaacagccuguuuaauua

SEQ ID NO: 582435 - RNA, 19 nt, Artificial Sequence
  Description of Artificial Sequence: Synthetic oligonucleotide
aaugguucauagugaauaa

SEQ ID NO: 582436 - RNA, 19 nt, Artificial Sequence
  Description of Artificial Sequence: Synthetic oligonucleotide
augacgagacaacaaacug

SEQ ID NO: 582437 - RNA, 19 nt, Artificial Sequence
  Description of Artificial Sequence: Synthetic oligonucleotide
aaacaguaucaacccuucg

SEQ ID NO: 582438 - RNA, 19 nt, Artificial Sequence
  Description of Artificial Sequence: Synthetic oligonucleotide
ucauagugaauaacagcug

SEQ ID NO: 582439 - RNA, 19 nt, Artificial Sequence
  Description of Artificial Sequence: Synthetic oligonucleotide
uuauagggacuuugggagg

SEQ ID NO: 582440 - RNA, 19 nt, Artificial Sequence
  Description of Artificial Sequence: Synthetic oligonucleotide
ugcauucccaccauagaga

SEQ ID NO: 582441 - RNA, 19 nt, Artificial Sequence
  Description of Artificial Sequence: Synthetic oligonucleotide
ggaaauaucauguagcacu

SEQ ID NO: 582442 - RNA, 19 nt, Artificial Sequence
  Description of Artificial Sequence: Synthetic oligonucleotide
ucgucuaauaaaacagcca

SEQ ID NO: 582443 - RNA, 19 nt, Artificial Sequence
  Description of Artificial Sequence: Synthetic oligonucleotide
gaauuggucagagucuucc

SEQ ID NO: 582444 - RNA, 19 nt, Artificial Sequence
  Description of Artificial Sequence: Synthetic oligonucleotide
ucaacacuaugaaucacuc

SEQ ID NO: 582445 - RNA, 19 nt, Artificial Sequence
  Description of Artificial Sequence: Synthetic oligonucleotide
gaugcuuaugacgagacaa

SEQ ID NO: 582446 - RNA, 19 nt, Artificial Sequence
  Description of Artificial Sequence: Synthetic oligonucleotide
ugcaguuccgaaagaaaga

SEQ ID NO: 582447 - RNA, 19 nt, Artificial Sequence
  Description of Artificial Sequence: Synthetic oligonucleotide
agguuauagggacuuuggg

SEQ ID NO: 582448 - RNA, 19 nt, Artificial Sequence
  Description of Artificial Sequence: Synthetic oligonucleotide
gaagccguaccauauacaa

SEQ ID NO: 582449 - RNA, 19 nt, Artificial Sequence
  Description of Artificial Sequence: Synthetic oligonucleotide
aacuauucuaagugguuua

SEQ ID NO: 582450 - RNA, 19 nt, Artificial Sequence
  Description of Artificial Sequence: Synthetic oligonucleotide
cacggaucaccaaaguugc

SEQ ID NO: 582451 - RNA, 19 nt, Artificial Sequence
  Description of Artificial Sequence: Synthetic oligonucleotide
caggcgguuacguaguugc

SEQ ID NO: 582452 - RNA, 19 nt, Artificial Sequence
  Description of Artificial Sequence: Synthetic oligonucleotide
ucucauagauauuuacauc

SEQ ID NO: 582453 - RNA, 19 nt, Artificial Sequence
  Description of Artificial Sequence: Synthetic oligonucleotide
uccgaaagaaagagcaggu

SEQ ID NO: 582454 - RNA, 19 nt, Artificial Sequence
  Description of Artificial Sequence: Synthetic oligonucleotide
cuaaacugcacggaucacc

SEQ ID NO: 582455 - RNA, 19 nt, Artificial Sequence
  Description of Artificial Sequence: Synthetic oligonucleotide
uuacguaguugccguaaag

SEQ ID NO: 582456 - RNA, 19 nt, Artificial Sequence
  Description of Artificial Sequence: Synthetic oligonucleotide
aguagcaaucauccacuuc

SEQ ID NO: 582457 - RNA, 19 nt, Artificial Sequence
  Description of Artificial Sequence: Synthetic oligonucleotide
aacugcacggaucaccaaa

SEQ ID NO: 582458 - RNA, 19 nt, Artificial Sequence
  Description of Artificial Sequence: Synthetic oligonucleotide
ucggaaaacaacagacccu

SEQ ID NO: 582459 - RNA, 19 nt, Artificial Sequence
  Description of Artificial Sequence: Synthetic oligonucleotide
ccuucgucuaauaaaacag

SEQ ID NO: 582460 - RNA, 19 nt, Artificial Sequence
  Description of Artificial Sequence: Synthetic oligonucleotide
uaacagccuguuuaauuag

SEQ ID NO: 582461 - RNA, 19 nt, Artificial Sequence
  Description of Artificial Sequence: Synthetic oligonucleotide
auugguacaaagacccagg

SEQ ID NO: 582462 - RNA, 19 nt, Artificial Sequence
  Description of Artificial Sequence: Synthetic oligonucleotide
aaaacggaguuugcuuuuc

SEQ ID NO: 582463 - RNA, 19 nt, Artificial Sequence
  Description of Artificial Sequence: Synthetic oligonucleotide
agagaauugaggggaagag

SEQ ID NO: 582464 - RNA, 19 nt, Artificial Sequence
  Description of Artificial Sequence: Synthetic oligonucleotide
uacacucuuuccucacugg

SEQ ID NO: 582465 - RNA, 19 nt, Artificial Sequence
  Description of Artificial Sequence: Synthetic oligonucleotide
aacagccuguuuaauuagg

SEQ ID NO: 582466 - RNA, 19 nt, Artificial Sequence
  Description of Artificial Sequence: Synthetic oligonucleotide
uccaaaacuaagcgauugu

SEQ ID NO: 582467 - RNA, 19 nt, Artificial Sequence
  Description of Artificial Sequence: Synthetic oligonucleotide
auacacucuuuccucacug

SEQ ID NO: 582468 - RNA, 19 nt, Artificial Sequence
  Description of Artificial Sequence: Synthetic oligonucleotide
cuauacaccacaaagcuau

SEQ ID NO: 582469 - RNA, 19 nt, Artificial Sequence
  Description of Artificial Sequence: Synthetic oligonucleotide
uggaaucuauaucaauuua

SEQ ID NO: 582470 - RNA, 19 nt, Artificial Sequence
  Description of Artificial Sequence: Synthetic oligonucleotide
cuuaugacgagacaacaaa

SEQ ID NO: 582471 - RNA, 19 nt, Artificial Sequence
  Description of Artificial Sequence: Synthetic oligonucleotide
caagcccuggccacgauag

SEQ ID NO: 582472 - RNA, 19 nt, Artificial Sequence
  Description of Artificial Sequence: Synthetic oligonucleotide
uauaggccaauuuccauuu

SEQ ID NO: 582473 - RNA, 19 nt, Artificial Sequence
  Description of Artificial Sequence: Synthetic oligonucleotide
auacaaaccagaguaaguu

SEQ ID NO: 582474 - RNA, 19 nt, Artificial Sequence
  Description of Artificial Sequence: Synthetic oligonucleotide
aggagagcgacgaacacag

SEQ ID NO: 582475 - RNA, 19 nt, Artificial Sequence
  Description of Artificial Sequence: Synthetic oligonucleotide
auagguuacccacggcaag

SEQ ID NO: 582476 - RNA, 19 nt, Artificial Sequence
  Description of Artificial Sequence: Synthetic oligonucleotide
uaccuccuuacauugguac

SEQ ID NO: 582477 - RNA, 19 nt, Artificial Sequence
  Description of Artificial Sequence: Synthetic oligonucleotide
uuacaauugcaaugacaca

SEQ ID NO: 582478 - RNA, 19 nt, Artificial Sequence
  Description of Artificial Sequence: Synthetic oligonucleotide
aacccuucgucuaauaaaa

SEQ ID NO: 582479 - RNA, 19 nt, Artificial Sequence
  Description of Artificial Sequence: Synthetic oligonucleotide
uacguaguugccguaaagu

SEQ ID NO: 582480 - RNA, 19 nt, Artificial Sequence
  Description of Artificial Sequence: Synthetic oligonucleotide
ucuaagaaccccagugcau

SEQ ID NO: 582481 - RNA, 19 nt, Artificial Sequence
  Description of Artificial Sequence: Synthetic oligonucleotide
cauugguacaaagacccag

SEQ ID NO: 582482 - RNA, 19 nt, Artificial Sequence
  Description of Artificial Sequence: Synthetic oligonucleotide
cuauauagauauuggucca

SEQ ID NO: 582483 - RNA, 19 nt, Artificial Sequence
  Description of Artificial Sequence: Synthetic oligonucleotide
aaugaagccguaccauaua

SEQ ID NO: 582484 - RNA, 19 nt, Artificial Sequence
  Description of Artificial Sequence: Synthetic oligonucleotide
gguuauagggacuuuggga

SEQ ID NO: 582485 - RNA, 19 nt, Artificial Sequence
  Description of Artificial Sequence: Synthetic oligonucleotide
aauagguuacccacggcaa

SEQ ID NO: 582486 - RNA, 19 nt, Artificial Sequence
  Description of Artificial Sequence: Synthetic oligonucleotide
ccauauacaaaccagagua

SEQ ID NO: 582487 - RNA, 19 nt, Artificial Sequence
  Description of Artificial Sequence: Synthetic oligonucleotide
uauagauauugguccauuu

SEQ ID NO: 582488 - RNA, 19 nt, Artificial Sequence
  Description of Artificial Sequence: Synthetic oligonucleotide
acgauaggucuucuuucac

SEQ ID NO: 582489 - RNA, 19 nt, Artificial Sequence
  Description of Artificial Sequence: Synthetic oligonucleotide
augguucauagugaauaac

SEQ ID NO: 582490 - RNA, 19 nt, Artificial Sequence
  Description of Artificial Sequence: Synthetic oligonucleotide
cuugaaacaggcgguuacg

SEQ ID NO: 582491 - RNA, 19 nt, Artificial Sequence
  Description of Artificial Sequence: Synthetic oligonucleotide
cuacucuuaguuaaaaccu

SEQ ID NO: 582492 - RNA, 19 nt, Artificial Sequence
  Description of Artificial Sequence: Synthetic oligonucleotide
uacuuauaugcaagguuau

SEQ ID NO: 582493 - RNA, 19 nt, Artificial Sequence
  Description of Artificial Sequence: Synthetic oligonucleotide
aguaucaacccuucgucua

SEQ ID NO: 582494 - RNA, 19 nt, Artificial Sequence
  Description of Artificial Sequence: Synthetic oligonucleotide
cuaagcgauuguauaagca

SEQ ID NO: 582495 - RNA, 19 nt, Artificial Sequence
  Description of Artificial Sequence: Synthetic oligonucleotide
uacucuuaguuaaaaccuu

SEQ ID NO: 582496 - RNA, 19 nt, Artificial Sequence
  Description of Artificial Sequence: Synthetic oligonucleotide
ucacugggagccaacugca

SEQ ID NO: 582497 - RNA, 19 nt, Artificial Sequence
  Description of Artificial Sequence: Synthetic oligonucleotide
cuacuaaacugcacggauc

SEQ ID NO: 582498 - RNA, 19 nt, Artificial Sequence
  Description of Artificial Sequence: Synthetic oligonucleotide
ugcuuaugacgagacaaca

SEQ ID NO: 582499 - RNA, 19 nt, Artificial Sequence
  Description of Artificial Sequence: Synthetic oligonucleotide
agaaugaagccguaccaua

SEQ ID NO: 582500 - RNA, 19 nt, Artificial Sequence
  Description of Artificial Sequence: Synthetic oligonucleotide
uaucucuacuaaacugcac

SEQ ID NO: 582501 - RNA, 19 nt, Artificial Sequence
  Description of Artificial Sequence: Synthetic oligonucleotide
agcacuugcaguuccgaaa

SEQ ID NO: 582502 - RNA, 19 nt, Artificial Sequence
  Description of Artificial Sequence: Synthetic oligonucleotide
augcuuaugacgagacaac

SEQ ID NO: 582503 - RNA, 19 nt, Artificial Sequence
  Description of Artificial Sequence: Synthetic oligonucleotide
uaucauauccaggauccau

SEQ ID NO: 582504 - RNA, 19 nt, Artificial Sequence
  Description of Artificial Sequence: Synthetic oligonucleotide
auacaagucaggagaauga

SEQ ID NO: 582505 - RNA, 19 nt, Artificial Sequence
  Description of Artificial Sequence: Synthetic oligonucleotide
cuaacagaacaaccaguuc

SEQ ID NO: 582506 - RNA, 19 nt, Artificial Sequence
  Description of Artificial Sequence: Synthetic oligonucleotide
aacuauacuaaaagauaua

SEQ ID NO: 582507 - RNA, 19 nt, Artificial Sequence
  Description of Artificial Sequence: Synthetic oligonucleotide
cgauuguauaagcauaucc

SEQ ID NO: 582508 - RNA, 19 nt, Artificial Sequence
  Description of Artificial Sequence: Synthetic oligonucleotide
uagguuacccacggcaagc

SEQ ID NO: 582509 - RNA, 19 nt, Artificial Sequence
  Description of Artificial Sequence: Synthetic oligonucleotide
gauaccuccuuacauuggu

SEQ ID NO: 582510 - RNA, 19 nt, Artificial Sequence
  Description of Artificial Sequence: Synthetic oligonucleotide
ucaauccauucgaauuuuc

SEQ ID NO: 582511 - RNA, 19 nt, Artificial Sequence
  Description of Artificial Sequence: Synthetic oligonucleotide
uuacccacggcaagcccug

SEQ ID NO: 582512 - RNA, 19 nt, Artificial Sequence
  Description of Artificial Sequence: Synthetic oligonucleotide
guaccauauacaaaccaga

SEQ ID NO: 582513 - RNA, 19 nt, Artificial Sequence
  Description of Artificial Sequence: Synthetic oligonucleotide
caagccgaucauaauccac

SEQ ID NO: 582514 - RNA, 19 nt, Artificial Sequence
  Description of Artificial Sequence: Synthetic oligonucleotide
ggaaccgcauucuccaaag

SEQ ID NO: 582515 - RNA, 19 nt, Artificial Sequence
  Description of Artificial Sequence: Synthetic oligonucleotide
uugaaacaggcgguuacgu

SEQ ID NO: 582516 - RNA, 19 nt, Artificial Sequence
  Description of Artificial Sequence: Synthetic oligonucleotide
caguuccgaaagaaagagc

SEQ ID NO: 582517 - RNA, 19 nt, Artificial Sequence
  Description of Artificial Sequence: Synthetic oligonucleotide
cuauacuaaaagauauacu

SEQ ID NO: 582518 - RNA, 19 nt, Artificial Sequence
  Description of Artificial Sequence: Synthetic oligonucleotide
ugaaacaggcgguuacgua

SEQ ID NO: 582519 - RNA, 19 nt, Artificial Sequence
  Description of Artificial Sequence: Synthetic oligonucleotide
aaauaacagccuguuuaau

SEQ ID NO: 582520 - RNA, 19 nt, Artificial Sequence
  Description of Artificial Sequence: Synthetic oligonucleotide
aggccaauuuccauuucgg

SEQ ID NO: 582521 - RNA, 19 nt, Artificial Sequence
  Description of Artificial Sequence: Synthetic oligonucleotide
gcaguuccgaaagaaagag

SEQ ID NO: 582522 - RNA, 19 nt, Artificial Sequence
  Description of Artificial Sequence: Synthetic oligonucleotide
aguugccguaaagugacug

SEQ ID NO: 582523 - RNA, 19 nt, Artificial Sequence
  Description of Artificial Sequence: Synthetic oligonucleotide
uacaagucaggagaaugau

SEQ ID NO: 582524 - RNA, 19 nt, Artificial Sequence
  Description of Artificial Sequence: Synthetic oligonucleotide
cuucgaaaacggaguuugc

SEQ ID NO: 582525 - RNA, 19 nt, Artificial Sequence
  Description of Artificial Sequence: Synthetic oligonucleotide
aaacaggcgguuacguagu

SEQ ID NO: 582526 - RNA, 19 nt, Artificial Sequence
  Description of Artificial Sequence: Synthetic oligonucleotide
ugcaagguuauagggacuu

SEQ ID NO: 582527 - RNA, 19 nt, Artificial Sequence
  Description of Artificial Sequence: Synthetic oligonucleotide
guugccguaaagugacuga

SEQ ID NO: 582528 - RNA, 19 nt, Artificial Sequence
  Description of Artificial Sequence: Synthetic oligonucleotide
aggucuucgaaaacggagu

SEQ ID NO: 582529 - RNA, 19 nt, Artificial Sequence
  Description of Artificial Sequence: Synthetic oligonucleotide
accgcauucuccaaagggu

SEQ ID NO: 582530 - RNA, 19 nt, Artificial Sequence
  Description of Artificial Sequence: Synthetic oligonucleotide
acaucagauuaagacauuu

SEQ ID NO: 582531 - RNA, 19 nt, Artificial Sequence
  Description of Artificial Sequence: Synthetic oligonucleotide
caacccuucgucuaauaaa

SEQ ID NO: 582532 - RNA, 19 nt, Artificial Sequence
  Description of Artificial Sequence: Synthetic oligonucleotide
cacuuccaaaacuaagcga

SEQ ID NO: 582533 - RNA, 19 nt, Artificial Sequence
  Description of Artificial Sequence: Synthetic oligonucleotide
agagcgacgaacacagcca

SEQ ID NO: 582534 - RNA, 19 nt, Artificial Sequence
  Description of Artificial Sequence: Synthetic oligonucleotide
guuccgaaagaaagagcag

SEQ ID NO: 582535 - RNA, 19 nt, Artificial Sequence
  Description of Artificial Sequence: Synthetic oligonucleotide
acuaaacugcacggaucac

SEQ ID NO: 582536 - RNA, 19 nt, Artificial Sequence
  Description of Artificial Sequence: Synthetic oligonucleotide
uuauuccuauucagagaau

SEQ ID NO: 582537 - RNA, 19 nt, Artificial Sequence
  Description of Artificial Sequence: Synthetic oligonucleotide
cacgauaggucuucuuuca

SEQ ID NO: 582538 - RNA, 19 nt, Artificial Sequence
  Description of Artificial Sequence: Synthetic oligonucleotide
agcauauuauggaaucuau

SEQ ID NO: 582539 - RNA, 19 nt, Artificial Sequence
  Description of Artificial Sequence: Synthetic oligonucleotide
agauaccuccuuacauugg

SEQ ID NO: 582540 - RNA, 19 nt, Artificial Sequence
  Description of Artificial Sequence: Synthetic oligonucleotide
guucaauaacaagaaugga

SEQ ID NO: 582541 - RNA, 19 nt, Artificial Sequence
  Description of Artificial Sequence: Synthetic oligonucleotide
ugucaacacuaugaaucac

SEQ ID NO: 582542 - RNA, 19 nt, Artificial Sequence
  Description of Artificial Sequence: Synthetic oligonucleotide
agcgauuguauaagcauau

SEQ ID NO: 582543 - RNA, 19 nt, Artificial Sequence
  Description of Artificial Sequence: Synthetic oligonucleotide
agaaugauccuuggcuaga

SEQ ID NO: 582544 - RNA, 19 nt, Artificial Sequence
  Description of Artificial Sequence: Synthetic oligonucleotide
cuagaugcuuaugacgaga

SEQ ID NO: 582545 - RNA, 19 nt, Artificial Sequence
  Description of Artificial Sequence: Synthetic oligonucleotide
aggacuuaucugucccgug

SEQ ID NO: 582546 - RNA, 19 nt, Artificial Sequence
  Description of Artificial Sequence: Synthetic oligonucleotide
gguauacuauacugucuac

SEQ ID NO: 582547 - RNA, 19 nt, Artificial Sequence
  Description of Artificial Sequence: Synthetic oligonucleotide
gacccugguguucuuaaua

SEQ ID NO: 582548 - RNA, 19 nt, Artificial Sequence
  Description of Artificial Sequence: Synthetic oligonucleotide
ggcgguuacguaguugccg

SEQ ID NO: 582549 - RNA, 19 nt, Artificial Sequence
  Description of Artificial Sequence: Synthetic oligonucleotide
guauaggccaauuuccauu

SEQ ID NO: 582550 - RNA, 19 nt, Artificial Sequence
  Description of Artificial Sequence: Synthetic oligonucleotide
caauccauucgaauuuucu

SEQ ID NO: 582551 - RNA, 19 nt, Artificial Sequence
  Description of Artificial Sequence: Synthetic oligonucleotide
uagcacuugcaguuccgaa

SEQ ID NO: 582552 - RNA, 19 nt, Artificial Sequence
  Description of Artificial Sequence: Synthetic oligonucleotide
ccgugcaaggaacucaagc

SEQ ID NO: 582553 - RNA, 19 nt, Artificial Sequence
  Description of Artificial Sequence: Synthetic oligonucleotide
acaacuauucuaagugguu

SEQ ID NO: 582554 - RNA, 19 nt, Artificial Sequence
  Description of Artificial Sequence: Synthetic oligonucleotide
aaacugcacggaucaccaa

SEQ ID NO: 582555 - RNA, 19 nt, Artificial Sequence
  Description of Artificial Sequence: Synthetic oligonucleotide
agcuagccugccaaccacg

SEQ ID NO: 582556 - RNA, 19 nt, Artificial Sequence
  Description of Artificial Sequence: Synthetic oligonucleotide
cacuaacucuaccacugca

SEQ ID NO: 582557 - RNA, 19 nt, Artificial Sequence
  Description of Artificial Sequence: Synthetic oligonucleotide
ggacaaugcagccacgucu

SEQ ID NO: 582558 - RNA, 19 nt, Artificial Sequence
  Description of Artificial Sequence: Synthetic oligonucleotide
uccgugacuuccucacaaa

SEQ ID NO: 582559 - RNA, 19 nt, Artificial Sequence
  Description of Artificial Sequence: Synthetic oligonucleotide
guuacguaguugccguaaa

SEQ ID NO: 582560 - RNA, 19 nt, Artificial Sequence
  Description of Artificial Sequence: Synthetic oligonucleotide
cacgucugggauucgaucu

SEQ ID NO: 582561 - RNA, 19 nt, Artificial Sequence
  Description of Artificial Sequence: Synthetic oligonucleotide
aagccguaccauauacaaa

SEQ ID NO: 582562 - RNA, 19 nt, Artificial Sequence
  Description of Artificial Sequence: Synthetic oligonucleotide
ggaaucuauaucaauuuau

SEQ ID NO: 582563 - RNA, 19 nt, Artificial Sequence
  Description of Artificial Sequence: Synthetic oligonucleotide
aacaggcgguuacguaguu

SEQ ID NO: 582564 - RNA, 19 nt, Artificial Sequence
  Description of Artificial Sequence: Synthetic oligonucleotide
aggcgguuacguaguugcc

SEQ ID NO: 582565 - RNA, 19 nt, Artificial Sequence
  Description of Artificial Sequence: Synthetic oligonucleotide
ccacgauaggucuucuuuc

SEQ ID NO: 582566 - RNA, 19 nt, Artificial Sequence
  Description of Artificial Sequence: Synthetic oligonucleotide
uaguugccguaaagugacu

SEQ ID NO: 582567 - RNA, 19 nt, Artificial Sequence
  Description of Artificial Sequence: Synthetic oligonucleotide
acaggcgguuacguaguug

SEQ ID NO: 582568 - RNA, 19 nt, Artificial Sequence
  Description of Artificial Sequence: Synthetic oligonucleotide
ggccaauuuccauuucgga

SEQ ID NO: 582569 - RNA, 19 nt, Artificial Sequence
  Description of Artificial Sequence: Synthetic oligonucleotide
guuacccacggcaagcccu

SEQ ID NO: 582570 - RNA, 19 nt, Artificial Sequence
  Description of Artificial Sequence: Synthetic oligonucleotide
acggcaagcccuggccacg

SEQ ID NO: 582571 - RNA, 19 nt, Artificial Sequence
  Description of Artificial Sequence: Synthetic oligonucleotide
caguaucaacccuucgucu

SEQ ID NO: 582572 - RNA, 19 nt, Artificial Sequence
  Description of Artificial Sequence: Synthetic oligonucleotide
ccgugacuuccucacaaag

SEQ ID NO: 582573 - RNA, 19 nt, Artificial Sequence
  Description of Artificial Sequence: Synthetic oligonucleotide
agacccugguguucuuaau

SEQ ID NO: 582574 - RNA, 19 nt, Artificial Sequence
  Description of Artificial Sequence: Synthetic oligonucleotide
cagacccugguguucuuaa

SEQ ID NO: 582575 - RNA, 19 nt, Artificial Sequence
  Description of Artificial Sequence: Synthetic oligonucleotide
gcuuaugacgagacaacaa

SEQ ID NO: 582576 - RNA, 19 nt, Artificial Sequence
  Description of Artificial Sequence: Synthetic oligonucleotide
caacuauucuaagugguuu

SEQ ID NO: 582577 - RNA, 19 nt, Artificial Sequence
  Description of Artificial Sequence: Synthetic oligonucleotide
augcaagguuauagggacu

SEQ ID NO: 582578 - RNA, 19 nt, Artificial Sequence
  Description of Artificial Sequence: Synthetic oligonucleotide
gguuacguaguugccguaa

SEQ ID NO: 582579 - RNA, 19 nt, Artificial Sequence
  Description of Artificial Sequence: Synthetic oligonucleotide
cuaucauauccaggaucca

SEQ ID NO: 582580 - RNA, 19 nt, Artificial Sequence
  Description of Artificial Sequence: Synthetic oligonucleotide
cuagccugccaaccacgca

SEQ ID NO: 582581 - RNA, 19 nt, Artificial Sequence
  Description of Artificial Sequence: Synthetic oligonucleotide
ccguaccauauacaaacca

SEQ ID NO: 582582 - RNA, 19 nt, Artificial Sequence
  Description of Artificial Sequence: Synthetic oligonucleotide
aggaggcaaugagacaaua

SEQ ID NO: 582583 - RNA, 19 nt, Artificial Sequence
  Description of Artificial Sequence: Synthetic oligonucleotide
gcuagccugccaaccacgc

SEQ ID NO: 582584 - RNA, 19 nt, Artificial Sequence
  Description of Artificial Sequence: Synthetic oligonucleotide
auaccuccuuacauuggua

SEQ ID NO: 582585 - RNA, 19 nt, Artificial Sequence
  Description of Artificial Sequence: Synthetic oligonucleotide
gccguaccauauacaaacc

SEQ ID NO: 582586 - RNA, 19 nt, Artificial Sequence
  Description of Artificial Sequence: Synthetic oligonucleotide
ggauucgaucuccugguau

SEQ ID NO: 582587 - RNA, 19 nt, Artificial Sequence
  Description of Artificial Sequence: Synthetic oligonucleotide
caucccugaauuggucaga

SEQ ID NO: 582588 - RNA, 19 nt, Artificial Sequence
  Description of Artificial Sequence: Synthetic oligonucleotide
ccaaaacuaagcgauugua

SEQ ID NO: 582589 - RNA, 19 nt, Artificial Sequence
  Description of Artificial Sequence: Synthetic oligonucleotide
agcgacgaacacagccaug

SEQ ID NO: 582590 - RNA, 19 nt, Artificial Sequence
  Description of Artificial Sequence: Synthetic oligonucleotide
ccgaaagaaagagcagguc

SEQ ID NO: 582591 - RNA, 19 nt, Artificial Sequence
  Description of Artificial Sequence: Synthetic oligonucleotide
caccauaaugguagcccgu

SEQ ID NO: 582592 - RNA, 19 nt, Artificial Sequence
  Description of Artificial Sequence: Synthetic oligonucleotide
ccgguggaauagguuaccc

SEQ ID NO: 582593 - RNA, 19 nt, Artificial Sequence
  Description of Artificial Sequence: Synthetic oligonucleotide
acggaucaccaaaguugca

SEQ ID NO: 582594 - RNA, 19 nt, Artificial Sequence
  Description of Artificial Sequence: Synthetic oligonucleotide
gcgauuguauaagcauauc

SEQ ID NO: 582595 - RNA, 19 nt, Artificial Sequence
  Description of Artificial Sequence: Synthetic oligonucleotide
ugguagcccguggccggug

SEQ ID NO: 582596 - RNA, 19 nt, Artificial Sequence
  Description of Artificial Sequence: Synthetic oligonucleotide
ccaagccgaucauaaucca

SEQ ID NO: 582597 - RNA, 19 nt, Artificial Sequence
  Description of Artificial Sequence: Synthetic oligonucleotide
acgagacaacaaacuggaa

SEQ ID NO: 582598 - RNA, 19 nt, Artificial Sequence
  Description of Artificial Sequence: Synthetic oligonucleotide
guagcccguggccggugga

SEQ ID NO: 582599 - RNA, 19 nt, Artificial Sequence
  Description of Artificial Sequence: Synthetic oligonucleotide
uggccacgauaggucuucu

SEQ ID NO: 582600 - RNA, 19 nt, Artificial Sequence
  Description of Artificial Sequence: Synthetic oligonucleotide
ccgcauucuccaaagggua

SEQ ID NO: 582601 - RNA, 19 nt, Artificial Sequence
  Description of Artificial Sequence: Synthetic oligonucleotide
cacccgucaccagcaagga

SEQ ID NO: 582602 - RNA, 19 nt, Artificial Sequence
  Description of Artificial Sequence: Synthetic oligonucleotide
cccguggccgguggaauag

SEQ ID NO: 582603 - RNA, 19 nt, Artificial Sequence
  Description of Artificial Sequence: Synthetic oligonucleotide
cugcacggaucaccaaagu

SEQ ID NO: 582604 - RNA, 19 nt, Artificial Sequence
  Description of Artificial Sequence: Synthetic oligonucleotide
cccgugcaaggaacucaag

SEQ ID NO: 582605 - RNA, 19 nt, Artificial Sequence
  Description of Artificial Sequence: Synthetic oligonucleotide
gccgaucauaauccacagu

SEQ ID NO: 582606 - RNA, 19 nt, Artificial Sequence
  Description of Artificial Sequence: Synthetic oligonucleotide
guggccgguggaauagguu

SEQ ID NO: 582607 - RNA, 19 nt, Artificial Sequence
  Description of Artificial Sequence: Synthetic oligonucleotide
cccacggggagauccaguu

SEQ ID NO: 582608 - RNA, 19 nt, Artificial Sequence
  Description of Artificial Sequence: Synthetic oligonucleotide
ggccacgauaggucuucuu

SEQ ID NO: 582609 - RNA, 19 nt, Artificial Sequence
  Description of Artificial Sequence: Synthetic oligonucleotide
gcaagguuauagggacuuu

SEQ ID NO: 582610 - RNA, 19 nt, Artificial Sequence
  Description of Artificial Sequence: Synthetic oligonucleotide
cgguuacguaguugccgua

SEQ ID NO: 582611 - RNA, 19 nt, Artificial Sequence
  Description of Artificial Sequence: Synthetic oligonucleotide
aacaaauaugauuuugucc

SEQ ID NO: 582612 - RNA, 19 nt, Artificial Sequence
  Description of Artificial Sequence: Synthetic oligonucleotide
aaaucuucuacguagaacu

SEQ ID NO: 582613 - RNA, 19 nt, Artificial Sequence
  Description of Artificial Sequence: Synthetic oligonucleotide
cauguugagaguuagaagg

SEQ ID NO: 582614 - RNA, 19 nt, Artificial Sequence
  Description of Artificial Sequence: Synthetic oligonucleotide
aaaaucucgaaguucuuuc

SEQ ID NO: 582615 - RNA, 19 nt, Artificial Sequence
  Description of Artificial Sequence: Synthetic oligonucleotide
uuuaccucaauuuucagga

SEQ ID NO: 582616 - RNA, 19 nt, Artificial Sequence
  Description of Artificial Sequence: Synthetic oligonucleotide
uucuuauccaucuacagcc

SEQ ID NO: 582617 - RNA, 19 nt, Artificial Sequence
  Description of Artificial Sequence: Synthetic oligonucleotide
uuuuaauugaaaauaccca

SEQ ID NO: 582618 - RNA, 19 nt, Artificial Sequence
  Description of Artificial Sequence: Synthetic oligonucleotide
aaauuaauauuaucaaggu

SEQ ID NO: 582619 - RNA, 19 nt, Artificial Sequence
  Description of Artificial Sequence: Synthetic oligonucleotide
aaggacuacuguuagcccc

SEQ ID NO: 582620 - RNA, 19 nt, Artificial Sequence
  Description of Artificial Sequence: Synthetic oligonucleotide
uauugugucaacuacggca

SEQ ID NO: 582621 - RNA, 19 nt, Artificial Sequence
  Description of Artificial Sequence: Synthetic oligonucleotide
aacggggccacuuauauug

SEQ ID NO: 582622 - RNA, 19 nt, Artificial Sequence
  Description of Artificial Sequence: Synthetic oligonucleotide
uuuaauugaaaauacccaa

SEQ ID NO: 582623 - RNA, 19 nt, Artificial Sequence
  Description of Artificial Sequence: Synthetic oligonucleotide
agaaggacuacuguuagcc

SEQ ID NO: 582624 - RNA, 19 nt, Artificial Sequence
  Description of Artificial Sequence: Synthetic oligonucleotide
ucaagaugaucuaauaaug

SEQ ID NO: 582625 - RNA, 19 nt, Artificial Sequence
  Description of Artificial Sequence: Synthetic oligonucleotide
aaagcauucuuauccaucu

SEQ ID NO: 582626 - RNA, 19 nt, Artificial Sequence
  Description of Artificial Sequence: Synthetic oligonucleotide
uuuuaauugacucccacau

SEQ ID NO: 582627 - RNA, 19 nt, Artificial Sequence
  Description of Artificial Sequence: Synthetic oligonucleotide
uguccuacuaguuuuagca

SEQ ID NO: 582628 - RNA, 19 nt, Artificial Sequence
  Description of Artificial Sequence: Synthetic oligonucleotide
uuccauauuuucaacaaug

SEQ ID NO: 582629 - RNA, 19 nt, Artificial Sequence
  Description of Artificial Sequence: Synthetic oligonucleotide
aauaugauuuuguccacug

SEQ ID NO: 582630 - RNA, 19 nt, Artificial Sequence
  Description of Artificial Sequence: Synthetic oligonucleotide
auaauguucuuaucucugc

SEQ ID NO: 582631 - RNA, 19 nt, Artificial Sequence
  Description of Artificial Sequence: Synthetic oligonucleotide
ucaagugaaaaucuucuac

SEQ ID NO: 582632 - RNA, 19 nt, Artificial Sequence
  Description of Artificial Sequence: Synthetic oligonucleotide
ucuacugaguuacuaaaug

SEQ ID NO: 582633 - RNA, 19 nt, Artificial Sequence
  Description of Artificial Sequence: Synthetic oligonucleotide
uucaagaugaucuaauaau

SEQ ID NO: 582634 - RNA, 19 nt, Artificial Sequence
  Description of Artificial Sequence: Synthetic oligonucleotide
ucguauuugacccacucug

SEQ ID NO: 582635 - RNA, 19 nt, Artificial Sequence
  Description of Artificial Sequence: Synthetic oligonucleotide
aggaucuuacucuugaaag

SEQ ID NO: 582636 - RNA, 19 nt, Artificial Sequence
  Description of Artificial Sequence: Synthetic oligonucleotide
aacguucauacaaauggcc

SEQ ID NO: 582637 - RNA, 19 nt, Artificial Sequence
  Description of Artificial Sequence: Synthetic oligonucleotide
ucaugauccguagaaaacg

SEQ ID NO: 582638 - RNA, 19 nt, Artificial Sequence
  Description of Artificial Sequence: Synthetic oligonucleotide
cuauuuauccucuggaaac

SEQ ID NO: 582639 - RNA, 19 nt, Artificial Sequence
  Description of Artificial Sequence: Synthetic oligonucleotide
auggaguguauccauaagg

SEQ ID NO: 582640 - RNA, 19 nt, Artificial Sequence
  Description of Artificial Sequence: Synthetic oligonucleotide
uuaaauguuggcgaaaggu

SEQ ID NO: 582641 - RNA, 19 nt, Artificial Sequence
  Description of Artificial Sequence: Synthetic oligonucleotide
aguugauuuccauauuuuc

SEQ ID NO: 582642 - RNA, 19 nt, Artificial Sequence
  Description of Artificial Sequence: Synthetic oligonucleotide
uugaaaguguccaacacaa

SEQ ID NO: 582643 - RNA, 19 nt, Artificial Sequence
  Description of Artificial Sequence: Synthetic oligonucleotide
aauaccgacuuugccaggc

SEQ ID NO: 582644 - RNA, 19 nt, Artificial Sequence
  Description of Artificial Sequence: Synthetic oligonucleotide
ugucaaaggauccacaaua

SEQ ID NO: 582645 - RNA, 19 nt, Artificial Sequence
  Description of Artificial Sequence: Synthetic oligonucleotide
cuuuaccucaauuuucagg

SEQ ID NO: 582646 - RNA, 19 nt, Artificial Sequence
  Description of Artificial Sequence: Synthetic oligonucleotide
uuucaagaugaucuaauaa

SEQ ID NO: 582647 - RNA, 19 nt, Artificial Sequence
  Description of Artificial Sequence: Synthetic oligonucleotide
aggauuuaucuuuauaaca

SEQ ID NO: 582648 - RNA, 19 nt, Artificial Sequence
  Description of Artificial Sequence: Synthetic oligonucleotide
ugcuagugggaaaagcacg

SEQ ID NO: 582649 - RNA, 19 nt, Artificial Sequence
  Description of Artificial Sequence: Synthetic oligonucleotide
gggguaaucauguugagag

SEQ ID NO: 582650 - RNA, 19 nt, Artificial Sequence
  Description of Artificial Sequence: Synthetic oligonucleotide
uuuaaauguuggcgaaagg

SEQ ID NO: 582651 - RNA, 19 nt, Artificial Sequence
  Description of Artificial Sequence: Synthetic oligonucleotide
uguaaagguccuaagaauu

SEQ ID NO: 582652 - RNA, 19 nt, Artificial Sequence
  Description of Artificial Sequence: Synthetic oligonucleotide
aagugaaaaucuucuacgu

SEQ ID NO: 582653 - RNA, 19 nt, Artificial Sequence
  Description of Artificial Sequence: Synthetic oligonucleotide
aauccguacucuuuggcca

SEQ ID NO: 582654 - RNA, 19 nt, Artificial Sequence
  Description of Artificial Sequence: Synthetic oligonucleotide
aaucaagugaaaaucuucu

SEQ ID NO: 582655 - RNA, 19 nt, Artificial Sequence
  Description of Artificial Sequence: Synthetic oligonucleotide
ucaaaucaaagcagugucc

SEQ ID NO: 582656 - RNA, 19 nt, Artificial Sequence
  Description of Artificial Sequence: Synthetic oligonucleotide
ucauauuggaauccguacu

SEQ ID NO: 582657 - RNA, 19 nt, Artificial Sequence
  Description of Artificial Sequence: Synthetic oligonucleotide
agaugaucuaauaauguuc

SEQ ID NO: 582658 - RNA, 19 nt, Artificial Sequence
  Description of Artificial Sequence: Synthetic oligonucleotide
uccaucuacagccucauuc

SEQ ID NO: 582659 - RNA, 19 nt, Artificial Sequence
  Description of Artificial Sequence: Synthetic oligonucleotide
acuauuuggaucuuggcua

SEQ ID NO: 582660 - RNA, 19 nt, Artificial Sequence
  Description of Artificial Sequence: Synthetic oligonucleotide
aaaugauucgcugcuuuuc

SEQ ID NO: 582661 - RNA, 19 nt, Artificial Sequence
  Description of Artificial Sequence: Synthetic oligonucleotide
auaugauuuuguccacugc

SEQ ID NO: 582662 - RNA, 19 nt, Artificial Sequence
  Description of Artificial Sequence: Synthetic oligonucleotide
aacgaugacaucucccaug

SEQ ID NO: 582663 - RNA, 19 nt, Artificial Sequence
  Description of Artificial Sequence: Synthetic oligonucleotide
aagacuauuuggaucuugg

SEQ ID NO: 582664 - RNA, 19 nt, Artificial Sequence
  Description of Artificial Sequence: Synthetic oligonucleotide
aagcgcaucuauuuucauc

SEQ ID NO: 582665 - RNA, 19 nt, Artificial Sequence
  Description of Artificial Sequence: Synthetic oligonucleotide
auacaaggcacugaugugg

SEQ ID NO: 582666 - RNA, 19 nt, Artificial Sequence
  Description of Artificial Sequence: Synthetic oligonucleotide
aauggaguguauccauaag

SEQ ID NO: 582667 - RNA, 19 nt, Artificial Sequence
  Description of Artificial Sequence: Synthetic oligonucleotide
uaaauguuggcgaaaggua

SEQ ID NO: 582668 - RNA, 19 nt, Artificial Sequence
  Description of Artificial Sequence: Synthetic oligonucleotide
ggaauuuugccacuggucc

SEQ ID NO: 582669 - RNA, 19 nt, Artificial Sequence
  Description of Artificial Sequence: Synthetic oligonucleotide
aguugcuccguacuguuuc

SEQ ID NO: 582670 - RNA, 19 nt, Artificial Sequence
  Description of Artificial Sequence: Synthetic oligonucleotide
uucauauuggaauccguac

SEQ ID NO: 582671 - RNA, 19 nt, Artificial Sequence
  Description of Artificial Sequence: Synthetic oligonucleotide
ucaccucuuuaaauguugg

SEQ ID NO: 582672 - RNA, 19 nt, Artificial Sequence
  Description of Artificial Sequence: Synthetic oligonucleotide
gaauccguacucuuuggcc

SEQ ID NO: 582673 - RNA, 19 nt, Artificial Sequence
  Description of Artificial Sequence: Synthetic oligonucleotide
ugauccguagaaaacguuc

SEQ ID NO: 582674 - RNA, 19 nt, Artificial Sequence
  Description of Artificial Sequence: Synthetic oligonucleotide
ugaucuagguuugaaagac

SEQ ID NO: 582675 - RNA, 19 nt, Artificial Sequence
  Description of Artificial Sequence: Synthetic oligonucleotide
ucuuguaaccccaaaugau

SEQ ID NO: 582676 - RNA, 19 nt, Artificial Sequence
  Description of Artificial Sequence: Synthetic oligonucleotide
agacuauuuggaucuuggc

SEQ ID NO: 582677 - RNA, 19 nt, Artificial Sequence
  Description of Artificial Sequence: Synthetic oligonucleotide
aaguucauauuggaauccg

SEQ ID NO: 582678 - RNA, 19 nt, Artificial Sequence
  Description of Artificial Sequence: Synthetic oligonucleotide
ucacguaauuucaguaucc

SEQ ID NO: 582679 - RNA, 19 nt, Artificial Sequence
  Description of Artificial Sequence: Synthetic oligonucleotide
ugaaauguccuacuaguuu

SEQ ID NO: 582680 - RNA, 19 nt, Artificial Sequence
  Description of Artificial Sequence: Synthetic oligonucleotide
uuggaauccguacucuuug

SEQ ID NO: 582681 - RNA, 19 nt, Artificial Sequence
  Description of Artificial Sequence: Synthetic oligonucleotide
acuauugugucaacuacgg

SEQ ID NO: 582682 - RNA, 19 nt, Artificial Sequence
  Description of Artificial Sequence: Synthetic oligonucleotide
ggaaucaccucuuuaaaug

SEQ ID NO: 582683 - RNA, 19 nt, Artificial Sequence
  Description of Artificial Sequence: Synthetic oligonucleotide
cacuauugugucaacuacg

SEQ ID NO: 582684 - RNA, 19 nt, Artificial Sequence
  Description of Artificial Sequence: Synthetic oligonucleotide
agcaucaacaaauaugauu

SEQ ID NO: 582685 - RNA, 19 nt, Artificial Sequence
  Description of Artificial Sequence: Synthetic oligonucleotide
gaaacgauauccauccaug

SEQ ID NO: 582686 - RNA, 19 nt, Artificial Sequence
  Description of Artificial Sequence: Synthetic oligonucleotide
acaacgaugacaucuccca

SEQ ID NO: 582687 - RNA, 19 nt, Artificial Sequence
  Description of Artificial Sequence: Synthetic oligonucleotide
accccaaaugauucgcugc

SEQ ID NO: 582688 - RNA, 19 nt, Artificial Sequence
  Description of Artificial Sequence: Synthetic oligonucleotide
ugaguugauuuccauauuu

SEQ ID NO: 582689 - RNA, 19 nt, Artificial Sequence
  Description of Artificial Sequence: Synthetic oligonucleotide
uucuacguagaacucuuca

SEQ ID NO: 582690 - RNA, 19 nt, Artificial Sequence
  Description of Artificial Sequence: Synthetic oligonucleotide
uagauucaucaucacacca

SEQ ID NO: 582691 - RNA, 19 nt, Artificial Sequence
  Description of Artificial Sequence: Synthetic oligonucleotide
acagaucaauuguuuuggc

SEQ ID NO: 582692 - RNA, 19 nt, Artificial Sequence
  Description of Artificial Sequence: Synthetic oligonucleotide
ucauaagaugugaugccca

SEQ ID NO: 582693 - RNA, 19 nt, Artificial Sequence
  Description of Artificial Sequence: Synthetic oligonucleotide
auguuuaucugcaaggaug

SEQ ID NO: 582694 - RNA, 19 nt, Artificial Sequence
  Description of Artificial Sequence: Synthetic oligonucleotide
gucaaaucaaagcaguguc

SEQ ID NO: 582695 - RNA, 19 nt, Artificial Sequence
  Description of Artificial Sequence: Synthetic oligonucleotide
augucucacaaucugguca

SEQ ID NO: 582696 - RNA, 19 nt, Artificial Sequence
  Description of Artificial Sequence: Synthetic oligonucleotide
guauuugacccacucuggg

SEQ ID NO: 582697 - RNA, 19 nt, Artificial Sequence
  Description of Artificial Sequence: Synthetic oligonucleotide
agacuuaauggcaacuugg

SEQ ID NO: 582698 - RNA, 19 nt, Artificial Sequence
  Description of Artificial Sequence: Synthetic oligonucleotide
cacagaucaauuguuuugg

SEQ ID NO: 582699 - RNA, 19 nt, Artificial Sequence
  Description of Artificial Sequence: Synthetic oligonucleotide
caaucaagugaaaaucuuc

SEQ ID NO: 582700 - RNA, 19 nt, Artificial Sequence
  Description of Artificial Sequence: Synthetic oligonucleotide
aauaacuggugguucggaa

SEQ ID NO: 582701 - RNA, 19 nt, Artificial Sequence
  Description of Artificial Sequence: Synthetic oligonucleotide
uaagagcuugguaucggcc

SEQ ID NO: 582702 - RNA, 19 nt, Artificial Sequence
  Description of Artificial Sequence: Synthetic oligonucleotide
uauuuauccucuggaaacc

SEQ ID NO: 582703 - RNA, 19 nt, Artificial Sequence
  Description of Artificial Sequence: Synthetic oligonucleotide
auguccuacuaguuuuagc

SEQ ID NO: 582704 - RNA, 19 nt, Artificial Sequence
  Description of Artificial Sequence: Synthetic oligonucleotide
ugucaaaucaaagcagugu

SEQ ID NO: 582705 - RNA, 19 nt, Artificial Sequence
  Description of Artificial Sequence: Synthetic oligonucleotide
ucauguguggaaauugcau

SEQ ID NO: 582706 - RNA, 19 nt, Artificial Sequence
  Description of Artificial Sequence: Synthetic oligonucleotide
ucucgaaguucuuucaggu

SEQ ID NO: 582707 - RNA, 19 nt, Artificial Sequence
  Description of Artificial Sequence: Synthetic oligonucleotide
ugcacaaguucauauugga

SEQ ID NO: 582708 - RNA, 19 nt, Artificial Sequence
  Description of Artificial Sequence: Synthetic oligonucleotide
cuacguagaacucuucaug

SEQ ID NO: 582709 - RNA, 19 nt, Artificial Sequence
  Description of Artificial Sequence: Synthetic oligonucleotide
ucuucugagcuucucuugu

SEQ ID NO: 582710 - RNA, 19 nt, Artificial Sequence
  Description of Artificial Sequence: Synthetic oligonucleotide
ugaguuacuaaauguuguc

SEQ ID NO: 582711 - RNA, 19 nt, Artificial Sequence
  Description of Artificial Sequence: Synthetic oligonucleotide
ugaucuaauaauguucuua

SEQ ID NO: 582712 - RNA, 19 nt, Artificial Sequence
  Description of Artificial Sequence: Synthetic oligonucleotide
auugugucaacuacggcag

SEQ ID NO: 582713 - RNA, 19 nt, Artificial Sequence
  Description of Artificial Sequence: Synthetic oligonucleotide
ugacaauaccgacuuugcc

SEQ ID NO: 582714 - RNA, 19 nt, Artificial Sequence
  Description of Artificial Sequence: Synthetic oligonucleotide
aucuaauaauguucuuauc

SEQ ID NO: 582715 - RNA, 19 nt, Artificial Sequence
  Description of Artificial Sequence: Synthetic oligonucleotide
ggauuuaucuuuauaacac

SEQ ID NO: 582716 - RNA, 19 nt, Artificial Sequence
  Description of Artificial Sequence: Synthetic oligonucleotide
aaaacgguaaaagcuuccu

SEQ ID NO: 582717 - RNA, 19 nt, Artificial Sequence
  Description of Artificial Sequence: Synthetic oligonucleotide
aguguauccauaaggagcu

SEQ ID NO: 582718 - RNA, 19 nt, Artificial Sequence
  Description of Artificial Sequence: Synthetic oligonucleotide
uggcucucuguuuagauuc

SEQ ID NO: 582719 - RNA, 19 nt, Artificial Sequence
  Description of Artificial Sequence: Synthetic oligonucleotide
aaagaaucuuguaacccca

SEQ ID NO: 582720 - RNA, 19 nt, Artificial Sequence
  Description of Artificial Sequence: Synthetic oligonucleotide
uccuacuaguuuuagcagu

SEQ ID NO: 582721 - RNA, 19 nt, Artificial Sequence
  Description of Artificial Sequence: Synthetic oligonucleotide
agaaacgauauccauccau

SEQ ID NO: 582722 - RNA, 19 nt, Artificial Sequence
  Description of Artificial Sequence: Synthetic oligonucleotide
aucaacaaauaugauuuug

SEQ ID NO: 582723 - RNA, 19 nt, Artificial Sequence
  Description of Artificial Sequence: Synthetic oligonucleotide
cuguuuagauucaucauca

SEQ ID NO: 582724 - RNA, 19 nt, Artificial Sequence
  Description of Artificial Sequence: Synthetic oligonucleotide
aaccccaaaugauucgcug

SEQ ID NO: 582725 - RNA, 19 nt, Artificial Sequence
  Description of Artificial Sequence: Synthetic oligonucleotide
agcgcuagaguucaucaug

SEQ ID NO: 582726 - RNA, 19 nt, Artificial Sequence
  Description of Artificial Sequence: Synthetic oligonucleotide
aaauaugauuuuguccacu

SEQ ID NO: 582727 - RNA, 19 nt, Artificial Sequence
  Description of Artificial Sequence: Synthetic oligonucleotide
aaauguuggcgaaagguaa

SEQ ID NO: 582728 - RNA, 19 nt, Artificial Sequence
  Description of Artificial Sequence: Synthetic oligonucleotide
ugugucaacuacggcaggg

SEQ ID NO: 582729 - RNA, 19 nt, Artificial Sequence
  Description of Artificial Sequence: Synthetic oligonucleotide
cauccuauuuauccucugg

SEQ ID NO: 582730 - RNA, 19 nt, Artificial Sequence
  Description of Artificial Sequence: Synthetic oligonucleotide
cacgucgaggaaaagaauc

SEQ ID NO: 582731 - RNA, 19 nt, Artificial Sequence
  Description of Artificial Sequence: Synthetic oligonucleotide
uaauugacucccacaugcc

SEQ ID NO: 582732 - RNA, 19 nt, Artificial Sequence
  Description of Artificial Sequence: Synthetic oligonucleotide
cuugguaucggccccggag

SEQ ID NO: 582733 - RNA, 19 nt, Artificial Sequence
  Description of Artificial Sequence: Synthetic oligonucleotide
caaaacgguaaaagcuucc

SEQ ID NO: 582734 - RNA, 19 nt, Artificial Sequence
  Description of Artificial Sequence: Synthetic oligonucleotide
cuaaaggggcuuccgaaag

SEQ ID NO: 582735 - RNA, 19 nt, Artificial Sequence
  Description of Artificial Sequence: Synthetic oligonucleotide
ucuuaucucugcaucguau

SEQ ID NO: 582736 - RNA, 19 nt, Artificial Sequence
  Description of Artificial Sequence: Synthetic oligonucleotide
acaaccaauagcugugcca

SEQ ID NO: 582737 - RNA, 19 nt, Artificial Sequence
  Description of Artificial Sequence: Synthetic oligonucleotide
gaucuaauaauguucuuau

SEQ ID NO: 582738 - RNA, 19 nt, Artificial Sequence
  Description of Artificial Sequence: Synthetic oligonucleotide
agauucaucaucacaccag

SEQ ID NO: 582739 - RNA, 19 nt, Artificial Sequence
  Description of Artificial Sequence: Synthetic oligonucleotide
acugaguuacuaaauguug

SEQ ID NO: 582740 - RNA, 19 nt, Artificial Sequence
  Description of Artificial Sequence: Synthetic oligonucleotide
ugguucggaaaauauuacu

SEQ ID NO: 582741 - RNA, 19 nt, Artificial Sequence
  Description of Artificial Sequence: Synthetic oligonucleotide
guaaacugcagacccugag

SEQ ID NO: 582742 - RNA, 19 nt, Artificial Sequence
  Description of Artificial Sequence: Synthetic oligonucleotide
uuuucagucuguuggugaa

SEQ ID NO: 582743 - RNA, 19 nt, Artificial Sequence
  Description of Artificial Sequence: Synthetic oligonucleotide
auccuauuuauccucugga

SEQ ID NO: 582744 - RNA, 19 nt, Artificial Sequence
  Description of Artificial Sequence: Synthetic oligonucleotide
ucggaaaauauuacuccaa

SEQ ID NO: 582745 - RNA, 19 nt, Artificial Sequence
  Description of Artificial Sequence: Synthetic oligonucleotide
uucauccuauuuauccucu

SEQ ID NO: 582746 - RNA, 19 nt, Artificial Sequence
  Description of Artificial Sequence: Synthetic oligonucleotide
aauggccagaagcaaccga

SEQ ID NO: 582747 - RNA, 19 nt, Artificial Sequence
  Description of Artificial Sequence: Synthetic oligonucleotide
gacuauuuggaucuuggcu

SEQ ID NO: 582748 - RNA, 19 nt, Artificial Sequence
  Description of Artificial Sequence: Synthetic oligonucleotide
ucacucaaguguuuugagu

SEQ ID NO: 582749 - RNA, 19 nt, Artificial Sequence
  Description of Artificial Sequence: Synthetic oligonucleotide
gacggaaagcaucaugauc

SEQ ID NO: 582750 - RNA, 19 nt, Artificial Sequence
  Description of Artificial Sequence: Synthetic oligonucleotide
ugcggcuaucacagaaugg

SEQ ID NO: 582751 - RNA, 19 nt, Artificial Sequence
  Description of Artificial Sequence: Synthetic oligonucleotide
aauacccaagauuggccau

SEQ ID NO: 582752 - RNA, 19 nt, Artificial Sequence
  Description of Artificial Sequence: Synthetic oligonucleotide
cuaagagcuugguaucggc

SEQ ID NO: 582753 - RNA, 19 nt, Artificial Sequence
  Description of Artificial Sequence: Synthetic oligonucleotide
ucaacuacggcaggguugu

SEQ ID NO: 582754 - RNA, 19 nt, Artificial Sequence
  Description of Artificial Sequence: Synthetic oligonucleotide
uccuauuuauccucuggaa

SEQ ID NO: 582755 - RNA, 19 nt, Artificial Sequence
  Description of Artificial Sequence: Synthetic oligonucleotide
cacaacgaugacaucuccc

SEQ ID NO: 582756 - RNA, 19 nt, Artificial Sequence
  Description of Artificial Sequence: Synthetic oligonucleotide
aggaauuuugccacugguc

SEQ ID NO: 582757 - RNA, 19 nt, Artificial Sequence
  Description of Artificial Sequence: Synthetic oligonucleotide
ugugcccaguguaaacugc

SEQ ID NO: 582758 - RNA, 19 nt, Artificial Sequence
  Description of Artificial Sequence: Synthetic oligonucleotide
ucuuuaccucaauuuucag

SEQ ID NO: 582759 - RNA, 19 nt, Artificial Sequence
  Description of Artificial Sequence: Synthetic oligonucleotide
acucaaguguuuugaguug

SEQ ID NO: 582760 - RNA, 19 nt, Artificial Sequence
  Description of Artificial Sequence: Synthetic oligonucleotide
gcuuccgaaagcuugcucc

SEQ ID NO: 582761 - RNA, 19 nt, Artificial Sequence
  Description of Artificial Sequence: Synthetic oligonucleotide
gaaggacuacuguuagccc

SEQ ID NO: 582762 - RNA, 19 nt, Artificial Sequence
  Description of Artificial Sequence: Synthetic oligonucleotide
guauccauaaggagcuccg

SEQ ID NO: 582763 - RNA, 19 nt, Artificial Sequence
  Description of Artificial Sequence: Synthetic oligonucleotide
uacuccaacgguguuauau

SEQ ID NO: 582764 - RNA, 19 nt, Artificial Sequence
  Description of Artificial Sequence: Synthetic oligonucleotide
guguccaacacaacgauga

SEQ ID NO: 582765 - RNA, 19 nt, Artificial Sequence
  Description of Artificial Sequence: Synthetic oligonucleotide
uuggcgaaagguaauucuu

SEQ ID NO: 582766 - RNA, 19 nt, Artificial Sequence
  Description of Artificial Sequence: Synthetic oligonucleotide
aauuuugccacugguccau

SEQ ID NO: 582767 - RNA, 19 nt, Artificial Sequence
  Description of Artificial Sequence: Synthetic oligonucleotide
agugaaaaucuucuacgua

SEQ ID NO: 582768 - RNA, 19 nt, Artificial Sequence
  Description of Artificial Sequence: Synthetic oligonucleotide
cuguuucaaccaaccaucc

SEQ ID NO: 582769 - RNA, 19 nt, Artificial Sequence
  Description of Artificial Sequence: Synthetic oligonucleotide
gaauuuugccacuggucca

SEQ ID NO: 582770 - RNA, 19 nt, Artificial Sequence
  Description of Artificial Sequence: Synthetic oligonucleotide
cagaucaaaaucucgaagu

SEQ ID NO: 582771 - RNA, 19 nt, Artificial Sequence
  Description of Artificial Sequence: Synthetic oligonucleotide
aggacggaaagcaucauga

SEQ ID NO: 582772 - RNA, 19 nt, Artificial Sequence
  Description of Artificial Sequence: Synthetic oligonucleotide
ucuagguuugaaagacuau

SEQ ID NO: 582773 - RNA, 19 nt, Artificial Sequence
  Description of Artificial Sequence: Synthetic oligonucleotide
augucagugcggcuaucac

SEQ ID NO: 582774 - RNA, 19 nt, Artificial Sequence
  Description of Artificial Sequence: Synthetic oligonucleotide
ccguagaaaacguucauac

SEQ ID NO: 582775 - RNA, 19 nt, Artificial Sequence
  Description of Artificial Sequence: Synthetic oligonucleotide
uucaguauccaugcaccug

SEQ ID NO: 582776 - RNA, 19 nt, Artificial Sequence
  Description of Artificial Sequence: Synthetic oligonucleotide
cugcuagugggaaaagcac

SEQ ID NO: 582777 - RNA, 19 nt, Artificial Sequence
  Description of Artificial Sequence: Synthetic oligonucleotide
ucugugcccaguguaaacu

SEQ ID NO: 582778 - RNA, 19 nt, Artificial Sequence
  Description of Artificial Sequence: Synthetic oligonucleotide
aucguauuugacccacucu

SEQ ID NO: 582779 - RNA, 19 nt, Artificial Sequence
  Description of Artificial Sequence: Synthetic oligonucleotide
cacaagcgcaucuauuuuc

SEQ ID NO: 582780 - RNA, 19 nt, Artificial Sequence
  Description of Artificial Sequence: Synthetic oligonucleotide
uccuucacguaauuucagu

SEQ ID NO: 582781 - RNA, 19 nt, Artificial Sequence
  Description of Artificial Sequence: Synthetic oligonucleotide
guccuacuaguuuuagcag

SEQ ID NO: 582782 - RNA, 19 nt, Artificial Sequence
  Description of Artificial Sequence: Synthetic oligonucleotide
uguaaacugcagacccuga

SEQ ID NO: 582783 - RNA, 19 nt, Artificial Sequence
  Description of Artificial Sequence: Synthetic oligonucleotide
caucaugauccguagaaaa

SEQ ID NO: 582784 - RNA, 19 nt, Artificial Sequence
  Description of Artificial Sequence: Synthetic oligonucleotide
guaaaucauauuguuggga

SEQ ID NO: 582785 - RNA, 19 nt, Artificial Sequence
  Description of Artificial Sequence: Synthetic oligonucleotide
guaaccccaaaugauucgc

SEQ ID NO: 582786 - RNA, 19 nt, Artificial Sequence
  Description of Artificial Sequence: Synthetic oligonucleotide
gaucaauuguuuuggcucu

SEQ ID NO: 582787 - RNA, 19 nt, Artificial Sequence
  Description of Artificial Sequence: Synthetic oligonucleotide
auuacuccaacgguguuau

SEQ ID NO: 582788 - RNA, 19 nt, Artificial Sequence
  Description of Artificial Sequence: Synthetic oligonucleotide
gauccguagaaaacguuca

SEQ ID NO: 582789 - RNA, 19 nt, Artificial Sequence
  Description of Artificial Sequence: Synthetic oligonucleotide
gaaaccagcgcuagaguuc

SEQ ID NO: 582790 - RNA, 19 nt, Artificial Sequence
  Description of Artificial Sequence: Synthetic oligonucleotide
auuguugggaagauccuga

SEQ ID NO: 582791 - RNA, 19 nt, Artificial Sequence
  Description of Artificial Sequence: Synthetic oligonucleotide
uccugaucuagguuugaaa

SEQ ID NO: 582792 - RNA, 19 nt, Artificial Sequence
  Description of Artificial Sequence: Synthetic oligonucleotide
ugacaucaaagaacagauc

SEQ ID NO: 582793 - RNA, 19 nt, Artificial Sequence
  Description of Artificial Sequence: Synthetic oligonucleotide
ugaaaguguccaacacaac

SEQ ID NO: 582794 - RNA, 19 nt, Artificial Sequence
  Description of Artificial Sequence: Synthetic oligonucleotide
auucuccggaacuucuuga

SEQ ID NO: 582795 - RNA, 19 nt, Artificial Sequence
  Description of Artificial Sequence: Synthetic oligonucleotide
gguucggaaaauauuacuc

SEQ ID NO: 582796 - RNA, 19 nt, Artificial Sequence
  Description of Artificial Sequence: Synthetic oligonucleotide
cuauugugucaacuacggc

SEQ ID NO: 582797 - RNA, 19 nt, Artificial Sequence
  Description of Artificial Sequence: Synthetic oligonucleotide
caggguuguuuucugugcc

SEQ ID NO: 582798 - RNA, 19 nt, Artificial Sequence
  Description of Artificial Sequence: Synthetic oligonucleotide
ucguguucacaaucuugcc

SEQ ID NO: 582799 - RNA, 19 nt, Artificial Sequence
  Description of Artificial Sequence: Synthetic oligonucleotide
aucaccucuuuaaauguug

SEQ ID NO: 582800 - RNA, 19 nt, Artificial Sequence
  Description of Artificial Sequence: Synthetic oligonucleotide
uacaaauggccagaagcaa

SEQ ID NO: 582801 - RNA, 19 nt, Artificial Sequence
  Description of Artificial Sequence: Synthetic oligonucleotide
uauuacuccaacgguguua

SEQ ID NO: 582802 - RNA, 19 nt, Artificial Sequence
  Description of Artificial Sequence: Synthetic oligonucleotide
uugugucaacuacggcagg

SEQ ID NO: 582803 - RNA, 19 nt, Artificial Sequence
  Description of Artificial Sequence: Synthetic oligonucleotide
agaguuagaaggugagauu

SEQ ID NO: 582804 - RNA, 19 nt, Artificial Sequence
  Description of Artificial Sequence: Synthetic oligonucleotide
gagccuaucaccugcugaa

SEQ ID NO: 582805 - RNA, 19 nt, Artificial Sequence
  Description of Artificial Sequence: Synthetic oligonucleotide
aauguuggcgaaagguaau

SEQ ID NO: 582806 - RNA, 19 nt, Artificial Sequence
  Description of Artificial Sequence: Synthetic oligonucleotide
uaaccccaaaugauucgcu

SEQ ID NO: 582807 - RNA, 19 nt, Artificial Sequence
  Description of Artificial Sequence: Synthetic oligonucleotide
guugagaguuagaagguga

SEQ ID NO: 582808 - RNA, 19 nt, Artificial Sequence
  Description of Artificial Sequence: Synthetic oligonucleotide
ucauccuauuuauccucug

SEQ ID NO: 582809 - RNA, 19 nt, Artificial Sequence
  Description of Artificial Sequence: Synthetic oligonucleotide
uuagccccugacaucaguu

SEQ ID NO: 582810 - RNA, 19 nt, Artificial Sequence
  Description of Artificial Sequence: Synthetic oligonucleotide
acuacggcaggguuguuuu

SEQ ID NO: 582811 - RNA, 19 nt, Artificial Sequence
  Description of Artificial Sequence: Synthetic oligonucleotide
aucaagugaaaaucuucua

SEQ ID NO: 582812 - RNA, 19 nt, Artificial Sequence
  Description of Artificial Sequence: Synthetic oligonucleotide
auacccaagauuggccauc

SEQ ID NO: 582813 - RNA, 19 nt, Artificial Sequence
  Description of Artificial Sequence: Synthetic oligonucleotide
gcugacaauaccgacuuug

SEQ ID NO: 582814 - RNA, 19 nt, Artificial Sequence
  Description of Artificial Sequence: Synthetic oligonucleotide
uggugguucggaaaauauu

SEQ ID NO: 582815 - RNA, 19 nt, Artificial Sequence
  Description of Artificial Sequence: Synthetic oligonucleotide
acguucauacaaauggcca

SEQ ID NO: 582816 - RNA, 19 nt, Artificial Sequence
  Description of Artificial Sequence: Synthetic oligonucleotide
uuuucucuacugaguuacu

SEQ ID NO: 582817 - RNA, 19 nt, Artificial Sequence
  Description of Artificial Sequence: Synthetic oligonucleotide
ugcaucguauuugacccac

SEQ ID NO: 582818 - RNA, 19 nt, Artificial Sequence
  Description of Artificial Sequence: Synthetic oligonucleotide
gacacaagcgcaucuauuu

SEQ ID NO: 582819 - RNA, 19 nt, Artificial Sequence
  Description of Artificial Sequence: Synthetic oligonucleotide
ccaacuauaucauaaauau

SEQ ID NO: 582820 - RNA, 19 nt, Artificial Sequence
  Description of Artificial Sequence: Synthetic oligonucleotide
uaccgacuuugccaggcug

SEQ ID NO: 582821 - RNA, 19 nt, Artificial Sequence
  Description of Artificial Sequence: Synthetic oligonucleotide
uccaacgguguuauauuuu

SEQ ID NO: 582822 - RNA, 19 nt, Artificial Sequence
  Description of Artificial Sequence: Synthetic oligonucleotide
ugguaucggccccggagcc

SEQ ID NO: 582823 - RNA, 19 nt, Artificial Sequence
  Description of Artificial Sequence: Synthetic oligonucleotide
agugggaaaagcacgucga

SEQ ID NO: 582824 - RNA, 19 nt, Artificial Sequence
  Description of Artificial Sequence: Synthetic oligonucleotide
agaaucuuguaaccccaaa

SEQ ID NO: 582825 - RNA, 19 nt, Artificial Sequence
  Description of Artificial Sequence: Synthetic oligonucleotide
ucuggaaaccagcgcuaga

SEQ ID NO: 582826 - RNA, 19 nt, Artificial Sequence
  Description of Artificial Sequence: Synthetic oligonucleotide
acguaauuucaguauccau

SEQ ID NO: 582827 - RNA, 19 nt, Artificial Sequence
  Description of Artificial Sequence: Synthetic oligonucleotide
auauuggaauccguacucu

SEQ ID NO: 582828 - RNA, 19 nt, Artificial Sequence
  Description of Artificial Sequence: Synthetic oligonucleotide
ugggguaaucauguugaga

SEQ ID NO: 582829 - RNA, 19 nt, Artificial Sequence
  Description of Artificial Sequence: Synthetic oligonucleotide
cccaguguaaacugcagac

SEQ ID NO: 582830 - RNA, 19 nt, Artificial Sequence
  Description of Artificial Sequence: Synthetic oligonucleotide
uucugugcccaguguaaac

SEQ ID NO: 582831 - RNA, 19 nt, Artificial Sequence
  Description of Artificial Sequence: Synthetic oligonucleotide
uccguacuguuucaaccaa

SEQ ID NO: 582832 - RNA, 19 nt, Artificial Sequence
  Description of Artificial Sequence: Synthetic oligonucleotide
gcuccguacuguuucaacc

SEQ ID NO: 582833 - RNA, 19 nt, Artificial Sequence
  Description of Artificial Sequence: Synthetic oligonucleotide
cagaugcucuagcucauac

SEQ ID NO: 582834 - RNA, 19 nt, Artificial Sequence
  Description of Artificial Sequence: Synthetic oligonucleotide
auucgcugcuuuucagucu

SEQ ID NO: 582835 - RNA, 19 nt, Artificial Sequence
  Description of Artificial Sequence: Synthetic oligonucleotide
uggccaucacuauuguguc

SEQ ID NO: 582836 - RNA, 19 nt, Artificial Sequence
  Description of Artificial Sequence: Synthetic oligonucleotide
uuauaacacugugauccuc

SEQ ID NO: 582837 - RNA, 19 nt, Artificial Sequence
  Description of Artificial Sequence: Synthetic oligonucleotide
acucggcuguggcaauccc

SEQ ID NO: 582838 - RNA, 19 nt, Artificial Sequence
  Description of Artificial Sequence: Synthetic oligonucleotide
cagaaggacuacuguuagc

SEQ ID NO: 582839 - RNA, 19 nt, Artificial Sequence
  Description of Artificial Sequence: Synthetic oligonucleotide
aaggcacugaugugguauu

SEQ ID NO: 582840 - RNA, 19 nt, Artificial Sequence
  Description of Artificial Sequence: Synthetic oligonucleotide
accaaccauccuucugggg

SEQ ID NO: 582841 - RNA, 19 nt, Artificial Sequence
  Description of Artificial Sequence: Synthetic oligonucleotide
cugaguuacuaaauguugu

SEQ ID NO: 582842 - RNA, 19 nt, Artificial Sequence
  Description of Artificial Sequence: Synthetic oligonucleotide
gugcggcuaucacagaaug

SEQ ID NO: 582843 - RNA, 19 nt, Artificial Sequence
  Description of Artificial Sequence: Synthetic oligonucleotide
cucggcuguggcaaucccc

SEQ ID NO: 582844 - RNA, 19 nt, Artificial Sequence
  Description of Artificial Sequence: Synthetic oligonucleotide
ucaauuguuuuggcucucu

SEQ ID NO: 582845 - RNA, 19 nt, Artificial Sequence
  Description of Artificial Sequence: Synthetic oligonucleotide
ucaaguguuuugaguugau

SEQ ID NO: 582846 - RNA, 19 nt, Artificial Sequence
  Description of Artificial Sequence: Synthetic oligonucleotide
acuccaacgguguuauauu

SEQ ID NO: 582847 - RNA, 19 nt, Artificial Sequence
  Description of Artificial Sequence: Synthetic oligonucleotide
ggacaauccuugcagcagc

SEQ ID NO: 582848 - RNA, 19 nt, Artificial Sequence
  Description of Artificial Sequence: Synthetic oligonucleotide
cacaaccaauagcugugcc

SEQ ID NO: 582849 - RNA, 19 nt, Artificial Sequence
  Description of Artificial Sequence: Synthetic oligonucleotide
uuauccucguguucacaau

SEQ ID NO: 582850 - RNA, 19 nt, Artificial Sequence
  Description of Artificial Sequence: Synthetic oligonucleotide
ugucaacuacggcaggguu

SEQ ID NO: 582851 - RNA, 19 nt, Artificial Sequence
  Description of Artificial Sequence: Synthetic oligonucleotide
acaagcgcaucuauuuuca

SEQ ID NO: 582852 - RNA, 19 nt, Artificial Sequence
  Description of Artificial Sequence: Synthetic oligonucleotide
aggucacucaaguguuuug

SEQ ID NO: 582853 - RNA, 19 nt, Artificial Sequence
  Description of Artificial Sequence: Synthetic oligonucleotide
uucaaccaaccauccuucu

SEQ ID NO: 582854 - RNA, 19 nt, Artificial Sequence
  Description of Artificial Sequence: Synthetic oligonucleotide
caauuguuuuggcucucug

SEQ ID NO: 582855 - RNA, 19 nt, Artificial Sequence
  Description of Artificial Sequence: Synthetic oligonucleotide
uguuggcgaaagguaauuc

SEQ ID NO: 582856 - RNA, 19 nt, Artificial Sequence
  Description of Artificial Sequence: Synthetic oligonucleotide
acgucgaggaaaagaaucu

SEQ ID NO: 582857 - RNA, 19 nt, Artificial Sequence
  Description of Artificial Sequence: Synthetic oligonucleotide
uccguagaaaacguucaua

SEQ ID NO: 582858 - RNA, 19 nt, Artificial Sequence
  Description of Artificial Sequence: Synthetic oligonucleotide
ggugguucggaaaauauua

SEQ ID NO: 582859 - RNA, 19 nt, Artificial Sequence
  Description of Artificial Sequence: Synthetic oligonucleotide
uugaguugauuuccauauu

SEQ ID NO: 582860 - RNA, 19 nt, Artificial Sequence
  Description of Artificial Sequence: Synthetic oligonucleotide
caggacggaaagcaucaug

SEQ ID NO: 582861 - RNA, 19 nt, Artificial Sequence
  Description of Artificial Sequence: Synthetic oligonucleotide
ggaauccguacucuuuggc

SEQ ID NO: 582862 - RNA, 19 nt, Artificial Sequence
  Description of Artificial Sequence: Synthetic oligonucleotide
ugcuccguacuguuucaac

SEQ ID NO: 582863 - RNA, 19 nt, Artificial Sequence
  Description of Artificial Sequence: Synthetic oligonucleotide
augcccaacuauaucauaa

SEQ ID NO: 582864 - RNA, 19 nt, Artificial Sequence
  Description of Artificial Sequence: Synthetic oligonucleotide
guucauauuggaauccgua

SEQ ID NO: 582865 - RNA, 19 nt, Artificial Sequence
  Description of Artificial Sequence: Synthetic oligonucleotide
uugacucccacaugccuuu

SEQ ID NO: 582866 - RNA, 19 nt, Artificial Sequence
  Description of Artificial Sequence: Synthetic oligonucleotide
cuuguaaccccaaaugauu

SEQ ID NO: 582867 - RNA, 19 nt, Artificial Sequence
  Description of Artificial Sequence: Synthetic oligonucleotide
uuaccucaauuuucaggau

SEQ ID NO: 582868 - RNA, 19 nt, Artificial Sequence
  Description of Artificial Sequence: Synthetic oligonucleotide
cauaaggagcuccgcccag

SEQ ID NO: 582869 - RNA, 19 nt, Artificial Sequence
  Description of Artificial Sequence: Synthetic oligonucleotide
aaauguccuacuaguuuua

SEQ ID NO: 582870 - RNA, 19 nt, Artificial Sequence
  Description of Artificial Sequence: Synthetic oligonucleotide
gcgaaagguaauucuucag

SEQ ID NO: 582871 - RNA, 19 nt, Artificial Sequence
  Description of Artificial Sequence: Synthetic oligonucleotide
cacugcuagugggaaaagc

SEQ ID NO: 582872 - RNA, 19 nt, Artificial Sequence
  Description of Artificial Sequence: Synthetic oligonucleotide
cguucauacaaauggccag

SEQ ID NO: 582873 - RNA, 19 nt, Artificial Sequence
  Description of Artificial Sequence: Synthetic oligonucleotide
caaaucaaagcaguguccu

SEQ ID NO: 582874 - RNA, 19 nt, Artificial Sequence
  Description of Artificial Sequence: Synthetic oligonucleotide
acacaagcgcaucuauuuu

SEQ ID NO: 582875 - RNA, 19 nt, Artificial Sequence
  Description of Artificial Sequence: Synthetic oligonucleotide
cacucaaguguuuugaguu

SEQ ID NO: 582876 - RNA, 19 nt, Artificial Sequence
  Description of Artificial Sequence: Synthetic oligonucleotide
aacuacggcaggguuguuu

SEQ ID NO: 582877 - RNA, 19 nt, Artificial Sequence
  Description of Artificial Sequence: Synthetic oligonucleotide
ggcgaaagguaauucuuca

SEQ ID NO: 582878 - RNA, 19 nt, Artificial Sequence
  Description of Artificial Sequence: Synthetic oligonucleotide
auccguagaaaacguucau

SEQ ID NO: 582879 - RNA, 19 nt, Artificial Sequence
  Description of Artificial Sequence: Synthetic oligonucleotide
gguaucuuuuaaauuaaua

SEQ ID NO: 582880 - RNA, 19 nt, Artificial Sequence
  Description of Artificial Sequence: Synthetic oligonucleotide
gugguucggaaaauauuac

SEQ ID NO: 582881 - RNA, 19 nt, Artificial Sequence
  Description of Artificial Sequence: Synthetic oligonucleotide
cuacuguuagccccugaca

SEQ ID NO: 582882 - RNA, 19 nt, Artificial Sequence
  Description of Artificial Sequence: Synthetic oligonucleotide
cucaaguguuuugaguuga

SEQ ID NO: 582883 - RNA, 19 nt, Artificial Sequence
  Description of Artificial Sequence: Synthetic oligonucleotide
aagaaucuuguaaccccaa

SEQ ID NO: 582884 - RNA, 19 nt, Artificial Sequence
  Description of Artificial Sequence: Synthetic oligonucleotide
ggcuaagagcuugguaucg

SEQ ID NO: 582885 - RNA, 19 nt, Artificial Sequence
  Description of Artificial Sequence: Synthetic oligonucleotide
aguguaaacugcagacccu

SEQ ID NO: 582886 - RNA, 19 nt, Artificial Sequence
  Description of Artificial Sequence: Synthetic oligonucleotide
accacauacaaggcacuga

SEQ ID NO: 582887 - RNA, 19 nt, Artificial Sequence
  Description of Artificial Sequence: Synthetic oligonucleotide
gacuuaauggcaacuuggu

SEQ ID NO: 582888 - RNA, 19 nt, Artificial Sequence
  Description of Artificial Sequence: Synthetic oligonucleotide
cguauuugacccacucugg

SEQ ID NO: 582889 - RNA, 19 nt, Artificial Sequence
  Description of Artificial Sequence: Synthetic oligonucleotide
uauccaucuacagccucau

SEQ ID NO: 582890 - RNA, 19 nt, Artificial Sequence
  Description of Artificial Sequence: Synthetic oligonucleotide
acacugugauccucucuga

SEQ ID NO: 582891 - RNA, 19 nt, Artificial Sequence
  Description of Artificial Sequence: Synthetic oligonucleotide
auauuacuccaacgguguu

SEQ ID NO: 582892 - RNA, 19 nt, Artificial Sequence
  Description of Artificial Sequence: Synthetic oligonucleotide
uggccagaagcaaccgaaa

SEQ ID NO: 582893 - RNA, 19 nt, Artificial Sequence
  Description of Artificial Sequence: Synthetic oligonucleotide
caugauccguagaaaacgu

SEQ ID NO: 582894 - RNA, 19 nt, Artificial Sequence
  Description of Artificial Sequence: Synthetic oligonucleotide
augaucuaauaauguucuu

SEQ ID NO: 582895 - RNA, 19 nt, Artificial Sequence
  Description of Artificial Sequence: Synthetic oligonucleotide
gcggcuaucacagaaugga

SEQ ID NO: 582896 - RNA, 19 nt, Artificial Sequence
  Description of Artificial Sequence: Synthetic oligonucleotide
cuuucaggucaugucucac

SEQ ID NO: 582897 - RNA, 19 nt, Artificial Sequence
  Description of Artificial Sequence: Synthetic oligonucleotide
cauguguggaaauugcauu

SEQ ID NO: 582898 - RNA, 19 nt, Artificial Sequence
  Description of Artificial Sequence: Synthetic oligonucleotide
aagccaacggggccacuua

SEQ ID NO: 582899 - RNA, 19 nt, Artificial Sequence
  Description of Artificial Sequence: Synthetic oligonucleotide
auaccgacuuugccaggcu

SEQ ID NO: 582900 - RNA, 19 nt, Artificial Sequence
  Description of Artificial Sequence: Synthetic oligonucleotide
aggacuacuguuagccccu

SEQ ID NO: 582901 - RNA, 19 nt, Artificial Sequence
  Description of Artificial Sequence: Synthetic oligonucleotide
cacguaauuucaguaucca

SEQ ID NO: 582902 - RNA, 19 nt, Artificial Sequence
  Description of Artificial Sequence: Synthetic oligonucleotide
gggacaauccuugcagcag

SEQ ID NO: 582903 - RNA, 19 nt, Artificial Sequence
  Description of Artificial Sequence: Synthetic oligonucleotide
auccucguguucacaaucu

SEQ ID NO: 582904 - RNA, 19 nt, Artificial Sequence
  Description of Artificial Sequence: Synthetic oligonucleotide
auacucggcuguggcaauc

SEQ ID NO: 582905 - RNA, 19 nt, Artificial Sequence
  Description of Artificial Sequence: Synthetic oligonucleotide
auccguacucuuuggccau

SEQ ID NO: 582906 - RNA, 19 nt, Artificial Sequence
  Description of Artificial Sequence: Synthetic oligonucleotide
guugcuccguacuguuuca

SEQ ID NO: 582907 - RNA, 19 nt, Artificial Sequence
  Description of Artificial Sequence: Synthetic oligonucleotide
acggggccacuuauauugc

SEQ ID NO: 582908 - RNA, 19 nt, Artificial Sequence
  Description of Artificial Sequence: Synthetic oligonucleotide
guaaucauguugagaguua

SEQ ID NO: 582909 - RNA, 19 nt, Artificial Sequence
  Description of Artificial Sequence: Synthetic oligonucleotide
uuccgaaagcuugcuccug

SEQ ID NO: 582910 - RNA, 19 nt, Artificial Sequence
  Description of Artificial Sequence: Synthetic oligonucleotide
ggagccuaucaccugcuga

SEQ ID NO: 582911 - RNA, 19 nt, Artificial Sequence
  Description of Artificial Sequence: Synthetic oligonucleotide
ggucacucaaguguuuuga

SEQ ID NO: 582912 - RNA, 19 nt, Artificial Sequence
  Description of Artificial Sequence: Synthetic oligonucleotide
auuuugccacugguccauc

SEQ ID NO: 582913 - RNA, 19 nt, Artificial Sequence
  Description of Artificial Sequence: Synthetic oligonucleotide
gguuccagaacaaaacggu

SEQ ID NO: 582914 - RNA, 19 nt, Artificial Sequence
  Description of Artificial Sequence: Synthetic oligonucleotide
caccacauacaaggcacug

SEQ ID NO: 582915 - RNA, 19 nt, Artificial Sequence
  Description of Artificial Sequence: Synthetic oligonucleotide
ucggccccggagccuauca

SEQ ID NO: 582916 - RNA, 19 nt, Artificial Sequence
  Description of Artificial Sequence: Synthetic oligonucleotide
cuagugggaaaagcacguc

SEQ ID NO: 582917 - RNA, 19 nt, Artificial Sequence
  Description of Artificial Sequence: Synthetic oligonucleotide
cgguaaaagcuuccuaaag

SEQ ID NO: 582918 - RNA, 19 nt, Artificial Sequence
  Description of Artificial Sequence: Synthetic oligonucleotide
gggccacuuauauugcaca

SEQ ID NO: 582919 - RNA, 19 nt, Artificial Sequence
  Description of Artificial Sequence: Synthetic oligonucleotide
agugcggcuaucacagaau

SEQ ID NO: 582920 - RNA, 19 nt, Artificial Sequence
  Description of Artificial Sequence: Synthetic oligonucleotide
auguuggcgaaagguaauu

SEQ ID NO: 582921 - RNA, 19 nt, Artificial Sequence
  Description of Artificial Sequence: Synthetic oligonucleotide
cauguuuaucugcaaggau

SEQ ID NO: 582922 - RNA, 19 nt, Artificial Sequence
  Description of Artificial Sequence: Synthetic oligonucleotide
gaguugauuuccauauuuu

SEQ ID NO: 582923 - RNA, 19 nt, Artificial Sequence
  Description of Artificial Sequence: Synthetic oligonucleotide
agcuuuuaauugacuccca

SEQ ID NO: 582924 - RNA, 19 nt, Artificial Sequence
  Description of Artificial Sequence: Synthetic oligonucleotide
guaaagguccuaagaauuu

SEQ ID NO: 582925 - RNA, 19 nt, Artificial Sequence
  Description of Artificial Sequence: Synthetic oligonucleotide
gaucuagguuugaaagacu

SEQ ID NO: 582926 - RNA, 19 nt, Artificial Sequence
  Description of Artificial Sequence: Synthetic oligonucleotide
guucuuaucucugcaucgu

SEQ ID NO: 582927 - RNA, 19 nt, Artificial Sequence
  Description of Artificial Sequence: Synthetic oligonucleotide
agccaacggggccacuuau

SEQ ID NO: 582928 - RNA, 19 nt, Artificial Sequence
  Description of Artificial Sequence: Synthetic oligonucleotide
caaccauccuucuggggua

SEQ ID NO: 582929 - RNA, 19 nt, Artificial Sequence
  Description of Artificial Sequence: Synthetic oligonucleotide
ggaaaccagcgcuagaguu

SEQ ID NO: 582930 - RNA, 19 nt, Artificial Sequence
  Description of Artificial Sequence: Synthetic oligonucleotide
agcuugguaucggccccgg

SEQ ID NO: 582931 - RNA, 19 nt, Artificial Sequence
  Description of Artificial Sequence: Synthetic oligonucleotide
aggcugcaauuuaaguaca

SEQ ID NO: 582932 - RNA, 19 nt, Artificial Sequence
  Description of Artificial Sequence: Synthetic oligonucleotide
gauuuuccuucacguaauu

SEQ ID NO: 582933 - RNA, 19 nt, Artificial Sequence
  Description of Artificial Sequence: Synthetic oligonucleotide
caguacccuguuuuccaga

SEQ ID NO: 582934 - RNA, 19 nt, Artificial Sequence
  Description of Artificial Sequence: Synthetic oligonucleotide
ccagcgcuagaguucauca

SEQ ID NO: 582935 - RNA, 19 nt, Artificial Sequence
  Description of Artificial Sequence: Synthetic oligonucleotide
ccuucacguaauuucagua

SEQ ID NO: 582936 - RNA, 19 nt, Artificial Sequence
  Description of Artificial Sequence: Synthetic oligonucleotide
uccguacucuuuggccaug

SEQ ID NO: 582937 - RNA, 19 nt, Artificial Sequence
  Description of Artificial Sequence: Synthetic oligonucleotide
caucacuauugugucaacu

SEQ ID NO: 582938 - RNA, 19 nt, Artificial Sequence
  Description of Artificial Sequence: Synthetic oligonucleotide
augauccguagaaaacguu

SEQ ID NO: 582939 - RNA, 19 nt, Artificial Sequence
  Description of Artificial Sequence: Synthetic oligonucleotide
guccuaagaauuucccauu

SEQ ID NO: 582940 - RNA, 19 nt, Artificial Sequence
  Description of Artificial Sequence: Synthetic oligonucleotide
cgcccagaucaaaaucucg

SEQ ID NO: 582941 - RNA, 19 nt, Artificial Sequence
  Description of Artificial Sequence: Synthetic oligonucleotide
uugcuccguacuguuucaa

SEQ ID NO: 582942 - RNA, 19 nt, Artificial Sequence
  Description of Artificial Sequence: Synthetic oligonucleotide
cguagaaaacguucauaca

SEQ ID NO: 582943 - RNA, 19 nt, Artificial Sequence
  Description of Artificial Sequence: Synthetic oligonucleotide
ugcugacaauaccgacuuu

SEQ ID NO: 582944 - RNA, 19 nt, Artificial Sequence
  Description of Artificial Sequence: Synthetic oligonucleotide
ccguacuguuucaaccaac

SEQ ID NO: 582945 - RNA, 19 nt, Artificial Sequence
  Description of Artificial Sequence: Synthetic oligonucleotide
cugcaucguauuugaccca

SEQ ID NO: 582946 - RNA, 19 nt, Artificial Sequence
  Description of Artificial Sequence: Synthetic oligonucleotide
gcacaaccaauagcugugc

SEQ ID NO: 582947 - RNA, 19 nt, Artificial Sequence
  Description of Artificial Sequence: Synthetic oligonucleotide
guacccuguuuuccagaaa

SEQ ID NO: 582948 - RNA, 19 nt, Artificial Sequence
  Description of Artificial Sequence: Synthetic oligonucleotide
cagucuugaggaagagacu

SEQ ID NO: 582949 - RNA, 19 nt, Artificial Sequence
  Description of Artificial Sequence: Synthetic oligonucleotide
gcacaaguucauauuggaa

SEQ ID NO: 582950 - RNA, 19 nt, Artificial Sequence
  Description of Artificial Sequence: Synthetic oligonucleotide
acaauccuugcagcagcuu

SEQ ID NO: 582951 - RNA, 19 nt, Artificial Sequence
  Description of Artificial Sequence: Synthetic oligonucleotide
gucuguuggugaagccaac

SEQ ID NO: 582952 - RNA, 19 nt, Artificial Sequence
  Description of Artificial Sequence: Synthetic oligonucleotide
ccgguaucuuuuaaauuaa

SEQ ID NO: 582953 - RNA, 19 nt, Artificial Sequence
  Description of Artificial Sequence: Synthetic oligonucleotide
caucaacaaauaugauuuu

SEQ ID NO: 582954 - RNA, 19 nt, Artificial Sequence
  Description of Artificial Sequence: Synthetic oligonucleotide
ccauaaggagcuccgccca

SEQ ID NO: 582955 - RNA, 19 nt, Artificial Sequence
  Description of Artificial Sequence: Synthetic oligonucleotide
cuccaacgguguuauauuu

SEQ ID NO: 582956 - RNA, 19 nt, Artificial Sequence
  Description of Artificial Sequence: Synthetic oligonucleotide
agccuaucaccugcugaaa

SEQ ID NO: 582957 - RNA, 19 nt, Artificial Sequence
  Description of Artificial Sequence: Synthetic oligonucleotide
ccccugacaucaguucugg

SEQ ID NO: 582958 - RNA, 19 nt, Artificial Sequence
  Description of Artificial Sequence: Synthetic oligonucleotide
guccuucaaggagcagaug

SEQ ID NO: 582959 - RNA, 19 nt, Artificial Sequence
  Description of Artificial Sequence: Synthetic oligonucleotide
gguggcagauuuucauccu

SEQ ID NO: 582960 - RNA, 19 nt, Artificial Sequence
  Description of Artificial Sequence: Synthetic oligonucleotide
ggcuuccgaaagcuugcuc

SEQ ID NO: 582961 - RNA, 19 nt, Artificial Sequence
  Description of Artificial Sequence: Synthetic oligonucleotide
guaucggccccggagccua

SEQ ID NO: 582962 - RNA, 19 nt, Artificial Sequence
  Description of Artificial Sequence: Synthetic oligonucleotide
ggguaaucauguugagagu

SEQ ID NO: 582963 - RNA, 19 nt, Artificial Sequence
  Description of Artificial Sequence: Synthetic oligonucleotide
ccgcccagaucaaaaucuc

SEQ ID NO: 582964 - RNA, 19 nt, Artificial Sequence
  Description of Artificial Sequence: Synthetic oligonucleotide
gcccaacuauaucauaaau

SEQ ID NO: 582965 - RNA, 19 nt, Artificial Sequence
  Description of Artificial Sequence: Synthetic oligonucleotide
aggcacugaugugguauuu

SEQ ID NO: 582966 - RNA, 19 nt, Artificial Sequence
  Description of Artificial Sequence: Synthetic oligonucleotide
caacgaugacaucucccau

SEQ ID NO: 582967 - RNA, 19 nt, Artificial Sequence
  Description of Artificial Sequence: Synthetic oligonucleotide
gccuaucaccugcugaaau

SEQ ID NO: 582968 - RNA, 19 nt, Artificial Sequence
  Description of Artificial Sequence: Synthetic oligonucleotide
gcgcuagaguucaucaugu

SEQ ID NO: 582969 - RNA, 19 nt, Artificial Sequence
  Description of Artificial Sequence: Synthetic oligonucleotide
cagcgcuagaguucaucau

SEQ ID NO: 582970 - RNA, 19 nt, Artificial Sequence
  Description of Artificial Sequence: Synthetic oligonucleotide
cauccaugucagugcggcu

SEQ ID NO: 582971 - RNA, 19 nt, Artificial Sequence
  Description of Artificial Sequence: Synthetic oligonucleotide
cauacucggcuguggcaau

SEQ ID NO: 582972 - RNA, 19 nt, Artificial Sequence
  Description of Artificial Sequence: Synthetic oligonucleotide
ccaacggggccacuuauau

SEQ ID NO: 582973 - RNA, 19 nt, Artificial Sequence
  Description of Artificial Sequence: Synthetic oligonucleotide
gagcuccgcccagaucaaa

SEQ ID NO: 582974 - RNA, 19 nt, Artificial Sequence
  Description of Artificial Sequence: Synthetic oligonucleotide
caacggggccacuuauauu

SEQ ID NO: 582975 - RNA, 19 nt, Artificial Sequence
  Description of Artificial Sequence: Synthetic oligonucleotide
aaccagcgcuagaguucau

SEQ ID NO: 582976 - RNA, 19 nt, Artificial Sequence
  Description of Artificial Sequence: Synthetic oligonucleotide
gcuugguaucggccccgga

SEQ ID NO: 582977 - RNA, 19 nt, Artificial Sequence
  Description of Artificial Sequence: Synthetic oligonucleotide
gccaacggggccacuuaua

SEQ ID NO: 582978 - RNA, 19 nt, Artificial Sequence
  Description of Artificial Sequence: Synthetic oligonucleotide
gguaucggccccggagccu

SEQ ID NO: 582979 - RNA, 19 nt, Artificial Sequence
  Description of Artificial Sequence: Synthetic oligonucleotide
ccacucugggacaauccuu

SEQ ID NO: 582980 - RNA, 19 nt, Artificial Sequence
  Description of Artificial Sequence: Synthetic oligonucleotide
cggggccacuuauauugca

SEQ ID NO: 582981 - RNA, 19 nt, Artificial Sequence
  Description of Artificial Sequence: Synthetic oligonucleotide
gcaccuggguuugcuuuua

SEQ ID NO: 582982 - RNA, 19 nt, Artificial Sequence
  Description of Artificial Sequence: Synthetic oligonucleotide
gggcuuccgaaagcuugcu

SEQ ID NO: 582983 - RNA, 19 nt, Artificial Sequence
  Description of Artificial Sequence: Synthetic oligonucleotide
ccaugcaccuggguuugcu

SEQ ID NO: 582984 - RNA, 19 nt, Artificial Sequence
  Description of Artificial Sequence: Synthetic oligonucleotide
gcaggacggaaagcaucau

SEQ ID NO: 582985 - RNA, 19 nt, Artificial Sequence
  Description of Artificial Sequence: Synthetic oligonucleotide
cgucgaggaaaagaaucuu

SEQ ID NO: 582986 - RNA, 19 nt, Artificial Sequence
  Description of Artificial Sequence: Synthetic oligonucleotide
caacuacggcaggguuguu

SEQ ID NO: 582987 - RNA, 19 nt, Artificial Sequence
  Description of Artificial Sequence: Synthetic oligonucleotide
uuuauaacauacaugaaag

SEQ ID NO: 582988 - RNA, 19 nt, Artificial Sequence
  Description of Artificial Sequence: Synthetic oligonucleotide
uauuagaggacaaugacag

SEQ ID NO: 582989 - RNA, 19 nt, Artificial Sequence
  Description of Artificial Sequence: Synthetic oligonucleotide
aauaacguagaccugacug

SEQ ID NO: 582990 - RNA, 19 nt, Artificial Sequence
  Description of Artificial Sequence: Synthetic oligonucleotide
cuauauuucaccaacuggg

SEQ ID NO: 582991 - RNA, 19 nt, Artificial Sequence
  Description of Artificial Sequence: Synthetic oligonucleotide
agauaaauuuauaacauac

SEQ ID NO: 582992 - RNA, 19 nt, Artificial Sequence
  Description of Artificial Sequence: Synthetic oligonucleotide
uguaaauuggcaagggcgg

SEQ ID NO: 582993 - RNA, 19 nt, Artificial Sequence
  Description of Artificial Sequence: Synthetic oligonucleotide
agaacgaaaauucuuuccg

SEQ ID NO: 582994 - RNA, 19 nt, Artificial Sequence
  Description of Artificial Sequence: Synthetic oligonucleotide
agauaugauacucacagug

SEQ ID NO: 582995 - RNA, 19 nt, Artificial Sequence
  Description of Artificial Sequence: Synthetic oligonucleotide
auggauuucaaacaaaccu

SEQ ID NO: 582996 - RNA, 19 nt, Artificial Sequence
  Description of Artificial Sequence: Synthetic oligonucleotide
caaagcucaacuuuguagg

SEQ ID NO: 582997 - RNA, 19 nt, Artificial Sequence
  Description of Artificial Sequence: Synthetic oligonucleotide
uccauuugaacaaugcagc

SEQ ID NO: 582998 - RNA, 19 nt, Artificial Sequence
  Description of Artificial Sequence: Synthetic oligonucleotide
aauaggauucuguaguagu

SEQ ID NO: 582999 - RNA, 19 nt, Artificial Sequence
  Description of Artificial Sequence: Synthetic oligonucleotide
aacgaaaauucuuuccgag

SEQ ID NO: 583000 - RNA, 19 nt, Artificial Sequence
  Description of Artificial Sequence: Synthetic oligonucleotide
uaagcuauauuucaccaac

SEQ ID NO: 583001 - RNA, 19 nt, Artificial Sequence
  Description of Artificial Sequence: Synthetic oligonucleotide
uuagugaguuuauuguugg

SEQ ID NO: 583002 - RNA, 19 nt, Artificial Sequence
  Description of Artificial Sequence: Synthetic oligonucleotide
ucacagacgaguuugaggu

SEQ ID NO: 583003 - RNA, 19 nt, Artificial Sequence
  Description of Artificial Sequence: Synthetic oligonucleotide
ugaagcauuagaaaacgac

SEQ ID NO: 583004 - RNA, 19 nt, Artificial Sequence
  Description of Artificial Sequence: Synthetic oligonucleotide
gaaaacgaccccuucacag

SEQ ID NO: 583005 - RNA, 19 nt, Artificial Sequence
  Description of Artificial Sequence: Synthetic oligonucleotide
agaccuguaacuucacacc

SEQ ID NO: 583006 - RNA, 19 nt, Artificial Sequence
  Description of Artificial Sequence: Synthetic oligonucleotide
ucgacacagacuauuagag

SEQ ID NO: 583007 - RNA, 19 nt, Artificial Sequence
  Description of Artificial Sequence: Synthetic oligonucleotide
acaugaaagaccgacaaag

SEQ ID NO: 583008 - RNA, 19 nt, Artificial Sequence
  Description of Artificial Sequence: Synthetic oligonucleotide
uguaggacagcuuauuaga

SEQ ID NO: 583009 - RNA, 19 nt, Artificial Sequence
  Description of Artificial Sequence: Synthetic oligonucleotide
aacuuacuguaacaggcuc

SEQ ID NO: 583010 - RNA, 19 nt, Artificial Sequence
  Description of Artificial Sequence: Synthetic oligonucleotide
gacacagacuauuagagga

SEQ ID NO: 583011 - RNA, 19 nt, Artificial Sequence
  Description of Artificial Sequence: Synthetic oligonucleotide
acauacaugaaagaccgac

SEQ ID NO: 583012 - RNA, 19 nt, Artificial Sequence
  Description of Artificial Sequence: Synthetic oligonucleotide
auguaaauuggcaagggcg

SEQ ID NO: 583013 - RNA, 19 nt, Artificial Sequence
  Description of Artificial Sequence: Synthetic oligonucleotide
agcauuagaaaacgacccc

SEQ ID NO: 583014 - RNA, 19 nt, Artificial Sequence
  Description of Artificial Sequence: Synthetic oligonucleotide
uauauuucaccaacugggc

SEQ ID NO: 583015 - RNA, 19 nt, Artificial Sequence
  Description of Artificial Sequence: Synthetic oligonucleotide
uuagaaaacgaccccuuca

SEQ ID NO: 583016 - RNA, 19 nt, Artificial Sequence
  Description of Artificial Sequence: Synthetic oligonucleotide
auaauucccaggcugaaga

SEQ ID NO: 583017 - RNA, 19 nt, Artificial Sequence
  Description of Artificial Sequence: Synthetic oligonucleotide
uugaagucggguuuguacc

SEQ ID NO: 583018 - RNA, 19 nt, Artificial Sequence
  Description of Artificial Sequence: Synthetic oligonucleotide
uuguaggacagcuuauuag

SEQ ID NO: 583019 - RNA, 19 nt, Artificial Sequence
  Description of Artificial Sequence: Synthetic oligonucleotide
caguuaaauugccugaagg

SEQ ID NO: 583020 - RNA, 19 nt, Artificial Sequence
  Description of Artificial Sequence: Synthetic oligonucleotide
ugguugagaacgaaaauuc

SEQ ID NO: 583021 - RNA, 19 nt, Artificial Sequence
  Description of Artificial Sequence: Synthetic oligonucleotide
gauaggacaucucaaagaa

SEQ ID NO: 583022 - RNA, 19 nt, Artificial Sequence
  Description of Artificial Sequence: Synthetic oligonucleotide
guaaaccaagccuagguug

SEQ ID NO: 583023 - RNA, 19 nt, Artificial Sequence
  Description of Artificial Sequence: Synthetic oligonucleotide
ucguacaugaucucugcag

SEQ ID NO: 583024 - RNA, 19 nt, Artificial Sequence
  Description of Artificial Sequence: Synthetic oligonucleotide
guuaccaugagcugaucag

SEQ ID NO: 583025 - RNA, 19 nt, Artificial Sequence
  Description of Artificial Sequence: Synthetic oligonucleotide
gauguaaauuggcaagggc

SEQ ID NO: 583026 - RNA, 19 nt, Artificial Sequence
  Description of Artificial Sequence: Synthetic oligonucleotide
acgaaaauucuuuccgagg

SEQ ID NO: 583027 - RNA, 19 nt, Artificial Sequence
  Description of Artificial Sequence: Synthetic oligonucleotide
gagaucuacuuucugguug

SEQ ID NO: 583028 - RNA, 19 nt, Artificial Sequence
  Description of Artificial Sequence: Synthetic oligonucleotide
ucgaugaacuuguagaguc

SEQ ID NO: 583029 - RNA, 19 nt, Artificial Sequence
  Description of Artificial Sequence: Synthetic oligonucleotide
uauuucaccaacugggcaa

SEQ ID NO: 583030 - RNA, 19 nt, Artificial Sequence
  Description of Artificial Sequence: Synthetic oligonucleotide
accaagccuagguugaugg

SEQ ID NO: 583031 - RNA, 19 nt, Artificial Sequence
  Description of Artificial Sequence: Synthetic oligonucleotide
guaccugagucucaugucg

SEQ ID NO: 583032 - RNA, 19 nt, Artificial Sequence
  Description of Artificial Sequence: Synthetic oligonucleotide
uguccauuugaacaaugca

SEQ ID NO: 583033 - RNA, 19 nt, Artificial Sequence
  Description of Artificial Sequence: Synthetic oligonucleotide
guaugguucaagugaaugc

SEQ ID NO: 583034 - RNA, 19 nt, Artificial Sequence
  Description of Artificial Sequence: Synthetic oligonucleotide
aaaacgaccccuucacagu

SEQ ID NO: 583035 - RNA, 19 nt, Artificial Sequence
  Description of Artificial Sequence: Synthetic oligonucleotide
aggaacuuacuguaacagg

SEQ ID NO: 583036 - RNA, 19 nt, Artificial Sequence
  Description of Artificial Sequence: Synthetic oligonucleotide
augaaagaccgacaaagcu

SEQ ID NO: 583037 - RNA, 19 nt, Artificial Sequence
  Description of Artificial Sequence: Synthetic oligonucleotide
uuuauuguugggguuaggu

SEQ ID NO: 583038 - RNA, 19 nt, Artificial Sequence
  Description of Artificial Sequence: Synthetic oligonucleotide
uaaauugccugaagggucu

SEQ ID NO: 583039 - RNA, 19 nt, Artificial Sequence
  Description of Artificial Sequence: Synthetic oligonucleotide
cagguuacagaauuuuagc

SEQ ID NO: 583040 - RNA, 19 nt, Artificial Sequence
  Description of Artificial Sequence: Synthetic oligonucleotide
uguuaccaugagcugauca

SEQ ID NO: 583041 - RNA, 19 nt, Artificial Sequence
  Description of Artificial Sequence: Synthetic oligonucleotide
agggcuuacauagagagca

SEQ ID NO: 583042 - RNA, 19 nt, Artificial Sequence
  Description of Artificial Sequence: Synthetic oligonucleotide
guccauuugaacaaugcag

SEQ ID NO: 583043 - RNA, 19 nt, Artificial Sequence
  Description of Artificial Sequence: Synthetic oligonucleotide
ucguagguguagucgaugg

SEQ ID NO: 583044 - RNA, 19 nt, Artificial Sequence
  Description of Artificial Sequence: Synthetic oligonucleotide
guuguaugcagacuuggug

SEQ ID NO: 583045 - RNA, 19 nt, Artificial Sequence
  Description of Artificial Sequence: Synthetic oligonucleotide
cagcuuauuagaauuuaag

SEQ ID NO: 583046 - RNA, 19 nt, Artificial Sequence
  Description of Artificial Sequence: Synthetic oligonucleotide
aguaacacuguaugguuca

SEQ ID NO: 583047 - RNA, 19 nt, Artificial Sequence
  Description of Artificial Sequence: Synthetic oligonucleotide
ucuggagauaugauacuca

SEQ ID NO: 583048 - RNA, 19 nt, Artificial Sequence
  Description of Artificial Sequence: Synthetic oligonucleotide
ucggguuuguaccugaguc

SEQ ID NO: 583049 - RNA, 19 nt, Artificial Sequence
  Description of Artificial Sequence: Synthetic oligonucleotide
cuacuuucugguuguaugc

SEQ ID NO: 583050 - RNA, 19 nt, Artificial Sequence
  Description of Artificial Sequence: Synthetic oligonucleotide
auacaugaaagaccgacaa

SEQ ID NO: 583051 - RNA, 19 nt, Artificial Sequence
  Description of Artificial Sequence: Synthetic oligonucleotide
uuaccaugagcugaucagg

SEQ ID NO: 583052 - RNA, 19 nt, Artificial Sequence
  Description of Artificial Sequence: Synthetic oligonucleotide
auaacguagaccugacuga

SEQ ID NO: 583053 - RNA, 19 nt, Artificial Sequence
  Description of Artificial Sequence: Synthetic oligonucleotide
guagagucgacacagacua

SEQ ID NO: 583054 - RNA, 19 nt, Artificial Sequence
  Description of Artificial Sequence: Synthetic oligonucleotide
aaagcucaacuuuguagga

SEQ ID NO: 583055 - RNA, 19 nt, Artificial Sequence
  Description of Artificial Sequence: Synthetic oligonucleotide
cuuacauagagagcagugc

SEQ ID NO: 583056 - RNA, 19 nt, Artificial Sequence
  Description of Artificial Sequence: Synthetic oligonucleotide
acagguuacagaauuuuag

SEQ ID NO: 583057 - RNA, 19 nt, Artificial Sequence
  Description of Artificial Sequence: Synthetic oligonucleotide
agaccgacaaagcucaacu

SEQ ID NO: 583058 - RNA, 19 nt, Artificial Sequence
  Description of Artificial Sequence: Synthetic oligonucleotide
gcgaauaucuugucuaugg

SEQ ID NO: 583059 - RNA, 19 nt, Artificial Sequence
  Description of Artificial Sequence: Synthetic oligonucleotide
uucaagugaaugcuguaau

SEQ ID NO: 583060 - RNA, 19 nt, Artificial Sequence
  Description of Artificial Sequence: Synthetic oligonucleotide
gaccuguaacuucacaccc

SEQ ID NO: 583061 - RNA, 19 nt, Artificial Sequence
  Description of Artificial Sequence: Synthetic oligonucleotide
cagcaagauuaucagaagc

SEQ ID NO: 583062 - RNA, 19 nt, Artificial Sequence
  Description of Artificial Sequence: Synthetic oligonucleotide
augccaguuaaauugccug

SEQ ID NO: 583063 - RNA, 19 nt, Artificial Sequence
  Description of Artificial Sequence: Synthetic oligonucleotide
gugauaggacaucucaaag

SEQ ID NO: 583064 - RNA, 19 nt, Artificial Sequence
  Description of Artificial Sequence: Synthetic oligonucleotide
uuauuguugggguuagguc

SEQ ID NO: 583065 - RNA, 19 nt, Artificial Sequence
  Description of Artificial Sequence: Synthetic oligonucleotide
uuauccaguauaagccucu

SEQ ID NO: 583066 - RNA, 19 nt, Artificial Sequence
  Description of Artificial Sequence: Synthetic oligonucleotide
cuauuagaggacaaugaca

SEQ ID NO: 583067 - RNA, 19 nt, Artificial Sequence
  Description of Artificial Sequence: Synthetic oligonucleotide
uuaagcuauauuucaccaa

SEQ ID NO: 583068 - RNA, 19 nt, Artificial Sequence
  Description of Artificial Sequence: Synthetic oligonucleotide
uccgaggcugucaccaugg

SEQ ID NO: 583069 - RNA, 19 nt, Artificial Sequence
  Description of Artificial Sequence: Synthetic oligonucleotide
ugaccagucguacaugauc

SEQ ID NO: 583070 - RNA, 19 nt, Artificial Sequence
  Description of Artificial Sequence: Synthetic oligonucleotide
ugugaccagucguacauga

SEQ ID NO: 583071 - RNA, 19 nt, Artificial Sequence
  Description of Artificial Sequence: Synthetic oligonucleotide
aagaccgacaaagcucaac

SEQ ID NO: 583072 - RNA, 19 nt, Artificial Sequence
  Description of Artificial Sequence: Synthetic oligonucleotide
uuuguaggacagcuuauua

SEQ ID NO: 583073 - RNA, 19 nt, Artificial Sequence
  Description of Artificial Sequence: Synthetic oligonucleotide
aguuguguuaaaugccugu

SEQ ID NO: 583074 - RNA, 19 nt, Artificial Sequence
  Description of Artificial Sequence: Synthetic oligonucleotide
accugaagcauuagaaaac

SEQ ID NO: 583075 - RNA, 19 nt, Artificial Sequence
  Description of Artificial Sequence: Synthetic oligonucleotide
aggacagcuuauuagaauu

SEQ ID NO: 583076 - RNA, 19 nt, Artificial Sequence
  Description of Artificial Sequence: Synthetic oligonucleotide
auuagaggacaaugacagg

SEQ ID NO: 583077 - RNA, 19 nt, Artificial Sequence
  Description of Artificial Sequence: Synthetic oligonucleotide
ugauguuauaaaucucauc

SEQ ID NO: 583078 - RNA, 19 nt, Artificial Sequence
  Description of Artificial Sequence: Synthetic oligonucleotide
auauuucaccaacugggca

SEQ ID NO: 583079 - RNA, 19 nt, Artificial Sequence
  Description of Artificial Sequence: Synthetic oligonucleotide
ugcauaacaugauccacaa

SEQ ID NO: 583080 - RNA, 19 nt, Artificial Sequence
  Description of Artificial Sequence: Synthetic oligonucleotide
cuggagauaugauacucac

SEQ ID NO: 583081 - RNA, 19 nt, Artificial Sequence
  Description of Artificial Sequence: Synthetic oligonucleotide
ggugauuucaugaugucug

SEQ ID NO: 583082 - RNA, 19 nt, Artificial Sequence
  Description of Artificial Sequence: Synthetic oligonucleotide
cucaucacagacgaguuug

SEQ ID NO: 583083 - RNA, 19 nt, Artificial Sequence
  Description of Artificial Sequence: Synthetic oligonucleotide
agaucuacuuucugguugu

SEQ ID NO: 583084 - RNA, 19 nt, Artificial Sequence
  Description of Artificial Sequence: Synthetic oligonucleotide
cacuguaugguucaaguga

SEQ ID NO: 583085 - RNA, 19 nt, Artificial Sequence
  Description of Artificial Sequence: Synthetic oligonucleotide
agcucaacuuuguaggaca

SEQ ID NO: 583086 - RNA, 19 nt, Artificial Sequence
  Description of Artificial Sequence: Synthetic oligonucleotide
ggacuugaccuuaacaugg

SEQ ID NO: 583087 - RNA, 19 nt, Artificial Sequence
  Description of Artificial Sequence: Synthetic oligonucleotide
ucucgaagcugguugagaa

SEQ ID NO: 583088 - RNA, 19 nt, Artificial Sequence
  Description of Artificial Sequence: Synthetic oligonucleotide
cauaggugauuucaugaug

SEQ ID NO: 583089 - RNA, 19 nt, Artificial Sequence
  Description of Artificial Sequence: Synthetic oligonucleotide
uaacguagaccugacugag

SEQ ID NO: 583090 - RNA, 19 nt, Artificial Sequence
  Description of Artificial Sequence: Synthetic oligonucleotide
acgaguuugagguaucuuu

SEQ ID NO: 583091 - RNA, 19 nt, Artificial Sequence
  Description of Artificial Sequence: Synthetic oligonucleotide
gaacgaaaauucuuuccga

SEQ ID NO: 583092 - RNA, 19 nt, Artificial Sequence
  Description of Artificial Sequence: Synthetic oligonucleotide
ucuguccauuugaacaaug

SEQ ID NO: 583093 - RNA, 19 nt, Artificial Sequence
  Description of Artificial Sequence: Synthetic oligonucleotide
acuguaacaggcucuucca

SEQ ID NO: 583094 - RNA, 19 nt, Artificial Sequence
  Description of Artificial Sequence: Synthetic oligonucleotide
ucuggguuagguugauggc

SEQ ID NO: 583095 - RNA, 19 nt, Artificial Sequence
  Description of Artificial Sequence: Synthetic oligonucleotide
accccuucacaguuuguac

SEQ ID NO: 583096 - RNA, 19 nt, Artificial Sequence
  Description of Artificial Sequence: Synthetic oligonucleotide
uaucagaagcuucucugau

SEQ ID NO: 583097 - RNA, 19 nt, Artificial Sequence
  Description of Artificial Sequence: Synthetic oligonucleotide
ugggguuaggucuugcaaa

SEQ ID NO: 583098 - RNA, 19 nt, Artificial Sequence
  Description of Artificial Sequence: Synthetic oligonucleotide
acauaggugauuucaugau

SEQ ID NO: 583099 - RNA, 19 nt, Artificial Sequence
  Description of Artificial Sequence: Synthetic oligonucleotide
gauggagaccuguaacuuc

SEQ ID NO: 583100 - RNA, 19 nt, Artificial Sequence
  Description of Artificial Sequence: Synthetic oligonucleotide
uggagauaugauacucaca

SEQ ID NO: 583101 - RNA, 19 nt, Artificial Sequence
  Description of Artificial Sequence: Synthetic oligonucleotide
augauacucacagugggga

SEQ ID NO: 583102 - RNA, 19 nt, Artificial Sequence
  Description of Artificial Sequence: Synthetic oligonucleotide
uuuucagcagcccgacaac

SEQ ID NO: 583103 - RNA, 19 nt, Artificial Sequence
  Description of Artificial Sequence: Synthetic oligonucleotide
gucgacacagacuauuaga

SEQ ID NO: 583104 - RNA, 19 nt, Artificial Sequence
  Description of Artificial Sequence: Synthetic oligonucleotide
guuagguugauggcccugg

SEQ ID NO: 583105 - RNA, 19 nt, Artificial Sequence
  Description of Artificial Sequence: Synthetic oligonucleotide
aauucccaggcugaagaga

SEQ ID NO: 583106 - RNA, 19 nt, Artificial Sequence
  Description of Artificial Sequence: Synthetic oligonucleotide
acacuguaugguucaagug

SEQ ID NO: 583107 - RNA, 19 nt, Artificial Sequence
  Description of Artificial Sequence: Synthetic oligonucleotide
agaauaacguagaccugac

SEQ ID NO: 583108 - RNA, 19 nt, Artificial Sequence
  Description of Artificial Sequence: Synthetic oligonucleotide
uguaggaguauugccuuca

SEQ ID NO: 583109 - RNA, 19 nt, Artificial Sequence
  Description of Artificial Sequence: Synthetic oligonucleotide
ugaagucggguuuguaccu

SEQ ID NO: 583110 - RNA, 19 nt, Artificial Sequence
  Description of Artificial Sequence: Synthetic oligonucleotide
acacgcuucucuguuugcc

SEQ ID NO: 583111 - RNA, 19 nt, Artificial Sequence
  Description of Artificial Sequence: Synthetic oligonucleotide
agcaccgacacuuucuuuu

SEQ ID NO: 583112 - RNA, 19 nt, Artificial Sequence
  Description of Artificial Sequence: Synthetic oligonucleotide
auugccugaagggucugac

SEQ ID NO: 583113 - RNA, 19 nt, Artificial Sequence
  Description of Artificial Sequence: Synthetic oligonucleotide
cuggguuagguugauggcc

SEQ ID NO: 583114 - RNA, 19 nt, Artificial Sequence
  Description of Artificial Sequence: Synthetic oligonucleotide
caagccuagguugauggag

SEQ ID NO: 583115 - RNA, 19 nt, Artificial Sequence
  Description of Artificial Sequence: Synthetic oligonucleotide
uuguaugcucuccaucauc

SEQ ID NO: 583116 - RNA, 19 nt, Artificial Sequence
  Description of Artificial Sequence: Synthetic oligonucleotide
acaguuguguuaaaugccu

SEQ ID NO: 583117 - RNA, 19 nt, Artificial Sequence
  Description of Artificial Sequence: Synthetic oligonucleotide
uacaugaaagaccgacaaa

SEQ ID NO: 583118 - RNA, 19 nt, Artificial Sequence
  Description of Artificial Sequence: Synthetic oligonucleotide
acacagacuauuagaggac

SEQ ID NO: 583119 - RNA, 19 nt, Artificial Sequence
  Description of Artificial Sequence: Synthetic oligonucleotide
aaacgaccccuucacaguu

SEQ ID NO: 583120 - RNA, 19 nt, Artificial Sequence
  Description of Artificial Sequence: Synthetic oligonucleotide
uuuggcccaucauggugcg

SEQ ID NO: 583121 - RNA, 19 nt, Artificial Sequence
  Description of Artificial Sequence: Synthetic oligonucleotide
aauacacgcuucucuguuu

SEQ ID NO: 583122 - RNA, 19 nt, Artificial Sequence
  Description of Artificial Sequence: Synthetic oligonucleotide
accgacaaagcucaacuuu

SEQ ID NO: 583123 - RNA, 19 nt, Artificial Sequence
  Description of Artificial Sequence: Synthetic oligonucleotide
aguguaggaguauugccuu

SEQ ID NO: 583124 - RNA, 19 nt, Artificial Sequence
  Description of Artificial Sequence: Synthetic oligonucleotide
ugggacugugaccagucgu

SEQ ID NO: 583125 - RNA, 19 nt, Artificial Sequence
  Description of Artificial Sequence: Synthetic oligonucleotide
gacauggacaucuggccga

SEQ ID NO: 583126 - RNA, 19 nt, Artificial Sequence
  Description of Artificial Sequence: Synthetic oligonucleotide
agcagcgaauaucuugucu

SEQ ID NO: 583127 - RNA, 19 nt, Artificial Sequence
  Description of Artificial Sequence: Synthetic oligonucleotide
uuuguaugcucuccaucau

SEQ ID NO: 583128 - RNA, 19 nt, Artificial Sequence
  Description of Artificial Sequence: Synthetic oligonucleotide
acagcagcgaauaucuugu

SEQ ID NO: 583129 - RNA, 19 nt, Artificial Sequence
  Description of Artificial Sequence: Synthetic oligonucleotide
caguauaagccucugucca

SEQ ID NO: 583130 - RNA, 19 nt, Artificial Sequence
  Description of Artificial Sequence: Synthetic oligonucleotide
aguauugccuucaguaaca

SEQ ID NO: 583131 - RNA, 19 nt, Artificial Sequence
  Description of Artificial Sequence: Synthetic oligonucleotide
gauuaucagaagcuucucu

SEQ ID NO: 583132 - RNA, 19 nt, Artificial Sequence
  Description of Artificial Sequence: Synthetic oligonucleotide
uaggacagcuuauuagaau

SEQ ID NO: 583133 - RNA, 19 nt, Artificial Sequence
  Description of Artificial Sequence: Synthetic oligonucleotide
cagaauaacguagaccuga

SEQ ID NO: 583134 - RNA, 19 nt, Artificial Sequence
  Description of Artificial Sequence: Synthetic oligonucleotide
acguagaccugacugaguu

SEQ ID NO: 583135 - RNA, 19 nt, Artificial Sequence
  Description of Artificial Sequence: Synthetic oligonucleotide
ucccacucuaacgauaaaa

SEQ ID NO: 583136 - RNA, 19 nt, Artificial Sequence
  Description of Artificial Sequence: Synthetic oligonucleotide
agccuagguugauggagac

SEQ ID NO: 583137 - RNA, 19 nt, Artificial Sequence
  Description of Artificial Sequence: Synthetic oligonucleotide
ugauacucacaguggggac

SEQ ID NO: 583138 - RNA, 19 nt, Artificial Sequence
  Description of Artificial Sequence: Synthetic oligonucleotide
acgcuucucuguuugccuc

SEQ ID NO: 583139 - RNA, 19 nt, Artificial Sequence
  Description of Artificial Sequence: Synthetic oligonucleotide
aauuggcaagggcgguuug

SEQ ID NO: 583140 - RNA, 19 nt, Artificial Sequence
  Description of Artificial Sequence: Synthetic oligonucleotide
aguauaagccucuguccau

SEQ ID NO: 583141 - RNA, 19 nt, Artificial Sequence
  Description of Artificial Sequence: Synthetic oligonucleotide
gcuaugcugacaccaacag

SEQ ID NO: 583142 - RNA, 19 nt, Artificial Sequence
  Description of Artificial Sequence: Synthetic oligonucleotide
gagguaucuuugcuuuggc

SEQ ID NO: 583143 - RNA, 19 nt, Artificial Sequence
  Description of Artificial Sequence: Synthetic oligonucleotide
agaaaacgaccccuucaca

SEQ ID NO: 583144 - RNA, 19 nt, Artificial Sequence
  Description of Artificial Sequence: Synthetic oligonucleotide
aggacaaugacagguuaca

SEQ ID NO: 583145 - RNA, 19 nt, Artificial Sequence
  Description of Artificial Sequence: Synthetic oligonucleotide
aucuggccgacacugacaa

SEQ ID NO: 583146 - RNA, 19 nt, Artificial Sequence
  Description of Artificial Sequence: Synthetic oligonucleotide
aagucggguuuguaccuga

SEQ ID NO: 583147 - RNA, 19 nt, Artificial Sequence
  Description of Artificial Sequence: Synthetic oligonucleotide
uugagguaucuuugcuuug

SEQ ID NO: 583148 - RNA, 19 nt, Artificial Sequence
  Description of Artificial Sequence: Synthetic oligonucleotide
acugacuuugguccucagu

SEQ ID NO: 583149 - RNA, 19 nt, Artificial Sequence
  Description of Artificial Sequence: Synthetic oligonucleotide
ugacagguuacagaauuuu

SEQ ID NO: 583150 - RNA, 19 nt, Artificial Sequence
  Description of Artificial Sequence: Synthetic oligonucleotide
aagcuauauuucaccaacu

SEQ ID NO: 583151 - RNA, 19 nt, Artificial Sequence
  Description of Artificial Sequence: Synthetic oligonucleotide
uaugcagacuuggugcuuc

SEQ ID NO: 583152 - RNA, 19 nt, Artificial Sequence
  Description of Artificial Sequence: Synthetic oligonucleotide
aacuugggcgaugugggau

SEQ ID NO: 583153 - RNA, 19 nt, Artificial Sequence
  Description of Artificial Sequence: Synthetic oligonucleotide
uauugccuucaguaacacu

SEQ ID NO: 583154 - RNA, 19 nt, Artificial Sequence
  Description of Artificial Sequence: Synthetic oligonucleotide
aggugauuucaugaugucu

SEQ ID NO: 583155 - RNA, 19 nt, Artificial Sequence
  Description of Artificial Sequence: Synthetic oligonucleotide
acagacgaguuugagguau

SEQ ID NO: 583156 - RNA, 19 nt, Artificial Sequence
  Description of Artificial Sequence: Synthetic oligonucleotide
acuuacuguaacaggcucu

SEQ ID NO: 583157 - RNA, 19 nt, Artificial Sequence
  Description of Artificial Sequence: Synthetic oligonucleotide
gaccugacugaguuuaucu

SEQ ID NO: 583158 - RNA, 19 nt, Artificial Sequence
  Description of Artificial Sequence: Synthetic oligonucleotide
uuccgaggcugucaccaug

SEQ ID NO: 583159 - RNA, 19 nt, Artificial Sequence
  Description of Artificial Sequence: Synthetic oligonucleotide
ggugauaggacaucucaaa

SEQ ID NO: 583160 - RNA, 19 nt, Artificial Sequence
  Description of Artificial Sequence: Synthetic oligonucleotide
gugcgguaggccuucccgg

SEQ ID NO: 583161 - RNA, 19 nt, Artificial Sequence
  Description of Artificial Sequence: Synthetic oligonucleotide
guaggaguauugccuucag

SEQ ID NO: 583162 - RNA, 19 nt, Artificial Sequence
  Description of Artificial Sequence: Synthetic oligonucleotide
ccaauugcucaucacugcc

SEQ ID NO: 583163 - RNA, 19 nt, Artificial Sequence
  Description of Artificial Sequence: Synthetic oligonucleotide
cgaugugggaucucgaagc

SEQ ID NO: 583164 - RNA, 19 nt, Artificial Sequence
  Description of Artificial Sequence: Synthetic oligonucleotide
cuuuccgaggcugucacca

SEQ ID NO: 583165 - RNA, 19 nt, Artificial Sequence
  Description of Artificial Sequence: Synthetic oligonucleotide
cauuauccaguauaagccu

SEQ ID NO: 583166 - RNA, 19 nt, Artificial Sequence
  Description of Artificial Sequence: Synthetic oligonucleotide
uaggugauuucaugauguc

SEQ ID NO: 583167 - RNA, 19 nt, Artificial Sequence
  Description of Artificial Sequence: Synthetic oligonucleotide
caguuguguuaaaugccug

SEQ ID NO: 583168 - RNA, 19 nt, Artificial Sequence
  Description of Artificial Sequence: Synthetic oligonucleotide
gaguuuauuguugggguua

SEQ ID NO: 583169 - RNA, 19 nt, Artificial Sequence
  Description of Artificial Sequence: Synthetic oligonucleotide
guagaccugacugaguuua

SEQ ID NO: 583170 - RNA, 19 nt, Artificial Sequence
  Description of Artificial Sequence: Synthetic oligonucleotide
agaccugacugaguuuauc

SEQ ID NO: 583171 - RNA, 19 nt, Artificial Sequence
  Description of Artificial Sequence: Synthetic oligonucleotide
ugacagauuucugcuuugu

SEQ ID NO: 583172 - RNA, 19 nt, Artificial Sequence
  Description of Artificial Sequence: Synthetic oligonucleotide
acgaccccuucacaguuug

SEQ ID NO: 583173 - RNA, 19 nt, Artificial Sequence
  Description of Artificial Sequence: Synthetic oligonucleotide
aggcgagaugugcugggag

SEQ ID NO: 583174 - RNA, 19 nt, Artificial Sequence
  Description of Artificial Sequence: Synthetic oligonucleotide
agagaucuacuuucugguu

SEQ ID NO: 583175 - RNA, 19 nt, Artificial Sequence
  Description of Artificial Sequence: Synthetic oligonucleotide
caauugcucaucacugcca

SEQ ID NO: 583176 - RNA, 19 nt, Artificial Sequence
  Description of Artificial Sequence: Synthetic oligonucleotide
ccgacaaagcucaacuuug

SEQ ID NO: 583177 - RNA, 19 nt, Artificial Sequence
  Description of Artificial Sequence: Synthetic oligonucleotide
cucgaagcugguugagaac

SEQ ID NO: 583178 - RNA, 19 nt, Artificial Sequence
  Description of Artificial Sequence: Synthetic oligonucleotide
accgacacuuucuuuucaa

SEQ ID NO: 583179 - RNA, 19 nt, Artificial Sequence
  Description of Artificial Sequence: Synthetic oligonucleotide
ccguuuugcuggaucaugg

SEQ ID NO: 583180 - RNA, 19 nt, Artificial Sequence
  Description of Artificial Sequence: Synthetic oligonucleotide
uauccaguauaagccucug

SEQ ID NO: 583181 - RNA, 19 nt, Artificial Sequence
  Description of Artificial Sequence: Synthetic oligonucleotide
uucagcagcccgacaacuu

SEQ ID NO: 583182 - RNA, 19 nt, Artificial Sequence
  Description of Artificial Sequence: Synthetic oligonucleotide
uacacgcuucucuguuugc

SEQ ID NO: 583183 - RNA, 19 nt, Artificial Sequence
  Description of Artificial Sequence: Synthetic oligonucleotide
gaccagucguacaugaucu

SEQ ID NO: 583184 - RNA, 19 nt, Artificial Sequence
  Description of Artificial Sequence: Synthetic oligonucleotide
acagcuuauuagaauuuaa

SEQ ID NO: 583185 - RNA, 19 nt, Artificial Sequence
  Description of Artificial Sequence: Synthetic oligonucleotide
gacugugaccagucguaca

SEQ ID NO: 583186 - RNA, 19 nt, Artificial Sequence
  Description of Artificial Sequence: Synthetic oligonucleotide
guggcugucggccguuuug

SEQ ID NO: 583187 - RNA, 19 nt, Artificial Sequence
  Description of Artificial Sequence: Synthetic oligonucleotide
gacagcuuauuagaauuua

SEQ ID NO: 583188 - RNA, 19 nt, Artificial Sequence
  Description of Artificial Sequence: Synthetic oligonucleotide
uccugaaguggaugucacu

SEQ ID NO: 583189 - RNA, 19 nt, Artificial Sequence
  Description of Artificial Sequence: Synthetic oligonucleotide
cugaagcauuagaaaacga

SEQ ID NO: 583190 - RNA, 19 nt, Artificial Sequence
  Description of Artificial Sequence: Synthetic oligonucleotide
uaaauuggcaagggcgguu

SEQ ID NO: 583191 - RNA, 19 nt, Artificial Sequence
  Description of Artificial Sequence: Synthetic oligonucleotide
ucuuuccgaggcugucacc

SEQ ID NO: 583192 - RNA, 19 nt, Artificial Sequence
  Description of Artificial Sequence: Synthetic oligonucleotide
cuauggcuaugcugacacc

SEQ ID NO: 583193 - RNA, 19 nt, Artificial Sequence
  Description of Artificial Sequence: Synthetic oligonucleotide
gauacucacaguggggacu

SEQ ID NO: 583194 - RNA, 19 nt, Artificial Sequence
  Description of Artificial Sequence: Synthetic oligonucleotide
ggaguauugccuucaguaa

SEQ ID NO: 583195 - RNA, 19 nt, Artificial Sequence
  Description of Artificial Sequence: Synthetic oligonucleotide
aggucauaucugccgccag

SEQ ID NO: 583196 - RNA, 19 nt, Artificial Sequence
  Description of Artificial Sequence: Synthetic oligonucleotide
ggaaucagcaggucauauc

SEQ ID NO: 583197 - RNA, 19 nt, Artificial Sequence
  Description of Artificial Sequence: Synthetic oligonucleotide
cugaucagggcuacccaca

SEQ ID NO: 583198 - RNA, 19 nt, Artificial Sequence
  Description of Artificial Sequence: Synthetic oligonucleotide
gacuccaauacacgcuucu

SEQ ID NO: 583199 - RNA, 19 nt, Artificial Sequence
  Description of Artificial Sequence: Synthetic oligonucleotide
guuuauuguugggguuagg

SEQ ID NO: 583200 - RNA, 19 nt, Artificial Sequence
  Description of Artificial Sequence: Synthetic oligonucleotide
uggcugucggccguuuugc

SEQ ID NO: 583201 - RNA, 19 nt, Artificial Sequence
  Description of Artificial Sequence: Synthetic oligonucleotide
gacagguuacagaauuuua

SEQ ID NO: 583202 - RNA, 19 nt, Artificial Sequence
  Description of Artificial Sequence: Synthetic oligonucleotide
gcgaugugggaucucgaag

SEQ ID NO: 583203 - RNA, 19 nt, Artificial Sequence
  Description of Artificial Sequence: Synthetic oligonucleotide
gguagauccacagccaaaa

SEQ ID NO: 583204 - RNA, 19 nt, Artificial Sequence
  Description of Artificial Sequence: Synthetic oligonucleotide
gaugugggaucucgaagcu

SEQ ID NO: 583205 - RNA, 19 nt, Artificial Sequence
  Description of Artificial Sequence: Synthetic oligonucleotide
guagucgauggcaggcgag

SEQ ID NO: 583206 - RNA, 19 nt, Artificial Sequence
  Description of Artificial Sequence: Synthetic oligonucleotide
ccccaauugcucaucacug

SEQ ID NO: 583207 - RNA, 19 nt, Artificial Sequence
  Description of Artificial Sequence: Synthetic oligonucleotide
aacauacaugaaagaccga

SEQ ID NO: 583208 - RNA, 19 nt, Artificial Sequence
  Description of Artificial Sequence: Synthetic oligonucleotide
gagauaugauacucacagu

SEQ ID NO: 583209 - RNA, 19 nt, Artificial Sequence
  Description of Artificial Sequence: Synthetic oligonucleotide
agcaucccacucuaacgau

SEQ ID NO: 583210 - RNA, 19 nt, Artificial Sequence
  Description of Artificial Sequence: Synthetic oligonucleotide
auuggcaagggcgguuuga

SEQ ID NO: 583211 - RNA, 19 nt, Artificial Sequence
  Description of Artificial Sequence: Synthetic oligonucleotide
aacguagaccugacugagu

SEQ ID NO: 583212 - RNA, 19 nt, Artificial Sequence
  Description of Artificial Sequence: Synthetic oligonucleotide
ucauggugcgguaggccuu

SEQ ID NO: 583213 - RNA, 19 nt, Artificial Sequence
  Description of Artificial Sequence: Synthetic oligonucleotide
gcugaucagggcuacccac

SEQ ID NO: 583214 - RNA, 19 nt, Artificial Sequence
  Description of Artificial Sequence: Synthetic oligonucleotide
cuagguugauggagaccug

SEQ ID NO: 583215 - RNA, 19 nt, Artificial Sequence
  Description of Artificial Sequence: Synthetic oligonucleotide
cacagacuauuagaggaca

SEQ ID NO: 583216 - RNA, 19 nt, Artificial Sequence
  Description of Artificial Sequence: Synthetic oligonucleotide
guaggacagcuuauuagaa

SEQ ID NO: 583217 - RNA, 19 nt, Artificial Sequence
  Description of Artificial Sequence: Synthetic oligonucleotide
gaauaacguagaccugacu

SEQ ID NO: 583218 - RNA, 19 nt, Artificial Sequence
  Description of Artificial Sequence: Synthetic oligonucleotide
guauugccuucaguaacac

SEQ ID NO: 583219 - RNA, 19 nt, Artificial Sequence
  Description of Artificial Sequence: Synthetic oligonucleotide
gucguacaugaucucugca

SEQ ID NO: 583220 - RNA, 19 nt, Artificial Sequence
  Description of Artificial Sequence: Synthetic oligonucleotide
cgacacagacuauuagagg

SEQ ID NO: 583221 - RNA, 19 nt, Artificial Sequence
  Description of Artificial Sequence: Synthetic oligonucleotide
agacgaguuugagguaucu

SEQ ID NO: 583222 - RNA, 19 nt, Artificial Sequence
  Description of Artificial Sequence: Synthetic oligonucleotide
uagaccugacugaguuuau

SEQ ID NO: 583223 - RNA, 19 nt, Artificial Sequence
  Description of Artificial Sequence: Synthetic oligonucleotide
ggaucucgaagcugguuga

SEQ ID NO: 583224 - RNA, 19 nt, Artificial Sequence
  Description of Artificial Sequence: Synthetic oligonucleotide
gguugauggagaccuguaa

SEQ ID NO: 583225 - RNA, 19 nt, Artificial Sequence
  Description of Artificial Sequence: Synthetic oligonucleotide
cccaucauggugcgguagg

SEQ ID NO: 583226 - RNA, 19 nt, Artificial Sequence
  Description of Artificial Sequence: Synthetic oligonucleotide
acagacuauuagaggacaa

SEQ ID NO: 583227 - RNA, 19 nt, Artificial Sequence
  Description of Artificial Sequence: Synthetic oligonucleotide
gcaagggcgguuugaaguc

SEQ ID NO: 583228 - RNA, 19 nt, Artificial Sequence
  Description of Artificial Sequence: Synthetic oligonucleotide
caucuggccgacacugaca

SEQ ID NO: 583229 - RNA, 19 nt, Artificial Sequence
  Description of Artificial Sequence: Synthetic oligonucleotide
guguaggaguauugccuuc

SEQ ID NO: 583230 - RNA, 19 nt, Artificial Sequence
  Description of Artificial Sequence: Synthetic oligonucleotide
augugggaucucgaagcug

SEQ ID NO: 583231 - RNA, 19 nt, Artificial Sequence
  Description of Artificial Sequence: Synthetic oligonucleotide
cagacgaguuugagguauc

SEQ ID NO: 583232 - RNA, 19 nt, Artificial Sequence
  Description of Artificial Sequence: Synthetic oligonucleotide
uuuccgaggcugucaccau

SEQ ID NO: 583233 - RNA, 19 nt, Artificial Sequence
  Description of Artificial Sequence: Synthetic oligonucleotide
gccugcgucugcugaaugc

SEQ ID NO: 583234 - RNA, 19 nt, Artificial Sequence
  Description of Artificial Sequence: Synthetic oligonucleotide
ggacuacuguuguuccaug

SEQ ID NO: 583235 - RNA, 19 nt, Artificial Sequence
  Description of Artificial Sequence: Synthetic oligonucleotide
acaucucaaagaagauaau

SEQ ID NO: 583236 - RNA, 19 nt, Artificial Sequence
  Description of Artificial Sequence: Synthetic oligonucleotide
uuacuguaacaggcucuuc

SEQ ID NO: 583237 - RNA, 19 nt, Artificial Sequence
  Description of Artificial Sequence: Synthetic oligonucleotide
ggcuaugcugacaccaaca

SEQ ID NO: 583238 - RNA, 19 nt, Artificial Sequence
  Description of Artificial Sequence: Synthetic oligonucleotide
cauggugcgguaggccuuc

SEQ ID NO: 583239 - RNA, 19 nt, Artificial Sequence
  Description of Artificial Sequence: Synthetic oligonucleotide
agucggguuuguaccugag

SEQ ID NO: 583240 - RNA, 19 nt, Artificial Sequence
  Description of Artificial Sequence: Synthetic oligonucleotide
caaggaucucaggcacagc

SEQ ID NO: 583241 - RNA, 19 nt, Artificial Sequence
  Description of Artificial Sequence: Synthetic oligonucleotide
uguggcugucggccguuuu

SEQ ID NO: 583242 - RNA, 19 nt, Artificial Sequence
  Description of Artificial Sequence: Synthetic oligonucleotide
guaaauuggcaagggcggu

SEQ ID NO: 583243 - RNA, 19 nt, Artificial Sequence
  Description of Artificial Sequence: Synthetic oligonucleotide
ucuggccgacacugacaac

SEQ ID NO: 583244 - RNA, 19 nt, Artificial Sequence
  Description of Artificial Sequence: Synthetic oligonucleotide
ucccgcuguccagaguuuc

SEQ ID NO: 583245 - RNA, 19 nt, Artificial Sequence
  Description of Artificial Sequence: Synthetic oligonucleotide
agucgauggcaggcgagau

SEQ ID NO: 583246 - RNA, 19 nt, Artificial Sequence
  Description of Artificial Sequence: Synthetic oligonucleotide
uccuuucaucacugacuuu

SEQ ID NO: 583247 - RNA, 19 nt, Artificial Sequence
  Description of Artificial Sequence: Synthetic oligonucleotide
cagcagcgaauaucuuguc

SEQ ID NO: 583248 - RNA, 19 nt, Artificial Sequence
  Description of Artificial Sequence: Synthetic oligonucleotide
ugucggccguuuugcugga

SEQ ID NO: 583249 - RNA, 19 nt, Artificial Sequence
  Description of Artificial Sequence: Synthetic oligonucleotide
cugcgucugcugaaugcca

SEQ ID NO: 583250 - RNA, 19 nt, Artificial Sequence
  Description of Artificial Sequence: Synthetic oligonucleotide
aggcgugacaguagcugcu

SEQ ID NO: 583251 - RNA, 19 nt, Artificial Sequence
  Description of Artificial Sequence: Synthetic oligonucleotide
ggcgaugugggaucucgaa

SEQ ID NO: 583252 - RNA, 19 nt, Artificial Sequence
  Description of Artificial Sequence: Synthetic oligonucleotide
gccguuuugcuggaucaug

SEQ ID NO: 583253 - RNA, 19 nt, Artificial Sequence
  Description of Artificial Sequence: Synthetic oligonucleotide
gguuagguugauggcccug

SEQ ID NO: 583254 - RNA, 19 nt, Artificial Sequence
  Description of Artificial Sequence: Synthetic oligonucleotide
uccgggaacuugggcgaug

SEQ ID NO: 583255 - RNA, 19 nt, Artificial Sequence
  Description of Artificial Sequence: Synthetic oligonucleotide
agggcgguuugaagucggg

SEQ ID NO: 583256 - RNA, 19 nt, Artificial Sequence
  Description of Artificial Sequence: Synthetic oligonucleotide
gcaccgacacuuucuuuuc

SEQ ID NO: 583257 - RNA, 19 nt, Artificial Sequence
  Description of Artificial Sequence: Synthetic oligonucleotide
aaagaccgacaaagcucaa

SEQ ID NO: 583258 - RNA, 19 nt, Artificial Sequence
  Description of Artificial Sequence: Synthetic oligonucleotide
caaccaugccaguuaaauu

SEQ ID NO: 583259 - RNA, 19 nt, Artificial Sequence
  Description of Artificial Sequence: Synthetic oligonucleotide
ccgacuccuccaucugugg

SEQ ID NO: 583260 - RNA, 19 nt, Artificial Sequence
  Description of Artificial Sequence: Synthetic oligonucleotide
uucccgcuguccagaguuu

SEQ ID NO: 583261 - RNA, 19 nt, Artificial Sequence
  Description of Artificial Sequence: Synthetic oligonucleotide
auggugcgguaggccuucc

SEQ ID NO: 583262 - RNA, 19 nt, Artificial Sequence
  Description of Artificial Sequence: Synthetic oligonucleotide
guagauccacagccaaaau

SEQ ID NO: 583263 - RNA, 19 nt, Artificial Sequence
  Description of Artificial Sequence: Synthetic oligonucleotide
aucccacucuaacgauaaa

SEQ ID NO: 583264 - RNA, 19 nt, Artificial Sequence
  Description of Artificial Sequence: Synthetic oligonucleotide
ggacugugaccagucguac

SEQ ID NO: 583265 - RNA, 19 nt, Artificial Sequence
  Description of Artificial Sequence: Synthetic oligonucleotide
ccaucauggugcgguaggc

SEQ ID NO: 583266 - RNA, 19 nt, Artificial Sequence
  Description of Artificial Sequence: Synthetic oligonucleotide
caguuuguacagcaagauu

SEQ ID NO: 583267 - RNA, 19 nt, Artificial Sequence
  Description of Artificial Sequence: Synthetic oligonucleotide
gggcuuacauagagagcag

SEQ ID NO: 583268 - RNA, 19 nt, Artificial Sequence
  Description of Artificial Sequence: Synthetic oligonucleotide
gucggguuuguaccugagu

SEQ ID NO: 583269 - RNA, 19 nt, Artificial Sequence
  Description of Artificial Sequence: Synthetic oligonucleotide
gccuagguugauggagacc

SEQ ID NO: 583270 - RNA, 19 nt, Artificial Sequence
  Description of Artificial Sequence: Synthetic oligonucleotide
cacagacgaguuugaggua

SEQ ID NO: 583271 - RNA, 19 nt, Artificial Sequence
  Description of Artificial Sequence: Synthetic oligonucleotide
gacgaguuugagguaucuu

SEQ ID NO: 583272 - RNA, 19 nt, Artificial Sequence
  Description of Artificial Sequence: Synthetic oligonucleotide
ccuccgggaacuugggcga

SEQ ID NO: 583273 - RNA, 19 nt, Artificial Sequence
  Description of Artificial Sequence: Synthetic oligonucleotide
caguggggacuacuguugu

SEQ ID NO: 583274 - RNA, 19 nt, Artificial Sequence
  Description of Artificial Sequence: Synthetic oligonucleotide
cccgguccuauguuggcca

SEQ ID NO: 583275 - RNA, 19 nt, Artificial Sequence
  Description of Artificial Sequence: Synthetic oligonucleotide
ccgacaacuuccuccaggu

SEQ ID NO: 583276 - RNA, 19 nt, Artificial Sequence
  Description of Artificial Sequence: Synthetic oligonucleotide
gcccaucauggugcgguag

SEQ ID NO: 583277 - RNA, 19 nt, Artificial Sequence
  Description of Artificial Sequence: Synthetic oligonucleotide
ggguuaggucuugcaaauc

SEQ ID NO: 583278 - RNA, 19 nt, Artificial Sequence
  Description of Artificial Sequence: Synthetic oligonucleotide
cuuggaccucagggcuuac

SEQ ID NO: 583279 - RNA, 19 nt, Artificial Sequence
  Description of Artificial Sequence: Synthetic oligonucleotide
caggcgagaugugcuggga

SEQ ID NO: 583280 - RNA, 19 nt, Artificial Sequence
  Description of Artificial Sequence: Synthetic oligonucleotide
ccgguccuauguuggccag

SEQ ID NO: 583281 - RNA, 19 nt, Artificial Sequence
  Description of Artificial Sequence: Synthetic oligonucleotide
ccaagccuagguugaugga

SEQ ID NO: 583282 - RNA, 19 nt, Artificial Sequence
  Description of Artificial Sequence: Synthetic oligonucleotide
gcaucccacucuaacgaua

SEQ ID NO: 583283 - RNA, 19 nt, Artificial Sequence
  Description of Artificial Sequence: Synthetic oligonucleotide
gccacauaggugauuucau

SEQ ID NO: 583284 - RNA, 19 nt, Artificial Sequence
  Description of Artificial Sequence: Synthetic oligonucleotide
gugaccagucguacaugau

SEQ ID NO: 583285 - RNA, 19 nt, Artificial Sequence
  Description of Artificial Sequence: Synthetic oligonucleotide
ggguuagguugauggcccu

SEQ ID NO: 583286 - RNA, 19 nt, Artificial Sequence
  Description of Artificial Sequence: Synthetic oligonucleotide
gguaggccuucccgguccu

SEQ ID NO: 583287 - RNA, 19 nt, Artificial Sequence
  Description of Artificial Sequence: Synthetic oligonucleotide
gggcgaugugggaucucga

SEQ ID NO: 583288 - RNA, 19 nt, Artificial Sequence
  Description of Artificial Sequence: Synthetic oligonucleotide
ggcugucggccguuuugcu

SEQ ID NO: 583289 - RNA, 19 nt, Artificial Sequence
  Description of Artificial Sequence: Synthetic oligonucleotide
gcacuucaugcagcuccga

SEQ ID NO: 583290 - RNA, 19 nt, Artificial Sequence
  Description of Artificial Sequence: Synthetic oligonucleotide
gccaaccaugccaguuaaa

SEQ ID NO: 583291 - RNA, 19 nt, Artificial Sequence
  Description of Artificial Sequence: Synthetic oligonucleotide
ccaggucuuuuaagcuaua

SEQ ID NO: 583292 - RNA, 19 nt, Artificial Sequence
  Description of Artificial Sequence: Synthetic oligonucleotide
guaggccuucccgguccua

SEQ ID NO: 583293 - RNA, 19 nt, Artificial Sequence
  Description of Artificial Sequence: Synthetic oligonucleotide
ggcgugacaguagcugcuu

SEQ ID NO: 583294 - RNA, 19 nt, Artificial Sequence
  Description of Artificial Sequence: Synthetic oligonucleotide
ggccguuuugcuggaucau

SEQ ID NO: 583295 - RNA, 19 nt, Artificial Sequence
  Description of Artificial Sequence: Synthetic oligonucleotide
ccgggaacuugggcgaugu

SEQ ID NO: 583296 - RNA, 19 nt, Artificial Sequence
  Description of Artificial Sequence: Synthetic oligonucleotide
gucggccguuuugcuggau

SEQ ID NO: 583297 - RNA, 19 nt, Artificial Sequence
  Description of Artificial Sequence: Synthetic oligonucleotide
cgaccccuucacaguuugu

SEQ ID NO: 583298 - RNA, 19 nt, Artificial Sequence
  Description of Artificial Sequence: Synthetic oligonucleotide
aauuguugcacagauaacc

SEQ ID NO: 583299 - RNA, 19 nt, Artificial Sequence
  Description of Artificial Sequence: Synthetic oligonucleotide
aagacuaacagcuuucuag

SEQ ID NO: 583300 - RNA, 19 nt, Artificial Sequence
  Description of Artificial Sequence: Synthetic oligonucleotide
uacauaguauuucagauug

SEQ ID NO: 583301 - RNA, 19 nt, Artificial Sequence
  Description of Artificial Sequence: Synthetic oligonucleotide
aauagauaggagugaaaac

SEQ ID NO: 583302 - RNA, 19 nt, Artificial Sequence
  Description of Artificial Sequence: Synthetic oligonucleotide
aaaauauugaaguaaugaa

SEQ ID NO: 583303 - RNA, 19 nt, Artificial Sequence
  Description of Artificial Sequence: Synthetic oligonucleotide
ugauuuguaaaguagugag

SEQ ID NO: 583304 - RNA, 19 nt, Artificial Sequence
  Description of Artificial Sequence: Synthetic oligonucleotide
gauguaagaagacuaacag

SEQ ID NO: 583305 - RNA, 19 nt, Artificial Sequence
  Description of Artificial Sequence: Synthetic oligonucleotide
aggagugaaaacuucaaac

SEQ ID NO: 583306 - RNA, 19 nt, Artificial Sequence
  Description of Artificial Sequence: Synthetic oligonucleotide
ucuauuuacaggcuucggg

SEQ ID NO: 583307 - RNA, 19 nt, Artificial Sequence
  Description of Artificial Sequence: Synthetic oligonucleotide
gaaaaugucgaccagcaug

SEQ ID NO: 583308 - RNA, 19 nt, Artificial Sequence
  Description of Artificial Sequence: Synthetic oligonucleotide
aaauuauugaaaugcgucu

SEQ ID NO: 583309 - RNA, 19 nt, Artificial Sequence
  Description of Artificial Sequence: Synthetic oligonucleotide
ucacaaaucgcacaucagg

SEQ ID NO: 583310 - RNA, 19 nt, Artificial Sequence
  Description of Artificial Sequence: Synthetic oligonucleotide
aguaaauuaucccggaguc

SEQ ID NO: 583311 - RNA, 19 nt, Artificial Sequence
  Description of Artificial Sequence: Synthetic oligonucleotide
auauagauucuccagagug

SEQ ID NO: 583312 - RNA, 19 nt, Artificial Sequence
  Description of Artificial Sequence: Synthetic oligonucleotide
gaggcaguaaauuaucccg

SEQ ID NO: 583313 - RNA, 19 nt, Artificial Sequence
  Description of Artificial Sequence: Synthetic oligonucleotide
uuaucccggagucauaugg

SEQ ID NO: 583314 - RNA, 19 nt, Artificial Sequence
  Description of Artificial Sequence: Synthetic oligonucleotide
ugucuguuaaagcucaugc

SEQ ID NO: 583315 - RNA, 19 nt, Artificial Sequence
  Description of Artificial Sequence: Synthetic oligonucleotide
auaauccccaauuuucuac

SEQ ID NO: 583316 - RNA, 19 nt, Artificial Sequence
  Description of Artificial Sequence: Synthetic oligonucleotide
uaaagauucugcaagcuuc

SEQ ID NO: 583317 - RNA, 19 nt, Artificial Sequence
  Description of Artificial Sequence: Synthetic oligonucleotide
uaagcuaaaagcuguauuc

SEQ ID NO: 583318 - RNA, 19 nt, Artificial Sequence
  Description of Artificial Sequence: Synthetic oligonucleotide
aaccgaaggaaacuucugg

SEQ ID NO: 583319 - RNA, 19 nt, Artificial Sequence
  Description of Artificial Sequence: Synthetic oligonucleotide
uguaccaugcuauauaaau

SEQ ID NO: 583320 - RNA, 19 nt, Artificial Sequence
  Description of Artificial Sequence: Synthetic oligonucleotide
ugcgugguaagccagagca

SEQ ID NO: 583321 - RNA, 19 nt, Artificial Sequence
  Description of Artificial Sequence: Synthetic oligonucleotide
cuucaaacgauguaagaag

SEQ ID NO: 583322 - RNA, 19 nt, Artificial Sequence
  Description of Artificial Sequence: Synthetic oligonucleotide
gaucauauagauucuccag

SEQ ID NO: 583323 - RNA, 19 nt, Artificial Sequence
  Description of Artificial Sequence: Synthetic oligonucleotide
ucauauaggcgauugguug

SEQ ID NO: 583324 - RNA, 19 nt, Artificial Sequence
  Description of Artificial Sequence: Synthetic oligonucleotide
auagauaggagugaaaacu

SEQ ID NO: 583325 - RNA, 19 nt, Artificial Sequence
  Description of Artificial Sequence: Synthetic oligonucleotide
uggaguaacauacaauccu

SEQ ID NO: 583326 - RNA, 19 nt, Artificial Sequence
  Description of Artificial Sequence: Synthetic oligonucleotide
uuguaaaguagugagaaga

SEQ ID NO: 583327 - RNA, 19 nt, Artificial Sequence
  Description of Artificial Sequence: Synthetic oligonucleotide
uauuuucgcaguaauguac

SEQ ID NO: 583328 - RNA, 19 nt, Artificial Sequence
  Description of Artificial Sequence: Synthetic oligonucleotide
aaugucgaccagcauguuc

SEQ ID NO: 583329 - RNA, 19 nt, Artificial Sequence
  Description of Artificial Sequence: Synthetic oligonucleotide
aaugugcuucaucaaugac

SEQ ID NO: 583330 - RNA, 19 nt, Artificial Sequence
  Description of Artificial Sequence: Synthetic oligonucleotide
auauuaauagauaggagug

SEQ ID NO: 583331 - RNA, 19 nt, Artificial Sequence
  Description of Artificial Sequence: Synthetic oligonucleotide
cauacaauccuccuccucc

SEQ ID NO: 583332 - RNA, 19 nt, Artificial Sequence
  Description of Artificial Sequence: Synthetic oligonucleotide
aaugcgucuccuuuguaug

SEQ ID NO: 583333 - RNA, 19 nt, Artificial Sequence
  Description of Artificial Sequence: Synthetic oligonucleotide
agucuuucggcauuguguc

SEQ ID NO: 583334 - RNA, 19 nt, Artificial Sequence
  Description of Artificial Sequence: Synthetic oligonucleotide
uaacgugucagccauugug

SEQ ID NO: 583335 - RNA, 19 nt, Artificial Sequence
  Description of Artificial Sequence: Synthetic oligonucleotide
uggcgaagcauauucaucc

SEQ ID NO: 583336 - RNA, 19 nt, Artificial Sequence
  Description of Artificial Sequence: Synthetic oligonucleotide
gguauagaaaagcacacag

SEQ ID NO: 583337 - RNA, 19 nt, Artificial Sequence
  Description of Artificial Sequence: Synthetic oligonucleotide
accgaaggaaacuucuggc

SEQ ID NO: 583338 - RNA, 19 nt, Artificial Sequence
  Description of Artificial Sequence: Synthetic oligonucleotide
uuguuuuacagcaauuguc

SEQ ID NO: 583339 - RNA, 19 nt, Artificial Sequence
  Description of Artificial Sequence: Synthetic oligonucleotide
cauucuaggcaaucaaacg

SEQ ID NO: 583340 - RNA, 19 nt, Artificial Sequence
  Description of Artificial Sequence: Synthetic oligonucleotide
auugaaguaaugaacacca

SEQ ID NO: 583341 - RNA, 19 nt, Artificial Sequence
  Description of Artificial Sequence: Synthetic oligonucleotide
ugaggaaugcucuauuuac

SEQ ID NO: 583342 - RNA, 19 nt, Artificial Sequence
  Description of Artificial Sequence: Synthetic oligonucleotide
cacagugagauauuucucc

SEQ ID NO: 583343 - RNA, 19 nt, Artificial Sequence
  Description of Artificial Sequence: Synthetic oligonucleotide
ugaaucuuugcacucuuac

SEQ ID NO: 583344 - RNA, 19 nt, Artificial Sequence
  Description of Artificial Sequence: Synthetic oligonucleotide
aaagacuuuccccagcaau

SEQ ID NO: 583345 - RNA, 19 nt, Artificial Sequence
  Description of Artificial Sequence: Synthetic oligonucleotide
gucgugaauaagaagaucc

SEQ ID NO: 583346 - RNA, 19 nt, Artificial Sequence
  Description of Artificial Sequence: Synthetic oligonucleotide
auaauccuuuguuuuacag

SEQ ID NO: 583347 - RNA, 19 nt, Artificial Sequence
  Description of Artificial Sequence: Synthetic oligonucleotide
uacagcaauugucacaaga

SEQ ID NO: 583348 - RNA, 19 nt, Artificial Sequence
  Description of Artificial Sequence: Synthetic oligonucleotide
auuuucgcaguaauguacc

SEQ ID NO: 583349 - RNA, 19 nt, Artificial Sequence
  Description of Artificial Sequence: Synthetic oligonucleotide
cauauaggcgauugguugg

SEQ ID NO: 583350 - RNA, 19 nt, Artificial Sequence
  Description of Artificial Sequence: Synthetic oligonucleotide
ucgugauagguauagaaaa

SEQ ID NO: 583351 - RNA, 19 nt, Artificial Sequence
  Description of Artificial Sequence: Synthetic oligonucleotide
uauauaagucuucauccaa

SEQ ID NO: 583352 - RNA, 19 nt, Artificial Sequence
  Description of Artificial Sequence: Synthetic oligonucleotide
aguaacaccaucaaucuga

SEQ ID NO: 583353 - RNA, 19 nt, Artificial Sequence
  Description of Artificial Sequence: Synthetic oligonucleotide
aaguagugagaagauacag

SEQ ID NO: 583354 - RNA, 19 nt, Artificial Sequence
  Description of Artificial Sequence: Synthetic oligonucleotide
aucauauagauucuccaga

SEQ ID NO: 583355 - RNA, 19 nt, Artificial Sequence
  Description of Artificial Sequence: Synthetic oligonucleotide
aagcacaugaggccgagcu

SEQ ID NO: 583356 - RNA, 19 nt, Artificial Sequence
  Description of Artificial Sequence: Synthetic oligonucleotide
ugaaaacuucaaacgaugu

SEQ ID NO: 583357 - RNA, 19 nt, Artificial Sequence
  Description of Artificial Sequence: Synthetic oligonucleotide
uucgcaguaauguaccaug

SEQ ID NO: 583358 - RNA, 19 nt, Artificial Sequence
  Description of Artificial Sequence: Synthetic oligonucleotide
agaacuaucacaugagaua

SEQ ID NO: 583359 - RNA, 19 nt, Artificial Sequence
  Description of Artificial Sequence: Synthetic oligonucleotide
agagccaucacuggaaccg

SEQ ID NO: 583360 - RNA, 19 nt, Artificial Sequence
  Description of Artificial Sequence: Synthetic oligonucleotide
cauuccguuauauuuucgc

SEQ ID NO: 583361 - RNA, 19 nt, Artificial Sequence
  Description of Artificial Sequence: Synthetic oligonucleotide
aaaugcgucuccuuuguau

SEQ ID NO: 583362 - RNA, 19 nt, Artificial Sequence
  Description of Artificial Sequence: Synthetic oligonucleotide
ucagacgccgacaaacaag

SEQ ID NO: 583363 - RNA, 19 nt, Artificial Sequence
  Description of Artificial Sequence: Synthetic oligonucleotide
uucgcuguugccgugagag

SEQ ID NO: 583364 - RNA, 19 nt, Artificial Sequence
  Description of Artificial Sequence: Synthetic oligonucleotide
gaacuaucacaugagauac

SEQ ID NO: 583365 - RNA, 19 nt, Artificial Sequence
  Description of Artificial Sequence: Synthetic oligonucleotide
ucauuauaagucucuucag

SEQ ID NO: 583366 - RNA, 19 nt, Artificial Sequence
  Description of Artificial Sequence: Synthetic oligonucleotide
uucagauugugucuguuaa

SEQ ID NO: 583367 - RNA, 19 nt, Artificial Sequence
  Description of Artificial Sequence: Synthetic oligonucleotide
aggucugaggaucuucagc

SEQ ID NO: 583368 - RNA, 19 nt, Artificial Sequence
  Description of Artificial Sequence: Synthetic oligonucleotide
acaugagauacauuuaaau

SEQ ID NO: 583369 - RNA, 19 nt, Artificial Sequence
  Description of Artificial Sequence: Synthetic oligonucleotide
uguaaaguagugagaagau

SEQ ID NO: 583370 - RNA, 19 nt, Artificial Sequence
  Description of Artificial Sequence: Synthetic oligonucleotide
aaguaaaaccucaggauca

SEQ ID NO: 583371 - RNA, 19 nt, Artificial Sequence
  Description of Artificial Sequence: Synthetic oligonucleotide
uaauguaccaugcuauaua

SEQ ID NO: 583372 - RNA, 19 nt, Artificial Sequence
  Description of Artificial Sequence: Synthetic oligonucleotide
ucuguaacgugucagccau

SEQ ID NO: 583373 - RNA, 19 nt, Artificial Sequence
  Description of Artificial Sequence: Synthetic oligonucleotide
uaaauuaucccggagucau

SEQ ID NO: 583374 - RNA, 19 nt, Artificial Sequence
  Description of Artificial Sequence: Synthetic oligonucleotide
aaaucagaacuaucacaug

SEQ ID NO: 583375 - RNA, 19 nt, Artificial Sequence
  Description of Artificial Sequence: Synthetic oligonucleotide
aaagcgugccaagagcuuc

SEQ ID NO: 583376 - RNA, 19 nt, Artificial Sequence
  Description of Artificial Sequence: Synthetic oligonucleotide
uuacuccccaagaaaaugu

SEQ ID NO: 583377 - RNA, 19 nt, Artificial Sequence
  Description of Artificial Sequence: Synthetic oligonucleotide
cugaguauuucuguaauac

SEQ ID NO: 583378 - RNA, 19 nt, Artificial Sequence
  Description of Artificial Sequence: Synthetic oligonucleotide
aagaaaaugucgaccagca

SEQ ID NO: 583379 - RNA, 19 nt, Artificial Sequence
  Description of Artificial Sequence: Synthetic oligonucleotide
ucgugaauaagaagauccc

SEQ ID NO: 583380 - RNA, 19 nt, Artificial Sequence
  Description of Artificial Sequence: Synthetic oligonucleotide
uugauuuguaaaguaguga

SEQ ID NO: 583381 - RNA, 19 nt, Artificial Sequence
  Description of Artificial Sequence: Synthetic oligonucleotide
aagucuuucggcauugugu

SEQ ID NO: 583382 - RNA, 19 nt, Artificial Sequence
  Description of Artificial Sequence: Synthetic oligonucleotide
uuucuagucacagaugguc

SEQ ID NO: 583383 - RNA, 19 nt, Artificial Sequence
  Description of Artificial Sequence: Synthetic oligonucleotide
ucaaacgauguaagaagac

SEQ ID NO: 583384 - RNA, 19 nt, Artificial Sequence
  Description of Artificial Sequence: Synthetic oligonucleotide
gacaaagcgugccaagagc

SEQ ID NO: 583385 - RNA, 19 nt, Artificial Sequence
  Description of Artificial Sequence: Synthetic oligonucleotide
ucuuaacuaccucuucucu

SEQ ID NO: 583386 - RNA, 19 nt, Artificial Sequence
  Description of Artificial Sequence: Synthetic oligonucleotide
cauugugucgugaauaaga

SEQ ID NO: 583387 - RNA, 19 nt, Artificial Sequence
  Description of Artificial Sequence: Synthetic oligonucleotide
uucuagucacagaugguca

SEQ ID NO: 583388 - RNA, 19 nt, Artificial Sequence
  Description of Artificial Sequence: Synthetic oligonucleotide
aucuugacgaaaaucauga

SEQ ID NO: 583389 - RNA, 19 nt, Artificial Sequence
  Description of Artificial Sequence: Synthetic oligonucleotide
uccaguuacaccagagaac

SEQ ID NO: 583390 - RNA, 19 nt, Artificial Sequence
  Description of Artificial Sequence: Synthetic oligonucleotide
ucgcacaucagguuuguca

SEQ ID NO: 583391 - RNA, 19 nt, Artificial Sequence
  Description of Artificial Sequence: Synthetic oligonucleotide
uugaaaugcgucuccuuug

SEQ ID NO: 583392 - RNA, 19 nt, Artificial Sequence
  Description of Artificial Sequence: Synthetic oligonucleotide
agaaacaauggccgccacg

SEQ ID NO: 583393 - RNA, 19 nt, Artificial Sequence
  Description of Artificial Sequence: Synthetic oligonucleotide
uccguuauauuuucgcagu

SEQ ID NO: 583394 - RNA, 19 nt, Artificial Sequence
  Description of Artificial Sequence: Synthetic oligonucleotide
uugguaauacauaguauuu

SEQ ID NO: 583395 - RNA, 19 nt, Artificial Sequence
  Description of Artificial Sequence: Synthetic oligonucleotide
ugaauaagaagaucccuuu

SEQ ID NO: 583396 - RNA, 19 nt, Artificial Sequence
  Description of Artificial Sequence: Synthetic oligonucleotide
gacgccgacaaacaagaug

SEQ ID NO: 583397 - RNA, 19 nt, Artificial Sequence
  Description of Artificial Sequence: Synthetic oligonucleotide
ugaaaugcgucuccuuugu

SEQ ID NO: 583398 - RNA, 19 nt, Artificial Sequence
  Description of Artificial Sequence: Synthetic oligonucleotide
uuuaguuccuagcaucaua

SEQ ID NO: 583399 - RNA, 19 nt, Artificial Sequence
  Description of Artificial Sequence: Synthetic oligonucleotide
ugagauauuucuccaucuc

SEQ ID NO: 583400 - RNA, 19 nt, Artificial Sequence
  Description of Artificial Sequence: Synthetic oligonucleotide
gguaauacauaguauuuca

SEQ ID NO: 583401 - RNA, 19 nt, Artificial Sequence
  Description of Artificial Sequence: Synthetic oligonucleotide
ggaauuuucuguuuccaug

SEQ ID NO: 583402 - RNA, 19 nt, Artificial Sequence
  Description of Artificial Sequence: Synthetic oligonucleotide
auuggcauugauauauaag

SEQ ID NO: 583403 - RNA, 19 nt, Artificial Sequence
  Description of Artificial Sequence: Synthetic oligonucleotide
aauuaucccggagucauau

SEQ ID NO: 583404 - RNA, 19 nt, Artificial Sequence
  Description of Artificial Sequence: Synthetic oligonucleotide
uaggcaaucaaacgccacu

SEQ ID NO: 583405 - RNA, 19 nt, Artificial Sequence
  Description of Artificial Sequence: Synthetic oligonucleotide
agcaagaccaucucucugu

SEQ ID NO: 583406 - RNA, 19 nt, Artificial Sequence
  Description of Artificial Sequence: Synthetic oligonucleotide
aaugcaauuguugcacaga

SEQ ID NO: 583407 - RNA, 19 nt, Artificial Sequence
  Description of Artificial Sequence: Synthetic oligonucleotide
uguaacgugucagccauug

SEQ ID NO: 583408 - RNA, 19 nt, Artificial Sequence
  Description of Artificial Sequence: Synthetic oligonucleotide
auugguuggucauuggcau

SEQ ID NO: 583409 - RNA, 19 nt, Artificial Sequence
  Description of Artificial Sequence: Synthetic oligonucleotide
aaacgauguaagaagacua

SEQ ID NO: 583410 - RNA, 19 nt, Artificial Sequence
  Description of Artificial Sequence: Synthetic oligonucleotide
auaugggugaugcuuucug

SEQ ID NO: 583411 - RNA, 19 nt, Artificial Sequence
  Description of Artificial Sequence: Synthetic oligonucleotide
uuucacgucauccgucaca

SEQ ID NO: 583412 - RNA, 19 nt, Artificial Sequence
  Description of Artificial Sequence: Synthetic oligonucleotide
aaaguagugagaagauaca

SEQ ID NO: 583413 - RNA, 19 nt, Artificial Sequence
  Description of Artificial Sequence: Synthetic oligonucleotide
uucuuaacuaccucuucuc

SEQ ID NO: 583414 - RNA, 19 nt, Artificial Sequence
  Description of Artificial Sequence: Synthetic oligonucleotide
uucuugguaguaacccucc

SEQ ID NO: 583415 - RNA, 19 nt, Artificial Sequence
  Description of Artificial Sequence: Synthetic oligonucleotide
uagauaggagugaaaacuu

SEQ ID NO: 583416 - RNA, 19 nt, Artificial Sequence
  Description of Artificial Sequence: Synthetic oligonucleotide
guaacauacaauccuccuc

SEQ ID NO: 583417 - RNA, 19 nt, Artificial Sequence
  Description of Artificial Sequence: Synthetic oligonucleotide
gauaggagugaaaacuuca

SEQ ID NO: 583418 - RNA, 19 nt, Artificial Sequence
  Description of Artificial Sequence: Synthetic oligonucleotide
ucuaggcaaucaaacgcca

SEQ ID NO: 583419 - RNA, 19 nt, Artificial Sequence
  Description of Artificial Sequence: Synthetic oligonucleotide
uacuuuuagaagacguuuu

SEQ ID NO: 583420 - RNA, 19 nt, Artificial Sequence
  Description of Artificial Sequence: Synthetic oligonucleotide
ucagucuggucacaucgug

SEQ ID NO: 583421 - RNA, 19 nt, Artificial Sequence
  Description of Artificial Sequence: Synthetic oligonucleotide
uccauucuaggcaaucaaa

SEQ ID NO: 583422 - RNA, 19 nt, Artificial Sequence
  Description of Artificial Sequence: Synthetic oligonucleotide
acgccgacaaacaagaugu

SEQ ID NO: 583423 - RNA, 19 nt, Artificial Sequence
  Description of Artificial Sequence: Synthetic oligonucleotide
ugcugagcggugcuguuag

SEQ ID NO: 583424 - RNA, 19 nt, Artificial Sequence
  Description of Artificial Sequence: Synthetic oligonucleotide
auucuugguaguaacccuc

SEQ ID NO: 583425 - RNA, 19 nt, Artificial Sequence
  Description of Artificial Sequence: Synthetic oligonucleotide
acgauguaagaagacuaac

SEQ ID NO: 583426 - RNA, 19 nt, Artificial Sequence
  Description of Artificial Sequence: Synthetic oligonucleotide
uuguugcacagauaaccug

SEQ ID NO: 583427 - RNA, 19 nt, Artificial Sequence
  Description of Artificial Sequence: Synthetic oligonucleotide
ccuagcaucauauaggcga

SEQ ID NO: 583428 - RNA, 19 nt, Artificial Sequence
  Description of Artificial Sequence: Synthetic oligonucleotide
uugugucgugaauaagaag

SEQ ID NO: 583429 - RNA, 19 nt, Artificial Sequence
  Description of Artificial Sequence: Synthetic oligonucleotide
gauugguuggucauuggca

SEQ ID NO: 583430 - RNA, 19 nt, Artificial Sequence
  Description of Artificial Sequence: Synthetic oligonucleotide
ugguaauacauaguauuuc

SEQ ID NO: 583431 - RNA, 19 nt, Artificial Sequence
  Description of Artificial Sequence: Synthetic oligonucleotide
uaugggugaugcuuucuga

SEQ ID NO: 583432 - RNA, 19 nt, Artificial Sequence
  Description of Artificial Sequence: Synthetic oligonucleotide
uccuagcaucauauaggcg

SEQ ID NO: 583433 - RNA, 19 nt, Artificial Sequence
  Description of Artificial Sequence: Synthetic oligonucleotide
aguaacccuccacagauuu

SEQ ID NO: 583434 - RNA, 19 nt, Artificial Sequence
  Description of Artificial Sequence: Synthetic oligonucleotide
ggauaaagauucugcaagc

SEQ ID NO: 583435 - RNA, 19 nt, Artificial Sequence
  Description of Artificial Sequence: Synthetic oligonucleotide
uuaggagacugcauacgaa

SEQ ID NO: 583436 - RNA, 19 nt, Artificial Sequence
  Description of Artificial Sequence: Synthetic oligonucleotide
agaccuuuucuggaguaac

SEQ ID NO: 583437 - RNA, 19 nt, Artificial Sequence
  Description of Artificial Sequence: Synthetic oligonucleotide
acauacaauccuccuccuc

SEQ ID NO: 583438 - RNA, 19 nt, Artificial Sequence
  Description of Artificial Sequence: Synthetic oligonucleotide
cucucuguaacgugucagc

SEQ ID NO: 583439 - RNA, 19 nt, Artificial Sequence
  Description of Artificial Sequence: Synthetic oligonucleotide
uucuggaguaacauacaau

SEQ ID NO: 583440 - RNA, 19 nt, Artificial Sequence
  Description of Artificial Sequence: Synthetic oligonucleotide
ugaggauauccuucuguac

SEQ ID NO: 583441 - RNA, 19 nt, Artificial Sequence
  Description of Artificial Sequence: Synthetic oligonucleotide
aagccaccguaacuaguuc

SEQ ID NO: 583442 - RNA, 19 nt, Artificial Sequence
  Description of Artificial Sequence: Synthetic oligonucleotide
ucgcaguaauguaccaugc

SEQ ID NO: 583443 - RNA, 19 nt, Artificial Sequence
  Description of Artificial Sequence: Synthetic oligonucleotide
ugagaaacaauggccgcca

SEQ ID NO: 583444 - RNA, 19 nt, Artificial Sequence
  Description of Artificial Sequence: Synthetic oligonucleotide
ucuuacuccccaagaaaau

SEQ ID NO: 583445 - RNA, 19 nt, Artificial Sequence
  Description of Artificial Sequence: Synthetic oligonucleotide
ugugucacauucccuccug

SEQ ID NO: 583446 - RNA, 19 nt, Artificial Sequence
  Description of Artificial Sequence: Synthetic oligonucleotide
cugggauucgcuguugccg

SEQ ID NO: 583447 - RNA, 19 nt, Artificial Sequence
  Description of Artificial Sequence: Synthetic oligonucleotide
aucagccuguuacuugcac

SEQ ID NO: 583448 - RNA, 19 nt, Artificial Sequence
  Description of Artificial Sequence: Synthetic oligonucleotide
cuuacuccccaagaaaaug

SEQ ID NO: 583449 - RNA, 19 nt, Artificial Sequence
  Description of Artificial Sequence: Synthetic oligonucleotide
aucagaacuaucacaugag

SEQ ID NO: 583450 - RNA, 19 nt, Artificial Sequence
  Description of Artificial Sequence: Synthetic oligonucleotide
ucuuucggcauugugucgu

SEQ ID NO: 583451 - RNA, 19 nt, Artificial Sequence
  Description of Artificial Sequence: Synthetic oligonucleotide
caugcuaaacaccugaggu

SEQ ID NO: 583452 - RNA, 19 nt, Artificial Sequence
  Description of Artificial Sequence: Synthetic oligonucleotide
auggccgccacguuugcag

SEQ ID NO: 583453 - RNA, 19 nt, Artificial Sequence
  Description of Artificial Sequence: Synthetic oligonucleotide
agcaucauauaggcgauug

SEQ ID NO: 583454 - RNA, 19 nt, Artificial Sequence
  Description of Artificial Sequence: Synthetic oligonucleotide
aaaucgcacaucagguuug

SEQ ID NO: 583455 - RNA, 19 nt, Artificial Sequence
  Description of Artificial Sequence: Synthetic oligonucleotide
augcaauuguugcacagau

SEQ ID NO: 583456 - RNA, 19 nt, Artificial Sequence
  Description of Artificial Sequence: Synthetic oligonucleotide
ugguuggucauuggcauug

SEQ ID NO: 583457 - RNA, 19 nt, Artificial Sequence
  Description of Artificial Sequence: Synthetic oligonucleotide
uguuaaagcucaugcuaaa

SEQ ID NO: 583458 - RNA, 19 nt, Artificial Sequence
  Description of Artificial Sequence: Synthetic oligonucleotide
agauaggagugaaaacuuc

SEQ ID NO: 583459 - RNA, 19 nt, Artificial Sequence
  Description of Artificial Sequence: Synthetic oligonucleotide
ugacgaaaaucaugacccc

SEQ ID NO: 583460 - RNA, 19 nt, Artificial Sequence
  Description of Artificial Sequence: Synthetic oligonucleotide
uuauugaaaugcgucuccu

SEQ ID NO: 583461 - RNA, 19 nt, Artificial Sequence
  Description of Artificial Sequence: Synthetic oligonucleotide
aagcgugccaagagcuucc

SEQ ID NO: 583462 - RNA, 19 nt, Artificial Sequence
  Description of Artificial Sequence: Synthetic oligonucleotide
cucuugggccuuuggaggg

SEQ ID NO: 583463 - RNA, 19 nt, Artificial Sequence
  Description of Artificial Sequence: Synthetic oligonucleotide
ugcauacgaaggccugagg

SEQ ID NO: 583464 - RNA, 19 nt, Artificial Sequence
  Description of Artificial Sequence: Synthetic oligonucleotide
aacgauguaagaagacuaa

SEQ ID NO: 583465 - RNA, 19 nt, Artificial Sequence
  Description of Artificial Sequence: Synthetic oligonucleotide
aguuacaccagagaacuua

SEQ ID NO: 583466 - RNA, 19 nt, Artificial Sequence
  Description of Artificial Sequence: Synthetic oligonucleotide
uacgaaggccugaggaaug

SEQ ID NO: 583467 - RNA, 19 nt, Artificial Sequence
  Description of Artificial Sequence: Synthetic oligonucleotide
auauccuucuguacccugg

SEQ ID NO: 583468 - RNA, 19 nt, Artificial Sequence
  Description of Artificial Sequence: Synthetic oligonucleotide
aaugcucuauuuacaggcu

SEQ ID NO: 583469 - RNA, 19 nt, Artificial Sequence
  Description of Artificial Sequence: Synthetic oligonucleotide
agaccucuguaaguucucc

SEQ ID NO: 583470 - RNA, 19 nt, Artificial Sequence
  Description of Artificial Sequence: Synthetic oligonucleotide
gagaggcaguaaauuaucc

SEQ ID NO: 583471 - RNA, 19 nt, Artificial Sequence
  Description of Artificial Sequence: Synthetic oligonucleotide
uuuucgcaguaauguacca

SEQ ID NO: 583472 - RNA, 19 nt, Artificial Sequence
  Description of Artificial Sequence: Synthetic oligonucleotide
auaagucuucauccaaaau

SEQ ID NO: 583473 - RNA, 19 nt, Artificial Sequence
  Description of Artificial Sequence: Synthetic oligonucleotide
cacugacucacacaaugug

SEQ ID NO: 583474 - RNA, 19 nt, Artificial Sequence
  Description of Artificial Sequence: Synthetic oligonucleotide
ggagucauaugggugaugc

SEQ ID NO: 583475 - RNA, 19 nt, Artificial Sequence
  Description of Artificial Sequence: Synthetic oligonucleotide
guaacuaguucuucuccuc

SEQ ID NO: 583476 - RNA, 19 nt, Artificial Sequence
  Description of Artificial Sequence: Synthetic oligonucleotide
cuuugcacucuuacucccc

SEQ ID NO: 583477 - RNA, 19 nt, Artificial Sequence
  Description of Artificial Sequence: Synthetic oligonucleotide
ugucacauucccuccugga

SEQ ID NO: 583478 - RNA, 19 nt, Artificial Sequence
  Description of Artificial Sequence: Synthetic oligonucleotide
uugccuugaagccaccgua

SEQ ID NO: 583479 - RNA, 19 nt, Artificial Sequence
  Description of Artificial Sequence: Synthetic oligonucleotide
gaaggaaacuucuggcgaa

SEQ ID NO: 583480 - RNA, 19 nt, Artificial Sequence
  Description of Artificial Sequence: Synthetic oligonucleotide
aacuaguucuucuccucuu

SEQ ID NO: 583481 - RNA, 19 nt, Artificial Sequence
  Description of Artificial Sequence: Synthetic oligonucleotide
uccuuuguaugaugguuuc

SEQ ID NO: 583482 - RNA, 19 nt, Artificial Sequence
  Description of Artificial Sequence: Synthetic oligonucleotide
auccuccuccuccuccucc

SEQ ID NO: 583483 - RNA, 19 nt, Artificial Sequence
  Description of Artificial Sequence: Synthetic oligonucleotide
ugaagccaccguaacuagu

SEQ ID NO: 583484 - RNA, 19 nt, Artificial Sequence
  Description of Artificial Sequence: Synthetic oligonucleotide
ugggauucgcuguugccgu

SEQ ID NO: 583485 - RNA, 19 nt, Artificial Sequence
  Description of Artificial Sequence: Synthetic oligonucleotide
aaggccugaggaaugcucu

SEQ ID NO: 583486 - RNA, 19 nt, Artificial Sequence
  Description of Artificial Sequence: Synthetic oligonucleotide
ucuugacgaaaaucaugac

SEQ ID NO: 583487 - RNA, 19 nt, Artificial Sequence
  Description of Artificial Sequence: Synthetic oligonucleotide
cucuguaaguucuccaaga

SEQ ID NO: 583488 - RNA, 19 nt, Artificial Sequence
  Description of Artificial Sequence: Synthetic oligonucleotide
aauccuccuccuccuccuc

SEQ ID NO: 583489 - RNA, 19 nt, Artificial Sequence
  Description of Artificial Sequence: Synthetic oligonucleotide
ccgacaaacaagaugugug

SEQ ID NO: 583490 - RNA, 19 nt, Artificial Sequence
  Description of Artificial Sequence: Synthetic oligonucleotide
gauggucagacgccgacaa

SEQ ID NO: 583491 - RNA, 19 nt, Artificial Sequence
  Description of Artificial Sequence: Synthetic oligonucleotide
uagcuugauuuguaaagua

SEQ ID NO: 583492 - RNA, 19 nt, Artificial Sequence
  Description of Artificial Sequence: Synthetic oligonucleotide
ggagacugcauacgaaggc

SEQ ID NO: 583493 - RNA, 19 nt, Artificial Sequence
  Description of Artificial Sequence: Synthetic oligonucleotide
ccauucuaggcaaucaaac

SEQ ID NO: 583494 - RNA, 19 nt, Artificial Sequence
  Description of Artificial Sequence: Synthetic oligonucleotide
acuccccaagaaaaugucg

SEQ ID NO: 583495 - RNA, 19 nt, Artificial Sequence
  Description of Artificial Sequence: Synthetic oligonucleotide
ugacugaaucuuugcacuc

SEQ ID NO: 583496 - RNA, 19 nt, Artificial Sequence
  Description of Artificial Sequence: Synthetic oligonucleotide
cagacgccgacaaacaaga

SEQ ID NO: 583497 - RNA, 19 nt, Artificial Sequence
  Description of Artificial Sequence: Synthetic oligonucleotide
uccuccuccuccuccuccg

SEQ ID NO: 583498 - RNA, 19 nt, Artificial Sequence
  Description of Artificial Sequence: Synthetic oligonucleotide
ucccggagucauaugggug

SEQ ID NO: 583499 - RNA, 19 nt, Artificial Sequence
  Description of Artificial Sequence: Synthetic oligonucleotide
gacuaacagcuuucuaguc

SEQ ID NO: 583500 - RNA, 19 nt, Artificial Sequence
  Description of Artificial Sequence: Synthetic oligonucleotide
caaugugcuucaucaauga

SEQ ID NO: 583501 - RNA, 19 nt, Artificial Sequence
  Description of Artificial Sequence: Synthetic oligonucleotide
ucuugguaguaacccucca

SEQ ID NO: 583502 - RNA, 19 nt, Artificial Sequence
  Description of Artificial Sequence: Synthetic oligonucleotide
uucacgucauccgucacau

SEQ ID NO: 583503 - RNA, 19 nt, Artificial Sequence
  Description of Artificial Sequence: Synthetic oligonucleotide
uuacaccagagaacuuacu

SEQ ID NO: 583504 - RNA, 19 nt, Artificial Sequence
  Description of Artificial Sequence: Synthetic oligonucleotide
cuaggcaaucaaacgccac

SEQ ID NO: 583505 - RNA, 19 nt, Artificial Sequence
  Description of Artificial Sequence: Synthetic oligonucleotide
uggaaccgaaggaaacuuc

SEQ ID NO: 583506 - RNA, 19 nt, Artificial Sequence
  Description of Artificial Sequence: Synthetic oligonucleotide
agaaucacugaggccugcg

SEQ ID NO: 583507 - RNA, 19 nt, Artificial Sequence
  Description of Artificial Sequence: Synthetic oligonucleotide
auugugucgugaauaagaa

SEQ ID NO: 583508 - RNA, 19 nt, Artificial Sequence
  Description of Artificial Sequence: Synthetic oligonucleotide
gagagccaucacuggaacc

SEQ ID NO: 583509 - RNA, 19 nt, Artificial Sequence
  Description of Artificial Sequence: Synthetic oligonucleotide
aucgugauagguauagaaa

SEQ ID NO: 583510 - RNA, 19 nt, Artificial Sequence
  Description of Artificial Sequence: Synthetic oligonucleotide
gucauuggcauugauauau

SEQ ID NO: 583511 - RNA, 19 nt, Artificial Sequence
  Description of Artificial Sequence: Synthetic oligonucleotide
agccauaauccccaauuuu

SEQ ID NO: 583512 - RNA, 19 nt, Artificial Sequence
  Description of Artificial Sequence: Synthetic oligonucleotide
ccgaaggaaacuucuggcg

SEQ ID NO: 583513 - RNA, 19 nt, Artificial Sequence
  Description of Artificial Sequence: Synthetic oligonucleotide
aaaucaggguuaaauccuu

SEQ ID NO: 583514 - RNA, 19 nt, Artificial Sequence
  Description of Artificial Sequence: Synthetic oligonucleotide
ugccuugaagccaccguaa

SEQ ID NO: 583515 - RNA, 19 nt, Artificial Sequence
  Description of Artificial Sequence: Synthetic oligonucleotide
cuugaguguagcuguauua

SEQ ID NO: 583516 - RNA, 19 nt, Artificial Sequence
  Description of Artificial Sequence: Synthetic oligonucleotide
ucaccaaaguaagcuaaaa

SEQ ID NO: 583517 - RNA, 19 nt, Artificial Sequence
  Description of Artificial Sequence: Synthetic oligonucleotide
acaauggccgccacguuug

SEQ ID NO: 583518 - RNA, 19 nt, Artificial Sequence
  Description of Artificial Sequence: Synthetic oligonucleotide
auuaucccggagucauaug

SEQ ID NO: 583519 - RNA, 19 nt, Artificial Sequence
  Description of Artificial Sequence: Synthetic oligonucleotide
uaggcgauugguuggucau

SEQ ID NO: 583520 - RNA, 19 nt, Artificial Sequence
  Description of Artificial Sequence: Synthetic oligonucleotide
cauacgaaggccugaggaa

SEQ ID NO: 583521 - RNA, 19 nt, Artificial Sequence
  Description of Artificial Sequence: Synthetic oligonucleotide
ugucgugaauaagaagauc

SEQ ID NO: 583522 - RNA, 19 nt, Artificial Sequence
  Description of Artificial Sequence: Synthetic oligonucleotide
ggcuuuaguuccuagcauc

SEQ ID NO: 583523 - RNA, 19 nt, Artificial Sequence
  Description of Artificial Sequence: Synthetic oligonucleotide
gauucgcuguugccgugag

SEQ ID NO: 583524 - RNA, 19 nt, Artificial Sequence
  Description of Artificial Sequence: Synthetic oligonucleotide
cacaaaucgcacaucaggu

SEQ ID NO: 583525 - RNA, 19 nt, Artificial Sequence
  Description of Artificial Sequence: Synthetic oligonucleotide
gcauacgaaggccugagga

SEQ ID NO: 583526 - RNA, 19 nt, Artificial Sequence
  Description of Artificial Sequence: Synthetic oligonucleotide
uuuucacgucauccgucac

SEQ ID NO: 583527 - RNA, 19 nt, Artificial Sequence
  Description of Artificial Sequence: Synthetic oligonucleotide
aguaagcuaaaagcuguau

SEQ ID NO: 583528 - RNA, 19 nt, Artificial Sequence
  Description of Artificial Sequence: Synthetic oligonucleotide
aucccggagucauaugggu

SEQ ID NO: 583529 - RNA, 19 nt, Artificial Sequence
  Description of Artificial Sequence: Synthetic oligonucleotide
uguuacuugcacagaccuu

SEQ ID NO: 583530 - RNA, 19 nt, Artificial Sequence
  Description of Artificial Sequence: Synthetic oligonucleotide
ccgaucauauagauucucc

SEQ ID NO: 583531 - RNA, 19 nt, Artificial Sequence
  Description of Artificial Sequence: Synthetic oligonucleotide
gcauguucagaguaaaucu

SEQ ID NO: 583532 - RNA, 19 nt, Artificial Sequence
  Description of Artificial Sequence: Synthetic oligonucleotide
agcacaugaggccgagcug

SEQ ID NO: 583533 - RNA, 19 nt, Artificial Sequence
  Description of Artificial Sequence: Synthetic oligonucleotide
agcuuccgaucauauagau

SEQ ID NO: 583534 - RNA, 19 nt, Artificial Sequence
  Description of Artificial Sequence: Synthetic oligonucleotide
caguaaauuaucccggagu

SEQ ID NO: 583535 - RNA, 19 nt, Artificial Sequence
  Description of Artificial Sequence: Synthetic oligonucleotide
aacuaucacaugagauaca

SEQ ID NO: 583536 - RNA, 19 nt, Artificial Sequence
  Description of Artificial Sequence: Synthetic oligonucleotide
cugacucacacaaugugcu

SEQ ID NO: 583537 - RNA, 19 nt, Artificial Sequence
  Description of Artificial Sequence: Synthetic oligonucleotide
agaaaaugucgaccagcau

SEQ ID NO: 583538 - RNA, 19 nt, Artificial Sequence
  Description of Artificial Sequence: Synthetic oligonucleotide
ggucugaggaucuucagcu

SEQ ID NO: 583539 - RNA, 19 nt, Artificial Sequence
  Description of Artificial Sequence: Synthetic oligonucleotide
caccaaagacuuuccccag

SEQ ID NO: 583540 - RNA, 19 nt, Artificial Sequence
  Description of Artificial Sequence: Synthetic oligonucleotide
uugcagaccucuguaaguu

SEQ ID NO: 583541 - RNA, 19 nt, Artificial Sequence
  Description of Artificial Sequence: Synthetic oligonucleotide
cgugauagguauagaaaag

SEQ ID NO: 583542 - RNA, 19 nt, Artificial Sequence
  Description of Artificial Sequence: Synthetic oligonucleotide
ugcuacugauguugcuuga

SEQ ID NO: 583543 - RNA, 19 nt, Artificial Sequence
  Description of Artificial Sequence: Synthetic oligonucleotide
uccgaucauauagauucuc

SEQ ID NO: 583544 - RNA, 19 nt, Artificial Sequence
  Description of Artificial Sequence: Synthetic oligonucleotide
cccaagaaaaugucgacca

SEQ ID NO: 583545 - RNA, 19 nt, Artificial Sequence
  Description of Artificial Sequence: Synthetic oligonucleotide
ugcuguuaggagacugcau

SEQ ID NO: 583546 - RNA, 19 nt, Artificial Sequence
  Description of Artificial Sequence: Synthetic oligonucleotide
auauaggcgauugguuggu

SEQ ID NO: 583547 - RNA, 19 nt, Artificial Sequence
  Description of Artificial Sequence: Synthetic oligonucleotide
ggaguaacauacaauccuc

SEQ ID NO: 583548 - RNA, 19 nt, Artificial Sequence
  Description of Artificial Sequence: Synthetic oligonucleotide
ugucgaccagcauguucag

SEQ ID NO: 583549 - RNA, 19 nt, Artificial Sequence
  Description of Artificial Sequence: Synthetic oligonucleotide
augcgucuccuuuguauga

SEQ ID NO: 583550 - RNA, 19 nt, Artificial Sequence
  Description of Artificial Sequence: Synthetic oligonucleotide
uacuugcacagaccuuuuc

SEQ ID NO: 583551 - RNA, 19 nt, Artificial Sequence
  Description of Artificial Sequence: Synthetic oligonucleotide
aucauauaggcgauugguu

SEQ ID NO: 583552 - RNA, 19 nt, Artificial Sequence
  Description of Artificial Sequence: Synthetic oligonucleotide
ggagagaugcaugaaucac

SEQ ID NO: 583553 - RNA, 19 nt, Artificial Sequence
  Description of Artificial Sequence: Synthetic oligonucleotide
guaagcuaaaagcuguauu

SEQ ID NO: 583554 - RNA, 19 nt, Artificial Sequence
  Description of Artificial Sequence: Synthetic oligonucleotide
cauuggcauugauauauaa

SEQ ID NO: 583555 - RNA, 19 nt, Artificial Sequence
  Description of Artificial Sequence: Synthetic oligonucleotide
uuacagcaauugucacaag

SEQ ID NO: 583556 - RNA, 19 nt, Artificial Sequence
  Description of Artificial Sequence: Synthetic oligonucleotide
aacccuccacagauuuagg

SEQ ID NO: 583557 - RNA, 19 nt, Artificial Sequence
  Description of Artificial Sequence: Synthetic oligonucleotide
cacaugagauacauuuaaa

SEQ ID NO: 583558 - RNA, 19 nt, Artificial Sequence
  Description of Artificial Sequence: Synthetic oligonucleotide
gacugcauacgaaggccug

SEQ ID NO: 583559 - RNA, 19 nt, Artificial Sequence
  Description of Artificial Sequence: Synthetic oligonucleotide
caguaauguaccaugcuau

SEQ ID NO: 583560 - RNA, 19 nt, Artificial Sequence
  Description of Artificial Sequence: Synthetic oligonucleotide
ucggcauugugucgugaau

SEQ ID NO: 583561 - RNA, 19 nt, Artificial Sequence
  Description of Artificial Sequence: Synthetic oligonucleotide
ugcagaccucuguaaguuc

SEQ ID NO: 583562 - RNA, 19 nt, Artificial Sequence
  Description of Artificial Sequence: Synthetic oligonucleotide
caaacgauguaagaagacu

SEQ ID NO: 583563 - RNA, 19 nt, Artificial Sequence
  Description of Artificial Sequence: Synthetic oligonucleotide
caucauauaggcgauuggu

SEQ ID NO: 583564 - RNA, 19 nt, Artificial Sequence
  Description of Artificial Sequence: Synthetic oligonucleotide
gcaguaauguaccaugcua

SEQ ID NO: 583565 - RNA, 19 nt, Artificial Sequence
  Description of Artificial Sequence: Synthetic oligonucleotide
ggauacuuuggccacuaaa

SEQ ID NO: 583566 - RNA, 19 nt, Artificial Sequence
  Description of Artificial Sequence: Synthetic oligonucleotide
agcaauuugcagaccucug

SEQ ID NO: 583567 - RNA, 19 nt, Artificial Sequence
  Description of Artificial Sequence: Synthetic oligonucleotide
cugcauacgaaggccugag

SEQ ID NO: 583568 - RNA, 19 nt, Artificial Sequence
  Description of Artificial Sequence: Synthetic oligonucleotide
guauagaaaagcacacagu

SEQ ID NO: 583569 - RNA, 19 nt, Artificial Sequence
  Description of Artificial Sequence: Synthetic oligonucleotide
ccgagcuggauccaguuac

SEQ ID NO: 583570 - RNA, 19 nt, Artificial Sequence
  Description of Artificial Sequence: Synthetic oligonucleotide
ugugugcugagcggugcug

SEQ ID NO: 583571 - RNA, 19 nt, Artificial Sequence
  Description of Artificial Sequence: Synthetic oligonucleotide
cgucuccuuuguaugaugg

SEQ ID NO: 583572 - RNA, 19 nt, Artificial Sequence
  Description of Artificial Sequence: Synthetic oligonucleotide
cacucuuacuccccaagaa

SEQ ID NO: 583573 - RNA, 19 nt, Artificial Sequence
  Description of Artificial Sequence: Synthetic oligonucleotide
acugcauacgaaggccuga

SEQ ID NO: 583574 - RNA, 19 nt, Artificial Sequence
  Description of Artificial Sequence: Synthetic oligonucleotide
gagaaacaauggccgccac

SEQ ID NO: 583575 - RNA, 19 nt, Artificial Sequence
  Description of Artificial Sequence: Synthetic oligonucleotide
cuagcuugauuuguaaagu

SEQ ID NO: 583576 - RNA, 19 nt, Artificial Sequence
  Description of Artificial Sequence: Synthetic oligonucleotide
uccuccuccuccuccuccu

SEQ ID NO: 583577 - RNA, 19 nt, Artificial Sequence
  Description of Artificial Sequence: Synthetic oligonucleotide
aggccugcgugguaagcca

SEQ ID NO: 583578 - RNA, 19 nt, Artificial Sequence
  Description of Artificial Sequence: Synthetic oligonucleotide
ucgcccggggaacuguccu

SEQ ID NO: 583579 - RNA, 19 nt, Artificial Sequence
  Description of Artificial Sequence: Synthetic oligonucleotide
gagcuuccgaucauauaga

SEQ ID NO: 583580 - RNA, 19 nt, Artificial Sequence
  Description of Artificial Sequence: Synthetic oligonucleotide
ugugucuguuaaagcucau

SEQ ID NO: 583581 - RNA, 19 nt, Artificial Sequence
  Description of Artificial Sequence: Synthetic oligonucleotide
cuuucggcauugugucgug

SEQ ID NO: 583582 - RNA, 19 nt, Artificial Sequence
  Description of Artificial Sequence: Synthetic oligonucleotide
caaaucgcacaucagguuu

SEQ ID NO: 583583 - RNA, 19 nt, Artificial Sequence
  Description of Artificial Sequence: Synthetic oligonucleotide
ucacaucgugauagguaua

SEQ ID NO: 583584 - RNA, 19 nt, Artificial Sequence
  Description of Artificial Sequence: Synthetic oligonucleotide
aaucagccuguuacuugca

SEQ ID NO: 583585 - RNA, 19 nt, Artificial Sequence
  Description of Artificial Sequence: Synthetic oligonucleotide
ggcaguaaauuaucccgga

SEQ ID NO: 583586 - RNA, 19 nt, Artificial Sequence
  Description of Artificial Sequence: Synthetic oligonucleotide
aucacaugagauacauuua

SEQ ID NO: 583587 - RNA, 19 nt, Artificial Sequence
  Description of Artificial Sequence: Synthetic oligonucleotide
cacguuugcaguggcagca

SEQ ID NO: 583588 - RNA, 19 nt, Artificial Sequence
  Description of Artificial Sequence: Synthetic oligonucleotide
cagucuggucacaucguga

SEQ ID NO: 583589 - RNA, 19 nt, Artificial Sequence
  Description of Artificial Sequence: Synthetic oligonucleotide
aauggccgccacguuugca

SEQ ID NO: 583590 - RNA, 19 nt, Artificial Sequence
  Description of Artificial Sequence: Synthetic oligonucleotide
gagcuggauccaguuacac

SEQ ID NO: 583591 - RNA, 19 nt, Artificial Sequence
  Description of Artificial Sequence: Synthetic oligonucleotide
acauaguauuucagauugu

SEQ ID NO: 583592 - RNA, 19 nt, Artificial Sequence
  Description of Artificial Sequence: Synthetic oligonucleotide
ccaagaaaaugucgaccag

SEQ ID NO: 583593 - RNA, 19 nt, Artificial Sequence
  Description of Artificial Sequence: Synthetic oligonucleotide
uaguaacccuccacagauu

SEQ ID NO: 583594 - RNA, 19 nt, Artificial Sequence
  Description of Artificial Sequence: Synthetic oligonucleotide
gcuacugauguugcuugag

SEQ ID NO: 583595 - RNA, 19 nt, Artificial Sequence
  Description of Artificial Sequence: Synthetic oligonucleotide
ggcgauugguuggucauug

SEQ ID NO: 583596 - RNA, 19 nt, Artificial Sequence
  Description of Artificial Sequence: Synthetic oligonucleotide
uacccugggauucgcuguu

SEQ ID NO: 583597 - RNA, 19 nt, Artificial Sequence
  Description of Artificial Sequence: Synthetic oligonucleotide
cuccuccuccuccuccucc

SEQ ID NO: 583598 - RNA, 19 nt, Artificial Sequence
  Description of Artificial Sequence: Synthetic oligonucleotide
gaaucacugaggccugcgu

SEQ ID NO: 583599 - RNA, 19 nt, Artificial Sequence
  Description of Artificial Sequence: Synthetic oligonucleotide
aaauuaucccggagucaua

SEQ ID NO: 583600 - RNA, 19 nt, Artificial Sequence
  Description of Artificial Sequence: Synthetic oligonucleotide
cgauugguuggucauuggc

SEQ ID NO: 583601 - RNA, 19 nt, Artificial Sequence
  Description of Artificial Sequence: Synthetic oligonucleotide
gucagacgccgacaaacaa

SEQ ID NO: 583602 - RNA, 19 nt, Artificial Sequence
  Description of Artificial Sequence: Synthetic oligonucleotide
ugcgucuccuuuguaugau

SEQ ID NO: 583603 - RNA, 19 nt, Artificial Sequence
  Description of Artificial Sequence: Synthetic oligonucleotide
gacugaaucuuugcacucu

SEQ ID NO: 583604 - RNA, 19 nt, Artificial Sequence
  Description of Artificial Sequence: Synthetic oligonucleotide
ugggauacuuuggccacua

SEQ ID NO: 583605 - RNA, 19 nt, Artificial Sequence
  Description of Artificial Sequence: Synthetic oligonucleotide
ccccaagaaaaugucgacc

SEQ ID NO: 583606 - RNA, 19 nt, Artificial Sequence
  Description of Artificial Sequence: Synthetic oligonucleotide
aguguccacucugaguauu

SEQ ID NO: 583607 - RNA, 19 nt, Artificial Sequence
  Description of Artificial Sequence: Synthetic oligonucleotide
acaucgugauagguauaga

SEQ ID NO: 583608 - RNA, 19 nt, Artificial Sequence
  Description of Artificial Sequence: Synthetic oligonucleotide
gaaaugcgucuccuuugua

SEQ ID NO: 583609 - RNA, 19 nt, Artificial Sequence
  Description of Artificial Sequence: Synthetic oligonucleotide
cgaucauauagauucucca

SEQ ID NO: 583610 - RNA, 19 nt, Artificial Sequence
  Description of Artificial Sequence: Synthetic oligonucleotide
uauaggcgauugguugguc

SEQ ID NO: 583611 - RNA, 19 nt, Artificial Sequence
  Description of Artificial Sequence: Synthetic oligonucleotide
cucgcccggggaacugucc

SEQ ID NO: 583612 - RNA, 19 nt, Artificial Sequence
  Description of Artificial Sequence: Synthetic oligonucleotide
gcaauuugcagaccucugu

SEQ ID NO: 583613 - RNA, 19 nt, Artificial Sequence
  Description of Artificial Sequence: Synthetic oligonucleotide
uugccgugagagccaucac

SEQ ID NO: 583614 - RNA, 19 nt, Artificial Sequence
  Description of Artificial Sequence: Synthetic oligonucleotide
gcauuccguuauauuuucg

SEQ ID NO: 583615 - RNA, 19 nt, Artificial Sequence
  Description of Artificial Sequence: Synthetic oligonucleotide
agcgugccaagagcuuccg

SEQ ID NO: 583616 - RNA, 19 nt, Artificial Sequence
  Description of Artificial Sequence: Synthetic oligonucleotide
gcgauugguuggucauugg

SEQ ID NO: 583617 - RNA, 19 nt, Artificial Sequence
  Description of Artificial Sequence: Synthetic oligonucleotide
cugcauuccguuauauuuu

SEQ ID NO: 583618 - RNA, 19 nt, Artificial Sequence
  Description of Artificial Sequence: Synthetic oligonucleotide
ccaguuacaccagagaacu

SEQ ID NO: 583619 - RNA, 19 nt, Artificial Sequence
  Description of Artificial Sequence: Synthetic oligonucleotide
agcucaugcuaaacaccug

SEQ ID NO: 583620 - RNA, 19 nt, Artificial Sequence
  Description of Artificial Sequence: Synthetic oligonucleotide
cagauaaccuggcagccau

SEQ ID NO: 583621 - RNA, 19 nt, Artificial Sequence
  Description of Artificial Sequence: Synthetic oligonucleotide
ccugggauucgcuguugcc

SEQ ID NO: 583622 - RNA, 19 nt, Artificial Sequence
  Description of Artificial Sequence: Synthetic oligonucleotide
ggaaccgaaggaaacuucu

SEQ ID NO: 583623 - RNA, 19 nt, Artificial Sequence
  Description of Artificial Sequence: Synthetic oligonucleotide
uggccgccacguuugcagu

SEQ ID NO: 583624 - RNA, 19 nt, Artificial Sequence
  Description of Artificial Sequence: Synthetic oligonucleotide
caauggccgccacguuugc

SEQ ID NO: 583625 - RNA, 19 nt, Artificial Sequence
  Description of Artificial Sequence: Synthetic oligonucleotide
ggucacaucgugauaggua

SEQ ID NO: 583626 - RNA, 19 nt, Artificial Sequence
  Description of Artificial Sequence: Synthetic oligonucleotide
aaaugucgaccagcauguu

SEQ ID NO: 583627 - RNA, 19 nt, Artificial Sequence
  Description of Artificial Sequence: Synthetic oligonucleotide
cgaaggaaacuucuggcga

SEQ ID NO: 583628 - RNA, 19 nt, Artificial Sequence
  Description of Artificial Sequence: Synthetic oligonucleotide
auggucagacgccgacaaa

SEQ ID NO: 583629 - RNA, 19 nt, Artificial Sequence
  Description of Artificial Sequence: Synthetic oligonucleotide
cugaaucuuugcacucuua

SEQ ID NO: 583630 - RNA, 19 nt, Artificial Sequence
  Description of Artificial Sequence: Synthetic oligonucleotide
ccacguuugcaguggcagc

SEQ ID NO: 583631 - RNA, 19 nt, Artificial Sequence
  Description of Artificial Sequence: Synthetic oligonucleotide
gagccaucacuggaaccga

SEQ ID NO: 583632 - RNA, 19 nt, Artificial Sequence
  Description of Artificial Sequence: Synthetic oligonucleotide
gccuugaagccaccguaac

SEQ ID NO: 583633 - RNA, 19 nt, Artificial Sequence
  Description of Artificial Sequence: Synthetic oligonucleotide
cagcaauuugcagaccucu

SEQ ID NO: 583634 - RNA, 19 nt, Artificial Sequence
  Description of Artificial Sequence: Synthetic oligonucleotide
gcaaucaaacgccacuuuu

SEQ ID NO: 583635 - RNA, 19 nt, Artificial Sequence
  Description of Artificial Sequence: Synthetic oligonucleotide
caagaccaucucucuguaa

SEQ ID NO: 583636 - RNA, 19 nt, Artificial Sequence
  Description of Artificial Sequence: Synthetic oligonucleotide
ggucagacgccgacaaaca

SEQ ID NO: 583637 - RNA, 19 nt, Artificial Sequence
  Description of Artificial Sequence: Synthetic oligonucleotide
gccgccacguuugcagugg

SEQ ID NO: 583638 - RNA, 19 nt, Artificial Sequence
  Description of Artificial Sequence: Synthetic oligonucleotide
gugucgugaauaagaagau

SEQ ID NO: 583639 - RNA, 19 nt, Artificial Sequence
  Description of Artificial Sequence: Synthetic oligonucleotide
caucucuggcagaaucacu

SEQ ID NO: 583640 - RNA, 19 nt, Artificial Sequence
  Description of Artificial Sequence: Synthetic oligonucleotide
agccuguuacuugcacaga

SEQ ID NO: 583641 - RNA, 19 nt, Artificial Sequence
  Description of Artificial Sequence: Synthetic oligonucleotide
guaagaagacuaacagcuu

SEQ ID NO: 583642 - RNA, 19 nt, Artificial Sequence
  Description of Artificial Sequence: Synthetic oligonucleotide
cacagaccuuuucuggagu

SEQ ID NO: 583643 - RNA, 19 nt, Artificial Sequence
  Description of Artificial Sequence: Synthetic oligonucleotide
cagugagauauuucuccau

SEQ ID NO: 583644 - RNA, 19 nt, Artificial Sequence
  Description of Artificial Sequence: Synthetic oligonucleotide
uagcaucauauaggcgauu

SEQ ID NO: 583645 - RNA, 19 nt, Artificial Sequence
  Description of Artificial Sequence: Synthetic oligonucleotide
uguugccgugagagccauc

SEQ ID NO: 583646 - RNA, 19 nt, Artificial Sequence
  Description of Artificial Sequence: Synthetic oligonucleotide
aauggccauuuagcacauu

SEQ ID NO: 583647 - RNA, 19 nt, Artificial Sequence
  Description of Artificial Sequence: Synthetic oligonucleotide
guaacgugucagccauugu

SEQ ID NO: 583648 - RNA, 19 nt, Artificial Sequence
  Description of Artificial Sequence: Synthetic oligonucleotide
acgucauccgucacaucuu

SEQ ID NO: 583649 - RNA, 19 nt, Artificial Sequence
  Description of Artificial Sequence: Synthetic oligonucleotide
ggucauuggcauugauaua

SEQ ID NO: 583650 - RNA, 19 nt, Artificial Sequence
  Description of Artificial Sequence: Synthetic oligonucleotide
acguuugcaguggcagcaa

SEQ ID NO: 583651 - RNA, 19 nt, Artificial Sequence
  Description of Artificial Sequence: Synthetic oligonucleotide
gggauucgcuguugccgug

SEQ ID NO: 583652 - RNA, 19 nt, Artificial Sequence
  Description of Artificial Sequence: Synthetic oligonucleotide
guaacccuccacagauuua

SEQ ID NO: 583653 - RNA, 19 nt, Artificial Sequence
  Description of Artificial Sequence: Synthetic oligonucleotide
cauaugggugaugcuuucu

SEQ ID NO: 583654 - RNA, 19 nt, Artificial Sequence
  Description of Artificial Sequence: Synthetic oligonucleotide
gcgugguaagccagagcag

SEQ ID NO: 583655 - RNA, 19 nt, Artificial Sequence
  Description of Artificial Sequence: Synthetic oligonucleotide
gcaagaccaucucucugua

SEQ ID NO: 583656 - RNA, 19 nt, Artificial Sequence
  Description of Artificial Sequence: Synthetic oligonucleotide
ggauucgcuguugccguga

SEQ ID NO: 583657 - RNA, 19 nt, Artificial Sequence
  Description of Artificial Sequence: Synthetic oligonucleotide
ggccgccacguuugcagug

SEQ ID NO: 583658 - RNA, 19 nt, Artificial Sequence
  Description of Artificial Sequence: Synthetic oligonucleotide
ggcgaagcauauucauccu

SEQ ID NO: 583659 - RNA, 19 nt, Artificial Sequence
  Description of Artificial Sequence: Synthetic oligonucleotide
gccgacaaacaagaugugu

SEQ ID NO: 583660 - RNA, 19 nt, Artificial Sequence
  Description of Artificial Sequence: Synthetic oligonucleotide
cuggaaccgaaggaaacuu

SEQ ID NO: 583661 - RNA, 19 nt, Artificial Sequence
  Description of Artificial Sequence: Synthetic oligonucleotide
cuuuaguuccuagcaucau

SEQ ID NO: 583662 - RNA, 19 nt, Artificial Sequence
  Description of Artificial Sequence: Synthetic oligonucleotide
aggcgauugguuggucauu

SEQ ID NO: 583663 - RNA, 19 nt, Artificial Sequence
  Description of Artificial Sequence: Synthetic oligonucleotide
ccggggaacuguccucagc

SEQ ID NO: 583664 - RNA, 19 nt, Artificial Sequence
  Description of Artificial Sequence: Synthetic oligonucleotide
cguuauauuuucgcaguaa

SEQ ID NO: 583665 - RNA, 19 nt, Artificial Sequence
  Description of Artificial Sequence: Synthetic oligonucleotide
agacgccgacaaacaagau

SEQ ID NO: 583666 - RNA, 19 nt, Artificial Sequence
  Description of Artificial Sequence: Synthetic oligonucleotide
augaccccacugacucaca

SEQ ID NO: 583667 - RNA, 19 nt, Artificial Sequence
  Description of Artificial Sequence: Synthetic oligonucleotide
ccaccguaacuaguucuuc

SEQ ID NO: 583668 - RNA, 19 nt, Artificial Sequence
  Description of Artificial Sequence: Synthetic oligonucleotide
ggcaaucaaacgccacuuu

SEQ ID NO: 583669 - RNA, 19 nt, Artificial Sequence
  Description of Artificial Sequence: Synthetic oligonucleotide
gcgaagcauauucauccuu

SEQ ID NO: 583670 - RNA, 19 nt, Artificial Sequence
  Description of Artificial Sequence: Synthetic oligonucleotide
ggccagauucuugguagua

SEQ ID NO: 583671 - RNA, 19 nt, Artificial Sequence
  Description of Artificial Sequence: Synthetic oligonucleotide
ccguuauauuuucgcagua

SEQ ID NO: 583672 - RNA, 19 nt, Artificial Sequence
  Description of Artificial Sequence: Synthetic oligonucleotide
cuugggccuuuggagggcu

SEQ ID NO: 583673 - RNA, 19 nt, Artificial Sequence
  Description of Artificial Sequence: Synthetic oligonucleotide
ccaagagcuuccgaucaua

SEQ ID NO: 583674 - RNA, 19 nt, Artificial Sequence
  Description of Artificial Sequence: Synthetic oligonucleotide
cugggauacuuuggccacu

SEQ ID NO: 583675 - RNA, 19 nt, Artificial Sequence
  Description of Artificial Sequence: Synthetic oligonucleotide
ccgccacguuugcaguggc

SEQ ID NO: 583676 - RNA, 19 nt, Artificial Sequence
  Description of Artificial Sequence: Synthetic oligonucleotide
cccggggaacuguccucag

SEQ ID NO: 583677 - RNA, 19 nt, Artificial Sequence
  Description of Artificial Sequence: Synthetic oligonucleotide
cgccgacaaacaagaugug

SEQ ID NO: 583678 - RNA, 19 nt, Artificial Sequence
  Description of Artificial Sequence: Synthetic oligonucleotide
ccucgcccggggaacuguc

SEQ ID NO: 583679 - RNA, 19 nt, Artificial Sequence
  Description of Artificial Sequence: Synthetic oligonucleotide
gcuuccgaucauauagauu

SEQ ID NO: 583680 - RNA, 19 nt, Artificial Sequence
  Description of Artificial Sequence: Synthetic oligonucleotide
gcgugccaagagcuuccga

SEQ ID NO: 583681 - RNA, 19 nt, Artificial Sequence
  Description of Artificial Sequence: Synthetic oligonucleotide
gccaccguaacuaguucuu

SEQ ID NO: 583682 - RNA, 19 nt, Artificial Sequence
  Description of Artificial Sequence: Synthetic oligonucleotide
gccugcgugguaagccaga

SEQ ID NO: 583683 - RNA, 19 nt, Artificial Sequence
  Description of Artificial Sequence: Synthetic oligonucleotide
gccaagagcuuccgaucau

SEQ ID NO: 583684 - RNA, 19 nt, Artificial Sequence
  Description of Artificial Sequence: Synthetic oligonucleotide
cuguaacgugucagccauu

SEQ ID NO: 583685 - RNA, 19 nt, Artificial Sequence
  Description of Artificial Sequence: Synthetic oligonucleotide
ccccagcaauuugcagacc

SEQ ID NO: 583686 - RNA, 19 nt, Artificial Sequence
  Description of Artificial Sequence: Synthetic oligonucleotide
ccuccuccuccuccuccuc

SEQ ID NO: 583687 - RNA, 19 nt, Artificial Sequence
  Description of Artificial Sequence: Synthetic oligonucleotide
cuguugccgugagagccau

SEQ ID NO: 583688 - RNA, 19 nt, Artificial Sequence
  Description of Artificial Sequence: Synthetic oligonucleotide
cgcccggggaacuguccuc

SEQ ID NO: 583689 - RNA, 19 nt, Artificial Sequence
  Description of Artificial Sequence: Synthetic oligonucleotide
cgccacguuugcaguggca

SEQ ID NO: 583690 - RNA, 19 nt, Artificial Sequence
  Description of Artificial Sequence: Synthetic oligonucleotide
cgucauccgucacaucuuu

SEQ ID NO: 583691 - RNA, 19 nt, Artificial Sequence
  Description of Artificial Sequence: Synthetic oligonucleotide
cggccagauucuugguagu

SEQ ID NO: 583692 - RNA, 19 nt, Artificial Sequence
  Description of Artificial Sequence: Synthetic oligonucleotide
gcggugcuguuaggagacu

SEQ ID NO: 583693 - RNA, 19 nt, Artificial Sequence
  Description of Artificial Sequence: Synthetic oligonucleotide
ccuccucgcccggggaacu

SEQ ID NO: 583694 - RNA, 19 nt, Artificial Sequence
  Description of Artificial Sequence: Synthetic oligonucleotide
uuuauaaacgaaauuacgg

SEQ ID NO: 583695 - RNA, 19 nt, Artificial Sequence
  Description of Artificial Sequence: Synthetic oligonucleotide
aaucauaacaggcaggggc

SEQ ID NO: 583696 - RNA, 19 nt, Artificial Sequence
  Description of Artificial Sequence: Synthetic oligonucleotide
uuuaucgaaagcuugagga

SEQ ID NO: 583697 - RNA, 19 nt, Artificial Sequence
  Description of Artificial Sequence: Synthetic oligonucleotide
acugagauagcauagucac

SEQ ID NO: 583698 - RNA, 19 nt, Artificial Sequence
  Description of Artificial Sequence: Synthetic oligonucleotide
uaaaucacuaggaaucugg

SEQ ID NO: 583699 - RNA, 19 nt, Artificial Sequence
  Description of Artificial Sequence: Synthetic oligonucleotide
uuauaaacgaaauuacggc

SEQ ID NO: 583700 - RNA, 19 nt, Artificial Sequence
  Description of Artificial Sequence: Synthetic oligonucleotide
aaacuuuuacacuggacuc

SEQ ID NO: 583701 - RNA, 19 nt, Artificial Sequence
  Description of Artificial Sequence: Synthetic oligonucleotide
gugauuaaaacuuuuacac

SEQ ID NO: 583702 - RNA, 19 nt, Artificial Sequence
  Description of Artificial Sequence: Synthetic oligonucleotide
ucuacaacuguacauaaac

SEQ ID NO: 583703 - RNA, 19 nt, Artificial Sequence
  Description of Artificial Sequence: Synthetic oligonucleotide
uauaaacgaaauuacggcc

SEQ ID NO: 583704 - RNA, 19 nt, Artificial Sequence
  Description of Artificial Sequence: Synthetic oligonucleotide
ugugauuaaaacuuuuaca

SEQ ID NO: 583705 - RNA, 19 nt, Artificial Sequence
  Description of Artificial Sequence: Synthetic oligonucleotide
ugagaugugauuaaaacuu

SEQ ID NO: 583706 - RNA, 19 nt, Artificial Sequence
  Description of Artificial Sequence: Synthetic oligonucleotide
uuauauugaagacacuucu

SEQ ID NO: 583707 - RNA, 19 nt, Artificial Sequence
  Description of Artificial Sequence: Synthetic oligonucleotide
agagucaugaacuuuuguc

SEQ ID NO: 583708 - RNA, 19 nt, Artificial Sequence
  Description of Artificial Sequence: Synthetic oligonucleotide
aauuucgucugccaauggg

SEQ ID NO: 583709 - RNA, 19 nt, Artificial Sequence
  Description of Artificial Sequence: Synthetic oligonucleotide
ucuuaaucacuucaaaggu

SEQ ID NO: 583710 - RNA, 19 nt, Artificial Sequence
  Description of Artificial Sequence: Synthetic oligonucleotide
aagaagaacguucugcgcu

SEQ ID NO: 583711 - RNA, 19 nt, Artificial Sequence
  Description of Artificial Sequence: Synthetic oligonucleotide
ugugcuuguaaauagucug

SEQ ID NO: 583712 - RNA, 19 nt, Artificial Sequence
  Description of Artificial Sequence: Synthetic oligonucleotide
auaaacgaaauuacggccc

SEQ ID NO: 583713 - RNA, 19 nt, Artificial Sequence
  Description of Artificial Sequence: Synthetic oligonucleotide
cucuaaaucacuaggaauc

SEQ ID NO: 583714 - RNA, 19 nt, Artificial Sequence
  Description of Artificial Sequence: Synthetic oligonucleotide
uuuuaucgaaagcuugagg

SEQ ID NO: 583715 - RNA, 19 nt, Artificial Sequence
  Description of Artificial Sequence: Synthetic oligonucleotide
agacuuauauugaagacac

SEQ ID NO: 583716 - RNA, 19 nt, Artificial Sequence
  Description of Artificial Sequence: Synthetic oligonucleotide
gagucaugaacuuuugucc

SEQ ID NO: 583717 - RNA, 19 nt, Artificial Sequence
  Description of Artificial Sequence: Synthetic oligonucleotide
auagaggugauccucuggg

SEQ ID NO: 583718 - RNA, 19 nt, Artificial Sequence
  Description of Artificial Sequence: Synthetic oligonucleotide
auagucaccacuuggggag

SEQ ID NO: 583719 - RNA, 19 nt, Artificial Sequence
  Description of Artificial Sequence: Synthetic oligonucleotide
cuugagaugugauuaaaac

SEQ ID NO: 583720 - RNA, 19 nt, Artificial Sequence
  Description of Artificial Sequence: Synthetic oligonucleotide
ugagauagcauagucacca

SEQ ID NO: 583721 - RNA, 19 nt, Artificial Sequence
  Description of Artificial Sequence: Synthetic oligonucleotide
uuaacaucaaagauaggau

SEQ ID NO: 583722 - RNA, 19 nt, Artificial Sequence
  Description of Artificial Sequence: Synthetic oligonucleotide
uugagaugugauuaaaacu

SEQ ID NO: 583723 - RNA, 19 nt, Artificial Sequence
  Description of Artificial Sequence: Synthetic oligonucleotide
ugauguuugaccagugggc

SEQ ID NO: 583724 - RNA, 19 nt, Artificial Sequence
  Description of Artificial Sequence: Synthetic oligonucleotide
aaagguaccaugaugggga

SEQ ID NO: 583725 - RNA, 19 nt, Artificial Sequence
  Description of Artificial Sequence: Synthetic oligonucleotide
gucacuuauaaagugagag

SEQ ID NO: 583726 - RNA, 19 nt, Artificial Sequence
  Description of Artificial Sequence: Synthetic oligonucleotide
acgucguugauguuugacc

SEQ ID NO: 583727 - RNA, 19 nt, Artificial Sequence
  Description of Artificial Sequence: Synthetic oligonucleotide
aauucgacuugccaagcug

SEQ ID NO: 583728 - RNA, 19 nt, Artificial Sequence
  Description of Artificial Sequence: Synthetic oligonucleotide
agaguugaagucucgcugg

SEQ ID NO: 583729 - RNA, 19 nt, Artificial Sequence
  Description of Artificial Sequence: Synthetic oligonucleotide
accauaaucuugcugccac

SEQ ID NO: 583730 - RNA, 19 nt, Artificial Sequence
  Description of Artificial Sequence: Synthetic oligonucleotide
cugaauagaaaccuugaug

SEQ ID NO: 583731 - RNA, 19 nt, Artificial Sequence
  Description of Artificial Sequence: Synthetic oligonucleotide
guuacugaagcugaggacc

SEQ ID NO: 583732 - RNA, 19 nt, Artificial Sequence
  Description of Artificial Sequence: Synthetic oligonucleotide
agggaucugagacuuaauc

SEQ ID NO: 583733 - RNA, 19 nt, Artificial Sequence
  Description of Artificial Sequence: Synthetic oligonucleotide
gaaauuacggcccuccauc

SEQ ID NO: 583734 - RNA, 19 nt, Artificial Sequence
  Description of Artificial Sequence: Synthetic oligonucleotide
ugagaaacgggguccagag

SEQ ID NO: 583735 - RNA, 19 nt, Artificial Sequence
  Description of Artificial Sequence: Synthetic oligonucleotide
caucuuguuccacugaacc

SEQ ID NO: 583736 - RNA, 19 nt, Artificial Sequence
  Description of Artificial Sequence: Synthetic oligonucleotide
uaaacgucguugauguuug

SEQ ID NO: 583737 - RNA, 19 nt, Artificial Sequence
  Description of Artificial Sequence: Synthetic oligonucleotide
cauaaccuuggcaagcugc

SEQ ID NO: 583738 - RNA, 19 nt, Artificial Sequence
  Description of Artificial Sequence: Synthetic oligonucleotide
aaugugaucacccguccau

SEQ ID NO: 583739 - RNA, 19 nt, Artificial Sequence
  Description of Artificial Sequence: Synthetic oligonucleotide
gagacaaugugaucacccg

SEQ ID NO: 583740 - RNA, 19 nt, Artificial Sequence
  Description of Artificial Sequence: Synthetic oligonucleotide
uuuuaccaaccccuccucg

SEQ ID NO: 583741 - RNA, 19 nt, Artificial Sequence
  Description of Artificial Sequence: Synthetic oligonucleotide
ugguuacugaagcugagga

SEQ ID NO: 583742 - RNA, 19 nt, Artificial Sequence
  Description of Artificial Sequence: Synthetic oligonucleotide
ucaacaccgauguucaacu

SEQ ID NO: 583743 - RNA, 19 nt, Artificial Sequence
  Description of Artificial Sequence: Synthetic oligonucleotide
ucacuuauaaagugagaga

SEQ ID NO: 583744 - RNA, 19 nt, Artificial Sequence
  Description of Artificial Sequence: Synthetic oligonucleotide
aauggcugagagaugaucu

SEQ ID NO: 583745 - RNA, 19 nt, Artificial Sequence
  Description of Artificial Sequence: Synthetic oligonucleotide
aaagugagagacuuauauu

SEQ ID NO: 583746 - RNA, 19 nt, Artificial Sequence
  Description of Artificial Sequence: Synthetic oligonucleotide
uaucgaaagcuugaggacc

SEQ ID NO: 583747 - RNA, 19 nt, Artificial Sequence
  Description of Artificial Sequence: Synthetic oligonucleotide
ucaaagguaccaugauggg

SEQ ID NO: 583748 - RNA, 19 nt, Artificial Sequence
  Description of Artificial Sequence: Synthetic oligonucleotide
cuugaaugguccacggagg

SEQ ID NO: 583749 - RNA, 19 nt, Artificial Sequence
  Description of Artificial Sequence: Synthetic oligonucleotide
ucacaauggaacucaaggu

SEQ ID NO: 583750 - RNA, 19 nt, Artificial Sequence
  Description of Artificial Sequence: Synthetic oligonucleotide
acuggacucauaaacgucg

SEQ ID NO: 583751 - RNA, 19 nt, Artificial Sequence
  Description of Artificial Sequence: Synthetic oligonucleotide
cuguuucugaauagaaacc

SEQ ID NO: 583752 - RNA, 19 nt, Artificial Sequence
  Description of Artificial Sequence: Synthetic oligonucleotide
uguauugaauuaauuucau

SEQ ID NO: 583753 - RNA, 19 nt, Artificial Sequence
  Description of Artificial Sequence: Synthetic oligonucleotide
uuaucgaaagcuugaggac

SEQ ID NO: 583754 - RNA, 19 nt, Artificial Sequence
  Description of Artificial Sequence: Synthetic oligonucleotide
augcagaccccucuaaauc

SEQ ID NO: 583755 - RNA, 19 nt, Artificial Sequence
  Description of Artificial Sequence: Synthetic oligonucleotide
guuccggggaaacugaacc

SEQ ID NO: 583756 - RNA, 19 nt, Artificial Sequence
  Description of Artificial Sequence: Synthetic oligonucleotide
caggacauagaggugaucc

SEQ ID NO: 583757 - RNA, 19 nt, Artificial Sequence
  Description of Artificial Sequence: Synthetic oligonucleotide
ggaucugagacuuaaucug

SEQ ID NO: 583758 - RNA, 19 nt, Artificial Sequence
  Description of Artificial Sequence: Synthetic oligonucleotide
uaacaucaaagauaggauu

SEQ ID NO: 583759 - RNA, 19 nt, Artificial Sequence
  Description of Artificial Sequence: Synthetic oligonucleotide
acuuauauugaagacacuu

SEQ ID NO: 583760 - RNA, 19 nt, Artificial Sequence
  Description of Artificial Sequence: Synthetic oligonucleotide
aaauuacggcccuccaucu

SEQ ID NO: 583761 - RNA, 19 nt, Artificial Sequence
  Description of Artificial Sequence: Synthetic oligonucleotide
gauguuugaccagugggcc

SEQ ID NO: 583762 - RNA, 19 nt, Artificial Sequence
  Description of Artificial Sequence: Synthetic oligonucleotide
auuucgucugccaaugggg

SEQ ID NO: 583763 - RNA, 19 nt, Artificial Sequence
  Description of Artificial Sequence: Synthetic oligonucleotide
gcacccgucacuuauaaag

SEQ ID NO: 583764 - RNA, 19 nt, Artificial Sequence
  Description of Artificial Sequence: Synthetic oligonucleotide
uaaacgaaauuacggcccu

SEQ ID NO: 583765 - RNA, 19 nt, Artificial Sequence
  Description of Artificial Sequence: Synthetic oligonucleotide
guugacugugccaagauca

SEQ ID NO: 583766 - RNA, 19 nt, Artificial Sequence
  Description of Artificial Sequence: Synthetic oligonucleotide
accccucuaaaucacuagg

SEQ ID NO: 583767 - RNA, 19 nt, Artificial Sequence
  Description of Artificial Sequence: Synthetic oligonucleotide
uuaucguuugaggaguggc

SEQ ID NO: 583768 - RNA, 19 nt, Artificial Sequence
  Description of Artificial Sequence: Synthetic oligonucleotide
agcaagugcaaguugugcu

SEQ ID NO: 583769 - RNA, 19 nt, Artificial Sequence
  Description of Artificial Sequence: Synthetic oligonucleotide
uguucauaaccuugagaug

SEQ ID NO: 583770 - RNA, 19 nt, Artificial Sequence
  Description of Artificial Sequence: Synthetic oligonucleotide
ugcauucuacaacuguaca

SEQ ID NO: 583771 - RNA, 19 nt, Artificial Sequence
  Description of Artificial Sequence: Synthetic oligonucleotide
uaucguuugaggaguggca

SEQ ID NO: 583772 - RNA, 19 nt, Artificial Sequence
  Description of Artificial Sequence: Synthetic oligonucleotide
gaugagacaaugugaucac

SEQ ID NO: 583773 - RNA, 19 nt, Artificial Sequence
  Description of Artificial Sequence: Synthetic oligonucleotide
uaaccuugagaugugauua

SEQ ID NO: 583774 - RNA, 19 nt, Artificial Sequence
  Description of Artificial Sequence: Synthetic oligonucleotide
acugaaccuccuugaaugg

SEQ ID NO: 583775 - RNA, 19 nt, Artificial Sequence
  Description of Artificial Sequence: Synthetic oligonucleotide
aacugagauagcauaguca

SEQ ID NO: 583776 - RNA, 19 nt, Artificial Sequence
  Description of Artificial Sequence: Synthetic oligonucleotide
uacgaacugagauagcaua

SEQ ID NO: 583777 - RNA, 19 nt, Artificial Sequence
  Description of Artificial Sequence: Synthetic oligonucleotide
ucuccgugagggcacuucg

SEQ ID NO: 583778 - RNA, 19 nt, Artificial Sequence
  Description of Artificial Sequence: Synthetic oligonucleotide
uaauuucgucugccaaugg

SEQ ID NO: 583779 - RNA, 19 nt, Artificial Sequence
  Description of Artificial Sequence: Synthetic oligonucleotide
uuuaccaaccccuccucgu

SEQ ID NO: 583780 - RNA, 19 nt, Artificial Sequence
  Description of Artificial Sequence: Synthetic oligonucleotide
agcauagucaccacuuggg

SEQ ID NO: 583781 - RNA, 19 nt, Artificial Sequence
  Description of Artificial Sequence: Synthetic oligonucleotide
ucagaguugaagucucgcu

SEQ ID NO: 583782 - RNA, 19 nt, Artificial Sequence
  Description of Artificial Sequence: Synthetic oligonucleotide
aucguuugaggaguggcac

SEQ ID NO: 583783 - RNA, 19 nt, Artificial Sequence
  Description of Artificial Sequence: Synthetic oligonucleotide
guuacgaacugagauagca

SEQ ID NO: 583784 - RNA, 19 nt, Artificial Sequence
  Description of Artificial Sequence: Synthetic oligonucleotide
gaaagucucauucucuugu

SEQ ID NO: 583785 - RNA, 19 nt, Artificial Sequence
  Description of Artificial Sequence: Synthetic oligonucleotide
uucuuaucguuugaggagu

SEQ ID NO: 583786 - RNA, 19 nt, Artificial Sequence
  Description of Artificial Sequence: Synthetic oligonucleotide
  modified_base (2)..(2): a, c, u, g, unknown or other
gnggauuugagcugcucca

SEQ ID NO: 583787 - RNA, 19 nt, Artificial Sequence
  Description of Artificial Sequence: Synthetic oligonucleotide
ucucagguccguuacgaac

SEQ ID NO: 583788 - RNA, 19 nt, Artificial Sequence
  Description of Artificial Sequence: Synthetic oligonucleotide
gaacugagauagcauaguc

SEQ ID NO: 583789 - RNA, 19 nt, Artificial Sequence
  Description of Artificial Sequence: Synthetic oligonucleotide
uucauaaccuugagaugug

SEQ ID NO: 583790 - RNA, 19 nt, Artificial Sequence
  Description of Artificial Sequence: Synthetic oligonucleotide
cuuguggccaaaaggagca

SEQ ID NO: 583791 - RNA, 19 nt, Artificial Sequence
  Description of Artificial Sequence: Synthetic oligonucleotide
acacgcaccugcucaacac

SEQ ID NO: 583792 - RNA, 19 nt, Artificial Sequence
  Description of Artificial Sequence: Synthetic oligonucleotide
aacucaaggucuguuuaug

SEQ ID NO: 583793 - RNA, 19 nt, Artificial Sequence
  Description of Artificial Sequence: Synthetic oligonucleotide
  modified_base (6)..(6): a, c, u, g, unknown or other
ucaggnggauuugagcugc

SEQ ID NO: 583794 - RNA, 19 nt, Artificial Sequence
  Description of Artificial Sequence: Synthetic oligonucleotide
cauacugcauucuacaacu

SEQ ID NO: 583795 - RNA, 19 nt, Artificial Sequence
  Description of Artificial Sequence: Synthetic oligonucleotide
ugaccagugggccuggauc

SEQ ID NO: 583796 - RNA, 19 nt, Artificial Sequence
  Description of Artificial Sequence: Synthetic oligonucleotide
auaaacgucguugauguuu

SEQ ID NO: 583797 - RNA, 19 nt, Artificial Sequence
  Description of Artificial Sequence: Synthetic oligonucleotide
agucaauguuucuggaacu

SEQ ID NO: 583798 - RNA, 19 nt, Artificial Sequence
  Description of Artificial Sequence: Synthetic oligonucleotide
uuuugucccugacaauacu

SEQ ID NO: 583799 - RNA, 19 nt, Artificial Sequence
  Description of Artificial Sequence: Synthetic oligonucleotide
uuuacacuggacucauaaa

SEQ ID NO: 583800 - RNA, 19 nt, Artificial Sequence
  Description of Artificial Sequence: Synthetic oligonucleotide
guucauaaccuugagaugu

SEQ ID NO: 583801 - RNA, 19 nt, Artificial Sequence
  Description of Artificial Sequence: Synthetic oligonucleotide
gaaugguccacggagguga

SEQ ID NO: 583802 - RNA, 19 nt, Artificial Sequence
  Description of Artificial Sequence: Synthetic oligonucleotide
aaaccuugauguaugcaga

SEQ ID NO: 583803 - RNA, 19 nt, Artificial Sequence
  Description of Artificial Sequence: Synthetic oligonucleotide
auagcauagucaccacuug

SEQ ID NO: 583804 - RNA, 19 nt, Artificial Sequence
  Description of Artificial Sequence: Synthetic oligonucleotide
cuuguuccacugaaccucc

SEQ ID NO: 583805 - RNA, 19 nt, Artificial Sequence
  Description of Artificial Sequence: Synthetic oligonucleotide
gguaccaugauggggaaag

SEQ ID NO: 583806 - RNA, 19 nt, Artificial Sequence
  Description of Artificial Sequence: Synthetic oligonucleotide
ucucuauggguccgagucc

SEQ ID NO: 583807 - RNA, 19 nt, Artificial Sequence
  Description of Artificial Sequence: Synthetic oligonucleotide
agcgcauccugagaaacgg

SEQ ID NO: 583808 - RNA, 19 nt, Artificial Sequence
  Description of Artificial Sequence: Synthetic oligonucleotide
ugcugccacucucaggucc

SEQ ID NO: 583809 - RNA, 19 nt, Artificial Sequence
  Description of Artificial Sequence: Synthetic oligonucleotide
agcugucaaugguugcagc

SEQ ID NO: 583810 - RNA, 19 nt, Artificial Sequence
  Description of Artificial Sequence: Synthetic oligonucleotide
cuuuucggaaggucuuugc

SEQ ID NO: 583811 - RNA, 19 nt, Artificial Sequence
  Description of Artificial Sequence: Synthetic oligonucleotide
agcggcugcagauacgucu

SEQ ID NO: 583812 - RNA, 19 nt, Artificial Sequence
  Description of Artificial Sequence: Synthetic oligonucleotide
aucacuuuucggaaggucu

SEQ ID NO: 583813 - RNA, 19 nt, Artificial Sequence
  Description of Artificial Sequence: Synthetic oligonucleotide
uguugccguagccucagga

SEQ ID NO: 583814 - RNA, 19 nt, Artificial Sequence
  Description of Artificial Sequence: Synthetic oligonucleotide
cugcauucuacaacuguac

SEQ ID NO: 583815 - RNA, 19 nt, Artificial Sequence
  Description of Artificial Sequence: Synthetic oligonucleotide
uuacgaacugagauagcau

SEQ ID NO: 583816 - RNA, 19 nt, Artificial Sequence
  Description of Artificial Sequence: Synthetic oligonucleotide
  modified_base (7)..(7): a, c, u, g, unknown or other
cucaggnggauuugagcug

SEQ ID NO: 583817 - RNA, 19 nt, Artificial Sequence
  Description of Artificial Sequence: Synthetic oligonucleotide
ucuuaucguuugaggagug

SEQ ID NO: 583818 - RNA, 19 nt, Artificial Sequence
  Description of Artificial Sequence: Synthetic oligonucleotide
uccguuacgaacugagaua

SEQ ID NO: 583819 - RNA, 19 nt, Artificial Sequence
  Description of Artificial Sequence: Synthetic oligonucleotide
agacaaugugaucacccgu

SEQ ID NO: 583820 - RNA, 19 nt, Artificial Sequence
  Description of Artificial Sequence: Synthetic oligonucleotide
augagacaaugugaucacc

SEQ ID NO: 583821 - RNA, 19 nt, Artificial Sequence
  Description of Artificial Sequence: Synthetic oligonucleotide
  modified_base (3)..(3): a, c, u, g, unknown or other
ggnggauuugagcugcucc

SEQ ID NO: 583822 - RNA, 19 nt, Artificial Sequence
  Description of Artificial Sequence: Synthetic oligonucleotide
gaugcgcugcgccaggcgc

SEQ ID NO: 583823 - RNA, 19 nt, Artificial Sequence
  Description of Artificial Sequence: Synthetic oligonucleotide
uguaugcagaccccucuaa

SEQ ID NO: 583824 - RNA, 19 nt, Artificial Sequence
  Description of Artificial Sequence: Synthetic oligonucleotide
ccuugaaugguccacggag

SEQ ID NO: 583825 - RNA, 19 nt, Artificial Sequence
  Description of Artificial Sequence: Synthetic oligonucleotide
aagucgaugcgcugcgcca

SEQ ID NO: 583826 - RNA, 19 nt, Artificial Sequence
  Description of Artificial Sequence: Synthetic oligonucleotide
uccccuucaaagcacccgu

SEQ ID NO: 583827 - RNA, 19 nt, Artificial Sequence
  Description of Artificial Sequence: Synthetic oligonucleotide
aaccuugagaugugauuaa

SEQ ID NO: 583828 - RNA, 19 nt, Artificial Sequence
  Description of Artificial Sequence: Synthetic oligonucleotide
uccgugagggcacuucgca

SEQ ID NO: 583829 - RNA, 19 nt, Artificial Sequence
  Description of Artificial Sequence: Synthetic oligonucleotide
ucugugcacgacacgcacc

SEQ ID NO: 583830 - RNA, 19 nt, Artificial Sequence
  Description of Artificial Sequence: Synthetic oligonucleotide
gacaguaaucuucugguau

SEQ ID NO: 583831 - RNA, 19 nt, Artificial Sequence
  Description of Artificial Sequence: Synthetic oligonucleotide
ucugggacuucuuaucguu

SEQ ID NO: 583832 - RNA, 19 nt, Artificial Sequence
  Description of Artificial Sequence: Synthetic oligonucleotide
gaacguucugcgcugcuuc

SEQ ID NO: 583833 - RNA, 19 nt, Artificial Sequence
  Description of Artificial Sequence: Synthetic oligonucleotide
ugugagggaucugagacuu

SEQ ID NO: 583834 - RNA, 19 nt, Artificial Sequence
  Description of Artificial Sequence: Synthetic oligonucleotide
ucugcgcugcuucuaauuu

SEQ ID NO: 583835 - RNA, 19 nt, Artificial Sequence
  Description of Artificial Sequence: Synthetic oligonucleotide
cucaacaccgauguucaac

SEQ ID NO: 583836 - RNA, 19 nt, Artificial Sequence
  Description of Artificial Sequence: Synthetic oligonucleotide
ucucgcuggagcuuguuuu

SEQ ID NO: 583837 - RNA, 19 nt, Artificial Sequence
  Description of Artificial Sequence: Synthetic oligonucleotide
cuuaaucacuucaaaggua

SEQ ID NO: 583838 - RNA, 19 nt, Artificial Sequence
  Description of Artificial Sequence: Synthetic oligonucleotide
caauggaacucaaggucug

SEQ ID NO: 583839 - RNA, 19 nt, Artificial Sequence
  Description of Artificial Sequence: Synthetic oligonucleotide
caugguuacugaagcugag

SEQ ID NO: 583840 - RNA, 19 nt, Artificial Sequence
  Description of Artificial Sequence: Synthetic oligonucleotide
acgaacugagauagcauag

SEQ ID NO: 583841 - RNA, 19 nt, Artificial Sequence
  Description of Artificial Sequence: Synthetic oligonucleotide
acccgucacuuauaaagug

SEQ ID NO: 583842 - RNA, 19 nt, Artificial Sequence
  Description of Artificial Sequence: Synthetic oligonucleotide
uucgcaaauuguuccucac

SEQ ID NO: 583843 - RNA, 19 nt, Artificial Sequence
  Description of Artificial Sequence: Synthetic oligonucleotide
cucuauggguccgaguccc

SEQ ID NO: 583844 - RNA, 19 nt, Artificial Sequence
  Description of Artificial Sequence: Synthetic oligonucleotide
gaagcgcauccugagaaac

SEQ ID NO: 583845 - RNA, 19 nt, Artificial Sequence
  Description of Artificial Sequence: Synthetic oligonucleotide
cauccagaggacaguaauc

SEQ ID NO: 583846 - RNA, 19 nt, Artificial Sequence
  Description of Artificial Sequence: Synthetic oligonucleotide
aaacgaaauuacggcccuc

SEQ ID NO: 583847 - RNA, 19 nt, Artificial Sequence
  Description of Artificial Sequence: Synthetic oligonucleotide
acuuauaaagugagagacu

SEQ ID NO: 583848 - RNA, 19 nt, Artificial Sequence
  Description of Artificial Sequence: Synthetic oligonucleotide
ucaauucgacuugccaagc

SEQ ID NO: 583849 - RNA, 19 nt, Artificial Sequence
  Description of Artificial Sequence: Synthetic oligonucleotide
acuucgcaaauuguuccuc

SEQ ID NO: 583850 - RNA, 19 nt, Artificial Sequence
  Description of Artificial Sequence: Synthetic oligonucleotide
cacccguccaucucugugc

SEQ ID NO: 583851 - RNA, 19 nt, Artificial Sequence
  Description of Artificial Sequence: Synthetic oligonucleotide
ugaucagcaagugcaaguu

SEQ ID NO: 583852 - RNA, 19 nt, Artificial Sequence
  Description of Artificial Sequence: Synthetic oligonucleotide
ucguugauguuugaccagu

SEQ ID NO: 583853 - RNA, 19 nt, Artificial Sequence
  Description of Artificial Sequence: Synthetic oligonucleotide
gcauagucaccacuugggg

SEQ ID NO: 583854 - RNA, 19 nt, Artificial Sequence
  Description of Artificial Sequence: Synthetic oligonucleotide
cuuaucguuugaggagugg

SEQ ID NO: 583855 - RNA, 19 nt, Artificial Sequence
  Description of Artificial Sequence: Synthetic oligonucleotide
guacauaaacuuuuccccu

SEQ ID NO: 583856 - RNA, 19 nt, Artificial Sequence
  Description of Artificial Sequence: Synthetic oligonucleotide
uggggaucuucaauucgac

SEQ ID NO: 583857 - RNA, 19 nt, Artificial Sequence
  Description of Artificial Sequence: Synthetic oligonucleotide
aacguucugcgcugcuucu

SEQ ID NO: 583858 - RNA, 19 nt, Artificial Sequence
  Description of Artificial Sequence: Synthetic oligonucleotide
gaaccuccuugaauggucc

SEQ ID NO: 583859 - RNA, 19 nt, Artificial Sequence
  Description of Artificial Sequence: Synthetic oligonucleotide
uuccggggaaacugaacca

SEQ ID NO: 583860 - RNA, 19 nt, Artificial Sequence
  Description of Artificial Sequence: Synthetic oligonucleotide
aggacauagaggugauccu

SEQ ID NO: 583861 - RNA, 19 nt, Artificial Sequence
  Description of Artificial Sequence: Synthetic oligonucleotide
aagcacccgucacuuauaa

SEQ ID NO: 583862 - RNA, 19 nt, Artificial Sequence
  Description of Artificial Sequence: Synthetic oligonucleotide
ugcuccugaugagacaaug

SEQ ID NO: 583863 - RNA, 19 nt, Artificial Sequence
  Description of Artificial Sequence: Synthetic oligonucleotide
uccuugaaugguccacgga

SEQ ID NO: 583864 - RNA, 19 nt, Artificial Sequence
  Description of Artificial Sequence: Synthetic oligonucleotide
gcacuucgcaaauuguucc

SEQ ID NO: 583865 - RNA, 19 nt, Artificial Sequence
  Description of Artificial Sequence: Synthetic oligonucleotide
aaccauaaucuugcugcca

SEQ ID NO: 583866 - RNA, 19 nt, Artificial Sequence
  Description of Artificial Sequence: Synthetic oligonucleotide
ucguuugaggaguggcaca

SEQ ID NO: 583867 - RNA, 19 nt, Artificial Sequence
  Description of Artificial Sequence: Synthetic oligonucleotide
cugcagauacgucucggug

SEQ ID NO: 583868 - RNA, 19 nt, Artificial Sequence
  Description of Artificial Sequence: Synthetic oligonucleotide
ucauaaccuugagauguga

SEQ ID NO: 583869 - RNA, 19 nt, Artificial Sequence
  Description of Artificial Sequence: Synthetic oligonucleotide
acaugguuacugaagcuga

SEQ ID NO: 583870 - RNA, 19 nt, Artificial Sequence
  Description of Artificial Sequence: Synthetic oligonucleotide
agcucagaguugaagucuc

SEQ ID NO: 583871 - RNA, 19 nt, Artificial Sequence
  Description of Artificial Sequence: Synthetic oligonucleotide
uagcucaagucgcccagga

SEQ ID NO: 583872 - RNA, 19 nt, Artificial Sequence
  Description of Artificial Sequence: Synthetic oligonucleotide
gcucaagucgcccaggauc

SEQ ID NO: 583873 - RNA, 19 nt, Artificial Sequence
  Description of Artificial Sequence: Synthetic oligonucleotide
auaaccuuggcaagcugcu

SEQ ID NO: 583874 - RNA, 19 nt, Artificial Sequence
  Description of Artificial Sequence: Synthetic oligonucleotide
uaugcuuggcuuguuuaau

SEQ ID NO: 583875 - RNA, 19 nt, Artificial Sequence
  Description of Artificial Sequence: Synthetic oligonucleotide
auucgacuugccaagcugu

SEQ ID NO: 583876 - RNA, 19 nt, Artificial Sequence
  Description of Artificial Sequence: Synthetic oligonucleotide
acuugccaagcugucaaug

SEQ ID NO: 583877 - RNA, 19 nt, Artificial Sequence
  Description of Artificial Sequence: Synthetic oligonucleotide
uagagaucagcugcagggu

SEQ ID NO: 583878 - RNA, 19 nt, Artificial Sequence
  Description of Artificial Sequence: Synthetic oligonucleotide
ccagaggacaguaaucuuc

SEQ ID NO: 583879 - RNA, 19 nt, Artificial Sequence
  Description of Artificial Sequence: Synthetic oligonucleotide
ugcacgacacgcaccugcu

SEQ ID NO: 583880 - RNA, 19 nt, Artificial Sequence
  Description of Artificial Sequence: Synthetic oligonucleotide
ggccaaaaggagcacuugc

SEQ ID NO: 583881 - RNA, 19 nt, Artificial Sequence
  Description of Artificial Sequence: Synthetic oligonucleotide
gggugaggcaucacaaugg

SEQ ID NO: 583882 - RNA, 19 nt, Artificial Sequence
  Description of Artificial Sequence: Synthetic oligonucleotide
auguuugaccagugggccu

SEQ ID NO: 583883 - RNA, 19 nt, Artificial Sequence
  Description of Artificial Sequence: Synthetic oligonucleotide
ccaagaucaccaaugucug

SEQ ID NO: 583884 - RNA, 19 nt, Artificial Sequence
  Description of Artificial Sequence: Synthetic oligonucleotide
ugaaugguccacggaggug

SEQ ID NO: 583885 - RNA, 19 nt, Artificial Sequence
  Description of Artificial Sequence: Synthetic oligonucleotide
uucgacuugccaagcuguc

SEQ ID NO: 583886 - RNA, 19 nt, Artificial Sequence
  Description of Artificial Sequence: Synthetic oligonucleotide
cacaucuccgugagggcac

SEQ ID NO: 583887 - RNA, 19 nt, Artificial Sequence
  Description of Artificial Sequence: Synthetic oligonucleotide
acuuuucggaaggucuuug

SEQ ID NO: 583888 - RNA, 19 nt, Artificial Sequence
  Description of Artificial Sequence: Synthetic oligonucleotide
cuucgcaaauuguuccuca

SEQ ID NO: 583889 - RNA, 19 nt, Artificial Sequence
  Description of Artificial Sequence: Synthetic oligonucleotide
ccgucacuuauaaagugag

SEQ ID NO: 583890 - RNA, 19 nt, Artificial Sequence
  Description of Artificial Sequence: Synthetic oligonucleotide
cacgcaccugcucaacacc

SEQ ID NO: 583891 - RNA, 19 nt, Artificial Sequence
  Description of Artificial Sequence: Synthetic oligonucleotide
acacaucuccgugagggca

SEQ ID NO: 583892 - RNA, 19 nt, Artificial Sequence
  Description of Artificial Sequence: Synthetic oligonucleotide
aucgaaagcuugaggaccu

SEQ ID NO: 583893 - RNA, 19 nt, Artificial Sequence
  Description of Artificial Sequence: Synthetic oligonucleotide
aagguaccaugauggggaa

SEQ ID NO: 583894 - RNA, 19 nt, Artificial Sequence
  Description of Artificial Sequence: Synthetic oligonucleotide
acucucagguccguuacga

SEQ ID NO: 583895 - RNA, 19 nt, Artificial Sequence
  Description of Artificial Sequence: Synthetic oligonucleotide
aggcgcgccagguucuggg

SEQ ID NO: 583896 - RNA, 19 nt, Artificial Sequence
  Description of Artificial Sequence: Synthetic oligonucleotide
uucugcgcugcuucuaauu

SEQ ID NO: 583897 - RNA, 19 nt, Artificial Sequence
  Description of Artificial Sequence: Synthetic oligonucleotide
cugggacauggacagcggc

SEQ ID NO: 583898 - RNA, 19 nt, Artificial Sequence
  Description of Artificial Sequence: Synthetic oligonucleotide
uuacggcccuccaucuugu

SEQ ID NO: 583899 - RNA, 19 nt, Artificial Sequence
  Description of Artificial Sequence: Synthetic oligonucleotide
gagcccgcgcuucuguagc

SEQ ID NO: 583900 - RNA, 19 nt, Artificial Sequence
  Description of Artificial Sequence: Synthetic oligonucleotide
cuaggaaucuggacaucca

SEQ ID NO: 583901 - RNA, 19 nt, Artificial Sequence
  Description of Artificial Sequence: Synthetic oligonucleotide
ccauacugcauucuacaac

SEQ ID NO: 583902 - RNA, 19 nt, Artificial Sequence
  Description of Artificial Sequence: Synthetic oligonucleotide
acgaaauuacggcccucca

SEQ ID NO: 583903 - RNA, 19 nt, Artificial Sequence
  Description of Artificial Sequence: Synthetic oligonucleotide
cucgcuggagcuuguuuuc

SEQ ID NO: 583904 - RNA, 19 nt, Artificial Sequence
  Description of Artificial Sequence: Synthetic oligonucleotide
cacgacacgcaccugcuca

SEQ ID NO: 583905 - RNA, 19 nt, Artificial Sequence
  Description of Artificial Sequence: Synthetic oligonucleotide
ccguuacgaacugagauag

SEQ ID NO: 583906 - RNA, 19 nt, Artificial Sequence
  Description of Artificial Sequence: Synthetic oligonucleotide
agcccuuuaguaauguuuu

SEQ ID NO: 583907 - RNA, 19 nt, Artificial Sequence
  Description of Artificial Sequence: Synthetic oligonucleotide
ucgacuugccaagcuguca

SEQ ID NO: 583908 - RNA, 19 nt, Artificial Sequence
  Description of Artificial Sequence: Synthetic oligonucleotide
acgcaccugcucaacaccg

SEQ ID NO: 583909 - RNA, 19 nt, Artificial Sequence
  Description of Artificial Sequence: Synthetic oligonucleotide
ggaaagagagagcccgcgc

SEQ ID NO: 583910 - RNA, 19 nt, Artificial Sequence
  Description of Artificial Sequence: Synthetic oligonucleotide
cucagguccguuacgaacu

SEQ ID NO: 583911 - RNA, 19 nt, Artificial Sequence
  Description of Artificial Sequence: Synthetic oligonucleotide
auacgucucggugccauca

SEQ ID NO: 583912 - RNA, 19 nt, Artificial Sequence
  Description of Artificial Sequence: Synthetic oligonucleotide
gggaucugagacuuaaucu

SEQ ID NO: 583913 - RNA, 19 nt, Artificial Sequence
  Description of Artificial Sequence: Synthetic oligonucleotide
  modified_base (4)..(4): a, c, u, g, unknown or other
aggnggauuugagcugcuc

SEQ ID NO: 583914 - RNA, 19 nt, Artificial Sequence
  Description of Artificial Sequence: Synthetic oligonucleotide
gacacgcaccugcucaaca

SEQ ID NO: 583915 - RNA, 19 nt, Artificial Sequence
  Description of Artificial Sequence: Synthetic oligonucleotide
cgcaaauuguuccucacug

SEQ ID NO: 583916 - RNA, 19 nt, Artificial Sequence
  Description of Artificial Sequence: Synthetic oligonucleotide
guccguuacgaacugagau

SEQ ID NO: 583917 - RNA, 19 nt, Artificial Sequence
  Description of Artificial Sequence: Synthetic oligonucleotide
uccggggaaacugaaccau

SEQ ID NO: 583918 - RNA, 19 nt, Artificial Sequence
  Description of Artificial Sequence: Synthetic oligonucleotide
gcaagugcaaguugugcuc

SEQ ID NO: 583919 - RNA, 19 nt, Artificial Sequence
  Description of Artificial Sequence: Synthetic oligonucleotide
agagagcccgcgcuucugu

SEQ ID NO: 583920 - RNA, 19 nt, Artificial Sequence
  Description of Artificial Sequence: Synthetic oligonucleotide
cucaagucgcccaggaucu

SEQ ID NO: 583921 - RNA, 19 nt, Artificial Sequence
  Description of Artificial Sequence: Synthetic oligonucleotide
agcuucccgagaaagcugu

SEQ ID NO: 583922 - RNA, 19 nt, Artificial Sequence
  Description of Artificial Sequence: Synthetic oligonucleotide
caucacuuuucggaagguc

SEQ ID NO: 583923 - RNA, 19 nt, Artificial Sequence
  Description of Artificial Sequence: Synthetic oligonucleotide
aguccugcgcgucgccguc

SEQ ID NO: 583924 - RNA, 19 nt, Artificial Sequence
  Description of Artificial Sequence: Synthetic oligonucleotide
ucuauggguccgaguccca

SEQ ID NO: 583925 - RNA, 19 nt, Artificial Sequence
  Description of Artificial Sequence: Synthetic oligonucleotide
ucccgagaaagcugugcaa

SEQ ID NO: 583926 - RNA, 19 nt, Artificial Sequence
  Description of Artificial Sequence: Synthetic oligonucleotide
guaugcagaccccucuaaa

SEQ ID NO: 583927 - RNA, 19 nt, Artificial Sequence
  Description of Artificial Sequence: Synthetic oligonucleotide
gaccugaaagucucauucu

SEQ ID NO: 583928 - RNA, 19 nt, Artificial Sequence
  Description of Artificial Sequence: Synthetic oligonucleotide
gagccuguuucugaauaga

SEQ ID NO: 583929 - RNA, 19 nt, Artificial Sequence
  Description of Artificial Sequence: Synthetic oligonucleotide
gggaaagagagagcccgcg

SEQ ID NO: 583930 - RNA, 19 nt, Artificial Sequence
  Description of Artificial Sequence: Synthetic oligonucleotide
auguaugcagaccccucua

SEQ ID NO: 583931 - RNA, 19 nt, Artificial Sequence
  Description of Artificial Sequence: Synthetic oligonucleotide
cugaucagcaagugcaagu

SEQ ID NO: 583932 - RNA, 19 nt, Artificial Sequence
  Description of Artificial Sequence: Synthetic oligonucleotide
ggaacucaaggucuguuua

SEQ ID NO: 583933 - RNA, 19 nt, Artificial Sequence
  Description of Artificial Sequence: Synthetic oligonucleotide
uugaccagugggccuggau

SEQ ID NO: 583934 - RNA, 19 nt, Artificial Sequence
  Description of Artificial Sequence: Synthetic oligonucleotide
gaacugcaugcaccuggug

SEQ ID NO: 583935 - RNA, 19 nt, Artificial Sequence
  Description of Artificial Sequence: Synthetic oligonucleotide
cuccgugagggcacuucgc

SEQ ID NO: 583936 - RNA, 19 nt, Artificial Sequence
  Description of Artificial Sequence: Synthetic oligonucleotide
caacaccgauguucaacug

SEQ ID NO: 583937 - RNA, 19 nt, Artificial Sequence
  Description of Artificial Sequence: Synthetic oligonucleotide
ggugaggcaucacaaugga

SEQ ID NO: 583938 - RNA, 19 nt, Artificial Sequence
  Description of Artificial Sequence: Synthetic oligonucleotide
gauacgucucggugccauc

SEQ ID NO: 583939 - RNA, 19 nt, Artificial Sequence
  Description of Artificial Sequence: Synthetic oligonucleotide
gcaaguugugcuccaggac

SEQ ID NO: 583940 - RNA, 19 nt, Artificial Sequence
  Description of Artificial Sequence: Synthetic oligonucleotide
uugcacugguuccggggaa

SEQ ID NO: 583941 - RNA, 19 nt, Artificial Sequence
  Description of Artificial Sequence: Synthetic oligonucleotide
ucgcuggagcuuguuuucc

SEQ ID NO: 583942 - RNA, 19 nt, Artificial Sequence
  Description of Artificial Sequence: Synthetic oligonucleotide
ggauggacuugcauauuug

SEQ ID NO: 583943 - RNA, 19 nt, Artificial Sequence
  Description of Artificial Sequence: Synthetic oligonucleotide
aaacgggguccagagucau

SEQ ID NO: 583944 - RNA, 19 nt, Artificial Sequence
  Description of Artificial Sequence: Synthetic oligonucleotide
ggcacuucgcaaauuguuc

SEQ ID NO: 583945 - RNA, 19 nt, Artificial Sequence
  Description of Artificial Sequence: Synthetic oligonucleotide
ugcucucuauggguccgag

SEQ ID NO: 583946 - RNA, 19 nt, Artificial Sequence
  Description of Artificial Sequence: Synthetic oligonucleotide
  modified_base (9)..(9): a, c, u, g, unknown or other
cccucaggnggauuugagc

SEQ ID NO: 583947 - RNA, 19 nt, Artificial Sequence
  Description of Artificial Sequence: Synthetic oligonucleotide
caaugugaucacccgucca

SEQ ID NO: 583948 - RNA, 19 nt, Artificial Sequence
  Description of Artificial Sequence: Synthetic oligonucleotide
gguugacugugccaagauc

SEQ ID NO: 583949 - RNA, 19 nt, Artificial Sequence
  Description of Artificial Sequence: Synthetic oligonucleotide
aggaccugccagcccauaa

SEQ ID NO: 583950 - RNA, 19 nt, Artificial Sequence
  Description of Artificial Sequence: Synthetic oligonucleotide
cuauggguccgagucccac

SEQ ID NO: 583951 - RNA, 19 nt, Artificial Sequence
  Description of Artificial Sequence: Synthetic oligonucleotide
aagucgcccaggaucuuau

SEQ ID NO: 583952 - RNA, 19 nt, Artificial Sequence
  Description of Artificial Sequence: Synthetic oligonucleotide
gggguccagagucaugaac

SEQ ID NO: 583953 - RNA, 19 nt, Artificial Sequence
  Description of Artificial Sequence: Synthetic oligonucleotide
acaucacuuuucggaaggu

SEQ ID NO: 583954 - RNA, 19 nt, Artificial Sequence
  Description of Artificial Sequence: Synthetic oligonucleotide
accuugagaugugauuaaa

SEQ ID NO: 583955 - RNA, 19 nt, Artificial Sequence
  Description of Artificial Sequence: Synthetic oligonucleotide
  modified_base (11)..(11): a, c, u, g, unknown or other
ugcccucaggnggauuuga

SEQ ID NO: 583956 - RNA, 19 nt, Artificial Sequence
  Description of Artificial Sequence: Synthetic oligonucleotide
auacugcauucuacaacug

SEQ ID NO: 583957 - RNA, 19 nt, Artificial Sequence
  Description of Artificial Sequence: Synthetic oligonucleotide
agccuguuucugaauagaa

SEQ ID NO: 583958 - RNA, 19 nt, Artificial Sequence
  Description of Artificial Sequence: Synthetic oligonucleotide
gucgcccaggaucuuaucu

SEQ ID NO: 583959 - RNA, 19 nt, Artificial Sequence
  Description of Artificial Sequence: Synthetic oligonucleotide
agcucaagucgcccaggau

SEQ ID NO: 583960 - RNA, 19 nt, Artificial Sequence
  Description of Artificial Sequence: Synthetic oligonucleotide
acgacacgcaccugcucaa

SEQ ID NO: 583961 - RNA, 19 nt, Artificial Sequence
  Description of Artificial Sequence: Synthetic oligonucleotide
  modified_base (8)..(8): a, c, u, g, unknown or other
ccucaggnggauuugagcu

SEQ ID NO: 583962 - RNA, 19 nt, Artificial Sequence
  Description of Artificial Sequence: Synthetic oligonucleotide
ucgaaagcuugaggaccug

SEQ ID NO: 583963 - RNA, 19 nt, Artificial Sequence
  Description of Artificial Sequence: Synthetic oligonucleotide
cugcgcgucgccgucgggc

SEQ ID NO: 583964 - RNA, 19 nt, Artificial Sequence
  Description of Artificial Sequence: Synthetic oligonucleotide
cugugcacgacacgcaccu

SEQ ID NO: 583965 - RNA, 19 nt, Artificial Sequence
  Description of Artificial Sequence: Synthetic oligonucleotide
cccgucacuuauaaaguga

SEQ ID NO: 583966 - RNA, 19 nt, Artificial Sequence
  Description of Artificial Sequence: Synthetic oligonucleotide
cacccgucacuuauaaagu

SEQ ID NO: 583967 - RNA, 19 nt, Artificial Sequence
  Description of Artificial Sequence: Synthetic oligonucleotide
agggcacuucgcaaauugu

SEQ ID NO: 583968 - RNA, 19 nt, Artificial Sequence
  Description of Artificial Sequence: Synthetic oligonucleotide
augcgcugcgccaggcgcg

SEQ ID NO: 583969 - RNA, 19 nt, Artificial Sequence
  Description of Artificial Sequence: Synthetic oligonucleotide
ccuugagaugugauuaaaa

SEQ ID NO: 583970 - RNA, 19 nt, Artificial Sequence
  Description of Artificial Sequence: Synthetic oligonucleotide
agcacccgucacuuauaaa

SEQ ID NO: 583971 - RNA, 19 nt, Artificial Sequence
  Description of Artificial Sequence: Synthetic oligonucleotide
ggacaucauagagaacaca

SEQ ID NO: 583972 - RNA, 19 nt, Artificial Sequence
  Description of Artificial Sequence: Synthetic oligonucleotide
cacuucgcaaauuguuccu

SEQ ID NO: 583973 - RNA, 19 nt, Artificial Sequence
  Description of Artificial Sequence: Synthetic oligonucleotide
caauucgacuugccaagcu

SEQ ID NO: 583974 - RNA, 19 nt, Artificial Sequence
  Description of Artificial Sequence: Synthetic oligonucleotide
  modified_base (10)..(10): a, c, u, g, unknown or other
gcccucaggnggauuugag

SEQ ID NO: 583975 - RNA, 19 nt, Artificial Sequence
  Description of Artificial Sequence: Synthetic oligonucleotide
ugcgcugcgccaggcgcgc

SEQ ID NO: 583976 - RNA, 19 nt, Artificial Sequence
  Description of Artificial Sequence: Synthetic oligonucleotide
gcucagaguugaagucucg

SEQ ID NO: 583977 - RNA, 19 nt, Artificial Sequence
  Description of Artificial Sequence: Synthetic oligonucleotide
guagccucaggagcucaga

SEQ ID NO: 583978 - RNA, 19 nt, Artificial Sequence
  Description of Artificial Sequence: Synthetic oligonucleotide
uuugaccagugggccugga

SEQ ID NO: 583979 - RNA, 19 nt, Artificial Sequence
  Description of Artificial Sequence: Synthetic oligonucleotide
cuggacucauaaacgucgu

SEQ ID NO: 583980 - RNA, 19 nt, Artificial Sequence
  Description of Artificial Sequence: Synthetic oligonucleotide
cccucuaaaucacuaggaa

SEQ ID NO: 583981 - RNA, 19 nt, Artificial Sequence
  Description of Artificial Sequence: Synthetic oligonucleotide
cuccccauacugcauucua

SEQ ID NO: 583982 - RNA, 19 nt, Artificial Sequence
  Description of Artificial Sequence: Synthetic oligonucleotide
agucacugacuuggucagu

SEQ ID NO: 583983 - RNA, 19 nt, Artificial Sequence
  Description of Artificial Sequence: Synthetic oligonucleotide
gacuuauauugaagacacu

SEQ ID NO: 583984 - RNA, 19 nt, Artificial Sequence
  Description of Artificial Sequence: Synthetic oligonucleotide
gcagaccccucuaaaucac

SEQ ID NO: 583985 - RNA, 19 nt, Artificial Sequence
  Description of Artificial Sequence: Synthetic oligonucleotide
aagucucgcuggagcuugu

SEQ ID NO: 583986 - RNA, 19 nt, Artificial Sequence
  Description of Artificial Sequence: Synthetic oligonucleotide
ccauaaccuuggcaagcug

SEQ ID NO: 583987 - RNA, 19 nt, Artificial Sequence
  Description of Artificial Sequence: Synthetic oligonucleotide
guccgagucccacaugguu

SEQ ID NO: 583988 - RNA, 19 nt, Artificial Sequence
  Description of Artificial Sequence: Synthetic oligonucleotide
gcgcauccugagaaacggg

SEQ ID NO: 583989 - RNA, 19 nt, Artificial Sequence
  Description of Artificial Sequence: Synthetic oligonucleotide
cugaaccuccuugaauggu

SEQ ID NO: 583990 - RNA, 19 nt, Artificial Sequence
  Description of Artificial Sequence: Synthetic oligonucleotide
gucgccgucgggccccgca

SEQ ID NO: 583991 - RNA, 19 nt, Artificial Sequence
  Description of Artificial Sequence: Synthetic oligonucleotide
agguaccaugauggggaaa

SEQ ID NO: 583992 - RNA, 19 nt, Artificial Sequence
  Description of Artificial Sequence: Synthetic oligonucleotide
cguuacgaacugagauagc

SEQ ID NO: 583993 - RNA, 19 nt, Artificial Sequence
  Description of Artificial Sequence: Synthetic oligonucleotide
caagucgcccaggaucuua

SEQ ID NO: 583994 - RNA, 19 nt, Artificial Sequence
  Description of Artificial Sequence: Synthetic oligonucleotide
ccuugugcuuguaaauagu

SEQ ID NO: 583995 - RNA, 19 nt, Artificial Sequence
  Description of Artificial Sequence: Synthetic oligonucleotide
cagaccccucuaaaucacu

SEQ ID NO: 583996 - RNA, 19 nt, Artificial Sequence
  Description of Artificial Sequence: Synthetic oligonucleotide
cagcggcugcagauacguc

SEQ ID NO: 583997 - RNA, 19 nt, Artificial Sequence
  Description of Artificial Sequence: Synthetic oligonucleotide
uacggcccuccaucuuguu

SEQ ID NO: 583998 - RNA, 19 nt, Artificial Sequence
  Description of Artificial Sequence: Synthetic oligonucleotide
cgacuugccaagcugucaa

SEQ ID NO: 583999 - RNA, 19 nt, Artificial Sequence
  Description of Artificial Sequence: Synthetic oligonucleotide
cgucacuuauaaagugaga

SEQ ID NO: 584000 - RNA, 19 nt, Artificial Sequence
  Description of Artificial Sequence: Synthetic oligonucleotide
gcacugguuccggggaaac

SEQ ID NO: 584001 - RNA, 19 nt, Artificial Sequence
  Description of Artificial Sequence: Synthetic oligonucleotide
guucugcgcugcuucuaau

SEQ ID NO: 584002 - RNA, 19 nt, Artificial Sequence
  Description of Artificial Sequence: Synthetic oligonucleotide
cauugccaaugcucucuau

SEQ ID NO: 584003 - RNA, 19 nt, Artificial Sequence
  Description of Artificial Sequence: Synthetic oligonucleotide
gcacgacacgcaccugcuc

SEQ ID NO: 584004 - RNA, 19 nt, Artificial Sequence
  Description of Artificial Sequence: Synthetic oligonucleotide
gcuucccgagaaagcugug

SEQ ID NO: 584005 - RNA, 19 nt, Artificial Sequence
  Description of Artificial Sequence: Synthetic oligonucleotide
  modified_base (5)..(5): a, c, u, g, unknown or other
caggnggauuugagcugcu

SEQ ID NO: 584006 - RNA, 19 nt, Artificial Sequence
  Description of Artificial Sequence: Synthetic oligonucleotide
cguucugcgcugcuucuaa

SEQ ID NO: 584007 - RNA, 19 nt, Artificial Sequence
  Description of Artificial Sequence: Synthetic oligonucleotide
gcucucuauggguccgagu

SEQ ID NO: 584008 - RNA, 19 nt, Artificial Sequence
  Description of Artificial Sequence: Synthetic oligonucleotide
cuccggcgccagcccaguc

SEQ ID NO: 584009 - RNA, 19 nt, Artificial Sequence
  Description of Artificial Sequence: Synthetic oligonucleotide
cacugguuccggggaaacu

SEQ ID NO: 584010 - RNA, 19 nt, Artificial Sequence
  Description of Artificial Sequence: Synthetic oligonucleotide
ccgugagggcacuucgcaa

SEQ ID NO: 584011 - RNA, 19 nt, Artificial Sequence
  Description of Artificial Sequence: Synthetic oligonucleotide
ccggggaaacugaaccaua

SEQ ID NO: 584012 - RNA, 19 nt, Artificial Sequence
  Description of Artificial Sequence: Synthetic oligonucleotide
cgaaauuacggcccuccau

SEQ ID NO: 584013 - RNA, 19 nt, Artificial Sequence
  Description of Artificial Sequence: Synthetic oligonucleotide
cugugauggcagaggcauu

SEQ ID NO: 584014 - RNA, 19 nt, Artificial Sequence
  Description of Artificial Sequence: Synthetic oligonucleotide
cgaacugagauagcauagu

SEQ ID NO: 584015 - RNA, 19 nt, Artificial Sequence
  Description of Artificial Sequence: Synthetic oligonucleotide
gguccgagucccacauggu

SEQ ID NO: 584016 - RNA, 19 nt, Artificial Sequence
  Description of Artificial Sequence: Synthetic oligonucleotide
cgcgucgccgucgggcccc

SEQ ID NO: 584017 - RNA, 19 nt, Artificial Sequence
  Description of Artificial Sequence: Synthetic oligonucleotide
gcgccagguucugggacau

SEQ ID NO: 584018 - RNA, 19 nt, Artificial Sequence
  Description of Artificial Sequence: Synthetic oligonucleotide
gcgcugcgccaggcgcgcc

SEQ ID NO: 584019 - RNA, 19 nt, Artificial Sequence
  Description of Artificial Sequence: Synthetic oligonucleotide
cgagucccacaugguuacu

SEQ ID NO: 584020 - RNA, 19 nt, Artificial Sequence
  Description of Artificial Sequence: Synthetic oligonucleotide
ugugagagaauccaggucg

SEQ ID NO: 584021 - RNA, 19 nt, Artificial Sequence
  Description of Artificial Sequence: Synthetic oligonucleotide
agaguagcgaaguaggucc

SEQ ID NO: 584022 - RNA, 19 nt, Artificial Sequence
  Description of Artificial Sequence: Synthetic oligonucleotide
agaccuaugaagcagaaag

SEQ ID NO: 584023 - RNA, 19 nt, Artificial Sequence
  Description of Artificial Sequence: Synthetic oligonucleotide
gagagagagagauagaaag

SEQ ID NO: 584024 - RNA, 19 nt, Artificial Sequence
  Description of Artificial Sequence: Synthetic oligonucleotide
ugaacuugcaccaaggcca

SEQ ID NO: 584025 - RNA, 19 nt, Artificial Sequence
  Description of Artificial Sequence: Synthetic oligonucleotide
uuaauugaaagacaacuga

SEQ ID NO: 584026 - RNA, 19 nt, Artificial Sequence
  Description of Artificial Sequence: Synthetic oligonucleotide
uuuacuucuuauaauuucc

SEQ ID NO: 584027 - RNA, 19 nt, Artificial Sequence
  Description of Artificial Sequence: Synthetic oligonucleotide
uguuaaaucucaaaagcug

SEQ ID NO: 584028 - RNA, 19 nt, Artificial Sequence
  Description of Artificial Sequence: Synthetic oligonucleotide
aaggugaguagccacaggg

SEQ ID NO: 584029 - RNA, 19 nt, Artificial Sequence
  Description of Artificial Sequence: Synthetic oligonucleotide
aaaacucaggcucccauuc

SEQ ID NO: 584030 - RNA, 19 nt, Artificial Sequence
  Description of Artificial Sequence: Synthetic oligonucleotide
uuuauagggagucuuugag

SEQ ID NO: 584031 - RNA, 19 nt, Artificial Sequence
  Description of Artificial Sequence: Synthetic oligonucleotide
cuuagaguagcgaaguagg

SEQ ID NO: 584032 - RNA, 19 nt, Artificial Sequence
  Description of Artificial Sequence: Synthetic oligonucleotide
uauagggagucuuugagug

SEQ ID NO: 584033 - RNA, 19 nt, Artificial Sequence
  Description of Artificial Sequence: Synthetic oligonucleotide
gaguguuaaaucucaaaag

SEQ ID NO: 584034 - RNA, 19 nt, Artificial Sequence
  Description of Artificial Sequence: Synthetic oligonucleotide
aagacaacugaucucagaa

SEQ ID NO: 584035 - RNA, 19 nt, Artificial Sequence
  Description of Artificial Sequence: Synthetic oligonucleotide
gagagagagagagagauag

SEQ ID NO: 584036 - RNA, 19 nt, Artificial Sequence
  Description of Artificial Sequence: Synthetic oligonucleotide
cugaacaacccucaggugg

SEQ ID NO: 584037 - RNA, 19 nt, Artificial Sequence
  Description of Artificial Sequence: Synthetic oligonucleotide
aacucaaucgccuggauuu

SEQ ID NO: 584038 - RNA, 19 nt, Artificial Sequence
  Description of Artificial Sequence: Synthetic oligonucleotide
auuaccacccaucucaaug

SEQ ID NO: 584039 - RNA, 19 nt, Artificial Sequence
  Description of Artificial Sequence: Synthetic oligonucleotide
augccauuauaguaggccc

SEQ ID NO: 584040 - RNA, 19 nt, Artificial Sequence
  Description of Artificial Sequence: Synthetic oligonucleotide
caaucagggagauaguugc

SEQ ID NO: 584041 - RNA, 19 nt, Artificial Sequence
  Description of Artificial Sequence: Synthetic oligonucleotide
aaacuggauggccaggcgg

SEQ ID NO: 584042 - RNA, 19 nt, Artificial Sequence
  Description of Artificial Sequence: Synthetic oligonucleotide
ucggauacgguugucaugg

SEQ ID NO: 584043 - RNA, 19 nt, Artificial Sequence
  Description of Artificial Sequence: Synthetic oligonucleotide
auauggaaaggauucuggg

SEQ ID NO: 584044 - RNA, 19 nt, Artificial Sequence
  Description of Artificial Sequence: Synthetic oligonucleotide
gagagagagagagagagag

SEQ ID NO: 584045 - RNA, 19 nt, Artificial Sequence
  Description of Artificial Sequence: Synthetic oligonucleotide
ugcaauucauguuucggag

SEQ ID NO: 584046 - RNA, 19 nt, Artificial Sequence
  Description of Artificial Sequence: Synthetic oligonucleotide
gauucguagcucuaccagg

SEQ ID NO: 584047 - RNA, 19 nt, Artificial Sequence
  Description of Artificial Sequence: Synthetic oligonucleotide
agggcaaucagggagauag

SEQ ID NO: 584048 - RNA, 19 nt, Artificial Sequence
  Description of Artificial Sequence: Synthetic oligonucleotide
uuauaguaggcccucuuga

SEQ ID NO: 584049 - RNA, 19 nt, Artificial Sequence
  Description of Artificial Sequence: Synthetic oligonucleotide
ugaaccaaugcaaacuggu

SEQ ID NO: 584050 - RNA, 19 nt, Artificial Sequence
  Description of Artificial Sequence: Synthetic oligonucleotide
gugaaguucauucaggguc

SEQ ID NO: 584051 - RNA, 19 nt, Artificial Sequence
  Description of Artificial Sequence: Synthetic oligonucleotide
uuucuuuaauugaaagaca

SEQ ID NO: 584052 - RNA, 19 nt, Artificial Sequence
  Description of Artificial Sequence: Synthetic oligonucleotide
ucugguuguggccuaagcc

SEQ ID NO: 584053 - RNA, 19 nt, Artificial Sequence
  Description of Artificial Sequence: Synthetic oligonucleotide
ucagagacucucaccaagg

SEQ ID NO: 584054 - RNA, 19 nt, Artificial Sequence
  Description of Artificial Sequence: Synthetic oligonucleotide
auaugugcaugcuugggag

SEQ ID NO: 584055 - RNA, 19 nt, Artificial Sequence
  Description of Artificial Sequence: Synthetic oligonucleotide
gaccuagccauauugggag

SEQ ID NO: 584056 - RNA, 19 nt, Artificial Sequence
  Description of Artificial Sequence: Synthetic oligonucleotide
aagcccauggggcagaagu

SEQ ID NO: 584057 - RNA, 19 nt, Artificial Sequence
  Description of Artificial Sequence: Synthetic oligonucleotide
uuccguagagggcuaaagg

SEQ ID NO: 584058 - RNA, 19 nt, Artificial Sequence
  Description of Artificial Sequence: Synthetic oligonucleotide
uguacagcuuagaguagcg

SEQ ID NO: 584059 - RNA, 19 nt, Artificial Sequence
  Description of Artificial Sequence: Synthetic oligonucleotide
guugucauggauucguagc

SEQ ID NO: 584060 - RNA, 19 nt, Artificial Sequence
  Description of Artificial Sequence: Synthetic oligonucleotide
ggcauaaagaugcuggagg

SEQ ID NO: 584061 - RNA, 19 nt, Artificial Sequence
  Description of Artificial Sequence: Synthetic oligonucleotide
auacgguugucauggauuc

SEQ ID NO: 584062 - RNA, 19 nt, Artificial Sequence
  Description of Artificial Sequence: Synthetic oligonucleotide
ugaacaacccucagguggc

SEQ ID NO: 584063 - RNA, 19 nt, Artificial Sequence
  Description of Artificial Sequence: Synthetic oligonucleotide
auuauaguaggcccucuug

SEQ ID NO: 584064 - RNA, 19 nt, Artificial Sequence
  Description of Artificial Sequence: Synthetic oligonucleotide
aacucaggcucccauucuc

SEQ ID NO: 584065 - RNA, 19 nt, Artificial Sequence
  Description of Artificial Sequence: Synthetic oligonucleotide
gugagagagagagagagag

SEQ ID NO: 584066 - RNA, 19 nt, Artificial Sequence
  Description of Artificial Sequence: Synthetic oligonucleotide
ugucguuuguccuucgggc

SEQ ID NO: 584067 - RNA, 19 nt, Artificial Sequence
  Description of Artificial Sequence: Synthetic oligonucleotide
auggauucguagcucuacc

SEQ ID NO: 584068 - RNA, 19 nt, Artificial Sequence
  Description of Artificial Sequence: Synthetic oligonucleotide
ucaagugcugggcagggca

SEQ ID NO: 584069 - RNA, 19 nt, Artificial Sequence
  Description of Artificial Sequence: Synthetic oligonucleotide
accaaugcaaacugguucu

SEQ ID NO: 584070 - RNA, 19 nt, Artificial Sequence
  Description of Artificial Sequence: Synthetic oligonucleotide
aggauucugggccuccacc

SEQ ID NO: 584071 - RNA, 19 nt, Artificial Sequence
  Description of Artificial Sequence: Synthetic oligonucleotide
gugugugagagagagagag

SEQ ID NO: 584072 - RNA, 19 nt, Artificial Sequence
  Description of Artificial Sequence: Synthetic oligonucleotide
cugaauacacccuugggca

SEQ ID NO: 584073 - RNA, 19 nt, Artificial Sequence
  Description of Artificial Sequence: Synthetic oligonucleotide
gaguccgcugaauacaccc

SEQ ID NO: 584074 - RNA, 19 nt, Artificial Sequence
  Description of Artificial Sequence: Synthetic oligonucleotide
uccuaacgcagauagggug

SEQ ID NO: 584075 - RNA, 19 nt, Artificial Sequence
  Description of Artificial Sequence: Synthetic oligonucleotide
uuauagggagucuuugagu

SEQ ID NO: 584076 - RNA, 19 nt, Artificial Sequence
  Description of Artificial Sequence: Synthetic oligonucleotide
auuuauagggagucuuuga

SEQ ID NO: 584077 - RNA, 19 nt, Artificial Sequence
  Description of Artificial Sequence: Synthetic oligonucleotide
cagccgaaaggacacaugg

SEQ ID NO: 584078 - RNA, 19 nt, Artificial Sequence
  Description of Artificial Sequence: Synthetic oligonucleotide
uacagcuuagaguagcgaa

SEQ ID NO: 584079 - RNA, 19 nt, Artificial Sequence
  Description of Artificial Sequence: Synthetic oligonucleotide
ucaaucauccggaucuggu

SEQ ID NO: 584080 - RNA, 19 nt, Artificial Sequence
  Description of Artificial Sequence: Synthetic oligonucleotide
gugugagagagagagagag

SEQ ID NO: 584081 - RNA, 19 nt, Artificial Sequence
  Description of Artificial Sequence: Synthetic oligonucleotide
aaggcauaaagaugcugga

SEQ ID NO: 584082 - RNA, 19 nt, Artificial Sequence
  Description of Artificial Sequence: Synthetic oligonucleotide
uauggcccaagagagcugg

SEQ ID NO: 584083 - RNA, 19 nt, Artificial Sequence
  Description of Artificial Sequence: Synthetic oligonucleotide
cuuuagacccaagucagag

SEQ ID NO: 584084 - RNA, 19 nt, Artificial Sequence
  Description of Artificial Sequence: Synthetic oligonucleotide
uauaguaggcccucuugac

SEQ ID NO: 584085 - RNA, 19 nt, Artificial Sequence
  Description of Artificial Sequence: Synthetic oligonucleotide
uuuagacccaagucagagc

SEQ ID NO: 584086 - RNA, 19 nt, Artificial Sequence
  Description of Artificial Sequence: Synthetic oligonucleotide
guucucguaggguaggcag

SEQ ID NO: 584087 - RNA, 19 nt, Artificial Sequence
  Description of Artificial Sequence: Synthetic oligonucleotide
auucauguuucggaguccg

SEQ ID NO: 584088 - RNA, 19 nt, Artificial Sequence
  Description of Artificial Sequence: Synthetic oligonucleotide
agagaauccaggucgggga

SEQ ID NO: 584089 - RNA, 19 nt, Artificial Sequence
  Description of Artificial Sequence: Synthetic oligonucleotide
gaaggauuuauagggaguc

SEQ ID NO: 584090 - RNA, 19 nt, Artificial Sequence
  Description of Artificial Sequence: Synthetic oligonucleotide
cuccuccuaacgcagauag

SEQ ID NO: 584091 - RNA, 19 nt, Artificial Sequence
  Description of Artificial Sequence: Synthetic oligonucleotide
guuaaaucucaaaagcuga

SEQ ID NO: 584092 - RNA, 19 nt, Artificial Sequence
  Description of Artificial Sequence: Synthetic oligonucleotide
augcaauucauguuucgga

SEQ ID NO: 584093 - RNA, 19 nt, Artificial Sequence
  Description of Artificial Sequence: Synthetic oligonucleotide
gagggaccuagccauauug

SEQ ID NO: 584094 - RNA, 19 nt, Artificial Sequence
  Description of Artificial Sequence: Synthetic oligonucleotide
ucguagcucuaccagggag

SEQ ID NO: 584095 - RNA, 19 nt, Artificial Sequence
  Description of Artificial Sequence: Synthetic oligonucleotide
uguggccuaagccaagccu

SEQ ID NO: 584096 - RNA, 19 nt, Artificial Sequence
  Description of Artificial Sequence: Synthetic oligonucleotide
aaucagggagauaguugcc

SEQ ID NO: 584097 - RNA, 19 nt, Artificial Sequence
  Description of Artificial Sequence: Synthetic oligonucleotide
cacuuuucggauacgguug

SEQ ID NO: 584098 - RNA, 19 nt, Artificial Sequence
  Description of Artificial Sequence: Synthetic oligonucleotide
gugugugugugugagagag

SEQ ID NO: 584099 - RNA, 19 nt, Artificial Sequence
  Description of Artificial Sequence: Synthetic oligonucleotide
caaggaccaaggcauaaag

SEQ ID NO: 584100 - RNA, 19 nt, Artificial Sequence
  Description of Artificial Sequence: Synthetic oligonucleotide
uagggaauggccagugugu

SEQ ID NO: 584101 - RNA, 19 nt, Artificial Sequence
  Description of Artificial Sequence: Synthetic oligonucleotide
uggaguucucguaggguag

SEQ ID NO: 584102 - RNA, 19 nt, Artificial Sequence
  Description of Artificial Sequence: Synthetic oligonucleotide
ucaaugcaauucauguuuc

SEQ ID NO: 584103 - RNA, 19 nt, Artificial Sequence
  Description of Artificial Sequence: Synthetic oligonucleotide
gggauuaccacccaucuca

SEQ ID NO: 584104 - RNA, 19 nt, Artificial Sequence
  Description of Artificial Sequence: Synthetic oligonucleotide
uuugugcagggacuggcca

SEQ ID NO: 584105 - RNA, 19 nt, Artificial Sequence
  Description of Artificial Sequence: Synthetic oligonucleotide
agguaggugugagagaauc

SEQ ID NO: 584106 - RNA, 19 nt, Artificial Sequence
  Description of Artificial Sequence: Synthetic oligonucleotide
cuagggaauggccagugug

SEQ ID NO: 584107 - RNA, 19 nt, Artificial Sequence
  Description of Artificial Sequence: Synthetic oligonucleotide
auucguagcucuaccaggg

SEQ ID NO: 584108 - RNA, 19 nt, Artificial Sequence
  Description of Artificial Sequence: Synthetic oligonucleotide
ucuuugaguggauauggua

SEQ ID NO: 584109 - RNA, 19 nt, Artificial Sequence
  Description of Artificial Sequence: Synthetic oligonucleotide
aggugagaucuccuugggc

SEQ ID NO: 584110 - RNA, 19 nt, Artificial Sequence
  Description of Artificial Sequence: Synthetic oligonucleotide
uaguaggcccucuugacuc

SEQ ID NO: 584111 - RNA, 19 nt, Artificial Sequence
  Description of Artificial Sequence: Synthetic oligonucleotide
ucguaggguaggcagaaaa

SEQ ID NO: 584112 - RNA, 19 nt, Artificial Sequence
  Description of Artificial Sequence: Synthetic oligonucleotide
ucagggagauaguugcccc

SEQ ID NO: 584113 - RNA, 19 nt, Artificial Sequence
  Description of Artificial Sequence: Synthetic oligonucleotide
uuuucggauacgguuguca

SEQ ID NO: 584114 - RNA, 19 nt, Artificial Sequence
  Description of Artificial Sequence: Synthetic oligonucleotide
uuucggagcucagagauau

SEQ ID NO: 584115 - RNA, 19 nt, Artificial Sequence
  Description of Artificial Sequence: Synthetic oligonucleotide
aguaggcccucuugacucc

SEQ ID NO: 584116 - RNA, 19 nt, Artificial Sequence
  Description of Artificial Sequence: Synthetic oligonucleotide
guaggugaguguuaaaucu

SEQ ID NO: 584117 - RNA, 19 nt, Artificial Sequence
  Description of Artificial Sequence: Synthetic oligonucleotide
cucagagacucucaccaag

SEQ ID NO: 584118 - RNA, 19 nt, Artificial Sequence
  Description of Artificial Sequence: Synthetic oligonucleotide
gugugugugugugugagag

SEQ ID NO: 584119 - RNA, 19 nt, Artificial Sequence
  Description of Artificial Sequence: Synthetic oligonucleotide
ugccauuauaguaggcccu

SEQ ID NO: 584120 - RNA, 19 nt, Artificial Sequence
  Description of Artificial Sequence: Synthetic oligonucleotide
gagagagagagagauagaa

SEQ ID NO: 584121 - RNA, 19 nt, Artificial Sequence
  Description of Artificial Sequence: Synthetic oligonucleotide
uggauucguagcucuacca

SEQ ID NO: 584122 - RNA, 19 nt, Artificial Sequence
  Description of Artificial Sequence: Synthetic oligonucleotide
ucaaucgccuggauuuugu

SEQ ID NO: 584123 - RNA, 19 nt, Artificial Sequence
  Description of Artificial Sequence: Synthetic oligonucleotide
ugugagagagagagagaga

SEQ ID NO: 584124 - RNA, 19 nt, Artificial Sequence
  Description of Artificial Sequence: Synthetic oligonucleotide
uguccuucgggcagggcca

SEQ ID NO: 584125 - RNA, 19 nt, Artificial Sequence
  Description of Artificial Sequence: Synthetic oligonucleotide
gucguugaugcccaccuug

SEQ ID NO: 584126 - RNA, 19 nt, Artificial Sequence
  Description of Artificial Sequence: Synthetic oligonucleotide
cuguguccacacuugcugg

SEQ ID NO: 584127 - RNA, 19 nt, Artificial Sequence
  Description of Artificial Sequence: Synthetic oligonucleotide
aaacucaggcucccauucu

SEQ ID NO: 584128 - RNA, 19 nt, Artificial Sequence
  Description of Artificial Sequence: Synthetic oligonucleotide
ugaauacacccuugggcac

SEQ ID NO: 584129 - RNA, 19 nt, Artificial Sequence
  Description of Artificial Sequence: Synthetic oligonucleotide
uucggaguccgcugaauac

SEQ ID NO: 584130 - RNA, 19 nt, Artificial Sequence
  Description of Artificial Sequence: Synthetic oligonucleotide
aucaugcaucaugagcagc

SEQ ID NO: 584131 - RNA, 19 nt, Artificial Sequence
  Description of Artificial Sequence: Synthetic oligonucleotide
ugagagagagagagagaga

SEQ ID NO: 584132 - RNA, 19 nt, Artificial Sequence
  Description of Artificial Sequence: Synthetic oligonucleotide
acagcuuagaguagcgaag

SEQ ID NO: 584133 - RNA, 19 nt, Artificial Sequence
  Description of Artificial Sequence: Synthetic oligonucleotide
ucuuuagacccaagucaga

SEQ ID NO: 584134 - RNA, 19 nt, Artificial Sequence
  Description of Artificial Sequence: Synthetic oligonucleotide
ugugugagagagagagaga

SEQ ID NO: 584135 - RNA, 19 nt, Artificial Sequence
  Description of Artificial Sequence: Synthetic oligonucleotide
uuucggauacgguugucau

SEQ ID NO: 584136 - RNA, 19 nt, Artificial Sequence
  Description of Artificial Sequence: Synthetic oligonucleotide
aggggauuaccacccaucu

SEQ ID NO: 584137 - RNA, 19 nt, Artificial Sequence
  Description of Artificial Sequence: Synthetic oligonucleotide
ggauucguagcucuaccag

SEQ ID NO: 584138 - RNA, 19 nt, Artificial Sequence
  Description of Artificial Sequence: Synthetic oligonucleotide
uagaguagcgaaguagguc

SEQ ID NO: 584139 - RNA, 19 nt, Artificial Sequence
  Description of Artificial Sequence: Synthetic oligonucleotide
uucggauacgguugucaug

SEQ ID NO: 584140 - RNA, 19 nt, Artificial Sequence
  Description of Artificial Sequence: Synthetic oligonucleotide
uucucguaggguaggcaga

SEQ ID NO: 584141 - RNA, 19 nt, Artificial Sequence
  Description of Artificial Sequence: Synthetic oligonucleotide
agaggaauacaugucugga

SEQ ID NO: 584142 - RNA, 19 nt, Artificial Sequence
  Description of Artificial Sequence: Synthetic oligonucleotide
gggaccuagccauauuggg

SEQ ID NO: 584143 - RNA, 19 nt, Artificial Sequence
  Description of Artificial Sequence: Synthetic oligonucleotide
ugcuuaguugguggugugg

SEQ ID NO: 584144 - RNA, 19 nt, Artificial Sequence
  Description of Artificial Sequence: Synthetic oligonucleotide
guaggugugagagaaucca

SEQ ID NO: 584145 - RNA, 19 nt, Artificial Sequence
  Description of Artificial Sequence: Synthetic oligonucleotide
caucaugcaucaugagcag

SEQ ID NO: 584146 - RNA, 19 nt, Artificial Sequence
  Description of Artificial Sequence: Synthetic oligonucleotide
ggggcuaggaagcuuacug

SEQ ID NO: 584147 - RNA, 19 nt, Artificial Sequence
  Description of Artificial Sequence: Synthetic oligonucleotide
aaggauuuauagggagucu

SEQ ID NO: 584148 - RNA, 19 nt, Artificial Sequence
  Description of Artificial Sequence: Synthetic oligonucleotide
acuuuucggauacgguugu

SEQ ID NO: 584149 - RNA, 19 nt, Artificial Sequence
  Description of Artificial Sequence: Synthetic oligonucleotide
ugguuguggccuaagccaa

SEQ ID NO: 584150 - RNA, 19 nt, Artificial Sequence
  Description of Artificial Sequence: Synthetic oligonucleotide
ugagaugcgcagguaguug

SEQ ID NO: 584151 - RNA, 19 nt, Artificial Sequence
  Description of Artificial Sequence: Synthetic oligonucleotide
uccgcugaauacacccuug

SEQ ID NO: 584152 - RNA, 19 nt, Artificial Sequence
  Description of Artificial Sequence: Synthetic oligonucleotide
gcuuagaguagcgaaguag

SEQ ID NO: 584153 - RNA, 19 nt, Artificial Sequence
  Description of Artificial Sequence: Synthetic oligonucleotide
uccuccuaacgcagauagg

SEQ ID NO: 584154 - RNA, 19 nt, Artificial Sequence
  Description of Artificial Sequence: Synthetic oligonucleotide
acugcucaccaaccccuac

SEQ ID NO: 584155 - RNA, 19 nt, Artificial Sequence
  Description of Artificial Sequence: Synthetic oligonucleotide
aaccccuaccacagcaggg

SEQ ID NO: 584156 - RNA, 19 nt, Artificial Sequence
  Description of Artificial Sequence: Synthetic oligonucleotide
gagagagagagagagagau

SEQ ID NO: 584157 - RNA, 19 nt, Artificial Sequence
  Description of Artificial Sequence: Synthetic oligonucleotide
caaccccuaccacagcagg

SEQ ID NO: 584158 - RNA, 19 nt, Artificial Sequence
  Description of Artificial Sequence: Synthetic oligonucleotide
ugugugugagagagagaga

SEQ ID NO: 584159 - RNA, 19 nt, Artificial Sequence
  Description of Artificial Sequence: Synthetic oligonucleotide
ugggcuguccugcugucgu

SEQ ID NO: 584160 - RNA, 19 nt, Artificial Sequence
  Description of Artificial Sequence: Synthetic oligonucleotide
ugagagaauccaggucggg

SEQ ID NO: 584161 - RNA, 19 nt, Artificial Sequence
  Description of Artificial Sequence: Synthetic oligonucleotide
agaaggauuuauagggagu

SEQ ID NO: 584162 - RNA, 19 nt, Artificial Sequence
  Description of Artificial Sequence: Synthetic oligonucleotide
ucggaguccgcugaauaca

SEQ ID NO: 584163 - RNA, 19 nt, Artificial Sequence
  Description of Artificial Sequence: Synthetic oligonucleotide
aggucggggacaccugagg

SEQ ID NO: 584164 - RNA, 19 nt, Artificial Sequence
  Description of Artificial Sequence: Synthetic oligonucleotide
ugacgcagcggaagguggc

SEQ ID NO: 584165 - RNA, 19 nt, Artificial Sequence
  Description of Artificial Sequence: Synthetic oligonucleotide
aggggacucauggugaaug

SEQ ID NO: 584166 - RNA, 19 nt, Artificial Sequence
  Description of Artificial Sequence: Synthetic oligonucleotide
aggcauaaagaugcuggag

SEQ ID NO: 584167 - RNA, 19 nt, Artificial Sequence
  Description of Artificial Sequence: Synthetic oligonucleotide
auagggugucagaauggac

SEQ ID NO: 584168 - RNA, 19 nt, Artificial Sequence
  Description of Artificial Sequence: Synthetic oligonucleotide
cagagacucucaccaaggc

SEQ ID NO: 584169 - RNA, 19 nt, Artificial Sequence
  Description of Artificial Sequence: Synthetic oligonucleotide
guggccuaagccaagccug

SEQ ID NO: 584170 - RNA, 19 nt, Artificial Sequence
  Description of Artificial Sequence: Synthetic oligonucleotide
agccgaaaggacacauggc

SEQ ID NO: 584171 - RNA, 19 nt, Artificial Sequence
  Description of Artificial Sequence: Synthetic oligonucleotide
gugugugugugugugugag

SEQ ID NO: 584172 - RNA, 19 nt, Artificial Sequence
  Description of Artificial Sequence: Synthetic oligonucleotide
uguguguguguguguguga

SEQ ID NO: 584173 - RNA, 19 nt, Artificial Sequence
  Description of Artificial Sequence: Synthetic oligonucleotide
agggaccuagccauauugg

SEQ ID NO: 584174 - RNA, 19 nt, Artificial Sequence
  Description of Artificial Sequence: Synthetic oligonucleotide
ugcuacugugcugugucca

SEQ ID NO: 584175 - RNA, 19 nt, Artificial Sequence
  Description of Artificial Sequence: Synthetic oligonucleotide
cauggauucguagcucuac

SEQ ID NO: 584176 - RNA, 19 nt, Artificial Sequence
  Description of Artificial Sequence: Synthetic oligonucleotide
gccgaaaggacacauggca

SEQ ID NO: 584177 - RNA, 19 nt, Artificial Sequence
  Description of Artificial Sequence: Synthetic oligonucleotide
agugacgcagcggaaggug

SEQ ID NO: 584178 - RNA, 19 nt, Artificial Sequence
  Description of Artificial Sequence: Synthetic oligonucleotide
agacccaagucagagcacu

SEQ ID NO: 584179 - RNA, 19 nt, Artificial Sequence
  Description of Artificial Sequence: Synthetic oligonucleotide
gcuuaguuggugguguggg

SEQ ID NO: 584180 - RNA, 19 nt, Artificial Sequence
  Description of Artificial Sequence: Synthetic oligonucleotide
ggugaguagccacagggga

SEQ ID NO: 584181 - RNA, 19 nt, Artificial Sequence
  Description of Artificial Sequence: Synthetic oligonucleotide
ccaaguggaguucucguag

SEQ ID NO: 584182 - RNA, 19 nt, Artificial Sequence
  Description of Artificial Sequence: Synthetic oligonucleotide
acgguugucauggauucgu

SEQ ID NO: 584183 - RNA, 19 nt, Artificial Sequence
  Description of Artificial Sequence: Synthetic oligonucleotide
aggauuuauagggagucuu

SEQ ID NO: 584184 - RNA, 19 nt, Artificial Sequence
  Description of Artificial Sequence: Synthetic oligonucleotide
ugugugugugugagagaga

SEQ ID NO: 584185 - RNA, 19 nt, Artificial Sequence
  Description of Artificial Sequence: Synthetic oligonucleotide
cuagccauauugggagagg

SEQ ID NO: 584186 - RNA, 19 nt, Artificial Sequence
  Description of Artificial Sequence: Synthetic oligonucleotide
ggugucagaauggacaaga

SEQ ID NO: 584187 - RNA, 19 nt, Artificial Sequence
  Description of Artificial Sequence: Synthetic oligonucleotide
agcuuacugcuccucauuu

SEQ ID NO: 584188 - RNA, 19 nt, Artificial Sequence
  Description of Artificial Sequence: Synthetic oligonucleotide
cuuccguagagggcuaaag

SEQ ID NO: 584189 - RNA, 19 nt, Artificial Sequence
  Description of Artificial Sequence: Synthetic oligonucleotide
auagauggacagguaguga

SEQ ID NO: 584190 - RNA, 19 nt, Artificial Sequence
  Description of Artificial Sequence: Synthetic oligonucleotide
uucguagcucuaccaggga

SEQ ID NO: 584191 - RNA, 19 nt, Artificial Sequence
  Description of Artificial Sequence: Synthetic oligonucleotide
ugugugugugugugugugu

SEQ ID NO: 584192 - RNA, 19 nt, Artificial Sequence
  Description of Artificial Sequence: Synthetic oligonucleotide
cagccuagggaauggccag

SEQ ID NO: 584193 - RNA, 19 nt, Artificial Sequence
  Description of Artificial Sequence: Synthetic oligonucleotide
ugugugugugugugugaga

SEQ ID NO: 584194 - RNA, 19 nt, Artificial Sequence
  Description of Artificial Sequence: Synthetic oligonucleotide
ugugugugugugugagaga

SEQ ID NO: 584195 - RNA, 19 nt, Artificial Sequence
  Description of Artificial Sequence: Synthetic oligonucleotide
uacgguugucauggauucg

SEQ ID NO: 584196 - RNA, 19 nt, Artificial Sequence
  Description of Artificial Sequence: Synthetic oligonucleotide
ggcaugaaccaaugcaaac

SEQ ID NO: 584197 - RNA, 19 nt, Artificial Sequence
  Description of Artificial Sequence: Synthetic oligonucleotide
gugugagagaauccagguc

SEQ ID NO: 584198 - RNA, 19 nt, Artificial Sequence
  Description of Artificial Sequence: Synthetic oligonucleotide
agguauggcccaagagagc

SEQ ID NO: 584199 - RNA, 19 nt, Artificial Sequence
  Description of Artificial Sequence: Synthetic oligonucleotide
gugugugugugugugugug

SEQ ID NO: 584200 - RNA, 19 nt, Artificial Sequence
  Description of Artificial Sequence: Synthetic oligonucleotide
agugugugugugugugugu

SEQ ID NO: 584201 - RNA, 19 nt, Artificial Sequence
  Description of Artificial Sequence: Synthetic oligonucleotide
gauacgguugucauggauu

SEQ ID NO: 584202 - RNA, 19 nt, Artificial Sequence
  Description of Artificial Sequence: Synthetic oligonucleotide
gucguuuguccuucgggca

SEQ ID NO: 584203 - RNA, 19 nt, Artificial Sequence
  Description of Artificial Sequence: Synthetic oligonucleotide
uggccuaagccaagccugu

SEQ ID NO: 584204 - RNA, 19 nt, Artificial Sequence
  Description of Artificial Sequence: Synthetic oligonucleotide
uacaaggaccaaggcauaa

SEQ ID NO: 584205 - RNA, 19 nt, Artificial Sequence
  Description of Artificial Sequence: Synthetic oligonucleotide
ucucguaggguaggcagaa

SEQ ID NO: 584206 - RNA, 19 nt, Artificial Sequence
  Description of Artificial Sequence: Synthetic oligonucleotide
uguuucggaguccgcugaa

SEQ ID NO: 584207 - RNA, 19 nt, Artificial Sequence
  Description of Artificial Sequence: Synthetic oligonucleotide
agagagagagagauagaaa

SEQ ID NO: 584208 - RNA, 19 nt, Artificial Sequence
  Description of Artificial Sequence: Synthetic oligonucleotide
aguggaguucucguagggu

SEQ ID NO: 584209 - RNA, 19 nt, Artificial Sequence
  Description of Artificial Sequence: Synthetic oligonucleotide
aguagcgaaguagguccuc

SEQ ID NO: 584210 - RNA, 19 nt, Artificial Sequence
  Description of Artificial Sequence: Synthetic oligonucleotide
gggcuaggaagcuuacugc

SEQ ID NO: 584211 - RNA, 19 nt, Artificial Sequence
  Description of Artificial Sequence: Synthetic oligonucleotide
ucaggccaucaaaggcucc

SEQ ID NO: 584212 - RNA, 19 nt, Artificial Sequence
  Description of Artificial Sequence: Synthetic oligonucleotide
cagugugugugugugugug

SEQ ID NO: 584213 - RNA, 19 nt, Artificial Sequence
  Description of Artificial Sequence: Synthetic oligonucleotide
gugacgcagcggaaggugg

SEQ ID NO: 584214 - RNA, 19 nt, Artificial Sequence
  Description of Artificial Sequence: Synthetic oligonucleotide
uggccagugugugugugug

SEQ ID NO: 584215 - RNA, 19 nt, Artificial Sequence
  Description of Artificial Sequence: Synthetic oligonucleotide
ugguucaaagccgcuguuc

SEQ ID NO: 584216 - RNA, 19 nt, Artificial Sequence
  Description of Artificial Sequence: Synthetic oligonucleotide
agauuuguuugugcaggga

SEQ ID NO: 584217 - RNA, 19 nt, Artificial Sequence
  Description of Artificial Sequence: Synthetic oligonucleotide
guggugucaggugagaucu

SEQ ID NO: 584218 - RNA, 19 nt, Artificial Sequence
  Description of Artificial Sequence: Synthetic oligonucleotide
gcaaucagggagauaguug

SEQ ID NO: 584219 - RNA, 19 nt, Artificial Sequence
  Description of Artificial Sequence: Synthetic oligonucleotide
ucucaaucauccggaucug

SEQ ID NO: 584220 - RNA, 19 nt, Artificial Sequence
  Description of Artificial Sequence: Synthetic oligonucleotide
ggacccagaggugagggag

SEQ ID NO: 584221 - RNA, 19 nt, Artificial Sequence
  Description of Artificial Sequence: Synthetic oligonucleotide
ccuuuuguucaaagggcag

SEQ ID NO: 584222 - RNA, 19 nt, Artificial Sequence
  Description of Artificial Sequence: Synthetic oligonucleotide
uaguugaguuucaggccau

SEQ ID NO: 584223 - RNA, 19 nt, Artificial Sequence
  Description of Artificial Sequence: Synthetic oligonucleotide
ggacagguagugaacuugc

SEQ ID NO: 584224 - RNA, 19 nt, Artificial Sequence
  Description of Artificial Sequence: Synthetic oligonucleotide
gugaguagccacaggggac

SEQ ID NO: 584225 - RNA, 19 nt, Artificial Sequence
  Description of Artificial Sequence: Synthetic oligonucleotide
ggugucaggugagaucucc

SEQ ID NO: 584226 - RNA, 19 nt, Artificial Sequence
  Description of Artificial Sequence: Synthetic oligonucleotide
ugcugucguuuguccuucg

SEQ ID NO: 584227 - RNA, 19 nt, Artificial Sequence
  Description of Artificial Sequence: Synthetic oligonucleotide
ggagaucuuauuguuuaca

SEQ ID NO: 584228 - RNA, 19 nt, Artificial Sequence
  Description of Artificial Sequence: Synthetic oligonucleotide
auggccagugugugugugu

SEQ ID NO: 584229 - RNA, 19 nt, Artificial Sequence
  Description of Artificial Sequence: Synthetic oligonucleotide
gcccuuuuguucaaagggc

SEQ ID NO: 584230 - RNA, 19 nt, Artificial Sequence
  Description of Artificial Sequence: Synthetic oligonucleotide
gggcacuuuucggauacgg

SEQ ID NO: 584231 - RNA, 19 nt, Artificial Sequence
  Description of Artificial Sequence: Synthetic oligonucleotide
accccuaccacagcaggga

SEQ ID NO: 584232 - RNA, 19 nt, Artificial Sequence
  Description of Artificial Sequence: Synthetic oligonucleotide
ggaguucucguaggguagg

SEQ ID NO: 584233 - RNA, 19 nt, Artificial Sequence
  Description of Artificial Sequence: Synthetic oligonucleotide
acaggggacucauggugaa

SEQ ID NO: 584234 - RNA, 19 nt, Artificial Sequence
  Description of Artificial Sequence: Synthetic oligonucleotide
aguucucguaggguaggca

SEQ ID NO: 584235 - RNA, 19 nt, Artificial Sequence
  Description of Artificial Sequence: Synthetic oligonucleotide
uccaggggauuaccaccca

SEQ ID NO: 584236 - RNA, 19 nt, Artificial Sequence
  Description of Artificial Sequence: Synthetic oligonucleotide
cuucccaguagggcacagg

SEQ ID NO: 584237 - RNA, 19 nt, Artificial Sequence
  Description of Artificial Sequence: Synthetic oligonucleotide
gagggcuaaaggccuucuc

SEQ ID NO: 584238 - RNA, 19 nt, Artificial Sequence
  Description of Artificial Sequence: Synthetic oligonucleotide
aaagcccauggggcagaag

SEQ ID NO: 584239 - RNA, 19 nt, Artificial Sequence
  Description of Artificial Sequence: Synthetic oligonucleotide
agagagagagagagagaga

SEQ ID NO: 584240 - RNA, 19 nt, Artificial Sequence
  Description of Artificial Sequence: Synthetic oligonucleotide
cucaaucgccuggauuuug

SEQ ID NO: 584241 - RNA, 19 nt, Artificial Sequence
  Description of Artificial Sequence: Synthetic oligonucleotide
cugcuuaguugguggugug

SEQ ID NO: 584242 - RNA, 19 nt, Artificial Sequence
  Description of Artificial Sequence: Synthetic oligonucleotide
gugcuacugugcugugucc

SEQ ID NO: 584243 - RNA, 19 nt, Artificial Sequence
  Description of Artificial Sequence: Synthetic oligonucleotide
gcugucguuuguccuucgg

SEQ ID NO: 584244 - RNA, 19 nt, Artificial Sequence
  Description of Artificial Sequence: Synthetic oligonucleotide
agcuuagaguagcgaagua

SEQ ID NO: 584245 - RNA, 19 nt, Artificial Sequence
  Description of Artificial Sequence: Synthetic oligonucleotide
gguauggcccaagagagcu

SEQ ID NO: 584246 - RNA, 19 nt, Artificial Sequence
  Description of Artificial Sequence: Synthetic oligonucleotide
caggucggggacaccugag

SEQ ID NO: 584247 - RNA, 19 nt, Artificial Sequence
  Description of Artificial Sequence: Synthetic oligonucleotide
agagagagagagagauaga

SEQ ID NO: 584248 - RNA, 19 nt, Artificial Sequence
  Description of Artificial Sequence: Synthetic oligonucleotide
uaacgcagauaggguguca

SEQ ID NO: 584249 - RNA, 19 nt, Artificial Sequence
  Description of Artificial Sequence: Synthetic oligonucleotide
ggaccuagccauauuggga

SEQ ID NO: 584250 - RNA, 19 nt, Artificial Sequence
  Description of Artificial Sequence: Synthetic oligonucleotide
ugggcacuuuucggauacg

SEQ ID NO: 584251 - RNA, 19 nt, Artificial Sequence
  Description of Artificial Sequence: Synthetic oligonucleotide
guacagcuuagaguagcga

SEQ ID NO: 584252 - RNA, 19 nt, Artificial Sequence
  Description of Artificial Sequence: Synthetic oligonucleotide
gccagugugugugugugug

SEQ ID NO: 584253 - RNA, 19 nt, Artificial Sequence
  Description of Artificial Sequence: Synthetic oligonucleotide
gccuaagccaagccuguac

SEQ ID NO: 584254 - RNA, 19 nt, Artificial Sequence
  Description of Artificial Sequence: Synthetic oligonucleotide
uagagggcuaaaggccuuc

SEQ ID NO: 584255 - RNA, 19 nt, Artificial Sequence
  Description of Artificial Sequence: Synthetic oligonucleotide
uggcccaagagagcuggaa

SEQ ID NO: 584256 - RNA, 19 nt, Artificial Sequence
  Description of Artificial Sequence: Synthetic oligonucleotide
ggcuaggaagcuuacugcu

SEQ ID NO: 584257 - RNA, 19 nt, Artificial Sequence
  Description of Artificial Sequence: Synthetic oligonucleotide
gaacuugcaccaaggccaa

SEQ ID NO: 584258 - RNA, 19 nt, Artificial Sequence
  Description of Artificial Sequence: Synthetic oligonucleotide
ccuaagccaagccuguaca

SEQ ID NO: 584259 - RNA, 19 nt, Artificial Sequence
  Description of Artificial Sequence: Synthetic oligonucleotide
ggccaugugcauaugugca

SEQ ID NO: 584260 - RNA, 19 nt, Artificial Sequence
  Description of Artificial Sequence: Synthetic oligonucleotide
ggagucuuugaguggauau

SEQ ID NO: 584261 - RNA, 19 nt, Artificial Sequence
  Description of Artificial Sequence: Synthetic oligonucleotide
aguccgcugaauacacccu

SEQ ID NO: 584262 - RNA, 19 nt, Artificial Sequence
  Description of Artificial Sequence: Synthetic oligonucleotide
acuacugcuuuuacuucuu

SEQ ID NO: 584263 - RNA, 19 nt, Artificial Sequence
  Description of Artificial Sequence: Synthetic oligonucleotide
ccgcugaauacacccuugg

SEQ ID NO: 584264 - RNA, 19 nt, Artificial Sequence
  Description of Artificial Sequence: Synthetic oligonucleotide
agagggaccuagccauauu

SEQ ID NO: 584265 - RNA, 19 nt, Artificial Sequence
  Description of Artificial Sequence: Synthetic oligonucleotide
aagguaggugugagagaau

SEQ ID NO: 584266 - RNA, 19 nt, Artificial Sequence
  Description of Artificial Sequence: Synthetic oligonucleotide
gccaaccgggagcagcugc

SEQ ID NO: 584267 - RNA, 19 nt, Artificial Sequence
  Description of Artificial Sequence: Synthetic oligonucleotide
gaaccaaugcaaacugguu

SEQ ID NO: 584268 - RNA, 19 nt, Artificial Sequence
  Description of Artificial Sequence: Synthetic oligonucleotide
gcacuuuucggauacgguu

SEQ ID NO: 584269 - RNA, 19 nt, Artificial Sequence
  Description of Artificial Sequence: Synthetic oligonucleotide
auaugguaggugaguguua

SEQ ID NO: 584270 - RNA, 19 nt, Artificial Sequence
  Description of Artificial Sequence: Synthetic oligonucleotide
guauggcccaagagagcug

SEQ ID NO: 584271 - RNA, 19 nt, Artificial Sequence
  Description of Artificial Sequence: Synthetic oligonucleotide
agucguugaugcccaccuu

SEQ ID NO: 584272 - RNA, 19 nt, Artificial Sequence
  Description of Artificial Sequence: Synthetic oligonucleotide
caagugcugggcagggcaa

SEQ ID NO: 584273 - RNA, 19 nt, Artificial Sequence
  Description of Artificial Sequence: Synthetic oligonucleotide
agagagagagagagagaua

SEQ ID NO: 584274 - RNA, 19 nt, Artificial Sequence
  Description of Artificial Sequence: Synthetic oligonucleotide
ugauggcaucuggcuaugu

SEQ ID NO: 584275 - RNA, 19 nt, Artificial Sequence
  Description of Artificial Sequence: Synthetic oligonucleotide
uggugucaggugagaucuc

SEQ ID NO: 584276 - RNA, 19 nt, Artificial Sequence
  Description of Artificial Sequence: Synthetic oligonucleotide
cugcugucguuuguccuuc

SEQ ID NO: 584277 - RNA, 19 nt, Artificial Sequence
  Description of Artificial Sequence: Synthetic oligonucleotide
cuccuaacgcagauagggu

SEQ ID NO: 584278 - RNA, 19 nt, Artificial Sequence
  Description of Artificial Sequence: Synthetic oligonucleotide
caaucauccggaucugguu

SEQ ID NO: 584279 - RNA, 19 nt, Artificial Sequence
  Description of Artificial Sequence: Synthetic oligonucleotide
cuuucggagcucagagaua

SEQ ID NO: 584280 - RNA, 19 nt, Artificial Sequence
  Description of Artificial Sequence: Synthetic oligonucleotide
ggauaugguaggugagugu

SEQ ID NO: 584281 - RNA, 19 nt, Artificial Sequence
  Description of Artificial Sequence: Synthetic oligonucleotide
ccaaggcauaaagaugcug

SEQ ID NO: 584282 - RNA, 19 nt, Artificial Sequence
  Description of Artificial Sequence: Synthetic oligonucleotide
gcuaggaagcuuacugcuc

SEQ ID NO: 584283 - RNA, 19 nt, Artificial Sequence
  Description of Artificial Sequence: Synthetic oligonucleotide
caccaugguggcuacuacu

SEQ ID NO: 584284 - RNA, 19 nt, Artificial Sequence
  Description of Artificial Sequence: Synthetic oligonucleotide
gccauuauaguaggcccuc

SEQ ID NO: 584285 - RNA, 19 nt, Artificial Sequence
  Description of Artificial Sequence: Synthetic oligonucleotide
aacugcucaccaaccccua

SEQ ID NO: 584286 - RNA, 19 nt, Artificial Sequence
  Description of Artificial Sequence: Synthetic oligonucleotide
cacccgggacagcuuguug

SEQ ID NO: 584287 - RNA, 19 nt, Artificial Sequence
  Description of Artificial Sequence: Synthetic oligonucleotide
ggcuacuacugcuuuuacu

SEQ ID NO: 584288 - RNA, 19 nt, Artificial Sequence
  Description of Artificial Sequence: Synthetic oligonucleotide
acucaaucgccuggauuuu

SEQ ID NO: 584289 - RNA, 19 nt, Artificial Sequence
  Description of Artificial Sequence: Synthetic oligonucleotide
cagcuuagaguagcgaagu

SEQ ID NO: 584290 - RNA, 19 nt, Artificial Sequence
  Description of Artificial Sequence: Synthetic oligonucleotide
ccaagagagcuggaaaaca

SEQ ID NO: 584291 - RNA, 19 nt, Artificial Sequence
  Description of Artificial Sequence: Synthetic oligonucleotide
gguuguggccuaagccaag

SEQ ID NO: 584292 - RNA, 19 nt, Artificial Sequence
  Description of Artificial Sequence: Synthetic oligonucleotide
cauuauaguaggcccucuu

SEQ ID NO: 584293 - RNA, 19 nt, Artificial Sequence
  Description of Artificial Sequence: Synthetic oligonucleotide
ggcagggcaaucagggaga

SEQ ID NO: 584294 - RNA, 19 nt, Artificial Sequence
  Description of Artificial Sequence: Synthetic oligonucleotide
ggcugcuuaguugguggug

SEQ ID NO: 584295 - RNA, 19 nt, Artificial Sequence
  Description of Artificial Sequence: Synthetic oligonucleotide
agccuagggaauggccagu

SEQ ID NO: 584296 - RNA, 19 nt, Artificial Sequence
  Description of Artificial Sequence: Synthetic oligonucleotide
cuacugcuuuuacuucuua

SEQ ID NO: 584297 - RNA, 19 nt, Artificial Sequence
  Description of Artificial Sequence: Synthetic oligonucleotide
caacucaaucgccuggauu

SEQ ID NO: 584298 - RNA, 19 nt, Artificial Sequence
  Description of Artificial Sequence: Synthetic oligonucleotide
gucuuugaguggauauggu

SEQ ID NO: 584299 - RNA, 19 nt, Artificial Sequence
  Description of Artificial Sequence: Synthetic oligonucleotide
ggugaguguuaaaucucaa

SEQ ID NO: 584300 - RNA, 19 nt, Artificial Sequence
  Description of Artificial Sequence: Synthetic oligonucleotide
gggugucagaauggacaag

SEQ ID NO: 584301 - RNA, 19 nt, Artificial Sequence
  Description of Artificial Sequence: Synthetic oligonucleotide
ggaguccgcugaauacacc

SEQ ID NO: 584302 - RNA, 19 nt, Artificial Sequence
  Description of Artificial Sequence: Synthetic oligonucleotide
gcagccgaaaggacacaug

SEQ ID NO: 584303 - RNA, 19 nt, Artificial Sequence
  Description of Artificial Sequence: Synthetic oligonucleotide
cggaguccgcugaauacac

SEQ ID NO: 584304 - RNA, 19 nt, Artificial Sequence
  Description of Artificial Sequence: Synthetic oligonucleotide
guaggcccucuugacucca

SEQ ID NO: 584305 - RNA, 19 nt, Artificial Sequence
  Description of Artificial Sequence: Synthetic oligonucleotide
gguagugaacuugcaccaa

SEQ ID NO: 584306 - RNA, 19 nt, Artificial Sequence
  Description of Artificial Sequence: Synthetic oligonucleotide
ccaaugcaaacugguucug

SEQ ID NO: 584307 - RNA, 19 nt, Artificial Sequence
  Description of Artificial Sequence: Synthetic oligonucleotide
guccgcugaauacacccuu

SEQ ID NO: 584308 - RNA, 19 nt, Artificial Sequence
  Description of Artificial Sequence: Synthetic oligonucleotide
gcggucagugacgcagcgg

SEQ ID NO: 584309 - RNA, 19 nt, Artificial Sequence
  Description of Artificial Sequence: Synthetic oligonucleotide
ccaccaugguggcuacuac

SEQ ID NO: 584310 - RNA, 19 nt, Artificial Sequence
  Description of Artificial Sequence: Synthetic oligonucleotide
ggauuuauagggagucuuu

SEQ ID NO: 584311 - RNA, 19 nt, Artificial Sequence
  Description of Artificial Sequence: Synthetic oligonucleotide
gacgcagcggaagguggcu

SEQ ID NO: 584312 - RNA, 19 nt, Artificial Sequence
  Description of Artificial Sequence: Synthetic oligonucleotide
gcaucaugagcagcccauc

SEQ ID NO: 584313 - RNA, 19 nt, Artificial Sequence
  Description of Artificial Sequence: Synthetic oligonucleotide
ggagagggcaugaaccaau

SEQ ID NO: 584314 - RNA, 19 nt, Artificial Sequence
  Description of Artificial Sequence: Synthetic oligonucleotide
gggugcaacugcucaccaa

SEQ ID NO: 584315 - RNA, 19 nt, Artificial Sequence
  Description of Artificial Sequence: Synthetic oligonucleotide
ggcacuuuucggauacggu

SEQ ID NO: 584316 - RNA, 19 nt, Artificial Sequence
  Description of Artificial Sequence: Synthetic oligonucleotide
gucuagcagugugguguca

SEQ ID NO: 584317 - RNA, 19 nt, Artificial Sequence
  Description of Artificial Sequence: Synthetic oligonucleotide
caguagggcacaggguugu

SEQ ID NO: 584318 - RNA, 19 nt, Artificial Sequence
  Description of Artificial Sequence: Synthetic oligonucleotide
caaucgccuggauuuuguu

SEQ ID NO: 584319 - RNA, 19 nt, Artificial Sequence
  Description of Artificial Sequence: Synthetic oligonucleotide
caugaaucuuggagaucuu

SEQ ID NO: 584320 - RNA, 19 nt, Artificial Sequence
  Description of Artificial Sequence: Synthetic oligonucleotide
guuucggaguccgcugaau

SEQ ID NO: 584321 - RNA, 19 nt, Artificial Sequence
  Description of Artificial Sequence: Synthetic oligonucleotide
ccccuaccacagcagggac

SEQ ID NO: 584322 - RNA, 19 nt, Artificial Sequence
  Description of Artificial Sequence: Synthetic oligonucleotide
gggagucuuugaguggaua

SEQ ID NO: 584323 - RNA, 19 nt, Artificial Sequence
  Description of Artificial Sequence: Synthetic oligonucleotide
ccaggucggggacaccuga

SEQ ID NO: 584324 - RNA, 19 nt, Artificial Sequence
  Description of Artificial Sequence: Synthetic oligonucleotide
cucguaggguaggcagaaa

SEQ ID NO: 584325 - RNA, 19 nt, Artificial Sequence
  Description of Artificial Sequence: Synthetic oligonucleotide
ugcccaccuuggugauauu

SEQ ID NO: 584326 - RNA, 19 nt, Artificial Sequence
  Description of Artificial Sequence: Synthetic oligonucleotide
cagugacgcagcggaaggu

SEQ ID NO: 584327 - RNA, 19 nt, Artificial Sequence
  Description of Artificial Sequence: Synthetic oligonucleotide
gcuuccguagagggcuaaa

SEQ ID NO: 584328 - RNA, 19 nt, Artificial Sequence
  Description of Artificial Sequence: Synthetic oligonucleotide
ggccaaccgggagcagcug

SEQ ID NO: 584329 - RNA, 19 nt, Artificial Sequence
  Description of Artificial Sequence: Synthetic oligonucleotide
gggacucauggugaauguu

SEQ ID NO: 584330 - RNA, 19 nt, Artificial Sequence
  Description of Artificial Sequence: Synthetic oligonucleotide
ggccagugugugugugugu

SEQ ID NO: 584331 - RNA, 19 nt, Artificial Sequence
  Description of Artificial Sequence: Synthetic oligonucleotide
ccagugugugugugugugu

SEQ ID NO: 584332 - RNA, 19 nt, Artificial Sequence
  Description of Artificial Sequence: Synthetic oligonucleotide
ccuagggaauggccagugu

SEQ ID NO: 584333 - RNA, 19 nt, Artificial Sequence
  Description of Artificial Sequence: Synthetic oligonucleotide
ggccuaagccaagccugua

SEQ ID NO: 584334 - RNA, 19 nt, Artificial Sequence
  Description of Artificial Sequence: Synthetic oligonucleotide
ccauuauaguaggcccucu

SEQ ID NO: 584335 - RNA, 19 nt, Artificial Sequence
  Description of Artificial Sequence: Synthetic oligonucleotide
gggcaaucagggagauagu

SEQ ID NO: 584336 - RNA, 19 nt, Artificial Sequence
  Description of Artificial Sequence: Synthetic oligonucleotide
caggggacucauggugaau

SEQ ID NO: 584337 - RNA, 19 nt, Artificial Sequence
  Description of Artificial Sequence: Synthetic oligonucleotide
uuuaauuacuaucaaauag

SEQ ID NO: 584338 - RNA, 19 nt, Artificial Sequence
  Description of Artificial Sequence: Synthetic oligonucleotide
uguacuauuggucagauaa

SEQ ID NO: 584339 - RNA, 19 nt, Artificial Sequence
  Description of Artificial Sequence: Synthetic oligonucleotide
uaaauaaucgggcaaaagc

SEQ ID NO: 584340 - RNA, 19 nt, Artificial Sequence
  Description of Artificial Sequence: Synthetic oligonucleotide
aacgcuguuacacugaaag

SEQ ID NO: 584341 - RNA, 19 nt, Artificial Sequence
  Description of Artificial Sequence: Synthetic oligonucleotide
aauggaaugcuuuacuauc

SEQ ID NO: 584342 - RNA, 19 nt, Artificial Sequence
  Description of Artificial Sequence: Synthetic oligonucleotide
ugucauucauguaaaauag

SEQ ID NO: 584343 - RNA, 19 nt, Artificial Sequence
  Description of Artificial Sequence: Synthetic oligonucleotide
ucuaaguuggaaauuauuc

SEQ ID NO: 584344 - RNA, 19 nt, Artificial Sequence
  Description of Artificial Sequence: Synthetic oligonucleotide
uggauuggaacgcugauag

SEQ ID NO: 584345 - RNA, 19 nt, Artificial Sequence
  Description of Artificial Sequence: Synthetic oligonucleotide
acuaaaagaaagguguacc

SEQ ID NO: 584346 - RNA, 19 nt, Artificial Sequence
  Description of Artificial Sequence: Synthetic oligonucleotide
aauaaucgggcaaaagccc

SEQ ID NO: 584347 - RNA, 19 nt, Artificial Sequence
  Description of Artificial Sequence: Synthetic oligonucleotide
aagaaaagucaacugaaca

SEQ ID NO: 584348 - RNA, 19 nt, Artificial Sequence
  Description of Artificial Sequence: Synthetic oligonucleotide
cuguguaacacccaguugg

SEQ ID NO: 584349 - RNA, 19 nt, Artificial Sequence
  Description of Artificial Sequence: Synthetic oligonucleotide
aggugaauuaaauaaucgg

SEQ ID NO: 584350 - RNA, 19 nt, Artificial Sequence
  Description of Artificial Sequence: Synthetic oligonucleotide
ugaaucaacccacugauaa

SEQ ID NO: 584351 - RNA, 19 nt, Artificial Sequence
  Description of Artificial Sequence: Synthetic oligonucleotide
uauaaugucgugcuccaag

SEQ ID NO: 584352 - RNA, 19 nt, Artificial Sequence
  Description of Artificial Sequence: Synthetic oligonucleotide
agguaauucgcuuuauugg

SEQ ID NO: 584353 - RNA, 19 nt, Artificial Sequence
  Description of Artificial Sequence: Synthetic oligonucleotide
auaucaauugcuuugguau

SEQ ID NO: 584354 - RNA, 19 nt, Artificial Sequence
  Description of Artificial Sequence: Synthetic oligonucleotide
aauagcagcuuuaagacca

SEQ ID NO: 584355 - RNA, 19 nt, Artificial Sequence
  Description of Artificial Sequence: Synthetic oligonucleotide
ucagguuuaacuuuaugcu

SEQ ID NO: 584356 - RNA, 19 nt, Artificial Sequence
  Description of Artificial Sequence: Synthetic oligonucleotide
uuauucagaauacuugugu

SEQ ID NO: 584357 - RNA, 19 nt, Artificial Sequence
  Description of Artificial Sequence: Synthetic oligonucleotide
gucaguagaaacuaugcag

SEQ ID NO: 584358 - RNA, 19 nt, Artificial Sequence
  Description of Artificial Sequence: Synthetic oligonucleotide
uugauaaggcugcaguugg

SEQ ID NO: 584359 - RNA, 19 nt, Artificial Sequence
  Description of Artificial Sequence: Synthetic oligonucleotide
uguagaugaugaaucaacc

SEQ ID NO: 584360 - RNA, 19 nt, Artificial Sequence
  Description of Artificial Sequence: Synthetic oligonucleotide
uuugcugaaccaaacaggu

SEQ ID NO: 584361 - RNA, 19 nt, Artificial Sequence
  Description of Artificial Sequence: Synthetic oligonucleotide
acagguuuauaucaaugac

SEQ ID NO: 584362 - RNA, 19 nt, Artificial Sequence
  Description of Artificial Sequence: Synthetic oligonucleotide
aaaucagcaacaccaacga

SEQ ID NO: 584363 - RNA, 19 nt, Artificial Sequence
  Description of Artificial Sequence: Synthetic oligonucleotide
aauaaaacacugucuguga

SEQ ID NO: 584364 - RNA, 19 nt, Artificial Sequence
  Description of Artificial Sequence: Synthetic oligonucleotide
uuugguauaaugucgugcu

SEQ ID NO: 584365 - RNA, 19 nt, Artificial Sequence
  Description of Artificial Sequence: Synthetic oligonucleotide
ucugaaaccugucaguaga

SEQ ID NO: 584366 - RNA, 19 nt, Artificial Sequence
  Description of Artificial Sequence: Synthetic oligonucleotide
accaguuaaaccuuacguc

SEQ ID NO: 584367 - RNA, 19 nt, Artificial Sequence
  Description of Artificial Sequence: Synthetic oligonucleotide
aaaccgacgacacaacugu

SEQ ID NO: 584368 - RNA, 19 nt, Artificial Sequence
  Description of Artificial Sequence: Synthetic oligonucleotide
uuuauuggguccauaguga

SEQ ID NO: 584369 - RNA, 19 nt, Artificial Sequence
  Description of Artificial Sequence: Synthetic oligonucleotide
ugucaaguaaacuauggaa

SEQ ID NO: 584370 - RNA, 19 nt, Artificial Sequence
  Description of Artificial Sequence: Synthetic oligonucleotide
uaagggaucugacaaccgg

SEQ ID NO: 584371 - RNA, 19 nt, Artificial Sequence
  Description of Artificial Sequence: Synthetic oligonucleotide
auauacuugauaaggcugc

SEQ ID NO: 584372 - RNA, 19 nt, Artificial Sequence
  Description of Artificial Sequence: Synthetic oligonucleotide
uacguuguauguuauagcu

SEQ ID NO: 584373 - RNA, 19 nt, Artificial Sequence
  Description of Artificial Sequence: Synthetic oligonucleotide
ugggauaagcagcaugugg

SEQ ID NO: 584374 - RNA, 19 nt, Artificial Sequence
  Description of Artificial Sequence: Synthetic oligonucleotide
uaauguugaauguucgggc

SEQ ID NO: 584375 - RNA, 19 nt, Artificial Sequence
  Description of Artificial Sequence: Synthetic oligonucleotide
aaacuuagguacaaccugg

SEQ ID NO: 584376 - RNA, 19 nt, Artificial Sequence
  Description of Artificial Sequence: Synthetic oligonucleotide
ugaaaacuaugcuugguca

SEQ ID NO: 584377 - RNA, 19 nt, Artificial Sequence
  Description of Artificial Sequence: Synthetic oligonucleotide
uuacuaucaaauagcagcu

SEQ ID NO: 584378 - RNA, 19 nt, Artificial Sequence
  Description of Artificial Sequence: Synthetic oligonucleotide
ggugaauuaaauaaucggg

SEQ ID NO: 584379 - RNA, 19 nt, Artificial Sequence
  Description of Artificial Sequence: Synthetic oligonucleotide
uuuuacucuuccucgcucg

SEQ ID NO: 584380 - RNA, 19 nt, Artificial Sequence
  Description of Artificial Sequence: Synthetic oligonucleotide
aaacuaugcaguucuuuug

SEQ ID NO: 584381 - RNA, 19 nt, Artificial Sequence
  Description of Artificial Sequence: Synthetic oligonucleotide
uccauauacuugauaaggc

SEQ ID NO: 584382 - RNA, 19 nt, Artificial Sequence
  Description of Artificial Sequence: Synthetic oligonucleotide
aaacuucuaaguuggaaau

SEQ ID NO: 584383 - RNA, 19 nt, Artificial Sequence
  Description of Artificial Sequence: Synthetic oligonucleotide
aacuauggaaguagcaaac

SEQ ID NO: 584384 - RNA, 19 nt, Artificial Sequence
  Description of Artificial Sequence: Synthetic oligonucleotide
uaccaguuaaaccuuacgu

SEQ ID NO: 584385 - RNA, 19 nt, Artificial Sequence
  Description of Artificial Sequence: Synthetic oligonucleotide
ugauacaguacguuguaug

SEQ ID NO: 584386 - RNA, 19 nt, Artificial Sequence
  Description of Artificial Sequence: Synthetic oligonucleotide
aauugcuuugguauaaugu

SEQ ID NO: 584387 - RNA, 19 nt, Artificial Sequence
  Description of Artificial Sequence: Synthetic oligonucleotide
auaaugucgugcuccaagg

SEQ ID NO: 584388 - RNA, 19 nt, Artificial Sequence
  Description of Artificial Sequence: Synthetic oligonucleotide
gaauguuacaaccacugga

SEQ ID NO: 584389 - RNA, 19 nt, Artificial Sequence
  Description of Artificial Sequence: Synthetic oligonucleotide
ggaaauuauucuuugggag

SEQ ID NO: 584390 - RNA, 19 nt, Artificial Sequence
  Description of Artificial Sequence: Synthetic oligonucleotide
uaaagagcacuauacuacc

SEQ ID NO: 584391 - RNA, 19 nt, Artificial Sequence
  Description of Artificial Sequence: Synthetic oligonucleotide
uaaaccuuacgucuugugu

SEQ ID NO: 584392 - RNA, 19 nt, Artificial Sequence
  Description of Artificial Sequence: Synthetic oligonucleotide
agggaaucccauuacauug

SEQ ID NO: 584393 - RNA, 19 nt, Artificial Sequence
  Description of Artificial Sequence: Synthetic oligonucleotide
uuggcuauuggacauugug

SEQ ID NO: 584394 - RNA, 19 nt, Artificial Sequence
  Description of Artificial Sequence: Synthetic oligonucleotide
uggaaauuauucuuuggga

SEQ ID NO: 584395 - RNA, 19 nt, Artificial Sequence
  Description of Artificial Sequence: Synthetic oligonucleotide
ucgacagugaaauauuggu

SEQ ID NO: 584396 - RNA, 19 nt, Artificial Sequence
  Description of Artificial Sequence: Synthetic oligonucleotide
aguacguuguauguuauag

SEQ ID NO: 584397 - RNA, 19 nt, Artificial Sequence
  Description of Artificial Sequence: Synthetic oligonucleotide
ugcuaaaggcuucaaaggu

SEQ ID NO: 584398 - RNA, 19 nt, Artificial Sequence
  Description of Artificial Sequence: Synthetic oligonucleotide
auccaagcgauauucuugg

SEQ ID NO: 584399 - RNA, 19 nt, Artificial Sequence
  Description of Artificial Sequence: Synthetic oligonucleotide
aaucaacccacugauaaga

SEQ ID NO: 584400 - RNA, 19 nt, Artificial Sequence
  Description of Artificial Sequence: Synthetic oligonucleotide
aacgcugauagucggaggu

SEQ ID NO: 584401 - RNA, 19 nt, Artificial Sequence
  Description of Artificial Sequence: Synthetic oligonucleotide
ugugcuagcacuuucuuuu

SEQ ID NO: 584402 - RNA, 19 nt, Artificial Sequence
  Description of Artificial Sequence: Synthetic oligonucleotide
ugguuguacaguacauucg

SEQ ID NO: 584403 - RNA, 19 nt, Artificial Sequence
  Description of Artificial Sequence: Synthetic oligonucleotide
aggguuacuaguuuugaug

SEQ ID NO: 584404 - RNA, 19 nt, Artificial Sequence
  Description of Artificial Sequence: Synthetic oligonucleotide
ugcugaaccaaacagguuu

SEQ ID NO: 584405 - RNA, 19 nt, Artificial Sequence
  Description of Artificial Sequence: Synthetic oligonucleotide
uuguguguacuauugguca

SEQ ID NO: 584406 - RNA, 19 nt, Artificial Sequence
  Description of Artificial Sequence: Synthetic oligonucleotide
aagagcacuauacuaccca

SEQ ID NO: 584407 - RNA, 19 nt, Artificial Sequence
  Description of Artificial Sequence: Synthetic oligonucleotide
uacguauuucuucugaaau

SEQ ID NO: 584408 - RNA, 19 nt, Artificial Sequence
  Description of Artificial Sequence: Synthetic oligonucleotide
cagaauguuacaaccacug

SEQ ID NO: 584409 - RNA, 19 nt, Artificial Sequence
  Description of Artificial Sequence: Synthetic oligonucleotide
uaugcaguucuuuuguacu

SEQ ID NO: 584410 - RNA, 19 nt, Artificial Sequence
  Description of Artificial Sequence: Synthetic oligonucleotide
aacuuuaugcuuuuccaua

SEQ ID NO: 584411 - RNA, 19 nt, Artificial Sequence
  Description of Artificial Sequence: Synthetic oligonucleotide
ugaaucccaaucuaggauc

SEQ ID NO: 584412 - RNA, 19 nt, Artificial Sequence
  Description of Artificial Sequence: Synthetic oligonucleotide
gagauagugaaucccaauc

SEQ ID NO: 584413 - RNA, 19 nt, Artificial Sequence
  Description of Artificial Sequence: Synthetic oligonucleotide
aaagagcacuauacuaccc

SEQ ID NO: 584414 - RNA, 19 nt, Artificial Sequence
  Description of Artificial Sequence: Synthetic oligonucleotide
agauagugaaucccaaucu

SEQ ID NO: 584415 - RNA, 19 nt, Artificial Sequence
  Description of Artificial Sequence: Synthetic oligonucleotide
uauuacauaacaccuuguu

SEQ ID NO: 584416 - RNA, 19 nt, Artificial Sequence
  Description of Artificial Sequence: Synthetic oligonucleotide
gacacuaaaagaaaggugu

SEQ ID NO: 584417 - RNA, 19 nt, Artificial Sequence
  Description of Artificial Sequence: Synthetic oligonucleotide
uuauuggguccauagugag

SEQ ID NO: 584418 - RNA, 19 nt, Artificial Sequence
  Description of Artificial Sequence: Synthetic oligonucleotide
ucuuguguguacuauuggu

SEQ ID NO: 584419 - RNA, 19 nt, Artificial Sequence
  Description of Artificial Sequence: Synthetic oligonucleotide
uuaaauaaucgggcaaaag

SEQ ID NO: 584420 - RNA, 19 nt, Artificial Sequence
  Description of Artificial Sequence: Synthetic oligonucleotide
ucggaggucaugaugaguc

SEQ ID NO: 584421 - RNA, 19 nt, Artificial Sequence
  Description of Artificial Sequence: Synthetic oligonucleotide
cugucaguagaaacuaugc

SEQ ID NO: 584422 - RNA, 19 nt, Artificial Sequence
  Description of Artificial Sequence: Synthetic oligonucleotide
gauuggaacgcugauaguc

SEQ ID NO: 584423 - RNA, 19 nt, Artificial Sequence
  Description of Artificial Sequence: Synthetic oligonucleotide
ucaugaugaguccaccuga

SEQ ID NO: 584424 - RNA, 19 nt, Artificial Sequence
  Description of Artificial Sequence: Synthetic oligonucleotide
aaaccugucaguagaaacu

SEQ ID NO: 584425 - RNA, 19 nt, Artificial Sequence
  Description of Artificial Sequence: Synthetic oligonucleotide
guuugcugaaccaaacagg

SEQ ID NO: 584426 - RNA, 19 nt, Artificial Sequence
  Description of Artificial Sequence: Synthetic oligonucleotide
ugguauaaugucgugcucc

SEQ ID NO: 584427 - RNA, 19 nt, Artificial Sequence
  Description of Artificial Sequence: Synthetic oligonucleotide
uuauagcuuuguauuuucc

SEQ ID NO: 584428 - RNA, 19 nt, Artificial Sequence
  Description of Artificial Sequence: Synthetic oligonucleotide
ugagcaacagugcacugac

SEQ ID NO: 584429 - RNA, 19 nt, Artificial Sequence
  Description of Artificial Sequence: Synthetic oligonucleotide
uuacuaucagguuuaacuu

SEQ ID NO: 584430 - RNA, 19 nt, Artificial Sequence
  Description of Artificial Sequence: Synthetic oligonucleotide
agaaagguguaccaaaaua

SEQ ID NO: 584431 - RNA, 19 nt, Artificial Sequence
  Description of Artificial Sequence: Synthetic oligonucleotide
auagugagcaacuucugaa

SEQ ID NO: 584432 - RNA, 19 nt, Artificial Sequence
  Description of Artificial Sequence: Synthetic oligonucleotide
uggcuauuggacauuguga

SEQ ID NO: 584433 - RNA, 19 nt, Artificial Sequence
  Description of Artificial Sequence: Synthetic oligonucleotide
gaaucaacccacugauaag

SEQ ID NO: 584434 - RNA, 19 nt, Artificial Sequence
  Description of Artificial Sequence: Synthetic oligonucleotide
aaacuaugcuuggucaguc

SEQ ID NO: 584435 - RNA, 19 nt, Artificial Sequence
  Description of Artificial Sequence: Synthetic oligonucleotide
uguaacacccaguuggcau

SEQ ID NO: 584436 - RNA, 19 nt, Artificial Sequence
  Description of Artificial Sequence: Synthetic oligonucleotide
agauaacgcuguuacacug

SEQ ID NO: 584437 - RNA, 19 nt, Artificial Sequence
  Description of Artificial Sequence: Synthetic oligonucleotide
auggaaguagcaaaccgac

SEQ ID NO: 584438 - RNA, 19 nt, Artificial Sequence
  Description of Artificial Sequence: Synthetic oligonucleotide
cuuguguguacuauugguc

SEQ ID NO: 584439 - RNA, 19 nt, Artificial Sequence
  Description of Artificial Sequence: Synthetic oligonucleotide
ucucguuugggguaaggga

SEQ ID NO: 584440 - RNA, 19 nt, Artificial Sequence
  Description of Artificial Sequence: Synthetic oligonucleotide
ugucgacagugaaauauug

SEQ ID NO: 584441 - RNA, 19 nt, Artificial Sequence
  Description of Artificial Sequence: Synthetic oligonucleotide
uguguaacacccaguuggc

SEQ ID NO: 584442 - RNA, 19 nt, Artificial Sequence
  Description of Artificial Sequence: Synthetic oligonucleotide
ugcccuagcacauuucaca

SEQ ID NO: 584443 - RNA, 19 nt, Artificial Sequence
  Description of Artificial Sequence: Synthetic oligonucleotide
uggaaguagcaaaccgacg

SEQ ID NO: 584444 - RNA, 19 nt, Artificial Sequence
  Description of Artificial Sequence: Synthetic oligonucleotide
aaaacuaugcuuggucagu

SEQ ID NO: 584445 - RNA, 19 nt, Artificial Sequence
  Description of Artificial Sequence: Synthetic oligonucleotide
aguagaaacuaugcaguuc

SEQ ID NO: 584446 - RNA, 19 nt, Artificial Sequence
  Description of Artificial Sequence: Synthetic oligonucleotide
uguguguacuauuggucag

SEQ ID NO: 584447 - RNA, 19 nt, Artificial Sequence
  Description of Artificial Sequence: Synthetic oligonucleotide
gaaauuauucuuugggagu

SEQ ID NO: 584448 - RNA, 19 nt, Artificial Sequence
  Description of Artificial Sequence: Synthetic oligonucleotide
uucacccauaacuaaaaua

SEQ ID NO: 584449 - RNA, 19 nt, Artificial Sequence
  Description of Artificial Sequence: Synthetic oligonucleotide
aguagcaaaccgacgacac

SEQ ID NO: 584450 - RNA, 19 nt, Artificial Sequence
  Description of Artificial Sequence: Synthetic oligonucleotide
ucugacguuaguaguucug

SEQ ID NO: 584451 - RNA, 19 nt, Artificial Sequence
  Description of Artificial Sequence: Synthetic oligonucleotide
aacauaaucuguguuucaa

SEQ ID NO: 584452 - RNA, 19 nt, Artificial Sequence
  Description of Artificial Sequence: Synthetic oligonucleotide
uacaguacguuguauguua

SEQ ID NO: 584453 - RNA, 19 nt, Artificial Sequence
  Description of Artificial Sequence: Synthetic oligonucleotide
auuggaacgcugauagucg

SEQ ID NO: 584454 - RNA, 19 nt, Artificial Sequence
  Description of Artificial Sequence: Synthetic oligonucleotide
cuaugcaguucuuuuguac

SEQ ID NO: 584455 - RNA, 19 nt, Artificial Sequence
  Description of Artificial Sequence: Synthetic oligonucleotide
uuggaacgcugauagucgg

SEQ ID NO: 584456 - RNA, 19 nt, Artificial Sequence
  Description of Artificial Sequence: Synthetic oligonucleotide
cuaaaggcuucaaagguga

SEQ ID NO: 584457 - RNA, 19 nt, Artificial Sequence
  Description of Artificial Sequence: Synthetic oligonucleotide
uuagugugguuauugcccu

SEQ ID NO: 584458 - RNA, 19 nt, Artificial Sequence
  Description of Artificial Sequence: Synthetic oligonucleotide
acuaugcuuggucagucug

SEQ ID NO: 584459 - RNA, 19 nt, Artificial Sequence
  Description of Artificial Sequence: Synthetic oligonucleotide
agagcacuauacuacccag

SEQ ID NO: 584460 - RNA, 19 nt, Artificial Sequence
  Description of Artificial Sequence: Synthetic oligonucleotide
uuaaaccuuacgucuugug

SEQ ID NO: 584461 - RNA, 19 nt, Artificial Sequence
  Description of Artificial Sequence: Synthetic oligonucleotide
aauauugguucugacguua

SEQ ID NO: 584462 - RNA, 19 nt, Artificial Sequence
  Description of Artificial Sequence: Synthetic oligonucleotide
agugugguuauugcccugc

SEQ ID NO: 584463 - RNA, 19 nt, Artificial Sequence
  Description of Artificial Sequence: Synthetic oligonucleotide
uuguacaguacauucgcau

SEQ ID NO: 584464 - RNA, 19 nt, Artificial Sequence
  Description of Artificial Sequence: Synthetic oligonucleotide
auagucggaggucaugaug

SEQ ID NO: 584465 - RNA, 19 nt, Artificial Sequence
  Description of Artificial Sequence: Synthetic oligonucleotide
uucucguuugggguaaggg

SEQ ID NO: 584466 - RNA, 19 nt, Artificial Sequence
  Description of Artificial Sequence: Synthetic oligonucleotide
aguuaaaccuuacgucuug

SEQ ID NO: 584467 - RNA, 19 nt, Artificial Sequence
  Description of Artificial Sequence: Synthetic oligonucleotide
cuugauaaggcugcaguug

SEQ ID NO: 584468 - RNA, 19 nt, Artificial Sequence
  Description of Artificial Sequence: Synthetic oligonucleotide
caaaccgacgacacaacug

SEQ ID NO: 584469 - RNA, 19 nt, Artificial Sequence
  Description of Artificial Sequence: Synthetic oligonucleotide
auacuacccagcuuuaaau

SEQ ID NO: 584470 - RNA, 19 nt, Artificial Sequence
  Description of Artificial Sequence: Synthetic oligonucleotide
ggaaguagcaaaccgacga

SEQ ID NO: 584471 - RNA, 19 nt, Artificial Sequence
  Description of Artificial Sequence: Synthetic oligonucleotide
uucuaaguuggaaauuauu

SEQ ID NO: 584472 - RNA, 19 nt, Artificial Sequence
  Description of Artificial Sequence: Synthetic oligonucleotide
ugauagucggaggucauga

SEQ ID NO: 584473 - RNA, 19 nt, Artificial Sequence
  Description of Artificial Sequence: Synthetic oligonucleotide
auguuacaaccacuggauc

SEQ ID NO: 584474 - RNA, 19 nt, Artificial Sequence
  Description of Artificial Sequence: Synthetic oligonucleotide
uguacguauuucuucugaa

SEQ ID NO: 584475 - RNA, 19 nt, Artificial Sequence
  Description of Artificial Sequence: Synthetic oligonucleotide
uucagaauacuugugucau

SEQ ID NO: 584476 - RNA, 19 nt, Artificial Sequence
  Description of Artificial Sequence: Synthetic oligonucleotide
aaugugaacuggaugccgu

SEQ ID NO: 584477 - RNA, 19 nt, Artificial Sequence
  Description of Artificial Sequence: Synthetic oligonucleotide
cacugauuucuguagauga

SEQ ID NO: 584478 - RNA, 19 nt, Artificial Sequence
  Description of Artificial Sequence: Synthetic oligonucleotide
gaaguagcaaaccgacgac

SEQ ID NO: 584479 - RNA, 19 nt, Artificial Sequence
  Description of Artificial Sequence: Synthetic oligonucleotide
auaaucuguguuucaagua

SEQ ID NO: 584480 - RNA, 19 nt, Artificial Sequence
  Description of Artificial Sequence: Synthetic oligonucleotide
ucgcucgggaccuucaccc

SEQ ID NO: 584481 - RNA, 19 nt, Artificial Sequence
  Description of Artificial Sequence: Synthetic oligonucleotide
uacuacccagcuuuaaauc

SEQ ID NO: 584482 - RNA, 19 nt, Artificial Sequence
  Description of Artificial Sequence: Synthetic oligonucleotide
uccguuagugugguuauug

SEQ ID NO: 584483 - RNA, 19 nt, Artificial Sequence
  Description of Artificial Sequence: Synthetic oligonucleotide
aaauauugguucugacguu

SEQ ID NO: 584484 - RNA, 19 nt, Artificial Sequence
  Description of Artificial Sequence: Synthetic oligonucleotide
aaggguuacuaguuuugau

SEQ ID NO: 584485 - RNA, 19 nt, Artificial Sequence
  Description of Artificial Sequence: Synthetic oligonucleotide
cagaauacuugugucauuc

SEQ ID NO: 584486 - RNA, 19 nt, Artificial Sequence
  Description of Artificial Sequence: Synthetic oligonucleotide
uugguguacguauuucuuc

SEQ ID NO: 584487 - RNA, 19 nt, Artificial Sequence
  Description of Artificial Sequence: Synthetic oligonucleotide
ugaagcaaauggaaugcuu

SEQ ID NO: 584488 - RNA, 19 nt, Artificial Sequence
  Description of Artificial Sequence: Synthetic oligonucleotide
guacguuguauguuauagc

SEQ ID NO: 584489 - RNA, 19 nt, Artificial Sequence
  Description of Artificial Sequence: Synthetic oligonucleotide
aaguagcaaaccgacgaca

SEQ ID NO: 584490 - RNA, 19 nt, Artificial Sequence
  Description of Artificial Sequence: Synthetic oligonucleotide
guaacacccaguuggcaug

SEQ ID NO: 584491 - RNA, 19 nt, Artificial Sequence
  Description of Artificial Sequence: Synthetic oligonucleotide
agacacuaaaagaaaggug

SEQ ID NO: 584492 - RNA, 19 nt, Artificial Sequence
  Description of Artificial Sequence: Synthetic oligonucleotide
aacuaugcuuggucagucu

SEQ ID NO: 584493 - RNA, 19 nt, Artificial Sequence
  Description of Artificial Sequence: Synthetic oligonucleotide
uccaaggaguaauucugga

SEQ ID NO: 584494 - RNA, 19 nt, Artificial Sequence
  Description of Artificial Sequence: Synthetic oligonucleotide
accgacgacacaacugugc

SEQ ID NO: 584495 - RNA, 19 nt, Artificial Sequence
  Description of Artificial Sequence: Synthetic oligonucleotide
gucgacagugaaauauugg

SEQ ID NO: 584496 - RNA, 19 nt, Artificial Sequence
  Description of Artificial Sequence: Synthetic oligonucleotide
uacuaucagguuuaacuuu

SEQ ID NO: 584497 - RNA, 19 nt, Artificial Sequence
  Description of Artificial Sequence: Synthetic oligonucleotide
ugugguuauugcccugcug

SEQ ID NO: 584498 - RNA, 19 nt, Artificial Sequence
  Description of Artificial Sequence: Synthetic oligonucleotide
uguuauagcuuuguauuuu

SEQ ID NO: 584499 - RNA, 19 nt, Artificial Sequence
  Description of Artificial Sequence: Synthetic oligonucleotide
uggugguaaggguuacuag

SEQ ID NO: 584500 - RNA, 19 nt, Artificial Sequence
  Description of Artificial Sequence: Synthetic oligonucleotide
ugguucugacguuaguagu

SEQ ID NO: 584501 - RNA, 19 nt, Artificial Sequence
  Description of Artificial Sequence: Synthetic oligonucleotide
aaguaagggcacccuaaaa

SEQ ID NO: 584502 - RNA, 19 nt, Artificial Sequence
  Description of Artificial Sequence: Synthetic oligonucleotide
ccugucaaguaaacuaugg

SEQ ID NO: 584503 - RNA, 19 nt, Artificial Sequence
  Description of Artificial Sequence: Synthetic oligonucleotide
uaaggguuacuaguuuuga

SEQ ID NO: 584504 - RNA, 19 nt, Artificial Sequence
  Description of Artificial Sequence: Synthetic oligonucleotide
aacaucugaugugggaagu

SEQ ID NO: 584505 - RNA, 19 nt, Artificial Sequence
  Description of Artificial Sequence: Synthetic oligonucleotide
gaacgcugauagucggagg

SEQ ID NO: 584506 - RNA, 19 nt, Artificial Sequence
  Description of Artificial Sequence: Synthetic oligonucleotide
cacuaaaagaaagguguac

SEQ ID NO: 584507 - RNA, 19 nt, Artificial Sequence
  Description of Artificial Sequence: Synthetic oligonucleotide
cauaaucuguguuucaagu

SEQ ID NO: 584508 - RNA, 19 nt, Artificial Sequence
  Description of Artificial Sequence: Synthetic oligonucleotide
guauguuauagcuuuguau

SEQ ID NO: 584509 - RNA, 19 nt, Artificial Sequence
  Description of Artificial Sequence: Synthetic oligonucleotide
aguaccaguuaaaccuuac

SEQ ID NO: 584510 - RNA, 19 nt, Artificial Sequence
  Description of Artificial Sequence: Synthetic oligonucleotide
acauucgcauggcccacac

SEQ ID NO: 584511 - RNA, 19 nt, Artificial Sequence
  Description of Artificial Sequence: Synthetic oligonucleotide
ccugcucugagguaauucg

SEQ ID NO: 584512 - RNA, 19 nt, Artificial Sequence
  Description of Artificial Sequence: Synthetic oligonucleotide
gguaagggaucugacaacc

SEQ ID NO: 584513 - RNA, 19 nt, Artificial Sequence
  Description of Artificial Sequence: Synthetic oligonucleotide
ccaaucuaggaucugguac

SEQ ID NO: 584514 - RNA, 19 nt, Artificial Sequence
  Description of Artificial Sequence: Synthetic oligonucleotide
cuauuggucagauaacgcu

SEQ ID NO: 584515 - RNA, 19 nt, Artificial Sequence
  Description of Artificial Sequence: Synthetic oligonucleotide
agaauacuugugucauuca

SEQ ID NO: 584516 - RNA, 19 nt, Artificial Sequence
  Description of Artificial Sequence: Synthetic oligonucleotide
cagacugucacugaaaacu

SEQ ID NO: 584517 - RNA, 19 nt, Artificial Sequence
  Description of Artificial Sequence: Synthetic oligonucleotide
ugugaacuggaugccgugc

SEQ ID NO: 584518 - RNA, 19 nt, Artificial Sequence
  Description of Artificial Sequence: Synthetic oligonucleotide
ucugugacaacugguggaa

SEQ ID NO: 584519 - RNA, 19 nt, Artificial Sequence
  Description of Artificial Sequence: Synthetic oligonucleotide
agcccaaauaucaauugcu

SEQ ID NO: 584520 - RNA, 19 nt, Artificial Sequence
  Description of Artificial Sequence: Synthetic oligonucleotide
agugcacugacagacucca

SEQ ID NO: 584521 - RNA, 19 nt, Artificial Sequence
  Description of Artificial Sequence: Synthetic oligonucleotide
aguuccguuagugugguua

SEQ ID NO: 584522 - RNA, 19 nt, Artificial Sequence
  Description of Artificial Sequence: Synthetic oligonucleotide
aacugugcuagcacuuucu

SEQ ID NO: 584523 - RNA, 19 nt, Artificial Sequence
  Description of Artificial Sequence: Synthetic oligonucleotide
aucaacccacugauaagac

SEQ ID NO: 584524 - RNA, 19 nt, Artificial Sequence
  Description of Artificial Sequence: Synthetic oligonucleotide
uugauguccucuugucgac

SEQ ID NO: 584525 - RNA, 19 nt, Artificial Sequence
  Description of Artificial Sequence: Synthetic oligonucleotide
uucgcauggcccacaccag

SEQ ID NO: 584526 - RNA, 19 nt, Artificial Sequence
  Description of Artificial Sequence: Synthetic oligonucleotide
auaguuugauacaguacgu

SEQ ID NO: 584527 - RNA, 19 nt, Artificial Sequence
  Description of Artificial Sequence: Synthetic oligonucleotide
ugggguugugaugugcuug

SEQ ID NO: 584528 - RNA, 19 nt, Artificial Sequence
  Description of Artificial Sequence: Synthetic oligonucleotide
ugucugaugugaguacugu

SEQ ID NO: 584529 - RNA, 19 nt, Artificial Sequence
  Description of Artificial Sequence: Synthetic oligonucleotide
aggucaugaugaguccacc

SEQ ID NO: 584530 - RNA, 19 nt, Artificial Sequence
  Description of Artificial Sequence: Synthetic oligonucleotide
gauaacgcuguuacacuga

SEQ ID NO: 584531 - RNA, 19 nt, Artificial Sequence
  Description of Artificial Sequence: Synthetic oligonucleotide
cugucaaguaaacuaugga

SEQ ID NO: 584532 - RNA, 19 nt, Artificial Sequence
  Description of Artificial Sequence: Synthetic oligonucleotide
ugcguggccgcuguccugg

SEQ ID NO: 584533 - RNA, 19 nt, Artificial Sequence
  Description of Artificial Sequence: Synthetic oligonucleotide
gaaguaagggcacccuaaa

SEQ ID NO: 584534 - RNA, 19 nt, Artificial Sequence
  Description of Artificial Sequence: Synthetic oligonucleotide
ggcuauuggacauugugaa

SEQ ID NO: 584535 - RNA, 19 nt, Artificial Sequence
  Description of Artificial Sequence: Synthetic oligonucleotide
acacugauuucuguagaug

SEQ ID NO: 584536 - RNA, 19 nt, Artificial Sequence
  Description of Artificial Sequence: Synthetic oligonucleotide
uguugaauguucgggcauc

SEQ ID NO: 584537 - RNA, 19 nt, Artificial Sequence
  Description of Artificial Sequence: Synthetic oligonucleotide
guaagggaucugacaaccg

SEQ ID NO: 584538 - RNA, 19 nt, Artificial Sequence
  Description of Artificial Sequence: Synthetic oligonucleotide
ugauaaggcugcaguuggu

SEQ ID NO: 584539 - RNA, 19 nt, Artificial Sequence
  Description of Artificial Sequence: Synthetic oligonucleotide
uugguauaaugucgugcuc

SEQ ID NO: 584540 - RNA, 19 nt, Artificial Sequence
  Description of Artificial Sequence: Synthetic oligonucleotide
acuaucagguuuaacuuua

SEQ ID NO: 584541 - RNA, 19 nt, Artificial Sequence
  Description of Artificial Sequence: Synthetic oligonucleotide
cacccuauagcccaaauau

SEQ ID NO: 584542 - RNA, 19 nt, Artificial Sequence
  Description of Artificial Sequence: Synthetic oligonucleotide
uucugacguuaguaguucu

SEQ ID NO: 584543 - RNA, 19 nt, Artificial Sequence
  Description of Artificial Sequence: Synthetic oligonucleotide
guguacguauuucuucuga

SEQ ID NO: 584544 - RNA, 19 nt, Artificial Sequence
  Description of Artificial Sequence: Synthetic oligonucleotide
agaugugguuguacaguac

SEQ ID NO: 584545 - RNA, 19 nt, Artificial Sequence
  Description of Artificial Sequence: Synthetic oligonucleotide
uaaucgggcaaaagcccau

SEQ ID NO: 584546 - RNA, 19 nt, Artificial Sequence
  Description of Artificial Sequence: Synthetic oligonucleotide
guacguauuucuucugaaa

SEQ ID NO: 584547 - RNA, 19 nt, Artificial Sequence
  Description of Artificial Sequence: Synthetic oligonucleotide
uauacacccuauagcccaa

SEQ ID NO: 584548 - RNA, 19 nt, Artificial Sequence
  Description of Artificial Sequence: Synthetic oligonucleotide
guugggauaagcagcaugu

SEQ ID NO: 584549 - RNA, 19 nt, Artificial Sequence
  Description of Artificial Sequence: Synthetic oligonucleotide
uggaacgcugauagucgga

SEQ ID NO: 584550 - RNA, 19 nt, Artificial Sequence
  Description of Artificial Sequence: Synthetic oligonucleotide
ugucgugcuccaaggagua

SEQ ID NO: 584551 - RNA, 19 nt, Artificial Sequence
  Description of Artificial Sequence: Synthetic oligonucleotide
ugugguuguacaguacauu

SEQ ID NO: 584552 - RNA, 19 nt, Artificial Sequence
  Description of Artificial Sequence: Synthetic oligonucleotide
cacuauacuacccagcuuu

SEQ ID NO: 584553 - RNA, 19 nt, Artificial Sequence
  Description of Artificial Sequence: Synthetic oligonucleotide
augagcaacagugcacuga

SEQ ID NO: 584554 - RNA, 19 nt, Artificial Sequence
  Description of Artificial Sequence: Synthetic oligonucleotide
cccuauagcccaaauauca

SEQ ID NO: 584555 - RNA, 19 nt, Artificial Sequence
  Description of Artificial Sequence: Synthetic oligonucleotide
ugaaaccugucaguagaaa

SEQ ID NO: 584556 - RNA, 19 nt, Artificial Sequence
  Description of Artificial Sequence: Synthetic oligonucleotide
aguaauucuggagcucggu

SEQ ID NO: 584557 - RNA, 19 nt, Artificial Sequence
  Description of Artificial Sequence: Synthetic oligonucleotide
acccuauagcccaaauauc

SEQ ID NO: 584558 - RNA, 19 nt, Artificial Sequence
  Description of Artificial Sequence: Synthetic oligonucleotide
gcuauuggacauugugaag

SEQ ID NO: 584559 - RNA, 19 nt, Artificial Sequence
  Description of Artificial Sequence: Synthetic oligonucleotide
uguguacuauuggucagau

SEQ ID NO: 584560 - RNA, 19 nt, Artificial Sequence
  Description of Artificial Sequence: Synthetic oligonucleotide
caucggaaagcaugcucac

SEQ ID NO: 584561 - RNA, 19 nt, Artificial Sequence
  Description of Artificial Sequence: Synthetic oligonucleotide
gagcacuauacuacccagc

SEQ ID NO: 584562 - RNA, 19 nt, Artificial Sequence
  Description of Artificial Sequence: Synthetic oligonucleotide
gcuaaaggcuucaaaggug

SEQ ID NO: 584563 - RNA, 19 nt, Artificial Sequence
  Description of Artificial Sequence: Synthetic oligonucleotide
acuuagguacaaccuggaa

SEQ ID NO: 584564 - RNA, 19 nt, Artificial Sequence
  Description of Artificial Sequence: Synthetic oligonucleotide
auauugguucugacguuag

SEQ ID NO: 584565 - RNA, 19 nt, Artificial Sequence
  Description of Artificial Sequence: Synthetic oligonucleotide
auggccaguuccguuagug

SEQ ID NO: 584566 - RNA, 19 nt, Artificial Sequence
  Description of Artificial Sequence: Synthetic oligonucleotide
agucggaggucaugaugag

SEQ ID NO: 584567 - RNA, 19 nt, Artificial Sequence
  Description of Artificial Sequence: Synthetic oligonucleotide
uugggauaagcagcaugug

SEQ ID NO: 584568 - RNA, 19 nt, Artificial Sequence
  Description of Artificial Sequence: Synthetic oligonucleotide
ggugguaaggguuacuagu

SEQ ID NO: 584569 - RNA, 19 nt, Artificial Sequence
  Description of Artificial Sequence: Synthetic oligonucleotide
ugcaguugguguacguauu

SEQ ID NO: 584570 - RNA, 19 nt, Artificial Sequence
  Description of Artificial Sequence: Synthetic oligonucleotide
gguauaaugucgugcucca

SEQ ID NO: 584571 - RNA, 19 nt, Artificial Sequence
  Description of Artificial Sequence: Synthetic oligonucleotide
gaagcaaauggaaugcuuu

SEQ ID NO: 584572 - RNA, 19 nt, Artificial Sequence
  Description of Artificial Sequence: Synthetic oligonucleotide
ugaaccaaacagguuuaua

SEQ ID NO: 584573 - RNA, 19 nt, Artificial Sequence
  Description of Artificial Sequence: Synthetic oligonucleotide
cuugucgacagugaaauau

SEQ ID NO: 584574 - RNA, 19 nt, Artificial Sequence
  Description of Artificial Sequence: Synthetic oligonucleotide
acgcuguuacacugaaagu

SEQ ID NO: 584575 - RNA, 19 nt, Artificial Sequence
  Description of Artificial Sequence: Synthetic oligonucleotide
acacccuauagcccaaaua

SEQ ID NO: 584576 - RNA, 19 nt, Artificial Sequence
  Description of Artificial Sequence: Synthetic oligonucleotide
ggguuacuaguuuugaugu

SEQ ID NO: 584577 - RNA, 19 nt, Artificial Sequence
  Description of Artificial Sequence: Synthetic oligonucleotide
auuggacauugugaagaug

SEQ ID NO: 584578 - RNA, 19 nt, Artificial Sequence
  Description of Artificial Sequence: Synthetic oligonucleotide
uggccaguuccguuagugu

SEQ ID NO: 584579 - RNA, 19 nt, Artificial Sequence
  Description of Artificial Sequence: Synthetic oligonucleotide
guaauucuggagcucggua

SEQ ID NO: 584580 - RNA, 19 nt, Artificial Sequence
  Description of Artificial Sequence: Synthetic oligonucleotide
augcaguucuuuuguacuu

SEQ ID NO: 584581 - RNA, 19 nt, Artificial Sequence
  Description of Artificial Sequence: Synthetic oligonucleotide
agcaaaccgacgacacaac

SEQ ID NO: 584582 - RNA, 19 nt, Artificial Sequence
  Description of Artificial Sequence: Synthetic oligonucleotide
guacuauuggucagauaac

SEQ ID NO: 584583 - RNA, 19 nt, Artificial Sequence
  Description of Artificial Sequence: Synthetic oligonucleotide
cugaugugggaaguggguc

SEQ ID NO: 584584 - RNA, 19 nt, Artificial Sequence
  Description of Artificial Sequence: Synthetic oligonucleotide
ggaacgcugauagucggag

SEQ ID NO: 584585 - RNA, 19 nt, Artificial Sequence
  Description of Artificial Sequence: Synthetic oligonucleotide
caguuuguuugcugaacca

SEQ ID NO: 584586 - RNA, 19 nt, Artificial Sequence
  Description of Artificial Sequence: Synthetic oligonucleotide
aacagugcacugacagacu

SEQ ID NO: 584587 - RNA, 19 nt, Artificial Sequence
  Description of Artificial Sequence: Synthetic oligonucleotide
aucgggcaaaagcccaugu

SEQ ID NO: 584588 - RNA, 19 nt, Artificial Sequence
  Description of Artificial Sequence: Synthetic oligonucleotide
agugggucuucuaggaagu

SEQ ID NO: 584589 - RNA, 19 nt, Artificial Sequence
  Description of Artificial Sequence: Synthetic oligonucleotide
ucgugcuccaaggaguaau

SEQ ID NO: 584590 - RNA, 19 nt, Artificial Sequence
  Description of Artificial Sequence: Synthetic oligonucleotide
gcccuagcacauuucacag

SEQ ID NO: 584591 - RNA, 19 nt, Artificial Sequence
  Description of Artificial Sequence: Synthetic oligonucleotide
ucagaauacuugugucauu

SEQ ID NO: 584592 - RNA, 19 nt, Artificial Sequence
  Description of Artificial Sequence: Synthetic oligonucleotide
caugcucacaaaucagcaa

SEQ ID NO: 584593 - RNA, 19 nt, Artificial Sequence
  Description of Artificial Sequence: Synthetic oligonucleotide
acaucugaugugggaagug

SEQ ID NO: 584594 - RNA, 19 nt, Artificial Sequence
  Description of Artificial Sequence: Synthetic oligonucleotide
aucuguguuucaaguacca

SEQ ID NO: 584595 - RNA, 19 nt, Artificial Sequence
  Description of Artificial Sequence: Synthetic oligonucleotide
aauucucguuugggguaag

SEQ ID NO: 584596 - RNA, 19 nt, Artificial Sequence
  Description of Artificial Sequence: Synthetic oligonucleotide
uacacccuauagcccaaau

SEQ ID NO: 584597 - RNA, 19 nt, Artificial Sequence
  Description of Artificial Sequence: Synthetic oligonucleotide
cacccaguuggcauggaga

SEQ ID NO: 584598 - RNA, 19 nt, Artificial Sequence
  Description of Artificial Sequence: Synthetic oligonucleotide
uggguccauagugagcaac

SEQ ID NO: 584599 - RNA, 19 nt, Artificial Sequence
  Description of Artificial Sequence: Synthetic oligonucleotide
guagcaaaccgacgacaca

SEQ ID NO: 584600 - RNA, 19 nt, Artificial Sequence
  Description of Artificial Sequence: Synthetic oligonucleotide
aacaaacuucuaaguugga

SEQ ID NO: 584601 - RNA, 19 nt, Artificial Sequence
  Description of Artificial Sequence: Synthetic oligonucleotide
guucugacguuaguaguuc

SEQ ID NO: 584602 - RNA, 19 nt, Artificial Sequence
  Description of Artificial Sequence: Synthetic oligonucleotide
cucgcucgggaccuucacc

SEQ ID NO: 584603 - RNA, 19 nt, Artificial Sequence
  Description of Artificial Sequence: Synthetic oligonucleotide
auggugguaaggguuacua

SEQ ID NO: 584604 - RNA, 19 nt, Artificial Sequence
  Description of Artificial Sequence: Synthetic oligonucleotide
uagugugguuauugcccug

SEQ ID NO: 584605 - RNA, 19 nt, Artificial Sequence
  Description of Artificial Sequence: Synthetic oligonucleotide
ugcuugcccuagcacauuu

SEQ ID NO: 584606 - RNA, 19 nt, Artificial Sequence
  Description of Artificial Sequence: Synthetic oligonucleotide
cucguuugggguaagggau

SEQ ID NO: 584607 - RNA, 19 nt, Artificial Sequence
  Description of Artificial Sequence: Synthetic oligonucleotide
gucagauaacgcuguuaca

SEQ ID NO: 584608 - RNA, 19 nt, Artificial Sequence
  Description of Artificial Sequence: Synthetic oligonucleotide
acgucuuguguguacuauu

SEQ ID NO: 584609 - RNA, 19 nt, Artificial Sequence
  Description of Artificial Sequence: Synthetic oligonucleotide
ccaguuaaaccuuacgucu

SEQ ID NO: 584610 - RNA, 19 nt, Artificial Sequence
  Description of Artificial Sequence: Synthetic oligonucleotide
uaacgcuguuacacugaaa

SEQ ID NO: 584611 - RNA, 19 nt, Artificial Sequence
  Description of Artificial Sequence: Synthetic oligonucleotide
uugcugaaccaaacagguu

SEQ ID NO: 584612 - RNA, 19 nt, Artificial Sequence
  Description of Artificial Sequence: Synthetic oligonucleotide
ggacaaaugcuugcccuag

SEQ ID NO: 584613 - RNA, 19 nt, Artificial Sequence
  Description of Artificial Sequence: Synthetic oligonucleotide
gguguacguauuucuucug

SEQ ID NO: 584614 - RNA, 19 nt, Artificial Sequence
  Description of Artificial Sequence: Synthetic oligonucleotide
guuguacaguacauucgca

SEQ ID NO: 584615 - RNA, 19 nt, Artificial Sequence
  Description of Artificial Sequence: Synthetic oligonucleotide
uuauugcccugcugcugcu

SEQ ID NO: 584616 - RNA, 19 nt, Artificial Sequence
  Description of Artificial Sequence: Synthetic oligonucleotide
ggaucugacaaccggcaaa

SEQ ID NO: 584617 - RNA, 19 nt, Artificial Sequence
  Description of Artificial Sequence: Synthetic oligonucleotide
cuacagacugucacugaaa

SEQ ID NO: 584618 - RNA, 19 nt, Artificial Sequence
  Description of Artificial Sequence: Synthetic oligonucleotide
cuauagcccaaauaucaau

SEQ ID NO: 584619 - RNA, 19 nt, Artificial Sequence
  Description of Artificial Sequence: Synthetic oligonucleotide
acgcugauagucggagguc

SEQ ID NO: 584620 - RNA, 19 nt, Artificial Sequence
  Description of Artificial Sequence: Synthetic oligonucleotide
cagucaagucauagguuga

SEQ ID NO: 584621 - RNA, 19 nt, Artificial Sequence
  Description of Artificial Sequence: Synthetic oligonucleotide
uccaagcgauauucuuggu

SEQ ID NO: 584622 - RNA, 19 nt, Artificial Sequence
  Description of Artificial Sequence: Synthetic oligonucleotide
gguuacuaguuuugauguc

SEQ ID NO: 584623 - RNA, 19 nt, Artificial Sequence
  Description of Artificial Sequence: Synthetic oligonucleotide
guaucccaugcugcucugg

SEQ ID NO: 584624 - RNA, 19 nt, Artificial Sequence
  Description of Artificial Sequence: Synthetic oligonucleotide
uacuaucaaauagcagcuu

SEQ ID NO: 584625 - RNA, 19 nt, Artificial Sequence
  Description of Artificial Sequence: Synthetic oligonucleotide
guagugguaggagggacaa

SEQ ID NO: 584626 - RNA, 19 nt, Artificial Sequence
  Description of Artificial Sequence: Synthetic oligonucleotide
cugauagucggaggucaug

SEQ ID NO: 584627 - RNA, 19 nt, Artificial Sequence
  Description of Artificial Sequence: Synthetic oligonucleotide
gaauguucgggcaucuuuu

SEQ ID NO: 584628 - RNA, 19 nt, Artificial Sequence
  Description of Artificial Sequence: Synthetic oligonucleotide
uagguacaaccuggaagcu

SEQ ID NO: 584629 - RNA, 19 nt, Artificial Sequence
  Description of Artificial Sequence: Synthetic oligonucleotide
uacauucgcauggcccaca

SEQ ID NO: 584630 - RNA, 19 nt, Artificial Sequence
  Description of Artificial Sequence: Synthetic oligonucleotide
cgcuguuacacugaaaguc

SEQ ID NO: 584631 - RNA, 19 nt, Artificial Sequence
  Description of Artificial Sequence: Synthetic oligonucleotide
ucuugucgacagugaaaua

SEQ ID NO: 584632 - RNA, 19 nt, Artificial Sequence
  Description of Artificial Sequence: Synthetic oligonucleotide
caagucuaacuccaaacuu

SEQ ID NO: 584633 - RNA, 19 nt, Artificial Sequence
  Description of Artificial Sequence: Synthetic oligonucleotide
aaccgacgacacaacugug

SEQ ID NO: 584634 - RNA, 19 nt, Artificial Sequence
  Description of Artificial Sequence: Synthetic oligonucleotide
aucggaaagcaugcucaca

SEQ ID NO: 584635 - RNA, 19 nt, Artificial Sequence
  Description of Artificial Sequence: Synthetic oligonucleotide
cagauaacgcuguuacacu

SEQ ID NO: 584636 - RNA, 19 nt, Artificial Sequence
  Description of Artificial Sequence: Synthetic oligonucleotide
ugaguccaccugagguagu

SEQ ID NO: 584637 - RNA, 19 nt, Artificial Sequence
  Description of Artificial Sequence: Synthetic oligonucleotide
cauucgcauggcccacacc

SEQ ID NO: 584638 - RNA, 19 nt, Artificial Sequence
  Description of Artificial Sequence: Synthetic oligonucleotide
agacugucacugaaaacua

SEQ ID NO: 584639 - RNA, 19 nt, Artificial Sequence
  Description of Artificial Sequence: Synthetic oligonucleotide
ucgggaccuucacccauaa

SEQ ID NO: 584640 - RNA, 19 nt, Artificial Sequence
  Description of Artificial Sequence: Synthetic oligonucleotide
ccguuagugugguuauugc

SEQ ID NO: 584641 - RNA, 19 nt, Artificial Sequence
  Description of Artificial Sequence: Synthetic oligonucleotide
uuggucagauaacgcuguu

SEQ ID NO: 584642 - RNA, 19 nt, Artificial Sequence
  Description of Artificial Sequence: Synthetic oligonucleotide
gcagcaugagcaacagugc

SEQ ID NO: 584643 - RNA, 19 nt, Artificial Sequence
  Description of Artificial Sequence: Synthetic oligonucleotide
gguuauugcccugcugcug

SEQ ID NO: 584644 - RNA, 19 nt, Artificial Sequence
  Description of Artificial Sequence: Synthetic oligonucleotide
gugcuagcacuuucuuuuc

SEQ ID NO: 584645 - RNA, 19 nt, Artificial Sequence
  Description of Artificial Sequence: Synthetic oligonucleotide
ugccgugccuggagguuac

SEQ ID NO: 584646 - RNA, 19 nt, Artificial Sequence
  Description of Artificial Sequence: Synthetic oligonucleotide
ccauauacuugauaaggcu

SEQ ID NO: 584647 - RNA, 19 nt, Artificial Sequence
  Description of Artificial Sequence: Synthetic oligonucleotide
cugaaguaagggcacccua

SEQ ID NO: 584648 - RNA, 19 nt, Artificial Sequence
  Description of Artificial Sequence: Synthetic oligonucleotide
uuacaaccacuggauccaa

SEQ ID NO: 584649 - RNA, 19 nt, Artificial Sequence
  Description of Artificial Sequence: Synthetic oligonucleotide
ccacugauaagacacuaaa

SEQ ID NO: 584650 - RNA, 19 nt, Artificial Sequence
  Description of Artificial Sequence: Synthetic oligonucleotide
gguucccgcagagugcugc

SEQ ID NO: 584651 - RNA, 19 nt, Artificial Sequence
  Description of Artificial Sequence: Synthetic oligonucleotide
gauagucggaggucaugau

SEQ ID NO: 584652 - RNA, 19 nt, Artificial Sequence
  Description of Artificial Sequence: Synthetic oligonucleotide
agcuaccaccccaaucugu

SEQ ID NO: 584653 - RNA, 19 nt, Artificial Sequence
  Description of Artificial Sequence: Synthetic oligonucleotide
acaguacguuguauguuau

SEQ ID NO: 584654 - RNA, 19 nt, Artificial Sequence
  Description of Artificial Sequence: Synthetic oligonucleotide
gguaaggguuacuaguuuu

SEQ ID NO: 584655 - RNA, 19 nt, Artificial Sequence
  Description of Artificial Sequence: Synthetic oligonucleotide
aagcagcauguggauugga

SEQ ID NO: 584656 - RNA, 19 nt, Artificial Sequence
  Description of Artificial Sequence: Synthetic oligonucleotide
acguuguauguuauagcuu

SEQ ID NO: 584657 - RNA, 19 nt, Artificial Sequence
  Description of Artificial Sequence: Synthetic oligonucleotide
cuuacgucuuguguguacu

SEQ ID NO: 584658 - RNA, 19 nt, Artificial Sequence
  Description of Artificial Sequence: Synthetic oligonucleotide
ccuuacgucuuguguguac

SEQ ID NO: 584659 - RNA, 19 nt, Artificial Sequence
  Description of Artificial Sequence: Synthetic oligonucleotide
uucgcuuuauuggguccau

SEQ ID NO: 584660 - RNA, 19 nt, Artificial Sequence
  Description of Artificial Sequence: Synthetic oligonucleotide
gggaaucccauuacauuga

SEQ ID NO: 584661 - RNA, 19 nt, Artificial Sequence
  Description of Artificial Sequence: Synthetic oligonucleotide
gugccuggagguuaccacu

SEQ ID NO: 584662 - RNA, 19 nt, Artificial Sequence
  Description of Artificial Sequence: Synthetic oligonucleotide
guacauucgcauggcccac

SEQ ID NO: 584663 - RNA, 19 nt, Artificial Sequence
  Description of Artificial Sequence: Synthetic oligonucleotide
gguguaccaaaauaaucuu

SEQ ID NO: 584664 - RNA, 19 nt, Artificial Sequence
  Description of Artificial Sequence: Synthetic oligonucleotide
acuauacuacccagcuuua

SEQ ID NO: 584665 - RNA, 19 nt, Artificial Sequence
  Description of Artificial Sequence: Synthetic oligonucleotide
guuccguuagugugguuau

SEQ ID NO: 584666 - RNA, 19 nt, Artificial Sequence
  Description of Artificial Sequence: Synthetic oligonucleotide
ggaccuucacccauaacua

SEQ ID NO: 584667 - RNA, 19 nt, Artificial Sequence
  Description of Artificial Sequence: Synthetic oligonucleotide
ggaaucccauuacauugaa

SEQ ID NO: 584668 - RNA, 19 nt, Artificial Sequence
  Description of Artificial Sequence: Synthetic oligonucleotide
acccagcuuuaaaucagga

SEQ ID NO: 584669 - RNA, 19 nt, Artificial Sequence
  Description of Artificial Sequence: Synthetic oligonucleotide
guguuucaaguaccaguua

SEQ ID NO: 584670 - RNA, 19 nt, Artificial Sequence
  Description of Artificial Sequence: Synthetic oligonucleotide
cuauacuacccagcuuuaa

SEQ ID NO: 584671 - RNA, 19 nt, Artificial Sequence
  Description of Artificial Sequence: Synthetic oligonucleotide
cugugacaacugguggaac

SEQ ID NO: 584672 - RNA, 19 nt, Artificial Sequence
  Description of Artificial Sequence: Synthetic oligonucleotide
ccuauagcccaaauaucaa

SEQ ID NO: 584673 - RNA, 19 nt, Artificial Sequence
  Description of Artificial Sequence: Synthetic oligonucleotide
gggagguagcugaguaucc

SEQ ID NO: 584674 - RNA, 19 nt, Artificial Sequence
  Description of Artificial Sequence: Synthetic oligonucleotide
uuggguccauagugagcaa

SEQ ID NO: 584675 - RNA, 19 nt, Artificial Sequence
  Description of Artificial Sequence: Synthetic oligonucleotide
gugguaggagggacaacuc

SEQ ID NO: 584676 - RNA, 19 nt, Artificial Sequence
  Description of Artificial Sequence: Synthetic oligonucleotide
cccgcagagugcugcagcc

SEQ ID NO: 584677 - RNA, 19 nt, Artificial Sequence
  Description of Artificial Sequence: Synthetic oligonucleotide
guacaaccuggaagcuacc

SEQ ID NO: 584678 - RNA, 19 nt, Artificial Sequence
  Description of Artificial Sequence: Synthetic oligonucleotide
guucccgcagagugcugca

SEQ ID NO: 584679 - RNA, 19 nt, Artificial Sequence
  Description of Artificial Sequence: Synthetic oligonucleotide
guugaauguucgggcaucu

SEQ ID NO: 584680 - RNA, 19 nt, Artificial Sequence
  Description of Artificial Sequence: Synthetic oligonucleotide
gugguaaggguuacuaguu

SEQ ID NO: 584681 - RNA, 19 nt, Artificial Sequence
  Description of Artificial Sequence: Synthetic oligonucleotide
caguuaaaccuuacgucuu

SEQ ID NO: 584682 - RNA, 19 nt, Artificial Sequence
  Description of Artificial Sequence: Synthetic oligonucleotide
caccccaaucugugacaac

SEQ ID NO: 584683 - RNA, 19 nt, Artificial Sequence
  Description of Artificial Sequence: Synthetic oligonucleotide
caguagaaacuaugcaguu

SEQ ID NO: 584684 - RNA, 19 nt, Artificial Sequence
  Description of Artificial Sequence: Synthetic oligonucleotide
ggagguuaccacucaugcu

SEQ ID NO: 584685 - RNA, 19 nt, Artificial Sequence
  Description of Artificial Sequence: Synthetic oligonucleotide
caguacguuguauguuaua

SEQ ID NO: 584686 - RNA, 19 nt, Artificial Sequence
  Description of Artificial Sequence: Synthetic oligonucleotide
uuccccggauggccaguuc

SEQ ID NO: 584687 - RNA, 19 nt, Artificial Sequence
  Description of Artificial Sequence: Synthetic oligonucleotide
ggucagucugaacccuguc

SEQ ID NO: 584688 - RNA, 19 nt, Artificial Sequence
  Description of Artificial Sequence: Synthetic oligonucleotide
guauaaugucgugcuccaa

SEQ ID NO: 584689 - RNA, 19 nt, Artificial Sequence
  Description of Artificial Sequence: Synthetic oligonucleotide
gcaaaccgacgacacaacu

SEQ ID NO: 584690 - RNA, 19 nt, Artificial Sequence
  Description of Artificial Sequence: Synthetic oligonucleotide
gacaaucaucucaguuugu

SEQ ID NO: 584691 - RNA, 19 nt, Artificial Sequence
  Description of Artificial Sequence: Synthetic oligonucleotide
guguacuauuggucagaua

SEQ ID NO: 584692 - RNA, 19 nt, Artificial Sequence
  Description of Artificial Sequence: Synthetic oligonucleotide
ucgcuuuauuggguccaua

SEQ ID NO: 584693 - RNA, 19 nt, Artificial Sequence
  Description of Artificial Sequence: Synthetic oligonucleotide
cacccauaacuaaaauauu

SEQ ID NO: 584694 - RNA, 19 nt, Artificial Sequence
  Description of Artificial Sequence: Synthetic oligonucleotide
gguucugacguuaguaguu

SEQ ID NO: 584695 - RNA, 19 nt, Artificial Sequence
  Description of Artificial Sequence: Synthetic oligonucleotide
uuccguuagugugguuauu

SEQ ID NO: 584696 - RNA, 19 nt, Artificial Sequence
  Description of Artificial Sequence: Synthetic oligonucleotide
auacacccuauagcccaaa

SEQ ID NO: 584697 - RNA, 19 nt, Artificial Sequence
  Description of Artificial Sequence: Synthetic oligonucleotide
augccgugccuggagguua

SEQ ID NO: 584698 - RNA, 19 nt, Artificial Sequence
  Description of Artificial Sequence: Synthetic oligonucleotide
gggaucugacaaccggcaa

SEQ ID NO: 584699 - RNA, 19 nt, Artificial Sequence
  Description of Artificial Sequence: Synthetic oligonucleotide
cucgggaccuucacccaua

SEQ ID NO: 584700 - RNA, 19 nt, Artificial Sequence
  Description of Artificial Sequence: Synthetic oligonucleotide
gccugcucugagguaauuc

SEQ ID NO: 584701 - RNA, 19 nt, Artificial Sequence
  Description of Artificial Sequence: Synthetic oligonucleotide
gauggccaguuccguuagu

SEQ ID NO: 584702 - RNA, 19 nt, Artificial Sequence
  Description of Artificial Sequence: Synthetic oligonucleotide
accuuacgucuugugugua

SEQ ID NO: 584703 - RNA, 19 nt, Artificial Sequence
  Description of Artificial Sequence: Synthetic oligonucleotide
cccaaauaucaauugcuuu

SEQ ID NO: 584704 - RNA, 19 nt, Artificial Sequence
  Description of Artificial Sequence: Synthetic oligonucleotide
gcagggaaucccauuacau

SEQ ID NO: 584705 - RNA, 19 nt, Artificial Sequence
  Description of Artificial Sequence: Synthetic oligonucleotide
ggauuggaacgcugauagu

SEQ ID NO: 584706 - RNA, 19 nt, Artificial Sequence
  Description of Artificial Sequence: Synthetic oligonucleotide
cccaaucuaggaucuggua

SEQ ID NO: 584707 - RNA, 19 nt, Artificial Sequence
  Description of Artificial Sequence: Synthetic oligonucleotide
gcucaguaccgaugugucu

SEQ ID NO: 584708 - RNA, 19 nt, Artificial Sequence
  Description of Artificial Sequence: Synthetic oligonucleotide
gagggacaacucucacuuu

SEQ ID NO: 584709 - RNA, 19 nt, Artificial Sequence
  Description of Artificial Sequence: Synthetic oligonucleotide
ccgacgacacaacugugcu

SEQ ID NO: 584710 - RNA, 19 nt, Artificial Sequence
  Description of Artificial Sequence: Synthetic oligonucleotide
gcuugcccuagcacauuuc

SEQ ID NO: 584711 - RNA, 19 nt, Artificial Sequence
  Description of Artificial Sequence: Synthetic oligonucleotide
cugaaccaaacagguuuau

SEQ ID NO: 584712 - RNA, 19 nt, Artificial Sequence
  Description of Artificial Sequence: Synthetic oligonucleotide
cagcaacaccaacgagaaa

SEQ ID NO: 584713 - RNA, 19 nt, Artificial Sequence
  Description of Artificial Sequence: Synthetic oligonucleotide
gucgugcuccaaggaguaa

SEQ ID NO: 584714 - RNA, 19 nt, Artificial Sequence
  Description of Artificial Sequence: Synthetic oligonucleotide
caugcugcucugggguugu

SEQ ID NO: 584715 - RNA, 19 nt, Artificial Sequence
  Description of Artificial Sequence: Synthetic oligonucleotide
agguucccgcagagugcug

SEQ ID NO: 584716 - RNA, 19 nt, Artificial Sequence
  Description of Artificial Sequence: Synthetic oligonucleotide
gcauguggauuggaacgcu

SEQ ID NO: 584717 - RNA, 19 nt, Artificial Sequence
  Description of Artificial Sequence: Synthetic oligonucleotide
gcugauagucggaggucau

SEQ ID NO: 584718 - RNA, 19 nt, Artificial Sequence
  Description of Artificial Sequence: Synthetic oligonucleotide
guuccccggauggccaguu

SEQ ID NO: 584719 - RNA, 19 nt, Artificial Sequence
  Description of Artificial Sequence: Synthetic oligonucleotide
ccugugcguggccgcuguc

SEQ ID NO: 584720 - RNA, 19 nt, Artificial Sequence
  Description of Artificial Sequence: Synthetic oligonucleotide
caguaccgaugugucugau

SEQ ID NO: 584721 - RNA, 19 nt, Artificial Sequence
  Description of Artificial Sequence: Synthetic oligonucleotide
gccgugccuggagguuacc

SEQ ID NO: 584722 - RNA, 19 nt, Artificial Sequence
  Description of Artificial Sequence: Synthetic oligonucleotide
ccgcagagugcugcagcca

SEQ ID NO: 584723 - RNA, 19 nt, Artificial Sequence
  Description of Artificial Sequence: Synthetic oligonucleotide
cgcucgggaccuucaccca

SEQ ID NO: 584724 - RNA, 19 nt, Artificial Sequence
  Description of Artificial Sequence: Synthetic oligonucleotide
gguuccccggauggccagu

SEQ ID NO: 584725 - RNA, 19 nt, Artificial Sequence
  Description of Artificial Sequence: Synthetic oligonucleotide
cugguggaacuuggcuauu

SEQ ID NO: 584726 - RNA, 19 nt, Artificial Sequence
  Description of Artificial Sequence: Synthetic oligonucleotide
ccccugugcguggccgcug

SEQ ID NO: 584727 - RNA, 19 nt, Artificial Sequence
  Description of Artificial Sequence: Synthetic oligonucleotide
ccggauggccaguuccguu

SEQ ID NO: 584728 - RNA, 19 nt, Artificial Sequence
  Description of Artificial Sequence: Synthetic oligonucleotide
cccugugcguggccgcugu

SEQ ID NO: 584729 - RNA, 19 nt, Artificial Sequence
  Description of Artificial Sequence: Synthetic oligonucleotide
caguuccguuagugugguu

SEQ ID NO: 584730 - RNA, 19 nt, Artificial Sequence
  Description of Artificial Sequence: Synthetic oligonucleotide
cccggauggccaguuccgu

SEQ ID NO: 584731 - RNA, 19 nt, Artificial Sequence
  Description of Artificial Sequence: Synthetic oligonucleotide
aacaaaauuuuguaggugg

SEQ ID NO: 584732 - RNA, 19 nt, Artificial Sequence
  Description of Artificial Sequence: Synthetic oligonucleotide
aaguccauaagcuucacac

SEQ ID NO: 584733 - RNA, 19 nt, Artificial Sequence
  Description of Artificial Sequence: Synthetic oligonucleotide
guuaacaaaauuuuguagg

SEQ ID NO: 584734 - RNA, 19 nt, Artificial Sequence
  Description of Artificial Sequence: Synthetic oligonucleotide
ucaaguagcaauuauauau

SEQ ID NO: 584735 - RNA, 19 nt, Artificial Sequence
  Description of Artificial Sequence: Synthetic oligonucleotide
ucagugacgauucuggagg

SEQ ID NO: 584736 - RNA, 19 nt, Artificial Sequence
  Description of Artificial Sequence: Synthetic oligonucleotide
uauuaaauagauaggugag

SEQ ID NO: 584737 - RNA, 19 nt, Artificial Sequence
  Description of Artificial Sequence: Synthetic oligonucleotide
ugugauuagaauuuggggu

SEQ ID NO: 584738 - RNA, 19 nt, Artificial Sequence
  Description of Artificial Sequence: Synthetic oligonucleotide
aaauagauaggugagucuc

SEQ ID NO: 584739 - RNA, 19 nt, Artificial Sequence
  Description of Artificial Sequence: Synthetic oligonucleotide
ugugugauuagaauuuggg

SEQ ID NO: 584740 - RNA, 19 nt, Artificial Sequence
  Description of Artificial Sequence: Synthetic oligonucleotide
aaacuagaauaacauuccc

SEQ ID NO: 584741 - RNA, 19 nt, Artificial Sequence
  Description of Artificial Sequence: Synthetic oligonucleotide
ugauuuucauccuagauaa

SEQ ID NO: 584742 - RNA, 19 nt, Artificial Sequence
  Description of Artificial Sequence: Synthetic oligonucleotide
ucauccuagauaaagcaag

SEQ ID NO: 584743 - RNA, 19 nt, Artificial Sequence
  Description of Artificial Sequence: Synthetic oligonucleotide
uucuucacgacacagguca

SEQ ID NO: 584744 - RNA, 19 nt, Artificial Sequence
  Description of Artificial Sequence: Synthetic oligonucleotide
ugcgaagugauucugaaac

SEQ ID NO: 584745 - RNA, 19 nt, Artificial Sequence
  Description of Artificial Sequence: Synthetic oligonucleotide
aaaguuaacaaaauuuugu

SEQ ID NO: 584746 - RNA, 19 nt, Artificial Sequence
  Description of Artificial Sequence: Synthetic oligonucleotide
guucuggcaaucuacaagg

SEQ ID NO: 584747 - RNA, 19 nt, Artificial Sequence
  Description of Artificial Sequence: Synthetic oligonucleotide
aauucuaucucuccaggga

SEQ ID NO: 584748 - RNA, 19 nt, Artificial Sequence
  Description of Artificial Sequence: Synthetic oligonucleotide
ucgacgcagaguaugaggg

SEQ ID NO: 584749 - RNA, 19 nt, Artificial Sequence
  Description of Artificial Sequence: Synthetic oligonucleotide
gaaagcaggggauaugugc

SEQ ID NO: 584750 - RNA, 19 nt, Artificial Sequence
  Description of Artificial Sequence: Synthetic oligonucleotide
aaauaccuaaaguuaacaa

SEQ ID NO: 584751 - RNA, 19 nt, Artificial Sequence
  Description of Artificial Sequence: Synthetic oligonucleotide
auaggugagucucuuaguc

SEQ ID NO: 584752 - RNA, 19 nt, Artificial Sequence
  Description of Artificial Sequence: Synthetic oligonucleotide
agaauuggugucuuaguuc

SEQ ID NO: 584753 - RNA, 19 nt, Artificial Sequence
  Description of Artificial Sequence: Synthetic oligonucleotide
aaagcuucucacugugugg

SEQ ID NO: 584754 - RNA, 19 nt, Artificial Sequence
  Description of Artificial Sequence: Synthetic oligonucleotide
gauagguucaaucaccgca

SEQ ID NO: 584755 - RNA, 19 nt, Artificial Sequence
  Description of Artificial Sequence: Synthetic oligonucleotide
ucuauuuagagugccaccc

SEQ ID NO: 584756 - RNA, 19 nt, Artificial Sequence
  Description of Artificial Sequence: Synthetic oligonucleotide
aaguuaacaaaauuuugua

SEQ ID NO: 584757 - RNA, 19 nt, Artificial Sequence
  Description of Artificial Sequence: Synthetic oligonucleotide
uggaugauagguucaauca

SEQ ID NO: 584758 - RNA, 19 nt, Artificial Sequence
  Description of Artificial Sequence: Synthetic oligonucleotide
agauaggugagucucuuag

SEQ ID NO: 584759 - RNA, 19 nt, Artificial Sequence
  Description of Artificial Sequence: Synthetic oligonucleotide
ucugaaacccuagaauugg

SEQ ID NO: 584760 - RNA, 19 nt, Artificial Sequence
  Description of Artificial Sequence: Synthetic oligonucleotide
ugugcuuucuauuuagagu

SEQ ID NO: 584761 - RNA, 19 nt, Artificial Sequence
  Description of Artificial Sequence: Synthetic oligonucleotide
uuaaauagauaggugaguc

SEQ ID NO: 584762 - RNA, 19 nt, Artificial Sequence
  Description of Artificial Sequence: Synthetic oligonucleotide
aacacgaaacuagaauaac

SEQ ID NO: 584763 - RNA, 19 nt, Artificial Sequence
  Description of Artificial Sequence: Synthetic oligonucleotide
agauguugcgaagugauuc

SEQ ID NO: 584764 - RNA, 19 nt, Artificial Sequence
  Description of Artificial Sequence: Synthetic oligonucleotide
gugugauuagaauuugggg

SEQ ID NO: 584765 - RNA, 19 nt, Artificial Sequence
  Description of Artificial Sequence: Synthetic oligonucleotide
uuaucaaguagcaauuaua

SEQ ID NO: 584766 - RNA, 19 nt, Artificial Sequence
  Description of Artificial Sequence: Synthetic oligonucleotide
aagaggaacaaaugcuucu

SEQ ID NO: 584767 - RNA, 19 nt, Artificial Sequence
  Description of Artificial Sequence: Synthetic oligonucleotide
gaugauagguucaaucacc

SEQ ID NO: 584768 - RNA, 19 nt, Artificial Sequence
  Description of Artificial Sequence: Synthetic oligonucleotide
uguguguucucgcuuugcg

SEQ ID NO: 584769 - RNA, 19 nt, Artificial Sequence
  Description of Artificial Sequence: Synthetic oligonucleotide
aggucauucggcuuugagg

SEQ ID NO: 584770 - RNA, 19 nt, Artificial Sequence
  Description of Artificial Sequence: Synthetic oligonucleotide
uggugcaagacaaccaaag

SEQ ID NO: 584771 - RNA, 19 nt, Artificial Sequence
  Description of Artificial Sequence: Synthetic oligonucleotide
auaugugcuuucuauuuag

SEQ ID NO: 584772 - RNA, 19 nt, Artificial Sequence
  Description of Artificial Sequence: Synthetic oligonucleotide
uuuaucaaguagcaauuau

SEQ ID NO: 584773 - RNA, 19 nt, Artificial Sequence
  Description of Artificial Sequence: Synthetic oligonucleotide
uagagugccaccccgccgg

SEQ ID NO: 584774 - RNA, 19 nt, Artificial Sequence
  Description of Artificial Sequence: Synthetic oligonucleotide
cuggcaaucuacaaggcac

SEQ ID NO: 584775 - RNA, 19 nt, Artificial Sequence
  Description of Artificial Sequence: Synthetic oligonucleotide
aauuuuguagguggcaacu

SEQ ID NO: 584776 - RNA, 19 nt, Artificial Sequence
  Description of Artificial Sequence: Synthetic oligonucleotide
aaggcguugccaucugugg

SEQ ID NO: 584777 - RNA, 19 nt, Artificial Sequence
  Description of Artificial Sequence: Synthetic oligonucleotide
uuugcaaggacuugauuaa

SEQ ID NO: 584778 - RNA, 19 nt, Artificial Sequence
  Description of Artificial Sequence: Synthetic oligonucleotide
uguuuggcccacaacaggu

SEQ ID NO: 584779 - RNA, 19 nt, Artificial Sequence
  Description of Artificial Sequence: Synthetic oligonucleotide
aaugcgguacuuucugugu

SEQ ID NO: 584780 - RNA, 19 nt, Artificial Sequence
  Description of Artificial Sequence: Synthetic oligonucleotide
ugcuugccaagucugaaug

SEQ ID NO: 584781 - RNA, 19 nt, Artificial Sequence
  Description of Artificial Sequence: Synthetic oligonucleotide
gaugaggcgacagagccag

SEQ ID NO: 584782 - RNA, 19 nt, Artificial Sequence
  Description of Artificial Sequence: Synthetic oligonucleotide
accgcaaccacguggacag

SEQ ID NO: 584783 - RNA, 19 nt, Artificial Sequence
  Description of Artificial Sequence: Synthetic oligonucleotide
uuaguucuggaaaccuucc

SEQ ID NO: 584784 - RNA, 19 nt, Artificial Sequence
  Description of Artificial Sequence: Synthetic oligonucleotide
augggcaaagacuucccac

SEQ ID NO: 584785 - RNA, 19 nt, Artificial Sequence
  Description of Artificial Sequence: Synthetic oligonucleotide
ugaaacccuagaauuggug

SEQ ID NO: 584786 - RNA, 19 nt, Artificial Sequence
  Description of Artificial Sequence: Synthetic oligonucleotide
aaagauguugcgaagugau

SEQ ID NO: 584787 - RNA, 19 nt, Artificial Sequence
  Description of Artificial Sequence: Synthetic oligonucleotide
ugauucugaaacccuagaa

SEQ ID NO: 584788 - RNA, 19 nt, Artificial Sequence
  Description of Artificial Sequence: Synthetic oligonucleotide
uaaauagauaggugagucu

SEQ ID NO: 584789 - RNA, 19 nt, Artificial Sequence
  Description of Artificial Sequence: Synthetic oligonucleotide
uggcaaucuacaaggcacg

SEQ ID NO: 584790 - RNA, 19 nt, Artificial Sequence
  Description of Artificial Sequence: Synthetic oligonucleotide
uugucuauguccagcagaa

SEQ ID NO: 584791 - RNA, 19 nt, Artificial Sequence
  Description of Artificial Sequence: Synthetic oligonucleotide
ucgccaucaaugcuugagg

SEQ ID NO: 584792 - RNA, 19 nt, Artificial Sequence
  Description of Artificial Sequence: Synthetic oligonucleotide
aucagugacgauucuggag

SEQ ID NO: 584793 - RNA, 19 nt, Artificial Sequence
  Description of Artificial Sequence: Synthetic oligonucleotide
uucuauuuagagugccacc

SEQ ID NO: 584794 - RNA, 19 nt, Artificial Sequence
  Description of Artificial Sequence: Synthetic oligonucleotide
aaucuacaaggcacgacuc

SEQ ID NO: 584795 - RNA, 19 nt, Artificial Sequence
  Description of Artificial Sequence: Synthetic oligonucleotide
uucauccuagauaaagcaa

SEQ ID NO: 584796 - RNA, 19 nt, Artificial Sequence
  Description of Artificial Sequence: Synthetic oligonucleotide
gaauuggugucuuaguucu

SEQ ID NO: 584797 - RNA, 19 nt, Artificial Sequence
  Description of Artificial Sequence: Synthetic oligonucleotide
uccaauaugccugcagaag

SEQ ID NO: 584798 - RNA, 19 nt, Artificial Sequence
  Description of Artificial Sequence: Synthetic oligonucleotide
agaggggauaggcccaccc

SEQ ID NO: 584799 - RNA, 19 nt, Artificial Sequence
  Description of Artificial Sequence: Synthetic oligonucleotide
caaguagcaggaaguaggc

SEQ ID NO: 584800 - RNA, 19 nt, Artificial Sequence
  Description of Artificial Sequence: Synthetic oligonucleotide
ggucauucggcuuugagga

SEQ ID NO: 584801 - RNA, 19 nt, Artificial Sequence
  Description of Artificial Sequence: Synthetic oligonucleotide
uuagagugccaccccgccg

SEQ ID NO: 584802 - RNA, 19 nt, Artificial Sequence
  Description of Artificial Sequence: Synthetic oligonucleotide
cauccuagauaaagcaagc

SEQ ID NO: 584803 - RNA, 19 nt, Artificial Sequence
  Description of Artificial Sequence: Synthetic oligonucleotide
auuaaauagauaggugagu

SEQ ID NO: 584804 - RNA, 19 nt, Artificial Sequence
  Description of Artificial Sequence: Synthetic oligonucleotide
aaacacgaaacuagaauaa

SEQ ID NO: 584805 - RNA, 19 nt, Artificial Sequence
  Description of Artificial Sequence: Synthetic oligonucleotide
guugcuaggagucauuuua

SEQ ID NO: 584806 - RNA, 19 nt, Artificial Sequence
  Description of Artificial Sequence: Synthetic oligonucleotide
agaaccaaucugcaugcug

SEQ ID NO: 584807 - RNA, 19 nt, Artificial Sequence
  Description of Artificial Sequence: Synthetic oligonucleotide
gcaacuugcauaauuaaug

SEQ ID NO: 584808 - RNA, 19 nt, Artificial Sequence
  Description of Artificial Sequence: Synthetic oligonucleotide
auuugggguagcaagagga

SEQ ID NO: 584809 - RNA, 19 nt, Artificial Sequence
  Description of Artificial Sequence: Synthetic oligonucleotide
augauagguucaaucaccg

SEQ ID NO: 584810 - RNA, 19 nt, Artificial Sequence
  Description of Artificial Sequence: Synthetic oligonucleotide
cagacuguauuuaauacaa

SEQ ID NO: 584811 - RNA, 19 nt, Artificial Sequence
  Description of Artificial Sequence: Synthetic oligonucleotide
cucgacgcagaguaugagg

SEQ ID NO: 584812 - RNA, 19 nt, Artificial Sequence
  Description of Artificial Sequence: Synthetic oligonucleotide
ugauuagaauuugggguag

SEQ ID NO: 584813 - RNA, 19 nt, Artificial Sequence
  Description of Artificial Sequence: Synthetic oligonucleotide
uguugcgaagugauucuga

SEQ ID NO: 584814 - RNA, 19 nt, Artificial Sequence
  Description of Artificial Sequence: Synthetic oligonucleotide
guggcggcacgcuaggucg

SEQ ID NO: 584815 - RNA, 19 nt, Artificial Sequence
  Description of Artificial Sequence: Synthetic oligonucleotide
gaaacccuagaauuggugu

SEQ ID NO: 584816 - RNA, 19 nt, Artificial Sequence
  Description of Artificial Sequence: Synthetic oligonucleotide
gcuguuauccccugcgugg

SEQ ID NO: 584817 - RNA, 19 nt, Artificial Sequence
  Description of Artificial Sequence: Synthetic oligonucleotide
uguucucgcuuugcgaggg

SEQ ID NO: 584818 - RNA, 19 nt, Artificial Sequence
  Description of Artificial Sequence: Synthetic oligonucleotide
ucuacaaggcacgacucac

SEQ ID NO: 584819 - RNA, 19 nt, Artificial Sequence
  Description of Artificial Sequence: Synthetic oligonucleotide
uaggugagucucuuaguca

SEQ ID NO: 584820 - RNA, 19 nt, Artificial Sequence
  Description of Artificial Sequence: Synthetic oligonucleotide
agccccugcuccaauaugc

SEQ ID NO: 584821 - RNA, 19 nt, Artificial Sequence
  Description of Artificial Sequence: Synthetic oligonucleotide
gugauuagaauuuggggua

SEQ ID NO: 584822 - RNA, 19 nt, Artificial Sequence
  Description of Artificial Sequence: Synthetic oligonucleotide
caaugcgguacuuucugug

SEQ ID NO: 584823 - RNA, 19 nt, Artificial Sequence
  Description of Artificial Sequence: Synthetic oligonucleotide
cugggcaagcuuugcaagg

SEQ ID NO: 584824 - RNA, 19 nt, Artificial Sequence
  Description of Artificial Sequence: Synthetic oligonucleotide
aagcuuugcaaggacuuga

SEQ ID NO: 584825 - RNA, 19 nt, Artificial Sequence
  Description of Artificial Sequence: Synthetic oligonucleotide
aagggcugcguguguuugg

SEQ ID NO: 584826 - RNA, 19 nt, Artificial Sequence
  Description of Artificial Sequence: Synthetic oligonucleotide
ugcaaggcuguuauccccu

SEQ ID NO: 584827 - RNA, 19 nt, Artificial Sequence
  Description of Artificial Sequence: Synthetic oligonucleotide
cuguguuaacagcaugggc

SEQ ID NO: 584828 - RNA, 19 nt, Artificial Sequence
  Description of Artificial Sequence: Synthetic oligonucleotide
ugaggugugcccaccgaga

SEQ ID NO: 584829 - RNA, 19 nt, Artificial Sequence
  Description of Artificial Sequence: Synthetic oligonucleotide
uuugggguagcaagaggaa

SEQ ID NO: 584830 - RNA, 19 nt, Artificial Sequence
  Description of Artificial Sequence: Synthetic oligonucleotide
ugauagguucaaucaccgc

SEQ ID NO: 584831 - RNA, 19 nt, Artificial Sequence
  Description of Artificial Sequence: Synthetic oligonucleotide
agaggaacaaaugcuucug

SEQ ID NO: 584832 - RNA, 19 nt, Artificial Sequence
  Description of Artificial Sequence: Synthetic oligonucleotide
aggcguugccaucuguggg

SEQ ID NO: 584833 - RNA, 19 nt, Artificial Sequence
  Description of Artificial Sequence: Synthetic oligonucleotide
cugaaugcauuucaggaaa

SEQ ID NO: 584834 - RNA, 19 nt, Artificial Sequence
  Description of Artificial Sequence: Synthetic oligonucleotide
ucagcccuagagcucugag

SEQ ID NO: 584835 - RNA, 19 nt, Artificial Sequence
  Description of Artificial Sequence: Synthetic oligonucleotide
acacgaaacuagaauaaca

SEQ ID NO: 584836 - RNA, 19 nt, Artificial Sequence
  Description of Artificial Sequence: Synthetic oligonucleotide
uucuggcaaucuacaaggc

SEQ ID NO: 584837 - RNA, 19 nt, Artificial Sequence
  Description of Artificial Sequence: Synthetic oligonucleotide
gaaagauguugcgaaguga

SEQ ID NO: 584838 - RNA, 19 nt, Artificial Sequence
  Description of Artificial Sequence: Synthetic oligonucleotide
aucuacaaggcacgacuca

SEQ ID NO: 584839 - RNA, 19 nt, Artificial Sequence
  Description of Artificial Sequence: Synthetic oligonucleotide
ggaaagauguugcgaagug

SEQ ID NO: 584840 - RNA, 19 nt, Artificial Sequence
  Description of Artificial Sequence: Synthetic oligonucleotide
ugcgguacuuucuguguca

SEQ ID NO: 584841 - RNA, 19 nt, Artificial Sequence
  Description of Artificial Sequence: Synthetic oligonucleotide
auuaaacacgaaacuagaa

SEQ ID NO: 584842 - RNA, 19 nt, Artificial Sequence
  Description of Artificial Sequence: Synthetic oligonucleotide
uuugcgagggauucugcuu

SEQ ID NO: 584843 - RNA, 19 nt, Artificial Sequence
  Description of Artificial Sequence: Synthetic oligonucleotide
ugcacacacagagucuuug

SEQ ID NO: 584844 - RNA, 19 nt, Artificial Sequence
  Description of Artificial Sequence: Synthetic oligonucleotide
ucgguugcggggcuugggc

SEQ ID NO: 584845 - RNA, 19 nt, Artificial Sequence
  Description of Artificial Sequence: Synthetic oligonucleotide
guugccaucugugggcggg

SEQ ID NO: 584846 - RNA, 19 nt, Artificial Sequence
  Description of Artificial Sequence: Synthetic oligonucleotide
caaucuacaaggcacgacu

SEQ ID NO: 584847 - RNA, 19 nt, Artificial Sequence
  Description of Artificial Sequence: Synthetic oligonucleotide
acguggacagauguggcag

SEQ ID NO: 584848 - RNA, 19 nt, Artificial Sequence
  Description of Artificial Sequence: Synthetic oligonucleotide
acgacacaggucauucggc

SEQ ID NO: 584849 - RNA, 19 nt, Artificial Sequence
  Description of Artificial Sequence: Synthetic oligonucleotide
agacacagacuguauuuaa

SEQ ID NO: 584850 - RNA, 19 nt, Artificial Sequence
  Description of Artificial Sequence: Synthetic oligonucleotide
aggugugcccaccgagagc

SEQ ID NO: 584851 - RNA, 19 nt, Artificial Sequence
  Description of Artificial Sequence: Synthetic oligonucleotide
acaaggcacgacucacauc

SEQ ID NO: 584852 - RNA, 19 nt, Artificial Sequence
  Description of Artificial Sequence: Synthetic oligonucleotide
gauuagaauuugggguagc

SEQ ID NO: 584853 - RNA, 19 nt, Artificial Sequence
  Description of Artificial Sequence: Synthetic oligonucleotide
gauguugcgaagugauucu

SEQ ID NO: 584854 - RNA, 19 nt, Artificial Sequence
  Description of Artificial Sequence: Synthetic oligonucleotide
ugcguggucagaccuuccu

SEQ ID NO: 584855 - RNA, 19 nt, Artificial Sequence
  Description of Artificial Sequence: Synthetic oligonucleotide
gaggggauaggcccacccc

SEQ ID NO: 584856 - RNA, 19 nt, Artificial Sequence
  Description of Artificial Sequence: Synthetic oligonucleotide
ugggagucuaguccugcgu

SEQ ID NO: 584857 - RNA, 19 nt, Artificial Sequence
  Description of Artificial Sequence: Synthetic oligonucleotide
ugugaggugugcccaccga

SEQ ID NO: 584858 - RNA, 19 nt, Artificial Sequence
  Description of Artificial Sequence: Synthetic oligonucleotide
gugaggugugcccaccgag

SEQ ID NO: 584859 - RNA, 19 nt, Artificial Sequence
  Description of Artificial Sequence: Synthetic oligonucleotide
ugccuggagagcucugacc

SEQ ID NO: 584860 - RNA, 19 nt, Artificial Sequence
  Description of Artificial Sequence: Synthetic oligonucleotide
cacagcucgacgcagagua

SEQ ID NO: 584861 - RNA, 19 nt, Artificial Sequence
  Description of Artificial Sequence: Synthetic oligonucleotide
agggcugcguguguuuggc

SEQ ID NO: 584862 - RNA, 19 nt, Artificial Sequence
  Description of Artificial Sequence: Synthetic oligonucleotide
agucuaguccugcgugguc

SEQ ID NO: 584863 - RNA, 19 nt, Artificial Sequence
  Description of Artificial Sequence: Synthetic oligonucleotide
ccuagauaaagcaagccaa

SEQ ID NO: 584864 - RNA, 19 nt, Artificial Sequence
  Description of Artificial Sequence: Synthetic oligonucleotide
auagguucaaucaccgcaa

SEQ ID NO: 584865 - RNA, 19 nt, Artificial Sequence
  Description of Artificial Sequence: Synthetic oligonucleotide
acugugaggugugcccacc

SEQ ID NO: 584866 - RNA, 19 nt, Artificial Sequence
  Description of Artificial Sequence: Synthetic oligonucleotide
guguucucgcuuugcgagg

SEQ ID NO: 584867 - RNA, 19 nt, Artificial Sequence
  Description of Artificial Sequence: Synthetic oligonucleotide
aagugauucugaaacccua

SEQ ID NO: 584868 - RNA, 19 nt, Artificial Sequence
  Description of Artificial Sequence: Synthetic oligonucleotide
caccguagguguuuccuug

SEQ ID NO: 584869 - RNA, 19 nt, Artificial Sequence
  Description of Artificial Sequence: Synthetic oligonucleotide
uccaccguagguguuuccu

SEQ ID NO: 584870 - RNA, 19 nt, Artificial Sequence
  Description of Artificial Sequence: Synthetic oligonucleotide
ggugcaaggcuguuauccc

SEQ ID NO: 584871 - RNA, 19 nt, Artificial Sequence
  Description of Artificial Sequence: Synthetic oligonucleotide
uagguucaaucaccgcaac

SEQ ID NO: 584872 - RNA, 19 nt, Artificial Sequence
  Description of Artificial Sequence: Synthetic oligonucleotide
aggcaacuugcauaauuaa

SEQ ID NO: 584873 - RNA, 19 nt, Artificial Sequence
  Description of Artificial Sequence: Synthetic oligonucleotide
uguuauccccugcgugggc

SEQ ID NO: 584874 - RNA, 19 nt, Artificial Sequence
  Description of Artificial Sequence: Synthetic oligonucleotide
cuguuauccccugcguggg

SEQ ID NO: 584875 - RNA, 19 nt, Artificial Sequence
  Description of Artificial Sequence: Synthetic oligonucleotide
uggcggcuggaaagcaggg

SEQ ID NO: 584876 - RNA, 19 nt, Artificial Sequence
  Description of Artificial Sequence: Synthetic oligonucleotide
uugccaagucugaaugcau

SEQ ID NO: 584877 - RNA, 19 nt, Artificial Sequence
  Description of Artificial Sequence: Synthetic oligonucleotide
cauugggaugugugauuag

SEQ ID NO: 584878 - RNA, 19 nt, Artificial Sequence
  Description of Artificial Sequence: Synthetic oligonucleotide
cagugacgauucuggaggc

SEQ ID NO: 584879 - RNA, 19 nt, Artificial Sequence
  Description of Artificial Sequence: Synthetic oligonucleotide
gauaggugagucucuuagu

SEQ ID NO: 584880 - RNA, 19 nt, Artificial Sequence
  Description of Artificial Sequence: Synthetic oligonucleotide
ggaacaaaugcuucugaua

SEQ ID NO: 584881 - RNA, 19 nt, Artificial Sequence
  Description of Artificial Sequence: Synthetic oligonucleotide
cucgcuuugcgagggauuc

SEQ ID NO: 584882 - RNA, 19 nt, Artificial Sequence
  Description of Artificial Sequence: Synthetic oligonucleotide
agccaacuucuucacgaca

SEQ ID NO: 584883 - RNA, 19 nt, Artificial Sequence
  Description of Artificial Sequence: Synthetic oligonucleotide
gugggcgccaggcggaugc

SEQ ID NO: 584884 - RNA, 19 nt, Artificial Sequence
  Description of Artificial Sequence: Synthetic oligonucleotide
uguugcuaggagucauuuu

SEQ ID NO: 584885 - RNA, 19 nt, Artificial Sequence
  Description of Artificial Sequence: Synthetic oligonucleotide
aauuggugucuuaguucug

SEQ ID NO: 584886 - RNA, 19 nt, Artificial Sequence
  Description of Artificial Sequence: Synthetic oligonucleotide
ggcguugccaucugugggc

SEQ ID NO: 584887 - RNA, 19 nt, Artificial Sequence
  Description of Artificial Sequence: Synthetic oligonucleotide
cugcgugggcgccaggcgg

SEQ ID NO: 584888 - RNA, 19 nt, Artificial Sequence
  Description of Artificial Sequence: Synthetic oligonucleotide
cacgcuaggucgguugcgg

SEQ ID NO: 584889 - RNA, 19 nt, Artificial Sequence
  Description of Artificial Sequence: Synthetic oligonucleotide
gguguuuccuuguucuauc

SEQ ID NO: 584890 - RNA, 19 nt, Artificial Sequence
  Description of Artificial Sequence: Synthetic oligonucleotide
cagcaagucugaaggaaca

SEQ ID NO: 584891 - RNA, 19 nt, Artificial Sequence
  Description of Artificial Sequence: Synthetic oligonucleotide
cugugaggugugcccaccg

SEQ ID NO: 584892 - RNA, 19 nt, Artificial Sequence
  Description of Artificial Sequence: Synthetic oligonucleotide
uggguguuugagguggcgu

SEQ ID NO: 584893 - RNA, 19 nt, Artificial Sequence
  Description of Artificial Sequence: Synthetic oligonucleotide
uagucacuccaaguugcug

SEQ ID NO: 584894 - RNA, 19 nt, Artificial Sequence
  Description of Artificial Sequence: Synthetic oligonucleotide
acccaguucugcucaccag

SEQ ID NO: 584895 - RNA, 19 nt, Artificial Sequence
  Description of Artificial Sequence: Synthetic oligonucleotide
gguguuugagguggcgugg

SEQ ID NO: 584896 - RNA, 19 nt, Artificial Sequence
  Description of Artificial Sequence: Synthetic oligonucleotide
cagucgccaucaaugcuug

SEQ ID NO: 584897 - RNA, 19 nt, Artificial Sequence
  Description of Artificial Sequence: Synthetic oligonucleotide
cuugcauaauuaauguguu

SEQ ID NO: 584898 - RNA, 19 nt, Artificial Sequence
  Description of Artificial Sequence: Synthetic oligonucleotide
ggguguuugagguggcgug

SEQ ID NO: 584899 - RNA, 19 nt, Artificial Sequence
  Description of Artificial Sequence: Synthetic oligonucleotide
gcgaagugauucugaaacc

SEQ ID NO: 584900 - RNA, 19 nt, Artificial Sequence
  Description of Artificial Sequence: Synthetic oligonucleotide
acgcuaggucgguugcggg

SEQ ID NO: 584901 - RNA, 19 nt, Artificial Sequence
  Description of Artificial Sequence: Synthetic oligonucleotide
uagauaggugagucucuua

SEQ ID NO: 584902 - RNA, 19 nt, Artificial Sequence
  Description of Artificial Sequence: Synthetic oligonucleotide
ugucacccgggcucagccc

SEQ ID NO: 584903 - RNA, 19 nt, Artificial Sequence
  Description of Artificial Sequence: Synthetic oligonucleotide
ggcuguuauccccugcgug

SEQ ID NO: 584904 - RNA, 19 nt, Artificial Sequence
  Description of Artificial Sequence: Synthetic oligonucleotide
cuacaaggcacgacucaca

SEQ ID NO: 584905 - RNA, 19 nt, Artificial Sequence
  Description of Artificial Sequence: Synthetic oligonucleotide
uuccuuguucuaucauuuu

SEQ ID NO: 584906 - RNA, 19 nt, Artificial Sequence
  Description of Artificial Sequence: Synthetic oligonucleotide
gcaagccaacuucuucacg

SEQ ID NO: 584907 - RNA, 19 nt, Artificial Sequence
  Description of Artificial Sequence: Synthetic oligonucleotide
auguugcgaagugauucug

SEQ ID NO: 584908 - RNA, 19 nt, Artificial Sequence
  Description of Artificial Sequence: Synthetic oligonucleotide
cugugggcgggaguggcgg

SEQ ID NO: 584909 - RNA, 19 nt, Artificial Sequence
  Description of Artificial Sequence: Synthetic oligonucleotide
ucucgcuuugcgagggauu

SEQ ID NO: 584910 - RNA, 19 nt, Artificial Sequence
  Description of Artificial Sequence: Synthetic oligonucleotide
guggcguggggccaggcuc

SEQ ID NO: 584911 - RNA, 19 nt, Artificial Sequence
  Description of Artificial Sequence: Synthetic oligonucleotide
gacgcagaguaugagggcu

SEQ ID NO: 584912 - RNA, 19 nt, Artificial Sequence
  Description of Artificial Sequence: Synthetic oligonucleotide
auuuuguagguggcaacuu

SEQ ID NO: 584913 - RNA, 19 nt, Artificial Sequence
  Description of Artificial Sequence: Synthetic oligonucleotide
uggcggcacgcuaggucgg

SEQ ID NO: 584914 - RNA, 19 nt, Artificial Sequence
  Description of Artificial Sequence: Synthetic oligonucleotide
ucuucacgacacaggucau

SEQ ID NO: 584915 - RNA, 19 nt, Artificial Sequence
  Description of Artificial Sequence: Synthetic oligonucleotide
aagauguugcgaagugauu

SEQ ID NO: 584916 - RNA, 19 nt, Artificial Sequence
  Description of Artificial Sequence: Synthetic oligonucleotide
uggcguggggccaggcucu

SEQ ID NO: 584917 - RNA, 19 nt, Artificial Sequence
  Description of Artificial Sequence: Synthetic oligonucleotide
agguagguuuccugguuuu

SEQ ID NO: 584918 - RNA, 19 nt, Artificial Sequence
  Description of Artificial Sequence: Synthetic oligonucleotide
caugggcaaagacuuccca

SEQ ID NO: 584919 - RNA, 19 nt, Artificial Sequence
  Description of Artificial Sequence: Synthetic oligonucleotide
cagcucgacgcagaguaug

SEQ ID NO: 584920 - RNA, 19 nt, Artificial Sequence
  Description of Artificial Sequence: Synthetic oligonucleotide
cacguggacagauguggca

SEQ ID NO: 584921 - RNA, 19 nt, Artificial Sequence
  Description of Artificial Sequence: Synthetic oligonucleotide
aggcuguuauccccugcgu

SEQ ID NO: 584922 - RNA, 19 nt, Artificial Sequence
  Description of Artificial Sequence: Synthetic oligonucleotide
agccaaggcguugccaucu

SEQ ID NO: 584923 - RNA, 19 nt, Artificial Sequence
  Description of Artificial Sequence: Synthetic oligonucleotide
caagacaaccaaaguccaa

SEQ ID NO: 584924 - RNA, 19 nt, Artificial Sequence
  Description of Artificial Sequence: Synthetic oligonucleotide
uguuaacagcaugggcaaa

SEQ ID NO: 584925 - RNA, 19 nt, Artificial Sequence
  Description of Artificial Sequence: Synthetic oligonucleotide
ccugauggggccuggcuug

SEQ ID NO: 584926 - RNA, 19 nt, Artificial Sequence
  Description of Artificial Sequence: Synthetic oligonucleotide
gguggcggguggcugggcg

SEQ ID NO: 584927 - RNA, 19 nt, Artificial Sequence
  Description of Artificial Sequence: Synthetic oligonucleotide
gguggcgaagggcugcgug

SEQ ID NO: 584928 - RNA, 19 nt, Artificial Sequence
  Description of Artificial Sequence: Synthetic oligonucleotide
augugcccgugccuggaga

SEQ ID NO: 584929 - RNA, 19 nt, Artificial Sequence
  Description of Artificial Sequence: Synthetic oligonucleotide
guggguguuugagguggcg

SEQ ID NO: 584930 - RNA, 19 nt, Artificial Sequence
  Description of Artificial Sequence: Synthetic oligonucleotide
aggggauaugugcuuucua

SEQ ID NO: 584931 - RNA, 19 nt, Artificial Sequence
  Description of Artificial Sequence: Synthetic oligonucleotide
ugggccgugggagucuagu

SEQ ID NO: 584932 - RNA, 19 nt, Artificial Sequence
  Description of Artificial Sequence: Synthetic oligonucleotide
gcccaccgagagcugaugg

SEQ ID NO: 584933 - RNA, 19 nt, Artificial Sequence
  Description of Artificial Sequence: Synthetic oligonucleotide
caacagguuagggcccagc

SEQ ID NO: 584934 - RNA, 19 nt, Artificial Sequence
  Description of Artificial Sequence: Synthetic oligonucleotide
gcuaggucgguugcggggc

SEQ ID NO: 584935 - RNA, 19 nt, Artificial Sequence
  Description of Artificial Sequence: Synthetic oligonucleotide
agcucgacgcagaguauga

SEQ ID NO: 584936 - RNA, 19 nt, Artificial Sequence
  Description of Artificial Sequence: Synthetic oligonucleotide
ggaguggcggcuggaaagc

SEQ ID NO: 584937 - RNA, 19 nt, Artificial Sequence
  Description of Artificial Sequence: Synthetic oligonucleotide
ggccuguugccuguugcgg

SEQ ID NO: 584938 - RNA, 19 nt, Artificial Sequence
  Description of Artificial Sequence: Synthetic oligonucleotide
gucuuaguucuggaaaccu

SEQ ID NO: 584939 - RNA, 19 nt, Artificial Sequence
  Description of Artificial Sequence: Synthetic oligonucleotide
ggcacgcuaggucgguugc

SEQ ID NO: 584940 - RNA, 19 nt, Artificial Sequence
  Description of Artificial Sequence: Synthetic oligonucleotide
gagguagguuuccugguuu

SEQ ID NO: 584941 - RNA, 19 nt, Artificial Sequence
  Description of Artificial Sequence: Synthetic oligonucleotide
ucacagcucgacgcagagu

SEQ ID NO: 584942 - RNA, 19 nt, Artificial Sequence
  Description of Artificial Sequence: Synthetic oligonucleotide
ggaugugugauuagaauuu

SEQ ID NO: 584943 - RNA, 19 nt, Artificial Sequence
  Description of Artificial Sequence: Synthetic oligonucleotide
cuggagccaaggcguugcc

SEQ ID NO: 584944 - RNA, 19 nt, Artificial Sequence
  Description of Artificial Sequence: Synthetic oligonucleotide
uucugcucaccaggaugga

SEQ ID NO: 584945 - RNA, 19 nt, Artificial Sequence
  Description of Artificial Sequence: Synthetic oligonucleotide
ucaccgcaaccacguggac

SEQ ID NO: 584946 - RNA, 19 nt, Artificial Sequence
  Description of Artificial Sequence: Synthetic oligonucleotide
ggagcugcggcgcgugccc

SEQ ID NO: 584947 - RNA, 19 nt, Artificial Sequence
  Description of Artificial Sequence: Synthetic oligonucleotide
acgcagaguaugagggcug

SEQ ID NO: 584948 - RNA, 19 nt, Artificial Sequence
  Description of Artificial Sequence: Synthetic oligonucleotide
cugcguggucagaccuucc

SEQ ID NO: 584949 - RNA, 19 nt, Artificial Sequence
  Description of Artificial Sequence: Synthetic oligonucleotide
gacacaggucauucggcuu

SEQ ID NO: 584950 - RNA, 19 nt, Artificial Sequence
  Description of Artificial Sequence: Synthetic oligonucleotide
gcgacagagccagcagucg

SEQ ID NO: 584951 - RNA, 19 nt, Artificial Sequence
  Description of Artificial Sequence: Synthetic oligonucleotide
ugcccaccgagagcugaug

SEQ ID NO: 584952 - RNA, 19 nt, Artificial Sequence
  Description of Artificial Sequence: Synthetic oligonucleotide
ggcacugggaagggcauca

SEQ ID NO: 584953 - RNA, 19 nt, Artificial Sequence
  Description of Artificial Sequence: Synthetic oligonucleotide
caccgcaaccacguggaca

SEQ ID NO: 584954 - RNA, 19 nt, Artificial Sequence
  Description of Artificial Sequence: Synthetic oligonucleotide
ucgcuuugcgagggauucu

SEQ ID NO: 584955 - RNA, 19 nt, Artificial Sequence
  Description of Artificial Sequence: Synthetic oligonucleotide
cugcguguguuuggcuuug

SEQ ID NO: 584956 - RNA, 19 nt, Artificial Sequence
  Description of Artificial Sequence: Synthetic oligonucleotide
gagucuaguccugcguggu

SEQ ID NO: 584957 - RNA, 19 nt, Artificial Sequence
  Description of Artificial Sequence: Synthetic oligonucleotide
gugcccggggccuguugcc

SEQ ID NO: 584958 - RNA, 19 nt, Artificial Sequence
  Description of Artificial Sequence: Synthetic oligonucleotide
gggcaagcuuugcaaggac

SEQ ID NO: 584959 - RNA, 19 nt, Artificial Sequence
  Description of Artificial Sequence: Synthetic oligonucleotide
aggucgguugcggggcuug

SEQ ID NO: 584960 - RNA, 19 nt, Artificial Sequence
  Description of Artificial Sequence: Synthetic oligonucleotide
gggguggcggcacgcuagg

SEQ ID NO: 584961 - RNA, 19 nt, Artificial Sequence
  Description of Artificial Sequence: Synthetic oligonucleotide
cgcuaggucgguugcgggg

SEQ ID NO: 584962 - RNA, 19 nt, Artificial Sequence
  Description of Artificial Sequence: Synthetic oligonucleotide
gcccuagagcucugagaag

SEQ ID NO: 584963 - RNA, 19 nt, Artificial Sequence
  Description of Artificial Sequence: Synthetic oligonucleotide
ccugcgugggcgccaggcg

SEQ ID NO: 584964 - RNA, 19 nt, Artificial Sequence
  Description of Artificial Sequence: Synthetic oligonucleotide
aguaggcaacuugcauaau

SEQ ID NO: 584965 - RNA, 19 nt, Artificial Sequence
  Description of Artificial Sequence: Synthetic oligonucleotide
ugcccggggccuguugccu

SEQ ID NO: 584966 - RNA, 19 nt, Artificial Sequence
  Description of Artificial Sequence: Synthetic oligonucleotide
gcaggggauaugugcuuuc

SEQ ID NO: 584967 - RNA, 19 nt, Artificial Sequence
  Description of Artificial Sequence: Synthetic oligonucleotide
gcucgacgcagaguaugag

SEQ ID NO: 584968 - RNA, 19 nt, Artificial Sequence
  Description of Artificial Sequence: Synthetic oligonucleotide
guucucgcuuugcgaggga

SEQ ID NO: 584969 - RNA, 19 nt, Artificial Sequence
  Description of Artificial Sequence: Synthetic oligonucleotide
gccgugggagucuaguccu

SEQ ID NO: 584970 - RNA, 19 nt, Artificial Sequence
  Description of Artificial Sequence: Synthetic oligonucleotide
cgacgcagaguaugagggc

SEQ ID NO: 584971 - RNA, 19 nt, Artificial Sequence
  Description of Artificial Sequence: Synthetic oligonucleotide
ggcaaagacuucccacacu

SEQ ID NO: 584972 - RNA, 19 nt, Artificial Sequence
  Description of Artificial Sequence: Synthetic oligonucleotide
gcacgcuaggucgguugcg

SEQ ID NO: 584973 - RNA, 19 nt, Artificial Sequence
  Description of Artificial Sequence: Synthetic oligonucleotide
ggcaagcuuugcaaggacu

SEQ ID NO: 584974 - RNA, 19 nt, Artificial Sequence
  Description of Artificial Sequence: Synthetic oligonucleotide
ggacuugauuaaauaccua

SEQ ID NO: 584975 - RNA, 19 nt, Artificial Sequence
  Description of Artificial Sequence: Synthetic oligonucleotide
gccccugcuccaauaugcc

SEQ ID NO: 584976 - RNA, 19 nt, Artificial Sequence
  Description of Artificial Sequence: Synthetic oligonucleotide
acagcucgacgcagaguau

SEQ ID NO: 584977 - RNA, 19 nt, Artificial Sequence
  Description of Artificial Sequence: Synthetic oligonucleotide
gggccgugggagucuaguc

SEQ ID NO: 584978 - RNA, 19 nt, Artificial Sequence
  Description of Artificial Sequence: Synthetic oligonucleotide
cgcagaguaugagggcugg

SEQ ID NO: 584979 - RNA, 19 nt, Artificial Sequence
  Description of Artificial Sequence: Synthetic oligonucleotide
gccggugcaaggcuguuau

SEQ ID NO: 584980 - RNA, 19 nt, Artificial Sequence
  Description of Artificial Sequence: Synthetic oligonucleotide
cgugcccggggccuguugc

SEQ ID NO: 584981 - RNA, 19 nt, Artificial Sequence
  Description of Artificial Sequence: Synthetic oligonucleotide
gcugugggcgcugccggug

SEQ ID NO: 584982 - RNA, 19 nt, Artificial Sequence
  Description of Artificial Sequence: Synthetic oligonucleotide
ggucgguugcggggcuugg

SEQ ID NO: 584983 - RNA, 19 nt, Artificial Sequence
  Description of Artificial Sequence: Synthetic oligonucleotide
gcacgacucacauccaguu

SEQ ID NO: 584984 - RNA, 19 nt, Artificial Sequence
  Description of Artificial Sequence: Synthetic oligonucleotide
cgcuuugcgagggauucug

SEQ ID NO: 584985 - RNA, 19 nt, Artificial Sequence
  Description of Artificial Sequence: Synthetic oligonucleotide
ggagguagguuuccugguu

SEQ ID NO: 584986 - RNA, 19 nt, Artificial Sequence
  Description of Artificial Sequence: Synthetic oligonucleotide
caggggauaugugcuuucu

SEQ ID NO: 584987 - RNA, 19 nt, Artificial Sequence
  Description of Artificial Sequence: Synthetic oligonucleotide
cccugcgugggcgccaggc

SEQ ID NO: 584988 - RNA, 19 nt, Artificial Sequence
  Description of Artificial Sequence: Synthetic oligonucleotide
gcugggcgccuggaugggg

SEQ ID NO: 584989 - RNA, 19 nt, Artificial Sequence
  Description of Artificial Sequence: Synthetic oligonucleotide
uaggucgguugcggggcuu

SEQ ID NO: 584990 - RNA, 19 nt, Artificial Sequence
  Description of Artificial Sequence: Synthetic oligonucleotide
ccaaguugcugucuguguu

SEQ ID NO: 584991 - RNA, 19 nt, Artificial Sequence
  Description of Artificial Sequence: Synthetic oligonucleotide
caccccgccggugggccug

SEQ ID NO: 584992 - RNA, 19 nt, Artificial Sequence
  Description of Artificial Sequence: Synthetic oligonucleotide
auccccugcgugggcgcca

SEQ ID NO: 584993 - RNA, 19 nt, Artificial Sequence
  Description of Artificial Sequence: Synthetic oligonucleotide
cggcacgcuaggucgguug

SEQ ID NO: 584994 - RNA, 19 nt, Artificial Sequence
  Description of Artificial Sequence: Synthetic oligonucleotide
gcgagggauucugcuuggc

SEQ ID NO: 584995 - RNA, 19 nt, Artificial Sequence
  Description of Artificial Sequence: Synthetic oligonucleotide
cguugccaucugugggcgg

SEQ ID NO: 584996 - RNA, 19 nt, Artificial Sequence
  Description of Artificial Sequence: Synthetic oligonucleotide
ccgugggagucuaguccug

SEQ ID NO: 584997 - RNA, 19 nt, Artificial Sequence
  Description of Artificial Sequence: Synthetic oligonucleotide
cuucacgacacaggucauu

SEQ ID NO: 584998 - RNA, 19 nt, Artificial Sequence
  Description of Artificial Sequence: Synthetic oligonucleotide
cuaggucgguugcggggcu

SEQ ID NO: 584999 - RNA, 19 nt, Artificial Sequence
  Description of Artificial Sequence: Synthetic oligonucleotide
gccaccccgccggugggcc

SEQ ID NO: 585000 - RNA, 19 nt, Artificial Sequence
  Description of Artificial Sequence: Synthetic oligonucleotide
gaagggcaucagugacgau

SEQ ID NO: 585001 - RNA, 19 nt, Artificial Sequence
  Description of Artificial Sequence: Synthetic oligonucleotide
ccggggcagguuucuucac

SEQ ID NO: 585002 - RNA, 19 nt, Artificial Sequence
  Description of Artificial Sequence: Synthetic oligonucleotide
gugggccgugggagucuag

SEQ ID NO: 585003 - RNA, 19 nt, Artificial Sequence
  Description of Artificial Sequence: Synthetic oligonucleotide
ccggugcaaggcuguuauc

SEQ ID NO: 585004 - RNA, 19 nt, Artificial Sequence
  Description of Artificial Sequence: Synthetic oligonucleotide
gcguggucagaccuuccuu

SEQ ID NO: 585005 - RNA, 19 nt, Artificial Sequence
  Description of Artificial Sequence: Synthetic oligonucleotide
gccaucugugggcgggagu

SEQ ID NO: 585006 - RNA, 19 nt, Artificial Sequence
  Description of Artificial Sequence: Synthetic oligonucleotide
ccccuuuaucaaguagcaa

SEQ ID NO: 585007 - RNA, 19 nt, Artificial Sequence
  Description of Artificial Sequence: Synthetic oligonucleotide
gcgugcccggggccuguug

SEQ ID NO: 585008 - RNA, 19 nt, Artificial Sequence
  Description of Artificial Sequence: Synthetic oligonucleotide
gcugccggugcaaggcugu

SEQ ID NO: 585009 - RNA, 19 nt, Artificial Sequence
  Description of Artificial Sequence: Synthetic oligonucleotide
ggugccggggcagguuucu

SEQ ID NO: 585010 - RNA, 19 nt, Artificial Sequence
  Description of Artificial Sequence: Synthetic oligonucleotide
gcguggggccaggcucugg

SEQ ID NO: 585011 - RNA, 19 nt, Artificial Sequence
  Description of Artificial Sequence: Synthetic oligonucleotide
ccgugccuggagagcucug

SEQ ID NO: 585012 - RNA, 19 nt, Artificial Sequence
  Description of Artificial Sequence: Synthetic oligonucleotide
ccccugcuccaauaugccu

SEQ ID NO: 585013 - RNA, 19 nt, Artificial Sequence
  Description of Artificial Sequence: Synthetic oligonucleotide
gcgguacuuucugugucau

SEQ ID NO: 585014 - RNA, 19 nt, Artificial Sequence
  Description of Artificial Sequence: Synthetic oligonucleotide
ggcgggaguggcggcugga

SEQ ID NO: 585015 - RNA, 19 nt, Artificial Sequence
  Description of Artificial Sequence: Synthetic oligonucleotide
ccaaggcguugccaucugu

SEQ ID NO: 585016 - RNA, 19 nt, Artificial Sequence
  Description of Artificial Sequence: Synthetic oligonucleotide
gggcugcguguguuuggcu

SEQ ID NO: 585017 - RNA, 19 nt, Artificial Sequence
  Description of Artificial Sequence: Synthetic oligonucleotide
gguuagggcccagcacaau

SEQ ID NO: 585018 - RNA, 19 nt, Artificial Sequence
  Description of Artificial Sequence: Synthetic oligonucleotide
ccaccguagguguuuccuu

SEQ ID NO: 585019 - RNA, 19 nt, Artificial Sequence
  Description of Artificial Sequence: Synthetic oligonucleotide
ggguuccaugcugcugugu

SEQ ID NO: 585020 - RNA, 19 nt, Artificial Sequence
  Description of Artificial Sequence: Synthetic oligonucleotide
cggggccuguugccuguug

SEQ ID NO: 585021 - RNA, 19 nt, Artificial Sequence
  Description of Artificial Sequence: Synthetic oligonucleotide
ggcggcacgcuaggucggu

SEQ ID NO: 585022 - RNA, 19 nt, Artificial Sequence
  Description of Artificial Sequence: Synthetic oligonucleotide
cccggggccuguugccugu

SEQ ID NO: 585023 - RNA, 19 nt, Artificial Sequence
  Description of Artificial Sequence: Synthetic oligonucleotide
gugccggggcagguuucuu

SEQ ID NO: 585024 - RNA, 19 nt, Artificial Sequence
  Description of Artificial Sequence: Synthetic oligonucleotide
cccgccggugggccuggaa

SEQ ID NO: 585025 - RNA, 19 nt, Artificial Sequence
  Description of Artificial Sequence: Synthetic oligonucleotide
ggguggcgaagggcugcgu

SEQ ID NO: 585026 - RNA, 19 nt, Artificial Sequence
  Description of Artificial Sequence: Synthetic oligonucleotide
ccaccccgccggugggccu

SEQ ID NO: 585027 - RNA, 19 nt, Artificial Sequence
  Description of Artificial Sequence: Synthetic oligonucleotide
ccggggccuguugccuguu

SEQ ID NO: 585028 - RNA, 19 nt, Artificial Sequence
  Description of Artificial Sequence: Synthetic oligonucleotide
ccccgccggugggccugga

SEQ ID NO: 585029 - RNA, 19 nt, Artificial Sequence
  Description of Artificial Sequence: Synthetic oligonucleotide
aauaauagaaauuacguug

SEQ ID NO: 585030 - RNA, 19 nt, Artificial Sequence
  Description of Artificial Sequence: Synthetic oligonucleotide
auaguaacacaauaaaucc

SEQ ID NO: 585031 - RNA, 19 nt, Artificial Sequence
  Description of Artificial Sequence: Synthetic oligonucleotide
ucaaucaaugcauugaagg

SEQ ID NO: 585032 - RNA, 19 nt, Artificial Sequence
  Description of Artificial Sequence: Synthetic oligonucleotide
ucauagaugauuaaggaug

SEQ ID NO: 585033 - RNA, 19 nt, Artificial Sequence
  Description of Artificial Sequence: Synthetic oligonucleotide
aaagagaugaauaauauga

SEQ ID NO: 585034 - RNA, 19 nt, Artificial Sequence
  Description of Artificial Sequence: Synthetic oligonucleotide
ucuaauucauucaugaugu

SEQ ID NO: 585035 - RNA, 19 nt, Artificial Sequence
  Description of Artificial Sequence: Synthetic oligonucleotide
agaacagccacuuuauccc

SEQ ID NO: 585036 - RNA, 19 nt, Artificial Sequence
  Description of Artificial Sequence: Synthetic oligonucleotide
uaacaauaaauuuugcugc

SEQ ID NO: 585037 - RNA, 19 nt, Artificial Sequence
  Description of Artificial Sequence: Synthetic oligonucleotide
aaaauuuaucaucauccag

SEQ ID NO: 585038 - RNA, 19 nt, Artificial Sequence
  Description of Artificial Sequence: Synthetic oligonucleotide
uuaagcacggaauaugagg

SEQ ID NO: 585039 - RNA, 19 nt, Artificial Sequence
  Description of Artificial Sequence: Synthetic oligonucleotide
aaaacuucgaauaauagaa

SEQ ID NO: 585040 - RNA, 19 nt, Artificial Sequence
  Description of Artificial Sequence: Synthetic oligonucleotide
cacaauaaauccaagagac

SEQ ID NO: 585041 - RNA, 19 nt, Artificial Sequence
  Description of Artificial Sequence: Synthetic oligonucleotide
uagucuauuggacacaucc

SEQ ID NO: 585042 - RNA, 19 nt, Artificial Sequence
  Description of Artificial Sequence: Synthetic oligonucleotide
uuauuuaauaacucggugu

SEQ ID NO: 585043 - RNA, 19 nt, Artificial Sequence
  Description of Artificial Sequence: Synthetic oligonucleotide
agguauuagguccuuauac

SEQ ID NO: 585044 - RNA, 19 nt, Artificial Sequence
  Description of Artificial Sequence: Synthetic oligonucleotide
aauuacguugaagaucacc

SEQ ID NO: 585045 - RNA, 19 nt, Artificial Sequence
  Description of Artificial Sequence: Synthetic oligonucleotide
uauucgguaagcaagcucu

SEQ ID NO: 585046 - RNA, 19 nt, Artificial Sequence
  Description of Artificial Sequence: Synthetic oligonucleotide
augcauauaaaacuuccgg

SEQ ID NO: 585047 - RNA, 19 nt, Artificial Sequence
  Description of Artificial Sequence: Synthetic oligonucleotide
gauguauucgguaagcaag

SEQ ID NO: 585048 - RNA, 19 nt, Artificial Sequence
  Description of Artificial Sequence: Synthetic oligonucleotide
ugugaaauccaucauuacu

SEQ ID NO: 585049 - RNA, 19 nt, Artificial Sequence
  Description of Artificial Sequence: Synthetic oligonucleotide
cuggcuaucaacauuuuag

SEQ ID NO: 585050 - RNA, 19 nt, Artificial Sequence
  Description of Artificial Sequence: Synthetic oligonucleotide
uuugcaguguccauaaacu

SEQ ID NO: 585051 - RNA, 19 nt, Artificial Sequence
  Description of Artificial Sequence: Synthetic oligonucleotide
ucauacguggauuugauau

SEQ ID NO: 585052 - RNA, 19 nt, Artificial Sequence
  Description of Artificial Sequence: Synthetic oligonucleotide
ucggugauaaaagagauga

SEQ ID NO: 585053 - RNA, 19 nt, Artificial Sequence
  Description of Artificial Sequence: Synthetic oligonucleotide
aauccaagagacuauuagu

SEQ ID NO: 585054 - RNA, 19 nt, Artificial Sequence
  Description of Artificial Sequence: Synthetic oligonucleotide
uauuuaauaacucggugua

SEQ ID NO: 585055 - RNA, 19 nt, Artificial Sequence
  Description of Artificial Sequence: Synthetic oligonucleotide
uuuuguucuggguugacug

SEQ ID NO: 585056 - RNA, 19 nt, Artificial Sequence
  Description of Artificial Sequence: Synthetic oligonucleotide
uguuauuuaauaacucggu

SEQ ID NO: 585057 - RNA, 19 nt, Artificial Sequence
  Description of Artificial Sequence: Synthetic oligonucleotide
accauuucuagucuauugg

SEQ ID NO: 585058 - RNA, 19 nt, Artificial Sequence
  Description of Artificial Sequence: Synthetic oligonucleotide
ugaacgagacuccauagca

SEQ ID NO: 585059 - RNA, 19 nt, Artificial Sequence
  Description of Artificial Sequence: Synthetic oligonucleotide
uaaaagagaugaauaauau

SEQ ID NO: 585060 - RNA, 19 nt, Artificial Sequence
  Description of Artificial Sequence: Synthetic oligonucleotide
uagaugauuaaggaugacg

SEQ ID NO: 585061 - RNA, 19 nt, Artificial Sequence
  Description of Artificial Sequence: Synthetic oligonucleotide
aauacauaaggcacagccg

SEQ ID NO: 585062 - RNA, 19 nt, Artificial Sequence
  Description of Artificial Sequence: Synthetic oligonucleotide
acuauuaguuguuucaaga

SEQ ID NO: 585063 - RNA, 19 nt, Artificial Sequence
  Description of Artificial Sequence: Synthetic oligonucleotide
cuaucaacauuuuagcuuc

SEQ ID NO: 585064 - RNA, 19 nt, Artificial Sequence
  Description of Artificial Sequence: Synthetic oligonucleotide
uaagcacggaauaugaggu

SEQ ID NO: 585065 - RNA, 19 nt, Artificial Sequence
  Description of Artificial Sequence: Synthetic oligonucleotide
uuaaaagucugaagguuug

SEQ ID NO: 585066 - RNA, 19 nt, Artificial Sequence
  Description of Artificial Sequence: Synthetic oligonucleotide
aacaauaaauuuugcugca

SEQ ID NO: 585067 - RNA, 19 nt, Artificial Sequence
  Description of Artificial Sequence: Synthetic oligonucleotide
ugcauauaaaacuuccgga

SEQ ID NO: 585068 - RNA, 19 nt, Artificial Sequence
  Description of Artificial Sequence: Synthetic oligonucleotide
ugaauaauaugaugguaug

SEQ ID NO: 585069 - RNA, 19 nt, Artificial Sequence
  Description of Artificial Sequence: Synthetic oligonucleotide
uucuucucggguaucagag

SEQ ID NO: 585070 - RNA, 19 nt, Artificial Sequence
  Description of Artificial Sequence: Synthetic oligonucleotide
ggggaaagaauacugaagg

SEQ ID NO: 585071 - RNA, 19 nt, Artificial Sequence
  Description of Artificial Sequence: Synthetic oligonucleotide
uacguugaagaucaccucc

SEQ ID NO: 585072 - RNA, 19 nt, Artificial Sequence
  Description of Artificial Sequence: Synthetic oligonucleotide
uugugcauaagcucggugc

SEQ ID NO: 585073 - RNA, 19 nt, Artificial Sequence
  Description of Artificial Sequence: Synthetic oligonucleotide
acuugcuagcuucacgacc

SEQ ID NO: 585074 - RNA, 19 nt, Artificial Sequence
  Description of Artificial Sequence: Synthetic oligonucleotide
uauuggacacauccaaugc

SEQ ID NO: 585075 - RNA, 19 nt, Artificial Sequence
  Description of Artificial Sequence: Synthetic oligonucleotide
aaaucccugagagaugaac

SEQ ID NO: 585076 - RNA, 19 nt, Artificial Sequence
  Description of Artificial Sequence: Synthetic oligonucleotide
ucacguaaugucuguaagg

SEQ ID NO: 585077 - RNA, 19 nt, Artificial Sequence
  Description of Artificial Sequence: Synthetic oligonucleotide
ugucgauaaggacagucag

SEQ ID NO: 585078 - RNA, 19 nt, Artificial Sequence
  Description of Artificial Sequence: Synthetic oligonucleotide
guuauuuaauaacucggug

SEQ ID NO: 585079 - RNA, 19 nt, Artificial Sequence
  Description of Artificial Sequence: Synthetic oligonucleotide
gauauagugagguuaccca

SEQ ID NO: 585080 - RNA, 19 nt, Artificial Sequence
  Description of Artificial Sequence: Synthetic oligonucleotide
agaucuaucaaugcuuggg

SEQ ID NO: 585081 - RNA, 19 nt, Artificial Sequence
  Description of Artificial Sequence: Synthetic oligonucleotide
uuugaggaaccauuucuag

SEQ ID NO: 585082 - RNA, 19 nt, Artificial Sequence
  Description of Artificial Sequence: Synthetic oligonucleotide
gaagguauauacaucagca

SEQ ID NO: 585083 - RNA, 19 nt, Artificial Sequence
  Description of Artificial Sequence: Synthetic oligonucleotide
ugugcaaccauauguuuca

SEQ ID NO: 585084 - RNA, 19 nt, Artificial Sequence
  Description of Artificial Sequence: Synthetic oligonucleotide
auauagugagguuacccag

SEQ ID NO: 585085 - RNA, 19 nt, Artificial Sequence
  Description of Artificial Sequence: Synthetic oligonucleotide
augucuguaaggcugggag

SEQ ID NO: 585086 - RNA, 19 nt, Artificial Sequence
  Description of Artificial Sequence: Synthetic oligonucleotide
auaaaacuuccggagacac

SEQ ID NO: 585087 - RNA, 19 nt, Artificial Sequence
  Description of Artificial Sequence: Synthetic oligonucleotide
agcaucaagauuucuucuc

SEQ ID NO: 585088 - RNA, 19 nt, Artificial Sequence
  Description of Artificial Sequence: Synthetic oligonucleotide
guuagcucgaaaaguaugg

SEQ ID NO: 585089 - RNA, 19 nt, Artificial Sequence
  Description of Artificial Sequence: Synthetic oligonucleotide
aagucugaagguuugguuu

SEQ ID NO: 585090 - RNA, 19 nt, Artificial Sequence
  Description of Artificial Sequence: Synthetic oligonucleotide
caugcauauaaaacuuccg

SEQ ID NO: 585091 - RNA, 19 nt, Artificial Sequence
  Description of Artificial Sequence: Synthetic oligonucleotide
cuuagguuagcucgaaaag

SEQ ID NO: 585092 - RNA, 19 nt, Artificial Sequence
  Description of Artificial Sequence: Synthetic oligonucleotide
ugacuauuucuucaauccc

SEQ ID NO: 585093 - RNA, 19 nt, Artificial Sequence
  Description of Artificial Sequence: Synthetic oligonucleotide
auuacguugaagaucaccu

SEQ ID NO: 585094 - RNA, 19 nt, Artificial Sequence
  Description of Artificial Sequence: Synthetic oligonucleotide
ugcaagugccugaagaaca

SEQ ID NO: 585095 - RNA, 19 nt, Artificial Sequence
  Description of Artificial Sequence: Synthetic oligonucleotide
ucuggggaucuuauuaugc

SEQ ID NO: 585096 - RNA, 19 nt, Artificial Sequence
  Description of Artificial Sequence: Synthetic oligonucleotide
uuuaucccuggccaggagc

SEQ ID NO: 585097 - RNA, 19 nt, Artificial Sequence
  Description of Artificial Sequence: Synthetic oligonucleotide
ucuaucaaugcuugggagu

SEQ ID NO: 585098 - RNA, 19 nt, Artificial Sequence
  Description of Artificial Sequence: Synthetic oligonucleotide
ugggaugugaauuaacaau

SEQ ID NO: 585099 - RNA, 19 nt, Artificial Sequence
  Description of Artificial Sequence: Synthetic oligonucleotide
uauacuguagaguguuggc

SEQ ID NO: 585100 - RNA, 19 nt, Artificial Sequence
  Description of Artificial Sequence: Synthetic oligonucleotide
uaugagguaagggucaucu

SEQ ID NO: 585101 - RNA, 19 nt, Artificial Sequence
  Description of Artificial Sequence: Synthetic oligonucleotide
agcaauucauuucugggga

SEQ ID NO: 585102 - RNA, 19 nt, Artificial Sequence
  Description of Artificial Sequence: Synthetic oligonucleotide
aagaucuaucaaugcuugg

SEQ ID NO: 585103 - RNA, 19 nt, Artificial Sequence
  Description of Artificial Sequence: Synthetic oligonucleotide
ucgauaaggacagucagcu

SEQ ID NO: 585104 - RNA, 19 nt, Artificial Sequence
  Description of Artificial Sequence: Synthetic oligonucleotide
cuauuggacacauccaaug

SEQ ID NO: 585105 - RNA, 19 nt, Artificial Sequence
  Description of Artificial Sequence: Synthetic oligonucleotide
agguuugaacauuugucuc

SEQ ID NO: 585106 - RNA, 19 nt, Artificial Sequence
  Description of Artificial Sequence: Synthetic oligonucleotide
uucgaauaauagaaauuac

SEQ ID NO: 585107 - RNA, 19 nt, Artificial Sequence
  Description of Artificial Sequence: Synthetic oligonucleotide
uauuagguccuuauaccac

SEQ ID NO: 585108 - RNA, 19 nt, Artificial Sequence
  Description of Artificial Sequence: Synthetic oligonucleotide
cuucgcuucaccgacaccc

SEQ ID NO: 585109 - RNA, 19 nt, Artificial Sequence
  Description of Artificial Sequence: Synthetic oligonucleotide
ucuuggcuuucauacgugg

SEQ ID NO: 585110 - RNA, 19 nt, Artificial Sequence
  Description of Artificial Sequence: Synthetic oligonucleotide
aggaauagucuucaucuug

SEQ ID NO: 585111 - RNA, 19 nt, Artificial Sequence
  Description of Artificial Sequence: Synthetic oligonucleotide
gaucauuguacaguaggag

SEQ ID NO: 585112 - RNA, 19 nt, Artificial Sequence
  Description of Artificial Sequence: Synthetic oligonucleotide
gacuauuaguuguuucaag

SEQ ID NO: 585113 - RNA, 19 nt, Artificial Sequence
  Description of Artificial Sequence: Synthetic oligonucleotide
uggcuaucaacauuuuagc

SEQ ID NO: 585114 - RNA, 19 nt, Artificial Sequence
  Description of Artificial Sequence: Synthetic oligonucleotide
uugucgauaaggacaguca

SEQ ID NO: 585115 - RNA, 19 nt, Artificial Sequence
  Description of Artificial Sequence: Synthetic oligonucleotide
uuagguuagcucgaaaagu

SEQ ID NO: 585116 - RNA, 19 nt, Artificial Sequence
  Description of Artificial Sequence: Synthetic oligonucleotide
uguacaaguucagugcuug

SEQ ID NO: 585117 - RNA, 19 nt, Artificial Sequence
  Description of Artificial Sequence: Synthetic oligonucleotide
ugaaauccaucauuacucu

SEQ ID NO: 585118 - RNA, 19 nt, Artificial Sequence
  Description of Artificial Sequence: Synthetic oligonucleotide
auuagguccuuauaccacu

SEQ ID NO: 585119 - RNA, 19 nt, Artificial Sequence
  Description of Artificial Sequence: Synthetic oligonucleotide
gugaaauccaucauuacuc

SEQ ID NO: 585120 - RNA, 19 nt, Artificial Sequence
  Description of Artificial Sequence: Synthetic oligonucleotide
auguauucgguaagcaagc

SEQ ID NO: 585121 - RNA, 19 nt, Artificial Sequence
  Description of Artificial Sequence: Synthetic oligonucleotide
ucugauucguuccuucagu

SEQ ID NO: 585122 - RNA, 19 nt, Artificial Sequence
  Description of Artificial Sequence: Synthetic oligonucleotide
gaagaucuaucaaugcuug

SEQ ID NO: 585123 - RNA, 19 nt, Artificial Sequence
  Description of Artificial Sequence: Synthetic oligonucleotide
gguauuagguccuuauacc

SEQ ID NO: 585124 - RNA, 19 nt, Artificial Sequence
  Description of Artificial Sequence: Synthetic oligonucleotide
uauguugcaagugaggguu

SEQ ID NO: 585125 - RNA, 19 nt, Artificial Sequence
  Description of Artificial Sequence: Synthetic oligonucleotide
cacguaaugucuguaaggc

SEQ ID NO: 585126 - RNA, 19 nt, Artificial Sequence
  Description of Artificial Sequence: Synthetic oligonucleotide
uccuucaaccuuugggagg

SEQ ID NO: 585127 - RNA, 19 nt, Artificial Sequence
  Description of Artificial Sequence: Synthetic oligonucleotide
aucuaucaaugcuugggag

SEQ ID NO: 585128 - RNA, 19 nt, Artificial Sequence
  Description of Artificial Sequence: Synthetic oligonucleotide
gguaucagagcaaagauuc

SEQ ID NO: 585129 - RNA, 19 nt, Artificial Sequence
  Description of Artificial Sequence: Synthetic oligonucleotide
caaugcuugaagaagaucu

SEQ ID NO: 585130 - RNA, 19 nt, Artificial Sequence
  Description of Artificial Sequence: Synthetic oligonucleotide
uagguuagcucgaaaagua

SEQ ID NO: 585131 - RNA, 19 nt, Artificial Sequence
  Description of Artificial Sequence: Synthetic oligonucleotide
aguaacacaauaaauccaa

SEQ ID NO: 585132 - RNA, 19 nt, Artificial Sequence
  Description of Artificial Sequence: Synthetic oligonucleotide
caguuugucgauaaggaca

SEQ ID NO: 585133 - RNA, 19 nt, Artificial Sequence
  Description of Artificial Sequence: Synthetic oligonucleotide
aguuugucgauaaggacag

SEQ ID NO: 585134 - RNA, 19 nt, Artificial Sequence
  Description of Artificial Sequence: Synthetic oligonucleotide
auuggacacauccaaugcu

SEQ ID NO: 585135 - RNA, 19 nt, Artificial Sequence
  Description of Artificial Sequence: Synthetic oligonucleotide
ugauguauucgguaagcaa

SEQ ID NO: 585136 - RNA, 19 nt, Artificial Sequence
  Description of Artificial Sequence: Synthetic oligonucleotide
uagcucgaaaaguauggcc

SEQ ID NO: 585137 - RNA, 19 nt, Artificial Sequence
  Description of Artificial Sequence: Synthetic oligonucleotide
aguauggccauauucuuua

SEQ ID NO: 585138 - RNA, 19 nt, Artificial Sequence
  Description of Artificial Sequence: Synthetic oligonucleotide
gaucuaucaaugcuuggga

SEQ ID NO: 585139 - RNA, 19 nt, Artificial Sequence
  Description of Artificial Sequence: Synthetic oligonucleotide
uucacgaccucaauggcua

SEQ ID NO: 585140 - RNA, 19 nt, Artificial Sequence
  Description of Artificial Sequence: Synthetic oligonucleotide
ugauuaaggaugacguuuu

SEQ ID NO: 585141 - RNA, 19 nt, Artificial Sequence
  Description of Artificial Sequence: Synthetic oligonucleotide
gacuaucagaugcuuuugc

SEQ ID NO: 585142 - RNA, 19 nt, Artificial Sequence
  Description of Artificial Sequence: Synthetic oligonucleotide
aaaagaugauguauucggu

SEQ ID NO: 585143 - RNA, 19 nt, Artificial Sequence
  Description of Artificial Sequence: Synthetic oligonucleotide
uucaccgacacccgcccgg

SEQ ID NO: 585144 - RNA, 19 nt, Artificial Sequence
  Description of Artificial Sequence: Synthetic oligonucleotide
uugaggaaccauuucuagu

SEQ ID NO: 585145 - RNA, 19 nt, Artificial Sequence
  Description of Artificial Sequence: Synthetic oligonucleotide
aagugaggguucuauucca

SEQ ID NO: 585146 - RNA, 19 nt, Artificial Sequence
  Description of Artificial Sequence: Synthetic oligonucleotide
cuaucaaugcuugggagug

SEQ ID NO: 585147 - RNA, 19 nt, Artificial Sequence
  Description of Artificial Sequence: Synthetic oligonucleotide
ugauucguuccuucagugc

SEQ ID NO: 585148 - RNA, 19 nt, Artificial Sequence
  Description of Artificial Sequence: Synthetic oligonucleotide
uccaaucaguuuucgguug

SEQ ID NO: 585149 - RNA, 19 nt, Artificial Sequence
  Description of Artificial Sequence: Synthetic oligonucleotide
ucaaccuuugggagggaug

SEQ ID NO: 585150 - RNA, 19 nt, Artificial Sequence
  Description of Artificial Sequence: Synthetic oligonucleotide
cuucgaauaauagaaauua

SEQ ID NO: 585151 - RNA, 19 nt, Artificial Sequence
  Description of Artificial Sequence: Synthetic oligonucleotide
cauuaagcacggaauauga

SEQ ID NO: 585152 - RNA, 19 nt, Artificial Sequence
  Description of Artificial Sequence: Synthetic oligonucleotide
ugauaucagcagcacaguc

SEQ ID NO: 585153 - RNA, 19 nt, Artificial Sequence
  Description of Artificial Sequence: Synthetic oligonucleotide
ucuauuggacacauccaau

SEQ ID NO: 585154 - RNA, 19 nt, Artificial Sequence
  Description of Artificial Sequence: Synthetic oligonucleotide
ucggguaucagagcaaaga

SEQ ID NO: 585155 - RNA, 19 nt, Artificial Sequence
  Description of Artificial Sequence: Synthetic oligonucleotide
uauaaaacuuccggagaca

SEQ ID NO: 585156 - RNA, 19 nt, Artificial Sequence
  Description of Artificial Sequence: Synthetic oligonucleotide
ggagcgugcauucuucucg

SEQ ID NO: 585157 - RNA, 19 nt, Artificial Sequence
  Description of Artificial Sequence: Synthetic oligonucleotide
cugcauguucaguuugucg

SEQ ID NO: 585158 - RNA, 19 nt, Artificial Sequence
  Description of Artificial Sequence: Synthetic oligonucleotide
uauggccauauucuuuacu

SEQ ID NO: 585159 - RNA, 19 nt, Artificial Sequence
  Description of Artificial Sequence: Synthetic oligonucleotide
cauagcagagguugguaug

SEQ ID NO: 585160 - RNA, 19 nt, Artificial Sequence
  Description of Artificial Sequence: Synthetic oligonucleotide
uguacaguaggagcgugca

SEQ ID NO: 585161 - RNA, 19 nt, Artificial Sequence
  Description of Artificial Sequence: Synthetic oligonucleotide
agguauuucauuucacgua

SEQ ID NO: 585162 - RNA, 19 nt, Artificial Sequence
  Description of Artificial Sequence: Synthetic oligonucleotide
uucuauuccaagguauuuc

SEQ ID NO: 585163 - RNA, 19 nt, Artificial Sequence
  Description of Artificial Sequence: Synthetic oligonucleotide
ucgggcauuaagcacggaa

SEQ ID NO: 585164 - RNA, 19 nt, Artificial Sequence
  Description of Artificial Sequence: Synthetic oligonucleotide
uaauagaaauuacguugaa

SEQ ID NO: 585165 - RNA, 19 nt, Artificial Sequence
  Description of Artificial Sequence: Synthetic oligonucleotide
agcucgaaaaguauggcca

SEQ ID NO: 585166 - RNA, 19 nt, Artificial Sequence
  Description of Artificial Sequence: Synthetic oligonucleotide
uuagcucgaaaaguauggc

SEQ ID NO: 585167 - RNA, 19 nt, Artificial Sequence
  Description of Artificial Sequence: Synthetic oligonucleotide
ucgguaagcaagcucuaaa

SEQ ID NO: 585168 - RNA, 19 nt, Artificial Sequence
  Description of Artificial Sequence: Synthetic oligonucleotide
cugugcaaccauauguuuc

SEQ ID NO: 585169 - RNA, 19 nt, Artificial Sequence
  Description of Artificial Sequence: Synthetic oligonucleotide
gucuguaaggcugggagcc

SEQ ID NO: 585170 - RNA, 19 nt, Artificial Sequence
  Description of Artificial Sequence: Synthetic oligonucleotide
uucuggggaucuuauuaug

SEQ ID NO: 585171 - RNA, 19 nt, Artificial Sequence
  Description of Artificial Sequence: Synthetic oligonucleotide
aagguauuagguccuuaua

SEQ ID NO: 585172 - RNA, 19 nt, Artificial Sequence
  Description of Artificial Sequence: Synthetic oligonucleotide
gguauauacaucagcauga

SEQ ID NO: 585173 - RNA, 19 nt, Artificial Sequence
  Description of Artificial Sequence: Synthetic oligonucleotide
cuaaaucccugagagauga

SEQ ID NO: 585174 - RNA, 19 nt, Artificial Sequence
  Description of Artificial Sequence: Synthetic oligonucleotide
cauacguggauuugauauc

SEQ ID NO: 585175 - RNA, 19 nt, Artificial Sequence
  Description of Artificial Sequence: Synthetic oligonucleotide
gagcgugcauucuucucgg

SEQ ID NO: 585176 - RNA, 19 nt, Artificial Sequence
  Description of Artificial Sequence: Synthetic oligonucleotide
ccaugcauauaaaacuucc

SEQ ID NO: 585177 - RNA, 19 nt, Artificial Sequence
  Description of Artificial Sequence: Synthetic oligonucleotide
auacguggauuugauauca

SEQ ID NO: 585178 - RNA, 19 nt, Artificial Sequence
  Description of Artificial Sequence: Synthetic oligonucleotide
caagagagacugugguucc

SEQ ID NO: 585179 - RNA, 19 nt, Artificial Sequence
  Description of Artificial Sequence: Synthetic oligonucleotide
acuauuucuucaaucccug

SEQ ID NO: 585180 - RNA, 19 nt, Artificial Sequence
  Description of Artificial Sequence: Synthetic oligonucleotide
cugauucguuccuucagug

SEQ ID NO: 585181 - RNA, 19 nt, Artificial Sequence
  Description of Artificial Sequence: Synthetic oligonucleotide
cguaaugucuguaaggcug

SEQ ID NO: 585182 - RNA, 19 nt, Artificial Sequence
  Description of Artificial Sequence: Synthetic oligonucleotide
gaacgagacuccauagcag

SEQ ID NO: 585183 - RNA, 19 nt, Artificial Sequence
  Description of Artificial Sequence: Synthetic oligonucleotide
uccggagacacuucagcac

SEQ ID NO: 585184 - RNA, 19 nt, Artificial Sequence
  Description of Artificial Sequence: Synthetic oligonucleotide
uauugugggucaccucucu

SEQ ID NO: 585185 - RNA, 19 nt, Artificial Sequence
  Description of Artificial Sequence: Synthetic oligonucleotide
auuaagcacggaauaugag

SEQ ID NO: 585186 - RNA, 19 nt, Artificial Sequence
  Description of Artificial Sequence: Synthetic oligonucleotide
agaugcuuuugcagugucc

SEQ ID NO: 585187 - RNA, 19 nt, Artificial Sequence
  Description of Artificial Sequence: Synthetic oligonucleotide
ugaugguauguugcaagug

SEQ ID NO: 585188 - RNA, 19 nt, Artificial Sequence
  Description of Artificial Sequence: Synthetic oligonucleotide
uuacguugaagaucaccuc

SEQ ID NO: 585189 - RNA, 19 nt, Artificial Sequence
  Description of Artificial Sequence: Synthetic oligonucleotide
auacuguagaguguuggcu

SEQ ID NO: 585190 - RNA, 19 nt, Artificial Sequence
  Description of Artificial Sequence: Synthetic oligonucleotide
cuacugcuguuugauauag

SEQ ID NO: 585191 - RNA, 19 nt, Artificial Sequence
  Description of Artificial Sequence: Synthetic oligonucleotide
aaacuucgaauaauagaaa

SEQ ID NO: 585192 - RNA, 19 nt, Artificial Sequence
  Description of Artificial Sequence: Synthetic oligonucleotide
acggaauaugagguucagc

SEQ ID NO: 585193 - RNA, 19 nt, Artificial Sequence
  Description of Artificial Sequence: Synthetic oligonucleotide
ucuucucggguaucagagc

SEQ ID NO: 585194 - RNA, 19 nt, Artificial Sequence
  Description of Artificial Sequence: Synthetic oligonucleotide
ucccucuaauucauucaug

SEQ ID NO: 585195 - RNA, 19 nt, Artificial Sequence
  Description of Artificial Sequence: Synthetic oligonucleotide
cuucucggguaucagagca

SEQ ID NO: 585196 - RNA, 19 nt, Artificial Sequence
  Description of Artificial Sequence: Synthetic oligonucleotide
uccaaugcuugaagaagau

SEQ ID NO: 585197 - RNA, 19 nt, Artificial Sequence
  Description of Artificial Sequence: Synthetic oligonucleotide
uucucacaaacaggcaagc

SEQ ID NO: 585198 - RNA, 19 nt, Artificial Sequence
  Description of Artificial Sequence: Synthetic oligonucleotide
cuugacucuccugagucug

SEQ ID NO: 585199 - RNA, 19 nt, Artificial Sequence
  Description of Artificial Sequence: Synthetic oligonucleotide
gcuaaaggcacuugcuagc

SEQ ID NO: 585200 - RNA, 19 nt, Artificial Sequence
  Description of Artificial Sequence: Synthetic oligonucleotide
gguaagcaagcucuaaauc

SEQ ID NO: 585201 - RNA, 19 nt, Artificial Sequence
  Description of Artificial Sequence: Synthetic oligonucleotide
auccaagagacuauuaguu

SEQ ID NO: 585202 - RNA, 19 nt, Artificial Sequence
  Description of Artificial Sequence: Synthetic oligonucleotide
uggccauauucuuuacugu

SEQ ID NO: 585203 - RNA, 19 nt, Artificial Sequence
  Description of Artificial Sequence: Synthetic oligonucleotide
agagguugguaugagguaa

SEQ ID NO: 585204 - RNA, 19 nt, Artificial Sequence
  Description of Artificial Sequence: Synthetic oligonucleotide
caccauaguaacacaauaa

SEQ ID NO: 585205 - RNA, 19 nt, Artificial Sequence
  Description of Artificial Sequence: Synthetic oligonucleotide
cucggugauaaaagagaug

SEQ ID NO: 585206 - RNA, 19 nt, Artificial Sequence
  Description of Artificial Sequence: Synthetic oligonucleotide
uaucaaugcuugggagugg

SEQ ID NO: 585207 - RNA, 19 nt, Artificial Sequence
  Description of Artificial Sequence: Synthetic oligonucleotide
ggaugcaagugccugaaga

SEQ ID NO: 585208 - RNA, 19 nt, Artificial Sequence
  Description of Artificial Sequence: Synthetic oligonucleotide
aggagcgugcauucuucuc

SEQ ID NO: 585209 - RNA, 19 nt, Artificial Sequence
  Description of Artificial Sequence: Synthetic oligonucleotide
gacuauuucuucaaucccu

SEQ ID NO: 585210 - RNA, 19 nt, Artificial Sequence
  Description of Artificial Sequence: Synthetic oligonucleotide
guauucgguaagcaagcuc

SEQ ID NO: 585211 - RNA, 19 nt, Artificial Sequence
  Description of Artificial Sequence: Synthetic oligonucleotide
acguaaugucuguaaggcu

SEQ ID NO: 585212 - RNA, 19 nt, Artificial Sequence
  Description of Artificial Sequence: Synthetic oligonucleotide
ggagguuugaacauuuguc

SEQ ID NO: 585213 - RNA, 19 nt, Artificial Sequence
  Description of Artificial Sequence: Synthetic oligonucleotide
caaucaaugcauugaaggu

SEQ ID NO: 585214 - RNA, 19 nt, Artificial Sequence
  Description of Artificial Sequence: Synthetic oligonucleotide
uguagaguguuggcuggcc

SEQ ID NO: 585215 - RNA, 19 nt, Artificial Sequence
  Description of Artificial Sequence: Synthetic oligonucleotide
aguaggagcgugcauucuu

SEQ ID NO: 585216 - RNA, 19 nt, Artificial Sequence
  Description of Artificial Sequence: Synthetic oligonucleotide
gaagguauuagguccuuau

SEQ ID NO: 585217 - RNA, 19 nt, Artificial Sequence
  Description of Artificial Sequence: Synthetic oligonucleotide
ucugugcaaccauauguuu

SEQ ID NO: 585218 - RNA, 19 nt, Artificial Sequence
  Description of Artificial Sequence: Synthetic oligonucleotide
guguuuaucccuggccagg

SEQ ID NO: 585219 - RNA, 19 nt, Artificial Sequence
  Description of Artificial Sequence: Synthetic oligonucleotide
ugguuccugcuuguaagag

SEQ ID NO: 585220 - RNA, 19 nt, Artificial Sequence
  Description of Artificial Sequence: Synthetic oligonucleotide
aguggggaaagaauacuga

SEQ ID NO: 585221 - RNA, 19 nt, Artificial Sequence
  Description of Artificial Sequence: Synthetic oligonucleotide
gucgauaaggacagucagc

SEQ ID NO: 585222 - RNA, 19 nt, Artificial Sequence
  Description of Artificial Sequence: Synthetic oligonucleotide
acgaccucaauggcuagag

SEQ ID NO: 585223 - RNA, 19 nt, Artificial Sequence
  Description of Artificial Sequence: Synthetic oligonucleotide
cuuucauacguggauuuga

SEQ ID NO: 585224 - RNA, 19 nt, Artificial Sequence
  Description of Artificial Sequence: Synthetic oligonucleotide
gguguuuaucccuggccag

SEQ ID NO: 585225 - RNA, 19 nt, Artificial Sequence
  Description of Artificial Sequence: Synthetic oligonucleotide
uguauucgguaagcaagcu

SEQ ID NO: 585226 - RNA, 19 nt, Artificial Sequence
  Description of Artificial Sequence: Synthetic oligonucleotide
agacuauuaguuguuucaa

SEQ ID NO: 585227 - RNA, 19 nt, Artificial Sequence
  Description of Artificial Sequence: Synthetic oligonucleotide
cuugugcauaagcucggug

SEQ ID NO: 585228 - RNA, 19 nt, Artificial Sequence
  Description of Artificial Sequence: Synthetic oligonucleotide
guguuuaaaagaugaugua

SEQ ID NO: 585229 - RNA, 19 nt, Artificial Sequence
  Description of Artificial Sequence: Synthetic oligonucleotide
gguuagcucgaaaaguaug

SEQ ID NO: 585230 - RNA, 19 nt, Artificial Sequence
  Description of Artificial Sequence: Synthetic oligonucleotide
acuacugcuguuugauaua

SEQ ID NO: 585231 - RNA, 19 nt, Artificial Sequence
  Description of Artificial Sequence: Synthetic oligonucleotide
aaauuacguugaagaucac

SEQ ID NO: 585232 - RNA, 19 nt, Artificial Sequence
  Description of Artificial Sequence: Synthetic oligonucleotide
auuguacaguaggagcgug

SEQ ID NO: 585233 - RNA, 19 nt, Artificial Sequence
  Description of Artificial Sequence: Synthetic oligonucleotide
cuaauucauucaugauguc

SEQ ID NO: 585234 - RNA, 19 nt, Artificial Sequence
  Description of Artificial Sequence: Synthetic oligonucleotide
uucauacguggauuugaua

SEQ ID NO: 585235 - RNA, 19 nt, Artificial Sequence
  Description of Artificial Sequence: Synthetic oligonucleotide
ucccugagagaugaacaca

SEQ ID NO: 585236 - RNA, 19 nt, Artificial Sequence
  Description of Artificial Sequence: Synthetic oligonucleotide
aagcacggaauaugagguu

SEQ ID NO: 585237 - RNA, 19 nt, Artificial Sequence
  Description of Artificial Sequence: Synthetic oligonucleotide
uugacucuccugagucuga

SEQ ID NO: 585238 - RNA, 19 nt, Artificial Sequence
  Description of Artificial Sequence: Synthetic oligonucleotide
gaaacgcagccagcgcgcg

SEQ ID NO: 585239 - RNA, 19 nt, Artificial Sequence
  Description of Artificial Sequence: Synthetic oligonucleotide
uuguuucaagagagacugu

SEQ ID NO: 585240 - RNA, 19 nt, Artificial Sequence
  Description of Artificial Sequence: Synthetic oligonucleotide
uuuugucuucaccgauguc

SEQ ID NO: 585241 - RNA, 19 nt, Artificial Sequence
  Description of Artificial Sequence: Synthetic oligonucleotide
ggguguuuaucccuggcca

SEQ ID NO: 585242 - RNA, 19 nt, Artificial Sequence
  Description of Artificial Sequence: Synthetic oligonucleotide
acacacauucauggccaac

SEQ ID NO: 585243 - RNA, 19 nt, Artificial Sequence
  Description of Artificial Sequence: Synthetic oligonucleotide
uaggagcgugcauucuucu

SEQ ID NO: 585244 - RNA, 19 nt, Artificial Sequence
  Description of Artificial Sequence: Synthetic oligonucleotide
gcuaucaacauuuuagcuu

SEQ ID NO: 585245 - RNA, 19 nt, Artificial Sequence
  Description of Artificial Sequence: Synthetic oligonucleotide
aggguucuauuccaaggua

SEQ ID NO: 585246 - RNA, 19 nt, Artificial Sequence
  Description of Artificial Sequence: Synthetic oligonucleotide
ugcaagugaggguucuauu

SEQ ID NO: 585247 - RNA, 19 nt, Artificial Sequence
  Description of Artificial Sequence: Synthetic oligonucleotide
guuuaucccuggccaggag

SEQ ID NO: 585248 - RNA, 19 nt, Artificial Sequence
  Description of Artificial Sequence: Synthetic oligonucleotide
ccaaggaauagucuucauc

SEQ ID NO: 585249 - RNA, 19 nt, Artificial Sequence
  Description of Artificial Sequence: Synthetic oligonucleotide
gaugauuaaggaugacguu

SEQ ID NO: 585250 - RNA, 19 nt, Artificial Sequence
  Description of Artificial Sequence: Synthetic oligonucleotide
gaagguuugguuucaccuu

SEQ ID NO: 585251 - RNA, 19 nt, Artificial Sequence
  Description of Artificial Sequence: Synthetic oligonucleotide
cguguuuaaaagaugaugu

SEQ ID NO: 585252 - RNA, 19 nt, Artificial Sequence
  Description of Artificial Sequence: Synthetic oligonucleotide
gggaugugaauuaacaaua

SEQ ID NO: 585253 - RNA, 19 nt, Artificial Sequence
  Description of Artificial Sequence: Synthetic oligonucleotide
aggaaccauuucuagucua

SEQ ID NO: 585254 - RNA, 19 nt, Artificial Sequence
  Description of Artificial Sequence: Synthetic oligonucleotide
ccguguuuaaaagaugaug

SEQ ID NO: 585255 - RNA, 19 nt, Artificial Sequence
  Description of Artificial Sequence: Synthetic oligonucleotide
ugggcaagguucucacaaa

SEQ ID NO: 585256 - RNA, 19 nt, Artificial Sequence
  Description of Artificial Sequence: Synthetic oligonucleotide
caagcuaaaggcacuugcu

SEQ ID NO: 585257 - RNA, 19 nt, Artificial Sequence
  Description of Artificial Sequence: Synthetic oligonucleotide
cgguguacaaguucagugc

SEQ ID NO: 585258 - RNA, 19 nt, Artificial Sequence
  Description of Artificial Sequence: Synthetic oligonucleotide
ucacgaccucaauggcuag

SEQ ID NO: 585259 - RNA, 19 nt, Artificial Sequence
  Description of Artificial Sequence: Synthetic oligonucleotide
cacuacugcuguuugauau

SEQ ID NO: 585260 - RNA, 19 nt, Artificial Sequence
  Description of Artificial Sequence: Synthetic oligonucleotide
cacuugcuagcuucacgac

SEQ ID NO: 585261 - RNA, 19 nt, Artificial Sequence
  Description of Artificial Sequence: Synthetic oligonucleotide
ucaaucccuguugcauuug

SEQ ID NO: 585262 - RNA, 19 nt, Artificial Sequence
  Description of Artificial Sequence: Synthetic oligonucleotide
cucggguaucagagcaaag

SEQ ID NO: 585263 - RNA, 19 nt, Artificial Sequence
  Description of Artificial Sequence: Synthetic oligonucleotide
agcgugcauucuucucggg

SEQ ID NO: 585264 - RNA, 19 nt, Artificial Sequence
  Description of Artificial Sequence: Synthetic oligonucleotide
agcagcuauugugggucac

SEQ ID NO: 585265 - RNA, 19 nt, Artificial Sequence
  Description of Artificial Sequence: Synthetic oligonucleotide
ccuucccucuaauucauuc

SEQ ID NO: 585266 - RNA, 19 nt, Artificial Sequence
  Description of Artificial Sequence: Synthetic oligonucleotide
cuauauacuguagaguguu

SEQ ID NO: 585267 - RNA, 19 nt, Artificial Sequence
  Description of Artificial Sequence: Synthetic oligonucleotide
agcaggacuaucagaugcu

SEQ ID NO: 585268 - RNA, 19 nt, Artificial Sequence
  Description of Artificial Sequence: Synthetic oligonucleotide
gaggaaccauuucuagucu

SEQ ID NO: 585269 - RNA, 19 nt, Artificial Sequence
  Description of Artificial Sequence: Synthetic oligonucleotide
guauggccauauucuuuac

SEQ ID NO: 585270 - RNA, 19 nt, Artificial Sequence
  Description of Artificial Sequence: Synthetic oligonucleotide
uucaaccuuugggagggau

SEQ ID NO: 585271 - RNA, 19 nt, Artificial Sequence
  Description of Artificial Sequence: Synthetic oligonucleotide
uggaaauauuugggaugug

SEQ ID NO: 585272 - RNA, 19 nt, Artificial Sequence
  Description of Artificial Sequence: Synthetic oligonucleotide
caaucaugggcagucugca

SEQ ID NO: 585273 - RNA, 19 nt, Artificial Sequence
  Description of Artificial Sequence: Synthetic oligonucleotide
guaggagcgugcauucuuc

SEQ ID NO: 585274 - RNA, 19 nt, Artificial Sequence
  Description of Artificial Sequence: Synthetic oligonucleotide
gcuuguaagagcugaucaa

SEQ ID NO: 585275 - RNA, 19 nt, Artificial Sequence
  Description of Artificial Sequence: Synthetic oligonucleotide
accgacacccgcccggcga

SEQ ID NO: 585276 - RNA, 19 nt, Artificial Sequence
  Description of Artificial Sequence: Synthetic oligonucleotide
gggcaagguucucacaaac

SEQ ID NO: 585277 - RNA, 19 nt, Artificial Sequence
  Description of Artificial Sequence: Synthetic oligonucleotide
cuucacgaccucaauggcu

SEQ ID NO: 585278 - RNA, 19 nt, Artificial Sequence
  Description of Artificial Sequence: Synthetic oligonucleotide
cugcuuguaagagcugauc

SEQ ID NO: 585279 - RNA, 19 nt, Artificial Sequence
  Description of Artificial Sequence: Synthetic oligonucleotide
cagugcuugugcauaagcu

SEQ ID NO: 585280 - RNA, 19 nt, Artificial Sequence
  Description of Artificial Sequence: Synthetic oligonucleotide
caguauauuauuccauuuu

SEQ ID NO: 585281 - RNA, 19 nt, Artificial Sequence
  Description of Artificial Sequence: Synthetic oligonucleotide
cuagucuauuggacacauc

SEQ ID NO: 585282 - RNA, 19 nt, Artificial Sequence
  Description of Artificial Sequence: Synthetic oligonucleotide
cacggaauaugagguucag

SEQ ID NO: 585283 - RNA, 19 nt, Artificial Sequence
  Description of Artificial Sequence: Synthetic oligonucleotide
cuucaccgacacccgcccg

SEQ ID NO: 585284 - RNA, 19 nt, Artificial Sequence
  Description of Artificial Sequence: Synthetic oligonucleotide
gcuucacgaccucaauggc

SEQ ID NO: 585285 - RNA, 19 nt, Artificial Sequence
  Description of Artificial Sequence: Synthetic oligonucleotide
cuguagaguguuggcuggc

SEQ ID NO: 585286 - RNA, 19 nt, Artificial Sequence
  Description of Artificial Sequence: Synthetic oligonucleotide
cgagcggucugcaggaagg

SEQ ID NO: 585287 - RNA, 19 nt, Artificial Sequence
  Description of Artificial Sequence: Synthetic oligonucleotide
agguuagcucgaaaaguau

SEQ ID NO: 585288 - RNA, 19 nt, Artificial Sequence
  Description of Artificial Sequence: Synthetic oligonucleotide
auaugagguucagccacau

SEQ ID NO: 585289 - RNA, 19 nt, Artificial Sequence
  Description of Artificial Sequence: Synthetic oligonucleotide
accauauguuucagcagau

SEQ ID NO: 585290 - RNA, 19 nt, Artificial Sequence
  Description of Artificial Sequence: Synthetic oligonucleotide
agccguagggucccuguuu

SEQ ID NO: 585291 - RNA, 19 nt, Artificial Sequence
  Description of Artificial Sequence: Synthetic oligonucleotide
agaguguuggcuggccaau

SEQ ID NO: 585292 - RNA, 19 nt, Artificial Sequence
  Description of Artificial Sequence: Synthetic oligonucleotide
ucaccgacacccgcccggc

SEQ ID NO: 585293 - RNA, 19 nt, Artificial Sequence
  Description of Artificial Sequence: Synthetic oligonucleotide
caccuccaaucaguuuucg

SEQ ID NO: 585294 - RNA, 19 nt, Artificial Sequence
  Description of Artificial Sequence: Synthetic oligonucleotide
caaucaguuuucgguuguc

SEQ ID NO: 585295 - RNA, 19 nt, Artificial Sequence
  Description of Artificial Sequence: Synthetic oligonucleotide
gagcggucugcaggaaggc

SEQ ID NO: 585296 - RNA, 19 nt, Artificial Sequence
  Description of Artificial Sequence: Synthetic oligonucleotide
gucccguggagagaauuuc

SEQ ID NO: 585297 - RNA, 19 nt, Artificial Sequence
  Description of Artificial Sequence: Synthetic oligonucleotide
cccgcggaaacgcagccag

SEQ ID NO: 585298 - RNA, 19 nt, Artificial Sequence
  Description of Artificial Sequence: Synthetic oligonucleotide
gggcauuaagcacggaaua

SEQ ID NO: 585299 - RNA, 19 nt, Artificial Sequence
  Description of Artificial Sequence: Synthetic oligonucleotide
ccaaauuugaggaaccauu

SEQ ID NO: 585300 - RNA, 19 nt, Artificial Sequence
  Description of Artificial Sequence: Synthetic oligonucleotide
gcuuucauacguggauuug

SEQ ID NO: 585301 - RNA, 19 nt, Artificial Sequence
  Description of Artificial Sequence: Synthetic oligonucleotide
ggaugcacuuccaggauaa

SEQ ID NO: 585302 - RNA, 19 nt, Artificial Sequence
  Description of Artificial Sequence: Synthetic oligonucleotide
cagagguugguaugaggua

SEQ ID NO: 585303 - RNA, 19 nt, Artificial Sequence
  Description of Artificial Sequence: Synthetic oligonucleotide
cugcauucuccccagacuu

SEQ ID NO: 585304 - RNA, 19 nt, Artificial Sequence
  Description of Artificial Sequence: Synthetic oligonucleotide
cugcaaggcaucuuggcuu

SEQ ID NO: 585305 - RNA, 19 nt, Artificial Sequence
  Description of Artificial Sequence: Synthetic oligonucleotide
gacaccgccgccgccaucu

SEQ ID NO: 585306 - RNA, 19 nt, Artificial Sequence
  Description of Artificial Sequence: Synthetic oligonucleotide
ggcaagguucucacaaaca

SEQ ID NO: 585307 - RNA, 19 nt, Artificial Sequence
  Description of Artificial Sequence: Synthetic oligonucleotide
ccauaguaacacaauaaau

SEQ ID NO: 585308 - RNA, 19 nt, Artificial Sequence
  Description of Artificial Sequence: Synthetic oligonucleotide
cuucaaucccuguugcauu

SEQ ID NO: 585309 - RNA, 19 nt, Artificial Sequence
  Description of Artificial Sequence: Synthetic oligonucleotide
gcagcuauugugggucacc

SEQ ID NO: 585310 - RNA, 19 nt, Artificial Sequence
  Description of Artificial Sequence: Synthetic oligonucleotide
cacaaacaggcaagcuaaa

SEQ ID NO: 585311 - RNA, 19 nt, Artificial Sequence
  Description of Artificial Sequence: Synthetic oligonucleotide
uccuucccucuaauucauu

SEQ ID NO: 585312 - RNA, 19 nt, Artificial Sequence
  Description of Artificial Sequence: Synthetic oligonucleotide
cagcuauauacuguagagu

SEQ ID NO: 585313 - RNA, 19 nt, Artificial Sequence
  Description of Artificial Sequence: Synthetic oligonucleotide
uggcuagagcaggacuauc

SEQ ID NO: 585314 - RNA, 19 nt, Artificial Sequence
  Description of Artificial Sequence: Synthetic oligonucleotide
cugagucugauucguuccu

SEQ ID NO: 585315 - RNA, 19 nt, Artificial Sequence
  Description of Artificial Sequence: Synthetic oligonucleotide
ccggagacacuucagcaca

SEQ ID NO: 585316 - RNA, 19 nt, Artificial Sequence
  Description of Artificial Sequence: Synthetic oligonucleotide
cauuguacaguaggagcgu

SEQ ID NO: 585317 - RNA, 19 nt, Artificial Sequence
  Description of Artificial Sequence: Synthetic oligonucleotide
guaucagagcaaagauucu

SEQ ID NO: 585318 - RNA, 19 nt, Artificial Sequence
  Description of Artificial Sequence: Synthetic oligonucleotide
guacaaguucagugcuugu

SEQ ID NO: 585319 - RNA, 19 nt, Artificial Sequence
  Description of Artificial Sequence: Synthetic oligonucleotide
guucuauuccaagguauuu

SEQ ID NO: 585320 - RNA, 19 nt, Artificial Sequence
  Description of Artificial Sequence: Synthetic oligonucleotide
cucuuagguuagcucgaaa

SEQ ID NO: 585321 - RNA, 19 nt, Artificial Sequence
  Description of Artificial Sequence: Synthetic oligonucleotide
gcggaaacgcagccagcgc

SEQ ID NO: 585322 - RNA, 19 nt, Artificial Sequence
  Description of Artificial Sequence: Synthetic oligonucleotide
aggucccguggagagaauu

SEQ ID NO: 585323 - RNA, 19 nt, Artificial Sequence
  Description of Artificial Sequence: Synthetic oligonucleotide
gcuauauacuguagagugu

SEQ ID NO: 585324 - RNA, 19 nt, Artificial Sequence
  Description of Artificial Sequence: Synthetic oligonucleotide
gggaugcacuuccaggaua

SEQ ID NO: 585325 - RNA, 19 nt, Artificial Sequence
  Description of Artificial Sequence: Synthetic oligonucleotide
gcagcagagcuucgcuuca

SEQ ID NO: 585326 - RNA, 19 nt, Artificial Sequence
  Description of Artificial Sequence: Synthetic oligonucleotide
gcacggaauaugagguuca

SEQ ID NO: 585327 - RNA, 19 nt, Artificial Sequence
  Description of Artificial Sequence: Synthetic oligonucleotide
cacgaccucaauggcuaga

SEQ ID NO: 585328 - RNA, 19 nt, Artificial Sequence
  Description of Artificial Sequence: Synthetic oligonucleotide
gcauaagcucggugcuuca

SEQ ID NO: 585329 - RNA, 19 nt, Artificial Sequence
  Description of Artificial Sequence: Synthetic oligonucleotide
agccuuccaugcauauaaa

SEQ ID NO: 585330 - RNA, 19 nt, Artificial Sequence
  Description of Artificial Sequence: Synthetic oligonucleotide
gccguagggucccuguuua

SEQ ID NO: 585331 - RNA, 19 nt, Artificial Sequence
  Description of Artificial Sequence: Synthetic oligonucleotide
gcgugcauucuucucgggu

SEQ ID NO: 585332 - RNA, 19 nt, Artificial Sequence
  Description of Artificial Sequence: Synthetic oligonucleotide
ggguaucagagcaaagauu

SEQ ID NO: 585333 - RNA, 19 nt, Artificial Sequence
  Description of Artificial Sequence: Synthetic oligonucleotide
gcaauucauuucuggggau

SEQ ID NO: 585334 - RNA, 19 nt, Artificial Sequence
  Description of Artificial Sequence: Synthetic oligonucleotide
agucuucaucuuggagguu

SEQ ID NO: 585335 - RNA, 19 nt, Artificial Sequence
  Description of Artificial Sequence: Synthetic oligonucleotide
ccgacacccgcccggcgag

SEQ ID NO: 585336 - RNA, 19 nt, Artificial Sequence
  Description of Artificial Sequence: Synthetic oligonucleotide
ccaaucaguuuucgguugu

SEQ ID NO: 585337 - RNA, 19 nt, Artificial Sequence
  Description of Artificial Sequence: Synthetic oligonucleotide
guguacaaguucagugcuu

SEQ ID NO: 585338 - RNA, 19 nt, Artificial Sequence
  Description of Artificial Sequence: Synthetic oligonucleotide
cgaccucaauggcuagagc

SEQ ID NO: 585339 - RNA, 19 nt, Artificial Sequence
  Description of Artificial Sequence: Synthetic oligonucleotide
ccguagggucccuguuuac

SEQ ID NO: 585340 - RNA, 19 nt, Artificial Sequence
  Description of Artificial Sequence: Synthetic oligonucleotide
cagcauuguuuugugcuuu

SEQ ID NO: 585341 - RNA, 19 nt, Artificial Sequence
  Description of Artificial Sequence: Synthetic oligonucleotide
cuucaaccuuugggaggga

SEQ ID NO: 585342 - RNA, 19 nt, Artificial Sequence
  Description of Artificial Sequence: Synthetic oligonucleotide
caccgaugucacugucacu

SEQ ID NO: 585343 - RNA, 19 nt, Artificial Sequence
  Description of Artificial Sequence: Synthetic oligonucleotide
ggucccguggagagaauuu

SEQ ID NO: 585344 - RNA, 19 nt, Artificial Sequence
  Description of Artificial Sequence: Synthetic oligonucleotide
gcuugugcauaagcucggu

SEQ ID NO: 585345 - RNA, 19 nt, Artificial Sequence
  Description of Artificial Sequence: Synthetic oligonucleotide
cugaagguauuagguccuu

SEQ ID NO: 585346 - RNA, 19 nt, Artificial Sequence
  Description of Artificial Sequence: Synthetic oligonucleotide
acccgcccggcgagcgguc

SEQ ID NO: 585347 - RNA, 19 nt, Artificial Sequence
  Description of Artificial Sequence: Synthetic oligonucleotide
cguagggucccuguuuacu

SEQ ID NO: 585348 - RNA, 19 nt, Artificial Sequence
  Description of Artificial Sequence: Synthetic oligonucleotide
cucgggcauuaagcacgga

SEQ ID NO: 585349 - RNA, 19 nt, Artificial Sequence
  Description of Artificial Sequence: Synthetic oligonucleotide
cggcgagcggucugcagga

SEQ ID NO: 585350 - RNA, 19 nt, Artificial Sequence
  Description of Artificial Sequence: Synthetic oligonucleotide
ccguggagagaauuuccuu

SEQ ID NO: 585351 - RNA, 19 nt, Artificial Sequence
  Description of Artificial Sequence: Synthetic oligonucleotide
caggucccguggagagaau

SEQ ID NO: 585352 - RNA, 19 nt, Artificial Sequence
  Description of Artificial Sequence: Synthetic oligonucleotide
ccccgcggaaacgcagcca

SEQ ID NO: 585353 - RNA, 19 nt, Artificial Sequence
  Description of Artificial Sequence: Synthetic oligonucleotide
cgacacccgcccggcgagc

SEQ ID NO: 585354 - RNA, 19 nt, Artificial Sequence
  Description of Artificial Sequence: Synthetic oligonucleotide
ucaugaaagagaaaggacc

SEQ ID NO: 585355 - RNA, 19 nt, Artificial Sequence
  Description of Artificial Sequence: Synthetic oligonucleotide
ugguccaaaagauacaugg

SEQ ID NO: 585356 - RNA, 19 nt, Artificial Sequence
  Description of Artificial Sequence: Synthetic oligonucleotide
uaugcuaccagcaauuccc

SEQ ID NO: 585357 - RNA, 19 nt, Artificial Sequence
  Description of Artificial Sequence: Synthetic oligonucleotide
ugguauucggccuauaggg

SEQ ID NO: 585358 - RNA, 19 nt, Artificial Sequence
  Description of Artificial Sequence: Synthetic oligonucleotide
uaaggauguagguaggucg

SEQ ID NO: 585359 - RNA, 19 nt, Artificial Sequence
  Description of Artificial Sequence: Synthetic oligonucleotide
uuacuugccacgcugaacc

SEQ ID NO: 585360 - RNA, 19 nt, Artificial Sequence
  Description of Artificial Sequence: Synthetic oligonucleotide
ucugagauaagauucacaa

SEQ ID NO: 585361 - RNA, 19 nt, Artificial Sequence
  Description of Artificial Sequence: Synthetic oligonucleotide
uuggacuugauucuggaug

SEQ ID NO: 585362 - RNA, 19 nt, Artificial Sequence
  Description of Artificial Sequence: Synthetic oligonucleotide
ucuaaguucaucagugccc

SEQ ID NO: 585363 - RNA, 19 nt, Artificial Sequence
  Description of Artificial Sequence: Synthetic oligonucleotide
uuugcaucauccucgacag

SEQ ID NO: 585364 - RNA, 19 nt, Artificial Sequence
  Description of Artificial Sequence: Synthetic oligonucleotide
aacuccuuaugucuuggac

SEQ ID NO: 585365 - RNA, 19 nt, Artificial Sequence
  Description of Artificial Sequence: Synthetic oligonucleotide
caucuaaggauguagguag

SEQ ID NO: 585366 - RNA, 19 nt, Artificial Sequence
  Description of Artificial Sequence: Synthetic oligonucleotide
aaugccuauauuucuccag

SEQ ID NO: 585367 - RNA, 19 nt, Artificial Sequence
  Description of Artificial Sequence: Synthetic oligonucleotide
uaagauucacaaaaccuga

SEQ ID NO: 585368 - RNA, 19 nt, Artificial Sequence
  Description of Artificial Sequence: Synthetic oligonucleotide
uuuauugucuuuaucguuu

SEQ ID NO: 585369 - RNA, 19 nt, Artificial Sequence
  Description of Artificial Sequence: Synthetic oligonucleotide
ugauguaagguauccaaug

SEQ ID NO: 585370 - RNA, 19 nt, Artificial Sequence
  Description of Artificial Sequence: Synthetic oligonucleotide
accagacuguuucaggucc

SEQ ID NO: 585371 - RNA, 19 nt, Artificial Sequence
  Description of Artificial Sequence: Synthetic oligonucleotide
auguagguaggucgaaucc

SEQ ID NO: 585372 - RNA, 19 nt, Artificial Sequence
  Description of Artificial Sequence: Synthetic oligonucleotide
uugauucuggaugagaagc

SEQ ID NO: 585373 - RNA, 19 nt, Artificial Sequence
  Description of Artificial Sequence: Synthetic oligonucleotide
agcucaacaauccagucug

SEQ ID NO: 585374 - RNA, 19 nt, Artificial Sequence
  Description of Artificial Sequence: Synthetic oligonucleotide
agauggaacagacacgcag

SEQ ID NO: 585375 - RNA, 19 nt, Artificial Sequence
  Description of Artificial Sequence: Synthetic oligonucleotide
auaugcuaccagcaauucc

SEQ ID NO: 585376 - RNA, 19 nt, Artificial Sequence
  Description of Artificial Sequence: Synthetic oligonucleotide
cucuaguacagguuggucc

SEQ ID NO: 585377 - RNA, 19 nt, Artificial Sequence
  Description of Artificial Sequence: Synthetic oligonucleotide
ugggucgucagucugaccu

SEQ ID NO: 585378 - RNA, 19 nt, Artificial Sequence
  Description of Artificial Sequence: Synthetic oligonucleotide
ucaaauuuccacuguggug

SEQ ID NO: 585379 - RNA, 19 nt, Artificial Sequence
  Description of Artificial Sequence: Synthetic oligonucleotide
uuauccaacacaaguucug

SEQ ID NO: 585380 - RNA, 19 nt, Artificial Sequence
  Description of Artificial Sequence: Synthetic oligonucleotide
uguccaguuuguaccaugg

SEQ ID NO: 585381 - RNA, 19 nt, Artificial Sequence
  Description of Artificial Sequence: Synthetic oligonucleotide
gagguuagaacauuugguc

SEQ ID NO: 585382 - RNA, 19 nt, Artificial Sequence
  Description of Artificial Sequence: Synthetic oligonucleotide
ucuaguacagguuggucca

SEQ ID NO: 585383 - RNA, 19 nt, Artificial Sequence
  Description of Artificial Sequence: Synthetic oligonucleotide
ucaacaauaauuucaccuu

SEQ ID NO: 585384 - RNA, 19 nt, Artificial Sequence
  Description of Artificial Sequence: Synthetic oligonucleotide
aaucaagggaggccgaaca

SEQ ID NO: 585385 - RNA, 19 nt, Artificial Sequence
  Description of Artificial Sequence: Synthetic oligonucleotide
ucuuccaacucccacgugu

SEQ ID NO: 585386 - RNA, 19 nt, Artificial Sequence
  Description of Artificial Sequence: Synthetic oligonucleotide
aaagcugaauugacggggc

SEQ ID NO: 585387 - RNA, 19 nt, Artificial Sequence
  Description of Artificial Sequence: Synthetic oligonucleotide
agucuaaguucaucagugc

SEQ ID NO: 585388 - RNA, 19 nt, Artificial Sequence
  Description of Artificial Sequence: Synthetic oligonucleotide
cauagagcagucuaaguuc

SEQ ID NO: 585389 - RNA, 19 nt, Artificial Sequence
  Description of Artificial Sequence: Synthetic oligonucleotide
aguugaacagccuccagcu

SEQ ID NO: 585390 - RNA, 19 nt, Artificial Sequence
  Description of Artificial Sequence: Synthetic oligonucleotide
ugagcuuacaucguaucag

SEQ ID NO: 585391 - RNA, 19 nt, Artificial Sequence
  Description of Artificial Sequence: Synthetic oligonucleotide
aguucguugccuaaccugc

SEQ ID NO: 585392 - RNA, 19 nt, Artificial Sequence
  Description of Artificial Sequence: Synthetic oligonucleotide
uucccaauggaagaggaag

SEQ ID NO: 585393 - RNA, 19 nt, Artificial Sequence
  Description of Artificial Sequence: Synthetic oligonucleotide
cuuacaucguaucagguca

SEQ ID NO: 585394 - RNA, 19 nt, Artificial Sequence
  Description of Artificial Sequence: Synthetic oligonucleotide
gagcuuacaucguaucagg

SEQ ID NO: 585395 - RNA, 19 nt, Artificial Sequence
  Description of Artificial Sequence: Synthetic oligonucleotide
uguaaugcucuugaguucu

SEQ ID NO: 585396 - RNA, 19 nt, Artificial Sequence
  Description of Artificial Sequence: Synthetic oligonucleotide
uuugagcccaugcaguugu

SEQ ID NO: 585397 - RNA, 19 nt, Artificial Sequence
  Description of Artificial Sequence: Synthetic oligonucleotide
guagacaucucagagaaca

SEQ ID NO: 585398 - RNA, 19 nt, Artificial Sequence
  Description of Artificial Sequence: Synthetic oligonucleotide
aucguuugcaucauccucg

SEQ ID NO: 585399 - RNA, 19 nt, Artificial Sequence
  Description of Artificial Sequence: Synthetic oligonucleotide
uccauuacaucaucaacaa

SEQ ID NO: 585400 - RNA, 19 nt, Artificial Sequence
  Description of Artificial Sequence: Synthetic oligonucleotide
gacucgaccaccuggggcc

SEQ ID NO: 585401 - RNA, 19 nt, Artificial Sequence
  Description of Artificial Sequence: Synthetic oligonucleotide
caggauacacuguacacac

SEQ ID NO: 585402 - RNA, 19 nt, Artificial Sequence
  Description of Artificial Sequence: Synthetic oligonucleotide
acuccuuaugucuuggacu

SEQ ID NO: 585403 - RNA, 19 nt, Artificial Sequence
  Description of Artificial Sequence: Synthetic oligonucleotide
uucauaugcuaccagcaau

SEQ ID NO: 585404 - RNA, 19 nt, Artificial Sequence
  Description of Artificial Sequence: Synthetic oligonucleotide
aaguugccaccgcuguugc

SEQ ID NO: 585405 - RNA, 19 nt, Artificial Sequence
  Description of Artificial Sequence: Synthetic oligonucleotide
cucgaaagugggaaugagg

SEQ ID NO: 585406 - RNA, 19 nt, Artificial Sequence
  Description of Artificial Sequence: Synthetic oligonucleotide
ucacaaaaccugaccaaug

SEQ ID NO: 585407 - RNA, 19 nt, Artificial Sequence
  Description of Artificial Sequence: Synthetic oligonucleotide
caauuccuggacuuugggg

SEQ ID NO: 585408 - RNA, 19 nt, Artificial Sequence
  Description of Artificial Sequence: Synthetic oligonucleotide
agguuagaacauuuggucu

SEQ ID NO: 585409 - RNA, 19 nt, Artificial Sequence
  Description of Artificial Sequence: Synthetic oligonucleotide
gaaagguuauuccacaccu

SEQ ID NO: 585410 - RNA, 19 nt, Artificial Sequence
  Description of Artificial Sequence: Synthetic oligonucleotide
auguaagguauccaaugug

SEQ ID NO: 585411 - RNA, 19 nt, Artificial Sequence
  Description of Artificial Sequence: Synthetic oligonucleotide
agguaaaugccuauauuuc

SEQ ID NO: 585412 - RNA, 19 nt, Artificial Sequence
  Description of Artificial Sequence: Synthetic oligonucleotide
cugguauucggccuauagg

SEQ ID NO: 585413 - RNA, 19 nt, Artificial Sequence
  Description of Artificial Sequence: Synthetic oligonucleotide
ucccauguaaugcucuuga

SEQ ID NO: 585414 - RNA, 19 nt, Artificial Sequence
  Description of Artificial Sequence: Synthetic oligonucleotide
agggaauguaccccaucgc

SEQ ID NO: 585415 - RNA, 19 nt, Artificial Sequence
  Description of Artificial Sequence: Synthetic oligonucleotide
gguaggucgaaucccacgg

SEQ ID NO: 585416 - RNA, 19 nt, Artificial Sequence
  Description of Artificial Sequence: Synthetic oligonucleotide
gauggaacagacacgcagc

SEQ ID NO: 585417 - RNA, 19 nt, Artificial Sequence
  Description of Artificial Sequence: Synthetic oligonucleotide
gaucugaacugucucccag

SEQ ID NO: 585418 - RNA, 19 nt, Artificial Sequence
  Description of Artificial Sequence: Synthetic oligonucleotide
uguagguaggucgaauccc

SEQ ID NO: 585419 - RNA, 19 nt, Artificial Sequence
  Description of Artificial Sequence: Synthetic oligonucleotide
ugaguauagauggaacaga

SEQ ID NO: 585420 - RNA, 19 nt, Artificial Sequence
  Description of Artificial Sequence: Synthetic oligonucleotide
auguaaugcucuugaguuc

SEQ ID NO: 585421 - RNA, 19 nt, Artificial Sequence
  Description of Artificial Sequence: Synthetic oligonucleotide
uggauucucuuccauuaca

SEQ ID NO: 585422 - RNA, 19 nt, Artificial Sequence
  Description of Artificial Sequence: Synthetic oligonucleotide
agucugaccugguauucgg

SEQ ID NO: 585423 - RNA, 19 nt, Artificial Sequence
  Description of Artificial Sequence: Synthetic oligonucleotide
ucccacgugucuuucaggc

SEQ ID NO: 585424 - RNA, 19 nt, Artificial Sequence
  Description of Artificial Sequence: Synthetic oligonucleotide
uguaccccaucgcacaucu

SEQ ID NO: 585425 - RNA, 19 nt, Artificial Sequence
  Description of Artificial Sequence: Synthetic oligonucleotide
cuuccauuacaucaucaac

SEQ ID NO: 585426 - RNA, 19 nt, Artificial Sequence
  Description of Artificial Sequence: Synthetic oligonucleotide
caggucagcaguagaagcc

SEQ ID NO: 585427 - RNA, 19 nt, Artificial Sequence
  Description of Artificial Sequence: Synthetic oligonucleotide
ugcuagaguuguuacugcc

SEQ ID NO: 585428 - RNA, 19 nt, Artificial Sequence
  Description of Artificial Sequence: Synthetic oligonucleotide
gaauugacggggcugaucu

SEQ ID NO: 585429 - RNA, 19 nt, Artificial Sequence
  Description of Artificial Sequence: Synthetic oligonucleotide
uuacaucguaucaggucag

SEQ ID NO: 585430 - RNA, 19 nt, Artificial Sequence
  Description of Artificial Sequence: Synthetic oligonucleotide
gccacgaucaguucaacag

SEQ ID NO: 585431 - RNA, 19 nt, Artificial Sequence
  Description of Artificial Sequence: Synthetic oligonucleotide
uaccccaucgcacaucuuc

SEQ ID NO: 585432 - RNA, 19 nt, Artificial Sequence
  Description of Artificial Sequence: Synthetic oligonucleotide
guuauuccacaccuuaaca

SEQ ID NO: 585433 - RNA, 19 nt, Artificial Sequence
  Description of Artificial Sequence: Synthetic oligonucleotide
aggccgaacaguugaacag

SEQ ID NO: 585434 - RNA, 19 nt, Artificial Sequence
  Description of Artificial Sequence: Synthetic oligonucleotide
uccaggauacacuguacac

SEQ ID NO: 585435 - RNA, 19 nt, Artificial Sequence
  Description of Artificial Sequence: Synthetic oligonucleotide
ugccagaacugagagaaug

SEQ ID NO: 585436 - RNA, 19 nt, Artificial Sequence
  Description of Artificial Sequence: Synthetic oligonucleotide
uuuguaccauggauggacu

SEQ ID NO: 585437 - RNA, 19 nt, Artificial Sequence
  Description of Artificial Sequence: Synthetic oligonucleotide
augagcuuacaucguauca

SEQ ID NO: 585438 - RNA, 19 nt, Artificial Sequence
  Description of Artificial Sequence: Synthetic oligonucleotide
agucauuuauaugaggcau

SEQ ID NO: 585439 - RNA, 19 nt, Artificial Sequence
  Description of Artificial Sequence: Synthetic oligonucleotide
uccaucuaaggauguaggu

SEQ ID NO: 585440 - RNA, 19 nt, Artificial Sequence
  Description of Artificial Sequence: Synthetic oligonucleotide
gcggcagucauuuauauga

SEQ ID NO: 585441 - RNA, 19 nt, Artificial Sequence
  Description of Artificial Sequence: Synthetic oligonucleotide
aaaccugaccaaugccaug

SEQ ID NO: 585442 - RNA, 19 nt, Artificial Sequence
  Description of Artificial Sequence: Synthetic oligonucleotide
guggaaagcugaauugacg

SEQ ID NO: 585443 - RNA, 19 nt, Artificial Sequence
  Description of Artificial Sequence: Synthetic oligonucleotide
auagggaauguaccccauc

SEQ ID NO: 585444 - RNA, 19 nt, Artificial Sequence
  Description of Artificial Sequence: Synthetic oligonucleotide
ucguugccuaaccugcucc

SEQ ID NO: 585445 - RNA, 19 nt, Artificial Sequence
  Description of Artificial Sequence: Synthetic oligonucleotide
caacuuguggcgaagcuca

SEQ ID NO: 585446 - RNA, 19 nt, Artificial Sequence
  Description of Artificial Sequence: Synthetic oligonucleotide
aaagauacauggugucaua

SEQ ID NO: 585447 - RNA, 19 nt, Artificial Sequence
  Description of Artificial Sequence: Synthetic oligonucleotide
uguggcgaagcucaacaau

SEQ ID NO: 585448 - RNA, 19 nt, Artificial Sequence
  Description of Artificial Sequence: Synthetic oligonucleotide
aauagcugcaagccagcuu

SEQ ID NO: 585449 - RNA, 19 nt, Artificial Sequence
  Description of Artificial Sequence: Synthetic oligonucleotide
ggugucauaauuauccaac

SEQ ID NO: 585450 - RNA, 19 nt, Artificial Sequence
  Description of Artificial Sequence: Synthetic oligonucleotide
caacuuagguucagagugc

SEQ ID NO: 585451 - RNA, 19 nt, Artificial Sequence
  Description of Artificial Sequence: Synthetic oligonucleotide
uccucgacagccaacucau

SEQ ID NO: 585452 - RNA, 19 nt, Artificial Sequence
  Description of Artificial Sequence: Synthetic oligonucleotide
cugaucugaacugucuccc

SEQ ID NO: 585453 - RNA, 19 nt, Artificial Sequence
  Description of Artificial Sequence: Synthetic oligonucleotide
ucgaugcucuaguacaggu

SEQ ID NO: 585454 - RNA, 19 nt, Artificial Sequence
  Description of Artificial Sequence: Synthetic oligonucleotide
aucaagggaggccgaacag

SEQ ID NO: 585455 - RNA, 19 nt, Artificial Sequence
  Description of Artificial Sequence: Synthetic oligonucleotide
aacuuagguucagagugca

SEQ ID NO: 585456 - RNA, 19 nt, Artificial Sequence
  Description of Artificial Sequence: Synthetic oligonucleotide
caggacucgaccaccuggg

SEQ ID NO: 585457 - RNA, 19 nt, Artificial Sequence
  Description of Artificial Sequence: Synthetic oligonucleotide
ggaaagguuauuccacacc

SEQ ID NO: 585458 - RNA, 19 nt, Artificial Sequence
  Description of Artificial Sequence: Synthetic oligonucleotide
aaggauguagguaggucga

SEQ ID NO: 585459 - RNA, 19 nt, Artificial Sequence
  Description of Artificial Sequence: Synthetic oligonucleotide
auccucgacagccaacuca

SEQ ID NO: 585460 - RNA, 19 nt, Artificial Sequence
  Description of Artificial Sequence: Synthetic oligonucleotide
aauguaccccaucgcacau

SEQ ID NO: 585461 - RNA, 19 nt, Artificial Sequence
  Description of Artificial Sequence: Synthetic oligonucleotide
uuuccgggaagcaauccua

SEQ ID NO: 585462 - RNA, 19 nt, Artificial Sequence
  Description of Artificial Sequence: Synthetic oligonucleotide
cuuguggcgaagcucaaca

SEQ ID NO: 585463 - RNA, 19 nt, Artificial Sequence
  Description of Artificial Sequence: Synthetic oligonucleotide
gguuauuccacaccuuaac

SEQ ID NO: 585464 - RNA, 19 nt, Artificial Sequence
  Description of Artificial Sequence: Synthetic oligonucleotide
ucaacuuguggcgaagcuc

SEQ ID NO: 585465 - RNA, 19 nt, Artificial Sequence
  Description of Artificial Sequence: Synthetic oligonucleotide
aguucuuccaggauacacu

SEQ ID NO: 585466 - RNA, 19 nt, Artificial Sequence
  Description of Artificial Sequence: Synthetic oligonucleotide
ucaguucaacaguccaucu

SEQ ID NO: 585467 - RNA, 19 nt, Artificial Sequence
  Description of Artificial Sequence: Synthetic oligonucleotide
caccaagacgucauucaag

SEQ ID NO: 585468 - RNA, 19 nt, Artificial Sequence
  Description of Artificial Sequence: Synthetic oligonucleotide
gaggccgaacaguugaaca

SEQ ID NO: 585469 - RNA, 19 nt, Artificial Sequence
  Description of Artificial Sequence: Synthetic oligonucleotide
cuauagggaauguacccca

SEQ ID NO: 585470 - RNA, 19 nt, Artificial Sequence
  Description of Artificial Sequence: Synthetic oligonucleotide
caguucguugccuaaccug

SEQ ID NO: 585471 - RNA, 19 nt, Artificial Sequence
  Description of Artificial Sequence: Synthetic oligonucleotide
uccaugagcuuacaucgua

SEQ ID NO: 585472 - RNA, 19 nt, Artificial Sequence
  Description of Artificial Sequence: Synthetic oligonucleotide
cacgcugaaccaugcaaag

SEQ ID NO: 585473 - RNA, 19 nt, Artificial Sequence
  Description of Artificial Sequence: Synthetic oligonucleotide
ucuuuuccgggaagcaauc

SEQ ID NO: 585474 - RNA, 19 nt, Artificial Sequence
  Description of Artificial Sequence: Synthetic oligonucleotide
ccaucgcacaucuucaggg

SEQ ID NO: 585475 - RNA, 19 nt, Artificial Sequence
  Description of Artificial Sequence: Synthetic oligonucleotide
aagccgccucuuuauuguc

SEQ ID NO: 585476 - RNA, 19 nt, Artificial Sequence
  Description of Artificial Sequence: Synthetic oligonucleotide
uauucggccuauagggaau

SEQ ID NO: 585477 - RNA, 19 nt, Artificial Sequence
  Description of Artificial Sequence: Synthetic oligonucleotide
ucugcggcagucauuuaua

SEQ ID NO: 585478 - RNA, 19 nt, Artificial Sequence
  Description of Artificial Sequence: Synthetic oligonucleotide
aauugacggggcugaucug

SEQ ID NO: 585479 - RNA, 19 nt, Artificial Sequence
  Description of Artificial Sequence: Synthetic oligonucleotide
uuggccacgaucaguucaa

SEQ ID NO: 585480 - RNA, 19 nt, Artificial Sequence
  Description of Artificial Sequence: Synthetic oligonucleotide
aguugacggcuccaguaug

SEQ ID NO: 585481 - RNA, 19 nt, Artificial Sequence
  Description of Artificial Sequence: Synthetic oligonucleotide
uuucccaauggaagaggaa

SEQ ID NO: 585482 - RNA, 19 nt, Artificial Sequence
  Description of Artificial Sequence: Synthetic oligonucleotide
gcugcuagaguuguuacug

SEQ ID NO: 585483 - RNA, 19 nt, Artificial Sequence
  Description of Artificial Sequence: Synthetic oligonucleotide
cuaucugcaaagcugccaa

SEQ ID NO: 585484 - RNA, 19 nt, Artificial Sequence
  Description of Artificial Sequence: Synthetic oligonucleotide
ugcggcagucauuuauaug

SEQ ID NO: 585485 - RNA, 19 nt, Artificial Sequence
  Description of Artificial Sequence: Synthetic oligonucleotide
acgcugaaccaugcaaagc

SEQ ID NO: 585486 - RNA, 19 nt, Artificial Sequence
  Description of Artificial Sequence: Synthetic oligonucleotide
cucgacagccaacucauca

SEQ ID NO: 585487 - RNA, 19 nt, Artificial Sequence
  Description of Artificial Sequence: Synthetic oligonucleotide
gccuauagggaauguaccc

SEQ ID NO: 585488 - RNA, 19 nt, Artificial Sequence
  Description of Artificial Sequence: Synthetic oligonucleotide
gcuaccagcaauucccgug

SEQ ID NO: 585489 - RNA, 19 nt, Artificial Sequence
  Description of Artificial Sequence: Synthetic oligonucleotide
guauucggccuauagggaa

SEQ ID NO: 585490 - RNA, 19 nt, Artificial Sequence
  Description of Artificial Sequence: Synthetic oligonucleotide
cuaaguucaucagugccca

SEQ ID NO: 585491 - RNA, 19 nt, Artificial Sequence
  Description of Artificial Sequence: Synthetic oligonucleotide
guucuagucgaugcucuag

SEQ ID NO: 585492 - RNA, 19 nt, Artificial Sequence
  Description of Artificial Sequence: Synthetic oligonucleotide
caccuggggccaaucaagg

SEQ ID NO: 585493 - RNA, 19 nt, Artificial Sequence
  Description of Artificial Sequence: Synthetic oligonucleotide
aagccucucuuuuccggga

SEQ ID NO: 585494 - RNA, 19 nt, Artificial Sequence
  Description of Artificial Sequence: Synthetic oligonucleotide
cugcuagaguuguuacugc

SEQ ID NO: 585495 - RNA, 19 nt, Artificial Sequence
  Description of Artificial Sequence: Synthetic oligonucleotide
agcuacauccaugagcuua

SEQ ID NO: 585496 - RNA, 19 nt, Artificial Sequence
  Description of Artificial Sequence: Synthetic oligonucleotide
accuuaacagcuugaggua

SEQ ID NO: 585497 - RNA, 19 nt, Artificial Sequence
  Description of Artificial Sequence: Synthetic oligonucleotide
gguaaaugccuauauuucu

SEQ ID NO: 585498 - RNA, 19 nt, Artificial Sequence
  Description of Artificial Sequence: Synthetic oligonucleotide
guucagagugcaauuccug

SEQ ID NO: 585499 - RNA, 19 nt, Artificial Sequence
  Description of Artificial Sequence: Synthetic oligonucleotide
cgcugaaccaugcaaagcc

SEQ ID NO: 585500 - RNA, 19 nt, Artificial Sequence
  Description of Artificial Sequence: Synthetic oligonucleotide
ucguuugcaucauccucga

SEQ ID NO: 585501 - RNA, 19 nt, Artificial Sequence
  Description of Artificial Sequence: Synthetic oligonucleotide
uucguugccuaaccugcuc

SEQ ID NO: 585502 - RNA, 19 nt, Artificial Sequence
  Description of Artificial Sequence: Synthetic oligonucleotide
uaguggcgcugcaaggaca

SEQ ID NO: 585503 - RNA, 19 nt, Artificial Sequence
  Description of Artificial Sequence: Synthetic oligonucleotide
aucuaaggauguagguagg

SEQ ID NO: 585504 - RNA, 19 nt, Artificial Sequence
  Description of Artificial Sequence: Synthetic oligonucleotide
gcuuacaucguaucagguc

SEQ ID NO: 585505 - RNA, 19 nt, Artificial Sequence
  Description of Artificial Sequence: Synthetic oligonucleotide
gaagccgccucuuuauugu

SEQ ID NO: 585506 - RNA, 19 nt, Artificial Sequence
  Description of Artificial Sequence: Synthetic oligonucleotide
gggaauguaccccaucgca

SEQ ID NO: 585507 - RNA, 19 nt, Artificial Sequence
  Description of Artificial Sequence: Synthetic oligonucleotide
ugcugggucgucagucuga

SEQ ID NO: 585508 - RNA, 19 nt, Artificial Sequence
  Description of Artificial Sequence: Synthetic oligonucleotide
ccacgguuccccaagguag

SEQ ID NO: 585509 - RNA, 19 nt, Artificial Sequence
  Description of Artificial Sequence: Synthetic oligonucleotide
ucguaucaggucagcagua

SEQ ID NO: 585510 - RNA, 19 nt, Artificial Sequence
  Description of Artificial Sequence: Synthetic oligonucleotide
agucgaugcucuaguacag

SEQ ID NO: 585511 - RNA, 19 nt, Artificial Sequence
  Description of Artificial Sequence: Synthetic oligonucleotide
ugacggcuccaguaugucu

SEQ ID NO: 585512 - RNA, 19 nt, Artificial Sequence
  Description of Artificial Sequence: Synthetic oligonucleotide
uucccauguaaugcucuug

SEQ ID NO: 585513 - RNA, 19 nt, Artificial Sequence
  Description of Artificial Sequence: Synthetic oligonucleotide
gacggggcugaucugaacu

SEQ ID NO: 585514 - RNA, 19 nt, Artificial Sequence
  Description of Artificial Sequence: Synthetic oligonucleotide
uggggccaaucaagggagg

SEQ ID NO: 585515 - RNA, 19 nt, Artificial Sequence
  Description of Artificial Sequence: Synthetic oligonucleotide
aggucgaaucccacgguuc

SEQ ID NO: 585516 - RNA, 19 nt, Artificial Sequence
  Description of Artificial Sequence: Synthetic oligonucleotide
cuggaugagaagccgccuc

SEQ ID NO: 585517 - RNA, 19 nt, Artificial Sequence
  Description of Artificial Sequence: Synthetic oligonucleotide
uuucccauguaaugcucuu

SEQ ID NO: 585518 - RNA, 19 nt, Artificial Sequence
  Description of Artificial Sequence: Synthetic oligonucleotide
guaucaggucagcaguaga

SEQ ID NO: 585519 - RNA, 19 nt, Artificial Sequence
  Description of Artificial Sequence: Synthetic oligonucleotide
ccuauagggaauguacccc

SEQ ID NO: 585520 - RNA, 19 nt, Artificial Sequence
  Description of Artificial Sequence: Synthetic oligonucleotide
cugcaaggacacuugcauc

SEQ ID NO: 585521 - RNA, 19 nt, Artificial Sequence
  Description of Artificial Sequence: Synthetic oligonucleotide
gauuauaguggcgcugcaa

SEQ ID NO: 585522 - RNA, 19 nt, Artificial Sequence
  Description of Artificial Sequence: Synthetic oligonucleotide
cuucauaugcuaccagcaa

SEQ ID NO: 585523 - RNA, 19 nt, Artificial Sequence
  Description of Artificial Sequence: Synthetic oligonucleotide
uacaucguaucaggucagc

SEQ ID NO: 585524 - RNA, 19 nt, Artificial Sequence
  Description of Artificial Sequence: Synthetic oligonucleotide
ugaauugacggggcugauc

SEQ ID NO: 585525 - RNA, 19 nt, Artificial Sequence
  Description of Artificial Sequence: Synthetic oligonucleotide
cauaugcuaccagcaauuc

SEQ ID NO: 585526 - RNA, 19 nt, Artificial Sequence
  Description of Artificial Sequence: Synthetic oligonucleotide
aggacucgaccaccugggg

SEQ ID NO: 585527 - RNA, 19 nt, Artificial Sequence
  Description of Artificial Sequence: Synthetic oligonucleotide
gaggaagccgucauccaga

SEQ ID NO: 585528 - RNA, 19 nt, Artificial Sequence
  Description of Artificial Sequence: Synthetic oligonucleotide
cagucugaccugguauucg

SEQ ID NO: 585529 - RNA, 19 nt, Artificial Sequence
  Description of Artificial Sequence: Synthetic oligonucleotide
guagguaggucgaauccca

SEQ ID NO: 585530 - RNA, 19 nt, Artificial Sequence
  Description of Artificial Sequence: Synthetic oligonucleotide
uuccaacucccacgugucu

SEQ ID NO: 585531 - RNA, 19 nt, Artificial Sequence
  Description of Artificial Sequence: Synthetic oligonucleotide
aaagguuauuccacaccuu

SEQ ID NO: 585532 - RNA, 19 nt, Artificial Sequence
  Description of Artificial Sequence: Synthetic oligonucleotide
acaucguaucaggucagca

SEQ ID NO: 585533 - RNA, 19 nt, Artificial Sequence
  Description of Artificial Sequence: Synthetic oligonucleotide
agcugugauuauaguggcg

SEQ ID NO: 585534 - RNA, 19 nt, Artificial Sequence
  Description of Artificial Sequence: Synthetic oligonucleotide
ggcaguucguugccuaacc

SEQ ID NO: 585535 - RNA, 19 nt, Artificial Sequence
  Description of Artificial Sequence: Synthetic oligonucleotide
cugcucgaaagugggaaug

SEQ ID NO: 585536 - RNA, 19 nt, Artificial Sequence
  Description of Artificial Sequence: Synthetic oligonucleotide
ucuuuaucguuugcaucau

SEQ ID NO: 585537 - RNA, 19 nt, Artificial Sequence
  Description of Artificial Sequence: Synthetic oligonucleotide
aucccacgguuccccaagg

SEQ ID NO: 585538 - RNA, 19 nt, Artificial Sequence
  Description of Artificial Sequence: Synthetic oligonucleotide
caccagacuguuucagguc

SEQ ID NO: 585539 - RNA, 19 nt, Artificial Sequence
  Description of Artificial Sequence: Synthetic oligonucleotide
cuuugagcccaugcaguug

SEQ ID NO: 585540 - RNA, 19 nt, Artificial Sequence
  Description of Artificial Sequence: Synthetic oligonucleotide
ggaauguaccccaucgcac

SEQ ID NO: 585541 - RNA, 19 nt, Artificial Sequence
  Description of Artificial Sequence: Synthetic oligonucleotide
cacaacaacuuagguucag

SEQ ID NO: 585542 - RNA, 19 nt, Artificial Sequence
  Description of Artificial Sequence: Synthetic oligonucleotide
gggaaagguuauuccacac

SEQ ID NO: 585543 - RNA, 19 nt, Artificial Sequence
  Description of Artificial Sequence: Synthetic oligonucleotide
ggcuuuggcaccaagacgu

SEQ ID NO: 585544 - RNA, 19 nt, Artificial Sequence
  Description of Artificial Sequence: Synthetic oligonucleotide
ccugguauucggccuauag

SEQ ID NO: 585545 - RNA, 19 nt, Artificial Sequence
  Description of Artificial Sequence: Synthetic oligonucleotide
aggaccccacuccauucug

SEQ ID NO: 585546 - RNA, 19 nt, Artificial Sequence
  Description of Artificial Sequence: Synthetic oligonucleotide
accucugcggcagucauuu

SEQ ID NO: 585547 - RNA, 19 nt, Artificial Sequence
  Description of Artificial Sequence: Synthetic oligonucleotide
ccugauguaagguauccaa

SEQ ID NO: 585548 - RNA, 19 nt, Artificial Sequence
  Description of Artificial Sequence: Synthetic oligonucleotide
ugggucaacuuguggcgaa

SEQ ID NO: 585549 - RNA, 19 nt, Artificial Sequence
  Description of Artificial Sequence: Synthetic oligonucleotide
gguggaaagcugaauugac

SEQ ID NO: 585550 - RNA, 19 nt, Artificial Sequence
  Description of Artificial Sequence: Synthetic oligonucleotide
gaguuguuacugccuccac

SEQ ID NO: 585551 - RNA, 19 nt, Artificial Sequence
  Description of Artificial Sequence: Synthetic oligonucleotide
ggacucgaccaccuggggc

SEQ ID NO: 585552 - RNA, 19 nt, Artificial Sequence
  Description of Artificial Sequence: Synthetic oligonucleotide
acaauccagucuggaaugu

SEQ ID NO: 585553 - RNA, 19 nt, Artificial Sequence
  Description of Artificial Sequence: Synthetic oligonucleotide
ggccuauagggaauguacc

SEQ ID NO: 585554 - RNA, 19 nt, Artificial Sequence
  Description of Artificial Sequence: Synthetic oligonucleotide
cagggcuuacuugccacgc

SEQ ID NO: 585555 - RNA, 19 nt, Artificial Sequence
  Description of Artificial Sequence: Synthetic oligonucleotide
auucggccuauagggaaug

SEQ ID NO: 585556 - RNA, 19 nt, Artificial Sequence
  Description of Artificial Sequence: Synthetic oligonucleotide
agcaaccucugcggcaguc

SEQ ID NO: 585557 - RNA, 19 nt, Artificial Sequence
  Description of Artificial Sequence: Synthetic oligonucleotide
gggcuuacuugccacgcug

SEQ ID NO: 585558 - RNA, 19 nt, Artificial Sequence
  Description of Artificial Sequence: Synthetic oligonucleotide
agggcuuacuugccacgcu

SEQ ID NO: 585559 - RNA, 19 nt, Artificial Sequence
  Description of Artificial Sequence: Synthetic oligonucleotide
agcuuacaucguaucaggu

SEQ ID NO: 585560 - RNA, 19 nt, Artificial Sequence
  Description of Artificial Sequence: Synthetic oligonucleotide
ccaccuggggccaaucaag

SEQ ID NO: 585561 - RNA, 19 nt, Artificial Sequence
  Description of Artificial Sequence: Synthetic oligonucleotide
auguaccccaucgcacauc

SEQ ID NO: 585562 - RNA, 19 nt, Artificial Sequence
  Description of Artificial Sequence: Synthetic oligonucleotide
gguuagaacauuuggucuu

SEQ ID NO: 585563 - RNA, 19 nt, Artificial Sequence
  Description of Artificial Sequence: Synthetic oligonucleotide
ucccacgguuccccaaggu

SEQ ID NO: 585564 - RNA, 19 nt, Artificial Sequence
  Description of Artificial Sequence: Synthetic oligonucleotide
uaccagcaauucccgugcu

SEQ ID NO: 585565 - RNA, 19 nt, Artificial Sequence
  Description of Artificial Sequence: Synthetic oligonucleotide
cucuuuuccgggaagcaau

SEQ ID NO: 585566 - RNA, 19 nt, Artificial Sequence
  Description of Artificial Sequence: Synthetic oligonucleotide
ggagguuagaacauuuggu

SEQ ID NO: 585567 - RNA, 19 nt, Artificial Sequence
  Description of Artificial Sequence: Synthetic oligonucleotide
acgguuccccaagguagac

SEQ ID NO: 585568 - RNA, 19 nt, Artificial Sequence
  Description of Artificial Sequence: Synthetic oligonucleotide
uccuuaugucuuggacuug

SEQ ID NO: 585569 - RNA, 19 nt, Artificial Sequence
  Description of Artificial Sequence: Synthetic oligonucleotide
aauuuccacugugguggaa

SEQ ID NO: 585570 - RNA, 19 nt, Artificial Sequence
  Description of Artificial Sequence: Synthetic oligonucleotide
ggccgaacaguugaacagc

SEQ ID NO: 585571 - RNA, 19 nt, Artificial Sequence
  Description of Artificial Sequence: Synthetic oligonucleotide
agguuauuccacaccuuaa

SEQ ID NO: 585572 - RNA, 19 nt, Artificial Sequence
  Description of Artificial Sequence: Synthetic oligonucleotide
agccaacucaucaucuuua

SEQ ID NO: 585573 - RNA, 19 nt, Artificial Sequence
  Description of Artificial Sequence: Synthetic oligonucleotide
cggccuauagggaauguac

SEQ ID NO: 585574 - RNA, 19 nt, Artificial Sequence
  Description of Artificial Sequence: Synthetic oligonucleotide
uugacggcuccaguauguc

SEQ ID NO: 585575 - RNA, 19 nt, Artificial Sequence
  Description of Artificial Sequence: Synthetic oligonucleotide
ucggccuauagggaaugua

SEQ ID NO: 585576 - RNA, 19 nt, Artificial Sequence
  Description of Artificial Sequence: Synthetic oligonucleotide
ugacggggcugaucugaac

SEQ ID NO: 585577 - RNA, 19 nt, Artificial Sequence
  Description of Artificial Sequence: Synthetic oligonucleotide
gucaacuuguggcgaagcu

SEQ ID NO: 585578 - RNA, 19 nt, Artificial Sequence
  Description of Artificial Sequence: Synthetic oligonucleotide
cacgguuccccaagguaga

SEQ ID NO: 585579 - RNA, 19 nt, Artificial Sequence
  Description of Artificial Sequence: Synthetic oligonucleotide
gugagcccaagcaggacuc

SEQ ID NO: 585580 - RNA, 19 nt, Artificial Sequence
  Description of Artificial Sequence: Synthetic oligonucleotide
caguucaacaguccaucua

SEQ ID NO: 585581 - RNA, 19 nt, Artificial Sequence
  Description of Artificial Sequence: Synthetic oligonucleotide
agaaaggaccccacuccau

SEQ ID NO: 585582 - RNA, 19 nt, Artificial Sequence
  Description of Artificial Sequence: Synthetic oligonucleotide
agcuugagguaaaugccua

SEQ ID NO: 585583 - RNA, 19 nt, Artificial Sequence
  Description of Artificial Sequence: Synthetic oligonucleotide
gguauucggccuauaggga

SEQ ID NO: 585584 - RNA, 19 nt, Artificial Sequence
  Description of Artificial Sequence: Synthetic oligonucleotide
ggucaacuuguggcgaagc

SEQ ID NO: 585585 - RNA, 19 nt, Artificial Sequence
  Description of Artificial Sequence: Synthetic oligonucleotide
gacuccagagaaggccuuc

SEQ ID NO: 585586 - RNA, 19 nt, Artificial Sequence
  Description of Artificial Sequence: Synthetic oligonucleotide
cagacuguuucagguccug

SEQ ID NO: 585587 - RNA, 19 nt, Artificial Sequence
  Description of Artificial Sequence: Synthetic oligonucleotide
ggugagcccaagcaggacu

SEQ ID NO: 585588 - RNA, 19 nt, Artificial Sequence
  Description of Artificial Sequence: Synthetic oligonucleotide
cccauguaaugcucuugag

SEQ ID NO: 585589 - RNA, 19 nt, Artificial Sequence
  Description of Artificial Sequence: Synthetic oligonucleotide
gacggcuccaguaugucuu

SEQ ID NO: 585590 - RNA, 19 nt, Artificial Sequence
  Description of Artificial Sequence: Synthetic oligonucleotide
gcucgaaagugggaaugag

SEQ ID NO: 585591 - RNA, 19 nt, Artificial Sequence
  Description of Artificial Sequence: Synthetic oligonucleotide
acugugguggaaagcugaa

SEQ ID NO: 585592 - RNA, 19 nt, Artificial Sequence
  Description of Artificial Sequence: Synthetic oligonucleotide
auccaugagcuuacaucgu

SEQ ID NO: 585593 - RNA, 19 nt, Artificial Sequence
  Description of Artificial Sequence: Synthetic oligonucleotide
uugagcccaugcaguuguc

SEQ ID NO: 585594 - RNA, 19 nt, Artificial Sequence
  Description of Artificial Sequence: Synthetic oligonucleotide
gaauagcugcaagccagcu

SEQ ID NO: 585595 - RNA, 19 nt, Artificial Sequence
  Description of Artificial Sequence: Synthetic oligonucleotide
guugacggcuccaguaugu

SEQ ID NO: 585596 - RNA, 19 nt, Artificial Sequence
  Description of Artificial Sequence: Synthetic oligonucleotide
uucggccuauagggaaugu

SEQ ID NO: 585597 - RNA, 19 nt, Artificial Sequence
  Description of Artificial Sequence: Synthetic oligonucleotide
gggaaugaggaagccguca

SEQ ID NO: 585598 - RNA, 19 nt, Artificial Sequence
  Description of Artificial Sequence: Synthetic oligonucleotide
agccaacccaggacaaagu

SEQ ID NO: 585599 - RNA, 19 nt, Artificial Sequence
  Description of Artificial Sequence: Synthetic oligonucleotide
guaugucuucuggagccaa

SEQ ID NO: 585600 - RNA, 19 nt, Artificial Sequence
  Description of Artificial Sequence: Synthetic oligonucleotide
cugggucgucagucugacc

SEQ ID NO: 585601 - RNA, 19 nt, Artificial Sequence
  Description of Artificial Sequence: Synthetic oligonucleotide
cucugcggcagucauuuau

SEQ ID NO: 585602 - RNA, 19 nt, Artificial Sequence
  Description of Artificial Sequence: Synthetic oligonucleotide
ccauagagcagucuaaguu

SEQ ID NO: 585603 - RNA, 19 nt, Artificial Sequence
  Description of Artificial Sequence: Synthetic oligonucleotide
gggguucuagucgaugcuc

SEQ ID NO: 585604 - RNA, 19 nt, Artificial Sequence
  Description of Artificial Sequence: Synthetic oligonucleotide
guaggucgaaucccacggu

SEQ ID NO: 585605 - RNA, 19 nt, Artificial Sequence
  Description of Artificial Sequence: Synthetic oligonucleotide
aacuuguggcgaagcucaa

SEQ ID NO: 585606 - RNA, 19 nt, Artificial Sequence
  Description of Artificial Sequence: Synthetic oligonucleotide
ccaucuaaggauguaggua

SEQ ID NO: 585607 - RNA, 19 nt, Artificial Sequence
  Description of Artificial Sequence: Synthetic oligonucleotide
ggaggccgaacaguugaac

SEQ ID NO: 585608 - RNA, 19 nt, Artificial Sequence
  Description of Artificial Sequence: Synthetic oligonucleotide
gggucaacuuguggcgaag

SEQ ID NO: 585609 - RNA, 19 nt, Artificial Sequence
  Description of Artificial Sequence: Synthetic oligonucleotide
cguaucaggucagcaguag

SEQ ID NO: 585610 - RNA, 19 nt, Artificial Sequence
  Description of Artificial Sequence: Synthetic oligonucleotide
caguugacggcuccaguau

SEQ ID NO: 585611 - RNA, 19 nt, Artificial Sequence
  Description of Artificial Sequence: Synthetic oligonucleotide
agcugccaacugcucgaaa

SEQ ID NO: 585612 - RNA, 19 nt, Artificial Sequence
  Description of Artificial Sequence: Synthetic oligonucleotide
cauuccguccagucuuggu

SEQ ID NO: 585613 - RNA, 19 nt, Artificial Sequence
  Description of Artificial Sequence: Synthetic oligonucleotide
cggcagucauuuauaugag

SEQ ID NO: 585614 - RNA, 19 nt, Artificial Sequence
  Description of Artificial Sequence: Synthetic oligonucleotide
gagaagccgccucuuuauu

SEQ ID NO: 585615 - RNA, 19 nt, Artificial Sequence
  Description of Artificial Sequence: Synthetic oligonucleotide
gguucuagucgaugcucua

SEQ ID NO: 585616 - RNA, 19 nt, Artificial Sequence
  Description of Artificial Sequence: Synthetic oligonucleotide
ccuuaacagcuugagguaa

SEQ ID NO: 585617 - RNA, 19 nt, Artificial Sequence
  Description of Artificial Sequence: Synthetic oligonucleotide
gcucuaguacagguugguc

SEQ ID NO: 585618 - RNA, 19 nt, Artificial Sequence
  Description of Artificial Sequence: Synthetic oligonucleotide
gccauagagcagucuaagu

SEQ ID NO: 585619 - RNA, 19 nt, Artificial Sequence
  Description of Artificial Sequence: Synthetic oligonucleotide
ucgaccaccuggggccaau

SEQ ID NO: 585620 - RNA, 19 nt, Artificial Sequence
  Description of Artificial Sequence: Synthetic oligonucleotide
cuacauccaugagcuuaca

SEQ ID NO: 585621 - RNA, 19 nt, Artificial Sequence
  Description of Artificial Sequence: Synthetic oligonucleotide
gcaguucguugccuaaccu

SEQ ID NO: 585622 - RNA, 19 nt, Artificial Sequence
  Description of Artificial Sequence: Synthetic oligonucleotide
gggcaguucguugccuaac

SEQ ID NO: 585623 - RNA, 19 nt, Artificial Sequence
  Description of Artificial Sequence: Synthetic oligonucleotide
guucguugccuaaccugcu

SEQ ID NO: 585624 - RNA, 19 nt, Artificial Sequence
  Description of Artificial Sequence: Synthetic oligonucleotide
ccacaacaacuuagguuca

SEQ ID NO: 585625 - RNA, 19 nt, Artificial Sequence
  Description of Artificial Sequence: Synthetic oligonucleotide
ggggcaguucguugccuaa

SEQ ID NO: 585626 - RNA, 19 nt, Artificial Sequence
  Description of Artificial Sequence: Synthetic oligonucleotide
gguccuucuguugaacauu

SEQ ID NO: 585627 - RNA, 19 nt, Artificial Sequence
  Description of Artificial Sequence: Synthetic oligonucleotide
ccucuuccaacucccacgu

SEQ ID NO: 585628 - RNA, 19 nt, Artificial Sequence
  Description of Artificial Sequence: Synthetic oligonucleotide
ggauguagguaggucgaau

SEQ ID NO: 585629 - RNA, 19 nt, Artificial Sequence
  Description of Artificial Sequence: Synthetic oligonucleotide
agacgucauucaagucgau

SEQ ID NO: 585630 - RNA, 19 nt, Artificial Sequence
  Description of Artificial Sequence: Synthetic oligonucleotide
cccacgguuccccaaggua

SEQ ID NO: 585631 - RNA, 19 nt, Artificial Sequence
  Description of Artificial Sequence: Synthetic oligonucleotide
gggcugaucugaacugucu

SEQ ID NO: 585632 - RNA, 19 nt, Artificial Sequence
  Description of Artificial Sequence: Synthetic oligonucleotide
gccaaucaagggaggccga

SEQ ID NO: 585633 - RNA, 19 nt, Artificial Sequence
  Description of Artificial Sequence: Synthetic oligonucleotide
cgggaagcaauccuaguau

SEQ ID NO: 585634 - RNA, 19 nt, Artificial Sequence
  Description of Artificial Sequence: Synthetic oligonucleotide
ccucgacagccaacucauc

SEQ ID NO: 585635 - RNA, 19 nt, Artificial Sequence
  Description of Artificial Sequence: Synthetic oligonucleotide
ccaaucaagggaggccgaa

SEQ ID NO: 585636 - RNA, 19 nt, Artificial Sequence
  Description of Artificial Sequence: Synthetic oligonucleotide
cgagcauuccguccagucu

SEQ ID NO: 585637 - RNA, 19 nt, Artificial Sequence
  Description of Artificial Sequence: Synthetic oligonucleotide
accugguauucggccuaua

SEQ ID NO: 585638 - RNA, 19 nt, Artificial Sequence
  Description of Artificial Sequence: Synthetic oligonucleotide
gucgucagucugaccuggu

SEQ ID NO: 585639 - RNA, 19 nt, Artificial Sequence
  Description of Artificial Sequence: Synthetic oligonucleotide
ccguccagucuugguguug

SEQ ID NO: 585640 - RNA, 19 nt, Artificial Sequence
  Description of Artificial Sequence: Synthetic oligonucleotide
cugccagaacugagagaau

SEQ ID NO: 585641 - RNA, 19 nt, Artificial Sequence
  Description of Artificial Sequence: Synthetic oligonucleotide
ccgaacaguugaacagccu

SEQ ID NO: 585642 - RNA, 19 nt, Artificial Sequence
  Description of Artificial Sequence: Synthetic oligonucleotide
ggaccccacuccauucugu

SEQ ID NO: 585643 - RNA, 19 nt, Artificial Sequence
  Description of Artificial Sequence: Synthetic oligonucleotide
ccaacucccacgugucuuu

SEQ ID NO: 585644 - RNA, 19 nt, Artificial Sequence
  Description of Artificial Sequence: Synthetic oligonucleotide
cugaauugacggggcugau

SEQ ID NO: 585645 - RNA, 19 nt, Artificial Sequence
  Description of Artificial Sequence: Synthetic oligonucleotide
cccacgugucuuucaggcu

SEQ ID NO: 585646 - RNA, 19 nt, Artificial Sequence
  Description of Artificial Sequence: Synthetic oligonucleotide
gcuccccaucuggcaagac

SEQ ID NO: 585647 - RNA, 19 nt, Artificial Sequence
  Description of Artificial Sequence: Synthetic oligonucleotide
cucgaccaccuggggccaa

SEQ ID NO: 585648 - RNA, 19 nt, Artificial Sequence
  Description of Artificial Sequence: Synthetic oligonucleotide
guggcgcugcaaggacacu

SEQ ID NO: 585649 - RNA, 19 nt, Artificial Sequence
  Description of Artificial Sequence: Synthetic oligonucleotide
guaccccaucgcacaucuu

SEQ ID NO: 585650 - RNA, 19 nt, Artificial Sequence
  Description of Artificial Sequence: Synthetic oligonucleotide
ccucugcggcagucauuua

SEQ ID NO: 585651 - RNA, 19 nt, Artificial Sequence
  Description of Artificial Sequence: Synthetic oligonucleotide
uguugaaugaggaagagcu

SEQ ID NO: 585652 - RNA, 19 nt, Artificial Sequence
  Description of Artificial Sequence: Synthetic oligonucleotide
gaacuuauacaucaaauag

SEQ ID NO: 585653 - RNA, 19 nt, Artificial Sequence
  Description of Artificial Sequence: Synthetic oligonucleotide
uuaggauuucacaugugcg

SEQ ID NO: 585654 - RNA, 19 nt, Artificial Sequence
  Description of Artificial Sequence: Synthetic oligonucleotide
agcaucuuagcuuugagug

SEQ ID NO: 585655 - RNA, 19 nt, Artificial Sequence
  Description of Artificial Sequence: Synthetic oligonucleotide
uuuaguuuaucauaccaga

SEQ ID NO: 585656 - RNA, 19 nt, Artificial Sequence
  Description of Artificial Sequence: Synthetic oligonucleotide
aguuuaucauaccagagug

SEQ ID NO: 585657 - RNA, 19 nt, Artificial Sequence
  Description of Artificial Sequence: Synthetic oligonucleotide
uuuaacguaauacuccaga

SEQ ID NO: 585658 - RNA, 19 nt, Artificial Sequence
  Description of Artificial Sequence: Synthetic oligonucleotide
uguguaagaguccaaggag

SEQ ID NO: 585659 - RNA, 19 nt, Artificial Sequence
  Description of Artificial Sequence: Synthetic oligonucleotide
ucgaagacgacuuuaacgu

SEQ ID NO: 585660 - RNA, 19 nt, Artificial Sequence
  Description of Artificial Sequence: Synthetic oligonucleotide
aaacucguccccuuuggac

SEQ ID NO: 585661 - RNA, 19 nt, Artificial Sequence
  Description of Artificial Sequence: Synthetic oligonucleotide
aacaaggcuagcuacagau

SEQ ID NO: 585662 - RNA, 19 nt, Artificial Sequence
  Description of Artificial Sequence: Synthetic oligonucleotide
uuaguuuaucauaccagag

SEQ ID NO: 585663 - RNA, 19 nt, Artificial Sequence
  Description of Artificial Sequence: Synthetic oligonucleotide
ucuuauagcauuguagccc

SEQ ID NO: 585664 - RNA, 19 nt, Artificial Sequence
  Description of Artificial Sequence: Synthetic oligonucleotide
uuacgcaucaaguuggucu

SEQ ID NO: 585665 - RNA, 19 nt, Artificial Sequence
  Description of Artificial Sequence: Synthetic oligonucleotide
aaugacaagaguggugaac

SEQ ID NO: 585666 - RNA, 19 nt, Artificial Sequence
  Description of Artificial Sequence: Synthetic oligonucleotide
cuuuaguuuaucauaccag

SEQ ID NO: 585667 - RNA, 19 nt, Artificial Sequence
  Description of Artificial Sequence: Synthetic oligonucleotide
ucaaggauagccuucauuu

SEQ ID NO: 585668 - RNA, 19 nt, Artificial Sequence
  Description of Artificial Sequence: Synthetic oligonucleotide
cuuaggauuucacaugugc

SEQ ID NO: 585669 - RNA, 19 nt, Artificial Sequence
  Description of Artificial Sequence: Synthetic oligonucleotide
ucuaggauaggauuuuaca

SEQ ID NO: 585670 - RNA, 19 nt, Artificial Sequence
  Description of Artificial Sequence: Synthetic oligonucleotide
uugguuucaaacaaggcua

SEQ ID NO: 585671 - RNA, 19 nt, Artificial Sequence
  Description of Artificial Sequence: Synthetic oligonucleotide
caaauagaccuuuucagug

SEQ ID NO: 585672 - RNA, 19 nt, Artificial Sequence
  Description of Artificial Sequence: Synthetic oligonucleotide
uuuaucauaccagagugac

SEQ ID NO: 585673 - RNA, 19 nt, Artificial Sequence
  Description of Artificial Sequence: Synthetic oligonucleotide
auacauacuuccuagccug

SEQ ID NO: 585674 - RNA, 19 nt, Artificial Sequence
  Description of Artificial Sequence: Synthetic oligonucleotide
acgaguuggcauuacggcc

SEQ ID NO: 585675 - RNA, 19 nt, Artificial Sequence
  Description of Artificial Sequence: Synthetic oligonucleotide
ugaacuuauacaucaaaua

SEQ ID NO: 585676 - RNA, 19 nt, Artificial Sequence
  Description of Artificial Sequence: Synthetic oligonucleotide
aguugagaagcacaccaac

SEQ ID NO: 585677 - RNA, 19 nt, Artificial Sequence
  Description of Artificial Sequence: Synthetic oligonucleotide
aguuuucuagcaucuuagc

SEQ ID NO: 585678 - RNA, 19 nt, Artificial Sequence
  Description of Artificial Sequence: Synthetic oligonucleotide
acgacuuuaacguaauacu

SEQ ID NO: 585679 - RNA, 19 nt, Artificial Sequence
  Description of Artificial Sequence: Synthetic oligonucleotide
auaggauuuuacaucaacg

SEQ ID NO: 585680 - RNA, 19 nt, Artificial Sequence
  Description of Artificial Sequence: Synthetic oligonucleotide
uaaaccuagauguuuccca

SEQ ID NO: 585681 - RNA, 19 nt, Artificial Sequence
  Description of Artificial Sequence: Synthetic oligonucleotide
cuuacagcuccaaagcacc

SEQ ID NO: 585682 - RNA, 19 nt, Artificial Sequence
  Description of Artificial Sequence: Synthetic oligonucleotide
uuccuugcaauuuugccgc

SEQ ID NO: 585683 - RNA, 19 nt, Artificial Sequence
  Description of Artificial Sequence: Synthetic oligonucleotide
acuaaugauuuuccuuucg

SEQ ID NO: 585684 - RNA, 19 nt, Artificial Sequence
  Description of Artificial Sequence: Synthetic oligonucleotide
aaguuuucuagcaucuuag

SEQ ID NO: 585685 - RNA, 19 nt, Artificial Sequence
  Description of Artificial Sequence: Synthetic oligonucleotide
gauaggauuuuacaucaac

SEQ ID NO: 585686 - RNA, 19 nt, Artificial Sequence
  Description of Artificial Sequence: Synthetic oligonucleotide
accuugaacagcuccgggc

SEQ ID NO: 585687 - RNA, 19 nt, Artificial Sequence
  Description of Artificial Sequence: Synthetic oligonucleotide
cauagaguccugcacaccc

SEQ ID NO: 585688 - RNA, 19 nt, Artificial Sequence
  Description of Artificial Sequence: Synthetic oligonucleotide
uugaaagauugcuucagcu

SEQ ID NO: 585689 - RNA, 19 nt, Artificial Sequence
  Description of Artificial Sequence: Synthetic oligonucleotide
acacguuuauggucaaggc

SEQ ID NO: 585690 - RNA, 19 nt, Artificial Sequence
  Description of Artificial Sequence: Synthetic oligonucleotide
aacucguccccuuuggaca

SEQ ID NO: 585691 - RNA, 19 nt, Artificial Sequence
  Description of Artificial Sequence: Synthetic oligonucleotide
ugagcuguacauagccugg

SEQ ID NO: 585692 - RNA, 19 nt, Artificial Sequence
  Description of Artificial Sequence: Synthetic oligonucleotide
ucaaacaaggcuagcuaca

SEQ ID NO: 585693 - RNA, 19 nt, Artificial Sequence
  Description of Artificial Sequence: Synthetic oligonucleotide
uccgcugaaucaaggauag

SEQ ID NO: 585694 - RNA, 19 nt, Artificial Sequence
  Description of Artificial Sequence: Synthetic oligonucleotide
uucagcuuacgcaucaagu

SEQ ID NO: 585695 - RNA, 19 nt, Artificial Sequence
  Description of Artificial Sequence: Synthetic oligonucleotide
uuccauauauucuugccuc

SEQ ID NO: 585696 - RNA, 19 nt, Artificial Sequence
  Description of Artificial Sequence: Synthetic oligonucleotide
cauguuggaaugacaagag

SEQ ID NO: 585697 - RNA, 19 nt, Artificial Sequence
  Description of Artificial Sequence: Synthetic oligonucleotide
uguucauagaguccugcac

SEQ ID NO: 585698 - RNA, 19 nt, Artificial Sequence
  Description of Artificial Sequence: Synthetic oligonucleotide
gacgacuuuaacguaauac

SEQ ID NO: 585699 - RNA, 19 nt, Artificial Sequence
  Description of Artificial Sequence: Synthetic oligonucleotide
aauacuccagaagcucggc

SEQ ID NO: 585700 - RNA, 19 nt, Artificial Sequence
  Description of Artificial Sequence: Synthetic oligonucleotide
uucuguaagacaacaggaa

SEQ ID NO: 585701 - RNA, 19 nt, Artificial Sequence
  Description of Artificial Sequence: Synthetic oligonucleotide
cuucucuaaaccuagaugu

SEQ ID NO: 585702 - RNA, 19 nt, Artificial Sequence
  Description of Artificial Sequence: Synthetic oligonucleotide
uaggauuucacaugugcgu

SEQ ID NO: 585703 - RNA, 19 nt, Artificial Sequence
  Description of Artificial Sequence: Synthetic oligonucleotide
uuaacguaauacuccagaa

SEQ ID NO: 585704 - RNA, 19 nt, Artificial Sequence
  Description of Artificial Sequence: Synthetic oligonucleotide
ugcaguagaguuuggcugc

SEQ ID NO: 585705 - RNA, 19 nt, Artificial Sequence
  Description of Artificial Sequence: Synthetic oligonucleotide
acacacacacacaucaccc

SEQ ID NO: 585706 - RNA, 19 nt, Artificial Sequence
  Description of Artificial Sequence: Synthetic oligonucleotide
uuucaaacaaggcuagcua

SEQ ID NO: 585707 - RNA, 19 nt, Artificial Sequence
  Description of Artificial Sequence: Synthetic oligonucleotide
aacucgaguggcuuuggug

SEQ ID NO: 585708 - RNA, 19 nt, Artificial Sequence
  Description of Artificial Sequence: Synthetic oligonucleotide
cuacuuagaggagaggagg

SEQ ID NO: 585709 - RNA, 19 nt, Artificial Sequence
  Description of Artificial Sequence: Synthetic oligonucleotide
acaagaguggugaacagag

SEQ ID NO: 585710 - RNA, 19 nt, Artificial Sequence
  Description of Artificial Sequence: Synthetic oligonucleotide
uaucaauucguggucuggg

SEQ ID NO: 585711 - RNA, 19 nt, Artificial Sequence
  Description of Artificial Sequence: Synthetic oligonucleotide
cuagacuuggcuaagaagu

SEQ ID NO: 585712 - RNA, 19 nt, Artificial Sequence
  Description of Artificial Sequence: Synthetic oligonucleotide
gaaagcgugguaccagcgg

SEQ ID NO: 585713 - RNA, 19 nt, Artificial Sequence
  Description of Artificial Sequence: Synthetic oligonucleotide
ugaccuuuaguuuaucaua

SEQ ID NO: 585714 - RNA, 19 nt, Artificial Sequence
  Description of Artificial Sequence: Synthetic oligonucleotide
uagauaugcuuccccaccc

SEQ ID NO: 585715 - RNA, 19 nt, Artificial Sequence
  Description of Artificial Sequence: Synthetic oligonucleotide
uguaaccuguguuuaggug

SEQ ID NO: 585716 - RNA, 19 nt, Artificial Sequence
  Description of Artificial Sequence: Synthetic oligonucleotide
ucaguaaaguccaccuuga

SEQ ID NO: 585717 - RNA, 19 nt, Artificial Sequence
  Description of Artificial Sequence: Synthetic oligonucleotide
uugcaaacagaaagguacc

SEQ ID NO: 585718 - RNA, 19 nt, Artificial Sequence
  Description of Artificial Sequence: Synthetic oligonucleotide
uuccuuucgaagcucugcc

SEQ ID NO: 585719 - RNA, 19 nt, Artificial Sequence
  Description of Artificial Sequence: Synthetic oligonucleotide
acuuacagcuccaaagcac

SEQ ID NO: 585720 - RNA, 19 nt, Artificial Sequence
  Description of Artificial Sequence: Synthetic oligonucleotide
aaaccuagauguuucccaa

SEQ ID NO: 585721 - RNA, 19 nt, Artificial Sequence
  Description of Artificial Sequence: Synthetic oligonucleotide
ugcgcacacacacacacac

SEQ ID NO: 585722 - RNA, 19 nt, Artificial Sequence
  Description of Artificial Sequence: Synthetic oligonucleotide
uuggcaagaaccugguaga

SEQ ID NO: 585723 - RNA, 19 nt, Artificial Sequence
  Description of Artificial Sequence: Synthetic oligonucleotide
uggcaauuccuguaugucc

SEQ ID NO: 585724 - RNA, 19 nt, Artificial Sequence
  Description of Artificial Sequence: Synthetic oligonucleotide
cacacacacacacacacac

SEQ ID NO: 585725 - RNA, 19 nt, Artificial Sequence
  Description of Artificial Sequence: Synthetic oligonucleotide
ugguuucaaacaaggcuag

SEQ ID NO: 585726 - RNA, 19 nt, Artificial Sequence
  Description of Artificial Sequence: Synthetic oligonucleotide
uuuugagguucaaugcacu

SEQ ID NO: 585727 - RNA, 19 nt, Artificial Sequence
  Description of Artificial Sequence: Synthetic oligonucleotide
guagauaugcuuccccacc

SEQ ID NO: 585728 - RNA, 19 nt, Artificial Sequence
  Description of Artificial Sequence: Synthetic oligonucleotide
ugaaucaaggauagccuuc

SEQ ID NO: 585729 - RNA, 19 nt, Artificial Sequence
  Description of Artificial Sequence: Synthetic oligonucleotide
uuaucaauucguggucugg

SEQ ID NO: 585730 - RNA, 19 nt, Artificial Sequence
  Description of Artificial Sequence: Synthetic oligonucleotide
agaaagguaccagacagca

SEQ ID NO: 585731 - RNA, 19 nt, Artificial Sequence
  Description of Artificial Sequence: Synthetic oligonucleotide
gauuucacaugugcgugcg

SEQ ID NO: 585732 - RNA, 19 nt, Artificial Sequence
  Description of Artificial Sequence: Synthetic oligonucleotide
uacgguagugcugaagucc

SEQ ID NO: 585733 - RNA, 19 nt, Artificial Sequence
  Description of Artificial Sequence: Synthetic oligonucleotide
cugagcuguacauagccug

SEQ ID NO: 585734 - RNA, 19 nt, Artificial Sequence
  Description of Artificial Sequence: Synthetic oligonucleotide
uacuuagaggagaggagga

SEQ ID NO: 585735 - RNA, 19 nt, Artificial Sequence
  Description of Artificial Sequence: Synthetic oligonucleotide
accaguugguuucuugguc

SEQ ID NO: 585736 - RNA, 19 nt, Artificial Sequence
  Description of Artificial Sequence: Synthetic oligonucleotide
uuguugaaccauuccacac

SEQ ID NO: 585737 - RNA, 19 nt, Artificial Sequence
  Description of Artificial Sequence: Synthetic oligonucleotide
cacgaguuggcauuacggc

SEQ ID NO: 585738 - RNA, 19 nt, Artificial Sequence
  Description of Artificial Sequence: Synthetic oligonucleotide
gaccuuuaguuuaucauac

SEQ ID NO: 585739 - RNA, 19 nt, Artificial Sequence
  Description of Artificial Sequence: Synthetic oligonucleotide
agucgaagacgacuuuaac

SEQ ID NO: 585740 - RNA, 19 nt, Artificial Sequence
  Description of Artificial Sequence: Synthetic oligonucleotide
cucuaaaccuagauguuuc

SEQ ID NO: 585741 - RNA, 19 nt, Artificial Sequence
  Description of Artificial Sequence: Synthetic oligonucleotide
agcucaaccucccaguagu

SEQ ID NO: 585742 - RNA, 19 nt, Artificial Sequence
  Description of Artificial Sequence: Synthetic oligonucleotide
cacacacacacacaucacc

SEQ ID NO: 585743 - RNA, 19 nt, Artificial Sequence
  Description of Artificial Sequence: Synthetic oligonucleotide
agagcaguaggugaaucuc

SEQ ID NO: 585744 - RNA, 19 nt, Artificial Sequence
  Description of Artificial Sequence: Synthetic oligonucleotide
agccugaaauuucccagac

SEQ ID NO: 585745 - RNA, 19 nt, Artificial Sequence
  Description of Artificial Sequence: Synthetic oligonucleotide
ggauacauacuuccuagcc

SEQ ID NO: 585746 - RNA, 19 nt, Artificial Sequence
  Description of Artificial Sequence: Synthetic oligonucleotide
ucuggcaauuccuguaugu

SEQ ID NO: 585747 - RNA, 19 nt, Artificial Sequence
  Description of Artificial Sequence: Synthetic oligonucleotide
agacagcaaggguauacuc

SEQ ID NO: 585748 - RNA, 19 nt, Artificial Sequence
  Description of Artificial Sequence: Synthetic oligonucleotide
augacaagaguggugaaca

SEQ ID NO: 585749 - RNA, 19 nt, Artificial Sequence
  Description of Artificial Sequence: Synthetic oligonucleotide
aaccuagauguuucccaag

SEQ ID NO: 585750 - RNA, 19 nt, Artificial Sequence
  Description of Artificial Sequence: Synthetic oligonucleotide
uucaaugcacucugguaga

SEQ ID NO: 585751 - RNA, 19 nt, Artificial Sequence
  Description of Artificial Sequence: Synthetic oligonucleotide
uuccuguucauagaguccu

SEQ ID NO: 585752 - RNA, 19 nt, Artificial Sequence
  Description of Artificial Sequence: Synthetic oligonucleotide
cacacacacacacacauca

SEQ ID NO: 585753 - RNA, 19 nt, Artificial Sequence
  Description of Artificial Sequence: Synthetic oligonucleotide
agcuuacgcaucaaguugg

SEQ ID NO: 585754 - RNA, 19 nt, Artificial Sequence
  Description of Artificial Sequence: Synthetic oligonucleotide
uguacauagccuggaaaga

SEQ ID NO: 585755 - RNA, 19 nt, Artificial Sequence
  Description of Artificial Sequence: Synthetic oligonucleotide
ucaauucguggucuggguc

SEQ ID NO: 585756 - RNA, 19 nt, Artificial Sequence
  Description of Artificial Sequence: Synthetic oligonucleotide
caacguuucuggcaauucc

SEQ ID NO: 585757 - RNA, 19 nt, Artificial Sequence
  Description of Artificial Sequence: Synthetic oligonucleotide
caaugcaaagacuugaccu

SEQ ID NO: 585758 - RNA, 19 nt, Artificial Sequence
  Description of Artificial Sequence: Synthetic oligonucleotide
agcacuaaugauuuuccuu

SEQ ID NO: 585759 - RNA, 19 nt, Artificial Sequence
  Description of Artificial Sequence: Synthetic oligonucleotide
uauagcauuguagccccag

SEQ ID NO: 585760 - RNA, 19 nt, Artificial Sequence
  Description of Artificial Sequence: Synthetic oligonucleotide
aggauuuuacaucaacguu

SEQ ID NO: 585761 - RNA, 19 nt, Artificial Sequence
  Description of Artificial Sequence: Synthetic oligonucleotide
cuggggauggguacgguag

SEQ ID NO: 585762 - RNA, 19 nt, Artificial Sequence
  Description of Artificial Sequence: Synthetic oligonucleotide
gauacauacuuccuagccu

SEQ ID NO: 585763 - RNA, 19 nt, Artificial Sequence
  Description of Artificial Sequence: Synthetic oligonucleotide
agagucuugacugucaguu

SEQ ID NO: 585764 - RNA, 19 nt, Artificial Sequence
  Description of Artificial Sequence: Synthetic oligonucleotide
uuuccuuucgaagcucugc

SEQ ID NO: 585765 - RNA, 19 nt, Artificial Sequence
  Description of Artificial Sequence: Synthetic oligonucleotide
ugggcaguauuguagucga

SEQ ID NO: 585766 - RNA, 19 nt, Artificial Sequence
  Description of Artificial Sequence: Synthetic oligonucleotide
ucauaccagagugacugag

SEQ ID NO: 585767 - RNA, 19 nt, Artificial Sequence
  Description of Artificial Sequence: Synthetic oligonucleotide
uccacauuguugugccagg

SEQ ID NO: 585768 - RNA, 19 nt, Artificial Sequence
  Description of Artificial Sequence: Synthetic oligonucleotide
uuguugacauuccuugcaa

SEQ ID NO: 585769 - RNA, 19 nt, Artificial Sequence
  Description of Artificial Sequence: Synthetic oligonucleotide
augccuacaccgcagaaau

SEQ ID NO: 585770 - RNA, 19 nt, Artificial Sequence
  Description of Artificial Sequence: Synthetic oligonucleotide
acguuuauggucaaggcaa

SEQ ID NO: 585771 - RNA, 19 nt, Artificial Sequence
  Description of Artificial Sequence: Synthetic oligonucleotide
accuagauguuucccaagu

SEQ ID NO: 585772 - RNA, 19 nt, Artificial Sequence
  Description of Artificial Sequence: Synthetic oligonucleotide
uagcaucuuagcuuugagu

SEQ ID NO: 585773 - RNA, 19 nt, Artificial Sequence
  Description of Artificial Sequence: Synthetic oligonucleotide
accgcagaaauuguucuuc

SEQ ID NO: 585774 - RNA, 19 nt, Artificial Sequence
  Description of Artificial Sequence: Synthetic oligonucleotide
guaaccuguguuuaggugu

SEQ ID NO: 585775 - RNA, 19 nt, Artificial Sequence
  Description of Artificial Sequence: Synthetic oligonucleotide
uuugagguucaaugcacuc

SEQ ID NO: 585776 - RNA, 19 nt, Artificial Sequence
  Description of Artificial Sequence: Synthetic oligonucleotide
uuaucauaccagagugacu

SEQ ID NO: 585777 - RNA, 19 nt, Artificial Sequence
  Description of Artificial Sequence: Synthetic oligonucleotide
uacgcaucaaguuggucuc

SEQ ID NO: 585778 - RNA, 19 nt, Artificial Sequence
  Description of Artificial Sequence: Synthetic oligonucleotide
cuuuaacguaauacuccag

SEQ ID NO: 585779 - RNA, 19 nt, Artificial Sequence
  Description of Artificial Sequence: Synthetic oligonucleotide
aaacaaggcuagcuacaga

SEQ ID NO: 585780 - RNA, 19 nt, Artificial Sequence
  Description of Artificial Sequence: Synthetic oligonucleotide
ucuccgcugaaucaaggau

SEQ ID NO: 585781 - RNA, 19 nt, Artificial Sequence
  Description of Artificial Sequence: Synthetic oligonucleotide
guauuguagucgaagacga

SEQ ID NO: 585782 - RNA, 19 nt, Artificial Sequence
  Description of Artificial Sequence: Synthetic oligonucleotide
ucaguuaacccuuggcauu

SEQ ID NO: 585783 - RNA, 19 nt, Artificial Sequence
  Description of Artificial Sequence: Synthetic oligonucleotide
acgguagugcugaaguccc

SEQ ID NO: 585784 - RNA, 19 nt, Artificial Sequence
  Description of Artificial Sequence: Synthetic oligonucleotide
ugcuucucuaaaccuagau

SEQ ID NO: 585785 - RNA, 19 nt, Artificial Sequence
  Description of Artificial Sequence: Synthetic oligonucleotide
uuguugaaugaggaagagc

SEQ ID NO: 585786 - RNA, 19 nt, Artificial Sequence
  Description of Artificial Sequence: Synthetic oligonucleotide
uagucgaagacgacuuuaa

SEQ ID NO: 585787 - RNA, 19 nt, Artificial Sequence
  Description of Artificial Sequence: Synthetic oligonucleotide
uugagguucaaugcacucu

SEQ ID NO: 585788 - RNA, 19 nt, Artificial Sequence
  Description of Artificial Sequence: Synthetic oligonucleotide
cagauggaaagcgugguac

SEQ ID NO: 585789 - RNA, 19 nt, Artificial Sequence
  Description of Artificial Sequence: Synthetic oligonucleotide
acaccgcagaaauuguucu

SEQ ID NO: 585790 - RNA, 19 nt, Artificial Sequence
  Description of Artificial Sequence: Synthetic oligonucleotide
ugacugagacagucauugg

SEQ ID NO: 585791 - RNA, 19 nt, Artificial Sequence
  Description of Artificial Sequence: Synthetic oligonucleotide
gauaugcuuccccacccac

SEQ ID NO: 585792 - RNA, 19 nt, Artificial Sequence
  Description of Artificial Sequence: Synthetic oligonucleotide
cuguauguccacagagccc

SEQ ID NO: 585793 - RNA, 19 nt, Artificial Sequence
  Description of Artificial Sequence: Synthetic oligonucleotide
gcuagcuacagauuuucug

SEQ ID NO: 585794 - RNA, 19 nt, Artificial Sequence
  Description of Artificial Sequence: Synthetic oligonucleotide
accuauggggacucagaag

SEQ ID NO: 585795 - RNA, 19 nt, Artificial Sequence
  Description of Artificial Sequence: Synthetic oligonucleotide
ccuguauguccacagagcc

SEQ ID NO: 585796 - RNA, 19 nt, Artificial Sequence
  Description of Artificial Sequence: Synthetic oligonucleotide
cuauccaugcugccguagc

SEQ ID NO: 585797 - RNA, 19 nt, Artificial Sequence
  Description of Artificial Sequence: Synthetic oligonucleotide
aggauuucacaugugcgug

SEQ ID NO: 585798 - RNA, 19 nt, Artificial Sequence
  Description of Artificial Sequence: Synthetic oligonucleotide
ucucauaaacagagggaua

SEQ ID NO: 585799 - RNA, 19 nt, Artificial Sequence
  Description of Artificial Sequence: Synthetic oligonucleotide
uugggucuaggauaggauu

SEQ ID NO: 585800 - RNA, 19 nt, Artificial Sequence
  Description of Artificial Sequence: Synthetic oligonucleotide
cacacacacacaucacccc

SEQ ID NO: 585801 - RNA, 19 nt, Artificial Sequence
  Description of Artificial Sequence: Synthetic oligonucleotide
uuuccguggauccgcuucu

SEQ ID NO: 585802 - RNA, 19 nt, Artificial Sequence
  Description of Artificial Sequence: Synthetic oligonucleotide
gaagacgacuuuaacguaa

SEQ ID NO: 585803 - RNA, 19 nt, Artificial Sequence
  Description of Artificial Sequence: Synthetic oligonucleotide
guaccagcggagaacaccc

SEQ ID NO: 585804 - RNA, 19 nt, Artificial Sequence
  Description of Artificial Sequence: Synthetic oligonucleotide
cuagcaucuuagcuuugag

SEQ ID NO: 585805 - RNA, 19 nt, Artificial Sequence
  Description of Artificial Sequence: Synthetic oligonucleotide
cuuugggugcggcaucagg

SEQ ID NO: 585806 - RNA, 19 nt, Artificial Sequence
  Description of Artificial Sequence: Synthetic oligonucleotide
uaccagacagcaaggguau

SEQ ID NO: 585807 - RNA, 19 nt, Artificial Sequence
  Description of Artificial Sequence: Synthetic oligonucleotide
cuuguugaaugaggaagag

SEQ ID NO: 585808 - RNA, 19 nt, Artificial Sequence
  Description of Artificial Sequence: Synthetic oligonucleotide
uuugccgcuuucuccagaa

SEQ ID NO: 585809 - RNA, 19 nt, Artificial Sequence
  Description of Artificial Sequence: Synthetic oligonucleotide
aucaauucguggucugggu

SEQ ID NO: 585810 - RNA, 19 nt, Artificial Sequence
  Description of Artificial Sequence: Synthetic oligonucleotide
ucucuaaaccuagauguuu

SEQ ID NO: 585811 - RNA, 19 nt, Artificial Sequence
  Description of Artificial Sequence: Synthetic oligonucleotide
acuuccuagccugagcugu

SEQ ID NO: 585812 - RNA, 19 nt, Artificial Sequence
  Description of Artificial Sequence: Synthetic oligonucleotide
auguuggaaugacaagagu

SEQ ID NO: 585813 - RNA, 19 nt, Artificial Sequence
  Description of Artificial Sequence: Synthetic oligonucleotide
cuaggauaggauuuuacau

SEQ ID NO: 585814 - RNA, 19 nt, Artificial Sequence
  Description of Artificial Sequence: Synthetic oligonucleotide
augcuguccagcuuuccgu

SEQ ID NO: 585815 - RNA, 19 nt, Artificial Sequence
  Description of Artificial Sequence: Synthetic oligonucleotide
ugccguagcaaaugccuac

SEQ ID NO: 585816 - RNA, 19 nt, Artificial Sequence
  Description of Artificial Sequence: Synthetic oligonucleotide
aucaaggauagccuucauu

SEQ ID NO: 585817 - RNA, 19 nt, Artificial Sequence
  Description of Artificial Sequence: Synthetic oligonucleotide
cacguuuauggucaaggca

SEQ ID NO: 585818 - RNA, 19 nt, Artificial Sequence
  Description of Artificial Sequence: Synthetic oligonucleotide
uguugacauuccuugcaau

SEQ ID NO: 585819 - RNA, 19 nt, Artificial Sequence
  Description of Artificial Sequence: Synthetic oligonucleotide
gaaagagucuugacuguca

SEQ ID NO: 585820 - RNA, 19 nt, Artificial Sequence
  Description of Artificial Sequence: Synthetic oligonucleotide
gguauacuccuccacuuac

SEQ ID NO: 585821 - RNA, 19 nt, Artificial Sequence
  Description of Artificial Sequence: Synthetic oligonucleotide
caagaguggugaacagagc

SEQ ID NO: 585822 - RNA, 19 nt, Artificial Sequence
  Description of Artificial Sequence: Synthetic oligonucleotide
ugcugccguagcaaaugcc

SEQ ID NO: 585823 - RNA, 19 nt, Artificial Sequence
  Description of Artificial Sequence: Synthetic oligonucleotide
ugccagacacguuuauggu

SEQ ID NO: 585824 - RNA, 19 nt, Artificial Sequence
  Description of Artificial Sequence: Synthetic oligonucleotide
ucuccuaccuauggggacu

SEQ ID NO: 585825 - RNA, 19 nt, Artificial Sequence
  Description of Artificial Sequence: Synthetic oligonucleotide
caaggguauacuccuccac

SEQ ID NO: 585826 - RNA, 19 nt, Artificial Sequence
  Description of Artificial Sequence: Synthetic oligonucleotide
gagugcaguagaguuuggc

SEQ ID NO: 585827 - RNA, 19 nt, Artificial Sequence
  Description of Artificial Sequence: Synthetic oligonucleotide
uggucuccgcugaaucaag

SEQ ID NO: 585828 - RNA, 19 nt, Artificial Sequence
  Description of Artificial Sequence: Synthetic oligonucleotide
cacuaaugauuuuccuuuc

SEQ ID NO: 585829 - RNA, 19 nt, Artificial Sequence
  Description of Artificial Sequence: Synthetic oligonucleotide
uugggugcggcaucagggu

SEQ ID NO: 585830 - RNA, 19 nt, Artificial Sequence
  Description of Artificial Sequence: Synthetic oligonucleotide
auggaaagcgugguaccag

SEQ ID NO: 585831 - RNA, 19 nt, Artificial Sequence
  Description of Artificial Sequence: Synthetic oligonucleotide
cacaccaaugcaaagacuu

SEQ ID NO: 585832 - RNA, 19 nt, Artificial Sequence
  Description of Artificial Sequence: Synthetic oligonucleotide
gauggguacgguagugcug

SEQ ID NO: 585833 - RNA, 19 nt, Artificial Sequence
  Description of Artificial Sequence: Synthetic oligonucleotide
cuuccaaucuccuaccuau

SEQ ID NO: 585834 - RNA, 19 nt, Artificial Sequence
  Description of Artificial Sequence: Synthetic oligonucleotide
ccuagacuuggcuaagaag

SEQ ID NO: 585835 - RNA, 19 nt, Artificial Sequence
  Description of Artificial Sequence: Synthetic oligonucleotide
gccuacaccgcagaaauug

SEQ ID NO: 585836 - RNA, 19 nt, Artificial Sequence
  Description of Artificial Sequence: Synthetic oligonucleotide
guaccagacagcaagggua

SEQ ID NO: 585837 - RNA, 19 nt, Artificial Sequence
  Description of Artificial Sequence: Synthetic oligonucleotide
ucaacguuucuggcaauuc

SEQ ID NO: 585838 - RNA, 19 nt, Artificial Sequence
  Description of Artificial Sequence: Synthetic oligonucleotide
aaagauugcuucagcucau

SEQ ID NO: 585839 - RNA, 19 nt, Artificial Sequence
  Description of Artificial Sequence: Synthetic oligonucleotide
guuuaucauaccagaguga

SEQ ID NO: 585840 - RNA, 19 nt, Artificial Sequence
  Description of Artificial Sequence: Synthetic oligonucleotide
cuuugagugcaguagaguu

SEQ ID NO: 585841 - RNA, 19 nt, Artificial Sequence
  Description of Artificial Sequence: Synthetic oligonucleotide
gcaguauuguagucgaaga

SEQ ID NO: 585842 - RNA, 19 nt, Artificial Sequence
  Description of Artificial Sequence: Synthetic oligonucleotide
cauaccagagugacugaga

SEQ ID NO: 585843 - RNA, 19 nt, Artificial Sequence
  Description of Artificial Sequence: Synthetic oligonucleotide
ucauagaguccugcacacc

SEQ ID NO: 585844 - RNA, 19 nt, Artificial Sequence
  Description of Artificial Sequence: Synthetic oligonucleotide
ggugaaucucuggggaugg

SEQ ID NO: 585845 - RNA, 19 nt, Artificial Sequence
  Description of Artificial Sequence: Synthetic oligonucleotide
ccuuuaguuuaucauacca

SEQ ID NO: 585846 - RNA, 19 nt, Artificial Sequence
  Description of Artificial Sequence: Synthetic oligonucleotide
aagacgacuuuaacguaau

SEQ ID NO: 585847 - RNA, 19 nt, Artificial Sequence
  Description of Artificial Sequence: Synthetic oligonucleotide
auuacggcccagacggcuc

SEQ ID NO: 585848 - RNA, 19 nt, Artificial Sequence
  Description of Artificial Sequence: Synthetic oligonucleotide
ggauuucacaugugcgugc

SEQ ID NO: 585849 - RNA, 19 nt, Artificial Sequence
  Description of Artificial Sequence: Synthetic oligonucleotide
gagagcaguaggugaaucu

SEQ ID NO: 585850 - RNA, 19 nt, Artificial Sequence
  Description of Artificial Sequence: Synthetic oligonucleotide
gguaccagcggagaacacc

SEQ ID NO: 585851 - RNA, 19 nt, Artificial Sequence
  Description of Artificial Sequence: Synthetic oligonucleotide
acacacacacacacaucac

SEQ ID NO: 585852 - RNA, 19 nt, Artificial Sequence
  Description of Artificial Sequence: Synthetic oligonucleotide
ucacaugugcgugcgcaca

SEQ ID NO: 585853 - RNA, 19 nt, Artificial Sequence
  Description of Artificial Sequence: Synthetic oligonucleotide
uggggacucagaaguucca

SEQ ID NO: 585854 - RNA, 19 nt, Artificial Sequence
  Description of Artificial Sequence: Synthetic oligonucleotide
gaaccauuccacacaccac

SEQ ID NO: 585855 - RNA, 19 nt, Artificial Sequence
  Description of Artificial Sequence: Synthetic oligonucleotide
acguaauacuccagaagcu

SEQ ID NO: 585856 - RNA, 19 nt, Artificial Sequence
  Description of Artificial Sequence: Synthetic oligonucleotide
ccaaugcaaagacuugacc

SEQ ID NO: 585857 - RNA, 19 nt, Artificial Sequence
  Description of Artificial Sequence: Synthetic oligonucleotide
uuauagcauuguagcccca

SEQ ID NO: 585858 - RNA, 19 nt, Artificial Sequence
  Description of Artificial Sequence: Synthetic oligonucleotide
ucuggggauggguacggua

SEQ ID NO: 585859 - RNA, 19 nt, Artificial Sequence
  Description of Artificial Sequence: Synthetic oligonucleotide
uugcaauuuugccgcuuuc

SEQ ID NO: 585860 - RNA, 19 nt, Artificial Sequence
  Description of Artificial Sequence: Synthetic oligonucleotide
uccuagccugagcuguaca

SEQ ID NO: 585861 - RNA, 19 nt, Artificial Sequence
  Description of Artificial Sequence: Synthetic oligonucleotide
gaagcucggcccuagacuu

SEQ ID NO: 585862 - RNA, 19 nt, Artificial Sequence
  Description of Artificial Sequence: Synthetic oligonucleotide
ccagacacguuuaugguca

SEQ ID NO: 585863 - RNA, 19 nt, Artificial Sequence
  Description of Artificial Sequence: Synthetic oligonucleotide
ugagagcaguaggugaauc

SEQ ID NO: 585864 - RNA, 19 nt, Artificial Sequence
  Description of Artificial Sequence: Synthetic oligonucleotide
auuccacacaccacgaguu

SEQ ID NO: 585865 - RNA, 19 nt, Artificial Sequence
  Description of Artificial Sequence: Synthetic oligonucleotide
cuggcaauuccuguauguc

SEQ ID NO: 585866 - RNA, 19 nt, Artificial Sequence
  Description of Artificial Sequence: Synthetic oligonucleotide
ucggcccuagacuuggcua

SEQ ID NO: 585867 - RNA, 19 nt, Artificial Sequence
  Description of Artificial Sequence: Synthetic oligonucleotide
gucuaggauaggauuuuac

SEQ ID NO: 585868 - RNA, 19 nt, Artificial Sequence
  Description of Artificial Sequence: Synthetic oligonucleotide
cuaccuauggggacucaga

SEQ ID NO: 585869 - RNA, 19 nt, Artificial Sequence
  Description of Artificial Sequence: Synthetic oligonucleotide
caaugcacucugguagacc

SEQ ID NO: 585870 - RNA, 19 nt, Artificial Sequence
  Description of Artificial Sequence: Synthetic oligonucleotide
cgaguuggcauuacggccc

SEQ ID NO: 585871 - RNA, 19 nt, Artificial Sequence
  Description of Artificial Sequence: Synthetic oligonucleotide
agcucggcccuagacuugg

SEQ ID NO: 585872 - RNA, 19 nt, Artificial Sequence
  Description of Artificial Sequence: Synthetic oligonucleotide
caccuugaacagcuccggg

SEQ ID NO: 585873 - RNA, 19 nt, Artificial Sequence
  Description of Artificial Sequence: Synthetic oligonucleotide
uucuagcaucuuagcuuug

SEQ ID NO: 585874 - RNA, 19 nt, Artificial Sequence
  Description of Artificial Sequence: Synthetic oligonucleotide
gggauacauacuuccuagc

SEQ ID NO: 585875 - RNA, 19 nt, Artificial Sequence
  Description of Artificial Sequence: Synthetic oligonucleotide
aguccaaggaggaccccuc

SEQ ID NO: 585876 - RNA, 19 nt, Artificial Sequence
  Description of Artificial Sequence: Synthetic oligonucleotide
cacuuaggauuucacaugu

SEQ ID NO: 585877 - RNA, 19 nt, Artificial Sequence
  Description of Artificial Sequence: Synthetic oligonucleotide
auugggucuaggauaggau

SEQ ID NO: 585878 - RNA, 19 nt, Artificial Sequence
  Description of Artificial Sequence: Synthetic oligonucleotide
acacacacacacacacauc

SEQ ID NO: 585879 - RNA, 19 nt, Artificial Sequence
  Description of Artificial Sequence: Synthetic oligonucleotide
ccuguaaccuguguuuagg

SEQ ID NO: 585880 - RNA, 19 nt, Artificial Sequence
  Description of Artificial Sequence: Synthetic oligonucleotide
uggucaccugcuuggcucu

SEQ ID NO: 585881 - RNA, 19 nt, Artificial Sequence
  Description of Artificial Sequence: Synthetic oligonucleotide
ggugguguaguugucugac

SEQ ID NO: 585882 - RNA, 19 nt, Artificial Sequence
  Description of Artificial Sequence: Synthetic oligonucleotide
cgacuuuaacguaauacuc

SEQ ID NO: 585883 - RNA, 19 nt, Artificial Sequence
  Description of Artificial Sequence: Synthetic oligonucleotide
ggauuuuacaucaacguuu

SEQ ID NO: 585884 - RNA, 19 nt, Artificial Sequence
  Description of Artificial Sequence: Synthetic oligonucleotide
cuccgcugaaucaaggaua

SEQ ID NO: 585885 - RNA, 19 nt, Artificial Sequence
  Description of Artificial Sequence: Synthetic oligonucleotide
gagugacugagacagucau

SEQ ID NO: 585886 - RNA, 19 nt, Artificial Sequence
  Description of Artificial Sequence: Synthetic oligonucleotide
uucguggucugggucuacc

SEQ ID NO: 585887 - RNA, 19 nt, Artificial Sequence
  Description of Artificial Sequence: Synthetic oligonucleotide
caauucguggucugggucu

SEQ ID NO: 585888 - RNA, 19 nt, Artificial Sequence
  Description of Artificial Sequence: Synthetic oligonucleotide
ucccaguagugaaugccuu

SEQ ID NO: 585889 - RNA, 19 nt, Artificial Sequence
  Description of Artificial Sequence: Synthetic oligonucleotide
ucguggucugggucuaccu

SEQ ID NO: 585890 - RNA, 19 nt, Artificial Sequence
  Description of Artificial Sequence: Synthetic oligonucleotide
gucuccgcugaaucaagga

SEQ ID NO: 585891 - RNA, 19 nt, Artificial Sequence
  Description of Artificial Sequence: Synthetic oligonucleotide
caccaaugcaaagacuuga

SEQ ID NO: 585892 - RNA, 19 nt, Artificial Sequence
  Description of Artificial Sequence: Synthetic oligonucleotide
cagcucaaccucccaguag

SEQ ID NO: 585893 - RNA, 19 nt, Artificial Sequence
  Description of Artificial Sequence: Synthetic oligonucleotide
cucucauaaacagagggau

SEQ ID NO: 585894 - RNA, 19 nt, Artificial Sequence
  Description of Artificial Sequence: Synthetic oligonucleotide
agagugacugagacaguca

SEQ ID NO: 585895 - RNA, 19 nt, Artificial Sequence
  Description of Artificial Sequence: Synthetic oligonucleotide
cagggguaccaggagguag

SEQ ID NO: 585896 - RNA, 19 nt, Artificial Sequence
  Description of Artificial Sequence: Synthetic oligonucleotide
guugagaagcacaccaacu

SEQ ID NO: 585897 - RNA, 19 nt, Artificial Sequence
  Description of Artificial Sequence: Synthetic oligonucleotide
acgcaucaaguuggucucc

SEQ ID NO: 585898 - RNA, 19 nt, Artificial Sequence
  Description of Artificial Sequence: Synthetic oligonucleotide
gcauucugcuucucuaaac

SEQ ID NO: 585899 - RNA, 19 nt, Artificial Sequence
  Description of Artificial Sequence: Synthetic oligonucleotide
ccuauggggacucagaagu

SEQ ID NO: 585900 - RNA, 19 nt, Artificial Sequence
  Description of Artificial Sequence: Synthetic oligonucleotide
cacacacacacacacacau

SEQ ID NO: 585901 - RNA, 19 nt, Artificial Sequence
  Description of Artificial Sequence: Synthetic oligonucleotide
ggaaagcgugguaccagcg

SEQ ID NO: 585902 - RNA, 19 nt, Artificial Sequence
  Description of Artificial Sequence: Synthetic oligonucleotide
agcuguacauagccuggaa

SEQ ID NO: 585903 - RNA, 19 nt, Artificial Sequence
  Description of Artificial Sequence: Synthetic oligonucleotide
aauucguggucugggucua

SEQ ID NO: 585904 - RNA, 19 nt, Artificial Sequence
  Description of Artificial Sequence: Synthetic oligonucleotide
aaggcuagcuacagauuuu

SEQ ID NO: 585905 - RNA, 19 nt, Artificial Sequence
  Description of Artificial Sequence: Synthetic oligonucleotide
ccucaguuaacccuuggca

SEQ ID NO: 585906 - RNA, 19 nt, Artificial Sequence
  Description of Artificial Sequence: Synthetic oligonucleotide
auaugcuuccccacccaca

SEQ ID NO: 585907 - RNA, 19 nt, Artificial Sequence
  Description of Artificial Sequence: Synthetic oligonucleotide
cagccugaaauuucccaga

SEQ ID NO: 585908 - RNA, 19 nt, Artificial Sequence
  Description of Artificial Sequence: Synthetic oligonucleotide
guauacuccuccacuuaca

SEQ ID NO: 585909 - RNA, 19 nt, Artificial Sequence
  Description of Artificial Sequence: Synthetic oligonucleotide
caaggcuagcuacagauuu

SEQ ID NO: 585910 - RNA, 19 nt, Artificial Sequence
  Description of Artificial Sequence: Synthetic oligonucleotide
gcuuguugaaugaggaaga

SEQ ID NO: 585911 - RNA, 19 nt, Artificial Sequence
  Description of Artificial Sequence: Synthetic oligonucleotide
gguguuggcuuugggugcg

SEQ ID NO: 585912 - RNA, 19 nt, Artificial Sequence
  Description of Artificial Sequence: Synthetic oligonucleotide
ugggucuaccuuggggaug

SEQ ID NO: 585913 - RNA, 19 nt, Artificial Sequence
  Description of Artificial Sequence: Synthetic oligonucleotide
cuuuaucaauucguggucu

SEQ ID NO: 585914 - RNA, 19 nt, Artificial Sequence
  Description of Artificial Sequence: Synthetic oligonucleotide
ucugcccaaguggcuagca

SEQ ID NO: 585915 - RNA, 19 nt, Artificial Sequence
  Description of Artificial Sequence: Synthetic oligonucleotide
cgcacacacacacacacac

SEQ ID NO: 585916 - RNA, 19 nt, Artificial Sequence
  Description of Artificial Sequence: Synthetic oligonucleotide
acuuaggauuucacaugug

SEQ ID NO: 585917 - RNA, 19 nt, Artificial Sequence
  Description of Artificial Sequence: Synthetic oligonucleotide
guagucgaagacgacuuua

SEQ ID NO: 585918 - RNA, 19 nt, Artificial Sequence
  Description of Artificial Sequence: Synthetic oligonucleotide
cauugacuguccaggagcu

SEQ ID NO: 585919 - RNA, 19 nt, Artificial Sequence
  Description of Artificial Sequence: Synthetic oligonucleotide
ggaaagagucuugacuguc

SEQ ID NO: 585920 - RNA, 19 nt, Artificial Sequence
  Description of Artificial Sequence: Synthetic oligonucleotide
cugaaauuucccagacucu

SEQ ID NO: 585921 - RNA, 19 nt, Artificial Sequence
  Description of Artificial Sequence: Synthetic oligonucleotide
aggagcuccaaagguggga

SEQ ID NO: 585922 - RNA, 19 nt, Artificial Sequence
  Description of Artificial Sequence: Synthetic oligonucleotide
uaccagcggagaacaccca

SEQ ID NO: 585923 - RNA, 19 nt, Artificial Sequence
  Description of Artificial Sequence: Synthetic oligonucleotide
gaguuggcauuacggccca

SEQ ID NO: 585924 - RNA, 19 nt, Artificial Sequence
  Description of Artificial Sequence: Synthetic oligonucleotide
gaacacccagaaggcuggg

SEQ ID NO: 585925 - RNA, 19 nt, Artificial Sequence
  Description of Artificial Sequence: Synthetic oligonucleotide
cuuacgcaucaaguugguc

SEQ ID NO: 585926 - RNA, 19 nt, Artificial Sequence
  Description of Artificial Sequence: Synthetic oligonucleotide
agacacguuuauggucaag

SEQ ID NO: 585927 - RNA, 19 nt, Artificial Sequence
  Description of Artificial Sequence: Synthetic oligonucleotide
caguugagaagcacaccaa

SEQ ID NO: 585928 - RNA, 19 nt, Artificial Sequence
  Description of Artificial Sequence: Synthetic oligonucleotide
cgugcgcacacacacacac

SEQ ID NO: 585929 - RNA, 19 nt, Artificial Sequence
  Description of Artificial Sequence: Synthetic oligonucleotide
ggcaagaaccugguagaug

SEQ ID NO: 585930 - RNA, 19 nt, Artificial Sequence
  Description of Artificial Sequence: Synthetic oligonucleotide
aguggcuagcagccugaaa

SEQ ID NO: 585931 - RNA, 19 nt, Artificial Sequence
  Description of Artificial Sequence: Synthetic oligonucleotide
acacacacacacacacaca

SEQ ID NO: 585932 - RNA, 19 nt, Artificial Sequence
  Description of Artificial Sequence: Synthetic oligonucleotide
ggucaaggcaaggucuuac

SEQ ID NO: 585933 - RNA, 19 nt, Artificial Sequence
  Description of Artificial Sequence: Synthetic oligonucleotide
aggcaaggucuuaccauug

SEQ ID NO: 585934 - RNA, 19 nt, Artificial Sequence
  Description of Artificial Sequence: Synthetic oligonucleotide
gugaaucucuggggauggg

SEQ ID NO: 585935 - RNA, 19 nt, Artificial Sequence
  Description of Artificial Sequence: Synthetic oligonucleotide
uccuugcaauuuugccgcu

SEQ ID NO: 585936 - RNA, 19 nt, Artificial Sequence
  Description of Artificial Sequence: Synthetic oligonucleotide
ggucuccgcugaaucaagg

SEQ ID NO: 585937 - RNA, 19 nt, Artificial Sequence
  Description of Artificial Sequence: Synthetic oligonucleotide
uuccuagccugagcuguac

SEQ ID NO: 585938 - RNA, 19 nt, Artificial Sequence
  Description of Artificial Sequence: Synthetic oligonucleotide
cccaguucuccuuccaauc

SEQ ID NO: 585939 - RNA, 19 nt, Artificial Sequence
  Description of Artificial Sequence: Synthetic oligonucleotide
acaccaacucgaguggcuu

SEQ ID NO: 585940 - RNA, 19 nt, Artificial Sequence
  Description of Artificial Sequence: Synthetic oligonucleotide
auagaccuuuucagugaca

SEQ ID NO: 585941 - RNA, 19 nt, Artificial Sequence
  Description of Artificial Sequence: Synthetic oligonucleotide
cuguaaccuguguuuaggu

SEQ ID NO: 585942 - RNA, 19 nt, Artificial Sequence
  Description of Artificial Sequence: Synthetic oligonucleotide
cuccgggcccugccuaucc

SEQ ID NO: 585943 - RNA, 19 nt, Artificial Sequence
  Description of Artificial Sequence: Synthetic oligonucleotide
agacgacuuuaacguaaua

SEQ ID NO: 585944 - RNA, 19 nt, Artificial Sequence
  Description of Artificial Sequence: Synthetic oligonucleotide
agacagucauugggucuag

SEQ ID NO: 585945 - RNA, 19 nt, Artificial Sequence
  Description of Artificial Sequence: Synthetic oligonucleotide
uccgggcccugccuaucca

SEQ ID NO: 585946 - RNA, 19 nt, Artificial Sequence
  Description of Artificial Sequence: Synthetic oligonucleotide
auucguggucugggucuac

SEQ ID NO: 585947 - RNA, 19 nt, Artificial Sequence
  Description of Artificial Sequence: Synthetic oligonucleotide
gcggugguguaguugucug

SEQ ID NO: 585948 - RNA, 19 nt, Artificial Sequence
  Description of Artificial Sequence: Synthetic oligonucleotide
cguuuauggucaaggcaag

SEQ ID NO: 585949 - RNA, 19 nt, Artificial Sequence
  Description of Artificial Sequence: Synthetic oligonucleotide
cuaguggccugccuacuua

SEQ ID NO: 585950 - RNA, 19 nt, Artificial Sequence
  Description of Artificial Sequence: Synthetic oligonucleotide
cccugccuauccaugcugc

SEQ ID NO: 585951 - RNA, 19 nt, Artificial Sequence
  Description of Artificial Sequence: Synthetic oligonucleotide
gcaaggguauacuccucca

SEQ ID NO: 585952 - RNA, 19 nt, Artificial Sequence
  Description of Artificial Sequence: Synthetic oligonucleotide
aguuaacccuuggcauucu

SEQ ID NO: 585953 - RNA, 19 nt, Artificial Sequence
  Description of Artificial Sequence: Synthetic oligonucleotide
acaaggcuagcuacagauu

SEQ ID NO: 585954 - RNA, 19 nt, Artificial Sequence
  Description of Artificial Sequence: Synthetic oligonucleotide
gggcccugccuauccaugc

SEQ ID NO: 585955 - RNA, 19 nt, Artificial Sequence
  Description of Artificial Sequence: Synthetic oligonucleotide
uuguugugccaggcagaga

SEQ ID NO: 585956 - RNA, 19 nt, Artificial Sequence
  Description of Artificial Sequence: Synthetic oligonucleotide
ggauggguacgguagugcu

SEQ ID NO: 585957 - RNA, 19 nt, Artificial Sequence
  Description of Artificial Sequence: Synthetic oligonucleotide
ugccuacaccgcagaaauu

SEQ ID NO: 585958 - RNA, 19 nt, Artificial Sequence
  Description of Artificial Sequence: Synthetic oligonucleotide
ggccuaguggccugccuac

SEQ ID NO: 585959 - RNA, 19 nt, Artificial Sequence
  Description of Artificial Sequence: Synthetic oligonucleotide
cuugcaauuuugccgcuuu

SEQ ID NO: 585960 - RNA, 19 nt, Artificial Sequence
  Description of Artificial Sequence: Synthetic oligonucleotide
gcggcaucagggucaguug

SEQ ID NO: 585961 - RNA, 19 nt, Artificial Sequence
  Description of Artificial Sequence: Synthetic oligonucleotide
ccuaccuauggggacucag

SEQ ID NO: 585962 - RNA, 19 nt, Artificial Sequence
  Description of Artificial Sequence: Synthetic oligonucleotide
uggucaaggcaaggucuua

SEQ ID NO: 585963 - RNA, 19 nt, Artificial Sequence
  Description of Artificial Sequence: Synthetic oligonucleotide
cugccguagcaaaugccua

SEQ ID NO: 585964 - RNA, 19 nt, Artificial Sequence
  Description of Artificial Sequence: Synthetic oligonucleotide
gcugccguagcaaaugccu

SEQ ID NO: 585965 - RNA, 19 nt, Artificial Sequence
  Description of Artificial Sequence: Synthetic oligonucleotide
cuccuaccuauggggacuc

SEQ ID NO: 585966 - RNA, 19 nt, Artificial Sequence
  Description of Artificial Sequence: Synthetic oligonucleotide
ggguacgguagugcugaag

SEQ ID NO: 585967 - RNA, 19 nt, Artificial Sequence
  Description of Artificial Sequence: Synthetic oligonucleotide
ccaguugguuucuuggucu

SEQ ID NO: 585968 - RNA, 19 nt, Artificial Sequence
  Description of Artificial Sequence: Synthetic oligonucleotide
cagcuccaaagcaccuuga

SEQ ID NO: 585969 - RNA, 19 nt, Artificial Sequence
  Description of Artificial Sequence: Synthetic oligonucleotide
cuuccuagccugagcugua

SEQ ID NO: 585970 - RNA, 19 nt, Artificial Sequence
  Description of Artificial Sequence: Synthetic oligonucleotide
cauuacggcccagacggcu

SEQ ID NO: 585971 - RNA, 19 nt, Artificial Sequence
  Description of Artificial Sequence: Synthetic oligonucleotide
cuacaccgcagaaauuguu

SEQ ID NO: 585972 - RNA, 19 nt, Artificial Sequence
  Description of Artificial Sequence: Synthetic oligonucleotide
agcuuuccguggauccgcu

SEQ ID NO: 585973 - RNA, 19 nt, Artificial Sequence
  Description of Artificial Sequence: Synthetic oligonucleotide
cgugguaccagcggagaac

SEQ ID NO: 585974 - RNA, 19 nt, Artificial Sequence
  Description of Artificial Sequence: Synthetic oligonucleotide
ccuuucuuauagcauugua

SEQ ID NO: 585975 - RNA, 19 nt, Artificial Sequence
  Description of Artificial Sequence: Synthetic oligonucleotide
uccgggcuuuggucaccug

SEQ ID NO: 585976 - RNA, 19 nt, Artificial Sequence
  Description of Artificial Sequence: Synthetic oligonucleotide
uccuaccuauggggacuca

SEQ ID NO: 585977 - RNA, 19 nt, Artificial Sequence
  Description of Artificial Sequence: Synthetic oligonucleotide
ccguagcaaaugccuacac

SEQ ID NO: 585978 - RNA, 19 nt, Artificial Sequence
  Description of Artificial Sequence: Synthetic oligonucleotide
cucguccccuuuggacagg

SEQ ID NO: 585979 - RNA, 19 nt, Artificial Sequence
  Description of Artificial Sequence: Synthetic oligonucleotide
ccuauccaugcugccguag

SEQ ID NO: 585980 - RNA, 19 nt, Artificial Sequence
  Description of Artificial Sequence: Synthetic oligonucleotide
aguuggcauuacggcccag

SEQ ID NO: 585981 - RNA, 19 nt, Artificial Sequence
  Description of Artificial Sequence: Synthetic oligonucleotide
cgcaucaaguuggucuccg

SEQ ID NO: 585982 - RNA, 19 nt, Artificial Sequence
  Description of Artificial Sequence: Synthetic oligonucleotide
ccgcuuucuccagaaacuc

SEQ ID NO: 585983 - RNA, 19 nt, Artificial Sequence
  Description of Artificial Sequence: Synthetic oligonucleotide
uggguacgguagugcugaa

SEQ ID NO: 585984 - RNA, 19 nt, Artificial Sequence
  Description of Artificial Sequence: Synthetic oligonucleotide
ccaacucgaguggcuuugg

SEQ ID NO: 585985 - RNA, 19 nt, Artificial Sequence
  Description of Artificial Sequence: Synthetic oligonucleotide
caaccucccaguagugaau

SEQ ID NO: 585986 - RNA, 19 nt, Artificial Sequence
  Description of Artificial Sequence: Synthetic oligonucleotide
ccccuuuggacagggugag

SEQ ID NO: 585987 - RNA, 19 nt, Artificial Sequence
  Description of Artificial Sequence: Synthetic oligonucleotide
gccguagcaaaugccuaca

SEQ ID NO: 585988 - RNA, 19 nt, Artificial Sequence
  Description of Artificial Sequence: Synthetic oligonucleotide
cagacacguuuauggucaa

SEQ ID NO: 585989 - RNA, 19 nt, Artificial Sequence
  Description of Artificial Sequence: Synthetic oligonucleotide
gcuuugagugcaguagagu

SEQ ID NO: 585990 - RNA, 19 nt, Artificial Sequence
  Description of Artificial Sequence: Synthetic oligonucleotide
ggcccuagacuuggcuaag

SEQ ID NO: 585991 - RNA, 19 nt, Artificial Sequence
  Description of Artificial Sequence: Synthetic oligonucleotide
gugcgcacacacacacaca

SEQ ID NO: 585992 - RNA, 19 nt, Artificial Sequence
  Description of Artificial Sequence: Synthetic oligonucleotide
gggucuaccuuggggaugu

SEQ ID NO: 585993 - RNA, 19 nt, Artificial Sequence
  Description of Artificial Sequence: Synthetic oligonucleotide
gcacacacacacacacaca

SEQ ID NO: 585994 - RNA, 19 nt, Artificial Sequence
  Description of Artificial Sequence: Synthetic oligonucleotide
cucggcccuagacuuggcu

SEQ ID NO: 585995 - RNA, 19 nt, Artificial Sequence
  Description of Artificial Sequence: Synthetic oligonucleotide
ggugggaagcuuguugaau

SEQ ID NO: 585996 - RNA, 19 nt, Artificial Sequence
  Description of Artificial Sequence: Synthetic oligonucleotide
ggucuaggauaggauuuua

SEQ ID NO: 585997 - RNA, 19 nt, Artificial Sequence
  Description of Artificial Sequence: Synthetic oligonucleotide
gucugccagacacguuuau

SEQ ID NO: 585998 - RNA, 19 nt, Artificial Sequence
  Description of Artificial Sequence: Synthetic oligonucleotide
caccgcagaaauuguucuu

SEQ ID NO: 585999 - RNA, 19 nt, Artificial Sequence
  Description of Artificial Sequence: Synthetic oligonucleotide
gcuuugggugcggcaucag

SEQ ID NO: 586000 - RNA, 19 nt, Artificial Sequence
  Description of Artificial Sequence: Synthetic oligonucleotide
ccaaggaggaccccucagu

SEQ ID NO: 586001 - RNA, 19 nt, Artificial Sequence
  Description of Artificial Sequence: Synthetic oligonucleotide
ccuacaccgcagaaauugu

SEQ ID NO: 586002 - RNA, 19 nt, Artificial Sequence
  Description of Artificial Sequence: Synthetic oligonucleotide
gcgugguaccagcggagaa

SEQ ID NO: 586003 - RNA, 19 nt, Artificial Sequence
  Description of Artificial Sequence: Synthetic oligonucleotide
gcauuacggcccagacggc

SEQ ID NO: 586004 - RNA, 19 nt, Artificial Sequence
  Description of Artificial Sequence: Synthetic oligonucleotide
cccagacucugggagguca

SEQ ID NO: 586005 - RNA, 19 nt, Artificial Sequence
  Description of Artificial Sequence: Synthetic oligonucleotide
cgaagacgacuuuaacgua

SEQ ID NO: 586006 - RNA, 19 nt, Artificial Sequence
  Description of Artificial Sequence: Synthetic oligonucleotide
caccaacucgaguggcuuu

SEQ ID NO: 586007 - RNA, 19 nt, Artificial Sequence
  Description of Artificial Sequence: Synthetic oligonucleotide
gggucuaggauaggauuuu

SEQ ID NO: 586008 - RNA, 19 nt, Artificial Sequence
  Description of Artificial Sequence: Synthetic oligonucleotide
gcgcacacacacacacaca

SEQ ID NO: 586009 - RNA, 19 nt, Artificial Sequence
  Description of Artificial Sequence: Synthetic oligonucleotide
ggcuagcuacagauuuucu

SEQ ID NO: 586010 - RNA, 19 nt, Artificial Sequence
  Description of Artificial Sequence: Synthetic oligonucleotide
gcccuagacuuggcuaaga

SEQ ID NO: 586011 - RNA, 19 nt, Artificial Sequence
  Description of Artificial Sequence: Synthetic oligonucleotide
gcuuacgcaucaaguuggu

SEQ ID NO: 586012 - RNA, 19 nt, Artificial Sequence
  Description of Artificial Sequence: Synthetic oligonucleotide
ccgcugaaucaaggauagc

SEQ ID NO: 586013 - RNA, 19 nt, Artificial Sequence
  Description of Artificial Sequence: Synthetic oligonucleotide
ccccaguucuccuuccaau

SEQ ID NO: 586014 - RNA, 19 nt, Artificial Sequence
  Description of Artificial Sequence: Synthetic oligonucleotide
gccuauccaugcugccgua

SEQ ID NO: 586015 - RNA, 19 nt, Artificial Sequence
  Description of Artificial Sequence: Synthetic oligonucleotide
cuccgggcuuuggucaccu

SEQ ID NO: 586016 - RNA, 19 nt, Artificial Sequence
  Description of Artificial Sequence: Synthetic oligonucleotide
gcgugcgcacacacacaca

SEQ ID NO: 586017 - RNA, 19 nt, Artificial Sequence
  Description of Artificial Sequence: Synthetic oligonucleotide
ccuaguggccugccuacuu

SEQ ID NO: 586018 - RNA, 19 nt, Artificial Sequence
  Description of Artificial Sequence: Synthetic oligonucleotide
gccuaguggccugccuacu

SEQ ID NO: 586019 - RNA, 19 nt, Artificial Sequence
  Description of Artificial Sequence: Synthetic oligonucleotide
ccuugcaauuuugccgcuu

SEQ ID NO: 586020 - RNA, 19 nt, Artificial Sequence
  Description of Artificial Sequence: Synthetic oligonucleotide
ccgggcccugccuauccau

SEQ ID NO: 586021 - RNA, 19 nt, Artificial Sequence
  Description of Artificial Sequence: Synthetic oligonucleotide
gugcggcaucagggucagu

SEQ ID NO: 586022 - RNA, 19 nt, Artificial Sequence
  Description of Artificial Sequence: Synthetic oligonucleotide
uuuauguuagaaaaggagg

SEQ ID NO: 586023 - RNA, 19 nt, Artificial Sequence
  Description of Artificial Sequence: Synthetic oligonucleotide
aaugguaugaccuaauucu

SEQ ID NO: 586024 - RNA, 19 nt, Artificial Sequence
  Description of Artificial Sequence: Synthetic oligonucleotide
auauauucuacacagaaca

SEQ ID NO: 586025 - RNA, 19 nt, Artificial Sequence
  Description of Artificial Sequence: Synthetic oligonucleotide
aaugcuaacacacuuucug

SEQ ID NO: 586026 - RNA, 19 nt, Artificial Sequence
  Description of Artificial Sequence: Synthetic oligonucleotide
ugacaaaacaaguacaugc

SEQ ID NO: 586027 - RNA, 19 nt, Artificial Sequence
  Description of Artificial Sequence: Synthetic oligonucleotide
acuagaccaaaacaaagcc

SEQ ID NO: 586028 - RNA, 19 nt, Artificial Sequence
  Description of Artificial Sequence: Synthetic oligonucleotide
cuaagguuugccaugaugg

SEQ ID NO: 586029 - RNA, 19 nt, Artificial Sequence
  Description of Artificial Sequence: Synthetic oligonucleotide
uuugguaccagacgaaacg

SEQ ID NO: 586030 - RNA, 19 nt, Artificial Sequence
  Description of Artificial Sequence: Synthetic oligonucleotide
gauuuugaagaccagcuag

SEQ ID NO: 586031 - RNA, 19 nt, Artificial Sequence
  Description of Artificial Sequence: Synthetic oligonucleotide
aguuaugcuuuauauauuc

SEQ ID NO: 586032 - RNA, 19 nt, Artificial Sequence
  Description of Artificial Sequence: Synthetic oligonucleotide
uuaugagacagaaaugaag

SEQ ID NO: 586033 - RNA, 19 nt, Artificial Sequence
  Description of Artificial Sequence: Synthetic oligonucleotide
uuauguuagaaaaggagga

SEQ ID NO: 586034 - RNA, 19 nt, Artificial Sequence
  Description of Artificial Sequence: Synthetic oligonucleotide
ucauauauggaaccaagug

SEQ ID NO: 586035 - RNA, 19 nt, Artificial Sequence
  Description of Artificial Sequence: Synthetic oligonucleotide
uugaucgugauauugacac

SEQ ID NO: 586036 - RNA, 19 nt, Artificial Sequence
  Description of Artificial Sequence: Synthetic oligonucleotide
cauauauggaaccaagugc

SEQ ID NO: 586037 - RNA, 19 nt, Artificial Sequence
  Description of Artificial Sequence: Synthetic oligonucleotide
aagccuaagggucacacag

SEQ ID NO: 586038 - RNA, 19 nt, Artificial Sequence
  Description of Artificial Sequence: Synthetic oligonucleotide
uuugacaauuaugagacag

SEQ ID NO: 586039 - RNA, 19 nt, Artificial Sequence
  Description of Artificial Sequence: Synthetic oligonucleotide
uugaagaccagcuaggggu

SEQ ID NO: 586040 - RNA, 19 nt, Artificial Sequence
  Description of Artificial Sequence: Synthetic oligonucleotide
uguuagaaaaggaggaaug

SEQ ID NO: 586041 - RNA, 19 nt, Artificial Sequence
  Description of Artificial Sequence: Synthetic oligonucleotide
aagggcauuagccuauggg

SEQ ID NO: 586042 - RNA, 19 nt, Artificial Sequence
  Description of Artificial Sequence: Synthetic oligonucleotide
uggucuacuauacauuucc

SEQ ID NO: 586043 - RNA, 19 nt, Artificial Sequence
  Description of Artificial Sequence: Synthetic oligonucleotide
ucagauagcaaacauuuau

SEQ ID NO: 586044 - RNA, 19 nt, Artificial Sequence
  Description of Artificial Sequence: Synthetic oligonucleotide
aacaucaguccacguagcc

SEQ ID NO: 586045 - RNA, 19 nt, Artificial Sequence
  Description of Artificial Sequence: Synthetic oligonucleotide
gauauugacacagucgugc

SEQ ID NO: 586046 - RNA, 19 nt, Artificial Sequence
  Description of Artificial Sequence: Synthetic oligonucleotide
agaacauaaggucuaagcu

SEQ ID NO: 586047 - RNA, 19 nt, Artificial Sequence
  Description of Artificial Sequence: Synthetic oligonucleotide
aaaacaaagccccgacuag

SEQ ID NO: 586048 - RNA, 19 nt, Artificial Sequence
  Description of Artificial Sequence: Synthetic oligonucleotide
uguuguccuauucaaauac

SEQ ID NO: 586049 - RNA, 19 nt, Artificial Sequence
  Description of Artificial Sequence: Synthetic oligonucleotide
ugucagauagcaaacauuu

SEQ ID NO: 586050 - RNA, 19 nt, Artificial Sequence
  Description of Artificial Sequence: Synthetic oligonucleotide
aggaguaccaugcuuuuac

SEQ ID NO: 586051 - RNA, 19 nt, Artificial Sequence
  Description of Artificial Sequence: Synthetic oligonucleotide
uaggaaaugaacaaagguu

SEQ ID NO: 586052 - RNA, 19 nt, Artificial Sequence
  Description of Artificial Sequence: Synthetic oligonucleotide
acaaguauaaugguaugac

SEQ ID NO: 586053 - RNA, 19 nt, Artificial Sequence
  Description of Artificial Sequence: Synthetic oligonucleotide
agggcauuagccuaugggg

SEQ ID NO: 586054 - RNA, 19 nt, Artificial Sequence
  Description of Artificial Sequence: Synthetic oligonucleotide
uggaauauauucaggaguc

SEQ ID NO: 586055 - RNA, 19 nt, Artificial Sequence
  Description of Artificial Sequence: Synthetic oligonucleotide
uaugacaaaacaaguacau

SEQ ID NO: 586056 - RNA, 19 nt, Artificial Sequence
  Description of Artificial Sequence: Synthetic oligonucleotide
aacggucaguguuauguac

SEQ ID NO: 586057 - RNA, 19 nt, Artificial Sequence
  Description of Artificial Sequence: Synthetic oligonucleotide
uugacuuuguguccuaacc

SEQ ID NO: 586058 - RNA, 19 nt, Artificial Sequence
  Description of Artificial Sequence: Synthetic oligonucleotide
uguuaguagggcaauuuca

SEQ ID NO: 586059 - RNA, 19 nt, Artificial Sequence
  Description of Artificial Sequence: Synthetic oligonucleotide
uuugucucaucauagcucu

SEQ ID NO: 586060 - RNA, 19 nt, Artificial Sequence
  Description of Artificial Sequence: Synthetic oligonucleotide
uuaaggaacaaaguuugcc

SEQ ID NO: 586061 - RNA, 19 nt, Artificial Sequence
  Description of Artificial Sequence: Synthetic oligonucleotide
cagaacauaaggucuaagc

SEQ ID NO: 586062 - RNA, 19 nt, Artificial Sequence
  Description of Artificial Sequence: Synthetic oligonucleotide
uuggauucauauauggaac

SEQ ID NO: 586063 - RNA, 19 nt, Artificial Sequence
  Description of Artificial Sequence: Synthetic oligonucleotide
ucaaucaaaaggcucugga

SEQ ID NO: 586064 - RNA, 19 nt, Artificial Sequence
  Description of Artificial Sequence: Synthetic oligonucleotide
ugcuuuauauauucuacac

SEQ ID NO: 586065 - RNA, 19 nt, Artificial Sequence
  Description of Artificial Sequence: Synthetic oligonucleotide
auaaggucuaagcuuguag

SEQ ID NO: 586066 - RNA, 19 nt, Artificial Sequence
  Description of Artificial Sequence: Synthetic oligonucleotide
ugguaugaccuaauucugg

SEQ ID NO: 586067 - RNA, 19 nt, Artificial Sequence
  Description of Artificial Sequence: Synthetic oligonucleotide
uuuugucucaucauagcuc

SEQ ID NO: 586068 - RNA, 19 nt, Artificial Sequence
  Description of Artificial Sequence: Synthetic oligonucleotide
uuugccuuacuuaagcaau

SEQ ID NO: 586069 - RNA, 19 nt, Artificial Sequence
  Description of Artificial Sequence: Synthetic oligonucleotide
uuagauugucucuuguugu

SEQ ID NO: 586070 - RNA, 19 nt, Artificial Sequence
  Description of Artificial Sequence: Synthetic oligonucleotide
uucaauguuaguagggcaa

SEQ ID NO: 586071 - RNA, 19 nt, Artificial Sequence
  Description of Artificial Sequence: Synthetic oligonucleotide
uaaggucuaagcuuguagu

SEQ ID NO: 586072 - RNA, 19 nt, Artificial Sequence
  Description of Artificial Sequence: Synthetic oligonucleotide
guaacgguugccuccaggg

SEQ ID NO: 586073 - RNA, 19 nt, Artificial Sequence
  Description of Artificial Sequence: Synthetic oligonucleotide
uuggcuguagaauccuucg

SEQ ID NO: 586074 - RNA, 19 nt, Artificial Sequence
  Description of Artificial Sequence: Synthetic oligonucleotide
auauauggaaccaagugca

SEQ ID NO: 586075 - RNA, 19 nt, Artificial Sequence
  Description of Artificial Sequence: Synthetic oligonucleotide
aguguuauguacuucggau

SEQ ID NO: 586076 - RNA, 19 nt, Artificial Sequence
  Description of Artificial Sequence: Synthetic oligonucleotide
uccuaaacuggacugguac

SEQ ID NO: 586077 - RNA, 19 nt, Artificial Sequence
  Description of Artificial Sequence: Synthetic oligonucleotide
uggauucauauauggaacc

SEQ ID NO: 586078 - RNA, 19 nt, Artificial Sequence
  Description of Artificial Sequence: Synthetic oligonucleotide
acuuaaggaacaaaguuug

SEQ ID NO: 586079 - RNA, 19 nt, Artificial Sequence
  Description of Artificial Sequence: Synthetic oligonucleotide
aaaugaacaaagguuugcu

SEQ ID NO: 586080 - RNA, 19 nt, Artificial Sequence
  Description of Artificial Sequence: Synthetic oligonucleotide
uucagcucaguugaaauug

SEQ ID NO: 586081 - RNA, 19 nt, Artificial Sequence
  Description of Artificial Sequence: Synthetic oligonucleotide
augauggcuaaugaucugc

SEQ ID NO: 586082 - RNA, 19 nt, Artificial Sequence
  Description of Artificial Sequence: Synthetic oligonucleotide
aacaaaguuugccuuacuu

SEQ ID NO: 586083 - RNA, 19 nt, Artificial Sequence
  Description of Artificial Sequence: Synthetic oligonucleotide
caaguauaaugguaugacc

SEQ ID NO: 586084 - RNA, 19 nt, Artificial Sequence
  Description of Artificial Sequence: Synthetic oligonucleotide
ugacuuuguguccuaacca

SEQ ID NO: 586085 - RNA, 19 nt, Artificial Sequence
  Description of Artificial Sequence: Synthetic oligonucleotide
aauauauucaggaguccug

SEQ ID NO: 586086 - RNA, 19 nt, Artificial Sequence
  Description of Artificial Sequence: Synthetic oligonucleotide
uuguaguuaugcuuuauau

SEQ ID NO: 586087 - RNA, 19 nt, Artificial Sequence
  Description of Artificial Sequence: Synthetic oligonucleotide
ucauagcucuuauuuaaug

SEQ ID NO: 586088 - RNA, 19 nt, Artificial Sequence
  Description of Artificial Sequence: Synthetic oligonucleotide
cuauuuuaacaguugugug

SEQ ID NO: 586089 - RNA, 19 nt, Artificial Sequence
  Description of Artificial Sequence: Synthetic oligonucleotide
gucauugccaaaauggagc

SEQ ID NO: 586090 - RNA, 19 nt, Artificial Sequence
  Description of Artificial Sequence: Synthetic oligonucleotide
guaguuaugcuuuauauau

SEQ ID NO: 586091 - RNA, 19 nt, Artificial Sequence
  Description of Artificial Sequence: Synthetic oligonucleotide
auguuaguagggcaauuuc

SEQ ID NO: 586092 - RNA, 19 nt, Artificial Sequence
  Description of Artificial Sequence: Synthetic oligonucleotide
aauagcaucuggucuacua

SEQ ID NO: 586093 - RNA, 19 nt, Artificial Sequence
  Description of Artificial Sequence: Synthetic oligonucleotide
gacugguaccucuaggaag

SEQ ID NO: 586094 - RNA, 19 nt, Artificial Sequence
  Description of Artificial Sequence: Synthetic oligonucleotide
aguacaugcagauuuugaa

SEQ ID NO: 586095 - RNA, 19 nt, Artificial Sequence
  Description of Artificial Sequence: Synthetic oligonucleotide
uagcucuuauuuaauguca

SEQ ID NO: 586096 - RNA, 19 nt, Artificial Sequence
  Description of Artificial Sequence: Synthetic oligonucleotide
accaugcccaaacagugac

SEQ ID NO: 586097 - RNA, 19 nt, Artificial Sequence
  Description of Artificial Sequence: Synthetic oligonucleotide
uguaguuaugcuuuauaua

SEQ ID NO: 586098 - RNA, 19 nt, Artificial Sequence
  Description of Artificial Sequence: Synthetic oligonucleotide
aacgguugccuccagggcu

SEQ ID NO: 586099 - RNA, 19 nt, Artificial Sequence
  Description of Artificial Sequence: Synthetic oligonucleotide
uauucaggaguccugccac

SEQ ID NO: 586100 - RNA, 19 nt, Artificial Sequence
  Description of Artificial Sequence: Synthetic oligonucleotide
cuagaccacaagaacgagg

SEQ ID NO: 586101 - RNA, 19 nt, Artificial Sequence
  Description of Artificial Sequence: Synthetic oligonucleotide
uaugaccuaauucuggcuu

SEQ ID NO: 586102 - RNA, 19 nt, Artificial Sequence
  Description of Artificial Sequence: Synthetic oligonucleotide
uuagggaccaugcccaaac

SEQ ID NO: 586103 - RNA, 19 nt, Artificial Sequence
  Description of Artificial Sequence: Synthetic oligonucleotide
ucuaagcuuguaguuaugc

SEQ ID NO: 586104 - RNA, 19 nt, Artificial Sequence
  Description of Artificial Sequence: Synthetic oligonucleotide
cuuucaauguuaguagggc

SEQ ID NO: 586105 - RNA, 19 nt, Artificial Sequence
  Description of Artificial Sequence: Synthetic oligonucleotide
auugccaaaauggagcaug

SEQ ID NO: 586106 - RNA, 19 nt, Artificial Sequence
  Description of Artificial Sequence: Synthetic oligonucleotide
uuugaauggagcccauuuc

SEQ ID NO: 586107 - RNA, 19 nt, Artificial Sequence
  Description of Artificial Sequence: Synthetic oligonucleotide
ugauggacucaaucaaaag

SEQ ID NO: 586108 - RNA, 19 nt, Artificial Sequence
  Description of Artificial Sequence: Synthetic oligonucleotide
ugcuguuauguucguauug

SEQ ID NO: 586109 - RNA, 19 nt, Artificial Sequence
  Description of Artificial Sequence: Synthetic oligonucleotide
ucauugccaaaauggagca

SEQ ID NO: 586110 - RNA, 19 nt, Artificial Sequence
  Description of Artificial Sequence: Synthetic oligonucleotide
ucgugcacaaaguuguucu

SEQ ID NO: 586111 - RNA, 19 nt, Artificial Sequence
  Description of Artificial Sequence: Synthetic oligonucleotide
uugccaaaauggagcaugg

SEQ ID NO: 586112 - RNA, 19 nt, Artificial Sequence
  Description of Artificial Sequence: Synthetic oligonucleotide
uuauguucguauuggccug

SEQ ID NO: 586113 - RNA, 19 nt, Artificial Sequence
  Description of Artificial Sequence: Synthetic oligonucleotide
caucaguccacguagccac

SEQ ID NO: 586114 - RNA, 19 nt, Artificial Sequence
  Description of Artificial Sequence: Synthetic oligonucleotide
uacaaguauaaugguauga

SEQ ID NO: 586115 - RNA, 19 nt, Artificial Sequence
  Description of Artificial Sequence: Synthetic oligonucleotide
caggguaucggcuuccacc

SEQ ID NO: 586116 - RNA, 19 nt, Artificial Sequence
  Description of Artificial Sequence: Synthetic oligonucleotide
aguacaugcaaaguuacaa

SEQ ID NO: 586117 - RNA, 19 nt, Artificial Sequence
  Description of Artificial Sequence: Synthetic oligonucleotide
caauuaugagacagaaaug

SEQ ID NO: 586118 - RNA, 19 nt, Artificial Sequence
  Description of Artificial Sequence: Synthetic oligonucleotide
acaagaacgaggaaguaca

SEQ ID NO: 586119 - RNA, 19 nt, Artificial Sequence
  Description of Artificial Sequence: Synthetic oligonucleotide
aguagcuaagguuugccau

SEQ ID NO: 586120 - RNA, 19 nt, Artificial Sequence
  Description of Artificial Sequence: Synthetic oligonucleotide
auugcagagugguuauguc

SEQ ID NO: 586121 - RNA, 19 nt, Artificial Sequence
  Description of Artificial Sequence: Synthetic oligonucleotide
uggccgguaguacacuugg

SEQ ID NO: 586122 - RNA, 19 nt, Artificial Sequence
  Description of Artificial Sequence: Synthetic oligonucleotide
guuauguucguauuggccu

SEQ ID NO: 586123 - RNA, 19 nt, Artificial Sequence
  Description of Artificial Sequence: Synthetic oligonucleotide
ucaguugaaauuguucagu

SEQ ID NO: 586124 - RNA, 19 nt, Artificial Sequence
  Description of Artificial Sequence: Synthetic oligonucleotide
cuucggaugcaucagaaca

SEQ ID NO: 586125 - RNA, 19 nt, Artificial Sequence
  Description of Artificial Sequence: Synthetic oligonucleotide
uccuucgccuauuuuaaca

SEQ ID NO: 586126 - RNA, 19 nt, Artificial Sequence
  Description of Artificial Sequence: Synthetic oligonucleotide
augcuuuauauauucuaca

SEQ ID NO: 586127 - RNA, 19 nt, Artificial Sequence
  Description of Artificial Sequence: Synthetic oligonucleotide
guuuucacgguaguagcgg

SEQ ID NO: 586128 - RNA, 19 nt, Artificial Sequence
  Description of Artificial Sequence: Synthetic oligonucleotide
aagaacgaggaaguacaag

SEQ ID NO: 586129 - RNA, 19 nt, Artificial Sequence
  Description of Artificial Sequence: Synthetic oligonucleotide
agccuagaccacaagaacg

SEQ ID NO: 586130 - RNA, 19 nt, Artificial Sequence
  Description of Artificial Sequence: Synthetic oligonucleotide
guguuauguacuucggaug

SEQ ID NO: 586131 - RNA, 19 nt, Artificial Sequence
  Description of Artificial Sequence: Synthetic oligonucleotide
uuuauucacuagaccaaaa

SEQ ID NO: 586132 - RNA, 19 nt, Artificial Sequence
  Description of Artificial Sequence: Synthetic oligonucleotide
aauguuaguagggcaauuu

SEQ ID NO: 586133 - RNA, 19 nt, Artificial Sequence
  Description of Artificial Sequence: Synthetic oligonucleotide
uguacuucggaugcaucag

SEQ ID NO: 586134 - RNA, 19 nt, Artificial Sequence
  Description of Artificial Sequence: Synthetic oligonucleotide
gaaacggucaguguuaugu

SEQ ID NO: 586135 - RNA, 19 nt, Artificial Sequence
  Description of Artificial Sequence: Synthetic oligonucleotide
aaggucuaagcuuguaguu

SEQ ID NO: 586136 - RNA, 19 nt, Artificial Sequence
  Description of Artificial Sequence: Synthetic oligonucleotide
uauugcagagugguuaugu

SEQ ID NO: 586137 - RNA, 19 nt, Artificial Sequence
  Description of Artificial Sequence: Synthetic oligonucleotide
uauaaugguaugaccuaau

SEQ ID NO: 586138 - RNA, 19 nt, Artificial Sequence
  Description of Artificial Sequence: Synthetic oligonucleotide
guagcuaagguuugccaug

SEQ ID NO: 586139 - RNA, 19 nt, Artificial Sequence
  Description of Artificial Sequence: Synthetic oligonucleotide
acugauugugggugccacc

SEQ ID NO: 586140 - RNA, 19 nt, Artificial Sequence
  Description of Artificial Sequence: Synthetic oligonucleotide
uggacucaaucaaaaggcu

SEQ ID NO: 586141 - RNA, 19 nt, Artificial Sequence
  Description of Artificial Sequence: Synthetic oligonucleotide
uccgagcaaggcuaaaaca

SEQ ID NO: 586142 - RNA, 19 nt, Artificial Sequence
  Description of Artificial Sequence: Synthetic oligonucleotide
ugauauugacacagucgug

SEQ ID NO: 586143 - RNA, 19 nt, Artificial Sequence
  Description of Artificial Sequence: Synthetic oligonucleotide
cauucuaguuucuaggaaa

SEQ ID NO: 586144 - RNA, 19 nt, Artificial Sequence
  Description of Artificial Sequence: Synthetic oligonucleotide
uuuaacaguuguguguguc

SEQ ID NO: 586145 - RNA, 19 nt, Artificial Sequence
  Description of Artificial Sequence: Synthetic oligonucleotide
ucggucuccgugaaguucu

SEQ ID NO: 586146 - RNA, 19 nt, Artificial Sequence
  Description of Artificial Sequence: Synthetic oligonucleotide
uucgccuauuuuaacaguu

SEQ ID NO: 586147 - RNA, 19 nt, Artificial Sequence
  Description of Artificial Sequence: Synthetic oligonucleotide
gguaugaccuaauucuggc

SEQ ID NO: 586148 - RNA, 19 nt, Artificial Sequence
  Description of Artificial Sequence: Synthetic oligonucleotide
uauguuagaaaaggaggaa

SEQ ID NO: 586149 - RNA, 19 nt, Artificial Sequence
  Description of Artificial Sequence: Synthetic oligonucleotide
auuugguaccagacgaaac

SEQ ID NO: 586150 - RNA, 19 nt, Artificial Sequence
  Description of Artificial Sequence: Synthetic oligonucleotide
aaagccuaagggucacaca

SEQ ID NO: 586151 - RNA, 19 nt, Artificial Sequence
  Description of Artificial Sequence: Synthetic oligonucleotide
ucuuccgucguaguaggcc

SEQ ID NO: 586152 - RNA, 19 nt, Artificial Sequence
  Description of Artificial Sequence: Synthetic oligonucleotide
uugccuuacuuaagcaaug

SEQ ID NO: 586153 - RNA, 19 nt, Artificial Sequence
  Description of Artificial Sequence: Synthetic oligonucleotide
agcuacagguggauaaccc

SEQ ID NO: 586154 - RNA, 19 nt, Artificial Sequence
  Description of Artificial Sequence: Synthetic oligonucleotide
uucggaugcaucagaacau

SEQ ID NO: 586155 - RNA, 19 nt, Artificial Sequence
  Description of Artificial Sequence: Synthetic oligonucleotide
ugcccaaacagugacuucu

SEQ ID NO: 586156 - RNA, 19 nt, Artificial Sequence
  Description of Artificial Sequence: Synthetic oligonucleotide
ucgccuauuuuaacaguug

SEQ ID NO: 586157 - RNA, 19 nt, Artificial Sequence
  Description of Artificial Sequence: Synthetic oligonucleotide
guaguagcgguccucccag

SEQ ID NO: 586158 - RNA, 19 nt, Artificial Sequence
  Description of Artificial Sequence: Synthetic oligonucleotide
cuugaccccagccaccacc

SEQ ID NO: 586159 - RNA, 19 nt, Artificial Sequence
  Description of Artificial Sequence: Synthetic oligonucleotide
agacgaaacggucaguguu

SEQ ID NO: 586160 - RNA, 19 nt, Artificial Sequence
  Description of Artificial Sequence: Synthetic oligonucleotide
uguuccacugauugugggu

SEQ ID NO: 586161 - RNA, 19 nt, Artificial Sequence
  Description of Artificial Sequence: Synthetic oligonucleotide
gucguaguaggccugggac

SEQ ID NO: 586162 - RNA, 19 nt, Artificial Sequence
  Description of Artificial Sequence: Synthetic oligonucleotide
aggguaucggcuuccacca

SEQ ID NO: 586163 - RNA, 19 nt, Artificial Sequence
  Description of Artificial Sequence: Synthetic oligonucleotide
auauugacacagucgugca

SEQ ID NO: 586164 - RNA, 19 nt, Artificial Sequence
  Description of Artificial Sequence: Synthetic oligonucleotide
cuugacgucggucuccgug

SEQ ID NO: 586165 - RNA, 19 nt, Artificial Sequence
  Description of Artificial Sequence: Synthetic oligonucleotide
agcaucuggucuacuauac

SEQ ID NO: 586166 - RNA, 19 nt, Artificial Sequence
  Description of Artificial Sequence: Synthetic oligonucleotide
uggaaccaagugcacguug

SEQ ID NO: 586167 - RNA, 19 nt, Artificial Sequence
  Description of Artificial Sequence: Synthetic oligonucleotide
cuagaguuuauguuagaaa

SEQ ID NO: 586168 - RNA, 19 nt, Artificial Sequence
  Description of Artificial Sequence: Synthetic oligonucleotide
gcuguuauguucguauugg

SEQ ID NO: 586169 - RNA, 19 nt, Artificial Sequence
  Description of Artificial Sequence: Synthetic oligonucleotide
aauccuucgccuauuuuaa

SEQ ID NO: 586170 - RNA, 19 nt, Artificial Sequence
  Description of Artificial Sequence: Synthetic oligonucleotide
agagcuacagguggauaac

SEQ ID NO: 586171 - RNA, 19 nt, Artificial Sequence
  Description of Artificial Sequence: Synthetic oligonucleotide
aguacaagcagggaggcuu

SEQ ID NO: 586172 - RNA, 19 nt, Artificial Sequence
  Description of Artificial Sequence: Synthetic oligonucleotide
uugccaugauggcuaauga

SEQ ID NO: 586173 - RNA, 19 nt, Artificial Sequence
  Description of Artificial Sequence: Synthetic oligonucleotide
gcucaguugaaauuguuca

SEQ ID NO: 586174 - RNA, 19 nt, Artificial Sequence
  Description of Artificial Sequence: Synthetic oligonucleotide
gucuccgugaaguucuccc

SEQ ID NO: 586175 - RNA, 19 nt, Artificial Sequence
  Description of Artificial Sequence: Synthetic oligonucleotide
agggaccaugcccaaacag

SEQ ID NO: 586176 - RNA, 19 nt, Artificial Sequence
  Description of Artificial Sequence: Synthetic oligonucleotide
cacuguguacucagugugg

SEQ ID NO: 586177 - RNA, 19 nt, Artificial Sequence
  Description of Artificial Sequence: Synthetic oligonucleotide
auaaugguaugaccuaauu

SEQ ID NO: 586178 - RNA, 19 nt, Artificial Sequence
  Description of Artificial Sequence: Synthetic oligonucleotide
cacaagaacgaggaaguac

SEQ ID NO: 586179 - RNA, 19 nt, Artificial Sequence
  Description of Artificial Sequence: Synthetic oligonucleotide
guguccuaaccauuucucc

SEQ ID NO: 586180 - RNA, 19 nt, Artificial Sequence
  Description of Artificial Sequence: Synthetic oligonucleotide
cgugauauugacacagucg

SEQ ID NO: 586181 - RNA, 19 nt, Artificial Sequence
  Description of Artificial Sequence: Synthetic oligonucleotide
uuuucacgguaguagcggu

SEQ ID NO: 586182 - RNA, 19 nt, Artificial Sequence
  Description of Artificial Sequence: Synthetic oligonucleotide
cuuuggauucauauaugga

SEQ ID NO: 586183 - RNA, 19 nt, Artificial Sequence
  Description of Artificial Sequence: Synthetic oligonucleotide
cuaggaaaugaacaaaggu

SEQ ID NO: 586184 - RNA, 19 nt, Artificial Sequence
  Description of Artificial Sequence: Synthetic oligonucleotide
gaaagccuaagggucacac

SEQ ID NO: 586185 - RNA, 19 nt, Artificial Sequence
  Description of Artificial Sequence: Synthetic oligonucleotide
ucagcucaguugaaauugu

SEQ ID NO: 586186 - RNA, 19 nt, Artificial Sequence
  Description of Artificial Sequence: Synthetic oligonucleotide
ucuccgugaaguucucccc

SEQ ID NO: 586187 - RNA, 19 nt, Artificial Sequence
  Description of Artificial Sequence: Synthetic oligonucleotide
uucaggaguccugccaccg

SEQ ID NO: 586188 - RNA, 19 nt, Artificial Sequence
  Description of Artificial Sequence: Synthetic oligonucleotide
gaaguacaugcagauuuug

SEQ ID NO: 586189 - RNA, 19 nt, Artificial Sequence
  Description of Artificial Sequence: Synthetic oligonucleotide
ugcaguacaggccgaugcu

SEQ ID NO: 586190 - RNA, 19 nt, Artificial Sequence
  Description of Artificial Sequence: Synthetic oligonucleotide
agaaaugcaagcgccuuga

SEQ ID NO: 586191 - RNA, 19 nt, Artificial Sequence
  Description of Artificial Sequence: Synthetic oligonucleotide
agcgauuaugugcuguuau

SEQ ID NO: 586192 - RNA, 19 nt, Artificial Sequence
  Description of Artificial Sequence: Synthetic oligonucleotide
uaacgguugccuccagggc

SEQ ID NO: 586193 - RNA, 19 nt, Artificial Sequence
  Description of Artificial Sequence: Synthetic oligonucleotide
acaaguacaugcaaaguua

SEQ ID NO: 586194 - RNA, 19 nt, Artificial Sequence
  Description of Artificial Sequence: Synthetic oligonucleotide
agaggguuacaccaguauu

SEQ ID NO: 586195 - RNA, 19 nt, Artificial Sequence
  Description of Artificial Sequence: Synthetic oligonucleotide
ucguaguaggccugggacu

SEQ ID NO: 586196 - RNA, 19 nt, Artificial Sequence
  Description of Artificial Sequence: Synthetic oligonucleotide
guggguaacgguugccucc

SEQ ID NO: 586197 - RNA, 19 nt, Artificial Sequence
  Description of Artificial Sequence: Synthetic oligonucleotide
gauacugggugacacacau

SEQ ID NO: 586198 - RNA, 19 nt, Artificial Sequence
  Description of Artificial Sequence: Synthetic oligonucleotide
auguuagaaaaggaggaau

SEQ ID NO: 586199 - RNA, 19 nt, Artificial Sequence
  Description of Artificial Sequence: Synthetic oligonucleotide
ccucaauuaaaagagcuac

SEQ ID NO: 586200 - RNA, 19 nt, Artificial Sequence
  Description of Artificial Sequence: Synthetic oligonucleotide
gauucauauauggaaccaa

SEQ ID NO: 586201 - RNA, 19 nt, Artificial Sequence
  Description of Artificial Sequence: Synthetic oligonucleotide
aauccgagcaaggcuaaaa

SEQ ID NO: 586202 - RNA, 19 nt, Artificial Sequence
  Description of Artificial Sequence: Synthetic oligonucleotide
aaacggucaguguuaugua

SEQ ID NO: 586203 - RNA, 19 nt, Artificial Sequence
  Description of Artificial Sequence: Synthetic oligonucleotide
uuauguacuucggaugcau

SEQ ID NO: 586204 - RNA, 19 nt, Artificial Sequence
  Description of Artificial Sequence: Synthetic oligonucleotide
gacucaaucaaaaggcucu

SEQ ID NO: 586205 - RNA, 19 nt, Artificial Sequence
  Description of Artificial Sequence: Synthetic oligonucleotide
gugguuaugucugcucagg

SEQ ID NO: 586206 - RNA, 19 nt, Artificial Sequence
  Description of Artificial Sequence: Synthetic oligonucleotide
uaguuaugcuuuauauauu

SEQ ID NO: 586207 - RNA, 19 nt, Artificial Sequence
  Description of Artificial Sequence: Synthetic oligonucleotide
ugccuuacuuaagcaaugc

SEQ ID NO: 586208 - RNA, 19 nt, Artificial Sequence
  Description of Artificial Sequence: Synthetic oligonucleotide
ugguaccagacgaaacggu

SEQ ID NO: 586209 - RNA, 19 nt, Artificial Sequence
  Description of Artificial Sequence: Synthetic oligonucleotide
aagaccagcuagggguccg

SEQ ID NO: 586210 - RNA, 19 nt, Artificial Sequence
  Description of Artificial Sequence: Synthetic oligonucleotide
ggugccaccacccugaggu

SEQ ID NO: 586211 - RNA, 19 nt, Artificial Sequence
  Description of Artificial Sequence: Synthetic oligonucleotide
augcaucagaacauaaggu

SEQ ID NO: 586212 - RNA, 19 nt, Artificial Sequence
  Description of Artificial Sequence: Synthetic oligonucleotide
auccuucgccuauuuuaac

SEQ ID NO: 586213 - RNA, 19 nt, Artificial Sequence
  Description of Artificial Sequence: Synthetic oligonucleotide
cuugaucgugauauugaca

SEQ ID NO: 586214 - RNA, 19 nt, Artificial Sequence
  Description of Artificial Sequence: Synthetic oligonucleotide
uuaguagggcaauuucauu

SEQ ID NO: 586215 - RNA, 19 nt, Artificial Sequence
  Description of Artificial Sequence: Synthetic oligonucleotide
guacugguccacuggccgg

SEQ ID NO: 586216 - RNA, 19 nt, Artificial Sequence
  Description of Artificial Sequence: Synthetic oligonucleotide
ugaucgugauauugacaca

SEQ ID NO: 586217 - RNA, 19 nt, Artificial Sequence
  Description of Artificial Sequence: Synthetic oligonucleotide
ugccaugauggcuaaugau

SEQ ID NO: 586218 - RNA, 19 nt, Artificial Sequence
  Description of Artificial Sequence: Synthetic oligonucleotide
aggccgaugcuauugcaga

SEQ ID NO: 586219 - RNA, 19 nt, Artificial Sequence
  Description of Artificial Sequence: Synthetic oligonucleotide
uauuggccugcuguuagcu

SEQ ID NO: 586220 - RNA, 19 nt, Artificial Sequence
  Description of Artificial Sequence: Synthetic oligonucleotide
guucguauuggccugcugu

SEQ ID NO: 586221 - RNA, 19 nt, Artificial Sequence
  Description of Artificial Sequence: Synthetic oligonucleotide
cucaaucaaaaggcucugg

SEQ ID NO: 586222 - RNA, 19 nt, Artificial Sequence
  Description of Artificial Sequence: Synthetic oligonucleotide
caacaucaguccacguagc

SEQ ID NO: 586223 - RNA, 19 nt, Artificial Sequence
  Description of Artificial Sequence: Synthetic oligonucleotide
uugguuaggguagcgguuc

SEQ ID NO: 586224 - RNA, 19 nt, Artificial Sequence
  Description of Artificial Sequence: Synthetic oligonucleotide
accgcgcuggaucuucuuc

SEQ ID NO: 586225 - RNA, 19 nt, Artificial Sequence
  Description of Artificial Sequence: Synthetic oligonucleotide
guugaaagccuaaggguca

SEQ ID NO: 586226 - RNA, 19 nt, Artificial Sequence
  Description of Artificial Sequence: Synthetic oligonucleotide
uaugucugcucagggauau

SEQ ID NO: 586227 - RNA, 19 nt, Artificial Sequence
  Description of Artificial Sequence: Synthetic oligonucleotide
uuaugucugcucagggaua

SEQ ID NO: 586228 - RNA, 19 nt, Artificial Sequence
  Description of Artificial Sequence: Synthetic oligonucleotide
ggcuuuugacaauuaugag

SEQ ID NO: 586229 - RNA, 19 nt, Artificial Sequence
  Description of Artificial Sequence: Synthetic oligonucleotide
uaacacacuuucuguucac

SEQ ID NO: 586230 - RNA, 19 nt, Artificial Sequence
  Description of Artificial Sequence: Synthetic oligonucleotide
ugcucagcuagaguuuaug

SEQ ID NO: 586231 - RNA, 19 nt, Artificial Sequence
  Description of Artificial Sequence: Synthetic oligonucleotide
uuucacgguaguagcgguc

SEQ ID NO: 586232 - RNA, 19 nt, Artificial Sequence
  Description of Artificial Sequence: Synthetic oligonucleotide
cagauagcaaacauuuaua

SEQ ID NO: 586233 - RNA, 19 nt, Artificial Sequence
  Description of Artificial Sequence: Synthetic oligonucleotide
auuaugagacagaaaugaa

SEQ ID NO: 586234 - RNA, 19 nt, Artificial Sequence
  Description of Artificial Sequence: Synthetic oligonucleotide
gcuacagguggauaacccc

SEQ ID NO: 586235 - RNA, 19 nt, Artificial Sequence
  Description of Artificial Sequence: Synthetic oligonucleotide
ugccaaaauggagcauggg

SEQ ID NO: 586236 - RNA, 19 nt, Artificial Sequence
  Description of Artificial Sequence: Synthetic oligonucleotide
uucguauuggccugcuguu

SEQ ID NO: 586237 - RNA, 19 nt, Artificial Sequence
  Description of Artificial Sequence: Synthetic oligonucleotide
uauguucguauuggccugc

SEQ ID NO: 586238 - RNA, 19 nt, Artificial Sequence
  Description of Artificial Sequence: Synthetic oligonucleotide
uacacuugguuaggguagc

SEQ ID NO: 586239 - RNA, 19 nt, Artificial Sequence
  Description of Artificial Sequence: Synthetic oligonucleotide
cuuacugggcuuguuccac

SEQ ID NO: 586240 - RNA, 19 nt, Artificial Sequence
  Description of Artificial Sequence: Synthetic oligonucleotide
aucggcuuccaccaguguu

SEQ ID NO: 586241 - RNA, 19 nt, Artificial Sequence
  Description of Artificial Sequence: Synthetic oligonucleotide
uagcuaagguuugccauga

SEQ ID NO: 586242 - RNA, 19 nt, Artificial Sequence
  Description of Artificial Sequence: Synthetic oligonucleotide
ccuucgccuauuuuaacag

SEQ ID NO: 586243 - RNA, 19 nt, Artificial Sequence
  Description of Artificial Sequence: Synthetic oligonucleotide
aaaugggaggcuguuucuu

SEQ ID NO: 586244 - RNA, 19 nt, Artificial Sequence
  Description of Artificial Sequence: Synthetic oligonucleotide
ccuaaacuggacugguacc

SEQ ID NO: 586245 - RNA, 19 nt, Artificial Sequence
  Description of Artificial Sequence: Synthetic oligonucleotide
uguggaagucagaggguua

SEQ ID NO: 586246 - RNA, 19 nt, Artificial Sequence
  Description of Artificial Sequence: Synthetic oligonucleotide
aggcuaaaacaucauucua

SEQ ID NO: 586247 - RNA, 19 nt, Artificial Sequence
  Description of Artificial Sequence: Synthetic oligonucleotide
gcuaacacacuuucuguuc

SEQ ID NO: 586248 - RNA, 19 nt, Artificial Sequence
  Description of Artificial Sequence: Synthetic oligonucleotide
agaccaaaacaaagccccg

SEQ ID NO: 586249 - RNA, 19 nt, Artificial Sequence
  Description of Artificial Sequence: Synthetic oligonucleotide
gaaugagacaccaccucaa

SEQ ID NO: 586250 - RNA, 19 nt, Artificial Sequence
  Description of Artificial Sequence: Synthetic oligonucleotide
gguaacgguugccuccagg

SEQ ID NO: 586251 - RNA, 19 nt, Artificial Sequence
  Description of Artificial Sequence: Synthetic oligonucleotide
cguugaaagccuaaggguc

SEQ ID NO: 586252 - RNA, 19 nt, Artificial Sequence
  Description of Artificial Sequence: Synthetic oligonucleotide
acucaaucaaaaggcucug

SEQ ID NO: 586253 - RNA, 19 nt, Artificial Sequence
  Description of Artificial Sequence: Synthetic oligonucleotide
acgucggucuccgugaagu

SEQ ID NO: 586254 - RNA, 19 nt, Artificial Sequence
  Description of Artificial Sequence: Synthetic oligonucleotide
augaccuaauucuggcuuu

SEQ ID NO: 586255 - RNA, 19 nt, Artificial Sequence
  Description of Artificial Sequence: Synthetic oligonucleotide
caucagaacauaaggucua

SEQ ID NO: 586256 - RNA, 19 nt, Artificial Sequence
  Description of Artificial Sequence: Synthetic oligonucleotide
gcuugaucgugauauugac

SEQ ID NO: 586257 - RNA, 19 nt, Artificial Sequence
  Description of Artificial Sequence: Synthetic oligonucleotide
augagacaccaccucaauu

SEQ ID NO: 586258 - RNA, 19 nt, Artificial Sequence
  Description of Artificial Sequence: Synthetic oligonucleotide
gcuaaaacaucauucuagu

SEQ ID NO: 586259 - RNA, 19 nt, Artificial Sequence
  Description of Artificial Sequence: Synthetic oligonucleotide
cagucgugcacaaaguugu

SEQ ID NO: 586260 - RNA, 19 nt, Artificial Sequence
  Description of Artificial Sequence: Synthetic oligonucleotide
uccgucguaguaggccugg

SEQ ID NO: 586261 - RNA, 19 nt, Artificial Sequence
  Description of Artificial Sequence: Synthetic oligonucleotide
gguuaugucugcucaggga

SEQ ID NO: 586262 - RNA, 19 nt, Artificial Sequence
  Description of Artificial Sequence: Synthetic oligonucleotide
uagaauccuucgccuauuu

SEQ ID NO: 586263 - RNA, 19 nt, Artificial Sequence
  Description of Artificial Sequence: Synthetic oligonucleotide
uccacugauugugggugcc

SEQ ID NO: 586264 - RNA, 19 nt, Artificial Sequence
  Description of Artificial Sequence: Synthetic oligonucleotide
uugcaggaguaccaugcuu

SEQ ID NO: 586265 - RNA, 19 nt, Artificial Sequence
  Description of Artificial Sequence: Synthetic oligonucleotide
ugguccacuggccgguagu

SEQ ID NO: 586266 - RNA, 19 nt, Artificial Sequence
  Description of Artificial Sequence: Synthetic oligonucleotide
uggguaacgguugccucca

SEQ ID NO: 586267 - RNA, 19 nt, Artificial Sequence
  Description of Artificial Sequence: Synthetic oligonucleotide
guaccagacgaaacgguca

SEQ ID NO: 586268 - RNA, 19 nt, Artificial Sequence
  Description of Artificial Sequence: Synthetic oligonucleotide
gcgauuaugugcuguuaug

SEQ ID NO: 586269 - RNA, 19 nt, Artificial Sequence
  Description of Artificial Sequence: Synthetic oligonucleotide
ccuuacuuaagcaaugcua

SEQ ID NO: 586270 - RNA, 19 nt, Artificial Sequence
  Description of Artificial Sequence: Synthetic oligonucleotide
acggucaguguuauguacu

SEQ ID NO: 586271 - RNA, 19 nt, Artificial Sequence
  Description of Artificial Sequence: Synthetic oligonucleotide
caucuggucuacuauacau

SEQ ID NO: 586272 - RNA, 19 nt, Artificial Sequence
  Description of Artificial Sequence: Synthetic oligonucleotide
caagggcauuagccuaugg

SEQ ID NO: 586273 - RNA, 19 nt, Artificial Sequence
  Description of Artificial Sequence: Synthetic oligonucleotide
cuaagcuuguaguuaugcu

SEQ ID NO: 586274 - RNA, 19 nt, Artificial Sequence
  Description of Artificial Sequence: Synthetic oligonucleotide
aggucuaagcuuguaguua

SEQ ID NO: 586275 - RNA, 19 nt, Artificial Sequence
  Description of Artificial Sequence: Synthetic oligonucleotide
guaucggcuuccaccagug

SEQ ID NO: 586276 - RNA, 19 nt, Artificial Sequence
  Description of Artificial Sequence: Synthetic oligonucleotide
uuccgucguaguaggccug

SEQ ID NO: 586277 - RNA, 19 nt, Artificial Sequence
  Description of Artificial Sequence: Synthetic oligonucleotide
aaguacaagcagggaggcu

SEQ ID NO: 586278 - RNA, 19 nt, Artificial Sequence
  Description of Artificial Sequence: Synthetic oligonucleotide
agguuugccaugauggcua

SEQ ID NO: 586279 - RNA, 19 nt, Artificial Sequence
  Description of Artificial Sequence: Synthetic oligonucleotide
ggaacaaaguuugccuuac

SEQ ID NO: 586280 - RNA, 19 nt, Artificial Sequence
  Description of Artificial Sequence: Synthetic oligonucleotide
cugcucagggauauacaca

SEQ ID NO: 586281 - RNA, 19 nt, Artificial Sequence
  Description of Artificial Sequence: Synthetic oligonucleotide
gacgaaacggucaguguua

SEQ ID NO: 586282 - RNA, 19 nt, Artificial Sequence
  Description of Artificial Sequence: Synthetic oligonucleotide
ugauugugggugccaccuc

SEQ ID NO: 586283 - RNA, 19 nt, Artificial Sequence
  Description of Artificial Sequence: Synthetic oligonucleotide
ugacacacaucugcuccac

SEQ ID NO: 586284 - RNA, 19 nt, Artificial Sequence
  Description of Artificial Sequence: Synthetic oligonucleotide
guccuaaccauuucucccu

SEQ ID NO: 586285 - RNA, 19 nt, Artificial Sequence
  Description of Artificial Sequence: Synthetic oligonucleotide
cuaaacuggacugguaccu

SEQ ID NO: 586286 - RNA, 19 nt, Artificial Sequence
  Description of Artificial Sequence: Synthetic oligonucleotide
cuggccgguaguacacuug

SEQ ID NO: 586287 - RNA, 19 nt, Artificial Sequence
  Description of Artificial Sequence: Synthetic oligonucleotide
ugcaaccuaggagaauuuu

SEQ ID NO: 586288 - RNA, 19 nt, Artificial Sequence
  Description of Artificial Sequence: Synthetic oligonucleotide
ucggaugcaucagaacaua

SEQ ID NO: 586289 - RNA, 19 nt, Artificial Sequence
  Description of Artificial Sequence: Synthetic oligonucleotide
cacgcgcuccaucaucuug

SEQ ID NO: 586290 - RNA, 19 nt, Artificial Sequence
  Description of Artificial Sequence: Synthetic oligonucleotide
auucuacacagaacaccug

SEQ ID NO: 586291 - RNA, 19 nt, Artificial Sequence
  Description of Artificial Sequence: Synthetic oligonucleotide
acacuugguuaggguagcg

SEQ ID NO: 586292 - RNA, 19 nt, Artificial Sequence
  Description of Artificial Sequence: Synthetic oligonucleotide
gaaccaagugcacguugaa

SEQ ID NO: 586293 - RNA, 19 nt, Artificial Sequence
  Description of Artificial Sequence: Synthetic oligonucleotide
ucuuagggaccaugcccaa

SEQ ID NO: 586294 - RNA, 19 nt, Artificial Sequence
  Description of Artificial Sequence: Synthetic oligonucleotide
gguaccagacgaaacgguc

SEQ ID NO: 586295 - RNA, 19 nt, Artificial Sequence
  Description of Artificial Sequence: Synthetic oligonucleotide
agcaccgcgcuggaucuuc

SEQ ID NO: 586296 - RNA, 19 nt, Artificial Sequence
  Description of Artificial Sequence: Synthetic oligonucleotide
acccugagguggguaacgg

SEQ ID NO: 586297 - RNA, 19 nt, Artificial Sequence
  Description of Artificial Sequence: Synthetic oligonucleotide
guagcgguucauguuuuca

SEQ ID NO: 586298 - RNA, 19 nt, Artificial Sequence
  Description of Artificial Sequence: Synthetic oligonucleotide
guacucaguguggaaguca

SEQ ID NO: 586299 - RNA, 19 nt, Artificial Sequence
  Description of Artificial Sequence: Synthetic oligonucleotide
agaccagcuagggguccgc

SEQ ID NO: 586300 - RNA, 19 nt, Artificial Sequence
  Description of Artificial Sequence: Synthetic oligonucleotide
uaucggcuuccaccagugu

SEQ ID NO: 586301 - RNA, 19 nt, Artificial Sequence
  Description of Artificial Sequence: Synthetic oligonucleotide
cauuugguaccagacgaaa

SEQ ID NO: 586302 - RNA, 19 nt, Artificial Sequence
  Description of Artificial Sequence: Synthetic oligonucleotide
ccaccucaauuaaaagagc

SEQ ID NO: 586303 - RNA, 19 nt, Artificial Sequence
  Description of Artificial Sequence: Synthetic oligonucleotide
guguacucaguguggaagu

SEQ ID NO: 586304 - RNA, 19 nt, Artificial Sequence
  Description of Artificial Sequence: Synthetic oligonucleotide
cacugauugugggugccac

SEQ ID NO: 586305 - RNA, 19 nt, Artificial Sequence
  Description of Artificial Sequence: Synthetic oligonucleotide
ucacgguaguagcgguccu

SEQ ID NO: 586306 - RNA, 19 nt, Artificial Sequence
  Description of Artificial Sequence: Synthetic oligonucleotide
caccaguguuccacccucc

SEQ ID NO: 586307 - RNA, 19 nt, Artificial Sequence
  Description of Artificial Sequence: Synthetic oligonucleotide
guuaugcuuuauauauucu

SEQ ID NO: 586308 - RNA, 19 nt, Artificial Sequence
  Description of Artificial Sequence: Synthetic oligonucleotide
gacgucggucuccgugaag

SEQ ID NO: 586309 - RNA, 19 nt, Artificial Sequence
  Description of Artificial Sequence: Synthetic oligonucleotide
ggaaccaagugcacguuga

SEQ ID NO: 586310 - RNA, 19 nt, Artificial Sequence
  Description of Artificial Sequence: Synthetic oligonucleotide
ggaucacaggaggagagga

SEQ ID NO: 586311 - RNA, 19 nt, Artificial Sequence
  Description of Artificial Sequence: Synthetic oligonucleotide
guaugcugcuugaucguga

SEQ ID NO: 586312 - RNA, 19 nt, Artificial Sequence
  Description of Artificial Sequence: Synthetic oligonucleotide
gucgugcacaaaguuguuc

SEQ ID NO: 586313 - RNA, 19 nt, Artificial Sequence
  Description of Artificial Sequence: Synthetic oligonucleotide
cuuccgucguaguaggccu

SEQ ID NO: 586314 - RNA, 19 nt, Artificial Sequence
  Description of Artificial Sequence: Synthetic oligonucleotide
auacugggugacacacauc

SEQ ID NO: 586315 - RNA, 19 nt, Artificial Sequence
  Description of Artificial Sequence: Synthetic oligonucleotide
gaccaugcccaaacaguga

SEQ ID NO: 586316 - RNA, 19 nt, Artificial Sequence
  Description of Artificial Sequence: Synthetic oligonucleotide
caagaacgaggaaguacaa

SEQ ID NO: 586317 - RNA, 19 nt, Artificial Sequence
  Description of Artificial Sequence: Synthetic oligonucleotide
gagucaaaaucuccugguu

SEQ ID NO: 586318 - RNA, 19 nt, Artificial Sequence
  Description of Artificial Sequence: Synthetic oligonucleotide
acgcgcuccaucaucuuga

SEQ ID NO: 586319 - RNA, 19 nt, Artificial Sequence
  Description of Artificial Sequence: Synthetic oligonucleotide
cuauugcagagugguuaug

SEQ ID NO: 586320 - RNA, 19 nt, Artificial Sequence
  Description of Artificial Sequence: Synthetic oligonucleotide
ccgaugcuauugcagagug

SEQ ID NO: 586321 - RNA, 19 nt, Artificial Sequence
  Description of Artificial Sequence: Synthetic oligonucleotide
ugaccuaauucuggcuuuu

SEQ ID NO: 586322 - RNA, 19 nt, Artificial Sequence
  Description of Artificial Sequence: Synthetic oligonucleotide
acuggccgguaguacacuu

SEQ ID NO: 586323 - RNA, 19 nt, Artificial Sequence
  Description of Artificial Sequence: Synthetic oligonucleotide
aucgugauauugacacagu

SEQ ID NO: 586324 - RNA, 19 nt, Artificial Sequence
  Description of Artificial Sequence: Synthetic oligonucleotide
ucguauuggccugcuguua

SEQ ID NO: 586325 - RNA, 19 nt, Artificial Sequence
  Description of Artificial Sequence: Synthetic oligonucleotide
agcuagggguccgcuuugg

SEQ ID NO: 586326 - RNA, 19 nt, Artificial Sequence
  Description of Artificial Sequence: Synthetic oligonucleotide
cuguagaauccuucgccua

SEQ ID NO: 586327 - RNA, 19 nt, Artificial Sequence
  Description of Artificial Sequence: Synthetic oligonucleotide
ggaguaccaugcuuuuaca

SEQ ID NO: 586328 - RNA, 19 nt, Artificial Sequence
  Description of Artificial Sequence: Synthetic oligonucleotide
ggucuaagcuuguaguuau

SEQ ID NO: 586329 - RNA, 19 nt, Artificial Sequence
  Description of Artificial Sequence: Synthetic oligonucleotide
gccuagaccacaagaacga

SEQ ID NO: 586330 - RNA, 19 nt, Artificial Sequence
  Description of Artificial Sequence: Synthetic oligonucleotide
agcaaggcuaaaacaucau

SEQ ID NO: 586331 - RNA, 19 nt, Artificial Sequence
  Description of Artificial Sequence: Synthetic oligonucleotide
gguggguaacgguugccuc

SEQ ID NO: 586332 - RNA, 19 nt, Artificial Sequence
  Description of Artificial Sequence: Synthetic oligonucleotide
caucugcaaccuaggagaa

SEQ ID NO: 586333 - RNA, 19 nt, Artificial Sequence
  Description of Artificial Sequence: Synthetic oligonucleotide
gucggucuccgugaaguuc

SEQ ID NO: 586334 - RNA, 19 nt, Artificial Sequence
  Description of Artificial Sequence: Synthetic oligonucleotide
ggaauagcaucuggucuac

SEQ ID NO: 586335 - RNA, 19 nt, Artificial Sequence
  Description of Artificial Sequence: Synthetic oligonucleotide
caagcgccuugacuuugug

SEQ ID NO: 586336 - RNA, 19 nt, Artificial Sequence
  Description of Artificial Sequence: Synthetic oligonucleotide
gcuguagaauccuucgccu

SEQ ID NO: 586337 - RNA, 19 nt, Artificial Sequence
  Description of Artificial Sequence: Synthetic oligonucleotide
acgaaacggucaguguuau

SEQ ID NO: 586338 - RNA, 19 nt, Artificial Sequence
  Description of Artificial Sequence: Synthetic oligonucleotide
ccgcgcuggaucuucuucc

SEQ ID NO: 586339 - RNA, 19 nt, Artificial Sequence
  Description of Artificial Sequence: Synthetic oligonucleotide
guacaagcagggaggcuuc

SEQ ID NO: 586340 - RNA, 19 nt, Artificial Sequence
  Description of Artificial Sequence: Synthetic oligonucleotide
augcaagcgccuugacuuu

SEQ ID NO: 586341 - RNA, 19 nt, Artificial Sequence
  Description of Artificial Sequence: Synthetic oligonucleotide
acauaaggucuaagcuugu

SEQ ID NO: 586342 - RNA, 19 nt, Artificial Sequence
  Description of Artificial Sequence: Synthetic oligonucleotide
ccuauucaaauacaaguau

SEQ ID NO: 586343 - RNA, 19 nt, Artificial Sequence
  Description of Artificial Sequence: Synthetic oligonucleotide
cgagcaaggcuaaaacauc

SEQ ID NO: 586344 - RNA, 19 nt, Artificial Sequence
  Description of Artificial Sequence: Synthetic oligonucleotide
uaguagcgguccucccagu

SEQ ID NO: 586345 - RNA, 19 nt, Artificial Sequence
  Description of Artificial Sequence: Synthetic oligonucleotide
agccuaagggucacacagu

SEQ ID NO: 586346 - RNA, 19 nt, Artificial Sequence
  Description of Artificial Sequence: Synthetic oligonucleotide
gcaucuggucuacuauaca

SEQ ID NO: 586347 - RNA, 19 nt, Artificial Sequence
  Description of Artificial Sequence: Synthetic oligonucleotide
accagcuagggguccgcuu

SEQ ID NO: 586348 - RNA, 19 nt, Artificial Sequence
  Description of Artificial Sequence: Synthetic oligonucleotide
gucagauagcaaacauuua

SEQ ID NO: 586349 - RNA, 19 nt, Artificial Sequence
  Description of Artificial Sequence: Synthetic oligonucleotide
cauaaggucuaagcuugua

SEQ ID NO: 586350 - RNA, 19 nt, Artificial Sequence
  Description of Artificial Sequence: Synthetic oligonucleotide
gcucagcuagaguuuaugu

SEQ ID NO: 586351 - RNA, 19 nt, Artificial Sequence
  Description of Artificial Sequence: Synthetic oligonucleotide
cagcuagggguccgcuuug

SEQ ID NO: 586352 - RNA, 19 nt, Artificial Sequence
  Description of Artificial Sequence: Synthetic oligonucleotide
gcgccuugacuuugugucc

SEQ ID NO: 586353 - RNA, 19 nt, Artificial Sequence
  Description of Artificial Sequence: Synthetic oligonucleotide
cacgguaguagcgguccuc

SEQ ID NO: 586354 - RNA, 19 nt, Artificial Sequence
  Description of Artificial Sequence: Synthetic oligonucleotide
ccgagcaaggcuaaaacau

SEQ ID NO: 586355 - RNA, 19 nt, Artificial Sequence
  Description of Artificial Sequence: Synthetic oligonucleotide
gguaucggcuuccaccagu

SEQ ID NO: 586356 - RNA, 19 nt, Artificial Sequence
  Description of Artificial Sequence: Synthetic oligonucleotide
gguagcgguucauguuuuc

SEQ ID NO: 586357 - RNA, 19 nt, Artificial Sequence
  Description of Artificial Sequence: Synthetic oligonucleotide
cuucugauacugggugaca

SEQ ID NO: 586358 - RNA, 19 nt, Artificial Sequence
  Description of Artificial Sequence: Synthetic oligonucleotide
auggcgcuccccagcaugu

SEQ ID NO: 586359 - RNA, 19 nt, Artificial Sequence
  Description of Artificial Sequence: Synthetic oligonucleotide
auguucguauuggccugcu

SEQ ID NO: 586360 - RNA, 19 nt, Artificial Sequence
  Description of Artificial Sequence: Synthetic oligonucleotide
cgaugcuauugcagagugg

SEQ ID NO: 586361 - RNA, 19 nt, Artificial Sequence
  Description of Artificial Sequence: Synthetic oligonucleotide
ccgguaguacacuugguua

SEQ ID NO: 586362 - RNA, 19 nt, Artificial Sequence
  Description of Artificial Sequence: Synthetic oligonucleotide
ccuagaccacaagaacgag

SEQ ID NO: 586363 - RNA, 19 nt, Artificial Sequence
  Description of Artificial Sequence: Synthetic oligonucleotide
ucuugacgucggucuccgu

SEQ ID NO: 586364 - RNA, 19 nt, Artificial Sequence
  Description of Artificial Sequence: Synthetic oligonucleotide
cagacgaaacggucagugu

SEQ ID NO: 586365 - RNA, 19 nt, Artificial Sequence
  Description of Artificial Sequence: Synthetic oligonucleotide
gggaccaugcccaaacagu

SEQ ID NO: 586366 - RNA, 19 nt, Artificial Sequence
  Description of Artificial Sequence: Synthetic oligonucleotide
cuccuaaacuggacuggua

SEQ ID NO: 586367 - RNA, 19 nt, Artificial Sequence
  Description of Artificial Sequence: Synthetic oligonucleotide
uuggcuuacugggcuuguu

SEQ ID NO: 586368 - RNA, 19 nt, Artificial Sequence
  Description of Artificial Sequence: Synthetic oligonucleotide
cacagucgugcacaaaguu

SEQ ID NO: 586369 - RNA, 19 nt, Artificial Sequence
  Description of Artificial Sequence: Synthetic oligonucleotide
cgacuagccagcgauuaug

SEQ ID NO: 586370 - RNA, 19 nt, Artificial Sequence
  Description of Artificial Sequence: Synthetic oligonucleotide
gcgcuccaucaucuugacg

SEQ ID NO: 586371 - RNA, 19 nt, Artificial Sequence
  Description of Artificial Sequence: Synthetic oligonucleotide
augugcuguuauguucgua

SEQ ID NO: 586372 - RNA, 19 nt, Artificial Sequence
  Description of Artificial Sequence: Synthetic oligonucleotide
cuuagggaccaugcccaaa

SEQ ID NO: 586373 - RNA, 19 nt, Artificial Sequence
  Description of Artificial Sequence: Synthetic oligonucleotide
gccuuacuuaagcaaugcu

SEQ ID NO: 586374 - RNA, 19 nt, Artificial Sequence
  Description of Artificial Sequence: Synthetic oligonucleotide
gcauuugguaccagacgaa

SEQ ID NO: 586375 - RNA, 19 nt, Artificial Sequence
  Description of Artificial Sequence: Synthetic oligonucleotide
gccgguaguacacuugguu

SEQ ID NO: 586376 - RNA, 19 nt, Artificial Sequence
  Description of Artificial Sequence: Synthetic oligonucleotide
gugcacguugaaagccuaa

SEQ ID NO: 586377 - RNA, 19 nt, Artificial Sequence
  Description of Artificial Sequence: Synthetic oligonucleotide
ccuaagggucacacaguaa

SEQ ID NO: 586378 - RNA, 19 nt, Artificial Sequence
  Description of Artificial Sequence: Synthetic oligonucleotide
gccccgacuagccagcgau

SEQ ID NO: 586379 - RNA, 19 nt, Artificial Sequence
  Description of Artificial Sequence: Synthetic oligonucleotide
cagcgauuaugugcuguua

SEQ ID NO: 586380 - RNA, 19 nt, Artificial Sequence
  Description of Artificial Sequence: Synthetic oligonucleotide
ggguaacgguugccuccag

SEQ ID NO: 586381 - RNA, 19 nt, Artificial Sequence
  Description of Artificial Sequence: Synthetic oligonucleotide
caauguuaguagggcaauu

SEQ ID NO: 586382 - RNA, 19 nt, Artificial Sequence
  Description of Artificial Sequence: Synthetic oligonucleotide
caauccgagcaaggcuaaa

SEQ ID NO: 586383 - RNA, 19 nt, Artificial Sequence
  Description of Artificial Sequence: Synthetic oligonucleotide
cugcaaccuaggagaauuu

SEQ ID NO: 586384 - RNA, 19 nt, Artificial Sequence
  Description of Artificial Sequence: Synthetic oligonucleotide
ccaagggcauuagccuaug

SEQ ID NO: 586385 - RNA, 19 nt, Artificial Sequence
  Description of Artificial Sequence: Synthetic oligonucleotide
cgaaacggucaguguuaug

SEQ ID NO: 586386 - RNA, 19 nt, Artificial Sequence
  Description of Artificial Sequence: Synthetic oligonucleotide
gaccagcuagggguccgcu

SEQ ID NO: 586387 - RNA, 19 nt, Artificial Sequence
  Description of Artificial Sequence: Synthetic oligonucleotide
gcccaggguaucggcuucc

SEQ ID NO: 586388 - RNA, 19 nt, Artificial Sequence
  Description of Artificial Sequence: Synthetic oligonucleotide
gccagcgauuaugugcugu

SEQ ID NO: 586389 - RNA, 19 nt, Artificial Sequence
  Description of Artificial Sequence: Synthetic oligonucleotide
ccagcuagggguccgcuuu

SEQ ID NO: 586390 - RNA, 19 nt, Artificial Sequence
  Description of Artificial Sequence: Synthetic oligonucleotide
ccccaaccaccaccaugag

SEQ ID NO: 586391 - RNA, 19 nt, Artificial Sequence
  Description of Artificial Sequence: Synthetic oligonucleotide
cccgacuagccagcgauua

SEQ ID NO: 586392 - RNA, 19 nt, Artificial Sequence
  Description of Artificial Sequence: Synthetic oligonucleotide
ccagcgauuaugugcuguu

SEQ ID NO: 586393 - RNA, 19 nt, Artificial Sequence
  Description of Artificial Sequence: Synthetic oligonucleotide
ccaugcccaaacagugacu

SEQ ID NO: 586394 - RNA, 19 nt, Artificial Sequence
  Description of Artificial Sequence: Synthetic oligonucleotide
gguuaggguagcgguucau

SEQ ID NO: 586395 - RNA, 19 nt, Artificial Sequence
  Description of Artificial Sequence: Synthetic oligonucleotide
gcaagcgccuugacuuugu

SEQ ID NO: 586396 - RNA, 19 nt, Artificial Sequence
  Description of Artificial Sequence: Synthetic oligonucleotide
ggguagcgguucauguuuu

SEQ ID NO: 586397 - RNA, 19 nt, Artificial Sequence
  Description of Artificial Sequence: Synthetic oligonucleotide
ggccgguaguacacuuggu

SEQ ID NO: 586398 - RNA, 19 nt, Artificial Sequence
  Description of Artificial Sequence: Synthetic oligonucleotide
caccgcgcuggaucuucuu

SEQ ID NO: 586399 - RNA, 19 nt, Artificial Sequence
  Description of Artificial Sequence: Synthetic oligonucleotide
ccgacuagccagcgauuau

SEQ ID NO: 586400 - RNA, 19 nt, Artificial Sequence
  Description of Artificial Sequence: Synthetic oligonucleotide
cgccuugacuuuguguccu

SEQ ID NO: 586401 - RNA, 19 nt, Artificial Sequence
  Description of Artificial Sequence: Synthetic oligonucleotide
ggguccgcuuuggauucau

SEQ ID NO: 586402 - RNA, 19 nt, Artificial Sequence
  Description of Artificial Sequence: Synthetic oligonucleotide
gagcaccgcgcuggaucuu

SEQ ID NO: 586403 - RNA, 19 nt, Artificial Sequence
  Description of Artificial Sequence: Synthetic oligonucleotide
cccaaaugggaggcuguuu

SEQ ID NO: 586404 - RNA, 19 nt, Artificial Sequence
  Description of Artificial Sequence: Synthetic oligonucleotide
gcaccgcgcuggaucuucu

SEQ ID NO: 586405 - RNA, 19 nt, Artificial Sequence
  Description of Artificial Sequence: Synthetic oligonucleotide
ccgcaccugccacaugcuu

SEQ ID NO: 586406 - RNA, 19 nt, Artificial Sequence
  Description of Artificial Sequence: Synthetic oligonucleotide
ccccgacuagccagcgauu

SEQ ID NO: 586407 - RNA, 19 nt, Artificial Sequence
  Description of Artificial Sequence: Synthetic oligonucleotide
cgucggucuccgugaaguu

SEQ ID NO: 586408 - RNA, 19 nt, Artificial Sequence
  Description of Artificial Sequence: Synthetic oligonucleotide
aaugaggauacacaaaucc

SEQ ID NO: 586409 - RNA, 19 nt, Artificial Sequence
  Description of Artificial Sequence: Synthetic oligonucleotide
aaugauuaaacucuacugu

SEQ ID NO: 586410 - RNA, 19 nt, Artificial Sequence
  Description of Artificial Sequence: Synthetic oligonucleotide
ucucuuauagguaugaaug

SEQ ID NO: 586411 - RNA, 19 nt, Artificial Sequence
  Description of Artificial Sequence: Synthetic oligonucleotide
auaaguagguuucauaauc

SEQ ID NO: 586412 - RNA, 19 nt, Artificial Sequence
  Description of Artificial Sequence: Synthetic oligonucleotide
aauuauaucugcuucugcu

SEQ ID NO: 586413 - RNA, 19 nt, Artificial Sequence
  Description of Artificial Sequence: Synthetic oligonucleotide
aaugcuacaagccacagua

SEQ ID NO: 586414 - RNA, 19 nt, Artificial Sequence
  Description of Artificial Sequence: Synthetic oligonucleotide
uacuguagaaauuauaucu

SEQ ID NO: 586415 - RNA, 19 nt, Artificial Sequence
  Description of Artificial Sequence: Synthetic oligonucleotide
aaguggaguacaucaaugc

SEQ ID NO: 586416 - RNA, 19 nt, Artificial Sequence
  Description of Artificial Sequence: Synthetic oligonucleotide
auuuguucgcaacauauac

SEQ ID NO: 586417 - RNA, 19 nt, Artificial Sequence
  Description of Artificial Sequence: Synthetic oligonucleotide
auagaaauugaguugaugu

SEQ ID NO: 586418 - RNA, 19 nt, Artificial Sequence
  Description of Artificial Sequence: Synthetic oligonucleotide
auuauuguaggauccaguc

SEQ ID NO: 586419 - RNA, 19 nt, Artificial Sequence
  Description of Artificial Sequence: Synthetic oligonucleotide
cuagucaucauauagcgac

SEQ ID NO: 586420 - RNA, 19 nt, Artificial Sequence
  Description of Artificial Sequence: Synthetic oligonucleotide
ucaucugcugauaaguagg

SEQ ID NO: 586421 - RNA, 19 nt, Artificial Sequence
  Description of Artificial Sequence: Synthetic oligonucleotide
uguaguaggaucucuauac

SEQ ID NO: 586422 - RNA, 19 nt, Artificial Sequence
  Description of Artificial Sequence: Synthetic oligonucleotide
cacauaaccgaauaguucc

SEQ ID NO: 586423 - RNA, 19 nt, Artificial Sequence
  Description of Artificial Sequence: Synthetic oligonucleotide
ucaaacacuggaaaggggc

SEQ ID NO: 586424 - RNA, 19 nt, Artificial Sequence
  Description of Artificial Sequence: Synthetic oligonucleotide
aggaaugccagccuaauuc

SEQ ID NO: 586425 - RNA, 19 nt, Artificial Sequence
  Description of Artificial Sequence: Synthetic oligonucleotide
gaugccagagauuaauccg

SEQ ID NO: 586426 - RNA, 19 nt, Artificial Sequence
  Description of Artificial Sequence: Synthetic oligonucleotide
agaugccagagauuaaucc

SEQ ID NO: 586427 - RNA, 19 nt, Artificial Sequence
  Description of Artificial Sequence: Synthetic oligonucleotide
uuguucgcaacauauaccc

SEQ ID NO: 586428 - RNA, 19 nt, Artificial Sequence
  Description of Artificial Sequence: Synthetic oligonucleotide
cuaguaauucuccagaaug

SEQ ID NO: 586429 - RNA, 19 nt, Artificial Sequence
  Description of Artificial Sequence: Synthetic oligonucleotide
uuauagguaugaaugcuag

SEQ ID NO: 586430 - RNA, 19 nt, Artificial Sequence
  Description of Artificial Sequence: Synthetic oligonucleotide
uaugccaccaccgagacca

SEQ ID NO: 586431 - RNA, 19 nt, Artificial Sequence
  Description of Artificial Sequence: Synthetic oligonucleotide
acaauauuaaaacuccugu

SEQ ID NO: 586432 - RNA, 19 nt, Artificial Sequence
  Description of Artificial Sequence: Synthetic oligonucleotide
ucacuauugauagaaauug

SEQ ID NO: 586433 - RNA, 19 nt, Artificial Sequence
  Description of Artificial Sequence: Synthetic oligonucleotide
cauuaaauuaaaagugccc

SEQ ID NO: 586434 - RNA, 19 nt, Artificial Sequence
  Description of Artificial Sequence: Synthetic oligonucleotide
uugucuugaaauauguaca

SEQ ID NO: 586435 - RNA, 19 nt, Artificial Sequence
  Description of Artificial Sequence: Synthetic oligonucleotide
aauaugccaccaccgagac

SEQ ID NO: 586436 - RNA, 19 nt, Artificial Sequence
  Description of Artificial Sequence: Synthetic oligonucleotide
ucauauagcgaccacuaug

SEQ ID NO: 586437 - RNA, 19 nt, Artificial Sequence
  Description of Artificial Sequence: Synthetic oligonucleotide
ugaggauacacaaauccca

SEQ ID NO: 586438 - RNA, 19 nt, Artificial Sequence
  Description of Artificial Sequence: Synthetic oligonucleotide
uuaauaugccaccaccgag

SEQ ID NO: 586439 - RNA, 19 nt, Artificial Sequence
  Description of Artificial Sequence: Synthetic oligonucleotide
cucuagucaucauauagcg

SEQ ID NO: 586440 - RNA, 19 nt, Artificial Sequence
  Description of Artificial Sequence: Synthetic oligonucleotide
aaccgaauaguuccuuuac

SEQ ID NO: 586441 - RNA, 19 nt, Artificial Sequence
  Description of Artificial Sequence: Synthetic oligonucleotide
aaugcuagauucaacuauc

SEQ ID NO: 586442 - RNA, 19 nt, Artificial Sequence
  Description of Artificial Sequence: Synthetic oligonucleotide
ucucuagucaucauauagc

SEQ ID NO: 586443 - RNA, 19 nt, Artificial Sequence
  Description of Artificial Sequence: Synthetic oligonucleotide
ucauugguagacaauaaaa

SEQ ID NO: 586444 - RNA, 19 nt, Artificial Sequence
  Description of Artificial Sequence: Synthetic oligonucleotide
augaaugcuagauucaacu

SEQ ID NO: 586445 - RNA, 19 nt, Artificial Sequence
  Description of Artificial Sequence: Synthetic oligonucleotide
uuaccacugacccaaaacu

SEQ ID NO: 586446 - RNA, 19 nt, Artificial Sequence
  Description of Artificial Sequence: Synthetic oligonucleotide
uuuaauaugccaccaccga

SEQ ID NO: 586447 - RNA, 19 nt, Artificial Sequence
  Description of Artificial Sequence: Synthetic oligonucleotide
ugucuugaaauauguacag

SEQ ID NO: 586448 - RNA, 19 nt, Artificial Sequence
  Description of Artificial Sequence: Synthetic oligonucleotide
ucugagguauucauguacc

SEQ ID NO: 586449 - RNA, 19 nt, Artificial Sequence
  Description of Artificial Sequence: Synthetic oligonucleotide
uuuguucgcaacauauacc

SEQ ID NO: 586450 - RNA, 19 nt, Artificial Sequence
  Description of Artificial Sequence: Synthetic oligonucleotide
uguagaaauuauaucugcu

SEQ ID NO: 586451 - RNA, 19 nt, Artificial Sequence
  Description of Artificial Sequence: Synthetic oligonucleotide
cuugauauccacaauauua

SEQ ID NO: 586452 - RNA, 19 nt, Artificial Sequence
  Description of Artificial Sequence: Synthetic oligonucleotide
gauuguuuguaguugcuac

SEQ ID NO: 586453 - RNA, 19 nt, Artificial Sequence
  Description of Artificial Sequence: Synthetic oligonucleotide
uucuaagcuuuucaaguag

SEQ ID NO: 586454 - RNA, 19 nt, Artificial Sequence
  Description of Artificial Sequence: Synthetic oligonucleotide
uaauaugccaccaccgaga

SEQ ID NO: 586455 - RNA, 19 nt, Artificial Sequence
  Description of Artificial Sequence: Synthetic oligonucleotide
auaaucacuauugauagaa

SEQ ID NO: 586456 - RNA, 19 nt, Artificial Sequence
  Description of Artificial Sequence: Synthetic oligonucleotide
gagauuaauccgcaaauca

SEQ ID NO: 586457 - RNA, 19 nt, Artificial Sequence
  Description of Artificial Sequence: Synthetic oligonucleotide
aaccaccuaauuuuguuga

SEQ ID NO: 586458 - RNA, 19 nt, Artificial Sequence
  Description of Artificial Sequence: Synthetic oligonucleotide
aaggcguucacuguguuug

SEQ ID NO: 586459 - RNA, 19 nt, Artificial Sequence
  Description of Artificial Sequence: Synthetic oligonucleotide
aaauuauuguaggauccag

SEQ ID NO: 586460 - RNA, 19 nt, Artificial Sequence
  Description of Artificial Sequence: Synthetic oligonucleotide
aauagaggagaugauuuca

SEQ ID NO: 586461 - RNA, 19 nt, Artificial Sequence
  Description of Artificial Sequence: Synthetic oligonucleotide
uuugcguggcuucaaaacu

SEQ ID NO: 586462 - RNA, 19 nt, Artificial Sequence
  Description of Artificial Sequence: Synthetic oligonucleotide
aguuauaucccgcuuugug

SEQ ID NO: 586463 - RNA, 19 nt, Artificial Sequence
  Description of Artificial Sequence: Synthetic oligonucleotide
acuauugauagaaauugag

SEQ ID NO: 586464 - RNA, 19 nt, Artificial Sequence
  Description of Artificial Sequence: Synthetic oligonucleotide
aaacggcuagcagacaugg

SEQ ID NO: 586465 - RNA, 19 nt, Artificial Sequence
  Description of Artificial Sequence: Synthetic oligonucleotide
uguaccccacaaaugauac

SEQ ID NO: 586466 - RNA, 19 nt, Artificial Sequence
  Description of Artificial Sequence: Synthetic oligonucleotide
acugacucguuuugugugc

SEQ ID NO: 586467 - RNA, 19 nt, Artificial Sequence
  Description of Artificial Sequence: Synthetic oligonucleotide
uuugacugacaaauagucu

SEQ ID NO: 586468 - RNA, 19 nt, Artificial Sequence
  Description of Artificial Sequence: Synthetic oligonucleotide
uuauuguaggauccaguca

SEQ ID NO: 586469 - RNA, 19 nt, Artificial Sequence
  Description of Artificial Sequence: Synthetic oligonucleotide
ucuguaauuuccagaugcc

SEQ ID NO: 586470 - RNA, 19 nt, Artificial Sequence
  Description of Artificial Sequence: Synthetic oligonucleotide
aaaucccauagcaugacug

SEQ ID NO: 586471 - RNA, 19 nt, Artificial Sequence
  Description of Artificial Sequence: Synthetic oligonucleotide
acggcuagcagacauggag

SEQ ID NO: 586472 - RNA, 19 nt, Artificial Sequence
  Description of Artificial Sequence: Synthetic oligonucleotide
cuucuagaguuauaucccg

SEQ ID NO: 586473 - RNA, 19 nt, Artificial Sequence
  Description of Artificial Sequence: Synthetic oligonucleotide
uauagcgaccacuauggcu

SEQ ID NO: 586474 - RNA, 19 nt, Artificial Sequence
  Description of Artificial Sequence: Synthetic oligonucleotide
guggcuaucaaauguguug

SEQ ID NO: 586475 - RNA, 19 nt, Artificial Sequence
  Description of Artificial Sequence: Synthetic oligonucleotide
uuuucugggguaaccaccu

SEQ ID NO: 586476 - RNA, 19 nt, Artificial Sequence
  Description of Artificial Sequence: Synthetic oligonucleotide
aaguuuacuucugagguau

SEQ ID NO: 586477 - RNA, 19 nt, Artificial Sequence
  Description of Artificial Sequence: Synthetic oligonucleotide
uugcuaguaauucuccaga

SEQ ID NO: 586478 - RNA, 19 nt, Artificial Sequence
  Description of Artificial Sequence: Synthetic oligonucleotide
ucacauaaccgaauaguuc

SEQ ID NO: 586479 - RNA, 19 nt, Artificial Sequence
  Description of Artificial Sequence: Synthetic oligonucleotide
ucucgugaugcuucuagag

SEQ ID NO: 586480 - RNA, 19 nt, Artificial Sequence
  Description of Artificial Sequence: Synthetic oligonucleotide
uaucauucccuccuccagc

SEQ ID NO: 586481 - RNA, 19 nt, Artificial Sequence
  Description of Artificial Sequence: Synthetic oligonucleotide
gcuagauucaacuaucuca

SEQ ID NO: 586482 - RNA, 19 nt, Artificial Sequence
  Description of Artificial Sequence: Synthetic oligonucleotide
uuccauauuggcaggcuug

SEQ ID NO: 586483 - RNA, 19 nt, Artificial Sequence
  Description of Artificial Sequence: Synthetic oligonucleotide
cugucgaacauucugaaga

SEQ ID NO: 586484 - RNA, 19 nt, Artificial Sequence
  Description of Artificial Sequence: Synthetic oligonucleotide
gauuaauccgcaaaucauc

SEQ ID NO: 586485 - RNA, 19 nt, Artificial Sequence
  Description of Artificial Sequence: Synthetic oligonucleotide
auucaacuaucucacuaag

SEQ ID NO: 586486 - RNA, 19 nt, Artificial Sequence
  Description of Artificial Sequence: Synthetic oligonucleotide
agccaacuguuauuaaaac

SEQ ID NO: 586487 - RNA, 19 nt, Artificial Sequence
  Description of Artificial Sequence: Synthetic oligonucleotide
acauuguauucuccucugc

SEQ ID NO: 586488 - RNA, 19 nt, Artificial Sequence
  Description of Artificial Sequence: Synthetic oligonucleotide
ugucacuuuuauucaguag

SEQ ID NO: 586489 - RNA, 19 nt, Artificial Sequence
  Description of Artificial Sequence: Synthetic oligonucleotide
agaguuauaucccgcuuug

SEQ ID NO: 586490 - RNA, 19 nt, Artificial Sequence
  Description of Artificial Sequence: Synthetic oligonucleotide
ucuuauagguaugaaugcu

SEQ ID NO: 586491 - RNA, 19 nt, Artificial Sequence
  Description of Artificial Sequence: Synthetic oligonucleotide
auguagugacuguaguagg

SEQ ID NO: 586492 - RNA, 19 nt, Artificial Sequence
  Description of Artificial Sequence: Synthetic oligonucleotide
aauuauuguaggauccagu

SEQ ID NO: 586493 - RNA, 19 nt, Artificial Sequence
  Description of Artificial Sequence: Synthetic oligonucleotide
cuuugcguggcuucaaaac

SEQ ID NO: 586494 - RNA, 19 nt, Artificial Sequence
  Description of Artificial Sequence: Synthetic oligonucleotide
gauucaacuaucucacuaa

SEQ ID NO: 586495 - RNA, 19 nt, Artificial Sequence
  Description of Artificial Sequence: Synthetic oligonucleotide
uuuaucauugguagacaau

SEQ ID NO: 586496 - RNA, 19 nt, Artificial Sequence
  Description of Artificial Sequence: Synthetic oligonucleotide
uccgcaaaucaucugcuga

SEQ ID NO: 586497 - RNA, 19 nt, Artificial Sequence
  Description of Artificial Sequence: Synthetic oligonucleotide
aggaggaaugcuacaagcc

SEQ ID NO: 586498 - RNA, 19 nt, Artificial Sequence
  Description of Artificial Sequence: Synthetic oligonucleotide
uggagaacagccugggaug

SEQ ID NO: 586499 - RNA, 19 nt, Artificial Sequence
  Description of Artificial Sequence: Synthetic oligonucleotide
agagauuaauccgcaaauc

SEQ ID NO: 586500 - RNA, 19 nt, Artificial Sequence
  Description of Artificial Sequence: Synthetic oligonucleotide
augauuaaacucuacugua

SEQ ID NO: 586501 - RNA, 19 nt, Artificial Sequence
  Description of Artificial Sequence: Synthetic oligonucleotide
auaucauucccuccuccag

SEQ ID NO: 586502 - RNA, 19 nt, Artificial Sequence
  Description of Artificial Sequence: Synthetic oligonucleotide
augccagagauuaauccgc

SEQ ID NO: 586503 - RNA, 19 nt, Artificial Sequence
  Description of Artificial Sequence: Synthetic oligonucleotide
uaguaggaucucuauaccu

SEQ ID NO: 586504 - RNA, 19 nt, Artificial Sequence
  Description of Artificial Sequence: Synthetic oligonucleotide
uacacaaaucccauagcau

SEQ ID NO: 586505 - RNA, 19 nt, Artificial Sequence
  Description of Artificial Sequence: Synthetic oligonucleotide
aguggaguacaucaaugcu

SEQ ID NO: 586506 - RNA, 19 nt, Artificial Sequence
  Description of Artificial Sequence: Synthetic oligonucleotide
uuguauucuccucugcuau

SEQ ID NO: 586507 - RNA, 19 nt, Artificial Sequence
  Description of Artificial Sequence: Synthetic oligonucleotide
caaaucaucugcugauaag

SEQ ID NO: 586508 - RNA, 19 nt, Artificial Sequence
  Description of Artificial Sequence: Synthetic oligonucleotide
uucuagaguuauaucccgc

SEQ ID NO: 586509 - RNA, 19 nt, Artificial Sequence
  Description of Artificial Sequence: Synthetic oligonucleotide
cuucaaaacugugcgaggc

SEQ ID NO: 586510 - RNA, 19 nt, Artificial Sequence
  Description of Artificial Sequence: Synthetic oligonucleotide
uugcguggcuucaaaacug

SEQ ID NO: 586511 - RNA, 19 nt, Artificial Sequence
  Description of Artificial Sequence: Synthetic oligonucleotide
acuguagaaauuauaucug

SEQ ID NO: 586512 - RNA, 19 nt, Artificial Sequence
  Description of Artificial Sequence: Synthetic oligonucleotide
ucuagucaucauauagcga

SEQ ID NO: 586513 - RNA, 19 nt, Artificial Sequence
  Description of Artificial Sequence: Synthetic oligonucleotide
guaaugaggauacacaaau

SEQ ID NO: 586514 - RNA, 19 nt, Artificial Sequence
  Description of Artificial Sequence: Synthetic oligonucleotide
auuaauccgcaaaucaucu

SEQ ID NO: 586515 - RNA, 19 nt, Artificial Sequence
  Description of Artificial Sequence: Synthetic oligonucleotide
ucauuuucauagagugagc

SEQ ID NO: 586516 - RNA, 19 nt, Artificial Sequence
  Description of Artificial Sequence: Synthetic oligonucleotide
caccauugaauaucauucc

SEQ ID NO: 586517 - RNA, 19 nt, Artificial Sequence
  Description of Artificial Sequence: Synthetic oligonucleotide
aguugcuacagcaaugaug

SEQ ID NO: 586518 - RNA, 19 nt, Artificial Sequence
  Description of Artificial Sequence: Synthetic oligonucleotide
ugggguaaccaccuaauuu

SEQ ID NO: 586519 - RNA, 19 nt, Artificial Sequence
  Description of Artificial Sequence: Synthetic oligonucleotide
gaauaguuccuuuacugcu

SEQ ID NO: 586520 - RNA, 19 nt, Artificial Sequence
  Description of Artificial Sequence: Synthetic oligonucleotide
gaagucuaggcugucaaca

SEQ ID NO: 586521 - RNA, 19 nt, Artificial Sequence
  Description of Artificial Sequence: Synthetic oligonucleotide
agaaugucugucacagagc

SEQ ID NO: 586522 - RNA, 19 nt, Artificial Sequence
  Description of Artificial Sequence: Synthetic oligonucleotide
agccuaauucacuuugucu

SEQ ID NO: 586523 - RNA, 19 nt, Artificial Sequence
  Description of Artificial Sequence: Synthetic oligonucleotide
uagaguuauaucccgcuuu

SEQ ID NO: 586524 - RNA, 19 nt, Artificial Sequence
  Description of Artificial Sequence: Synthetic oligonucleotide
aguaagaaugagcuguauu

SEQ ID NO: 586525 - RNA, 19 nt, Artificial Sequence
  Description of Artificial Sequence: Synthetic oligonucleotide
cuagcagacauggagaaca

SEQ ID NO: 586526 - RNA, 19 nt, Artificial Sequence
  Description of Artificial Sequence: Synthetic oligonucleotide
uguaaucaccucugugagc

SEQ ID NO: 586527 - RNA, 19 nt, Artificial Sequence
  Description of Artificial Sequence: Synthetic oligonucleotide
guuucauaaucacuauuga

SEQ ID NO: 586528 - RNA, 19 nt, Artificial Sequence
  Description of Artificial Sequence: Synthetic oligonucleotide
aggcuuauuguuuucucgu

SEQ ID NO: 586529 - RNA, 19 nt, Artificial Sequence
  Description of Artificial Sequence: Synthetic oligonucleotide
aaaggggcgccacaaugga

SEQ ID NO: 586530 - RNA, 19 nt, Artificial Sequence
  Description of Artificial Sequence: Synthetic oligonucleotide
augucacauaaccgaauag

SEQ ID NO: 586531 - RNA, 19 nt, Artificial Sequence
  Description of Artificial Sequence: Synthetic oligonucleotide
auuguuuucucgugaugcu

SEQ ID NO: 586532 - RNA, 19 nt, Artificial Sequence
  Description of Artificial Sequence: Synthetic oligonucleotide
ugagguauucauguaccug

SEQ ID NO: 586533 - RNA, 19 nt, Artificial Sequence
  Description of Artificial Sequence: Synthetic oligonucleotide
guaguaggaucucuauacc

SEQ ID NO: 586534 - RNA, 19 nt, Artificial Sequence
  Description of Artificial Sequence: Synthetic oligonucleotide
aggggcgccacaauggacc

SEQ ID NO: 586535 - RNA, 19 nt, Artificial Sequence
  Description of Artificial Sequence: Synthetic oligonucleotide
uagucaucauauagcgacc

SEQ ID NO: 586536 - RNA, 19 nt, Artificial Sequence
  Description of Artificial Sequence: Synthetic oligonucleotide
ucgugaugcuucuagaguu

SEQ ID NO: 586537 - RNA, 19 nt, Artificial Sequence
  Description of Artificial Sequence: Synthetic oligonucleotide
guaagaaugagcuguauuu

SEQ ID NO: 586538 - RNA, 19 nt, Artificial Sequence
  Description of Artificial Sequence: Synthetic oligonucleotide
uauagguaugaaugcuaga

SEQ ID NO: 586539 - RNA, 19 nt, Artificial Sequence
  Description of Artificial Sequence: Synthetic oligonucleotide
ugaaugcuagauucaacua

SEQ ID NO: 586540 - RNA, 19 nt, Artificial Sequence
  Description of Artificial Sequence: Synthetic oligonucleotide
cucgcacagacuuugcgug

SEQ ID NO: 586541 - RNA, 19 nt, Artificial Sequence
  Description of Artificial Sequence: Synthetic oligonucleotide
auuuugacugacaaauagu

SEQ ID NO: 586542 - RNA, 19 nt, Artificial Sequence
  Description of Artificial Sequence: Synthetic oligonucleotide
uccaugggccugaacacug

SEQ ID NO: 586543 - RNA, 19 nt, Artificial Sequence
  Description of Artificial Sequence: Synthetic oligonucleotide
auuacagccaacuguuauu

SEQ ID NO: 586544 - RNA, 19 nt, Artificial Sequence
  Description of Artificial Sequence: Synthetic oligonucleotide
guugucgaauggcacacug

SEQ ID NO: 586545 - RNA, 19 nt, Artificial Sequence
  Description of Artificial Sequence: Synthetic oligonucleotide
auuuucauagagugagcaa

SEQ ID NO: 586546 - RNA, 19 nt, Artificial Sequence
  Description of Artificial Sequence: Synthetic oligonucleotide
ugucgaacauucugaagaa

SEQ ID NO: 586547 - RNA, 19 nt, Artificial Sequence
  Description of Artificial Sequence: Synthetic oligonucleotide
uguauucuccucugcuaug

SEQ ID NO: 586548 - RNA, 19 nt, Artificial Sequence
  Description of Artificial Sequence: Synthetic oligonucleotide
uggaccgcucucuuauagg

SEQ ID NO: 586549 - RNA, 19 nt, Artificial Sequence
  Description of Artificial Sequence: Synthetic oligonucleotide
uguaggauccagucaugac

SEQ ID NO: 586550 - RNA, 19 nt, Artificial Sequence
  Description of Artificial Sequence: Synthetic oligonucleotide
uucguucuuccuuuuaaua

SEQ ID NO: 586551 - RNA, 19 nt, Artificial Sequence
  Description of Artificial Sequence: Synthetic oligonucleotide
uguucgcaacauauacccc

SEQ ID NO: 586552 - RNA, 19 nt, Artificial Sequence
  Description of Artificial Sequence: Synthetic oligonucleotide
auaucccgcuuuguguucc

SEQ ID NO: 586553 - RNA, 19 nt, Artificial Sequence
  Description of Artificial Sequence: Synthetic oligonucleotide
auagaggagaugauuucag

SEQ ID NO: 586554 - RNA, 19 nt, Artificial Sequence
  Description of Artificial Sequence: Synthetic oligonucleotide
gcuaucaaauguguugucg

SEQ ID NO: 586555 - RNA, 19 nt, Artificial Sequence
  Description of Artificial Sequence: Synthetic oligonucleotide
uuaaaacuccugucuguaa

SEQ ID NO: 586556 - RNA, 19 nt, Artificial Sequence
  Description of Artificial Sequence: Synthetic oligonucleotide
uagaggagaugauuucaga

SEQ ID NO: 586557 - RNA, 19 nt, Artificial Sequence
  Description of Artificial Sequence: Synthetic oligonucleotide
cagagaggaggaaugcuac

SEQ ID NO: 586558 - RNA, 19 nt, Artificial Sequence
  Description of Artificial Sequence: Synthetic oligonucleotide
acuaagcaggaaguggcuc

SEQ ID NO: 586559 - RNA, 19 nt, Artificial Sequence
  Description of Artificial Sequence: Synthetic oligonucleotide
acuggcacccguaauguag

SEQ ID NO: 586560 - RNA, 19 nt, Artificial Sequence
  Description of Artificial Sequence: Synthetic oligonucleotide
ugcuagauucaacuaucuc

SEQ ID NO: 586561 - RNA, 19 nt, Artificial Sequence
  Description of Artificial Sequence: Synthetic oligonucleotide
acucguuuugugugcuuuc

SEQ ID NO: 586562 - RNA, 19 nt, Artificial Sequence
  Description of Artificial Sequence: Synthetic oligonucleotide
ugcuaguaauucuccagaa

SEQ ID NO: 586563 - RNA, 19 nt, Artificial Sequence
  Description of Artificial Sequence: Synthetic oligonucleotide
guuauaucccgcuuugugu

SEQ ID NO: 586564 - RNA, 19 nt, Artificial Sequence
  Description of Artificial Sequence: Synthetic oligonucleotide
uagguaugaaugcuagauu

SEQ ID NO: 586565 - RNA, 19 nt, Artificial Sequence
  Description of Artificial Sequence: Synthetic oligonucleotide
cauuuucauagagugagca

SEQ ID NO: 586566 - RNA, 19 nt, Artificial Sequence
  Description of Artificial Sequence: Synthetic oligonucleotide
agauuaauccgcaaaucau

SEQ ID NO: 586567 - RNA, 19 nt, Artificial Sequence
  Description of Artificial Sequence: Synthetic oligonucleotide
ucgcuugccgcucgcacag

SEQ ID NO: 586568 - RNA, 19 nt, Artificial Sequence
  Description of Artificial Sequence: Synthetic oligonucleotide
guaggaucucuauaccuuc

SEQ ID NO: 586569 - RNA, 19 nt, Artificial Sequence
  Description of Artificial Sequence: Synthetic oligonucleotide
cuuauagguaugaaugcua

SEQ ID NO: 586570 - RNA, 19 nt, Artificial Sequence
  Description of Artificial Sequence: Synthetic oligonucleotide
accgcucucuuauagguau

SEQ ID NO: 586571 - RNA, 19 nt, Artificial Sequence
  Description of Artificial Sequence: Synthetic oligonucleotide
acccguaauguagugacug

SEQ ID NO: 586572 - RNA, 19 nt, Artificial Sequence
  Description of Artificial Sequence: Synthetic oligonucleotide
uucuuucgcuugccgcucg

SEQ ID NO: 586573 - RNA, 19 nt, Artificial Sequence
  Description of Artificial Sequence: Synthetic oligonucleotide
uguacacgaauguguuaca

SEQ ID NO: 586574 - RNA, 19 nt, Artificial Sequence
  Description of Artificial Sequence: Synthetic oligonucleotide
ugaagucuaggcugucaac

SEQ ID NO: 586575 - RNA, 19 nt, Artificial Sequence
  Description of Artificial Sequence: Synthetic oligonucleotide
aauccgcaaaucaucugcu

SEQ ID NO: 586576 - RNA, 19 nt, Artificial Sequence
  Description of Artificial Sequence: Synthetic oligonucleotide
guauucauguaccugguau

SEQ ID NO: 586577 - RNA, 19 nt, Artificial Sequence
  Description of Artificial Sequence: Synthetic oligonucleotide
ucgcacagacuuugcgugg

SEQ ID NO: 586578 - RNA, 19 nt, Artificial Sequence
  Description of Artificial Sequence: Synthetic oligonucleotide
guacacgaauguguuacag

SEQ ID NO: 586579 - RNA, 19 nt, Artificial Sequence
  Description of Artificial Sequence: Synthetic oligonucleotide
agaccuguugcugggaucu

SEQ ID NO: 586580 - RNA, 19 nt, Artificial Sequence
  Description of Artificial Sequence: Synthetic oligonucleotide
ucagacccauuccaacaac

SEQ ID NO: 586581 - RNA, 19 nt, Artificial Sequence
  Description of Artificial Sequence: Synthetic oligonucleotide
ugccagagauuaauccgca

SEQ ID NO: 586582 - RNA, 19 nt, Artificial Sequence
  Description of Artificial Sequence: Synthetic oligonucleotide
cccauagcaugacugaagg

SEQ ID NO: 586583 - RNA, 19 nt, Artificial Sequence
  Description of Artificial Sequence: Synthetic oligonucleotide
uucucgugaugcuucuaga

SEQ ID NO: 586584 - RNA, 19 nt, Artificial Sequence
  Description of Artificial Sequence: Synthetic oligonucleotide
ccgaauaguuccuuuacug

SEQ ID NO: 586585 - RNA, 19 nt, Artificial Sequence
  Description of Artificial Sequence: Synthetic oligonucleotide
uauguacagauuguuugua

SEQ ID NO: 586586 - RNA, 19 nt, Artificial Sequence
  Description of Artificial Sequence: Synthetic oligonucleotide
agcuguugggauggaauuc

SEQ ID NO: 586587 - RNA, 19 nt, Artificial Sequence
  Description of Artificial Sequence: Synthetic oligonucleotide
gacccugccgggcuccucg

SEQ ID NO: 586588 - RNA, 19 nt, Artificial Sequence
  Description of Artificial Sequence: Synthetic oligonucleotide
ugcguggcuucaaaacugu

SEQ ID NO: 586589 - RNA, 19 nt, Artificial Sequence
  Description of Artificial Sequence: Synthetic oligonucleotide
gcuucuagaguuauauccc

SEQ ID NO: 586590 - RNA, 19 nt, Artificial Sequence
  Description of Artificial Sequence: Synthetic oligonucleotide
gauaaguagguuucauaau

SEQ ID NO: 586591 - RNA, 19 nt, Artificial Sequence
  Description of Artificial Sequence: Synthetic oligonucleotide
uucauagagugagcaaagu

SEQ ID NO: 586592 - RNA, 19 nt, Artificial Sequence
  Description of Artificial Sequence: Synthetic oligonucleotide
ggguguaccccacaaauga

SEQ ID NO: 586593 - RNA, 19 nt, Artificial Sequence
  Description of Artificial Sequence: Synthetic oligonucleotide
uauucuccguggacuggcc

SEQ ID NO: 586594 - RNA, 19 nt, Artificial Sequence
  Description of Artificial Sequence: Synthetic oligonucleotide
ugauagaaauugaguugau

SEQ ID NO: 586595 - RNA, 19 nt, Artificial Sequence
  Description of Artificial Sequence: Synthetic oligonucleotide
cauggcaaggagugauuac

SEQ ID NO: 586596 - RNA, 19 nt, Artificial Sequence
  Description of Artificial Sequence: Synthetic oligonucleotide
uggugcaagaagucauuaa

SEQ ID NO: 586597 - RNA, 19 nt, Artificial Sequence
  Description of Artificial Sequence: Synthetic oligonucleotide
cugucagacccauuccaac

SEQ ID NO: 586598 - RNA, 19 nt, Artificial Sequence
  Description of Artificial Sequence: Synthetic oligonucleotide
agcagacauggagaacagc

SEQ ID NO: 586599 - RNA, 19 nt, Artificial Sequence
  Description of Artificial Sequence: Synthetic oligonucleotide
cacuauugauagaaauuga

SEQ ID NO: 586600 - RNA, 19 nt, Artificial Sequence
  Description of Artificial Sequence: Synthetic oligonucleotide
ugcuaggaaugccagccua

SEQ ID NO: 586601 - RNA, 19 nt, Artificial Sequence
  Description of Artificial Sequence: Synthetic oligonucleotide
uccugucgaacauucugaa

SEQ ID NO: 586602 - RNA, 19 nt, Artificial Sequence
  Description of Artificial Sequence: Synthetic oligonucleotide
uuucagugccagacauggc

SEQ ID NO: 586603 - RNA, 19 nt, Artificial Sequence
  Description of Artificial Sequence: Synthetic oligonucleotide
caccuaauuuuguugaucu

SEQ ID NO: 586604 - RNA, 19 nt, Artificial Sequence
  Description of Artificial Sequence: Synthetic oligonucleotide
cauuagauccaugggccug

SEQ ID NO: 586605 - RNA, 19 nt, Artificial Sequence
  Description of Artificial Sequence: Synthetic oligonucleotide
auuagauccaugggccuga

SEQ ID NO: 586606 - RNA, 19 nt, Artificial Sequence
  Description of Artificial Sequence: Synthetic oligonucleotide
aguaggaucucuauaccuu

SEQ ID NO: 586607 - RNA, 19 nt, Artificial Sequence
  Description of Artificial Sequence: Synthetic oligonucleotide
gugcagcaaaugaugaccc

SEQ ID NO: 586608 - RNA, 19 nt, Artificial Sequence
  Description of Artificial Sequence: Synthetic oligonucleotide
gaugcacccacacagcuuu

SEQ ID NO: 586609 - RNA, 19 nt, Artificial Sequence
  Description of Artificial Sequence: Synthetic oligonucleotide
guuuacuucugagguauuc

SEQ ID NO: 586610 - RNA, 19 nt, Artificial Sequence
  Description of Artificial Sequence: Synthetic oligonucleotide
gcaaauauucuccguggac

SEQ ID NO: 586611 - RNA, 19 nt, Artificial Sequence
  Description of Artificial Sequence: Synthetic oligonucleotide
uguuccugucgaacauucu

SEQ ID NO: 586612 - RNA, 19 nt, Artificial Sequence
  Description of Artificial Sequence: Synthetic oligonucleotide
gccaacuguuauuaaaaca

SEQ ID NO: 586613 - RNA, 19 nt, Artificial Sequence
  Description of Artificial Sequence: Synthetic oligonucleotide
guaauguagugacuguagu

SEQ ID NO: 586614 - RNA, 19 nt, Artificial Sequence
  Description of Artificial Sequence: Synthetic oligonucleotide
aucauauagcgaccacuau

SEQ ID NO: 586615 - RNA, 19 nt, Artificial Sequence
  Description of Artificial Sequence: Synthetic oligonucleotide
gcacccguaauguagugac

SEQ ID NO: 586616 - RNA, 19 nt, Artificial Sequence
  Description of Artificial Sequence: Synthetic oligonucleotide
acuaucucacuaagcagga

SEQ ID NO: 586617 - RNA, 19 nt, Artificial Sequence
  Description of Artificial Sequence: Synthetic oligonucleotide
guaugaaugcuagauucaa

SEQ ID NO: 586618 - RNA, 19 nt, Artificial Sequence
  Description of Artificial Sequence: Synthetic oligonucleotide
caugucacauaaccgaaua

SEQ ID NO: 586619 - RNA, 19 nt, Artificial Sequence
  Description of Artificial Sequence: Synthetic oligonucleotide
ccucaugucacauaaccga

SEQ ID NO: 586620 - RNA, 19 nt, Artificial Sequence
  Description of Artificial Sequence: Synthetic oligonucleotide
cguaauguagugacuguag

SEQ ID NO: 586621 - RNA, 19 nt, Artificial Sequence
  Description of Artificial Sequence: Synthetic oligonucleotide
ggaaugccagccuaauuca

SEQ ID NO: 586622 - RNA, 19 nt, Artificial Sequence
  Description of Artificial Sequence: Synthetic oligonucleotide
gcguucacuguguuugacg

SEQ ID NO: 586623 - RNA, 19 nt, Artificial Sequence
  Description of Artificial Sequence: Synthetic oligonucleotide
cucggggucuccgcgaccg

SEQ ID NO: 586624 - RNA, 19 nt, Artificial Sequence
  Description of Artificial Sequence: Synthetic oligonucleotide
uggacuggccuccaccauu

SEQ ID NO: 586625 - RNA, 19 nt, Artificial Sequence
  Description of Artificial Sequence: Synthetic oligonucleotide
gccagccuaauucacuuug

SEQ ID NO: 586626 - RNA, 19 nt, Artificial Sequence
  Description of Artificial Sequence: Synthetic oligonucleotide
ggcuuauuguuuucucgug

SEQ ID NO: 586627 - RNA, 19 nt, Artificial Sequence
  Description of Artificial Sequence: Synthetic oligonucleotide
cagacccauuccaacaaca

SEQ ID NO: 586628 - RNA, 19 nt, Artificial Sequence
  Description of Artificial Sequence: Synthetic oligonucleotide
cuguaauuuccagaugcca

SEQ ID NO: 586629 - RNA, 19 nt, Artificial Sequence
  Description of Artificial Sequence: Synthetic oligonucleotide
cagccuaauucacuuuguc

SEQ ID NO: 586630 - RNA, 19 nt, Artificial Sequence
  Description of Artificial Sequence: Synthetic oligonucleotide
uaggaaugccagccuaauu

SEQ ID NO: 586631 - RNA, 19 nt, Artificial Sequence
  Description of Artificial Sequence: Synthetic oligonucleotide
cauuguauucuccucugcu

SEQ ID NO: 586632 - RNA, 19 nt, Artificial Sequence
  Description of Artificial Sequence: Synthetic oligonucleotide
ucuuucgcuugccgcucgc

SEQ ID NO: 586633 - RNA, 19 nt, Artificial Sequence
  Description of Artificial Sequence: Synthetic oligonucleotide
aauggaccgcucucuuaua

SEQ ID NO: 586634 - RNA, 19 nt, Artificial Sequence
  Description of Artificial Sequence: Synthetic oligonucleotide
agauuguuuguaguugcua

SEQ ID NO: 586635 - RNA, 19 nt, Artificial Sequence
  Description of Artificial Sequence: Synthetic oligonucleotide
guguugucgaauggcacac

SEQ ID NO: 586636 - RNA, 19 nt, Artificial Sequence
  Description of Artificial Sequence: Synthetic oligonucleotide
cacugucagacccauucca

SEQ ID NO: 586637 - RNA, 19 nt, Artificial Sequence
  Description of Artificial Sequence: Synthetic oligonucleotide
uuugugugcuuucguucuu

SEQ ID NO: 586638 - RNA, 19 nt, Artificial Sequence
  Description of Artificial Sequence: Synthetic oligonucleotide
aggauacacaaaucccaua

SEQ ID NO: 586639 - RNA, 19 nt, Artificial Sequence
  Description of Artificial Sequence: Synthetic oligonucleotide
uuucuuucgcuugccgcuc

SEQ ID NO: 586640 - RNA, 19 nt, Artificial Sequence
  Description of Artificial Sequence: Synthetic oligonucleotide
accaccuaauuuuguugau

SEQ ID NO: 586641 - RNA, 19 nt, Artificial Sequence
  Description of Artificial Sequence: Synthetic oligonucleotide
cuaaacggcuagcagacau

SEQ ID NO: 586642 - RNA, 19 nt, Artificial Sequence
  Description of Artificial Sequence: Synthetic oligonucleotide
ccuuuuaauaugccaccac

SEQ ID NO: 586643 - RNA, 19 nt, Artificial Sequence
  Description of Artificial Sequence: Synthetic oligonucleotide
acaauggaccgcucucuua

SEQ ID NO: 586644 - RNA, 19 nt, Artificial Sequence
  Description of Artificial Sequence: Synthetic oligonucleotide
gucuugaaauauguacaga

SEQ ID NO: 586645 - RNA, 19 nt, Artificial Sequence
  Description of Artificial Sequence: Synthetic oligonucleotide
acauaaccgaauaguuccu

SEQ ID NO: 586646 - RNA, 19 nt, Artificial Sequence
  Description of Artificial Sequence: Synthetic oligonucleotide
cagagauuaauccgcaaau

SEQ ID NO: 586647 - RNA, 19 nt, Artificial Sequence
  Description of Artificial Sequence: Synthetic oligonucleotide
guugaagucuaggcuguca

SEQ ID NO: 586648 - RNA, 19 nt, Artificial Sequence
  Description of Artificial Sequence: Synthetic oligonucleotide
augcuagauucaacuaucu

SEQ ID NO: 586649 - RNA, 19 nt, Artificial Sequence
  Description of Artificial Sequence: Synthetic oligonucleotide
gccuaauucacuuugucuu

SEQ ID NO: 586650 - RNA, 19 nt, Artificial Sequence
  Description of Artificial Sequence: Synthetic oligonucleotide
gggguaaccaccuaauuuu

SEQ ID NO: 586651 - RNA, 19 nt, Artificial Sequence
  Description of Artificial Sequence: Synthetic oligonucleotide
cugcuguacacgaaugugu

SEQ ID NO: 586652 - RNA, 19 nt, Artificial Sequence
  Description of Artificial Sequence: Synthetic oligonucleotide
guguuccugucgaacauuc

SEQ ID NO: 586653 - RNA, 19 nt, Artificial Sequence
  Description of Artificial Sequence: Synthetic oligonucleotide
gcuaugagacuggauuuug

SEQ ID NO: 586654 - RNA, 19 nt, Artificial Sequence
  Description of Artificial Sequence: Synthetic oligonucleotide
accaccgagaccaggugga

SEQ ID NO: 586655 - RNA, 19 nt, Artificial Sequence
  Description of Artificial Sequence: Synthetic oligonucleotide
ggagaacagccugggaugc

SEQ ID NO: 586656 - RNA, 19 nt, Artificial Sequence
  Description of Artificial Sequence: Synthetic oligonucleotide
uccucggggucuccgcgac

SEQ ID NO: 586657 - RNA, 19 nt, Artificial Sequence
  Description of Artificial Sequence: Synthetic oligonucleotide
uggcacccguaauguagug

SEQ ID NO: 586658 - RNA, 19 nt, Artificial Sequence
  Description of Artificial Sequence: Synthetic oligonucleotide
cucgugaugcuucuagagu

SEQ ID NO: 586659 - RNA, 19 nt, Artificial Sequence
  Description of Artificial Sequence: Synthetic oligonucleotide
gaggauacacaaaucccau

SEQ ID NO: 586660 - RNA, 19 nt, Artificial Sequence
  Description of Artificial Sequence: Synthetic oligonucleotide
uguugucgaauggcacacu

SEQ ID NO: 586661 - RNA, 19 nt, Artificial Sequence
  Description of Artificial Sequence: Synthetic oligonucleotide
gcgaccggggcucagcccc

SEQ ID NO: 586662 - RNA, 19 nt, Artificial Sequence
  Description of Artificial Sequence: Synthetic oligonucleotide
gcaagauggugcaagaagu

SEQ ID NO: 586663 - RNA, 19 nt, Artificial Sequence
  Description of Artificial Sequence: Synthetic oligonucleotide
caauggaccgcucucuuau

SEQ ID NO: 586664 - RNA, 19 nt, Artificial Sequence
  Description of Artificial Sequence: Synthetic oligonucleotide
ccugucgaacauucugaag

SEQ ID NO: 586665 - RNA, 19 nt, Artificial Sequence
  Description of Artificial Sequence: Synthetic oligonucleotide
caaaacugugcgaggcuua

SEQ ID NO: 586666 - RNA, 19 nt, Artificial Sequence
  Description of Artificial Sequence: Synthetic oligonucleotide
gacugaaggcguucacugu

SEQ ID NO: 586667 - RNA, 19 nt, Artificial Sequence
  Description of Artificial Sequence: Synthetic oligonucleotide
acaguaagaaugagcugua

SEQ ID NO: 586668 - RNA, 19 nt, Artificial Sequence
  Description of Artificial Sequence: Synthetic oligonucleotide
cuaugagacuggauuuugu

SEQ ID NO: 586669 - RNA, 19 nt, Artificial Sequence
  Description of Artificial Sequence: Synthetic oligonucleotide
gugacuguaguaggaucuc

SEQ ID NO: 586670 - RNA, 19 nt, Artificial Sequence
  Description of Artificial Sequence: Synthetic oligonucleotide
auggugcaagaagucauua

SEQ ID NO: 586671 - RNA, 19 nt, Artificial Sequence
  Description of Artificial Sequence: Synthetic oligonucleotide
ggguaaccaccuaauuuug

SEQ ID NO: 586672 - RNA, 19 nt, Artificial Sequence
  Description of Artificial Sequence: Synthetic oligonucleotide
uuucugggguaaccaccua

SEQ ID NO: 586673 - RNA, 19 nt, Artificial Sequence
  Description of Artificial Sequence: Synthetic oligonucleotide
gucgaauggcacacuguca

SEQ ID NO: 586674 - RNA, 19 nt, Artificial Sequence
  Description of Artificial Sequence: Synthetic oligonucleotide
ccagagauuaauccgcaaa

SEQ ID NO: 586675 - RNA, 19 nt, Artificial Sequence
  Description of Artificial Sequence: Synthetic oligonucleotide
caucugcugauaaguaggu

SEQ ID NO: 586676 - RNA, 19 nt, Artificial Sequence
  Description of Artificial Sequence: Synthetic oligonucleotide
acucuacuguagaaauuau

SEQ ID NO: 586677 - RNA, 19 nt, Artificial Sequence
  Description of Artificial Sequence: Synthetic oligonucleotide
uaucccgcuuuguguuccu

SEQ ID NO: 586678 - RNA, 19 nt, Artificial Sequence
  Description of Artificial Sequence: Synthetic oligonucleotide
gacccauuccaacaacauu

SEQ ID NO: 586679 - RNA, 19 nt, Artificial Sequence
  Description of Artificial Sequence: Synthetic oligonucleotide
guguaccccacaaaugaua

SEQ ID NO: 586680 - RNA, 19 nt, Artificial Sequence
  Description of Artificial Sequence: Synthetic oligonucleotide
aacggcuagcagacaugga

SEQ ID NO: 586681 - RNA, 19 nt, Artificial Sequence
  Description of Artificial Sequence: Synthetic oligonucleotide
gccacaauggaccgcucuc

SEQ ID NO: 586682 - RNA, 19 nt, Artificial Sequence
  Description of Artificial Sequence: Synthetic oligonucleotide
aggcguucacuguguuuga

SEQ ID NO: 586683 - RNA, 19 nt, Artificial Sequence
  Description of Artificial Sequence: Synthetic oligonucleotide
ccauugaauaucauucccu

SEQ ID NO: 586684 - RNA, 19 nt, Artificial Sequence
  Description of Artificial Sequence: Synthetic oligonucleotide
cugaacacuggcacccgua

SEQ ID NO: 586685 - RNA, 19 nt, Artificial Sequence
  Description of Artificial Sequence: Synthetic oligonucleotide
ggaccgcucucuuauaggu

SEQ ID NO: 586686 - RNA, 19 nt, Artificial Sequence
  Description of Artificial Sequence: Synthetic oligonucleotide
cauuaccacugacccaaaa

SEQ ID NO: 586687 - RNA, 19 nt, Artificial Sequence
  Description of Artificial Sequence: Synthetic oligonucleotide
cacuguguuugacgucauc

SEQ ID NO: 586688 - RNA, 19 nt, Artificial Sequence
  Description of Artificial Sequence: Synthetic oligonucleotide
gggguguaccccacaaaug

SEQ ID NO: 586689 - RNA, 19 nt, Artificial Sequence
  Description of Artificial Sequence: Synthetic oligonucleotide
ugccagccuaauucacuuu

SEQ ID NO: 586690 - RNA, 19 nt, Artificial Sequence
  Description of Artificial Sequence: Synthetic oligonucleotide
guagugacuguaguaggau

SEQ ID NO: 586691 - RNA, 19 nt, Artificial Sequence
  Description of Artificial Sequence: Synthetic oligonucleotide
aggcaagauggugcaagaa

SEQ ID NO: 586692 - RNA, 19 nt, Artificial Sequence
  Description of Artificial Sequence: Synthetic oligonucleotide
ccgcuuuguguuccugucg

SEQ ID NO: 586693 - RNA, 19 nt, Artificial Sequence
  Description of Artificial Sequence: Synthetic oligonucleotide
ugacucguuuugugugcuu

SEQ ID NO: 586694 - RNA, 19 nt, Artificial Sequence
  Description of Artificial Sequence: Synthetic oligonucleotide
ggcuaucaaauguguuguc

SEQ ID NO: 586695 - RNA, 19 nt, Artificial Sequence
  Description of Artificial Sequence: Synthetic oligonucleotide
uuagauccaugggccugaa

SEQ ID NO: 586696 - RNA, 19 nt, Artificial Sequence
  Description of Artificial Sequence: Synthetic oligonucleotide
uccguggacuggccuccac

SEQ ID NO: 586697 - RNA, 19 nt, Artificial Sequence
  Description of Artificial Sequence: Synthetic oligonucleotide
gauggugcaagaagucauu

SEQ ID NO: 586698 - RNA, 19 nt, Artificial Sequence
  Description of Artificial Sequence: Synthetic oligonucleotide
caaaucccauagcaugacu

SEQ ID NO: 586699 - RNA, 19 nt, Artificial Sequence
  Description of Artificial Sequence: Synthetic oligonucleotide
uccgcgaccggggcucagc

SEQ ID NO: 586700 - RNA, 19 nt, Artificial Sequence
  Description of Artificial Sequence: Synthetic oligonucleotide
aucugcugauaaguagguu

SEQ ID NO: 586701 - RNA, 19 nt, Artificial Sequence
  Description of Artificial Sequence: Synthetic oligonucleotide
gaaggcguucacuguguuu

SEQ ID NO: 586702 - RNA, 19 nt, Artificial Sequence
  Description of Artificial Sequence: Synthetic oligonucleotide
cuggcacccguaauguagu

SEQ ID NO: 586703 - RNA, 19 nt, Artificial Sequence
  Description of Artificial Sequence: Synthetic oligonucleotide
ccaccuaauuuuguugauc

SEQ ID NO: 586704 - RNA, 19 nt, Artificial Sequence
  Description of Artificial Sequence: Synthetic oligonucleotide
cuagaguuauaucccgcuu

SEQ ID NO: 586705 - RNA, 19 nt, Artificial Sequence
  Description of Artificial Sequence: Synthetic oligonucleotide
gaguuauaucccgcuuugu

SEQ ID NO: 586706 - RNA, 19 nt, Artificial Sequence
  Description of Artificial Sequence: Synthetic oligonucleotide
gcuugccgcucgcacagac

SEQ ID NO: 586707 - RNA, 19 nt, Artificial Sequence
  Description of Artificial Sequence: Synthetic oligonucleotide
acacuggaaaggggcgcca

SEQ ID NO: 586708 - RNA, 19 nt, Artificial Sequence
  Description of Artificial Sequence: Synthetic oligonucleotide
ggcuugauauccacaauau

SEQ ID NO: 586709 - RNA, 19 nt, Artificial Sequence
  Description of Artificial Sequence: Synthetic oligonucleotide
cuaggcugucaacacuuau

SEQ ID NO: 586710 - RNA, 19 nt, Artificial Sequence
  Description of Artificial Sequence: Synthetic oligonucleotide
gaccgcucucuuauaggua

SEQ ID NO: 586711 - RNA, 19 nt, Artificial Sequence
  Description of Artificial Sequence: Synthetic oligonucleotide
cagacauggcaaggaguga

SEQ ID NO: 586712 - RNA, 19 nt, Artificial Sequence
  Description of Artificial Sequence: Synthetic oligonucleotide
ugccgcucgcacagacuuu

SEQ ID NO: 586713 - RNA, 19 nt, Artificial Sequence
  Description of Artificial Sequence: Synthetic oligonucleotide
gcaugacugaaggcguuca

SEQ ID NO: 586714 - RNA, 19 nt, Artificial Sequence
  Description of Artificial Sequence: Synthetic oligonucleotide
ccuuuacugcugcuguaca

SEQ ID NO: 586715 - RNA, 19 nt, Artificial Sequence
  Description of Artificial Sequence: Synthetic oligonucleotide
ggcacccguaauguaguga

SEQ ID NO: 586716 - RNA, 19 nt, Artificial Sequence
  Description of Artificial Sequence: Synthetic oligonucleotide
gcuaggaaugccagccuaa

SEQ ID NO: 586717 - RNA, 19 nt, Artificial Sequence
  Description of Artificial Sequence: Synthetic oligonucleotide
aguuuacuucugagguauu

SEQ ID NO: 586718 - RNA, 19 nt, Artificial Sequence
  Description of Artificial Sequence: Synthetic oligonucleotide
gguaaccaccuaauuuugu

SEQ ID NO: 586719 - RNA, 19 nt, Artificial Sequence
  Description of Artificial Sequence: Synthetic oligonucleotide
aucccgcuuuguguuccug

SEQ ID NO: 586720 - RNA, 19 nt, Artificial Sequence
  Description of Artificial Sequence: Synthetic oligonucleotide
guaugggcauuggcaaaua

SEQ ID NO: 586721 - RNA, 19 nt, Artificial Sequence
  Description of Artificial Sequence: Synthetic oligonucleotide
cuugccgcucgcacagacu

SEQ ID NO: 586722 - RNA, 19 nt, Artificial Sequence
  Description of Artificial Sequence: Synthetic oligonucleotide
ggcguucacuguguuugac

SEQ ID NO: 586723 - RNA, 19 nt, Artificial Sequence
  Description of Artificial Sequence: Synthetic oligonucleotide
ccgagaccagguggaaagg

SEQ ID NO: 586724 - RNA, 19 nt, Artificial Sequence
  Description of Artificial Sequence: Synthetic oligonucleotide
gccugaacacuggcacccg

SEQ ID NO: 586725 - RNA, 19 nt, Artificial Sequence
  Description of Artificial Sequence: Synthetic oligonucleotide
cauaaccgaauaguuccuu

SEQ ID NO: 586726 - RNA, 19 nt, Artificial Sequence
  Description of Artificial Sequence: Synthetic oligonucleotide
gccagagauuaauccgcaa

SEQ ID NO: 586727 - RNA, 19 nt, Artificial Sequence
  Description of Artificial Sequence: Synthetic oligonucleotide
cugacucguuuugugugcu

SEQ ID NO: 586728 - RNA, 19 nt, Artificial Sequence
  Description of Artificial Sequence: Synthetic oligonucleotide
ggcgccacaauggaccgcu

SEQ ID NO: 586729 - RNA, 19 nt, Artificial Sequence
  Description of Artificial Sequence: Synthetic oligonucleotide
caucaucuacugcuccuuu

SEQ ID NO: 586730 - RNA, 19 nt, Artificial Sequence
  Description of Artificial Sequence: Synthetic oligonucleotide
cacuggcacccguaaugua

SEQ ID NO: 586731 - RNA, 19 nt, Artificial Sequence
  Description of Artificial Sequence: Synthetic oligonucleotide
ggcaaggguaagagaugga

SEQ ID NO: 586732 - RNA, 19 nt, Artificial Sequence
  Description of Artificial Sequence: Synthetic oligonucleotide
cacccguaauguagugacu

SEQ ID NO: 586733 - RNA, 19 nt, Artificial Sequence
  Description of Artificial Sequence: Synthetic oligonucleotide
ccacuauggcugaauuuua

SEQ ID NO: 586734 - RNA, 19 nt, Artificial Sequence
  Description of Artificial Sequence: Synthetic oligonucleotide
ccgcucucuuauagguaug

SEQ ID NO: 586735 - RNA, 19 nt, Artificial Sequence
  Description of Artificial Sequence: Synthetic oligonucleotide
ucuccgcgaccggggcuca

SEQ ID NO: 586736 - RNA, 19 nt, Artificial Sequence
  Description of Artificial Sequence: Synthetic oligonucleotide
cugggguaaccaccuaauu

SEQ ID NO: 586737 - RNA, 19 nt, Artificial Sequence
  Description of Artificial Sequence: Synthetic oligonucleotide
caccgagaccagguggaaa

SEQ ID NO: 586738 - RNA, 19 nt, Artificial Sequence
  Description of Artificial Sequence: Synthetic oligonucleotide
ccauuagauccaugggccu

SEQ ID NO: 586739 - RNA, 19 nt, Artificial Sequence
  Description of Artificial Sequence: Synthetic oligonucleotide
gguguaccccacaaaugau

SEQ ID NO: 586740 - RNA, 19 nt, Artificial Sequence
  Description of Artificial Sequence: Synthetic oligonucleotide
ccguaauguagugacugua

SEQ ID NO: 586741 - RNA, 19 nt, Artificial Sequence
  Description of Artificial Sequence: Synthetic oligonucleotide
ccgcaaaucaucugcugau

SEQ ID NO: 586742 - RNA, 19 nt, Artificial Sequence
  Description of Artificial Sequence: Synthetic oligonucleotide
ccccauuaccacugaccca

SEQ ID NO: 586743 - RNA, 19 nt, Artificial Sequence
  Description of Artificial Sequence: Synthetic oligonucleotide
ccgcgaccggggcucagcc

SEQ ID NO: 586744 - RNA, 19 nt, Artificial Sequence
  Description of Artificial Sequence: Synthetic oligonucleotide
gcgaggcuuauuguuuucu

SEQ ID NO: 586745 - RNA, 19 nt, Artificial Sequence
  Description of Artificial Sequence: Synthetic oligonucleotide
ccagccuaauucacuuugu

SEQ ID NO: 586746 - RNA, 19 nt, Artificial Sequence
  Description of Artificial Sequence: Synthetic oligonucleotide
ccgcucgcacagacuuugc

SEQ ID NO: 586747 - RNA, 19 nt, Artificial Sequence
  Description of Artificial Sequence: Synthetic oligonucleotide
cccguaauguagugacugu

SEQ ID NO: 586748 - RNA, 19 nt, Artificial Sequence
  Description of Artificial Sequence: Synthetic oligonucleotide
ccuaaacggcuagcagaca

SEQ ID NO: 586749 - RNA, 19 nt, Artificial Sequence
  Description of Artificial Sequence: Synthetic oligonucleotide
ccucggggucuccgcgacc

SEQ ID NO: 586750 - RNA, 19 nt, Artificial Sequence
  Description of Artificial Sequence: Synthetic oligonucleotide
ggaugcacccacacagcuu

SEQ ID NO: 586751 - RNA, 19 nt, Artificial Sequence
  Description of Artificial Sequence: Synthetic oligonucleotide
gggcgccacaauggaccgc

SEQ ID NO: 586752 - RNA, 19 nt, Artificial Sequence
  Description of Artificial Sequence: Synthetic oligonucleotide
cuccgcgaccggggcucag

SEQ ID NO: 586753 - RNA, 19 nt, Artificial Sequence
  Description of Artificial Sequence: Synthetic oligonucleotide
cgcgaccggggcucagccc

SEQ ID NO: 586754 - RNA, 19 nt, Artificial Sequence
  Description of Artificial Sequence: Synthetic oligonucleotide
ccugaacacuggcacccgu

SEQ ID NO: 586755 - RNA, 19 nt, Artificial Sequence
  Description of Artificial Sequence: Synthetic oligonucleotide
cuccguggacuggccucca

SEQ ID NO: 586756 - RNA, 19 nt, Artificial Sequence
  Description of Artificial Sequence: Synthetic oligonucleotide
cgcaaaucaucugcugaua

SEQ ID NO: 586757 - RNA, 19 nt, Artificial Sequence
  Description of Artificial Sequence: Synthetic oligonucleotide
ccaccgagaccagguggaa

SEQ ID NO: 586758 - RNA, 19 nt, Artificial Sequence
  Description of Artificial Sequence: Synthetic oligonucleotide
cgaauguguuacagcuguu

SEQ ID NO: 586759 - RNA, 19 nt, Artificial Sequence
  Description of Artificial Sequence: Synthetic oligonucleotide
gcgccacaauggaccgcuc

SEQ ID NO: 586760 - RNA, 19 nt, Artificial Sequence
  Description of Artificial Sequence: Synthetic oligonucleotide
cgaccggggcucagccccu

SEQ ID NO: 586761 - RNA, 19 nt, Artificial Sequence
  Description of Artificial Sequence: Synthetic oligonucleotide
cgcuugccgcucgcacaga

SEQ ID NO: 586762 - RNA, 19 nt, Artificial Sequence
  Description of Artificial Sequence: Synthetic oligonucleotide
aaauaaucgcagcaaaugc

SEQ ID NO: 586763 - RNA, 19 nt, Artificial Sequence
  Description of Artificial Sequence: Synthetic oligonucleotide
ugcauuaauagcaaaaugc

SEQ ID NO: 586764 - RNA, 19 nt, Artificial Sequence
  Description of Artificial Sequence: Synthetic oligonucleotide
aauuaauuaaauagacugc

SEQ ID NO: 586765 - RNA, 19 nt, Artificial Sequence
  Description of Artificial Sequence: Synthetic oligonucleotide
aaauaaucaaacaaugcgg

SEQ ID NO: 586766 - RNA, 19 nt, Artificial Sequence
  Description of Artificial Sequence: Synthetic oligonucleotide
uuuaauacggcgcugacga

SEQ ID NO: 586767 - RNA, 19 nt, Artificial Sequence
  Description of Artificial Sequence: Synthetic oligonucleotide
accagaacaauguuuaacc

SEQ ID NO: 586768 - RNA, 19 nt, Artificial Sequence
  Description of Artificial Sequence: Synthetic oligonucleotide
aguuauucguaauccaucc

SEQ ID NO: 586769 - RNA, 19 nt, Artificial Sequence
  Description of Artificial Sequence: Synthetic oligonucleotide
acaauguuuaaccuaguac

SEQ ID NO: 586770 - RNA, 19 nt, Artificial Sequence
  Description of Artificial Sequence: Synthetic oligonucleotide
uaguacacguucaugaacg

SEQ ID NO: 586771 - RNA, 19 nt, Artificial Sequence
  Description of Artificial Sequence: Synthetic oligonucleotide
aauacguucaggcacccag

SEQ ID NO: 586772 - RNA, 19 nt, Artificial Sequence
  Description of Artificial Sequence: Synthetic oligonucleotide
uaauguuucggagaaaggg

SEQ ID NO: 586773 - RNA, 19 nt, Artificial Sequence
  Description of Artificial Sequence: Synthetic oligonucleotide
cucuaaacuacuuucagag

SEQ ID NO: 586774 - RNA, 19 nt, Artificial Sequence
  Description of Artificial Sequence: Synthetic oligonucleotide
uggaccacaauacagagcu

SEQ ID NO: 586775 - RNA, 19 nt, Artificial Sequence
  Description of Artificial Sequence: Synthetic oligonucleotide
gaaaaggcugcauuaauag

SEQ ID NO: 586776 - RNA, 19 nt, Artificial Sequence
  Description of Artificial Sequence: Synthetic oligonucleotide
cuugcuaacaaccaacugc

SEQ ID NO: 586777 - RNA, 19 nt, Artificial Sequence
  Description of Artificial Sequence: Synthetic oligonucleotide
uuuacuuuaauacggcgcu

SEQ ID NO: 586778 - RNA, 19 nt, Artificial Sequence
  Description of Artificial Sequence: Synthetic oligonucleotide
gauauaguagcagucaucc

SEQ ID NO: 586779 - RNA, 19 nt, Artificial Sequence
  Description of Artificial Sequence: Synthetic oligonucleotide
gaacuauaacauuacacag

SEQ ID NO: 586780 - RNA, 19 nt, Artificial Sequence
  Description of Artificial Sequence: Synthetic oligonucleotide
uuuuauauugagcuuguuc

SEQ ID NO: 586781 - RNA, 19 nt, Artificial Sequence
  Description of Artificial Sequence: Synthetic oligonucleotide
uguucauauggguagagca

SEQ ID NO: 586782 - RNA, 19 nt, Artificial Sequence
  Description of Artificial Sequence: Synthetic oligonucleotide
ucuguugaacagaaaacag

SEQ ID NO: 586783 - RNA, 19 nt, Artificial Sequence
  Description of Artificial Sequence: Synthetic oligonucleotide
aauguuuaaccuaguacac

SEQ ID NO: 586784 - RNA, 19 nt, Artificial Sequence
  Description of Artificial Sequence: Synthetic oligonucleotide
ucuuuaauaaauugcccug

SEQ ID NO: 586785 - RNA, 19 nt, Artificial Sequence
  Description of Artificial Sequence: Synthetic oligonucleotide
caccauaaaugaaugaagg

SEQ ID NO: 586786 - RNA, 19 nt, Artificial Sequence
  Description of Artificial Sequence: Synthetic oligonucleotide
aauaaucaaacaaugcggu

SEQ ID NO: 586787 - RNA, 19 nt, Artificial Sequence
  Description of Artificial Sequence: Synthetic oligonucleotide
ucaggcacaaguuuccagg

SEQ ID NO: 586788 - RNA, 19 nt, Artificial Sequence
  Description of Artificial Sequence: Synthetic oligonucleotide
caauguuuaaccuaguaca

SEQ ID NO: 586789 - RNA, 19 nt, Artificial Sequence
  Description of Artificial Sequence: Synthetic oligonucleotide
aguuucacuaaccguuucc

SEQ ID NO: 586790 - RNA, 19 nt, Artificial Sequence
  Description of Artificial Sequence: Synthetic oligonucleotide
auucuuaacagaaauaaca

SEQ ID NO: 586791 - RNA, 19 nt, Artificial Sequence
  Description of Artificial Sequence: Synthetic oligonucleotide
uuuagauccaacccaaaau

SEQ ID NO: 586792 - RNA, 19 nt, Artificial Sequence
  Description of Artificial Sequence: Synthetic oligonucleotide
aaucaaacaaugcgguucu

SEQ ID NO: 586793 - RNA, 19 nt, Artificial Sequence
  Description of Artificial Sequence: Synthetic oligonucleotide
uuggaauacguucaggcac

SEQ ID NO: 586794 - RNA, 19 nt, Artificial Sequence
  Description of Artificial Sequence: Synthetic oligonucleotide
gauuccaaaauuguuauga

SEQ ID NO: 586795 - RNA, 19 nt, Artificial Sequence
  Description of Artificial Sequence: Synthetic oligonucleotide
uguugguuuggcauggaag

SEQ ID NO: 586796 - RNA, 19 nt, Artificial Sequence
  Description of Artificial Sequence: Synthetic oligonucleotide
ucuuuacuuuaauacggcg

SEQ ID NO: 586797 - RNA, 19 nt, Artificial Sequence
  Description of Artificial Sequence: Synthetic oligonucleotide
uuaauaggaagaaagcauu

SEQ ID NO: 586798 - RNA, 19 nt, Artificial Sequence
  Description of Artificial Sequence: Synthetic oligonucleotide
aaccauugaaucuuuaaua

SEQ ID NO: 586799 - RNA, 19 nt, Artificial Sequence
  Description of Artificial Sequence: Synthetic oligonucleotide
aauaaauugcccugggguu

SEQ ID NO: 586800 - RNA, 19 nt, Artificial Sequence
  Description of Artificial Sequence: Synthetic oligonucleotide
auggaaguuucacuaaccg

SEQ ID NO: 586801 - RNA, 19 nt, Artificial Sequence
  Description of Artificial Sequence: Synthetic oligonucleotide
agaucuguugaacagaaaa

SEQ ID NO: 586802 - RNA, 19 nt, Artificial Sequence
  Description of Artificial Sequence: Synthetic oligonucleotide
agaacaauguuuaaccuag

SEQ ID NO: 586803 - RNA, 19 nt, Artificial Sequence
  Description of Artificial Sequence: Synthetic oligonucleotide
uccuuaauaggaagaaagc

SEQ ID NO: 586804 - RNA, 19 nt, Artificial Sequence
  Description of Artificial Sequence: Synthetic oligonucleotide
gauggguucaacaaaggug

SEQ ID NO: 586805 - RNA, 19 nt, Artificial Sequence
  Description of Artificial Sequence: Synthetic oligonucleotide
accacuaaguggcugacuc

SEQ ID NO: 586806 - RNA, 19 nt, Artificial Sequence
  Description of Artificial Sequence: Synthetic oligonucleotide
uuauuuagauccaacccaa

SEQ ID NO: 586807 - RNA, 19 nt, Artificial Sequence
  Description of Artificial Sequence: Synthetic oligonucleotide
guugcuuuggaauacguuc

SEQ ID NO: 586808 - RNA, 19 nt, Artificial Sequence
  Description of Artificial Sequence: Synthetic oligonucleotide
uaugguuauuguucuuucg

SEQ ID NO: 586809 - RNA, 19 nt, Artificial Sequence
  Description of Artificial Sequence: Synthetic oligonucleotide
agaaauaacaguacaugag

SEQ ID NO: 586810 - RNA, 19 nt, Artificial Sequence
  Description of Artificial Sequence: Synthetic oligonucleotide
uaucaguuuccucuaaacu

SEQ ID NO: 586811 - RNA, 19 nt, Artificial Sequence
  Description of Artificial Sequence: Synthetic oligonucleotide
ggaacuauaacauuacaca

SEQ ID NO: 586812 - RNA, 19 nt, Artificial Sequence
  Description of Artificial Sequence: Synthetic oligonucleotide
ggaagaaagcauuuagacg

SEQ ID NO: 586813 - RNA, 19 nt, Artificial Sequence
  Description of Artificial Sequence: Synthetic oligonucleotide
aaguuauucguaauccauc

SEQ ID NO: 586814 - RNA, 19 nt, Artificial Sequence
  Description of Artificial Sequence: Synthetic oligonucleotide
caacgcuuuauuuagagca

SEQ ID NO: 586815 - RNA, 19 nt, Artificial Sequence
  Description of Artificial Sequence: Synthetic oligonucleotide
aaugggagaguauaaucaa

SEQ ID NO: 586816 - RNA, 19 nt, Artificial Sequence
  Description of Artificial Sequence: Synthetic oligonucleotide
aauaaucgcagcaaaugcu

SEQ ID NO: 586817 - RNA, 19 nt, Artificial Sequence
  Description of Artificial Sequence: Synthetic oligonucleotide
ugagcaacucaaacaacag

SEQ ID NO: 586818 - RNA, 19 nt, Artificial Sequence
  Description of Artificial Sequence: Synthetic oligonucleotide
agcauuuagacgaugucac

SEQ ID NO: 586819 - RNA, 19 nt, Artificial Sequence
  Description of Artificial Sequence: Synthetic oligonucleotide
uuaaccuaguacacguuca

SEQ ID NO: 586820 - RNA, 19 nt, Artificial Sequence
  Description of Artificial Sequence: Synthetic oligonucleotide
ucagggauaucuaugguua

SEQ ID NO: 586821 - RNA, 19 nt, Artificial Sequence
  Description of Artificial Sequence: Synthetic oligonucleotide
uaaacuacuuucagaguac

SEQ ID NO: 586822 - RNA, 19 nt, Artificial Sequence
  Description of Artificial Sequence: Synthetic oligonucleotide
uaaucaaacaaugcgguuc

SEQ ID NO: 586823 - RNA, 19 nt, Artificial Sequence
  Description of Artificial Sequence: Synthetic oligonucleotide
uuuggaauacguucaggca

SEQ ID NO: 586824 - RNA, 19 nt, Artificial Sequence
  Description of Artificial Sequence: Synthetic oligonucleotide
cacaguugguacuaugacg

SEQ ID NO: 586825 - RNA, 19 nt, Artificial Sequence
  Description of Artificial Sequence: Synthetic oligonucleotide
aagcauuuagacgauguca

SEQ ID NO: 586826 - RNA, 19 nt, Artificial Sequence
  Description of Artificial Sequence: Synthetic oligonucleotide
accauugaaucuuuaauaa

SEQ ID NO: 586827 - RNA, 19 nt, Artificial Sequence
  Description of Artificial Sequence: Synthetic oligonucleotide
acguucaugaacguuuccc

SEQ ID NO: 586828 - RNA, 19 nt, Artificial Sequence
  Description of Artificial Sequence: Synthetic oligonucleotide
accuaguacacguucauga

SEQ ID NO: 586829 - RNA, 19 nt, Artificial Sequence
  Description of Artificial Sequence: Synthetic oligonucleotide
aauguuucggagaaaggga

SEQ ID NO: 586830 - RNA, 19 nt, Artificial Sequence
  Description of Artificial Sequence: Synthetic oligonucleotide
uuucauugguucuucuccc

SEQ ID NO: 586831 - RNA, 19 nt, Artificial Sequence
  Description of Artificial Sequence: Synthetic oligonucleotide
ccaauuuacacuguaaccg

SEQ ID NO: 586832 - RNA, 19 nt, Artificial Sequence
  Description of Artificial Sequence: Synthetic oligonucleotide
uacacguucaugaacguuu

SEQ ID NO: 586833 - RNA, 19 nt, Artificial Sequence
  Description of Artificial Sequence: Synthetic oligonucleotide
uggaauacguucaggcacc

SEQ ID NO: 586834 - RNA, 19 nt, Artificial Sequence
  Description of Artificial Sequence: Synthetic oligonucleotide
uuuauaagaaaaggaacua

SEQ ID NO: 586835 - RNA, 19 nt, Artificial Sequence
  Description of Artificial Sequence: Synthetic oligonucleotide
aaaguuauucguaauccau

SEQ ID NO: 586836 - RNA, 19 nt, Artificial Sequence
  Description of Artificial Sequence: Synthetic oligonucleotide
acgauguucuuuuauuucu

SEQ ID NO: 586837 - RNA, 19 nt, Artificial Sequence
  Description of Artificial Sequence: Synthetic oligonucleotide
acauccuaagaucuguuga

SEQ ID NO: 586838 - RNA, 19 nt, Artificial Sequence
  Description of Artificial Sequence: Synthetic oligonucleotide
ucguaauccauccaccauc

SEQ ID NO: 586839 - RNA, 19 nt, Artificial Sequence
  Description of Artificial Sequence: Synthetic oligonucleotide
augguuauuguucuuucgu

SEQ ID NO: 586840 - RNA, 19 nt, Artificial Sequence
  Description of Artificial Sequence: Synthetic oligonucleotide
ugacagguacugcuuauug

SEQ ID NO: 586841 - RNA, 19 nt, Artificial Sequence
  Description of Artificial Sequence: Synthetic oligonucleotide
uuauccugcuagcacacac

SEQ ID NO: 586842 - RNA, 19 nt, Artificial Sequence
  Description of Artificial Sequence: Synthetic oligonucleotide
uaaccgccgauuuucaucu

SEQ ID NO: 586843 - RNA, 19 nt, Artificial Sequence
  Description of Artificial Sequence: Synthetic oligonucleotide
uguggaccuccuuagagac

SEQ ID NO: 586844 - RNA, 19 nt, Artificial Sequence
  Description of Artificial Sequence: Synthetic oligonucleotide
aucuguugaacagaaaaca

SEQ ID NO: 586845 - RNA, 19 nt, Artificial Sequence
  Description of Artificial Sequence: Synthetic oligonucleotide
cauggaaguuucacuaacc

SEQ ID NO: 586846 - RNA, 19 nt, Artificial Sequence
  Description of Artificial Sequence: Synthetic oligonucleotide
uugagugguuucuuuaacu

SEQ ID NO: 586847 - RNA, 19 nt, Artificial Sequence
  Description of Artificial Sequence: Synthetic oligonucleotide
caggcaacgcuuuauuuag

SEQ ID NO: 586848 - RNA, 19 nt, Artificial Sequence
  Description of Artificial Sequence: Synthetic oligonucleotide
auaaauugcccugggguuc

SEQ ID NO: 586849 - RNA, 19 nt, Artificial Sequence
  Description of Artificial Sequence: Synthetic oligonucleotide
uuuuauccugcuagcacac

SEQ ID NO: 586850 - RNA, 19 nt, Artificial Sequence
  Description of Artificial Sequence: Synthetic oligonucleotide
uccauguccuuucuugagc

SEQ ID NO: 586851 - RNA, 19 nt, Artificial Sequence
  Description of Artificial Sequence: Synthetic oligonucleotide
agauccaacccaaaauaac

SEQ ID NO: 586852 - RNA, 19 nt, Artificial Sequence
  Description of Artificial Sequence: Synthetic oligonucleotide
aaaacuggcaaagucuuuu

SEQ ID NO: 586853 - RNA, 19 nt, Artificial Sequence
  Description of Artificial Sequence: Synthetic oligonucleotide
gaguauggcuguaaaauac

SEQ ID NO: 586854 - RNA, 19 nt, Artificial Sequence
  Description of Artificial Sequence: Synthetic oligonucleotide
cauuacacagcagaguaug

SEQ ID NO: 586855 - RNA, 19 nt, Artificial Sequence
  Description of Artificial Sequence: Synthetic oligonucleotide
ucguccauguccuuucuug

SEQ ID NO: 586856 - RNA, 19 nt, Artificial Sequence
  Description of Artificial Sequence: Synthetic oligonucleotide
uguuaugauguugguuugg

SEQ ID NO: 586857 - RNA, 19 nt, Artificial Sequence
  Description of Artificial Sequence: Synthetic oligonucleotide
gcuuauugaguuuucauca

SEQ ID NO: 586858 - RNA, 19 nt, Artificial Sequence
  Description of Artificial Sequence: Synthetic oligonucleotide
aaaccaaugggagaguaua

SEQ ID NO: 586859 - RNA, 19 nt, Artificial Sequence
  Description of Artificial Sequence: Synthetic oligonucleotide
uucaacaaaggugggcuag

SEQ ID NO: 586860 - RNA, 19 nt, Artificial Sequence
  Description of Artificial Sequence: Synthetic oligonucleotide
ucucaggcgagcuauugcu

SEQ ID NO: 586861 - RNA, 19 nt, Artificial Sequence
  Description of Artificial Sequence: Synthetic oligonucleotide
ucuugcuaacaaccaacug

SEQ ID NO: 586862 - RNA, 19 nt, Artificial Sequence
  Description of Artificial Sequence: Synthetic oligonucleotide
ucuguaucaugaaggacau

SEQ ID NO: 586863 - RNA, 19 nt, Artificial Sequence
  Description of Artificial Sequence: Synthetic oligonucleotide
acuuuaauacggcgcugac

SEQ ID NO: 586864 - RNA, 19 nt, Artificial Sequence
  Description of Artificial Sequence: Synthetic oligonucleotide
uugucaggcacaaguuucc

SEQ ID NO: 586865 - RNA, 19 nt, Artificial Sequence
  Description of Artificial Sequence: Synthetic oligonucleotide
agcuuugcgccucuugggg

SEQ ID NO: 586866 - RNA, 19 nt, Artificial Sequence
  Description of Artificial Sequence: Synthetic oligonucleotide
cugguucaccacuaagugg

SEQ ID NO: 586867 - RNA, 19 nt, Artificial Sequence
  Description of Artificial Sequence: Synthetic oligonucleotide
auucguaauccauccacca

SEQ ID NO: 586868 - RNA, 19 nt, Artificial Sequence
  Description of Artificial Sequence: Synthetic oligonucleotide
ucugcuaugcacaggcguc

SEQ ID NO: 586869 - RNA, 19 nt, Artificial Sequence
  Description of Artificial Sequence: Synthetic oligonucleotide
auguuuaaccuaguacacg

SEQ ID NO: 586870 - RNA, 19 nt, Artificial Sequence
  Description of Artificial Sequence: Synthetic oligonucleotide
ucaaacaaugcgguucuug

SEQ ID NO: 586871 - RNA, 19 nt, Artificial Sequence
  Description of Artificial Sequence: Synthetic oligonucleotide
gguacuaugacguguggac

SEQ ID NO: 586872 - RNA, 19 nt, Artificial Sequence
  Description of Artificial Sequence: Synthetic oligonucleotide
auaaucgcagcaaaugcug

SEQ ID NO: 586873 - RNA, 19 nt, Artificial Sequence
  Description of Artificial Sequence: Synthetic oligonucleotide
uuuacacuguaaccgccga

SEQ ID NO: 586874 - RNA, 19 nt, Artificial Sequence
  Description of Artificial Sequence: Synthetic oligonucleotide
uuacacagcagaguauggc

SEQ ID NO: 586875 - RNA, 19 nt, Artificial Sequence
  Description of Artificial Sequence: Synthetic oligonucleotide
ucuaaacuacuuucagagu

SEQ ID NO: 586876 - RNA, 19 nt, Artificial Sequence
  Description of Artificial Sequence: Synthetic oligonucleotide
aauaggaagaaagcauuua

SEQ ID NO: 586877 - RNA, 19 nt, Artificial Sequence
  Description of Artificial Sequence: Synthetic oligonucleotide
cuuuaauacggcgcugacg

SEQ ID NO: 586878 - RNA, 19 nt, Artificial Sequence
  Description of Artificial Sequence: Synthetic oligonucleotide
guagcagucauccucaagu

SEQ ID NO: 586879 - RNA, 19 nt, Artificial Sequence
  Description of Artificial Sequence: Synthetic oligonucleotide
accauuuuguuuaacauua

SEQ ID NO: 586880 - RNA, 19 nt, Artificial Sequence
  Description of Artificial Sequence: Synthetic oligonucleotide
gacguguggaccuccuuag

SEQ ID NO: 586881 - RNA, 19 nt, Artificial Sequence
  Description of Artificial Sequence: Synthetic oligonucleotide
cuaguacacguucaugaac

SEQ ID NO: 586882 - RNA, 19 nt, Artificial Sequence
  Description of Artificial Sequence: Synthetic oligonucleotide
uaauacggcgcugacgaug

SEQ ID NO: 586883 - RNA, 19 nt, Artificial Sequence
  Description of Artificial Sequence: Synthetic oligonucleotide
acuacuuucagaguacuuu

SEQ ID NO: 586884 - RNA, 19 nt, Artificial Sequence
  Description of Artificial Sequence: Synthetic oligonucleotide
ucuccuggcggauaauugu

SEQ ID NO: 586885 - RNA, 19 nt, Artificial Sequence
  Description of Artificial Sequence: Synthetic oligonucleotide
aagggaacugcuacaagca

SEQ ID NO: 586886 - RNA, 19 nt, Artificial Sequence
  Description of Artificial Sequence: Synthetic oligonucleotide
cuaaguggcugacucucgg

SEQ ID NO: 586887 - RNA, 19 nt, Artificial Sequence
  Description of Artificial Sequence: Synthetic oligonucleotide
auccugcuagcacacacag

SEQ ID NO: 586888 - RNA, 19 nt, Artificial Sequence
  Description of Artificial Sequence: Synthetic oligonucleotide
uacuuuaauacggcgcuga

SEQ ID NO: 586889 - RNA, 19 nt, Artificial Sequence
  Description of Artificial Sequence: Synthetic oligonucleotide
uccaacccaaaauaacuau

SEQ ID NO: 586890 - RNA, 19 nt, Artificial Sequence
  Description of Artificial Sequence: Synthetic oligonucleotide
cucaaguugcuucuuaaga

SEQ ID NO: 586891 - RNA, 19 nt, Artificial Sequence
  Description of Artificial Sequence: Synthetic oligonucleotide
ucggagaaagggaacugcu

SEQ ID NO: 586892 - RNA, 19 nt, Artificial Sequence
  Description of Artificial Sequence: Synthetic oligonucleotide
uucauauggguagagcaaa

SEQ ID NO: 586893 - RNA, 19 nt, Artificial Sequence
  Description of Artificial Sequence: Synthetic oligonucleotide
aauacggcgcugacgaugu

SEQ ID NO: 586894 - RNA, 19 nt, Artificial Sequence
  Description of Artificial Sequence: Synthetic oligonucleotide
ucuuccgaugcccaucuau

SEQ ID NO: 586895 - RNA, 19 nt, Artificial Sequence
  Description of Artificial Sequence: Synthetic oligonucleotide
auaagcugacuccgggaag

SEQ ID NO: 586896 - RNA, 19 nt, Artificial Sequence
  Description of Artificial Sequence: Synthetic oligonucleotide
agaguauggcuguaaaaua

SEQ ID NO: 586897 - RNA, 19 nt, Artificial Sequence
  Description of Artificial Sequence: Synthetic oligonucleotide
gcaacauaagcugacuccg

SEQ ID NO: 586898 - RNA, 19 nt, Artificial Sequence
  Description of Artificial Sequence: Synthetic oligonucleotide
gacgaggccucucauuggc

SEQ ID NO: 586899 - RNA, 19 nt, Artificial Sequence
  Description of Artificial Sequence: Synthetic oligonucleotide
uugguacuaugacgugugg

SEQ ID NO: 586900 - RNA, 19 nt, Artificial Sequence
  Description of Artificial Sequence: Synthetic oligonucleotide
uaggagacagcuccuccug

SEQ ID NO: 586901 - RNA, 19 nt, Artificial Sequence
  Description of Artificial Sequence: Synthetic oligonucleotide
auccuaagaucuguugaac

SEQ ID NO: 586902 - RNA, 19 nt, Artificial Sequence
  Description of Artificial Sequence: Synthetic oligonucleotide
ccuaagaucuguugaacag

SEQ ID NO: 586903 - RNA, 19 nt, Artificial Sequence
  Description of Artificial Sequence: Synthetic oligonucleotide
aaacuacuuucagaguacu

SEQ ID NO: 586904 - RNA, 19 nt, Artificial Sequence
  Description of Artificial Sequence: Synthetic oligonucleotide
gccaauuuacacuguaacc

SEQ ID NO: 586905 - RNA, 19 nt, Artificial Sequence
  Description of Artificial Sequence: Synthetic oligonucleotide
aaugcgguucuugcuaaca

SEQ ID NO: 586906 - RNA, 19 nt, Artificial Sequence
  Description of Artificial Sequence: Synthetic oligonucleotide
ugaacguuucccugugaac

SEQ ID NO: 586907 - RNA, 19 nt, Artificial Sequence
  Description of Artificial Sequence: Synthetic oligonucleotide
guaaccgccgauuuucauc

SEQ ID NO: 586908 - RNA, 19 nt, Artificial Sequence
  Description of Artificial Sequence: Synthetic oligonucleotide
ugacgauguucuuuuauuu

SEQ ID NO: 586909 - RNA, 19 nt, Artificial Sequence
  Description of Artificial Sequence: Synthetic oligonucleotide
guugguacuaugacgugug

SEQ ID NO: 586910 - RNA, 19 nt, Artificial Sequence
  Description of Artificial Sequence: Synthetic oligonucleotide
gauccaacccaaaauaacu

SEQ ID NO: 586911 - RNA, 19 nt, Artificial Sequence
  Description of Artificial Sequence: Synthetic oligonucleotide
caguacaugagcaacucaa

SEQ ID NO: 586912 - RNA, 19 nt, Artificial Sequence
  Description of Artificial Sequence: Synthetic oligonucleotide
uguuaguuguggugguacu

SEQ ID NO: 586913 - RNA, 19 nt, Artificial Sequence
  Description of Artificial Sequence: Synthetic oligonucleotide
uucguaauccauccaccau

SEQ ID NO: 586914 - RNA, 19 nt, Artificial Sequence
  Description of Artificial Sequence: Synthetic oligonucleotide
agcagucauccucaaguug

SEQ ID NO: 586915 - RNA, 19 nt, Artificial Sequence
  Description of Artificial Sequence: Synthetic oligonucleotide
uacguucaggcacccagga

SEQ ID NO: 586916 - RNA, 19 nt, Artificial Sequence
  Description of Artificial Sequence: Synthetic oligonucleotide
uguugcuuuggaauacguu

SEQ ID NO: 586917 - RNA, 19 nt, Artificial Sequence
  Description of Artificial Sequence: Synthetic oligonucleotide
ggcaacgcuuuauuuagag

SEQ ID NO: 586918 - RNA, 19 nt, Artificial Sequence
  Description of Artificial Sequence: Synthetic oligonucleotide
uaaccuaguacacguucau

SEQ ID NO: 586919 - RNA, 19 nt, Artificial Sequence
  Description of Artificial Sequence: Synthetic oligonucleotide
cuuucguccauguccuuuc

SEQ ID NO: 586920 - RNA, 19 nt, Artificial Sequence
  Description of Artificial Sequence: Synthetic oligonucleotide
uuguucauauggguagagc

SEQ ID NO: 586921 - RNA, 19 nt, Artificial Sequence
  Description of Artificial Sequence: Synthetic oligonucleotide
caggaccucauuuauuuca

SEQ ID NO: 586922 - RNA, 19 nt, Artificial Sequence
  Description of Artificial Sequence: Synthetic oligonucleotide
gauaucuaugguuauuguu

SEQ ID NO: 586923 - RNA, 19 nt, Artificial Sequence
  Description of Artificial Sequence: Synthetic oligonucleotide
gucuuuacuuuaauacggc

SEQ ID NO: 586924 - RNA, 19 nt, Artificial Sequence
  Description of Artificial Sequence: Synthetic oligonucleotide
uuuagacgaugucaccuuu

SEQ ID NO: 586925 - RNA, 19 nt, Artificial Sequence
  Description of Artificial Sequence: Synthetic oligonucleotide
agcugcaaagugcagcuau

SEQ ID NO: 586926 - RNA, 19 nt, Artificial Sequence
  Description of Artificial Sequence: Synthetic oligonucleotide
ggagaguauaaucaaaagu

SEQ ID NO: 586927 - RNA, 19 nt, Artificial Sequence
  Description of Artificial Sequence: Synthetic oligonucleotide
ugcgguucuugcuaacaac

SEQ ID NO: 586928 - RNA, 19 nt, Artificial Sequence
  Description of Artificial Sequence: Synthetic oligonucleotide
acgcuuuauuuagagcaac

SEQ ID NO: 586929 - RNA, 19 nt, Artificial Sequence
  Description of Artificial Sequence: Synthetic oligonucleotide
auggaccacaauacagagc

SEQ ID NO: 586930 - RNA, 19 nt, Artificial Sequence
  Description of Artificial Sequence: Synthetic oligonucleotide
agaguauaaucaaaaguua

SEQ ID NO: 586931 - RNA, 19 nt, Artificial Sequence
  Description of Artificial Sequence: Synthetic oligonucleotide
cagcaaauacggcacuccc

SEQ ID NO: 586932 - RNA, 19 nt, Artificial Sequence
  Description of Artificial Sequence: Synthetic oligonucleotide
ggccaauuuacacuguaac

SEQ ID NO: 586933 - RNA, 19 nt, Artificial Sequence
  Description of Artificial Sequence: Synthetic oligonucleotide
uucauugguucuucucccu

SEQ ID NO: 586934 - RNA, 19 nt, Artificial Sequence
  Description of Artificial Sequence: Synthetic oligonucleotide
ugacgaggccucucauugg

SEQ ID NO: 586935 - RNA, 19 nt, Artificial Sequence
  Description of Artificial Sequence: Synthetic oligonucleotide
aguugguacuaugacgugu

SEQ ID NO: 586936 - RNA, 19 nt, Artificial Sequence
  Description of Artificial Sequence: Synthetic oligonucleotide
aaccuaguacacguucaug

SEQ ID NO: 586937 - RNA, 19 nt, Artificial Sequence
  Description of Artificial Sequence: Synthetic oligonucleotide
cuauaacauuacacagcag

SEQ ID NO: 586938 - RNA, 19 nt, Artificial Sequence
  Description of Artificial Sequence: Synthetic oligonucleotide
gcugguucaccacuaagug

SEQ ID NO: 586939 - RNA, 19 nt, Artificial Sequence
  Description of Artificial Sequence: Synthetic oligonucleotide
agaaagggaacugcuacaa

SEQ ID NO: 586940 - RNA, 19 nt, Artificial Sequence
  Description of Artificial Sequence: Synthetic oligonucleotide
gucgacaccaggcagccga

SEQ ID NO: 586941 - RNA, 19 nt, Artificial Sequence
  Description of Artificial Sequence: Synthetic oligonucleotide
gaaagcauuuagacgaugu

SEQ ID NO: 586942 - RNA, 19 nt, Artificial Sequence
  Description of Artificial Sequence: Synthetic oligonucleotide
acuuuccuuaauaggaaga

SEQ ID NO: 586943 - RNA, 19 nt, Artificial Sequence
  Description of Artificial Sequence: Synthetic oligonucleotide
uucugccgggacauagugc

SEQ ID NO: 586944 - RNA, 19 nt, Artificial Sequence
  Description of Artificial Sequence: Synthetic oligonucleotide
gggauaucuaugguuauug

SEQ ID NO: 586945 - RNA, 19 nt, Artificial Sequence
  Description of Artificial Sequence: Synthetic oligonucleotide
uggccaauuuacacuguaa

SEQ ID NO: 586946 - RNA, 19 nt, Artificial Sequence
  Description of Artificial Sequence: Synthetic oligonucleotide
ugguacuaugacgugugga

SEQ ID NO: 586947 - RNA, 19 nt, Artificial Sequence
  Description of Artificial Sequence: Synthetic oligonucleotide
uuagacgaugucaccuuuu

SEQ ID NO: 586948 - RNA, 19 nt, Artificial Sequence
  Description of Artificial Sequence: Synthetic oligonucleotide
ugacucucgguagacugug

SEQ ID NO: 586949 - RNA, 19 nt, Artificial Sequence
  Description of Artificial Sequence: Synthetic oligonucleotide
uacacuguaaccgccgauu

SEQ ID NO: 586950 - RNA, 19 nt, Artificial Sequence
  Description of Artificial Sequence: Synthetic oligonucleotide
gucacaguugguacuauga

SEQ ID NO: 586951 - RNA, 19 nt, Artificial Sequence
  Description of Artificial Sequence: Synthetic oligonucleotide
agagaucaaagugcuucag

SEQ ID NO: 586952 - RNA, 19 nt, Artificial Sequence
  Description of Artificial Sequence: Synthetic oligonucleotide
uuacuuuaauacggcgcug

SEQ ID NO: 586953 - RNA, 19 nt, Artificial Sequence
  Description of Artificial Sequence: Synthetic oligonucleotide
guuauucguaauccaucca

SEQ ID NO: 586954 - RNA, 19 nt, Artificial Sequence
  Description of Artificial Sequence: Synthetic oligonucleotide
cauccuaagaucuguugaa

SEQ ID NO: 586955 - RNA, 19 nt, Artificial Sequence
  Description of Artificial Sequence: Synthetic oligonucleotide
aacgcuuuauuuagagcaa

SEQ ID NO: 586956 - RNA, 19 nt, Artificial Sequence
  Description of Artificial Sequence: Synthetic oligonucleotide
uaaguggcugacucucggu

SEQ ID NO: 586957 - RNA, 19 nt, Artificial Sequence
  Description of Artificial Sequence: Synthetic oligonucleotide
caagcacauccuaagaucu

SEQ ID NO: 586958 - RNA, 19 nt, Artificial Sequence
  Description of Artificial Sequence: Synthetic oligonucleotide
acggcacucccuuccuuac

SEQ ID NO: 586959 - RNA, 19 nt, Artificial Sequence
  Description of Artificial Sequence: Synthetic oligonucleotide
cauaagcugacuccgggaa

SEQ ID NO: 586960 - RNA, 19 nt, Artificial Sequence
  Description of Artificial Sequence: Synthetic oligonucleotide
cucucaggcgagcuauugc

SEQ ID NO: 586961 - RNA, 19 nt, Artificial Sequence
  Description of Artificial Sequence: Synthetic oligonucleotide
gcaccauaaaugaaugaag

SEQ ID NO: 586962 - RNA, 19 nt, Artificial Sequence
  Description of Artificial Sequence: Synthetic oligonucleotide
ucgcagcaaaugcugugca

SEQ ID NO: 586963 - RNA, 19 nt, Artificial Sequence
  Description of Artificial Sequence: Synthetic oligonucleotide
ucaggcgagcuauugcuuu

SEQ ID NO: 586964 - RNA, 19 nt, Artificial Sequence
  Description of Artificial Sequence: Synthetic oligonucleotide
ugagcgcagugacaauacu

SEQ ID NO: 586965 - RNA, 19 nt, Artificial Sequence
  Description of Artificial Sequence: Synthetic oligonucleotide
agaguacuuuguggcuucc

SEQ ID NO: 586966 - RNA, 19 nt, Artificial Sequence
  Description of Artificial Sequence: Synthetic oligonucleotide
auacguucaggcacccagg

SEQ ID NO: 586967 - RNA, 19 nt, Artificial Sequence
  Description of Artificial Sequence: Synthetic oligonucleotide
cguucaggcacccaggaag

SEQ ID NO: 586968 - RNA, 19 nt, Artificial Sequence
  Description of Artificial Sequence: Synthetic oligonucleotide
gcugucaugacagguacug

SEQ ID NO: 586969 - RNA, 19 nt, Artificial Sequence
  Description of Artificial Sequence: Synthetic oligonucleotide
uuacacuguaaccgccgau

SEQ ID NO: 586970 - RNA, 19 nt, Artificial Sequence
  Description of Artificial Sequence: Synthetic oligonucleotide
cauuucaccuggaaccuaa

SEQ ID NO: 586971 - RNA, 19 nt, Artificial Sequence
  Description of Artificial Sequence: Synthetic oligonucleotide
acuaaguggcugacucucg

SEQ ID NO: 586972 - RNA, 19 nt, Artificial Sequence
  Description of Artificial Sequence: Synthetic oligonucleotide
ccuuacuuggagucagagg

SEQ ID NO: 586973 - RNA, 19 nt, Artificial Sequence
  Description of Artificial Sequence: Synthetic oligonucleotide
acuaugacguguggaccuc

SEQ ID NO: 586974 - RNA, 19 nt, Artificial Sequence
  Description of Artificial Sequence: Synthetic oligonucleotide
uaguuguggugguacuuuc

SEQ ID NO: 586975 - RNA, 19 nt, Artificial Sequence
  Description of Artificial Sequence: Synthetic oligonucleotide
acacguucaugaacguuuc

SEQ ID NO: 586976 - RNA, 19 nt, Artificial Sequence
  Description of Artificial Sequence: Synthetic oligonucleotide
ccuggaaccuaaaauauaa

SEQ ID NO: 586977 - RNA, 19 nt, Artificial Sequence
  Description of Artificial Sequence: Synthetic oligonucleotide
acuaaccguuuccuucugu

SEQ ID NO: 586978 - RNA, 19 nt, Artificial Sequence
  Description of Artificial Sequence: Synthetic oligonucleotide
ccaaugggagaguauaauc

SEQ ID NO: 586979 - RNA, 19 nt, Artificial Sequence
  Description of Artificial Sequence: Synthetic oligonucleotide
aggcauggaccacaauaca

SEQ ID NO: 586980 - RNA, 19 nt, Artificial Sequence
  Description of Artificial Sequence: Synthetic oligonucleotide
ugcuguagugugccucaca

SEQ ID NO: 586981 - RNA, 19 nt, Artificial Sequence
  Description of Artificial Sequence: Synthetic oligonucleotide
uagguccacaucucauuaa

SEQ ID NO: 586982 - RNA, 19 nt, Artificial Sequence
  Description of Artificial Sequence: Synthetic oligonucleotide
cuccuggcggauaauuguc

SEQ ID NO: 586983 - RNA, 19 nt, Artificial Sequence
  Description of Artificial Sequence: Synthetic oligonucleotide
caugaucuuccgaugccca

SEQ ID NO: 586984 - RNA, 19 nt, Artificial Sequence
  Description of Artificial Sequence: Synthetic oligonucleotide
gcuacucuccgacagccug

SEQ ID NO: 586985 - RNA, 19 nt, Artificial Sequence
  Description of Artificial Sequence: Synthetic oligonucleotide
ucaggcacccaggaaguaa

SEQ ID NO: 586986 - RNA, 19 nt, Artificial Sequence
  Description of Artificial Sequence: Synthetic oligonucleotide
guucauauggguagagcaa

SEQ ID NO: 586987 - RNA, 19 nt, Artificial Sequence
  Description of Artificial Sequence: Synthetic oligonucleotide
accgccgauuuucaucugu

SEQ ID NO: 586988 - RNA, 19 nt, Artificial Sequence
  Description of Artificial Sequence: Synthetic oligonucleotide
uacggcacucccuuccuua

SEQ ID NO: 586989 - RNA, 19 nt, Artificial Sequence
  Description of Artificial Sequence: Synthetic oligonucleotide
gauagguccacaucucauu

SEQ ID NO: 586990 - RNA, 19 nt, Artificial Sequence
  Description of Artificial Sequence: Synthetic oligonucleotide
ggucaacauucuuuucugc

SEQ ID NO: 586991 - RNA, 19 nt, Artificial Sequence
  Description of Artificial Sequence: Synthetic oligonucleotide
caggauagguccacaucuc

SEQ ID NO: 586992 - RNA, 19 nt, Artificial Sequence
  Description of Artificial Sequence: Synthetic oligonucleotide
cuguugauauaguagcagu

SEQ ID NO: 586993 - RNA, 19 nt, Artificial Sequence
  Description of Artificial Sequence: Synthetic oligonucleotide
uguaaccgccgauuuucau

SEQ ID NO: 586994 - RNA, 19 nt, Artificial Sequence
  Description of Artificial Sequence: Synthetic oligonucleotide
ggugguacuuuccuuaaua

SEQ ID NO: 586995 - RNA, 19 nt, Artificial Sequence
  Description of Artificial Sequence: Synthetic oligonucleotide
aaccaaugggagaguauaa

SEQ ID NO: 586996 - RNA, 19 nt, Artificial Sequence
  Description of Artificial Sequence: Synthetic oligonucleotide
cugacuccgggaagaaauc

SEQ ID NO: 586997 - RNA, 19 nt, Artificial Sequence
  Description of Artificial Sequence: Synthetic oligonucleotide
cauuuagacgaugucaccu

SEQ ID NO: 586998 - RNA, 19 nt, Artificial Sequence
  Description of Artificial Sequence: Synthetic oligonucleotide
gcaacgcuuuauuuagagc

SEQ ID NO: 586999 - RNA, 19 nt, Artificial Sequence
  Description of Artificial Sequence: Synthetic oligonucleotide
agcgcagugacaauacuuu

SEQ ID NO: 587000 - RNA, 19 nt, Artificial Sequence
  Description of Artificial Sequence: Synthetic oligonucleotide
ucuuucguccauguccuuu

SEQ ID NO: 587001 - RNA, 19 nt, Artificial Sequence
  Description of Artificial Sequence: Synthetic oligonucleotide
agacaggcaacgcuuuauu

SEQ ID NO: 587002 - RNA, 19 nt, Artificial Sequence
  Description of Artificial Sequence: Synthetic oligonucleotide
gcgguucuugcuaacaacc

SEQ ID NO: 587003 - RNA, 19 nt, Artificial Sequence
  Description of Artificial Sequence: Synthetic oligonucleotide
uuuauccugcuagcacaca

SEQ ID NO: 587004 - RNA, 19 nt, Artificial Sequence
  Description of Artificial Sequence: Synthetic oligonucleotide
agcaaauacggcacucccu

SEQ ID NO: 587005 - RNA, 19 nt, Artificial Sequence
  Description of Artificial Sequence: Synthetic oligonucleotide
ucauuuugagugguuucuu

SEQ ID NO: 587006 - RNA, 19 nt, Artificial Sequence
  Description of Artificial Sequence: Synthetic oligonucleotide
acacuguaaccgccgauuu

SEQ ID NO: 587007 - RNA, 19 nt, Artificial Sequence
  Description of Artificial Sequence: Synthetic oligonucleotide
cucgguagacuguggugug

SEQ ID NO: 587008 - RNA, 19 nt, Artificial Sequence
  Description of Artificial Sequence: Synthetic oligonucleotide
auguugguuuggcauggaa

SEQ ID NO: 587009 - RNA, 19 nt, Artificial Sequence
  Description of Artificial Sequence: Synthetic oligonucleotide
ggaaguuucacuaaccguu

SEQ ID NO: 587010 - RNA, 19 nt, Artificial Sequence
  Description of Artificial Sequence: Synthetic oligonucleotide
gcauuuagacgaugucacc

SEQ ID NO: 587011 - RNA, 19 nt, Artificial Sequence
  Description of Artificial Sequence: Synthetic oligonucleotide
auggcaugauggugacgag

SEQ ID NO: 587012 - RNA, 19 nt, Artificial Sequence
  Description of Artificial Sequence: Synthetic oligonucleotide
cacguucaugaacguuucc

SEQ ID NO: 587013 - RNA, 19 nt, Artificial Sequence
  Description of Artificial Sequence: Synthetic oligonucleotide
guuucggagaaagggaacu

SEQ ID NO: 587014 - RNA, 19 nt, Artificial Sequence
  Description of Artificial Sequence: Synthetic oligonucleotide
auccaacccaaaauaacua

SEQ ID NO: 587015 - RNA, 19 nt, Artificial Sequence
  Description of Artificial Sequence: Synthetic oligonucleotide
cuuccagagcugucaugac

SEQ ID NO: 587016 - RNA, 19 nt, Artificial Sequence
  Description of Artificial Sequence: Synthetic oligonucleotide
aacuacuuucagaguacuu

SEQ ID NO: 587017 - RNA, 19 nt, Artificial Sequence
  Description of Artificial Sequence: Synthetic oligonucleotide
uacggcgcugacgauguuc

SEQ ID NO: 587018 - RNA, 19 nt, Artificial Sequence
  Description of Artificial Sequence: Synthetic oligonucleotide
cugucaugacagguacugc

SEQ ID NO: 587019 - RNA, 19 nt, Artificial Sequence
  Description of Artificial Sequence: Synthetic oligonucleotide
cuggaaccuaaaauauaaa

SEQ ID NO: 587020 - RNA, 19 nt, Artificial Sequence
  Description of Artificial Sequence: Synthetic oligonucleotide
guucuuucguccauguccu

SEQ ID NO: 587021 - RNA, 19 nt, Artificial Sequence
  Description of Artificial Sequence: Synthetic oligonucleotide
uuaauacggcgcugacgau

SEQ ID NO: 587022 - RNA, 19 nt, Artificial Sequence
  Description of Artificial Sequence: Synthetic oligonucleotide
caguugguacuaugacgug

SEQ ID NO: 587023 - RNA, 19 nt, Artificial Sequence
  Description of Artificial Sequence: Synthetic oligonucleotide
ggcgcuucggcugagguga

SEQ ID NO: 587024 - RNA, 19 nt, Artificial Sequence
  Description of Artificial Sequence: Synthetic oligonucleotide
ugcaccucucaggcgagcu

SEQ ID NO: 587025 - RNA, 19 nt, Artificial Sequence
  Description of Artificial Sequence: Synthetic oligonucleotide
gacucucgguagacugugg

SEQ ID NO: 587026 - RNA, 19 nt, Artificial Sequence
  Description of Artificial Sequence: Synthetic oligonucleotide
uggugguacuuuccuuaau

SEQ ID NO: 587027 - RNA, 19 nt, Artificial Sequence
  Description of Artificial Sequence: Synthetic oligonucleotide
uggcuaccagaacaauguu

SEQ ID NO: 587028 - RNA, 19 nt, Artificial Sequence
  Description of Artificial Sequence: Synthetic oligonucleotide
agugugccucacaggcagc

SEQ ID NO: 587029 - RNA, 19 nt, Artificial Sequence
  Description of Artificial Sequence: Synthetic oligonucleotide
gaugcccaucuaucccaac

SEQ ID NO: 587030 - RNA, 19 nt, Artificial Sequence
  Description of Artificial Sequence: Synthetic oligonucleotide
uggaucagcuuugcgccuc

SEQ ID NO: 587031 - RNA, 19 nt, Artificial Sequence
  Description of Artificial Sequence: Synthetic oligonucleotide
cgggacauagugcacauuc

SEQ ID NO: 587032 - RNA, 19 nt, Artificial Sequence
  Description of Artificial Sequence: Synthetic oligonucleotide
ucaccacuaaguggcugac

SEQ ID NO: 587033 - RNA, 19 nt, Artificial Sequence
  Description of Artificial Sequence: Synthetic oligonucleotide
uccgacagccugucacagu

SEQ ID NO: 587034 - RNA, 19 nt, Artificial Sequence
  Description of Artificial Sequence: Synthetic oligonucleotide
ucgacaccaggcagccgac

SEQ ID NO: 587035 - RNA, 19 nt, Artificial Sequence
  Description of Artificial Sequence: Synthetic oligonucleotide
aucuaugguuauuguucuu

SEQ ID NO: 587036 - RNA, 19 nt, Artificial Sequence
  Description of Artificial Sequence: Synthetic oligonucleotide
gcaacaguguugcuuugga

SEQ ID NO: 587037 - RNA, 19 nt, Artificial Sequence
  Description of Artificial Sequence: Synthetic oligonucleotide
aaccgccgauuuucaucug

SEQ ID NO: 587038 - RNA, 19 nt, Artificial Sequence
  Description of Artificial Sequence: Synthetic oligonucleotide
ccuggcggauaauugucag

SEQ ID NO: 587039 - RNA, 19 nt, Artificial Sequence
  Description of Artificial Sequence: Synthetic oligonucleotide
cguguggaccuccuuagag

SEQ ID NO: 587040 - RNA, 19 nt, Artificial Sequence
  Description of Artificial Sequence: Synthetic oligonucleotide
guucaacaaaggugggcua

SEQ ID NO: 587041 - RNA, 19 nt, Artificial Sequence
  Description of Artificial Sequence: Synthetic oligonucleotide
gauggugacgaggccucuc

SEQ ID NO: 587042 - RNA, 19 nt, Artificial Sequence
  Description of Artificial Sequence: Synthetic oligonucleotide
acguguggaccuccuuaga

SEQ ID NO: 587043 - RNA, 19 nt, Artificial Sequence
  Description of Artificial Sequence: Synthetic oligonucleotide
ggcagcaacauaagcugac

SEQ ID NO: 587044 - RNA, 19 nt, Artificial Sequence
  Description of Artificial Sequence: Synthetic oligonucleotide
guggugguacuuuccuuaa

SEQ ID NO: 587045 - RNA, 19 nt, Artificial Sequence
  Description of Artificial Sequence: Synthetic oligonucleotide
cuguaaccgccgauuuuca

SEQ ID NO: 587046 - RNA, 19 nt, Artificial Sequence
  Description of Artificial Sequence: Synthetic oligonucleotide
ccaggauagguccacaucu

SEQ ID NO: 587047 - RNA, 19 nt, Artificial Sequence
  Description of Artificial Sequence: Synthetic oligonucleotide
cuaaccguuuccuucuguu

SEQ ID NO: 587048 - RNA, 19 nt, Artificial Sequence
  Description of Artificial Sequence: Synthetic oligonucleotide
gaaguuucacuaaccguuu

SEQ ID NO: 587049 - RNA, 19 nt, Artificial Sequence
  Description of Artificial Sequence: Synthetic oligonucleotide
cacuaaccguuuccuucug

SEQ ID NO: 587050 - RNA, 19 nt, Artificial Sequence
  Description of Artificial Sequence: Synthetic oligonucleotide
acguucaggcacccaggaa

SEQ ID NO: 587051 - RNA, 19 nt, Artificial Sequence
  Description of Artificial Sequence: Synthetic oligonucleotide
gcaaauacggcacucccuu

SEQ ID NO: 587052 - RNA, 19 nt, Artificial Sequence
  Description of Artificial Sequence: Synthetic oligonucleotide
ggcauggaaguuucacuaa

SEQ ID NO: 587053 - RNA, 19 nt, Artificial Sequence
  Description of Artificial Sequence: Synthetic oligonucleotide
gaauacguucaggcaccca

SEQ ID NO: 587054 - RNA, 19 nt, Artificial Sequence
  Description of Artificial Sequence: Synthetic oligonucleotide
ggauaucuaugguuauugu

SEQ ID NO: 587055 - RNA, 19 nt, Artificial Sequence
  Description of Artificial Sequence: Synthetic oligonucleotide
gauguugguuuggcaugga

SEQ ID NO: 587056 - RNA, 19 nt, Artificial Sequence
  Description of Artificial Sequence: Synthetic oligonucleotide
ugguguggauggguucaac

SEQ ID NO: 587057 - RNA, 19 nt, Artificial Sequence
  Description of Artificial Sequence: Synthetic oligonucleotide
ccuaguacacguucaugaa

SEQ ID NO: 587058 - RNA, 19 nt, Artificial Sequence
  Description of Artificial Sequence: Synthetic oligonucleotide
gugugccucacaggcagca

SEQ ID NO: 587059 - RNA, 19 nt, Artificial Sequence
  Description of Artificial Sequence: Synthetic oligonucleotide
ggaauacguucaggcaccc

SEQ ID NO: 587060 - RNA, 19 nt, Artificial Sequence
  Description of Artificial Sequence: Synthetic oligonucleotide
guacugcuuauugaguuuu

SEQ ID NO: 587061 - RNA, 19 nt, Artificial Sequence
  Description of Artificial Sequence: Synthetic oligonucleotide
ggcugguucaccacuaagu

SEQ ID NO: 587062 - RNA, 19 nt, Artificial Sequence
  Description of Artificial Sequence: Synthetic oligonucleotide
auacggcacucccuuccuu

SEQ ID NO: 587063 - RNA, 19 nt, Artificial Sequence
  Description of Artificial Sequence: Synthetic oligonucleotide
gagcgcagugacaauacuu

SEQ ID NO: 587064 - RNA, 19 nt, Artificial Sequence
  Description of Artificial Sequence: Synthetic oligonucleotide
ggggaagaugaucugcuau

SEQ ID NO: 587065 - RNA, 19 nt, Artificial Sequence
  Description of Artificial Sequence: Synthetic oligonucleotide
cuguaucaugaaggacaug

SEQ ID NO: 587066 - RNA, 19 nt, Artificial Sequence
  Description of Artificial Sequence: Synthetic oligonucleotide
gcuucggcugaggugagga

SEQ ID NO: 587067 - RNA, 19 nt, Artificial Sequence
  Description of Artificial Sequence: Synthetic oligonucleotide
ggcggauaauugucaggca

SEQ ID NO: 587068 - RNA, 19 nt, Artificial Sequence
  Description of Artificial Sequence: Synthetic oligonucleotide
gggacauagugcacauuca

SEQ ID NO: 587069 - RNA, 19 nt, Artificial Sequence
  Description of Artificial Sequence: Synthetic oligonucleotide
ugcuaugcacaggcgucuu

SEQ ID NO: 587070 - RNA, 19 nt, Artificial Sequence
  Description of Artificial Sequence: Synthetic oligonucleotide
guuaguuguggugguacuu

SEQ ID NO: 587071 - RNA, 19 nt, Artificial Sequence
  Description of Artificial Sequence: Synthetic oligonucleotide
cccaggauagguccacauc

SEQ ID NO: 587072 - RNA, 19 nt, Artificial Sequence
  Description of Artificial Sequence: Synthetic oligonucleotide
cagaaccauugaaucuuua

SEQ ID NO: 587073 - RNA, 19 nt, Artificial Sequence
  Description of Artificial Sequence: Synthetic oligonucleotide
cuacucuccgacagccugu

SEQ ID NO: 587074 - RNA, 19 nt, Artificial Sequence
  Description of Artificial Sequence: Synthetic oligonucleotide
ccagaacaauguuuaaccu

SEQ ID NO: 587075 - RNA, 19 nt, Artificial Sequence
  Description of Artificial Sequence: Synthetic oligonucleotide
gcuuguucauauggguaga

SEQ ID NO: 587076 - RNA, 19 nt, Artificial Sequence
  Description of Artificial Sequence: Synthetic oligonucleotide
aggcaacgcuuuauuuaga

SEQ ID NO: 587077 - RNA, 19 nt, Artificial Sequence
  Description of Artificial Sequence: Synthetic oligonucleotide
agcuacucuccgacagccu

SEQ ID NO: 587078 - RNA, 19 nt, Artificial Sequence
  Description of Artificial Sequence: Synthetic oligonucleotide
cuaugcacaggcgucuuuu

SEQ ID NO: 587079 - RNA, 19 nt, Artificial Sequence
  Description of Artificial Sequence: Synthetic oligonucleotide
guguugcuuuggaauacgu

SEQ ID NO: 587080 - RNA, 19 nt, Artificial Sequence
  Description of Artificial Sequence: Synthetic oligonucleotide
aucaaacaaugcgguucuu

SEQ ID NO: 587081 - RNA, 19 nt, Artificial Sequence
  Description of Artificial Sequence: Synthetic oligonucleotide
cagggauaucuaugguuau

SEQ ID NO: 587082 - RNA, 19 nt, Artificial Sequence
  Description of Artificial Sequence: Synthetic oligonucleotide
cguaauccauccaccaucu

SEQ ID NO: 587083 - RNA, 19 nt, Artificial Sequence
  Description of Artificial Sequence: Synthetic oligonucleotide
guacacguucaugaacguu

SEQ ID NO: 587084 - RNA, 19 nt, Artificial Sequence
  Description of Artificial Sequence: Synthetic oligonucleotide
cgguucuugcuaacaacca

SEQ ID NO: 587085 - RNA, 19 nt, Artificial Sequence
  Description of Artificial Sequence: Synthetic oligonucleotide
aucuuccgaugcccaucua

SEQ ID NO: 587086 - RNA, 19 nt, Artificial Sequence
  Description of Artificial Sequence: Synthetic oligonucleotide
cagcagaguauggcuguaa

SEQ ID NO: 587087 - RNA, 19 nt, Artificial Sequence
  Description of Artificial Sequence: Synthetic oligonucleotide
cucaggcgagcuauugcuu

SEQ ID NO: 587088 - RNA, 19 nt, Artificial Sequence
  Description of Artificial Sequence: Synthetic oligonucleotide
caccucucaggcgagcuau

SEQ ID NO: 587089 - RNA, 19 nt, Artificial Sequence
  Description of Artificial Sequence: Synthetic oligonucleotide
cacuguaaccgccgauuuu

SEQ ID NO: 587090 - RNA, 19 nt, Artificial Sequence
  Description of Artificial Sequence: Synthetic oligonucleotide
caggcgagcuauugcuuuu

SEQ ID NO: 587091 - RNA, 19 nt, Artificial Sequence
  Description of Artificial Sequence: Synthetic oligonucleotide
auacggcgcugacgauguu

SEQ ID NO: 587092 - RNA, 19 nt, Artificial Sequence
  Description of Artificial Sequence: Synthetic oligonucleotide
ggcgcugacgauguucuuu

SEQ ID NO: 587093 - RNA, 19 nt, Artificial Sequence
  Description of Artificial Sequence: Synthetic oligonucleotide
ggaucagcuuugcgccucu

SEQ ID NO: 587094 - RNA, 19 nt, Artificial Sequence
  Description of Artificial Sequence: Synthetic oligonucleotide
ccacuaaguggcugacucu

SEQ ID NO: 587095 - RNA, 19 nt, Artificial Sequence
  Description of Artificial Sequence: Synthetic oligonucleotide
ccgccgauuuucaucugua

SEQ ID NO: 587096 - RNA, 19 nt, Artificial Sequence
  Description of Artificial Sequence: Synthetic oligonucleotide
accucucaggcgagcuauu

SEQ ID NO: 587097 - RNA, 19 nt, Artificial Sequence
  Description of Artificial Sequence: Synthetic oligonucleotide
ggucuccuggcggauaauu

SEQ ID NO: 587098 - RNA, 19 nt, Artificial Sequence
  Description of Artificial Sequence: Synthetic oligonucleotide
cgacagcgccucuucuuuc

SEQ ID NO: 587099 - RNA, 19 nt, Artificial Sequence
  Description of Artificial Sequence: Synthetic oligonucleotide
ugccggcgcuucggcugag

SEQ ID NO: 587100 - RNA, 19 nt, Artificial Sequence
  Description of Artificial Sequence: Synthetic oligonucleotide
cggcgcuucggcugaggug

SEQ ID NO: 587101 - RNA, 19 nt, Artificial Sequence
  Description of Artificial Sequence: Synthetic oligonucleotide
gcgcagugacaauacuuuu

SEQ ID NO: 587102 - RNA, 19 nt, Artificial Sequence
  Description of Artificial Sequence: Synthetic oligonucleotide
caccacuaaguggcugacu

SEQ ID NO: 587103 - RNA, 19 nt, Artificial Sequence
  Description of Artificial Sequence: Synthetic oligonucleotide
gccgacagcgccucuucuu

SEQ ID NO: 587104 - RNA, 19 nt, Artificial Sequence
  Description of Artificial Sequence: Synthetic oligonucleotide
gccgggacauagugcacau

SEQ ID NO: 587105 - RNA, 19 nt, Artificial Sequence
  Description of Artificial Sequence: Synthetic oligonucleotide
ccuguuaguugugguggua

SEQ ID NO: 587106 - RNA, 19 nt, Artificial Sequence
  Description of Artificial Sequence: Synthetic oligonucleotide
gccggcgcuucggcugagg

SEQ ID NO: 587107 - RNA, 19 nt, Artificial Sequence
  Description of Artificial Sequence: Synthetic oligonucleotide
gcuaugcacaggcgucuuu

SEQ ID NO: 587108 - RNA, 19 nt, Artificial Sequence
  Description of Artificial Sequence: Synthetic oligonucleotide
ggcugacucucgguagacu

SEQ ID NO: 587109 - RNA, 19 nt, Artificial Sequence
  Description of Artificial Sequence: Synthetic oligonucleotide
gaucagcuuugcgccucuu

SEQ ID NO: 587110 - RNA, 19 nt, Artificial Sequence
  Description of Artificial Sequence: Synthetic oligonucleotide
ccgacagcgccucuucuuu

SEQ ID NO: 587111 - RNA, 19 nt, Artificial Sequence
  Description of Artificial Sequence: Synthetic oligonucleotide
ccccaggauagguccacau

SEQ ID NO: 587112 - RNA, 19 nt, Artificial Sequence
  Description of Artificial Sequence: Synthetic oligonucleotide
gggcuaggagacagcuccu

SEQ ID NO: 587113 - RNA, 19 nt, Artificial Sequence
  Description of Artificial Sequence: Synthetic oligonucleotide
cgccgauuuucaucuguau

SEQ ID NO: 587114 - RNA, 19 nt, Artificial Sequence
  Description of Artificial Sequence: Synthetic oligonucleotide
cgacaccaggcagccgaca

SEQ ID NO: 587115 - RNA, 19 nt, Artificial Sequence
  Description of Artificial Sequence: Synthetic oligonucleotide
cggcacucccuuccuuacu

SEQ ID NO: 587116 - RNA, 19 nt, Artificial Sequence
  Description of Artificial Sequence: Synthetic oligonucleotide
ccgggacauagugcacauu

SEQ ID NO: 587117 - RNA, 19 nt, Artificial Sequence
  Description of Artificial Sequence: Synthetic oligonucleotide
cggcgcugacgauguucuu

SEQ ID NO: 587118 - RNA, 19 nt, Artificial Sequence
  Description of Artificial Sequence: Synthetic oligonucleotide
aaacuuuaaagccaguccc

SEQ ID NO: 587119 - RNA, 19 nt, Artificial Sequence
  Description of Artificial Sequence: Synthetic oligonucleotide
aaaacuuuaaagccagucc

SEQ ID NO: 587120 - RNA, 19 nt, Artificial Sequence
  Description of Artificial Sequence: Synthetic oligonucleotide
auuaauaccgcauuagcgc

SEQ ID NO: 587121 - RNA, 19 nt, Artificial Sequence
  Description of Artificial Sequence: Synthetic oligonucleotide
ugaacaaaguacuugaagg

SEQ ID NO: 587122 - RNA, 19 nt, Artificial Sequence
  Description of Artificial Sequence: Synthetic oligonucleotide
aaagaaggcgacuacaaac

SEQ ID NO: 587123 - RNA, 19 nt, Artificial Sequence
  Description of Artificial Sequence: Synthetic oligonucleotide
aaagguaucacccacuggu

SEQ ID NO: 587124 - RNA, 19 nt, Artificial Sequence
  Description of Artificial Sequence: Synthetic oligonucleotide
caguuuuagauuaauaccg

SEQ ID NO: 587125 - RNA, 19 nt, Artificial Sequence
  Description of Artificial Sequence: Synthetic oligonucleotide
agagcagaagucuuaaacc

SEQ ID NO: 587126 - RNA, 19 nt, Artificial Sequence
  Description of Artificial Sequence: Synthetic oligonucleotide
gauguuaaaagguugccag

SEQ ID NO: 587127 - RNA, 19 nt, Artificial Sequence
  Description of Artificial Sequence: Synthetic oligonucleotide
aauaaggugcccaacuucc

SEQ ID NO: 587128 - RNA, 19 nt, Artificial Sequence
  Description of Artificial Sequence: Synthetic oligonucleotide
uuuaaagccagucccuucg

SEQ ID NO: 587129 - RNA, 19 nt, Artificial Sequence
  Description of Artificial Sequence: Synthetic oligonucleotide
aauuuauuggucuggaaau

SEQ ID NO: 587130 - RNA, 19 nt, Artificial Sequence
  Description of Artificial Sequence: Synthetic oligonucleotide
agauuaauaccgcauuagc

SEQ ID NO: 587131 - RNA, 19 nt, Artificial Sequence
  Description of Artificial Sequence: Synthetic oligonucleotide
acauucauaagcacgaggc

SEQ ID NO: 587132 - RNA, 19 nt, Artificial Sequence
  Description of Artificial Sequence: Synthetic oligonucleotide
gauuaauaccgcauuagcg

SEQ ID NO: 587133 - RNA, 19 nt, Artificial Sequence
  Description of Artificial Sequence: Synthetic oligonucleotide
ucauuuuaaagcccgggag

SEQ ID NO: 587134 - RNA, 19 nt, Artificial Sequence
  Description of Artificial Sequence: Synthetic oligonucleotide
uuguuagcagaacagaaca

SEQ ID NO: 587135 - RNA, 19 nt, Artificial Sequence
  Description of Artificial Sequence: Synthetic oligonucleotide
gaagucuuaaaccacugug

SEQ ID NO: 587136 - RNA, 19 nt, Artificial Sequence
  Description of Artificial Sequence: Synthetic oligonucleotide
ugguaagugaggaugacug

SEQ ID NO: 587137 - RNA, 19 nt, Artificial Sequence
  Description of Artificial Sequence: Synthetic oligonucleotide
ucuuucuacacaaggucgg

SEQ ID NO: 587138 - RNA, 19 nt, Artificial Sequence
  Description of Artificial Sequence: Synthetic oligonucleotide
aagagguguagguugcugg

SEQ ID NO: 587139 - RNA, 19 nt, Artificial Sequence
  Description of Artificial Sequence: Synthetic oligonucleotide
acaaacaucucauuaagaa

SEQ ID NO: 587140 - RNA, 19 nt, Artificial Sequence
  Description of Artificial Sequence: Synthetic oligonucleotide
gaagaggugagacacgacc

SEQ ID NO: 587141 - RNA, 19 nt, Artificial Sequence
  Description of Artificial Sequence: Synthetic oligonucleotide
caguuagagacauucaggc

SEQ ID NO: 587142 - RNA, 19 nt, Artificial Sequence
  Description of Artificial Sequence: Synthetic oligonucleotide
uggacgauugcccuugggg

SEQ ID NO: 587143 - RNA, 19 nt, Artificial Sequence
  Description of Artificial Sequence: Synthetic oligonucleotide
uucuaccugcccuagaucc

SEQ ID NO: 587144 - RNA, 19 nt, Artificial Sequence
  Description of Artificial Sequence: Synthetic oligonucleotide
uuuaaagcccgggagauug

SEQ ID NO: 587145 - RNA, 19 nt, Artificial Sequence
  Description of Artificial Sequence: Synthetic oligonucleotide
uucuacacaaggucggagg

SEQ ID NO: 587146 - RNA, 19 nt, Artificial Sequence
  Description of Artificial Sequence: Synthetic oligonucleotide
uuagcagaacagaacacug

SEQ ID NO: 587147 - RNA, 19 nt, Artificial Sequence
  Description of Artificial Sequence: Synthetic oligonucleotide
uuuuagauuaauaccgcau

SEQ ID NO: 587148 - RNA, 19 nt, Artificial Sequence
  Description of Artificial Sequence: Synthetic oligonucleotide
agauuguugacagucuccc

SEQ ID NO: 587149 - RNA, 19 nt, Artificial Sequence
  Description of Artificial Sequence: Synthetic oligonucleotide
cacagugugacaugcaggg

SEQ ID NO: 587150 - RNA, 19 nt, Artificial Sequence
  Description of Artificial Sequence: Synthetic oligonucleotide
uuuagauuaauaccgcauu

SEQ ID NO: 587151 - RNA, 19 nt, Artificial Sequence
  Description of Artificial Sequence: Synthetic oligonucleotide
agcauccaaaacuuuaaag

SEQ ID NO: 587152 - RNA, 19 nt, Artificial Sequence
  Description of Artificial Sequence: Synthetic oligonucleotide
caaaucagaagucuguuuc

SEQ ID NO: 587153 - RNA, 19 nt, Artificial Sequence
  Description of Artificial Sequence: Synthetic oligonucleotide
gcauccaaaacuuuaaagc

SEQ ID NO: 587154 - RNA, 19 nt, Artificial Sequence
  Description of Artificial Sequence: Synthetic oligonucleotide
uuaauaccgcauuagcgca

SEQ ID NO: 587155 - RNA, 19 nt, Artificial Sequence
  Description of Artificial Sequence: Synthetic oligonucleotide
aguuuuagauuaauaccgc

SEQ ID NO: 587156 - RNA, 19 nt, Artificial Sequence
  Description of Artificial Sequence: Synthetic oligonucleotide
gauauugagacgggcaucc

SEQ ID NO: 587157 - RNA, 19 nt, Artificial Sequence
  Description of Artificial Sequence: Synthetic oligonucleotide
uuaguuuuggcaguuuggc

SEQ ID NO: 587158 - RNA, 19 nt, Artificial Sequence
  Description of Artificial Sequence: Synthetic oligonucleotide
uucguaggguccaacuugg

SEQ ID NO: 587159 - RNA, 19 nt, Artificial Sequence
  Description of Artificial Sequence: Synthetic oligonucleotide
ucuuaaaauaaggugccca

SEQ ID NO: 587160 - RNA, 19 nt, Artificial Sequence
  Description of Artificial Sequence: Synthetic oligonucleotide
gguuguugagugcaaaucg

SEQ ID NO: 587161 - RNA, 19 nt, Artificial Sequence
  Description of Artificial Sequence: Synthetic oligonucleotide
guuagagacauucaggcaa

SEQ ID NO: 587162 - RNA, 19 nt, Artificial Sequence
  Description of Artificial Sequence: Synthetic oligonucleotide
uagauuaauaccgcauuag

SEQ ID NO: 587163 - RNA, 19 nt, Artificial Sequence
  Description of Artificial Sequence: Synthetic oligonucleotide
cuuguuagcagaacagaac

SEQ ID NO: 587164 - RNA, 19 nt, Artificial Sequence
  Description of Artificial Sequence: Synthetic oligonucleotide
uauuggucuggaaauaaau

SEQ ID NO: 587165 - RNA, 19 nt, Artificial Sequence
  Description of Artificial Sequence: Synthetic oligonucleotide
ucauuaagaaacugcccug

SEQ ID NO: 587166 - RNA, 19 nt, Artificial Sequence
  Description of Artificial Sequence: Synthetic oligonucleotide
uuagauuaauaccgcauua

SEQ ID NO: 587167 - RNA, 19 nt, Artificial Sequence
  Description of Artificial Sequence: Synthetic oligonucleotide
aaucgggucaggauguagg

SEQ ID NO: 587168 - RNA, 19 nt, Artificial Sequence
  Description of Artificial Sequence: Synthetic oligonucleotide
ucaaagaaggcgacuacaa

SEQ ID NO: 587169 - RNA, 19 nt, Artificial Sequence
  Description of Artificial Sequence: Synthetic oligonucleotide
aguuacaaauuuauugguc

SEQ ID NO: 587170 - RNA, 19 nt, Artificial Sequence
  Description of Artificial Sequence: Synthetic oligonucleotide
gagggguacauguaccccg

SEQ ID NO: 587171 - RNA, 19 nt, Artificial Sequence
  Description of Artificial Sequence: Synthetic oligonucleotide
cuucgagugaacugcgugg

SEQ ID NO: 587172 - RNA, 19 nt, Artificial Sequence
  Description of Artificial Sequence: Synthetic oligonucleotide
uaguuuuggcaguuuggcg

SEQ ID NO: 587173 - RNA, 19 nt, Artificial Sequence
  Description of Artificial Sequence: Synthetic oligonucleotide
ugaaucucuuccuugccga

SEQ ID NO: 587174 - RNA, 19 nt, Artificial Sequence
  Description of Artificial Sequence: Synthetic oligonucleotide
ucuacacaaggucggagga

SEQ ID NO: 587175 - RNA, 19 nt, Artificial Sequence
  Description of Artificial Sequence: Synthetic oligonucleotide
auugagacgggcauccucg

SEQ ID NO: 587176 - RNA, 19 nt, Artificial Sequence
  Description of Artificial Sequence: Synthetic oligonucleotide
gagcagaagucuuaaacca

SEQ ID NO: 587177 - RNA, 19 nt, Artificial Sequence
  Description of Artificial Sequence: Synthetic oligonucleotide
aucuuucuacacaaggucg

SEQ ID NO: 587178 - RNA, 19 nt, Artificial Sequence
  Description of Artificial Sequence: Synthetic oligonucleotide
ucacucuuacaaaagcagu

SEQ ID NO: 587179 - RNA, 19 nt, Artificial Sequence
  Description of Artificial Sequence: Synthetic oligonucleotide
uaggcgcugaugaagaggu

SEQ ID NO: 587180 - RNA, 19 nt, Artificial Sequence
  Description of Artificial Sequence: Synthetic oligonucleotide
ugugcugacgguacgugug

SEQ ID NO: 587181 - RNA, 19 nt, Artificial Sequence
  Description of Artificial Sequence: Synthetic oligonucleotide
aguugcauuccaccacagc

SEQ ID NO: 587182 - RNA, 19 nt, Artificial Sequence
  Description of Artificial Sequence: Synthetic oligonucleotide
aucgggucaggauguaggc

SEQ ID NO: 587183 - RNA, 19 nt, Artificial Sequence
  Description of Artificial Sequence: Synthetic oligonucleotide
ucagcauccaaaacuuuaa

SEQ ID NO: 587184 - RNA, 19 nt, Artificial Sequence
  Description of Artificial Sequence: Synthetic oligonucleotide
augccugcgaaccaggaug

SEQ ID NO: 587185 - RNA, 19 nt, Artificial Sequence
  Description of Artificial Sequence: Synthetic oligonucleotide
uguuaaaagguugccagaa

SEQ ID NO: 587186 - RNA, 19 nt, Artificial Sequence
  Description of Artificial Sequence: Synthetic oligonucleotide
acaaagguaucacccacug

SEQ ID NO: 587187 - RNA, 19 nt, Artificial Sequence
  Description of Artificial Sequence: Synthetic oligonucleotide
gaagaaccagcaaugggcc

SEQ ID NO: 587188 - RNA, 19 nt, Artificial Sequence
  Description of Artificial Sequence: Synthetic oligonucleotide
aauaccgcauuagcgcagg

SEQ ID NO: 587189 - RNA, 19 nt, Artificial Sequence
  Description of Artificial Sequence: Synthetic oligonucleotide
gacgguguggguuccaggc

SEQ ID NO: 587190 - RNA, 19 nt, Artificial Sequence
  Description of Artificial Sequence: Synthetic oligonucleotide
uacacaaggucggaggaag

SEQ ID NO: 587191 - RNA, 19 nt, Artificial Sequence
  Description of Artificial Sequence: Synthetic oligonucleotide
acugcguggacucgguuuc

SEQ ID NO: 587192 - RNA, 19 nt, Artificial Sequence
  Description of Artificial Sequence: Synthetic oligonucleotide
uguuagcagaacagaacac

SEQ ID NO: 587193 - RNA, 19 nt, Artificial Sequence
  Description of Artificial Sequence: Synthetic oligonucleotide
auggcagacagcaaaaugu

SEQ ID NO: 587194 - RNA, 19 nt, Artificial Sequence
  Description of Artificial Sequence: Synthetic oligonucleotide
guauuugcggaucacuuuc

SEQ ID NO: 587195 - RNA, 19 nt, Artificial Sequence
  Description of Artificial Sequence: Synthetic oligonucleotide
cuuucauuuuaaagcccgg

SEQ ID NO: 587196 - RNA, 19 nt, Artificial Sequence
  Description of Artificial Sequence: Synthetic oligonucleotide
guucaugccgaugucgugg

SEQ ID NO: 587197 - RNA, 19 nt, Artificial Sequence
  Description of Artificial Sequence: Synthetic oligonucleotide
agguaucacccacugguuc

SEQ ID NO: 587198 - RNA, 19 nt, Artificial Sequence
  Description of Artificial Sequence: Synthetic oligonucleotide
cauucauaagcacgaggcc

SEQ ID NO: 587199 - RNA, 19 nt, Artificial Sequence
  Description of Artificial Sequence: Synthetic oligonucleotide
aagcccgggagauuguuga

SEQ ID NO: 587200 - RNA, 19 nt, Artificial Sequence
  Description of Artificial Sequence: Synthetic oligonucleotide
cuucguaggguccaacuug

SEQ ID NO: 587201 - RNA, 19 nt, Artificial Sequence
  Description of Artificial Sequence: Synthetic oligonucleotide
cauggaauguacagacccc

SEQ ID NO: 587202 - RNA, 19 nt, Artificial Sequence
  Description of Artificial Sequence: Synthetic oligonucleotide
gcaguuuggcgucugaggg

SEQ ID NO: 587203 - RNA, 19 nt, Artificial Sequence
  Description of Artificial Sequence: Synthetic oligonucleotide
agcgaguucccauggaaug

SEQ ID NO: 587204 - RNA, 19 nt, Artificial Sequence
  Description of Artificial Sequence: Synthetic oligonucleotide
uaauaccgcauuagcgcag

SEQ ID NO: 587205 - RNA, 19 nt, Artificial Sequence
  Description of Artificial Sequence: Synthetic oligonucleotide
augccgaugacacucuuga

SEQ ID NO: 587206 - RNA, 19 nt, Artificial Sequence
  Description of Artificial Sequence: Synthetic oligonucleotide
ugacacccaguauuugcgg

SEQ ID NO: 587207 - RNA, 19 nt, Artificial Sequence
  Description of Artificial Sequence: Synthetic oligonucleotide
gaugucgugguaagugagg

SEQ ID NO: 587208 - RNA, 19 nt, Artificial Sequence
  Description of Artificial Sequence: Synthetic oligonucleotide
guuuuagauuaauaccgca

SEQ ID NO: 587209 - RNA, 19 nt, Artificial Sequence
  Description of Artificial Sequence: Synthetic oligonucleotide
ucugagggaggccaccaca

SEQ ID NO: 587210 - RNA, 19 nt, Artificial Sequence
  Description of Artificial Sequence: Synthetic oligonucleotide
augaagagguguagguugc

SEQ ID NO: 587211 - RNA, 19 nt, Artificial Sequence
  Description of Artificial Sequence: Synthetic oligonucleotide
auuagcgcaggguggcagg

SEQ ID NO: 587212 - RNA, 19 nt, Artificial Sequence
  Description of Artificial Sequence: Synthetic oligonucleotide
aaacuggugaaggacucca

SEQ ID NO: 587213 - RNA, 19 nt, Artificial Sequence
  Description of Artificial Sequence: Synthetic oligonucleotide
ccauggaauguacagaccc

SEQ ID NO: 587214 - RNA, 19 nt, Artificial Sequence
  Description of Artificial Sequence: Synthetic oligonucleotide
cauggagggguacauguac

SEQ ID NO: 587215 - RNA, 19 nt, Artificial Sequence
  Description of Artificial Sequence: Synthetic oligonucleotide
uaccccgcugggaaggacg

SEQ ID NO: 587216 - RNA, 19 nt, Artificial Sequence
  Description of Artificial Sequence: Synthetic oligonucleotide
gucgugguaagugaggaug

SEQ ID NO: 587217 - RNA, 19 nt, Artificial Sequence
  Description of Artificial Sequence: Synthetic oligonucleotide
ccagcaaugggccaguuag

SEQ ID NO: 587218 - RNA, 19 nt, Artificial Sequence
  Description of Artificial Sequence: Synthetic oligonucleotide
aagaggugagacacgacca

SEQ ID NO: 587219 - RNA, 19 nt, Artificial Sequence
  Description of Artificial Sequence: Synthetic oligonucleotide
agaagucuuaaaccacugu

SEQ ID NO: 587220 - RNA, 19 nt, Artificial Sequence
  Description of Artificial Sequence: Synthetic oligonucleotide
guacgugugcaccaccucc

SEQ ID NO: 587221 - RNA, 19 nt, Artificial Sequence
  Description of Artificial Sequence: Synthetic oligonucleotide
gagacgggcauccucgcug

SEQ ID NO: 587222 - RNA, 19 nt, Artificial Sequence
  Description of Artificial Sequence: Synthetic oligonucleotide
ggugaaggacuccaggaag

SEQ ID NO: 587223 - RNA, 19 nt, Artificial Sequence
  Description of Artificial Sequence: Synthetic oligonucleotide
auuuuaaagcccgggagau

SEQ ID NO: 587224 - RNA, 19 nt, Artificial Sequence
  Description of Artificial Sequence: Synthetic oligonucleotide
auguuaaaagguugccaga

SEQ ID NO: 587225 - RNA, 19 nt, Artificial Sequence
  Description of Artificial Sequence: Synthetic oligonucleotide
aaugccugcgaaccaggau

SEQ ID NO: 587226 - RNA, 19 nt, Artificial Sequence
  Description of Artificial Sequence: Synthetic oligonucleotide
uuucuacacaaggucggag

SEQ ID NO: 587227 - RNA, 19 nt, Artificial Sequence
  Description of Artificial Sequence: Synthetic oligonucleotide
auaagcacgaggccuucca

SEQ ID NO: 587228 - RNA, 19 nt, Artificial Sequence
  Description of Artificial Sequence: Synthetic oligonucleotide
aaggcgacuacaaaccaaa

SEQ ID NO: 587229 - RNA, 19 nt, Artificial Sequence
  Description of Artificial Sequence: Synthetic oligonucleotide
uggugaaggacuccaggaa

SEQ ID NO: 587230 - RNA, 19 nt, Artificial Sequence
  Description of Artificial Sequence: Synthetic oligonucleotide
gaugacacucuugagccca

SEQ ID NO: 587231 - RNA, 19 nt, Artificial Sequence
  Description of Artificial Sequence: Synthetic oligonucleotide
uccgggagcgcaucaggcg

SEQ ID NO: 587232 - RNA, 19 nt, Artificial Sequence
  Description of Artificial Sequence: Synthetic oligonucleotide
gacacgaccauguccggca

SEQ ID NO: 587233 - RNA, 19 nt, Artificial Sequence
  Description of Artificial Sequence: Synthetic oligonucleotide
agucccuucgagugaacug

SEQ ID NO: 587234 - RNA, 19 nt, Artificial Sequence
  Description of Artificial Sequence: Synthetic oligonucleotide
agggugacgguguggguuc

SEQ ID NO: 587235 - RNA, 19 nt, Artificial Sequence
  Description of Artificial Sequence: Synthetic oligonucleotide
gaaccaggaugcuggauca

SEQ ID NO: 587236 - RNA, 19 nt, Artificial Sequence
  Description of Artificial Sequence: Synthetic oligonucleotide
uacgugugcaccaccucca

SEQ ID NO: 587237 - RNA, 19 nt, Artificial Sequence
  Description of Artificial Sequence: Synthetic oligonucleotide
uuaaagccagucccuucga

SEQ ID NO: 587238 - RNA, 19 nt, Artificial Sequence
  Description of Artificial Sequence: Synthetic oligonucleotide
uccggcagggcuugggucc

SEQ ID NO: 587239 - RNA, 19 nt, Artificial Sequence
  Description of Artificial Sequence: Synthetic oligonucleotide
guacauguaccccgcuggg

SEQ ID NO: 587240 - RNA, 19 nt, Artificial Sequence
  Description of Artificial Sequence: Synthetic oligonucleotide
cuugagcccaaacugguga

SEQ ID NO: 587241 - RNA, 19 nt, Artificial Sequence
  Description of Artificial Sequence: Synthetic oligonucleotide
cccuucuuaaaauaaggug

SEQ ID NO: 587242 - RNA, 19 nt, Artificial Sequence
  Description of Artificial Sequence: Synthetic oligonucleotide
auaaggugcccaacuuccc

SEQ ID NO: 587243 - RNA, 19 nt, Artificial Sequence
  Description of Artificial Sequence: Synthetic oligonucleotide
aagaaccagcaaugggcca

SEQ ID NO: 587244 - RNA, 19 nt, Artificial Sequence
  Description of Artificial Sequence: Synthetic oligonucleotide
caaagguaucacccacugg

SEQ ID NO: 587245 - RNA, 19 nt, Artificial Sequence
  Description of Artificial Sequence: Synthetic oligonucleotide
ucccuucgagugaacugcg

SEQ ID NO: 587246 - RNA, 19 nt, Artificial Sequence
  Description of Artificial Sequence: Synthetic oligonucleotide
ugccugcgaaccaggaugc

SEQ ID NO: 587247 - RNA, 19 nt, Artificial Sequence
  Description of Artificial Sequence: Synthetic oligonucleotide
uaaucucugucuuguuuuc

SEQ ID NO: 587248 - RNA, 19 nt, Artificial Sequence
  Description of Artificial Sequence: Synthetic oligonucleotide
caucuugggucugccaucg

SEQ ID NO: 587249 - RNA, 19 nt, Artificial Sequence
  Description of Artificial Sequence: Synthetic oligonucleotide
ucgcuccccuuucaaauca

SEQ ID NO: 587250 - RNA, 19 nt, Artificial Sequence
  Description of Artificial Sequence: Synthetic oligonucleotide
acgaccauguccggcaggg

SEQ ID NO: 587251 - RNA, 19 nt, Artificial Sequence
  Description of Artificial Sequence: Synthetic oligonucleotide
agacgggcauccucgcugg

SEQ ID NO: 587252 - RNA, 19 nt, Artificial Sequence
  Description of Artificial Sequence: Synthetic oligonucleotide
gucccuucgagugaacugc

SEQ ID NO: 587253 - RNA, 19 nt, Artificial Sequence
  Description of Artificial Sequence: Synthetic oligonucleotide
ucuaccugcccuagauccu

SEQ ID NO: 587254 - RNA, 19 nt, Artificial Sequence
  Description of Artificial Sequence: Synthetic oligonucleotide
ccaacuuggaguugcauuc

SEQ ID NO: 587255 - RNA, 19 nt, Artificial Sequence
  Description of Artificial Sequence: Synthetic oligonucleotide
cauuguucccgguggcacc

SEQ ID NO: 587256 - RNA, 19 nt, Artificial Sequence
  Description of Artificial Sequence: Synthetic oligonucleotide
aaggucggaggaagccucc

SEQ ID NO: 587257 - RNA, 19 nt, Artificial Sequence
  Description of Artificial Sequence: Synthetic oligonucleotide
cuggcagagggcauguauc

SEQ ID NO: 587258 - RNA, 19 nt, Artificial Sequence
  Description of Artificial Sequence: Synthetic oligonucleotide
agacacgaccauguccggc

SEQ ID NO: 587259 - RNA, 19 nt, Artificial Sequence
  Description of Artificial Sequence: Synthetic oligonucleotide
uuggcgggcugagagaucu

SEQ ID NO: 587260 - RNA, 19 nt, Artificial Sequence
  Description of Artificial Sequence: Synthetic oligonucleotide
uaagcacgaggccuuccac

SEQ ID NO: 587261 - RNA, 19 nt, Artificial Sequence
  Description of Artificial Sequence: Synthetic oligonucleotide
cuuaaaccacugugacacc

SEQ ID NO: 587262 - RNA, 19 nt, Artificial Sequence
  Description of Artificial Sequence: Synthetic oligonucleotide
uggcaaaaugccugcgaac

SEQ ID NO: 587263 - RNA, 19 nt, Artificial Sequence
  Description of Artificial Sequence: Synthetic oligonucleotide
aggggcauccacauggcag

SEQ ID NO: 587264 - RNA, 19 nt, Artificial Sequence
  Description of Artificial Sequence: Synthetic oligonucleotide
aggaaccgacugcagagca

SEQ ID NO: 587265 - RNA, 19 nt, Artificial Sequence
  Description of Artificial Sequence: Synthetic oligonucleotide
ugacgguguggguuccagg

SEQ ID NO: 587266 - RNA, 19 nt, Artificial Sequence
  Description of Artificial Sequence: Synthetic oligonucleotide
gaggugacacuggagccag

SEQ ID NO: 587267 - RNA, 19 nt, Artificial Sequence
  Description of Artificial Sequence: Synthetic oligonucleotide
ugguucacacugugggaug

SEQ ID NO: 587268 - RNA, 19 nt, Artificial Sequence
  Description of Artificial Sequence: Synthetic oligonucleotide
ugauauugagacgggcauc

SEQ ID NO: 587269 - RNA, 19 nt, Artificial Sequence
  Description of Artificial Sequence: Synthetic oligonucleotide
ugacgguacgugugcacca

SEQ ID NO: 587270 - RNA, 19 nt, Artificial Sequence
  Description of Artificial Sequence: Synthetic oligonucleotide
uucaugccgaugucguggu

SEQ ID NO: 587271 - RNA, 19 nt, Artificial Sequence
  Description of Artificial Sequence: Synthetic oligonucleotide
gaaccgacugcagagcaga

SEQ ID NO: 587272 - RNA, 19 nt, Artificial Sequence
  Description of Artificial Sequence: Synthetic oligonucleotide
ggcgacuacaaaccaaaac

SEQ ID NO: 587273 - RNA, 19 nt, Artificial Sequence
  Description of Artificial Sequence: Synthetic oligonucleotide
cugacgguacgugugcacc

SEQ ID NO: 587274 - RNA, 19 nt, Artificial Sequence
  Description of Artificial Sequence: Synthetic oligonucleotide
caaggucggaggaagccuc

SEQ ID NO: 587275 - RNA, 19 nt, Artificial Sequence
  Description of Artificial Sequence: Synthetic oligonucleotide
gacuggacgauugcccuug

SEQ ID NO: 587276 - RNA, 19 nt, Artificial Sequence
  Description of Artificial Sequence: Synthetic oligonucleotide
guuagcagaacagaacacu

SEQ ID NO: 587277 - RNA, 19 nt, Artificial Sequence
  Description of Artificial Sequence: Synthetic oligonucleotide
augccgaugucgugguaag

SEQ ID NO: 587278 - RNA, 19 nt, Artificial Sequence
  Description of Artificial Sequence: Synthetic oligonucleotide
gugaacugcguggacucgg

SEQ ID NO: 587279 - RNA, 19 nt, Artificial Sequence
  Description of Artificial Sequence: Synthetic oligonucleotide
uuaaagcccgggagauugu

SEQ ID NO: 587280 - RNA, 19 nt, Artificial Sequence
  Description of Artificial Sequence: Synthetic oligonucleotide
gaaggacggggcaccaucc

SEQ ID NO: 587281 - RNA, 19 nt, Artificial Sequence
  Description of Artificial Sequence: Synthetic oligonucleotide
aucgccagaguucacucuu

SEQ ID NO: 587282 - RNA, 19 nt, Artificial Sequence
  Description of Artificial Sequence: Synthetic oligonucleotide
agggguacauguaccccgc

SEQ ID NO: 587283 - RNA, 19 nt, Artificial Sequence
  Description of Artificial Sequence: Synthetic oligonucleotide
gguaucacccacugguuca

SEQ ID NO: 587284 - RNA, 19 nt, Artificial Sequence
  Description of Artificial Sequence: Synthetic oligonucleotide
gggcauguaucccaugccc

SEQ ID NO: 587285 - RNA, 19 nt, Artificial Sequence
  Description of Artificial Sequence: Synthetic oligonucleotide
caccaggccacuuguuagc

SEQ ID NO: 587286 - RNA, 19 nt, Artificial Sequence
  Description of Artificial Sequence: Synthetic oligonucleotide
agaggugagacacgaccau

SEQ ID NO: 587287 - RNA, 19 nt, Artificial Sequence
  Description of Artificial Sequence: Synthetic oligonucleotide
auguaccccgcugggaagg

SEQ ID NO: 587288 - RNA, 19 nt, Artificial Sequence
  Description of Artificial Sequence: Synthetic oligonucleotide
augucgugguaagugagga

SEQ ID NO: 587289 - RNA, 19 nt, Artificial Sequence
  Description of Artificial Sequence: Synthetic oligonucleotide
gcugugaaucucuuccuug

SEQ ID NO: 587290 - RNA, 19 nt, Artificial Sequence
  Description of Artificial Sequence: Synthetic oligonucleotide
aaagcccgggagauuguug

SEQ ID NO: 587291 - RNA, 19 nt, Artificial Sequence
  Description of Artificial Sequence: Synthetic oligonucleotide
uccuugccgaagaggugag

SEQ ID NO: 587292 - RNA, 19 nt, Artificial Sequence
  Description of Artificial Sequence: Synthetic oligonucleotide
cugcccuagauccugccuc

SEQ ID NO: 587293 - RNA, 19 nt, Artificial Sequence
  Description of Artificial Sequence: Synthetic oligonucleotide
ggacaaagguaucacccac

SEQ ID NO: 587294 - RNA, 19 nt, Artificial Sequence
  Description of Artificial Sequence: Synthetic oligonucleotide
agacugccuagcaggacac

SEQ ID NO: 587295 - RNA, 19 nt, Artificial Sequence
  Description of Artificial Sequence: Synthetic oligonucleotide
uggaucaaccugggcuugg

SEQ ID NO: 587296 - RNA, 19 nt, Artificial Sequence
  Description of Artificial Sequence: Synthetic oligonucleotide
ggugauauugagacgggca

SEQ ID NO: 587297 - RNA, 19 nt, Artificial Sequence
  Description of Artificial Sequence: Synthetic oligonucleotide
acacaaggucggaggaagc

SEQ ID NO: 587298 - RNA, 19 nt, Artificial Sequence
  Description of Artificial Sequence: Synthetic oligonucleotide
ggaguugaagagcggguug

SEQ ID NO: 587299 - RNA, 19 nt, Artificial Sequence
  Description of Artificial Sequence: Synthetic oligonucleotide
auuugcggaucacuuucau

SEQ ID NO: 587300 - RNA, 19 nt, Artificial Sequence
  Description of Artificial Sequence: Synthetic oligonucleotide
augugcugacgguacgugu

SEQ ID NO: 587301 - RNA, 19 nt, Artificial Sequence
  Description of Artificial Sequence: Synthetic oligonucleotide
aacuggugaaggacuccag

SEQ ID NO: 587302 - RNA, 19 nt, Artificial Sequence
  Description of Artificial Sequence: Synthetic oligonucleotide
acaaggucggaggaagccu

SEQ ID NO: 587303 - RNA, 19 nt, Artificial Sequence
  Description of Artificial Sequence: Synthetic oligonucleotide
acgugugcaccaccuccac

SEQ ID NO: 587304 - RNA, 19 nt, Artificial Sequence
  Description of Artificial Sequence: Synthetic oligonucleotide
aagcgaguucccauggaau

SEQ ID NO: 587305 - RNA, 19 nt, Artificial Sequence
  Description of Artificial Sequence: Synthetic oligonucleotide
uguccggcagggcuugggu

SEQ ID NO: 587306 - RNA, 19 nt, Artificial Sequence
  Description of Artificial Sequence: Synthetic oligonucleotide
acacccaguauuugcggau

SEQ ID NO: 587307 - RNA, 19 nt, Artificial Sequence
  Description of Artificial Sequence: Synthetic oligonucleotide
caccuguugaguucuccuc

SEQ ID NO: 587308 - RNA, 19 nt, Artificial Sequence
  Description of Artificial Sequence: Synthetic oligonucleotide
ggcaccauccuguuggcca

SEQ ID NO: 587309 - RNA, 19 nt, Artificial Sequence
  Description of Artificial Sequence: Synthetic oligonucleotide
aaacugcccuggccugguc

SEQ ID NO: 587310 - RNA, 19 nt, Artificial Sequence
  Description of Artificial Sequence: Synthetic oligonucleotide
uggcaguuuggcgucugag

SEQ ID NO: 587311 - RNA, 19 nt, Artificial Sequence
  Description of Artificial Sequence: Synthetic oligonucleotide
uugagacgggcauccucgc

SEQ ID NO: 587312 - RNA, 19 nt, Artificial Sequence
  Description of Artificial Sequence: Synthetic oligonucleotide
ugcccuagauccugccucu

SEQ ID NO: 587313 - RNA, 19 nt, Artificial Sequence
  Description of Artificial Sequence: Synthetic oligonucleotide
aggugagacacgaccaugu

SEQ ID NO: 587314 - RNA, 19 nt, Artificial Sequence
  Description of Artificial Sequence: Synthetic oligonucleotide
cucgccggcuguuguaggc

SEQ ID NO: 587315 - RNA, 19 nt, Artificial Sequence
  Description of Artificial Sequence: Synthetic oligonucleotide
ugagacgggcauccucgcu

SEQ ID NO: 587316 - RNA, 19 nt, Artificial Sequence
  Description of Artificial Sequence: Synthetic oligonucleotide
cauuagcgcaggguggcag

SEQ ID NO: 587317 - RNA, 19 nt, Artificial Sequence
  Description of Artificial Sequence: Synthetic oligonucleotide
gccacuuguuagcagaaca

SEQ ID NO: 587318 - RNA, 19 nt, Artificial Sequence
  Description of Artificial Sequence: Synthetic oligonucleotide
gggaagcgaguucccaugg

SEQ ID NO: 587319 - RNA, 19 nt, Artificial Sequence
  Description of Artificial Sequence: Synthetic oligonucleotide
ugccgaugacacucuugag

SEQ ID NO: 587320 - RNA, 19 nt, Artificial Sequence
  Description of Artificial Sequence: Synthetic oligonucleotide
caugguucucucugaagaa

SEQ ID NO: 587321 - RNA, 19 nt, Artificial Sequence
  Description of Artificial Sequence: Synthetic oligonucleotide
ucaggguuguugagugcaa

SEQ ID NO: 587322 - RNA, 19 nt, Artificial Sequence
  Description of Artificial Sequence: Synthetic oligonucleotide
cagaguucacucuuacaaa

SEQ ID NO: 587323 - RNA, 19 nt, Artificial Sequence
  Description of Artificial Sequence: Synthetic oligonucleotide
aggacggggcaccauccug

SEQ ID NO: 587324 - RNA, 19 nt, Artificial Sequence
  Description of Artificial Sequence: Synthetic oligonucleotide
gugauauugagacgggcau

SEQ ID NO: 587325 - RNA, 19 nt, Artificial Sequence
  Description of Artificial Sequence: Synthetic oligonucleotide
agcccgggagauuguugac

SEQ ID NO: 587326 - RNA, 19 nt, Artificial Sequence
  Description of Artificial Sequence: Synthetic oligonucleotide
uuuggcgucugaggguaga

SEQ ID NO: 587327 - RNA, 19 nt, Artificial Sequence
  Description of Artificial Sequence: Synthetic oligonucleotide
ucgagugaacugcguggac

SEQ ID NO: 587328 - RNA, 19 nt, Artificial Sequence
  Description of Artificial Sequence: Synthetic oligonucleotide
cucgcuccccuuucaaauc

SEQ ID NO: 587329 - RNA, 19 nt, Artificial Sequence
  Description of Artificial Sequence: Synthetic oligonucleotide
ucgccggcuguuguaggcg

SEQ ID NO: 587330 - RNA, 19 nt, Artificial Sequence
  Description of Artificial Sequence: Synthetic oligonucleotide
aucuugggucugccaucgc

SEQ ID NO: 587331 - RNA, 19 nt, Artificial Sequence
  Description of Artificial Sequence: Synthetic oligonucleotide
acccaguauuugcggauca

SEQ ID NO: 587332 - RNA, 19 nt, Artificial Sequence
  Description of Artificial Sequence: Synthetic oligonucleotide
gcauguaucccaugcccug

SEQ ID NO: 587333 - RNA, 19 nt, Artificial Sequence
  Description of Artificial Sequence: Synthetic oligonucleotide
uucccgguggcacccgagu

SEQ ID NO: 587334 - RNA, 19 nt, Artificial Sequence
  Description of Artificial Sequence: Synthetic oligonucleotide
uuggcgucugaggguagag

SEQ ID NO: 587335 - RNA, 19 nt, Artificial Sequence
  Description of Artificial Sequence: Synthetic oligonucleotide
gugcugacgguacgugugc

SEQ ID NO: 587336 - RNA, 19 nt, Artificial Sequence
  Description of Artificial Sequence: Synthetic oligonucleotide
auaccgcauuagcgcaggg

SEQ ID NO: 587337 - RNA, 19 nt, Artificial Sequence
  Description of Artificial Sequence: Synthetic oligonucleotide
uuggcaguuuggcgucuga

SEQ ID NO: 587338 - RNA, 19 nt, Artificial Sequence
  Description of Artificial Sequence: Synthetic oligonucleotide
acuggacgauugcccuugg

SEQ ID NO: 587339 - RNA, 19 nt, Artificial Sequence
  Description of Artificial Sequence: Synthetic oligonucleotide
ugcggaucacuuucauuuu

SEQ ID NO: 587340 - RNA, 19 nt, Artificial Sequence
  Description of Artificial Sequence: Synthetic oligonucleotide
uaccgcauuagcgcagggu

SEQ ID NO: 587341 - RNA, 19 nt, Artificial Sequence
  Description of Artificial Sequence: Synthetic oligonucleotide
ggggagggaagcgaguucc

SEQ ID NO: 587342 - RNA, 19 nt, Artificial Sequence
  Description of Artificial Sequence: Synthetic oligonucleotide
uccacccggagaucuugga

SEQ ID NO: 587343 - RNA, 19 nt, Artificial Sequence
  Description of Artificial Sequence: Synthetic oligonucleotide
cuuaaucucugucuuguuu

SEQ ID NO: 587344 - RNA, 19 nt, Artificial Sequence
  Description of Artificial Sequence: Synthetic oligonucleotide
acacgaccauguccggcag

SEQ ID NO: 587345 - RNA, 19 nt, Artificial Sequence
  Description of Artificial Sequence: Synthetic oligonucleotide
cauaagcacgaggccuucc

SEQ ID NO: 587346 - RNA, 19 nt, Artificial Sequence
  Description of Artificial Sequence: Synthetic oligonucleotide
uuuuaaagcccgggagauu

SEQ ID NO: 587347 - RNA, 19 nt, Artificial Sequence
  Description of Artificial Sequence: Synthetic oligonucleotide
gguggcacccgaguugggg

SEQ ID NO: 587348 - RNA, 19 nt, Artificial Sequence
  Description of Artificial Sequence: Synthetic oligonucleotide
cccgggagauuguugacag

SEQ ID NO: 587349 - RNA, 19 nt, Artificial Sequence
  Description of Artificial Sequence: Synthetic oligonucleotide
cuggacgauugcccuuggg

SEQ ID NO: 587350 - RNA, 19 nt, Artificial Sequence
  Description of Artificial Sequence: Synthetic oligonucleotide
cucagcaagcuuggcgggc

SEQ ID NO: 587351 - RNA, 19 nt, Artificial Sequence
  Description of Artificial Sequence: Synthetic oligonucleotide
cuuggguccacccggagau

SEQ ID NO: 587352 - RNA, 19 nt, Artificial Sequence
  Description of Artificial Sequence: Synthetic oligonucleotide
gggccaguuagagacauuc

SEQ ID NO: 587353 - RNA, 19 nt, Artificial Sequence
  Description of Artificial Sequence: Synthetic oligonucleotide
ccuucgagugaacugcgug

SEQ ID NO: 587354 - RNA, 19 nt, Artificial Sequence
  Description of Artificial Sequence: Synthetic oligonucleotide
ccggcauuguucccggugg

SEQ ID NO: 587355 - RNA, 19 nt, Artificial Sequence
  Description of Artificial Sequence: Synthetic oligonucleotide
ggguacauguaccccgcug

SEQ ID NO: 587356 - RNA, 19 nt, Artificial Sequence
  Description of Artificial Sequence: Synthetic oligonucleotide
gauuguugacagucucccu

SEQ ID NO: 587357 - RNA, 19 nt, Artificial Sequence
  Description of Artificial Sequence: Synthetic oligonucleotide
ccaccaggccacuuguuag

SEQ ID NO: 587358 - RNA, 19 nt, Artificial Sequence
  Description of Artificial Sequence: Synthetic oligonucleotide
uguucccgguggcacccga

SEQ ID NO: 587359 - RNA, 19 nt, Artificial Sequence
  Description of Artificial Sequence: Synthetic oligonucleotide
cuaagggagagaucacagu

SEQ ID NO: 587360 - RNA, 19 nt, Artificial Sequence
  Description of Artificial Sequence: Synthetic oligonucleotide
gucucgccggcuguuguag

SEQ ID NO: 587361 - RNA, 19 nt, Artificial Sequence
  Description of Artificial Sequence: Synthetic oligonucleotide
ccccuuucaaaucagaagu

SEQ ID NO: 587362 - RNA, 19 nt, Artificial Sequence
  Description of Artificial Sequence: Synthetic oligonucleotide
cuucugcacagggauucac

SEQ ID NO: 587363 - RNA, 19 nt, Artificial Sequence
  Description of Artificial Sequence: Synthetic oligonucleotide
caugccgaugucgugguaa

SEQ ID NO: 587364 - RNA, 19 nt, Artificial Sequence
  Description of Artificial Sequence: Synthetic oligonucleotide
gacgguacgugugcaccac

SEQ ID NO: 587365 - RNA, 19 nt, Artificial Sequence
  Description of Artificial Sequence: Synthetic oligonucleotide
cgacuacaaaccaaaacca

SEQ ID NO: 587366 - RNA, 19 nt, Artificial Sequence
  Description of Artificial Sequence: Synthetic oligonucleotide
cacgaccauguccggcagg

SEQ ID NO: 587367 - RNA, 19 nt, Artificial Sequence
  Description of Artificial Sequence: Synthetic oligonucleotide
aggacaccuccauggacuu

SEQ ID NO: 587368 - RNA, 19 nt, Artificial Sequence
  Description of Artificial Sequence: Synthetic oligonucleotide
uaaagcccgggagauuguu

SEQ ID NO: 587369 - RNA, 19 nt, Artificial Sequence
  Description of Artificial Sequence: Synthetic oligonucleotide
agccagucccuucgaguga

SEQ ID NO: 587370 - RNA, 19 nt, Artificial Sequence
  Description of Artificial Sequence: Synthetic oligonucleotide
gguucaugccgaugucgug

SEQ ID NO: 587371 - RNA, 19 nt, Artificial Sequence
  Description of Artificial Sequence: Synthetic oligonucleotide
caacuucccugccucgcuc

SEQ ID NO: 587372 - RNA, 19 nt, Artificial Sequence
  Description of Artificial Sequence: Synthetic oligonucleotide
accagagcacaugguucuc

SEQ ID NO: 587373 - RNA, 19 nt, Artificial Sequence
  Description of Artificial Sequence: Synthetic oligonucleotide
cccuuucaaaucagaaguc

SEQ ID NO: 587374 - RNA, 19 nt, Artificial Sequence
  Description of Artificial Sequence: Synthetic oligonucleotide
gucuucguaggguccaacu

SEQ ID NO: 587375 - RNA, 19 nt, Artificial Sequence
  Description of Artificial Sequence: Synthetic oligonucleotide
uggcgucugaggguagaga

SEQ ID NO: 587376 - RNA, 19 nt, Artificial Sequence
  Description of Artificial Sequence: Synthetic oligonucleotide
gcaaaaugccugcgaacca

SEQ ID NO: 587377 - RNA, 19 nt, Artificial Sequence
  Description of Artificial Sequence: Synthetic oligonucleotide
cucuugagcccaaacuggu

SEQ ID NO: 587378 - RNA, 19 nt, Artificial Sequence
  Description of Artificial Sequence: Synthetic oligonucleotide
caccagagcacaugguucu

SEQ ID NO: 587379 - RNA, 19 nt, Artificial Sequence
  Description of Artificial Sequence: Synthetic oligonucleotide
augggccaguuagagacau

SEQ ID NO: 587380 - RNA, 19 nt, Artificial Sequence
  Description of Artificial Sequence: Synthetic oligonucleotide
ugcugacgguacgugugca

SEQ ID NO: 587381 - RNA, 19 nt, Artificial Sequence
  Description of Artificial Sequence: Synthetic oligonucleotide
caguauuugcggaucacuu

SEQ ID NO: 587382 - RNA, 19 nt, Artificial Sequence
  Description of Artificial Sequence: Synthetic oligonucleotide
ucgccagaguucacucuua

SEQ ID NO: 587383 - RNA, 19 nt, Artificial Sequence
  Description of Artificial Sequence: Synthetic oligonucleotide
aggucucgccggcuguugu

SEQ ID NO: 587384 - RNA, 19 nt, Artificial Sequence
  Description of Artificial Sequence: Synthetic oligonucleotide
ccgcauuagcgcagggugg

SEQ ID NO: 587385 - RNA, 19 nt, Artificial Sequence
  Description of Artificial Sequence: Synthetic oligonucleotide
ggaucacuuucauuuuaaa

SEQ ID NO: 587386 - RNA, 19 nt, Artificial Sequence
  Description of Artificial Sequence: Synthetic oligonucleotide
ggaugggagccaggaaccg

SEQ ID NO: 587387 - RNA, 19 nt, Artificial Sequence
  Description of Artificial Sequence: Synthetic oligonucleotide
gagggaagcgaguucccau

SEQ ID NO: 587388 - RNA, 19 nt, Artificial Sequence
  Description of Artificial Sequence: Synthetic oligonucleotide
cagcauccaaaacuuuaaa

SEQ ID NO: 587389 - RNA, 19 nt, Artificial Sequence
  Description of Artificial Sequence: Synthetic oligonucleotide
guggacucgguuuccuucu

SEQ ID NO: 587390 - RNA, 19 nt, Artificial Sequence
  Description of Artificial Sequence: Synthetic oligonucleotide
cccauggaauguacagacc

SEQ ID NO: 587391 - RNA, 19 nt, Artificial Sequence
  Description of Artificial Sequence: Synthetic oligonucleotide
acuugggcccggcauuguu

SEQ ID NO: 587392 - RNA, 19 nt, Artificial Sequence
  Description of Artificial Sequence: Synthetic oligonucleotide
ggugagacacgaccauguc

SEQ ID NO: 587393 - RNA, 19 nt, Artificial Sequence
  Description of Artificial Sequence: Synthetic oligonucleotide
cgaugucgugguaagugag

SEQ ID NO: 587394 - RNA, 19 nt, Artificial Sequence
  Description of Artificial Sequence: Synthetic oligonucleotide
gguggucuucguagggucc

SEQ ID NO: 587395 - RNA, 19 nt, Artificial Sequence
  Description of Artificial Sequence: Synthetic oligonucleotide
uguaccccgcugggaagga

SEQ ID NO: 587396 - RNA, 19 nt, Artificial Sequence
  Description of Artificial Sequence: Synthetic oligonucleotide
cacccaguauuugcggauc

SEQ ID NO: 587397 - RNA, 19 nt, Artificial Sequence
  Description of Artificial Sequence: Synthetic oligonucleotide
aucccaugcccugaacaaa

SEQ ID NO: 587398 - RNA, 19 nt, Artificial Sequence
  Description of Artificial Sequence: Synthetic oligonucleotide
gggugauauugagacgggc

SEQ ID NO: 587399 - RNA, 19 nt, Artificial Sequence
  Description of Artificial Sequence: Synthetic oligonucleotide
gucugaggguagagagagg

SEQ ID NO: 587400 - RNA, 19 nt, Artificial Sequence
  Description of Artificial Sequence: Synthetic oligonucleotide
cuggaucaaccugggcuug

SEQ ID NO: 587401 - RNA, 19 nt, Artificial Sequence
  Description of Artificial Sequence: Synthetic oligonucleotide
accccgcugggaaggacgg

SEQ ID NO: 587402 - RNA, 19 nt, Artificial Sequence
  Description of Artificial Sequence: Synthetic oligonucleotide
ugcguggacucgguuuccu

SEQ ID NO: 587403 - RNA, 19 nt, Artificial Sequence
  Description of Artificial Sequence: Synthetic oligonucleotide
ucccgguggcacccgaguu

SEQ ID NO: 587404 - RNA, 19 nt, Artificial Sequence
  Description of Artificial Sequence: Synthetic oligonucleotide
ggaaccgacugcagagcag

SEQ ID NO: 587405 - RNA, 19 nt, Artificial Sequence
  Description of Artificial Sequence: Synthetic oligonucleotide
gcaaugggccaguuagaga

SEQ ID NO: 587406 - RNA, 19 nt, Artificial Sequence
  Description of Artificial Sequence: Synthetic oligonucleotide
uuguucccgguggcacccg

SEQ ID NO: 587407 - RNA, 19 nt, Artificial Sequence
  Description of Artificial Sequence: Synthetic oligonucleotide
gguacgugugcaccaccuc

SEQ ID NO: 587408 - RNA, 19 nt, Artificial Sequence
  Description of Artificial Sequence: Synthetic oligonucleotide
ccagggacaaagguaucac

SEQ ID NO: 587409 - RNA, 19 nt, Artificial Sequence
  Description of Artificial Sequence: Synthetic oligonucleotide
gugguaagugaggaugacu

SEQ ID NO: 587410 - RNA, 19 nt, Artificial Sequence
  Description of Artificial Sequence: Synthetic oligonucleotide
cccugaucuuucuacacaa

SEQ ID NO: 587411 - RNA, 19 nt, Artificial Sequence
  Description of Artificial Sequence: Synthetic oligonucleotide
gcugacgguacgugugcac

SEQ ID NO: 587412 - RNA, 19 nt, Artificial Sequence
  Description of Artificial Sequence: Synthetic oligonucleotide
ggaccacugccaccuguug

SEQ ID NO: 587413 - RNA, 19 nt, Artificial Sequence
  Description of Artificial Sequence: Synthetic oligonucleotide
cuuggcgggcugagagauc

SEQ ID NO: 587414 - RNA, 19 nt, Artificial Sequence
  Description of Artificial Sequence: Synthetic oligonucleotide
ggacucgguuuccuucuac

SEQ ID NO: 587415 - RNA, 19 nt, Artificial Sequence
  Description of Artificial Sequence: Synthetic oligonucleotide
ggaaugacuggugcacaga

SEQ ID NO: 587416 - RNA, 19 nt, Artificial Sequence
  Description of Artificial Sequence: Synthetic oligonucleotide
gggcccggcauuguucccg

SEQ ID NO: 587417 - RNA, 19 nt, Artificial Sequence
  Description of Artificial Sequence: Synthetic oligonucleotide
cuacacaaggucggaggaa

SEQ ID NO: 587418 - RNA, 19 nt, Artificial Sequence
  Description of Artificial Sequence: Synthetic oligonucleotide
gccugaacaucuugggucu

SEQ ID NO: 587419 - RNA, 19 nt, Artificial Sequence
  Description of Artificial Sequence: Synthetic oligonucleotide
ucaugccgaugucguggua

SEQ ID NO: 587420 - RNA, 19 nt, Artificial Sequence
  Description of Artificial Sequence: Synthetic oligonucleotide
cguggacucgguuuccuuc

SEQ ID NO: 587421 - RNA, 19 nt, Artificial Sequence
  Description of Artificial Sequence: Synthetic oligonucleotide
ugggcccggcauuguuccc

SEQ ID NO: 587422 - RNA, 19 nt, Artificial Sequence
  Description of Artificial Sequence: Synthetic oligonucleotide
gguccacccggagaucuug

SEQ ID NO: 587423 - RNA, 19 nt, Artificial Sequence
  Description of Artificial Sequence: Synthetic oligonucleotide
ccgguggcacccgaguugg

SEQ ID NO: 587424 - RNA, 19 nt, Artificial Sequence
  Description of Artificial Sequence: Synthetic oligonucleotide
auguaggcgccagcuccug

SEQ ID NO: 587425 - RNA, 19 nt, Artificial Sequence
  Description of Artificial Sequence: Synthetic oligonucleotide
guuuggcgucugaggguag

SEQ ID NO: 587426 - RNA, 19 nt, Artificial Sequence
  Description of Artificial Sequence: Synthetic oligonucleotide
ggugcccaacuucccugcc

SEQ ID NO: 587427 - RNA, 19 nt, Artificial Sequence
  Description of Artificial Sequence: Synthetic oligonucleotide
aaccgacugcagagcagaa

SEQ ID NO: 587428 - RNA, 19 nt, Artificial Sequence
  Description of Artificial Sequence: Synthetic oligonucleotide
ggacuugggcccggcauug

SEQ ID NO: 587429 - RNA, 19 nt, Artificial Sequence
  Description of Artificial Sequence: Synthetic oligonucleotide
agggcacugcagggugacg

SEQ ID NO: 587430 - RNA, 19 nt, Artificial Sequence
  Description of Artificial Sequence: Synthetic oligonucleotide
ccgaugucgugguaaguga

SEQ ID NO: 587431 - RNA, 19 nt, Artificial Sequence
  Description of Artificial Sequence: Synthetic oligonucleotide
uggcgggcugagagaucug

SEQ ID NO: 587432 - RNA, 19 nt, Artificial Sequence
  Description of Artificial Sequence: Synthetic oligonucleotide
gccgaagaggugagacacg

SEQ ID NO: 587433 - RNA, 19 nt, Artificial Sequence
  Description of Artificial Sequence: Synthetic oligonucleotide
ggcgcugaugaagaggugu

SEQ ID NO: 587434 - RNA, 19 nt, Artificial Sequence
  Description of Artificial Sequence: Synthetic oligonucleotide
acgaggccuuccaccaucu

SEQ ID NO: 587435 - RNA, 19 nt, Artificial Sequence
  Description of Artificial Sequence: Synthetic oligonucleotide
gcuauguguuucuuaguuu

SEQ ID NO: 587436 - RNA, 19 nt, Artificial Sequence
  Description of Artificial Sequence: Synthetic oligonucleotide
gaaacugcccuggccuggu

SEQ ID NO: 587437 - RNA, 19 nt, Artificial Sequence
  Description of Artificial Sequence: Synthetic oligonucleotide
caguuuggcgucugagggu

SEQ ID NO: 587438 - RNA, 19 nt, Artificial Sequence
  Description of Artificial Sequence: Synthetic oligonucleotide
cccaaccaccagcagagca

SEQ ID NO: 587439 - RNA, 19 nt, Artificial Sequence
  Description of Artificial Sequence: Synthetic oligonucleotide
uggucuucguaggguccaa

SEQ ID NO: 587440 - RNA, 19 nt, Artificial Sequence
  Description of Artificial Sequence: Synthetic oligonucleotide
ugggccaguuagagacauu

SEQ ID NO: 587441 - RNA, 19 nt, Artificial Sequence
  Description of Artificial Sequence: Synthetic oligonucleotide
cugcguggacucgguuucc

SEQ ID NO: 587442 - RNA, 19 nt, Artificial Sequence
  Description of Artificial Sequence: Synthetic oligonucleotide
gaaggacuccaggaagcau

SEQ ID NO: 587443 - RNA, 19 nt, Artificial Sequence
  Description of Artificial Sequence: Synthetic oligonucleotide
aggucggaggaagccucca

SEQ ID NO: 587444 - RNA, 19 nt, Artificial Sequence
  Description of Artificial Sequence: Synthetic oligonucleotide
gcacaugguucucucugaa

SEQ ID NO: 587445 - RNA, 19 nt, Artificial Sequence
  Description of Artificial Sequence: Synthetic oligonucleotide
cccggcauuguucccggug

SEQ ID NO: 587446 - RNA, 19 nt, Artificial Sequence
  Description of Artificial Sequence: Synthetic oligonucleotide
aggccacuuguuagcagaa

SEQ ID NO: 587447 - RNA, 19 nt, Artificial Sequence
  Description of Artificial Sequence: Synthetic oligonucleotide
gcggaucacuuucauuuua

SEQ ID NO: 587448 - RNA, 19 nt, Artificial Sequence
  Description of Artificial Sequence: Synthetic oligonucleotide
gggucaggauguaggcgcc

SEQ ID NO: 587449 - RNA, 19 nt, Artificial Sequence
  Description of Artificial Sequence: Synthetic oligonucleotide
gccaccuguugaguucucc

SEQ ID NO: 587450 - RNA, 19 nt, Artificial Sequence
  Description of Artificial Sequence: Synthetic oligonucleotide
agucucccucagauguuaa

SEQ ID NO: 587451 - RNA, 19 nt, Artificial Sequence
  Description of Artificial Sequence: Synthetic oligonucleotide
ggggcaccauccuguuggc

SEQ ID NO: 587452 - RNA, 19 nt, Artificial Sequence
  Description of Artificial Sequence: Synthetic oligonucleotide
aggcgacuacaaaccaaaa

SEQ ID NO: 587453 - RNA, 19 nt, Artificial Sequence
  Description of Artificial Sequence: Synthetic oligonucleotide
ccucagauguuaaaagguu

SEQ ID NO: 587454 - RNA, 19 nt, Artificial Sequence
  Description of Artificial Sequence: Synthetic oligonucleotide
uuggguccacccggagauc

SEQ ID NO: 587455 - RNA, 19 nt, Artificial Sequence
  Description of Artificial Sequence: Synthetic oligonucleotide
cuagauccugccucuucuu

SEQ ID NO: 587456 - RNA, 19 nt, Artificial Sequence
  Description of Artificial Sequence: Synthetic oligonucleotide
ggaucaaccugggcuugga

SEQ ID NO: 587457 - RNA, 19 nt, Artificial Sequence
  Description of Artificial Sequence: Synthetic oligonucleotide
aggcaguguuacagcuaug

SEQ ID NO: 587458 - RNA, 19 nt, Artificial Sequence
  Description of Artificial Sequence: Synthetic oligonucleotide
cccaguauuugcggaucac

SEQ ID NO: 587459 - RNA, 19 nt, Artificial Sequence
  Description of Artificial Sequence: Synthetic oligonucleotide
ggccacuuguuagcagaac

SEQ ID NO: 587460 - RNA, 19 nt, Artificial Sequence
  Description of Artificial Sequence: Synthetic oligonucleotide
ggucuucguaggguccaac

SEQ ID NO: 587461 - RNA, 19 nt, Artificial Sequence
  Description of Artificial Sequence: Synthetic oligonucleotide
cauccucgcugguguggga

SEQ ID NO: 587462 - RNA, 19 nt, Artificial Sequence
  Description of Artificial Sequence: Synthetic oligonucleotide
cgaagaggugagacacgac

SEQ ID NO: 587463 - RNA, 19 nt, Artificial Sequence
  Description of Artificial Sequence: Synthetic oligonucleotide
gggagauuguugacagucu

SEQ ID NO: 587464 - RNA, 19 nt, Artificial Sequence
  Description of Artificial Sequence: Synthetic oligonucleotide
guaccccgcugggaaggac

SEQ ID NO: 587465 - RNA, 19 nt, Artificial Sequence
  Description of Artificial Sequence: Synthetic oligonucleotide
ccugccucgcuccccuuuc

SEQ ID NO: 587466 - RNA, 19 nt, Artificial Sequence
  Description of Artificial Sequence: Synthetic oligonucleotide
gcccgggagauuguugaca

SEQ ID NO: 587467 - RNA, 19 nt, Artificial Sequence
  Description of Artificial Sequence: Synthetic oligonucleotide
ggguagagagaggggccac

SEQ ID NO: 587468 - RNA, 19 nt, Artificial Sequence
  Description of Artificial Sequence: Synthetic oligonucleotide
cagucccuucgagugaacu

SEQ ID NO: 587469 - RNA, 19 nt, Artificial Sequence
  Description of Artificial Sequence: Synthetic oligonucleotide
acguugcugugaaucucuu

SEQ ID NO: 587470 - RNA, 19 nt, Artificial Sequence
  Description of Artificial Sequence: Synthetic oligonucleotide
gcgucugaggguagagaga

SEQ ID NO: 587471 - RNA, 19 nt, Artificial Sequence
  Description of Artificial Sequence: Synthetic oligonucleotide
cugccucgcuccccuuuca

SEQ ID NO: 587472 - RNA, 19 nt, Artificial Sequence
  Description of Artificial Sequence: Synthetic oligonucleotide
cagggugacgguguggguu

SEQ ID NO: 587473 - RNA, 19 nt, Artificial Sequence
  Description of Artificial Sequence: Synthetic oligonucleotide
gguccaacuuggaguugca

SEQ ID NO: 587474 - RNA, 19 nt, Artificial Sequence
  Description of Artificial Sequence: Synthetic oligonucleotide
ccaugcccugaacaaagua

SEQ ID NO: 587475 - RNA, 19 nt, Artificial Sequence
  Description of Artificial Sequence: Synthetic oligonucleotide
ggacggggcaccauccugu

SEQ ID NO: 587476 - RNA, 19 nt, Artificial Sequence
  Description of Artificial Sequence: Synthetic oligonucleotide
gccagucccuucgagugaa

SEQ ID NO: 587477 - RNA, 19 nt, Artificial Sequence
  Description of Artificial Sequence: Synthetic oligonucleotide
ggcauccacauggcagaca

SEQ ID NO: 587478 - RNA, 19 nt, Artificial Sequence
  Description of Artificial Sequence: Synthetic oligonucleotide
ccaguauuugcggaucacu

SEQ ID NO: 587479 - RNA, 19 nt, Artificial Sequence
  Description of Artificial Sequence: Synthetic oligonucleotide
cagcaggguggucuucgua

SEQ ID NO: 587480 - RNA, 19 nt, Artificial Sequence
  Description of Artificial Sequence: Synthetic oligonucleotide
gggcuaagggagagaucac

SEQ ID NO: 587481 - RNA, 19 nt, Artificial Sequence
  Description of Artificial Sequence: Synthetic oligonucleotide
gccucgcuccccuuucaaa

SEQ ID NO: 587482 - RNA, 19 nt, Artificial Sequence
  Description of Artificial Sequence: Synthetic oligonucleotide
gccaucgccagaguucacu

SEQ ID NO: 587483 - RNA, 19 nt, Artificial Sequence
  Description of Artificial Sequence: Synthetic oligonucleotide
ccucgcuccccuuucaaau

SEQ ID NO: 587484 - RNA, 19 nt, Artificial Sequence
  Description of Artificial Sequence: Synthetic oligonucleotide
cgcuccccuuucaaaucag

SEQ ID NO: 587485 - RNA, 19 nt, Artificial Sequence
  Description of Artificial Sequence: Synthetic oligonucleotide
ggucucgccggcuguugua

SEQ ID NO: 587486 - RNA, 19 nt, Artificial Sequence
  Description of Artificial Sequence: Synthetic oligonucleotide
gggcaccauccuguuggcc

SEQ ID NO: 587487 - RNA, 19 nt, Artificial Sequence
  Description of Artificial Sequence: Synthetic oligonucleotide
ccauguccggcagggcuug

SEQ ID NO: 587488 - RNA, 19 nt, Artificial Sequence
  Description of Artificial Sequence: Synthetic oligonucleotide
ggcugugggguuucagcau

SEQ ID NO: 587489 - RNA, 19 nt, Artificial Sequence
  Description of Artificial Sequence: Synthetic oligonucleotide
cgccggcuguuguaggcgc

SEQ ID NO: 587490 - RNA, 19 nt, Artificial Sequence
  Description of Artificial Sequence: Synthetic oligonucleotide
gcgcugaugaagaggugua

SEQ ID NO: 587491 - RNA, 19 nt, Artificial Sequence
  Description of Artificial Sequence: Synthetic oligonucleotide
gccgcucgaucuccagguc

SEQ ID NO: 587492 - RNA, 19 nt, Artificial Sequence
  Description of Artificial Sequence: Synthetic oligonucleotide
gcauuagcgcaggguggca

SEQ ID NO: 587493 - RNA, 19 nt, Artificial Sequence
  Description of Artificial Sequence: Synthetic oligonucleotide
ccagucccuucgagugaac

SEQ ID NO: 587494 - RNA, 19 nt, Artificial Sequence
  Description of Artificial Sequence: Synthetic oligonucleotide
ggucggaggaagccuccau

SEQ ID NO: 587495 - RNA, 19 nt, Artificial Sequence
  Description of Artificial Sequence: Synthetic oligonucleotide
gacgggcauccucgcuggu

SEQ ID NO: 587496 - RNA, 19 nt, Artificial Sequence
  Description of Artificial Sequence: Synthetic oligonucleotide
ccaacuucccugccucgcu

SEQ ID NO: 587497 - RNA, 19 nt, Artificial Sequence
  Description of Artificial Sequence: Synthetic oligonucleotide
ggguuguagcaggucuugu

SEQ ID NO: 587498 - RNA, 19 nt, Artificial Sequence
  Description of Artificial Sequence: Synthetic oligonucleotide
gccuagcaggacaccucca

SEQ ID NO: 587499 - RNA, 19 nt, Artificial Sequence
  Description of Artificial Sequence: Synthetic oligonucleotide
gggcuuggguccacccgga

SEQ ID NO: 587500 - RNA, 19 nt, Artificial Sequence
  Description of Artificial Sequence: Synthetic oligonucleotide
gggguacauguaccccgcu

SEQ ID NO: 587501 - RNA, 19 nt, Artificial Sequence
  Description of Artificial Sequence: Synthetic oligonucleotide
ccugcccuagauccugccu

SEQ ID NO: 587502 - RNA, 19 nt, Artificial Sequence
  Description of Artificial Sequence: Synthetic oligonucleotide
ggagcgcaucaggcggguc

SEQ ID NO: 587503 - RNA, 19 nt, Artificial Sequence
  Description of Artificial Sequence: Synthetic oligonucleotide
cgguacgugugcaccaccu

SEQ ID NO: 587504 - RNA, 19 nt, Artificial Sequence
  Description of Artificial Sequence: Synthetic oligonucleotide
cccuucgagugaacugcgu

SEQ ID NO: 587505 - RNA, 19 nt, Artificial Sequence
  Description of Artificial Sequence: Synthetic oligonucleotide
cgguggcacccgaguuggg

SEQ ID NO: 587506 - RNA, 19 nt, Artificial Sequence
  Description of Artificial Sequence: Synthetic oligonucleotide
gcguggacucgguuuccuu

SEQ ID NO: 587507 - RNA, 19 nt, Artificial Sequence
  Description of Artificial Sequence: Synthetic oligonucleotide
gggagcgcaucaggcgggu

SEQ ID NO: 587508 - RNA, 19 nt, Artificial Sequence
  Description of Artificial Sequence: Synthetic oligonucleotide
ccgggagauuguugacagu

SEQ ID NO: 587509 - RNA, 19 nt, Artificial Sequence
  Description of Artificial Sequence: Synthetic oligonucleotide
gccggcuguuguaggcgcu

SEQ ID NO: 587510 - RNA, 19 nt, Artificial Sequence
  Description of Artificial Sequence: Synthetic oligonucleotide
gccugcgaaccaggaugcu

SEQ ID NO: 587511 - RNA, 19 nt, Artificial Sequence
  Description of Artificial Sequence: Synthetic oligonucleotide
gcccggcauuguucccggu

SEQ ID NO: 587512 - RNA, 19 nt, Artificial Sequence
  Description of Artificial Sequence: Synthetic oligonucleotide
cccugccucgcuccccuuu

SEQ ID NO: 587513 - RNA, 19 nt, Artificial Sequence
  Description of Artificial Sequence: Synthetic oligonucleotide
gcccuagauccugccucuu

SEQ ID NO: 587514 - RNA, 19 nt, Artificial Sequence
  Description of Artificial Sequence: Synthetic oligonucleotide
auaagucuaacuuaaagac

SEQ ID NO: 587515 - RNA, 19 nt, Artificial Sequence
  Description of Artificial Sequence: Synthetic oligonucleotide
aauugauuuagacauacug

SEQ ID NO: 587516 - RNA, 19 nt, Artificial Sequence
  Description of Artificial Sequence: Synthetic oligonucleotide
cugaagauaacaauuaugg

SEQ ID NO: 587517 - RNA, 19 nt, Artificial Sequence
  Description of Artificial Sequence: Synthetic oligonucleotide
acaauuauggacuuuaaag

SEQ ID NO: 587518 - RNA, 19 nt, Artificial Sequence
  Description of Artificial Sequence: Synthetic oligonucleotide
gaaugaaugaugaugaugg

SEQ ID NO: 587519 - RNA, 19 nt, Artificial Sequence
  Description of Artificial Sequence: Synthetic oligonucleotide
aaauaagucuaacuuaaag

SEQ ID NO: 587520 - RNA, 19 nt, Artificial Sequence
  Description of Artificial Sequence: Synthetic oligonucleotide
aacuacauuauuuaugugu

SEQ ID NO: 587521 - RNA, 19 nt, Artificial Sequence
  Description of Artificial Sequence: Synthetic oligonucleotide
aauuauggacuuuaaagcu

SEQ ID NO: 587522 - RNA, 19 nt, Artificial Sequence
  Description of Artificial Sequence: Synthetic oligonucleotide
uguguuaacuuccuuaucc

SEQ ID NO: 587523 - RNA, 19 nt, Artificial Sequence
  Description of Artificial Sequence: Synthetic oligonucleotide
uuagccaauacacucaugc

SEQ ID NO: 587524 - RNA, 19 nt, Artificial Sequence
  Description of Artificial Sequence: Synthetic oligonucleotide
aaugcuagccacuaagcuc

SEQ ID NO: 587525 - RNA, 19 nt, Artificial Sequence
  Description of Artificial Sequence: Synthetic oligonucleotide
gaaauaacgggauguaugg

SEQ ID NO: 587526 - RNA, 19 nt, Artificial Sequence
  Description of Artificial Sequence: Synthetic oligonucleotide
gauuuagacauacuguagg

SEQ ID NO: 587527 - RNA, 19 nt, Artificial Sequence
  Description of Artificial Sequence: Synthetic oligonucleotide
uugaugauauuucaacugg

SEQ ID NO: 587528 - RNA, 19 nt, Artificial Sequence
  Description of Artificial Sequence: Synthetic oligonucleotide
uuaaauggccgacagaagc

SEQ ID NO: 587529 - RNA, 19 nt, Artificial Sequence
  Description of Artificial Sequence: Synthetic oligonucleotide
aagcuuacauaccuaauag

SEQ ID NO: 587530 - RNA, 19 nt, Artificial Sequence
  Description of Artificial Sequence: Synthetic oligonucleotide
aagauaacaauuauggacu

SEQ ID NO: 587531 - RNA, 19 nt, Artificial Sequence
  Description of Artificial Sequence: Synthetic oligonucleotide
aaguguuaguuguauuccc

SEQ ID NO: 587532 - RNA, 19 nt, Artificial Sequence
  Description of Artificial Sequence: Synthetic oligonucleotide
aacagauaugucccuaaac

SEQ ID NO: 587533 - RNA, 19 nt, Artificial Sequence
  Description of Artificial Sequence: Synthetic oligonucleotide
uguaggucaaauaauauuu

SEQ ID NO: 587534 - RNA, 19 nt, Artificial Sequence
  Description of Artificial Sequence: Synthetic oligonucleotide
aaugacuccccagucagcc

SEQ ID NO: 587535 - RNA, 19 nt, Artificial Sequence
  Description of Artificial Sequence: Synthetic oligonucleotide
ucucauaccacuuaaucac

SEQ ID NO: 587536 - RNA, 19 nt, Artificial Sequence
  Description of Artificial Sequence: Synthetic oligonucleotide
uuccuaguggcacuuaugg

SEQ ID NO: 587537 - RNA, 19 nt, Artificial Sequence
  Description of Artificial Sequence: Synthetic oligonucleotide
uguauggaaagcuaugucu

SEQ ID NO: 587538 - RNA, 19 nt, Artificial Sequence
  Description of Artificial Sequence: Synthetic oligonucleotide
acauaaaauuaguagcuuc

SEQ ID NO: 587539 - RNA, 19 nt, Artificial Sequence
  Description of Artificial Sequence: Synthetic oligonucleotide
gaacucuaggacuagcugg

SEQ ID NO: 587540 - RNA, 19 nt, Artificial Sequence
  Description of Artificial Sequence: Synthetic oligonucleotide
aauucuuagcaaaacauca

SEQ ID NO: 587541 - RNA, 19 nt, Artificial Sequence
  Description of Artificial Sequence: Synthetic oligonucleotide
uauaaauggggcccaagag

SEQ ID NO: 587542 - RNA, 19 nt, Artificial Sequence
  Description of Artificial Sequence: Synthetic oligonucleotide
auugaugauauuucaacug

SEQ ID NO: 587543 - RNA, 19 nt, Artificial Sequence
  Description of Artificial Sequence: Synthetic oligonucleotide
cuauguagaaauauagaac

SEQ ID NO: 587544 - RNA, 19 nt, Artificial Sequence
  Description of Artificial Sequence: Synthetic oligonucleotide
uccaugaugacaccuauac

SEQ ID NO: 587545 - RNA, 19 nt, Artificial Sequence
  Description of Artificial Sequence: Synthetic oligonucleotide
auauaacugauauuuugag

SEQ ID NO: 587546 - RNA, 19 nt, Artificial Sequence
  Description of Artificial Sequence: Synthetic oligonucleotide
aagacacuacaguaaauug

SEQ ID NO: 587547 - RNA, 19 nt, Artificial Sequence
  Description of Artificial Sequence: Synthetic oligonucleotide
cuauugaugauauuucaac

SEQ ID NO: 587548 - RNA, 19 nt, Artificial Sequence
  Description of Artificial Sequence: Synthetic oligonucleotide
aauaacgggauguauggaa

SEQ ID NO: 587549 - RNA, 19 nt, Artificial Sequence
  Description of Artificial Sequence: Synthetic oligonucleotide
auuccuagcacccaguaca

SEQ ID NO: 587550 - RNA, 19 nt, Artificial Sequence
  Description of Artificial Sequence: Synthetic oligonucleotide
cuagaccugaaaauuaagc

SEQ ID NO: 587551 - RNA, 19 nt, Artificial Sequence
  Description of Artificial Sequence: Synthetic oligonucleotide
accacuuaaucacuacugc

SEQ ID NO: 587552 - RNA, 19 nt, Artificial Sequence
  Description of Artificial Sequence: Synthetic oligonucleotide
uguuauagguacucugagg

SEQ ID NO: 587553 - RNA, 19 nt, Artificial Sequence
  Description of Artificial Sequence: Synthetic oligonucleotide
ugaaugaugaugauggguu

SEQ ID NO: 587554 - RNA, 19 nt, Artificial Sequence
  Description of Artificial Sequence: Synthetic oligonucleotide
uuauggacuuuaaagcuug

SEQ ID NO: 587555 - RNA, 19 nt, Artificial Sequence
  Description of Artificial Sequence: Synthetic oligonucleotide
guuauagguacucugagga

SEQ ID NO: 587556 - RNA, 19 nt, Artificial Sequence
  Description of Artificial Sequence: Synthetic oligonucleotide
cuagccacuaagcucaugg

SEQ ID NO: 587557 - RNA, 19 nt, Artificial Sequence
  Description of Artificial Sequence: Synthetic oligonucleotide
gguggauucagaaauaacg

SEQ ID NO: 587558 - RNA, 19 nt, Artificial Sequence
  Description of Artificial Sequence: Synthetic oligonucleotide
uauugaugauauuucaacu

SEQ ID NO: 587559 - RNA, 19 nt, Artificial Sequence
  Description of Artificial Sequence: Synthetic oligonucleotide
uucucauaccacuuaauca

SEQ ID NO: 587560 - RNA, 19 nt, Artificial Sequence
  Description of Artificial Sequence: Synthetic oligonucleotide
aaaugcuagccacuaagcu

SEQ ID NO: 587561 - RNA, 19 nt, Artificial Sequence
  Description of Artificial Sequence: Synthetic oligonucleotide
ugauuuagacauacuguag

SEQ ID NO: 587562 - RNA, 19 nt, Artificial Sequence
  Description of Artificial Sequence: Synthetic oligonucleotide
acugugcuccuacaaagcc

SEQ ID NO: 587563 - RNA, 19 nt, Artificial Sequence
  Description of Artificial Sequence: Synthetic oligonucleotide
agcgcagaguuccugaccc

SEQ ID NO: 587564 - RNA, 19 nt, Artificial Sequence
  Description of Artificial Sequence: Synthetic oligonucleotide
uucaauaaauacucaguga

SEQ ID NO: 587565 - RNA, 19 nt, Artificial Sequence
  Description of Artificial Sequence: Synthetic oligonucleotide
acaaguuaaagcauguguc

SEQ ID NO: 587566 - RNA, 19 nt, Artificial Sequence
  Description of Artificial Sequence: Synthetic oligonucleotide
uugauuuagacauacugua

SEQ ID NO: 587567 - RNA, 19 nt, Artificial Sequence
  Description of Artificial Sequence: Synthetic oligonucleotide
agacacuacaguaaauugc

SEQ ID NO: 587568 - RNA, 19 nt, Artificial Sequence
  Description of Artificial Sequence: Synthetic oligonucleotide
guugguaucacuggggacg

SEQ ID NO: 587569 - RNA, 19 nt, Artificial Sequence
  Description of Artificial Sequence: Synthetic oligonucleotide
uuugcccaagcuuacauac

SEQ ID NO: 587570 - RNA, 19 nt, Artificial Sequence
  Description of Artificial Sequence: Synthetic oligonucleotide
uuacauaccuaauaguaau

SEQ ID NO: 587571 - RNA, 19 nt, Artificial Sequence
  Description of Artificial Sequence: Synthetic oligonucleotide
agacguucaauaaauacuc

SEQ ID NO: 587572 - RNA, 19 nt, Artificial Sequence
  Description of Artificial Sequence: Synthetic oligonucleotide
ugugagaaaacuagaccug

SEQ ID NO: 587573 - RNA, 19 nt, Artificial Sequence
  Description of Artificial Sequence: Synthetic oligonucleotide
ugcaugguaacagauaugu

SEQ ID NO: 587574 - RNA, 19 nt, Artificial Sequence
  Description of Artificial Sequence: Synthetic oligonucleotide
gauggguuagccaauacac

SEQ ID NO: 587575 - RNA, 19 nt, Artificial Sequence
  Description of Artificial Sequence: Synthetic oligonucleotide
auaaauacucagugaauga

SEQ ID NO: 587576 - RNA, 19 nt, Artificial Sequence
  Description of Artificial Sequence: Synthetic oligonucleotide
uuauguguuaacuuccuua

SEQ ID NO: 587577 - RNA, 19 nt, Artificial Sequence
  Description of Artificial Sequence: Synthetic oligonucleotide
guagcuucaaaaguguuag

SEQ ID NO: 587578 - RNA, 19 nt, Artificial Sequence
  Description of Artificial Sequence: Synthetic oligonucleotide
agugaaugaaugaugauga

SEQ ID NO: 587579 - RNA, 19 nt, Artificial Sequence
  Description of Artificial Sequence: Synthetic oligonucleotide
ucuauugaugauauuucaa

SEQ ID NO: 587580 - RNA, 19 nt, Artificial Sequence
  Description of Artificial Sequence: Synthetic oligonucleotide
uuuuguaagcagacaagcu

SEQ ID NO: 587581 - RNA, 19 nt, Artificial Sequence
  Description of Artificial Sequence: Synthetic oligonucleotide
acaguaaauugcuauggug

SEQ ID NO: 587582 - RNA, 19 nt, Artificial Sequence
  Description of Artificial Sequence: Synthetic oligonucleotide
uaugucuggguucugggga

SEQ ID NO: 587583 - RNA, 19 nt, Artificial Sequence
  Description of Artificial Sequence: Synthetic oligonucleotide
cauacuguaggucaaauaa

SEQ ID NO: 587584 - RNA, 19 nt, Artificial Sequence
  Description of Artificial Sequence: Synthetic oligonucleotide
ucuaacuuaaagacacagu

SEQ ID NO: 587585 - RNA, 19 nt, Artificial Sequence
  Description of Artificial Sequence: Synthetic oligonucleotide
ugacugugcuccuacaaag

SEQ ID NO: 587586 - RNA, 19 nt, Artificial Sequence
  Description of Artificial Sequence: Synthetic oligonucleotide
uuuuaaugccaucuaggaa

SEQ ID NO: 587587 - RNA, 19 nt, Artificial Sequence
  Description of Artificial Sequence: Synthetic oligonucleotide
ugauggguuagccaauaca

SEQ ID NO: 587588 - RNA, 19 nt, Artificial Sequence
  Description of Artificial Sequence: Synthetic oligonucleotide
aaagcuaugucuggguucu

SEQ ID NO: 587589 - RNA, 19 nt, Artificial Sequence
  Description of Artificial Sequence: Synthetic oligonucleotide
auuuagacauacuguaggu

SEQ ID NO: 587590 - RNA, 19 nt, Artificial Sequence
  Description of Artificial Sequence: Synthetic oligonucleotide
uauacauuauugccugaga

SEQ ID NO: 587591 - RNA, 19 nt, Artificial Sequence
  Description of Artificial Sequence: Synthetic oligonucleotide
agaaauaacgggauguaug

SEQ ID NO: 587592 - RNA, 19 nt, Artificial Sequence
  Description of Artificial Sequence: Synthetic oligonucleotide
aguacugcauaucuugacu

SEQ ID NO: 587593 - RNA, 19 nt, Artificial Sequence
  Description of Artificial Sequence: Synthetic oligonucleotide
ugacaccuauacauuauug

SEQ ID NO: 587594 - RNA, 19 nt, Artificial Sequence
  Description of Artificial Sequence: Synthetic oligonucleotide
acuagcuggaaauugggaa

SEQ ID NO: 587595 - RNA, 19 nt, Artificial Sequence
  Description of Artificial Sequence: Synthetic oligonucleotide
agucuuaaauggccgacag

SEQ ID NO: 587596 - RNA, 19 nt, Artificial Sequence
  Description of Artificial Sequence: Synthetic oligonucleotide
aguguuaguuguauucccc

SEQ ID NO: 587597 - RNA, 19 nt, Artificial Sequence
  Description of Artificial Sequence: Synthetic oligonucleotide
auacauuauugccugagau

SEQ ID NO: 587598 - RNA, 19 nt, Artificial Sequence
  Description of Artificial Sequence: Synthetic oligonucleotide
ugauauauacauucagcua

SEQ ID NO: 587599 - RNA, 19 nt, Artificial Sequence
  Description of Artificial Sequence: Synthetic oligonucleotide
uguuaguuguauuccccag

SEQ ID NO: 587600 - RNA, 19 nt, Artificial Sequence
  Description of Artificial Sequence: Synthetic oligonucleotide
agcaaacuaccuccaacac

SEQ ID NO: 587601 - RNA, 19 nt, Artificial Sequence
  Description of Artificial Sequence: Synthetic oligonucleotide
agucucauauuucugacua

SEQ ID NO: 587602 - RNA, 19 nt, Artificial Sequence
  Description of Artificial Sequence: Synthetic oligonucleotide
uaagcgauuugcccaagcu

SEQ ID NO: 587603 - RNA, 19 nt, Artificial Sequence
  Description of Artificial Sequence: Synthetic oligonucleotide
ucacacuaguuucccaaag

SEQ ID NO: 587604 - RNA, 19 nt, Artificial Sequence
  Description of Artificial Sequence: Synthetic oligonucleotide
uagaacucuaggacuagcu

SEQ ID NO: 587605 - RNA, 19 nt, Artificial Sequence
  Description of Artificial Sequence: Synthetic oligonucleotide
gcuuuguuaaccgauagcc

SEQ ID NO: 587606 - RNA, 19 nt, Artificial Sequence
  Description of Artificial Sequence: Synthetic oligonucleotide
cuuaaucacuacugcaaac

SEQ ID NO: 587607 - RNA, 19 nt, Artificial Sequence
  Description of Artificial Sequence: Synthetic oligonucleotide
uccuaaaaucuaaaaugaa

SEQ ID NO: 587608 - RNA, 19 nt, Artificial Sequence
  Description of Artificial Sequence: Synthetic oligonucleotide
uuaaccgauagcccucucu

SEQ ID NO: 587609 - RNA, 19 nt, Artificial Sequence
  Description of Artificial Sequence: Synthetic oligonucleotide
uguaagcagacaagcucag

SEQ ID NO: 587610 - RNA, 19 nt, Artificial Sequence
  Description of Artificial Sequence: Synthetic oligonucleotide
auaacaauuauggacuuua

SEQ ID NO: 587611 - RNA, 19 nt, Artificial Sequence
  Description of Artificial Sequence: Synthetic oligonucleotide
ugagguaagguggauucag

SEQ ID NO: 587612 - RNA, 19 nt, Artificial Sequence
  Description of Artificial Sequence: Synthetic oligonucleotide
caugaugacaccuauacau

SEQ ID NO: 587613 - RNA, 19 nt, Artificial Sequence
  Description of Artificial Sequence: Synthetic oligonucleotide
uacaggucacacuaguuuc

SEQ ID NO: 587614 - RNA, 19 nt, Artificial Sequence
  Description of Artificial Sequence: Synthetic oligonucleotide
uaucuugacucuccuaaaa

SEQ ID NO: 587615 - RNA, 19 nt, Artificial Sequence
  Description of Artificial Sequence: Synthetic oligonucleotide
uucccagggucaauguagg

SEQ ID NO: 587616 - RNA, 19 nt, Artificial Sequence
  Description of Artificial Sequence: Synthetic oligonucleotide
cauaucuugacucuccuaa

SEQ ID NO: 587617 - RNA, 19 nt, Artificial Sequence
  Description of Artificial Sequence: Synthetic oligonucleotide
agccacuagaaaauaaguc

SEQ ID NO: 587618 - RNA, 19 nt, Artificial Sequence
  Description of Artificial Sequence: Synthetic oligonucleotide
uuucugaucggccgaguac

SEQ ID NO: 587619 - RNA, 19 nt, Artificial Sequence
  Description of Artificial Sequence: Synthetic oligonucleotide
caccacuuauaaauggggc

SEQ ID NO: 587620 - RNA, 19 nt, Artificial Sequence
  Description of Artificial Sequence: Synthetic oligonucleotide
uaucccguuuccuccagag

SEQ ID NO: 587621 - RNA, 19 nt, Artificial Sequence
  Description of Artificial Sequence: Synthetic oligonucleotide
cugaaaauuaagcgauuug

SEQ ID NO: 587622 - RNA, 19 nt, Artificial Sequence
  Description of Artificial Sequence: Synthetic oligonucleotide
uguacuguguacugucacu

SEQ ID NO: 587623 - RNA, 19 nt, Artificial Sequence
  Description of Artificial Sequence: Synthetic oligonucleotide
cuaaaccccauccacugac

SEQ ID NO: 587624 - RNA, 19 nt, Artificial Sequence
  Description of Artificial Sequence: Synthetic oligonucleotide
guacucugaggacaugagg

SEQ ID NO: 587625 - RNA, 19 nt, Artificial Sequence
  Description of Artificial Sequence: Synthetic oligonucleotide
auguacaucugccagugau

SEQ ID NO: 587626 - RNA, 19 nt, Artificial Sequence
  Description of Artificial Sequence: Synthetic oligonucleotide
ccugauauauacauucagc

SEQ ID NO: 587627 - RNA, 19 nt, Artificial Sequence
  Description of Artificial Sequence: Synthetic oligonucleotide
aaauacucagugaaugaau

SEQ ID NO: 587628 - RNA, 19 nt, Artificial Sequence
  Description of Artificial Sequence: Synthetic oligonucleotide
uuaaauugauuuagacaua

SEQ ID NO: 587629 - RNA, 19 nt, Artificial Sequence
  Description of Artificial Sequence: Synthetic oligonucleotide
auagaacucuaggacuagc

SEQ ID NO: 587630 - RNA, 19 nt, Artificial Sequence
  Description of Artificial Sequence: Synthetic oligonucleotide
uccuaguggcacuuauggg

SEQ ID NO: 587631 - RNA, 19 nt, Artificial Sequence
  Description of Artificial Sequence: Synthetic oligonucleotide
gugacauugaaguguaaga

SEQ ID NO: 587632 - RNA, 19 nt, Artificial Sequence
  Description of Artificial Sequence: Synthetic oligonucleotide
ucauucugugagaaaacua

SEQ ID NO: 587633 - RNA, 19 nt, Artificial Sequence
  Description of Artificial Sequence: Synthetic oligonucleotide
cuaugucuggguucugggg

SEQ ID NO: 587634 - RNA, 19 nt, Artificial Sequence
  Description of Artificial Sequence: Synthetic oligonucleotide
cuuacauaccuaauaguaa

SEQ ID NO: 587635 - RNA, 19 nt, Artificial Sequence
  Description of Artificial Sequence: Synthetic oligonucleotide
acuuaaucacuacugcaaa

SEQ ID NO: 587636 - RNA, 19 nt, Artificial Sequence
  Description of Artificial Sequence: Synthetic oligonucleotide
guguuauagguacucugag

SEQ ID NO: 587637 - RNA, 19 nt, Artificial Sequence
  Description of Artificial Sequence: Synthetic oligonucleotide
acagccacuagaaaauaag

SEQ ID NO: 587638 - RNA, 19 nt, Artificial Sequence
  Description of Artificial Sequence: Synthetic oligonucleotide
uuaagcgauuugcccaagc

SEQ ID NO: 587639 - RNA, 19 nt, Artificial Sequence
  Description of Artificial Sequence: Synthetic oligonucleotide
cugugagaaaacuagaccu

SEQ ID NO: 587640 - RNA, 19 nt, Artificial Sequence
  Description of Artificial Sequence: Synthetic oligonucleotide
gagaugguuucucuccuug

SEQ ID NO: 587641 - RNA, 19 nt, Artificial Sequence
  Description of Artificial Sequence: Synthetic oligonucleotide
ggagacguucaauaaauac

SEQ ID NO: 587642 - RNA, 19 nt, Artificial Sequence
  Description of Artificial Sequence: Synthetic oligonucleotide
acuuacaggucacacuagu

SEQ ID NO: 587643 - RNA, 19 nt, Artificial Sequence
  Description of Artificial Sequence: Synthetic oligonucleotide
cuuaaauggccgacagaag

SEQ ID NO: 587644 - RNA, 19 nt, Artificial Sequence
  Description of Artificial Sequence: Synthetic oligonucleotide
agcaaaacaucauuauaua

SEQ ID NO: 587645 - RNA, 19 nt, Artificial Sequence
  Description of Artificial Sequence: Synthetic oligonucleotide
uucagucuuaaauggccga

SEQ ID NO: 587646 - RNA, 19 nt, Artificial Sequence
  Description of Artificial Sequence: Synthetic oligonucleotide
uaauucaacuauguagaaa

SEQ ID NO: 587647 - RNA, 19 nt, Artificial Sequence
  Description of Artificial Sequence: Synthetic oligonucleotide
gauagcccucucuggagag

SEQ ID NO: 587648 - RNA, 19 nt, Artificial Sequence
  Description of Artificial Sequence: Synthetic oligonucleotide
ugucccuaaaccccaucca

SEQ ID NO: 587649 - RNA, 19 nt, Artificial Sequence
  Description of Artificial Sequence: Synthetic oligonucleotide
agcuuacauaccuaauagu

SEQ ID NO: 587650 - RNA, 19 nt, Artificial Sequence
  Description of Artificial Sequence: Synthetic oligonucleotide
augaaugaugaugaugggu

SEQ ID NO: 587651 - RNA, 19 nt, Artificial Sequence
  Description of Artificial Sequence: Synthetic oligonucleotide
cauaccacuuaaucacuac

SEQ ID NO: 587652 - RNA, 19 nt, Artificial Sequence
  Description of Artificial Sequence: Synthetic oligonucleotide
ugacucuccuaaaaucuaa

SEQ ID NO: 587653 - RNA, 19 nt, Artificial Sequence
  Description of Artificial Sequence: Synthetic oligonucleotide
auugaaguguaagacacua

SEQ ID NO: 587654 - RNA, 19 nt, Artificial Sequence
  Description of Artificial Sequence: Synthetic oligonucleotide
auaccaaggcuucaguuuu

SEQ ID NO: 587655 - RNA, 19 nt, Artificial Sequence
  Description of Artificial Sequence: Synthetic oligonucleotide
aagcgauuugcccaagcuu

SEQ ID NO: 587656 - RNA, 19 nt, Artificial Sequence
  Description of Artificial Sequence: Synthetic oligonucleotide
aacucuaggacuagcugga

SEQ ID NO: 587657 - RNA, 19 nt, Artificial Sequence
  Description of Artificial Sequence: Synthetic oligonucleotide
auaauucaacuauguagaa

SEQ ID NO: 587658 - RNA, 19 nt, Artificial Sequence
  Description of Artificial Sequence: Synthetic oligonucleotide
guacugcauaucuugacuc

SEQ ID NO: 587659 - RNA, 19 nt, Artificial Sequence
  Description of Artificial Sequence: Synthetic oligonucleotide
ugaucggccgaguacugca

SEQ ID NO: 587660 - RNA, 19 nt, Artificial Sequence
  Description of Artificial Sequence: Synthetic oligonucleotide
cuaagcucauggcucagug

SEQ ID NO: 587661 - RNA, 19 nt, Artificial Sequence
  Description of Artificial Sequence: Synthetic oligonucleotide
uacauaccuaauaguaaua

SEQ ID NO: 587662 - RNA, 19 nt, Artificial Sequence
  Description of Artificial Sequence: Synthetic oligonucleotide
uucugaucggccgaguacu

SEQ ID NO: 587663 - RNA, 19 nt, Artificial Sequence
  Description of Artificial Sequence: Synthetic oligonucleotide
gacccuugcuaccuggccc

SEQ ID NO: 587664 - RNA, 19 nt, Artificial Sequence
  Description of Artificial Sequence: Synthetic oligonucleotide
auguguuaacuuccuuauc

SEQ ID NO: 587665 - RNA, 19 nt, Artificial Sequence
  Description of Artificial Sequence: Synthetic oligonucleotide
aaacuagaccugaaaauua

SEQ ID NO: 587666 - RNA, 19 nt, Artificial Sequence
  Description of Artificial Sequence: Synthetic oligonucleotide
uacugcauaucuugacucu

SEQ ID NO: 587667 - RNA, 19 nt, Artificial Sequence
  Description of Artificial Sequence: Synthetic oligonucleotide
gagacguucaauaaauacu

SEQ ID NO: 587668 - RNA, 19 nt, Artificial Sequence
  Description of Artificial Sequence: Synthetic oligonucleotide
augauggguuagccaauac

SEQ ID NO: 587669 - RNA, 19 nt, Artificial Sequence
  Description of Artificial Sequence: Synthetic oligonucleotide
gaguacugcauaucuugac

SEQ ID NO: 587670 - RNA, 19 nt, Artificial Sequence
  Description of Artificial Sequence: Synthetic oligonucleotide
acauaccuaauaguaauaa

SEQ ID NO: 587671 - RNA, 19 nt, Artificial Sequence
  Description of Artificial Sequence: Synthetic oligonucleotide
uccuacaaagccuccucga

SEQ ID NO: 587672 - RNA, 19 nt, Artificial Sequence
  Description of Artificial Sequence: Synthetic oligonucleotide
ucccuaaaccccauccacu

SEQ ID NO: 587673 - RNA, 19 nt, Artificial Sequence
  Description of Artificial Sequence: Synthetic oligonucleotide
aucuugacucuccuaaaau

SEQ ID NO: 587674 - RNA, 19 nt, Artificial Sequence
  Description of Artificial Sequence: Synthetic oligonucleotide
acugcauaucuugacucuc

SEQ ID NO: 587675 - RNA, 19 nt, Artificial Sequence
  Description of Artificial Sequence: Synthetic oligonucleotide
aaauaacgggauguaugga

SEQ ID NO: 587676 - RNA, 19 nt, Artificial Sequence
  Description of Artificial Sequence: Synthetic oligonucleotide
gauuuucugaucggccgag

SEQ ID NO: 587677 - RNA, 19 nt, Artificial Sequence
  Description of Artificial Sequence: Synthetic oligonucleotide
agacuuccugagcaaauga

SEQ ID NO: 587678 - RNA, 19 nt, Artificial Sequence
  Description of Artificial Sequence: Synthetic oligonucleotide
uguacaucugccagugauu

SEQ ID NO: 587679 - RNA, 19 nt, Artificial Sequence
  Description of Artificial Sequence: Synthetic oligonucleotide
uugacucuccuaaaaucua

SEQ ID NO: 587680 - RNA, 19 nt, Artificial Sequence
  Description of Artificial Sequence: Synthetic oligonucleotide
uucagcgcagaguuccuga

SEQ ID NO: 587681 - RNA, 19 nt, Artificial Sequence
  Description of Artificial Sequence: Synthetic oligonucleotide
caguuuuguaagcagacaa

SEQ ID NO: 587682 - RNA, 19 nt, Artificial Sequence
  Description of Artificial Sequence: Synthetic oligonucleotide
uccagccuaacauucuaaa

SEQ ID NO: 587683 - RNA, 19 nt, Artificial Sequence
  Description of Artificial Sequence: Synthetic oligonucleotide
aaauugauuuagacauacu

SEQ ID NO: 587684 - RNA, 19 nt, Artificial Sequence
  Description of Artificial Sequence: Synthetic oligonucleotide
auaaaauuaguagcuucaa

SEQ ID NO: 587685 - RNA, 19 nt, Artificial Sequence
  Description of Artificial Sequence: Synthetic oligonucleotide
cuuuccucuaauguuccac

SEQ ID NO: 587686 - RNA, 19 nt, Artificial Sequence
  Description of Artificial Sequence: Synthetic oligonucleotide
guacuguguacugucacug

SEQ ID NO: 587687 - RNA, 19 nt, Artificial Sequence
  Description of Artificial Sequence: Synthetic oligonucleotide
aacaucccuugaguucccc

SEQ ID NO: 587688 - RNA, 19 nt, Artificial Sequence
  Description of Artificial Sequence: Synthetic oligonucleotide
cugacuaucugggaaguuc

SEQ ID NO: 587689 - RNA, 19 nt, Artificial Sequence
  Description of Artificial Sequence: Synthetic oligonucleotide
augacuccccagucagccc

SEQ ID NO: 587690 - RNA, 19 nt, Artificial Sequence
  Description of Artificial Sequence: Synthetic oligonucleotide
uaagguggauucagaaaua

SEQ ID NO: 587691 - RNA, 19 nt, Artificial Sequence
  Description of Artificial Sequence: Synthetic oligonucleotide
ucagucuuaaauggccgac

SEQ ID NO: 587692 - RNA, 19 nt, Artificial Sequence
  Description of Artificial Sequence: Synthetic oligonucleotide
caagcuuacauaccuaaua

SEQ ID NO: 587693 - RNA, 19 nt, Artificial Sequence
  Description of Artificial Sequence: Synthetic oligonucleotide
ucccaaagacuuccugagc

SEQ ID NO: 587694 - RNA, 19 nt, Artificial Sequence
  Description of Artificial Sequence: Synthetic oligonucleotide
aauggccgacagaagccac

SEQ ID NO: 587695 - RNA, 19 nt, Artificial Sequence
  Description of Artificial Sequence: Synthetic oligonucleotide
auauagaacucuaggacua

SEQ ID NO: 587696 - RNA, 19 nt, Artificial Sequence
  Description of Artificial Sequence: Synthetic oligonucleotide
agaacuguaugugauccau

SEQ ID NO: 587697 - RNA, 19 nt, Artificial Sequence
  Description of Artificial Sequence: Synthetic oligonucleotide
ucagaaauaacgggaugua

SEQ ID NO: 587698 - RNA, 19 nt, Artificial Sequence
  Description of Artificial Sequence: Synthetic oligonucleotide
gcaaacuaccuccaacacc

SEQ ID NO: 587699 - RNA, 19 nt, Artificial Sequence
  Description of Artificial Sequence: Synthetic oligonucleotide
guuguauuccccagcaaca

SEQ ID NO: 587700 - RNA, 19 nt, Artificial Sequence
  Description of Artificial Sequence: Synthetic oligonucleotide
agcagacaagcucaguuuu

SEQ ID NO: 587701 - RNA, 19 nt, Artificial Sequence
  Description of Artificial Sequence: Synthetic oligonucleotide
cuaguuucccaaagacuuc

SEQ ID NO: 587702 - RNA, 19 nt, Artificial Sequence
  Description of Artificial Sequence: Synthetic oligonucleotide
agaggcuugccugaagaug

SEQ ID NO: 587703 - RNA, 19 nt, Artificial Sequence
  Description of Artificial Sequence: Synthetic oligonucleotide
acauaccaaggcuucaguu

SEQ ID NO: 587704 - RNA, 19 nt, Artificial Sequence
  Description of Artificial Sequence: Synthetic oligonucleotide
aagccaccaagccaaucau

SEQ ID NO: 587705 - RNA, 19 nt, Artificial Sequence
  Description of Artificial Sequence: Synthetic oligonucleotide
uugcccaagcuuacauacc

SEQ ID NO: 587706 - RNA, 19 nt, Artificial Sequence
  Description of Artificial Sequence: Synthetic oligonucleotide
gccacuagaaaauaagucu

SEQ ID NO: 587707 - RNA, 19 nt, Artificial Sequence
  Description of Artificial Sequence: Synthetic oligonucleotide
guguuaguuguauucccca

SEQ ID NO: 587708 - RNA, 19 nt, Artificial Sequence
  Description of Artificial Sequence: Synthetic oligonucleotide
uuucaugauccaguggcau

SEQ ID NO: 587709 - RNA, 19 nt, Artificial Sequence
  Description of Artificial Sequence: Synthetic oligonucleotide
uauggacuuuaaagcuuga

SEQ ID NO: 587710 - RNA, 19 nt, Artificial Sequence
  Description of Artificial Sequence: Synthetic oligonucleotide
cuuccuaguggcacuuaug

SEQ ID NO: 587711 - RNA, 19 nt, Artificial Sequence
  Description of Artificial Sequence: Synthetic oligonucleotide
auuauggacuuuaaagcuu

SEQ ID NO: 587712 - RNA, 19 nt, Artificial Sequence
  Description of Artificial Sequence: Synthetic oligonucleotide
gucccuaaaccccauccac

SEQ ID NO: 587713 - RNA, 19 nt, Artificial Sequence
  Description of Artificial Sequence: Synthetic oligonucleotide
caucagucaauagaaacaa

SEQ ID NO: 587714 - RNA, 19 nt, Artificial Sequence
  Description of Artificial Sequence: Synthetic oligonucleotide
agcaccuguacuguguacu

SEQ ID NO: 587715 - RNA, 19 nt, Artificial Sequence
  Description of Artificial Sequence: Synthetic oligonucleotide
auaucuugacucuccuaaa

SEQ ID NO: 587716 - RNA, 19 nt, Artificial Sequence
  Description of Artificial Sequence: Synthetic oligonucleotide
agguggauucagaaauaac

SEQ ID NO: 587717 - RNA, 19 nt, Artificial Sequence
  Description of Artificial Sequence: Synthetic oligonucleotide
uguuccacgcuguggugac

SEQ ID NO: 587718 - RNA, 19 nt, Artificial Sequence
  Description of Artificial Sequence: Synthetic oligonucleotide
agcgauuugcccaagcuua

SEQ ID NO: 587719 - RNA, 19 nt, Artificial Sequence
  Description of Artificial Sequence: Synthetic oligonucleotide
ucugaucggccgaguacug

SEQ ID NO: 587720 - RNA, 19 nt, Artificial Sequence
  Description of Artificial Sequence: Synthetic oligonucleotide
ggcacuuauggguuuaaga

SEQ ID NO: 587721 - RNA, 19 nt, Artificial Sequence
  Description of Artificial Sequence: Synthetic oligonucleotide
agugauuagcagaguccac

SEQ ID NO: 587722 - RNA, 19 nt, Artificial Sequence
  Description of Artificial Sequence: Synthetic oligonucleotide
gccuccucgacauaccaag

SEQ ID NO: 587723 - RNA, 19 nt, Artificial Sequence
  Description of Artificial Sequence: Synthetic oligonucleotide
ccgaguacugcauaucuug

SEQ ID NO: 587724 - RNA, 19 nt, Artificial Sequence
  Description of Artificial Sequence: Synthetic oligonucleotide
uuccagccuaacauucuaa

SEQ ID NO: 587725 - RNA, 19 nt, Artificial Sequence
  Description of Artificial Sequence: Synthetic oligonucleotide
ugaugauggguuagccaau

SEQ ID NO: 587726 - RNA, 19 nt, Artificial Sequence
  Description of Artificial Sequence: Synthetic oligonucleotide
cuacaaagccuccucgaca

SEQ ID NO: 587727 - RNA, 19 nt, Artificial Sequence
  Description of Artificial Sequence: Synthetic oligonucleotide
uguuaaccgauagcccucu

SEQ ID NO: 587728 - RNA, 19 nt, Artificial Sequence
  Description of Artificial Sequence: Synthetic oligonucleotide
auucugugagaaaacuaga

SEQ ID NO: 587729 - RNA, 19 nt, Artificial Sequence
  Description of Artificial Sequence: Synthetic oligonucleotide
auuugcccaagcuuacaua

SEQ ID NO: 587730 - RNA, 19 nt, Artificial Sequence
  Description of Artificial Sequence: Synthetic oligonucleotide
gcuuacauaccuaauagua

SEQ ID NO: 587731 - RNA, 19 nt, Artificial Sequence
  Description of Artificial Sequence: Synthetic oligonucleotide
caucauuauauaacugaua

SEQ ID NO: 587732 - RNA, 19 nt, Artificial Sequence
  Description of Artificial Sequence: Synthetic oligonucleotide
agguacucugaggacauga

SEQ ID NO: 587733 - RNA, 19 nt, Artificial Sequence
  Description of Artificial Sequence: Synthetic oligonucleotide
acgggauguauggaaagcu

SEQ ID NO: 587734 - RNA, 19 nt, Artificial Sequence
  Description of Artificial Sequence: Synthetic oligonucleotide
cuagcacccaguacauguc

SEQ ID NO: 587735 - RNA, 19 nt, Artificial Sequence
  Description of Artificial Sequence: Synthetic oligonucleotide
agacaggagcuuuuguguu

SEQ ID NO: 587736 - RNA, 19 nt, Artificial Sequence
  Description of Artificial Sequence: Synthetic oligonucleotide
gugagaaaacuagaccuga

SEQ ID NO: 587737 - RNA, 19 nt, Artificial Sequence
  Description of Artificial Sequence: Synthetic oligonucleotide
auaacgggauguauggaaa

SEQ ID NO: 587738 - RNA, 19 nt, Artificial Sequence
  Description of Artificial Sequence: Synthetic oligonucleotide
gccgacagaagccaccaag

SEQ ID NO: 587739 - RNA, 19 nt, Artificial Sequence
  Description of Artificial Sequence: Synthetic oligonucleotide
acuguaggucaaauaauau

SEQ ID NO: 587740 - RNA, 19 nt, Artificial Sequence
  Description of Artificial Sequence: Synthetic oligonucleotide
ucagcgcagaguuccugac

SEQ ID NO: 587741 - RNA, 19 nt, Artificial Sequence
  Description of Artificial Sequence: Synthetic oligonucleotide
uuccccucccagcaaacua

SEQ ID NO: 587742 - RNA, 19 nt, Artificial Sequence
  Description of Artificial Sequence: Synthetic oligonucleotide
cacccuaguuucucauacc

SEQ ID NO: 587743 - RNA, 19 nt, Artificial Sequence
  Description of Artificial Sequence: Synthetic oligonucleotide
uaugucccuaaaccccauc

SEQ ID NO: 587744 - RNA, 19 nt, Artificial Sequence
  Description of Artificial Sequence: Synthetic oligonucleotide
uuccuagcacccaguacau

SEQ ID NO: 587745 - RNA, 19 nt, Artificial Sequence
  Description of Artificial Sequence: Synthetic oligonucleotide
ccucuaauguuccacgcug

SEQ ID NO: 587746 - RNA, 19 nt, Artificial Sequence
  Description of Artificial Sequence: Synthetic oligonucleotide
caccuauacauuauugccu

SEQ ID NO: 587747 - RNA, 19 nt, Artificial Sequence
  Description of Artificial Sequence: Synthetic oligonucleotide
ggcuuuguuaaccgauagc

SEQ ID NO: 587748 - RNA, 19 nt, Artificial Sequence
  Description of Artificial Sequence: Synthetic oligonucleotide
agggucaguuuuguaagca

SEQ ID NO: 587749 - RNA, 19 nt, Artificial Sequence
  Description of Artificial Sequence: Synthetic oligonucleotide
gauuugcccaagcuuacau

SEQ ID NO: 587750 - RNA, 19 nt, Artificial Sequence
  Description of Artificial Sequence: Synthetic oligonucleotide
guuaacuuccuuaucccgu

SEQ ID NO: 587751 - RNA, 19 nt, Artificial Sequence
  Description of Artificial Sequence: Synthetic oligonucleotide
agcuacaaaucaaaccaau

SEQ ID NO: 587752 - RNA, 19 nt, Artificial Sequence
  Description of Artificial Sequence: Synthetic oligonucleotide
gcacuuauggguuuaagau

SEQ ID NO: 587753 - RNA, 19 nt, Artificial Sequence
  Description of Artificial Sequence: Synthetic oligonucleotide
uaguuguauuccccagcaa

SEQ ID NO: 587754 - RNA, 19 nt, Artificial Sequence
  Description of Artificial Sequence: Synthetic oligonucleotide
ggauguauggaaagcuaug

SEQ ID NO: 587755 - RNA, 19 nt, Artificial Sequence
  Description of Artificial Sequence: Synthetic oligonucleotide
uccuuguuauaaagugauu

SEQ ID NO: 587756 - RNA, 19 nt, Artificial Sequence
  Description of Artificial Sequence: Synthetic oligonucleotide
gacguucaauaaauacuca

SEQ ID NO: 587757 - RNA, 19 nt, Artificial Sequence
  Description of Artificial Sequence: Synthetic oligonucleotide
gggcuuuguuaaccgauag

SEQ ID NO: 587758 - RNA, 19 nt, Artificial Sequence
  Description of Artificial Sequence: Synthetic oligonucleotide
ggaaggggcuuuguuaacc

SEQ ID NO: 587759 - RNA, 19 nt, Artificial Sequence
  Description of Artificial Sequence: Synthetic oligonucleotide
cuggaaauugggaaauccu

SEQ ID NO: 587760 - RNA, 19 nt, Artificial Sequence
  Description of Artificial Sequence: Synthetic oligonucleotide
cuuaucccguuuccuccag

SEQ ID NO: 587761 - RNA, 19 nt, Artificial Sequence
  Description of Artificial Sequence: Synthetic oligonucleotide
uugguaucacuggggacgu

SEQ ID NO: 587762 - RNA, 19 nt, Artificial Sequence
  Description of Artificial Sequence: Synthetic oligonucleotide
uuccugacccuugcuaccu

SEQ ID NO: 587763 - RNA, 19 nt, Artificial Sequence
  Description of Artificial Sequence: Synthetic oligonucleotide
auggguuagccaauacacu

SEQ ID NO: 587764 - RNA, 19 nt, Artificial Sequence
  Description of Artificial Sequence: Synthetic oligonucleotide
agcuggaaauugggaaauc

SEQ ID NO: 587765 - RNA, 19 nt, Artificial Sequence
  Description of Artificial Sequence: Synthetic oligonucleotide
ucgacauaccaaggcuuca

SEQ ID NO: 587766 - RNA, 19 nt, Artificial Sequence
  Description of Artificial Sequence: Synthetic oligonucleotide
caggagacguucaauaaau

SEQ ID NO: 587767 - RNA, 19 nt, Artificial Sequence
  Description of Artificial Sequence: Synthetic oligonucleotide
cauaccaaggcuucaguuu

SEQ ID NO: 587768 - RNA, 19 nt, Artificial Sequence
  Description of Artificial Sequence: Synthetic oligonucleotide
auagcccucucuggagagg

SEQ ID NO: 587769 - RNA, 19 nt, Artificial Sequence
  Description of Artificial Sequence: Synthetic oligonucleotide
uagcuucaaaaguguuagu

SEQ ID NO: 587770 - RNA, 19 nt, Artificial Sequence
  Description of Artificial Sequence: Synthetic oligonucleotide
ccagugauuuucugaucgg

SEQ ID NO: 587771 - RNA, 19 nt, Artificial Sequence
  Description of Artificial Sequence: Synthetic oligonucleotide
ucggccgaguacugcauau

SEQ ID NO: 587772 - RNA, 19 nt, Artificial Sequence
  Description of Artificial Sequence: Synthetic oligonucleotide
cuguaggucaaauaauauu

SEQ ID NO: 587773 - RNA, 19 nt, Artificial Sequence
  Description of Artificial Sequence: Synthetic oligonucleotide
cacuaguuucccaaagacu

SEQ ID NO: 587774 - RNA, 19 nt, Artificial Sequence
  Description of Artificial Sequence: Synthetic oligonucleotide
cugacugugcuccuacaaa

SEQ ID NO: 587775 - RNA, 19 nt, Artificial Sequence
  Description of Artificial Sequence: Synthetic oligonucleotide
gucuuaaauggccgacaga

SEQ ID NO: 587776 - RNA, 19 nt, Artificial Sequence
  Description of Artificial Sequence: Synthetic oligonucleotide
cccuaaaccccauccacug

SEQ ID NO: 587777 - RNA, 19 nt, Artificial Sequence
  Description of Artificial Sequence: Synthetic oligonucleotide
gaugauggguuagccaaua

SEQ ID NO: 587778 - RNA, 19 nt, Artificial Sequence
  Description of Artificial Sequence: Synthetic oligonucleotide
auuaagcgauuugcccaag

SEQ ID NO: 587779 - RNA, 19 nt, Artificial Sequence
  Description of Artificial Sequence: Synthetic oligonucleotide
gacucuccuaaaaucuaaa

SEQ ID NO: 587780 - RNA, 19 nt, Artificial Sequence
  Description of Artificial Sequence: Synthetic oligonucleotide
cagcgcagaguuccugacc

SEQ ID NO: 587781 - RNA, 19 nt, Artificial Sequence
  Description of Artificial Sequence: Synthetic oligonucleotide
ccacccuaguuucucauac

SEQ ID NO: 587782 - RNA, 19 nt, Artificial Sequence
  Description of Artificial Sequence: Synthetic oligonucleotide
gacauaccaaggcuucagu

SEQ ID NO: 587783 - RNA, 19 nt, Artificial Sequence
  Description of Artificial Sequence: Synthetic oligonucleotide
cauaaaugcuagccacuaa

SEQ ID NO: 587784 - RNA, 19 nt, Artificial Sequence
  Description of Artificial Sequence: Synthetic oligonucleotide
gccacuaagcucauggcuc

SEQ ID NO: 587785 - RNA, 19 nt, Artificial Sequence
  Description of Artificial Sequence: Synthetic oligonucleotide
ccuaguggcacuuaugggu

SEQ ID NO: 587786 - RNA, 19 nt, Artificial Sequence
  Description of Artificial Sequence: Synthetic oligonucleotide
gaugacaccuauacauuau

SEQ ID NO: 587787 - RNA, 19 nt, Artificial Sequence
  Description of Artificial Sequence: Synthetic oligonucleotide
acuaagcucauggcucagu

SEQ ID NO: 587788 - RNA, 19 nt, Artificial Sequence
  Description of Artificial Sequence: Synthetic oligonucleotide
gucacacuaguuucccaaa

SEQ ID NO: 587789 - RNA, 19 nt, Artificial Sequence
  Description of Artificial Sequence: Synthetic oligonucleotide
augagguaagguggauuca

SEQ ID NO: 587790 - RNA, 19 nt, Artificial Sequence
  Description of Artificial Sequence: Synthetic oligonucleotide
caggcccauaaaugcuagc

SEQ ID NO: 587791 - RNA, 19 nt, Artificial Sequence
  Description of Artificial Sequence: Synthetic oligonucleotide
cugaucggccgaguacugc

SEQ ID NO: 587792 - RNA, 19 nt, Artificial Sequence
  Description of Artificial Sequence: Synthetic oligonucleotide
agucuaacuuaaagacaca

SEQ ID NO: 587793 - RNA, 19 nt, Artificial Sequence
  Description of Artificial Sequence: Synthetic oligonucleotide
cagccacuagaaaauaagu

SEQ ID NO: 587794 - RNA, 19 nt, Artificial Sequence
  Description of Artificial Sequence: Synthetic oligonucleotide
cacgcuguggugacauuga

SEQ ID NO: 587795 - RNA, 19 nt, Artificial Sequence
  Description of Artificial Sequence: Synthetic oligonucleotide
augcaugguaacagauaug

SEQ ID NO: 587796 - RNA, 19 nt, Artificial Sequence
  Description of Artificial Sequence: Synthetic oligonucleotide
aggggcuuuguuaaccgau

SEQ ID NO: 587797 - RNA, 19 nt, Artificial Sequence
  Description of Artificial Sequence: Synthetic oligonucleotide
caaagacuuccugagcaaa

SEQ ID NO: 587798 - RNA, 19 nt, Artificial Sequence
  Description of Artificial Sequence: Synthetic oligonucleotide
ggaaccccaccacuuauaa

SEQ ID NO: 587799 - RNA, 19 nt, Artificial Sequence
  Description of Artificial Sequence: Synthetic oligonucleotide
cacuuauggguuuaagauu

SEQ ID NO: 587800 - RNA, 19 nt, Artificial Sequence
  Description of Artificial Sequence: Synthetic oligonucleotide
guuagccaauacacucaug

SEQ ID NO: 587801 - RNA, 19 nt, Artificial Sequence
  Description of Artificial Sequence: Synthetic oligonucleotide
cacccaguacauguccaac

SEQ ID NO: 587802 - RNA, 19 nt, Artificial Sequence
  Description of Artificial Sequence: Synthetic oligonucleotide
gggacugcuguagauguuc

SEQ ID NO: 587803 - RNA, 19 nt, Artificial Sequence
  Description of Artificial Sequence: Synthetic oligonucleotide
cacuuauaaauggggccca

SEQ ID NO: 587804 - RNA, 19 nt, Artificial Sequence
  Description of Artificial Sequence: Synthetic oligonucleotide
ccucuacacaccacccuag

SEQ ID NO: 587805 - RNA, 19 nt, Artificial Sequence
  Description of Artificial Sequence: Synthetic oligonucleotide
accacccuaguuucucaua

SEQ ID NO: 587806 - RNA, 19 nt, Artificial Sequence
  Description of Artificial Sequence: Synthetic oligonucleotide
caacaggcccauaaaugcu

SEQ ID NO: 587807 - RNA, 19 nt, Artificial Sequence
  Description of Artificial Sequence: Synthetic oligonucleotide
cagucuuaaauggccgaca

SEQ ID NO: 587808 - RNA, 19 nt, Artificial Sequence
  Description of Artificial Sequence: Synthetic oligonucleotide
auauuucaacuggcucucu

SEQ ID NO: 587809 - RNA, 19 nt, Artificial Sequence
  Description of Artificial Sequence: Synthetic oligonucleotide
cuucagcgcagaguuccug

SEQ ID NO: 587810 - RNA, 19 nt, Artificial Sequence
  Description of Artificial Sequence: Synthetic oligonucleotide
gccaucuaggaagggguag

SEQ ID NO: 587811 - RNA, 19 nt, Artificial Sequence
  Description of Artificial Sequence: Synthetic oligonucleotide
cuaguggcacuuauggguu

SEQ ID NO: 587812 - RNA, 19 nt, Artificial Sequence
  Description of Artificial Sequence: Synthetic oligonucleotide
cagcaccuguacuguguac

SEQ ID NO: 587813 - RNA, 19 nt, Artificial Sequence
  Description of Artificial Sequence: Synthetic oligonucleotide
guaggucaaauaauauuuu

SEQ ID NO: 587814 - RNA, 19 nt, Artificial Sequence
  Description of Artificial Sequence: Synthetic oligonucleotide
caaaaguguuaguuguauu

SEQ ID NO: 587815 - RNA, 19 nt, Artificial Sequence
  Description of Artificial Sequence: Synthetic oligonucleotide
gcuugacauaaaauuagua

SEQ ID NO: 587816 - RNA, 19 nt, Artificial Sequence
  Description of Artificial Sequence: Synthetic oligonucleotide
gcagacaagcucaguuuug

SEQ ID NO: 587817 - RNA, 19 nt, Artificial Sequence
  Description of Artificial Sequence: Synthetic oligonucleotide
gugaaugaaugaugaugau

SEQ ID NO: 587818 - RNA, 19 nt, Artificial Sequence
  Description of Artificial Sequence: Synthetic oligonucleotide
aucggccgaguacugcaua

SEQ ID NO: 587819 - RNA, 19 nt, Artificial Sequence
  Description of Artificial Sequence: Synthetic oligonucleotide
cacuaagcucauggcucag

SEQ ID NO: 587820 - RNA, 19 nt, Artificial Sequence
  Description of Artificial Sequence: Synthetic oligonucleotide
ccuggaaggggcuuuguua

SEQ ID NO: 587821 - RNA, 19 nt, Artificial Sequence
  Description of Artificial Sequence: Synthetic oligonucleotide
ccuuguuauaaagugauuu

SEQ ID NO: 587822 - RNA, 19 nt, Artificial Sequence
  Description of Artificial Sequence: Synthetic oligonucleotide
aggagacguucaauaaaua

SEQ ID NO: 587823 - RNA, 19 nt, Artificial Sequence
  Description of Artificial Sequence: Synthetic oligonucleotide
aagcuaugucuggguucug

SEQ ID NO: 587824 - RNA, 19 nt, Artificial Sequence
  Description of Artificial Sequence: Synthetic oligonucleotide
ggccgaguacugcauaucu

SEQ ID NO: 587825 - RNA, 19 nt, Artificial Sequence
  Description of Artificial Sequence: Synthetic oligonucleotide
ccagccuaacauucuaaaa

SEQ ID NO: 587826 - RNA, 19 nt, Artificial Sequence
  Description of Artificial Sequence: Synthetic oligonucleotide
ccaggagacguucaauaaa

SEQ ID NO: 587827 - RNA, 19 nt, Artificial Sequence
  Description of Artificial Sequence: Synthetic oligonucleotide
ggaaagcuaugucuggguu

SEQ ID NO: 587828 - RNA, 19 nt, Artificial Sequence
  Description of Artificial Sequence: Synthetic oligonucleotide
ccacuaagcucauggcuca

SEQ ID NO: 587829 - RNA, 19 nt, Artificial Sequence
  Description of Artificial Sequence: Synthetic oligonucleotide
cagggucaauguaggugga

SEQ ID NO: 587830 - RNA, 19 nt, Artificial Sequence
  Description of Artificial Sequence: Synthetic oligonucleotide
cagaaauaacgggauguau

SEQ ID NO: 587831 - RNA, 19 nt, Artificial Sequence
  Description of Artificial Sequence: Synthetic oligonucleotide
gucucauauuucugacuau

SEQ ID NO: 587832 - RNA, 19 nt, Artificial Sequence
  Description of Artificial Sequence: Synthetic oligonucleotide
auaugucccuaaaccccau

SEQ ID NO: 587833 - RNA, 19 nt, Artificial Sequence
  Description of Artificial Sequence: Synthetic oligonucleotide
gggauguauggaaagcuau

SEQ ID NO: 587834 - RNA, 19 nt, Artificial Sequence
  Description of Artificial Sequence: Synthetic oligonucleotide
cuggggacguuuggucuuc

SEQ ID NO: 587835 - RNA, 19 nt, Artificial Sequence
  Description of Artificial Sequence: Synthetic oligonucleotide
cauccacuucagacuuaca

SEQ ID NO: 587836 - RNA, 19 nt, Artificial Sequence
  Description of Artificial Sequence: Synthetic oligonucleotide
agcaugugucacagccacu

SEQ ID NO: 587837 - RNA, 19 nt, Artificial Sequence
  Description of Artificial Sequence: Synthetic oligonucleotide
ccccucccagcaaacuacc

SEQ ID NO: 587838 - RNA, 19 nt, Artificial Sequence
  Description of Artificial Sequence: Synthetic oligonucleotide
gcauaucuugacucuccua

SEQ ID NO: 587839 - RNA, 19 nt, Artificial Sequence
  Description of Artificial Sequence: Synthetic oligonucleotide
ccuauacauuauugccuga

SEQ ID NO: 587840 - RNA, 19 nt, Artificial Sequence
  Description of Artificial Sequence: Synthetic oligonucleotide
ccauaaaugcuagccacua

SEQ ID NO: 587841 - RNA, 19 nt, Artificial Sequence
  Description of Artificial Sequence: Synthetic oligonucleotide
cgaguacugcauaucuuga

SEQ ID NO: 587842 - RNA, 19 nt, Artificial Sequence
  Description of Artificial Sequence: Synthetic oligonucleotide
cuuauggguuuaagauuuu

SEQ ID NO: 587843 - RNA, 19 nt, Artificial Sequence
  Description of Artificial Sequence: Synthetic oligonucleotide
gguaucacuggggacguuu

SEQ ID NO: 587844 - RNA, 19 nt, Artificial Sequence
  Description of Artificial Sequence: Synthetic oligonucleotide
uggggacguuuggucuucu

SEQ ID NO: 587845 - RNA, 19 nt, Artificial Sequence
  Description of Artificial Sequence: Synthetic oligonucleotide
uccacgcuguggugacauu

SEQ ID NO: 587846 - RNA, 19 nt, Artificial Sequence
  Description of Artificial Sequence: Synthetic oligonucleotide
ccuaaaccccauccacuga

SEQ ID NO: 587847 - RNA, 19 nt, Artificial Sequence
  Description of Artificial Sequence: Synthetic oligonucleotide
gacuccccagucagcccuc

SEQ ID NO: 587848 - RNA, 19 nt, Artificial Sequence
  Description of Artificial Sequence: Synthetic oligonucleotide
cccauaaaugcuagccacu

SEQ ID NO: 587849 - RNA, 19 nt, Artificial Sequence
  Description of Artificial Sequence: Synthetic oligonucleotide
ggggcuuuguuaaccgaua

SEQ ID NO: 587850 - RNA, 19 nt, Artificial Sequence
  Description of Artificial Sequence: Synthetic oligonucleotide
ccaauacacucaugccuaa

SEQ ID NO: 587851 - RNA, 19 nt, Artificial Sequence
  Description of Artificial Sequence: Synthetic oligonucleotide
gacuaucugggaaguucuu

SEQ ID NO: 587852 - RNA, 19 nt, Artificial Sequence
  Description of Artificial Sequence: Synthetic oligonucleotide
gaucggccgaguacugcau

SEQ ID NO: 587853 - RNA, 19 nt, Artificial Sequence
  Description of Artificial Sequence: Synthetic oligonucleotide
caccacccuaguuucucau

SEQ ID NO: 587854 - RNA, 19 nt, Artificial Sequence
  Description of Artificial Sequence: Synthetic oligonucleotide
gccugaagaugucugcauu

SEQ ID NO: 587855 - RNA, 19 nt, Artificial Sequence
  Description of Artificial Sequence: Synthetic oligonucleotide
guuccacgcuguggugaca

SEQ ID NO: 587856 - RNA, 19 nt, Artificial Sequence
  Description of Artificial Sequence: Synthetic oligonucleotide
caccuguacuguguacugu

SEQ ID NO: 587857 - RNA, 19 nt, Artificial Sequence
  Description of Artificial Sequence: Synthetic oligonucleotide
ccucgacauaccaaggcuu

SEQ ID NO: 587858 - RNA, 19 nt, Artificial Sequence
  Description of Artificial Sequence: Synthetic oligonucleotide
gggaaccccaccacuuaua

SEQ ID NO: 587859 - RNA, 19 nt, Artificial Sequence
  Description of Artificial Sequence: Synthetic oligonucleotide
ugguaucacuggggacguu

SEQ ID NO: 587860 - RNA, 19 nt, Artificial Sequence
  Description of Artificial Sequence: Synthetic oligonucleotide
ccguuuccuccagagguga

SEQ ID NO: 587861 - RNA, 19 nt, Artificial Sequence
  Description of Artificial Sequence: Synthetic oligonucleotide
ccuuccuaguggcacuuau

SEQ ID NO: 587862 - RNA, 19 nt, Artificial Sequence
  Description of Artificial Sequence: Synthetic oligonucleotide
gcccaagcuuacauaccua

SEQ ID NO: 587863 - RNA, 19 nt, Artificial Sequence
  Description of Artificial Sequence: Synthetic oligonucleotide
cgauuugcccaagcuuaca

SEQ ID NO: 587864 - RNA, 19 nt, Artificial Sequence
  Description of Artificial Sequence: Synthetic oligonucleotide
ggccgacagaagccaccaa

SEQ ID NO: 587865 - RNA, 19 nt, Artificial Sequence
  Description of Artificial Sequence: Synthetic oligonucleotide
gcgcagaguuccugacccu

SEQ ID NO: 587866 - RNA, 19 nt, Artificial Sequence
  Description of Artificial Sequence: Synthetic oligonucleotide
cggccgaguacugcauauc

SEQ ID NO: 587867 - RNA, 19 nt, Artificial Sequence
  Description of Artificial Sequence: Synthetic oligonucleotide
cccucccagcaaacuaccu

SEQ ID NO: 587868 - RNA, 19 nt, Artificial Sequence
  Description of Artificial Sequence: Synthetic oligonucleotide
cgcagaguuccugacccuu

SEQ ID NO: 587869 - RNA, 19 nt, Artificial Sequence
  Description of Artificial Sequence: Synthetic oligonucleotide
ggggcccaagagggucagu

SEQ ID NO: 587870 - RNA, 19 nt, Artificial Sequence
  Description of Artificial Sequence: Synthetic oligonucleotide
aaaaguuugcaugagaaac

SEQ ID NO: 587871 - RNA, 19 nt, Artificial Sequence
  Description of Artificial Sequence: Synthetic oligonucleotide
uacuauacuaaucauaucc

SEQ ID NO: 587872 - RNA, 19 nt, Artificial Sequence
  Description of Artificial Sequence: Synthetic oligonucleotide
aaaugaaaugaacaccugc

SEQ ID NO: 587873 - RNA, 19 nt, Artificial Sequence
  Description of Artificial Sequence: Synthetic oligonucleotide
ucaauaugaacucucacgg

SEQ ID NO: 587874 - RNA, 19 nt, Artificial Sequence
  Description of Artificial Sequence: Synthetic oligonucleotide
uguuaauugagaaaagcgg

SEQ ID NO: 587875 - RNA, 19 nt, Artificial Sequence
  Description of Artificial Sequence: Synthetic oligonucleotide
uuaaacuuaaccuaaagau

SEQ ID NO: 587876 - RNA, 19 nt, Artificial Sequence
  Description of Artificial Sequence: Synthetic oligonucleotide
uuugguagcuuaaagaacc

SEQ ID NO: 587877 - RNA, 19 nt, Artificial Sequence
  Description of Artificial Sequence: Synthetic oligonucleotide
aacacuucaauauaccugu

SEQ ID NO: 587878 - RNA, 19 nt, Artificial Sequence
  Description of Artificial Sequence: Synthetic oligonucleotide
ucaaccuucaggaagacga

SEQ ID NO: 587879 - RNA, 19 nt, Artificial Sequence
  Description of Artificial Sequence: Synthetic oligonucleotide
uuuacucaauauuacaugc

SEQ ID NO: 587880 - RNA, 19 nt, Artificial Sequence
  Description of Artificial Sequence: Synthetic oligonucleotide
uauacuaaucauauccacc

SEQ ID NO: 587881 - RNA, 19 nt, Artificial Sequence
  Description of Artificial Sequence: Synthetic oligonucleotide
gauaacaucacucuuaagu

SEQ ID NO: 587882 - RNA, 19 nt, Artificial Sequence
  Description of Artificial Sequence: Synthetic oligonucleotide
agcuuaaagaaccaccacg

SEQ ID NO: 587883 - RNA, 19 nt, Artificial Sequence
  Description of Artificial Sequence: Synthetic oligonucleotide
aaagccucaccacucugcc

SEQ ID NO: 587884 - RNA, 19 nt, Artificial Sequence
  Description of Artificial Sequence: Synthetic oligonucleotide
uccucuagaguuuaaacug

SEQ ID NO: 587885 - RNA, 19 nt, Artificial Sequence
  Description of Artificial Sequence: Synthetic oligonucleotide
cacuuagcaaaauacaccc

SEQ ID NO: 587886 - RNA, 19 nt, Artificial Sequence
  Description of Artificial Sequence: Synthetic oligonucleotide
uuuuguacguccucaauug

SEQ ID NO: 587887 - RNA, 19 nt, Artificial Sequence
  Description of Artificial Sequence: Synthetic oligonucleotide
aaagauccgcucaacauac

SEQ ID NO: 587888 - RNA, 19 nt, Artificial Sequence
  Description of Artificial Sequence: Synthetic oligonucleotide
aguauuaguauugugucuc

SEQ ID NO: 587889 - RNA, 19 nt, Artificial Sequence
  Description of Artificial Sequence: Synthetic oligonucleotide
acgaaguuugaccacauag

SEQ ID NO: 587890 - RNA, 19 nt, Artificial Sequence
  Description of Artificial Sequence: Synthetic oligonucleotide
aaacacuuauggaagguac

SEQ ID NO: 587891 - RNA, 19 nt, Artificial Sequence
  Description of Artificial Sequence: Synthetic oligonucleotide
aguauugugucucaauucu

SEQ ID NO: 587892 - RNA, 19 nt, Artificial Sequence
  Description of Artificial Sequence: Synthetic oligonucleotide
aacucagauaacaucacuc

SEQ ID NO: 587893 - RNA, 19 nt, Artificial Sequence
  Description of Artificial Sequence: Synthetic oligonucleotide
aguucuauguaucugugcu

SEQ ID NO: 587894 - RNA, 19 nt, Artificial Sequence
  Description of Artificial Sequence: Synthetic oligonucleotide
auaacucaaaugcuccuac

SEQ ID NO: 587895 - RNA, 19 nt, Artificial Sequence
  Description of Artificial Sequence: Synthetic oligonucleotide
uccucaauugagcaggacc

SEQ ID NO: 587896 - RNA, 19 nt, Artificial Sequence
  Description of Artificial Sequence: Synthetic oligonucleotide
uuuaauccagauuuucaca

SEQ ID NO: 587897 - RNA, 19 nt, Artificial Sequence
  Description of Artificial Sequence: Synthetic oligonucleotide
gaauugugcagucggagag

SEQ ID NO: 587898 - RNA, 19 nt, Artificial Sequence
  Description of Artificial Sequence: Synthetic oligonucleotide
aaguuugcaugagaaacac

SEQ ID NO: 587899 - RNA, 19 nt, Artificial Sequence
  Description of Artificial Sequence: Synthetic oligonucleotide
uaaacuuaaccuaaagauu

SEQ ID NO: 587900 - RNA, 19 nt, Artificial Sequence
  Description of Artificial Sequence: Synthetic oligonucleotide
ugaaaugaacaccugcgac

SEQ ID NO: 587901 - RNA, 19 nt, Artificial Sequence
  Description of Artificial Sequence: Synthetic oligonucleotide
uucucuaguauaaaugaaa

SEQ ID NO: 587902 - RNA, 19 nt, Artificial Sequence
  Description of Artificial Sequence: Synthetic oligonucleotide
uuaagucaaggccucacca

SEQ ID NO: 587903 - RNA, 19 nt, Artificial Sequence
  Description of Artificial Sequence: Synthetic oligonucleotide
agcaacgcggcuuacgaac

SEQ ID NO: 587904 - RNA, 19 nt, Artificial Sequence
  Description of Artificial Sequence: Synthetic oligonucleotide
uccacagguaaugugaucc

SEQ ID NO: 587905 - RNA, 19 nt, Artificial Sequence
  Description of Artificial Sequence: Synthetic oligonucleotide
uguaucuccgugcugugcc

SEQ ID NO: 587906 - RNA, 19 nt, Artificial Sequence
  Description of Artificial Sequence: Synthetic oligonucleotide
uuaauugagaaaagcggaa

SEQ ID NO: 587907 - RNA, 19 nt, Artificial Sequence
  Description of Artificial Sequence: Synthetic oligonucleotide
cuuaaacuacuuaacucag

SEQ ID NO: 587908 - RNA, 19 nt, Artificial Sequence
  Description of Artificial Sequence: Synthetic oligonucleotide
uguacguccucaauugagc

SEQ ID NO: 587909 - RNA, 19 nt, Artificial Sequence
  Description of Artificial Sequence: Synthetic oligonucleotide
aaauaacucaaaugcuccu

SEQ ID NO: 587910 - RNA, 19 nt, Artificial Sequence
  Description of Artificial Sequence: Synthetic oligonucleotide
uuaguauugugucucaauu

SEQ ID NO: 587911 - RNA, 19 nt, Artificial Sequence
  Description of Artificial Sequence: Synthetic oligonucleotide
gaaaaguacauguccccag

SEQ ID NO: 587912 - RNA, 19 nt, Artificial Sequence
  Description of Artificial Sequence: Synthetic oligonucleotide
ucagauaacaucacucuua

SEQ ID NO: 587913 - RNA, 19 nt, Artificial Sequence
  Description of Artificial Sequence: Synthetic oligonucleotide
uuaaagauccgcucaacau

SEQ ID NO: 587914 - RNA, 19 nt, Artificial Sequence
  Description of Artificial Sequence: Synthetic oligonucleotide
aauuccuacaguauuagua

SEQ ID NO: 587915 - RNA, 19 nt, Artificial Sequence
  Description of Artificial Sequence: Synthetic oligonucleotide
uccuacaguauuaguauug

SEQ ID NO: 587916 - RNA, 19 nt, Artificial Sequence
  Description of Artificial Sequence: Synthetic oligonucleotide
uuuaagucaaggccucacc

SEQ ID NO: 587917 - RNA, 19 nt, Artificial Sequence
  Description of Artificial Sequence: Synthetic oligonucleotide
cuacuuucaguaagcaacg

SEQ ID NO: 587918 - RNA, 19 nt, Artificial Sequence
  Description of Artificial Sequence: Synthetic oligonucleotide
aaaaguacauguccccagu

SEQ ID NO: 587919 - RNA, 19 nt, Artificial Sequence
  Description of Artificial Sequence: Synthetic oligonucleotide
ucuuaaguauacuaccaaa

SEQ ID NO: 587920 - RNA, 19 nt, Artificial Sequence
  Description of Artificial Sequence: Synthetic oligonucleotide
cuuaaacuuaaccuaaaga

SEQ ID NO: 587921 - RNA, 19 nt, Artificial Sequence
  Description of Artificial Sequence: Synthetic oligonucleotide
ugugcagucggagaggaag

SEQ ID NO: 587922 - RNA, 19 nt, Artificial Sequence
  Description of Artificial Sequence: Synthetic oligonucleotide
uuguacguccucaauugag

SEQ ID NO: 587923 - RNA, 19 nt, Artificial Sequence
  Description of Artificial Sequence: Synthetic oligonucleotide
uaauugagaaaagcggaag

SEQ ID NO: 587924 - RNA, 19 nt, Artificial Sequence
  Description of Artificial Sequence: Synthetic oligonucleotide
uucuauguaucugugcugc

SEQ ID NO: 587925 - RNA, 19 nt, Artificial Sequence
  Description of Artificial Sequence: Synthetic oligonucleotide
caauugagcaggaccaggg

SEQ ID NO: 587926 - RNA, 19 nt, Artificial Sequence
  Description of Artificial Sequence: Synthetic oligonucleotide
uguccuucgacauggcugc

SEQ ID NO: 587927 - RNA, 19 nt, Artificial Sequence
  Description of Artificial Sequence: Synthetic oligonucleotide
uaagcaacgcggcuuacga

SEQ ID NO: 587928 - RNA, 19 nt, Artificial Sequence
  Description of Artificial Sequence: Synthetic oligonucleotide
cuauacuaaucauauccac

SEQ ID NO: 587929 - RNA, 19 nt, Artificial Sequence
  Description of Artificial Sequence: Synthetic oligonucleotide
acucagauaacaucacucu

SEQ ID NO: 587930 - RNA, 19 nt, Artificial Sequence
  Description of Artificial Sequence: Synthetic oligonucleotide
uuucaguaagcaacgcggc

SEQ ID NO: 587931 - RNA, 19 nt, Artificial Sequence
  Description of Artificial Sequence: Synthetic oligonucleotide
ucucaaaacuaacuuuuaa

SEQ ID NO: 587932 - RNA, 19 nt, Artificial Sequence
  Description of Artificial Sequence: Synthetic oligonucleotide
uaggccacgaaguuugacc

SEQ ID NO: 587933 - RNA, 19 nt, Artificial Sequence
  Description of Artificial Sequence: Synthetic oligonucleotide
aacaccugcgaccccauca

SEQ ID NO: 587934 - RNA, 19 nt, Artificial Sequence
  Description of Artificial Sequence: Synthetic oligonucleotide
ucuccguugcuuuguaggg

SEQ ID NO: 587935 - RNA, 19 nt, Artificial Sequence
  Description of Artificial Sequence: Synthetic oligonucleotide
aaaguuugcaugagaaaca

SEQ ID NO: 587936 - RNA, 19 nt, Artificial Sequence
  Description of Artificial Sequence: Synthetic oligonucleotide
aaacgcagagagcuccggg

SEQ ID NO: 587937 - RNA, 19 nt, Artificial Sequence
  Description of Artificial Sequence: Synthetic oligonucleotide
aaguacauguccccagugu

SEQ ID NO: 587938 - RNA, 19 nt, Artificial Sequence
  Description of Artificial Sequence: Synthetic oligonucleotide
aaugccaauguaucuccgu

SEQ ID NO: 587939 - RNA, 19 nt, Artificial Sequence
  Description of Artificial Sequence: Synthetic oligonucleotide
cuauaagccccguugcuag

SEQ ID NO: 587940 - RNA, 19 nt, Artificial Sequence
  Description of Artificial Sequence: Synthetic oligonucleotide
ugaccuaacuuccuccuga

SEQ ID NO: 587941 - RNA, 19 nt, Artificial Sequence
  Description of Artificial Sequence: Synthetic oligonucleotide
ugaauugugcagucggaga

SEQ ID NO: 587942 - RNA, 19 nt, Artificial Sequence
  Description of Artificial Sequence: Synthetic oligonucleotide
aaaagcggaagaaaauagu

SEQ ID NO: 587943 - RNA, 19 nt, Artificial Sequence
  Description of Artificial Sequence: Synthetic oligonucleotide
uguucugaccgcuguagcc

SEQ ID NO: 587944 - RNA, 19 nt, Artificial Sequence
  Description of Artificial Sequence: Synthetic oligonucleotide
uccccuguaaucuugcccu

SEQ ID NO: 587945 - RNA, 19 nt, Artificial Sequence
  Description of Artificial Sequence: Synthetic oligonucleotide
aauugugcagucggagagg

SEQ ID NO: 587946 - RNA, 19 nt, Artificial Sequence
  Description of Artificial Sequence: Synthetic oligonucleotide
cuaaucauauccacccaug

SEQ ID NO: 587947 - RNA, 19 nt, Artificial Sequence
  Description of Artificial Sequence: Synthetic oligonucleotide
ucugaguaugaccuaacuu

SEQ ID NO: 587948 - RNA, 19 nt, Artificial Sequence
  Description of Artificial Sequence: Synthetic oligonucleotide
cuugacugcuuauuggcug

SEQ ID NO: 587949 - RNA, 19 nt, Artificial Sequence
  Description of Artificial Sequence: Synthetic oligonucleotide
uuccacggaaggcagaagu

SEQ ID NO: 587950 - RNA, 19 nt, Artificial Sequence
  Description of Artificial Sequence: Synthetic oligonucleotide
auauaccggugucccaugc

SEQ ID NO: 587951 - RNA, 19 nt, Artificial Sequence
  Description of Artificial Sequence: Synthetic oligonucleotide
aguuguaaaugucguucuc

SEQ ID NO: 587952 - RNA, 19 nt, Artificial Sequence
  Description of Artificial Sequence: Synthetic oligonucleotide
uccuacuauacuaaucaua

SEQ ID NO: 587953 - RNA, 19 nt, Artificial Sequence
  Description of Artificial Sequence: Synthetic oligonucleotide
ugaacgaacgccuccccug

SEQ ID NO: 587954 - RNA, 19 nt, Artificial Sequence
  Description of Artificial Sequence: Synthetic oligonucleotide
uaguauugugucucaauuc

SEQ ID NO: 587955 - RNA, 19 nt, Artificial Sequence
  Description of Artificial Sequence: Synthetic oligonucleotide
augaaaugaacaccugcga

SEQ ID NO: 587956 - RNA, 19 nt, Artificial Sequence
  Description of Artificial Sequence: Synthetic oligonucleotide
uaugaccuaacuuccuccu

SEQ ID NO: 587957 - RNA, 19 nt, Artificial Sequence
  Description of Artificial Sequence: Synthetic oligonucleotide
cuguccuucgacauggcug

SEQ ID NO: 587958 - RNA, 19 nt, Artificial Sequence
  Description of Artificial Sequence: Synthetic oligonucleotide
aauauaccggugucccaug

SEQ ID NO: 587959 - RNA, 19 nt, Artificial Sequence
  Description of Artificial Sequence: Synthetic oligonucleotide
auuaguauugugucucaau

SEQ ID NO: 587960 - RNA, 19 nt, Artificial Sequence
  Description of Artificial Sequence: Synthetic oligonucleotide
acguccucaauugagcagg

SEQ ID NO: 587961 - RNA, 19 nt, Artificial Sequence
  Description of Artificial Sequence: Synthetic oligonucleotide
aagucaaggccucaccaau

SEQ ID NO: 587962 - RNA, 19 nt, Artificial Sequence
  Description of Artificial Sequence: Synthetic oligonucleotide
ugaggcaaacugaacgaac

SEQ ID NO: 587963 - RNA, 19 nt, Artificial Sequence
  Description of Artificial Sequence: Synthetic oligonucleotide
guaugaccuaacuuccucc

SEQ ID NO: 587964 - RNA, 19 nt, Artificial Sequence
  Description of Artificial Sequence: Synthetic oligonucleotide
aauccaucucgguucugug

SEQ ID NO: 587965 - RNA, 19 nt, Artificial Sequence
  Description of Artificial Sequence: Synthetic oligonucleotide
agcugacacucccaugccc

SEQ ID NO: 587966 - RNA, 19 nt, Artificial Sequence
  Description of Artificial Sequence: Synthetic oligonucleotide
ucggcuagcucuugugagg

SEQ ID NO: 587967 - RNA, 19 nt, Artificial Sequence
  Description of Artificial Sequence: Synthetic oligonucleotide
uuuguacguccucaauuga

SEQ ID NO: 587968 - RNA, 19 nt, Artificial Sequence
  Description of Artificial Sequence: Synthetic oligonucleotide
acuauacuaaucauaucca

SEQ ID NO: 587969 - RNA, 19 nt, Artificial Sequence
  Description of Artificial Sequence: Synthetic oligonucleotide
gaaaaguuugcaugagaaa

SEQ ID NO: 587970 - RNA, 19 nt, Artificial Sequence
  Description of Artificial Sequence: Synthetic oligonucleotide
aaugcuccuacuauacuaa

SEQ ID NO: 587971 - RNA, 19 nt, Artificial Sequence
  Description of Artificial Sequence: Synthetic oligonucleotide
acucaaaugcuccuacuau

SEQ ID NO: 587972 - RNA, 19 nt, Artificial Sequence
  Description of Artificial Sequence: Synthetic oligonucleotide
aacgccuccccuguaaucu

SEQ ID NO: 587973 - RNA, 19 nt, Artificial Sequence
  Description of Artificial Sequence: Synthetic oligonucleotide
gaguucuauguaucugugc

SEQ ID NO: 587974 - RNA, 19 nt, Artificial Sequence
  Description of Artificial Sequence: Synthetic oligonucleotide
gaaguuuuguacguccuca

SEQ ID NO: 587975 - RNA, 19 nt, Artificial Sequence
  Description of Artificial Sequence: Synthetic oligonucleotide
guagcuuaaagaaccacca

SEQ ID NO: 587976 - RNA, 19 nt, Artificial Sequence
  Description of Artificial Sequence: Synthetic oligonucleotide
auaaggcccaggccucugc

SEQ ID NO: 587977 - RNA, 19 nt, Artificial Sequence
  Description of Artificial Sequence: Synthetic oligonucleotide
aacgcggcuuacgaacccc

SEQ ID NO: 587978 - RNA, 19 nt, Artificial Sequence
  Description of Artificial Sequence: Synthetic oligonucleotide
uccguugcuuuguagggca

SEQ ID NO: 587979 - RNA, 19 nt, Artificial Sequence
  Description of Artificial Sequence: Synthetic oligonucleotide
gaccccaucaugaauugug

SEQ ID NO: 587980 - RNA, 19 nt, Artificial Sequence
  Description of Artificial Sequence: Synthetic oligonucleotide
aaacuacuuaacucagaua

SEQ ID NO: 587981 - RNA, 19 nt, Artificial Sequence
  Description of Artificial Sequence: Synthetic oligonucleotide
acuacuuaacucagauaac

SEQ ID NO: 587982 - RNA, 19 nt, Artificial Sequence
  Description of Artificial Sequence: Synthetic oligonucleotide
ucucccgucacucuuccau

SEQ ID NO: 587983 - RNA, 19 nt, Artificial Sequence
  Description of Artificial Sequence: Synthetic oligonucleotide
aagcuuaaacuuaaccuaa

SEQ ID NO: 587984 - RNA, 19 nt, Artificial Sequence
  Description of Artificial Sequence: Synthetic oligonucleotide
aagugacuucuacuuucag

SEQ ID NO: 587985 - RNA, 19 nt, Artificial Sequence
  Description of Artificial Sequence: Synthetic oligonucleotide
gguagcuuaaagaaccacc

SEQ ID NO: 587986 - RNA, 19 nt, Artificial Sequence
  Description of Artificial Sequence: Synthetic oligonucleotide
gcuccuacuauacuaauca

SEQ ID NO: 587987 - RNA, 19 nt, Artificial Sequence
  Description of Artificial Sequence: Synthetic oligonucleotide
aaaacgcagagagcuccgg

SEQ ID NO: 587988 - RNA, 19 nt, Artificial Sequence
  Description of Artificial Sequence: Synthetic oligonucleotide
ugcgaccccaucaugaauu

SEQ ID NO: 587989 - RNA, 19 nt, Artificial Sequence
  Description of Artificial Sequence: Synthetic oligonucleotide
aacaucacucuuaaguaua

SEQ ID NO: 587990 - RNA, 19 nt, Artificial Sequence
  Description of Artificial Sequence: Synthetic oligonucleotide
gcugcuauaagccccguug

SEQ ID NO: 587991 - RNA, 19 nt, Artificial Sequence
  Description of Artificial Sequence: Synthetic oligonucleotide
ucaccaauuccuacaguau

SEQ ID NO: 587992 - RNA, 19 nt, Artificial Sequence
  Description of Artificial Sequence: Synthetic oligonucleotide
agagcuccggggaaagucc

SEQ ID NO: 587993 - RNA, 19 nt, Artificial Sequence
  Description of Artificial Sequence: Synthetic oligonucleotide
ccuaacuuccuccugacug

SEQ ID NO: 587994 - RNA, 19 nt, Artificial Sequence
  Description of Artificial Sequence: Synthetic oligonucleotide
cucauccuauccaagccug

SEQ ID NO: 587995 - RNA, 19 nt, Artificial Sequence
  Description of Artificial Sequence: Synthetic oligonucleotide
aaguuuuguacguccucaa

SEQ ID NO: 587996 - RNA, 19 nt, Artificial Sequence
  Description of Artificial Sequence: Synthetic oligonucleotide
aaugucguucuccguugcu

SEQ ID NO: 587997 - RNA, 19 nt, Artificial Sequence
  Description of Artificial Sequence: Synthetic oligonucleotide
uugguagcuuaaagaacca

SEQ ID NO: 587998 - RNA, 19 nt, Artificial Sequence
  Description of Artificial Sequence: Synthetic oligonucleotide
gcuuaaacuuaaccuaaag

SEQ ID NO: 587999 - RNA, 19 nt, Artificial Sequence
  Description of Artificial Sequence: Synthetic oligonucleotide
cucgcugucuccauaucug

SEQ ID NO: 588000 - RNA, 19 nt, Artificial Sequence
  Description of Artificial Sequence: Synthetic oligonucleotide
cuugacagagcugauguca

SEQ ID NO: 588001 - RNA, 19 nt, Artificial Sequence
  Description of Artificial Sequence: Synthetic oligonucleotide
uagcuuaaagaaccaccac

SEQ ID NO: 588002 - RNA, 19 nt, Artificial Sequence
  Description of Artificial Sequence: Synthetic oligonucleotide
ucucggcuagcucuuguga

SEQ ID NO: 588003 - RNA, 19 nt, Artificial Sequence
  Description of Artificial Sequence: Synthetic oligonucleotide
ugcuccuacuauacuaauc

SEQ ID NO: 588004 - RNA, 19 nt, Artificial Sequence
  Description of Artificial Sequence: Synthetic oligonucleotide
aacucgcugucuccauauc

SEQ ID NO: 588005 - RNA, 19 nt, Artificial Sequence
  Description of Artificial Sequence: Synthetic oligonucleotide
acucuuaaguauacuacca

SEQ ID NO: 588006 - RNA, 19 nt, Artificial Sequence
  Description of Artificial Sequence: Synthetic oligonucleotide
cucggcuagcucuugugag

SEQ ID NO: 588007 - RNA, 19 nt, Artificial Sequence
  Description of Artificial Sequence: Synthetic oligonucleotide
acucgcugucuccauaucu

SEQ ID NO: 588008 - RNA, 19 nt, Artificial Sequence
  Description of Artificial Sequence: Synthetic oligonucleotide
cugcuauaagccccguugc

SEQ ID NO: 588009 - RNA, 19 nt, Artificial Sequence
  Description of Artificial Sequence: Synthetic oligonucleotide
ucaauauaccgguguccca

SEQ ID NO: 588010 - RNA, 19 nt, Artificial Sequence
  Description of Artificial Sequence: Synthetic oligonucleotide
uaacucaaaugcuccuacu

SEQ ID NO: 588011 - RNA, 19 nt, Artificial Sequence
  Description of Artificial Sequence: Synthetic oligonucleotide
cuagaaugaacaugagaaa

SEQ ID NO: 588012 - RNA, 19 nt, Artificial Sequence
  Description of Artificial Sequence: Synthetic oligonucleotide
uauaccggugucccaugcu

SEQ ID NO: 588013 - RNA, 19 nt, Artificial Sequence
  Description of Artificial Sequence: Synthetic oligonucleotide
ggagagaagaaguuguaaa

SEQ ID NO: 588014 - RNA, 19 nt, Artificial Sequence
  Description of Artificial Sequence: Synthetic oligonucleotide
caaugccaauguaucuccg

SEQ ID NO: 588015 - RNA, 19 nt, Artificial Sequence
  Description of Artificial Sequence: Synthetic oligonucleotide
uggugugcuuaaagauccg

SEQ ID NO: 588016 - RNA, 19 nt, Artificial Sequence
  Description of Artificial Sequence: Synthetic oligonucleotide
guaagcaacgcggcuuacg

SEQ ID NO: 588017 - RNA, 19 nt, Artificial Sequence
  Description of Artificial Sequence: Synthetic oligonucleotide
agauaacaucacucuuaag

SEQ ID NO: 588018 - RNA, 19 nt, Artificial Sequence
  Description of Artificial Sequence: Synthetic oligonucleotide
cuuuaagucaaggccucac

SEQ ID NO: 588019 - RNA, 19 nt, Artificial Sequence
  Description of Artificial Sequence: Synthetic oligonucleotide
uauuggcugccugugaaau

SEQ ID NO: 588020 - RNA, 19 nt, Artificial Sequence
  Description of Artificial Sequence: Synthetic oligonucleotide
uucucggcuagcucuugug

SEQ ID NO: 588021 - RNA, 19 nt, Artificial Sequence
  Description of Artificial Sequence: Synthetic oligonucleotide
caugugcacgcaguggccg

SEQ ID NO: 588022 - RNA, 19 nt, Artificial Sequence
  Description of Artificial Sequence: Synthetic oligonucleotide
cagagccaauuuuacauca

SEQ ID NO: 588023 - RNA, 19 nt, Artificial Sequence
  Description of Artificial Sequence: Synthetic oligonucleotide
aguuuuguacguccucaau

SEQ ID NO: 588024 - RNA, 19 nt, Artificial Sequence
  Description of Artificial Sequence: Synthetic oligonucleotide
cugccuguuugacaaugcc

SEQ ID NO: 588025 - RNA, 19 nt, Artificial Sequence
  Description of Artificial Sequence: Synthetic oligonucleotide
cuacuauacuaaucauauc

SEQ ID NO: 588026 - RNA, 19 nt, Artificial Sequence
  Description of Artificial Sequence: Synthetic oligonucleotide
uauaagccccguugcuagc

SEQ ID NO: 588027 - RNA, 19 nt, Artificial Sequence
  Description of Artificial Sequence: Synthetic oligonucleotide
accggugucccaugcuuuc

SEQ ID NO: 588028 - RNA, 19 nt, Artificial Sequence
  Description of Artificial Sequence: Synthetic oligonucleotide
caaccuucaggaagacgag

SEQ ID NO: 588029 - RNA, 19 nt, Artificial Sequence
  Description of Artificial Sequence: Synthetic oligonucleotide
caggccggucauaaggccc

SEQ ID NO: 588030 - RNA, 19 nt, Artificial Sequence
  Description of Artificial Sequence: Synthetic oligonucleotide
uggacacuugacagagcug

SEQ ID NO: 588031 - RNA, 19 nt, Artificial Sequence
  Description of Artificial Sequence: Synthetic oligonucleotide
agauccgcucaacauacuu

SEQ ID NO: 588032 - RNA, 19 nt, Artificial Sequence
  Description of Artificial Sequence: Synthetic oligonucleotide
gaucuagcaccuuuugagu

SEQ ID NO: 588033 - RNA, 19 nt, Artificial Sequence
  Description of Artificial Sequence: Synthetic oligonucleotide
agggaucuagcaccuuuug

SEQ ID NO: 588034 - RNA, 19 nt, Artificial Sequence
  Description of Artificial Sequence: Synthetic oligonucleotide
uauuaguauugugucucaa

SEQ ID NO: 588035 - RNA, 19 nt, Artificial Sequence
  Description of Artificial Sequence: Synthetic oligonucleotide
cuccugacugcucuugaac

SEQ ID NO: 588036 - RNA, 19 nt, Artificial Sequence
  Description of Artificial Sequence: Synthetic oligonucleotide
cugcauguuggcccugucc

SEQ ID NO: 588037 - RNA, 19 nt, Artificial Sequence
  Description of Artificial Sequence: Synthetic oligonucleotide
acaguacaaagaaagcuuu

SEQ ID NO: 588038 - RNA, 19 nt, Artificial Sequence
  Description of Artificial Sequence: Synthetic oligonucleotide
acacuuauggaagguacaa

SEQ ID NO: 588039 - RNA, 19 nt, Artificial Sequence
  Description of Artificial Sequence: Synthetic oligonucleotide
augaccuaacuuccuccug

SEQ ID NO: 588040 - RNA, 19 nt, Artificial Sequence
  Description of Artificial Sequence: Synthetic oligonucleotide
cagauaacaucacucuuaa

SEQ ID NO: 588041 - RNA, 19 nt, Artificial Sequence
  Description of Artificial Sequence: Synthetic oligonucleotide
cauccuauccaagccugcc

SEQ ID NO: 588042 - RNA, 19 nt, Artificial Sequence
  Description of Artificial Sequence: Synthetic oligonucleotide
cacgggguugaguggagag

SEQ ID NO: 588043 - RNA, 19 nt, Artificial Sequence
  Description of Artificial Sequence: Synthetic oligonucleotide
auugugcagucggagagga

SEQ ID NO: 588044 - RNA, 19 nt, Artificial Sequence
  Description of Artificial Sequence: Synthetic oligonucleotide
aagucgccugggcagcuga

SEQ ID NO: 588045 - RNA, 19 nt, Artificial Sequence
  Description of Artificial Sequence: Synthetic oligonucleotide
cauccaaaugggagucccc

SEQ ID NO: 588046 - RNA, 19 nt, Artificial Sequence
  Description of Artificial Sequence: Synthetic oligonucleotide
aagacgaggcgcagucccg

SEQ ID NO: 588047 - RNA, 19 nt, Artificial Sequence
  Description of Artificial Sequence: Synthetic oligonucleotide
auccuauccaagccugccu

SEQ ID NO: 588048 - RNA, 19 nt, Artificial Sequence
  Description of Artificial Sequence: Synthetic oligonucleotide
cacuuauggaagguacaag

SEQ ID NO: 588049 - RNA, 19 nt, Artificial Sequence
  Description of Artificial Sequence: Synthetic oligonucleotide
ccucuagaguuuaaacugc

SEQ ID NO: 588050 - RNA, 19 nt, Artificial Sequence
  Description of Artificial Sequence: Synthetic oligonucleotide
ugucggcgcuguuuggacc

SEQ ID NO: 588051 - RNA, 19 nt, Artificial Sequence
  Description of Artificial Sequence: Synthetic oligonucleotide
auggugcaaaguggguccc

SEQ ID NO: 588052 - RNA, 19 nt, Artificial Sequence
  Description of Artificial Sequence: Synthetic oligonucleotide
uccggguccacagguaaug

SEQ ID NO: 588053 - RNA, 19 nt, Artificial Sequence
  Description of Artificial Sequence: Synthetic oligonucleotide
cucuuaaguauacuaccaa

SEQ ID NO: 588054 - RNA, 19 nt, Artificial Sequence
  Description of Artificial Sequence: Synthetic oligonucleotide
uuccuacaguauuaguauu

SEQ ID NO: 588055 - RNA, 19 nt, Artificial Sequence
  Description of Artificial Sequence: Synthetic oligonucleotide
accuaaagauuuaaaugaa

SEQ ID NO: 588056 - RNA, 19 nt, Artificial Sequence
  Description of Artificial Sequence: Synthetic oligonucleotide
caucauuggcgcugucggc

SEQ ID NO: 588057 - RNA, 19 nt, Artificial Sequence
  Description of Artificial Sequence: Synthetic oligonucleotide
gugucucaauucucaaaac

SEQ ID NO: 588058 - RNA, 19 nt, Artificial Sequence
  Description of Artificial Sequence: Synthetic oligonucleotide
cacuguaagucgccugggc

SEQ ID NO: 588059 - RNA, 19 nt, Artificial Sequence
  Description of Artificial Sequence: Synthetic oligonucleotide
uacuuucaguaagcaacgc

SEQ ID NO: 588060 - RNA, 19 nt, Artificial Sequence
  Description of Artificial Sequence: Synthetic oligonucleotide
gagagcuccggggaaaguc

SEQ ID NO: 588061 - RNA, 19 nt, Artificial Sequence
  Description of Artificial Sequence: Synthetic oligonucleotide
cuguaaucuugcccuccgg

SEQ ID NO: 588062 - RNA, 19 nt, Artificial Sequence
  Description of Artificial Sequence: Synthetic oligonucleotide
ccucaauugagcaggacca

SEQ ID NO: 588063 - RNA, 19 nt, Artificial Sequence
  Description of Artificial Sequence: Synthetic oligonucleotide
ugguagcuuaaagaaccac

SEQ ID NO: 588064 - RNA, 19 nt, Artificial Sequence
  Description of Artificial Sequence: Synthetic oligonucleotide
guagccggccccguaacag

SEQ ID NO: 588065 - RNA, 19 nt, Artificial Sequence
  Description of Artificial Sequence: Synthetic oligonucleotide
aagcaacgcggcuuacgaa

SEQ ID NO: 588066 - RNA, 19 nt, Artificial Sequence
  Description of Artificial Sequence: Synthetic oligonucleotide
cucaauugagcaggaccag

SEQ ID NO: 588067 - RNA, 19 nt, Artificial Sequence
  Description of Artificial Sequence: Synthetic oligonucleotide
ccuacuauacuaaucauau

SEQ ID NO: 588068 - RNA, 19 nt, Artificial Sequence
  Description of Artificial Sequence: Synthetic oligonucleotide
uccacccgacgcuuuaaaa

SEQ ID NO: 588069 - RNA, 19 nt, Artificial Sequence
  Description of Artificial Sequence: Synthetic oligonucleotide
ucgguucugugugacuuga

SEQ ID NO: 588070 - RNA, 19 nt, Artificial Sequence
  Description of Artificial Sequence: Synthetic oligonucleotide
ccgcucaacauacuuaaac

SEQ ID NO: 588071 - RNA, 19 nt, Artificial Sequence
  Description of Artificial Sequence: Synthetic oligonucleotide
ucccuagagcuuucucggc

SEQ ID NO: 588072 - RNA, 19 nt, Artificial Sequence
  Description of Artificial Sequence: Synthetic oligonucleotide
ggguaggccacgaaguuug

SEQ ID NO: 588073 - RNA, 19 nt, Artificial Sequence
  Description of Artificial Sequence: Synthetic oligonucleotide
accaauuccuacaguauua

SEQ ID NO: 588074 - RNA, 19 nt, Artificial Sequence
  Description of Artificial Sequence: Synthetic oligonucleotide
gcucaacauacuuaaacua

SEQ ID NO: 588075 - RNA, 19 nt, Artificial Sequence
  Description of Artificial Sequence: Synthetic oligonucleotide
aacuccacccgacgcuuua

SEQ ID NO: 588076 - RNA, 19 nt, Artificial Sequence
  Description of Artificial Sequence: Synthetic oligonucleotide
gcugaggucucucccaaac

SEQ ID NO: 588077 - RNA, 19 nt, Artificial Sequence
  Description of Artificial Sequence: Synthetic oligonucleotide
aguaagcaacgcggcuuac

SEQ ID NO: 588078 - RNA, 19 nt, Artificial Sequence
  Description of Artificial Sequence: Synthetic oligonucleotide
acuuagcaaaauacaccca

SEQ ID NO: 588079 - RNA, 19 nt, Artificial Sequence
  Description of Artificial Sequence: Synthetic oligonucleotide
aggaaguuuuguacguccu

SEQ ID NO: 588080 - RNA, 19 nt, Artificial Sequence
  Description of Artificial Sequence: Synthetic oligonucleotide
agguaaugugaucccguuu

SEQ ID NO: 588081 - RNA, 19 nt, Artificial Sequence
  Description of Artificial Sequence: Synthetic oligonucleotide
guauugugucucaauucuc

SEQ ID NO: 588082 - RNA, 19 nt, Artificial Sequence
  Description of Artificial Sequence: Synthetic oligonucleotide
gacacucccaugcccugca

SEQ ID NO: 588083 - RNA, 19 nt, Artificial Sequence
  Description of Artificial Sequence: Synthetic oligonucleotide
cuccguugcuuuguagggc

SEQ ID NO: 588084 - RNA, 19 nt, Artificial Sequence
  Description of Artificial Sequence: Synthetic oligonucleotide
gucggcgcuguuuggacca

SEQ ID NO: 588085 - RNA, 19 nt, Artificial Sequence
  Description of Artificial Sequence: Synthetic oligonucleotide
ggaaguuuuguacguccuc

SEQ ID NO: 588086 - RNA, 19 nt, Artificial Sequence
  Description of Artificial Sequence: Synthetic oligonucleotide
gaacgccuccccuguaauc

SEQ ID NO: 588087 - RNA, 19 nt, Artificial Sequence
  Description of Artificial Sequence: Synthetic oligonucleotide
gucguucuccguugcuuug

SEQ ID NO: 588088 - RNA, 19 nt, Artificial Sequence
  Description of Artificial Sequence: Synthetic oligonucleotide
ggugugcuuaaagauccgc

SEQ ID NO: 588089 - RNA, 19 nt, Artificial Sequence
  Description of Artificial Sequence: Synthetic oligonucleotide
caaggccucaccaauuccu

SEQ ID NO: 588090 - RNA, 19 nt, Artificial Sequence
  Description of Artificial Sequence: Synthetic oligonucleotide
accuaacuuccuccugacu

SEQ ID NO: 588091 - RNA, 19 nt, Artificial Sequence
  Description of Artificial Sequence: Synthetic oligonucleotide
accugcgaccccaucauga

SEQ ID NO: 588092 - RNA, 19 nt, Artificial Sequence
  Description of Artificial Sequence: Synthetic oligonucleotide
cugucggcgcuguuuggac

SEQ ID NO: 588093 - RNA, 19 nt, Artificial Sequence
  Description of Artificial Sequence: Synthetic oligonucleotide
ccggucauaaggcccaggc

SEQ ID NO: 588094 - RNA, 19 nt, Artificial Sequence
  Description of Artificial Sequence: Synthetic oligonucleotide
uagccccuguuguugaauu

SEQ ID NO: 588095 - RNA, 19 nt, Artificial Sequence
  Description of Artificial Sequence: Synthetic oligonucleotide
ccuaaagauuuaaaugaaa

SEQ ID NO: 588096 - RNA, 19 nt, Artificial Sequence
  Description of Artificial Sequence: Synthetic oligonucleotide
ucugaccgcuguagccggc

SEQ ID NO: 588097 - RNA, 19 nt, Artificial Sequence
  Description of Artificial Sequence: Synthetic oligonucleotide
caacgcggcuuacgaaccc

SEQ ID NO: 588098 - RNA, 19 nt, Artificial Sequence
  Description of Artificial Sequence: Synthetic oligonucleotide
acgaacgccuccccuguaa

SEQ ID NO: 588099 - RNA, 19 nt, Artificial Sequence
  Description of Artificial Sequence: Synthetic oligonucleotide
gaccgcuguagccggcccc

SEQ ID NO: 588100 - RNA, 19 nt, Artificial Sequence
  Description of Artificial Sequence: Synthetic oligonucleotide
caguauuaguauugugucu

SEQ ID NO: 588101 - RNA, 19 nt, Artificial Sequence
  Description of Artificial Sequence: Synthetic oligonucleotide
augcuccuacuauacuaau

SEQ ID NO: 588102 - RNA, 19 nt, Artificial Sequence
  Description of Artificial Sequence: Synthetic oligonucleotide
ugaacaccugcgaccccau

SEQ ID NO: 588103 - RNA, 19 nt, Artificial Sequence
  Description of Artificial Sequence: Synthetic oligonucleotide
uaccggugucccaugcuuu

SEQ ID NO: 588104 - RNA, 19 nt, Artificial Sequence
  Description of Artificial Sequence: Synthetic oligonucleotide
caccagaccucauccuauc

SEQ ID NO: 588105 - RNA, 19 nt, Artificial Sequence
  Description of Artificial Sequence: Synthetic oligonucleotide
ccccguaacagccacucac

SEQ ID NO: 588106 - RNA, 19 nt, Artificial Sequence
  Description of Artificial Sequence: Synthetic oligonucleotide
aucucgguucugugugacu

SEQ ID NO: 588107 - RNA, 19 nt, Artificial Sequence
  Description of Artificial Sequence: Synthetic oligonucleotide
guuggcccuguccuucgac

SEQ ID NO: 588108 - RNA, 19 nt, Artificial Sequence
  Description of Artificial Sequence: Synthetic oligonucleotide
agcuuaaacuuaaccuaaa

SEQ ID NO: 588109 - RNA, 19 nt, Artificial Sequence
  Description of Artificial Sequence: Synthetic oligonucleotide
gaacgaacgccuccccugu

SEQ ID NO: 588110 - RNA, 19 nt, Artificial Sequence
  Description of Artificial Sequence: Synthetic oligonucleotide
cucacgggguugaguggag

SEQ ID NO: 588111 - RNA, 19 nt, Artificial Sequence
  Description of Artificial Sequence: Synthetic oligonucleotide
ggaccaaucucaauaugaa

SEQ ID NO: 588112 - RNA, 19 nt, Artificial Sequence
  Description of Artificial Sequence: Synthetic oligonucleotide
guaucuccgugcugugcca

SEQ ID NO: 588113 - RNA, 19 nt, Artificial Sequence
  Description of Artificial Sequence: Synthetic oligonucleotide
agucggagaggaaguuuug

SEQ ID NO: 588114 - RNA, 19 nt, Artificial Sequence
  Description of Artificial Sequence: Synthetic oligonucleotide
caacauacuuaaacuacuu

SEQ ID NO: 588115 - RNA, 19 nt, Artificial Sequence
  Description of Artificial Sequence: Synthetic oligonucleotide
aagauccgcucaacauacu

SEQ ID NO: 588116 - RNA, 19 nt, Artificial Sequence
  Description of Artificial Sequence: Synthetic oligonucleotide
uaagucgccugggcagcug

SEQ ID NO: 588117 - RNA, 19 nt, Artificial Sequence
  Description of Artificial Sequence: Synthetic oligonucleotide
caauauaccggugucccau

SEQ ID NO: 588118 - RNA, 19 nt, Artificial Sequence
  Description of Artificial Sequence: Synthetic oligonucleotide
caccucaauauaccggugu

SEQ ID NO: 588119 - RNA, 19 nt, Artificial Sequence
  Description of Artificial Sequence: Synthetic oligonucleotide
acgggguugaguggagaga

SEQ ID NO: 588120 - RNA, 19 nt, Artificial Sequence
  Description of Artificial Sequence: Synthetic oligonucleotide
gugugcuuaaagauccgcu

SEQ ID NO: 588121 - RNA, 19 nt, Artificial Sequence
  Description of Artificial Sequence: Synthetic oligonucleotide
ccgucacucuuccaucagg

SEQ ID NO: 588122 - RNA, 19 nt, Artificial Sequence
  Description of Artificial Sequence: Synthetic oligonucleotide
ugugcacgcaguggccggu

SEQ ID NO: 588123 - RNA, 19 nt, Artificial Sequence
  Description of Artificial Sequence: Synthetic oligonucleotide
cacgcaguggccgguggug

SEQ ID NO: 588124 - RNA, 19 nt, Artificial Sequence
  Description of Artificial Sequence: Synthetic oligonucleotide
uugugcagucggagaggaa

SEQ ID NO: 588125 - RNA, 19 nt, Artificial Sequence
  Description of Artificial Sequence: Synthetic oligonucleotide
caguaagcaacgcggcuua

SEQ ID NO: 588126 - RNA, 19 nt, Artificial Sequence
  Description of Artificial Sequence: Synthetic oligonucleotide
ugcagucggagaggaaguu

SEQ ID NO: 588127 - RNA, 19 nt, Artificial Sequence
  Description of Artificial Sequence: Synthetic oligonucleotide
caauuccuacaguauuagu

SEQ ID NO: 588128 - RNA, 19 nt, Artificial Sequence
  Description of Artificial Sequence: Synthetic oligonucleotide
gccaauguaucuccgugcu

SEQ ID NO: 588129 - RNA, 19 nt, Artificial Sequence
  Description of Artificial Sequence: Synthetic oligonucleotide
gcaacgcggcuuacgaacc

SEQ ID NO: 588130 - RNA, 19 nt, Artificial Sequence
  Description of Artificial Sequence: Synthetic oligonucleotide
caauccaucucgguucugu

SEQ ID NO: 588131 - RNA, 19 nt, Artificial Sequence
  Description of Artificial Sequence: Synthetic oligonucleotide
cagucggagaggaaguuuu

SEQ ID NO: 588132 - RNA, 19 nt, Artificial Sequence
  Description of Artificial Sequence: Synthetic oligonucleotide
guugcuagccccuguuguu

SEQ ID NO: 588133 - RNA, 19 nt, Artificial Sequence
  Description of Artificial Sequence: Synthetic oligonucleotide
agucgccugggcagcugac

SEQ ID NO: 588134 - RNA, 19 nt, Artificial Sequence
  Description of Artificial Sequence: Synthetic oligonucleotide
gcgaccccaucaugaauug

SEQ ID NO: 588135 - RNA, 19 nt, Artificial Sequence
  Description of Artificial Sequence: Synthetic oligonucleotide
gaguccccgaagccucaca

SEQ ID NO: 588136 - RNA, 19 nt, Artificial Sequence
  Description of Artificial Sequence: Synthetic oligonucleotide
cuuuguagggcagcccucu

SEQ ID NO: 588137 - RNA, 19 nt, Artificial Sequence
  Description of Artificial Sequence: Synthetic oligonucleotide
gcuauaagccccguugcua

SEQ ID NO: 588138 - RNA, 19 nt, Artificial Sequence
  Description of Artificial Sequence: Synthetic oligonucleotide
ccguaacagccacucacug

SEQ ID NO: 588139 - RNA, 19 nt, Artificial Sequence
  Description of Artificial Sequence: Synthetic oligonucleotide
gcgcugucggcgcuguuug

SEQ ID NO: 588140 - RNA, 19 nt, Artificial Sequence
  Description of Artificial Sequence: Synthetic oligonucleotide
caccugcgaccccaucaug

SEQ ID NO: 588141 - RNA, 19 nt, Artificial Sequence
  Description of Artificial Sequence: Synthetic oligonucleotide
ggcgcuguuuggaccacug

SEQ ID NO: 588142 - RNA, 19 nt, Artificial Sequence
  Description of Artificial Sequence: Synthetic oligonucleotide
agcuccggggaaaguccag

SEQ ID NO: 588143 - RNA, 19 nt, Artificial Sequence
  Description of Artificial Sequence: Synthetic oligonucleotide
cuccuacuauacuaaucau

SEQ ID NO: 588144 - RNA, 19 nt, Artificial Sequence
  Description of Artificial Sequence: Synthetic oligonucleotide
cguaacagccacucacuga

SEQ ID NO: 588145 - RNA, 19 nt, Artificial Sequence
  Description of Artificial Sequence: Synthetic oligonucleotide
cggucauaaggcccaggcc

SEQ ID NO: 588146 - RNA, 19 nt, Artificial Sequence
  Description of Artificial Sequence: Synthetic oligonucleotide
ccgguggugcucugcacug

SEQ ID NO: 588147 - RNA, 19 nt, Artificial Sequence
  Description of Artificial Sequence: Synthetic oligonucleotide
ggccccguaacagccacuc

SEQ ID NO: 588148 - RNA, 19 nt, Artificial Sequence
  Description of Artificial Sequence: Synthetic oligonucleotide
cagguaaugugaucccguu

SEQ ID NO: 588149 - RNA, 19 nt, Artificial Sequence
  Description of Artificial Sequence: Synthetic oligonucleotide
acgccuccccuguaaucuu

SEQ ID NO: 588150 - RNA, 19 nt, Artificial Sequence
  Description of Artificial Sequence: Synthetic oligonucleotide
gaccaggguaggccacgaa

SEQ ID NO: 588151 - RNA, 19 nt, Artificial Sequence
  Description of Artificial Sequence: Synthetic oligonucleotide
gucgccugggcagcugaca

SEQ ID NO: 588152 - RNA, 19 nt, Artificial Sequence
  Description of Artificial Sequence: Synthetic oligonucleotide
acuccacccgacgcuuuaa

SEQ ID NO: 588153 - RNA, 19 nt, Artificial Sequence
  Description of Artificial Sequence: Synthetic oligonucleotide
gcugucggcgcuguuugga

SEQ ID NO: 588154 - RNA, 19 nt, Artificial Sequence
  Description of Artificial Sequence: Synthetic oligonucleotide
cuccacccgacgcuuuaaa

SEQ ID NO: 588155 - RNA, 19 nt, Artificial Sequence
  Description of Artificial Sequence: Synthetic oligonucleotide
gugcagucggagaggaagu

SEQ ID NO: 588156 - RNA, 19 nt, Artificial Sequence
  Description of Artificial Sequence: Synthetic oligonucleotide
ccuacaguauuaguauugu

SEQ ID NO: 588157 - RNA, 19 nt, Artificial Sequence
  Description of Artificial Sequence: Synthetic oligonucleotide
ccuagagcuuucucggcua

SEQ ID NO: 588158 - RNA, 19 nt, Artificial Sequence
  Description of Artificial Sequence: Synthetic oligonucleotide
cguugcuuuguagggcagc

SEQ ID NO: 588159 - RNA, 19 nt, Artificial Sequence
  Description of Artificial Sequence: Synthetic oligonucleotide
gugaacucgcugucuccau

SEQ ID NO: 588160 - RNA, 19 nt, Artificial Sequence
  Description of Artificial Sequence: Synthetic oligonucleotide
ccguugcuagccccuguug

SEQ ID NO: 588161 - RNA, 19 nt, Artificial Sequence
  Description of Artificial Sequence: Synthetic oligonucleotide
ccguugcuuuguagggcag

SEQ ID NO: 588162 - RNA, 19 nt, Artificial Sequence
  Description of Artificial Sequence: Synthetic oligonucleotide
cggguccacagguaaugug

SEQ ID NO: 588163 - RNA, 19 nt, Artificial Sequence
  Description of Artificial Sequence: Synthetic oligonucleotide
gugcacgcaguggccggug

SEQ ID NO: 588164 - RNA, 19 nt, Artificial Sequence
  Description of Artificial Sequence: Synthetic oligonucleotide
ucggcgcuguuuggaccac

SEQ ID NO: 588165 - RNA, 19 nt, Artificial Sequence
  Description of Artificial Sequence: Synthetic oligonucleotide
ccugcgaccccaucaugaa

SEQ ID NO: 588166 - RNA, 19 nt, Artificial Sequence
  Description of Artificial Sequence: Synthetic oligonucleotide
gccgguggugcucugcacu

SEQ ID NO: 588167 - RNA, 19 nt, Artificial Sequence
  Description of Artificial Sequence: Synthetic oligonucleotide
agcuuccucuagaguuuaa

SEQ ID NO: 588168 - RNA, 19 nt, Artificial Sequence
  Description of Artificial Sequence: Synthetic oligonucleotide
ccggugucccaugcuuucc

SEQ ID NO: 588169 - RNA, 19 nt, Artificial Sequence
  Description of Artificial Sequence: Synthetic oligonucleotide
gcugcauguuggcccuguc

SEQ ID NO: 588170 - RNA, 19 nt, Artificial Sequence
  Description of Artificial Sequence: Synthetic oligonucleotide
cccguaacagccacucacu

SEQ ID NO: 588171 - RNA, 19 nt, Artificial Sequence
  Description of Artificial Sequence: Synthetic oligonucleotide
guaagucgccugggcagcu

SEQ ID NO: 588172 - RNA, 19 nt, Artificial Sequence
  Description of Artificial Sequence: Synthetic oligonucleotide
ucuuugcaucagggaucua

SEQ ID NO: 588173 - RNA, 19 nt, Artificial Sequence
  Description of Artificial Sequence: Synthetic oligonucleotide
gcuagccccuguuguugaa

SEQ ID NO: 588174 - RNA, 19 nt, Artificial Sequence
  Description of Artificial Sequence: Synthetic oligonucleotide
cuagccccuguuguugaau

SEQ ID NO: 588175 - RNA, 19 nt, Artificial Sequence
  Description of Artificial Sequence: Synthetic oligonucleotide
ggaguccccgaagccucac

SEQ ID NO: 588176 - RNA, 19 nt, Artificial Sequence
  Description of Artificial Sequence: Synthetic oligonucleotide
cugcgaccccaucaugaau

SEQ ID NO: 588177 - RNA, 19 nt, Artificial Sequence
  Description of Artificial Sequence: Synthetic oligonucleotide
cguugcuagccccuguugu

SEQ ID NO: 588178 - RNA, 19 nt, Artificial Sequence
  Description of Artificial Sequence: Synthetic oligonucleotide
cuccggguccacagguaau

SEQ ID NO: 588179 - RNA, 19 nt, Artificial Sequence
  Description of Artificial Sequence: Synthetic oligonucleotide
cauuggcgcugucggcgcu

SEQ ID NO: 588180 - RNA, 19 nt, Artificial Sequence
  Description of Artificial Sequence: Synthetic oligonucleotide
gccccguaacagccacuca

SEQ ID NO: 588181 - RNA, 19 nt, Artificial Sequence
  Description of Artificial Sequence: Synthetic oligonucleotide
cguccucaauugagcagga

SEQ ID NO: 588182 - RNA, 19 nt, Artificial Sequence
  Description of Artificial Sequence: Synthetic oligonucleotide
uggcgcugucggcgcuguu

SEQ ID NO: 588183 - RNA, 19 nt, Artificial Sequence
  Description of Artificial Sequence: Synthetic oligonucleotide
gcgcuguuuggaccacugu

SEQ ID NO: 588184 - RNA, 19 nt, Artificial Sequence
  Description of Artificial Sequence: Synthetic oligonucleotide
gccccguugcuagccccug

SEQ ID NO: 588185 - RNA, 19 nt, Artificial Sequence
  Description of Artificial Sequence: Synthetic oligonucleotide
ggcgcugucggcgcuguuu

SEQ ID NO: 588186 - RNA, 19 nt, Artificial Sequence
  Description of Artificial Sequence: Synthetic oligonucleotide
cgguucugugugacuugaa

SEQ ID NO: 588187 - RNA, 19 nt, Artificial Sequence
  Description of Artificial Sequence: Synthetic oligonucleotide
cgaacgccuccccuguaau

SEQ ID NO: 588188 - RNA, 19 nt, Artificial Sequence
  Description of Artificial Sequence: Synthetic oligonucleotide
ccggguccacagguaaugu

SEQ ID NO: 588189 - RNA, 19 nt, Artificial Sequence
  Description of Artificial Sequence: Synthetic oligonucleotide
ccccguugcuagccccugu

SEQ ID NO: 588190 - RNA, 19 nt, Artificial Sequence
  Description of Artificial Sequence: Synthetic oligonucleotide
cggccccguaacagccacu

SEQ ID NO: 588191 - RNA, 19 nt, Artificial Sequence
  Description of Artificial Sequence: Synthetic oligonucleotide
auaauaguggcuuuuacac

SEQ ID NO: 588192 - RNA, 19 nt, Artificial Sequence
  Description of Artificial Sequence: Synthetic oligonucleotide
aaugauuguaaacacacca

SEQ ID NO: 588193 - RNA, 19 nt, Artificial Sequence
  Description of Artificial Sequence: Synthetic oligonucleotide
acaaucaguacauuuaugg

SEQ ID NO: 588194 - RNA, 19 nt, Artificial Sequence
  Description of Artificial Sequence: Synthetic oligonucleotide
cuugacaucgggaugaucg

SEQ ID NO: 588195 - RNA, 19 nt, Artificial Sequence
  Description of Artificial Sequence: Synthetic oligonucleotide
aauuguagaaaaugauuuc

SEQ ID NO: 588196 - RNA, 19 nt, Artificial Sequence
  Description of Artificial Sequence: Synthetic oligonucleotide
acacuuugcuuuuaaaugc

SEQ ID NO: 588197 - RNA, 19 nt, Artificial Sequence
  Description of Artificial Sequence: Synthetic oligonucleotide
auuguagaaaaugauuucc

SEQ ID NO: 588198 - RNA, 19 nt, Artificial Sequence
  Description of Artificial Sequence: Synthetic oligonucleotide
aaagaugucuuguuuaggu

SEQ ID NO: 588199 - RNA, 19 nt, Artificial Sequence
  Description of Artificial Sequence: Synthetic oligonucleotide
ucuguucacacacugaagc

SEQ ID NO: 588200 - RNA, 19 nt, Artificial Sequence
  Description of Artificial Sequence: Synthetic oligonucleotide
uaaaauccagcucaccagg

SEQ ID NO: 588201 - RNA, 19 nt, Artificial Sequence
  Description of Artificial Sequence: Synthetic oligonucleotide
uggacaaucacaaucagua

SEQ ID NO: 588202 - RNA, 19 nt, Artificial Sequence
  Description of Artificial Sequence: Synthetic oligonucleotide
ucauuuguugaucugagaa

SEQ ID NO: 588203 - RNA, 19 nt, Artificial Sequence
  Description of Artificial Sequence: Synthetic oligonucleotide
agaugucuuguuuaggugg

SEQ ID NO: 588204 - RNA, 19 nt, Artificial Sequence
  Description of Artificial Sequence: Synthetic oligonucleotide
ugaggacuguaaaugaggg

SEQ ID NO: 588205 - RNA, 19 nt, Artificial Sequence
  Description of Artificial Sequence: Synthetic oligonucleotide
auguuuuacacccgcagac

SEQ ID NO: 588206 - RNA, 19 nt, Artificial Sequence
  Description of Artificial Sequence: Synthetic oligonucleotide
aaauaggaaguccggagug

SEQ ID NO: 588207 - RNA, 19 nt, Artificial Sequence
  Description of Artificial Sequence: Synthetic oligonucleotide
ggauaugagauacaggagg

SEQ ID NO: 588208 - RNA, 19 nt, Artificial Sequence
  Description of Artificial Sequence: Synthetic oligonucleotide
aguuacuuuucccuuuggc

SEQ ID NO: 588209 - RNA, 19 nt, Artificial Sequence
  Description of Artificial Sequence: Synthetic oligonucleotide
auaaaauccagcucaccag

SEQ ID NO: 588210 - RNA, 19 nt, Artificial Sequence
  Description of Artificial Sequence: Synthetic oligonucleotide
ucuguugcggucaaucucc

SEQ ID NO: 588211 - RNA, 19 nt, Artificial Sequence
  Description of Artificial Sequence: Synthetic oligonucleotide
gagccuauggcuuggaucc

SEQ ID NO: 588212 - RNA, 19 nt, Artificial Sequence
  Description of Artificial Sequence: Synthetic oligonucleotide
aaauugucccacuauuuga

SEQ ID NO: 588213 - RNA, 19 nt, Artificial Sequence
  Description of Artificial Sequence: Synthetic oligonucleotide
uggcauaugaaaacugucc

SEQ ID NO: 588214 - RNA, 19 nt, Artificial Sequence
  Description of Artificial Sequence: Synthetic oligonucleotide
gauuguaaacacaccaccg

SEQ ID NO: 588215 - RNA, 19 nt, Artificial Sequence
  Description of Artificial Sequence: Synthetic oligonucleotide
uuaagagccaccucccuag

SEQ ID NO: 588216 - RNA, 19 nt, Artificial Sequence
  Description of Artificial Sequence: Synthetic oligonucleotide
uaugagauacaggagguag

SEQ ID NO: 588217 - RNA, 19 nt, Artificial Sequence
  Description of Artificial Sequence: Synthetic oligonucleotide
aauguuuuacacccgcaga

SEQ ID NO: 588218 - RNA, 19 nt, Artificial Sequence
  Description of Artificial Sequence: Synthetic oligonucleotide
uugauucuugcucuguugc

SEQ ID NO: 588219 - RNA, 19 nt, Artificial Sequence
  Description of Artificial Sequence: Synthetic oligonucleotide
auuagagaaagggccagcc

SEQ ID NO: 588220 - RNA, 19 nt, Artificial Sequence
  Description of Artificial Sequence: Synthetic oligonucleotide
acaaagaugucuuguuuag

SEQ ID NO: 588221 - RNA, 19 nt, Artificial Sequence
  Description of Artificial Sequence: Synthetic oligonucleotide
aguguuguauaucaaggca

SEQ ID NO: 588222 - RNA, 19 nt, Artificial Sequence
  Description of Artificial Sequence: Synthetic oligonucleotide
uaugaaaacuguccugugu

SEQ ID NO: 588223 - RNA, 19 nt, Artificial Sequence
  Description of Artificial Sequence: Synthetic oligonucleotide
uugucaggaucuuugaaga

SEQ ID NO: 588224 - RNA, 19 nt, Artificial Sequence
  Description of Artificial Sequence: Synthetic oligonucleotide
uaaaugagggccaggcuca

SEQ ID NO: 588225 - RNA, 19 nt, Artificial Sequence
  Description of Artificial Sequence: Synthetic oligonucleotide
uuauggcauaugaaaacug

SEQ ID NO: 588226 - RNA, 19 nt, Artificial Sequence
  Description of Artificial Sequence: Synthetic oligonucleotide
gucaaaacaaggcaaccgc

SEQ ID NO: 588227 - RNA, 19 nt, Artificial Sequence
  Description of Artificial Sequence: Synthetic oligonucleotide
aauaggaaguccggagugg

SEQ ID NO: 588228 - RNA, 19 nt, Artificial Sequence
  Description of Artificial Sequence: Synthetic oligonucleotide
uaaccggccagcaucagca

SEQ ID NO: 588229 - RNA, 19 nt, Artificial Sequence
  Description of Artificial Sequence: Synthetic oligonucleotide
auuguaaacacaccaccga

SEQ ID NO: 588230 - RNA, 19 nt, Artificial Sequence
  Description of Artificial Sequence: Synthetic oligonucleotide
agcuguaaucagcaguugg

SEQ ID NO: 588231 - RNA, 19 nt, Artificial Sequence
  Description of Artificial Sequence: Synthetic oligonucleotide
guaaaugagggccaggcuc

SEQ ID NO: 588232 - RNA, 19 nt, Artificial Sequence
  Description of Artificial Sequence: Synthetic oligonucleotide
auagaugaggucucguucu

SEQ ID NO: 588233 - RNA, 19 nt, Artificial Sequence
  Description of Artificial Sequence: Synthetic oligonucleotide
acccuagugagccuauggc

SEQ ID NO: 588234 - RNA, 19 nt, Artificial Sequence
  Description of Artificial Sequence: Synthetic oligonucleotide
uauugguaacuacaaagua

SEQ ID NO: 588235 - RNA, 19 nt, Artificial Sequence
  Description of Artificial Sequence: Synthetic oligonucleotide
agcgccgagacgaagaggc

SEQ ID NO: 588236 - RNA, 19 nt, Artificial Sequence
  Description of Artificial Sequence: Synthetic oligonucleotide
ucgagucaaaacaaggcaa

SEQ ID NO: 588237 - RNA, 19 nt, Artificial Sequence
  Description of Artificial Sequence: Synthetic oligonucleotide
gagacgaagaggcugcagc

SEQ ID NO: 588238 - RNA, 19 nt, Artificial Sequence
  Description of Artificial Sequence: Synthetic oligonucleotide
gaagguauuucacccgcag

SEQ ID NO: 588239 - RNA, 19 nt, Artificial Sequence
  Description of Artificial Sequence: Synthetic oligonucleotide
ggaacuaaacaacacagca

SEQ ID NO: 588240 - RNA, 19 nt, Artificial Sequence
  Description of Artificial Sequence: Synthetic oligonucleotide
gguaucucgagucaaaaca

SEQ ID NO: 588241 - RNA, 19 nt, Artificial Sequence
  Description of Artificial Sequence: Synthetic oligonucleotide
gaaaucauuuguugaucug

SEQ ID NO: 588242 - RNA, 19 nt, Artificial Sequence
  Description of Artificial Sequence: Synthetic oligonucleotide
guacauuuauggcauauga

SEQ ID NO: 588243 - RNA, 19 nt, Artificial Sequence
  Description of Artificial Sequence: Synthetic oligonucleotide
guauuucacccgcagaagc

SEQ ID NO: 588244 - RNA, 19 nt, Artificial Sequence
  Description of Artificial Sequence: Synthetic oligonucleotide
ucucauaaaaucugguguu

SEQ ID NO: 588245 - RNA, 19 nt, Artificial Sequence
  Description of Artificial Sequence: Synthetic oligonucleotide
uguuggaaagcagaggagu

SEQ ID NO: 588246 - RNA, 19 nt, Artificial Sequence
  Description of Artificial Sequence: Synthetic oligonucleotide
uuuuguuauccugcugugg

SEQ ID NO: 588247 - RNA, 19 nt, Artificial Sequence
  Description of Artificial Sequence: Synthetic oligonucleotide
ucucguucuccuuuggucu

SEQ ID NO: 588248 - RNA, 19 nt, Artificial Sequence
  Description of Artificial Sequence: Synthetic oligonucleotide
accgagucccgcuuguagc

SEQ ID NO: 588249 - RNA, 19 nt, Artificial Sequence
  Description of Artificial Sequence: Synthetic oligonucleotide
uacacccgcagacuaaagc

SEQ ID NO: 588250 - RNA, 19 nt, Artificial Sequence
  Description of Artificial Sequence: Synthetic oligonucleotide
aauccucaaacgaucccac

SEQ ID NO: 588251 - RNA, 19 nt, Artificial Sequence
  Description of Artificial Sequence: Synthetic oligonucleotide
accaugaaccaauggcugg

SEQ ID NO: 588252 - RNA, 19 nt, Artificial Sequence
  Description of Artificial Sequence: Synthetic oligonucleotide
ucauaauaguggcuuuuac

SEQ ID NO: 588253 - RNA, 19 nt, Artificial Sequence
  Description of Artificial Sequence: Synthetic oligonucleotide
aacacgacugucccucuug

SEQ ID NO: 588254 - RNA, 19 nt, Artificial Sequence
  Description of Artificial Sequence: Synthetic oligonucleotide
uaauaguggcuuuuacaca

SEQ ID NO: 588255 - RNA, 19 nt, Artificial Sequence
  Description of Artificial Sequence: Synthetic oligonucleotide
gaaggaggaacuaaacaac

SEQ ID NO: 588256 - RNA, 19 nt, Artificial Sequence
  Description of Artificial Sequence: Synthetic oligonucleotide
guguuguauaucaaggcag

SEQ ID NO: 588257 - RNA, 19 nt, Artificial Sequence
  Description of Artificial Sequence: Synthetic oligonucleotide
ugguuauugguaacuacaa

SEQ ID NO: 588258 - RNA, 19 nt, Artificial Sequence
  Description of Artificial Sequence: Synthetic oligonucleotide
accaccgacagcuuggaca

SEQ ID NO: 588259 - RNA, 19 nt, Artificial Sequence
  Description of Artificial Sequence: Synthetic oligonucleotide
uuuggcccuggcuuaagag

SEQ ID NO: 588260 - RNA, 19 nt, Artificial Sequence
  Description of Artificial Sequence: Synthetic oligonucleotide
gaacuaaacaacacagcac

SEQ ID NO: 588261 - RNA, 19 nt, Artificial Sequence
  Description of Artificial Sequence: Synthetic oligonucleotide
uggguaaccggccagcauc

SEQ ID NO: 588262 - RNA, 19 nt, Artificial Sequence
  Description of Artificial Sequence: Synthetic oligonucleotide
augaaaacuguccugugua

SEQ ID NO: 588263 - RNA, 19 nt, Artificial Sequence
  Description of Artificial Sequence: Synthetic oligonucleotide
aggaguuggugacacucac

SEQ ID NO: 588264 - RNA, 19 nt, Artificial Sequence
  Description of Artificial Sequence: Synthetic oligonucleotide
ugcgcuguggauugucagg

SEQ ID NO: 588265 - RNA, 19 nt, Artificial Sequence
  Description of Artificial Sequence: Synthetic oligonucleotide
auuuuguuauccugcugug

SEQ ID NO: 588266 - RNA, 19 nt, Artificial Sequence
  Description of Artificial Sequence: Synthetic oligonucleotide
cuuacugucguggcgggcg

SEQ ID NO: 588267 - RNA, 19 nt, Artificial Sequence
  Description of Artificial Sequence: Synthetic oligonucleotide
gacccuagugagccuaugg

SEQ ID NO: 588268 - RNA, 19 nt, Artificial Sequence
  Description of Artificial Sequence: Synthetic oligonucleotide
aaggaggaacuaaacaaca

SEQ ID NO: 588269 - RNA, 19 nt, Artificial Sequence
  Description of Artificial Sequence: Synthetic oligonucleotide
caucugaaugauuguaaac

SEQ ID NO: 588270 - RNA, 19 nt, Artificial Sequence
  Description of Artificial Sequence: Synthetic oligonucleotide
gugaggacuguaaaugagg

SEQ ID NO: 588271 - RNA, 19 nt, Artificial Sequence
  Description of Artificial Sequence: Synthetic oligonucleotide
cuugauucuugcucuguug

SEQ ID NO: 588272 - RNA, 19 nt, Artificial Sequence
  Description of Artificial Sequence: Synthetic oligonucleotide
uucgcucgguuccagaagu

SEQ ID NO: 588273 - RNA, 19 nt, Artificial Sequence
  Description of Artificial Sequence: Synthetic oligonucleotide
ugagccuauggcuuggauc

SEQ ID NO: 588274 - RNA, 19 nt, Artificial Sequence
  Description of Artificial Sequence: Synthetic oligonucleotide
ugaaaacuguccuguguac

SEQ ID NO: 588275 - RNA, 19 nt, Artificial Sequence
  Description of Artificial Sequence: Synthetic oligonucleotide
aucucgagucaaaacaagg

SEQ ID NO: 588276 - RNA, 19 nt, Artificial Sequence
  Description of Artificial Sequence: Synthetic oligonucleotide
cuugguuuggcacuugaca

SEQ ID NO: 588277 - RNA, 19 nt, Artificial Sequence
  Description of Artificial Sequence: Synthetic oligonucleotide
auaucaaggcagcuuugug

SEQ ID NO: 588278 - RNA, 19 nt, Artificial Sequence
  Description of Artificial Sequence: Synthetic oligonucleotide
auggaauccucaaacgauc

SEQ ID NO: 588279 - RNA, 19 nt, Artificial Sequence
  Description of Artificial Sequence: Synthetic oligonucleotide
cacagcuacacagcuaagg

SEQ ID NO: 588280 - RNA, 19 nt, Artificial Sequence
  Description of Artificial Sequence: Synthetic oligonucleotide
gaggacaagcuuccguaag

SEQ ID NO: 588281 - RNA, 19 nt, Artificial Sequence
  Description of Artificial Sequence: Synthetic oligonucleotide
accucccuagacuauuuag

SEQ ID NO: 588282 - RNA, 19 nt, Artificial Sequence
  Description of Artificial Sequence: Synthetic oligonucleotide
gaaugauuguaaacacacc

SEQ ID NO: 588283 - RNA, 19 nt, Artificial Sequence
  Description of Artificial Sequence: Synthetic oligonucleotide
uccccauugacugaacugu

SEQ ID NO: 588284 - RNA, 19 nt, Artificial Sequence
  Description of Artificial Sequence: Synthetic oligonucleotide
accgcggaccgucagcggc

SEQ ID NO: 588285 - RNA, 19 nt, Artificial Sequence
  Description of Artificial Sequence: Synthetic oligonucleotide
ucuuggguaucucgaguca

SEQ ID NO: 588286 - RNA, 19 nt, Artificial Sequence
  Description of Artificial Sequence: Synthetic oligonucleotide
auaggaaguccggaguggg

SEQ ID NO: 588287 - RNA, 19 nt, Artificial Sequence
  Description of Artificial Sequence: Synthetic oligonucleotide
ggucucauaaaaucuggug

SEQ ID NO: 588288 - RNA, 19 nt, Artificial Sequence
  Description of Artificial Sequence: Synthetic oligonucleotide
uuuuacacccgcagacuaa

SEQ ID NO: 588289 - RNA, 19 nt, Artificial Sequence
  Description of Artificial Sequence: Synthetic oligonucleotide
uguagaccguuguggauga

SEQ ID NO: 588290 - RNA, 19 nt, Artificial Sequence
  Description of Artificial Sequence: Synthetic oligonucleotide
cugcauuccaggcucguag

SEQ ID NO: 588291 - RNA, 19 nt, Artificial Sequence
  Description of Artificial Sequence: Synthetic oligonucleotide
gguuuggcacuugacaucg

SEQ ID NO: 588292 - RNA, 19 nt, Artificial Sequence
  Description of Artificial Sequence: Synthetic oligonucleotide
aaucauaauaguggcuuuu

SEQ ID NO: 588293 - RNA, 19 nt, Artificial Sequence
  Description of Artificial Sequence: Synthetic oligonucleotide
uggauccuucacaacaaaa

SEQ ID NO: 588294 - RNA, 19 nt, Artificial Sequence
  Description of Artificial Sequence: Synthetic oligonucleotide
uuguuuagguggcagugua

SEQ ID NO: 588295 - RNA, 19 nt, Artificial Sequence
  Description of Artificial Sequence: Synthetic oligonucleotide
aacacgguucuuuccuggu

SEQ ID NO: 588296 - RNA, 19 nt, Artificial Sequence
  Description of Artificial Sequence: Synthetic oligonucleotide
uuuagguggcaguguagac

SEQ ID NO: 588297 - RNA, 19 nt, Artificial Sequence
  Description of Artificial Sequence: Synthetic oligonucleotide
cucgagucaaaacaaggca

SEQ ID NO: 588298 - RNA, 19 nt, Artificial Sequence
  Description of Artificial Sequence: Synthetic oligonucleotide
ucgguuccagaaguguugg

SEQ ID NO: 588299 - RNA, 19 nt, Artificial Sequence
  Description of Artificial Sequence: Synthetic oligonucleotide
uggucucauaaaaucuggu

SEQ ID NO: 588300 - RNA, 19 nt, Artificial Sequence
  Description of Artificial Sequence: Synthetic oligonucleotide
aaguacuuaggagggacau

SEQ ID NO: 588301 - RNA, 19 nt, Artificial Sequence
  Description of Artificial Sequence: Synthetic oligonucleotide
caagugagaggcaccaguc

SEQ ID NO: 588302 - RNA, 19 nt, Artificial Sequence
  Description of Artificial Sequence: Synthetic oligonucleotide
caacacgguucuuuccugg

SEQ ID NO: 588303 - RNA, 19 nt, Artificial Sequence
  Description of Artificial Sequence: Synthetic oligonucleotide
uuguuaggucugcauuuug

SEQ ID NO: 588304 - RNA, 19 nt, Artificial Sequence
  Description of Artificial Sequence: Synthetic oligonucleotide
ugcaucugguccccaaacu

SEQ ID NO: 588305 - RNA, 19 nt, Artificial Sequence
  Description of Artificial Sequence: Synthetic oligonucleotide
ucuugguuuggcacuugac

SEQ ID NO: 588306 - RNA, 19 nt, Artificial Sequence
  Description of Artificial Sequence: Synthetic oligonucleotide
cucgguuccagaaguguug

SEQ ID NO: 588307 - RNA, 19 nt, Artificial Sequence
  Description of Artificial Sequence: Synthetic oligonucleotide
cugaaugauuguaaacaca

SEQ ID NO: 588308 - RNA, 19 nt, Artificial Sequence
  Description of Artificial Sequence: Synthetic oligonucleotide
uugucccacuauuugauuu

SEQ ID NO: 588309 - RNA, 19 nt, Artificial Sequence
  Description of Artificial Sequence: Synthetic oligonucleotide
gaccaugaaccaauggcug

SEQ ID NO: 588310 - RNA, 19 nt, Artificial Sequence
  Description of Artificial Sequence: Synthetic oligonucleotide
ugcagcgccgagacgaaga

SEQ ID NO: 588311 - RNA, 19 nt, Artificial Sequence
  Description of Artificial Sequence: Synthetic oligonucleotide
cagggguccccauugacug

SEQ ID NO: 588312 - RNA, 19 nt, Artificial Sequence
  Description of Artificial Sequence: Synthetic oligonucleotide
gacagcuuggacacuuugc

SEQ ID NO: 588313 - RNA, 19 nt, Artificial Sequence
  Description of Artificial Sequence: Synthetic oligonucleotide
uggcacuugacaucgggau

SEQ ID NO: 588314 - RNA, 19 nt, Artificial Sequence
  Description of Artificial Sequence: Synthetic oligonucleotide
cacaaucaguacauuuaug

SEQ ID NO: 588315 - RNA, 19 nt, Artificial Sequence
  Description of Artificial Sequence: Synthetic oligonucleotide
cuagugagccuauggcuug

SEQ ID NO: 588316 - RNA, 19 nt, Artificial Sequence
  Description of Artificial Sequence: Synthetic oligonucleotide
uggugacacucacaacgag

SEQ ID NO: 588317 - RNA, 19 nt, Artificial Sequence
  Description of Artificial Sequence: Synthetic oligonucleotide
gugacacucacaacgagca

SEQ ID NO: 588318 - RNA, 19 nt, Artificial Sequence
  Description of Artificial Sequence: Synthetic oligonucleotide
cacaacgagcagcagcagc

SEQ ID NO: 588319 - RNA, 19 nt, Artificial Sequence
  Description of Artificial Sequence: Synthetic oligonucleotide
caaggcaaccgccuaauga

SEQ ID NO: 588320 - RNA, 19 nt, Artificial Sequence
  Description of Artificial Sequence: Synthetic oligonucleotide
ugugaucaucucuucgcuc

SEQ ID NO: 588321 - RNA, 19 nt, Artificial Sequence
  Description of Artificial Sequence: Synthetic oligonucleotide
gacaucgggaugaucgaug

SEQ ID NO: 588322 - RNA, 19 nt, Artificial Sequence
  Description of Artificial Sequence: Synthetic oligonucleotide
cucauaaaaucugguguug

SEQ ID NO: 588323 - RNA, 19 nt, Artificial Sequence
  Description of Artificial Sequence: Synthetic oligonucleotide
cucccuagacuauuuagga

SEQ ID NO: 588324 - RNA, 19 nt, Artificial Sequence
  Description of Artificial Sequence: Synthetic oligonucleotide
cgccuaaugauuuaucacc

SEQ ID NO: 588325 - RNA, 19 nt, Artificial Sequence
  Description of Artificial Sequence: Synthetic oligonucleotide
ccucccuagacuauuuagg

SEQ ID NO: 588326 - RNA, 19 nt, Artificial Sequence
  Description of Artificial Sequence: Synthetic oligonucleotide
ugacacucacaacgagcag

SEQ ID NO: 588327 - RNA, 19 nt, Artificial Sequence
  Description of Artificial Sequence: Synthetic oligonucleotide
caaacgaucccacugauuu

SEQ ID NO: 588328 - RNA, 19 nt, Artificial Sequence
  Description of Artificial Sequence: Synthetic oligonucleotide
uuguauaucaaggcagcuu

SEQ ID NO: 588329 - RNA, 19 nt, Artificial Sequence
  Description of Artificial Sequence: Synthetic oligonucleotide
uguuauccugcuguggcuc

SEQ ID NO: 588330 - RNA, 19 nt, Artificial Sequence
  Description of Artificial Sequence: Synthetic oligonucleotide
aguacuuaggagggacauc

SEQ ID NO: 588331 - RNA, 19 nt, Artificial Sequence
  Description of Artificial Sequence: Synthetic oligonucleotide
gcaggauucugucuugaag

SEQ ID NO: 588332 - RNA, 19 nt, Artificial Sequence
  Description of Artificial Sequence: Synthetic oligonucleotide
ucccuagacuauuuaggaa

SEQ ID NO: 588333 - RNA, 19 nt, Artificial Sequence
  Description of Artificial Sequence: Synthetic oligonucleotide
ugguuuggcacuugacauc

SEQ ID NO: 588334 - RNA, 19 nt, Artificial Sequence
  Description of Artificial Sequence: Synthetic oligonucleotide
aaacgaucccacugauuuu

SEQ ID NO: 588335 - RNA, 19 nt, Artificial Sequence
  Description of Artificial Sequence: Synthetic oligonucleotide
cuaaggauugggccaagga

SEQ ID NO: 588336 - RNA, 19 nt, Artificial Sequence
  Description of Artificial Sequence: Synthetic oligonucleotide
ggcucaagucacuugugag

SEQ ID NO: 588337 - RNA, 19 nt, Artificial Sequence
  Description of Artificial Sequence: Synthetic oligonucleotide
guuccuucagguuggguaa

SEQ ID NO: 588338 - RNA, 19 nt, Artificial Sequence
  Description of Artificial Sequence: Synthetic oligonucleotide
gggaaugaugacccuagug

SEQ ID NO: 588339 - RNA, 19 nt, Artificial Sequence
  Description of Artificial Sequence: Synthetic oligonucleotide
aggcucaagucacuuguga

SEQ ID NO: 588340 - RNA, 19 nt, Artificial Sequence
  Description of Artificial Sequence: Synthetic oligonucleotide
gacaacgcggggcagccca

SEQ ID NO: 588341 - RNA, 19 nt, Artificial Sequence
  Description of Artificial Sequence: Synthetic oligonucleotide
uccuuacugucguggcggg

SEQ ID NO: 588342 - RNA, 19 nt, Artificial Sequence
  Description of Artificial Sequence: Synthetic oligonucleotide
gcucguagcguguggacgg

SEQ ID NO: 588343 - RNA, 19 nt, Artificial Sequence
  Description of Artificial Sequence: Synthetic oligonucleotide
aggaggcuauguugccacc

SEQ ID NO: 588344 - RNA, 19 nt, Artificial Sequence
  Description of Artificial Sequence: Synthetic oligonucleotide
agcacgucgcggcucgccg

SEQ ID NO: 588345 - RNA, 19 nt, Artificial Sequence
  Description of Artificial Sequence: Synthetic oligonucleotide
aaggaguugcuaguuguua

SEQ ID NO: 588346 - RNA, 19 nt, Artificial Sequence
  Description of Artificial Sequence: Synthetic oligonucleotide
guaaccggccagcaucagc

SEQ ID NO: 588347 - RNA, 19 nt, Artificial Sequence
  Description of Artificial Sequence: Synthetic oligonucleotide
gaggucucguucuccuuug

SEQ ID NO: 588348 - RNA, 19 nt, Artificial Sequence
  Description of Artificial Sequence: Synthetic oligonucleotide
cuguaaucagcaguugguc

SEQ ID NO: 588349 - RNA, 19 nt, Artificial Sequence
  Description of Artificial Sequence: Synthetic oligonucleotide
ggcuggauaugagauacag

SEQ ID NO: 588350 - RNA, 19 nt, Artificial Sequence
  Description of Artificial Sequence: Synthetic oligonucleotide
ggugacacucacaacgagc

SEQ ID NO: 588351 - RNA, 19 nt, Artificial Sequence
  Description of Artificial Sequence: Synthetic oligonucleotide
cauuagagaaagggccagc

SEQ ID NO: 588352 - RNA, 19 nt, Artificial Sequence
  Description of Artificial Sequence: Synthetic oligonucleotide
ggaaacacgacugucccuc

SEQ ID NO: 588353 - RNA, 19 nt, Artificial Sequence
  Description of Artificial Sequence: Synthetic oligonucleotide
guaucucgagucaaaacaa

SEQ ID NO: 588354 - RNA, 19 nt, Artificial Sequence
  Description of Artificial Sequence: Synthetic oligonucleotide
ugucaggaucuuugaagau

SEQ ID NO: 588355 - RNA, 19 nt, Artificial Sequence
  Description of Artificial Sequence: Synthetic oligonucleotide
aguguagaccguuguggau

SEQ ID NO: 588356 - RNA, 19 nt, Artificial Sequence
  Description of Artificial Sequence: Synthetic oligonucleotide
aggcucguagcguguggac

SEQ ID NO: 588357 - RNA, 19 nt, Artificial Sequence
  Description of Artificial Sequence: Synthetic oligonucleotide
cuucgcucgguuccagaag

SEQ ID NO: 588358 - RNA, 19 nt, Artificial Sequence
  Description of Artificial Sequence: Synthetic oligonucleotide
aagcuuccguaaggcacac

SEQ ID NO: 588359 - RNA, 19 nt, Artificial Sequence
  Description of Artificial Sequence: Synthetic oligonucleotide
agaggacaagcuuccguaa

SEQ ID NO: 588360 - RNA, 19 nt, Artificial Sequence
  Description of Artificial Sequence: Synthetic oligonucleotide
gccuaaugauuuaucaccc

SEQ ID NO: 588361 - RNA, 19 nt, Artificial Sequence
  Description of Artificial Sequence: Synthetic oligonucleotide
ccuaaugauuuaucacccc

SEQ ID NO: 588362 - RNA, 19 nt, Artificial Sequence
  Description of Artificial Sequence: Synthetic oligonucleotide
ugucguggcgggcguagga

SEQ ID NO: 588363 - RNA, 19 nt, Artificial Sequence
  Description of Artificial Sequence: Synthetic oligonucleotide
uagugagccuauggcuugg

SEQ ID NO: 588364 - RNA, 19 nt, Artificial Sequence
  Description of Artificial Sequence: Synthetic oligonucleotide
gagacaacgcggggcagcc

SEQ ID NO: 588365 - RNA, 19 nt, Artificial Sequence
  Description of Artificial Sequence: Synthetic oligonucleotide
cugaaggccgagaguguug

SEQ ID NO: 588366 - RNA, 19 nt, Artificial Sequence
  Description of Artificial Sequence: Synthetic oligonucleotide
auguugccacccauggccg

SEQ ID NO: 588367 - RNA, 19 nt, Artificial Sequence
  Description of Artificial Sequence: Synthetic oligonucleotide
gaggcuauguugccaccca

SEQ ID NO: 588368 - RNA, 19 nt, Artificial Sequence
  Description of Artificial Sequence: Synthetic oligonucleotide
augagauacaggagguaga

SEQ ID NO: 588369 - RNA, 19 nt, Artificial Sequence
  Description of Artificial Sequence: Synthetic oligonucleotide
aaguccggagugggaacag

SEQ ID NO: 588370 - RNA, 19 nt, Artificial Sequence
  Description of Artificial Sequence: Synthetic oligonucleotide
ggaucuuugaagauaaaau

SEQ ID NO: 588371 - RNA, 19 nt, Artificial Sequence
  Description of Artificial Sequence: Synthetic oligonucleotide
cuacacagcuaaggauugg

SEQ ID NO: 588372 - RNA, 19 nt, Artificial Sequence
  Description of Artificial Sequence: Synthetic oligonucleotide
uggguaucucgagucaaaa

SEQ ID NO: 588373 - RNA, 19 nt, Artificial Sequence
  Description of Artificial Sequence: Synthetic oligonucleotide
ugggaaugaugacccuagu

SEQ ID NO: 588374 - RNA, 19 nt, Artificial Sequence
  Description of Artificial Sequence: Synthetic oligonucleotide
cugcgcuguggauugucag

SEQ ID NO: 588375 - RNA, 19 nt, Artificial Sequence
  Description of Artificial Sequence: Synthetic oligonucleotide
acaaggcaaccgccuaaug

SEQ ID NO: 588376 - RNA, 19 nt, Artificial Sequence
  Description of Artificial Sequence: Synthetic oligonucleotide
gccgugaggacuguaaaug

SEQ ID NO: 588377 - RNA, 19 nt, Artificial Sequence
  Description of Artificial Sequence: Synthetic oligonucleotide
aaacacgacugucccucuu

SEQ ID NO: 588378 - RNA, 19 nt, Artificial Sequence
  Description of Artificial Sequence: Synthetic oligonucleotide
gccugugaucaucucuucg

SEQ ID NO: 588379 - RNA, 19 nt, Artificial Sequence
  Description of Artificial Sequence: Synthetic oligonucleotide
gaaguccggagugggaaca

SEQ ID NO: 588380 - RNA, 19 nt, Artificial Sequence
  Description of Artificial Sequence: Synthetic oligonucleotide
gguaacuacaaaguacuua

SEQ ID NO: 588381 - RNA, 19 nt, Artificial Sequence
  Description of Artificial Sequence: Synthetic oligonucleotide
aggucucguucuccuuugg

SEQ ID NO: 588382 - RNA, 19 nt, Artificial Sequence
  Description of Artificial Sequence: Synthetic oligonucleotide
acaaaguacuuaggaggga

SEQ ID NO: 588383 - RNA, 19 nt, Artificial Sequence
  Description of Artificial Sequence: Synthetic oligonucleotide
uuacugucguggcgggcgu

SEQ ID NO: 588384 - RNA, 19 nt, Artificial Sequence
  Description of Artificial Sequence: Synthetic oligonucleotide
aggucccuucuccaaacaa

SEQ ID NO: 588385 - RNA, 19 nt, Artificial Sequence
  Description of Artificial Sequence: Synthetic oligonucleotide
aggguacccugaaacugac

SEQ ID NO: 588386 - RNA, 19 nt, Artificial Sequence
  Description of Artificial Sequence: Synthetic oligonucleotide
ggcuggacaaucacaauca

SEQ ID NO: 588387 - RNA, 19 nt, Artificial Sequence
  Description of Artificial Sequence: Synthetic oligonucleotide
gucaggaucuuugaagaua

SEQ ID NO: 588388 - RNA, 19 nt, Artificial Sequence
  Description of Artificial Sequence: Synthetic oligonucleotide
cucguucuccuuuggucuc

SEQ ID NO: 588389 - RNA, 19 nt, Artificial Sequence
  Description of Artificial Sequence: Synthetic oligonucleotide
gaugaucgaugaccucaca

SEQ ID NO: 588390 - RNA, 19 nt, Artificial Sequence
  Description of Artificial Sequence: Synthetic oligonucleotide
gguuauugguaacuacaaa

SEQ ID NO: 588391 - RNA, 19 nt, Artificial Sequence
  Description of Artificial Sequence: Synthetic oligonucleotide
ggccucgaaguccuuacug

SEQ ID NO: 588392 - RNA, 19 nt, Artificial Sequence
  Description of Artificial Sequence: Synthetic oligonucleotide
uugugagguaggucccuuc

SEQ ID NO: 588393 - RNA, 19 nt, Artificial Sequence
  Description of Artificial Sequence: Synthetic oligonucleotide
cgagucaaaacaaggcaac

SEQ ID NO: 588394 - RNA, 19 nt, Artificial Sequence
  Description of Artificial Sequence: Synthetic oligonucleotide
gaauacaccagaagguauu

SEQ ID NO: 588395 - RNA, 19 nt, Artificial Sequence
  Description of Artificial Sequence: Synthetic oligonucleotide
ggguaucucgagucaaaac

SEQ ID NO: 588396 - RNA, 19 nt, Artificial Sequence
  Description of Artificial Sequence: Synthetic oligonucleotide
ccgagaguguuguauauca

SEQ ID NO: 588397 - RNA, 19 nt, Artificial Sequence
  Description of Artificial Sequence: Synthetic oligonucleotide
guccggagugggaacaggc

SEQ ID NO: 588398 - RNA, 19 nt, Artificial Sequence
  Description of Artificial Sequence: Synthetic oligonucleotide
ucgcucgguuccagaagug

SEQ ID NO: 588399 - RNA, 19 nt, Artificial Sequence
  Description of Artificial Sequence: Synthetic oligonucleotide
gcccgugggccccugaagg

SEQ ID NO: 588400 - RNA, 19 nt, Artificial Sequence
  Description of Artificial Sequence: Synthetic oligonucleotide
ggcucguagcguguggacg

SEQ ID NO: 588401 - RNA, 19 nt, Artificial Sequence
  Description of Artificial Sequence: Synthetic oligonucleotide
guaggagcgggaaggccgc

SEQ ID NO: 588402 - RNA, 19 nt, Artificial Sequence
  Description of Artificial Sequence: Synthetic oligonucleotide
ucacaacgagcagcagcag

SEQ ID NO: 588403 - RNA, 19 nt, Artificial Sequence
  Description of Artificial Sequence: Synthetic oligonucleotide
gcuacacagcuaaggauug

SEQ ID NO: 588404 - RNA, 19 nt, Artificial Sequence
  Description of Artificial Sequence: Synthetic oligonucleotide
uguugccacccauggccgu

SEQ ID NO: 588405 - RNA, 19 nt, Artificial Sequence
  Description of Artificial Sequence: Synthetic oligonucleotide
ccgccuaaugauuuaucac

SEQ ID NO: 588406 - RNA, 19 nt, Artificial Sequence
  Description of Artificial Sequence: Synthetic oligonucleotide
aggccgagaguguuguaua

SEQ ID NO: 588407 - RNA, 19 nt, Artificial Sequence
  Description of Artificial Sequence: Synthetic oligonucleotide
ucguagcguguggacgggg

SEQ ID NO: 588408 - RNA, 19 nt, Artificial Sequence
  Description of Artificial Sequence: Synthetic oligonucleotide
agaagguauuucacccgca

SEQ ID NO: 588409 - RNA, 19 nt, Artificial Sequence
  Description of Artificial Sequence: Synthetic oligonucleotide
cuggacaaucacaaucagu

SEQ ID NO: 588410 - RNA, 19 nt, Artificial Sequence
  Description of Artificial Sequence: Synthetic oligonucleotide
ucccuuuggcccuggcuua

SEQ ID NO: 588411 - RNA, 19 nt, Artificial Sequence
  Description of Artificial Sequence: Synthetic oligonucleotide
ggaccgcggaccgucagcg

SEQ ID NO: 588412 - RNA, 19 nt, Artificial Sequence
  Description of Artificial Sequence: Synthetic oligonucleotide
ggccccugaaggccgagag

SEQ ID NO: 588413 - RNA, 19 nt, Artificial Sequence
  Description of Artificial Sequence: Synthetic oligonucleotide
augcaacaggaguuacuuu

SEQ ID NO: 588414 - RNA, 19 nt, Artificial Sequence
  Description of Artificial Sequence: Synthetic oligonucleotide
cugccgcccuguuggagag

SEQ ID NO: 588415 - RNA, 19 nt, Artificial Sequence
  Description of Artificial Sequence: Synthetic oligonucleotide
ucguucuccuuuggucuca

SEQ ID NO: 588416 - RNA, 19 nt, Artificial Sequence
  Description of Artificial Sequence: Synthetic oligonucleotide
acccgcagacuaaagcuga

SEQ ID NO: 588417 - RNA, 19 nt, Artificial Sequence
  Description of Artificial Sequence: Synthetic oligonucleotide
gggaauacaccagaaggua

SEQ ID NO: 588418 - RNA, 19 nt, Artificial Sequence
  Description of Artificial Sequence: Synthetic oligonucleotide
guugccacccauggccgug

SEQ ID NO: 588419 - RNA, 19 nt, Artificial Sequence
  Description of Artificial Sequence: Synthetic oligonucleotide
caucgggaugaucgaugac

SEQ ID NO: 588420 - RNA, 19 nt, Artificial Sequence
  Description of Artificial Sequence: Synthetic oligonucleotide
gcuaaggauugggccaagg

SEQ ID NO: 588421 - RNA, 19 nt, Artificial Sequence
  Description of Artificial Sequence: Synthetic oligonucleotide
agacaacgcggggcagccc

SEQ ID NO: 588422 - RNA, 19 nt, Artificial Sequence
  Description of Artificial Sequence: Synthetic oligonucleotide
aggcuauguugccacccau

SEQ ID NO: 588423 - RNA, 19 nt, Artificial Sequence
  Description of Artificial Sequence: Synthetic oligonucleotide
gaccgcggaccgucagcgg

SEQ ID NO: 588424 - RNA, 19 nt, Artificial Sequence
  Description of Artificial Sequence: Synthetic oligonucleotide
accgacagcuuggacacuu

SEQ ID NO: 588425 - RNA, 19 nt, Artificial Sequence
  Description of Artificial Sequence: Synthetic oligonucleotide
ggcuauguugccacccaug

SEQ ID NO: 588426 - RNA, 19 nt, Artificial Sequence
  Description of Artificial Sequence: Synthetic oligonucleotide
cccgcuuguagcucugcag

SEQ ID NO: 588427 - RNA, 19 nt, Artificial Sequence
  Description of Artificial Sequence: Synthetic oligonucleotide
ggaugaucgaugaccucac

SEQ ID NO: 588428 - RNA, 19 nt, Artificial Sequence
  Description of Artificial Sequence: Synthetic oligonucleotide
guuguauaucaaggcagcu

SEQ ID NO: 588429 - RNA, 19 nt, Artificial Sequence
  Description of Artificial Sequence: Synthetic oligonucleotide
ggaugaaggaguugcuagu

SEQ ID NO: 588430 - RNA, 19 nt, Artificial Sequence
  Description of Artificial Sequence: Synthetic oligonucleotide
cucguagcguguggacggg

SEQ ID NO: 588431 - RNA, 19 nt, Artificial Sequence
  Description of Artificial Sequence: Synthetic oligonucleotide
guuuggcacuugacaucgg

SEQ ID NO: 588432 - RNA, 19 nt, Artificial Sequence
  Description of Artificial Sequence: Synthetic oligonucleotide
ccuucucuuguguggugag

SEQ ID NO: 588433 - RNA, 19 nt, Artificial Sequence
  Description of Artificial Sequence: Synthetic oligonucleotide
gaaacacgacugucccucu

SEQ ID NO: 588434 - RNA, 19 nt, Artificial Sequence
  Description of Artificial Sequence: Synthetic oligonucleotide
ggccaggucaaaguacuca

SEQ ID NO: 588435 - RNA, 19 nt, Artificial Sequence
  Description of Artificial Sequence: Synthetic oligonucleotide
gagucccgcuuguagcucu

SEQ ID NO: 588436 - RNA, 19 nt, Artificial Sequence
  Description of Artificial Sequence: Synthetic oligonucleotide
auaguggcuuuuacacaaa

SEQ ID NO: 588437 - RNA, 19 nt, Artificial Sequence
  Description of Artificial Sequence: Synthetic oligonucleotide
cuuguuuagguggcagugu

SEQ ID NO: 588438 - RNA, 19 nt, Artificial Sequence
  Description of Artificial Sequence: Synthetic oligonucleotide
uugccacccauggccguga

SEQ ID NO: 588439 - RNA, 19 nt, Artificial Sequence
  Description of Artificial Sequence: Synthetic oligonucleotide
agguccgcggccagcacgu

SEQ ID NO: 588440 - RNA, 19 nt, Artificial Sequence
  Description of Artificial Sequence: Synthetic oligonucleotide
agcggagguccgcggccag

SEQ ID NO: 588441 - RNA, 19 nt, Artificial Sequence
  Description of Artificial Sequence: Synthetic oligonucleotide
agugagccuauggcuugga

SEQ ID NO: 588442 - RNA, 19 nt, Artificial Sequence
  Description of Artificial Sequence: Synthetic oligonucleotide
agcuaaggauugggccaag

SEQ ID NO: 588443 - RNA, 19 nt, Artificial Sequence
  Description of Artificial Sequence: Synthetic oligonucleotide
ccccauugacugaacugug

SEQ ID NO: 588444 - RNA, 19 nt, Artificial Sequence
  Description of Artificial Sequence: Synthetic oligonucleotide
aacacaccaccgacagcuu

SEQ ID NO: 588445 - RNA, 19 nt, Artificial Sequence
  Description of Artificial Sequence: Synthetic oligonucleotide
ccgugaggacuguaaauga

SEQ ID NO: 588446 - RNA, 19 nt, Artificial Sequence
  Description of Artificial Sequence: Synthetic oligonucleotide
cuuccguaaggcacacggu

SEQ ID NO: 588447 - RNA, 19 nt, Artificial Sequence
  Description of Artificial Sequence: Synthetic oligonucleotide
guggcgggcguaggagcgg

SEQ ID NO: 588448 - RNA, 19 nt, Artificial Sequence
  Description of Artificial Sequence: Synthetic oligonucleotide
aaggcccgugggccccuga

SEQ ID NO: 588449 - RNA, 19 nt, Artificial Sequence
  Description of Artificial Sequence: Synthetic oligonucleotide
ggaauacaccagaagguau

SEQ ID NO: 588450 - RNA, 19 nt, Artificial Sequence
  Description of Artificial Sequence: Synthetic oligonucleotide
cuggaccuggcuggauaug

SEQ ID NO: 588451 - RNA, 19 nt, Artificial Sequence
  Description of Artificial Sequence: Synthetic oligonucleotide
cagcuaaggauugggccaa

SEQ ID NO: 588452 - RNA, 19 nt, Artificial Sequence
  Description of Artificial Sequence: Synthetic oligonucleotide
cagcaccgagucccgcuug

SEQ ID NO: 588453 - RNA, 19 nt, Artificial Sequence
  Description of Artificial Sequence: Synthetic oligonucleotide
cugucguggcgggcguagg

SEQ ID NO: 588454 - RNA, 19 nt, Artificial Sequence
  Description of Artificial Sequence: Synthetic oligonucleotide
gccucgaaguccuuacugu

SEQ ID NO: 588455 - RNA, 19 nt, Artificial Sequence
  Description of Artificial Sequence: Synthetic oligonucleotide
cuucgcugugcuugauucu

SEQ ID NO: 588456 - RNA, 19 nt, Artificial Sequence
  Description of Artificial Sequence: Synthetic oligonucleotide
gggacaucaugaccaugaa

SEQ ID NO: 588457 - RNA, 19 nt, Artificial Sequence
  Description of Artificial Sequence: Synthetic oligonucleotide
ggguaaccggccagcauca

SEQ ID NO: 588458 - RNA, 19 nt, Artificial Sequence
  Description of Artificial Sequence: Synthetic oligonucleotide
acaacgcggggcagcccag

SEQ ID NO: 588459 - RNA, 19 nt, Artificial Sequence
  Description of Artificial Sequence: Synthetic oligonucleotide
ggcguaggagcgggaaggc

SEQ ID NO: 588460 - RNA, 19 nt, Artificial Sequence
  Description of Artificial Sequence: Synthetic oligonucleotide
aggcaaccgccuaaugauu

SEQ ID NO: 588461 - RNA, 19 nt, Artificial Sequence
  Description of Artificial Sequence: Synthetic oligonucleotide
ccuagugagccuauggcuu

SEQ ID NO: 588462 - RNA, 19 nt, Artificial Sequence
  Description of Artificial Sequence: Synthetic oligonucleotide
gccagggguccccauugac

SEQ ID NO: 588463 - RNA, 19 nt, Artificial Sequence
  Description of Artificial Sequence: Synthetic oligonucleotide
caccaccgacagcuuggac

SEQ ID NO: 588464 - RNA, 19 nt, Artificial Sequence
  Description of Artificial Sequence: Synthetic oligonucleotide
ccgcagaagcugguuauug

SEQ ID NO: 588465 - RNA, 19 nt, Artificial Sequence
  Description of Artificial Sequence: Synthetic oligonucleotide
cccuagugagccuauggcu

SEQ ID NO: 588466 - RNA, 19 nt, Artificial Sequence
  Description of Artificial Sequence: Synthetic oligonucleotide
gccgagaguguuguauauc

SEQ ID NO: 588467 - RNA, 19 nt, Artificial Sequence
  Description of Artificial Sequence: Synthetic oligonucleotide
cgggaaggccgcagcaccg

SEQ ID NO: 588468 - RNA, 19 nt, Artificial Sequence
  Description of Artificial Sequence: Synthetic oligonucleotide
augacccuagugagccuau

SEQ ID NO: 588469 - RNA, 19 nt, Artificial Sequence
  Description of Artificial Sequence: Synthetic oligonucleotide
agccuauggcuuggauccu

SEQ ID NO: 588470 - RNA, 19 nt, Artificial Sequence
  Description of Artificial Sequence: Synthetic oligonucleotide
gcaaccgccuaaugauuua

SEQ ID NO: 588471 - RNA, 19 nt, Artificial Sequence
  Description of Artificial Sequence: Synthetic oligonucleotide
gguaaccggccagcaucag

SEQ ID NO: 588472 - RNA, 19 nt, Artificial Sequence
  Description of Artificial Sequence: Synthetic oligonucleotide
ggucucguucuccuuuggu

SEQ ID NO: 588473 - RNA, 19 nt, Artificial Sequence
  Description of Artificial Sequence: Synthetic oligonucleotide
gcacgucgcggcucgccgc

SEQ ID NO: 588474 - RNA, 19 nt, Artificial Sequence
  Description of Artificial Sequence: Synthetic oligonucleotide
caccucccuagacuauuua

SEQ ID NO: 588475 - RNA, 19 nt, Artificial Sequence
  Description of Artificial Sequence: Synthetic oligonucleotide
ccgcggaccgucagcggcc

SEQ ID NO: 588476 - RNA, 19 nt, Artificial Sequence
  Description of Artificial Sequence: Synthetic oligonucleotide
ccgugggccccugaaggcc

SEQ ID NO: 588477 - RNA, 19 nt, Artificial Sequence
  Description of Artificial Sequence: Synthetic oligonucleotide
ggccaacugaggcaggauu

SEQ ID NO: 588478 - RNA, 19 nt, Artificial Sequence
  Description of Artificial Sequence: Synthetic oligonucleotide
caaccgccuaaugauuuau

SEQ ID NO: 588479 - RNA, 19 nt, Artificial Sequence
  Description of Artificial Sequence: Synthetic oligonucleotide
ggccgugaggacuguaaau

SEQ ID NO: 588480 - RNA, 19 nt, Artificial Sequence
  Description of Artificial Sequence: Synthetic oligonucleotide
ugccgcccuguuggagagc

SEQ ID NO: 588481 - RNA, 19 nt, Artificial Sequence
  Description of Artificial Sequence: Synthetic oligonucleotide
ccagggguccccauugacu

SEQ ID NO: 588482 - RNA, 19 nt, Artificial Sequence
  Description of Artificial Sequence: Synthetic oligonucleotide
ccuuacugucguggcgggc

SEQ ID NO: 588483 - RNA, 19 nt, Artificial Sequence
  Description of Artificial Sequence: Synthetic oligonucleotide
gcagaugggaggguacccu

SEQ ID NO: 588484 - RNA, 19 nt, Artificial Sequence
  Description of Artificial Sequence: Synthetic oligonucleotide
ggcaaccgccuaaugauuu

SEQ ID NO: 588485 - RNA, 19 nt, Artificial Sequence
  Description of Artificial Sequence: Synthetic oligonucleotide
ggccgagaguguuguauau

SEQ ID NO: 588486 - RNA, 19 nt, Artificial Sequence
  Description of Artificial Sequence: Synthetic oligonucleotide
cgaugaccucacacacagc

SEQ ID NO: 588487 - RNA, 19 nt, Artificial Sequence
  Description of Artificial Sequence: Synthetic oligonucleotide
cgagaguguuguauaucaa

SEQ ID NO: 588488 - RNA, 19 nt, Artificial Sequence
  Description of Artificial Sequence: Synthetic oligonucleotide
cagaggaguuggugacacu

SEQ ID NO: 588489 - RNA, 19 nt, Artificial Sequence
  Description of Artificial Sequence: Synthetic oligonucleotide
ggcucgccgccucccuggc

SEQ ID NO: 588490 - RNA, 19 nt, Artificial Sequence
  Description of Artificial Sequence: Synthetic oligonucleotide
cgagacgaagaggcugcag

SEQ ID NO: 588491 - RNA, 19 nt, Artificial Sequence
  Description of Artificial Sequence: Synthetic oligonucleotide
cuugugagguaggucccuu

SEQ ID NO: 588492 - RNA, 19 nt, Artificial Sequence
  Description of Artificial Sequence: Synthetic oligonucleotide
gagcuggcuugaggcccuc

SEQ ID NO: 588493 - RNA, 19 nt, Artificial Sequence
  Description of Artificial Sequence: Synthetic oligonucleotide
gccgcccuguuggagagcu

SEQ ID NO: 588494 - RNA, 19 nt, Artificial Sequence
  Description of Artificial Sequence: Synthetic oligonucleotide
gggccucgaaguccuuacu

SEQ ID NO: 588495 - RNA, 19 nt, Artificial Sequence
  Description of Artificial Sequence: Synthetic oligonucleotide
cacuugacaucgggaugau

SEQ ID NO: 588496 - RNA, 19 nt, Artificial Sequence
  Description of Artificial Sequence: Synthetic oligonucleotide
ccgcccuguuggagagcug

SEQ ID NO: 588497 - RNA, 19 nt, Artificial Sequence
  Description of Artificial Sequence: Synthetic oligonucleotide
ccgagacgaagaggcugca

SEQ ID NO: 588498 - RNA, 19 nt, Artificial Sequence
  Description of Artificial Sequence: Synthetic oligonucleotide
ccaccucccuagacuauuu

SEQ ID NO: 588499 - RNA, 19 nt, Artificial Sequence
  Description of Artificial Sequence: Synthetic oligonucleotide
cccgcagacuaaagcugau

SEQ ID NO: 588500 - RNA, 19 nt, Artificial Sequence
  Description of Artificial Sequence: Synthetic oligonucleotide
ggcugccauggaaggcaua

SEQ ID NO: 588501 - RNA, 19 nt, Artificial Sequence
  Description of Artificial Sequence: Synthetic oligonucleotide
cccuguuggagagcugcau

SEQ ID NO: 588502 - RNA, 19 nt, Artificial Sequence
  Description of Artificial Sequence: Synthetic oligonucleotide
gguccgcggccagcacguc

SEQ ID NO: 588503 - RNA, 19 nt, Artificial Sequence
  Description of Artificial Sequence: Synthetic oligonucleotide
ccccuucgcugugcuugau

SEQ ID NO: 588504 - RNA, 19 nt, Artificial Sequence
  Description of Artificial Sequence: Synthetic oligonucleotide
aaugugaggaguuaaacac

SEQ ID NO: 588505 - RNA, 19 nt, Artificial Sequence
  Description of Artificial Sequence: Synthetic oligonucleotide
ugauuaagaaguaugguag

SEQ ID NO: 588506 - RNA, 19 nt, Artificial Sequence
  Description of Artificial Sequence: Synthetic oligonucleotide
ugaucaagaacuuugggug

SEQ ID NO: 588507 - RNA, 19 nt, Artificial Sequence
  Description of Artificial Sequence: Synthetic oligonucleotide
ucguacuugauuaagaagu

SEQ ID NO: 588508 - RNA, 19 nt, Artificial Sequence
  Description of Artificial Sequence: Synthetic oligonucleotide
uucggcuugacacagauca

SEQ ID NO: 588509 - RNA, 19 nt, Artificial Sequence
  Description of Artificial Sequence: Synthetic oligonucleotide
aaaggugucaaaccccagg

SEQ ID NO: 588510 - RNA, 19 nt, Artificial Sequence
  Description of Artificial Sequence: Synthetic oligonucleotide
uauugaucaagaacuuugg

SEQ ID NO: 588511 - RNA, 19 nt, Artificial Sequence
  Description of Artificial Sequence: Synthetic oligonucleotide
ucacucaugucccagaucu

SEQ ID NO: 588512 - RNA, 19 nt, Artificial Sequence
  Description of Artificial Sequence: Synthetic oligonucleotide
gacaucauggcucucaaug

SEQ ID NO: 588513 - RNA, 19 nt, Artificial Sequence
  Description of Artificial Sequence: Synthetic oligonucleotide
uaagaaguaugguagggcc

SEQ ID NO: 588514 - RNA, 19 nt, Artificial Sequence
  Description of Artificial Sequence: Synthetic oligonucleotide
aucuguuuuggugaaagcc

SEQ ID NO: 588515 - RNA, 19 nt, Artificial Sequence
  Description of Artificial Sequence: Synthetic oligonucleotide
agaaauaacagccaagcuu

SEQ ID NO: 588516 - RNA, 19 nt, Artificial Sequence
  Description of Artificial Sequence: Synthetic oligonucleotide
ugaauuagagggaugcucu

SEQ ID NO: 588517 - RNA, 19 nt, Artificial Sequence
  Description of Artificial Sequence: Synthetic oligonucleotide
agaaauucacaggaugucc

SEQ ID NO: 588518 - RNA, 19 nt, Artificial Sequence
  Description of Artificial Sequence: Synthetic oligonucleotide
uugaucaagaacuuugggu

SEQ ID NO: 588519 - RNA, 19 nt, Artificial Sequence
  Description of Artificial Sequence: Synthetic oligonucleotide
aguuaaacaccuucgcuag

SEQ ID NO: 588520 - RNA, 19 nt, Artificial Sequence
  Description of Artificial Sequence: Synthetic oligonucleotide
uucuggaaguuucaccucg

SEQ ID NO: 588521 - RNA, 19 nt, Artificial Sequence
  Description of Artificial Sequence: Synthetic oligonucleotide
aggaguuaaacaccuucgc

SEQ ID NO: 588522 - RNA, 19 nt, Artificial Sequence
  Description of Artificial Sequence: Synthetic oligonucleotide
acuugauuaagaaguaugg

SEQ ID NO: 588523 - RNA, 19 nt, Artificial Sequence
  Description of Artificial Sequence: Synthetic oligonucleotide
aagaacuuugggugaacag

SEQ ID NO: 588524 - RNA, 19 nt, Artificial Sequence
  Description of Artificial Sequence: Synthetic oligonucleotide
auugaucaagaacuuuggg

SEQ ID NO: 588525 - RNA, 19 nt, Artificial Sequence
  Description of Artificial Sequence: Synthetic oligonucleotide
auugaugaccagcuuccgc

SEQ ID NO: 588526 - RNA, 19 nt, Artificial Sequence
  Description of Artificial Sequence: Synthetic oligonucleotide
aaccgugacagaaaucccc

SEQ ID NO: 588527 - RNA, 19 nt, Artificial Sequence
  Description of Artificial Sequence: Synthetic oligonucleotide
gacauuaucgaaccgugac

SEQ ID NO: 588528 - RNA, 19 nt, Artificial Sequence
  Description of Artificial Sequence: Synthetic oligonucleotide
auuaagaaguaugguaggg

SEQ ID NO: 588529 - RNA, 19 nt, Artificial Sequence
  Description of Artificial Sequence: Synthetic oligonucleotide
acagggaucguacacacca

SEQ ID NO: 588530 - RNA, 19 nt, Artificial Sequence
  Description of Artificial Sequence: Synthetic oligonucleotide
uaaaugccauuucuggaag

SEQ ID NO: 588531 - RNA, 19 nt, Artificial Sequence
  Description of Artificial Sequence: Synthetic oligonucleotide
cacauuacaucccagggug

SEQ ID NO: 588532 - RNA, 19 nt, Artificial Sequence
  Description of Artificial Sequence: Synthetic oligonucleotide
acauuugucaaacgccagg

SEQ ID NO: 588533 - RNA, 19 nt, Artificial Sequence
  Description of Artificial Sequence: Synthetic oligonucleotide
cucauguugaacccgcugg

SEQ ID NO: 588534 - RNA, 19 nt, Artificial Sequence
  Description of Artificial Sequence: Synthetic oligonucleotide
guauugaucaagaacuuug

SEQ ID NO: 588535 - RNA, 19 nt, Artificial Sequence
  Description of Artificial Sequence: Synthetic oligonucleotide
cugugguugccucagacgg

SEQ ID NO: 588536 - RNA, 19 nt, Artificial Sequence
  Description of Artificial Sequence: Synthetic oligonucleotide
auuaacaggaagaugacau

SEQ ID NO: 588537 - RNA, 19 nt, Artificial Sequence
  Description of Artificial Sequence: Synthetic oligonucleotide
gaaugugaggaguuaaaca

SEQ ID NO: 588538 - RNA, 19 nt, Artificial Sequence
  Description of Artificial Sequence: Synthetic oligonucleotide
cuaagaaggaaugugagga

SEQ ID NO: 588539 - RNA, 19 nt, Artificial Sequence
  Description of Artificial Sequence: Synthetic oligonucleotide
uccgggaaauauuuucugg

SEQ ID NO: 588540 - RNA, 19 nt, Artificial Sequence
  Description of Artificial Sequence: Synthetic oligonucleotide
caagcguguggguagaccg

SEQ ID NO: 588541 - RNA, 19 nt, Artificial Sequence
  Description of Artificial Sequence: Synthetic oligonucleotide
uuaagaaguaugguagggc

SEQ ID NO: 588542 - RNA, 19 nt, Artificial Sequence
  Description of Artificial Sequence: Synthetic oligonucleotide
ugugacaugucugacgccc

SEQ ID NO: 588543 - RNA, 19 nt, Artificial Sequence
  Description of Artificial Sequence: Synthetic oligonucleotide
aguguuugagcaaggagac

SEQ ID NO: 588544 - RNA, 19 nt, Artificial Sequence
  Description of Artificial Sequence: Synthetic oligonucleotide
uuuaggacaaucugggcua

SEQ ID NO: 588545 - RNA, 19 nt, Artificial Sequence
  Description of Artificial Sequence: Synthetic oligonucleotide
cucguauugaucaagaacu

SEQ ID NO: 588546 - RNA, 19 nt, Artificial Sequence
  Description of Artificial Sequence: Synthetic oligonucleotide
ucgcuaggaagguaaaucc

SEQ ID NO: 588547 - RNA, 19 nt, Artificial Sequence
  Description of Artificial Sequence: Synthetic oligonucleotide
cauuaucgaaccgugacag

SEQ ID NO: 588548 - RNA, 19 nt, Artificial Sequence
  Description of Artificial Sequence: Synthetic oligonucleotide
cauggugcggucucgaaag

SEQ ID NO: 588549 - RNA, 19 nt, Artificial Sequence
  Description of Artificial Sequence: Synthetic oligonucleotide
gaggaguuaaacaccuucg

SEQ ID NO: 588550 - RNA, 19 nt, Artificial Sequence
  Description of Artificial Sequence: Synthetic oligonucleotide
aacccgcuggcauucacuc

SEQ ID NO: 588551 - RNA, 19 nt, Artificial Sequence
  Description of Artificial Sequence: Synthetic oligonucleotide
aucguacuugauuaagaag

SEQ ID NO: 588552 - RNA, 19 nt, Artificial Sequence
  Description of Artificial Sequence: Synthetic oligonucleotide
uaugguagggccgugacuc

SEQ ID NO: 588553 - RNA, 19 nt, Artificial Sequence
  Description of Artificial Sequence: Synthetic oligonucleotide
uagguuacagggaucguac

SEQ ID NO: 588554 - RNA, 19 nt, Artificial Sequence
  Description of Artificial Sequence: Synthetic oligonucleotide
ugggcuaaaugccauuucu

SEQ ID NO: 588555 - RNA, 19 nt, Artificial Sequence
  Description of Artificial Sequence: Synthetic oligonucleotide
aggaaggacauuaucgaac

SEQ ID NO: 588556 - RNA, 19 nt, Artificial Sequence
  Description of Artificial Sequence: Synthetic oligonucleotide
aguguguugguguuguaca

SEQ ID NO: 588557 - RNA, 19 nt, Artificial Sequence
  Description of Artificial Sequence: Synthetic oligonucleotide
cauaagguggcuugggcac

SEQ ID NO: 588558 - RNA, 19 nt, Artificial Sequence
  Description of Artificial Sequence: Synthetic oligonucleotide
aagaaguaugguagggccg

SEQ ID NO: 588559 - RNA, 19 nt, Artificial Sequence
  Description of Artificial Sequence: Synthetic oligonucleotide
ggcuaaaugccauuucugg

SEQ ID NO: 588560 - RNA, 19 nt, Artificial Sequence
  Description of Artificial Sequence: Synthetic oligonucleotide
caagguagggaccaaucgc

SEQ ID NO: 588561 - RNA, 19 nt, Artificial Sequence
  Description of Artificial Sequence: Synthetic oligonucleotide
aagaugaugcugugggcca

SEQ ID NO: 588562 - RNA, 19 nt, Artificial Sequence
  Description of Artificial Sequence: Synthetic oligonucleotide
guaguguuugagcaaggag

SEQ ID NO: 588563 - RNA, 19 nt, Artificial Sequence
  Description of Artificial Sequence: Synthetic oligonucleotide
aagguaaauccuuccugcu

SEQ ID NO: 588564 - RNA, 19 nt, Artificial Sequence
  Description of Artificial Sequence: Synthetic oligonucleotide
cucaugacaacaaaggugu

SEQ ID NO: 588565 - RNA, 19 nt, Artificial Sequence
  Description of Artificial Sequence: Synthetic oligonucleotide
uuaucgaaccgugacagaa

SEQ ID NO: 588566 - RNA, 19 nt, Artificial Sequence
  Description of Artificial Sequence: Synthetic oligonucleotide
gaaacugccgcuccaucug

SEQ ID NO: 588567 - RNA, 19 nt, Artificial Sequence
  Description of Artificial Sequence: Synthetic oligonucleotide
gacuuuauggcuucccaga

SEQ ID NO: 588568 - RNA, 19 nt, Artificial Sequence
  Description of Artificial Sequence: Synthetic oligonucleotide
uagaagugguacuucuuca

SEQ ID NO: 588569 - RNA, 19 nt, Artificial Sequence
  Description of Artificial Sequence: Synthetic oligonucleotide
ugucugacgccccagccca

SEQ ID NO: 588570 - RNA, 19 nt, Artificial Sequence
  Description of Artificial Sequence: Synthetic oligonucleotide
ggaaggacauuaucgaacc

SEQ ID NO: 588571 - RNA, 19 nt, Artificial Sequence
  Description of Artificial Sequence: Synthetic oligonucleotide
agagaaauucacaggaugu

SEQ ID NO: 588572 - RNA, 19 nt, Artificial Sequence
  Description of Artificial Sequence: Synthetic oligonucleotide
uucaacagacuggaaacug

SEQ ID NO: 588573 - RNA, 19 nt, Artificial Sequence
  Description of Artificial Sequence: Synthetic oligonucleotide
gggagucucauccaggcgg

SEQ ID NO: 588574 - RNA, 19 nt, Artificial Sequence
  Description of Artificial Sequence: Synthetic oligonucleotide
cauuugucaaacgccaggc

SEQ ID NO: 588575 - RNA, 19 nt, Artificial Sequence
  Description of Artificial Sequence: Synthetic oligonucleotide
agcaugggguuuucgagag

SEQ ID NO: 588576 - RNA, 19 nt, Artificial Sequence
  Description of Artificial Sequence: Synthetic oligonucleotide
acauuaucgaaccgugaca

SEQ ID NO: 588577 - RNA, 19 nt, Artificial Sequence
  Description of Artificial Sequence: Synthetic oligonucleotide
caugcauccgcugagguuc

SEQ ID NO: 588578 - RNA, 19 nt, Artificial Sequence
  Description of Artificial Sequence: Synthetic oligonucleotide
agggaucguacacaccaac

SEQ ID NO: 588579 - RNA, 19 nt, Artificial Sequence
  Description of Artificial Sequence: Synthetic oligonucleotide
augucaagcguguggguag

SEQ ID NO: 588580 - RNA, 19 nt, Artificial Sequence
  Description of Artificial Sequence: Synthetic oligonucleotide
gauucagauccacggauga

SEQ ID NO: 588581 - RNA, 19 nt, Artificial Sequence
  Description of Artificial Sequence: Synthetic oligonucleotide
uucgcuaggaagguaaauc

SEQ ID NO: 588582 - RNA, 19 nt, Artificial Sequence
  Description of Artificial Sequence: Synthetic oligonucleotide
uuaacaggaagaugacauc

SEQ ID NO: 588583 - RNA, 19 nt, Artificial Sequence
  Description of Artificial Sequence: Synthetic oligonucleotide
caugccagaagccaacauc

SEQ ID NO: 588584 - RNA, 19 nt, Artificial Sequence
  Description of Artificial Sequence: Synthetic oligonucleotide
aacagacuggaaacugccg

SEQ ID NO: 588585 - RNA, 19 nt, Artificial Sequence
  Description of Artificial Sequence: Synthetic oligonucleotide
aggaagguaaauccuuccu

SEQ ID NO: 588586 - RNA, 19 nt, Artificial Sequence
  Description of Artificial Sequence: Synthetic oligonucleotide
aaugucaagcgugugggua

SEQ ID NO: 588587 - RNA, 19 nt, Artificial Sequence
  Description of Artificial Sequence: Synthetic oligonucleotide
agauccacggaugacucag

SEQ ID NO: 588588 - RNA, 19 nt, Artificial Sequence
  Description of Artificial Sequence: Synthetic oligonucleotide
cuugggagucucauccagg

SEQ ID NO: 588589 - RNA, 19 nt, Artificial Sequence
  Description of Artificial Sequence: Synthetic oligonucleotide
uguucuuaccggucgccgc

SEQ ID NO: 588590 - RNA, 19 nt, Artificial Sequence
  Description of Artificial Sequence: Synthetic oligonucleotide
agggcggggcagcaaaacc

SEQ ID NO: 588591 - RNA, 19 nt, Artificial Sequence
  Description of Artificial Sequence: Synthetic oligonucleotide
ugcggucucgaaagcagag

SEQ ID NO: 588592 - RNA, 19 nt, Artificial Sequence
  Description of Artificial Sequence: Synthetic oligonucleotide
gaucuguuuuggugaaagc

SEQ ID NO: 588593 - RNA, 19 nt, Artificial Sequence
  Description of Artificial Sequence: Synthetic oligonucleotide
aauccuuccugcucguauu

SEQ ID NO: 588594 - RNA, 19 nt, Artificial Sequence
  Description of Artificial Sequence: Synthetic oligonucleotide
aaggucaggagcagaaacu

SEQ ID NO: 588595 - RNA, 19 nt, Artificial Sequence
  Description of Artificial Sequence: Synthetic oligonucleotide
uguccauuaacaggaagau

SEQ ID NO: 588596 - RNA, 19 nt, Artificial Sequence
  Description of Artificial Sequence: Synthetic oligonucleotide
ggaagguaaauccuuccug

SEQ ID NO: 588597 - RNA, 19 nt, Artificial Sequence
  Description of Artificial Sequence: Synthetic oligonucleotide
acuguucuuaccggucgcc

SEQ ID NO: 588598 - RNA, 19 nt, Artificial Sequence
  Description of Artificial Sequence: Synthetic oligonucleotide
acggaugacucagccagcc

SEQ ID NO: 588599 - RNA, 19 nt, Artificial Sequence
  Description of Artificial Sequence: Synthetic oligonucleotide
cuuggaagaaaucacugua

SEQ ID NO: 588600 - RNA, 19 nt, Artificial Sequence
  Description of Artificial Sequence: Synthetic oligonucleotide
ugggagguucauucaugcg

SEQ ID NO: 588601 - RNA, 19 nt, Artificial Sequence
  Description of Artificial Sequence: Synthetic oligonucleotide
uagaccggcagagucacca

SEQ ID NO: 588602 - RNA, 19 nt, Artificial Sequence
  Description of Artificial Sequence: Synthetic oligonucleotide
cuuuaggacaaucugggcu

SEQ ID NO: 588603 - RNA, 19 nt, Artificial Sequence
  Description of Artificial Sequence: Synthetic oligonucleotide
ggaucguacacaccaacug

SEQ ID NO: 588604 - RNA, 19 nt, Artificial Sequence
  Description of Artificial Sequence: Synthetic oligonucleotide
cacuccgggaaauauuuuc

SEQ ID NO: 588605 - RNA, 19 nt, Artificial Sequence
  Description of Artificial Sequence: Synthetic oligonucleotide
ugggagucucauccaggcg

SEQ ID NO: 588606 - RNA, 19 nt, Artificial Sequence
  Description of Artificial Sequence: Synthetic oligonucleotide
cauuacaucccagggugcc

SEQ ID NO: 588607 - RNA, 19 nt, Artificial Sequence
  Description of Artificial Sequence: Synthetic oligonucleotide
agaaguaugguagggccgu

SEQ ID NO: 588608 - RNA, 19 nt, Artificial Sequence
  Description of Artificial Sequence: Synthetic oligonucleotide
agaucucguuugcugacug

SEQ ID NO: 588609 - RNA, 19 nt, Artificial Sequence
  Description of Artificial Sequence: Synthetic oligonucleotide
guauccagggauguuagca

SEQ ID NO: 588610 - RNA, 19 nt, Artificial Sequence
  Description of Artificial Sequence: Synthetic oligonucleotide
aucgaaccgugacagaaau

SEQ ID NO: 588611 - RNA, 19 nt, Artificial Sequence
  Description of Artificial Sequence: Synthetic oligonucleotide
ggugccauaagguggcuug

SEQ ID NO: 588612 - RNA, 19 nt, Artificial Sequence
  Description of Artificial Sequence: Synthetic oligonucleotide
uaucgaaccgugacagaaa

SEQ ID NO: 588613 - RNA, 19 nt, Artificial Sequence
  Description of Artificial Sequence: Synthetic oligonucleotide
aggagcaugggguuuucga

SEQ ID NO: 588614 - RNA, 19 nt, Artificial Sequence
  Description of Artificial Sequence: Synthetic oligonucleotide
gaaauccccggaucuggug

SEQ ID NO: 588615 - RNA, 19 nt, Artificial Sequence
  Description of Artificial Sequence: Synthetic oligonucleotide
ccugcaaucacugccaggc

SEQ ID NO: 588616 - RNA, 19 nt, Artificial Sequence
  Description of Artificial Sequence: Synthetic oligonucleotide
gucaucguacuugauuaag

SEQ ID NO: 588617 - RNA, 19 nt, Artificial Sequence
  Description of Artificial Sequence: Synthetic oligonucleotide
aaacgccaggcugacagga

SEQ ID NO: 588618 - RNA, 19 nt, Artificial Sequence
  Description of Artificial Sequence: Synthetic oligonucleotide
agucucauccaggcgguac

SEQ ID NO: 588619 - RNA, 19 nt, Artificial Sequence
  Description of Artificial Sequence: Synthetic oligonucleotide
gacagaaauccccggaucu

SEQ ID NO: 588620 - RNA, 19 nt, Artificial Sequence
  Description of Artificial Sequence: Synthetic oligonucleotide
cgaaccgugacagaaaucc

SEQ ID NO: 588621 - RNA, 19 nt, Artificial Sequence
  Description of Artificial Sequence: Synthetic oligonucleotide
ggcuagguuacagggaucg

SEQ ID NO: 588622 - RNA, 19 nt, Artificial Sequence
  Description of Artificial Sequence: Synthetic oligonucleotide
guacuuaaaagccuccagu

SEQ ID NO: 588623 - RNA, 19 nt, Artificial Sequence
  Description of Artificial Sequence: Synthetic oligonucleotide
caucgggaugcucauguug

SEQ ID NO: 588624 - RNA, 19 nt, Artificial Sequence
  Description of Artificial Sequence: Synthetic oligonucleotide
gaucguacacaccaacugu

SEQ ID NO: 588625 - RNA, 19 nt, Artificial Sequence
  Description of Artificial Sequence: Synthetic oligonucleotide
agcgugacaucagagaaau

SEQ ID NO: 588626 - RNA, 19 nt, Artificial Sequence
  Description of Artificial Sequence: Synthetic oligonucleotide
ugaaucuccuggagccacc

SEQ ID NO: 588627 - RNA, 19 nt, Artificial Sequence
  Description of Artificial Sequence: Synthetic oligonucleotide
ggaucuguuuuggugaaag

SEQ ID NO: 588628 - RNA, 19 nt, Artificial Sequence
  Description of Artificial Sequence: Synthetic oligonucleotide
accgugacagaaauccccg

SEQ ID NO: 588629 - RNA, 19 nt, Artificial Sequence
  Description of Artificial Sequence: Synthetic oligonucleotide
gaauuagagggaugcucuc

SEQ ID NO: 588630 - RNA, 19 nt, Artificial Sequence
  Description of Artificial Sequence: Synthetic oligonucleotide
ccacggaugacucagccag

SEQ ID NO: 588631 - RNA, 19 nt, Artificial Sequence
  Description of Artificial Sequence: Synthetic oligonucleotide
uguauccagggauguuagc

SEQ ID NO: 588632 - RNA, 19 nt, Artificial Sequence
  Description of Artificial Sequence: Synthetic oligonucleotide
guuacagggaucguacaca

SEQ ID NO: 588633 - RNA, 19 nt, Artificial Sequence
  Description of Artificial Sequence: Synthetic oligonucleotide
gagcaugggguuuucgaga

SEQ ID NO: 588634 - RNA, 19 nt, Artificial Sequence
  Description of Artificial Sequence: Synthetic oligonucleotide
aggcacuugacagacacaa

SEQ ID NO: 588635 - RNA, 19 nt, Artificial Sequence
  Description of Artificial Sequence: Synthetic oligonucleotide
aucgccaacacaucagcuu

SEQ ID NO: 588636 - RNA, 19 nt, Artificial Sequence
  Description of Artificial Sequence: Synthetic oligonucleotide
aggcgguacucauucaacu

SEQ ID NO: 588637 - RNA, 19 nt, Artificial Sequence
  Description of Artificial Sequence: Synthetic oligonucleotide
aggacauuaucgaaccgug

SEQ ID NO: 588638 - RNA, 19 nt, Artificial Sequence
  Description of Artificial Sequence: Synthetic oligonucleotide
gaguaggagaucuuggcau

SEQ ID NO: 588639 - RNA, 19 nt, Artificial Sequence
  Description of Artificial Sequence: Synthetic oligonucleotide
uccggucucugguugaauc

SEQ ID NO: 588640 - RNA, 19 nt, Artificial Sequence
  Description of Artificial Sequence: Synthetic oligonucleotide
agcguguggguagaccggc

SEQ ID NO: 588641 - RNA, 19 nt, Artificial Sequence
  Description of Artificial Sequence: Synthetic oligonucleotide
guagggaccaaucgccaac

SEQ ID NO: 588642 - RNA, 19 nt, Artificial Sequence
  Description of Artificial Sequence: Synthetic oligonucleotide
ucguauugaucaagaacuu

SEQ ID NO: 588643 - RNA, 19 nt, Artificial Sequence
  Description of Artificial Sequence: Synthetic oligonucleotide
ccaauaguagaagugguac

SEQ ID NO: 588644 - RNA, 19 nt, Artificial Sequence
  Description of Artificial Sequence: Synthetic oligonucleotide
cuccgggaaauauuuucug

SEQ ID NO: 588645 - RNA, 19 nt, Artificial Sequence
  Description of Artificial Sequence: Synthetic oligonucleotide
acaggauguccuggcaucg

SEQ ID NO: 588646 - RNA, 19 nt, Artificial Sequence
  Description of Artificial Sequence: Synthetic oligonucleotide
auggugcggucucgaaagc

SEQ ID NO: 588647 - RNA, 19 nt, Artificial Sequence
  Description of Artificial Sequence: Synthetic oligonucleotide
ucucgaaagcagaggacuu

SEQ ID NO: 588648 - RNA, 19 nt, Artificial Sequence
  Description of Artificial Sequence: Synthetic oligonucleotide
aagccuacaggccccugaa

SEQ ID NO: 588649 - RNA, 19 nt, Artificial Sequence
  Description of Artificial Sequence: Synthetic oligonucleotide
aaucgccaacacaucagcu

SEQ ID NO: 588650 - RNA, 19 nt, Artificial Sequence
  Description of Artificial Sequence: Synthetic oligonucleotide
accagcacgguguugucau

SEQ ID NO: 588651 - RNA, 19 nt, Artificial Sequence
  Description of Artificial Sequence: Synthetic oligonucleotide
agauucagauccacggaug

SEQ ID NO: 588652 - RNA, 19 nt, Artificial Sequence
  Description of Artificial Sequence: Synthetic oligonucleotide
ugucaaaccccagggcagc

SEQ ID NO: 588653 - RNA, 19 nt, Artificial Sequence
  Description of Artificial Sequence: Synthetic oligonucleotide
aauaacagccaagcuugua

SEQ ID NO: 588654 - RNA, 19 nt, Artificial Sequence
  Description of Artificial Sequence: Synthetic oligonucleotide
gguuacagggaucguacac

SEQ ID NO: 588655 - RNA, 19 nt, Artificial Sequence
  Description of Artificial Sequence: Synthetic oligonucleotide
cuuugggcuugccaccagc

SEQ ID NO: 588656 - RNA, 19 nt, Artificial Sequence
  Description of Artificial Sequence: Synthetic oligonucleotide
ucugcgugccugcuccagc

SEQ ID NO: 588657 - RNA, 19 nt, Artificial Sequence
  Description of Artificial Sequence: Synthetic oligonucleotide
aucgggaugcucauguuga

SEQ ID NO: 588658 - RNA, 19 nt, Artificial Sequence
  Description of Artificial Sequence: Synthetic oligonucleotide
cuggcauucacuccgggaa

SEQ ID NO: 588659 - RNA, 19 nt, Artificial Sequence
  Description of Artificial Sequence: Synthetic oligonucleotide
caugacaacaaagguguca

SEQ ID NO: 588660 - RNA, 19 nt, Artificial Sequence
  Description of Artificial Sequence: Synthetic oligonucleotide
ugccauaagguggcuuggg

SEQ ID NO: 588661 - RNA, 19 nt, Artificial Sequence
  Description of Artificial Sequence: Synthetic oligonucleotide
agagggaugcucucaggaa

SEQ ID NO: 588662 - RNA, 19 nt, Artificial Sequence
  Description of Artificial Sequence: Synthetic oligonucleotide
ugucaucguacuugauuaa

SEQ ID NO: 588663 - RNA, 19 nt, Artificial Sequence
  Description of Artificial Sequence: Synthetic oligonucleotide
ucagguccgcaaaggucag

SEQ ID NO: 588664 - RNA, 19 nt, Artificial Sequence
  Description of Artificial Sequence: Synthetic oligonucleotide
gagauucagauccacggau

SEQ ID NO: 588665 - RNA, 19 nt, Artificial Sequence
  Description of Artificial Sequence: Synthetic oligonucleotide
caugggguuuucgagagca

SEQ ID NO: 588666 - RNA, 19 nt, Artificial Sequence
  Description of Artificial Sequence: Synthetic oligonucleotide
ucguacacaccaacuguua

SEQ ID NO: 588667 - RNA, 19 nt, Artificial Sequence
  Description of Artificial Sequence: Synthetic oligonucleotide
ggucaguucaugccagaag

SEQ ID NO: 588668 - RNA, 19 nt, Artificial Sequence
  Description of Artificial Sequence: Synthetic oligonucleotide
ugugguugccucagacggu

SEQ ID NO: 588669 - RNA, 19 nt, Artificial Sequence
  Description of Artificial Sequence: Synthetic oligonucleotide
gcugugguugccucagacg

SEQ ID NO: 588670 - RNA, 19 nt, Artificial Sequence
  Description of Artificial Sequence: Synthetic oligonucleotide
agacuggaaacugccgcuc

SEQ ID NO: 588671 - RNA, 19 nt, Artificial Sequence
  Description of Artificial Sequence: Synthetic oligonucleotide
cuacaggccccugaauuag

SEQ ID NO: 588672 - RNA, 19 nt, Artificial Sequence
  Description of Artificial Sequence: Synthetic oligonucleotide
ugcucguauugaucaagaa

SEQ ID NO: 588673 - RNA, 19 nt, Artificial Sequence
  Description of Artificial Sequence: Synthetic oligonucleotide
ugguguuguacaggguccc

SEQ ID NO: 588674 - RNA, 19 nt, Artificial Sequence
  Description of Artificial Sequence: Synthetic oligonucleotide
caaacgccaggcugacagg

SEQ ID NO: 588675 - RNA, 19 nt, Artificial Sequence
  Description of Artificial Sequence: Synthetic oligonucleotide
aaguaugguagggccguga

SEQ ID NO: 588676 - RNA, 19 nt, Artificial Sequence
  Description of Artificial Sequence: Synthetic oligonucleotide
gcucucaaugagcuguucc

SEQ ID NO: 588677 - RNA, 19 nt, Artificial Sequence
  Description of Artificial Sequence: Synthetic oligonucleotide
cuguucuuaccggucgccg

SEQ ID NO: 588678 - RNA, 19 nt, Artificial Sequence
  Description of Artificial Sequence: Synthetic oligonucleotide
gaaccgugacagaaauccc

SEQ ID NO: 588679 - RNA, 19 nt, Artificial Sequence
  Description of Artificial Sequence: Synthetic oligonucleotide
cauccgcugagguucacca

SEQ ID NO: 588680 - RNA, 19 nt, Artificial Sequence
  Description of Artificial Sequence: Synthetic oligonucleotide
agggaccaaucgccaacac

SEQ ID NO: 588681 - RNA, 19 nt, Artificial Sequence
  Description of Artificial Sequence: Synthetic oligonucleotide
ucgucacucaugucccaga

SEQ ID NO: 588682 - RNA, 19 nt, Artificial Sequence
  Description of Artificial Sequence: Synthetic oligonucleotide
cauuaacaggaagaugaca

SEQ ID NO: 588683 - RNA, 19 nt, Artificial Sequence
  Description of Artificial Sequence: Synthetic oligonucleotide
caaaggugucaaaccccag

SEQ ID NO: 588684 - RNA, 19 nt, Artificial Sequence
  Description of Artificial Sequence: Synthetic oligonucleotide
agguucauucaugcgguca

SEQ ID NO: 588685 - RNA, 19 nt, Artificial Sequence
  Description of Artificial Sequence: Synthetic oligonucleotide
uccaggauacugggcuagg

SEQ ID NO: 588686 - RNA, 19 nt, Artificial Sequence
  Description of Artificial Sequence: Synthetic oligonucleotide
uggagccaccacgucauug

SEQ ID NO: 588687 - RNA, 19 nt, Artificial Sequence
  Description of Artificial Sequence: Synthetic oligonucleotide
agcguccggucucugguug

SEQ ID NO: 588688 - RNA, 19 nt, Artificial Sequence
  Description of Artificial Sequence: Synthetic oligonucleotide
agguuacagggaucguaca

SEQ ID NO: 588689 - RNA, 19 nt, Artificial Sequence
  Description of Artificial Sequence: Synthetic oligonucleotide
caauaguagaagugguacu

SEQ ID NO: 588690 - RNA, 19 nt, Artificial Sequence
  Description of Artificial Sequence: Synthetic oligonucleotide
ucgaaccgugacagaaauc

SEQ ID NO: 588691 - RNA, 19 nt, Artificial Sequence
  Description of Artificial Sequence: Synthetic oligonucleotide
uagggccgugacuccuucg

SEQ ID NO: 588692 - RNA, 19 nt, Artificial Sequence
  Description of Artificial Sequence: Synthetic oligonucleotide
ugacgccccagcccaucag

SEQ ID NO: 588693 - RNA, 19 nt, Artificial Sequence
  Description of Artificial Sequence: Synthetic oligonucleotide
cucgaaagcagaggacuuc

SEQ ID NO: 588694 - RNA, 19 nt, Artificial Sequence
  Description of Artificial Sequence: Synthetic oligonucleotide
gucucgaaagcagaggacu

SEQ ID NO: 588695 - RNA, 19 nt, Artificial Sequence
  Description of Artificial Sequence: Synthetic oligonucleotide
ugcucauguugaacccgcu

SEQ ID NO: 588696 - RNA, 19 nt, Artificial Sequence
  Description of Artificial Sequence: Synthetic oligonucleotide
ugucaaacgccaggcugac

SEQ ID NO: 588697 - RNA, 19 nt, Artificial Sequence
  Description of Artificial Sequence: Synthetic oligonucleotide
accuucgcuaggaagguaa

SEQ ID NO: 588698 - RNA, 19 nt, Artificial Sequence
  Description of Artificial Sequence: Synthetic oligonucleotide
ggcacucaugucaaaagca

SEQ ID NO: 588699 - RNA, 19 nt, Artificial Sequence
  Description of Artificial Sequence: Synthetic oligonucleotide
aucguacacaccaacuguu

SEQ ID NO: 588700 - RNA, 19 nt, Artificial Sequence
  Description of Artificial Sequence: Synthetic oligonucleotide
ggaguuaaacaccuucgcu

SEQ ID NO: 588701 - RNA, 19 nt, Artificial Sequence
  Description of Artificial Sequence: Synthetic oligonucleotide
agcuuguauccagggaugu

SEQ ID NO: 588702 - RNA, 19 nt, Artificial Sequence
  Description of Artificial Sequence: Synthetic oligonucleotide
caguucaugccagaagcca

SEQ ID NO: 588703 - RNA, 19 nt, Artificial Sequence
  Description of Artificial Sequence: Synthetic oligonucleotide
accaauaguagaaguggua

SEQ ID NO: 588704 - RNA, 19 nt, Artificial Sequence
  Description of Artificial Sequence: Synthetic oligonucleotide
cucgucacucaugucccag

SEQ ID NO: 588705 - RNA, 19 nt, Artificial Sequence
  Description of Artificial Sequence: Synthetic oligonucleotide
cugggcuaaaugccauuuc

SEQ ID NO: 588706 - RNA, 19 nt, Artificial Sequence
  Description of Artificial Sequence: Synthetic oligonucleotide
gaggagcaugggguuuucg

SEQ ID NO: 588707 - RNA, 19 nt, Artificial Sequence
  Description of Artificial Sequence: Synthetic oligonucleotide
ugucaagcguguggguaga

SEQ ID NO: 588708 - RNA, 19 nt, Artificial Sequence
  Description of Artificial Sequence: Synthetic oligonucleotide
cgggaaauauuuucuggag

SEQ ID NO: 588709 - RNA, 19 nt, Artificial Sequence
  Description of Artificial Sequence: Synthetic oligonucleotide
ggaccaaucgccaacacau

SEQ ID NO: 588710 - RNA, 19 nt, Artificial Sequence
  Description of Artificial Sequence: Synthetic oligonucleotide
uuugggugaacaggcugua

SEQ ID NO: 588711 - RNA, 19 nt, Artificial Sequence
  Description of Artificial Sequence: Synthetic oligonucleotide
uuaggacaaucugggcuaa

SEQ ID NO: 588712 - RNA, 19 nt, Artificial Sequence
  Description of Artificial Sequence: Synthetic oligonucleotide
cuagguuacagggaucgua

SEQ ID NO: 588713 - RNA, 19 nt, Artificial Sequence
  Description of Artificial Sequence: Synthetic oligonucleotide
gugccauaagguggcuugg

SEQ ID NO: 588714 - RNA, 19 nt, Artificial Sequence
  Description of Artificial Sequence: Synthetic oligonucleotide
gccauaagguggcuugggc

SEQ ID NO: 588715 - RNA, 19 nt, Artificial Sequence
  Description of Artificial Sequence: Synthetic oligonucleotide
ugacaucauggcucucaau

SEQ ID NO: 588716 - RNA, 19 nt, Artificial Sequence
  Description of Artificial Sequence: Synthetic oligonucleotide
ucacuccgggaaauauuuu

SEQ ID NO: 588717 - RNA, 19 nt, Artificial Sequence
  Description of Artificial Sequence: Synthetic oligonucleotide
auaagguggcuugggcaca

SEQ ID NO: 588718 - RNA, 19 nt, Artificial Sequence
  Description of Artificial Sequence: Synthetic oligonucleotide
gugguugccucagacgguc

SEQ ID NO: 588719 - RNA, 19 nt, Artificial Sequence
  Description of Artificial Sequence: Synthetic oligonucleotide
agaaauccccggaucuggu

SEQ ID NO: 588720 - RNA, 19 nt, Artificial Sequence
  Description of Artificial Sequence: Synthetic oligonucleotide
gguagaccggcagagucac

SEQ ID NO: 588721 - RNA, 19 nt, Artificial Sequence
  Description of Artificial Sequence: Synthetic oligonucleotide
acaccuucgcuaggaaggu

SEQ ID NO: 588722 - RNA, 19 nt, Artificial Sequence
  Description of Artificial Sequence: Synthetic oligonucleotide
auucacuccgggaaauauu

SEQ ID NO: 588723 - RNA, 19 nt, Artificial Sequence
  Description of Artificial Sequence: Synthetic oligonucleotide
gucacucaugucccagauc

SEQ ID NO: 588724 - RNA, 19 nt, Artificial Sequence
  Description of Artificial Sequence: Synthetic oligonucleotide
ccgggaaauauuuucugga

SEQ ID NO: 588725 - RNA, 19 nt, Artificial Sequence
  Description of Artificial Sequence: Synthetic oligonucleotide
ggacagaaaccaucagcuc

SEQ ID NO: 588726 - RNA, 19 nt, Artificial Sequence
  Description of Artificial Sequence: Synthetic oligonucleotide
ugugggccacaucucuguu

SEQ ID NO: 588727 - RNA, 19 nt, Artificial Sequence
  Description of Artificial Sequence: Synthetic oligonucleotide
caccugcaaucacugccag

SEQ ID NO: 588728 - RNA, 19 nt, Artificial Sequence
  Description of Artificial Sequence: Synthetic oligonucleotide
ggugggagguucauucaug

SEQ ID NO: 588729 - RNA, 19 nt, Artificial Sequence
  Description of Artificial Sequence: Synthetic oligonucleotide
cuucggcuugacacagauc

SEQ ID NO: 588730 - RNA, 19 nt, Artificial Sequence
  Description of Artificial Sequence: Synthetic oligonucleotide
gggaccaaucgccaacaca

SEQ ID NO: 588731 - RNA, 19 nt, Artificial Sequence
  Description of Artificial Sequence: Synthetic oligonucleotide
auggcuucccagaucucgu

SEQ ID NO: 588732 - RNA, 19 nt, Artificial Sequence
  Description of Artificial Sequence: Synthetic oligonucleotide
uccgcuugcuggccgcaau

SEQ ID NO: 588733 - RNA, 19 nt, Artificial Sequence
  Description of Artificial Sequence: Synthetic oligonucleotide
ugguagggccgugacuccu

SEQ ID NO: 588734 - RNA, 19 nt, Artificial Sequence
  Description of Artificial Sequence: Synthetic oligonucleotide
guguggguagaccggcaga

SEQ ID NO: 588735 - RNA, 19 nt, Artificial Sequence
  Description of Artificial Sequence: Synthetic oligonucleotide
cugcaguacuuaaaagccu

SEQ ID NO: 588736 - RNA, 19 nt, Artificial Sequence
  Description of Artificial Sequence: Synthetic oligonucleotide
ucaggccgugucucaugac

SEQ ID NO: 588737 - RNA, 19 nt, Artificial Sequence
  Description of Artificial Sequence: Synthetic oligonucleotide
ggcaucgggaugcucaugu

SEQ ID NO: 588738 - RNA, 19 nt, Artificial Sequence
  Description of Artificial Sequence: Synthetic oligonucleotide
gaccaaucgccaacacauc

SEQ ID NO: 588739 - RNA, 19 nt, Artificial Sequence
  Description of Artificial Sequence: Synthetic oligonucleotide
agguagggaccaaucgcca

SEQ ID NO: 588740 - RNA, 19 nt, Artificial Sequence
  Description of Artificial Sequence: Synthetic oligonucleotide
guuuucgagagcagugccu

SEQ ID NO: 588741 - RNA, 19 nt, Artificial Sequence
  Description of Artificial Sequence: Synthetic oligonucleotide
agacggucuccucgucacu

SEQ ID NO: 588742 - RNA, 19 nt, Artificial Sequence
  Description of Artificial Sequence: Synthetic oligonucleotide
gcggucucgaaagcagagg

SEQ ID NO: 588743 - RNA, 19 nt, Artificial Sequence
  Description of Artificial Sequence: Synthetic oligonucleotide
aacgccaggcugacaggaa

SEQ ID NO: 588744 - RNA, 19 nt, Artificial Sequence
  Description of Artificial Sequence: Synthetic oligonucleotide
guacuugauuaagaaguau

SEQ ID NO: 588745 - RNA, 19 nt, Artificial Sequence
  Description of Artificial Sequence: Synthetic oligonucleotide
uggaucuguuuuggugaaa

SEQ ID NO: 588746 - RNA, 19 nt, Artificial Sequence
  Description of Artificial Sequence: Synthetic oligonucleotide
gccaacacaucagcuugag

SEQ ID NO: 588747 - RNA, 19 nt, Artificial Sequence
  Description of Artificial Sequence: Synthetic oligonucleotide
uccccagcgcccugcugcu

SEQ ID NO: 588748 - RNA, 19 nt, Artificial Sequence
  Description of Artificial Sequence: Synthetic oligonucleotide
guaugguagggccgugacu

SEQ ID NO: 588749 - RNA, 19 nt, Artificial Sequence
  Description of Artificial Sequence: Synthetic oligonucleotide
gguagggaccaaucgccaa

SEQ ID NO: 588750 - RNA, 19 nt, Artificial Sequence
  Description of Artificial Sequence: Synthetic oligonucleotide
auccgcugagguucaccau

SEQ ID NO: 588751 - RNA, 19 nt, Artificial Sequence
  Description of Artificial Sequence: Synthetic oligonucleotide
guagggccgugacuccuuc

SEQ ID NO: 588752 - RNA, 19 nt, Artificial Sequence
  Description of Artificial Sequence: Synthetic oligonucleotide
gccugggcggcucacugug

SEQ ID NO: 588753 - RNA, 19 nt, Artificial Sequence
  Description of Artificial Sequence: Synthetic oligonucleotide
ggucucgaaagcagaggac

SEQ ID NO: 588754 - RNA, 19 nt, Artificial Sequence
  Description of Artificial Sequence: Synthetic oligonucleotide
cugggcggcucacugugca

SEQ ID NO: 588755 - RNA, 19 nt, Artificial Sequence
  Description of Artificial Sequence: Synthetic oligonucleotide
gguugccucagacggucuc

SEQ ID NO: 588756 - RNA, 19 nt, Artificial Sequence
  Description of Artificial Sequence: Synthetic oligonucleotide
guuccccugcauggugcgg

SEQ ID NO: 588757 - RNA, 19 nt, Artificial Sequence
  Description of Artificial Sequence: Synthetic oligonucleotide
aggccgugucucaugacaa

SEQ ID NO: 588758 - RNA, 19 nt, Artificial Sequence
  Description of Artificial Sequence: Synthetic oligonucleotide
cagauccacggaugacuca

SEQ ID NO: 588759 - RNA, 19 nt, Artificial Sequence
  Description of Artificial Sequence: Synthetic oligonucleotide
ggaugacucagccagccuu

SEQ ID NO: 588760 - RNA, 19 nt, Artificial Sequence
  Description of Artificial Sequence: Synthetic oligonucleotide
guaggagaucuuggcauua

SEQ ID NO: 588761 - RNA, 19 nt, Artificial Sequence
  Description of Artificial Sequence: Synthetic oligonucleotide
cucugcgugccugcuccag

SEQ ID NO: 588762 - RNA, 19 nt, Artificial Sequence
  Description of Artificial Sequence: Synthetic oligonucleotide
gacgccccagcccaucagu

SEQ ID NO: 588763 - RNA, 19 nt, Artificial Sequence
  Description of Artificial Sequence: Synthetic oligonucleotide
ccgugacagaaauccccgg

SEQ ID NO: 588764 - RNA, 19 nt, Artificial Sequence
  Description of Artificial Sequence: Synthetic oligonucleotide
ggcgaacugcagcuuggac

SEQ ID NO: 588765 - RNA, 19 nt, Artificial Sequence
  Description of Artificial Sequence: Synthetic oligonucleotide
gguguuguacagggucccc

SEQ ID NO: 588766 - RNA, 19 nt, Artificial Sequence
  Description of Artificial Sequence: Synthetic oligonucleotide
uugaacccgcuggcauuca

SEQ ID NO: 588767 - RNA, 19 nt, Artificial Sequence
  Description of Artificial Sequence: Synthetic oligonucleotide
cugcugguccagcguccgg

SEQ ID NO: 588768 - RNA, 19 nt, Artificial Sequence
  Description of Artificial Sequence: Synthetic oligonucleotide
ggacauuaucgaaccguga

SEQ ID NO: 588769 - RNA, 19 nt, Artificial Sequence
  Description of Artificial Sequence: Synthetic oligonucleotide
gaacccgcuggcauucacu

SEQ ID NO: 588770 - RNA, 19 nt, Artificial Sequence
  Description of Artificial Sequence: Synthetic oligonucleotide
gggcggggcagcaaaacca

SEQ ID NO: 588771 - RNA, 19 nt, Artificial Sequence
  Description of Artificial Sequence: Synthetic oligonucleotide
gccgugucucaugacaaca

SEQ ID NO: 588772 - RNA, 19 nt, Artificial Sequence
  Description of Artificial Sequence: Synthetic oligonucleotide
gagguucaccauccuuggu

SEQ ID NO: 588773 - RNA, 19 nt, Artificial Sequence
  Description of Artificial Sequence: Synthetic oligonucleotide
cagggaucguacacaccaa

SEQ ID NO: 588774 - RNA, 19 nt, Artificial Sequence
  Description of Artificial Sequence: Synthetic oligonucleotide
ggccgugucucaugacaac

SEQ ID NO: 588775 - RNA, 19 nt, Artificial Sequence
  Description of Artificial Sequence: Synthetic oligonucleotide
acgccccagcccaucagug

SEQ ID NO: 588776 - RNA, 19 nt, Artificial Sequence
  Description of Artificial Sequence: Synthetic oligonucleotide
ccuacaggccccugaauua

SEQ ID NO: 588777 - RNA, 19 nt, Artificial Sequence
  Description of Artificial Sequence: Synthetic oligonucleotide
caaccuuguccaaguccaa

SEQ ID NO: 588778 - RNA, 19 nt, Artificial Sequence
  Description of Artificial Sequence: Synthetic oligonucleotide
ggaucuggugaggcacaag

SEQ ID NO: 588779 - RNA, 19 nt, Artificial Sequence
  Description of Artificial Sequence: Synthetic oligonucleotide
cguguggguagaccggcag

SEQ ID NO: 588780 - RNA, 19 nt, Artificial Sequence
  Description of Artificial Sequence: Synthetic oligonucleotide
cugacgccccagcccauca

SEQ ID NO: 588781 - RNA, 19 nt, Artificial Sequence
  Description of Artificial Sequence: Synthetic oligonucleotide
cgugacagaaauccccgga

SEQ ID NO: 588782 - RNA, 19 nt, Artificial Sequence
  Description of Artificial Sequence: Synthetic oligonucleotide
gcuaggaagguaaauccuu

SEQ ID NO: 588783 - RNA, 19 nt, Artificial Sequence
  Description of Artificial Sequence: Synthetic oligonucleotide
augaugcugugggccacau

SEQ ID NO: 588784 - RNA, 19 nt, Artificial Sequence
  Description of Artificial Sequence: Synthetic oligonucleotide
cggucucgaaagcagagga

SEQ ID NO: 588785 - RNA, 19 nt, Artificial Sequence
  Description of Artificial Sequence: Synthetic oligonucleotide
gccacuguucuuaccgguc

SEQ ID NO: 588786 - RNA, 19 nt, Artificial Sequence
  Description of Artificial Sequence: Synthetic oligonucleotide
gccuacaggccccugaauu

SEQ ID NO: 588787 - RNA, 19 nt, Artificial Sequence
  Description of Artificial Sequence: Synthetic oligonucleotide
gucaagcguguggguagac

SEQ ID NO: 588788 - RNA, 19 nt, Artificial Sequence
  Description of Artificial Sequence: Synthetic oligonucleotide
ccugcauggugcggucucg

SEQ ID NO: 588789 - RNA, 19 nt, Artificial Sequence
  Description of Artificial Sequence: Synthetic oligonucleotide
gggcaccugcaaucacugc

SEQ ID NO: 588790 - RNA, 19 nt, Artificial Sequence
  Description of Artificial Sequence: Synthetic oligonucleotide
ggcgguacucauucaacuu

SEQ ID NO: 588791 - RNA, 19 nt, Artificial Sequence
  Description of Artificial Sequence: Synthetic oligonucleotide
guagaccggcagagucacc

SEQ ID NO: 588792 - RNA, 19 nt, Artificial Sequence
  Description of Artificial Sequence: Synthetic oligonucleotide
ggcuuugggcuugccacca

SEQ ID NO: 588793 - RNA, 19 nt, Artificial Sequence
  Description of Artificial Sequence: Synthetic oligonucleotide
ggccgugacuccuucggcu

SEQ ID NO: 588794 - RNA, 19 nt, Artificial Sequence
  Description of Artificial Sequence: Synthetic oligonucleotide
uuccgcuugcuggccgcaa

SEQ ID NO: 588795 - RNA, 19 nt, Artificial Sequence
  Description of Artificial Sequence: Synthetic oligonucleotide
gggucaguucaugccagaa

SEQ ID NO: 588796 - RNA, 19 nt, Artificial Sequence
  Description of Artificial Sequence: Synthetic oligonucleotide
caccggcucucucuggugu

SEQ ID NO: 588797 - RNA, 19 nt, Artificial Sequence
  Description of Artificial Sequence: Synthetic oligonucleotide
cugcauggugcggucucga

SEQ ID NO: 588798 - RNA, 19 nt, Artificial Sequence
  Description of Artificial Sequence: Synthetic oligonucleotide
ugcauccgcugagguucac

SEQ ID NO: 588799 - RNA, 19 nt, Artificial Sequence
  Description of Artificial Sequence: Synthetic oligonucleotide
gucaaacgccaggcugaca

SEQ ID NO: 588800 - RNA, 19 nt, Artificial Sequence
  Description of Artificial Sequence: Synthetic oligonucleotide
gugacuccuucggcuugac

SEQ ID NO: 588801 - RNA, 19 nt, Artificial Sequence
  Description of Artificial Sequence: Synthetic oligonucleotide
cuucgcuaggaagguaaau

SEQ ID NO: 588802 - RNA, 19 nt, Artificial Sequence
  Description of Artificial Sequence: Synthetic oligonucleotide
ccugggcggcucacugugc

SEQ ID NO: 588803 - RNA, 19 nt, Artificial Sequence
  Description of Artificial Sequence: Synthetic oligonucleotide
ccgugacuccuucggcuug

SEQ ID NO: 588804 - RNA, 19 nt, Artificial Sequence
  Description of Artificial Sequence: Synthetic oligonucleotide
ccuucgcuaggaagguaaa

SEQ ID NO: 588805 - RNA, 19 nt, Artificial Sequence
  Description of Artificial Sequence: Synthetic oligonucleotide
cggggcagcaaaaccaaua

SEQ ID NO: 588806 - RNA, 19 nt, Artificial Sequence
  Description of Artificial Sequence: Synthetic oligonucleotide
ccggucucugguugaaucu

SEQ ID NO: 588807 - RNA, 19 nt, Artificial Sequence
  Description of Artificial Sequence: Synthetic oligonucleotide
ccggaucuggugaggcaca

SEQ ID NO: 588808 - RNA, 19 nt, Artificial Sequence
  Description of Artificial Sequence: Synthetic oligonucleotide
cgcuaggaagguaaauccu

SEQ ID NO: 588809 - RNA, 19 nt, Artificial Sequence
  Description of Artificial Sequence: Synthetic oligonucleotide
gcguccggucucugguuga

SEQ ID NO: 588810 - RNA, 19 nt, Artificial Sequence
  Description of Artificial Sequence: Synthetic oligonucleotide
ccgcaaaggucaggagcag

SEQ ID NO: 588811 - RNA, 19 nt, Artificial Sequence
  Description of Artificial Sequence: Synthetic oligonucleotide
gcauucacuccgggaaaua

SEQ ID NO: 588812 - RNA, 19 nt, Artificial Sequence
  Description of Artificial Sequence: Synthetic oligonucleotide
gggcuagguuacagggauc

SEQ ID NO: 588813 - RNA, 19 nt, Artificial Sequence
  Description of Artificial Sequence: Synthetic oligonucleotide
cguacacaccaacuguuau

SEQ ID NO: 588814 - RNA, 19 nt, Artificial Sequence
  Description of Artificial Sequence: Synthetic oligonucleotide
caccuucgcuaggaaggua

SEQ ID NO: 588815 - RNA, 19 nt, Artificial Sequence
  Description of Artificial Sequence: Synthetic oligonucleotide
gcuagguuacagggaucgu

SEQ ID NO: 588816 - RNA, 19 nt, Artificial Sequence
  Description of Artificial Sequence: Synthetic oligonucleotide
ccaugcauccgcugagguu

SEQ ID NO: 588817 - RNA, 19 nt, Artificial Sequence
  Description of Artificial Sequence: Synthetic oligonucleotide
cguauugaucaagaacuuu

SEQ ID NO: 588818 - RNA, 19 nt, Artificial Sequence
  Description of Artificial Sequence: Synthetic oligonucleotide
gcguguggguagaccggca

SEQ ID NO: 588819 - RNA, 19 nt, Artificial Sequence
  Description of Artificial Sequence: Synthetic oligonucleotide
gcuuguauccagggauguu

SEQ ID NO: 588820 - RNA, 19 nt, Artificial Sequence
  Description of Artificial Sequence: Synthetic oligonucleotide
cagcguccggucucugguu

SEQ ID NO: 588821 - RNA, 19 nt, Artificial Sequence
  Description of Artificial Sequence: Synthetic oligonucleotide
ccaagccuacaggccccug

SEQ ID NO: 588822 - RNA, 19 nt, Artificial Sequence
  Description of Artificial Sequence: Synthetic oligonucleotide
gcaucgggaugcucauguu

SEQ ID NO: 588823 - RNA, 19 nt, Artificial Sequence
  Description of Artificial Sequence: Synthetic oligonucleotide
guccggucucugguugaau

SEQ ID NO: 588824 - RNA, 19 nt, Artificial Sequence
  Description of Artificial Sequence: Synthetic oligonucleotide
cgucacucaugucccagau

SEQ ID NO: 588825 - RNA, 19 nt, Artificial Sequence
  Description of Artificial Sequence: Synthetic oligonucleotide
ccggcagagucaccauugu

SEQ ID NO: 588826 - RNA, 19 nt, Artificial Sequence
  Description of Artificial Sequence: Synthetic oligonucleotide
gucugacgccccagcccau

SEQ ID NO: 588827 - RNA, 19 nt, Artificial Sequence
  Description of Artificial Sequence: Synthetic oligonucleotide
gcgugacaucagagaaauu

SEQ ID NO: 588828 - RNA, 19 nt, Artificial Sequence
  Description of Artificial Sequence: Synthetic oligonucleotide
ccccugcauggugcggucu

SEQ ID NO: 588829 - RNA, 19 nt, Artificial Sequence
  Description of Artificial Sequence: Synthetic oligonucleotide
aaacauaucauacugcugg

SEQ ID NO: 588830 - RNA, 19 nt, Artificial Sequence
  Description of Artificial Sequence: Synthetic oligonucleotide
aauuuggucagguaggugc

SEQ ID NO: 588831 - RNA, 19 nt, Artificial Sequence
  Description of Artificial Sequence: Synthetic oligonucleotide
aaugaauuuggucagguag

SEQ ID NO: 588832 - RNA, 19 nt, Artificial Sequence
  Description of Artificial Sequence: Synthetic oligonucleotide
gauaaggucgcauagcucg

SEQ ID NO: 588833 - RNA, 19 nt, Artificial Sequence
  Description of Artificial Sequence: Synthetic oligonucleotide
uguauugauaaucucccgg

SEQ ID NO: 588834 - RNA, 19 nt, Artificial Sequence
  Description of Artificial Sequence: Synthetic oligonucleotide
uauguauugauaaucuccc

SEQ ID NO: 588835 - RNA, 19 nt, Artificial Sequence
  Description of Artificial Sequence: Synthetic oligonucleotide
gauucggucauacacagcc

SEQ ID NO: 588836 - RNA, 19 nt, Artificial Sequence
  Description of Artificial Sequence: Synthetic oligonucleotide
ucaucauucaccaccgugg

SEQ ID NO: 588837 - RNA, 19 nt, Artificial Sequence
  Description of Artificial Sequence: Synthetic oligonucleotide
gaaucgaagauacaggggc

SEQ ID NO: 588838 - RNA, 19 nt, Artificial Sequence
  Description of Artificial Sequence: Synthetic oligonucleotide
uuaaacauaucauacugcu

SEQ ID NO: 588839 - RNA, 19 nt, Artificial Sequence
  Description of Artificial Sequence: Synthetic oligonucleotide
agcgcggucauacacagcc

SEQ ID NO: 588840 - RNA, 19 nt, Artificial Sequence
  Description of Artificial Sequence: Synthetic oligonucleotide
guaguagucagccagggag

SEQ ID NO: 588841 - RNA, 19 nt, Artificial Sequence
  Description of Artificial Sequence: Synthetic oligonucleotide
aggaaucgaagauacaggg

SEQ ID NO: 588842 - RNA, 19 nt, Artificial Sequence
  Description of Artificial Sequence: Synthetic oligonucleotide
uuccgcaacagcuucaagg

SEQ ID NO: 588843 - RNA, 19 nt, Artificial Sequence
  Description of Artificial Sequence: Synthetic oligonucleotide
guauacacgguucugcacg

SEQ ID NO: 588844 - RNA, 19 nt, Artificial Sequence
  Description of Artificial Sequence: Synthetic oligonucleotide
aacuuggcaaaugcaaccc

SEQ ID NO: 588845 - RNA, 19 nt, Artificial Sequence
  Description of Artificial Sequence: Synthetic oligonucleotide
uauugauaaucucccgggg

SEQ ID NO: 588846 - RNA, 19 nt, Artificial Sequence
  Description of Artificial Sequence: Synthetic oligonucleotide
gucgauuucaccaagcuug

SEQ ID NO: 588847 - RNA, 19 nt, Artificial Sequence
  Description of Artificial Sequence: Synthetic oligonucleotide
guauguauugauaaucucc

SEQ ID NO: 588848 - RNA, 19 nt, Artificial Sequence
  Description of Artificial Sequence: Synthetic oligonucleotide
ucuaagaugacacgggcau

SEQ ID NO: 588849 - RNA, 19 nt, Artificial Sequence
  Description of Artificial Sequence: Synthetic oligonucleotide
ugggugacaccauagaucu

SEQ ID NO: 588850 - RNA, 19 nt, Artificial Sequence
  Description of Artificial Sequence: Synthetic oligonucleotide
agggucuuggcauauuugg

SEQ ID NO: 588851 - RNA, 19 nt, Artificial Sequence
  Description of Artificial Sequence: Synthetic oligonucleotide
aaucgaagauacaggggcc

SEQ ID NO: 588852 - RNA, 19 nt, Artificial Sequence
  Description of Artificial Sequence: Synthetic oligonucleotide
cucauuaccgugccgaacc

SEQ ID NO: 588853 - RNA, 19 nt, Artificial Sequence
  Description of Artificial Sequence: Synthetic oligonucleotide
ucagcgacuuguauacacg

SEQ ID NO: 588854 - RNA, 19 nt, Artificial Sequence
  Description of Artificial Sequence: Synthetic oligonucleotide
auguuugccagaaugcccc

SEQ ID NO: 588855 - RNA, 19 nt, Artificial Sequence
  Description of Artificial Sequence: Synthetic oligonucleotide
uucaugucauccaugccgc

SEQ ID NO: 588856 - RNA, 19 nt, Artificial Sequence
  Description of Artificial Sequence: Synthetic oligonucleotide
aaggucgcauagcucgugc

SEQ ID NO: 588857 - RNA, 19 nt, Artificial Sequence
  Description of Artificial Sequence: Synthetic oligonucleotide
acuggcaccacacgcuugc

SEQ ID NO: 588858 - RNA, 19 nt, Artificial Sequence
  Description of Artificial Sequence: Synthetic oligonucleotide
acagccauagcauggcggg

SEQ ID NO: 588859 - RNA, 19 nt, Artificial Sequence
  Description of Artificial Sequence: Synthetic oligonucleotide
cauauuuggguggacagcc

SEQ ID NO: 588860 - RNA, 19 nt, Artificial Sequence
  Description of Artificial Sequence: Synthetic oligonucleotide
ucgaacuggcaucacagug

SEQ ID NO: 588861 - RNA, 19 nt, Artificial Sequence
  Description of Artificial Sequence: Synthetic oligonucleotide
ucuagugccugcucgaaga

SEQ ID NO: 588862 - RNA, 19 nt, Artificial Sequence
  Description of Artificial Sequence: Synthetic oligonucleotide
uuccagucggacuucauug

SEQ ID NO: 588863 - RNA, 19 nt, Artificial Sequence
  Description of Artificial Sequence: Synthetic oligonucleotide
aagggguccgacugucugc

SEQ ID NO: 588864 - RNA, 19 nt, Artificial Sequence
  Description of Artificial Sequence: Synthetic oligonucleotide
uguggcuauucgcaggucc

SEQ ID NO: 588865 - RNA, 19 nt, Artificial Sequence
  Description of Artificial Sequence: Synthetic oligonucleotide
gaugccacgagugugggug

SEQ ID NO: 588866 - RNA, 19 nt, Artificial Sequence
  Description of Artificial Sequence: Synthetic oligonucleotide
gcguaaagcagguauaggg

SEQ ID NO: 588867 - RNA, 19 nt, Artificial Sequence
  Description of Artificial Sequence: Synthetic oligonucleotide
uucuggcgcagcaagacgc

SEQ ID NO: 588868 - RNA, 19 nt, Artificial Sequence
  Description of Artificial Sequence: Synthetic oligonucleotide
cacaucucgagccuucucg

SEQ ID NO: 588869 - RNA, 19 nt, Artificial Sequence
  Description of Artificial Sequence: Synthetic oligonucleotide
ugagaugccacgcucguau

SEQ ID NO: 588870 - RNA, 19 nt, Artificial Sequence
  Description of Artificial Sequence: Synthetic oligonucleotide
caggaaucgaagauacagg

SEQ ID NO: 588871 - RNA, 19 nt, Artificial Sequence
  Description of Artificial Sequence: Synthetic oligonucleotide
gacacauugggccacuuga

SEQ ID NO: 588872 - RNA, 19 nt, Artificial Sequence
  Description of Artificial Sequence: Synthetic oligonucleotide
uauacacgguucugcacgg

SEQ ID NO: 588873 - RNA, 19 nt, Artificial Sequence
  Description of Artificial Sequence: Synthetic oligonucleotide
cauguuugccagaaugccc

SEQ ID NO: 588874 - RNA, 19 nt, Artificial Sequence
  Description of Artificial Sequence: Synthetic oligonucleotide
cuuguauacacgguucugc

SEQ ID NO: 588875 - RNA, 19 nt, Artificial Sequence
  Description of Artificial Sequence: Synthetic oligonucleotide
cauugggccacuugaacag

SEQ ID NO: 588876 - RNA, 19 nt, Artificial Sequence
  Description of Artificial Sequence: Synthetic oligonucleotide
uagcgggcaaugaauuugg

SEQ ID NO: 588877 - RNA, 19 nt, Artificial Sequence
  Description of Artificial Sequence: Synthetic oligonucleotide
gaugcgagagugcugugug

SEQ ID NO: 588878 - RNA, 19 nt, Artificial Sequence
  Description of Artificial Sequence: Synthetic oligonucleotide
uccuuuaggcuuccaaaca

SEQ ID NO: 588879 - RNA, 19 nt, Artificial Sequence
  Description of Artificial Sequence: Synthetic oligonucleotide
uguauguauugauaaucuc

SEQ ID NO: 588880 - RNA, 19 nt, Artificial Sequence
  Description of Artificial Sequence: Synthetic oligonucleotide
aguauuguacguggccugc

SEQ ID NO: 588881 - RNA, 19 nt, Artificial Sequence
  Description of Artificial Sequence: Synthetic oligonucleotide
ugaguauuguacguggccu

SEQ ID NO: 588882 - RNA, 19 nt, Artificial Sequence
  Description of Artificial Sequence: Synthetic oligonucleotide
uucagcgacuuguauacac

SEQ ID NO: 588883 - RNA, 19 nt, Artificial Sequence
  Description of Artificial Sequence: Synthetic oligonucleotide
agguauagggucuuggcau

SEQ ID NO: 588884 - RNA, 19 nt, Artificial Sequence
  Description of Artificial Sequence: Synthetic oligonucleotide
auaucauacugcugggcug

SEQ ID NO: 588885 - RNA, 19 nt, Artificial Sequence
  Description of Artificial Sequence: Synthetic oligonucleotide
uuggucgacuggaaggugc

SEQ ID NO: 588886 - RNA, 19 nt, Artificial Sequence
  Description of Artificial Sequence: Synthetic oligonucleotide
gaagcuguagauagcccgg

SEQ ID NO: 588887 - RNA, 19 nt, Artificial Sequence
  Description of Artificial Sequence: Synthetic oligonucleotide
guaaagcagguauaggguc

SEQ ID NO: 588888 - RNA, 19 nt, Artificial Sequence
  Description of Artificial Sequence: Synthetic oligonucleotide
acauaucauacugcugggc

SEQ ID NO: 588889 - RNA, 19 nt, Artificial Sequence
  Description of Artificial Sequence: Synthetic oligonucleotide
cacggaugaugcuacauug

SEQ ID NO: 588890 - RNA, 19 nt, Artificial Sequence
  Description of Artificial Sequence: Synthetic oligonucleotide
gaugcaucacuccucacaa

SEQ ID NO: 588891 - RNA, 19 nt, Artificial Sequence
  Description of Artificial Sequence: Synthetic oligonucleotide
ucgcaggcacaucucacgg

SEQ ID NO: 588892 - RNA, 19 nt, Artificial Sequence
  Description of Artificial Sequence: Synthetic oligonucleotide
guagaugccacgagugugg

SEQ ID NO: 588893 - RNA, 19 nt, Artificial Sequence
  Description of Artificial Sequence: Synthetic oligonucleotide
auacugcugggcuggcucc

SEQ ID NO: 588894 - RNA, 19 nt, Artificial Sequence
  Description of Artificial Sequence: Synthetic oligonucleotide
agcggguaagcccaccacg

SEQ ID NO: 588895 - RNA, 19 nt, Artificial Sequence
  Description of Artificial Sequence: Synthetic oligonucleotide
aagcggguaagcccaccac

SEQ ID NO: 588896 - RNA, 19 nt, Artificial Sequence
  Description of Artificial Sequence: Synthetic oligonucleotide
ucgauuucaccaagcuugc

SEQ ID NO: 588897 - RNA, 19 nt, Artificial Sequence
  Description of Artificial Sequence: Synthetic oligonucleotide
ucugcaaaucgcaggcaca

SEQ ID NO: 588898 - RNA, 19 nt, Artificial Sequence
  Description of Artificial Sequence: Synthetic oligonucleotide
gcaggaaucgaagauacag

SEQ ID NO: 588899 - RNA, 19 nt, Artificial Sequence
  Description of Artificial Sequence: Synthetic oligonucleotide
ucuuguucugggcccuagg

SEQ ID NO: 588900 - RNA, 19 nt, Artificial Sequence
  Description of Artificial Sequence: Synthetic oligonucleotide
agcuuuccgcaacagcuuc

SEQ ID NO: 588901 - RNA, 19 nt, Artificial Sequence
  Description of Artificial Sequence: Synthetic oligonucleotide
gaugacaaucuguggugug

SEQ ID NO: 588902 - RNA, 19 nt, Artificial Sequence
  Description of Artificial Sequence: Synthetic oligonucleotide
gaguauuguacguggccug

SEQ ID NO: 588903 - RNA, 19 nt, Artificial Sequence
  Description of Artificial Sequence: Synthetic oligonucleotide
cacagccauagcauggcgg

SEQ ID NO: 588904 - RNA, 19 nt, Artificial Sequence
  Description of Artificial Sequence: Synthetic oligonucleotide
auagcgggcaaugaauuug

SEQ ID NO: 588905 - RNA, 19 nt, Artificial Sequence
  Description of Artificial Sequence: Synthetic oligonucleotide
uguauacacgguucugcac

SEQ ID NO: 588906 - RNA, 19 nt, Artificial Sequence
  Description of Artificial Sequence: Synthetic oligonucleotide
cagcgacuuguauacacgg

SEQ ID NO: 588907 - RNA, 19 nt, Artificial Sequence
  Description of Artificial Sequence: Synthetic oligonucleotide
uuugccagaaugccccagu

SEQ ID NO: 588908 - RNA, 19 nt, Artificial Sequence
  Description of Artificial Sequence: Synthetic oligonucleotide
auacacagccauagcaugg

SEQ ID NO: 588909 - RNA, 19 nt, Artificial Sequence
  Description of Artificial Sequence: Synthetic oligonucleotide
ucggacuucauugggcucc

SEQ ID NO: 588910 - RNA, 19 nt, Artificial Sequence
  Description of Artificial Sequence: Synthetic oligonucleotide
ugucugacacauugggcca

SEQ ID NO: 588911 - RNA, 19 nt, Artificial Sequence
  Description of Artificial Sequence: Synthetic oligonucleotide
ugugcguaaagcagguaua

SEQ ID NO: 588912 - RNA, 19 nt, Artificial Sequence
  Description of Artificial Sequence: Synthetic oligonucleotide
gagauaaggucgcauagcu

SEQ ID NO: 588913 - RNA, 19 nt, Artificial Sequence
  Description of Artificial Sequence: Synthetic oligonucleotide
guugaccugaguauuguac

SEQ ID NO: 588914 - RNA, 19 nt, Artificial Sequence
  Description of Artificial Sequence: Synthetic oligonucleotide
ucucgagccuucucgaagu

SEQ ID NO: 588915 - RNA, 19 nt, Artificial Sequence
  Description of Artificial Sequence: Synthetic oligonucleotide
ugcacacuccgacguaucc

SEQ ID NO: 588916 - RNA, 19 nt, Artificial Sequence
  Description of Artificial Sequence: Synthetic oligonucleotide
accgugccgaaccucaaag

SEQ ID NO: 588917 - RNA, 19 nt, Artificial Sequence
  Description of Artificial Sequence: Synthetic oligonucleotide
uauuguacguggccugcac

SEQ ID NO: 588918 - RNA, 19 nt, Artificial Sequence
  Description of Artificial Sequence: Synthetic oligonucleotide
ugaccugaguauuguacgu

SEQ ID NO: 588919 - RNA, 19 nt, Artificial Sequence
  Description of Artificial Sequence: Synthetic oligonucleotide
cuccucacaaagaagaucu

SEQ ID NO: 588920 - RNA, 19 nt, Artificial Sequence
  Description of Artificial Sequence: Synthetic oligonucleotide
aggucgcauagcucgugcc

SEQ ID NO: 588921 - RNA, 19 nt, Artificial Sequence
  Description of Artificial Sequence: Synthetic oligonucleotide
caucauucaccaccguggc

SEQ ID NO: 588922 - RNA, 19 nt, Artificial Sequence
  Description of Artificial Sequence: Synthetic oligonucleotide
ugaauuuggucagguaggu

SEQ ID NO: 588923 - RNA, 19 nt, Artificial Sequence
  Description of Artificial Sequence: Synthetic oligonucleotide
cacgccccaguucagaggc

SEQ ID NO: 588924 - RNA, 19 nt, Artificial Sequence
  Description of Artificial Sequence: Synthetic oligonucleotide
cagugagaugccacgcucg

SEQ ID NO: 588925 - RNA, 19 nt, Artificial Sequence
  Description of Artificial Sequence: Synthetic oligonucleotide
auagaucucagcagccccg

SEQ ID NO: 588926 - RNA, 19 nt, Artificial Sequence
  Description of Artificial Sequence: Synthetic oligonucleotide
agcgacgguagccucucac

SEQ ID NO: 588927 - RNA, 19 nt, Artificial Sequence
  Description of Artificial Sequence: Synthetic oligonucleotide
ugcguaaagcagguauagg

SEQ ID NO: 588928 - RNA, 19 nt, Artificial Sequence
  Description of Artificial Sequence: Synthetic oligonucleotide
cuguagauagcccgggcac

SEQ ID NO: 588929 - RNA, 19 nt, Artificial Sequence
  Description of Artificial Sequence: Synthetic oligonucleotide
gauagcccgggcacggucg

SEQ ID NO: 588930 - RNA, 19 nt, Artificial Sequence
  Description of Artificial Sequence: Synthetic oligonucleotide
ugccgcucugcccaggagc

SEQ ID NO: 588931 - RNA, 19 nt, Artificial Sequence
  Description of Artificial Sequence: Synthetic oligonucleotide
ugacacauugggccacuug

SEQ ID NO: 588932 - RNA, 19 nt, Artificial Sequence
  Description of Artificial Sequence: Synthetic oligonucleotide
auucgcagguccaggauuc

SEQ ID NO: 588933 - RNA, 19 nt, Artificial Sequence
  Description of Artificial Sequence: Synthetic oligonucleotide
ggauuugagguacucgaug

SEQ ID NO: 588934 - RNA, 19 nt, Artificial Sequence
  Description of Artificial Sequence: Synthetic oligonucleotide
gguaguuggacuugcccgc

SEQ ID NO: 588935 - RNA, 19 nt, Artificial Sequence
  Description of Artificial Sequence: Synthetic oligonucleotide
uucggucauacacagccuu

SEQ ID NO: 588936 - RNA, 19 nt, Artificial Sequence
  Description of Artificial Sequence: Synthetic oligonucleotide
ugguagcgcggucauacac

SEQ ID NO: 588937 - RNA, 19 nt, Artificial Sequence
  Description of Artificial Sequence: Synthetic oligonucleotide
ugggagauaaggucgcaua

SEQ ID NO: 588938 - RNA, 19 nt, Artificial Sequence
  Description of Artificial Sequence: Synthetic oligonucleotide
agcacucucaggacugagc

SEQ ID NO: 588939 - RNA, 19 nt, Artificial Sequence
  Description of Artificial Sequence: Synthetic oligonucleotide
aaaacgggccaggcgcaac

SEQ ID NO: 588940 - RNA, 19 nt, Artificial Sequence
  Description of Artificial Sequence: Synthetic oligonucleotide
guucuggcgcagcaagacg

SEQ ID NO: 588941 - RNA, 19 nt, Artificial Sequence
  Description of Artificial Sequence: Synthetic oligonucleotide
ugaugacaaucuguggugu

SEQ ID NO: 588942 - RNA, 19 nt, Artificial Sequence
  Description of Artificial Sequence: Synthetic oligonucleotide
gggagauaaggucgcauag

SEQ ID NO: 588943 - RNA, 19 nt, Artificial Sequence
  Description of Artificial Sequence: Synthetic oligonucleotide
gacgguagccucucacagc

SEQ ID NO: 588944 - RNA, 19 nt, Artificial Sequence
  Description of Artificial Sequence: Synthetic oligonucleotide
auuguacguggccugcaca

SEQ ID NO: 588945 - RNA, 19 nt, Artificial Sequence
  Description of Artificial Sequence: Synthetic oligonucleotide
ucacgccccaguucagagg

SEQ ID NO: 588946 - RNA, 19 nt, Artificial Sequence
  Description of Artificial Sequence: Synthetic oligonucleotide
auuaccgugccgaaccuca

SEQ ID NO: 588947 - RNA, 19 nt, Artificial Sequence
  Description of Artificial Sequence: Synthetic oligonucleotide
ugccgaaccucaaagucuu

SEQ ID NO: 588948 - RNA, 19 nt, Artificial Sequence
  Description of Artificial Sequence: Synthetic oligonucleotide
cagucggacuucauugggc

SEQ ID NO: 588949 - RNA, 19 nt, Artificial Sequence
  Description of Artificial Sequence: Synthetic oligonucleotide
uuucaccaagcuugcacuc

SEQ ID NO: 588950 - RNA, 19 nt, Artificial Sequence
  Description of Artificial Sequence: Synthetic oligonucleotide
ucgucuagucggucacugg

SEQ ID NO: 588951 - RNA, 19 nt, Artificial Sequence
  Description of Artificial Sequence: Synthetic oligonucleotide
ggcacggucgauuucacca

SEQ ID NO: 588952 - RNA, 19 nt, Artificial Sequence
  Description of Artificial Sequence: Synthetic oligonucleotide
cucguggacaugguguggg

SEQ ID NO: 588953 - RNA, 19 nt, Artificial Sequence
  Description of Artificial Sequence: Synthetic oligonucleotide
ccgccuuggacacaaagcg

SEQ ID NO: 588954 - RNA, 19 nt, Artificial Sequence
  Description of Artificial Sequence: Synthetic oligonucleotide
uucugcacgggcucugaac

SEQ ID NO: 588955 - RNA, 19 nt, Artificial Sequence
  Description of Artificial Sequence: Synthetic oligonucleotide
cacacuccgacguauccuc

SEQ ID NO: 588956 - RNA, 19 nt, Artificial Sequence
  Description of Artificial Sequence: Synthetic oligonucleotide
cugugguguggcuauucgc

SEQ ID NO: 588957 - RNA, 19 nt, Artificial Sequence
  Description of Artificial Sequence: Synthetic oligonucleotide
gaagaggucccgugcgcgc

SEQ ID NO: 588958 - RNA, 19 nt, Artificial Sequence
  Description of Artificial Sequence: Synthetic oligonucleotide
ggaaucgaagauacagggg

SEQ ID NO: 588959 - RNA, 19 nt, Artificial Sequence
  Description of Artificial Sequence: Synthetic oligonucleotide
uggcauauuuggguggaca

SEQ ID NO: 588960 - RNA, 19 nt, Artificial Sequence
  Description of Artificial Sequence: Synthetic oligonucleotide
caggauucggucauacaca

SEQ ID NO: 588961 - RNA, 19 nt, Artificial Sequence
  Description of Artificial Sequence: Synthetic oligonucleotide
gugcguaaagcagguauag

SEQ ID NO: 588962 - RNA, 19 nt, Artificial Sequence
  Description of Artificial Sequence: Synthetic oligonucleotide
agauaaggucgcauagcuc

SEQ ID NO: 588963 - RNA, 19 nt, Artificial Sequence
  Description of Artificial Sequence: Synthetic oligonucleotide
uagucggucacuggauuug

SEQ ID NO: 588964 - RNA, 19 nt, Artificial Sequence
  Description of Artificial Sequence: Synthetic oligonucleotide
gcgcucaucauucaccacc

SEQ ID NO: 588965 - RNA, 19 nt, Artificial Sequence
  Description of Artificial Sequence: Synthetic oligonucleotide
gacacggugccuguggcac

SEQ ID NO: 588966 - RNA, 19 nt, Artificial Sequence
  Description of Artificial Sequence: Synthetic oligonucleotide
ucauuaccgugccgaaccu

SEQ ID NO: 588967 - RNA, 19 nt, Artificial Sequence
  Description of Artificial Sequence: Synthetic oligonucleotide
gaccugaguauuguacgug

SEQ ID NO: 588968 - RNA, 19 nt, Artificial Sequence
  Description of Artificial Sequence: Synthetic oligonucleotide
cucuaagaugacacgggca

SEQ ID NO: 588969 - RNA, 19 nt, Artificial Sequence
  Description of Artificial Sequence: Synthetic oligonucleotide
ggcauaguugaugacaauc

SEQ ID NO: 588970 - RNA, 19 nt, Artificial Sequence
  Description of Artificial Sequence: Synthetic oligonucleotide
cucacgccccaguucagag

SEQ ID NO: 588971 - RNA, 19 nt, Artificial Sequence
  Description of Artificial Sequence: Synthetic oligonucleotide
ucgaagauacaggggccag

SEQ ID NO: 588972 - RNA, 19 nt, Artificial Sequence
  Description of Artificial Sequence: Synthetic oligonucleotide
gcaagcauggaccacaccu

SEQ ID NO: 588973 - RNA, 19 nt, Artificial Sequence
  Description of Artificial Sequence: Synthetic oligonucleotide
uuuccgcaacagcuucaag

SEQ ID NO: 588974 - RNA, 19 nt, Artificial Sequence
  Description of Artificial Sequence: Synthetic oligonucleotide
ggaugcaucacuccucaca

SEQ ID NO: 588975 - RNA, 19 nt, Artificial Sequence
  Description of Artificial Sequence: Synthetic oligonucleotide
caaaucgcaggcacaucuc

SEQ ID NO: 588976 - RNA, 19 nt, Artificial Sequence
  Description of Artificial Sequence: Synthetic oligonucleotide
cacgcuugccaggucaucc

SEQ ID NO: 588977 - RNA, 19 nt, Artificial Sequence
  Description of Artificial Sequence: Synthetic oligonucleotide
gaagcggguaagcccacca

SEQ ID NO: 588978 - RNA, 19 nt, Artificial Sequence
  Description of Artificial Sequence: Synthetic oligonucleotide
gaauuuggucagguaggug

SEQ ID NO: 588979 - RNA, 19 nt, Artificial Sequence
  Description of Artificial Sequence: Synthetic oligonucleotide
ccucgaacuggcaucacag

SEQ ID NO: 588980 - RNA, 19 nt, Artificial Sequence
  Description of Artificial Sequence: Synthetic oligonucleotide
caagggguccgacugucug

SEQ ID NO: 588981 - RNA, 19 nt, Artificial Sequence
  Description of Artificial Sequence: Synthetic oligonucleotide
agccucuguguauguauug

SEQ ID NO: 588982 - RNA, 19 nt, Artificial Sequence
  Description of Artificial Sequence: Synthetic oligonucleotide
uuaaggaguaggggccgcc

SEQ ID NO: 588983 - RNA, 19 nt, Artificial Sequence
  Description of Artificial Sequence: Synthetic oligonucleotide
acgcuguuaaggaguaggg

SEQ ID NO: 588984 - RNA, 19 nt, Artificial Sequence
  Description of Artificial Sequence: Synthetic oligonucleotide
aauucucaugccggagccu

SEQ ID NO: 588985 - RNA, 19 nt, Artificial Sequence
  Description of Artificial Sequence: Synthetic oligonucleotide
caggcgcaacuccaggucc

SEQ ID NO: 588986 - RNA, 19 nt, Artificial Sequence
  Description of Artificial Sequence: Synthetic oligonucleotide
gcaggcacaucucacgggc

SEQ ID NO: 588987 - RNA, 19 nt, Artificial Sequence
  Description of Artificial Sequence: Synthetic oligonucleotide
auuuggguggacagccauc

SEQ ID NO: 588988 - RNA, 19 nt, Artificial Sequence
  Description of Artificial Sequence: Synthetic oligonucleotide
aucgaagauacaggggcca

SEQ ID NO: 588989 - RNA, 19 nt, Artificial Sequence
  Description of Artificial Sequence: Synthetic oligonucleotide
acacgcuugugccacucgu

SEQ ID NO: 588990 - RNA, 19 nt, Artificial Sequence
  Description of Artificial Sequence: Synthetic oligonucleotide
ucuggcgcagcaagacgcu

SEQ ID NO: 588991 - RNA, 19 nt, Artificial Sequence
  Description of Artificial Sequence: Synthetic oligonucleotide
gguccgacugucugcacag

SEQ ID NO: 588992 - RNA, 19 nt, Artificial Sequence
  Description of Artificial Sequence: Synthetic oligonucleotide
uggcgcagcaagacgcugu

SEQ ID NO: 588993 - RNA, 19 nt, Artificial Sequence
  Description of Artificial Sequence: Synthetic oligonucleotide
ggagauaaggucgcauagc

SEQ ID NO: 588994 - RNA, 19 nt, Artificial Sequence
  Description of Artificial Sequence: Synthetic oligonucleotide
cauagcucgugccacagcu

SEQ ID NO: 588995 - RNA, 19 nt, Artificial Sequence
  Description of Artificial Sequence: Synthetic oligonucleotide
uagaucucagcagccccgc

SEQ ID NO: 588996 - RNA, 19 nt, Artificial Sequence
  Description of Artificial Sequence: Synthetic oligonucleotide
auuuggucagguaggugcu

SEQ ID NO: 588997 - RNA, 19 nt, Artificial Sequence
  Description of Artificial Sequence: Synthetic oligonucleotide
uguuugccagaaugcccca

SEQ ID NO: 588998 - RNA, 19 nt, Artificial Sequence
  Description of Artificial Sequence: Synthetic oligonucleotide
ggugaagcggguaagccca

SEQ ID NO: 588999 - RNA, 19 nt, Artificial Sequence
  Description of Artificial Sequence: Synthetic oligonucleotide
cgcucguaugccuugaagc

SEQ ID NO: 589000 - RNA, 19 nt, Artificial Sequence
  Description of Artificial Sequence: Synthetic oligonucleotide
uccgacguauccucagcau

SEQ ID NO: 589001 - RNA, 19 nt, Artificial Sequence
  Description of Artificial Sequence: Synthetic oligonucleotide
agccaucuagugccugcuc

SEQ ID NO: 589002 - RNA, 19 nt, Artificial Sequence
  Description of Artificial Sequence: Synthetic oligonucleotide
agaugcgagagugcugugu

SEQ ID NO: 589003 - RNA, 19 nt, Artificial Sequence
  Description of Artificial Sequence: Synthetic oligonucleotide
guaagcccaccacggauga

SEQ ID NO: 589004 - RNA, 19 nt, Artificial Sequence
  Description of Artificial Sequence: Synthetic oligonucleotide
gguaagcccaccacggaug

SEQ ID NO: 589005 - RNA, 19 nt, Artificial Sequence
  Description of Artificial Sequence: Synthetic oligonucleotide
ucgcagguccaggauucgg

SEQ ID NO: 589006 - RNA, 19 nt, Artificial Sequence
  Description of Artificial Sequence: Synthetic oligonucleotide
ggugucagucuuccuuuag

SEQ ID NO: 589007 - RNA, 19 nt, Artificial Sequence
  Description of Artificial Sequence: Synthetic oligonucleotide
cacgcuugugccacucgug

SEQ ID NO: 589008 - RNA, 19 nt, Artificial Sequence
  Description of Artificial Sequence: Synthetic oligonucleotide
aacgggccaggcgcaacuc

SEQ ID NO: 589009 - RNA, 19 nt, Artificial Sequence
  Description of Artificial Sequence: Synthetic oligonucleotide
aagaggucccgugcgcgcu

SEQ ID NO: 589010 - RNA, 19 nt, Artificial Sequence
  Description of Artificial Sequence: Synthetic oligonucleotide
ccauguuugccagaaugcc

SEQ ID NO: 589011 - RNA, 19 nt, Artificial Sequence
  Description of Artificial Sequence: Synthetic oligonucleotide
agccucgucuagucgguca

SEQ ID NO: 589012 - RNA, 19 nt, Artificial Sequence
  Description of Artificial Sequence: Synthetic oligonucleotide
cucgucuagucggucacug

SEQ ID NO: 589013 - RNA, 19 nt, Artificial Sequence
  Description of Artificial Sequence: Synthetic oligonucleotide
cacggucgauuucaccaag

SEQ ID NO: 589014 - RNA, 19 nt, Artificial Sequence
  Description of Artificial Sequence: Synthetic oligonucleotide
gcuugugccacucguggac

SEQ ID NO: 589015 - RNA, 19 nt, Artificial Sequence
  Description of Artificial Sequence: Synthetic oligonucleotide
uucgcagguccaggauucg

SEQ ID NO: 589016 - RNA, 19 nt, Artificial Sequence
  Description of Artificial Sequence: Synthetic oligonucleotide
ugggagcgcaggaaucgaa

SEQ ID NO: 589017 - RNA, 19 nt, Artificial Sequence
  Description of Artificial Sequence: Synthetic oligonucleotide
gcaaaucgcaggcacaucu

SEQ ID NO: 589018 - RNA, 19 nt, Artificial Sequence
  Description of Artificial Sequence: Synthetic oligonucleotide
uccucauuaccgugccgaa

SEQ ID NO: 589019 - RNA, 19 nt, Artificial Sequence
  Description of Artificial Sequence: Synthetic oligonucleotide
uggacaugguguggguucu

SEQ ID NO: 589020 - RNA, 19 nt, Artificial Sequence
  Description of Artificial Sequence: Synthetic oligonucleotide
gaagauacaggggccagau

SEQ ID NO: 589021 - RNA, 19 nt, Artificial Sequence
  Description of Artificial Sequence: Synthetic oligonucleotide
ucgcauagcucgugccaca

SEQ ID NO: 589022 - RNA, 19 nt, Artificial Sequence
  Description of Artificial Sequence: Synthetic oligonucleotide
cccgccuuggacacaaagc

SEQ ID NO: 589023 - RNA, 19 nt, Artificial Sequence
  Description of Artificial Sequence: Synthetic oligonucleotide
gcuguagauagcccgggca

SEQ ID NO: 589024 - RNA, 19 nt, Artificial Sequence
  Description of Artificial Sequence: Synthetic oligonucleotide
cucgugccacagcugguag

SEQ ID NO: 589025 - RNA, 19 nt, Artificial Sequence
  Description of Artificial Sequence: Synthetic oligonucleotide
agcgcaggaaucgaagaua

SEQ ID NO: 589026 - RNA, 19 nt, Artificial Sequence
  Description of Artificial Sequence: Synthetic oligonucleotide
cgagagugcugugugaugg

SEQ ID NO: 589027 - RNA, 19 nt, Artificial Sequence
  Description of Artificial Sequence: Synthetic oligonucleotide
ggucuuggcauauuugggu

SEQ ID NO: 589028 - RNA, 19 nt, Artificial Sequence
  Description of Artificial Sequence: Synthetic oligonucleotide
uaccgugccgaaccucaaa

SEQ ID NO: 589029 - RNA, 19 nt, Artificial Sequence
  Description of Artificial Sequence: Synthetic oligonucleotide
gucgcauagcucgugccac

SEQ ID NO: 589030 - RNA, 19 nt, Artificial Sequence
  Description of Artificial Sequence: Synthetic oligonucleotide
ucgugccacagcugguagu

SEQ ID NO: 589031 - RNA, 19 nt, Artificial Sequence
  Description of Artificial Sequence: Synthetic oligonucleotide
guaguuggacuugcccgcc

SEQ ID NO: 589032 - RNA, 19 nt, Artificial Sequence
  Description of Artificial Sequence: Synthetic oligonucleotide
gaagcgacgguagccucuc

SEQ ID NO: 589033 - RNA, 19 nt, Artificial Sequence
  Description of Artificial Sequence: Synthetic oligonucleotide
cacagccuuggucgacugg

SEQ ID NO: 589034 - RNA, 19 nt, Artificial Sequence
  Description of Artificial Sequence: Synthetic oligonucleotide
cugugcguaaagcagguau

SEQ ID NO: 589035 - RNA, 19 nt, Artificial Sequence
  Description of Artificial Sequence: Synthetic oligonucleotide
gcuauucgcagguccagga

SEQ ID NO: 589036 - RNA, 19 nt, Artificial Sequence
  Description of Artificial Sequence: Synthetic oligonucleotide
ucugggagauaaggucgca

SEQ ID NO: 589037 - RNA, 19 nt, Artificial Sequence
  Description of Artificial Sequence: Synthetic oligonucleotide
gcauauuuggguggacagc

SEQ ID NO: 589038 - RNA, 19 nt, Artificial Sequence
  Description of Artificial Sequence: Synthetic oligonucleotide
ugaagcggguaagcccacc

SEQ ID NO: 589039 - RNA, 19 nt, Artificial Sequence
  Description of Artificial Sequence: Synthetic oligonucleotide
gcggguaagcccaccacgg

SEQ ID NO: 589040 - RNA, 19 nt, Artificial Sequence
  Description of Artificial Sequence: Synthetic oligonucleotide
uuaccgugccgaaccucaa

SEQ ID NO: 589041 - RNA, 19 nt, Artificial Sequence
  Description of Artificial Sequence: Synthetic oligonucleotide
cggaugaugcuacauugag

SEQ ID NO: 589042 - RNA, 19 nt, Artificial Sequence
  Description of Artificial Sequence: Synthetic oligonucleotide
gucgacuggaaggugccca

SEQ ID NO: 589043 - RNA, 19 nt, Artificial Sequence
  Description of Artificial Sequence: Synthetic oligonucleotide
cgcucaucauucaccaccg

SEQ ID NO: 589044 - RNA, 19 nt, Artificial Sequence
  Description of Artificial Sequence: Synthetic oligonucleotide
ucguggacauggugugggu

SEQ ID NO: 589045 - RNA, 19 nt, Artificial Sequence
  Description of Artificial Sequence: Synthetic oligonucleotide
augccacgcucguaugccu

SEQ ID NO: 589046 - RNA, 19 nt, Artificial Sequence
  Description of Artificial Sequence: Synthetic oligonucleotide
agcgacuuguauacacggu

SEQ ID NO: 589047 - RNA, 19 nt, Artificial Sequence
  Description of Artificial Sequence: Synthetic oligonucleotide
uggccuguugagccagcuc

SEQ ID NO: 589048 - RNA, 19 nt, Artificial Sequence
  Description of Artificial Sequence: Synthetic oligonucleotide
agggguccgacugucugca

SEQ ID NO: 589049 - RNA, 19 nt, Artificial Sequence
  Description of Artificial Sequence: Synthetic oligonucleotide
auauuuggguggacagcca

SEQ ID NO: 589050 - RNA, 19 nt, Artificial Sequence
  Description of Artificial Sequence: Synthetic oligonucleotide
cacgagugugggugacacc

SEQ ID NO: 589051 - RNA, 19 nt, Artificial Sequence
  Description of Artificial Sequence: Synthetic oligonucleotide
aguaggggccgccggcuaa

SEQ ID NO: 589052 - RNA, 19 nt, Artificial Sequence
  Description of Artificial Sequence: Synthetic oligonucleotide
cuccgacguauccucagca

SEQ ID NO: 589053 - RNA, 19 nt, Artificial Sequence
  Description of Artificial Sequence: Synthetic oligonucleotide
ugcacgggcucugaaccau

SEQ ID NO: 589054 - RNA, 19 nt, Artificial Sequence
  Description of Artificial Sequence: Synthetic oligonucleotide
ggcuauucgcagguccagg

SEQ ID NO: 589055 - RNA, 19 nt, Artificial Sequence
  Description of Artificial Sequence: Synthetic oligonucleotide
guagccucucacagcaguc

SEQ ID NO: 589056 - RNA, 19 nt, Artificial Sequence
  Description of Artificial Sequence: Synthetic oligonucleotide
auugggccacuugaacagu

SEQ ID NO: 589057 - RNA, 19 nt, Artificial Sequence
  Description of Artificial Sequence: Synthetic oligonucleotide
ggucgcauagcucgugcca

SEQ ID NO: 589058 - RNA, 19 nt, Artificial Sequence
  Description of Artificial Sequence: Synthetic oligonucleotide
gcuacauugagggacugua

SEQ ID NO: 589059 - RNA, 19 nt, Artificial Sequence
  Description of Artificial Sequence: Synthetic oligonucleotide
agucggucacuggauuuga

SEQ ID NO: 589060 - RNA, 19 nt, Artificial Sequence
  Description of Artificial Sequence: Synthetic oligonucleotide
cuuggucgacuggaaggug

SEQ ID NO: 589061 - RNA, 19 nt, Artificial Sequence
  Description of Artificial Sequence: Synthetic oligonucleotide
agaugccacgagugugggu

SEQ ID NO: 589062 - RNA, 19 nt, Artificial Sequence
  Description of Artificial Sequence: Synthetic oligonucleotide
uggacacaaagcgcucauc

SEQ ID NO: 589063 - RNA, 19 nt, Artificial Sequence
  Description of Artificial Sequence: Synthetic oligonucleotide
auucggucauacacagccu

SEQ ID NO: 589064 - RNA, 19 nt, Artificial Sequence
  Description of Artificial Sequence: Synthetic oligonucleotide
gacguauccucagcaucuc

SEQ ID NO: 589065 - RNA, 19 nt, Artificial Sequence
  Description of Artificial Sequence: Synthetic oligonucleotide
aggcaaugcuguagcuuuc

SEQ ID NO: 589066 - RNA, 19 nt, Artificial Sequence
  Description of Artificial Sequence: Synthetic oligonucleotide
gcucguaugccuugaagcu

SEQ ID NO: 589067 - RNA, 19 nt, Artificial Sequence
  Description of Artificial Sequence: Synthetic oligonucleotide
ugccacgcucguaugccuu

SEQ ID NO: 589068 - RNA, 19 nt, Artificial Sequence
  Description of Artificial Sequence: Synthetic oligonucleotide
auagcccgggcacggucga

SEQ ID NO: 589069 - RNA, 19 nt, Artificial Sequence
  Description of Artificial Sequence: Synthetic oligonucleotide
gccacuugaacagugagau

SEQ ID NO: 589070 - RNA, 19 nt, Artificial Sequence
  Description of Artificial Sequence: Synthetic oligonucleotide
gggagcgcaggaaucgaag

SEQ ID NO: 589071 - RNA, 19 nt, Artificial Sequence
  Description of Artificial Sequence: Synthetic oligonucleotide
gagcgcaggaaucgaagau

SEQ ID NO: 589072 - RNA, 19 nt, Artificial Sequence
  Description of Artificial Sequence: Synthetic oligonucleotide
uggaugcaucacuccucac

SEQ ID NO: 589073 - RNA, 19 nt, Artificial Sequence
  Description of Artificial Sequence: Synthetic oligonucleotide
uugcccgccuuggacacaa

SEQ ID NO: 589074 - RNA, 19 nt, Artificial Sequence
  Description of Artificial Sequence: Synthetic oligonucleotide
gcgggcaaugaauuugguc

SEQ ID NO: 589075 - RNA, 19 nt, Artificial Sequence
  Description of Artificial Sequence: Synthetic oligonucleotide
gguagcgcggucauacaca

SEQ ID NO: 589076 - RNA, 19 nt, Artificial Sequence
  Description of Artificial Sequence: Synthetic oligonucleotide
ugcaaaucgcaggcacauc

SEQ ID NO: 589077 - RNA, 19 nt, Artificial Sequence
  Description of Artificial Sequence: Synthetic oligonucleotide
cauuaccgugccgaaccuc

SEQ ID NO: 589078 - RNA, 19 nt, Artificial Sequence
  Description of Artificial Sequence: Synthetic oligonucleotide
gcgcaggaaucgaagauac

SEQ ID NO: 589079 - RNA, 19 nt, Artificial Sequence
  Description of Artificial Sequence: Synthetic oligonucleotide
cuugccaagggguccgacu

SEQ ID NO: 589080 - RNA, 19 nt, Artificial Sequence
  Description of Artificial Sequence: Synthetic oligonucleotide
cacuggcaccacacgcuug

SEQ ID NO: 589081 - RNA, 19 nt, Artificial Sequence
  Description of Artificial Sequence: Synthetic oligonucleotide
gucggacuucauugggcuc

SEQ ID NO: 589082 - RNA, 19 nt, Artificial Sequence
  Description of Artificial Sequence: Synthetic oligonucleotide
acacgcuugccaggucauc

SEQ ID NO: 589083 - RNA, 19 nt, Artificial Sequence
  Description of Artificial Sequence: Synthetic oligonucleotide
gucggucacuggauuugag

SEQ ID NO: 589084 - RNA, 19 nt, Artificial Sequence
  Description of Artificial Sequence: Synthetic oligonucleotide
ugccacucguggacauggu

SEQ ID NO: 589085 - RNA, 19 nt, Artificial Sequence
  Description of Artificial Sequence: Synthetic oligonucleotide
augccacgaguguggguga

SEQ ID NO: 589086 - RNA, 19 nt, Artificial Sequence
  Description of Artificial Sequence: Synthetic oligonucleotide
gucugacacauugggccac

SEQ ID NO: 589087 - RNA, 19 nt, Artificial Sequence
  Description of Artificial Sequence: Synthetic oligonucleotide
cuuuccgcaacagcuucaa

SEQ ID NO: 589088 - RNA, 19 nt, Artificial Sequence
  Description of Artificial Sequence: Synthetic oligonucleotide
ggcaaaugcaacccacagu

SEQ ID NO: 589089 - RNA, 19 nt, Artificial Sequence
  Description of Artificial Sequence: Synthetic oligonucleotide
cacgggcucugaaccauca

SEQ ID NO: 589090 - RNA, 19 nt, Artificial Sequence
  Description of Artificial Sequence: Synthetic oligonucleotide
ccgacguauccucagcauc

SEQ ID NO: 589091 - RNA, 19 nt, Artificial Sequence
  Description of Artificial Sequence: Synthetic oligonucleotide
gguagccucucacagcagu

SEQ ID NO: 589092 - RNA, 19 nt, Artificial Sequence
  Description of Artificial Sequence: Synthetic oligonucleotide
gucagcaagcauggaccac

SEQ ID NO: 589093 - RNA, 19 nt, Artificial Sequence
  Description of Artificial Sequence: Synthetic oligonucleotide
agacgcuguuaaggaguag

SEQ ID NO: 589094 - RNA, 19 nt, Artificial Sequence
  Description of Artificial Sequence: Synthetic oligonucleotide
aagcgacgguagccucuca

SEQ ID NO: 589095 - RNA, 19 nt, Artificial Sequence
  Description of Artificial Sequence: Synthetic oligonucleotide
gcccgccuuggacacaaag

SEQ ID NO: 589096 - RNA, 19 nt, Artificial Sequence
  Description of Artificial Sequence: Synthetic oligonucleotide
ggguccgacugucugcaca

SEQ ID NO: 589097 - RNA, 19 nt, Artificial Sequence
  Description of Artificial Sequence: Synthetic oligonucleotide
caagcauggaccacaccuu

SEQ ID NO: 589098 - RNA, 19 nt, Artificial Sequence
  Description of Artificial Sequence: Synthetic oligonucleotide
cagccauagcauggcgggc

SEQ ID NO: 589099 - RNA, 19 nt, Artificial Sequence
  Description of Artificial Sequence: Synthetic oligonucleotide
cagcacucucaggacugag

SEQ ID NO: 589100 - RNA, 19 nt, Artificial Sequence
  Description of Artificial Sequence: Synthetic oligonucleotide
cgcuguuaaggaguagggg

SEQ ID NO: 589101 - RNA, 19 nt, Artificial Sequence
  Description of Artificial Sequence: Synthetic oligonucleotide
cacggcccugguagcgcgg

SEQ ID NO: 589102 - RNA, 19 nt, Artificial Sequence
  Description of Artificial Sequence: Synthetic oligonucleotide
agccccgcuugauguagau

SEQ ID NO: 589103 - RNA, 19 nt, Artificial Sequence
  Description of Artificial Sequence: Synthetic oligonucleotide
cagaugcgagagugcugug

SEQ ID NO: 589104 - RNA, 19 nt, Artificial Sequence
  Description of Artificial Sequence: Synthetic oligonucleotide
cuagucggucacuggauuu

SEQ ID NO: 589105 - RNA, 19 nt, Artificial Sequence
  Description of Artificial Sequence: Synthetic oligonucleotide
gcgagagugcugugugaug

SEQ ID NO: 589106 - RNA, 19 nt, Artificial Sequence
  Description of Artificial Sequence: Synthetic oligonucleotide
gcgacuuguauacacgguu

SEQ ID NO: 589107 - RNA, 19 nt, Artificial Sequence
  Description of Artificial Sequence: Synthetic oligonucleotide
cauagcgggcaaugaauuu

SEQ ID NO: 589108 - RNA, 19 nt, Artificial Sequence
  Description of Artificial Sequence: Synthetic oligonucleotide
ugccacgagugugggugac

SEQ ID NO: 589109 - RNA, 19 nt, Artificial Sequence
  Description of Artificial Sequence: Synthetic oligonucleotide
cucgaacuggcaucacagu

SEQ ID NO: 589110 - RNA, 19 nt, Artificial Sequence
  Description of Artificial Sequence: Synthetic oligonucleotide
ccgccggcuaaugagcugc

SEQ ID NO: 589111 - RNA, 19 nt, Artificial Sequence
  Description of Artificial Sequence: Synthetic oligonucleotide
cgccuuggacacaaagcgc

SEQ ID NO: 589112 - RNA, 19 nt, Artificial Sequence
  Description of Artificial Sequence: Synthetic oligonucleotide
gccgcucugcccaggagcc

SEQ ID NO: 589113 - RNA, 19 nt, Artificial Sequence
  Description of Artificial Sequence: Synthetic oligonucleotide
ccacgagugugggugacac

SEQ ID NO: 589114 - RNA, 19 nt, Artificial Sequence
  Description of Artificial Sequence: Synthetic oligonucleotide
ccgaaccucaaagucuuuc

SEQ ID NO: 589115 - RNA, 19 nt, Artificial Sequence
  Description of Artificial Sequence: Synthetic oligonucleotide
cugguagcgcggucauaca

SEQ ID NO: 589116 - RNA, 19 nt, Artificial Sequence
  Description of Artificial Sequence: Synthetic oligonucleotide
aggcgcaacuccaggucca

SEQ ID NO: 589117 - RNA, 19 nt, Artificial Sequence
  Description of Artificial Sequence: Synthetic oligonucleotide
gccacgcucguaugccuug

SEQ ID NO: 589118 - RNA, 19 nt, Artificial Sequence
  Description of Artificial Sequence: Synthetic oligonucleotide
cuggcgcagcaagacgcug

SEQ ID NO: 589119 - RNA, 19 nt, Artificial Sequence
  Description of Artificial Sequence: Synthetic oligonucleotide
cuauucgcagguccaggau

SEQ ID NO: 589120 - RNA, 19 nt, Artificial Sequence
  Description of Artificial Sequence: Synthetic oligonucleotide
ccacuugaacagugagaug

SEQ ID NO: 589121 - RNA, 19 nt, Artificial Sequence
  Description of Artificial Sequence: Synthetic oligonucleotide
cucagcccggcgggcaggc

SEQ ID NO: 589122 - RNA, 19 nt, Artificial Sequence
  Description of Artificial Sequence: Synthetic oligonucleotide
cgucuagucggucacugga

SEQ ID NO: 589123 - RNA, 19 nt, Artificial Sequence
  Description of Artificial Sequence: Synthetic oligonucleotide
gggcacggucgauuucacc

SEQ ID NO: 589124 - RNA, 19 nt, Artificial Sequence
  Description of Artificial Sequence: Synthetic oligonucleotide
cugcaaaucgcaggcacau

SEQ ID NO: 589125 - RNA, 19 nt, Artificial Sequence
  Description of Artificial Sequence: Synthetic oligonucleotide
acacuccgacguauccuca

SEQ ID NO: 589126 - RNA, 19 nt, Artificial Sequence
  Description of Artificial Sequence: Synthetic oligonucleotide
gugcgcgcuccaacuugcg

SEQ ID NO: 589127 - RNA, 19 nt, Artificial Sequence
  Description of Artificial Sequence: Synthetic oligonucleotide
ccacacgcuugccagguca

SEQ ID NO: 589128 - RNA, 19 nt, Artificial Sequence
  Description of Artificial Sequence: Synthetic oligonucleotide
caucuagugccugcucgaa

SEQ ID NO: 589129 - RNA, 19 nt, Artificial Sequence
  Description of Artificial Sequence: Synthetic oligonucleotide
cauugagggacuguaccuu

SEQ ID NO: 589130 - RNA, 19 nt, Artificial Sequence
  Description of Artificial Sequence: Synthetic oligonucleotide
ggacuguaccuugucugga

SEQ ID NO: 589131 - RNA, 19 nt, Artificial Sequence
  Description of Artificial Sequence: Synthetic oligonucleotide
gcacggucgauuucaccaa

SEQ ID NO: 589132 - RNA, 19 nt, Artificial Sequence
  Description of Artificial Sequence: Synthetic oligonucleotide
cgcaggcacaucucacggg

SEQ ID NO: 589133 - RNA, 19 nt, Artificial Sequence
  Description of Artificial Sequence: Synthetic oligonucleotide
ggucgauuucaccaagcuu

SEQ ID NO: 589134 - RNA, 19 nt, Artificial Sequence
  Description of Artificial Sequence: Synthetic oligonucleotide
uaagcccaccacggaugau

SEQ ID NO: 589135 - RNA, 19 nt, Artificial Sequence
  Description of Artificial Sequence: Synthetic oligonucleotide
uaggggccgccggcuaaug

SEQ ID NO: 589136 - RNA, 19 nt, Artificial Sequence
  Description of Artificial Sequence: Synthetic oligonucleotide
agcgggcaaugaauuuggu

SEQ ID NO: 589137 - RNA, 19 nt, Artificial Sequence
  Description of Artificial Sequence: Synthetic oligonucleotide
gugggagcgcaggaaucga

SEQ ID NO: 589138 - RNA, 19 nt, Artificial Sequence
  Description of Artificial Sequence: Synthetic oligonucleotide
ccucauuaccgugccgaac

SEQ ID NO: 589139 - RNA, 19 nt, Artificial Sequence
  Description of Artificial Sequence: Synthetic oligonucleotide
ggguaagcccaccacggau

SEQ ID NO: 589140 - RNA, 19 nt, Artificial Sequence
  Description of Artificial Sequence: Synthetic oligonucleotide
guccgacugucugcacagc

SEQ ID NO: 589141 - RNA, 19 nt, Artificial Sequence
  Description of Artificial Sequence: Synthetic oligonucleotide
agcucgugccacagcuggu

SEQ ID NO: 589142 - RNA, 19 nt, Artificial Sequence
  Description of Artificial Sequence: Synthetic oligonucleotide
ccgugcgcgcuccaacuug

SEQ ID NO: 589143 - RNA, 19 nt, Artificial Sequence
  Description of Artificial Sequence: Synthetic oligonucleotide
caccacggaugaugcuaca

SEQ ID NO: 589144 - RNA, 19 nt, Artificial Sequence
  Description of Artificial Sequence: Synthetic oligonucleotide
acggcccugguagcgcggu

SEQ ID NO: 589145 - RNA, 19 nt, Artificial Sequence
  Description of Artificial Sequence: Synthetic oligonucleotide
cgacguauccucagcaucu

SEQ ID NO: 589146 - RNA, 19 nt, Artificial Sequence
  Description of Artificial Sequence: Synthetic oligonucleotide
ggcgcugugcagccucguc

SEQ ID NO: 589147 - RNA, 19 nt, Artificial Sequence
  Description of Artificial Sequence: Synthetic oligonucleotide
cagcccggcgggcaggcaa

SEQ ID NO: 589148 - RNA, 19 nt, Artificial Sequence
  Description of Artificial Sequence: Synthetic oligonucleotide
cuaggaggcuggucccgcu

SEQ ID NO: 589149 - RNA, 19 nt, Artificial Sequence
  Description of Artificial Sequence: Synthetic oligonucleotide
cccgacaccuucagcaucu

SEQ ID NO: 589150 - RNA, 19 nt, Artificial Sequence
  Description of Artificial Sequence: Synthetic oligonucleotide
gccgccggcuaaugagcug

SEQ ID NO: 589151 - RNA, 19 nt, Artificial Sequence
  Description of Artificial Sequence: Synthetic oligonucleotide
gugagaugccacgcucgua

SEQ ID NO: 589152 - RNA, 19 nt, Artificial Sequence
  Description of Artificial Sequence: Synthetic oligonucleotide
cacgcucguaugccuugaa

SEQ ID NO: 589153 - RNA, 19 nt, Artificial Sequence
  Description of Artificial Sequence: Synthetic oligonucleotide
cacacgcuugccaggucau

SEQ ID NO: 589154 - RNA, 19 nt, Artificial Sequence
  Description of Artificial Sequence: Synthetic oligonucleotide
cugggagauaaggucgcau

SEQ ID NO: 589155 - RNA, 19 nt, Artificial Sequence
  Description of Artificial Sequence: Synthetic oligonucleotide
gugccugcucgaagagguc

SEQ ID NO: 589156 - RNA, 19 nt, Artificial Sequence
  Description of Artificial Sequence: Synthetic oligonucleotide
ggcgcaacuccagguccac

SEQ ID NO: 589157 - RNA, 19 nt, Artificial Sequence
  Description of Artificial Sequence: Synthetic oligonucleotide
cagccucgucuagucgguc

SEQ ID NO: 589158 - RNA, 19 nt, Artificial Sequence
  Description of Artificial Sequence: Synthetic oligonucleotide
gcucgugccacagcuggua

SEQ ID NO: 589159 - RNA, 19 nt, Artificial Sequence
  Description of Artificial Sequence: Synthetic oligonucleotide
ccuuggucgacuggaaggu

SEQ ID NO: 589160 - RNA, 19 nt, Artificial Sequence
  Description of Artificial Sequence: Synthetic oligonucleotide
cgcuugccaggucauccac

SEQ ID NO: 589161 - RNA, 19 nt, Artificial Sequence
  Description of Artificial Sequence: Synthetic oligonucleotide
gcacacuccgacguauccu

SEQ ID NO: 589162 - RNA, 19 nt, Artificial Sequence
  Description of Artificial Sequence: Synthetic oligonucleotide
cuugcccgccuuggacaca

SEQ ID NO: 589163 - RNA, 19 nt, Artificial Sequence
  Description of Artificial Sequence: Synthetic oligonucleotide
gcuugccaagggguccgac

SEQ ID NO: 589164 - RNA, 19 nt, Artificial Sequence
  Description of Artificial Sequence: Synthetic oligonucleotide
ccacugcggauguaguagu

SEQ ID NO: 589165 - RNA, 19 nt, Artificial Sequence
  Description of Artificial Sequence: Synthetic oligonucleotide
ccacggaugaugcuacauu

SEQ ID NO: 589166 - RNA, 19 nt, Artificial Sequence
  Description of Artificial Sequence: Synthetic oligonucleotide
acgccccaguucagaggca

SEQ ID NO: 589167 - RNA, 19 nt, Artificial Sequence
  Description of Artificial Sequence: Synthetic oligonucleotide
cgaagauacaggggccaga

SEQ ID NO: 589168 - RNA, 19 nt, Artificial Sequence
  Description of Artificial Sequence: Synthetic oligonucleotide
ccgcuugauguagauguua

SEQ ID NO: 589169 - RNA, 19 nt, Artificial Sequence
  Description of Artificial Sequence: Synthetic oligonucleotide
gggguccgacugucugcac

SEQ ID NO: 589170 - RNA, 19 nt, Artificial Sequence
  Description of Artificial Sequence: Synthetic oligonucleotide
gccacgagugugggugaca

SEQ ID NO: 589171 - RNA, 19 nt, Artificial Sequence
  Description of Artificial Sequence: Synthetic oligonucleotide
gcggucauacacagccaua

SEQ ID NO: 589172 - RNA, 19 nt, Artificial Sequence
  Description of Artificial Sequence: Synthetic oligonucleotide
ccaugaaguugaccugagu

SEQ ID NO: 589173 - RNA, 19 nt, Artificial Sequence
  Description of Artificial Sequence: Synthetic oligonucleotide
ggcgcagcaagacgcuguu

SEQ ID NO: 589174 - RNA, 19 nt, Artificial Sequence
  Description of Artificial Sequence: Synthetic oligonucleotide
gcacgggcucugaaccauc

SEQ ID NO: 589175 - RNA, 19 nt, Artificial Sequence
  Description of Artificial Sequence: Synthetic oligonucleotide
cggucgauuucaccaagcu

SEQ ID NO: 589176 - RNA, 19 nt, Artificial Sequence
  Description of Artificial Sequence: Synthetic oligonucleotide
ccucacgccccaguucaga

SEQ ID NO: 589177 - RNA, 19 nt, Artificial Sequence
  Description of Artificial Sequence: Synthetic oligonucleotide
ccaugccgcucugcccagg

SEQ ID NO: 589178 - RNA, 19 nt, Artificial Sequence
  Description of Artificial Sequence: Synthetic oligonucleotide
cgcagguccaggauucggu

SEQ ID NO: 589179 - RNA, 19 nt, Artificial Sequence
  Description of Artificial Sequence: Synthetic oligonucleotide
cguaugccuugaagcucuc

SEQ ID NO: 589180 - RNA, 19 nt, Artificial Sequence
  Description of Artificial Sequence: Synthetic oligonucleotide
ccgugccgaaccucaaagu

SEQ ID NO: 589181 - RNA, 19 nt, Artificial Sequence
  Description of Artificial Sequence: Synthetic oligonucleotide
gccggcuaaugagcugcuc

SEQ ID NO: 589182 - RNA, 19 nt, Artificial Sequence
  Description of Artificial Sequence: Synthetic oligonucleotide
gcagccucgucuagucggu

SEQ ID NO: 589183 - RNA, 19 nt, Artificial Sequence
  Description of Artificial Sequence: Synthetic oligonucleotide
cgggcacggucgauuucac

SEQ ID NO: 589184 - RNA, 19 nt, Artificial Sequence
  Description of Artificial Sequence: Synthetic oligonucleotide
gcgcggucauacacagcca

SEQ ID NO: 589185 - RNA, 19 nt, Artificial Sequence
  Description of Artificial Sequence: Synthetic oligonucleotide
cggguaagcccaccacgga

SEQ ID NO: 589186 - RNA, 19 nt, Artificial Sequence
  Description of Artificial Sequence: Synthetic oligonucleotide
ggucccgugcgcgcuccaa

SEQ ID NO: 589187 - RNA, 19 nt, Artificial Sequence
  Description of Artificial Sequence: Synthetic oligonucleotide
cccgggcacggucgauuuc

SEQ ID NO: 589188 - RNA, 19 nt, Artificial Sequence
  Description of Artificial Sequence: Synthetic oligonucleotide
ccacgcucguaugccuuga

SEQ ID NO: 589189 - RNA, 19 nt, Artificial Sequence
  Description of Artificial Sequence: Synthetic oligonucleotide
ccggcgggcaggcaaugcu

SEQ ID NO: 589190 - RNA, 19 nt, Artificial Sequence
  Description of Artificial Sequence: Synthetic oligonucleotide
gcccaccacggaugaugcu

SEQ ID NO: 589191 - RNA, 19 nt, Artificial Sequence
  Description of Artificial Sequence: Synthetic oligonucleotide
gcccgggcacggucgauuu

SEQ ID NO: 589192 - RNA, 19 nt, Artificial Sequence
  Description of Artificial Sequence: Synthetic oligonucleotide
cccgcuugauguagauguu

SEQ ID NO: 589193 - RNA, 19 nt, Artificial Sequence
  Description of Artificial Sequence: Synthetic oligonucleotide
gcgcagcaagacgcuguua

SEQ ID NO: 589194 - RNA, 19 nt, Artificial Sequence
  Description of Artificial Sequence: Synthetic oligonucleotide
cccgugcgcgcuccaacuu

SEQ ID NO: 589195 - RNA, 19 nt, Artificial Sequence
  Description of Artificial Sequence: Synthetic oligonucleotide
uaaacgucuacucagguag

SEQ ID NO: 589196 - RNA, 19 nt, Artificial Sequence
  Description of Artificial Sequence: Synthetic oligonucleotide
aauuggauuacugaugaac

SEQ ID NO: 589197 - RNA, 19 nt, Artificial Sequence
  Description of Artificial Sequence: Synthetic oligonucleotide
uccuacaucuuuaugauag

SEQ ID NO: 589198 - RNA, 19 nt, Artificial Sequence
  Description of Artificial Sequence: Synthetic oligonucleotide
ucaauugccacuaaguuau

SEQ ID NO: 589199 - RNA, 19 nt, Artificial Sequence
  Description of Artificial Sequence: Synthetic oligonucleotide
auuuagaagagacugauau

SEQ ID NO: 589200 - RNA, 19 nt, Artificial Sequence
  Description of Artificial Sequence: Synthetic oligonucleotide
aauaaccucacaaucucgc

SEQ ID NO: 589201 - RNA, 19 nt, Artificial Sequence
  Description of Artificial Sequence: Synthetic oligonucleotide
  modified_base (11)..(11): a, c, u, g, unknown or other
aagcucaauanccuuuggc

SEQ ID NO: 589202 - RNA, 19 nt, Artificial Sequence
  Description of Artificial Sequence: Synthetic oligonucleotide
aacuauagcaucaugaagu

SEQ ID NO: 589203 - RNA, 19 nt, Artificial Sequence
  Description of Artificial Sequence: Synthetic oligonucleotide
aauaaagcgggacggggac

SEQ ID NO: 589204 - RNA, 19 nt, Artificial Sequence
  Description of Artificial Sequence: Synthetic oligonucleotide
uucaacuauagcaucauga

SEQ ID NO: 589205 - RNA, 19 nt, Artificial Sequence
  Description of Artificial Sequence: Synthetic oligonucleotide
uauacauguaucaugggaa

SEQ ID NO: 589206 - RNA, 19 nt, Artificial Sequence
  Description of Artificial Sequence: Synthetic oligonucleotide
aaguuuagggaaccguaac

SEQ ID NO: 589207 - RNA, 19 nt, Artificial Sequence
  Description of Artificial Sequence: Synthetic oligonucleotide
  modified_base (17)..(17): a, c, u, g, unknown or other
gauuugaagcucaauancc

SEQ ID NO: 589208 - RNA, 19 nt, Artificial Sequence
  Description of Artificial Sequence: Synthetic oligonucleotide
ugccguuugaccaauaacu

SEQ ID NO: 589209 - RNA, 19 nt, Artificial Sequence
  Description of Artificial Sequence: Synthetic oligonucleotide
  modified_base (10)..(10): a, c, u, g, unknown or other
agcucaauanccuuuggcu

SEQ ID NO: 589210 - RNA, 19 nt, Artificial Sequence
  Description of Artificial Sequence: Synthetic oligonucleotide
  modified_base (5)..(5): a, c, u, g, unknown or other
aauanccuuuggcugauca

SEQ ID NO: 589211 - RNA, 19 nt, Artificial Sequence
  Description of Artificial Sequence: Synthetic oligonucleotide
aauagugcaugcauuacag

SEQ ID NO: 589212 - RNA, 19 nt, Artificial Sequence
  Description of Artificial Sequence: Synthetic oligonucleotide
uuacgaagaagacacguca

SEQ ID NO: 589213 - RNA, 19 nt, Artificial Sequence
  Description of Artificial Sequence: Synthetic oligonucleotide
auauaagcuagcucaauug

SEQ ID NO: 589214 - RNA, 19 nt, Artificial Sequence
  Description of Artificial Sequence: Synthetic oligonucleotide
  modified_base (18)..(18): a, c, u, g, unknown or other
ugauuugaagcucaauanc

SEQ ID NO: 589215 - RNA, 19 nt, Artificial Sequence
  Description of Artificial Sequence: Synthetic oligonucleotide
ucuauauuauuguucauua

SEQ ID NO: 589216 - RNA, 19 nt, Artificial Sequence
  Description of Artificial Sequence: Synthetic oligonucleotide
acuaauucacucugaagag

SEQ ID NO: 589217 - RNA, 19 nt, Artificial Sequence
  Description of Artificial Sequence: Synthetic oligonucleotide
uuugcgguuccuucgauag

SEQ ID NO: 589218 - RNA, 19 nt, Artificial Sequence
  Description of Artificial Sequence: Synthetic oligonucleotide
aaucccaccuccuacagau

SEQ ID NO: 589219 - RNA, 19 nt, Artificial Sequence
  Description of Artificial Sequence: Synthetic oligonucleotide
uguaucaugggaaacuuua

SEQ ID NO: 589220 - RNA, 19 nt, Artificial Sequence
  Description of Artificial Sequence: Synthetic oligonucleotide
ugucucgugauacagcuga

SEQ ID NO: 589221 - RNA, 19 nt, Artificial Sequence
  Description of Artificial Sequence: Synthetic oligonucleotide
aaauaggauuugaugaguc

SEQ ID NO: 589222 - RNA, 19 nt, Artificial Sequence
  Description of Artificial Sequence: Synthetic oligonucleotide
uguaaugccuuuagcaugu

SEQ ID NO: 589223 - RNA, 19 nt, Artificial Sequence
  Description of Artificial Sequence: Synthetic oligonucleotide
aauuugccaagcuccaucu

SEQ ID NO: 589224 - RNA, 19 nt, Artificial Sequence
  Description of Artificial Sequence: Synthetic oligonucleotide
uguaaugcagaguauacuu

SEQ ID NO: 589225 - RNA, 19 nt, Artificial Sequence
  Description of Artificial Sequence: Synthetic oligonucleotide
uuaugugaggaauuugcca

SEQ ID NO: 589226 - RNA, 19 nt, Artificial Sequence
  Description of Artificial Sequence: Synthetic oligonucleotide
gaugagucuuucaauaacc

SEQ ID NO: 589227 - RNA, 19 nt, Artificial Sequence
  Description of Artificial Sequence: Synthetic oligonucleotide
uguuaaggccaccuagcgg

SEQ ID NO: 589228 - RNA, 19 nt, Artificial Sequence
  Description of Artificial Sequence: Synthetic oligonucleotide
acugauauugagcagcuaa

SEQ ID NO: 589229 - RNA, 19 nt, Artificial Sequence
  Description of Artificial Sequence: Synthetic oligonucleotide
aacagauucuaaagguucg

SEQ ID NO: 589230 - RNA, 19 nt, Artificial Sequence
  Description of Artificial Sequence: Synthetic oligonucleotide
uuuacagccagaugagucu

SEQ ID NO: 589231 - RNA, 19 nt, Artificial Sequence
  Description of Artificial Sequence: Synthetic oligonucleotide
aauaaacgucuacucaggu

SEQ ID NO: 589232 - RNA, 19 nt, Artificial Sequence
  Description of Artificial Sequence: Synthetic oligonucleotide
aguaaaguagcacuuuuau

SEQ ID NO: 589233 - RNA, 19 nt, Artificial Sequence
  Description of Artificial Sequence: Synthetic oligonucleotide
ucagaaguuucaauguacu

SEQ ID NO: 589234 - RNA, 19 nt, Artificial Sequence
  Description of Artificial Sequence: Synthetic oligonucleotide
gagucuauauaaauagugc

SEQ ID NO: 589235 - RNA, 19 nt, Artificial Sequence
  Description of Artificial Sequence: Synthetic oligonucleotide
ccuuuuacgaagaagacac

SEQ ID NO: 589236 - RNA, 19 nt, Artificial Sequence
  Description of Artificial Sequence: Synthetic oligonucleotide
uacuccguggcgaauuugg

SEQ ID NO: 589237 - RNA, 19 nt, Artificial Sequence
  Description of Artificial Sequence: Synthetic oligonucleotide
uucauuagcccacaggcau

SEQ ID NO: 589238 - RNA, 19 nt, Artificial Sequence
  Description of Artificial Sequence: Synthetic oligonucleotide
guaggcaguagcuagcaag

SEQ ID NO: 589239 - RNA, 19 nt, Artificial Sequence
  Description of Artificial Sequence: Synthetic oligonucleotide
aauaguguuaaggccaccu

SEQ ID NO: 589240 - RNA, 19 nt, Artificial Sequence
  Description of Artificial Sequence: Synthetic oligonucleotide
gauucuaaagguucgccca

SEQ ID NO: 589241 - RNA, 19 nt, Artificial Sequence
  Description of Artificial Sequence: Synthetic oligonucleotide
  modified_base (4)..(4): a, c, u, g, unknown or other
auanccuuuggcugaucac

SEQ ID NO: 589242 - RNA, 19 nt, Artificial Sequence
  Description of Artificial Sequence: Synthetic oligonucleotide
ucgauaguguuacaguacu

SEQ ID NO: 589243 - RNA, 19 nt, Artificial Sequence
  Description of Artificial Sequence: Synthetic oligonucleotide
uuguaagcgugacugaaac

SEQ ID NO: 589244 - RNA, 19 nt, Artificial Sequence
  Description of Artificial Sequence: Synthetic oligonucleotide
  modified_base (3)..(3): a, c, u, g, unknown or other
uanccuuuggcugaucacc

SEQ ID NO: 589245 - RNA, 19 nt, Artificial Sequence
  Description of Artificial Sequence: Synthetic oligonucleotide
gcuuuguacaacuagaaca

SEQ ID NO: 589246 - RNA, 19 nt, Artificial Sequence
  Description of Artificial Sequence: Synthetic oligonucleotide
gggugagaaaacuuuaagg

SEQ ID NO: 589247 - RNA, 19 nt, Artificial Sequence
  Description of Artificial Sequence: Synthetic oligonucleotide
uacagcugaagguaguucu

SEQ ID NO: 589248 - RNA, 19 nt, Artificial Sequence
  Description of Artificial Sequence: Synthetic oligonucleotide
gaguucauaaauaaacguc

SEQ ID NO: 589249 - RNA, 19 nt, Artificial Sequence
  Description of Artificial Sequence: Synthetic oligonucleotide
aggaguucauaaauaaacg

SEQ ID NO: 589250 - RNA, 19 nt, Artificial Sequence
  Description of Artificial Sequence: Synthetic oligonucleotide
uccguggcgaauuugguga

SEQ ID NO: 589251 - RNA, 19 nt, Artificial Sequence
  Description of Artificial Sequence: Synthetic oligonucleotide
auuggcucagggcuuacuc

SEQ ID NO: 589252 - RNA, 19 nt, Artificial Sequence
  Description of Artificial Sequence: Synthetic oligonucleotide
aagcgugacugaaacagac

SEQ ID NO: 589253 - RNA, 19 nt, Artificial Sequence
  Description of Artificial Sequence: Synthetic oligonucleotide
ugaaccgaagaauaagcuc

SEQ ID NO: 589254 - RNA, 19 nt, Artificial Sequence
  Description of Artificial Sequence: Synthetic oligonucleotide
ugaaguuuagggaaccgua

SEQ ID NO: 589255 - RNA, 19 nt, Artificial Sequence
  Description of Artificial Sequence: Synthetic oligonucleotide
uucgauaguguuacaguac

SEQ ID NO: 589256 - RNA, 19 nt, Artificial Sequence
  Description of Artificial Sequence: Synthetic oligonucleotide
cugauauugagcagcuaag

SEQ ID NO: 589257 - RNA, 19 nt, Artificial Sequence
  Description of Artificial Sequence: Synthetic oligonucleotide
gauacaaccuugucucgug

SEQ ID NO: 589258 - RNA, 19 nt, Artificial Sequence
  Description of Artificial Sequence: Synthetic oligonucleotide
uuuaucauccacggguuca

SEQ ID NO: 589259 - RNA, 19 nt, Artificial Sequence
  Description of Artificial Sequence: Synthetic oligonucleotide
auaacucaaaugaaaccuc

SEQ ID NO: 589260 - RNA, 19 nt, Artificial Sequence
  Description of Artificial Sequence: Synthetic oligonucleotide
aguuuagggaaccguaaca

SEQ ID NO: 589261 - RNA, 19 nt, Artificial Sequence
  Description of Artificial Sequence: Synthetic oligonucleotide
uguacuuugcgguuccuuc

SEQ ID NO: 589262 - RNA, 19 nt, Artificial Sequence
  Description of Artificial Sequence: Synthetic oligonucleotide
acaacguugggugagaaaa

SEQ ID NO: 589263 - RNA, 19 nt, Artificial Sequence
  Description of Artificial Sequence: Synthetic oligonucleotide
augcauuacagucaugaaa

SEQ ID NO: 589264 - RNA, 19 nt, Artificial Sequence
  Description of Artificial Sequence: Synthetic oligonucleotide
uagggaaccguaacaauuc

SEQ ID NO: 589265 - RNA, 19 nt, Artificial Sequence
  Description of Artificial Sequence: Synthetic oligonucleotide
agggaaccguaacaauucc

SEQ ID NO: 589266 - RNA, 19 nt, Artificial Sequence
  Description of Artificial Sequence: Synthetic oligonucleotide
guaccuuggucauuccugg

SEQ ID NO: 589267 - RNA, 19 nt, Artificial Sequence
  Description of Artificial Sequence: Synthetic oligonucleotide
uccuugcuaauauaacuac

SEQ ID NO: 589268 - RNA, 19 nt, Artificial Sequence
  Description of Artificial Sequence: Synthetic oligonucleotide
acagauucuaaagguucgc

SEQ ID NO: 589269 - RNA, 19 nt, Artificial Sequence
  Description of Artificial Sequence: Synthetic oligonucleotide
accguaacaauuccugugu

SEQ ID NO: 589270 - RNA, 19 nt, Artificial Sequence
  Description of Artificial Sequence: Synthetic oligonucleotide
ugauauugagcagcuaaga

SEQ ID NO: 589271 - RNA, 19 nt, Artificial Sequence
  Description of Artificial Sequence: Synthetic oligonucleotide
ggugagaaaacuuuaaggu

SEQ ID NO: 589272 - RNA, 19 nt, Artificial Sequence
  Description of Artificial Sequence: Synthetic oligonucleotide
acaaauccuagcaccaccg

SEQ ID NO: 589273 - RNA, 19 nt, Artificial Sequence
  Description of Artificial Sequence: Synthetic oligonucleotide
cuagacgcuugauuugccg

SEQ ID NO: 589274 - RNA, 19 nt, Artificial Sequence
  Description of Artificial Sequence: Synthetic oligonucleotide
guguuaaggccaccuagcg

SEQ ID NO: 589275 - RNA, 19 nt, Artificial Sequence
  Description of Artificial Sequence: Synthetic oligonucleotide
  modified_base (12)..(12): a, c, u, g, unknown or other
gaagcucaauanccuuugg

SEQ ID NO: 589276 - RNA, 19 nt, Artificial Sequence
  Description of Artificial Sequence: Synthetic oligonucleotide
uguguacuguaauuacuac

SEQ ID NO: 589277 - RNA, 19 nt, Artificial Sequence
  Description of Artificial Sequence: Synthetic oligonucleotide
acuagaacaucaacuguuc

SEQ ID NO: 589278 - RNA, 19 nt, Artificial Sequence
  Description of Artificial Sequence: Synthetic oligonucleotide
uccuucgauaguguuacag

SEQ ID NO: 589279 - RNA, 19 nt, Artificial Sequence
  Description of Artificial Sequence: Synthetic oligonucleotide
uggauuacugaugaaccga

SEQ ID NO: 589280 - RNA, 19 nt, Artificial Sequence
  Description of Artificial Sequence: Synthetic oligonucleotide
agcuaagacauuuauccuu

SEQ ID NO: 589281 - RNA, 19 nt, Artificial Sequence
  Description of Artificial Sequence: Synthetic oligonucleotide
caucaacuguucuuguaag

SEQ ID NO: 589282 - RNA, 19 nt, Artificial Sequence
  Description of Artificial Sequence: Synthetic oligonucleotide
cuuacucccuuauuaguuc

SEQ ID NO: 589283 - RNA, 19 nt, Artificial Sequence
  Description of Artificial Sequence: Synthetic oligonucleotide
aacguugggugagaaaacu

SEQ ID NO: 589284 - RNA, 19 nt, Artificial Sequence
  Description of Artificial Sequence: Synthetic oligonucleotide
cuaauggcagucaaaaugu

SEQ ID NO: 589285 - RNA, 19 nt, Artificial Sequence
  Description of Artificial Sequence: Synthetic oligonucleotide
  modified_base (8)..(8): a, c, u, g, unknown or other
cucaauanccuuuggcuga

SEQ ID NO: 589286 - RNA, 19 nt, Artificial Sequence
  Description of Artificial Sequence: Synthetic oligonucleotide
guuccuucgauaguguuac

SEQ ID NO: 589287 - RNA, 19 nt, Artificial Sequence
  Description of Artificial Sequence: Synthetic oligonucleotide
uuuagaagagacugauauu

SEQ ID NO: 589288 - RNA, 19 nt, Artificial Sequence
  Description of Artificial Sequence: Synthetic oligonucleotide
gacuugauauacauguauc

SEQ ID NO: 589289 - RNA, 19 nt, Artificial Sequence
  Description of Artificial Sequence: Synthetic oligonucleotide
ugcgguuccuucgauagug

SEQ ID NO: 589290 - RNA, 19 nt, Artificial Sequence
  Description of Artificial Sequence: Synthetic oligonucleotide
cagaguauauuccuacauc

SEQ ID NO: 589291 - RNA, 19 nt, Artificial Sequence
  Description of Artificial Sequence: Synthetic oligonucleotide
ggaccaguuccacacaccg

SEQ ID NO: 589292 - RNA, 19 nt, Artificial Sequence
  Description of Artificial Sequence: Synthetic oligonucleotide
ugauuaugugaggaauuug

SEQ ID NO: 589293 - RNA, 19 nt, Artificial Sequence
  Description of Artificial Sequence: Synthetic oligonucleotide
cuguccuacuaauucacuc

SEQ ID NO: 589294 - RNA, 19 nt, Artificial Sequence
  Description of Artificial Sequence: Synthetic oligonucleotide
uuuagcaugucagcugccu

SEQ ID NO: 589295 - RNA, 19 nt, Artificial Sequence
  Description of Artificial Sequence: Synthetic oligonucleotide
uguaagcgugacugaaaca

SEQ ID NO: 589296 - RNA, 19 nt, Artificial Sequence
  Description of Artificial Sequence: Synthetic oligonucleotide
agggcuuacucccuuauua

SEQ ID NO: 589297 - RNA, 19 nt, Artificial Sequence
  Description of Artificial Sequence: Synthetic oligonucleotide
ucuaaagguucgcccaaaa

SEQ ID NO: 589298 - RNA, 19 nt, Artificial Sequence
  Description of Artificial Sequence: Synthetic oligonucleotide
uuaagguggauuggcucag

SEQ ID NO: 589299 - RNA, 19 nt, Artificial Sequence
  Description of Artificial Sequence: Synthetic oligonucleotide
gacaauuagaaaauaggau

SEQ ID NO: 589300 - RNA, 19 nt, Artificial Sequence
  Description of Artificial Sequence: Synthetic oligonucleotide
auaaccucacaaucucgcu

SEQ ID NO: 589301 - RNA, 19 nt, Artificial Sequence
  Description of Artificial Sequence: Synthetic oligonucleotide
ucuuguaagcgugacugaa

SEQ ID NO: 589302 - RNA, 19 nt, Artificial Sequence
  Description of Artificial Sequence: Synthetic oligonucleotide
  modified_base (9)..(9): a, c, u, g, unknown or other
gcucaauanccuuuggcug

SEQ ID NO: 589303 - RNA, 19 nt, Artificial Sequence
  Description of Artificial Sequence: Synthetic oligonucleotide
uagacgcuugauuugccgu

SEQ ID NO: 589304 - RNA, 19 nt, Artificial Sequence
  Description of Artificial Sequence: Synthetic oligonucleotide
ucuagacgcuugauuugcc

SEQ ID NO: 589305 - RNA, 19 nt, Artificial Sequence
  Description of Artificial Sequence: Synthetic oligonucleotide
auaaacgucuacucaggua

SEQ ID NO: 589306 - RNA, 19 nt, Artificial Sequence
  Description of Artificial Sequence: Synthetic oligonucleotide
uucaauguacuuugcgguu

SEQ ID NO: 589307 - RNA, 19 nt, Artificial Sequence
  Description of Artificial Sequence: Synthetic oligonucleotide
uuaguuccugaaauucuuu

SEQ ID NO: 589308 - RNA, 19 nt, Artificial Sequence
  Description of Artificial Sequence: Synthetic oligonucleotide
acggguucaccauagcuau

SEQ ID NO: 589309 - RNA, 19 nt, Artificial Sequence
  Description of Artificial Sequence: Synthetic oligonucleotide
gauauaagcuagcucaauu

SEQ ID NO: 589310 - RNA, 19 nt, Artificial Sequence
  Description of Artificial Sequence: Synthetic oligonucleotide
aauugggauugguuuugau

SEQ ID NO: 589311 - RNA, 19 nt, Artificial Sequence
  Description of Artificial Sequence: Synthetic oligonucleotide
uccuacuaauucacucuga

SEQ ID NO: 589312 - RNA, 19 nt, Artificial Sequence
  Description of Artificial Sequence: Synthetic oligonucleotide
acacgucacuacuucaacu

SEQ ID NO: 589313 - RNA, 19 nt, Artificial Sequence
  Description of Artificial Sequence: Synthetic oligonucleotide
ggcgaauuuggugauaagc

SEQ ID NO: 589314 - RNA, 19 nt, Artificial Sequence
  Description of Artificial Sequence: Synthetic oligonucleotide
auaaagcgggacggggacc

SEQ ID NO: 589315 - RNA, 19 nt, Artificial Sequence
  Description of Artificial Sequence: Synthetic oligonucleotide
aaacgucuacucagguagg

SEQ ID NO: 589316 - RNA, 19 nt, Artificial Sequence
  Description of Artificial Sequence: Synthetic oligonucleotide
cucaauugccacuaaguua

SEQ ID NO: 589317 - RNA, 19 nt, Artificial Sequence
  Description of Artificial Sequence: Synthetic oligonucleotide
uaaagcgggacggggacca

SEQ ID NO: 589318 - RNA, 19 nt, Artificial Sequence
  Description of Artificial Sequence: Synthetic oligonucleotide
gacacgucacuacuucaac

SEQ ID NO: 589319 - RNA, 19 nt, Artificial Sequence
  Description of Artificial Sequence: Synthetic oligonucleotide
ggaaccguaacaauuccug

SEQ ID NO: 589320 - RNA, 19 nt, Artificial Sequence
  Description of Artificial Sequence: Synthetic oligonucleotide
ucucgugauacagcugaag

SEQ ID NO: 589321 - RNA, 19 nt, Artificial Sequence
  Description of Artificial Sequence: Synthetic oligonucleotide
cuucgauaguguuacagua

SEQ ID NO: 589322 - RNA, 19 nt, Artificial Sequence
  Description of Artificial Sequence: Synthetic oligonucleotide
agauucagucagaagguca

SEQ ID NO: 589323 - RNA, 19 nt, Artificial Sequence
  Description of Artificial Sequence: Synthetic oligonucleotide
augaaguuuagggaaccgu

SEQ ID NO: 589324 - RNA, 19 nt, Artificial Sequence
  Description of Artificial Sequence: Synthetic oligonucleotide
uucgacaguucuguucacc

SEQ ID NO: 589325 - RNA, 19 nt, Artificial Sequence
  Description of Artificial Sequence: Synthetic oligonucleotide
guuuagggaaccguaacaa

SEQ ID NO: 589326 - RNA, 19 nt, Artificial Sequence
  Description of Artificial Sequence: Synthetic oligonucleotide
auucuaaagguucgcccaa

SEQ ID NO: 589327 - RNA, 19 nt, Artificial Sequence
  Description of Artificial Sequence: Synthetic oligonucleotide
gaaguuuagggaaccguaa

SEQ ID NO: 589328 - RNA, 19 nt, Artificial Sequence
  Description of Artificial Sequence: Synthetic oligonucleotide
ccugguaaauccacaagug

SEQ ID NO: 589329 - RNA, 19 nt, Artificial Sequence
  Description of Artificial Sequence: Synthetic oligonucleotide
ccuacagguaccuugguca

SEQ ID NO: 589330 - RNA, 19 nt, Artificial Sequence
  Description of Artificial Sequence: Synthetic oligonucleotide
uguaacaggcagccuuuua

SEQ ID NO: 589331 - RNA, 19 nt, Artificial Sequence
  Description of Artificial Sequence: Synthetic oligonucleotide
  modified_base (7)..(7): a, c, u, g, unknown or other
ucaauanccuuuggcugau

SEQ ID NO: 589332 - RNA, 19 nt, Artificial Sequence
  Description of Artificial Sequence: Synthetic oligonucleotide
uggucauuccugguaaauc

SEQ ID NO: 589333 - RNA, 19 nt, Artificial Sequence
  Description of Artificial Sequence: Synthetic oligonucleotide
ggaguucauaaauaaacgu

SEQ ID NO: 589334 - RNA, 19 nt, Artificial Sequence
  Description of Artificial Sequence: Synthetic oligonucleotide
uacaguacuccguggcgaa

SEQ ID NO: 589335 - RNA, 19 nt, Artificial Sequence
  Description of Artificial Sequence: Synthetic oligonucleotide
caacguugggugagaaaac

SEQ ID NO: 589336 - RNA, 19 nt, Artificial Sequence
  Description of Artificial Sequence: Synthetic oligonucleotide
ugauauaagcuagcucaau

SEQ ID NO: 589337 - RNA, 19 nt, Artificial Sequence
  Description of Artificial Sequence: Synthetic oligonucleotide
auaguguuaaggccaccua

SEQ ID NO: 589338 - RNA, 19 nt, Artificial Sequence
  Description of Artificial Sequence: Synthetic oligonucleotide
uugucucgugauacagcug

SEQ ID NO: 589339 - RNA, 19 nt, Artificial Sequence
  Description of Artificial Sequence: Synthetic oligonucleotide
caccgcauagcucagaagu

SEQ ID NO: 589340 - RNA, 19 nt, Artificial Sequence
  Description of Artificial Sequence: Synthetic oligonucleotide
gcugaucaccuacagguac

SEQ ID NO: 589341 - RNA, 19 nt, Artificial Sequence
  Description of Artificial Sequence: Synthetic oligonucleotide
agguucgcccaaaagucuc

SEQ ID NO: 589342 - RNA, 19 nt, Artificial Sequence
  Description of Artificial Sequence: Synthetic oligonucleotide
ucuagguguucgacaguuc

SEQ ID NO: 589343 - RNA, 19 nt, Artificial Sequence
  Description of Artificial Sequence: Synthetic oligonucleotide
cacgucacuacuucaacua

SEQ ID NO: 589344 - RNA, 19 nt, Artificial Sequence
  Description of Artificial Sequence: Synthetic oligonucleotide
gguaguucucuugcuagcc

SEQ ID NO: 589345 - RNA, 19 nt, Artificial Sequence
  Description of Artificial Sequence: Synthetic oligonucleotide
uuugggacgcugucuugaa

SEQ ID NO: 589346 - RNA, 19 nt, Artificial Sequence
  Description of Artificial Sequence: Synthetic oligonucleotide
ucucugauuugaagcucaa

SEQ ID NO: 589347 - RNA, 19 nt, Artificial Sequence
  Description of Artificial Sequence: Synthetic oligonucleotide
uaauugggauugguuuuga

SEQ ID NO: 589348 - RNA, 19 nt, Artificial Sequence
  Description of Artificial Sequence: Synthetic oligonucleotide
aauucacucugaagaguau

SEQ ID NO: 589349 - RNA, 19 nt, Artificial Sequence
  Description of Artificial Sequence: Synthetic oligonucleotide
uguucacgggcagacaguu

SEQ ID NO: 589350 - RNA, 19 nt, Artificial Sequence
  Description of Artificial Sequence: Synthetic oligonucleotide
caaaagucuagguguucga

SEQ ID NO: 589351 - RNA, 19 nt, Artificial Sequence
  Description of Artificial Sequence: Synthetic oligonucleotide
auuucuaauggcagucaaa

SEQ ID NO: 589352 - RNA, 19 nt, Artificial Sequence
  Description of Artificial Sequence: Synthetic oligonucleotide
acgucacuacuucaacuau

SEQ ID NO: 589353 - RNA, 19 nt, Artificial Sequence
  Description of Artificial Sequence: Synthetic oligonucleotide
cauuucuaauggcagucaa

SEQ ID NO: 589354 - RNA, 19 nt, Artificial Sequence
  Description of Artificial Sequence: Synthetic oligonucleotide
cacggguucaccauagcua

SEQ ID NO: 589355 - RNA, 19 nt, Artificial Sequence
  Description of Artificial Sequence: Synthetic oligonucleotide
cuguaauuacuacaaugcu

SEQ ID NO: 589356 - RNA, 19 nt, Artificial Sequence
  Description of Artificial Sequence: Synthetic oligonucleotide
uggcgaauuuggugauaag

SEQ ID NO: 589357 - RNA, 19 nt, Artificial Sequence
  Description of Artificial Sequence: Synthetic oligonucleotide
ucuacucagguaggcagua

SEQ ID NO: 589358 - RNA, 19 nt, Artificial Sequence
  Description of Artificial Sequence: Synthetic oligonucleotide
cacgggcagacaguuuucg

SEQ ID NO: 589359 - RNA, 19 nt, Artificial Sequence
  Description of Artificial Sequence: Synthetic oligonucleotide
acucccuuauuaguuccug

SEQ ID NO: 589360 - RNA, 19 nt, Artificial Sequence
  Description of Artificial Sequence: Synthetic oligonucleotide
cuuuggcugaucaccuaca

SEQ ID NO: 589361 - RNA, 19 nt, Artificial Sequence
  Description of Artificial Sequence: Synthetic oligonucleotide
cuauuuagaagagacugau

SEQ ID NO: 589362 - RNA, 19 nt, Artificial Sequence
  Description of Artificial Sequence: Synthetic oligonucleotide
uuacagccagaugagucua

SEQ ID NO: 589363 - RNA, 19 nt, Artificial Sequence
  Description of Artificial Sequence: Synthetic oligonucleotide
cagcuguccuacuaauuca

SEQ ID NO: 589364 - RNA, 19 nt, Artificial Sequence
  Description of Artificial Sequence: Synthetic oligonucleotide
ugggauugguuuugauuuu

SEQ ID NO: 589365 - RNA, 19 nt, Artificial Sequence
  Description of Artificial Sequence: Synthetic oligonucleotide
cccuuucugaggacuacgg

SEQ ID NO: 589366 - RNA, 19 nt, Artificial Sequence
  Description of Artificial Sequence: Synthetic oligonucleotide
caguaaaguagcacuuuua

SEQ ID NO: 589367 - RNA, 19 nt, Artificial Sequence
  Description of Artificial Sequence: Synthetic oligonucleotide
aagucucauggaaaauaua

SEQ ID NO: 589368 - RNA, 19 nt, Artificial Sequence
  Description of Artificial Sequence: Synthetic oligonucleotide
gacaacguugggugagaaa

SEQ ID NO: 589369 - RNA, 19 nt, Artificial Sequence
  Description of Artificial Sequence: Synthetic oligonucleotide
cgucuacucagguaggcag

SEQ ID NO: 589370 - RNA, 19 nt, Artificial Sequence
  Description of Artificial Sequence: Synthetic oligonucleotide
auagguggauacauugauu

SEQ ID NO: 589371 - RNA, 19 nt, Artificial Sequence
  Description of Artificial Sequence: Synthetic oligonucleotide
cauugauuaugugaggaau

SEQ ID NO: 589372 - RNA, 19 nt, Artificial Sequence
  Description of Artificial Sequence: Synthetic oligonucleotide
agucuagguguucgacagu

SEQ ID NO: 589373 - RNA, 19 nt, Artificial Sequence
  Description of Artificial Sequence: Synthetic oligonucleotide
gcuauuuagaagagacuga

SEQ ID NO: 589374 - RNA, 19 nt, Artificial Sequence
  Description of Artificial Sequence: Synthetic oligonucleotide
aguacuccguggcgaauuu

SEQ ID NO: 589375 - RNA, 19 nt, Artificial Sequence
  Description of Artificial Sequence: Synthetic oligonucleotide
cauuagcccacaggcauca

SEQ ID NO: 589376 - RNA, 19 nt, Artificial Sequence
  Description of Artificial Sequence: Synthetic oligonucleotide
cucccuuauuaguuccuga

SEQ ID NO: 589377 - RNA, 19 nt, Artificial Sequence
  Description of Artificial Sequence: Synthetic oligonucleotide
guggcgaauuuggugauaa

SEQ ID NO: 589378 - RNA, 19 nt, Artificial Sequence
  Description of Artificial Sequence: Synthetic oligonucleotide
ccuuucugaggacuacggc

SEQ ID NO: 589379 - RNA, 19 nt, Artificial Sequence
  Description of Artificial Sequence: Synthetic oligonucleotide
agaagacacgucacuacuu

SEQ ID NO: 589380 - RNA, 19 nt, Artificial Sequence
  Description of Artificial Sequence: Synthetic oligonucleotide
caacuguucuuguaagcgu

SEQ ID NO: 589381 - RNA, 19 nt, Artificial Sequence
  Description of Artificial Sequence: Synthetic oligonucleotide
acgucuacucagguaggca

SEQ ID NO: 589382 - RNA, 19 nt, Artificial Sequence
  Description of Artificial Sequence: Synthetic oligonucleotide
agcgugacugaaacagacu

SEQ ID NO: 589383 - RNA, 19 nt, Artificial Sequence
  Description of Artificial Sequence: Synthetic oligonucleotide
caauaguguuaaggccacc

SEQ ID NO: 589384 - RNA, 19 nt, Artificial Sequence
  Description of Artificial Sequence: Synthetic oligonucleotide
ugacaacguugggugagaa

SEQ ID NO: 589385 - RNA, 19 nt, Artificial Sequence
  Description of Artificial Sequence: Synthetic oligonucleotide
guaguucucuugcuagccu

SEQ ID NO: 589386 - RNA, 19 nt, Artificial Sequence
  Description of Artificial Sequence: Synthetic oligonucleotide
caaagauuauagguuuugu

SEQ ID NO: 589387 - RNA, 19 nt, Artificial Sequence
  Description of Artificial Sequence: Synthetic oligonucleotide
cuacucagguaggcaguag

SEQ ID NO: 589388 - RNA, 19 nt, Artificial Sequence
  Description of Artificial Sequence: Synthetic oligonucleotide
acggggaccaguagcauuu

SEQ ID NO: 589389 - RNA, 19 nt, Artificial Sequence
  Description of Artificial Sequence: Synthetic oligonucleotide
cuagcaccaccgcauagcu

SEQ ID NO: 589390 - RNA, 19 nt, Artificial Sequence
  Description of Artificial Sequence: Synthetic oligonucleotide
cgugacugaaacagacuug

SEQ ID NO: 589391 - RNA, 19 nt, Artificial Sequence
  Description of Artificial Sequence: Synthetic oligonucleotide
gccguuugaccaauaacuc

SEQ ID NO: 589392 - RNA, 19 nt, Artificial Sequence
  Description of Artificial Sequence: Synthetic oligonucleotide
auaauuugacuggcuccuu

SEQ ID NO: 589393 - RNA, 19 nt, Artificial Sequence
  Description of Artificial Sequence: Synthetic oligonucleotide
ccguuugaccaauaacuca

SEQ ID NO: 589394 - RNA, 19 nt, Artificial Sequence
  Description of Artificial Sequence: Synthetic oligonucleotide
cuuggucauuccugguaaa

SEQ ID NO: 589395 - RNA, 19 nt, Artificial Sequence
  Description of Artificial Sequence: Synthetic oligonucleotide
aaagcgggacggggaccag

SEQ ID NO: 589396 - RNA, 19 nt, Artificial Sequence
  Description of Artificial Sequence: Synthetic oligonucleotide
uuccuucgauaguguuaca

SEQ ID NO: 589397 - RNA, 19 nt, Artificial Sequence
  Description of Artificial Sequence: Synthetic oligonucleotide
acagccagaugagucuaua

SEQ ID NO: 589398 - RNA, 19 nt, Artificial Sequence
  Description of Artificial Sequence: Synthetic oligonucleotide
gcuagcucaauugccacua

SEQ ID NO: 589399 - RNA, 19 nt, Artificial Sequence
  Description of Artificial Sequence: Synthetic oligonucleotide
aggcacaaauaaagcggga

SEQ ID NO: 589400 - RNA, 19 nt, Artificial Sequence
  Description of Artificial Sequence: Synthetic oligonucleotide
gguuccuucgauaguguua

SEQ ID NO: 589401 - RNA, 19 nt, Artificial Sequence
  Description of Artificial Sequence: Synthetic oligonucleotide
acguugggugagaaaacuu

SEQ ID NO: 589402 - RNA, 19 nt, Artificial Sequence
  Description of Artificial Sequence: Synthetic oligonucleotide
accgcauagcucagaaguu

SEQ ID NO: 589403 - RNA, 19 nt, Artificial Sequence
  Description of Artificial Sequence: Synthetic oligonucleotide
gcauuucuaauggcaguca

SEQ ID NO: 589404 - RNA, 19 nt, Artificial Sequence
  Description of Artificial Sequence: Synthetic oligonucleotide
gucuagguguucgacaguu

SEQ ID NO: 589405 - RNA, 19 nt, Artificial Sequence
  Description of Artificial Sequence: Synthetic oligonucleotide
gcgugacugaaacagacuu

SEQ ID NO: 589406 - RNA, 19 nt, Artificial Sequence
  Description of Artificial Sequence: Synthetic oligonucleotide
ccuacagauacaaccuugu

SEQ ID NO: 589407 - RNA, 19 nt, Artificial Sequence
  Description of Artificial Sequence: Synthetic oligonucleotide
ccuucgauaguguuacagu

SEQ ID NO: 589408 - RNA, 19 nt, Artificial Sequence
  Description of Artificial Sequence: Synthetic oligonucleotide
  modified_base (6)..(6): a, c, u, g, unknown or other
caauanccuuuggcugauc

SEQ ID NO: 589409 - RNA, 19 nt, Artificial Sequence
  Description of Artificial Sequence: Synthetic oligonucleotide
gucuacucagguaggcagu

SEQ ID NO: 589410 - RNA, 19 nt, Artificial Sequence
  Description of Artificial Sequence: Synthetic oligonucleotide
cgauaguguuacaguacuc

SEQ ID NO: 589411 - RNA, 19 nt, Artificial Sequence
  Description of Artificial Sequence: Synthetic oligonucleotide
gcuuacucccuuauuaguu

SEQ ID NO: 589412 - RNA, 19 nt, Artificial Sequence
  Description of Artificial Sequence: Synthetic oligonucleotide
acaguacuccguggcgaau

SEQ ID NO: 589413 - RNA, 19 nt, Artificial Sequence
  Description of Artificial Sequence: Synthetic oligonucleotide
gacugauauugagcagcua

SEQ ID NO: 589414 - RNA, 19 nt, Artificial Sequence
  Description of Artificial Sequence: Synthetic oligonucleotide
guaaugccuuuagcauguc

SEQ ID NO: 589415 - RNA, 19 nt, Artificial Sequence
  Description of Artificial Sequence: Synthetic oligonucleotide
cucgcuguucacgggcaga

SEQ ID NO: 589416 - RNA, 19 nt, Artificial Sequence
  Description of Artificial Sequence: Synthetic oligonucleotide
ggguucaccauagcuauuu

SEQ ID NO: 589417 - RNA, 19 nt, Artificial Sequence
  Description of Artificial Sequence: Synthetic oligonucleotide
gacuacggcugcagcuuua

SEQ ID NO: 589418 - RNA, 19 nt, Artificial Sequence
  Description of Artificial Sequence: Synthetic oligonucleotide
gggaaccguaacaauuccu

SEQ ID NO: 589419 - RNA, 19 nt, Artificial Sequence
  Description of Artificial Sequence: Synthetic oligonucleotide
gcgggacggggaccaguag

SEQ ID NO: 589420 - RNA, 19 nt, Artificial Sequence
  Description of Artificial Sequence: Synthetic oligonucleotide
ccacggguucaccauagcu

SEQ ID NO: 589421 - RNA, 19 nt, Artificial Sequence
  Description of Artificial Sequence: Synthetic oligonucleotide
ccguaacaauuccugugua

SEQ ID NO: 589422 - RNA, 19 nt, Artificial Sequence
  Description of Artificial Sequence: Synthetic oligonucleotide
gaucaccuacagguaccuu

SEQ ID NO: 589423 - RNA, 19 nt, Artificial Sequence
  Description of Artificial Sequence: Synthetic oligonucleotide
gcaccaccgcauagcucag

SEQ ID NO: 589424 - RNA, 19 nt, Artificial Sequence
  Description of Artificial Sequence: Synthetic oligonucleotide
caccaccgcauagcucaga

SEQ ID NO: 589425 - RNA, 19 nt, Artificial Sequence
  Description of Artificial Sequence: Synthetic oligonucleotide
gcgggucaacagauucuaa

SEQ ID NO: 589426 - RNA, 19 nt, Artificial Sequence
  Description of Artificial Sequence: Synthetic oligonucleotide
ccgcauagcucagaaguuu

SEQ ID NO: 589427 - RNA, 19 nt, Artificial Sequence
  Description of Artificial Sequence: Synthetic oligonucleotide
cggggaccaguagcauuuc

SEQ ID NO: 589428 - RNA, 19 nt, Artificial Sequence
  Description of Artificial Sequence: Synthetic oligonucleotide
cgggauguuuuguguugau

SEQ ID NO: 589429 - RNA, 19 nt, Artificial Sequence
  Description of Artificial Sequence: Synthetic oligonucleotide
cguggcgaauuuggugaua

SEQ ID NO: 589430 - RNA, 19 nt, Artificial Sequence
  Description of Artificial Sequence: Synthetic oligonucleotide
acuaacaguagcuucagcc

SEQ ID NO: 589431 - RNA, 19 nt, Artificial Sequence
  Description of Artificial Sequence: Synthetic oligonucleotide
aaaagcuuauccuuuguac

SEQ ID NO: 589432 - RNA, 19 nt, Artificial Sequence
  Description of Artificial Sequence: Synthetic oligonucleotide
ugaaguucaaauauguggc

SEQ ID NO: 589433 - RNA, 19 nt, Artificial Sequence
  Description of Artificial Sequence: Synthetic oligonucleotide
ugaaauguuagcauugaag

SEQ ID NO: 589434 - RNA, 19 nt, Artificial Sequence
  Description of Artificial Sequence: Synthetic oligonucleotide
cuauguuuagcccagagcc

SEQ ID NO: 589435 - RNA, 19 nt, Artificial Sequence
  Description of Artificial Sequence: Synthetic oligonucleotide
aauugugcauucugaauac

SEQ ID NO: 589436 - RNA, 19 nt, Artificial Sequence
  Description of Artificial Sequence: Synthetic oligonucleotide
uuauguucaaucuuggaca

SEQ ID NO: 589437 - RNA, 19 nt, Artificial Sequence
  Description of Artificial Sequence: Synthetic oligonucleotide
aacgggagaaaagaaaggc

SEQ ID NO: 589438 - RNA, 19 nt, Artificial Sequence
  Description of Artificial Sequence: Synthetic oligonucleotide
aaggacucagcccaccucc

SEQ ID NO: 589439 - RNA, 19 nt, Artificial Sequence
  Description of Artificial Sequence: Synthetic oligonucleotide
aaaaccacuauagcgcugc

SEQ ID NO: 589440 - RNA, 19 nt, Artificial Sequence
  Description of Artificial Sequence: Synthetic oligonucleotide
ucuaauaugugguagcaga

SEQ ID NO: 589441 - RNA, 19 nt, Artificial Sequence
  Description of Artificial Sequence: Synthetic oligonucleotide
guauagaagaggcaaaucc

SEQ ID NO: 589442 - RNA, 19 nt, Artificial Sequence
  Description of Artificial Sequence: Synthetic oligonucleotide
uauagaagaggcaaauccc

SEQ ID NO: 589443 - RNA, 19 nt, Artificial Sequence
  Description of Artificial Sequence: Synthetic oligonucleotide
aagcuuauccuuuguacac

SEQ ID NO: 589444 - RNA, 19 nt, Artificial Sequence
  Description of Artificial Sequence: Synthetic oligonucleotide
uagucuguaucucaggucc

SEQ ID NO: 589445 - RNA, 19 nt, Artificial Sequence
  Description of Artificial Sequence: Synthetic oligonucleotide
accacuauagcgcugccgc

SEQ ID NO: 589446 - RNA, 19 nt, Artificial Sequence
  Description of Artificial Sequence: Synthetic oligonucleotide
aaagcuuauccuuuguaca

SEQ ID NO: 589447 - RNA, 19 nt, Artificial Sequence
  Description of Artificial Sequence: Synthetic oligonucleotide
uuggacauagccaauaaaa

SEQ ID NO: 589448 - RNA, 19 nt, Artificial Sequence
  Description of Artificial Sequence: Synthetic oligonucleotide
aaaguaucaagggacaaug

SEQ ID NO: 589449 - RNA, 19 nt, Artificial Sequence
  Description of Artificial Sequence: Synthetic oligonucleotide
uguucaaucuuggacauag

SEQ ID NO: 589450 - RNA, 19 nt, Artificial Sequence
  Description of Artificial Sequence: Synthetic oligonucleotide
aguaucaagggacaauguc

SEQ ID NO: 589451 - RNA, 19 nt, Artificial Sequence
  Description of Artificial Sequence: Synthetic oligonucleotide
uuuucuaauaugugguagc

SEQ ID NO: 589452 - RNA, 19 nt, Artificial Sequence
  Description of Artificial Sequence: Synthetic oligonucleotide
uaggauaugucuucacugg

SEQ ID NO: 589453 - RNA, 19 nt, Artificial Sequence
  Description of Artificial Sequence: Synthetic oligonucleotide
uggacauagccaauaaaag

SEQ ID NO: 589454 - RNA, 19 nt, Artificial Sequence
  Description of Artificial Sequence: Synthetic oligonucleotide
ucaaguaccggcuucuuca

SEQ ID NO: 589455 - RNA, 19 nt, Artificial Sequence
  Description of Artificial Sequence: Synthetic oligonucleotide
ugucgauacagcaagguaa

SEQ ID NO: 589456 - RNA, 19 nt, Artificial Sequence
  Description of Artificial Sequence: Synthetic oligonucleotide
uacuauuagaaggaagagg

SEQ ID NO: 589457 - RNA, 19 nt, Artificial Sequence
  Description of Artificial Sequence: Synthetic oligonucleotide
ugcaguaucacuuguuagc

SEQ ID NO: 589458 - RNA, 19 nt, Artificial Sequence
  Description of Artificial Sequence: Synthetic oligonucleotide
aguauaaccugguaacgag

SEQ ID NO: 589459 - RNA, 19 nt, Artificial Sequence
  Description of Artificial Sequence: Synthetic oligonucleotide
aaugcuagucuguaucuca

SEQ ID NO: 589460 - RNA, 19 nt, Artificial Sequence
  Description of Artificial Sequence: Synthetic oligonucleotide
aaacuuugcuguuggauga

SEQ ID NO: 589461 - RNA, 19 nt, Artificial Sequence
  Description of Artificial Sequence: Synthetic oligonucleotide
gaagaggaaacugaagucc

SEQ ID NO: 589462 - RNA, 19 nt, Artificial Sequence
  Description of Artificial Sequence: Synthetic oligonucleotide
uguacuugcucguggaucc

SEQ ID NO: 589463 - RNA, 19 nt, Artificial Sequence
  Description of Artificial Sequence: Synthetic oligonucleotide
ugccauuugugucagauuc

SEQ ID NO: 589464 - RNA, 19 nt, Artificial Sequence
  Description of Artificial Sequence: Synthetic oligonucleotide
ugagaguacggucaaaguc

SEQ ID NO: 589465 - RNA, 19 nt, Artificial Sequence
  Description of Artificial Sequence: Synthetic oligonucleotide
ucuuguucugauacucugg

SEQ ID NO: 589466 - RNA, 19 nt, Artificial Sequence
  Description of Artificial Sequence: Synthetic oligonucleotide
uacacauuccagauggucu

SEQ ID NO: 589467 - RNA, 19 nt, Artificial Sequence
  Description of Artificial Sequence: Synthetic oligonucleotide
uuagggaguauagaagagg

SEQ ID NO: 589468 - RNA, 19 nt, Artificial Sequence
  Description of Artificial Sequence: Synthetic oligonucleotide
ucaagcauggucuucccug

SEQ ID NO: 589469 - RNA, 19 nt, Artificial Sequence
  Description of Artificial Sequence: Synthetic oligonucleotide
uuaaggguugacacuaaca

SEQ ID NO: 589470 - RNA, 19 nt, Artificial Sequence
  Description of Artificial Sequence: Synthetic oligonucleotide
uguccuagagccaagguua

SEQ ID NO: 589471 - RNA, 19 nt, Artificial Sequence
  Description of Artificial Sequence: Synthetic oligonucleotide
uuagggaauugagaggugg

SEQ ID NO: 589472 - RNA, 19 nt, Artificial Sequence
  Description of Artificial Sequence: Synthetic oligonucleotide
ugagcgaucuccaugucga

SEQ ID NO: 589473 - RNA, 19 nt, Artificial Sequence
  Description of Artificial Sequence: Synthetic oligonucleotide
cauaacggggacaugggcc

SEQ ID NO: 589474 - RNA, 19 nt, Artificial Sequence
  Description of Artificial Sequence: Synthetic oligonucleotide
ugguuagcugaccaaaccc

SEQ ID NO: 589475 - RNA, 19 nt, Artificial Sequence
  Description of Artificial Sequence: Synthetic oligonucleotide
ucgauagccacauuuuaug

SEQ ID NO: 589476 - RNA, 19 nt, Artificial Sequence
  Description of Artificial Sequence: Synthetic oligonucleotide
uuauccuuuguacacccca

SEQ ID NO: 589477 - RNA, 19 nt, Artificial Sequence
  Description of Artificial Sequence: Synthetic oligonucleotide
ucgcacauaaaccuccugc

SEQ ID NO: 589478 - RNA, 19 nt, Artificial Sequence
  Description of Artificial Sequence: Synthetic oligonucleotide
aacgagugcuccuuggaug

SEQ ID NO: 589479 - RNA, 19 nt, Artificial Sequence
  Description of Artificial Sequence: Synthetic oligonucleotide
guaucucagguccuuaggg

SEQ ID NO: 589480 - RNA, 19 nt, Artificial Sequence
  Description of Artificial Sequence: Synthetic oligonucleotide
ucucguagggucagguucg

SEQ ID NO: 589481 - RNA, 19 nt, Artificial Sequence
  Description of Artificial Sequence: Synthetic oligonucleotide
aaauauguggcaggaagca

SEQ ID NO: 589482 - RNA, 19 nt, Artificial Sequence
  Description of Artificial Sequence: Synthetic oligonucleotide
uaugaaccgggauaggcug

SEQ ID NO: 589483 - RNA, 19 nt, Artificial Sequence
  Description of Artificial Sequence: Synthetic oligonucleotide
uaaucagggaggcuaaccu

SEQ ID NO: 589484 - RNA, 19 nt, Artificial Sequence
  Description of Artificial Sequence: Synthetic oligonucleotide
uaacaaagcgcagacuccg

SEQ ID NO: 589485 - RNA, 19 nt, Artificial Sequence
  Description of Artificial Sequence: Synthetic oligonucleotide
uuugcuccagaaacgaaga

SEQ ID NO: 589486 - RNA, 19 nt, Artificial Sequence
  Description of Artificial Sequence: Synthetic oligonucleotide
guaucaagggacaaugucc

SEQ ID NO: 589487 - RNA, 19 nt, Artificial Sequence
  Description of Artificial Sequence: Synthetic oligonucleotide
acauuuuaugcucccagug

SEQ ID NO: 589488 - RNA, 19 nt, Artificial Sequence
  Description of Artificial Sequence: Synthetic oligonucleotide
cacauaaaccuccugccgg

SEQ ID NO: 589489 - RNA, 19 nt, Artificial Sequence
  Description of Artificial Sequence: Synthetic oligonucleotide
gauacucuggugucugccg

SEQ ID NO: 589490 - RNA, 19 nt, Artificial Sequence
  Description of Artificial Sequence: Synthetic oligonucleotide
ucaugcguccagcugagcc

SEQ ID NO: 589491 - RNA, 19 nt, Artificial Sequence
  Description of Artificial Sequence: Synthetic oligonucleotide
gguaguaucaugcgcagag

SEQ ID NO: 589492 - RNA, 19 nt, Artificial Sequence
  Description of Artificial Sequence: Synthetic oligonucleotide
aucucaacugagaaauucc

SEQ ID NO: 589493 - RNA, 19 nt, Artificial Sequence
  Description of Artificial Sequence: Synthetic oligonucleotide
aagccugaaugcuagucug

SEQ ID NO: 589494 - RNA, 19 nt, Artificial Sequence
  Description of Artificial Sequence: Synthetic oligonucleotide
auaaccugguaacgagugc

SEQ ID NO: 589495 - RNA, 19 nt, Artificial Sequence
  Description of Artificial Sequence: Synthetic oligonucleotide
uuagcaaccugucuucagu

SEQ ID NO: 589496 - RNA, 19 nt, Artificial Sequence
  Description of Artificial Sequence: Synthetic oligonucleotide
aucacuuguuagcuggcac

SEQ ID NO: 589497 - RNA, 19 nt, Artificial Sequence
  Description of Artificial Sequence: Synthetic oligonucleotide
cagaccuaguauaaccugg

SEQ ID NO: 589498 - RNA, 19 nt, Artificial Sequence
  Description of Artificial Sequence: Synthetic oligonucleotide
aggcaaaucccauuuggag

SEQ ID NO: 589499 - RNA, 19 nt, Artificial Sequence
  Description of Artificial Sequence: Synthetic oligonucleotide
aaacuuuagcaaccugucu

SEQ ID NO: 589500 - RNA, 19 nt, Artificial Sequence
  Description of Artificial Sequence: Synthetic oligonucleotide
uuagcuggcacuccuucug

SEQ ID NO: 589501 - RNA, 19 nt, Artificial Sequence
  Description of Artificial Sequence: Synthetic oligonucleotide
uuagcauugaagcgcugca

SEQ ID NO: 589502 - RNA, 19 nt, Artificial Sequence
  Description of Artificial Sequence: Synthetic oligonucleotide
gaggcuaaccugcccaugg

SEQ ID NO: 589503 - RNA, 19 nt, Artificial Sequence
  Description of Artificial Sequence: Synthetic oligonucleotide
ggacauagccaauaaaagc

SEQ ID NO: 589504 - RNA, 19 nt, Artificial Sequence
  Description of Artificial Sequence: Synthetic oligonucleotide
uacggucaaagucagugcu

SEQ ID NO: 589505 - RNA, 19 nt, Artificial Sequence
  Description of Artificial Sequence: Synthetic oligonucleotide
agugcuguagcauccccuc

SEQ ID NO: 589506 - RNA, 19 nt, Artificial Sequence
  Description of Artificial Sequence: Synthetic oligonucleotide
agaaaaccacuauagcgcu

SEQ ID NO: 589507 - RNA, 19 nt, Artificial Sequence
  Description of Artificial Sequence: Synthetic oligonucleotide
ugaaugcuagucuguaucu

SEQ ID NO: 589508 - RNA, 19 nt, Artificial Sequence
  Description of Artificial Sequence: Synthetic oligonucleotide
gagaguacggucaaaguca

SEQ ID NO: 589509 - RNA, 19 nt, Artificial Sequence
  Description of Artificial Sequence: Synthetic oligonucleotide
aucaugcgcagaguaaacc

SEQ ID NO: 589510 - RNA, 19 nt, Artificial Sequence
  Description of Artificial Sequence: Synthetic oligonucleotide
uuuagcaaccugucuucag

SEQ ID NO: 589511 - RNA, 19 nt, Artificial Sequence
  Description of Artificial Sequence: Synthetic oligonucleotide
agcuuagggaauugagagg

SEQ ID NO: 589512 - RNA, 19 nt, Artificial Sequence
  Description of Artificial Sequence: Synthetic oligonucleotide
ugugaggcgaaggaagucc

SEQ ID NO: 589513 - RNA, 19 nt, Artificial Sequence
  Description of Artificial Sequence: Synthetic oligonucleotide
cuuagggaguauagaagag

SEQ ID NO: 589514 - RNA, 19 nt, Artificial Sequence
  Description of Artificial Sequence: Synthetic oligonucleotide
agcaauacuauuagaagga

SEQ ID NO: 589515 - RNA, 19 nt, Artificial Sequence
  Description of Artificial Sequence: Synthetic oligonucleotide
uuuuguccuagagccaagg

SEQ ID NO: 589516 - RNA, 19 nt, Artificial Sequence
  Description of Artificial Sequence: Synthetic oligonucleotide
ugcucguggaucccgaaga

SEQ ID NO: 589517 - RNA, 19 nt, Artificial Sequence
  Description of Artificial Sequence: Synthetic oligonucleotide
ucauaacggggacaugggc

SEQ ID NO: 589518 - RNA, 19 nt, Artificial Sequence
  Description of Artificial Sequence: Synthetic oligonucleotide
caugagaguacggucaaag

SEQ ID NO: 589519 - RNA, 19 nt, Artificial Sequence
  Description of Artificial Sequence: Synthetic oligonucleotide
augugguagcagaauaacc

SEQ ID NO: 589520 - RNA, 19 nt, Artificial Sequence
  Description of Artificial Sequence: Synthetic oligonucleotide
auacacauuccagaugguc

SEQ ID NO: 589521 - RNA, 19 nt, Artificial Sequence
  Description of Artificial Sequence: Synthetic oligonucleotide
ugucauuccgaaaguacau

SEQ ID NO: 589522 - RNA, 19 nt, Artificial Sequence
  Description of Artificial Sequence: Synthetic oligonucleotide
gaaacuuuagcaaccuguc

SEQ ID NO: 589523 - RNA, 19 nt, Artificial Sequence
  Description of Artificial Sequence: Synthetic oligonucleotide
auguuacugcucuagauuu

SEQ ID NO: 589524 - RNA, 19 nt, Artificial Sequence
  Description of Artificial Sequence: Synthetic oligonucleotide
ugggaucagcaauagucag

SEQ ID NO: 589525 - RNA, 19 nt, Artificial Sequence
  Description of Artificial Sequence: Synthetic oligonucleotide
acaugguaaacaucaggca

SEQ ID NO: 589526 - RNA, 19 nt, Artificial Sequence
  Description of Artificial Sequence: Synthetic oligonucleotide
uaguauaaccugguaacga

SEQ ID NO: 589527 - RNA, 19 nt, Artificial Sequence
  Description of Artificial Sequence: Synthetic oligonucleotide
aaaccacuauagcgcugcc

SEQ ID NO: 589528 - RNA, 19 nt, Artificial Sequence
  Description of Artificial Sequence: Synthetic oligonucleotide
uaugugguagcagaauaac

SEQ ID NO: 589529 - RNA, 19 nt, Artificial Sequence
  Description of Artificial Sequence: Synthetic oligonucleotide
uccuuuguacaccccaacu

SEQ ID NO: 589530 - RNA, 19 nt, Artificial Sequence
  Description of Artificial Sequence: Synthetic oligonucleotide
agcuuauccuuuguacacc

SEQ ID NO: 589531 - RNA, 19 nt, Artificial Sequence
  Description of Artificial Sequence: Synthetic oligonucleotide
ucacuuguuagcuggcacu

SEQ ID NO: 589532 - RNA, 19 nt, Artificial Sequence
  Description of Artificial Sequence: Synthetic oligonucleotide
aaccugucuucagugacag

SEQ ID NO: 589533 - RNA, 19 nt, Artificial Sequence
  Description of Artificial Sequence: Synthetic oligonucleotide
uuguacaccccaacuaaaa

SEQ ID NO: 589534 - RNA, 19 nt, Artificial Sequence
  Description of Artificial Sequence: Synthetic oligonucleotide
uaguaucaugcgcagagua

SEQ ID NO: 589535 - RNA, 19 nt, Artificial Sequence
  Description of Artificial Sequence: Synthetic oligonucleotide
uuuguacaccccaacuaaa

SEQ ID NO: 589536 - RNA, 19 nt, Artificial Sequence
  Description of Artificial Sequence: Synthetic oligonucleotide
cucauaacggggacauggg

SEQ ID NO: 589537 - RNA, 19 nt, Artificial Sequence
  Description of Artificial Sequence: Synthetic oligonucleotide
uaugcucccagugauuugu

SEQ ID NO: 589538 - RNA, 19 nt, Artificial Sequence
  Description of Artificial Sequence: Synthetic oligonucleotide
gaaguucaaauauguggca

SEQ ID NO: 589539 - RNA, 19 nt, Artificial Sequence
  Description of Artificial Sequence: Synthetic oligonucleotide
caugcgcagaguaaaccag

SEQ ID NO: 589540 - RNA, 19 nt, Artificial Sequence
  Description of Artificial Sequence: Synthetic oligonucleotide
agggacaauguccucuaag

SEQ ID NO: 589541 - RNA, 19 nt, Artificial Sequence
  Description of Artificial Sequence: Synthetic oligonucleotide
uaaccugguaacgagugcu

SEQ ID NO: 589542 - RNA, 19 nt, Artificial Sequence
  Description of Artificial Sequence: Synthetic oligonucleotide
cuuagguaaucagggaggc

SEQ ID NO: 589543 - RNA, 19 nt, Artificial Sequence
  Description of Artificial Sequence: Synthetic oligonucleotide
uccgaaaguacaucucaac

SEQ ID NO: 589544 - RNA, 19 nt, Artificial Sequence
  Description of Artificial Sequence: Synthetic oligonucleotide
gaagcuuagggaauugaga

SEQ ID NO: 589545 - RNA, 19 nt, Artificial Sequence
  Description of Artificial Sequence: Synthetic oligonucleotide
uacugcucuagauuuugcu

SEQ ID NO: 589546 - RNA, 19 nt, Artificial Sequence
  Description of Artificial Sequence: Synthetic oligonucleotide
gacgcugcacgguuugggg

SEQ ID NO: 589547 - RNA, 19 nt, Artificial Sequence
  Description of Artificial Sequence: Synthetic oligonucleotide
uucuaauaugugguagcag

SEQ ID NO: 589548 - RNA, 19 nt, Artificial Sequence
  Description of Artificial Sequence: Synthetic oligonucleotide
uuagcugaccaaaccccug

SEQ ID NO: 589549 - RNA, 19 nt, Artificial Sequence
  Description of Artificial Sequence: Synthetic oligonucleotide
ucuuggacauagccaauaa

SEQ ID NO: 589550 - RNA, 19 nt, Artificial Sequence
  Description of Artificial Sequence: Synthetic oligonucleotide
guuagcauugaagcgcugc

SEQ ID NO: 589551 - RNA, 19 nt, Artificial Sequence
  Description of Artificial Sequence: Synthetic oligonucleotide
ucggagucacuucagcccu

SEQ ID NO: 589552 - RNA, 19 nt, Artificial Sequence
  Description of Artificial Sequence: Synthetic oligonucleotide
gcucauaacggggacaugg

SEQ ID NO: 589553 - RNA, 19 nt, Artificial Sequence
  Description of Artificial Sequence: Synthetic oligonucleotide
auaugggcuagaagaagac

SEQ ID NO: 589554 - RNA, 19 nt, Artificial Sequence
  Description of Artificial Sequence: Synthetic oligonucleotide
aaccuucauuuccucggag

SEQ ID NO: 589555 - RNA, 19 nt, Artificial Sequence
  Description of Artificial Sequence: Synthetic oligonucleotide
acaaucaccuccgugucug

SEQ ID NO: 589556 - RNA, 19 nt, Artificial Sequence
  Description of Artificial Sequence: Synthetic oligonucleotide
uccugaugaaguucaaaua

SEQ ID NO: 589557 - RNA, 19 nt, Artificial Sequence
  Description of Artificial Sequence: Synthetic oligonucleotide
cagaaauugugcauucuga

SEQ ID NO: 589558 - RNA, 19 nt, Artificial Sequence
  Description of Artificial Sequence: Synthetic oligonucleotide
cauuuuaugcucccaguga

SEQ ID NO: 589559 - RNA, 19 nt, Artificial Sequence
  Description of Artificial Sequence: Synthetic oligonucleotide
uuacugcucuagauuuugc

SEQ ID NO: 589560 - RNA, 19 nt, Artificial Sequence
  Description of Artificial Sequence: Synthetic oligonucleotide
cuuggaugucaaacgggag

SEQ ID NO: 589561 - RNA, 19 nt, Artificial Sequence
  Description of Artificial Sequence: Synthetic oligonucleotide
acauaaaccuccugccggu

SEQ ID NO: 589562 - RNA, 19 nt, Artificial Sequence
  Description of Artificial Sequence: Synthetic oligonucleotide
aguaccggcuucuucaguu

SEQ ID NO: 589563 - RNA, 19 nt, Artificial Sequence
  Description of Artificial Sequence: Synthetic oligonucleotide
caucucaacugagaaauuc

SEQ ID NO: 589564 - RNA, 19 nt, Artificial Sequence
  Description of Artificial Sequence: Synthetic oligonucleotide
agguucguaaguccugucu

SEQ ID NO: 589565 - RNA, 19 nt, Artificial Sequence
  Description of Artificial Sequence: Synthetic oligonucleotide
ucugccaauccuuggguau

SEQ ID NO: 589566 - RNA, 19 nt, Artificial Sequence
  Description of Artificial Sequence: Synthetic oligonucleotide
acucaugagaguacgguca

SEQ ID NO: 589567 - RNA, 19 nt, Artificial Sequence
  Description of Artificial Sequence: Synthetic oligonucleotide
agucacaggugucaugcgu

SEQ ID NO: 589568 - RNA, 19 nt, Artificial Sequence
  Description of Artificial Sequence: Synthetic oligonucleotide
gauagccacauuuuaugcu

SEQ ID NO: 589569 - RNA, 19 nt, Artificial Sequence
  Description of Artificial Sequence: Synthetic oligonucleotide
auacuggcauguuacugcu

SEQ ID NO: 589570 - RNA, 19 nt, Artificial Sequence
  Description of Artificial Sequence: Synthetic oligonucleotide
uggaaacuuuagcaaccug

SEQ ID NO: 589571 - RNA, 19 nt, Artificial Sequence
  Description of Artificial Sequence: Synthetic oligonucleotide
ucacaggugucaugcgucc

SEQ ID NO: 589572 - RNA, 19 nt, Artificial Sequence
  Description of Artificial Sequence: Synthetic oligonucleotide
gcugggaucagcaauaguc

SEQ ID NO: 589573 - RNA, 19 nt, Artificial Sequence
  Description of Artificial Sequence: Synthetic oligonucleotide
cuagucuguaucucagguc

SEQ ID NO: 589574 - RNA, 19 nt, Artificial Sequence
  Description of Artificial Sequence: Synthetic oligonucleotide
uuccgaaaguacaucucaa

SEQ ID NO: 589575 - RNA, 19 nt, Artificial Sequence
  Description of Artificial Sequence: Synthetic oligonucleotide
gaagccgagccuucuguac

SEQ ID NO: 589576 - RNA, 19 nt, Artificial Sequence
  Description of Artificial Sequence: Synthetic oligonucleotide
aaggggacugagugguugu

SEQ ID NO: 589577 - RNA, 19 nt, Artificial Sequence
  Description of Artificial Sequence: Synthetic oligonucleotide
gcuuagguaaucagggagg

SEQ ID NO: 589578 - RNA, 19 nt, Artificial Sequence
  Description of Artificial Sequence: Synthetic oligonucleotide
augagaguacggucaaagu

SEQ ID NO: 589579 - RNA, 19 nt, Artificial Sequence
  Description of Artificial Sequence: Synthetic oligonucleotide
gaagcgcugcacuucgcug

SEQ ID NO: 589580 - RNA, 19 nt, Artificial Sequence
  Description of Artificial Sequence: Synthetic oligonucleotide
aucaccuccgugucugcag

SEQ ID NO: 589581 - RNA, 19 nt, Artificial Sequence
  Description of Artificial Sequence: Synthetic oligonucleotide
cauuccgaaaguacaucuc

SEQ ID NO: 589582 - RNA, 19 nt, Artificial Sequence
  Description of Artificial Sequence: Synthetic oligonucleotide
gugucaugcguccagcuga

SEQ ID NO: 589583 - RNA, 19 nt, Artificial Sequence
  Description of Artificial Sequence: Synthetic oligonucleotide
agagguguucagaaaacca

SEQ ID NO: 589584 - RNA, 19 nt, Artificial Sequence
  Description of Artificial Sequence: Synthetic oligonucleotide
guacggucaaagucagugc

SEQ ID NO: 589585 - RNA, 19 nt, Artificial Sequence
  Description of Artificial Sequence: Synthetic oligonucleotide
ugggcaacggugagagcag

SEQ ID NO: 589586 - RNA, 19 nt, Artificial Sequence
  Description of Artificial Sequence: Synthetic oligonucleotide
aacaaagcgcagacuccgg

SEQ ID NO: 589587 - RNA, 19 nt, Artificial Sequence
  Description of Artificial Sequence: Synthetic oligonucleotide
cugcacuucgcugggaggg

SEQ ID NO: 589588 - RNA, 19 nt, Artificial Sequence
  Description of Artificial Sequence: Synthetic oligonucleotide
agucccugcuauguuuagc

SEQ ID NO: 589589 - RNA, 19 nt, Artificial Sequence
  Description of Artificial Sequence: Synthetic oligonucleotide
guuaaggguugacacuaac

SEQ ID NO: 589590 - RNA, 19 nt, Artificial Sequence
  Description of Artificial Sequence: Synthetic oligonucleotide
gguaacgagugcuccuugg

SEQ ID NO: 589591 - RNA, 19 nt, Artificial Sequence
  Description of Artificial Sequence: Synthetic oligonucleotide
cugauagggguccuuagga

SEQ ID NO: 589592 - RNA, 19 nt, Artificial Sequence
  Description of Artificial Sequence: Synthetic oligonucleotide
uaucccagguccugaguga

SEQ ID NO: 589593 - RNA, 19 nt, Artificial Sequence
  Description of Artificial Sequence: Synthetic oligonucleotide
agggucagguucguaaguc

SEQ ID NO: 589594 - RNA, 19 nt, Artificial Sequence
  Description of Artificial Sequence: Synthetic oligonucleotide
cuuauccuuuguacacccc

SEQ ID NO: 589595 - RNA, 19 nt, Artificial Sequence
  Description of Artificial Sequence: Synthetic oligonucleotide
uuuuaugcucccagugauu

SEQ ID NO: 589596 - RNA, 19 nt, Artificial Sequence
  Description of Artificial Sequence: Synthetic oligonucleotide
gcuauguuuagcccagagc

SEQ ID NO: 589597 - RNA, 19 nt, Artificial Sequence
  Description of Artificial Sequence: Synthetic oligonucleotide
uuuagcuggcucagacgcu

SEQ ID NO: 589598 - RNA, 19 nt, Artificial Sequence
  Description of Artificial Sequence: Synthetic oligonucleotide
uccucgauagccacauuuu

SEQ ID NO: 589599 - RNA, 19 nt, Artificial Sequence
  Description of Artificial Sequence: Synthetic oligonucleotide
caguaucugagccagcaga

SEQ ID NO: 589600 - RNA, 19 nt, Artificial Sequence
  Description of Artificial Sequence: Synthetic oligonucleotide
caggcauguagauggugag

SEQ ID NO: 589601 - RNA, 19 nt, Artificial Sequence
  Description of Artificial Sequence: Synthetic oligonucleotide
gaagccugaaugcuagucu

SEQ ID NO: 589602 - RNA, 19 nt, Artificial Sequence
  Description of Artificial Sequence: Synthetic oligonucleotide
aaccugguaacgagugcuc

SEQ ID NO: 589603 - RNA, 19 nt, Artificial Sequence
  Description of Artificial Sequence: Synthetic oligonucleotide
ugccgagucucauucugca

SEQ ID NO: 589604 - RNA, 19 nt, Artificial Sequence
  Description of Artificial Sequence: Synthetic oligonucleotide
aaguaucaagggacaaugu

SEQ ID NO: 589605 - RNA, 19 nt, Artificial Sequence
  Description of Artificial Sequence: Synthetic oligonucleotide
agaguaaaccagaagcuua

SEQ ID NO: 589606 - RNA, 19 nt, Artificial Sequence
  Description of Artificial Sequence: Synthetic oligonucleotide
uuaugcucccagugauuug

SEQ ID NO: 589607 - RNA, 19 nt, Artificial Sequence
  Description of Artificial Sequence: Synthetic oligonucleotide
gaauugagaggugguugcc

SEQ ID NO: 589608 - RNA, 19 nt, Artificial Sequence
  Description of Artificial Sequence: Synthetic oligonucleotide
auacucuuguucugauacu

SEQ ID NO: 589609 - RNA, 19 nt, Artificial Sequence
  Description of Artificial Sequence: Synthetic oligonucleotide
gguuagcugaccaaacccc

SEQ ID NO: 589610 - RNA, 19 nt, Artificial Sequence
  Description of Artificial Sequence: Synthetic oligonucleotide
gucgauacagcaagguaac

SEQ ID NO: 589611 - RNA, 19 nt, Artificial Sequence
  Description of Artificial Sequence: Synthetic oligonucleotide
uucgcacauaaaccuccug

SEQ ID NO: 589612 - RNA, 19 nt, Artificial Sequence
  Description of Artificial Sequence: Synthetic oligonucleotide
ccaugaaauguuagcauug

SEQ ID NO: 589613 - RNA, 19 nt, Artificial Sequence
  Description of Artificial Sequence: Synthetic oligonucleotide
uggugagucacagguguca

SEQ ID NO: 589614 - RNA, 19 nt, Artificial Sequence
  Description of Artificial Sequence: Synthetic oligonucleotide
caaguaccggcuucuucag

SEQ ID NO: 589615 - RNA, 19 nt, Artificial Sequence
  Description of Artificial Sequence: Synthetic oligonucleotide
guggaucccgaagaggaag

SEQ ID NO: 589616 - RNA, 19 nt, Artificial Sequence
  Description of Artificial Sequence: Synthetic oligonucleotide
gcuuauccuuuguacaccc

SEQ ID NO: 589617 - RNA, 19 nt, Artificial Sequence
  Description of Artificial Sequence: Synthetic oligonucleotide
augucgauacagcaaggua

SEQ ID NO: 589618 - RNA, 19 nt, Artificial Sequence
  Description of Artificial Sequence: Synthetic oligonucleotide
uaucacuuguuagcuggca

SEQ ID NO: 589619 - RNA, 19 nt, Artificial Sequence
  Description of Artificial Sequence: Synthetic oligonucleotide
cucacucauucaucugggc

SEQ ID NO: 589620 - RNA, 19 nt, Artificial Sequence
  Description of Artificial Sequence: Synthetic oligonucleotide
guucguaaguccugucuca

SEQ ID NO: 589621 - RNA, 19 nt, Artificial Sequence
  Description of Artificial Sequence: Synthetic oligonucleotide
aggcuaaccugcccauggg

SEQ ID NO: 589622 - RNA, 19 nt, Artificial Sequence
  Description of Artificial Sequence: Synthetic oligonucleotide
gguugacacuaacaguagc

SEQ ID NO: 589623 - RNA, 19 nt, Artificial Sequence
  Description of Artificial Sequence: Synthetic oligonucleotide
agaguacggucaaagucag

SEQ ID NO: 589624 - RNA, 19 nt, Artificial Sequence
  Description of Artificial Sequence: Synthetic oligonucleotide
caugguaaacaucaggcau

SEQ ID NO: 589625 - RNA, 19 nt, Artificial Sequence
  Description of Artificial Sequence: Synthetic oligonucleotide
auaugugguagcagaauaa

SEQ ID NO: 589626 - RNA, 19 nt, Artificial Sequence
  Description of Artificial Sequence: Synthetic oligonucleotide
ugagcagaccuaguauaac

SEQ ID NO: 589627 - RNA, 19 nt, Artificial Sequence
  Description of Artificial Sequence: Synthetic oligonucleotide
augaaccgggauaggcugc

SEQ ID NO: 589628 - RNA, 19 nt, Artificial Sequence
  Description of Artificial Sequence: Synthetic oligonucleotide
agccacagggaaacuuugc

SEQ ID NO: 589629 - RNA, 19 nt, Artificial Sequence
  Description of Artificial Sequence: Synthetic oligonucleotide
guaucaugcgcagaguaaa

SEQ ID NO: 589630 - RNA, 19 nt, Artificial Sequence
  Description of Artificial Sequence: Synthetic oligonucleotide
agugacaggcacaguauga

SEQ ID NO: 589631 - RNA, 19 nt, Artificial Sequence
  Description of Artificial Sequence: Synthetic oligonucleotide
ugguaacgagugcuccuug

SEQ ID NO: 589632 - RNA, 19 nt, Artificial Sequence
  Description of Artificial Sequence: Synthetic oligonucleotide
agggugccuucuuacuguc

SEQ ID NO: 589633 - RNA, 19 nt, Artificial Sequence
  Description of Artificial Sequence: Synthetic oligonucleotide
acuauagcgcugccgcaga

SEQ ID NO: 589634 - RNA, 19 nt, Artificial Sequence
  Description of Artificial Sequence: Synthetic oligonucleotide
guaacgagugcuccuugga

SEQ ID NO: 589635 - RNA, 19 nt, Artificial Sequence
  Description of Artificial Sequence: Synthetic oligonucleotide
gguucguaaguccugucuc

SEQ ID NO: 589636 - RNA, 19 nt, Artificial Sequence
  Description of Artificial Sequence: Synthetic oligonucleotide
auggaaacuuuagcaaccu

SEQ ID NO: 589637 - RNA, 19 nt, Artificial Sequence
  Description of Artificial Sequence: Synthetic oligonucleotide
ucaccuccgugucugcagu

SEQ ID NO: 589638 - RNA, 19 nt, Artificial Sequence
  Description of Artificial Sequence: Synthetic oligonucleotide
cacuauagcgcugccgcag

SEQ ID NO: 589639 - RNA, 19 nt, Artificial Sequence
  Description of Artificial Sequence: Synthetic oligonucleotide
acacuaacaguagcuucag

SEQ ID NO: 589640 - RNA, 19 nt, Artificial Sequence
  Description of Artificial Sequence: Synthetic oligonucleotide
ugaaccgggauaggcugcc

SEQ ID NO: 589641 - RNA, 19 nt, Artificial Sequence
  Description of Artificial Sequence: Synthetic oligonucleotide
ucccugcuauguuuagccc

SEQ ID NO: 589642 - RNA, 19 nt, Artificial Sequence
  Description of Artificial Sequence: Synthetic oligonucleotide
uuccucggagucacuucag

SEQ ID NO: 589643 - RNA, 19 nt, Artificial Sequence
  Description of Artificial Sequence: Synthetic oligonucleotide
gaaaaccacuauagcgcug

SEQ ID NO: 589644 - RNA, 19 nt, Artificial Sequence
  Description of Artificial Sequence: Synthetic oligonucleotide
agacgcugcacgguuuggg

SEQ ID NO: 589645 - RNA, 19 nt, Artificial Sequence
  Description of Artificial Sequence: Synthetic oligonucleotide
aaccgggauaggcugccau

SEQ ID NO: 589646 - RNA, 19 nt, Artificial Sequence
  Description of Artificial Sequence: Synthetic oligonucleotide
gggaucagcaauagucagg

SEQ ID NO: 589647 - RNA, 19 nt, Artificial Sequence
  Description of Artificial Sequence: Synthetic oligonucleotide
aguaucaugcgcagaguaa

SEQ ID NO: 589648 - RNA, 19 nt, Artificial Sequence
  Description of Artificial Sequence: Synthetic oligonucleotide
auguuagcauugaagcgcu

SEQ ID NO: 589649 - RNA, 19 nt, Artificial Sequence
  Description of Artificial Sequence: Synthetic oligonucleotide
agguccuuagggaguauag

SEQ ID NO: 589650 - RNA, 19 nt, Artificial Sequence
  Description of Artificial Sequence: Synthetic oligonucleotide
ggcauguagauggugaguc

SEQ ID NO: 589651 - RNA, 19 nt, Artificial Sequence
  Description of Artificial Sequence: Synthetic oligonucleotide
augcuagucuguaucucag

SEQ ID NO: 589652 - RNA, 19 nt, Artificial Sequence
  Description of Artificial Sequence: Synthetic oligonucleotide
uucugccaauccuugggua

SEQ ID NO: 589653 - RNA, 19 nt, Artificial Sequence
  Description of Artificial Sequence: Synthetic oligonucleotide
ccugauagggguccuuagg

SEQ ID NO: 589654 - RNA, 19 nt, Artificial Sequence
  Description of Artificial Sequence: Synthetic oligonucleotide
ggaaacuuuagcaaccugu

SEQ ID NO: 589655 - RNA, 19 nt, Artificial Sequence
  Description of Artificial Sequence: Synthetic oligonucleotide
ccacauuuuaugcucccag

SEQ ID NO: 589656 - RNA, 19 nt, Artificial Sequence
  Description of Artificial Sequence: Synthetic oligonucleotide
gcagaccuaguauaaccug

SEQ ID NO: 589657 - RNA, 19 nt, Artificial Sequence
  Description of Artificial Sequence: Synthetic oligonucleotide
uccuugguuagcugaccaa

SEQ ID NO: 589658 - RNA, 19 nt, Artificial Sequence
  Description of Artificial Sequence: Synthetic oligonucleotide
uguuagcauugaagcgcug

SEQ ID NO: 589659 - RNA, 19 nt, Artificial Sequence
  Description of Artificial Sequence: Synthetic oligonucleotide
uuagguaaucagggaggcu

SEQ ID NO: 589660 - RNA, 19 nt, Artificial Sequence
  Description of Artificial Sequence: Synthetic oligonucleotide
ugaagccgagccuucugua

SEQ ID NO: 589661 - RNA, 19 nt, Artificial Sequence
  Description of Artificial Sequence: Synthetic oligonucleotide
agacuccgggccugugugg

SEQ ID NO: 589662 - RNA, 19 nt, Artificial Sequence
  Description of Artificial Sequence: Synthetic oligonucleotide
ggugucaugcguccagcug

SEQ ID NO: 589663 - RNA, 19 nt, Artificial Sequence
  Description of Artificial Sequence: Synthetic oligonucleotide
agcacucaugagaguacgg

SEQ ID NO: 589664 - RNA, 19 nt, Artificial Sequence
  Description of Artificial Sequence: Synthetic oligonucleotide
ccucacucauucaucuggg

SEQ ID NO: 589665 - RNA, 19 nt, Artificial Sequence
  Description of Artificial Sequence: Synthetic oligonucleotide
uggguaugacagacucugu

SEQ ID NO: 589666 - RNA, 19 nt, Artificial Sequence
  Description of Artificial Sequence: Synthetic oligonucleotide
cacuuguuagcuggcacuc

SEQ ID NO: 589667 - RNA, 19 nt, Artificial Sequence
  Description of Artificial Sequence: Synthetic oligonucleotide
gcuucgcacauaaaccucc

SEQ ID NO: 589668 - RNA, 19 nt, Artificial Sequence
  Description of Artificial Sequence: Synthetic oligonucleotide
aggcgaaggaaguccugca

SEQ ID NO: 589669 - RNA, 19 nt, Artificial Sequence
  Description of Artificial Sequence: Synthetic oligonucleotide
cgauagccacauuuuaugc

SEQ ID NO: 589670 - RNA, 19 nt, Artificial Sequence
  Description of Artificial Sequence: Synthetic oligonucleotide
cagggaaacuuugcuguug

SEQ ID NO: 589671 - RNA, 19 nt, Artificial Sequence
  Description of Artificial Sequence: Synthetic oligonucleotide
gucacuucagcccuauuuu

SEQ ID NO: 589672 - RNA, 19 nt, Artificial Sequence
  Description of Artificial Sequence: Synthetic oligonucleotide
aggugucaugcguccagcu

SEQ ID NO: 589673 - RNA, 19 nt, Artificial Sequence
  Description of Artificial Sequence: Synthetic oligonucleotide
ucgauacagcaagguaaca

SEQ ID NO: 589674 - RNA, 19 nt, Artificial Sequence
  Description of Artificial Sequence: Synthetic oligonucleotide
uccgugucugcaguaucac

SEQ ID NO: 589675 - RNA, 19 nt, Artificial Sequence
  Description of Artificial Sequence: Synthetic oligonucleotide
gugguaagagguguucaga

SEQ ID NO: 589676 - RNA, 19 nt, Artificial Sequence
  Description of Artificial Sequence: Synthetic oligonucleotide
ugccaauccuuggguauga

SEQ ID NO: 589677 - RNA, 19 nt, Artificial Sequence
  Description of Artificial Sequence: Synthetic oligonucleotide
ggcccaauggaaacuuuag

SEQ ID NO: 589678 - RNA, 19 nt, Artificial Sequence
  Description of Artificial Sequence: Synthetic oligonucleotide
agcaaccaggguaguauca

SEQ ID NO: 589679 - RNA, 19 nt, Artificial Sequence
  Description of Artificial Sequence: Synthetic oligonucleotide
ucccugucugccacauggu

SEQ ID NO: 589680 - RNA, 19 nt, Artificial Sequence
  Description of Artificial Sequence: Synthetic oligonucleotide
cuaagagucccugcuaugu

SEQ ID NO: 589681 - RNA, 19 nt, Artificial Sequence
  Description of Artificial Sequence: Synthetic oligonucleotide
cucgauagccacauuuuau

SEQ ID NO: 589682 - RNA, 19 nt, Artificial Sequence
  Description of Artificial Sequence: Synthetic oligonucleotide
ccugaugaaguucaaauau

SEQ ID NO: 589683 - RNA, 19 nt, Artificial Sequence
  Description of Artificial Sequence: Synthetic oligonucleotide
aggacagugaggagcaaua

SEQ ID NO: 589684 - RNA, 19 nt, Artificial Sequence
  Description of Artificial Sequence: Synthetic oligonucleotide
acuaagauacuggcauguu

SEQ ID NO: 589685 - RNA, 19 nt, Artificial Sequence
  Description of Artificial Sequence: Synthetic oligonucleotide
cacauuuuaugcucccagu

SEQ ID NO: 589686 - RNA, 19 nt, Artificial Sequence
  Description of Artificial Sequence: Synthetic oligonucleotide
agggaguauagaagaggca

SEQ ID NO: 589687 - RNA, 19 nt, Artificial Sequence
  Description of Artificial Sequence: Synthetic oligonucleotide
guagcagaauaaccaggua

SEQ ID NO: 589688 - RNA, 19 nt, Artificial Sequence
  Description of Artificial Sequence: Synthetic oligonucleotide
agggaauugagaggugguu

SEQ ID NO: 589689 - RNA, 19 nt, Artificial Sequence
  Description of Artificial Sequence: Synthetic oligonucleotide
gcuagucuguaucucaggu

SEQ ID NO: 589690 - RNA, 19 nt, Artificial Sequence
  Description of Artificial Sequence: Synthetic oligonucleotide
aggcauguagauggugagu

SEQ ID NO: 589691 - RNA, 19 nt, Artificial Sequence
  Description of Artificial Sequence: Synthetic oligonucleotide
cacauggugguagccagga

SEQ ID NO: 589692 - RNA, 19 nt, Artificial Sequence
  Description of Artificial Sequence: Synthetic oligonucleotide
caagggacaauguccucua

SEQ ID NO: 589693 - RNA, 19 nt, Artificial Sequence
  Description of Artificial Sequence: Synthetic oligonucleotide
gaugauccaguuccucgau

SEQ ID NO: 589694 - RNA, 19 nt, Artificial Sequence
  Description of Artificial Sequence: Synthetic oligonucleotide
guauaaccugguaacgagu

SEQ ID NO: 589695 - RNA, 19 nt, Artificial Sequence
  Description of Artificial Sequence: Synthetic oligonucleotide
aggggacugagugguuguc

SEQ ID NO: 589696 - RNA, 19 nt, Artificial Sequence
  Description of Artificial Sequence: Synthetic oligonucleotide
ugcacuucgcugggaggga

SEQ ID NO: 589697 - RNA, 19 nt, Artificial Sequence
  Description of Artificial Sequence: Synthetic oligonucleotide
ccuuaggauaugucuucac

SEQ ID NO: 589698 - RNA, 19 nt, Artificial Sequence
  Description of Artificial Sequence: Synthetic oligonucleotide
agagucccugcuauguuua

SEQ ID NO: 589699 - RNA, 19 nt, Artificial Sequence
  Description of Artificial Sequence: Synthetic oligonucleotide
ucaugagaguacggucaaa

SEQ ID NO: 589700 - RNA, 19 nt, Artificial Sequence
  Description of Artificial Sequence: Synthetic oligonucleotide
ggcauguuacugcucuaga

SEQ ID NO: 589701 - RNA, 19 nt, Artificial Sequence
  Description of Artificial Sequence: Synthetic oligonucleotide
cguguguuugcucacaaaa

SEQ ID NO: 589702 - RNA, 19 nt, Artificial Sequence
  Description of Artificial Sequence: Synthetic oligonucleotide
cuauuagaaggaagaggau

SEQ ID NO: 589703 - RNA, 19 nt, Artificial Sequence
  Description of Artificial Sequence: Synthetic oligonucleotide
guagcauccccuccuuggu

SEQ ID NO: 589704 - RNA, 19 nt, Artificial Sequence
  Description of Artificial Sequence: Synthetic oligonucleotide
caugucgauacagcaaggu

SEQ ID NO: 589705 - RNA, 19 nt, Artificial Sequence
  Description of Artificial Sequence: Synthetic oligonucleotide
agguaaucagggaggcuaa

SEQ ID NO: 589706 - RNA, 19 nt, Artificial Sequence
  Description of Artificial Sequence: Synthetic oligonucleotide
caagcauggucuucccugu

SEQ ID NO: 589707 - RNA, 19 nt, Artificial Sequence
  Description of Artificial Sequence: Synthetic oligonucleotide
ugccgcagagccuggccua

SEQ ID NO: 589708 - RNA, 19 nt, Artificial Sequence
  Description of Artificial Sequence: Synthetic oligonucleotide
gggacugagugguugucaa

SEQ ID NO: 589709 - RNA, 19 nt, Artificial Sequence
  Description of Artificial Sequence: Synthetic oligonucleotide
agucuguaucucagguccu

SEQ ID NO: 589710 - RNA, 19 nt, Artificial Sequence
  Description of Artificial Sequence: Synthetic oligonucleotide
gggauaggcugccaugaaa

SEQ ID NO: 589711 - RNA, 19 nt, Artificial Sequence
  Description of Artificial Sequence: Synthetic oligonucleotide
cagguucguaaguccuguc

SEQ ID NO: 589712 - RNA, 19 nt, Artificial Sequence
  Description of Artificial Sequence: Synthetic oligonucleotide
gcauguagauggugaguca

SEQ ID NO: 589713 - RNA, 19 nt, Artificial Sequence
  Description of Artificial Sequence: Synthetic oligonucleotide
agccugaaugcuagucugu

SEQ ID NO: 589714 - RNA, 19 nt, Artificial Sequence
  Description of Artificial Sequence: Synthetic oligonucleotide
ugcucauaacggggacaug

SEQ ID NO: 589715 - RNA, 19 nt, Artificial Sequence
  Description of Artificial Sequence: Synthetic oligonucleotide
ccuuuguacaccccaacua

SEQ ID NO: 589716 - RNA, 19 nt, Artificial Sequence
  Description of Artificial Sequence: Synthetic oligonucleotide
gcaauacuauuagaaggaa

SEQ ID NO: 589717 - RNA, 19 nt, Artificial Sequence
  Description of Artificial Sequence: Synthetic oligonucleotide
cccugcuauguuuagccca

SEQ ID NO: 589718 - RNA, 19 nt, Artificial Sequence
  Description of Artificial Sequence: Synthetic oligonucleotide
acuugcucguggaucccga

SEQ ID NO: 589719 - RNA, 19 nt, Artificial Sequence
  Description of Artificial Sequence: Synthetic oligonucleotide
ccgaaaguacaucucaacu

SEQ ID NO: 589720 - RNA, 19 nt, Artificial Sequence
  Description of Artificial Sequence: Synthetic oligonucleotide
cagggugccuucuuacugu

SEQ ID NO: 589721 - RNA, 19 nt, Artificial Sequence
  Description of Artificial Sequence: Synthetic oligonucleotide
ggccagggugccuucuuac

SEQ ID NO: 589722 - RNA, 19 nt, Artificial Sequence
  Description of Artificial Sequence: Synthetic oligonucleotide
gcauguuacugcucuagau

SEQ ID NO: 589723 - RNA, 19 nt, Artificial Sequence
  Description of Artificial Sequence: Synthetic oligonucleotide
agugcuccuuggaugucaa

SEQ ID NO: 589724 - RNA, 19 nt, Artificial Sequence
  Description of Artificial Sequence: Synthetic oligonucleotide
gcaacggugagagcagcca

SEQ ID NO: 589725 - RNA, 19 nt, Artificial Sequence
  Description of Artificial Sequence: Synthetic oligonucleotide
cauuccagauggucucgua

SEQ ID NO: 589726 - RNA, 19 nt, Artificial Sequence
  Description of Artificial Sequence: Synthetic oligonucleotide
cuucgcacauaaaccuccu

SEQ ID NO: 589727 - RNA, 19 nt, Artificial Sequence
  Description of Artificial Sequence: Synthetic oligonucleotide
gguaaucagggaggcuaac

SEQ ID NO: 589728 - RNA, 19 nt, Artificial Sequence
  Description of Artificial Sequence: Synthetic oligonucleotide
acggucaaagucagugcuu

SEQ ID NO: 589729 - RNA, 19 nt, Artificial Sequence
  Description of Artificial Sequence: Synthetic oligonucleotide
guaguaucaugcgcagagu

SEQ ID NO: 589730 - RNA, 19 nt, Artificial Sequence
  Description of Artificial Sequence: Synthetic oligonucleotide
cuugcucguggaucccgaa

SEQ ID NO: 589731 - RNA, 19 nt, Artificial Sequence
  Description of Artificial Sequence: Synthetic oligonucleotide
ccgagccuucuguacuugc

SEQ ID NO: 589732 - RNA, 19 nt, Artificial Sequence
  Description of Artificial Sequence: Synthetic oligonucleotide
agcagcccguguguuugcu

SEQ ID NO: 589733 - RNA, 19 nt, Artificial Sequence
  Description of Artificial Sequence: Synthetic oligonucleotide
gcuaaccugcccaugggcu

SEQ ID NO: 589734 - RNA, 19 nt, Artificial Sequence
  Description of Artificial Sequence: Synthetic oligonucleotide
auguucaaucuuggacaua

SEQ ID NO: 589735 - RNA, 19 nt, Artificial Sequence
  Description of Artificial Sequence: Synthetic oligonucleotide
cgcugcacgguuuggggug

SEQ ID NO: 589736 - RNA, 19 nt, Artificial Sequence
  Description of Artificial Sequence: Synthetic oligonucleotide
cacaaucaccuccgugucu

SEQ ID NO: 589737 - RNA, 19 nt, Artificial Sequence
  Description of Artificial Sequence: Synthetic oligonucleotide
ggaggcuaaccugcccaug

SEQ ID NO: 589738 - RNA, 19 nt, Artificial Sequence
  Description of Artificial Sequence: Synthetic oligonucleotide
gugaggcgaaggaaguccu

SEQ ID NO: 589739 - RNA, 19 nt, Artificial Sequence
  Description of Artificial Sequence: Synthetic oligonucleotide
gcacuaagagucccugcua

SEQ ID NO: 589740 - RNA, 19 nt, Artificial Sequence
  Description of Artificial Sequence: Synthetic oligonucleotide
gaaccgggauaggcugcca

SEQ ID NO: 589741 - RNA, 19 nt, Artificial Sequence
  Description of Artificial Sequence: Synthetic oligonucleotide
gucaugcguccagcugagc

SEQ ID NO: 589742 - RNA, 19 nt, Artificial Sequence
  Description of Artificial Sequence: Synthetic oligonucleotide
ccucgauagccacauuuua

SEQ ID NO: 589743 - RNA, 19 nt, Artificial Sequence
  Description of Artificial Sequence: Synthetic oligonucleotide
gcugagccucacucauuca

SEQ ID NO: 589744 - RNA, 19 nt, Artificial Sequence
  Description of Artificial Sequence: Synthetic oligonucleotide
ucguagggucagguucgua

SEQ ID NO: 589745 - RNA, 19 nt, Artificial Sequence
  Description of Artificial Sequence: Synthetic oligonucleotide
guaccggcuucuucaguuu

SEQ ID NO: 589746 - RNA, 19 nt, Artificial Sequence
  Description of Artificial Sequence: Synthetic oligonucleotide
ccccuccuugguuagcuga

SEQ ID NO: 589747 - RNA, 19 nt, Artificial Sequence
  Description of Artificial Sequence: Synthetic oligonucleotide
gggcccaauggaaacuuua

SEQ ID NO: 589748 - RNA, 19 nt, Artificial Sequence
  Description of Artificial Sequence: Synthetic oligonucleotide
gggcaacggugagagcagc

SEQ ID NO: 589749 - RNA, 19 nt, Artificial Sequence
  Description of Artificial Sequence: Synthetic oligonucleotide
ggguaguaucaugcgcaga

SEQ ID NO: 589750 - RNA, 19 nt, Artificial Sequence
  Description of Artificial Sequence: Synthetic oligonucleotide
gagcgaucuccaugucgau

SEQ ID NO: 589751 - RNA, 19 nt, Artificial Sequence
  Description of Artificial Sequence: Synthetic oligonucleotide
ccgggauaggcugccauga

SEQ ID NO: 589752 - RNA, 19 nt, Artificial Sequence
  Description of Artificial Sequence: Synthetic oligonucleotide
gcagcccguguguuugcuc

SEQ ID NO: 589753 - RNA, 19 nt, Artificial Sequence
  Description of Artificial Sequence: Synthetic oligonucleotide
ggaugucaaacgggagaaa

SEQ ID NO: 589754 - RNA, 19 nt, Artificial Sequence
  Description of Artificial Sequence: Synthetic oligonucleotide
ccggugguaagagguguuc

SEQ ID NO: 589755 - RNA, 19 nt, Artificial Sequence
  Description of Artificial Sequence: Synthetic oligonucleotide
gccauuugugucagauucu

SEQ ID NO: 589756 - RNA, 19 nt, Artificial Sequence
  Description of Artificial Sequence: Synthetic oligonucleotide
ccacuauagcgcugccgca

SEQ ID NO: 589757 - RNA, 19 nt, Artificial Sequence
  Description of Artificial Sequence: Synthetic oligonucleotide
cucagacgcugcacgguuu

SEQ ID NO: 589758 - RNA, 19 nt, Artificial Sequence
  Description of Artificial Sequence: Synthetic oligonucleotide
ggugagucacaggugucau

SEQ ID NO: 589759 - RNA, 19 nt, Artificial Sequence
  Description of Artificial Sequence: Synthetic oligonucleotide
augcucccagugauuugua

SEQ ID NO: 589760 - RNA, 19 nt, Artificial Sequence
  Description of Artificial Sequence: Synthetic oligonucleotide
gaguacggucaaagucagu

SEQ ID NO: 589761 - RNA, 19 nt, Artificial Sequence
  Description of Artificial Sequence: Synthetic oligonucleotide
gccgagccuucuguacuug

SEQ ID NO: 589762 - RNA, 19 nt, Artificial Sequence
  Description of Artificial Sequence: Synthetic oligonucleotide
ccuccugccggugguaaga

SEQ ID NO: 589763 - RNA, 19 nt, Artificial Sequence
  Description of Artificial Sequence: Synthetic oligonucleotide
gcucagacgcugcacgguu

SEQ ID NO: 589764 - RNA, 19 nt, Artificial Sequence
  Description of Artificial Sequence: Synthetic oligonucleotide
caccuccgugucugcagua

SEQ ID NO: 589765 - RNA, 19 nt, Artificial Sequence
  Description of Artificial Sequence: Synthetic oligonucleotide
gggaggcuaaccugcccau

SEQ ID NO: 589766 - RNA, 19 nt, Artificial Sequence
  Description of Artificial Sequence: Synthetic oligonucleotide
acggggacaugggcccaau

SEQ ID NO: 589767 - RNA, 19 nt, Artificial Sequence
  Description of Artificial Sequence: Synthetic oligonucleotide
ggucucguagggucagguu

SEQ ID NO: 589768 - RNA, 19 nt, Artificial Sequence
  Description of Artificial Sequence: Synthetic oligonucleotide
ccguguguuugcucacaaa

SEQ ID NO: 589769 - RNA, 19 nt, Artificial Sequence
  Description of Artificial Sequence: Synthetic oligonucleotide
gcuucugagcagaccuagu

SEQ ID NO: 589770 - RNA, 19 nt, Artificial Sequence
  Description of Artificial Sequence: Synthetic oligonucleotide
cggugguaagagguguuca

SEQ ID NO: 589771 - RNA, 19 nt, Artificial Sequence
  Description of Artificial Sequence: Synthetic oligonucleotide
ccgugucugcaguaucacu

SEQ ID NO: 589772 - RNA, 19 nt, Artificial Sequence
  Description of Artificial Sequence: Synthetic oligonucleotide
ccgagggcgggaggagcag

SEQ ID NO: 589773 - RNA, 19 nt, Artificial Sequence
  Description of Artificial Sequence: Synthetic oligonucleotide
cucguagggucagguucgu

SEQ ID NO: 589774 - RNA, 19 nt, Artificial Sequence
  Description of Artificial Sequence: Synthetic oligonucleotide
ggucaaguaccggcuucuu

SEQ ID NO: 589775 - RNA, 19 nt, Artificial Sequence
  Description of Artificial Sequence: Synthetic oligonucleotide
gccggugguaagagguguu

SEQ ID NO: 589776 - RNA, 19 nt, Artificial Sequence
  Description of Artificial Sequence: Synthetic oligonucleotide
gcgcagacuccgggccugu

SEQ ID NO: 589777 - RNA, 19 nt, Artificial Sequence
  Description of Artificial Sequence: Synthetic oligonucleotide
auaaguauuacauuaauag

SEQ ID NO: 589778 - RNA, 19 nt, Artificial Sequence
  Description of Artificial Sequence: Synthetic oligonucleotide
auauagaauauauauauac

SEQ ID NO: 589779 - RNA, 19 nt, Artificial Sequence
  Description of Artificial Sequence: Synthetic oligonucleotide
aaacacaucacacuguggg

SEQ ID NO: 589780 - RNA, 19 nt, Artificial Sequence
  Description of Artificial Sequence: Synthetic oligonucleotide
uaguuaaacucucugaacg

SEQ ID NO: 589781 - RNA, 19 nt, Artificial Sequence
  Description of Artificial Sequence: Synthetic oligonucleotide
auauauagaauauauauau

SEQ ID NO: 589782 - RNA, 19 nt, Artificial Sequence
  Description of Artificial Sequence: Synthetic oligonucleotide
aacaauaaguauuacauua

SEQ ID NO: 589783 - RNA, 19 nt, Artificial Sequence
  Description of Artificial Sequence: Synthetic oligonucleotide
ucuuagacaacauacaaac

SEQ ID NO: 589784 - RNA, 19 nt, Artificial Sequence
  Description of Artificial Sequence: Synthetic oligonucleotide
aaaugugucuucaugaacg

SEQ ID NO: 589785 - RNA, 19 nt, Artificial Sequence
  Description of Artificial Sequence: Synthetic oligonucleotide
uuggcaauuauauaguagc

SEQ ID NO: 589786 - RNA, 19 nt, Artificial Sequence
  Description of Artificial Sequence: Synthetic oligonucleotide
aaguauuacauuaauagcu

SEQ ID NO: 589787 - RNA, 19 nt, Artificial Sequence
  Description of Artificial Sequence: Synthetic oligonucleotide
aaauaucauucuuugaaga

SEQ ID NO: 589788 - RNA, 19 nt, Artificial Sequence
  Description of Artificial Sequence: Synthetic oligonucleotide
caaacuggcaauuacuggg

SEQ ID NO: 589789 - RNA, 19 nt, Artificial Sequence
  Description of Artificial Sequence: Synthetic oligonucleotide
uuggauaauggucaacagg

SEQ ID NO: 589790 - RNA, 19 nt, Artificial Sequence
  Description of Artificial Sequence: Synthetic oligonucleotide
acugauguaagucucacca

SEQ ID NO: 589791 - RNA, 19 nt, Artificial Sequence
  Description of Artificial Sequence: Synthetic oligonucleotide
aaacccguaacaucccagc

SEQ ID NO: 589792 - RNA, 19 nt, Artificial Sequence
  Description of Artificial Sequence: Synthetic oligonucleotide
uguaaaaucuaaguucagg

SEQ ID NO: 589793 - RNA, 19 nt, Artificial Sequence
  Description of Artificial Sequence: Synthetic oligonucleotide
uauauauagaauauauaua

SEQ ID NO: 589794 - RNA, 19 nt, Artificial Sequence
  Description of Artificial Sequence: Synthetic oligonucleotide
augaacggaaaguacaggg

SEQ ID NO: 589795 - RNA, 19 nt, Artificial Sequence
  Description of Artificial Sequence: Synthetic oligonucleotide
auaaugggcaacaagcacc

SEQ ID NO: 589796 - RNA, 19 nt, Artificial Sequence
  Description of Artificial Sequence: Synthetic oligonucleotide
uucaugaacggaaaguaca

SEQ ID NO: 589797 - RNA, 19 nt, Artificial Sequence
  Description of Artificial Sequence: Synthetic oligonucleotide
ucuuaaauacaccuggcaa

SEQ ID NO: 589798 - RNA, 19 nt, Artificial Sequence
  Description of Artificial Sequence: Synthetic oligonucleotide
aaugugucuucaugaacgg

SEQ ID NO: 589799 - RNA, 19 nt, Artificial Sequence
  Description of Artificial Sequence: Synthetic oligonucleotide
uagucuaguauguugaaga

SEQ ID NO: 589800 - RNA, 19 nt, Artificial Sequence
  Description of Artificial Sequence: Synthetic oligonucleotide
auaguuaaacucucugaac

SEQ ID NO: 589801 - RNA, 19 nt, Artificial Sequence
  Description of Artificial Sequence: Synthetic oligonucleotide
gauaaucaggaucacaauc

SEQ ID NO: 589802 - RNA, 19 nt, Artificial Sequence
  Description of Artificial Sequence: Synthetic oligonucleotide
uauauaguauauuauggua

SEQ ID NO: 589803 - RNA, 19 nt, Artificial Sequence
  Description of Artificial Sequence: Synthetic oligonucleotide
uaaugggcaacaagcaccg

SEQ ID NO: 589804 - RNA, 19 nt, Artificial Sequence
  Description of Artificial Sequence: Synthetic oligonucleotide
ugcucaaguauccaaacac

SEQ ID NO: 589805 - RNA, 19 nt, Artificial Sequence
  Description of Artificial Sequence: Synthetic oligonucleotide
aauacuuagccugacauuu

SEQ ID NO: 589806 - RNA, 19 nt, Artificial Sequence
  Description of Artificial Sequence: Synthetic oligonucleotide
acauaugauugucauuuac

SEQ ID NO: 589807 - RNA, 19 nt, Artificial Sequence
  Description of Artificial Sequence: Synthetic oligonucleotide
aaauacaccuggcaaagau

SEQ ID NO: 589808 - RNA, 19 nt, Artificial Sequence
  Description of Artificial Sequence: Synthetic oligonucleotide
uauauaguagcagcaauug

SEQ ID NO: 589809 - RNA, 19 nt, Artificial Sequence
  Description of Artificial Sequence: Synthetic oligonucleotide
aguauccaauuucuuagac

SEQ ID NO: 589810 - RNA, 19 nt, Artificial Sequence
  Description of Artificial Sequence: Synthetic oligonucleotide
gaggguacaaguaacacug

SEQ ID NO: 589811 - RNA, 19 nt, Artificial Sequence
  Description of Artificial Sequence: Synthetic oligonucleotide
ucaaccaucgauucugggc

SEQ ID NO: 589812 - RNA, 19 nt, Artificial Sequence
  Description of Artificial Sequence: Synthetic oligonucleotide
ucaugaacggaaaguacag

SEQ ID NO: 589813 - RNA, 19 nt, Artificial Sequence
  Description of Artificial Sequence: Synthetic oligonucleotide
aagcuuuuggauaaugguc

SEQ ID NO: 589814 - RNA, 19 nt, Artificial Sequence
  Description of Artificial Sequence: Synthetic oligonucleotide
aggcaauugugacagaguc

SEQ ID NO: 589815 - RNA, 19 nt, Artificial Sequence
  Description of Artificial Sequence: Synthetic oligonucleotide
agagucuacauuaacauca

SEQ ID NO: 589816 - RNA, 19 nt, Artificial Sequence
  Description of Artificial Sequence: Synthetic oligonucleotide
guauacuauauauagaaua

SEQ ID NO: 589817 - RNA, 19 nt, Artificial Sequence
  Description of Artificial Sequence: Synthetic oligonucleotide
ucuaguauauugauguaua

SEQ ID NO: 589818 - RNA, 19 nt, Artificial Sequence
  Description of Artificial Sequence: Synthetic oligonucleotide
uucaggugcauacaaacaa

SEQ ID NO: 589819 - RNA, 19 nt, Artificial Sequence
  Description of Artificial Sequence: Synthetic oligonucleotide
uauccuuugaaugacuaca

SEQ ID NO: 589820 - RNA, 19 nt, Artificial Sequence
  Description of Artificial Sequence: Synthetic oligonucleotide
auauaguagcagcaauugg

SEQ ID NO: 589821 - RNA, 19 nt, Artificial Sequence
  Description of Artificial Sequence: Synthetic oligonucleotide
uuacaaauauggcuauuca

SEQ ID NO: 589822 - RNA, 19 nt, Artificial Sequence
  Description of Artificial Sequence: Synthetic oligonucleotide
uggucaacagggauaauca

SEQ ID NO: 589823 - RNA, 19 nt, Artificial Sequence
  Description of Artificial Sequence: Synthetic oligonucleotide
guaauuggcuucuuguuug

SEQ ID NO: 589824 - RNA, 19 nt, Artificial Sequence
  Description of Artificial Sequence: Synthetic oligonucleotide
agucuaguauguugaagac

SEQ ID NO: 589825 - RNA, 19 nt, Artificial Sequence
  Description of Artificial Sequence: Synthetic oligonucleotide
acggagauccucugaaagc

SEQ ID NO: 589826 - RNA, 19 nt, Artificial Sequence
  Description of Artificial Sequence: Synthetic oligonucleotide
aacguggugaguacugacc

SEQ ID NO: 589827 - RNA, 19 nt, Artificial Sequence
  Description of Artificial Sequence: Synthetic oligonucleotide
ucggacuucuuaaauacac

SEQ ID NO: 589828 - RNA, 19 nt, Artificial Sequence
  Description of Artificial Sequence: Synthetic oligonucleotide
uuauauaguagcagcaauu

SEQ ID NO: 589829 - RNA, 19 nt, Artificial Sequence
  Description of Artificial Sequence: Synthetic oligonucleotide
ugaacggaaaguacagggc

SEQ ID NO: 589830 - RNA, 19 nt, Artificial Sequence
  Description of Artificial Sequence: Synthetic oligonucleotide
aaaguacagggcuaacaca

SEQ ID NO: 589831 - RNA, 19 nt, Artificial Sequence
  Description of Artificial Sequence: Synthetic oligonucleotide
uacaacauacagcacccgc

SEQ ID NO: 589832 - RNA, 19 nt, Artificial Sequence
  Description of Artificial Sequence: Synthetic oligonucleotide
uauauagaauauauauaua

SEQ ID NO: 589833 - RNA, 19 nt, Artificial Sequence
  Description of Artificial Sequence: Synthetic oligonucleotide
cagcaauugguuuaaaguc

SEQ ID NO: 589834 - RNA, 19 nt, Artificial Sequence
  Description of Artificial Sequence: Synthetic oligonucleotide
ugcauacaaacaauaagua

SEQ ID NO: 589835 - RNA, 19 nt, Artificial Sequence
  Description of Artificial Sequence: Synthetic oligonucleotide
uucuuagacaacauacaaa

SEQ ID NO: 589836 - RNA, 19 nt, Artificial Sequence
  Description of Artificial Sequence: Synthetic oligonucleotide
aauugugacagagucuaca

SEQ ID NO: 589837 - RNA, 19 nt, Artificial Sequence
  Description of Artificial Sequence: Synthetic oligonucleotide
auuauauaguagcagcaau

SEQ ID NO: 589838 - RNA, 19 nt, Artificial Sequence
  Description of Artificial Sequence: Synthetic oligonucleotide
auugugcccgcaaacaggc

SEQ ID NO: 589839 - RNA, 19 nt, Artificial Sequence
  Description of Artificial Sequence: Synthetic oligonucleotide
ggugcauacaaacaauaag

SEQ ID NO: 589840 - RNA, 19 nt, Artificial Sequence
  Description of Artificial Sequence: Synthetic oligonucleotide
aauaaguauuacauuaaua

SEQ ID NO: 589841 - RNA, 19 nt, Artificial Sequence
  Description of Artificial Sequence: Synthetic oligonucleotide
uuugucaccuuagcaauag

SEQ ID NO: 589842 - RNA, 19 nt, Artificial Sequence
  Description of Artificial Sequence: Synthetic oligonucleotide
agggcuaacacauaugauu

SEQ ID NO: 589843 - RNA, 19 nt, Artificial Sequence
  Description of Artificial Sequence: Synthetic oligonucleotide
augggcaacaagcaccggg

SEQ ID NO: 589844 - RNA, 19 nt, Artificial Sequence
  Description of Artificial Sequence: Synthetic oligonucleotide
gucaaauaaaacccguaac

SEQ ID NO: 589845 - RNA, 19 nt, Artificial Sequence
  Description of Artificial Sequence: Synthetic oligonucleotide
uggugacccacccagggag

SEQ ID NO: 589846 - RNA, 19 nt, Artificial Sequence
  Description of Artificial Sequence: Synthetic oligonucleotide
guaaaaucuaaguucaggu

SEQ ID NO: 589847 - RNA, 19 nt, Artificial Sequence
  Description of Artificial Sequence: Synthetic oligonucleotide
aguauccaaacacaucaca

SEQ ID NO: 589848 - RNA, 19 nt, Artificial Sequence
  Description of Artificial Sequence: Synthetic oligonucleotide
gucaacagggauaaucagg

SEQ ID NO: 589849 - RNA, 19 nt, Artificial Sequence
  Description of Artificial Sequence: Synthetic oligonucleotide
uuucaaccaucgauucugg

SEQ ID NO: 589850 - RNA, 19 nt, Artificial Sequence
  Description of Artificial Sequence: Synthetic oligonucleotide
gacaugggacgccagagug

SEQ ID NO: 589851 - RNA, 19 nt, Artificial Sequence
  Description of Artificial Sequence: Synthetic oligonucleotide
aguuaaacucucugaacgu

SEQ ID NO: 589852 - RNA, 19 nt, Artificial Sequence
  Description of Artificial Sequence: Synthetic oligonucleotide
aaguacagggcuaacacau

SEQ ID NO: 589853 - RNA, 19 nt, Artificial Sequence
  Description of Artificial Sequence: Synthetic oligonucleotide
acacgauccgaguaggcag

SEQ ID NO: 589854 - RNA, 19 nt, Artificial Sequence
  Description of Artificial Sequence: Synthetic oligonucleotide
agcaauaguguccaguuuu

SEQ ID NO: 589855 - RNA, 19 nt, Artificial Sequence
  Description of Artificial Sequence: Synthetic oligonucleotide
aaccgagaagagcauucuc

SEQ ID NO: 589856 - RNA, 19 nt, Artificial Sequence
  Description of Artificial Sequence: Synthetic oligonucleotide
agcagcaauugguuuaaag

SEQ ID NO: 589857 - RNA, 19 nt, Artificial Sequence
  Description of Artificial Sequence: Synthetic oligonucleotide
uacacaauauagucuagua

SEQ ID NO: 589858 - RNA, 19 nt, Artificial Sequence
  Description of Artificial Sequence: Synthetic oligonucleotide
cauaaugggcaacaagcac

SEQ ID NO: 589859 - RNA, 19 nt, Artificial Sequence
  Description of Artificial Sequence: Synthetic oligonucleotide
uccgacucgaugcucaagu

SEQ ID NO: 589860 - RNA, 19 nt, Artificial Sequence
  Description of Artificial Sequence: Synthetic oligonucleotide
caccuuagcaauagugucc

SEQ ID NO: 589861 - RNA, 19 nt, Artificial Sequence
  Description of Artificial Sequence: Synthetic oligonucleotide
aaugacggguuugcagccc

SEQ ID NO: 589862 - RNA, 19 nt, Artificial Sequence
  Description of Artificial Sequence: Synthetic oligonucleotide
ugucuucaugaacggaaag

SEQ ID NO: 589863 - RNA, 19 nt, Artificial Sequence
  Description of Artificial Sequence: Synthetic oligonucleotide
caccugggaaauaaugagg

SEQ ID NO: 589864 - RNA, 19 nt, Artificial Sequence
  Description of Artificial Sequence: Synthetic oligonucleotide
acaacauacagcacccgcg

SEQ ID NO: 589865 - RNA, 19 nt, Artificial Sequence
  Description of Artificial Sequence: Synthetic oligonucleotide
caauuauauaguagcagca

SEQ ID NO: 589866 - RNA, 19 nt, Artificial Sequence
  Description of Artificial Sequence: Synthetic oligonucleotide
gaagagcauucucauauuc

SEQ ID NO: 589867 - RNA, 19 nt, Artificial Sequence
  Description of Artificial Sequence: Synthetic oligonucleotide
cuauucaccuucauaauaa

SEQ ID NO: 589868 - RNA, 19 nt, Artificial Sequence
  Description of Artificial Sequence: Synthetic oligonucleotide
aaguauccaaacacaucac

SEQ ID NO: 589869 - RNA, 19 nt, Artificial Sequence
  Description of Artificial Sequence: Synthetic oligonucleotide
gcuaaugcaaccgagaaga

SEQ ID NO: 589870 - RNA, 19 nt, Artificial Sequence
  Description of Artificial Sequence: Synthetic oligonucleotide
agggacucgauuuucucug

SEQ ID NO: 589871 - RNA, 19 nt, Artificial Sequence
  Description of Artificial Sequence: Synthetic oligonucleotide
guagucaacugccacacga

SEQ ID NO: 589872 - RNA, 19 nt, Artificial Sequence
  Description of Artificial Sequence: Synthetic oligonucleotide
aguacugaccagccuaucu

SEQ ID NO: 589873 - RNA, 19 nt, Artificial Sequence
  Description of Artificial Sequence: Synthetic oligonucleotide
cuucaugaacggaaaguac

SEQ ID NO: 589874 - RNA, 19 nt, Artificial Sequence
  Description of Artificial Sequence: Synthetic oligonucleotide
uuaaagucugauaguuaaa

SEQ ID NO: 589875 - RNA, 19 nt, Artificial Sequence
  Description of Artificial Sequence: Synthetic oligonucleotide
uaaucaggaucacaaucuc

SEQ ID NO: 589876 - RNA, 19 nt, Artificial Sequence
  Description of Artificial Sequence: Synthetic oligonucleotide
ggcaaagaugaauucauac

SEQ ID NO: 589877 - RNA, 19 nt, Artificial Sequence
  Description of Artificial Sequence: Synthetic oligonucleotide
guaacaucccagcacauaa

SEQ ID NO: 589878 - RNA, 19 nt, Artificial Sequence
  Description of Artificial Sequence: Synthetic oligonucleotide
aagcuuucuaguauauuga

SEQ ID NO: 589879 - RNA, 19 nt, Artificial Sequence
  Description of Artificial Sequence: Synthetic oligonucleotide
ugccacacgauccgaguag

SEQ ID NO: 589880 - RNA, 19 nt, Artificial Sequence
  Description of Artificial Sequence: Synthetic oligonucleotide
gauguauacuauauauaga

SEQ ID NO: 589881 - RNA, 19 nt, Artificial Sequence
  Description of Artificial Sequence: Synthetic oligonucleotide
uuucagucgggauucacuu

SEQ ID NO: 589882 - RNA, 19 nt, Artificial Sequence
  Description of Artificial Sequence: Synthetic oligonucleotide
aguaaucuggggcucucug

SEQ ID NO: 589883 - RNA, 19 nt, Artificial Sequence
  Description of Artificial Sequence: Synthetic oligonucleotide
ucagucgggauucacuuuu

SEQ ID NO: 589884 - RNA, 19 nt, Artificial Sequence
  Description of Artificial Sequence: Synthetic oligonucleotide
uccgaguugaugagggacu

SEQ ID NO: 589885 - RNA, 19 nt, Artificial Sequence
  Description of Artificial Sequence: Synthetic oligonucleotide
caacauacagcacccgcgc

SEQ ID NO: 589886 - RNA, 19 nt, Artificial Sequence
  Description of Artificial Sequence: Synthetic oligonucleotide
agcaauugguuuaaagucu

SEQ ID NO: 589887 - RNA, 19 nt, Artificial Sequence
  Description of Artificial Sequence: Synthetic oligonucleotide
ugggaggaccacuugcaag

SEQ ID NO: 589888 - RNA, 19 nt, Artificial Sequence
  Description of Artificial Sequence: Synthetic oligonucleotide
cacggagauccucugaaag

SEQ ID NO: 589889 - RNA, 19 nt, Artificial Sequence
  Description of Artificial Sequence: Synthetic oligonucleotide
acauacagcacccgcgcug

SEQ ID NO: 589890 - RNA, 19 nt, Artificial Sequence
  Description of Artificial Sequence: Synthetic oligonucleotide
gaaugacggguuugcagcc

SEQ ID NO: 589891 - RNA, 19 nt, Artificial Sequence
  Description of Artificial Sequence: Synthetic oligonucleotide
caaccaucgauucugggca

SEQ ID NO: 589892 - RNA, 19 nt, Artificial Sequence
  Description of Artificial Sequence: Synthetic oligonucleotide
auagucuaguauguugaag

SEQ ID NO: 589893 - RNA, 19 nt, Artificial Sequence
  Description of Artificial Sequence: Synthetic oligonucleotide
uucaaccaucgauucuggg

SEQ ID NO: 589894 - RNA, 19 nt, Artificial Sequence
  Description of Artificial Sequence: Synthetic oligonucleotide
aagacgcuuggaugcacug

SEQ ID NO: 589895 - RNA, 19 nt, Artificial Sequence
  Description of Artificial Sequence: Synthetic oligonucleotide
uguggugcuaagaggugac

SEQ ID NO: 589896 - RNA, 19 nt, Artificial Sequence
  Description of Artificial Sequence: Synthetic oligonucleotide
cuuguuugucaccuuagca

SEQ ID NO: 589897 - RNA, 19 nt, Artificial Sequence
  Description of Artificial Sequence: Synthetic oligonucleotide
cuaacacauaugauuguca

SEQ ID NO: 589898 - RNA, 19 nt, Artificial Sequence
  Description of Artificial Sequence: Synthetic oligonucleotide
uaguauguugaagacacuu

SEQ ID NO: 589899 - RNA, 19 nt, Artificial Sequence
  Description of Artificial Sequence: Synthetic oligonucleotide
uauagucuaguauguugaa

SEQ ID NO: 589900 - RNA, 19 nt, Artificial Sequence
  Description of Artificial Sequence: Synthetic oligonucleotide
caaacacaucacacugugg

SEQ ID NO: 589901 - RNA, 19 nt, Artificial Sequence
  Description of Artificial Sequence: Synthetic oligonucleotide
guaaucuggggcucucugc

SEQ ID NO: 589902 - RNA, 19 nt, Artificial Sequence
  Description of Artificial Sequence: Synthetic oligonucleotide
caugggacgccagaguggg

SEQ ID NO: 589903 - RNA, 19 nt, Artificial Sequence
  Description of Artificial Sequence: Synthetic oligonucleotide
acuccaaauuucaaccauc

SEQ ID NO: 589904 - RNA, 19 nt, Artificial Sequence
  Description of Artificial Sequence: Synthetic oligonucleotide
uggugaguacugaccagcc

SEQ ID NO: 589905 - RNA, 19 nt, Artificial Sequence
  Description of Artificial Sequence: Synthetic oligonucleotide
aguauuacauuaauagcuu

SEQ ID NO: 589906 - RNA, 19 nt, Artificial Sequence
  Description of Artificial Sequence: Synthetic oligonucleotide
gauaauggucaacagggau

SEQ ID NO: 589907 - RNA, 19 nt, Artificial Sequence
  Description of Artificial Sequence: Synthetic oligonucleotide
uauucaccuucauaauaaa

SEQ ID NO: 589908 - RNA, 19 nt, Artificial Sequence
  Description of Artificial Sequence: Synthetic oligonucleotide
augaacuaauuaucuuacu

SEQ ID NO: 589909 - RNA, 19 nt, Artificial Sequence
  Description of Artificial Sequence: Synthetic oligonucleotide
agcuuucuaguauauugau

SEQ ID NO: 589910 - RNA, 19 nt, Artificial Sequence
  Description of Artificial Sequence: Synthetic oligonucleotide
acacugauguaagucucac

SEQ ID NO: 589911 - RNA, 19 nt, Artificial Sequence
  Description of Artificial Sequence: Synthetic oligonucleotide
acucucugaacguggugag

SEQ ID NO: 589912 - RNA, 19 nt, Artificial Sequence
  Description of Artificial Sequence: Synthetic oligonucleotide
uuuuaauacuuagccugac

SEQ ID NO: 589913 - RNA, 19 nt, Artificial Sequence
  Description of Artificial Sequence: Synthetic oligonucleotide
aaacuggcaauuacuggga

SEQ ID NO: 589914 - RNA, 19 nt, Artificial Sequence
  Description of Artificial Sequence: Synthetic oligonucleotide
uacuuagccugacauuuua

SEQ ID NO: 589915 - RNA, 19 nt, Artificial Sequence
  Description of Artificial Sequence: Synthetic oligonucleotide
aaccaucgauucugggcag

SEQ ID NO: 589916 - RNA, 19 nt, Artificial Sequence
  Description of Artificial Sequence: Synthetic oligonucleotide
acacuuagacagaaacagg

SEQ ID NO: 589917 - RNA, 19 nt, Artificial Sequence
  Description of Artificial Sequence: Synthetic oligonucleotide
caugaacggaaaguacagg

SEQ ID NO: 589918 - RNA, 19 nt, Artificial Sequence
  Description of Artificial Sequence: Synthetic oligonucleotide
acauaaugggcaacaagca

SEQ ID NO: 589919 - RNA, 19 nt, Artificial Sequence
  Description of Artificial Sequence: Synthetic oligonucleotide
ucucugaacguggugagua

SEQ ID NO: 589920 - RNA, 19 nt, Artificial Sequence
  Description of Artificial Sequence: Synthetic oligonucleotide
ggagcugcuaaugcaaccg

SEQ ID NO: 589921 - RNA, 19 nt, Artificial Sequence
  Description of Artificial Sequence: Synthetic oligonucleotide
auaauggucaacagggaua

SEQ ID NO: 589922 - RNA, 19 nt, Artificial Sequence
  Description of Artificial Sequence: Synthetic oligonucleotide
auauuaugguauacuauau

SEQ ID NO: 589923 - RNA, 19 nt, Artificial Sequence
  Description of Artificial Sequence: Synthetic oligonucleotide
agcagccuaagccaaccca

SEQ ID NO: 589924 - RNA, 19 nt, Artificial Sequence
  Description of Artificial Sequence: Synthetic oligonucleotide
acugugcacaucacaaaag

SEQ ID NO: 589925 - RNA, 19 nt, Artificial Sequence
  Description of Artificial Sequence: Synthetic oligonucleotide
ggcaacaagcaccgggugg

SEQ ID NO: 589926 - RNA, 19 nt, Artificial Sequence
  Description of Artificial Sequence: Synthetic oligonucleotide
gggcuaacacauaugauug

SEQ ID NO: 589927 - RNA, 19 nt, Artificial Sequence
  Description of Artificial Sequence: Synthetic oligonucleotide
cuaaugcaaccgagaagag

SEQ ID NO: 589928 - RNA, 19 nt, Artificial Sequence
  Description of Artificial Sequence: Synthetic oligonucleotide
ugucgacacuccaagccaa

SEQ ID NO: 589929 - RNA, 19 nt, Artificial Sequence
  Description of Artificial Sequence: Synthetic oligonucleotide
aaccaucggacuucuuaaa

SEQ ID NO: 589930 - RNA, 19 nt, Artificial Sequence
  Description of Artificial Sequence: Synthetic oligonucleotide
cugaaagcucuaagugccc

SEQ ID NO: 589931 - RNA, 19 nt, Artificial Sequence
  Description of Artificial Sequence: Synthetic oligonucleotide
cacgauccgaguaggcagc

SEQ ID NO: 589932 - RNA, 19 nt, Artificial Sequence
  Description of Artificial Sequence: Synthetic oligonucleotide
uggugcuaagaggugacac

SEQ ID NO: 589933 - RNA, 19 nt, Artificial Sequence
  Description of Artificial Sequence: Synthetic oligonucleotide
ucaccauugugcccgcaaa

SEQ ID NO: 589934 - RNA, 19 nt, Artificial Sequence
  Description of Artificial Sequence: Synthetic oligonucleotide
aaucuccgacucgaugcuc

SEQ ID NO: 589935 - RNA, 19 nt, Artificial Sequence
  Description of Artificial Sequence: Synthetic oligonucleotide
accaucggacuucuuaaau

SEQ ID NO: 589936 - RNA, 19 nt, Artificial Sequence
  Description of Artificial Sequence: Synthetic oligonucleotide
guggugaguacugaccagc

SEQ ID NO: 589937 - RNA, 19 nt, Artificial Sequence
  Description of Artificial Sequence: Synthetic oligonucleotide
gauugucauuuacaaauau

SEQ ID NO: 589938 - RNA, 19 nt, Artificial Sequence
  Description of Artificial Sequence: Synthetic oligonucleotide
ccucugaaagcucuaagug

SEQ ID NO: 589939 - RNA, 19 nt, Artificial Sequence
  Description of Artificial Sequence: Synthetic oligonucleotide
gggauaaucaggaucacaa

SEQ ID NO: 589940 - RNA, 19 nt, Artificial Sequence
  Description of Artificial Sequence: Synthetic oligonucleotide
ccugucgacacuccaagcc

SEQ ID NO: 589941 - RNA, 19 nt, Artificial Sequence
  Description of Artificial Sequence: Synthetic oligonucleotide
agcagugcgccucgcgggg

SEQ ID NO: 589942 - RNA, 19 nt, Artificial Sequence
  Description of Artificial Sequence: Synthetic oligonucleotide
guauuacauuaauagcuua

SEQ ID NO: 589943 - RNA, 19 nt, Artificial Sequence
  Description of Artificial Sequence: Synthetic oligonucleotide
ugaacguggugaguacuga

SEQ ID NO: 589944 - RNA, 19 nt, Artificial Sequence
  Description of Artificial Sequence: Synthetic oligonucleotide
cuaagccaacccaaccauc

SEQ ID NO: 589945 - RNA, 19 nt, Artificial Sequence
  Description of Artificial Sequence: Synthetic oligonucleotide
ugcaugcggaucuucugaa

SEQ ID NO: 589946 - RNA, 19 nt, Artificial Sequence
  Description of Artificial Sequence: Synthetic oligonucleotide
ggcaauuacugggaggacc

SEQ ID NO: 589947 - RNA, 19 nt, Artificial Sequence
  Description of Artificial Sequence: Synthetic oligonucleotide
acagacacgugcaugcgga

SEQ ID NO: 589948 - RNA, 19 nt, Artificial Sequence
  Description of Artificial Sequence: Synthetic oligonucleotide
auccgaguaggcagcacac

SEQ ID NO: 589949 - RNA, 19 nt, Artificial Sequence
  Description of Artificial Sequence: Synthetic oligonucleotide
acugccacacgauccgagu

SEQ ID NO: 589950 - RNA, 19 nt, Artificial Sequence
  Description of Artificial Sequence: Synthetic oligonucleotide
ggucaacagggauaaucag

SEQ ID NO: 589951 - RNA, 19 nt, Artificial Sequence
  Description of Artificial Sequence: Synthetic oligonucleotide
ggcacaaacuggcaauuac

SEQ ID NO: 589952 - RNA, 19 nt, Artificial Sequence
  Description of Artificial Sequence: Synthetic oligonucleotide
accauugugcccgcaaaca

SEQ ID NO: 589953 - RNA, 19 nt, Artificial Sequence
  Description of Artificial Sequence: Synthetic oligonucleotide
agacgcuuggaugcacugg

SEQ ID NO: 589954 - RNA, 19 nt, Artificial Sequence
  Description of Artificial Sequence: Synthetic oligonucleotide
cacaacccaagacgcuugg

SEQ ID NO: 589955 - RNA, 19 nt, Artificial Sequence
  Description of Artificial Sequence: Synthetic oligonucleotide
gggaggaccacuugcaaga

SEQ ID NO: 589956 - RNA, 19 nt, Artificial Sequence
  Description of Artificial Sequence: Synthetic oligonucleotide
caaccaucggacuucuuaa

SEQ ID NO: 589957 - RNA, 19 nt, Artificial Sequence
  Description of Artificial Sequence: Synthetic oligonucleotide
aguauguugaagacacuua

SEQ ID NO: 589958 - RNA, 19 nt, Artificial Sequence
  Description of Artificial Sequence: Synthetic oligonucleotide
agcagcagugcgccucgcg

SEQ ID NO: 589959 - RNA, 19 nt, Artificial Sequence
  Description of Artificial Sequence: Synthetic oligonucleotide
cuugcacgccugucgacac

SEQ ID NO: 589960 - RNA, 19 nt, Artificial Sequence
  Description of Artificial Sequence: Synthetic oligonucleotide
aagcucuaagugcccacuu

SEQ ID NO: 589961 - RNA, 19 nt, Artificial Sequence
  Description of Artificial Sequence: Synthetic oligonucleotide
auuacugggaggaccacuu

SEQ ID NO: 589962 - RNA, 19 nt, Artificial Sequence
  Description of Artificial Sequence: Synthetic oligonucleotide
agaagagcauucucauauu

SEQ ID NO: 589963 - RNA, 19 nt, Artificial Sequence
  Description of Artificial Sequence: Synthetic oligonucleotide
gucuaguauguugaagaca

SEQ ID NO: 589964 - RNA, 19 nt, Artificial Sequence
  Description of Artificial Sequence: Synthetic oligonucleotide
uauggcuauucaccuucau

SEQ ID NO: 589965 - RNA, 19 nt, Artificial Sequence
  Description of Artificial Sequence: Synthetic oligonucleotide
gcaauugguuuaaagucug

SEQ ID NO: 589966 - RNA, 19 nt, Artificial Sequence
  Description of Artificial Sequence: Synthetic oligonucleotide
uccgcaacccucgccgcgg

SEQ ID NO: 589967 - RNA, 19 nt, Artificial Sequence
  Description of Artificial Sequence: Synthetic oligonucleotide
ggggcgaauccacagcaag

SEQ ID NO: 589968 - RNA, 19 nt, Artificial Sequence
  Description of Artificial Sequence: Synthetic oligonucleotide
cuacaacauacagcacccg

SEQ ID NO: 589969 - RNA, 19 nt, Artificial Sequence
  Description of Artificial Sequence: Synthetic oligonucleotide
aaugggcaacaagcaccgg

SEQ ID NO: 589970 - RNA, 19 nt, Artificial Sequence
  Description of Artificial Sequence: Synthetic oligonucleotide
guccgaguugaugagggac

SEQ ID NO: 589971 - RNA, 19 nt, Artificial Sequence
  Description of Artificial Sequence: Synthetic oligonucleotide
ggcgaauccacagcaagug

SEQ ID NO: 589972 - RNA, 19 nt, Artificial Sequence
  Description of Artificial Sequence: Synthetic oligonucleotide
gaaucuccagaacuguaau

SEQ ID NO: 589973 - RNA, 19 nt, Artificial Sequence
  Description of Artificial Sequence: Synthetic oligonucleotide
aacggaaaguacagggcua

SEQ ID NO: 589974 - RNA, 19 nt, Artificial Sequence
  Description of Artificial Sequence: Synthetic oligonucleotide
agggauaaucaggaucaca

SEQ ID NO: 589975 - RNA, 19 nt, Artificial Sequence
  Description of Artificial Sequence: Synthetic oligonucleotide
agccuaucuggcuaauaua

SEQ ID NO: 589976 - RNA, 19 nt, Artificial Sequence
  Description of Artificial Sequence: Synthetic oligonucleotide
uagcaauaguguccaguuu

SEQ ID NO: 589977 - RNA, 19 nt, Artificial Sequence
  Description of Artificial Sequence: Synthetic oligonucleotide
caccauugugcccgcaaac

SEQ ID NO: 589978 - RNA, 19 nt, Artificial Sequence
  Description of Artificial Sequence: Synthetic oligonucleotide
cugucgacacuccaagcca

SEQ ID NO: 589979 - RNA, 19 nt, Artificial Sequence
  Description of Artificial Sequence: Synthetic oligonucleotide
agggacaugggacgccaga

SEQ ID NO: 589980 - RNA, 19 nt, Artificial Sequence
  Description of Artificial Sequence: Synthetic oligonucleotide
agcaccggguggaaugacg

SEQ ID NO: 589981 - RNA, 19 nt, Artificial Sequence
  Description of Artificial Sequence: Synthetic oligonucleotide
aagcaccggguggaaugac

SEQ ID NO: 589982 - RNA, 19 nt, Artificial Sequence
  Description of Artificial Sequence: Synthetic oligonucleotide
caauugugacagagucuac

SEQ ID NO: 589983 - RNA, 19 nt, Artificial Sequence
  Description of Artificial Sequence: Synthetic oligonucleotide
aggugcauacaaacaauaa

SEQ ID NO: 589984 - RNA, 19 nt, Artificial Sequence
  Description of Artificial Sequence: Synthetic oligonucleotide
ggaaaguacagggcuaaca

SEQ ID NO: 589985 - RNA, 19 nt, Artificial Sequence
  Description of Artificial Sequence: Synthetic oligonucleotide
caggugcauacaaacaaua

SEQ ID NO: 589986 - RNA, 19 nt, Artificial Sequence
  Description of Artificial Sequence: Synthetic oligonucleotide
gguacaaguaacacugaaa

SEQ ID NO: 589987 - RNA, 19 nt, Artificial Sequence
  Description of Artificial Sequence: Synthetic oligonucleotide
cagccuaagccaacccaac

SEQ ID NO: 589988 - RNA, 19 nt, Artificial Sequence
  Description of Artificial Sequence: Synthetic oligonucleotide
cacaucacacugugggaca

SEQ ID NO: 589989 - RNA, 19 nt, Artificial Sequence
  Description of Artificial Sequence: Synthetic oligonucleotide
accggguggaaugacgggu

SEQ ID NO: 589990 - RNA, 19 nt, Artificial Sequence
  Description of Artificial Sequence: Synthetic oligonucleotide
gcuaaauuucagaggguac

SEQ ID NO: 589991 - RNA, 19 nt, Artificial Sequence
  Description of Artificial Sequence: Synthetic oligonucleotide
auccuuugaaugacuacaa

SEQ ID NO: 589992 - RNA, 19 nt, Artificial Sequence
  Description of Artificial Sequence: Synthetic oligonucleotide
gcaauuacugggaggacca

SEQ ID NO: 589993 - RNA, 19 nt, Artificial Sequence
  Description of Artificial Sequence: Synthetic oligonucleotide
ggcuaauauaaaacugcac

SEQ ID NO: 589994 - RNA, 19 nt, Artificial Sequence
  Description of Artificial Sequence: Synthetic oligonucleotide
cagcgggaugcucggaccc

SEQ ID NO: 589995 - RNA, 19 nt, Artificial Sequence
  Description of Artificial Sequence: Synthetic oligonucleotide
caauugguuuaaagucuga

SEQ ID NO: 589996 - RNA, 19 nt, Artificial Sequence
  Description of Artificial Sequence: Synthetic oligonucleotide
ccauugugcccgcaaacag

SEQ ID NO: 589997 - RNA, 19 nt, Artificial Sequence
  Description of Artificial Sequence: Synthetic oligonucleotide
gccuaucuggcuaauauaa

SEQ ID NO: 589998 - RNA, 19 nt, Artificial Sequence
  Description of Artificial Sequence: Synthetic oligonucleotide
agagggacaugggacgcca

SEQ ID NO: 589999 - RNA, 19 nt, Artificial Sequence
  Description of Artificial Sequence: Synthetic oligonucleotide
caccggguggaaugacggg

SEQ ID NO: 590000 - RNA, 19 nt, Artificial Sequence
  Description of Artificial Sequence: Synthetic oligonucleotide
aucuccgacucgaugcuca

SEQ ID NO: 590001 - RNA, 19 nt, Artificial Sequence
  Description of Artificial Sequence: Synthetic oligonucleotide
ugcacgccugucgacacuc

SEQ ID NO: 590002 - RNA, 19 nt, Artificial Sequence
  Description of Artificial Sequence: Synthetic oligonucleotide
uuuucucggccacccgcua

SEQ ID NO: 590003 - RNA, 19 nt, Artificial Sequence
  Description of Artificial Sequence: Synthetic oligonucleotide
cacacgauccgaguaggca

SEQ ID NO: 590004 - RNA, 19 nt, Artificial Sequence
  Description of Artificial Sequence: Synthetic oligonucleotide
gagagggacaugggacgcc

SEQ ID NO: 590005 - RNA, 19 nt, Artificial Sequence
  Description of Artificial Sequence: Synthetic oligonucleotide
uccaagccaauagccaguu

SEQ ID NO: 590006 - RNA, 19 nt, Artificial Sequence
  Description of Artificial Sequence: Synthetic oligonucleotide
gcaccggguggaaugacgg

SEQ ID NO: 590007 - RNA, 19 nt, Artificial Sequence
  Description of Artificial Sequence: Synthetic oligonucleotide
cuccgcaacccucgccgcg

SEQ ID NO: 590008 - RNA, 19 nt, Artificial Sequence
  Description of Artificial Sequence: Synthetic oligonucleotide
guuucagucgggauucacu

SEQ ID NO: 590009 - RNA, 19 nt, Artificial Sequence
  Description of Artificial Sequence: Synthetic oligonucleotide
cucggccacccgcuaacag

SEQ ID NO: 590010 - RNA, 19 nt, Artificial Sequence
  Description of Artificial Sequence: Synthetic oligonucleotide
cggacuucuuaaauacacc

SEQ ID NO: 590011 - RNA, 19 nt, Artificial Sequence
  Description of Artificial Sequence: Synthetic oligonucleotide
gcaacaagcaccgggugga

SEQ ID NO: 590012 - RNA, 19 nt, Artificial Sequence
  Description of Artificial Sequence: Synthetic oligonucleotide
ugcaaccgagaagagcauu

SEQ ID NO: 590013 - RNA, 19 nt, Artificial Sequence
  Description of Artificial Sequence: Synthetic oligonucleotide
agcacauaaugggcaacaa

SEQ ID NO: 590014 - RNA, 19 nt, Artificial Sequence
  Description of Artificial Sequence: Synthetic oligonucleotide
cagcagccuaagccaaccc

SEQ ID NO: 590015 - RNA, 19 nt, Artificial Sequence
  Description of Artificial Sequence: Synthetic oligonucleotide
gcuaacaguccugaauguc

SEQ ID NO: 590016 - RNA, 19 nt, Artificial Sequence
  Description of Artificial Sequence: Synthetic oligonucleotide
gcuguccgaguugaugagg

SEQ ID NO: 590017 - RNA, 19 nt, Artificial Sequence
  Description of Artificial Sequence: Synthetic oligonucleotide
ugcuugcacgccugucgac

SEQ ID NO: 590018 - RNA, 19 nt, Artificial Sequence
  Description of Artificial Sequence: Synthetic oligonucleotide
cacuugcaagacaggaaaa

SEQ ID NO: 590019 - RNA, 19 nt, Artificial Sequence
  Description of Artificial Sequence: Synthetic oligonucleotide
ucuccgacucgaugcucaa

SEQ ID NO: 590020 - RNA, 19 nt, Artificial Sequence
  Description of Artificial Sequence: Synthetic oligonucleotide
uugcacgccugucgacacu

SEQ ID NO: 590021 - RNA, 19 nt, Artificial Sequence
  Description of Artificial Sequence: Synthetic oligonucleotide
auauggcuauucaccuuca

SEQ ID NO: 590022 - RNA, 19 nt, Artificial Sequence
  Description of Artificial Sequence: Synthetic oligonucleotide
ggcccauaguagucaacug

SEQ ID NO: 590023 - RNA, 19 nt, Artificial Sequence
  Description of Artificial Sequence: Synthetic oligonucleotide
gcgagacccaggcugaaga

SEQ ID NO: 590024 - RNA, 19 nt, Artificial Sequence
  Description of Artificial Sequence: Synthetic oligonucleotide
acgugcaugcggaucuucu

SEQ ID NO: 590025 - RNA, 19 nt, Artificial Sequence
  Description of Artificial Sequence: Synthetic oligonucleotide
ucgacacuccaagccaaua

SEQ ID NO: 590026 - RNA, 19 nt, Artificial Sequence
  Description of Artificial Sequence: Synthetic oligonucleotide
gcugcuaaugcaaccgaga

SEQ ID NO: 590027 - RNA, 19 nt, Artificial Sequence
  Description of Artificial Sequence: Synthetic oligonucleotide
cagccuaucuggcuaauau

SEQ ID NO: 590028 - RNA, 19 nt, Artificial Sequence
  Description of Artificial Sequence: Synthetic oligonucleotide
gcaggccucaaucugcaaa

SEQ ID NO: 590029 - RNA, 19 nt, Artificial Sequence
  Description of Artificial Sequence: Synthetic oligonucleotide
cggacgcucgccauguccg

SEQ ID NO: 590030 - RNA, 19 nt, Artificial Sequence
  Description of Artificial Sequence: Synthetic oligonucleotide
gcaagugcauggcgagacc

SEQ ID NO: 590031 - RNA, 19 nt, Artificial Sequence
  Description of Artificial Sequence: Synthetic oligonucleotide
acaacccaagacgcuugga

SEQ ID NO: 590032 - RNA, 19 nt, Artificial Sequence
  Description of Artificial Sequence: Synthetic oligonucleotide
auacuuagccugacauuuu

SEQ ID NO: 590033 - RNA, 19 nt, Artificial Sequence
  Description of Artificial Sequence: Synthetic oligonucleotide
ggacgcucgccauguccgg

SEQ ID NO: 590034 - RNA, 19 nt, Artificial Sequence
  Description of Artificial Sequence: Synthetic oligonucleotide
gcuuuuggauaauggucaa

SEQ ID NO: 590035 - RNA, 19 nt, Artificial Sequence
  Description of Artificial Sequence: Synthetic oligonucleotide
accaucgauucugggcagu

SEQ ID NO: 590036 - RNA, 19 nt, Artificial Sequence
  Description of Artificial Sequence: Synthetic oligonucleotide
ugacggguuugcagcccau

SEQ ID NO: 590037 - RNA, 19 nt, Artificial Sequence
  Description of Artificial Sequence: Synthetic oligonucleotide
gguauacuauauauagaau

SEQ ID NO: 590038 - RNA, 19 nt, Artificial Sequence
  Description of Artificial Sequence: Synthetic oligonucleotide
aggguacaaguaacacuga

SEQ ID NO: 590039 - RNA, 19 nt, Artificial Sequence
  Description of Artificial Sequence: Synthetic oligonucleotide
caagcaccggguggaauga

SEQ ID NO: 590040 - RNA, 19 nt, Artificial Sequence
  Description of Artificial Sequence: Synthetic oligonucleotide
cagggauaaucaggaucac

SEQ ID NO: 590041 - RNA, 19 nt, Artificial Sequence
  Description of Artificial Sequence: Synthetic oligonucleotide
caaucuccgacucgaugcu

SEQ ID NO: 590042 - RNA, 19 nt, Artificial Sequence
  Description of Artificial Sequence: Synthetic oligonucleotide
ccaucggacuucuuaaaua

SEQ ID NO: 590043 - RNA, 19 nt, Artificial Sequence
  Description of Artificial Sequence: Synthetic oligonucleotide
cagugcgccucgcggggag

SEQ ID NO: 590044 - RNA, 19 nt, Artificial Sequence
  Description of Artificial Sequence: Synthetic oligonucleotide
cuccaagccaauagccagu

SEQ ID NO: 590045 - RNA, 19 nt, Artificial Sequence
  Description of Artificial Sequence: Synthetic oligonucleotide
ggguuugcagcccauggau

SEQ ID NO: 590046 - RNA, 19 nt, Artificial Sequence
  Description of Artificial Sequence: Synthetic oligonucleotide
ggccgggcggguccgaagc

SEQ ID NO: 590047 - RNA, 19 nt, Artificial Sequence
  Description of Artificial Sequence: Synthetic oligonucleotide
gcagccuaagccaacccaa

SEQ ID NO: 590048 - RNA, 19 nt, Artificial Sequence
  Description of Artificial Sequence: Synthetic oligonucleotide
cuccgacucgaugcucaag

SEQ ID NO: 590049 - RNA, 19 nt, Artificial Sequence
  Description of Artificial Sequence: Synthetic oligonucleotide
cugggaggaccacuugcaa

SEQ ID NO: 590050 - RNA, 19 nt, Artificial Sequence
  Description of Artificial Sequence: Synthetic oligonucleotide
cugcaaacuuuggaaauau

SEQ ID NO: 590051 - RNA, 19 nt, Artificial Sequence
  Description of Artificial Sequence: Synthetic oligonucleotide
cccgcaaacaggcucugca

SEQ ID NO: 590052 - RNA, 19 nt, Artificial Sequence
  Description of Artificial Sequence: Synthetic oligonucleotide
gccugucgacacuccaagc

SEQ ID NO: 590053 - RNA, 19 nt, Artificial Sequence
  Description of Artificial Sequence: Synthetic oligonucleotide
gcuugcacgccugucgaca

SEQ ID NO: 590054 - RNA, 19 nt, Artificial Sequence
  Description of Artificial Sequence: Synthetic oligonucleotide
acgauccgaguaggcagca

SEQ ID NO: 590055 - RNA, 19 nt, Artificial Sequence
  Description of Artificial Sequence: Synthetic oligonucleotide
ccuaucuggcuaauauaaa

SEQ ID NO: 590056 - RNA, 19 nt, Artificial Sequence
  Description of Artificial Sequence: Synthetic oligonucleotide
cugccacacgauccgagua

SEQ ID NO: 590057 - RNA, 19 nt, Artificial Sequence
  Description of Artificial Sequence: Synthetic oligonucleotide
gcagguguuucagucggga

SEQ ID NO: 590058 - RNA, 19 nt, Artificial Sequence
  Description of Artificial Sequence: Synthetic oligonucleotide
ggcuaacacauaugauugu

SEQ ID NO: 590059 - RNA, 19 nt, Artificial Sequence
  Description of Artificial Sequence: Synthetic oligonucleotide
ggugacccacccagggagc

SEQ ID NO: 590060 - RNA, 19 nt, Artificial Sequence
  Description of Artificial Sequence: Synthetic oligonucleotide
cgugcaugcggaucuucug

SEQ ID NO: 590061 - RNA, 19 nt, Artificial Sequence
  Description of Artificial Sequence: Synthetic oligonucleotide
ugcccgcaaacaggcucug

SEQ ID NO: 590062 - RNA, 19 nt, Artificial Sequence
  Description of Artificial Sequence: Synthetic oligonucleotide
cacgugcaugcggaucuuc

SEQ ID NO: 590063 - RNA, 19 nt, Artificial Sequence
  Description of Artificial Sequence: Synthetic oligonucleotide
ggcggguccgaagcagcgg

SEQ ID NO: 590064 - RNA, 19 nt, Artificial Sequence
  Description of Artificial Sequence: Synthetic oligonucleotide
acgccugucgacacuccaa

SEQ ID NO: 590065 - RNA, 19 nt, Artificial Sequence
  Description of Artificial Sequence: Synthetic oligonucleotide
gcucuaagugcccacuuuu

SEQ ID NO: 590066 - RNA, 19 nt, Artificial Sequence
  Description of Artificial Sequence: Synthetic oligonucleotide
ggcaauugugacagagucu

SEQ ID NO: 590067 - RNA, 19 nt, Artificial Sequence
  Description of Artificial Sequence: Synthetic oligonucleotide
gggcggguccgaagcagcg

SEQ ID NO: 590068 - RNA, 19 nt, Artificial Sequence
  Description of Artificial Sequence: Synthetic oligonucleotide
caucgauucugggcaguaa

SEQ ID NO: 590069 - RNA, 19 nt, Artificial Sequence
  Description of Artificial Sequence: Synthetic oligonucleotide
cagggcuaacacauaugau

SEQ ID NO: 590070 - RNA, 19 nt, Artificial Sequence
  Description of Artificial Sequence: Synthetic oligonucleotide
augcaaccgagaagagcau

SEQ ID NO: 590071 - RNA, 19 nt, Artificial Sequence
  Description of Artificial Sequence: Synthetic oligonucleotide
gguuauccuuugaaugacu

SEQ ID NO: 590072 - RNA, 19 nt, Artificial Sequence
  Description of Artificial Sequence: Synthetic oligonucleotide
acccgcuaacaguccugaa

SEQ ID NO: 590073 - RNA, 19 nt, Artificial Sequence
  Description of Artificial Sequence: Synthetic oligonucleotide
ggcgagacccaggcugaag

SEQ ID NO: 590074 - RNA, 19 nt, Artificial Sequence
  Description of Artificial Sequence: Synthetic oligonucleotide
augggacgccagagugggg

SEQ ID NO: 590075 - RNA, 19 nt, Artificial Sequence
  Description of Artificial Sequence: Synthetic oligonucleotide
ggaugcucggacccagccu

SEQ ID NO: 590076 - RNA, 19 nt, Artificial Sequence
  Description of Artificial Sequence: Synthetic oligonucleotide
cgaguaggcagcacacaca

SEQ ID NO: 590077 - RNA, 19 nt, Artificial Sequence
  Description of Artificial Sequence: Synthetic oligonucleotide
gacgccagaguggggcugu

SEQ ID NO: 590078 - RNA, 19 nt, Artificial Sequence
  Description of Artificial Sequence: Synthetic oligonucleotide
aggggcgaauccacagcaa

SEQ ID NO: 590079 - RNA, 19 nt, Artificial Sequence
  Description of Artificial Sequence: Synthetic oligonucleotide
aggcccggacgcucgccau

SEQ ID NO: 590080 - RNA, 19 nt, Artificial Sequence
  Description of Artificial Sequence: Synthetic oligonucleotide
ccuaagccaacccaaccau

SEQ ID NO: 590081 - RNA, 19 nt, Artificial Sequence
  Description of Artificial Sequence: Synthetic oligonucleotide
ccuccgcaacccucgccgc

SEQ ID NO: 590082 - RNA, 19 nt, Artificial Sequence
  Description of Artificial Sequence: Synthetic oligonucleotide
ggcccggacgcucgccaug

SEQ ID NO: 590083 - RNA, 19 nt, Artificial Sequence
  Description of Artificial Sequence: Synthetic oligonucleotide
acgccagaguggggcuguc

SEQ ID NO: 590084 - RNA, 19 nt, Artificial Sequence
  Description of Artificial Sequence: Synthetic oligonucleotide
gggcgaauccacagcaagu

SEQ ID NO: 590085 - RNA, 19 nt, Artificial Sequence
  Description of Artificial Sequence: Synthetic oligonucleotide
cccgcuaacaguccugaau

SEQ ID NO: 590086 - RNA, 19 nt, Artificial Sequence
  Description of Artificial Sequence: Synthetic oligonucleotide
gggcaguaaucuggggcuc

SEQ ID NO: 590087 - RNA, 19 nt, Artificial Sequence
  Description of Artificial Sequence: Synthetic oligonucleotide
ccaagccaauagccaguuc

SEQ ID NO: 590088 - RNA, 19 nt, Artificial Sequence
  Description of Artificial Sequence: Synthetic oligonucleotide
cucucugaacguggugagu

SEQ ID NO: 590089 - RNA, 19 nt, Artificial Sequence
  Description of Artificial Sequence: Synthetic oligonucleotide
caguaaucuggggcucucu

SEQ ID NO: 590090 - RNA, 19 nt, Artificial Sequence
  Description of Artificial Sequence: Synthetic oligonucleotide
cacccagggagcugcuaau

SEQ ID NO: 590091 - RNA, 19 nt, Artificial Sequence
  Description of Artificial Sequence: Synthetic oligonucleotide
cggguuugcagcccaugga

SEQ ID NO: 590092 - RNA, 19 nt, Artificial Sequence
  Description of Artificial Sequence: Synthetic oligonucleotide
ccaccuccgcaacccucgc

SEQ ID NO: 590093 - RNA, 19 nt, Artificial Sequence
  Description of Artificial Sequence: Synthetic oligonucleotide
ccaacccaaccaucggacu

SEQ ID NO: 590094 - RNA, 19 nt, Artificial Sequence
  Description of Artificial Sequence: Synthetic oligonucleotide
gucgacacuccaagccaau

SEQ ID NO: 590095 - RNA, 19 nt, Artificial Sequence
  Description of Artificial Sequence: Synthetic oligonucleotide
ccgacucgaugcucaagua

SEQ ID NO: 590096 - RNA, 19 nt, Artificial Sequence
  Description of Artificial Sequence: Synthetic oligonucleotide
cccaagacgcuuggaugca

SEQ ID NO: 590097 - RNA, 19 nt, Artificial Sequence
  Description of Artificial Sequence: Synthetic oligonucleotide
gcccgcaaacaggcucugc

SEQ ID NO: 590098 - RNA, 19 nt, Artificial Sequence
  Description of Artificial Sequence: Synthetic oligonucleotide
cggaaaguacagggcuaac

SEQ ID NO: 590099 - RNA, 19 nt, Artificial Sequence
  Description of Artificial Sequence: Synthetic oligonucleotide
gccgggcggguccgaagca

SEQ ID NO: 590100 - RNA, 19 nt, Artificial Sequence
  Description of Artificial Sequence: Synthetic oligonucleotide
ccgcaacccucgccgcggc

SEQ ID NO: 590101 - RNA, 19 nt, Artificial Sequence
  Description of Artificial Sequence: Synthetic oligonucleotide
ccaucgauucugggcagua

SEQ ID NO: 590102 - RNA, 19 nt, Artificial Sequence
  Description of Artificial Sequence: Synthetic oligonucleotide
ccugcaccugggaaauaau

SEQ ID NO: 590103 - RNA, 19 nt, Artificial Sequence
  Description of Artificial Sequence: Synthetic oligonucleotide
cgauccgaguaggcagcac

SEQ ID NO: 590104 - RNA, 19 nt, Artificial Sequence
  Description of Artificial Sequence: Synthetic oligonucleotide
gcagugcgccucgcgggga

SEQ ID NO: 590105 - RNA, 19 nt, Artificial Sequence
  Description of Artificial Sequence: Synthetic oligonucleotide
ccagccuaucuggcuaaua

SEQ ID NO: 590106 - RNA, 19 nt, Artificial Sequence
  Description of Artificial Sequence: Synthetic oligonucleotide
gcccggacgcucgccaugu

SEQ ID NO: 590107 - RNA, 19 nt, Artificial Sequence
  Description of Artificial Sequence: Synthetic oligonucleotide
ccguaacaucccagcacau

SEQ ID NO: 590108 - RNA, 19 nt, Artificial Sequence
  Description of Artificial Sequence: Synthetic oligonucleotide
ccucgcggggaggcccgga

SEQ ID NO: 590109 - RNA, 19 nt, Artificial Sequence
  Description of Artificial Sequence: Synthetic oligonucleotide
gauaaauaaccgcagugcg

SEQ ID NO: 590110 - RNA, 19 nt, Artificial Sequence
  Description of Artificial Sequence: Synthetic oligonucleotide
ucuuggucccuucagaugg

SEQ ID NO: 590111 - RNA, 19 nt, Artificial Sequence
  Description of Artificial Sequence: Synthetic oligonucleotide
acaaacagaccccaaagac

SEQ ID NO: 590112 - RNA, 19 nt, Artificial Sequence
  Description of Artificial Sequence: Synthetic oligonucleotide
gaaaauagggcccagccug

SEQ ID NO: 590113 - RNA, 19 nt, Artificial Sequence
  Description of Artificial Sequence: Synthetic oligonucleotide
aggacagugagucauagag

SEQ ID NO: 590114 - RNA, 19 nt, Artificial Sequence
  Description of Artificial Sequence: Synthetic oligonucleotide
uaaauaaccgcagugcggg

SEQ ID NO: 590115 - RNA, 19 nt, Artificial Sequence
  Description of Artificial Sequence: Synthetic oligonucleotide
gacagugagucauagagug

SEQ ID NO: 590116 - RNA, 19 nt, Artificial Sequence
  Description of Artificial Sequence: Synthetic oligonucleotide
auacaugccggcuagcugg

SEQ ID NO: 590117 - RNA, 19 nt, Artificial Sequence
  Description of Artificial Sequence: Synthetic oligonucleotide
ugcuacuacaaucugccca

SEQ ID NO: 590118 - RNA, 19 nt, Artificial Sequence
  Description of Artificial Sequence: Synthetic oligonucleotide
caagguucgagucaaggag

SEQ ID NO: 590119 - RNA, 19 nt, Artificial Sequence
  Description of Artificial Sequence: Synthetic oligonucleotide
aagguucgagucaaggagc

SEQ ID NO: 590120 - RNA, 19 nt, Artificial Sequence
  Description of Artificial Sequence: Synthetic oligonucleotide
agacaaacagaccccaaag

SEQ ID NO: 590121 - RNA, 19 nt, Artificial Sequence
  Description of Artificial Sequence: Synthetic oligonucleotide
gaucaguggacacuggcug

SEQ ID NO: 590122 - RNA, 19 nt, Artificial Sequence
  Description of Artificial Sequence: Synthetic oligonucleotide
accaggcgcuuuuauaugc

SEQ ID NO: 590123 - RNA, 19 nt, Artificial Sequence
  Description of Artificial Sequence: Synthetic oligonucleotide
auccacccuauucaggagc

SEQ ID NO: 590124 - RNA, 19 nt, Artificial Sequence
  Description of Artificial Sequence: Synthetic oligonucleotide
gugaaaauagggcccagcc

SEQ ID NO: 590125 - RNA, 19 nt, Artificial Sequence
  Description of Artificial Sequence: Synthetic oligonucleotide
cugaagugggccuaccagg

SEQ ID NO: 590126 - RNA, 19 nt, Artificial Sequence
  Description of Artificial Sequence: Synthetic oligonucleotide
ugcgguggaaacuggcucg

SEQ ID NO: 590127 - RNA, 19 nt, Artificial Sequence
  Description of Artificial Sequence: Synthetic oligonucleotide
auaaauaaccgcagugcgg

SEQ ID NO: 590128 - RNA, 19 nt, Artificial Sequence
  Description of Artificial Sequence: Synthetic oligonucleotide
uguaggcuggccaacugug

SEQ ID NO: 590129 - RNA, 19 nt, Artificial Sequence
  Description of Artificial Sequence: Synthetic oligonucleotide
gauguugaggcucucagcu

SEQ ID NO: 590130 - RNA, 19 nt, Artificial Sequence
  Description of Artificial Sequence: Synthetic oligonucleotide
cuuuccggaagguuuuccg

SEQ ID NO: 590131 - RNA, 19 nt, Artificial Sequence
  Description of Artificial Sequence: Synthetic oligonucleotide
ucgcaagacauucuccuca

SEQ ID NO: 590132 - RNA, 19 nt, Artificial Sequence
  Description of Artificial Sequence: Synthetic oligonucleotide
cuacaaucugcccaagcag

SEQ ID NO: 590133 - RNA, 19 nt, Artificial Sequence
  Description of Artificial Sequence: Synthetic oligonucleotide
agguacuggggauguaggc

SEQ ID NO: 590134 - RNA, 19 nt, Artificial Sequence
  Description of Artificial Sequence: Synthetic oligonucleotide
ggucugauggcuucggugg

SEQ ID NO: 590135 - RNA, 19 nt, Artificial Sequence
  Description of Artificial Sequence: Synthetic oligonucleotide
agagccggcaguuugcucu

SEQ ID NO: 590136 - RNA, 19 nt, Artificial Sequence
  Description of Artificial Sequence: Synthetic oligonucleotide
aauagggcccagccugggg

SEQ ID NO: 590137 - RNA, 19 nt, Artificial Sequence
  Description of Artificial Sequence: Synthetic oligonucleotide
ugaagugugcgguggaaac

SEQ ID NO: 590138 - RNA, 19 nt, Artificial Sequence
  Description of Artificial Sequence: Synthetic oligonucleotide
uccgcagcccugaaguggg

SEQ ID NO: 590139 - RNA, 19 nt, Artificial Sequence
  Description of Artificial Sequence: Synthetic oligonucleotide
gaagucgcaagacauucuc

SEQ ID NO: 590140 - RNA, 19 nt, Artificial Sequence
  Description of Artificial Sequence: Synthetic oligonucleotide
aacuggcucggccaggcug

SEQ ID NO: 590141 - RNA, 19 nt, Artificial Sequence
  Description of Artificial Sequence: Synthetic oligonucleotide
uuccugaccuugaagucgc

SEQ ID NO: 590142 - RNA, 19 nt, Artificial Sequence
  Description of Artificial Sequence: Synthetic oligonucleotide
gauacaugccggcuagcug

SEQ ID NO: 590143 - RNA, 19 nt, Artificial Sequence
  Description of Artificial Sequence: Synthetic oligonucleotide
ucugaggggaucucuuccc

SEQ ID NO: 590144 - RNA, 19 nt, Artificial Sequence
  Description of Artificial Sequence: Synthetic oligonucleotide
uggggcuuccaaaauuggc

SEQ ID NO: 590145 - RNA, 19 nt, Artificial Sequence
  Description of Artificial Sequence: Synthetic oligonucleotide
uugaagucgcaagacauuc

SEQ ID NO: 590146 - RNA, 19 nt, Artificial Sequence
  Description of Artificial Sequence: Synthetic oligonucleotide
uacuacaaucugcccaagc

SEQ ID NO: 590147 - RNA, 19 nt, Artificial Sequence
  Description of Artificial Sequence: Synthetic oligonucleotide
aaccaggcgcuuuuauaug

SEQ ID NO: 590148 - RNA, 19 nt, Artificial Sequence
  Description of Artificial Sequence: Synthetic oligonucleotide
cacaagauggcuccgccug

SEQ ID NO: 590149 - RNA, 19 nt, Artificial Sequence
  Description of Artificial Sequence: Synthetic oligonucleotide
cacaggaggacagugaguc

SEQ ID NO: 590150 - RNA, 19 nt, Artificial Sequence
  Description of Artificial Sequence: Synthetic oligonucleotide
cucuucaaugccuggcacc

SEQ ID NO: 590151 - RNA, 19 nt, Artificial Sequence
  Description of Artificial Sequence: Synthetic oligonucleotide
ugaggcguagaugugcggc

SEQ ID NO: 590152 - RNA, 19 nt, Artificial Sequence
  Description of Artificial Sequence: Synthetic oligonucleotide
cucaauggcggaguguggg

SEQ ID NO: 590153 - RNA, 19 nt, Artificial Sequence
  Description of Artificial Sequence: Synthetic oligonucleotide
ugugcgguggaaacuggcu

SEQ ID NO: 590154 - RNA, 19 nt, Artificial Sequence
  Description of Artificial Sequence: Synthetic oligonucleotide
uugggaucaguggacacug

SEQ ID NO: 590155 - RNA, 19 nt, Artificial Sequence
  Description of Artificial Sequence: Synthetic oligonucleotide
uuccggaagguuuuccgca

SEQ ID NO: 590156 - RNA, 19 nt, Artificial Sequence
  Description of Artificial Sequence: Synthetic oligonucleotide
ugugaaaauagggcccagc

SEQ ID NO: 590157 - RNA, 19 nt, Artificial Sequence
  Description of Artificial Sequence: Synthetic oligonucleotide
aauggcggaguguggggcu

SEQ ID NO: 590158 - RNA, 19 nt, Artificial Sequence
  Description of Artificial Sequence: Synthetic oligonucleotide
gucuuggggagauucuugc

SEQ ID NO: 590159 - RNA, 19 nt, Artificial Sequence
  Description of Artificial Sequence: Synthetic oligonucleotide
ugugcggcugggcucuagg

SEQ ID NO: 590160 - RNA, 19 nt, Artificial Sequence
  Description of Artificial Sequence: Synthetic oligonucleotide
ucccuuagagaagagccug

SEQ ID NO: 590161 - RNA, 19 nt, Artificial Sequence
  Description of Artificial Sequence: Synthetic oligonucleotide
gaggggaucucuucccgcc

SEQ ID NO: 590162 - RNA, 19 nt, Artificial Sequence
  Description of Artificial Sequence: Synthetic oligonucleotide
uuccgcagcccugaagugg

SEQ ID NO: 590163 - RNA, 19 nt, Artificial Sequence
  Description of Artificial Sequence: Synthetic oligonucleotide
gugcccuucccuuugucag

SEQ ID NO: 590164 - RNA, 19 nt, Artificial Sequence
  Description of Artificial Sequence: Synthetic oligonucleotide
ugauacaugccggcuagcu

SEQ ID NO: 590165 - RNA, 19 nt, Artificial Sequence
  Description of Artificial Sequence: Synthetic oligonucleotide
uccacccuauucaggagcu

SEQ ID NO: 590166 - RNA, 19 nt, Artificial Sequence
  Description of Artificial Sequence: Synthetic oligonucleotide
agauggcuccgccugaagu

SEQ ID NO: 590167 - RNA, 19 nt, Artificial Sequence
  Description of Artificial Sequence: Synthetic oligonucleotide
ugcaugaaggugucugcac

SEQ ID NO: 590168 - RNA, 19 nt, Artificial Sequence
  Description of Artificial Sequence: Synthetic oligonucleotide
gugggaaggucccaaugcc

SEQ ID NO: 590169 - RNA, 19 nt, Artificial Sequence
  Description of Artificial Sequence: Synthetic oligonucleotide
auagagugagucacuuagg

SEQ ID NO: 590170 - RNA, 19 nt, Artificial Sequence
  Description of Artificial Sequence: Synthetic oligonucleotide
guaggccuucucuuccucg

SEQ ID NO: 590171 - RNA, 19 nt, Artificial Sequence
  Description of Artificial Sequence: Synthetic oligonucleotide
ugaaccaggcgcuuuuaua

SEQ ID NO: 590172 - RNA, 19 nt, Artificial Sequence
  Description of Artificial Sequence: Synthetic oligonucleotide
gauguaggcuggccaacug

SEQ ID NO: 590173 - RNA, 19 nt, Artificial Sequence
  Description of Artificial Sequence: Synthetic oligonucleotide
uccggaagguuuuccgcag

SEQ ID NO: 590174 - RNA, 19 nt, Artificial Sequence
  Description of Artificial Sequence: Synthetic oligonucleotide
gagucaagggaccaggggu

SEQ ID NO: 590175 - RNA, 19 nt, Artificial Sequence
  Description of Artificial Sequence: Synthetic oligonucleotide
accuugaagucgcaagaca

SEQ ID NO: 590176 - RNA, 19 nt, Artificial Sequence
  Description of Artificial Sequence: Synthetic oligonucleotide
acggcgagggacuuuggug

SEQ ID NO: 590177 - RNA, 19 nt, Artificial Sequence
  Description of Artificial Sequence: Synthetic oligonucleotide
cuuggucuuggggagauuc

SEQ ID NO: 590178 - RNA, 19 nt, Artificial Sequence
  Description of Artificial Sequence: Synthetic oligonucleotide
acuuagggacucugagguc

SEQ ID NO: 590179 - RNA, 19 nt, Artificial Sequence
  Description of Artificial Sequence: Synthetic oligonucleotide
cuugguaccuaagggugcc

SEQ ID NO: 590180 - RNA, 19 nt, Artificial Sequence
  Description of Artificial Sequence: Synthetic oligonucleotide
agugcccuucccuuuguca

SEQ ID NO: 590181 - RNA, 19 nt, Artificial Sequence
  Description of Artificial Sequence: Synthetic oligonucleotide
gaaacuggcucggccaggc

SEQ ID NO: 590182 - RNA, 19 nt, Artificial Sequence
  Description of Artificial Sequence: Synthetic oligonucleotide
acaggcugugaagugugcg

SEQ ID NO: 590183 - RNA, 19 nt, Artificial Sequence
  Description of Artificial Sequence: Synthetic oligonucleotide
guucgagucaaggagccac

SEQ ID NO: 590184 - RNA, 19 nt, Artificial Sequence
  Description of Artificial Sequence: Synthetic oligonucleotide
aaauaaccgcagugcgggu

SEQ ID NO: 590185 - RNA, 19 nt, Artificial Sequence
  Description of Artificial Sequence: Synthetic oligonucleotide
auguaggcuggccaacugu

SEQ ID NO: 590186 - RNA, 19 nt, Artificial Sequence
  Description of Artificial Sequence: Synthetic oligonucleotide
uguccaagguucgagucaa

SEQ ID NO: 590187 - RNA, 19 nt, Artificial Sequence
  Description of Artificial Sequence: Synthetic oligonucleotide
gucgggauggggcacagga

SEQ ID NO: 590188 - RNA, 19 nt, Artificial Sequence
  Description of Artificial Sequence: Synthetic oligonucleotide
ccaguugucgggauggggc

SEQ ID NO: 590189 - RNA, 19 nt, Artificial Sequence
  Description of Artificial Sequence: Synthetic oligonucleotide
ucgcccauguccgacgugc

SEQ ID NO: 590190 - RNA, 19 nt, Artificial Sequence
  Description of Artificial Sequence: Synthetic oligonucleotide
cugaggggaucucuucccg

SEQ ID NO: 590191 - RNA, 19 nt, Artificial Sequence
  Description of Artificial Sequence: Synthetic oligonucleotide
gcuggaaauccccauacuc

SEQ ID NO: 590192 - RNA, 19 nt, Artificial Sequence
  Description of Artificial Sequence: Synthetic oligonucleotide
aauaaccgcagugcggguu

SEQ ID NO: 590193 - RNA, 19 nt, Artificial Sequence
  Description of Artificial Sequence: Synthetic oligonucleotide
guggaaacuggcucggcca

SEQ ID NO: 590194 - RNA, 19 nt, Artificial Sequence
  Description of Artificial Sequence: Synthetic oligonucleotide
cacuuagggacucugaggu

SEQ ID NO: 590195 - RNA, 19 nt, Artificial Sequence
  Description of Artificial Sequence: Synthetic oligonucleotide
agggcagucccuccaguug

SEQ ID NO: 590196 - RNA, 19 nt, Artificial Sequence
  Description of Artificial Sequence: Synthetic oligonucleotide
cuugguagcuucggugcgg

SEQ ID NO: 590197 - RNA, 19 nt, Artificial Sequence
  Description of Artificial Sequence: Synthetic oligonucleotide
gacagacaaacagacccca

SEQ ID NO: 590198 - RNA, 19 nt, Artificial Sequence
  Description of Artificial Sequence: Synthetic oligonucleotide
gggcuuccaaaauuggccc

SEQ ID NO: 590199 - RNA, 19 nt, Artificial Sequence
  Description of Artificial Sequence: Synthetic oligonucleotide
guuuuccgcagcccugaag

SEQ ID NO: 590200 - RNA, 19 nt, Artificial Sequence
  Description of Artificial Sequence: Synthetic oligonucleotide
ugggaucaguggacacugg

SEQ ID NO: 590201 - RNA, 19 nt, Artificial Sequence
  Description of Artificial Sequence: Synthetic oligonucleotide
gguggaaacuggcucggcc

SEQ ID NO: 590202 - RNA, 19 nt, Artificial Sequence
  Description of Artificial Sequence: Synthetic oligonucleotide
uccucgcccauguccgacg

SEQ ID NO: 590203 - RNA, 19 nt, Artificial Sequence
  Description of Artificial Sequence: Synthetic oligonucleotide
uguccguuccugaccuuga

SEQ ID NO: 590204 - RNA, 19 nt, Artificial Sequence
  Description of Artificial Sequence: Synthetic oligonucleotide
aagguuuuccgcagcccug

SEQ ID NO: 590205 - RNA, 19 nt, Artificial Sequence
  Description of Artificial Sequence: Synthetic oligonucleotide
cucgcugcugggcuuuccg

SEQ ID NO: 590206 - RNA, 19 nt, Artificial Sequence
  Description of Artificial Sequence: Synthetic oligonucleotide
ggaucaucaggacaggucu

SEQ ID NO: 590207 - RNA, 19 nt, Artificial Sequence
  Description of Artificial Sequence: Synthetic oligonucleotide
uacaugccggcuagcuggc

SEQ ID NO: 590208 - RNA, 19 nt, Artificial Sequence
  Description of Artificial Sequence: Synthetic oligonucleotide
uggggugugccagggaccc

SEQ ID NO: 590209 - RNA, 19 nt, Artificial Sequence
  Description of Artificial Sequence: Synthetic oligonucleotide
agccgagcaugguugucuc

SEQ ID NO: 590210 - RNA, 19 nt, Artificial Sequence
  Description of Artificial Sequence: Synthetic oligonucleotide
accccaaagacguggggaa

SEQ ID NO: 590211 - RNA, 19 nt, Artificial Sequence
  Description of Artificial Sequence: Synthetic oligonucleotide
agaccuggagggcuccuug

SEQ ID NO: 590212 - RNA, 19 nt, Artificial Sequence
  Description of Artificial Sequence: Synthetic oligonucleotide
acuggccccuuccuugcuc

SEQ ID NO: 590213 - RNA, 19 nt, Artificial Sequence
  Description of Artificial Sequence: Synthetic oligonucleotide
agcaguggggugugccagg

SEQ ID NO: 590214 - RNA, 19 nt, Artificial Sequence
  Description of Artificial Sequence: Synthetic oligonucleotide
gaccuugaagucgcaagac

SEQ ID NO: 590215 - RNA, 19 nt, Artificial Sequence
  Description of Artificial Sequence: Synthetic oligonucleotide
ccuuccucgcccauguccg

SEQ ID NO: 590216 - RNA, 19 nt, Artificial Sequence
  Description of Artificial Sequence: Synthetic oligonucleotide
cagucccuccaguugucgg

SEQ ID NO: 590217 - RNA, 19 nt, Artificial Sequence
  Description of Artificial Sequence: Synthetic oligonucleotide
ucgagucaaggagccacag

SEQ ID NO: 590218 - RNA, 19 nt, Artificial Sequence
  Description of Artificial Sequence: Synthetic oligonucleotide
caaucugcccaagcagugc

SEQ ID NO: 590219 - RNA, 19 nt, Artificial Sequence
  Description of Artificial Sequence: Synthetic oligonucleotide
gcuacuacaaucugcccaa

SEQ ID NO: 590220 - RNA, 19 nt, Artificial Sequence
  Description of Artificial Sequence: Synthetic oligonucleotide
uuagggacucugaggucuc

SEQ ID NO: 590221 - RNA, 19 nt, Artificial Sequence
  Description of Artificial Sequence: Synthetic oligonucleotide
aggucccaaugccacuguc

SEQ ID NO: 590222 - RNA, 19 nt, Artificial Sequence
  Description of Artificial Sequence: Synthetic oligonucleotide
acaagauggcuccgccuga

SEQ ID NO: 590223 - RNA, 19 nt, Artificial Sequence
  Description of Artificial Sequence: Synthetic oligonucleotide
aguggguguggucccucag

SEQ ID NO: 590224 - RNA, 19 nt, Artificial Sequence
  Description of Artificial Sequence: Synthetic oligonucleotide
cauccacccuauucaggag

SEQ ID NO: 590225 - RNA, 19 nt, Artificial Sequence
  Description of Artificial Sequence: Synthetic oligonucleotide
aggcugacaucugagggga

SEQ ID NO: 590226 - RNA, 19 nt, Artificial Sequence
  Description of Artificial Sequence: Synthetic oligonucleotide
augccuggcaccucccgcu

SEQ ID NO: 590227 - RNA, 19 nt, Artificial Sequence
  Description of Artificial Sequence: Synthetic oligonucleotide
gugcggcggguucagagcc

SEQ ID NO: 590228 - RNA, 19 nt, Artificial Sequence
  Description of Artificial Sequence: Synthetic oligonucleotide
uuccucgagugcccggcgc

SEQ ID NO: 590229 - RNA, 19 nt, Artificial Sequence
  Description of Artificial Sequence: Synthetic oligonucleotide
ugugggcacggcgagggac

SEQ ID NO: 590230 - RNA, 19 nt, Artificial Sequence
  Description of Artificial Sequence: Synthetic oligonucleotide
ccugauacaugccggcuag

SEQ ID NO: 590231 - RNA, 19 nt, Artificial Sequence
  Description of Artificial Sequence: Synthetic oligonucleotide
uggcuccgccugaaguggg

SEQ ID NO: 590232 - RNA, 19 nt, Artificial Sequence
  Description of Artificial Sequence: Synthetic oligonucleotide
cuuagggacucugaggucu

SEQ ID NO: 590233 - RNA, 19 nt, Artificial Sequence
  Description of Artificial Sequence: Synthetic oligonucleotide
ggcgcuuuuauaugcaugu

SEQ ID NO: 590234 - RNA, 19 nt, Artificial Sequence
  Description of Artificial Sequence: Synthetic oligonucleotide
aucugcccaagcagugccc

SEQ ID NO: 590235 - RNA, 19 nt, Artificial Sequence
  Description of Artificial Sequence: Synthetic oligonucleotide
gugcgguggaaacuggcuc

SEQ ID NO: 590236 - RNA, 19 nt, Artificial Sequence
  Description of Artificial Sequence: Synthetic oligonucleotide
ugcccuucccuuugucaga

SEQ ID NO: 590237 - RNA, 19 nt, Artificial Sequence
  Description of Artificial Sequence: Synthetic oligonucleotide
ugguaccuaagggugccac

SEQ ID NO: 590238 - RNA, 19 nt, Artificial Sequence
  Description of Artificial Sequence: Synthetic oligonucleotide
cagcaccacaagauggcuc

SEQ ID NO: 590239 - RNA, 19 nt, Artificial Sequence
  Description of Artificial Sequence: Synthetic oligonucleotide
cugaggcguagaugugcgg

SEQ ID NO: 590240 - RNA, 19 nt, Artificial Sequence
  Description of Artificial Sequence: Synthetic oligonucleotide
ccaggggaacuguaguggg

SEQ ID NO: 590241 - RNA, 19 nt, Artificial Sequence
  Description of Artificial Sequence: Synthetic oligonucleotide
uuccgcuguugccaugauc

SEQ ID NO: 590242 - RNA, 19 nt, Artificial Sequence
  Description of Artificial Sequence: Synthetic oligonucleotide
ucgagugcccggcgcaggu

SEQ ID NO: 590243 - RNA, 19 nt, Artificial Sequence
  Description of Artificial Sequence: Synthetic oligonucleotide
gaggacagugagucauaga

SEQ ID NO: 590244 - RNA, 19 nt, Artificial Sequence
  Description of Artificial Sequence: Synthetic oligonucleotide
cuguccaagguucgaguca

SEQ ID NO: 590245 - RNA, 19 nt, Artificial Sequence
  Description of Artificial Sequence: Synthetic oligonucleotide
aaacuggcucggccaggcu

SEQ ID NO: 590246 - RNA, 19 nt, Artificial Sequence
  Description of Artificial Sequence: Synthetic oligonucleotide
gaucucuucccgccuaccu

SEQ ID NO: 590247 - RNA, 19 nt, Artificial Sequence
  Description of Artificial Sequence: Synthetic oligonucleotide
gugccgcccacucaccagc

SEQ ID NO: 590248 - RNA, 19 nt, Artificial Sequence
  Description of Artificial Sequence: Synthetic oligonucleotide
guguccguuccugaccuug

SEQ ID NO: 590249 - RNA, 19 nt, Artificial Sequence
  Description of Artificial Sequence: Synthetic oligonucleotide
ggcuuccaaaauuggcccc

SEQ ID NO: 590250 - RNA, 19 nt, Artificial Sequence
  Description of Artificial Sequence: Synthetic oligonucleotide
agugugcgguggaaacugg

SEQ ID NO: 590251 - RNA, 19 nt, Artificial Sequence
  Description of Artificial Sequence: Synthetic oligonucleotide
cuccgccugaagugggagc

SEQ ID NO: 590252 - RNA, 19 nt, Artificial Sequence
  Description of Artificial Sequence: Synthetic oligonucleotide
cuuccucgagugcccggcg

SEQ ID NO: 590253 - RNA, 19 nt, Artificial Sequence
  Description of Artificial Sequence: Synthetic oligonucleotide
gcuucgguggccugaagga

SEQ ID NO: 590254 - RNA, 19 nt, Artificial Sequence
  Description of Artificial Sequence: Synthetic oligonucleotide
aggcgcuuuuauaugcaug

SEQ ID NO: 590255 - RNA, 19 nt, Artificial Sequence
  Description of Artificial Sequence: Synthetic oligonucleotide
agcugcuagcugcucgggu

SEQ ID NO: 590256 - RNA, 19 nt, Artificial Sequence
  Description of Artificial Sequence: Synthetic oligonucleotide
uccggagcggggagccucc

SEQ ID NO: 590257 - RNA, 19 nt, Artificial Sequence
  Description of Artificial Sequence: Synthetic oligonucleotide
ugguagcuucggugcggcg

SEQ ID NO: 590258 - RNA, 19 nt, Artificial Sequence
  Description of Artificial Sequence: Synthetic oligonucleotide
cccauacucaggcuugggc

SEQ ID NO: 590259 - RNA, 19 nt, Artificial Sequence
  Description of Artificial Sequence: Synthetic oligonucleotide
ccuccaguugucgggaugg

SEQ ID NO: 590260 - RNA, 19 nt, Artificial Sequence
  Description of Artificial Sequence: Synthetic oligonucleotide
gccuuagccaucagcuugg

SEQ ID NO: 590261 - RNA, 19 nt, Artificial Sequence
  Description of Artificial Sequence: Synthetic oligonucleotide
ucggguguuggggaagguc

SEQ ID NO: 590262 - RNA, 19 nt, Artificial Sequence
  Description of Artificial Sequence: Synthetic oligonucleotide
ucccuucagauggagccuc

SEQ ID NO: 590263 - RNA, 19 nt, Artificial Sequence
  Description of Artificial Sequence: Synthetic oligonucleotide
agucacuuagggacucuga

SEQ ID NO: 590264 - RNA, 19 nt, Artificial Sequence
  Description of Artificial Sequence: Synthetic oligonucleotide
ggcccugaggcguagaugu

SEQ ID NO: 590265 - RNA, 19 nt, Artificial Sequence
  Description of Artificial Sequence: Synthetic oligonucleotide
uaaccgcagugcggguugg

SEQ ID NO: 590266 - RNA, 19 nt, Artificial Sequence
  Description of Artificial Sequence: Synthetic oligonucleotide
ggcguagaugugcggcugg

SEQ ID NO: 590267 - RNA, 19 nt, Artificial Sequence
  Description of Artificial Sequence: Synthetic oligonucleotide
ugcucggguguuggggaag

SEQ ID NO: 590268 - RNA, 19 nt, Artificial Sequence
  Description of Artificial Sequence: Synthetic oligonucleotide
uucagagcccgguguccgu

SEQ ID NO: 590269 - RNA, 19 nt, Artificial Sequence
  Description of Artificial Sequence: Synthetic oligonucleotide
gcuaggggugccccuggcg

SEQ ID NO: 590270 - RNA, 19 nt, Artificial Sequence
  Description of Artificial Sequence: Synthetic oligonucleotide
cccugacucccacaggagg

SEQ ID NO: 590271 - RNA, 19 nt, Artificial Sequence
  Description of Artificial Sequence: Synthetic oligonucleotide
ugggcccugaggcguagau

SEQ ID NO: 590272 - RNA, 19 nt, Artificial Sequence
  Description of Artificial Sequence: Synthetic oligonucleotide
aggggaucucuucccgccu

SEQ ID NO: 590273 - RNA, 19 nt, Artificial Sequence
  Description of Artificial Sequence: Synthetic oligonucleotide
ccaagguucgagucaagga

SEQ ID NO: 590274 - RNA, 19 nt, Artificial Sequence
  Description of Artificial Sequence: Synthetic oligonucleotide
cccaaagacguggggaagg

SEQ ID NO: 590275 - RNA, 19 nt, Artificial Sequence
  Description of Artificial Sequence: Synthetic oligonucleotide
guguggggacugaaccagg

SEQ ID NO: 590276 - RNA, 19 nt, Artificial Sequence
  Description of Artificial Sequence: Synthetic oligonucleotide
gugcggcugggcucuaggc

SEQ ID NO: 590277 - RNA, 19 nt, Artificial Sequence
  Description of Artificial Sequence: Synthetic oligonucleotide
gaagugugcgguggaaacu

SEQ ID NO: 590278 - RNA, 19 nt, Artificial Sequence
  Description of Artificial Sequence: Synthetic oligonucleotide
gagcugcuagcugcucggg

SEQ ID NO: 590279 - RNA, 19 nt, Artificial Sequence
  Description of Artificial Sequence: Synthetic oligonucleotide
gcacccugauacaugccgg

SEQ ID NO: 590280 - RNA, 19 nt, Artificial Sequence
  Description of Artificial Sequence: Synthetic oligonucleotide
uucggugcggcggguucag

SEQ ID NO: 590281 - RNA, 19 nt, Artificial Sequence
  Description of Artificial Sequence: Synthetic oligonucleotide
cagguugggcagagauggc

SEQ ID NO: 590282 - RNA, 19 nt, Artificial Sequence
  Description of Artificial Sequence: Synthetic oligonucleotide
gugugcgguggaaacuggc

SEQ ID NO: 590283 - RNA, 19 nt, Artificial Sequence
  Description of Artificial Sequence: Synthetic oligonucleotide
gaggcguagaugugcggcu

SEQ ID NO: 590284 - RNA, 19 nt, Artificial Sequence
  Description of Artificial Sequence: Synthetic oligonucleotide
cagggaucaucaggacagg

SEQ ID NO: 590285 - RNA, 19 nt, Artificial Sequence
  Description of Artificial Sequence: Synthetic oligonucleotide
ccaaagacguggggaaggg

SEQ ID NO: 590286 - RNA, 19 nt, Artificial Sequence
  Description of Artificial Sequence: Synthetic oligonucleotide
cuacuacaaucugcccaag

SEQ ID NO: 590287 - RNA, 19 nt, Artificial Sequence
  Description of Artificial Sequence: Synthetic oligonucleotide
aggcguagaugugcggcug

SEQ ID NO: 590288 - RNA, 19 nt, Artificial Sequence
  Description of Artificial Sequence: Synthetic oligonucleotide
uuccucgcccauguccgac

SEQ ID NO: 590289 - RNA, 19 nt, Artificial Sequence
  Description of Artificial Sequence: Synthetic oligonucleotide
cugauacaugccggcuagc

SEQ ID NO: 590290 - RNA, 19 nt, Artificial Sequence
  Description of Artificial Sequence: Synthetic oligonucleotide
uugucgggauggggcacag

SEQ ID NO: 590291 - RNA, 19 nt, Artificial Sequence
  Description of Artificial Sequence: Synthetic oligonucleotide
ggcgagggacuuuggugag

SEQ ID NO: 590292 - RNA, 19 nt, Artificial Sequence
  Description of Artificial Sequence: Synthetic oligonucleotide
uugguaccuaagggugcca

SEQ ID NO: 590293 - RNA, 19 nt, Artificial Sequence
  Description of Artificial Sequence: Synthetic oligonucleotide
agggcuccuugguaccuaa

SEQ ID NO: 590294 - RNA, 19 nt, Artificial Sequence
  Description of Artificial Sequence: Synthetic oligonucleotide
uuccggagcggggagccuc

SEQ ID NO: 590295 - RNA, 19 nt, Artificial Sequence
  Description of Artificial Sequence: Synthetic oligonucleotide
ugucgggauggggcacagg

SEQ ID NO: 590296 - RNA, 19 nt, Artificial Sequence
  Description of Artificial Sequence: Synthetic oligonucleotide
uccuugccauccacccuau

SEQ ID NO: 590297 - RNA, 19 nt, Artificial Sequence
  Description of Artificial Sequence: Synthetic oligonucleotide
aggggugccccuggcgggg

SEQ ID NO: 590298 - RNA, 19 nt, Artificial Sequence
  Description of Artificial Sequence: Synthetic oligonucleotide
gcggguucagagccggcag

SEQ ID NO: 590299 - RNA, 19 nt, Artificial Sequence
  Description of Artificial Sequence: Synthetic oligonucleotide
uccugaccuugaagucgca

SEQ ID NO: 590300 - RNA, 19 nt, Artificial Sequence
  Description of Artificial Sequence: Synthetic oligonucleotide
aggcagcaccauucagaca

SEQ ID NO: 590301 - RNA, 19 nt, Artificial Sequence
  Description of Artificial Sequence: Synthetic oligonucleotide
ggggauguaggcuggccaa

SEQ ID NO: 590302 - RNA, 19 nt, Artificial Sequence
  Description of Artificial Sequence: Synthetic oligonucleotide
cgagggacuuuggugaggg

SEQ ID NO: 590303 - RNA, 19 nt, Artificial Sequence
  Description of Artificial Sequence: Synthetic oligonucleotide
ggacuuuggugagggcagg

SEQ ID NO: 590304 - RNA, 19 nt, Artificial Sequence
  Description of Artificial Sequence: Synthetic oligonucleotide
cucgagugcccggcgcagg

SEQ ID NO: 590305 - RNA, 19 nt, Artificial Sequence
  Description of Artificial Sequence: Synthetic oligonucleotide
cauguccgacgugcugggg

SEQ ID NO: 590306 - RNA, 19 nt, Artificial Sequence
  Description of Artificial Sequence: Synthetic oligonucleotide
gacugaaccaggcgcuuuu

SEQ ID NO: 590307 - RNA, 19 nt, Artificial Sequence
  Description of Artificial Sequence: Synthetic oligonucleotide
uggcuucgguggccugaag

SEQ ID NO: 590308 - RNA, 19 nt, Artificial Sequence
  Description of Artificial Sequence: Synthetic oligonucleotide
ccucaauggcggagugugg

SEQ ID NO: 590309 - RNA, 19 nt, Artificial Sequence
  Description of Artificial Sequence: Synthetic oligonucleotide
caagcagugcccuucccuu

SEQ ID NO: 590310 - RNA, 19 nt, Artificial Sequence
  Description of Artificial Sequence: Synthetic oligonucleotide
acucccacaggaggacagu

SEQ ID NO: 590311 - RNA, 19 nt, Artificial Sequence
  Description of Artificial Sequence: Synthetic oligonucleotide
ucagagcccgguguccguu

SEQ ID NO: 590312 - RNA, 19 nt, Artificial Sequence
  Description of Artificial Sequence: Synthetic oligonucleotide
ggagauguugaggcucuca

SEQ ID NO: 590313 - RNA, 19 nt, Artificial Sequence
  Description of Artificial Sequence: Synthetic oligonucleotide
agcccgguguccguuccug

SEQ ID NO: 590314 - RNA, 19 nt, Artificial Sequence
  Description of Artificial Sequence: Synthetic oligonucleotide
augccggcuagcuggccuu

SEQ ID NO: 590315 - RNA, 19 nt, Artificial Sequence
  Description of Artificial Sequence: Synthetic oligonucleotide
ccguuccugaccuugaagu

SEQ ID NO: 590316 - RNA, 19 nt, Artificial Sequence
  Description of Artificial Sequence: Synthetic oligonucleotide
gucauagagugagucacuu

SEQ ID NO: 590317 - RNA, 19 nt, Artificial Sequence
  Description of Artificial Sequence: Synthetic oligonucleotide
ccgguguccguuccugacc

SEQ ID NO: 590318 - RNA, 19 nt, Artificial Sequence
  Description of Artificial Sequence: Synthetic oligonucleotide
cguuccugaccuugaaguc

SEQ ID NO: 590319 - RNA, 19 nt, Artificial Sequence
  Description of Artificial Sequence: Synthetic oligonucleotide
cagagccggcaguuugcuc

SEQ ID NO: 590320 - RNA, 19 nt, Artificial Sequence
  Description of Artificial Sequence: Synthetic oligonucleotide
gcgguggaaacuggcucgg

SEQ ID NO: 590321 - RNA, 19 nt, Artificial Sequence
  Description of Artificial Sequence: Synthetic oligonucleotide
ggaucaguggacacuggcu

SEQ ID NO: 590322 - RNA, 19 nt, Artificial Sequence
  Description of Artificial Sequence: Synthetic oligonucleotide
cacccuauucaggagcugu

SEQ ID NO: 590323 - RNA, 19 nt, Artificial Sequence
  Description of Artificial Sequence: Synthetic oligonucleotide
auggcuucgguggccugaa

SEQ ID NO: 590324 - RNA, 19 nt, Artificial Sequence
  Description of Artificial Sequence: Synthetic oligonucleotide
aggccauuccggggcccac

SEQ ID NO: 590325 - RNA, 19 nt, Artificial Sequence
  Description of Artificial Sequence: Synthetic oligonucleotide
gucccuccaguugucggga

SEQ ID NO: 590326 - RNA, 19 nt, Artificial Sequence
  Description of Artificial Sequence: Synthetic oligonucleotide
caugccggcuagcuggccu

SEQ ID NO: 590327 - RNA, 19 nt, Artificial Sequence
  Description of Artificial Sequence: Synthetic oligonucleotide
ggaucucuucccgccuacc

SEQ ID NO: 590328 - RNA, 19 nt, Artificial Sequence
  Description of Artificial Sequence: Synthetic oligonucleotide
cagcaccauucagacagca

SEQ ID NO: 590329 - RNA, 19 nt, Artificial Sequence
  Description of Artificial Sequence: Synthetic oligonucleotide
ggcucggccaggcugacau

SEQ ID NO: 590330 - RNA, 19 nt, Artificial Sequence
  Description of Artificial Sequence: Synthetic oligonucleotide
uuuccggagcggggagccu

SEQ ID NO: 590331 - RNA, 19 nt, Artificial Sequence
  Description of Artificial Sequence: Synthetic oligonucleotide
gcuggcaugcuggggugcc

SEQ ID NO: 590332 - RNA, 19 nt, Artificial Sequence
  Description of Artificial Sequence: Synthetic oligonucleotide
ccgcagugcggguugggug

SEQ ID NO: 590333 - RNA, 19 nt, Artificial Sequence
  Description of Artificial Sequence: Synthetic oligonucleotide
ccggaagguuuuccgcagc

SEQ ID NO: 590334 - RNA, 19 nt, Artificial Sequence
  Description of Artificial Sequence: Synthetic oligonucleotide
cuucggugcggcggguuca

SEQ ID NO: 590335 - RNA, 19 nt, Artificial Sequence
  Description of Artificial Sequence: Synthetic oligonucleotide
uccuugcucuugguagcuu

SEQ ID NO: 590336 - RNA, 19 nt, Artificial Sequence
  Description of Artificial Sequence: Synthetic oligonucleotide
cccgguguccguuccugac

SEQ ID NO: 590337 - RNA, 19 nt, Artificial Sequence
  Description of Artificial Sequence: Synthetic oligonucleotide
gggcagucccuccaguugu

SEQ ID NO: 590338 - RNA, 19 nt, Artificial Sequence
  Description of Artificial Sequence: Synthetic oligonucleotide
ggacagugagucauagagu

SEQ ID NO: 590339 - RNA, 19 nt, Artificial Sequence
  Description of Artificial Sequence: Synthetic oligonucleotide
cucgcccauguccgacgug

SEQ ID NO: 590340 - RNA, 19 nt, Artificial Sequence
  Description of Artificial Sequence: Synthetic oligonucleotide
ggagcggggagccuccacu

SEQ ID NO: 590341 - RNA, 19 nt, Artificial Sequence
  Description of Artificial Sequence: Synthetic oligonucleotide
ggcaugcuggggugccgcc

SEQ ID NO: 590342 - RNA, 19 nt, Artificial Sequence
  Description of Artificial Sequence: Synthetic oligonucleotide
uccgguccacaggcagggc

SEQ ID NO: 590343 - RNA, 19 nt, Artificial Sequence
  Description of Artificial Sequence: Synthetic oligonucleotide
gcgagggacuuuggugagg

SEQ ID NO: 590344 - RNA, 19 nt, Artificial Sequence
  Description of Artificial Sequence: Synthetic oligonucleotide
gcccauguccgacgugcug

SEQ ID NO: 590345 - RNA, 19 nt, Artificial Sequence
  Description of Artificial Sequence: Synthetic oligonucleotide
ccaggcgcuuuuauaugca

SEQ ID NO: 590346 - RNA, 19 nt, Artificial Sequence
  Description of Artificial Sequence: Synthetic oligonucleotide
gcuucggugcggcggguuc

SEQ ID NO: 590347 - RNA, 19 nt, Artificial Sequence
  Description of Artificial Sequence: Synthetic oligonucleotide
cuggccccuuccuugcucu

SEQ ID NO: 590348 - RNA, 19 nt, Artificial Sequence
  Description of Artificial Sequence: Synthetic oligonucleotide
cagugcggguugggugugg

SEQ ID NO: 590349 - RNA, 19 nt, Artificial Sequence
  Description of Artificial Sequence: Synthetic oligonucleotide
gcggcggguucagagccgg

SEQ ID NO: 590350 - RNA, 19 nt, Artificial Sequence
  Description of Artificial Sequence: Synthetic oligonucleotide
augugcggcugggcucuag

SEQ ID NO: 590351 - RNA, 19 nt, Artificial Sequence
  Description of Artificial Sequence: Synthetic oligonucleotide
gcaccacaagauggcuccg

SEQ ID NO: 590352 - RNA, 19 nt, Artificial Sequence
  Description of Artificial Sequence: Synthetic oligonucleotide
ugggcgggcucugcugcuc

SEQ ID NO: 590353 - RNA, 19 nt, Artificial Sequence
  Description of Artificial Sequence: Synthetic oligonucleotide
cugagccgagcaugguugu

SEQ ID NO: 590354 - RNA, 19 nt, Artificial Sequence
  Description of Artificial Sequence: Synthetic oligonucleotide
caggcgcuuuuauaugcau

SEQ ID NO: 590355 - RNA, 19 nt, Artificial Sequence
  Description of Artificial Sequence: Synthetic oligonucleotide
cugcucggguguuggggaa

SEQ ID NO: 590356 - RNA, 19 nt, Artificial Sequence
  Description of Artificial Sequence: Synthetic oligonucleotide
uggcucgcugcugggcuuu

SEQ ID NO: 590357 - RNA, 19 nt, Artificial Sequence
  Description of Artificial Sequence: Synthetic oligonucleotide
ccgccuaccuggcucgcug

SEQ ID NO: 590358 - RNA, 19 nt, Artificial Sequence
  Description of Artificial Sequence: Synthetic oligonucleotide
ggcuugggcucccgccagc

SEQ ID NO: 590359 - RNA, 19 nt, Artificial Sequence
  Description of Artificial Sequence: Synthetic oligonucleotide
gguucgagucaaggagcca

SEQ ID NO: 590360 - RNA, 19 nt, Artificial Sequence
  Description of Artificial Sequence: Synthetic oligonucleotide
ggcgggcucugcugcucag

SEQ ID NO: 590361 - RNA, 19 nt, Artificial Sequence
  Description of Artificial Sequence: Synthetic oligonucleotide
gugggcacggcgagggacu

SEQ ID NO: 590362 - RNA, 19 nt, Artificial Sequence
  Description of Artificial Sequence: Synthetic oligonucleotide
ggggacugaaccaggcgcu

SEQ ID NO: 590363 - RNA, 19 nt, Artificial Sequence
  Description of Artificial Sequence: Synthetic oligonucleotide
cgcuuuuauaugcauguau

SEQ ID NO: 590364 - RNA, 19 nt, Artificial Sequence
  Description of Artificial Sequence: Synthetic oligonucleotide
ucccgccuaccuggcucgc

SEQ ID NO: 590365 - RNA, 19 nt, Artificial Sequence
  Description of Artificial Sequence: Synthetic oligonucleotide
ggggaacuguagugggugu

SEQ ID NO: 590366 - RNA, 19 nt, Artificial Sequence
  Description of Artificial Sequence: Synthetic oligonucleotide
uggcucggccaggcugaca

SEQ ID NO: 590367 - RNA, 19 nt, Artificial Sequence
  Description of Artificial Sequence: Synthetic oligonucleotide
cugccuuagccaucagcuu

SEQ ID NO: 590368 - RNA, 19 nt, Artificial Sequence
  Description of Artificial Sequence: Synthetic oligonucleotide
cccaagcagugcccuuccc

SEQ ID NO: 590369 - RNA, 19 nt, Artificial Sequence
  Description of Artificial Sequence: Synthetic oligonucleotide
caggccauuccggggccca

SEQ ID NO: 590370 - RNA, 19 nt, Artificial Sequence
  Description of Artificial Sequence: Synthetic oligonucleotide
ccccugucaccuucuuauc

SEQ ID NO: 590371 - RNA, 19 nt, Artificial Sequence
  Description of Artificial Sequence: Synthetic oligonucleotide
gguuuuccgcagcccugaa

SEQ ID NO: 590372 - RNA, 19 nt, Artificial Sequence
  Description of Artificial Sequence: Synthetic oligonucleotide
ucggugcggcggguucaga

SEQ ID NO: 590373 - RNA, 19 nt, Artificial Sequence
  Description of Artificial Sequence: Synthetic oligonucleotide
gccgagcaugguugucuca

SEQ ID NO: 590374 - RNA, 19 nt, Artificial Sequence
  Description of Artificial Sequence: Synthetic oligonucleotide
ccgugggcgggcucugcug

SEQ ID NO: 590375 - RNA, 19 nt, Artificial Sequence
  Description of Artificial Sequence: Synthetic oligonucleotide
cgcaagacauucuccucaa

SEQ ID NO: 590376 - RNA, 19 nt, Artificial Sequence
  Description of Artificial Sequence: Synthetic oligonucleotide
cuggcucggccaggcugac

SEQ ID NO: 590377 - RNA, 19 nt, Artificial Sequence
  Description of Artificial Sequence: Synthetic oligonucleotide
gcagugcggguugggugug

SEQ ID NO: 590378 - RNA, 19 nt, Artificial Sequence
  Description of Artificial Sequence: Synthetic oligonucleotide
gggcgggcucugcugcuca

SEQ ID NO: 590379 - RNA, 19 nt, Artificial Sequence
  Description of Artificial Sequence: Synthetic oligonucleotide
cgccuaccuggcucgcugc

SEQ ID NO: 590380 - RNA, 19 nt, Artificial Sequence
  Description of Artificial Sequence: Synthetic oligonucleotide
ccacaagccuggggcuucc

SEQ ID NO: 590381 - RNA, 19 nt, Artificial Sequence
  Description of Artificial Sequence: Synthetic oligonucleotide
gcgcuuuuauaugcaugua

SEQ ID NO: 590382 - RNA, 19 nt, Artificial Sequence
  Description of Artificial Sequence: Synthetic oligonucleotide
ccacaagauggcuccgccu

SEQ ID NO: 590383 - RNA, 19 nt, Artificial Sequence
  Description of Artificial Sequence: Synthetic oligonucleotide
ggcuccgccugaaguggga

SEQ ID NO: 590384 - RNA, 19 nt, Artificial Sequence
  Description of Artificial Sequence: Synthetic oligonucleotide
gggguuccgcuguugccau

SEQ ID NO: 590385 - RNA, 19 nt, Artificial Sequence
  Description of Artificial Sequence: Synthetic oligonucleotide
ggggugccgcccacucacc

SEQ ID NO: 590386 - RNA, 19 nt, Artificial Sequence
  Description of Artificial Sequence: Synthetic oligonucleotide
ccacccuauucaggagcug

SEQ ID NO: 590387 - RNA, 19 nt, Artificial Sequence
  Description of Artificial Sequence: Synthetic oligonucleotide
gcgcagugacuuggucuug

SEQ ID NO: 590388 - RNA, 19 nt, Artificial Sequence
  Description of Artificial Sequence: Synthetic oligonucleotide
gccggcuagcuggccuugc

SEQ ID NO: 590389 - RNA, 19 nt, Artificial Sequence
  Description of Artificial Sequence: Synthetic oligonucleotide
ccccaaaugcugggcccug

SEQ ID NO: 590390 - RNA, 19 nt, Artificial Sequence
  Description of Artificial Sequence: Synthetic oligonucleotide
ccgagcaugguugucucau

SEQ ID NO: 590391 - RNA, 19 nt, Artificial Sequence
  Description of Artificial Sequence: Synthetic oligonucleotide
gcagugcccuucccuuugu

SEQ ID NO: 590392 - RNA, 19 nt, Artificial Sequence
  Description of Artificial Sequence: Synthetic oligonucleotide
cgguguccguuccugaccu

SEQ ID NO: 590393 - RNA, 19 nt, Artificial Sequence
  Description of Artificial Sequence: Synthetic oligonucleotide
agccggcaguuugcucuuu

SEQ ID NO: 590394 - RNA, 19 nt, Artificial Sequence
  Description of Artificial Sequence: Synthetic oligonucleotide
ccagcaccacaagauggcu

SEQ ID NO: 590395 - RNA, 19 nt, Artificial Sequence
  Description of Artificial Sequence: Synthetic oligonucleotide
ccgccugaagugggagcug

SEQ ID NO: 590396 - RNA, 19 nt, Artificial Sequence
  Description of Artificial Sequence: Synthetic oligonucleotide
gcccggcgcagguccucug

SEQ ID NO: 590397 - RNA, 19 nt, Artificial Sequence
  Description of Artificial Sequence: Synthetic oligonucleotide
ccaggcgcagugacuuggu

SEQ ID NO: 590398 - RNA, 19 nt, Artificial Sequence
  Description of Artificial Sequence: Synthetic oligonucleotide
ccucgcccauguccgacgu

SEQ ID NO: 590399 - RNA, 19 nt, Artificial Sequence
  Description of Artificial Sequence: Synthetic oligonucleotide
cggcggguucagagccggc

SEQ ID NO: 590400 - RNA, 19 nt, Artificial Sequence
  Description of Artificial Sequence: Synthetic oligonucleotide
cgagugcccggcgcagguc

SEQ ID NO: 590401 - RNA, 19 nt, Artificial Sequence
  Description of Artificial Sequence: Synthetic oligonucleotide
cgcccauguccgacgugcu

SEQ ID NO: 590402 - RNA, 19 nt, Artificial Sequence
  Description of Artificial Sequence: Synthetic oligonucleotide
ccggagcggggagccucca

SEQ ID NO: 590403 - RNA, 19 nt, Artificial Sequence
  Description of Artificial Sequence: Synthetic oligonucleotide
cccgccuaccuggcucgcu

SEQ ID NO: 590404 - RNA, 19 nt, Artificial Sequence
  Description of Artificial Sequence: Synthetic oligonucleotide
aaugguucuacucauauac

SEQ ID NO: 590405 - RNA, 19 nt, Artificial Sequence
  Description of Artificial Sequence: Synthetic oligonucleotide
aguauaaaggcuuaggccc

SEQ ID NO: 590406 - RNA, 19 nt, Artificial Sequence
  Description of Artificial Sequence: Synthetic oligonucleotide
uuuacuucaguacaaagcc

SEQ ID NO: 590407 - RNA, 19 nt, Artificial Sequence
  Description of Artificial Sequence: Synthetic oligonucleotide
aagaagacucucuuuagcc

SEQ ID NO: 590408 - RNA, 19 nt, Artificial Sequence
  Description of Artificial Sequence: Synthetic oligonucleotide
uuaaaggcaccauuaaugg

SEQ ID NO: 590409 - RNA, 19 nt, Artificial Sequence
  Description of Artificial Sequence: Synthetic oligonucleotide
aaaggcuuaggccccaccc

SEQ ID NO: 590410 - RNA, 19 nt, Artificial Sequence
  Description of Artificial Sequence: Synthetic oligonucleotide
aaacuaggguguuauuacc

SEQ ID NO: 590411 - RNA, 19 nt, Artificial Sequence
  Description of Artificial Sequence: Synthetic oligonucleotide
uacuacacgacuaugaaaa

SEQ ID NO: 590412 - RNA, 19 nt, Artificial Sequence
  Description of Artificial Sequence: Synthetic oligonucleotide
auuuacuucaguacaaagc

SEQ ID NO: 590413 - RNA, 19 nt, Artificial Sequence
  Description of Artificial Sequence: Synthetic oligonucleotide
acucauauacccuauguag

SEQ ID NO: 590414 - RNA, 19 nt, Artificial Sequence
  Description of Artificial Sequence: Synthetic oligonucleotide
acuguuucauggcauaggc

SEQ ID NO: 590415 - RNA, 19 nt, Artificial Sequence
  Description of Artificial Sequence: Synthetic oligonucleotide
aaagccagauacuacacga

SEQ ID NO: 590416 - RNA, 19 nt, Artificial Sequence
  Description of Artificial Sequence: Synthetic oligonucleotide
gaagauucggcucugacca

SEQ ID NO: 590417 - RNA, 19 nt, Artificial Sequence
  Description of Artificial Sequence: Synthetic oligonucleotide
gaguauaaaggcuuaggcc

SEQ ID NO: 590418 - RNA, 19 nt, Artificial Sequence
  Description of Artificial Sequence: Synthetic oligonucleotide
aguaacacucucuagguca

SEQ ID NO: 590419 - RNA, 19 nt, Artificial Sequence
  Description of Artificial Sequence: Synthetic oligonucleotide
aaaggugcucaucugagga

SEQ ID NO: 590420 - RNA, 19 nt, Artificial Sequence
  Description of Artificial Sequence: Synthetic oligonucleotide
aagaaguugucaaucuccc

SEQ ID NO: 590421 - RNA, 19 nt, Artificial Sequence
  Description of Artificial Sequence: Synthetic oligonucleotide
gaaaaccugcccuaaaaug

SEQ ID NO: 590422 - RNA, 19 nt, Artificial Sequence
  Description of Artificial Sequence: Synthetic oligonucleotide
auauggagugugcaggccc

SEQ ID NO: 590423 - RNA, 19 nt, Artificial Sequence
  Description of Artificial Sequence: Synthetic oligonucleotide
ugcccuaaaaugaaacuag

SEQ ID NO: 590424 - RNA, 19 nt, Artificial Sequence
  Description of Artificial Sequence: Synthetic oligonucleotide
accauuaaugguucuacuc

SEQ ID NO: 590425 - RNA, 19 nt, Artificial Sequence
  Description of Artificial Sequence: Synthetic oligonucleotide
ugguguagaaacuucaggu

SEQ ID NO: 590426 - RNA, 19 nt, Artificial Sequence
  Description of Artificial Sequence: Synthetic oligonucleotide
aacuaggguguuauuaccc

SEQ ID NO: 590427 - RNA, 19 nt, Artificial Sequence
  Description of Artificial Sequence: Synthetic oligonucleotide
guugucaauaaagucacgg

SEQ ID NO: 590428 - RNA, 19 nt, Artificial Sequence
  Description of Artificial Sequence: Synthetic oligonucleotide
cuguuuagugucuagcggg

SEQ ID NO: 590429 - RNA, 19 nt, Artificial Sequence
  Description of Artificial Sequence: Synthetic oligonucleotide
cugaaguuccuccagauug

SEQ ID NO: 590430 - RNA, 19 nt, Artificial Sequence
  Description of Artificial Sequence: Synthetic oligonucleotide
aaaaccugcccuaaaauga

SEQ ID NO: 590431 - RNA, 19 nt, Artificial Sequence
  Description of Artificial Sequence: Synthetic oligonucleotide
agucuugagcccuugacag

SEQ ID NO: 590432 - RNA, 19 nt, Artificial Sequence
  Description of Artificial Sequence: Synthetic oligonucleotide
uauuuacuucaguacaaag

SEQ ID NO: 590433 - RNA, 19 nt, Artificial Sequence
  Description of Artificial Sequence: Synthetic oligonucleotide
uguagaaacuucaggugcc

SEQ ID NO: 590434 - RNA, 19 nt, Artificial Sequence
  Description of Artificial Sequence: Synthetic oligonucleotide
aaggccgcugccuagagcu

SEQ ID NO: 590435 - RNA, 19 nt, Artificial Sequence
  Description of Artificial Sequence: Synthetic oligonucleotide
guagacaugagcuaccuga

SEQ ID NO: 590436 - RNA, 19 nt, Artificial Sequence
  Description of Artificial Sequence: Synthetic oligonucleotide
ugggcgucacuccagaggg

SEQ ID NO: 590437 - RNA, 19 nt, Artificial Sequence
  Description of Artificial Sequence: Synthetic oligonucleotide
ugaagauucggcucugacc

SEQ ID NO: 590438 - RNA, 19 nt, Artificial Sequence
  Description of Artificial Sequence: Synthetic oligonucleotide
ugucaauaaagucacggua

SEQ ID NO: 590439 - RNA, 19 nt, Artificial Sequence
  Description of Artificial Sequence: Synthetic oligonucleotide
uucaggauguggcuaaccc

SEQ ID NO: 590440 - RNA, 19 nt, Artificial Sequence
  Description of Artificial Sequence: Synthetic oligonucleotide
cuaucuaccuuuguggucc

SEQ ID NO: 590441 - RNA, 19 nt, Artificial Sequence
  Description of Artificial Sequence: Synthetic oligonucleotide
aggcauaccagccucccgc

SEQ ID NO: 590442 - RNA, 19 nt, Artificial Sequence
  Description of Artificial Sequence: Synthetic oligonucleotide
uuacaguggacuagcaccc

SEQ ID NO: 590443 - RNA, 19 nt, Artificial Sequence
  Description of Artificial Sequence: Synthetic oligonucleotide
ugaucaguugugugaaggg

SEQ ID NO: 590444 - RNA, 19 nt, Artificial Sequence
  Description of Artificial Sequence: Synthetic oligonucleotide
acaugagcuaccugagacc

SEQ ID NO: 590445 - RNA, 19 nt, Artificial Sequence
  Description of Artificial Sequence: Synthetic oligonucleotide
gacaugagcuaccugagac

SEQ ID NO: 590446 - RNA, 19 nt, Artificial Sequence
  Description of Artificial Sequence: Synthetic oligonucleotide
aaguaacacucucuagguc

SEQ ID NO: 590447 - RNA, 19 nt, Artificial Sequence
  Description of Artificial Sequence: Synthetic oligonucleotide
augguguagaaacuucagg

SEQ ID NO: 590448 - RNA, 19 nt, Artificial Sequence
  Description of Artificial Sequence: Synthetic oligonucleotide
uggacuagcacccgagugc

SEQ ID NO: 590449 - RNA, 19 nt, Artificial Sequence
  Description of Artificial Sequence: Synthetic oligonucleotide
ucaauaaagucacgguacu

SEQ ID NO: 590450 - RNA, 19 nt, Artificial Sequence
  Description of Artificial Sequence: Synthetic oligonucleotide
ucuaggagacugauggagc

SEQ ID NO: 590451 - RNA, 19 nt, Artificial Sequence
  Description of Artificial Sequence: Synthetic oligonucleotide
uuauuacccuuaaaggcac

SEQ ID NO: 590452 - RNA, 19 nt, Artificial Sequence
  Description of Artificial Sequence: Synthetic oligonucleotide
agggcaaccacagacuggc

SEQ ID NO: 590453 - RNA, 19 nt, Artificial Sequence
  Description of Artificial Sequence: Synthetic oligonucleotide
ggagccuagguguagaagg

SEQ ID NO: 590454 - RNA, 19 nt, Artificial Sequence
  Description of Artificial Sequence: Synthetic oligonucleotide
agcgggacagaguauaaag

SEQ ID NO: 590455 - RNA, 19 nt, Artificial Sequence
  Description of Artificial Sequence: Synthetic oligonucleotide
cuaugaagggcaaccacag

SEQ ID NO: 590456 - RNA, 19 nt, Artificial Sequence
  Description of Artificial Sequence: Synthetic oligonucleotide
cuaggagacugauggagcg

SEQ ID NO: 590457 - RNA, 19 nt, Artificial Sequence
  Description of Artificial Sequence: Synthetic oligonucleotide
guuauuacccuuaaaggca

SEQ ID NO: 590458 - RNA, 19 nt, Artificial Sequence
  Description of Artificial Sequence: Synthetic oligonucleotide
caggaaaugacaaaggucu

SEQ ID NO: 590459 - RNA, 19 nt, Artificial Sequence
  Description of Artificial Sequence: Synthetic oligonucleotide
agucuguuuagugucuagc

SEQ ID NO: 590460 - RNA, 19 nt, Artificial Sequence
  Description of Artificial Sequence: Synthetic oligonucleotide
aaugguguagaaacuucag

SEQ ID NO: 590461 - RNA, 19 nt, Artificial Sequence
  Description of Artificial Sequence: Synthetic oligonucleotide
ugucuagcgggacagagua

SEQ ID NO: 590462 - RNA, 19 nt, Artificial Sequence
  Description of Artificial Sequence: Synthetic oligonucleotide
uagacaugagcuaccugag

SEQ ID NO: 590463 - RNA, 19 nt, Artificial Sequence
  Description of Artificial Sequence: Synthetic oligonucleotide
cuuggaaccuauaaccauc

SEQ ID NO: 590464 - RNA, 19 nt, Artificial Sequence
  Description of Artificial Sequence: Synthetic oligonucleotide
acaagaagacucucuuuag

SEQ ID NO: 590465 - RNA, 19 nt, Artificial Sequence
  Description of Artificial Sequence: Synthetic oligonucleotide
ucaguugugugaaggguga

SEQ ID NO: 590466 - RNA, 19 nt, Artificial Sequence
  Description of Artificial Sequence: Synthetic oligonucleotide
uuucugcucccagacaugg

SEQ ID NO: 590467 - RNA, 19 nt, Artificial Sequence
  Description of Artificial Sequence: Synthetic oligonucleotide
uaccugagaccuaaggcug

SEQ ID NO: 590468 - RNA, 19 nt, Artificial Sequence
  Description of Artificial Sequence: Synthetic oligonucleotide
cuauauggagugugcaggc

SEQ ID NO: 590469 - RNA, 19 nt, Artificial Sequence
  Description of Artificial Sequence: Synthetic oligonucleotide
caagaagacucucuuuagc

SEQ ID NO: 590470 - RNA, 19 nt, Artificial Sequence
  Description of Artificial Sequence: Synthetic oligonucleotide
ugucaggaaaguccacucc

SEQ ID NO: 590471 - RNA, 19 nt, Artificial Sequence
  Description of Artificial Sequence: Synthetic oligonucleotide
gauacuacacgacuaugaa

SEQ ID NO: 590472 - RNA, 19 nt, Artificial Sequence
  Description of Artificial Sequence: Synthetic oligonucleotide
gaugucacacugaagcccc

SEQ ID NO: 590473 - RNA, 19 nt, Artificial Sequence
  Description of Artificial Sequence: Synthetic oligonucleotide
accccagccauacuguuuc

SEQ ID NO: 590474 - RNA, 19 nt, Artificial Sequence
  Description of Artificial Sequence: Synthetic oligonucleotide
uggccuagcugccuguagg

SEQ ID NO: 590475 - RNA, 19 nt, Artificial Sequence
  Description of Artificial Sequence: Synthetic oligonucleotide
gagcuagcuauauggagug

SEQ ID NO: 590476 - RNA, 19 nt, Artificial Sequence
  Description of Artificial Sequence: Synthetic oligonucleotide
agcaauagguggucgcagg

SEQ ID NO: 590477 - RNA, 19 nt, Artificial Sequence
  Description of Artificial Sequence: Synthetic oligonucleotide
cugaucaguugugugaagg

SEQ ID NO: 590478 - RNA, 19 nt, Artificial Sequence
  Description of Artificial Sequence: Synthetic oligonucleotide
acucauugcacaaggccgc

SEQ ID NO: 590479 - RNA, 19 nt, Artificial Sequence
  Description of Artificial Sequence: Synthetic oligonucleotide
gacacgcacguugugauag

SEQ ID NO: 590480 - RNA, 19 nt, Artificial Sequence
  Description of Artificial Sequence: Synthetic oligonucleotide
uacucauauacccuaugua

SEQ ID NO: 590481 - RNA, 19 nt, Artificial Sequence
  Description of Artificial Sequence: Synthetic oligonucleotide
agcuaccugagaccuaagg

SEQ ID NO: 590482 - RNA, 19 nt, Artificial Sequence
  Description of Artificial Sequence: Synthetic oligonucleotide
aaaucugagggaagggaug

SEQ ID NO: 590483 - RNA, 19 nt, Artificial Sequence
  Description of Artificial Sequence: Synthetic oligonucleotide
gcagcagagauucugauca

SEQ ID NO: 590484 - RNA, 19 nt, Artificial Sequence
  Description of Artificial Sequence: Synthetic oligonucleotide
uucaguacaaagccagaua

SEQ ID NO: 590485 - RNA, 19 nt, Artificial Sequence
  Description of Artificial Sequence: Synthetic oligonucleotide
agaaaaccugcccuaaaau

SEQ ID NO: 590486 - RNA, 19 nt, Artificial Sequence
  Description of Artificial Sequence: Synthetic oligonucleotide
acugauggagcgcaugacu

SEQ ID NO: 590487 - RNA, 19 nt, Artificial Sequence
  Description of Artificial Sequence: Synthetic oligonucleotide
ggggacaugaaccagaaaa

SEQ ID NO: 590488 - RNA, 19 nt, Artificial Sequence
  Description of Artificial Sequence: Synthetic oligonucleotide
uacuguuucauggcauagg

SEQ ID NO: 590489 - RNA, 19 nt, Artificial Sequence
  Description of Artificial Sequence: Synthetic oligonucleotide
agacuggcgagacuucagg

SEQ ID NO: 590490 - RNA, 19 nt, Artificial Sequence
  Description of Artificial Sequence: Synthetic oligonucleotide
ugccuguaggacuucagga

SEQ ID NO: 590491 - RNA, 19 nt, Artificial Sequence
  Description of Artificial Sequence: Synthetic oligonucleotide
ugccucacaugccuggugc

SEQ ID NO: 590492 - RNA, 19 nt, Artificial Sequence
  Description of Artificial Sequence: Synthetic oligonucleotide
aggugcucaucugaggagc

SEQ ID NO: 590493 - RNA, 19 nt, Artificial Sequence
  Description of Artificial Sequence: Synthetic oligonucleotide
cagauuggcagcauuccac

SEQ ID NO: 590494 - RNA, 19 nt, Artificial Sequence
  Description of Artificial Sequence: Synthetic oligonucleotide
uagaaggcauaccagccuc

SEQ ID NO: 590495 - RNA, 19 nt, Artificial Sequence
  Description of Artificial Sequence: Synthetic oligonucleotide
cauugcacaaggccgcugc

SEQ ID NO: 590496 - RNA, 19 nt, Artificial Sequence
  Description of Artificial Sequence: Synthetic oligonucleotide
aaggcauaccagccucccg

SEQ ID NO: 590497 - RNA, 19 nt, Artificial Sequence
  Description of Artificial Sequence: Synthetic oligonucleotide
gguguagaaacuucaggug

SEQ ID NO: 590498 - RNA, 19 nt, Artificial Sequence
  Description of Artificial Sequence: Synthetic oligonucleotide
acuaggguguuauuacccu

SEQ ID NO: 590499 - RNA, 19 nt, Artificial Sequence
  Description of Artificial Sequence: Synthetic oligonucleotide
auugcacaaggccgcugcc

SEQ ID NO: 590500 - RNA, 19 nt, Artificial Sequence
  Description of Artificial Sequence: Synthetic oligonucleotide
uaaaggcaccauuaauggu

SEQ ID NO: 590501 - RNA, 19 nt, Artificial Sequence
  Description of Artificial Sequence: Synthetic oligonucleotide
agauacuacacgacuauga

SEQ ID NO: 590502 - RNA, 19 nt, Artificial Sequence
  Description of Artificial Sequence: Synthetic oligonucleotide
ugauggagcgcaugacucc

SEQ ID NO: 590503 - RNA, 19 nt, Artificial Sequence
  Description of Artificial Sequence: Synthetic oligonucleotide
acuaugaagggcaaccaca

SEQ ID NO: 590504 - RNA, 19 nt, Artificial Sequence
  Description of Artificial Sequence: Synthetic oligonucleotide
aagauucggcucugaccac

SEQ ID NO: 590505 - RNA, 19 nt, Artificial Sequence
  Description of Artificial Sequence: Synthetic oligonucleotide
agauuggcagcauuccacu

SEQ ID NO: 590506 - RNA, 19 nt, Artificial Sequence
  Description of Artificial Sequence: Synthetic oligonucleotide
aaggcuuaggccccacccu

SEQ ID NO: 590507 - RNA, 19 nt, Artificial Sequence
  Description of Artificial Sequence: Synthetic oligonucleotide
aguugugugaagggugaac

SEQ ID NO: 590508 - RNA, 19 nt, Artificial Sequence
  Description of Artificial Sequence: Synthetic oligonucleotide
acguugugauaggugaagc

SEQ ID NO: 590509 - RNA, 19 nt, Artificial Sequence
  Description of Artificial Sequence: Synthetic oligonucleotide
accuuuggcuguugaaauc

SEQ ID NO: 590510 - RNA, 19 nt, Artificial Sequence
  Description of Artificial Sequence: Synthetic oligonucleotide
cugauggagcgcaugacuc

SEQ ID NO: 590511 - RNA, 19 nt, Artificial Sequence
  Description of Artificial Sequence: Synthetic oligonucleotide
uuuucugcucccagacaug

SEQ ID NO: 590512 - RNA, 19 nt, Artificial Sequence
  Description of Artificial Sequence: Synthetic oligonucleotide
cauaccagccucccgcugc

SEQ ID NO: 590513 - RNA, 19 nt, Artificial Sequence
  Description of Artificial Sequence: Synthetic oligonucleotide
cuuuggaaguaacacucuc

SEQ ID NO: 590514 - RNA, 19 nt, Artificial Sequence
  Description of Artificial Sequence: Synthetic oligonucleotide
agggcagcacuaugaaggg

SEQ ID NO: 590515 - RNA, 19 nt, Artificial Sequence
  Description of Artificial Sequence: Synthetic oligonucleotide
cuggcacgcucaaugaagc

SEQ ID NO: 590516 - RNA, 19 nt, Artificial Sequence
  Description of Artificial Sequence: Synthetic oligonucleotide
cucagcaauagguggucgc

SEQ ID NO: 590517 - RNA, 19 nt, Artificial Sequence
  Description of Artificial Sequence: Synthetic oligonucleotide
ugaaagugcuaucuaccuu

SEQ ID NO: 590518 - RNA, 19 nt, Artificial Sequence
  Description of Artificial Sequence: Synthetic oligonucleotide
gacccugugagggccaugg

SEQ ID NO: 590519 - RNA, 19 nt, Artificial Sequence
  Description of Artificial Sequence: Synthetic oligonucleotide
uccucggagguugaugcgg

SEQ ID NO: 590520 - RNA, 19 nt, Artificial Sequence
  Description of Artificial Sequence: Synthetic oligonucleotide
gugaccagucuguuuagug

SEQ ID NO: 590521 - RNA, 19 nt, Artificial Sequence
  Description of Artificial Sequence: Synthetic oligonucleotide
gagugugcaggcccagagg

SEQ ID NO: 590522 - RNA, 19 nt, Artificial Sequence
  Description of Artificial Sequence: Synthetic oligonucleotide
ugagcuaccugagaccuaa

SEQ ID NO: 590523 - RNA, 19 nt, Artificial Sequence
  Description of Artificial Sequence: Synthetic oligonucleotide
gaaccagaaaaccugcccu

SEQ ID NO: 590524 - RNA, 19 nt, Artificial Sequence
  Description of Artificial Sequence: Synthetic oligonucleotide
uaggguguuauuacccuua

SEQ ID NO: 590525 - RNA, 19 nt, Artificial Sequence
  Description of Artificial Sequence: Synthetic oligonucleotide
uccagauuggcagcauucc

SEQ ID NO: 590526 - RNA, 19 nt, Artificial Sequence
  Description of Artificial Sequence: Synthetic oligonucleotide
aucaguugugugaagggug

SEQ ID NO: 590527 - RNA, 19 nt, Artificial Sequence
  Description of Artificial Sequence: Synthetic oligonucleotide
agaugcgggaggcucgguc

SEQ ID NO: 590528 - RNA, 19 nt, Artificial Sequence
  Description of Artificial Sequence: Synthetic oligonucleotide
uucggcucugaccaccaga

SEQ ID NO: 590529 - RNA, 19 nt, Artificial Sequence
  Description of Artificial Sequence: Synthetic oligonucleotide
caaugguguagaaacuuca

SEQ ID NO: 590530 - RNA, 19 nt, Artificial Sequence
  Description of Artificial Sequence: Synthetic oligonucleotide
agugucuagcgggacagag

SEQ ID NO: 590531 - RNA, 19 nt, Artificial Sequence
  Description of Artificial Sequence: Synthetic oligonucleotide
ucggcucugaccaccagau

SEQ ID NO: 590532 - RNA, 19 nt, Artificial Sequence
  Description of Artificial Sequence: Synthetic oligonucleotide
ucagcaauagguggucgca

SEQ ID NO: 590533 - RNA, 19 nt, Artificial Sequence
  Description of Artificial Sequence: Synthetic oligonucleotide
ucuagcgggacagaguaua

SEQ ID NO: 590534 - RNA, 19 nt, Artificial Sequence
  Description of Artificial Sequence: Synthetic oligonucleotide
gucccagacacgcacguug

SEQ ID NO: 590535 - RNA, 19 nt, Artificial Sequence
  Description of Artificial Sequence: Synthetic oligonucleotide
aaacuugacuggccagaga

SEQ ID NO: 590536 - RNA, 19 nt, Artificial Sequence
  Description of Artificial Sequence: Synthetic oligonucleotide
guauaaaggcuuaggcccc

SEQ ID NO: 590537 - RNA, 19 nt, Artificial Sequence
  Description of Artificial Sequence: Synthetic oligonucleotide
aggcuuaggccccacccuc

SEQ ID NO: 590538 - RNA, 19 nt, Artificial Sequence
  Description of Artificial Sequence: Synthetic oligonucleotide
acggcugacacccaucuua

SEQ ID NO: 590539 - RNA, 19 nt, Artificial Sequence
  Description of Artificial Sequence: Synthetic oligonucleotide
aagcgcucagggaagaagu

SEQ ID NO: 590540 - RNA, 19 nt, Artificial Sequence
  Description of Artificial Sequence: Synthetic oligonucleotide
gagauucugaucaguugug

SEQ ID NO: 590541 - RNA, 19 nt, Artificial Sequence
  Description of Artificial Sequence: Synthetic oligonucleotide
agccuauggggcuggggac

SEQ ID NO: 590542 - RNA, 19 nt, Artificial Sequence
  Description of Artificial Sequence: Synthetic oligonucleotide
cuuuccuuggaaccuauaa

SEQ ID NO: 590543 - RNA, 19 nt, Artificial Sequence
  Description of Artificial Sequence: Synthetic oligonucleotide
uuccucgucccagacacgc

SEQ ID NO: 590544 - RNA, 19 nt, Artificial Sequence
  Description of Artificial Sequence: Synthetic oligonucleotide
cuuguuccgaggccugucc

SEQ ID NO: 590545 - RNA, 19 nt, Artificial Sequence
  Description of Artificial Sequence: Synthetic oligonucleotide
cuaccugagaccuaaggcu

SEQ ID NO: 590546 - RNA, 19 nt, Artificial Sequence
  Description of Artificial Sequence: Synthetic oligonucleotide
uacccuuaaaggcaccauu

SEQ ID NO: 590547 - RNA, 19 nt, Artificial Sequence
  Description of Artificial Sequence: Synthetic oligonucleotide
agaggcucuucaucugaag

SEQ ID NO: 590548 - RNA, 19 nt, Artificial Sequence
  Description of Artificial Sequence: Synthetic oligonucleotide
guaggucuguagcuggcgc

SEQ ID NO: 590549 - RNA, 19 nt, Artificial Sequence
  Description of Artificial Sequence: Synthetic oligonucleotide
guggacuagcacccgagug

SEQ ID NO: 590550 - RNA, 19 nt, Artificial Sequence
  Description of Artificial Sequence: Synthetic oligonucleotide
aaagugcuaucuaccuuug

SEQ ID NO: 590551 - RNA, 19 nt, Artificial Sequence
  Description of Artificial Sequence: Synthetic oligonucleotide
cuccagauuggcagcauuc

SEQ ID NO: 590552 - RNA, 19 nt, Artificial Sequence
  Description of Artificial Sequence: Synthetic oligonucleotide
uaaugguucuacucauaua

SEQ ID NO: 590553 - RNA, 19 nt, Artificial Sequence
  Description of Artificial Sequence: Synthetic oligonucleotide
cacuaugaagggcaaccac

SEQ ID NO: 590554 - RNA, 19 nt, Artificial Sequence
  Description of Artificial Sequence: Synthetic oligonucleotide
acagaguauaaaggcuuag

SEQ ID NO: 590555 - RNA, 19 nt, Artificial Sequence
  Description of Artificial Sequence: Synthetic oligonucleotide
cugagggaagggaugaaga

SEQ ID NO: 590556 - RNA, 19 nt, Artificial Sequence
  Description of Artificial Sequence: Synthetic oligonucleotide
gacaugaaccagaaaaccu

SEQ ID NO: 590557 - RNA, 19 nt, Artificial Sequence
  Description of Artificial Sequence: Synthetic oligonucleotide
gaagaugcgggaggcucgg

SEQ ID NO: 590558 - RNA, 19 nt, Artificial Sequence
  Description of Artificial Sequence: Synthetic oligonucleotide
uggcuaacccuguuucucu

SEQ ID NO: 590559 - RNA, 19 nt, Artificial Sequence
  Description of Artificial Sequence: Synthetic oligonucleotide
gaucgccugcuccaucugc

SEQ ID NO: 590560 - RNA, 19 nt, Artificial Sequence
  Description of Artificial Sequence: Synthetic oligonucleotide
uggcacgcucaaugaagcg

SEQ ID NO: 590561 - RNA, 19 nt, Artificial Sequence
  Description of Artificial Sequence: Synthetic oligonucleotide
auuacccuuaaaggcacca

SEQ ID NO: 590562 - RNA, 19 nt, Artificial Sequence
  Description of Artificial Sequence: Synthetic oligonucleotide
cucaaugaagcgguguguc

SEQ ID NO: 590563 - RNA, 19 nt, Artificial Sequence
  Description of Artificial Sequence: Synthetic oligonucleotide
uggcuugaagauucggcuc

SEQ ID NO: 590564 - RNA, 19 nt, Artificial Sequence
  Description of Artificial Sequence: Synthetic oligonucleotide
gucuugagcccuugacagg

SEQ ID NO: 590565 - RNA, 19 nt, Artificial Sequence
  Description of Artificial Sequence: Synthetic oligonucleotide
cuagggacugcuggggagg

SEQ ID NO: 590566 - RNA, 19 nt, Artificial Sequence
  Description of Artificial Sequence: Synthetic oligonucleotide
auguucaggauguggcuaa

SEQ ID NO: 590567 - RNA, 19 nt, Artificial Sequence
  Description of Artificial Sequence: Synthetic oligonucleotide
guucuacucauauacccua

SEQ ID NO: 590568 - RNA, 19 nt, Artificial Sequence
  Description of Artificial Sequence: Synthetic oligonucleotide
aagugcuaucuaccuuugu

SEQ ID NO: 590569 - RNA, 19 nt, Artificial Sequence
  Description of Artificial Sequence: Synthetic oligonucleotide
gccuguaggacuucaggag

SEQ ID NO: 590570 - RNA, 19 nt, Artificial Sequence
  Description of Artificial Sequence: Synthetic oligonucleotide
aagacucucuuuagcccag

SEQ ID NO: 590571 - RNA, 19 nt, Artificial Sequence
  Description of Artificial Sequence: Synthetic oligonucleotide
cuuuccggagccuaggugu

SEQ ID NO: 590572 - RNA, 19 nt, Artificial Sequence
  Description of Artificial Sequence: Synthetic oligonucleotide
gacaaaggucuagggacug

SEQ ID NO: 590573 - RNA, 19 nt, Artificial Sequence
  Description of Artificial Sequence: Synthetic oligonucleotide
uuccaguggggcagcagcu

SEQ ID NO: 590574 - RNA, 19 nt, Artificial Sequence
  Description of Artificial Sequence: Synthetic oligonucleotide
gucuacacuggccugccuc

SEQ ID NO: 590575 - RNA, 19 nt, Artificial Sequence
  Description of Artificial Sequence: Synthetic oligonucleotide
cuauaaccaucaccucccc

SEQ ID NO: 590576 - RNA, 19 nt, Artificial Sequence
  Description of Artificial Sequence: Synthetic oligonucleotide
ucugggguucucucuggcu

SEQ ID NO: 590577 - RNA, 19 nt, Artificial Sequence
  Description of Artificial Sequence: Synthetic oligonucleotide
uauaaaggcuuaggcccca

SEQ ID NO: 590578 - RNA, 19 nt, Artificial Sequence
  Description of Artificial Sequence: Synthetic oligonucleotide
aaaugaaacuaggguguua

SEQ ID NO: 590579 - RNA, 19 nt, Artificial Sequence
  Description of Artificial Sequence: Synthetic oligonucleotide
auaccugcaguguggccca

SEQ ID NO: 590580 - RNA, 19 nt, Artificial Sequence
  Description of Artificial Sequence: Synthetic oligonucleotide
ggcacgcucaaugaagcgg

SEQ ID NO: 590581 - RNA, 19 nt, Artificial Sequence
  Description of Artificial Sequence: Synthetic oligonucleotide
gauuggcagcauuccacuc

SEQ ID NO: 590582 - RNA, 19 nt, Artificial Sequence
  Description of Artificial Sequence: Synthetic oligonucleotide
caguggacuagcacccgag

SEQ ID NO: 590583 - RNA, 19 nt, Artificial Sequence
  Description of Artificial Sequence: Synthetic oligonucleotide
ucccagacacgcacguugu

SEQ ID NO: 590584 - RNA, 19 nt, Artificial Sequence
  Description of Artificial Sequence: Synthetic oligonucleotide
cgggacagaguauaaaggc

SEQ ID NO: 590585 - RNA, 19 nt, Artificial Sequence
  Description of Artificial Sequence: Synthetic oligonucleotide
agacaugagcuaccugaga

SEQ ID NO: 590586 - RNA, 19 nt, Artificial Sequence
  Description of Artificial Sequence: Synthetic oligonucleotide
guugaugcggggccucagc

SEQ ID NO: 590587 - RNA, 19 nt, Artificial Sequence
  Description of Artificial Sequence: Synthetic oligonucleotide
ugucgucuacacuggccug

SEQ ID NO: 590588 - RNA, 19 nt, Artificial Sequence
  Description of Artificial Sequence: Synthetic oligonucleotide
ucuuuagcccagugcccug

SEQ ID NO: 590589 - RNA, 19 nt, Artificial Sequence
  Description of Artificial Sequence: Synthetic oligonucleotide
acuagcacccgagugcccu

SEQ ID NO: 590590 - RNA, 19 nt, Artificial Sequence
  Description of Artificial Sequence: Synthetic oligonucleotide
aguggacuagcacccgagu

SEQ ID NO: 590591 - RNA, 19 nt, Artificial Sequence
  Description of Artificial Sequence: Synthetic oligonucleotide
cuggcgagacuucagggca

SEQ ID NO: 590592 - RNA, 19 nt, Artificial Sequence
  Description of Artificial Sequence: Synthetic oligonucleotide
acccaucuuacaguggacu

SEQ ID NO: 590593 - RNA, 19 nt, Artificial Sequence
  Description of Artificial Sequence: Synthetic oligonucleotide
acacgcacguugugauagg

SEQ ID NO: 590594 - RNA, 19 nt, Artificial Sequence
  Description of Artificial Sequence: Synthetic oligonucleotide
gagacugauggagcgcaug

SEQ ID NO: 590595 - RNA, 19 nt, Artificial Sequence
  Description of Artificial Sequence: Synthetic oligonucleotide
guugugugaagggugaacu

SEQ ID NO: 590596 - RNA, 19 nt, Artificial Sequence
  Description of Artificial Sequence: Synthetic oligonucleotide
gcuagcuauauggagugug

SEQ ID NO: 590597 - RNA, 19 nt, Artificial Sequence
  Description of Artificial Sequence: Synthetic oligonucleotide
ucggagguugaugcggggc

SEQ ID NO: 590598 - RNA, 19 nt, Artificial Sequence
  Description of Artificial Sequence: Synthetic oligonucleotide
guaacacucucuaggucac

SEQ ID NO: 590599 - RNA, 19 nt, Artificial Sequence
  Description of Artificial Sequence: Synthetic oligonucleotide
ucagagccuauggggcugg

SEQ ID NO: 590600 - RNA, 19 nt, Artificial Sequence
  Description of Artificial Sequence: Synthetic oligonucleotide
cugccucaccacuuuccgg

SEQ ID NO: 590601 - RNA, 19 nt, Artificial Sequence
  Description of Artificial Sequence: Synthetic oligonucleotide
guuccgaggccuguccagg

SEQ ID NO: 590602 - RNA, 19 nt, Artificial Sequence
  Description of Artificial Sequence: Synthetic oligonucleotide
cagacuggcgagacuucag

SEQ ID NO: 590603 - RNA, 19 nt, Artificial Sequence
  Description of Artificial Sequence: Synthetic oligonucleotide
uggggacugaaagugcuau

SEQ ID NO: 590604 - RNA, 19 nt, Artificial Sequence
  Description of Artificial Sequence: Synthetic oligonucleotide
ucgucccagacacgcacgu

SEQ ID NO: 590605 - RNA, 19 nt, Artificial Sequence
  Description of Artificial Sequence: Synthetic oligonucleotide
caauaccugcaguguggcc

SEQ ID NO: 590606 - RNA, 19 nt, Artificial Sequence
  Description of Artificial Sequence: Synthetic oligonucleotide
gcgggacagaguauaaagg

SEQ ID NO: 590607 - RNA, 19 nt, Artificial Sequence
  Description of Artificial Sequence: Synthetic oligonucleotide
uaucuaccuuugugguccc

SEQ ID NO: 590608 - RNA, 19 nt, Artificial Sequence
  Description of Artificial Sequence: Synthetic oligonucleotide
auaaaggcuuaggccccac

SEQ ID NO: 590609 - RNA, 19 nt, Artificial Sequence
  Description of Artificial Sequence: Synthetic oligonucleotide
cuacucauauacccuaugu

SEQ ID NO: 590610 - RNA, 19 nt, Artificial Sequence
  Description of Artificial Sequence: Synthetic oligonucleotide
agaacggcugacacccauc

SEQ ID NO: 590611 - RNA, 19 nt, Artificial Sequence
  Description of Artificial Sequence: Synthetic oligonucleotide
agcagagauucugaucagu

SEQ ID NO: 590612 - RNA, 19 nt, Artificial Sequence
  Description of Artificial Sequence: Synthetic oligonucleotide
uuuccggagccuaggugua

SEQ ID NO: 590613 - RNA, 19 nt, Artificial Sequence
  Description of Artificial Sequence: Synthetic oligonucleotide
uuagcccagugcccugaga

SEQ ID NO: 590614 - RNA, 19 nt, Artificial Sequence
  Description of Artificial Sequence: Synthetic oligonucleotide
cagauacuacacgacuaug

SEQ ID NO: 590615 - RNA, 19 nt, Artificial Sequence
  Description of Artificial Sequence: Synthetic oligonucleotide
gaugcgggaggcucggucu

SEQ ID NO: 590616 - RNA, 19 nt, Artificial Sequence
  Description of Artificial Sequence: Synthetic oligonucleotide
gaggagcuagcuauaugga

SEQ ID NO: 590617 - RNA, 19 nt, Artificial Sequence
  Description of Artificial Sequence: Synthetic oligonucleotide
gucgucuacacuggccugc

SEQ ID NO: 590618 - RNA, 19 nt, Artificial Sequence
  Description of Artificial Sequence: Synthetic oligonucleotide
gaucaguugugugaagggu

SEQ ID NO: 590619 - RNA, 19 nt, Artificial Sequence
  Description of Artificial Sequence: Synthetic oligonucleotide
agacacucuccaguggaca

SEQ ID NO: 590620 - RNA, 19 nt, Artificial Sequence
  Description of Artificial Sequence: Synthetic oligonucleotide
gucagacauggccauccac

SEQ ID NO: 590621 - RNA, 19 nt, Artificial Sequence
  Description of Artificial Sequence: Synthetic oligonucleotide
cugauuccucgucccagac

SEQ ID NO: 590622 - RNA, 19 nt, Artificial Sequence
  Description of Artificial Sequence: Synthetic oligonucleotide
gaacggcugacacccaucu

SEQ ID NO: 590623 - RNA, 19 nt, Artificial Sequence
  Description of Artificial Sequence: Synthetic oligonucleotide
ggauggccaaaaguugagg

SEQ ID NO: 590624 - RNA, 19 nt, Artificial Sequence
  Description of Artificial Sequence: Synthetic oligonucleotide
guccugcuagccaccaggg

SEQ ID NO: 590625 - RNA, 19 nt, Artificial Sequence
  Description of Artificial Sequence: Synthetic oligonucleotide
acccgagugcccugugcuc

SEQ ID NO: 590626 - RNA, 19 nt, Artificial Sequence
  Description of Artificial Sequence: Synthetic oligonucleotide
cuagccaccagggcagcac

SEQ ID NO: 590627 - RNA, 19 nt, Artificial Sequence
  Description of Artificial Sequence: Synthetic oligonucleotide
aggugcaaaggugcucauc

SEQ ID NO: 590628 - RNA, 19 nt, Artificial Sequence
  Description of Artificial Sequence: Synthetic oligonucleotide
gucgcagggacuccagguc

SEQ ID NO: 590629 - RNA, 19 nt, Artificial Sequence
  Description of Artificial Sequence: Synthetic oligonucleotide
agugcccugugcucuggca

SEQ ID NO: 590630 - RNA, 19 nt, Artificial Sequence
  Description of Artificial Sequence: Synthetic oligonucleotide
gcgcaugacuccucggagg

SEQ ID NO: 590631 - RNA, 19 nt, Artificial Sequence
  Description of Artificial Sequence: Synthetic oligonucleotide
gacuucagggcaggccaag

SEQ ID NO: 590632 - RNA, 19 nt, Artificial Sequence
  Description of Artificial Sequence: Synthetic oligonucleotide
gacagaguauaaaggcuua

SEQ ID NO: 590633 - RNA, 19 nt, Artificial Sequence
  Description of Artificial Sequence: Synthetic oligonucleotide
auaccagccucccgcugcu

SEQ ID NO: 590634 - RNA, 19 nt, Artificial Sequence
  Description of Artificial Sequence: Synthetic oligonucleotide
cugcccuaaaaugaaacua

SEQ ID NO: 590635 - RNA, 19 nt, Artificial Sequence
  Description of Artificial Sequence: Synthetic oligonucleotide
acccuuaaaggcaccauua

SEQ ID NO: 590636 - RNA, 19 nt, Artificial Sequence
  Description of Artificial Sequence: Synthetic oligonucleotide
ggacuagcacccgagugcc

SEQ ID NO: 590637 - RNA, 19 nt, Artificial Sequence
  Description of Artificial Sequence: Synthetic oligonucleotide
ucgucuacacuggccugcc

SEQ ID NO: 590638 - RNA, 19 nt, Artificial Sequence
  Description of Artificial Sequence: Synthetic oligonucleotide
ucauugcacaaggccgcug

SEQ ID NO: 590639 - RNA, 19 nt, Artificial Sequence
  Description of Artificial Sequence: Synthetic oligonucleotide
caugagcuaccugagaccu

SEQ ID NO: 590640 - RNA, 19 nt, Artificial Sequence
  Description of Artificial Sequence: Synthetic oligonucleotide
cuccagaccccagccauac

SEQ ID NO: 590641 - RNA, 19 nt, Artificial Sequence
  Description of Artificial Sequence: Synthetic oligonucleotide
ccugccucaccacuuuccg

SEQ ID NO: 590642 - RNA, 19 nt, Artificial Sequence
  Description of Artificial Sequence: Synthetic oligonucleotide
guuuagugucuagcgggac

SEQ ID NO: 590643 - RNA, 19 nt, Artificial Sequence
  Description of Artificial Sequence: Synthetic oligonucleotide
cugucgucuacacuggccu

SEQ ID NO: 590644 - RNA, 19 nt, Artificial Sequence
  Description of Artificial Sequence: Synthetic oligonucleotide
uggggagaccacaccccac

SEQ ID NO: 590645 - RNA, 19 nt, Artificial Sequence
  Description of Artificial Sequence: Synthetic oligonucleotide
gcuaucuaccuuugugguc

SEQ ID NO: 590646 - RNA, 19 nt, Artificial Sequence
  Description of Artificial Sequence: Synthetic oligonucleotide
gauucggcucugaccacca

SEQ ID NO: 590647 - RNA, 19 nt, Artificial Sequence
  Description of Artificial Sequence: Synthetic oligonucleotide
ggagcuagcuauauggagu

SEQ ID NO: 590648 - RNA, 19 nt, Artificial Sequence
  Description of Artificial Sequence: Synthetic oligonucleotide
gggcuggggacugaaagug

SEQ ID NO: 590649 - RNA, 19 nt, Artificial Sequence
  Description of Artificial Sequence: Synthetic oligonucleotide
cacccaucuuacaguggac

SEQ ID NO: 590650 - RNA, 19 nt, Artificial Sequence
  Description of Artificial Sequence: Synthetic oligonucleotide
uauggggcuggggacugaa

SEQ ID NO: 590651 - RNA, 19 nt, Artificial Sequence
  Description of Artificial Sequence: Synthetic oligonucleotide
gauggagcgcaugacuccu

SEQ ID NO: 590652 - RNA, 19 nt, Artificial Sequence
  Description of Artificial Sequence: Synthetic oligonucleotide
ugggcccuuuggcugugac

SEQ ID NO: 590653 - RNA, 19 nt, Artificial Sequence
  Description of Artificial Sequence: Synthetic oligonucleotide
guggacacuaccagcaggu

SEQ ID NO: 590654 - RNA, 19 nt, Artificial Sequence
  Description of Artificial Sequence: Synthetic oligonucleotide
accugggcgucacuccaga

SEQ ID NO: 590655 - RNA, 19 nt, Artificial Sequence
  Description of Artificial Sequence: Synthetic oligonucleotide
ggaucucuuuggaaguaac

SEQ ID NO: 590656 - RNA, 19 nt, Artificial Sequence
  Description of Artificial Sequence: Synthetic oligonucleotide
aucgccugcuccaucugcu

SEQ ID NO: 590657 - RNA, 19 nt, Artificial Sequence
  Description of Artificial Sequence: Synthetic oligonucleotide
gguuggggcgcacgauggg

SEQ ID NO: 590658 - RNA, 19 nt, Artificial Sequence
  Description of Artificial Sequence: Synthetic oligonucleotide
ugccuagagcugccucaca

SEQ ID NO: 590659 - RNA, 19 nt, Artificial Sequence
  Description of Artificial Sequence: Synthetic oligonucleotide
ggcuaacccuguuucucug

SEQ ID NO: 590660 - RNA, 19 nt, Artificial Sequence
  Description of Artificial Sequence: Synthetic oligonucleotide
agaaaaccucuggccaggu

SEQ ID NO: 590661 - RNA, 19 nt, Artificial Sequence
  Description of Artificial Sequence: Synthetic oligonucleotide
gcugccuagagcugccuca

SEQ ID NO: 590662 - RNA, 19 nt, Artificial Sequence
  Description of Artificial Sequence: Synthetic oligonucleotide
acgcucaaugaagcggugu

SEQ ID NO: 590663 - RNA, 19 nt, Artificial Sequence
  Description of Artificial Sequence: Synthetic oligonucleotide
cacaugccuggugcaauac

SEQ ID NO: 590664 - RNA, 19 nt, Artificial Sequence
  Description of Artificial Sequence: Synthetic oligonucleotide
accagucuguuuagugucu

SEQ ID NO: 590665 - RNA, 19 nt, Artificial Sequence
  Description of Artificial Sequence: Synthetic oligonucleotide
gugauaggugaagcgcuca

SEQ ID NO: 590666 - RNA, 19 nt, Artificial Sequence
  Description of Artificial Sequence: Synthetic oligonucleotide
ggagggcucuaggagacug

SEQ ID NO: 590667 - RNA, 19 nt, Artificial Sequence
  Description of Artificial Sequence: Synthetic oligonucleotide
cuagcacccgagugcccug

SEQ ID NO: 590668 - RNA, 19 nt, Artificial Sequence
  Description of Artificial Sequence: Synthetic oligonucleotide
ccuagagcugccucacaug

SEQ ID NO: 590669 - RNA, 19 nt, Artificial Sequence
  Description of Artificial Sequence: Synthetic oligonucleotide
cccuguuucucugaaguuc

SEQ ID NO: 590670 - RNA, 19 nt, Artificial Sequence
  Description of Artificial Sequence: Synthetic oligonucleotide
gggaggagcuagcuauaug

SEQ ID NO: 590671 - RNA, 19 nt, Artificial Sequence
  Description of Artificial Sequence: Synthetic oligonucleotide
accuaaggcugcaggaaau

SEQ ID NO: 590672 - RNA, 19 nt, Artificial Sequence
  Description of Artificial Sequence: Synthetic oligonucleotide
aucccagacgcagcuccag

SEQ ID NO: 590673 - RNA, 19 nt, Artificial Sequence
  Description of Artificial Sequence: Synthetic oligonucleotide
gggacugaaagugcuaucu

SEQ ID NO: 590674 - RNA, 19 nt, Artificial Sequence
  Description of Artificial Sequence: Synthetic oligonucleotide
ggagcgcaugacuccucgg

SEQ ID NO: 590675 - RNA, 19 nt, Artificial Sequence
  Description of Artificial Sequence: Synthetic oligonucleotide
cacgcucaaugaagcggug

SEQ ID NO: 590676 - RNA, 19 nt, Artificial Sequence
  Description of Artificial Sequence: Synthetic oligonucleotide
cugccuagagcugccucac

SEQ ID NO: 590677 - RNA, 19 nt, Artificial Sequence
  Description of Artificial Sequence: Synthetic oligonucleotide
uaacacucucuaggucacu

SEQ ID NO: 590678 - RNA, 19 nt, Artificial Sequence
  Description of Artificial Sequence: Synthetic oligonucleotide
cuagcgggacagaguauaa

SEQ ID NO: 590679 - RNA, 19 nt, Artificial Sequence
  Description of Artificial Sequence: Synthetic oligonucleotide
agacacgcacguugugaua

SEQ ID NO: 590680 - RNA, 19 nt, Artificial Sequence
  Description of Artificial Sequence: Synthetic oligonucleotide
uccagaccccagccauacu

SEQ ID NO: 590681 - RNA, 19 nt, Artificial Sequence
  Description of Artificial Sequence: Synthetic oligonucleotide
caccugggcgucacuccag

SEQ ID NO: 590682 - RNA, 19 nt, Artificial Sequence
  Description of Artificial Sequence: Synthetic oligonucleotide
agguggucgcagggacucc

SEQ ID NO: 590683 - RNA, 19 nt, Artificial Sequence
  Description of Artificial Sequence: Synthetic oligonucleotide
aucuuacaguggacuagca

SEQ ID NO: 590684 - RNA, 19 nt, Artificial Sequence
  Description of Artificial Sequence: Synthetic oligonucleotide
gguucuacucauauacccu

SEQ ID NO: 590685 - RNA, 19 nt, Artificial Sequence
  Description of Artificial Sequence: Synthetic oligonucleotide
cuucaguacaaagccagau

SEQ ID NO: 590686 - RNA, 19 nt, Artificial Sequence
  Description of Artificial Sequence: Synthetic oligonucleotide
auuccucgucccagacacg

SEQ ID NO: 590687 - RNA, 19 nt, Artificial Sequence
  Description of Artificial Sequence: Synthetic oligonucleotide
uggcuuuccuuggaaccua

SEQ ID NO: 590688 - RNA, 19 nt, Artificial Sequence
  Description of Artificial Sequence: Synthetic oligonucleotide
gcuggcagucagaaugccc

SEQ ID NO: 590689 - RNA, 19 nt, Artificial Sequence
  Description of Artificial Sequence: Synthetic oligonucleotide
cucuuuagcccagugcccu

SEQ ID NO: 590690 - RNA, 19 nt, Artificial Sequence
  Description of Artificial Sequence: Synthetic oligonucleotide
cgcucaaugaagcggugug

SEQ ID NO: 590691 - RNA, 19 nt, Artificial Sequence
  Description of Artificial Sequence: Synthetic oligonucleotide
uagugucuagcgggacaga

SEQ ID NO: 590692 - RNA, 19 nt, Artificial Sequence
  Description of Artificial Sequence: Synthetic oligonucleotide
gugcugauuccucguccca

SEQ ID NO: 590693 - RNA, 19 nt, Artificial Sequence
  Description of Artificial Sequence: Synthetic oligonucleotide
agcccuugacagguagaca

SEQ ID NO: 590694 - RNA, 19 nt, Artificial Sequence
  Description of Artificial Sequence: Synthetic oligonucleotide
ggcgagacuucagggcagg

SEQ ID NO: 590695 - RNA, 19 nt, Artificial Sequence
  Description of Artificial Sequence: Synthetic oligonucleotide
agcuagcuauauggagugu

SEQ ID NO: 590696 - RNA, 19 nt, Artificial Sequence
  Description of Artificial Sequence: Synthetic oligonucleotide
auggagcgcaugacuccuc

SEQ ID NO: 590697 - RNA, 19 nt, Artificial Sequence
  Description of Artificial Sequence: Synthetic oligonucleotide
cagacacgcacguugugau

SEQ ID NO: 590698 - RNA, 19 nt, Artificial Sequence
  Description of Artificial Sequence: Synthetic oligonucleotide
uggacacuaccagcaggua

SEQ ID NO: 590699 - RNA, 19 nt, Artificial Sequence
  Description of Artificial Sequence: Synthetic oligonucleotide
ggccuagcugccuguagga

SEQ ID NO: 590700 - RNA, 19 nt, Artificial Sequence
  Description of Artificial Sequence: Synthetic oligonucleotide
cuacacuggccugccucac

SEQ ID NO: 590701 - RNA, 19 nt, Artificial Sequence
  Description of Artificial Sequence: Synthetic oligonucleotide
gacuagcacccgagugccc

SEQ ID NO: 590702 - RNA, 19 nt, Artificial Sequence
  Description of Artificial Sequence: Synthetic oligonucleotide
gagggcucuaggagacuga

SEQ ID NO: 590703 - RNA, 19 nt, Artificial Sequence
  Description of Artificial Sequence: Synthetic oligonucleotide
cccuugacagguagacaug

SEQ ID NO: 590704 - RNA, 19 nt, Artificial Sequence
  Description of Artificial Sequence: Synthetic oligonucleotide
gcucugaccaccagauguc

SEQ ID NO: 590705 - RNA, 19 nt, Artificial Sequence
  Description of Artificial Sequence: Synthetic oligonucleotide
gcacaaggccgcugccuag

SEQ ID NO: 590706 - RNA, 19 nt, Artificial Sequence
  Description of Artificial Sequence: Synthetic oligonucleotide
aagaugcgggaggcucggu

SEQ ID NO: 590707 - RNA, 19 nt, Artificial Sequence
  Description of Artificial Sequence: Synthetic oligonucleotide
gagcuaccugagaccuaag

SEQ ID NO: 590708 - RNA, 19 nt, Artificial Sequence
  Description of Artificial Sequence: Synthetic oligonucleotide
ccagauuggcagcauucca

SEQ ID NO: 590709 - RNA, 19 nt, Artificial Sequence
  Description of Artificial Sequence: Synthetic oligonucleotide
uagcacccgagugcccugu

SEQ ID NO: 590710 - RNA, 19 nt, Artificial Sequence
  Description of Artificial Sequence: Synthetic oligonucleotide
guggucgcagggacuccag

SEQ ID NO: 590711 - RNA, 19 nt, Artificial Sequence
  Description of Artificial Sequence: Synthetic oligonucleotide
ggucgcagggacuccaggu

SEQ ID NO: 590712 - RNA, 19 nt, Artificial Sequence
  Description of Artificial Sequence: Synthetic oligonucleotide
cacaaggccgcugccuaga

SEQ ID NO: 590713 - RNA, 19 nt, Artificial Sequence
  Description of Artificial Sequence: Synthetic oligonucleotide
gaggagcugugaccagucu

SEQ ID NO: 590714 - RNA, 19 nt, Artificial Sequence
  Description of Artificial Sequence: Synthetic oligonucleotide
gcacuaugaagggcaacca

SEQ ID NO: 590715 - RNA, 19 nt, Artificial Sequence
  Description of Artificial Sequence: Synthetic oligonucleotide
agacucucuuuagcccagu

SEQ ID NO: 590716 - RNA, 19 nt, Artificial Sequence
  Description of Artificial Sequence: Synthetic oligonucleotide
gcggugugucuccuuccag

SEQ ID NO: 590717 - RNA, 19 nt, Artificial Sequence
  Description of Artificial Sequence: Synthetic oligonucleotide
ggaucgccugcuccaucug

SEQ ID NO: 590718 - RNA, 19 nt, Artificial Sequence
  Description of Artificial Sequence: Synthetic oligonucleotide
cuggggacugaaagugcua

SEQ ID NO: 590719 - RNA, 19 nt, Artificial Sequence
  Description of Artificial Sequence: Synthetic oligonucleotide
gguugaugcggggccucag

SEQ ID NO: 590720 - RNA, 19 nt, Artificial Sequence
  Description of Artificial Sequence: Synthetic oligonucleotide
ggggagaccacaccccacu

SEQ ID NO: 590721 - RNA, 19 nt, Artificial Sequence
  Description of Artificial Sequence: Synthetic oligonucleotide
agacuucagggcaggccaa

SEQ ID NO: 590722 - RNA, 19 nt, Artificial Sequence
  Description of Artificial Sequence: Synthetic oligonucleotide
gcauaccagccucccgcug

SEQ ID NO: 590723 - RNA, 19 nt, Artificial Sequence
  Description of Artificial Sequence: Synthetic oligonucleotide
agcgcucagggaagaaguu

SEQ ID NO: 590724 - RNA, 19 nt, Artificial Sequence
  Description of Artificial Sequence: Synthetic oligonucleotide
ccaccuuuggcuguugaaa

SEQ ID NO: 590725 - RNA, 19 nt, Artificial Sequence
  Description of Artificial Sequence: Synthetic oligonucleotide
cccuuaaaggcaccauuaa

SEQ ID NO: 590726 - RNA, 19 nt, Artificial Sequence
  Description of Artificial Sequence: Synthetic oligonucleotide
gcuccgaggagggcucuag

SEQ ID NO: 590727 - RNA, 19 nt, Artificial Sequence
  Description of Artificial Sequence: Synthetic oligonucleotide
ccuuaaaggcaccauuaau

SEQ ID NO: 590728 - RNA, 19 nt, Artificial Sequence
  Description of Artificial Sequence: Synthetic oligonucleotide
gugucuagcgggacagagu

SEQ ID NO: 590729 - RNA, 19 nt, Artificial Sequence
  Description of Artificial Sequence: Synthetic oligonucleotide
aucuaccuuuguggucccu

SEQ ID NO: 590730 - RNA, 19 nt, Artificial Sequence
  Description of Artificial Sequence: Synthetic oligonucleotide
cugaggagcugugaccagu

SEQ ID NO: 590731 - RNA, 19 nt, Artificial Sequence
  Description of Artificial Sequence: Synthetic oligonucleotide
cuugagcccuugacaggua

SEQ ID NO: 590732 - RNA, 19 nt, Artificial Sequence
  Description of Artificial Sequence: Synthetic oligonucleotide
ccagauacuacacgacuau

SEQ ID NO: 590733 - RNA, 19 nt, Artificial Sequence
  Description of Artificial Sequence: Synthetic oligonucleotide
ggccauccacucauugcac

SEQ ID NO: 590734 - RNA, 19 nt, Artificial Sequence
  Description of Artificial Sequence: Synthetic oligonucleotide
gcagagauucugaucaguu

SEQ ID NO: 590735 - RNA, 19 nt, Artificial Sequence
  Description of Artificial Sequence: Synthetic oligonucleotide
cacuuuccggagccuaggu

SEQ ID NO: 590736 - RNA, 19 nt, Artificial Sequence
  Description of Artificial Sequence: Synthetic oligonucleotide
ccugggcgucacuccagag

SEQ ID NO: 590737 - RNA, 19 nt, Artificial Sequence
  Description of Artificial Sequence: Synthetic oligonucleotide
cagagccuauggggcuggg

SEQ ID NO: 590738 - RNA, 19 nt, Artificial Sequence
  Description of Artificial Sequence: Synthetic oligonucleotide
ccuagguguagaaggcaua

SEQ ID NO: 590739 - RNA, 19 nt, Artificial Sequence
  Description of Artificial Sequence: Synthetic oligonucleotide
cugugggcccuuuggcugu

SEQ ID NO: 590740 - RNA, 19 nt, Artificial Sequence
  Description of Artificial Sequence: Synthetic oligonucleotide
gccucacaugccuggugca

SEQ ID NO: 590741 - RNA, 19 nt, Artificial Sequence
  Description of Artificial Sequence: Synthetic oligonucleotide
cagaacggcugacacccau

SEQ ID NO: 590742 - RNA, 19 nt, Artificial Sequence
  Description of Artificial Sequence: Synthetic oligonucleotide
gccuagcugccuguaggac

SEQ ID NO: 590743 - RNA, 19 nt, Artificial Sequence
  Description of Artificial Sequence: Synthetic oligonucleotide
cucacaugccuggugcaau

SEQ ID NO: 590744 - RNA, 19 nt, Artificial Sequence
  Description of Artificial Sequence: Synthetic oligonucleotide
augagcuaccugagaccua

SEQ ID NO: 590745 - RNA, 19 nt, Artificial Sequence
  Description of Artificial Sequence: Synthetic oligonucleotide
cuuggccuagcugccugua

SEQ ID NO: 590746 - RNA, 19 nt, Artificial Sequence
  Description of Artificial Sequence: Synthetic oligonucleotide
gcucaaugaagcggugugu

SEQ ID NO: 590747 - RNA, 19 nt, Artificial Sequence
  Description of Artificial Sequence: Synthetic oligonucleotide
cacgcacguugugauaggu

SEQ ID NO: 590748 - RNA, 19 nt, Artificial Sequence
  Description of Artificial Sequence: Synthetic oligonucleotide
gcgcacgaugggccggagc

SEQ ID NO: 590749 - RNA, 19 nt, Artificial Sequence
  Description of Artificial Sequence: Synthetic oligonucleotide
ggggcgcacgaugggccgg

SEQ ID NO: 590750 - RNA, 19 nt, Artificial Sequence
  Description of Artificial Sequence: Synthetic oligonucleotide
gaccccagccauacuguuu

SEQ ID NO: 590751 - RNA, 19 nt, Artificial Sequence
  Description of Artificial Sequence: Synthetic oligonucleotide
cggagccuagguguagaag

SEQ ID NO: 590752 - RNA, 19 nt, Artificial Sequence
  Description of Artificial Sequence: Synthetic oligonucleotide
cgcacgaugggccggagcu

SEQ ID NO: 590753 - RNA, 19 nt, Artificial Sequence
  Description of Artificial Sequence: Synthetic oligonucleotide
gcccugugcucuggcacgc

SEQ ID NO: 590754 - RNA, 19 nt, Artificial Sequence
  Description of Artificial Sequence: Synthetic oligonucleotide
cagcaccguggcagcagaa

SEQ ID NO: 590755 - RNA, 19 nt, Artificial Sequence
  Description of Artificial Sequence: Synthetic oligonucleotide
ggcccggguccugcuagcc

SEQ ID NO: 590756 - RNA, 19 nt, Artificial Sequence
  Description of Artificial Sequence: Synthetic oligonucleotide
cucuuguuccgaggccugu

SEQ ID NO: 590757 - RNA, 19 nt, Artificial Sequence
  Description of Artificial Sequence: Synthetic oligonucleotide
gcggaucucuuuggaagua

SEQ ID NO: 590758 - RNA, 19 nt, Artificial Sequence
  Description of Artificial Sequence: Synthetic oligonucleotide
gguacaccugggcgucacu

SEQ ID NO: 590759 - RNA, 19 nt, Artificial Sequence
  Description of Artificial Sequence: Synthetic oligonucleotide
ccucacaugccuggugcaa

SEQ ID NO: 590760 - RNA, 19 nt, Artificial Sequence
  Description of Artificial Sequence: Synthetic oligonucleotide
gucuagcgggacagaguau

SEQ ID NO: 590761 - RNA, 19 nt, Artificial Sequence
  Description of Artificial Sequence: Synthetic oligonucleotide
ggggaggagcuagcuauau

SEQ ID NO: 590762 - RNA, 19 nt, Artificial Sequence
  Description of Artificial Sequence: Synthetic oligonucleotide
gcggggccucagcccaagc

SEQ ID NO: 590763 - RNA, 19 nt, Artificial Sequence
  Description of Artificial Sequence: Synthetic oligonucleotide
ccggagccuagguguagaa

SEQ ID NO: 590764 - RNA, 19 nt, Artificial Sequence
  Description of Artificial Sequence: Synthetic oligonucleotide
gggagaccacaccccacuu

SEQ ID NO: 590765 - RNA, 19 nt, Artificial Sequence
  Description of Artificial Sequence: Synthetic oligonucleotide
cgucacuccagaggggcaa

SEQ ID NO: 590766 - RNA, 19 nt, Artificial Sequence
  Description of Artificial Sequence: Synthetic oligonucleotide
ggcgcacgaugggccggag

SEQ ID NO: 590767 - RNA, 19 nt, Artificial Sequence
  Description of Artificial Sequence: Synthetic oligonucleotide
cggaucucuuuggaaguaa

SEQ ID NO: 590768 - RNA, 19 nt, Artificial Sequence
  Description of Artificial Sequence: Synthetic oligonucleotide
augcggggccucagcccaa

SEQ ID NO: 590769 - RNA, 19 nt, Artificial Sequence
  Description of Artificial Sequence: Synthetic oligonucleotide
caggguuggggcgcacgau

SEQ ID NO: 590770 - RNA, 19 nt, Artificial Sequence
  Description of Artificial Sequence: Synthetic oligonucleotide
ccuuggccuagcugccugu

SEQ ID NO: 590771 - RNA, 19 nt, Artificial Sequence
  Description of Artificial Sequence: Synthetic oligonucleotide
ggagacugauggagcgcau

SEQ ID NO: 590772 - RNA, 19 nt, Artificial Sequence
  Description of Artificial Sequence: Synthetic oligonucleotide
ccgcugccuagagcugccu

SEQ ID NO: 590773 - RNA, 19 nt, Artificial Sequence
  Description of Artificial Sequence: Synthetic oligonucleotide
ucgauugugccacagaagg

SEQ ID NO: 590774 - RNA, 19 nt, Artificial Sequence
  Description of Artificial Sequence: Synthetic oligonucleotide
aaaauuacccacauccagc

SEQ ID NO: 590775 - RNA, 19 nt, Artificial Sequence
  Description of Artificial Sequence: Synthetic oligonucleotide
ucaguaaugcucuagaggu

SEQ ID NO: 590776 - RNA, 19 nt, Artificial Sequence
  Description of Artificial Sequence: Synthetic oligonucleotide
aagcaagacauucucuagc

SEQ ID NO: 590777 - RNA, 19 nt, Artificial Sequence
  Description of Artificial Sequence: Synthetic oligonucleotide
auaaaagugauguaucuca

SEQ ID NO: 590778 - RNA, 19 nt, Artificial Sequence
  Description of Artificial Sequence: Synthetic oligonucleotide
uuaagaauggcagaggaug

SEQ ID NO: 590779 - RNA, 19 nt, Artificial Sequence
  Description of Artificial Sequence: Synthetic oligonucleotide
uugaacgccaugaaagugg

SEQ ID NO: 590780 - RNA, 19 nt, Artificial Sequence
  Description of Artificial Sequence: Synthetic oligonucleotide
ucuuugguggacauaauug

SEQ ID NO: 590781 - RNA, 19 nt, Artificial Sequence
  Description of Artificial Sequence: Synthetic oligonucleotide
aaaugcaccaggugccucc

SEQ ID NO: 590782 - RNA, 19 nt, Artificial Sequence
  Description of Artificial Sequence: Synthetic oligonucleotide
ugauguaucucaguaaugc

SEQ ID NO: 590783 - RNA, 19 nt, Artificial Sequence
  Description of Artificial Sequence: Synthetic oligonucleotide
ucagaaagaagcccucgcg

SEQ ID NO: 590784 - RNA, 19 nt, Artificial Sequence
  Description of Artificial Sequence: Synthetic oligonucleotide
aaauuacccacauccagcu

SEQ ID NO: 590785 - RNA, 19 nt, Artificial Sequence
  Description of Artificial Sequence: Synthetic oligonucleotide
gacaauguguaccuuuccg

SEQ ID NO: 590786 - RNA, 19 nt, Artificial Sequence
  Description of Artificial Sequence: Synthetic oligonucleotide
uugcacacgguccauaaag

SEQ ID NO: 590787 - RNA, 19 nt, Artificial Sequence
  Description of Artificial Sequence: Synthetic oligonucleotide
cuuugguggacauaauugc

SEQ ID NO: 590788 - RNA, 19 nt, Artificial Sequence
  Description of Artificial Sequence: Synthetic oligonucleotide
caucauauacaaaaugcac

SEQ ID NO: 590789 - RNA, 19 nt, Artificial Sequence
  Description of Artificial Sequence: Synthetic oligonucleotide
ugaaagauccuagaguccc

SEQ ID NO: 590790 - RNA, 19 nt, Artificial Sequence
  Description of Artificial Sequence: Synthetic oligonucleotide
gauccgucgagacaccucg

SEQ ID NO: 590791 - RNA, 19 nt, Artificial Sequence
  Description of Artificial Sequence: Synthetic oligonucleotide
uccuagaguccccaggugg

SEQ ID NO: 590792 - RNA, 19 nt, Artificial Sequence
  Description of Artificial Sequence: Synthetic oligonucleotide
aguggcgggagcuaggagg

SEQ ID NO: 590793 - RNA, 19 nt, Artificial Sequence
  Description of Artificial Sequence: Synthetic oligonucleotide
ucaagauccgucgagacac

SEQ ID NO: 590794 - RNA, 19 nt, Artificial Sequence
  Description of Artificial Sequence: Synthetic oligonucleotide
uccgagucaagcaagacau

SEQ ID NO: 590795 - RNA, 19 nt, Artificial Sequence
  Description of Artificial Sequence: Synthetic oligonucleotide
ugauuuguuccccauggca

SEQ ID NO: 590796 - RNA, 19 nt, Artificial Sequence
  Description of Artificial Sequence: Synthetic oligonucleotide
caaaauuacccacauccag

SEQ ID NO: 590797 - RNA, 19 nt, Artificial Sequence
  Description of Artificial Sequence: Synthetic oligonucleotide
gaagccacgagcugcuucg

SEQ ID NO: 590798 - RNA, 19 nt, Artificial Sequence
  Description of Artificial Sequence: Synthetic oligonucleotide
guagaugaugcccagcuug

SEQ ID NO: 590799 - RNA, 19 nt, Artificial Sequence
  Description of Artificial Sequence: Synthetic oligonucleotide
ugcuuaguggaguaggccc

SEQ ID NO: 590800 - RNA, 19 nt, Artificial Sequence
  Description of Artificial Sequence: Synthetic oligonucleotide
agugauguaucucaguaau

SEQ ID NO: 590801 - RNA, 19 nt, Artificial Sequence
  Description of Artificial Sequence: Synthetic oligonucleotide
cuugcuucggaugauuucg

SEQ ID NO: 590802 - RNA, 19 nt, Artificial Sequence
  Description of Artificial Sequence: Synthetic oligonucleotide
uuccuuagccccacuaggg

SEQ ID NO: 590803 - RNA, 19 nt, Artificial Sequence
  Description of Artificial Sequence: Synthetic oligonucleotide
cucgccaccgcucacauag

SEQ ID NO: 590804 - RNA, 19 nt, Artificial Sequence
  Description of Artificial Sequence: Synthetic oligonucleotide
aacgccaugaaaguggcgu

SEQ ID NO: 590805 - RNA, 19 nt, Artificial Sequence
  Description of Artificial Sequence: Synthetic oligonucleotide
aacugcgugcuuaagaaug

SEQ ID NO: 590806 - RNA, 19 nt, Artificial Sequence
  Description of Artificial Sequence: Synthetic oligonucleotide
uucuuccgcaaaauuaccc

SEQ ID NO: 590807 - RNA, 19 nt, Artificial Sequence
  Description of Artificial Sequence: Synthetic oligonucleotide
gaggugagugaacaucucg

SEQ ID NO: 590808 - RNA, 19 nt, Artificial Sequence
  Description of Artificial Sequence: Synthetic oligonucleotide
uagaggugagugaacaucu

SEQ ID NO: 590809 - RNA, 19 nt, Artificial Sequence
  Description of Artificial Sequence: Synthetic oligonucleotide
agaagguccgcucuuucuc

SEQ ID NO: 590810 - RNA, 19 nt, Artificial Sequence
  Description of Artificial Sequence: Synthetic oligonucleotide
cgcaaaauuacccacaucc

SEQ ID NO: 590811 - RNA, 19 nt, Artificial Sequence
  Description of Artificial Sequence: Synthetic oligonucleotide
ucuuccgcaaaauuaccca

SEQ ID NO: 590812 - RNA, 19 nt, Artificial Sequence
  Description of Artificial Sequence: Synthetic oligonucleotide
ugagaagcgcccuucccgg

SEQ ID NO: 590813 - RNA, 19 nt, Artificial Sequence
  Description of Artificial Sequence: Synthetic oligonucleotide
guagacaggcuccagccgg

SEQ ID NO: 590814 - RNA, 19 nt, Artificial Sequence
  Description of Artificial Sequence: Synthetic oligonucleotide
caauguguaccuuuccgag

SEQ ID NO: 590815 - RNA, 19 nt, Artificial Sequence
  Description of Artificial Sequence: Synthetic oligonucleotide
gaguaucccugaaagaucc

SEQ ID NO: 590816 - RNA, 19 nt, Artificial Sequence
  Description of Artificial Sequence: Synthetic oligonucleotide
auguacucgauugugccac

SEQ ID NO: 590817 - RNA, 19 nt, Artificial Sequence
  Description of Artificial Sequence: Synthetic oligonucleotide
ucucaguaaugcucuagag

SEQ ID NO: 590818 - RNA, 19 nt, Artificial Sequence
  Description of Artificial Sequence: Synthetic oligonucleotide
agcguagugcaguguaacc

SEQ ID NO: 590819 - RNA, 19 nt, Artificial Sequence
  Description of Artificial Sequence: Synthetic oligonucleotide
agaggcgcauucuccacgc

SEQ ID NO: 590820 - RNA, 19 nt, Artificial Sequence
  Description of Artificial Sequence: Synthetic oligonucleotide
aagcguagugcaguguaac

SEQ ID NO: 590821 - RNA, 19 nt, Artificial Sequence
  Description of Artificial Sequence: Synthetic oligonucleotide
uguuacacugaauggaguu

SEQ ID NO: 590822 - RNA, 19 nt, Artificial Sequence
  Description of Artificial Sequence: Synthetic oligonucleotide
agaaggagaagguccgcuc

SEQ ID NO: 590823 - RNA, 19 nt, Artificial Sequence
  Description of Artificial Sequence: Synthetic oligonucleotide
uucaagauccgucgagaca

SEQ ID NO: 590824 - RNA, 19 nt, Artificial Sequence
  Description of Artificial Sequence: Synthetic oligonucleotide
ugaacgccaugaaaguggc

SEQ ID NO: 590825 - RNA, 19 nt, Artificial Sequence
  Description of Artificial Sequence: Synthetic oligonucleotide
cagaaagaagcccucgcgc

SEQ ID NO: 590826 - RNA, 19 nt, Artificial Sequence
  Description of Artificial Sequence: Synthetic oligonucleotide
cuugcuuaguggaguaggc

SEQ ID NO: 590827 - RNA, 19 nt, Artificial Sequence
  Description of Artificial Sequence: Synthetic oligonucleotide
ugauuucggggccauguac

SEQ ID NO: 590828 - RNA, 19 nt, Artificial Sequence
  Description of Artificial Sequence: Synthetic oligonucleotide
ucacgguagaugaugccca

SEQ ID NO: 590829 - RNA, 19 nt, Artificial Sequence
  Description of Artificial Sequence: Synthetic oligonucleotide
aacaucucgccaccgcuca

SEQ ID NO: 590830 - RNA, 19 nt, Artificial Sequence
  Description of Artificial Sequence: Synthetic oligonucleotide
agcuucagucgcuuggcgg

SEQ ID NO: 590831 - RNA, 19 nt, Artificial Sequence
  Description of Artificial Sequence: Synthetic oligonucleotide
aaggggugauucuugacuu

SEQ ID NO: 590832 - RNA, 19 nt, Artificial Sequence
  Description of Artificial Sequence: Synthetic oligonucleotide
aggaguaucccugaaagau

SEQ ID NO: 590833 - RNA, 19 nt, Artificial Sequence
  Description of Artificial Sequence: Synthetic oligonucleotide
guggacauaauugcacacg

SEQ ID NO: 590834 - RNA, 19 nt, Artificial Sequence
  Description of Artificial Sequence: Synthetic oligonucleotide
cauaauugcacacggucca

SEQ ID NO: 590835 - RNA, 19 nt, Artificial Sequence
  Description of Artificial Sequence: Synthetic oligonucleotide
ugucaguagcccucggacc

SEQ ID NO: 590836 - RNA, 19 nt, Artificial Sequence
  Description of Artificial Sequence: Synthetic oligonucleotide
aagcccucgcgcuugccuc

SEQ ID NO: 590837 - RNA, 19 nt, Artificial Sequence
  Description of Artificial Sequence: Synthetic oligonucleotide
ucugcucacaacacuugcu

SEQ ID NO: 590838 - RNA, 19 nt, Artificial Sequence
  Description of Artificial Sequence: Synthetic oligonucleotide
gaaaguggcguugagccca

SEQ ID NO: 590839 - RNA, 19 nt, Artificial Sequence
  Description of Artificial Sequence: Synthetic oligonucleotide
gaagguccgcucuuucucc

SEQ ID NO: 590840 - RNA, 19 nt, Artificial Sequence
  Description of Artificial Sequence: Synthetic oligonucleotide
uaccuuuccgagucaagca

SEQ ID NO: 590841 - RNA, 19 nt, Artificial Sequence
  Description of Artificial Sequence: Synthetic oligonucleotide
ucgaagaggauggacggug

SEQ ID NO: 590842 - RNA, 19 nt, Artificial Sequence
  Description of Artificial Sequence: Synthetic oligonucleotide
aguacuggcgcugguagag

SEQ ID NO: 590843 - RNA, 19 nt, Artificial Sequence
  Description of Artificial Sequence: Synthetic oligonucleotide
caugaaaguggcguugagc

SEQ ID NO: 590844 - RNA, 19 nt, Artificial Sequence
  Description of Artificial Sequence: Synthetic oligonucleotide
uguaccuuuccgagucaag

SEQ ID NO: 590845 - RNA, 19 nt, Artificial Sequence
  Description of Artificial Sequence: Synthetic oligonucleotide
acaucgggcguccgaagcg

SEQ ID NO: 590846 - RNA, 19 nt, Artificial Sequence
  Description of Artificial Sequence: Synthetic oligonucleotide
ugucccuaacucuuaucug

SEQ ID NO: 590847 - RNA, 19 nt, Artificial Sequence
  Description of Artificial Sequence: Synthetic oligonucleotide
aaggggcuucccuguaggg

SEQ ID NO: 590848 - RNA, 19 nt, Artificial Sequence
  Description of Artificial Sequence: Synthetic oligonucleotide
uuguuacacugaauggagu

SEQ ID NO: 590849 - RNA, 19 nt, Artificial Sequence
  Description of Artificial Sequence: Synthetic oligonucleotide
ugcgugcuuaagaauggca

SEQ ID NO: 590850 - RNA, 19 nt, Artificial Sequence
  Description of Artificial Sequence: Synthetic oligonucleotide
cuuccgcaaaauuacccac

SEQ ID NO: 590851 - RNA, 19 nt, Artificial Sequence
  Description of Artificial Sequence: Synthetic oligonucleotide
ggucgaagaggauggacgg

SEQ ID NO: 590852 - RNA, 19 nt, Artificial Sequence
  Description of Artificial Sequence: Synthetic oligonucleotide
ugccccgacagcaucauau

SEQ ID NO: 590853 - RNA, 19 nt, Artificial Sequence
  Description of Artificial Sequence: Synthetic oligonucleotide
gauuuguuccccauggcaa

SEQ ID NO: 590854 - RNA, 19 nt, Artificial Sequence
  Description of Artificial Sequence: Synthetic oligonucleotide
ugcacacgguccauaaagu

SEQ ID NO: 590855 - RNA, 19 nt, Artificial Sequence
  Description of Artificial Sequence: Synthetic oligonucleotide
gaaagcguagugcagugua

SEQ ID NO: 590856 - RNA, 19 nt, Artificial Sequence
  Description of Artificial Sequence: Synthetic oligonucleotide
ugcuucggaugauuucggg

SEQ ID NO: 590857 - RNA, 19 nt, Artificial Sequence
  Description of Artificial Sequence: Synthetic oligonucleotide
cugucaguagcccucggac

SEQ ID NO: 590858 - RNA, 19 nt, Artificial Sequence
  Description of Artificial Sequence: Synthetic oligonucleotide
ucucucucauucccaacac

SEQ ID NO: 590859 - RNA, 19 nt, Artificial Sequence
  Description of Artificial Sequence: Synthetic oligonucleotide
uggaaagcguagugcagug

SEQ ID NO: 590860 - RNA, 19 nt, Artificial Sequence
  Description of Artificial Sequence: Synthetic oligonucleotide
uccgcaaaauuacccacau

SEQ ID NO: 590861 - RNA, 19 nt, Artificial Sequence
  Description of Artificial Sequence: Synthetic oligonucleotide
agccgggugaauucuuccg

SEQ ID NO: 590862 - RNA, 19 nt, Artificial Sequence
  Description of Artificial Sequence: Synthetic oligonucleotide
acaaggggccguuggcucg

SEQ ID NO: 590863 - RNA, 19 nt, Artificial Sequence
  Description of Artificial Sequence: Synthetic oligonucleotide
cucgauugugccacagaag

SEQ ID NO: 590864 - RNA, 19 nt, Artificial Sequence
  Description of Artificial Sequence: Synthetic oligonucleotide
  modified_base (14)..(14): a, c, u, g, unknown or other
agggcgaggccccngucag

SEQ ID NO: 590865 - RNA, 19 nt, Artificial Sequence
  Description of Artificial Sequence: Synthetic oligonucleotide
ucgguugaacgccaugaaa

SEQ ID NO: 590866 - RNA, 19 nt, Artificial Sequence
  Description of Artificial Sequence: Synthetic oligonucleotide
agcuccuaaggagaagggg

SEQ ID NO: 590867 - RNA, 19 nt, Artificial Sequence
  Description of Artificial Sequence: Synthetic oligonucleotide
aguggcguugagcccagag

SEQ ID NO: 590868 - RNA, 19 nt, Artificial Sequence
  Description of Artificial Sequence: Synthetic oligonucleotide
uccgacacacccugccagg

SEQ ID NO: 590869 - RNA, 19 nt, Artificial Sequence
  Description of Artificial Sequence: Synthetic oligonucleotide
gauggacggugccacgaag

SEQ ID NO: 590870 - RNA, 19 nt, Artificial Sequence
  Description of Artificial Sequence: Synthetic oligonucleotide
  modified_base (2)..(2): a, c, u, g, unknown or other
cngucagcagcucgaagag

SEQ ID NO: 590871 - RNA, 19 nt, Artificial Sequence
  Description of Artificial Sequence: Synthetic oligonucleotide
ggaugccaagcccagaccc

SEQ ID NO: 590872 - RNA, 19 nt, Artificial Sequence
  Description of Artificial Sequence: Synthetic oligonucleotide
ugauaggcgaccggaggag

SEQ ID NO: 590873 - RNA, 19 nt, Artificial Sequence
  Description of Artificial Sequence: Synthetic oligonucleotide
cacacgguccauaaaguga

SEQ ID NO: 590874 - RNA, 19 nt, Artificial Sequence
  Description of Artificial Sequence: Synthetic oligonucleotide
acacucgaaaccucagccu

SEQ ID NO: 590875 - RNA, 19 nt, Artificial Sequence
  Description of Artificial Sequence: Synthetic oligonucleotide
gcuucggaugauuucgggg

SEQ ID NO: 590876 - RNA, 19 nt, Artificial Sequence
  Description of Artificial Sequence: Synthetic oligonucleotide
guacacucgaaaccucagc

SEQ ID NO: 590877 - RNA, 19 nt, Artificial Sequence
  Description of Artificial Sequence: Synthetic oligonucleotide
cacuucaagauccgucgag

SEQ ID NO: 590878 - RNA, 19 nt, Artificial Sequence
  Description of Artificial Sequence: Synthetic oligonucleotide
gagugaacaucucgccacc

SEQ ID NO: 590879 - RNA, 19 nt, Artificial Sequence
  Description of Artificial Sequence: Synthetic oligonucleotide
guugaacgccaugaaagug

SEQ ID NO: 590880 - RNA, 19 nt, Artificial Sequence
  Description of Artificial Sequence: Synthetic oligonucleotide
ggugagugaacaucucgcc

SEQ ID NO: 590881 - RNA, 19 nt, Artificial Sequence
  Description of Artificial Sequence: Synthetic oligonucleotide
uggacggugccacgaagga

SEQ ID NO: 590882 - RNA, 19 nt, Artificial Sequence
  Description of Artificial Sequence: Synthetic oligonucleotide
uugcuuaguggaguaggcc

SEQ ID NO: 590883 - RNA, 19 nt, Artificial Sequence
  Description of Artificial Sequence: Synthetic oligonucleotide
uccgucgagacaccucggc

SEQ ID NO: 590884 - RNA, 19 nt, Artificial Sequence
  Description of Artificial Sequence: Synthetic oligonucleotide
ccuaccuccuuccuuagcc

SEQ ID NO: 590885 - RNA, 19 nt, Artificial Sequence
  Description of Artificial Sequence: Synthetic oligonucleotide
acucgaaaccucagccucc

SEQ ID NO: 590886 - RNA, 19 nt, Artificial Sequence
  Description of Artificial Sequence: Synthetic oligonucleotide
acugcgugcuuaagaaugg

SEQ ID NO: 590887 - RNA, 19 nt, Artificial Sequence
  Description of Artificial Sequence: Synthetic oligonucleotide
aaguacuggcgcugguaga

SEQ ID NO: 590888 - RNA, 19 nt, Artificial Sequence
  Description of Artificial Sequence: Synthetic oligonucleotide
agcggaggagaagagcgcg

SEQ ID NO: 590889 - RNA, 19 nt, Artificial Sequence
  Description of Artificial Sequence: Synthetic oligonucleotide
gauaggcgaccggaggagg

SEQ ID NO: 590890 - RNA, 19 nt, Artificial Sequence
  Description of Artificial Sequence: Synthetic oligonucleotide
auaagucugguggcagcac

SEQ ID NO: 590891 - RNA, 19 nt, Artificial Sequence
  Description of Artificial Sequence: Synthetic oligonucleotide
accuuuccgagucaagcaa

SEQ ID NO: 590892 - RNA, 19 nt, Artificial Sequence
  Description of Artificial Sequence: Synthetic oligonucleotide
auggacggugccacgaagg

SEQ ID NO: 590893 - RNA, 19 nt, Artificial Sequence
  Description of Artificial Sequence: Synthetic oligonucleotide
acgguccauaaagugacag

SEQ ID NO: 590894 - RNA, 19 nt, Artificial Sequence
  Description of Artificial Sequence: Synthetic oligonucleotide
accuaccuccuuccuuagc

SEQ ID NO: 590895 - RNA, 19 nt, Artificial Sequence
  Description of Artificial Sequence: Synthetic oligonucleotide
gcugauaggcgaccggagg

SEQ ID NO: 590896 - RNA, 19 nt, Artificial Sequence
  Description of Artificial Sequence: Synthetic oligonucleotide
aggggugauucuugacuuc

SEQ ID NO: 590897 - RNA, 19 nt, Artificial Sequence
  Description of Artificial Sequence: Synthetic oligonucleotide
guggcguugagcccagagc

SEQ ID NO: 590898 - RNA, 19 nt, Artificial Sequence
  Description of Artificial Sequence: Synthetic oligonucleotide
cgguugaacgccaugaaag

SEQ ID NO: 590899 - RNA, 19 nt, Artificial Sequence
  Description of Artificial Sequence: Synthetic oligonucleotide
gaaagauccuagagucccc

SEQ ID NO: 590900 - RNA, 19 nt, Artificial Sequence
  Description of Artificial Sequence: Synthetic oligonucleotide
agagcgcgcgcugccaucc

SEQ ID NO: 590901 - RNA, 19 nt, Artificial Sequence
  Description of Artificial Sequence: Synthetic oligonucleotide
  modified_base (16)..(16): a, c, u, g, unknown or other
gcaccgagcguucggngcg

SEQ ID NO: 590902 - RNA, 19 nt, Artificial Sequence
  Description of Artificial Sequence: Synthetic oligonucleotide
aggcacuucaagauccguc

SEQ ID NO: 590903 - RNA, 19 nt, Artificial Sequence
  Description of Artificial Sequence: Synthetic oligonucleotide
gugucccuaacucuuaucu

SEQ ID NO: 590904 - RNA, 19 nt, Artificial Sequence
  Description of Artificial Sequence: Synthetic oligonucleotide
gagaagagcgcgcgcugcc

SEQ ID NO: 590905 - RNA, 19 nt, Artificial Sequence
  Description of Artificial Sequence: Synthetic oligonucleotide
cagaggcgcauucuccacg

SEQ ID NO: 590906 - RNA, 19 nt, Artificial Sequence
  Description of Artificial Sequence: Synthetic oligonucleotide
gugaacaucucgccaccgc

SEQ ID NO: 590907 - RNA, 19 nt, Artificial Sequence
  Description of Artificial Sequence: Synthetic oligonucleotide
gaugauuucggggccaugu

SEQ ID NO: 590908 - RNA, 19 nt, Artificial Sequence
  Description of Artificial Sequence: Synthetic oligonucleotide
ggaguagacaggcuccagc

SEQ ID NO: 590909 - RNA, 19 nt, Artificial Sequence
  Description of Artificial Sequence: Synthetic oligonucleotide
cucacaacacuugcuuccc

SEQ ID NO: 590910 - RNA, 19 nt, Artificial Sequence
  Description of Artificial Sequence: Synthetic oligonucleotide
uccacgcuuuucagaaaga

SEQ ID NO: 590911 - RNA, 19 nt, Artificial Sequence
  Description of Artificial Sequence: Synthetic oligonucleotide
uguguaccuuuccgaguca

SEQ ID NO: 590912 - RNA, 19 nt, Artificial Sequence
  Description of Artificial Sequence: Synthetic oligonucleotide
ggugauucuugacuuccug

SEQ ID NO: 590913 - RNA, 19 nt, Artificial Sequence
  Description of Artificial Sequence: Synthetic oligonucleotide
cuugccguguccagccuug

SEQ ID NO: 590914 - RNA, 19 nt, Artificial Sequence
  Description of Artificial Sequence: Synthetic oligonucleotide
cuuagggucuuugcacagc

SEQ ID NO: 590915 - RNA, 19 nt, Artificial Sequence
  Description of Artificial Sequence: Synthetic oligonucleotide
cuccgacacacccugccag

SEQ ID NO: 590916 - RNA, 19 nt, Artificial Sequence
  Description of Artificial Sequence: Synthetic oligonucleotide
uguaaccaggaagggcgcc

SEQ ID NO: 590917 - RNA, 19 nt, Artificial Sequence
  Description of Artificial Sequence: Synthetic oligonucleotide
uacuggcgcugguagaggu

SEQ ID NO: 590918 - RNA, 19 nt, Artificial Sequence
  Description of Artificial Sequence: Synthetic oligonucleotide
gaaggagaagguccgcucu

SEQ ID NO: 590919 - RNA, 19 nt, Artificial Sequence
  Description of Artificial Sequence: Synthetic oligonucleotide
ccauccugaagccacgagc

SEQ ID NO: 590920 - RNA, 19 nt, Artificial Sequence
  Description of Artificial Sequence: Synthetic oligonucleotide
cugauaggcgaccggagga

SEQ ID NO: 590921 - RNA, 19 nt, Artificial Sequence
  Description of Artificial Sequence: Synthetic oligonucleotide
ugugucccuaacucuuauc

SEQ ID NO: 590922 - RNA, 19 nt, Artificial Sequence
  Description of Artificial Sequence: Synthetic oligonucleotide
gcgugcuuaagaauggcag

SEQ ID NO: 590923 - RNA, 19 nt, Artificial Sequence
  Description of Artificial Sequence: Synthetic oligonucleotide
uucccaacacaggucuuug

SEQ ID NO: 590924 - RNA, 19 nt, Artificial Sequence
  Description of Artificial Sequence: Synthetic oligonucleotide
gcaacugcgugcuuaagaa

SEQ ID NO: 590925 - RNA, 19 nt, Artificial Sequence
  Description of Artificial Sequence: Synthetic oligonucleotide
cagccuaaaagggcugagg

SEQ ID NO: 590926 - RNA, 19 nt, Artificial Sequence
  Description of Artificial Sequence: Synthetic oligonucleotide
aggugccuccagcacauca

SEQ ID NO: 590927 - RNA, 19 nt, Artificial Sequence
  Description of Artificial Sequence: Synthetic oligonucleotide
gguggacauaauugcacac

SEQ ID NO: 590928 - RNA, 19 nt, Artificial Sequence
  Description of Artificial Sequence: Synthetic oligonucleotide
aagauccgucgagacaccu

SEQ ID NO: 590929 - RNA, 19 nt, Artificial Sequence
  Description of Artificial Sequence: Synthetic oligonucleotide
ugacagggcuccugauuug

SEQ ID NO: 590930 - RNA, 19 nt, Artificial Sequence
  Description of Artificial Sequence: Synthetic oligonucleotide
ucacaacacuugcuucccu

SEQ ID NO: 590931 - RNA, 19 nt, Artificial Sequence
  Description of Artificial Sequence: Synthetic oligonucleotide
uacacugaauggaguuuua

SEQ ID NO: 590932 - RNA, 19 nt, Artificial Sequence
  Description of Artificial Sequence: Synthetic oligonucleotide
uuggcgggguccacuguca

SEQ ID NO: 590933 - RNA, 19 nt, Artificial Sequence
  Description of Artificial Sequence: Synthetic oligonucleotide
gggaggcacuucaagaucc

SEQ ID NO: 590934 - RNA, 19 nt, Artificial Sequence
  Description of Artificial Sequence: Synthetic oligonucleotide
gugauguaucucaguaaug

SEQ ID NO: 590935 - RNA, 19 nt, Artificial Sequence
  Description of Artificial Sequence: Synthetic oligonucleotide
gucgagacaccucggccug

SEQ ID NO: 590936 - RNA, 19 nt, Artificial Sequence
  Description of Artificial Sequence: Synthetic oligonucleotide
  modified_base (3)..(3): a, c, u, g, unknown or other
ccngucagcagcucgaaga

SEQ ID NO: 590937 - RNA, 19 nt, Artificial Sequence
  Description of Artificial Sequence: Synthetic oligonucleotide
guaaugcucuagagguucc

SEQ ID NO: 590938 - RNA, 19 nt, Artificial Sequence
  Description of Artificial Sequence: Synthetic oligonucleotide
cacuaggggagaagccagc

SEQ ID NO: 590939 - RNA, 19 nt, Artificial Sequence
  Description of Artificial Sequence: Synthetic oligonucleotide
ucuugacuuccugcgcacc

SEQ ID NO: 590940 - RNA, 19 nt, Artificial Sequence
  Description of Artificial Sequence: Synthetic oligonucleotide
ugagcgaaucuggggccgg

SEQ ID NO: 590941 - RNA, 19 nt, Artificial Sequence
  Description of Artificial Sequence: Synthetic oligonucleotide
uguacucgauugugccaca

SEQ ID NO: 590942 - RNA, 19 nt, Artificial Sequence
  Description of Artificial Sequence: Synthetic oligonucleotide
cuuugcacagcagccgcug

SEQ ID NO: 590943 - RNA, 19 nt, Artificial Sequence
  Description of Artificial Sequence: Synthetic oligonucleotide
cacgguagaugaugcccag

SEQ ID NO: 590944 - RNA, 19 nt, Artificial Sequence
  Description of Artificial Sequence: Synthetic oligonucleotide
cauaagucugguggcagca

SEQ ID NO: 590945 - RNA, 19 nt, Artificial Sequence
  Description of Artificial Sequence: Synthetic oligonucleotide
gaagggaaccugccccgac

SEQ ID NO: 590946 - RNA, 19 nt, Artificial Sequence
  Description of Artificial Sequence: Synthetic oligonucleotide
agaggugagugaacaucuc

SEQ ID NO: 590947 - RNA, 19 nt, Artificial Sequence
  Description of Artificial Sequence: Synthetic oligonucleotide
acagccuaaaagggcugag

SEQ ID NO: 590948 - RNA, 19 nt, Artificial Sequence
  Description of Artificial Sequence: Synthetic oligonucleotide
acaucucgccaccgcucac

SEQ ID NO: 590949 - RNA, 19 nt, Artificial Sequence
  Description of Artificial Sequence: Synthetic oligonucleotide
caagauccgucgagacacc

SEQ ID NO: 590950 - RNA, 19 nt, Artificial Sequence
  Description of Artificial Sequence: Synthetic oligonucleotide
gcacacgguccauaaagug

SEQ ID NO: 590951 - RNA, 19 nt, Artificial Sequence
  Description of Artificial Sequence: Synthetic oligonucleotide
ucgcgcuugccucgguuga

SEQ ID NO: 590952 - RNA, 19 nt, Artificial Sequence
  Description of Artificial Sequence: Synthetic oligonucleotide
auggcaacugcgugcuuaa

SEQ ID NO: 590953 - RNA, 19 nt, Artificial Sequence
  Description of Artificial Sequence: Synthetic oligonucleotide
agauccgucgagacaccuc

SEQ ID NO: 590954 - RNA, 19 nt, Artificial Sequence
  Description of Artificial Sequence: Synthetic oligonucleotide
gaacaucucgccaccgcuc

SEQ ID NO: 590955 - RNA, 19 nt, Artificial Sequence
  Description of Artificial Sequence: Synthetic oligonucleotide
aagcgcccuucccggaucu

SEQ ID NO: 590956 - RNA, 19 nt, Artificial Sequence
  Description of Artificial Sequence: Synthetic oligonucleotide
ggaugcccuugcuuagugg

SEQ ID NO: 590957 - RNA, 19 nt, Artificial Sequence
  Description of Artificial Sequence: Synthetic oligonucleotide
uccgucuggaaagcguagu

SEQ ID NO: 590958 - RNA, 19 nt, Artificial Sequence
  Description of Artificial Sequence: Synthetic oligonucleotide
caucgggcguccgaagcgg

SEQ ID NO: 590959 - RNA, 19 nt, Artificial Sequence
  Description of Artificial Sequence: Synthetic oligonucleotide
uggggacccgcgcccaacc

SEQ ID NO: 590960 - RNA, 19 nt, Artificial Sequence
  Description of Artificial Sequence: Synthetic oligonucleotide
cacgagcugcuucgcagcc

SEQ ID NO: 590961 - RNA, 19 nt, Artificial Sequence
  Description of Artificial Sequence: Synthetic oligonucleotide
cugacauaaaagugaugua

SEQ ID NO: 590962 - RNA, 19 nt, Artificial Sequence
  Description of Artificial Sequence: Synthetic oligonucleotide
ucaguagcccucggaccag

SEQ ID NO: 590963 - RNA, 19 nt, Artificial Sequence
  Description of Artificial Sequence: Synthetic oligonucleotide
agcccucgcgcuugccucg

SEQ ID NO: 590964 - RNA, 19 nt, Artificial Sequence
  Description of Artificial Sequence: Synthetic oligonucleotide
gacaccucggccugagugu

SEQ ID NO: 590965 - RNA, 19 nt, Artificial Sequence
  Description of Artificial Sequence: Synthetic oligonucleotide
agcaccuaccuccuuccuu

SEQ ID NO: 590966 - RNA, 19 nt, Artificial Sequence
  Description of Artificial Sequence: Synthetic oligonucleotide
gccacgagcugcuucgcag

SEQ ID NO: 590967 - RNA, 19 nt, Artificial Sequence
  Description of Artificial Sequence: Synthetic oligonucleotide
augauuucggggccaugua

SEQ ID NO: 590968 - RNA, 19 nt, Artificial Sequence
  Description of Artificial Sequence: Synthetic oligonucleotide
ccuuuccgagucaagcaag

SEQ ID NO: 590969 - RNA, 19 nt, Artificial Sequence
  Description of Artificial Sequence: Synthetic oligonucleotide
aggcugauaggcgaccgga

SEQ ID NO: 590970 - RNA, 19 nt, Artificial Sequence
  Description of Artificial Sequence: Synthetic oligonucleotide
gcauaagucugguggcagc

SEQ ID NO: 590971 - RNA, 19 nt, Artificial Sequence
  Description of Artificial Sequence: Synthetic oligonucleotide
accaggcccgaauccggag

SEQ ID NO: 590972 - RNA, 19 nt, Artificial Sequence
  Description of Artificial Sequence: Synthetic oligonucleotide
ccuguagggagcaccuacc

SEQ ID NO: 590973 - RNA, 19 nt, Artificial Sequence
  Description of Artificial Sequence: Synthetic oligonucleotide
uaauugcacacgguccaua

SEQ ID NO: 590974 - RNA, 19 nt, Artificial Sequence
  Description of Artificial Sequence: Synthetic oligonucleotide
  modified_base (7)..(7): a, c, u, g, unknown or other
ggccccngucagcagcucg

SEQ ID NO: 590975 - RNA, 19 nt, Artificial Sequence
  Description of Artificial Sequence: Synthetic oligonucleotide
agaagcgcccuucccggau

SEQ ID NO: 590976 - RNA, 19 nt, Artificial Sequence
  Description of Artificial Sequence: Synthetic oligonucleotide
cuucagucgcuuggcgggg

SEQ ID NO: 590977 - RNA, 19 nt, Artificial Sequence
  Description of Artificial Sequence: Synthetic oligonucleotide
gaacgccaugaaaguggcg

SEQ ID NO: 590978 - RNA, 19 nt, Artificial Sequence
  Description of Artificial Sequence: Synthetic oligonucleotide
  modified_base (16)..(16): a, c, u, g, unknown or other
gaagggcgaggccccnguc

SEQ ID NO: 590979 - RNA, 19 nt, Artificial Sequence
  Description of Artificial Sequence: Synthetic oligonucleotide
ggcauaagucugguggcag

SEQ ID NO: 590980 - RNA, 19 nt, Artificial Sequence
  Description of Artificial Sequence: Synthetic oligonucleotide
guacucgauugugccacag

SEQ ID NO: 590981 - RNA, 19 nt, Artificial Sequence
  Description of Artificial Sequence: Synthetic oligonucleotide
auaauugcacacgguccau

SEQ ID NO: 590982 - RNA, 19 nt, Artificial Sequence
  Description of Artificial Sequence: Synthetic oligonucleotide
guacuggcgcugguagagg

SEQ ID NO: 590983 - RNA, 19 nt, Artificial Sequence
  Description of Artificial Sequence: Synthetic oligonucleotide
gaagcgcccuucccggauc

SEQ ID NO: 590984 - RNA, 19 nt, Artificial Sequence
  Description of Artificial Sequence: Synthetic oligonucleotide
ggggccguuggcucggcgg

SEQ ID NO: 590985 - RNA, 19 nt, Artificial Sequence
  Description of Artificial Sequence: Synthetic oligonucleotide
gcuugccucgguugaacgc

SEQ ID NO: 590986 - RNA, 19 nt, Artificial Sequence
  Description of Artificial Sequence: Synthetic oligonucleotide
ggaguaucccugaaagauc

SEQ ID NO: 590987 - RNA, 19 nt, Artificial Sequence
  Description of Artificial Sequence: Synthetic oligonucleotide
agcacaucgggcguccgaa

SEQ ID NO: 590988 - RNA, 19 nt, Artificial Sequence
  Description of Artificial Sequence: Synthetic oligonucleotide
ccuaacucuuaucugguaa

SEQ ID NO: 590989 - RNA, 19 nt, Artificial Sequence
  Description of Artificial Sequence: Synthetic oligonucleotide
ccacuaggggagaagccag

SEQ ID NO: 590990 - RNA, 19 nt, Artificial Sequence
  Description of Artificial Sequence: Synthetic oligonucleotide
uaggcgaccggaggaggca

SEQ ID NO: 590991 - RNA, 19 nt, Artificial Sequence
  Description of Artificial Sequence: Synthetic oligonucleotide
gguugaacgccaugaaagu

SEQ ID NO: 590992 - RNA, 19 nt, Artificial Sequence
  Description of Artificial Sequence: Synthetic oligonucleotide
gccgggugaauucuuccgc

SEQ ID NO: 590993 - RNA, 19 nt, Artificial Sequence
  Description of Artificial Sequence: Synthetic oligonucleotide
gcgcccaaccucuucuuag

SEQ ID NO: 590994 - RNA, 19 nt, Artificial Sequence
  Description of Artificial Sequence: Synthetic oligonucleotide
aggcgcauucuccacgcuu

SEQ ID NO: 590995 - RNA, 19 nt, Artificial Sequence
  Description of Artificial Sequence: Synthetic oligonucleotide
gccauguacucgauugugc

SEQ ID NO: 590996 - RNA, 19 nt, Artificial Sequence
  Description of Artificial Sequence: Synthetic oligonucleotide
guaucccugaaagauccua

SEQ ID NO: 590997 - RNA, 19 nt, Artificial Sequence
  Description of Artificial Sequence: Synthetic oligonucleotide
uggcauccgucuggaaagc

SEQ ID NO: 590998 - RNA, 19 nt, Artificial Sequence
  Description of Artificial Sequence: Synthetic oligonucleotide
gaaagaagcccucgcgcuu

SEQ ID NO: 590999 - RNA, 19 nt, Artificial Sequence
  Description of Artificial Sequence: Synthetic oligonucleotide
ccgacagcaucauauacaa

SEQ ID NO: 591000 - RNA, 19 nt, Artificial Sequence
  Description of Artificial Sequence: Synthetic oligonucleotide
augcccuugcuuaguggag

SEQ ID NO: 591001 - RNA, 19 nt, Artificial Sequence
  Description of Artificial Sequence: Synthetic oligonucleotide
ggaggcacuucaagauccg

SEQ ID NO: 591002 - RNA, 19 nt, Artificial Sequence
  Description of Artificial Sequence: Synthetic oligonucleotide
auccgucuggaaagcguag

SEQ ID NO: 591003 - RNA, 19 nt, Artificial Sequence
  Description of Artificial Sequence: Synthetic oligonucleotide
cgguccauaaagugacagg

SEQ ID NO: 591004 - RNA, 19 nt, Artificial Sequence
  Description of Artificial Sequence: Synthetic oligonucleotide
gcuugcgccucuuggccag

SEQ ID NO: 591005 - RNA, 19 nt, Artificial Sequence
  Description of Artificial Sequence: Synthetic oligonucleotide
gggccguuggcucggcggg

SEQ ID NO: 591006 - RNA, 19 nt, Artificial Sequence
  Description of Artificial Sequence: Synthetic oligonucleotide
cuuugcccgcccuggccug

SEQ ID NO: 591007 - RNA, 19 nt, Artificial Sequence
  Description of Artificial Sequence: Synthetic oligonucleotide
caaggggccguuggcucgg

SEQ ID NO: 591008 - RNA, 19 nt, Artificial Sequence
  Description of Artificial Sequence: Synthetic oligonucleotide
gcguagugcaguguaacca

SEQ ID NO: 591009 - RNA, 19 nt, Artificial Sequence
  Description of Artificial Sequence: Synthetic oligonucleotide
cauggcaacugcgugcuua

SEQ ID NO: 591010 - RNA, 19 nt, Artificial Sequence
  Description of Artificial Sequence: Synthetic oligonucleotide
uuagccccacuaggggaga

SEQ ID NO: 591011 - RNA, 19 nt, Artificial Sequence
  Description of Artificial Sequence: Synthetic oligonucleotide
caccuaccuccuuccuuag

SEQ ID NO: 591012 - RNA, 19 nt, Artificial Sequence
  Description of Artificial Sequence: Synthetic oligonucleotide
acgccaugaaaguggcguu

SEQ ID NO: 591013 - RNA, 19 nt, Artificial Sequence
  Description of Artificial Sequence: Synthetic oligonucleotide
gugcccaugaggaaugggu

SEQ ID NO: 591014 - RNA, 19 nt, Artificial Sequence
  Description of Artificial Sequence: Synthetic oligonucleotide
gcaccuaccuccuuccuua

SEQ ID NO: 591015 - RNA, 19 nt, Artificial Sequence
  Description of Artificial Sequence: Synthetic oligonucleotide
agccacgagcugcuucgca

SEQ ID NO: 591016 - RNA, 19 nt, Artificial Sequence
  Description of Artificial Sequence: Synthetic oligonucleotide
gagaagcgcccuucccgga

SEQ ID NO: 591017 - RNA, 19 nt, Artificial Sequence
  Description of Artificial Sequence: Synthetic oligonucleotide
uccagccgggugaauucuu

SEQ ID NO: 591018 - RNA, 19 nt, Artificial Sequence
  Description of Artificial Sequence: Synthetic oligonucleotide
ccaggcccgaauccggagg

SEQ ID NO: 591019 - RNA, 19 nt, Artificial Sequence
  Description of Artificial Sequence: Synthetic oligonucleotide
cguacacucgaaaccucag

SEQ ID NO: 591020 - RNA, 19 nt, Artificial Sequence
  Description of Artificial Sequence: Synthetic oligonucleotide
ccacgagcugcuucgcagc

SEQ ID NO: 591021 - RNA, 19 nt, Artificial Sequence
  Description of Artificial Sequence: Synthetic oligonucleotide
cgaaucuggggccggaaug

SEQ ID NO: 591022 - RNA, 19 nt, Artificial Sequence
  Description of Artificial Sequence: Synthetic oligonucleotide
  modified_base (14)..(14): a, c, u, g, unknown or other
accgagcguucggngcggg

SEQ ID NO: 591023 - RNA, 19 nt, Artificial Sequence
  Description of Artificial Sequence: Synthetic oligonucleotide
cucgguugaacgccaugaa

SEQ ID NO: 591024 - RNA, 19 nt, Artificial Sequence
  Description of Artificial Sequence: Synthetic oligonucleotide
aguaucccugaaagauccu

SEQ ID NO: 591025 - RNA, 19 nt, Artificial Sequence
  Description of Artificial Sequence: Synthetic oligonucleotide
gcugugcccaugaggaaug

SEQ ID NO: 591026 - RNA, 19 nt, Artificial Sequence
  Description of Artificial Sequence: Synthetic oligonucleotide
guccgaagcggaggagaag

SEQ ID NO: 591027 - RNA, 19 nt, Artificial Sequence
  Description of Artificial Sequence: Synthetic oligonucleotide
agcgcgcgcugccauccug

SEQ ID NO: 591028 - RNA, 19 nt, Artificial Sequence
  Description of Artificial Sequence: Synthetic oligonucleotide
gguccacugucaguagccc

SEQ ID NO: 591029 - RNA, 19 nt, Artificial Sequence
  Description of Artificial Sequence: Synthetic oligonucleotide
gugaauucuuccgcaaaau

SEQ ID NO: 591030 - RNA, 19 nt, Artificial Sequence
  Description of Artificial Sequence: Synthetic oligonucleotide
uucagucgcuuggcggggu

SEQ ID NO: 591031 - RNA, 19 nt, Artificial Sequence
  Description of Artificial Sequence: Synthetic oligonucleotide
ccuagaguccccaggugga

SEQ ID NO: 591032 - RNA, 19 nt, Artificial Sequence
  Description of Artificial Sequence: Synthetic oligonucleotide
gccaccgcucacauagucc

SEQ ID NO: 591033 - RNA, 19 nt, Artificial Sequence
  Description of Artificial Sequence: Synthetic oligonucleotide
aggcgaccggaggaggcag

SEQ ID NO: 591034 - RNA, 19 nt, Artificial Sequence
  Description of Artificial Sequence: Synthetic oligonucleotide
gggagccgcggcgagaggc

SEQ ID NO: 591035 - RNA, 19 nt, Artificial Sequence
  Description of Artificial Sequence: Synthetic oligonucleotide
ccgucgagacaccucggcc

SEQ ID NO: 591036 - RNA, 19 nt, Artificial Sequence
  Description of Artificial Sequence: Synthetic oligonucleotide
ggcugauaggcgaccggag

SEQ ID NO: 591037 - RNA, 19 nt, Artificial Sequence
  Description of Artificial Sequence: Synthetic oligonucleotide
gcgcugguagaggugagug

SEQ ID NO: 591038 - RNA, 19 nt, Artificial Sequence
  Description of Artificial Sequence: Synthetic oligonucleotide
ggacggugccacgaaggag

SEQ ID NO: 591039 - RNA, 19 nt, Artificial Sequence
  Description of Artificial Sequence: Synthetic oligonucleotide
gcugccagcaggggaguag

SEQ ID NO: 591040 - RNA, 19 nt, Artificial Sequence
  Description of Artificial Sequence: Synthetic oligonucleotide
ccguguccagccuugcuuc

SEQ ID NO: 591041 - RNA, 19 nt, Artificial Sequence
  Description of Artificial Sequence: Synthetic oligonucleotide
  modified_base (18)..(18): a, c, u, g, unknown or other
gugaagggcgaggccccng

SEQ ID NO: 591042 - RNA, 19 nt, Artificial Sequence
  Description of Artificial Sequence: Synthetic oligonucleotide
auccgucgagacaccucgg

SEQ ID NO: 591043 - RNA, 19 nt, Artificial Sequence
  Description of Artificial Sequence: Synthetic oligonucleotide
caucucgccaccgcucaca

SEQ ID NO: 591044 - RNA, 19 nt, Artificial Sequence
  Description of Artificial Sequence: Synthetic oligonucleotide
guaaccaggaagggcgccu

SEQ ID NO: 591045 - RNA, 19 nt, Artificial Sequence
  Description of Artificial Sequence: Synthetic oligonucleotide
aggggccguuggcucggcg

SEQ ID NO: 591046 - RNA, 19 nt, Artificial Sequence
  Description of Artificial Sequence: Synthetic oligonucleotide
ccccacucugcucacaaca

SEQ ID NO: 591047 - RNA, 19 nt, Artificial Sequence
  Description of Artificial Sequence: Synthetic oligonucleotide
ccccgacagcaucauauac

SEQ ID NO: 591048 - RNA, 19 nt, Artificial Sequence
  Description of Artificial Sequence: Synthetic oligonucleotide
ccaugaaaguggcguugag

SEQ ID NO: 591049 - RNA, 19 nt, Artificial Sequence
  Description of Artificial Sequence: Synthetic oligonucleotide
gaagagcgcgcgcugccau

SEQ ID NO: 591050 - RNA, 19 nt, Artificial Sequence
  Description of Artificial Sequence: Synthetic oligonucleotide
ucgccaccgcucacauagu

SEQ ID NO: 591051 - RNA, 19 nt, Artificial Sequence
  Description of Artificial Sequence: Synthetic oligonucleotide
ccccacuaggggagaagcc

SEQ ID NO: 591052 - RNA, 19 nt, Artificial Sequence
  Description of Artificial Sequence: Synthetic oligonucleotide
ccguacacucgaaaccuca

SEQ ID NO: 591053 - RNA, 19 nt, Artificial Sequence
  Description of Artificial Sequence: Synthetic oligonucleotide
cacgguccauaaagugaca

SEQ ID NO: 591054 - RNA, 19 nt, Artificial Sequence
  Description of Artificial Sequence: Synthetic oligonucleotide
  modified_base (15)..(15): a, c, u, g, unknown or other
caccgagcguucggngcgg

SEQ ID NO: 591055 - RNA, 19 nt, Artificial Sequence
  Description of Artificial Sequence: Synthetic oligonucleotide
ucgagacaccucggccuga

SEQ ID NO: 591056 - RNA, 19 nt, Artificial Sequence
  Description of Artificial Sequence: Synthetic oligonucleotide
ccgaagcggaggagaagag

SEQ ID NO: 591057 - RNA, 19 nt, Artificial Sequence
  Description of Artificial Sequence: Synthetic oligonucleotide
ccagaggcgcauucuccac

SEQ ID NO: 591058 - RNA, 19 nt, Artificial Sequence
  Description of Artificial Sequence: Synthetic oligonucleotide
cccacuaggggagaagcca

SEQ ID NO: 591059 - RNA, 19 nt, Artificial Sequence
  Description of Artificial Sequence: Synthetic oligonucleotide
cgcuugccucgguugaacg

SEQ ID NO: 591060 - RNA, 19 nt, Artificial Sequence
  Description of Artificial Sequence: Synthetic oligonucleotide
ucgaaaccucagccuccuu

SEQ ID NO: 591061 - RNA, 19 nt, Artificial Sequence
  Description of Artificial Sequence: Synthetic oligonucleotide
ggaaugggugagugagaaa

SEQ ID NO: 591062 - RNA, 19 nt, Artificial Sequence
  Description of Artificial Sequence: Synthetic oligonucleotide
gugagugagaaaggggcuu

SEQ ID NO: 591063 - RNA, 19 nt, Artificial Sequence
  Description of Artificial Sequence: Synthetic oligonucleotide
  modified_base (4)..(4): a, c, u, g, unknown or other
cccngucagcagcucgaag

SEQ ID NO: 591064 - RNA, 19 nt, Artificial Sequence
  Description of Artificial Sequence: Synthetic oligonucleotide
agcgaaucuggggccggaa

SEQ ID NO: 591065 - RNA, 19 nt, Artificial Sequence
  Description of Artificial Sequence: Synthetic oligonucleotide
cggaggagaagagcgcgcg

SEQ ID NO: 591066 - RNA, 19 nt, Artificial Sequence
  Description of Artificial Sequence: Synthetic oligonucleotide
caacugcgugcuuaagaau

SEQ ID NO: 591067 - RNA, 19 nt, Artificial Sequence
  Description of Artificial Sequence: Synthetic oligonucleotide
ucggggccauguacucgau

SEQ ID NO: 591068 - RNA, 19 nt, Artificial Sequence
  Description of Artificial Sequence: Synthetic oligonucleotide
gcguugagcccagagcgca

SEQ ID NO: 591069 - RNA, 19 nt, Artificial Sequence
  Description of Artificial Sequence: Synthetic oligonucleotide
cguguccagccuugcuucg

SEQ ID NO: 591070 - RNA, 19 nt, Artificial Sequence
  Description of Artificial Sequence: Synthetic oligonucleotide
gaggcacuucaagauccgu

SEQ ID NO: 591071 - RNA, 19 nt, Artificial Sequence
  Description of Artificial Sequence: Synthetic oligonucleotide
ggauggacggugccacgaa

SEQ ID NO: 591072 - RNA, 19 nt, Artificial Sequence
  Description of Artificial Sequence: Synthetic oligonucleotide
cuuccccguccagugagaa

SEQ ID NO: 591073 - RNA, 19 nt, Artificial Sequence
  Description of Artificial Sequence: Synthetic oligonucleotide
gccggaauggggcugggau

SEQ ID NO: 591074 - RNA, 19 nt, Artificial Sequence
  Description of Artificial Sequence: Synthetic oligonucleotide
cugcuucgcagccccucca

SEQ ID NO: 591075 - RNA, 19 nt, Artificial Sequence
  Description of Artificial Sequence: Synthetic oligonucleotide
  modified_base (9)..(9): a, c, u, g, unknown or other
gaggccccngucagcagcu

SEQ ID NO: 591076 - RNA, 19 nt, Artificial Sequence
  Description of Artificial Sequence: Synthetic oligonucleotide
caguaaugcucuagagguu

SEQ ID NO: 591077 - RNA, 19 nt, Artificial Sequence
  Description of Artificial Sequence: Synthetic oligonucleotide
gcaauuccuggggaucaga

SEQ ID NO: 591078 - RNA, 19 nt, Artificial Sequence
  Description of Artificial Sequence: Synthetic oligonucleotide
ggcugcgcuccugagcuuc

SEQ ID NO: 591079 - RNA, 19 nt, Artificial Sequence
  Description of Artificial Sequence: Synthetic oligonucleotide
gggcguccgaagcggagga

SEQ ID NO: 591080 - RNA, 19 nt, Artificial Sequence
  Description of Artificial Sequence: Synthetic oligonucleotide
gcguccgaagcggaggaga

SEQ ID NO: 591081 - RNA, 19 nt, Artificial Sequence
  Description of Artificial Sequence: Synthetic oligonucleotide
gucgaagaggauggacggu

SEQ ID NO: 591082 - RNA, 19 nt, Artificial Sequence
  Description of Artificial Sequence: Synthetic oligonucleotide
cccguacacucgaaaccuc

SEQ ID NO: 591083 - RNA, 19 nt, Artificial Sequence
  Description of Artificial Sequence: Synthetic oligonucleotide
ccacgcuuuucagaaagaa

SEQ ID NO: 591084 - RNA, 19 nt, Artificial Sequence
  Description of Artificial Sequence: Synthetic oligonucleotide
  modified_base (8)..(8): a, c, u, g, unknown or other
aggccccngucagcagcuc

SEQ ID NO: 591085 - RNA, 19 nt, Artificial Sequence
  Description of Artificial Sequence: Synthetic oligonucleotide
ggcgaccggaggaggcagg

SEQ ID NO: 591086 - RNA, 19 nt, Artificial Sequence
  Description of Artificial Sequence: Synthetic oligonucleotide
cccaaggcuccacccgcag

SEQ ID NO: 591087 - RNA, 19 nt, Artificial Sequence
  Description of Artificial Sequence: Synthetic oligonucleotide
ccgcaaaauuacccacauc

SEQ ID NO: 591088 - RNA, 19 nt, Artificial Sequence
  Description of Artificial Sequence: Synthetic oligonucleotide
cgaaggaguaucccugaaa

SEQ ID NO: 591089 - RNA, 19 nt, Artificial Sequence
  Description of Artificial Sequence: Synthetic oligonucleotide
gcgaccggaggaggcaggc

SEQ ID NO: 591090 - RNA, 19 nt, Artificial Sequence
  Description of Artificial Sequence: Synthetic oligonucleotide
aaguggcguugagcccaga

SEQ ID NO: 591091 - RNA, 19 nt, Artificial Sequence
  Description of Artificial Sequence: Synthetic oligonucleotide
gaggcgcauucuccacgcu

SEQ ID NO: 591092 - RNA, 19 nt, Artificial Sequence
  Description of Artificial Sequence: Synthetic oligonucleotide
cgccaugaaaguggcguug

SEQ ID NO: 591093 - RNA, 19 nt, Artificial Sequence
  Description of Artificial Sequence: Synthetic oligonucleotide
  modified_base (6)..(6): a, c, u, g, unknown or other
gccccngucagcagcucga

SEQ ID NO: 591094 - RNA, 19 nt, Artificial Sequence
  Description of Artificial Sequence: Synthetic oligonucleotide
ggaaagcguagugcagugu

SEQ ID NO: 591095 - RNA, 19 nt, Artificial Sequence
  Description of Artificial Sequence: Synthetic oligonucleotide
gcccuugcuuaguggagua

SEQ ID NO: 591096 - RNA, 19 nt, Artificial Sequence
  Description of Artificial Sequence: Synthetic oligonucleotide
acggugccacgaaggagua

SEQ ID NO: 591097 - RNA, 19 nt, Artificial Sequence
  Description of Artificial Sequence: Synthetic oligonucleotide
ggcuucccuguagggagca

SEQ ID NO: 591098 - RNA, 19 nt, Artificial Sequence
  Description of Artificial Sequence: Synthetic oligonucleotide
cgucgagacaccucggccu

SEQ ID NO: 591099 - RNA, 19 nt, Artificial Sequence
  Description of Artificial Sequence: Synthetic oligonucleotide
gccccgacagcaucauaua

SEQ ID NO: 591100 - RNA, 19 nt, Artificial Sequence
  Description of Artificial Sequence: Synthetic oligonucleotide
cguugagcccagagcgcac

SEQ ID NO: 591101 - RNA, 19 nt, Artificial Sequence
  Description of Artificial Sequence: Synthetic oligonucleotide
cgggcguccgaagcggagg

SEQ ID NO: 591102 - RNA, 19 nt, Artificial Sequence
  Description of Artificial Sequence: Synthetic oligonucleotide
ggcgcauucuccacgcuuu

SEQ ID NO: 591103 - RNA, 19 nt, Artificial Sequence
  Description of Artificial Sequence: Synthetic oligonucleotide
ggacccgcgcccaaccucu

SEQ ID NO: 591104 - RNA, 19 nt, Artificial Sequence
  Description of Artificial Sequence: Synthetic oligonucleotide
cccguccagugagaagcgc

SEQ ID NO: 591105 - RNA, 19 nt, Artificial Sequence
  Description of Artificial Sequence: Synthetic oligonucleotide
ccccguacacucgaaaccu

SEQ ID NO: 591106 - RNA, 19 nt, Artificial Sequence
  Description of Artificial Sequence: Synthetic oligonucleotide
cugcauuguuguggucgaa

SEQ ID NO: 591107 - RNA, 19 nt, Artificial Sequence
  Description of Artificial Sequence: Synthetic oligonucleotide
cgcacccuggggacccgcg

SEQ ID NO: 591108 - RNA, 19 nt, Artificial Sequence
  Description of Artificial Sequence: Synthetic oligonucleotide
gcaccgggcucgcggguca

SEQ ID NO: 591109 - RNA, 19 nt, Artificial Sequence
  Description of Artificial Sequence: Synthetic oligonucleotide
cgccaccgcucacauaguc

SEQ ID NO: 591110 - RNA, 19 nt, Artificial Sequence
  Description of Artificial Sequence: Synthetic oligonucleotide
ccacucugcucacaacacu

SEQ ID NO: 591111 - RNA, 19 nt, Artificial Sequence
  Description of Artificial Sequence: Synthetic oligonucleotide
cguccgaagcggaggagaa

SEQ ID NO: 591112 - RNA, 19 nt, Artificial Sequence
  Description of Artificial Sequence: Synthetic oligonucleotide
gcccucgcgcuugccucgg

SEQ ID NO: 591113 - RNA, 19 nt, Artificial Sequence
  Description of Artificial Sequence: Synthetic oligonucleotide
gcuuccccguccagugaga

SEQ ID NO: 591114 - RNA, 19 nt, Artificial Sequence
  Description of Artificial Sequence: Synthetic oligonucleotide
cgggugaauucuuccgcaa

SEQ ID NO: 591115 - RNA, 19 nt, Artificial Sequence
  Description of Artificial Sequence: Synthetic oligonucleotide
ggcgggguccacugucagu

SEQ ID NO: 591116 - RNA, 19 nt, Artificial Sequence
  Description of Artificial Sequence: Synthetic oligonucleotide
caccgggcucgcgggucac

SEQ ID NO: 591117 - RNA, 19 nt, Artificial Sequence
  Description of Artificial Sequence: Synthetic oligonucleotide
gggaggggaggcacuucaa

SEQ ID NO: 591118 - RNA, 19 nt, Artificial Sequence
  Description of Artificial Sequence: Synthetic oligonucleotide
gcgcgcgcugccauccuga

SEQ ID NO: 591119 - RNA, 19 nt, Artificial Sequence
  Description of Artificial Sequence: Synthetic oligonucleotide
gagcgcgcgcugccauccu

SEQ ID NO: 591120 - RNA, 19 nt, Artificial Sequence
  Description of Artificial Sequence: Synthetic oligonucleotide
gccccuuggaagggaaccu

SEQ ID NO: 591121 - RNA, 19 nt, Artificial Sequence
  Description of Artificial Sequence: Synthetic oligonucleotide
cugccccgacagcaucaua

SEQ ID NO: 591122 - RNA, 19 nt, Artificial Sequence
  Description of Artificial Sequence: Synthetic oligonucleotide
ggccggaauggggcuggga

SEQ ID NO: 591123 - RNA, 19 nt, Artificial Sequence
  Description of Artificial Sequence: Synthetic oligonucleotide
gcgcacccuggggacccgc

SEQ ID NO: 591124 - RNA, 19 nt, Artificial Sequence
  Description of Artificial Sequence: Synthetic oligonucleotide
gcgcauucuccacgcuuuu

SEQ ID NO: 591125 - RNA, 19 nt, Artificial Sequence
  Description of Artificial Sequence: Synthetic oligonucleotide
  modified_base (5)..(5): a, c, u, g, unknown or other
ccccngucagcagcucgaa

SEQ ID NO: 591126 - RNA, 19 nt, Artificial Sequence
  Description of Artificial Sequence: Synthetic oligonucleotide
cgcgggucacagcuccuaa

SEQ ID NO: 591127 - RNA, 19 nt, Artificial Sequence
  Description of Artificial Sequence: Synthetic oligonucleotide
ccuugccguguccagccuu

SEQ ID NO: 591128 - RNA, 19 nt, Artificial Sequence
  Description of Artificial Sequence: Synthetic oligonucleotide
gcugcgcuccugagcuucu

SEQ ID NO: 591129 - RNA, 19 nt, Artificial Sequence
  Description of Artificial Sequence: Synthetic oligonucleotide
cgcgcccaaccucuucuua

SEQ ID NO: 591130 - RNA, 19 nt, Artificial Sequence
  Description of Artificial Sequence: Synthetic oligonucleotide
  modified_base (13)..(13): a, c, u, g, unknown or other
ccgagcguucggngcgggu

SEQ ID NO: 591131 - RNA, 19 nt, Artificial Sequence
  Description of Artificial Sequence: Synthetic oligonucleotide
gcccucggaccaguuccuu

SEQ ID NO: 591132 - RNA, 19 nt, Artificial Sequence
  Description of Artificial Sequence: Synthetic oligonucleotide
ccgcgcccaaccucuucuu

SEQ ID NO: 591133 - RNA, 19 nt, Artificial Sequence
  Description of Artificial Sequence: Synthetic oligonucleotide
agaagauagggauacaugc

SEQ ID NO: 591134 - RNA, 19 nt, Artificial Sequence
  Description of Artificial Sequence: Synthetic oligonucleotide
aguuaauuuguacaguccc

SEQ ID NO: 591135 - RNA, 19 nt, Artificial Sequence
  Description of Artificial Sequence: Synthetic oligonucleotide
caauugaaaaccuuggugg

SEQ ID NO: 591136 - RNA, 19 nt, Artificial Sequence
  Description of Artificial Sequence: Synthetic oligonucleotide
uguauauaaagacuaauaa

SEQ ID NO: 591137 - RNA, 19 nt, Artificial Sequence
  Description of Artificial Sequence: Synthetic oligonucleotide
ucaucaacgaguuagggug

SEQ ID NO: 591138 - RNA, 19 nt, Artificial Sequence
  Description of Artificial Sequence: Synthetic oligonucleotide
uuaggagugccacauaagg

SEQ ID NO: 591139 - RNA, 19 nt, Artificial Sequence
  Description of Artificial Sequence: Synthetic oligonucleotide
aauaacuuacacagcaacc

SEQ ID NO: 591140 - RNA, 19 nt, Artificial Sequence
  Description of Artificial Sequence: Synthetic oligonucleotide
uguaauuucggaaauacuu

SEQ ID NO: 591141 - RNA, 19 nt, Artificial Sequence
  Description of Artificial Sequence: Synthetic oligonucleotide
uaaagacuaauaaaagggc

SEQ ID NO: 591142 - RNA, 19 nt, Artificial Sequence
  Description of Artificial Sequence: Synthetic oligonucleotide
agguguacaugauacaccc

SEQ ID NO: 591143 - RNA, 19 nt, Artificial Sequence
  Description of Artificial Sequence: Synthetic oligonucleotide
uucucaucgauauagguca

SEQ ID NO: 591144 - RNA, 19 nt, Artificial Sequence
  Description of Artificial Sequence: Synthetic oligonucleotide
cuaauaaaagggcaguccc

SEQ ID NO: 591145 - RNA, 19 nt, Artificial Sequence
  Description of Artificial Sequence: Synthetic oligonucleotide
agaaguaaagacuucggca

SEQ ID NO: 591146 - RNA, 19 nt, Artificial Sequence
  Description of Artificial Sequence: Synthetic oligonucleotide
aacgaguuagggugggagc

SEQ ID NO: 591147 - RNA, 19 nt, Artificial Sequence
  Description of Artificial Sequence: Synthetic oligonucleotide
gaagagguugccuagcuug

SEQ ID NO: 591148 - RNA, 19 nt, Artificial Sequence
  Description of Artificial Sequence: Synthetic oligonucleotide
aaguuaauuuguacagucc

SEQ ID NO: 591149 - RNA, 19 nt, Artificial Sequence
  Description of Artificial Sequence: Synthetic oligonucleotide
uguacagucccauugcuga

SEQ ID NO: 591150 - RNA, 19 nt, Artificial Sequence
  Description of Artificial Sequence: Synthetic oligonucleotide
gaaguuaauuuguacaguc

SEQ ID NO: 591151 - RNA, 19 nt, Artificial Sequence
  Description of Artificial Sequence: Synthetic oligonucleotide
acuagcaagguguacauga

SEQ ID NO: 591152 - RNA, 19 nt, Artificial Sequence
  Description of Artificial Sequence: Synthetic oligonucleotide
acuaagguggcacucaaug

SEQ ID NO: 591153 - RNA, 19 nt, Artificial Sequence
  Description of Artificial Sequence: Synthetic oligonucleotide
ugcagagugaagcagcacc

SEQ ID NO: 591154 - RNA, 19 nt, Artificial Sequence
  Description of Artificial Sequence: Synthetic oligonucleotide
aagacuaauaaaagggcag

SEQ ID NO: 591155 - RNA, 19 nt, Artificial Sequence
  Description of Artificial Sequence: Synthetic oligonucleotide
caugauacacccaauggac

SEQ ID NO: 591156 - RNA, 19 nt, Artificial Sequence
  Description of Artificial Sequence: Synthetic oligonucleotide
ugcuacgcgaaccuggccg

SEQ ID NO: 591157 - RNA, 19 nt, Artificial Sequence
  Description of Artificial Sequence: Synthetic oligonucleotide
uguugagucauugaagagc

SEQ ID NO: 591158 - RNA, 19 nt, Artificial Sequence
  Description of Artificial Sequence: Synthetic oligonucleotide
agacuuaggcgguaugugc

SEQ ID NO: 591159 - RNA, 19 nt, Artificial Sequence
  Description of Artificial Sequence: Synthetic oligonucleotide
cugauuucggugcagauac

SEQ ID NO: 591160 - RNA, 19 nt, Artificial Sequence
  Description of Artificial Sequence: Synthetic oligonucleotide
gauaaguuuuguguggucc

SEQ ID NO: 591161 - RNA, 19 nt, Artificial Sequence
  Description of Artificial Sequence: Synthetic oligonucleotide
aaagacuucggcacgaucu

SEQ ID NO: 591162 - RNA, 19 nt, Artificial Sequence
  Description of Artificial Sequence: Synthetic oligonucleotide
uagaaaucuccauagacau

SEQ ID NO: 591163 - RNA, 19 nt, Artificial Sequence
  Description of Artificial Sequence: Synthetic oligonucleotide
aaagacuaauaaaagggca

SEQ ID NO: 591164 - RNA, 19 nt, Artificial Sequence
  Description of Artificial Sequence: Synthetic oligonucleotide
uucuauguacuguaggcug

SEQ ID NO: 591165 - RNA, 19 nt, Artificial Sequence
  Description of Artificial Sequence: Synthetic oligonucleotide
uucuggauaagggaggcgg

SEQ ID NO: 591166 - RNA, 19 nt, Artificial Sequence
  Description of Artificial Sequence: Synthetic oligonucleotide
ugucacacagcugauaccc

SEQ ID NO: 591167 - RNA, 19 nt, Artificial Sequence
  Description of Artificial Sequence: Synthetic oligonucleotide
gucucuuuuaggcaugagg

SEQ ID NO: 591168 - RNA, 19 nt, Artificial Sequence
  Description of Artificial Sequence: Synthetic oligonucleotide
uuagggugggagcucacgg

SEQ ID NO: 591169 - RNA, 19 nt, Artificial Sequence
  Description of Artificial Sequence: Synthetic oligonucleotide
acaugauacacccaaugga

SEQ ID NO: 591170 - RNA, 19 nt, Artificial Sequence
  Description of Artificial Sequence: Synthetic oligonucleotide
aauguauauaaagacuaau

SEQ ID NO: 591171 - RNA, 19 nt, Artificial Sequence
  Description of Artificial Sequence: Synthetic oligonucleotide
ugauacacccaauggacca

SEQ ID NO: 591172 - RNA, 19 nt, Artificial Sequence
  Description of Artificial Sequence: Synthetic oligonucleotide
cuuagaggcauugacacug

SEQ ID NO: 591173 - RNA, 19 nt, Artificial Sequence
  Description of Artificial Sequence: Synthetic oligonucleotide
uaucugacguagauaguag

SEQ ID NO: 591174 - RNA, 19 nt, Artificial Sequence
  Description of Artificial Sequence: Synthetic oligonucleotide
uucggcacgaucuugccug

SEQ ID NO: 591175 - RNA, 19 nt, Artificial Sequence
  Description of Artificial Sequence: Synthetic oligonucleotide
ucgucauugagcaacucgu

SEQ ID NO: 591176 - RNA, 19 nt, Artificial Sequence
  Description of Artificial Sequence: Synthetic oligonucleotide
gaagccuacgacguguugg

SEQ ID NO: 591177 - RNA, 19 nt, Artificial Sequence
  Description of Artificial Sequence: Synthetic oligonucleotide
agagcgcgagcuuagcagc

SEQ ID NO: 591178 - RNA, 19 nt, Artificial Sequence
  Description of Artificial Sequence: Synthetic oligonucleotide
cauguaauuucggaaauac

SEQ ID NO: 591179 - RNA, 19 nt, Artificial Sequence
  Description of Artificial Sequence: Synthetic oligonucleotide
uagauaguagcgugccucg

SEQ ID NO: 591180 - RNA, 19 nt, Artificial Sequence
  Description of Artificial Sequence: Synthetic oligonucleotide
ugcggaaccacguucgcag

SEQ ID NO: 591181 - RNA, 19 nt, Artificial Sequence
  Description of Artificial Sequence: Synthetic oligonucleotide
aaguccccuauuuucaccu

SEQ ID NO: 591182 - RNA, 19 nt, Artificial Sequence
  Description of Artificial Sequence: Synthetic oligonucleotide
uucaucaacgaguuagggu

SEQ ID NO: 591183 - RNA, 19 nt, Artificial Sequence
  Description of Artificial Sequence: Synthetic oligonucleotide
uagggauacaugcaggauc

SEQ ID NO: 591184 - RNA, 19 nt, Artificial Sequence
  Description of Artificial Sequence: Synthetic oligonucleotide
uuucggugcagauacuggc

SEQ ID NO: 591185 - RNA, 19 nt, Artificial Sequence
  Description of Artificial Sequence: Synthetic oligonucleotide
cacauaaggucuucuuucg

SEQ ID NO: 591186 - RNA, 19 nt, Artificial Sequence
  Description of Artificial Sequence: Synthetic oligonucleotide
uguucacucauguaauuuc

SEQ ID NO: 591187 - RNA, 19 nt, Artificial Sequence
  Description of Artificial Sequence: Synthetic oligonucleotide
acagcaaccccuucagggg

SEQ ID NO: 591188 - RNA, 19 nt, Artificial Sequence
  Description of Artificial Sequence: Synthetic oligonucleotide
acgggcauagcguagccgg

SEQ ID NO: 591189 - RNA, 19 nt, Artificial Sequence
  Description of Artificial Sequence: Synthetic oligonucleotide
gaaaaccuuggugggaugg

SEQ ID NO: 591190 - RNA, 19 nt, Artificial Sequence
  Description of Artificial Sequence: Synthetic oligonucleotide
caggauaaguuuugugugg

SEQ ID NO: 591191 - RNA, 19 nt, Artificial Sequence
  Description of Artificial Sequence: Synthetic oligonucleotide
uuacacagcaaccccuuca

SEQ ID NO: 591192 - RNA, 19 nt, Artificial Sequence
  Description of Artificial Sequence: Synthetic oligonucleotide
uggggcuugagaaguaaag

SEQ ID NO: 591193 - RNA, 19 nt, Artificial Sequence
  Description of Artificial Sequence: Synthetic oligonucleotide
uucaugcuccuaaauuugc

SEQ ID NO: 591194 - RNA, 19 nt, Artificial Sequence
  Description of Artificial Sequence: Synthetic oligonucleotide
ugaaugaccugauuucggu

SEQ ID NO: 591195 - RNA, 19 nt, Artificial Sequence
  Description of Artificial Sequence: Synthetic oligonucleotide
ugaggucucaaaagguggc

SEQ ID NO: 591196 - RNA, 19 nt, Artificial Sequence
  Description of Artificial Sequence: Synthetic oligonucleotide
gagcaauugaaaaccuugg

SEQ ID NO: 591197 - RNA, 19 nt, Artificial Sequence
  Description of Artificial Sequence: Synthetic oligonucleotide
ucaccgucauuguagagga

SEQ ID NO: 591198 - RNA, 19 nt, Artificial Sequence
  Description of Artificial Sequence: Synthetic oligonucleotide
cugggagcaauugaaaacc

SEQ ID NO: 591199 - RNA, 19 nt, Artificial Sequence
  Description of Artificial Sequence: Synthetic oligonucleotide
ugacguagauaguagcgug

SEQ ID NO: 591200 - RNA, 19 nt, Artificial Sequence
  Description of Artificial Sequence: Synthetic oligonucleotide
uuugguugccagcccaaag

SEQ ID NO: 591201 - RNA, 19 nt, Artificial Sequence
  Description of Artificial Sequence: Synthetic oligonucleotide
uuugcuacgcgaaccuggc

SEQ ID NO: 591202 - RNA, 19 nt, Artificial Sequence
  Description of Artificial Sequence: Synthetic oligonucleotide
aucggcuggugcucgagcc

SEQ ID NO: 591203 - RNA, 19 nt, Artificial Sequence
  Description of Artificial Sequence: Synthetic oligonucleotide
ggcaaauccuccuuuaccc

SEQ ID NO: 591204 - RNA, 19 nt, Artificial Sequence
  Description of Artificial Sequence: Synthetic oligonucleotide
gacuuaggcgguaugugcg

SEQ ID NO: 591205 - RNA, 19 nt, Artificial Sequence
  Description of Artificial Sequence: Synthetic oligonucleotide
ucuaccaugguacgggcau

SEQ ID NO: 591206 - RNA, 19 nt, Artificial Sequence
  Description of Artificial Sequence: Synthetic oligonucleotide
cauacagugggcugagggc

SEQ ID NO: 591207 - RNA, 19 nt, Artificial Sequence
  Description of Artificial Sequence: Synthetic oligonucleotide
gucaccgucauuguagagg

SEQ ID NO: 591208 - RNA, 19 nt, Artificial Sequence
  Description of Artificial Sequence: Synthetic oligonucleotide
ucuauguacuguaggcugu

SEQ ID NO: 591209 - RNA, 19 nt, Artificial Sequence
  Description of Artificial Sequence: Synthetic oligonucleotide
acguucuauguacuguagg

SEQ ID NO: 591210 - RNA, 19 nt, Artificial Sequence
  Description of Artificial Sequence: Synthetic oligonucleotide
gaacucgucauugagcaac

SEQ ID NO: 591211 - RNA, 19 nt, Artificial Sequence
  Description of Artificial Sequence: Synthetic oligonucleotide
gcaauugaaaaccuuggug

SEQ ID NO: 591212 - RNA, 19 nt, Artificial Sequence
  Description of Artificial Sequence: Synthetic oligonucleotide
uucuugauccggagguagg

SEQ ID NO: 591213 - RNA, 19 nt, Artificial Sequence
  Description of Artificial Sequence: Synthetic oligonucleotide
guucacucauguaauuucg

SEQ ID NO: 591214 - RNA, 19 nt, Artificial Sequence
  Description of Artificial Sequence: Synthetic oligonucleotide
augauacacccaauggacc

SEQ ID NO: 591215 - RNA, 19 nt, Artificial Sequence
  Description of Artificial Sequence: Synthetic oligonucleotide
agcguagccggcuagccag

SEQ ID NO: 591216 - RNA, 19 nt, Artificial Sequence
  Description of Artificial Sequence: Synthetic oligonucleotide
ucggucagcgcuuuccucc

SEQ ID NO: 591217 - RNA, 19 nt, Artificial Sequence
  Description of Artificial Sequence: Synthetic oligonucleotide
acguagauaguagcgugcc

SEQ ID NO: 591218 - RNA, 19 nt, Artificial Sequence
  Description of Artificial Sequence: Synthetic oligonucleotide
cuaaauuugcuacgcgaac

SEQ ID NO: 591219 - RNA, 19 nt, Artificial Sequence
  Description of Artificial Sequence: Synthetic oligonucleotide
caagguguacaugauacac

SEQ ID NO: 591220 - RNA, 19 nt, Artificial Sequence
  Description of Artificial Sequence: Synthetic oligonucleotide
cuccuuuacccagaaagcg

SEQ ID NO: 591221 - RNA, 19 nt, Artificial Sequence
  Description of Artificial Sequence: Synthetic oligonucleotide
gagucauugaagagcaccc

SEQ ID NO: 591222 - RNA, 19 nt, Artificial Sequence
  Description of Artificial Sequence: Synthetic oligonucleotide
aagacuuaggcgguaugug

SEQ ID NO: 591223 - RNA, 19 nt, Artificial Sequence
  Description of Artificial Sequence: Synthetic oligonucleotide
uuguacagucccauugcug

SEQ ID NO: 591224 - RNA, 19 nt, Artificial Sequence
  Description of Artificial Sequence: Synthetic oligonucleotide
aggaaccccagcuuucccg

SEQ ID NO: 591225 - RNA, 19 nt, Artificial Sequence
  Description of Artificial Sequence: Synthetic oligonucleotide
agcaauugaaaaccuuggu

SEQ ID NO: 591226 - RNA, 19 nt, Artificial Sequence
  Description of Artificial Sequence: Synthetic oligonucleotide
cagaagauagggauacaug

SEQ ID NO: 591227 - RNA, 19 nt, Artificial Sequence
  Description of Artificial Sequence: Synthetic oligonucleotide
aaagccguggaagccuacg

SEQ ID NO: 591228 - RNA, 19 nt, Artificial Sequence
  Description of Artificial Sequence: Synthetic oligonucleotide
agcaacucgugaauggugg

SEQ ID NO: 591229 - RNA, 19 nt, Artificial Sequence
  Description of Artificial Sequence: Synthetic oligonucleotide
ucucuuucgacagcggggc

SEQ ID NO: 591230 - RNA, 19 nt, Artificial Sequence
  Description of Artificial Sequence: Synthetic oligonucleotide
uugauccggagguaggucu

SEQ ID NO: 591231 - RNA, 19 nt, Artificial Sequence
  Description of Artificial Sequence: Synthetic oligonucleotide
augaggucucaaaaggugg

SEQ ID NO: 591232 - RNA, 19 nt, Artificial Sequence
  Description of Artificial Sequence: Synthetic oligonucleotide
agcaaguguucacucaugu

SEQ ID NO: 591233 - RNA, 19 nt, Artificial Sequence
  Description of Artificial Sequence: Synthetic oligonucleotide
ucuuucgacagcggggcgg

SEQ ID NO: 591234 - RNA, 19 nt, Artificial Sequence
  Description of Artificial Sequence: Synthetic oligonucleotide
guugagucauugaagagca

SEQ ID NO: 591235 - RNA, 19 nt, Artificial Sequence
  Description of Artificial Sequence: Synthetic oligonucleotide
ucaugcuccuaaauuugcu

SEQ ID NO: 591236 - RNA, 19 nt, Artificial Sequence
  Description of Artificial Sequence: Synthetic oligonucleotide
gacgggcagggauauaacc

SEQ ID NO: 591237 - RNA, 19 nt, Artificial Sequence
  Description of Artificial Sequence: Synthetic oligonucleotide
aagccuacgacguguuggu

SEQ ID NO: 591238 - RNA, 19 nt, Artificial Sequence
  Description of Artificial Sequence: Synthetic oligonucleotide
uuaggcaugaggucucaaa

SEQ ID NO: 591239 - RNA, 19 nt, Artificial Sequence
  Description of Artificial Sequence: Synthetic oligonucleotide
acauacuggcgccggcugc

SEQ ID NO: 591240 - RNA, 19 nt, Artificial Sequence
  Description of Artificial Sequence: Synthetic oligonucleotide
cucaaaagguggcuugccc

SEQ ID NO: 591241 - RNA, 19 nt, Artificial Sequence
  Description of Artificial Sequence: Synthetic oligonucleotide
acuucggcacgaucuugcc

SEQ ID NO: 591242 - RNA, 19 nt, Artificial Sequence
  Description of Artificial Sequence: Synthetic oligonucleotide
uuuacccagaaagcggccc

SEQ ID NO: 591243 - RNA, 19 nt, Artificial Sequence
  Description of Artificial Sequence: Synthetic oligonucleotide
ucuggauaagggaggcggc

SEQ ID NO: 591244 - RNA, 19 nt, Artificial Sequence
  Description of Artificial Sequence: Synthetic oligonucleotide
caccucaaaacuguguccc

SEQ ID NO: 591245 - RNA, 19 nt, Artificial Sequence
  Description of Artificial Sequence: Synthetic oligonucleotide
aagucacuaagguggcacu

SEQ ID NO: 591246 - RNA, 19 nt, Artificial Sequence
  Description of Artificial Sequence: Synthetic oligonucleotide
uguccgaauaguccaccca

SEQ ID NO: 591247 - RNA, 19 nt, Artificial Sequence
  Description of Artificial Sequence: Synthetic oligonucleotide
aggacuaucugacguagau

SEQ ID NO: 591248 - RNA, 19 nt, Artificial Sequence
  Description of Artificial Sequence: Synthetic oligonucleotide
gacguguuggugugcgagg

SEQ ID NO: 591249 - RNA, 19 nt, Artificial Sequence
  Description of Artificial Sequence: Synthetic oligonucleotide
aacuuacacagcaaccccu

SEQ ID NO: 591250 - RNA, 19 nt, Artificial Sequence
  Description of Artificial Sequence: Synthetic oligonucleotide
cagagcgcgagcuuagcag

SEQ ID NO: 591251 - RNA, 19 nt, Artificial Sequence
  Description of Artificial Sequence: Synthetic oligonucleotide
caucaacgaguuagggugg

SEQ ID NO: 591252 - RNA, 19 nt, Artificial Sequence
  Description of Artificial Sequence: Synthetic oligonucleotide
ggagcaauugaaaaccuug

SEQ ID NO: 591253 - RNA, 19 nt, Artificial Sequence
  Description of Artificial Sequence: Synthetic oligonucleotide
agauagggauacaugcagg

SEQ ID NO: 591254 - RNA, 19 nt, Artificial Sequence
  Description of Artificial Sequence: Synthetic oligonucleotide
acuaagaccucaggaaucu

SEQ ID NO: 591255 - RNA, 19 nt, Artificial Sequence
  Description of Artificial Sequence: Synthetic oligonucleotide
guagauaguagcgugccuc

SEQ ID NO: 591256 - RNA, 19 nt, Artificial Sequence
  Description of Artificial Sequence: Synthetic oligonucleotide
auagcguagccggcuagcc

SEQ ID NO: 591257 - RNA, 19 nt, Artificial Sequence
  Description of Artificial Sequence: Synthetic oligonucleotide
gugagguaagacucugugc

SEQ ID NO: 591258 - RNA, 19 nt, Artificial Sequence
  Description of Artificial Sequence: Synthetic oligonucleotide
agccguggaagccuacgac

SEQ ID NO: 591259 - RNA, 19 nt, Artificial Sequence
  Description of Artificial Sequence: Synthetic oligonucleotide
aucucuuucgacagcgggg

SEQ ID NO: 591260 - RNA, 19 nt, Artificial Sequence
  Description of Artificial Sequence: Synthetic oligonucleotide
gcauccgagaucucgaagc

SEQ ID NO: 591261 - RNA, 19 nt, Artificial Sequence
  Description of Artificial Sequence: Synthetic oligonucleotide
agacuaauaaaagggcagu

SEQ ID NO: 591262 - RNA, 19 nt, Artificial Sequence
  Description of Artificial Sequence: Synthetic oligonucleotide
uacgacguguuggugugcg

SEQ ID NO: 591263 - RNA, 19 nt, Artificial Sequence
  Description of Artificial Sequence: Synthetic oligonucleotide
agaaguuaauuuguacagu

SEQ ID NO: 591264 - RNA, 19 nt, Artificial Sequence
  Description of Artificial Sequence: Synthetic oligonucleotide
agcgcuuuccuccucuugu

SEQ ID NO: 591265 - RNA, 19 nt, Artificial Sequence
  Description of Artificial Sequence: Synthetic oligonucleotide
ucccgaggugugauguugg

SEQ ID NO: 591266 - RNA, 19 nt, Artificial Sequence
  Description of Artificial Sequence: Synthetic oligonucleotide
uacccaaguccauacuugu

SEQ ID NO: 591267 - RNA, 19 nt, Artificial Sequence
  Description of Artificial Sequence: Synthetic oligonucleotide
caucgauauaggucacugc

SEQ ID NO: 591268 - RNA, 19 nt, Artificial Sequence
  Description of Artificial Sequence: Synthetic oligonucleotide
ggugagguaagacucugug

SEQ ID NO: 591269 - RNA, 19 nt, Artificial Sequence
  Description of Artificial Sequence: Synthetic oligonucleotide
cuucaucaacgaguuaggg

SEQ ID NO: 591270 - RNA, 19 nt, Artificial Sequence
  Description of Artificial Sequence: Synthetic oligonucleotide
accuuuauugagaacugug

SEQ ID NO: 591271 - RNA, 19 nt, Artificial Sequence
  Description of Artificial Sequence: Synthetic oligonucleotide
uucgucucccgaaccacug

SEQ ID NO: 591272 - RNA, 19 nt, Artificial Sequence
  Description of Artificial Sequence: Synthetic oligonucleotide
ucgcucugagggcuuagag

SEQ ID NO: 591273 - RNA, 19 nt, Artificial Sequence
  Description of Artificial Sequence: Synthetic oligonucleotide
acguguuggugugcgaggc

SEQ ID NO: 591274 - RNA, 19 nt, Artificial Sequence
  Description of Artificial Sequence: Synthetic oligonucleotide
guccgaauaguccacccac

SEQ ID NO: 591275 - RNA, 19 nt, Artificial Sequence
  Description of Artificial Sequence: Synthetic oligonucleotide
auggaccacacauccaccu

SEQ ID NO: 591276 - RNA, 19 nt, Artificial Sequence
  Description of Artificial Sequence: Synthetic oligonucleotide
aaaccuuggugggauggug

SEQ ID NO: 591277 - RNA, 19 nt, Artificial Sequence
  Description of Artificial Sequence: Synthetic oligonucleotide
gacguagauaguagcgugc

SEQ ID NO: 591278 - RNA, 19 nt, Artificial Sequence
  Description of Artificial Sequence: Synthetic oligonucleotide
guguugagucauugaagag

SEQ ID NO: 591279 - RNA, 19 nt, Artificial Sequence
  Description of Artificial Sequence: Synthetic oligonucleotide
aaguguucacucauguaau

SEQ ID NO: 591280 - RNA, 19 nt, Artificial Sequence
  Description of Artificial Sequence: Synthetic oligonucleotide
acucgugaaugguggggcg

SEQ ID NO: 591281 - RNA, 19 nt, Artificial Sequence
  Description of Artificial Sequence: Synthetic oligonucleotide
agcaagucacuaagguggc

SEQ ID NO: 591282 - RNA, 19 nt, Artificial Sequence
  Description of Artificial Sequence: Synthetic oligonucleotide
aagacuucggcacgaucuu

SEQ ID NO: 591283 - RNA, 19 nt, Artificial Sequence
  Description of Artificial Sequence: Synthetic oligonucleotide
uuagcagcuugucuaccau

SEQ ID NO: 591284 - RNA, 19 nt, Artificial Sequence
  Description of Artificial Sequence: Synthetic oligonucleotide
ugggagcaauugaaaaccu

SEQ ID NO: 591285 - RNA, 19 nt, Artificial Sequence
  Description of Artificial Sequence: Synthetic oligonucleotide
uugugucugcauccgagau

SEQ ID NO: 591286 - RNA, 19 nt, Artificial Sequence
  Description of Artificial Sequence: Synthetic oligonucleotide
cuucauucgucucccgaac

SEQ ID NO: 591287 - RNA, 19 nt, Artificial Sequence
  Description of Artificial Sequence: Synthetic oligonucleotide
aaaaccuuggugggauggu

SEQ ID NO: 591288 - RNA, 19 nt, Artificial Sequence
  Description of Artificial Sequence: Synthetic oligonucleotide
cagggauauaaccagaagu

SEQ ID NO: 591289 - RNA, 19 nt, Artificial Sequence
  Description of Artificial Sequence: Synthetic oligonucleotide
ucgucucccgaaccacugg

SEQ ID NO: 591290 - RNA, 19 nt, Artificial Sequence
  Description of Artificial Sequence: Synthetic oligonucleotide
agaagacuuaggcgguaug

SEQ ID NO: 591291 - RNA, 19 nt, Artificial Sequence
  Description of Artificial Sequence: Synthetic oligonucleotide
uccgaauaguccacccacu

SEQ ID NO: 591292 - RNA, 19 nt, Artificial Sequence
  Description of Artificial Sequence: Synthetic oligonucleotide
cguucuauguacuguaggc

SEQ ID NO: 591293 - RNA, 19 nt, Artificial Sequence
  Description of Artificial Sequence: Synthetic oligonucleotide
ugucuaccaugguacgggc

SEQ ID NO: 591294 - RNA, 19 nt, Artificial Sequence
  Description of Artificial Sequence: Synthetic oligonucleotide
agucacuaagguggcacuc

SEQ ID NO: 591295 - RNA, 19 nt, Artificial Sequence
  Description of Artificial Sequence: Synthetic oligonucleotide
ccauacagugggcugaggg

SEQ ID NO: 591296 - RNA, 19 nt, Artificial Sequence
  Description of Artificial Sequence: Synthetic oligonucleotide
gaugaggcguguugaguca

SEQ ID NO: 591297 - RNA, 19 nt, Artificial Sequence
  Description of Artificial Sequence: Synthetic oligonucleotide
gauaagggaggcggccacg

SEQ ID NO: 591298 - RNA, 19 nt, Artificial Sequence
  Description of Artificial Sequence: Synthetic oligonucleotide
agaaaucuccauagacauc

SEQ ID NO: 591299 - RNA, 19 nt, Artificial Sequence
  Description of Artificial Sequence: Synthetic oligonucleotide
uugccugcgaacaccuccu

SEQ ID NO: 591300 - RNA, 19 nt, Artificial Sequence
  Description of Artificial Sequence: Synthetic oligonucleotide
ugggagcucacggugaggu

SEQ ID NO: 591301 - RNA, 19 nt, Artificial Sequence
  Description of Artificial Sequence: Synthetic oligonucleotide
guuaggagugccacauaag

SEQ ID NO: 591302 - RNA, 19 nt, Artificial Sequence
  Description of Artificial Sequence: Synthetic oligonucleotide
ucgugaaugguggggcggg

SEQ ID NO: 591303 - RNA, 19 nt, Artificial Sequence
  Description of Artificial Sequence: Synthetic oligonucleotide
caacgaguuagggugggag

SEQ ID NO: 591304 - RNA, 19 nt, Artificial Sequence
  Description of Artificial Sequence: Synthetic oligonucleotide
ucuugauccggagguaggu

SEQ ID NO: 591305 - RNA, 19 nt, Artificial Sequence
  Description of Artificial Sequence: Synthetic oligonucleotide
ggauugaugugcuugggaa

SEQ ID NO: 591306 - RNA, 19 nt, Artificial Sequence
  Description of Artificial Sequence: Synthetic oligonucleotide
cacguucuauguacuguag

SEQ ID NO: 591307 - RNA, 19 nt, Artificial Sequence
  Description of Artificial Sequence: Synthetic oligonucleotide
ugcgaacaccuccuuugug

SEQ ID NO: 591308 - RNA, 19 nt, Artificial Sequence
  Description of Artificial Sequence: Synthetic oligonucleotide
aggauaaguuuuguguggu

SEQ ID NO: 591309 - RNA, 19 nt, Artificial Sequence
  Description of Artificial Sequence: Synthetic oligonucleotide
ugcguggguccacuaagac

SEQ ID NO: 591310 - RNA, 19 nt, Artificial Sequence
  Description of Artificial Sequence: Synthetic oligonucleotide
gccaucacguucuauguac

SEQ ID NO: 591311 - RNA, 19 nt, Artificial Sequence
  Description of Artificial Sequence: Synthetic oligonucleotide
caacucgugaauggugggg

SEQ ID NO: 591312 - RNA, 19 nt, Artificial Sequence
  Description of Artificial Sequence: Synthetic oligonucleotide
cacgggauugaugugcuug

SEQ ID NO: 591313 - RNA, 19 nt, Artificial Sequence
  Description of Artificial Sequence: Synthetic oligonucleotide
cuaucugacguagauagua

SEQ ID NO: 591314 - RNA, 19 nt, Artificial Sequence
  Description of Artificial Sequence: Synthetic oligonucleotide
gccguggaagccuacgacg

SEQ ID NO: 591315 - RNA, 19 nt, Artificial Sequence
  Description of Artificial Sequence: Synthetic oligonucleotide
cucccgaaccacugguucc

SEQ ID NO: 591316 - RNA, 19 nt, Artificial Sequence
  Description of Artificial Sequence: Synthetic oligonucleotide
acgaucuugccugcgaaca

SEQ ID NO: 591317 - RNA, 19 nt, Artificial Sequence
  Description of Artificial Sequence: Synthetic oligonucleotide
guugcuggcagagcgcgag

SEQ ID NO: 591318 - RNA, 19 nt, Artificial Sequence
  Description of Artificial Sequence: Synthetic oligonucleotide
ggaugaggcguguugaguc

SEQ ID NO: 591319 - RNA, 19 nt, Artificial Sequence
  Description of Artificial Sequence: Synthetic oligonucleotide
acgaguuagggugggagcu

SEQ ID NO: 591320 - RNA, 19 nt, Artificial Sequence
  Description of Artificial Sequence: Synthetic oligonucleotide
cgaagcauuuggcaaaucc

SEQ ID NO: 591321 - RNA, 19 nt, Artificial Sequence
  Description of Artificial Sequence: Synthetic oligonucleotide
acgcgaaccuggccgggcc

SEQ ID NO: 591322 - RNA, 19 nt, Artificial Sequence
  Description of Artificial Sequence: Synthetic oligonucleotide
gaagcaucuucuggauaag

SEQ ID NO: 591323 - RNA, 19 nt, Artificial Sequence
  Description of Artificial Sequence: Synthetic oligonucleotide
ugguacgggcauagcguag

SEQ ID NO: 591324 - RNA, 19 nt, Artificial Sequence
  Description of Artificial Sequence: Synthetic oligonucleotide
ggucucaaaagguggcuug

SEQ ID NO: 591325 - RNA, 19 nt, Artificial Sequence
  Description of Artificial Sequence: Synthetic oligonucleotide
ugugcggaaccacguucgc

SEQ ID NO: 591326 - RNA, 19 nt, Artificial Sequence
  Description of Artificial Sequence: Synthetic oligonucleotide
cauacuggcgccggcugcg

SEQ ID NO: 591327 - RNA, 19 nt, Artificial Sequence
  Description of Artificial Sequence: Synthetic oligonucleotide
aucaacgaguuaggguggg

SEQ ID NO: 591328 - RNA, 19 nt, Artificial Sequence
  Description of Artificial Sequence: Synthetic oligonucleotide
aagagguugccuagcuuga

SEQ ID NO: 591329 - RNA, 19 nt, Artificial Sequence
  Description of Artificial Sequence: Synthetic oligonucleotide
aguguucacucauguaauu

SEQ ID NO: 591330 - RNA, 19 nt, Artificial Sequence
  Description of Artificial Sequence: Synthetic oligonucleotide
auauuccacuuugguugcc

SEQ ID NO: 591331 - RNA, 19 nt, Artificial Sequence
  Description of Artificial Sequence: Synthetic oligonucleotide
auacuucaggagcgugauc

SEQ ID NO: 591332 - RNA, 19 nt, Artificial Sequence
  Description of Artificial Sequence: Synthetic oligonucleotide
ugucaccgucauuguagag

SEQ ID NO: 591333 - RNA, 19 nt, Artificial Sequence
  Description of Artificial Sequence: Synthetic oligonucleotide
cuuguccgaauaguccacc

SEQ ID NO: 591334 - RNA, 19 nt, Artificial Sequence
  Description of Artificial Sequence: Synthetic oligonucleotide
uacgggcauagcguagccg

SEQ ID NO: 591335 - RNA, 19 nt, Artificial Sequence
  Description of Artificial Sequence: Synthetic oligonucleotide
aaaagccguggaagccuac

SEQ ID NO: 591336 - RNA, 19 nt, Artificial Sequence
  Description of Artificial Sequence: Synthetic oligonucleotide
gagacgggcagggauauaa

SEQ ID NO: 591337 - RNA, 19 nt, Artificial Sequence
  Description of Artificial Sequence: Synthetic oligonucleotide
cuugggaaugcuguauuca

SEQ ID NO: 591338 - RNA, 19 nt, Artificial Sequence
  Description of Artificial Sequence: Synthetic oligonucleotide
gagcaacucgugaauggug

SEQ ID NO: 591339 - RNA, 19 nt, Artificial Sequence
  Description of Artificial Sequence: Synthetic oligonucleotide
ugauccggagguaggucuc

SEQ ID NO: 591340 - RNA, 19 nt, Artificial Sequence
  Description of Artificial Sequence: Synthetic oligonucleotide
agauccucguucaggaaga

SEQ ID NO: 591341 - RNA, 19 nt, Artificial Sequence
  Description of Artificial Sequence: Synthetic oligonucleotide
uagcguagccggcuagcca

SEQ ID NO: 591342 - RNA, 19 nt, Artificial Sequence
  Description of Artificial Sequence: Synthetic oligonucleotide
ccugcgaacaccuccuuug

SEQ ID NO: 591343 - RNA, 19 nt, Artificial Sequence
  Description of Artificial Sequence: Synthetic oligonucleotide
caugguacgggcauagcgu

SEQ ID NO: 591344 - RNA, 19 nt, Artificial Sequence
  Description of Artificial Sequence: Synthetic oligonucleotide
gaagacuuaggcgguaugu

SEQ ID NO: 591345 - RNA, 19 nt, Artificial Sequence
  Description of Artificial Sequence: Synthetic oligonucleotide
uaggcgguaugugcggaag

SEQ ID NO: 591346 - RNA, 19 nt, Artificial Sequence
  Description of Artificial Sequence: Synthetic oligonucleotide
gaucggcuggugcucgagc

SEQ ID NO: 591347 - RNA, 19 nt, Artificial Sequence
  Description of Artificial Sequence: Synthetic oligonucleotide
acgggcagggauauaacca

SEQ ID NO: 591348 - RNA, 19 nt, Artificial Sequence
  Description of Artificial Sequence: Synthetic oligonucleotide
guaggucucuuuuaggcau

SEQ ID NO: 591349 - RNA, 19 nt, Artificial Sequence
  Description of Artificial Sequence: Synthetic oligonucleotide
gucucaaaagguggcuugc

SEQ ID NO: 591350 - RNA, 19 nt, Artificial Sequence
  Description of Artificial Sequence: Synthetic oligonucleotide
uacccagaaagcggccccg

SEQ ID NO: 591351 - RNA, 19 nt, Artificial Sequence
  Description of Artificial Sequence: Synthetic oligonucleotide
aacucgucauugagcaacu

SEQ ID NO: 591352 - RNA, 19 nt, Artificial Sequence
  Description of Artificial Sequence: Synthetic oligonucleotide
cucacggugagguaagacu

SEQ ID NO: 591353 - RNA, 19 nt, Artificial Sequence
  Description of Artificial Sequence: Synthetic oligonucleotide
cauagcguagccggcuagc

SEQ ID NO: 591354 - RNA, 19 nt, Artificial Sequence
  Description of Artificial Sequence: Synthetic oligonucleotide
cucgugaaugguggggcgg

SEQ ID NO: 591355 - RNA, 19 nt, Artificial Sequence
  Description of Artificial Sequence: Synthetic oligonucleotide
uuuuaggcaugaggucuca

SEQ ID NO: 591356 - RNA, 19 nt, Artificial Sequence
  Description of Artificial Sequence: Synthetic oligonucleotide
cacgaucuugccugcgaac

SEQ ID NO: 591357 - RNA, 19 nt, Artificial Sequence
  Description of Artificial Sequence: Synthetic oligonucleotide
cauccaccucaaaacugug

SEQ ID NO: 591358 - RNA, 19 nt, Artificial Sequence
  Description of Artificial Sequence: Synthetic oligonucleotide
ugauuucggugcagauacu

SEQ ID NO: 591359 - RNA, 19 nt, Artificial Sequence
  Description of Artificial Sequence: Synthetic oligonucleotide
uuaggcgguaugugcggaa

SEQ ID NO: 591360 - RNA, 19 nt, Artificial Sequence
  Description of Artificial Sequence: Synthetic oligonucleotide
uugagucauugaagagcac

SEQ ID NO: 591361 - RNA, 19 nt, Artificial Sequence
  Description of Artificial Sequence: Synthetic oligonucleotide
gacagcggggcggucacug

SEQ ID NO: 591362 - RNA, 19 nt, Artificial Sequence
  Description of Artificial Sequence: Synthetic oligonucleotide
gcuacgcgaaccuggccgg

SEQ ID NO: 591363 - RNA, 19 nt, Artificial Sequence
  Description of Artificial Sequence: Synthetic oligonucleotide
uugcuacgcgaaccuggcc

SEQ ID NO: 591364 - RNA, 19 nt, Artificial Sequence
  Description of Artificial Sequence: Synthetic oligonucleotide
cauucgucucccgaaccac

SEQ ID NO: 591365 - RNA, 19 nt, Artificial Sequence
  Description of Artificial Sequence: Synthetic oligonucleotide
cguguugagucauugaaga

SEQ ID NO: 591366 - RNA, 19 nt, Artificial Sequence
  Description of Artificial Sequence: Synthetic oligonucleotide
cacguucgcagguaaggca

SEQ ID NO: 591367 - RNA, 19 nt, Artificial Sequence
  Description of Artificial Sequence: Synthetic oligonucleotide
cacauacuggcgccggcug

SEQ ID NO: 591368 - RNA, 19 nt, Artificial Sequence
  Description of Artificial Sequence: Synthetic oligonucleotide
gcaacucgugaaugguggg

SEQ ID NO: 591369 - RNA, 19 nt, Artificial Sequence
  Description of Artificial Sequence: Synthetic oligonucleotide
ggauagaaaucuccauaga

SEQ ID NO: 591370 - RNA, 19 nt, Artificial Sequence
  Description of Artificial Sequence: Synthetic oligonucleotide
ccuaaauuugcuacgcgaa

SEQ ID NO: 591371 - RNA, 19 nt, Artificial Sequence
  Description of Artificial Sequence: Synthetic oligonucleotide
acacccaauggaccacaca

SEQ ID NO: 591372 - RNA, 19 nt, Artificial Sequence
  Description of Artificial Sequence: Synthetic oligonucleotide
cacccaauggaccacacau

SEQ ID NO: 591373 - RNA, 19 nt, Artificial Sequence
  Description of Artificial Sequence: Synthetic oligonucleotide
ucgacagcggggcggucac

SEQ ID NO: 591374 - RNA, 19 nt, Artificial Sequence
  Description of Artificial Sequence: Synthetic oligonucleotide
cuauguacuguaggcuguc

SEQ ID NO: 591375 - RNA, 19 nt, Artificial Sequence
  Description of Artificial Sequence: Synthetic oligonucleotide
cagaaagcggccccgcaca

SEQ ID NO: 591376 - RNA, 19 nt, Artificial Sequence
  Description of Artificial Sequence: Synthetic oligonucleotide
ugaccugauuucggugcag

SEQ ID NO: 591377 - RNA, 19 nt, Artificial Sequence
  Description of Artificial Sequence: Synthetic oligonucleotide
guucuauguacuguaggcu

SEQ ID NO: 591378 - RNA, 19 nt, Artificial Sequence
  Description of Artificial Sequence: Synthetic oligonucleotide
gagcucacggugagguaag

SEQ ID NO: 591379 - RNA, 19 nt, Artificial Sequence
  Description of Artificial Sequence: Synthetic oligonucleotide
cacuguugucacacagcug

SEQ ID NO: 591380 - RNA, 19 nt, Artificial Sequence
  Description of Artificial Sequence: Synthetic oligonucleotide
agagguugccuagcuugag

SEQ ID NO: 591381 - RNA, 19 nt, Artificial Sequence
  Description of Artificial Sequence: Synthetic oligonucleotide
agacgggcagggauauaac

SEQ ID NO: 591382 - RNA, 19 nt, Artificial Sequence
  Description of Artificial Sequence: Synthetic oligonucleotide
ucccgaaccacugguuccu

SEQ ID NO: 591383 - RNA, 19 nt, Artificial Sequence
  Description of Artificial Sequence: Synthetic oligonucleotide
aggaugaggcguguugagu

SEQ ID NO: 591384 - RNA, 19 nt, Artificial Sequence
  Description of Artificial Sequence: Synthetic oligonucleotide
cagauacuggcagcccagg

SEQ ID NO: 591385 - RNA, 19 nt, Artificial Sequence
  Description of Artificial Sequence: Synthetic oligonucleotide
acagcggggcggucacugg

SEQ ID NO: 591386 - RNA, 19 nt, Artificial Sequence
  Description of Artificial Sequence: Synthetic oligonucleotide
caccgguagcugcaucucc

SEQ ID NO: 591387 - RNA, 19 nt, Artificial Sequence
  Description of Artificial Sequence: Synthetic oligonucleotide
guaugugcggaagucccuc

SEQ ID NO: 591388 - RNA, 19 nt, Artificial Sequence
  Description of Artificial Sequence: Synthetic oligonucleotide
cuugauccggagguagguc

SEQ ID NO: 591389 - RNA, 19 nt, Artificial Sequence
  Description of Artificial Sequence: Synthetic oligonucleotide
gguacgggcauagcguagc

SEQ ID NO: 591390 - RNA, 19 nt, Artificial Sequence
  Description of Artificial Sequence: Synthetic oligonucleotide
ccuacgacguguuggugug

SEQ ID NO: 591391 - RNA, 19 nt, Artificial Sequence
  Description of Artificial Sequence: Synthetic oligonucleotide
guacgggcauagcguagcc

SEQ ID NO: 591392 - RNA, 19 nt, Artificial Sequence
  Description of Artificial Sequence: Synthetic oligonucleotide
cucuuucgacagcggggcg

SEQ ID NO: 591393 - RNA, 19 nt, Artificial Sequence
  Description of Artificial Sequence: Synthetic oligonucleotide
guucgcagguaaggcagcc

SEQ ID NO: 591394 - RNA, 19 nt, Artificial Sequence
  Description of Artificial Sequence: Synthetic oligonucleotide
acggugagguaagacucug

SEQ ID NO: 591395 - RNA, 19 nt, Artificial Sequence
  Description of Artificial Sequence: Synthetic oligonucleotide
uccauacagugggcugagg

SEQ ID NO: 591396 - RNA, 19 nt, Artificial Sequence
  Description of Artificial Sequence: Synthetic oligonucleotide
ucaacgaguuaggguggga

SEQ ID NO: 591397 - RNA, 19 nt, Artificial Sequence
  Description of Artificial Sequence: Synthetic oligonucleotide
gcguguugagucauugaag

SEQ ID NO: 591398 - RNA, 19 nt, Artificial Sequence
  Description of Artificial Sequence: Synthetic oligonucleotide
gaccugauuucggugcaga

SEQ ID NO: 591399 - RNA, 19 nt, Artificial Sequence
  Description of Artificial Sequence: Synthetic oligonucleotide
gggauugaugugcuuggga

SEQ ID NO: 591400 - RNA, 19 nt, Artificial Sequence
  Description of Artificial Sequence: Synthetic oligonucleotide
ugccaucagagggcacagg

SEQ ID NO: 591401 - RNA, 19 nt, Artificial Sequence
  Description of Artificial Sequence: Synthetic oligonucleotide
uuuaggcaugaggucucaa

SEQ ID NO: 591402 - RNA, 19 nt, Artificial Sequence
  Description of Artificial Sequence: Synthetic oligonucleotide
agacuucggcacgaucuug

SEQ ID NO: 591403 - RNA, 19 nt, Artificial Sequence
  Description of Artificial Sequence: Synthetic oligonucleotide
auucgucucccgaaccacu

SEQ ID NO: 591404 - RNA, 19 nt, Artificial Sequence
  Description of Artificial Sequence: Synthetic oligonucleotide
agaaagcggccccgcacau

SEQ ID NO: 591405 - RNA, 19 nt, Artificial Sequence
  Description of Artificial Sequence: Synthetic oligonucleotide
ucaggagcgugaucuucuu

SEQ ID NO: 591406 - RNA, 19 nt, Artificial Sequence
  Description of Artificial Sequence: Synthetic oligonucleotide
ggauaaguuuugugugguc

SEQ ID NO: 591407 - RNA, 19 nt, Artificial Sequence
  Description of Artificial Sequence: Synthetic oligonucleotide
cuuuucccggggacgguca

SEQ ID NO: 591408 - RNA, 19 nt, Artificial Sequence
  Description of Artificial Sequence: Synthetic oligonucleotide
ugcccacuagcaaggugua

SEQ ID NO: 591409 - RNA, 19 nt, Artificial Sequence
  Description of Artificial Sequence: Synthetic oligonucleotide
aggcgguaugugcggaagu

SEQ ID NO: 591410 - RNA, 19 nt, Artificial Sequence
  Description of Artificial Sequence: Synthetic oligonucleotide
ggauaagggaggcggccac

SEQ ID NO: 591411 - RNA, 19 nt, Artificial Sequence
  Description of Artificial Sequence: Synthetic oligonucleotide
ggggcuugagaaguaaaga

SEQ ID NO: 591412 - RNA, 19 nt, Artificial Sequence
  Description of Artificial Sequence: Synthetic oligonucleotide
ggauacaugcaggauccuc

SEQ ID NO: 591413 - RNA, 19 nt, Artificial Sequence
  Description of Artificial Sequence: Synthetic oligonucleotide
cgguaugugcggaaguccc

SEQ ID NO: 591414 - RNA, 19 nt, Artificial Sequence
  Description of Artificial Sequence: Synthetic oligonucleotide
uacgcgaaccuggccgggc

SEQ ID NO: 591415 - RNA, 19 nt, Artificial Sequence
  Description of Artificial Sequence: Synthetic oligonucleotide
ucuugccugcgaacaccuc

SEQ ID NO: 591416 - RNA, 19 nt, Artificial Sequence
  Description of Artificial Sequence: Synthetic oligonucleotide
ggcuguaacccacacccaa

SEQ ID NO: 591417 - RNA, 19 nt, Artificial Sequence
  Description of Artificial Sequence: Synthetic oligonucleotide
accuucccgaggugugaug

SEQ ID NO: 591418 - RNA, 19 nt, Artificial Sequence
  Description of Artificial Sequence: Synthetic oligonucleotide
gcgaacaccuccuuugugu

SEQ ID NO: 591419 - RNA, 19 nt, Artificial Sequence
  Description of Artificial Sequence: Synthetic oligonucleotide
gggagcuauguaguuagga

SEQ ID NO: 591420 - RNA, 19 nt, Artificial Sequence
  Description of Artificial Sequence: Synthetic oligonucleotide
cugacguagauaguagcgu

SEQ ID NO: 591421 - RNA, 19 nt, Artificial Sequence
  Description of Artificial Sequence: Synthetic oligonucleotide
ggagcucacggugagguaa

SEQ ID NO: 591422 - RNA, 19 nt, Artificial Sequence
  Description of Artificial Sequence: Synthetic oligonucleotide
ugaggcguguugagucauu

SEQ ID NO: 591423 - RNA, 19 nt, Artificial Sequence
  Description of Artificial Sequence: Synthetic oligonucleotide
cagcccucgcucugagggc

SEQ ID NO: 591424 - RNA, 19 nt, Artificial Sequence
  Description of Artificial Sequence: Synthetic oligonucleotide
cuaagaccucaggaaucuc

SEQ ID NO: 591425 - RNA, 19 nt, Artificial Sequence
  Description of Artificial Sequence: Synthetic oligonucleotide
ccagaaagcggccccgcac

SEQ ID NO: 591426 - RNA, 19 nt, Artificial Sequence
  Description of Artificial Sequence: Synthetic oligonucleotide
gcugcgguggauagaaauc

SEQ ID NO: 591427 - RNA, 19 nt, Artificial Sequence
  Description of Artificial Sequence: Synthetic oligonucleotide
ucugugccaucacguucua

SEQ ID NO: 591428 - RNA, 19 nt, Artificial Sequence
  Description of Artificial Sequence: Synthetic oligonucleotide
agcccucgcucugagggcu

SEQ ID NO: 591429 - RNA, 19 nt, Artificial Sequence
  Description of Artificial Sequence: Synthetic oligonucleotide
ccucuugccgcaccagccc

SEQ ID NO: 591430 - RNA, 19 nt, Artificial Sequence
  Description of Artificial Sequence: Synthetic oligonucleotide
cugcgguggauagaaaucu

SEQ ID NO: 591431 - RNA, 19 nt, Artificial Sequence
  Description of Artificial Sequence: Synthetic oligonucleotide
agagaccuccugcgacaga

SEQ ID NO: 591432 - RNA, 19 nt, Artificial Sequence
  Description of Artificial Sequence: Synthetic oligonucleotide
guagccggcuagccaguuc

SEQ ID NO: 591433 - RNA, 19 nt, Artificial Sequence
  Description of Artificial Sequence: Synthetic oligonucleotide
ggaagccuacgacguguug

SEQ ID NO: 591434 - RNA, 19 nt, Artificial Sequence
  Description of Artificial Sequence: Synthetic oligonucleotide
gcggaaccacguucgcagg

SEQ ID NO: 591435 - RNA, 19 nt, Artificial Sequence
  Description of Artificial Sequence: Synthetic oligonucleotide
cccacuagcaagguguaca

SEQ ID NO: 591436 - RNA, 19 nt, Artificial Sequence
  Description of Artificial Sequence: Synthetic oligonucleotide
guggaagccuacgacgugu

SEQ ID NO: 591437 - RNA, 19 nt, Artificial Sequence
  Description of Artificial Sequence: Synthetic oligonucleotide
cuagcaagguguacaugau

SEQ ID NO: 591438 - RNA, 19 nt, Artificial Sequence
  Description of Artificial Sequence: Synthetic oligonucleotide
gcgguaugugcggaagucc

SEQ ID NO: 591439 - RNA, 19 nt, Artificial Sequence
  Description of Artificial Sequence: Synthetic oligonucleotide
augaggcguguugagucau

SEQ ID NO: 591440 - RNA, 19 nt, Artificial Sequence
  Description of Artificial Sequence: Synthetic oligonucleotide
caggacuaucugacguaga

SEQ ID NO: 591441 - RNA, 19 nt, Artificial Sequence
  Description of Artificial Sequence: Synthetic oligonucleotide
cuuaggcgguaugugcgga

SEQ ID NO: 591442 - RNA, 19 nt, Artificial Sequence
  Description of Artificial Sequence: Synthetic oligonucleotide
gggcacaggauaaguuuug

SEQ ID NO: 591443 - RNA, 19 nt, Artificial Sequence
  Description of Artificial Sequence: Synthetic oligonucleotide
cuacgcgaaccuggccggg

SEQ ID NO: 591444 - RNA, 19 nt, Artificial Sequence
  Description of Artificial Sequence: Synthetic oligonucleotide
ccggcuagccaguuccuug

SEQ ID NO: 591445 - RNA, 19 nt, Artificial Sequence
  Description of Artificial Sequence: Synthetic oligonucleotide
ggcacgaucuugccugcga

SEQ ID NO: 591446 - RNA, 19 nt, Artificial Sequence
  Description of Artificial Sequence: Synthetic oligonucleotide
auccgagaucucgaagcau

SEQ ID NO: 591447 - RNA, 19 nt, Artificial Sequence
  Description of Artificial Sequence: Synthetic oligonucleotide
acgacguguuggugugcga

SEQ ID NO: 591448 - RNA, 19 nt, Artificial Sequence
  Description of Artificial Sequence: Synthetic oligonucleotide
cuacgacguguuggugugc

SEQ ID NO: 591449 - RNA, 19 nt, Artificial Sequence
  Description of Artificial Sequence: Synthetic oligonucleotide
guguucacucauguaauuu

SEQ ID NO: 591450 - RNA, 19 nt, Artificial Sequence
  Description of Artificial Sequence: Synthetic oligonucleotide
ccacguucgcagguaaggc

SEQ ID NO: 591451 - RNA, 19 nt, Artificial Sequence
  Description of Artificial Sequence: Synthetic oligonucleotide
gucuaccaugguacgggca

SEQ ID NO: 591452 - RNA, 19 nt, Artificial Sequence
  Description of Artificial Sequence: Synthetic oligonucleotide
caguggggucugucugaag

SEQ ID NO: 591453 - RNA, 19 nt, Artificial Sequence
  Description of Artificial Sequence: Synthetic oligonucleotide
gcagagcgcgagcuuagca

SEQ ID NO: 591454 - RNA, 19 nt, Artificial Sequence
  Description of Artificial Sequence: Synthetic oligonucleotide
ucgaagcauuuggcaaauc

SEQ ID NO: 591455 - RNA, 19 nt, Artificial Sequence
  Description of Artificial Sequence: Synthetic oligonucleotide
cugcauccgagaucucgaa

SEQ ID NO: 591456 - RNA, 19 nt, Artificial Sequence
  Description of Artificial Sequence: Synthetic oligonucleotide
gccuacgacguguuggugu

SEQ ID NO: 591457 - RNA, 19 nt, Artificial Sequence
  Description of Artificial Sequence: Synthetic oligonucleotide
gcuuagcagcuugucuacc

SEQ ID NO: 591458 - RNA, 19 nt, Artificial Sequence
  Description of Artificial Sequence: Synthetic oligonucleotide
ggcacugcgugugcggaac

SEQ ID NO: 591459 - RNA, 19 nt, Artificial Sequence
  Description of Artificial Sequence: Synthetic oligonucleotide
ggaggcggccacgggauug

SEQ ID NO: 591460 - RNA, 19 nt, Artificial Sequence
  Description of Artificial Sequence: Synthetic oligonucleotide
ccgaaccacugguuccucc

SEQ ID NO: 591461 - RNA, 19 nt, Artificial Sequence
  Description of Artificial Sequence: Synthetic oligonucleotide
gaaccuggccgggccggug

SEQ ID NO: 591462 - RNA, 19 nt, Artificial Sequence
  Description of Artificial Sequence: Synthetic oligonucleotide
ccgaggugugauguuggcc

SEQ ID NO: 591463 - RNA, 19 nt, Artificial Sequence
  Description of Artificial Sequence: Synthetic oligonucleotide
gugcggaaccacguucgca

SEQ ID NO: 591464 - RNA, 19 nt, Artificial Sequence
  Description of Artificial Sequence: Synthetic oligonucleotide
agccuacgacguguuggug

SEQ ID NO: 591465 - RNA, 19 nt, Artificial Sequence
  Description of Artificial Sequence: Synthetic oligonucleotide
cuuugguugccagcccaaa

SEQ ID NO: 591466 - RNA, 19 nt, Artificial Sequence
  Description of Artificial Sequence: Synthetic oligonucleotide
gcgcgagcuuagcagcuug

SEQ ID NO: 591467 - RNA, 19 nt, Artificial Sequence
  Description of Artificial Sequence: Synthetic oligonucleotide
ugccugcgaacaccuccuu

SEQ ID NO: 591468 - RNA, 19 nt, Artificial Sequence
  Description of Artificial Sequence: Synthetic oligonucleotide
cccgaggugugauguuggc

SEQ ID NO: 591469 - RNA, 19 nt, Artificial Sequence
  Description of Artificial Sequence: Synthetic oligonucleotide
guggggcuugagaaguaaa

SEQ ID NO: 591470 - RNA, 19 nt, Artificial Sequence
  Description of Artificial Sequence: Synthetic oligonucleotide
cuucggcacgaucuugccu

SEQ ID NO: 591471 - RNA, 19 nt, Artificial Sequence
  Description of Artificial Sequence: Synthetic oligonucleotide
gcccaggacuaucugacgu

SEQ ID NO: 591472 - RNA, 19 nt, Artificial Sequence
  Description of Artificial Sequence: Synthetic oligonucleotide
ggacuaucugacguagaua

SEQ ID NO: 591473 - RNA, 19 nt, Artificial Sequence
  Description of Artificial Sequence: Synthetic oligonucleotide
gcucacggugagguaagac

SEQ ID NO: 591474 - RNA, 19 nt, Artificial Sequence
  Description of Artificial Sequence: Synthetic oligonucleotide
ccccgcacauacuggcgcc

SEQ ID NO: 591475 - RNA, 19 nt, Artificial Sequence
  Description of Artificial Sequence: Synthetic oligonucleotide
gcacgaucuugccugcgaa

SEQ ID NO: 591476 - RNA, 19 nt, Artificial Sequence
  Description of Artificial Sequence: Synthetic oligonucleotide
agcucacggugagguaaga

SEQ ID NO: 591477 - RNA, 19 nt, Artificial Sequence
  Description of Artificial Sequence: Synthetic oligonucleotide
cugcgaacaccuccuuugu

SEQ ID NO: 591478 - RNA, 19 nt, Artificial Sequence
  Description of Artificial Sequence: Synthetic oligonucleotide
cuuucgacagcggggcggu

SEQ ID NO: 591479 - RNA, 19 nt, Artificial Sequence
  Description of Artificial Sequence: Synthetic oligonucleotide
ggaaccacguucgcaggua

SEQ ID NO: 591480 - RNA, 19 nt, Artificial Sequence
  Description of Artificial Sequence: Synthetic oligonucleotide
ggcugcguggguccacuaa

SEQ ID NO: 591481 - RNA, 19 nt, Artificial Sequence
  Description of Artificial Sequence: Synthetic oligonucleotide
agcgcgagcuuagcagcuu

SEQ ID NO: 591482 - RNA, 19 nt, Artificial Sequence
  Description of Artificial Sequence: Synthetic oligonucleotide
ccagaagauagggauacau

SEQ ID NO: 591483 - RNA, 19 nt, Artificial Sequence
  Description of Artificial Sequence: Synthetic oligonucleotide
cucgaagcauuuggcaaau

SEQ ID NO: 591484 - RNA, 19 nt, Artificial Sequence
  Description of Artificial Sequence: Synthetic oligonucleotide
ggcagagcgcgagcuuagc

SEQ ID NO: 591485 - RNA, 19 nt, Artificial Sequence
  Description of Artificial Sequence: Synthetic oligonucleotide
gagcgcgagcuuagcagcu

SEQ ID NO: 591486 - RNA, 19 nt, Artificial Sequence
  Description of Artificial Sequence: Synthetic oligonucleotide
ggcacaggauaaguuuugu

SEQ ID NO: 591487 - RNA, 19 nt, Artificial Sequence
  Description of Artificial Sequence: Synthetic oligonucleotide
cacuaagguggcacucaau

SEQ ID NO: 591488 - RNA, 19 nt, Artificial Sequence
  Description of Artificial Sequence: Synthetic oligonucleotide
cagaagacuuaggcgguau

SEQ ID NO: 591489 - RNA, 19 nt, Artificial Sequence
  Description of Artificial Sequence: Synthetic oligonucleotide
ccguggaagccuacgacgu

SEQ ID NO: 591490 - RNA, 19 nt, Artificial Sequence
  Description of Artificial Sequence: Synthetic oligonucleotide
uuucgacagcggggcgguc

SEQ ID NO: 591491 - RNA, 19 nt, Artificial Sequence
  Description of Artificial Sequence: Synthetic oligonucleotide
cgggagcuauguaguuagg

SEQ ID NO: 591492 - RNA, 19 nt, Artificial Sequence
  Description of Artificial Sequence: Synthetic oligonucleotide
ggggagacgggcagggaua

SEQ ID NO: 591493 - RNA, 19 nt, Artificial Sequence
  Description of Artificial Sequence: Synthetic oligonucleotide
cgggcauagcguagccggc

SEQ ID NO: 591494 - RNA, 19 nt, Artificial Sequence
  Description of Artificial Sequence: Synthetic oligonucleotide
agccggcuagccaguuccu

SEQ ID NO: 591495 - RNA, 19 nt, Artificial Sequence
  Description of Artificial Sequence: Synthetic oligonucleotide
gccuaagaggaggccuuca

SEQ ID NO: 591496 - RNA, 19 nt, Artificial Sequence
  Description of Artificial Sequence: Synthetic oligonucleotide
gcaccgguagcugcaucuc

SEQ ID NO: 591497 - RNA, 19 nt, Artificial Sequence
  Description of Artificial Sequence: Synthetic oligonucleotide
guagaggaugaggcguguu

SEQ ID NO: 591498 - RNA, 19 nt, Artificial Sequence
  Description of Artificial Sequence: Synthetic oligonucleotide
gggagcaauugaaaaccuu

SEQ ID NO: 591499 - RNA, 19 nt, Artificial Sequence
  Description of Artificial Sequence: Synthetic oligonucleotide
ccuucccgaggugugaugu

SEQ ID NO: 591500 - RNA, 19 nt, Artificial Sequence
  Description of Artificial Sequence: Synthetic oligonucleotide
cuucccgaggugugauguu

SEQ ID NO: 591501 - RNA, 19 nt, Artificial Sequence
  Description of Artificial Sequence: Synthetic oligonucleotide
cgaguuagggugggagcuc

SEQ ID NO: 591502 - RNA, 19 nt, Artificial Sequence
  Description of Artificial Sequence: Synthetic oligonucleotide
gguugcuggcagagcgcga

SEQ ID NO: 591503 - RNA, 19 nt, Artificial Sequence
  Description of Artificial Sequence: Synthetic oligonucleotide
gggcaccgguagcugcauc

SEQ ID NO: 591504 - RNA, 19 nt, Artificial Sequence
  Description of Artificial Sequence: Synthetic oligonucleotide
gggagacgggcagggauau

SEQ ID NO: 591505 - RNA, 19 nt, Artificial Sequence
  Description of Artificial Sequence: Synthetic oligonucleotide
caccuucccgaggugugau

SEQ ID NO: 591506 - RNA, 19 nt, Artificial Sequence
  Description of Artificial Sequence: Synthetic oligonucleotide
aggcggccacgggauugau

SEQ ID NO: 591507 - RNA, 19 nt, Artificial Sequence
  Description of Artificial Sequence: Synthetic oligonucleotide
cguagauaguagcgugccu

SEQ ID NO: 591508 - RNA, 19 nt, Artificial Sequence
  Description of Artificial Sequence: Synthetic oligonucleotide
gccugcgaacaccuccuuu

SEQ ID NO: 591509 - RNA, 19 nt, Artificial Sequence
  Description of Artificial Sequence: Synthetic oligonucleotide
ccucaaaacugugucccuu

SEQ ID NO: 591510 - RNA, 19 nt, Artificial Sequence
  Description of Artificial Sequence: Synthetic oligonucleotide
caccgucauuguagaggau

SEQ ID NO: 591511 - RNA, 19 nt, Artificial Sequence
  Description of Artificial Sequence: Synthetic oligonucleotide
cggcacgaucuugccugcg

SEQ ID NO: 591512 - RNA, 19 nt, Artificial Sequence
  Description of Artificial Sequence: Synthetic oligonucleotide
gcgugugcggaaccacguu

SEQ ID NO: 591513 - RNA, 19 nt, Artificial Sequence
  Description of Artificial Sequence: Synthetic oligonucleotide
gggcagucccaaguucaau

SEQ ID NO: 591514 - RNA, 19 nt, Artificial Sequence
  Description of Artificial Sequence: Synthetic oligonucleotide
gggcucggucagcgcuuuc

SEQ ID NO: 591515 - RNA, 19 nt, Artificial Sequence
  Description of Artificial Sequence: Synthetic oligonucleotide
ccggggacggucaggcaau

SEQ ID NO: 591516 - RNA, 19 nt, Artificial Sequence
  Description of Artificial Sequence: Synthetic oligonucleotide
cggaaccacguucgcaggu

SEQ ID NO: 591517 - RNA, 19 nt, Artificial Sequence
  Description of Artificial Sequence: Synthetic oligonucleotide
ggagacgggcagggauaua

SEQ ID NO: 591518 - RNA, 19 nt, Artificial Sequence
  Description of Artificial Sequence: Synthetic oligonucleotide
cguguuggugugcgaggcu

SEQ ID NO: 591519 - RNA, 19 nt, Artificial Sequence
  Description of Artificial Sequence: Synthetic oligonucleotide
cgcgagcuuagcagcuugu

SEQ ID NO: 591520 - RNA, 19 nt, Artificial Sequence
  Description of Artificial Sequence: Synthetic oligonucleotide
gcguagccggcuagccagu

SEQ ID NO: 591521 - RNA, 19 nt, Artificial Sequence
  Description of Artificial Sequence: Synthetic oligonucleotide
gccggcuagccaguuccuu

SEQ ID NO: 591522 - RNA, 19 nt, Artificial Sequence
  Description of Artificial Sequence: Synthetic oligonucleotide
gggaggcggccacgggauu

SEQ ID NO: 591523 - RNA, 19 nt, Artificial Sequence
  Description of Artificial Sequence: Synthetic oligonucleotide
ccacgggauugaugugcuu

SEQ ID NO: 591524 - RNA, 19 nt, Artificial Sequence
  Description of Artificial Sequence: Synthetic oligonucleotide
gcccucgcucugagggcuu

SEQ ID NO: 591525 - RNA, 19 nt, Artificial Sequence
  Description of Artificial Sequence: Synthetic oligonucleotide
cgaaccuggccgggccggu

SEQ ID NO: 591526 - RNA, 19 nt, Artificial Sequence
  Description of Artificial Sequence: Synthetic oligonucleotide
cguagccggcuagccaguu

SEQ ID NO: 591527 - RNA, 19 nt, Artificial Sequence
  Description of Artificial Sequence: Synthetic oligonucleotide
cgacagcggggcggucacu

SEQ ID NO: 591528 - RNA, 19 nt, Artificial Sequence
  Description of Artificial Sequence: Synthetic oligonucleotide
cgggcucggucagcgcuuu

SEQ ID NO: 591529 - RNA, 19 nt, Artificial Sequence
  Description of Artificial Sequence: Synthetic oligonucleotide
auuacuuccaguaagaugc

SEQ ID NO: 591530 - RNA, 19 nt, Artificial Sequence
  Description of Artificial Sequence: Synthetic oligonucleotide
ucuagagugaacuucauga

SEQ ID NO: 591531 - RNA, 19 nt, Artificial Sequence
  Description of Artificial Sequence: Synthetic oligonucleotide
aauugacugcauucuaugc

SEQ ID NO: 591532 - RNA, 19 nt, Artificial Sequence
  Description of Artificial Sequence: Synthetic oligonucleotide
ugauuaaaugccgagacgg

SEQ ID NO: 591533 - RNA, 19 nt, Artificial Sequence
  Description of Artificial Sequence: Synthetic oligonucleotide
aauuguggcaaacucuuuc

SEQ ID NO: 591534 - RNA, 19 nt, Artificial Sequence
  Description of Artificial Sequence: Synthetic oligonucleotide
auaggaagagugcuggucc

SEQ ID NO: 591535 - RNA, 19 nt, Artificial Sequence
  Description of Artificial Sequence: Synthetic oligonucleotide
auauucagggucuuguugg

SEQ ID NO: 591536 - RNA, 19 nt, Artificial Sequence
  Description of Artificial Sequence: Synthetic oligonucleotide
uuuauuugugauaacccca

SEQ ID NO: 591537 - RNA, 19 nt, Artificial Sequence
  Description of Artificial Sequence: Synthetic oligonucleotide
uuugugauaaccccaaauc

SEQ ID NO: 591538 - RNA, 19 nt, Artificial Sequence
  Description of Artificial Sequence: Synthetic oligonucleotide
uuuuguguaauagagcagc

SEQ ID NO: 591539 - RNA, 19 nt, Artificial Sequence
  Description of Artificial Sequence: Synthetic oligonucleotide
aguaagaugccuuuucaag

SEQ ID NO: 591540 - RNA, 19 nt, Artificial Sequence
  Description of Artificial Sequence: Synthetic oligonucleotide
ucuauguaaauacacacuu

SEQ ID NO: 591541 - RNA, 19 nt, Artificial Sequence
  Description of Artificial Sequence: Synthetic oligonucleotide
aguguaguagcugaaaggg

SEQ ID NO: 591542 - RNA, 19 nt, Artificial Sequence
  Description of Artificial Sequence: Synthetic oligonucleotide
aauguaccaguuuucaccu

SEQ ID NO: 591543 - RNA, 19 nt, Artificial Sequence
  Description of Artificial Sequence: Synthetic oligonucleotide
aaauugacugcauucuaug

SEQ ID NO: 591544 - RNA, 19 nt, Artificial Sequence
  Description of Artificial Sequence: Synthetic oligonucleotide
aaggagacgcuccaccacc

SEQ ID NO: 591545 - RNA, 19 nt, Artificial Sequence
  Description of Artificial Sequence: Synthetic oligonucleotide
aaggauaccaguuucgcaa

SEQ ID NO: 591546 - RNA, 19 nt, Artificial Sequence
  Description of Artificial Sequence: Synthetic oligonucleotide
aaucguauuguuccuaggu

SEQ ID NO: 591547 - RNA, 19 nt, Artificial Sequence
  Description of Artificial Sequence: Synthetic oligonucleotide
aaagugguaccuguucucc

SEQ ID NO: 591548 - RNA, 19 nt, Artificial Sequence
  Description of Artificial Sequence: Synthetic oligonucleotide
guuauuguacuccaaggcc

SEQ ID NO: 591549 - RNA, 19 nt, Artificial Sequence
  Description of Artificial Sequence: Synthetic oligonucleotide
ugucuauguaaauacacac

SEQ ID NO: 591550 - RNA, 19 nt, Artificial Sequence
  Description of Artificial Sequence: Synthetic oligonucleotide
cauuuuguguaauagagca

SEQ ID NO: 591551 - RNA, 19 nt, Artificial Sequence
  Description of Artificial Sequence: Synthetic oligonucleotide
guuuauuugugauaacccc

SEQ ID NO: 591552 - RNA, 19 nt, Artificial Sequence
  Description of Artificial Sequence: Synthetic oligonucleotide
cuucaugagggcuuguucg

SEQ ID NO: 591553 - RNA, 19 nt, Artificial Sequence
  Description of Artificial Sequence: Synthetic oligonucleotide
ugugauaaccccaaaucgu

SEQ ID NO: 591554 - RNA, 19 nt, Artificial Sequence
  Description of Artificial Sequence: Synthetic oligonucleotide
auuggaauccaaaagguag

SEQ ID NO: 591555 - RNA, 19 nt, Artificial Sequence
  Description of Artificial Sequence: Synthetic oligonucleotide
cuuaguaccacccacuguc

SEQ ID NO: 591556 - RNA, 19 nt, Artificial Sequence
  Description of Artificial Sequence: Synthetic oligonucleotide
ugugauugagagaugggca

SEQ ID NO: 591557 - RNA, 19 nt, Artificial Sequence
  Description of Artificial Sequence: Synthetic oligonucleotide
agagugaacuucaugaggg

SEQ ID NO: 591558 - RNA, 19 nt, Artificial Sequence
  Description of Artificial Sequence: Synthetic oligonucleotide
uuuggaagggugaugggga

SEQ ID NO: 591559 - RNA, 19 nt, Artificial Sequence
  Description of Artificial Sequence: Synthetic oligonucleotide
gauauucagggucuuguug

SEQ ID NO: 591560 - RNA, 19 nt, Artificial Sequence
  Description of Artificial Sequence: Synthetic oligonucleotide
uauagugcgacucuucuuu

SEQ ID NO: 591561 - RNA, 19 nt, Artificial Sequence
  Description of Artificial Sequence: Synthetic oligonucleotide
aaugccgagacggaaacug

SEQ ID NO: 591562 - RNA, 19 nt, Artificial Sequence
  Description of Artificial Sequence: Synthetic oligonucleotide
uuguguacggcguaggcug

SEQ ID NO: 591563 - RNA, 19 nt, Artificial Sequence
  Description of Artificial Sequence: Synthetic oligonucleotide
aacugggcagaauuacuuc

SEQ ID NO: 591564 - RNA, 19 nt, Artificial Sequence
  Description of Artificial Sequence: Synthetic oligonucleotide
aaaucguauuguuccuagg

SEQ ID NO: 591565 - RNA, 19 nt, Artificial Sequence
  Description of Artificial Sequence: Synthetic oligonucleotide
agguaaucuuucuuuaaag

SEQ ID NO: 591566 - RNA, 19 nt, Artificial Sequence
  Description of Artificial Sequence: Synthetic oligonucleotide
uauauucccaauguaccag

SEQ ID NO: 591567 - RNA, 19 nt, Artificial Sequence
  Description of Artificial Sequence: Synthetic oligonucleotide
cagcuaagggaucaaaagg

SEQ ID NO: 591568 - RNA, 19 nt, Artificial Sequence
  Description of Artificial Sequence: Synthetic oligonucleotide
aaauacacacuuccagagu

SEQ ID NO: 591569 - RNA, 19 nt, Artificial Sequence
  Description of Artificial Sequence: Synthetic oligonucleotide
cugagcucggcuuaguacc

SEQ ID NO: 591570 - RNA, 19 nt, Artificial Sequence
  Description of Artificial Sequence: Synthetic oligonucleotide
uuucgcaagauguuuauuu

SEQ ID NO: 591571 - RNA, 19 nt, Artificial Sequence
  Description of Artificial Sequence: Synthetic oligonucleotide
caguuauuguacuccaagg

SEQ ID NO: 591572 - RNA, 19 nt, Artificial Sequence
  Description of Artificial Sequence: Synthetic oligonucleotide
gguaugaauaggaagagug

SEQ ID NO: 591573 - RNA, 19 nt, Artificial Sequence
  Description of Artificial Sequence: Synthetic oligonucleotide
aucaaaagguaugaauagg

SEQ ID NO: 591574 - RNA, 19 nt, Artificial Sequence
  Description of Artificial Sequence: Synthetic oligonucleotide
uguucgggguccaagauau

SEQ ID NO: 591575 - RNA, 19 nt, Artificial Sequence
  Description of Artificial Sequence: Synthetic oligonucleotide
uuaaaugccgagacggaaa

SEQ ID NO: 591576 - RNA, 19 nt, Artificial Sequence
  Description of Artificial Sequence: Synthetic oligonucleotide
guaauagagcagcagaaca

SEQ ID NO: 591577 - RNA, 19 nt, Artificial Sequence
  Description of Artificial Sequence: Synthetic oligonucleotide
gaugccucucagcuaaggg

SEQ ID NO: 591578 - RNA, 19 nt, Artificial Sequence
  Description of Artificial Sequence: Synthetic oligonucleotide
aaagccgcaccauuuugug

SEQ ID NO: 591579 - RNA, 19 nt, Artificial Sequence
  Description of Artificial Sequence: Synthetic oligonucleotide
uucgcaagauguuuauuug

SEQ ID NO: 591580 - RNA, 19 nt, Artificial Sequence
  Description of Artificial Sequence: Synthetic oligonucleotide
auaaccccaaaucguauug

SEQ ID NO: 591581 - RNA, 19 nt, Artificial Sequence
  Description of Artificial Sequence: Synthetic oligonucleotide
ugcauauaaccaaaauaaa

SEQ ID NO: 591582 - RNA, 19 nt, Artificial Sequence
  Description of Artificial Sequence: Synthetic oligonucleotide
aguaccacccacugucugg

SEQ ID NO: 591583 - RNA, 19 nt, Artificial Sequence
  Description of Artificial Sequence: Synthetic oligonucleotide
gacauuguggguccuggag

SEQ ID NO: 591584 - RNA, 19 nt, Artificial Sequence
  Description of Artificial Sequence: Synthetic oligonucleotide
acuuccagaguguacuaag

SEQ ID NO: 591585 - RNA, 19 nt, Artificial Sequence
  Description of Artificial Sequence: Synthetic oligonucleotide
accaccguguuacagcagg

SEQ ID NO: 591586 - RNA, 19 nt, Artificial Sequence
  Description of Artificial Sequence: Synthetic oligonucleotide
ucguauuguuccuagguaa

SEQ ID NO: 591587 - RNA, 19 nt, Artificial Sequence
  Description of Artificial Sequence: Synthetic oligonucleotide
caaaucguauuguuccuag

SEQ ID NO: 591588 - RNA, 19 nt, Artificial Sequence
  Description of Artificial Sequence: Synthetic oligonucleotide
uucaagggacuguagagaa

SEQ ID NO: 591589 - RNA, 19 nt, Artificial Sequence
  Description of Artificial Sequence: Synthetic oligonucleotide
guuggggugagccuuuucc

SEQ ID NO: 591590 - RNA, 19 nt, Artificial Sequence
  Description of Artificial Sequence: Synthetic oligonucleotide
ugauuccuuagcuccaccc

SEQ ID NO: 591591 - RNA, 19 nt, Artificial Sequence
  Description of Artificial Sequence: Synthetic oligonucleotide
uacuaaggauaccaguuuc

SEQ ID NO: 591592 - RNA, 19 nt, Artificial Sequence
  Description of Artificial Sequence: Synthetic oligonucleotide
aaaauugacugcauucuau

SEQ ID NO: 591593 - RNA, 19 nt, Artificial Sequence
  Description of Artificial Sequence: Synthetic oligonucleotide
agguccuuucuauugcagg

SEQ ID NO: 591594 - RNA, 19 nt, Artificial Sequence
  Description of Artificial Sequence: Synthetic oligonucleotide
uucggugaucucauccagg

SEQ ID NO: 591595 - RNA, 19 nt, Artificial Sequence
  Description of Artificial Sequence: Synthetic oligonucleotide
uucccaauguaccaguuuu

SEQ ID NO: 591596 - RNA, 19 nt, Artificial Sequence
  Description of Artificial Sequence: Synthetic oligonucleotide
cuuccagaguguacuaagg

SEQ ID NO: 591597 - RNA, 19 nt, Artificial Sequence
  Description of Artificial Sequence: Synthetic oligonucleotide
agugauguguugaaauguc

SEQ ID NO: 591598 - RNA, 19 nt, Artificial Sequence
  Description of Artificial Sequence: Synthetic oligonucleotide
agacucuagagugaacuuc

SEQ ID NO: 591599 - RNA, 19 nt, Artificial Sequence
  Description of Artificial Sequence: Synthetic oligonucleotide
acuaaggauaccaguuucg

SEQ ID NO: 591600 - RNA, 19 nt, Artificial Sequence
  Description of Artificial Sequence: Synthetic oligonucleotide
auucugagacacaucaauc

SEQ ID NO: 591601 - RNA, 19 nt, Artificial Sequence
  Description of Artificial Sequence: Synthetic oligonucleotide
ucagaccuuagcuucugca

SEQ ID NO: 591602 - RNA, 19 nt, Artificial Sequence
  Description of Artificial Sequence: Synthetic oligonucleotide
ucucucugcauauaaccaa

SEQ ID NO: 591603 - RNA, 19 nt, Artificial Sequence
  Description of Artificial Sequence: Synthetic oligonucleotide
agucgagcuagcuggauga

SEQ ID NO: 591604 - RNA, 19 nt, Artificial Sequence
  Description of Artificial Sequence: Synthetic oligonucleotide
aagcuugccaugccccggg

SEQ ID NO: 591605 - RNA, 19 nt, Artificial Sequence
  Description of Artificial Sequence: Synthetic oligonucleotide
ugagagauguguucacgcu

SEQ ID NO: 591606 - RNA, 19 nt, Artificial Sequence
  Description of Artificial Sequence: Synthetic oligonucleotide
agcuaagggaucaaaaggu

SEQ ID NO: 591607 - RNA, 19 nt, Artificial Sequence
  Description of Artificial Sequence: Synthetic oligonucleotide
ugucacuucagugauuaaa

SEQ ID NO: 591608 - RNA, 19 nt, Artificial Sequence
  Description of Artificial Sequence: Synthetic oligonucleotide
uccuagguaaucuuucuuu

SEQ ID NO: 591609 - RNA, 19 nt, Artificial Sequence
  Description of Artificial Sequence: Synthetic oligonucleotide
guaugaauaggaagagugc

SEQ ID NO: 591610 - RNA, 19 nt, Artificial Sequence
  Description of Artificial Sequence: Synthetic oligonucleotide
guaccuguucuccucaaug

SEQ ID NO: 591611 - RNA, 19 nt, Artificial Sequence
  Description of Artificial Sequence: Synthetic oligonucleotide
cuaaggauaccaguuucgc

SEQ ID NO: 591612 - RNA, 19 nt, Artificial Sequence
  Description of Artificial Sequence: Synthetic oligonucleotide
cugacuguggcgacggagc

SEQ ID NO: 591613 - RNA, 19 nt, Artificial Sequence
  Description of Artificial Sequence: Synthetic oligonucleotide
accguguuacagcagggag

SEQ ID NO: 591614 - RNA, 19 nt, Artificial Sequence
  Description of Artificial Sequence: Synthetic oligonucleotide
gaucuugagccaugugugc

SEQ ID NO: 591615 - RNA, 19 nt, Artificial Sequence
  Description of Artificial Sequence: Synthetic oligonucleotide
acgcugacggcguagcagg

SEQ ID NO: 591616 - RNA, 19 nt, Artificial Sequence
  Description of Artificial Sequence: Synthetic oligonucleotide
ucacaguuagguccuuucu

SEQ ID NO: 591617 - RNA, 19 nt, Artificial Sequence
  Description of Artificial Sequence: Synthetic oligonucleotide
aaaagccgcaccauuuugu

SEQ ID NO: 591618 - RNA, 19 nt, Artificial Sequence
  Description of Artificial Sequence: Synthetic oligonucleotide
cagcagaacauccuguuuc

SEQ ID NO: 591619 - RNA, 19 nt, Artificial Sequence
  Description of Artificial Sequence: Synthetic oligonucleotide
ugcaugguauucuccacgu

SEQ ID NO: 591620 - RNA, 19 nt, Artificial Sequence
  Description of Artificial Sequence: Synthetic oligonucleotide
agaauuacuuccaguaaga

SEQ ID NO: 591621 - RNA, 19 nt, Artificial Sequence
  Description of Artificial Sequence: Synthetic oligonucleotide
augccucucagcuaaggga

SEQ ID NO: 591622 - RNA, 19 nt, Artificial Sequence
  Description of Artificial Sequence: Synthetic oligonucleotide
accgacaguuauuguacuc

SEQ ID NO: 591623 - RNA, 19 nt, Artificial Sequence
  Description of Artificial Sequence: Synthetic oligonucleotide
uguucacgcuguaggacug

SEQ ID NO: 591624 - RNA, 19 nt, Artificial Sequence
  Description of Artificial Sequence: Synthetic oligonucleotide
cugcgggcacuaaagagcc

SEQ ID NO: 591625 - RNA, 19 nt, Artificial Sequence
  Description of Artificial Sequence: Synthetic oligonucleotide
uuccgaagaguuacuuccc

SEQ ID NO: 591626 - RNA, 19 nt, Artificial Sequence
  Description of Artificial Sequence: Synthetic oligonucleotide
aauuggaauccaaaaggua

SEQ ID NO: 591627 - RNA, 19 nt, Artificial Sequence
  Description of Artificial Sequence: Synthetic oligonucleotide
ccccaaaucguauuguucc

SEQ ID NO: 591628 - RNA, 19 nt, Artificial Sequence
  Description of Artificial Sequence: Synthetic oligonucleotide
uucacaguuagguccuuuc

SEQ ID NO: 591629 - RNA, 19 nt, Artificial Sequence
  Description of Artificial Sequence: Synthetic oligonucleotide
ucggcuuaguaccacccac

SEQ ID NO: 591630 - RNA, 19 nt, Artificial Sequence
  Description of Artificial Sequence: Synthetic oligonucleotide
agcucggcuuaguaccacc

SEQ ID NO: 591631 - RNA, 19 nt, Artificial Sequence
  Description of Artificial Sequence: Synthetic oligonucleotide
aagacucuagagugaacuu

SEQ ID NO: 591632 - RNA, 19 nt, Artificial Sequence
  Description of Artificial Sequence: Synthetic oligonucleotide
gauagccggggcuguaaag

SEQ ID NO: 591633 - RNA, 19 nt, Artificial Sequence
  Description of Artificial Sequence: Synthetic oligonucleotide
ccaaaagguagauauucag

SEQ ID NO: 591634 - RNA, 19 nt, Artificial Sequence
  Description of Artificial Sequence: Synthetic oligonucleotide
ugcgacucuucuuucacau

SEQ ID NO: 591635 - RNA, 19 nt, Artificial Sequence
  Description of Artificial Sequence: Synthetic oligonucleotide
uccgaagaguuacuuccca

SEQ ID NO: 591636 - RNA, 19 nt, Artificial Sequence
  Description of Artificial Sequence: Synthetic oligonucleotide
uccaagauauagugcgacu

SEQ ID NO: 591637 - RNA, 19 nt, Artificial Sequence
  Description of Artificial Sequence: Synthetic oligonucleotide
ugauaaccccaaaucguau

SEQ ID NO: 591638 - RNA, 19 nt, Artificial Sequence
  Description of Artificial Sequence: Synthetic oligonucleotide
acuaaagagccggcccucc

SEQ ID NO: 591639 - RNA, 19 nt, Artificial Sequence
  Description of Artificial Sequence: Synthetic oligonucleotide
agaugccuuuucaagggac

SEQ ID NO: 591640 - RNA, 19 nt, Artificial Sequence
  Description of Artificial Sequence: Synthetic oligonucleotide
guagccgaguacuccaggc

SEQ ID NO: 591641 - RNA, 19 nt, Artificial Sequence
  Description of Artificial Sequence: Synthetic oligonucleotide
uuaguaccacccacugucu

SEQ ID NO: 591642 - RNA, 19 nt, Artificial Sequence
  Description of Artificial Sequence: Synthetic oligonucleotide
ucugguugacacacaguuc

SEQ ID NO: 591643 - RNA, 19 nt, Artificial Sequence
  Description of Artificial Sequence: Synthetic oligonucleotide
auuuuguguaauagagcag

SEQ ID NO: 591644 - RNA, 19 nt, Artificial Sequence
  Description of Artificial Sequence: Synthetic oligonucleotide
aaacugggcagaauuacuu

SEQ ID NO: 591645 - RNA, 19 nt, Artificial Sequence
  Description of Artificial Sequence: Synthetic oligonucleotide
gagucgagcuagcuggaug

SEQ ID NO: 591646 - RNA, 19 nt, Artificial Sequence
  Description of Artificial Sequence: Synthetic oligonucleotide
uuggggugagccuuuucca

SEQ ID NO: 591647 - RNA, 19 nt, Artificial Sequence
  Description of Artificial Sequence: Synthetic oligonucleotide
aaccccaaaucguauuguu

SEQ ID NO: 591648 - RNA, 19 nt, Artificial Sequence
  Description of Artificial Sequence: Synthetic oligonucleotide
gguugugcuagugaggccc

SEQ ID NO: 591649 - RNA, 19 nt, Artificial Sequence
  Description of Artificial Sequence: Synthetic oligonucleotide
aauccuagccacaguaaau

SEQ ID NO: 591650 - RNA, 19 nt, Artificial Sequence
  Description of Artificial Sequence: Synthetic oligonucleotide
cucuuucacaggagcagag

SEQ ID NO: 591651 - RNA, 19 nt, Artificial Sequence
  Description of Artificial Sequence: Synthetic oligonucleotide
aucguauuguuccuaggua

SEQ ID NO: 591652 - RNA, 19 nt, Artificial Sequence
  Description of Artificial Sequence: Synthetic oligonucleotide
cugacggcguagcaggcgg

SEQ ID NO: 591653 - RNA, 19 nt, Artificial Sequence
  Description of Artificial Sequence: Synthetic oligonucleotide
caaaagguaugaauaggaa

SEQ ID NO: 591654 - RNA, 19 nt, Artificial Sequence
  Description of Artificial Sequence: Synthetic oligonucleotide
aguuucgcaagauguuuau

SEQ ID NO: 591655 - RNA, 19 nt, Artificial Sequence
  Description of Artificial Sequence: Synthetic oligonucleotide
augguauucuccacgugag

SEQ ID NO: 591656 - RNA, 19 nt, Artificial Sequence
  Description of Artificial Sequence: Synthetic oligonucleotide
ggaucaaaagguaugaaua

SEQ ID NO: 591657 - RNA, 19 nt, Artificial Sequence
  Description of Artificial Sequence: Synthetic oligonucleotide
ucgggguccaagauauagu

SEQ ID NO: 591658 - RNA, 19 nt, Artificial Sequence
  Description of Artificial Sequence: Synthetic oligonucleotide
uuguuccuagguaaucuuu

SEQ ID NO: 591659 - RNA, 19 nt, Artificial Sequence
  Description of Artificial Sequence: Synthetic oligonucleotide
cuguucagagccagugaag

SEQ ID NO: 591660 - RNA, 19 nt, Artificial Sequence
  Description of Artificial Sequence: Synthetic oligonucleotide
ucaagggacuguagagaac

SEQ ID NO: 591661 - RNA, 19 nt, Artificial Sequence
  Description of Artificial Sequence: Synthetic oligonucleotide
aagauauagugcgacucuu

SEQ ID NO: 591662 - RNA, 19 nt, Artificial Sequence
  Description of Artificial Sequence: Synthetic oligonucleotide
agagccagugaagcuugcc

SEQ ID NO: 591663 - RNA, 19 nt, Artificial Sequence
  Description of Artificial Sequence: Synthetic oligonucleotide
gaugggcaaaagccgcacc

SEQ ID NO: 591664 - RNA, 19 nt, Artificial Sequence
  Description of Artificial Sequence: Synthetic oligonucleotide
agacggucaaccaugaauu

SEQ ID NO: 591665 - RNA, 19 nt, Artificial Sequence
  Description of Artificial Sequence: Synthetic oligonucleotide
gugauugagagaugggcaa

SEQ ID NO: 591666 - RNA, 19 nt, Artificial Sequence
  Description of Artificial Sequence: Synthetic oligonucleotide
cucuagagugaacuucaug

SEQ ID NO: 591667 - RNA, 19 nt, Artificial Sequence
  Description of Artificial Sequence: Synthetic oligonucleotide
augguccugcaacaugcag

SEQ ID NO: 591668 - RNA, 19 nt, Artificial Sequence
  Description of Artificial Sequence: Synthetic oligonucleotide
ucucuuguguacggcguag

SEQ ID NO: 591669 - RNA, 19 nt, Artificial Sequence
  Description of Artificial Sequence: Synthetic oligonucleotide
auagccggggcuguaaaga

SEQ ID NO: 591670 - RNA, 19 nt, Artificial Sequence
  Description of Artificial Sequence: Synthetic oligonucleotide
ugacuguggcgacggagca

SEQ ID NO: 591671 - RNA, 19 nt, Artificial Sequence
  Description of Artificial Sequence: Synthetic oligonucleotide
uuguucgggguccaagaua

SEQ ID NO: 591672 - RNA, 19 nt, Artificial Sequence
  Description of Artificial Sequence: Synthetic oligonucleotide
ccugcgggcacuaaagagc

SEQ ID NO: 591673 - RNA, 19 nt, Artificial Sequence
  Description of Artificial Sequence: Synthetic oligonucleotide
gauuaaaugccgagacgga

SEQ ID NO: 591674 - RNA, 19 nt, Artificial Sequence
  Description of Artificial Sequence: Synthetic oligonucleotide
uccccaccgacaguuauug

SEQ ID NO: 591675 - RNA, 19 nt, Artificial Sequence
  Description of Artificial Sequence: Synthetic oligonucleotide
cacgcuguaggacugccuc

SEQ ID NO: 591676 - RNA, 19 nt, Artificial Sequence
  Description of Artificial Sequence: Synthetic oligonucleotide
uagccgaguacuccaggcu

SEQ ID NO: 591677 - RNA, 19 nt, Artificial Sequence
  Description of Artificial Sequence: Synthetic oligonucleotide
ugguauucuccacgugaga

SEQ ID NO: 591678 - RNA, 19 nt, Artificial Sequence
  Description of Artificial Sequence: Synthetic oligonucleotide
aggagggcugaugucaaag

SEQ ID NO: 591679 - RNA, 19 nt, Artificial Sequence
  Description of Artificial Sequence: Synthetic oligonucleotide
guuucugacuguggcgacg

SEQ ID NO: 591680 - RNA, 19 nt, Artificial Sequence
  Description of Artificial Sequence: Synthetic oligonucleotide
uguguacggcguaggcugc

SEQ ID NO: 591681 - RNA, 19 nt, Artificial Sequence
  Description of Artificial Sequence: Synthetic oligonucleotide
gguaucaguugucacuuca

SEQ ID NO: 591682 - RNA, 19 nt, Artificial Sequence
  Description of Artificial Sequence: Synthetic oligonucleotide
gcuagugaggcccacuuca

SEQ ID NO: 591683 - RNA, 19 nt, Artificial Sequence
  Description of Artificial Sequence: Synthetic oligonucleotide
caccauuuuguguaauaga

SEQ ID NO: 591684 - RNA, 19 nt, Artificial Sequence
  Description of Artificial Sequence: Synthetic oligonucleotide
gaaugugauagccggggcu

SEQ ID NO: 591685 - RNA, 19 nt, Artificial Sequence
  Description of Artificial Sequence: Synthetic oligonucleotide
gcugaggugaagaagguca

SEQ ID NO: 591686 - RNA, 19 nt, Artificial Sequence
  Description of Artificial Sequence: Synthetic oligonucleotide
ggucuuguugguucugcag

SEQ ID NO: 591687 - RNA, 19 nt, Artificial Sequence
  Description of Artificial Sequence: Synthetic oligonucleotide
agauguguucacgcuguag

SEQ ID NO: 591688 - RNA, 19 nt, Artificial Sequence
  Description of Artificial Sequence: Synthetic oligonucleotide
cuagccacaguaaauguau

SEQ ID NO: 591689 - RNA, 19 nt, Artificial Sequence
  Description of Artificial Sequence: Synthetic oligonucleotide
accccaaaucguauuguuc

SEQ ID NO: 591690 - RNA, 19 nt, Artificial Sequence
  Description of Artificial Sequence: Synthetic oligonucleotide
acgcuguaggacugccucg

SEQ ID NO: 591691 - RNA, 19 nt, Artificial Sequence
  Description of Artificial Sequence: Synthetic oligonucleotide
acaguaggaagacggucaa

SEQ ID NO: 591692 - RNA, 19 nt, Artificial Sequence
  Description of Artificial Sequence: Synthetic oligonucleotide
guaggaagacggucaacca

SEQ ID NO: 591693 - RNA, 19 nt, Artificial Sequence
  Description of Artificial Sequence: Synthetic oligonucleotide
gauuccuuagcuccacccu

SEQ ID NO: 591694 - RNA, 19 nt, Artificial Sequence
  Description of Artificial Sequence: Synthetic oligonucleotide
auauagugcgacucuucuu

SEQ ID NO: 591695 - RNA, 19 nt, Artificial Sequence
  Description of Artificial Sequence: Synthetic oligonucleotide
cuagguaaucuuucuuuaa

SEQ ID NO: 591696 - RNA, 19 nt, Artificial Sequence
  Description of Artificial Sequence: Synthetic oligonucleotide
ucgagcuagcuggaugaag

SEQ ID NO: 591697 - RNA, 19 nt, Artificial Sequence
  Description of Artificial Sequence: Synthetic oligonucleotide
uaaccccaaaucguauugu

SEQ ID NO: 591698 - RNA, 19 nt, Artificial Sequence
  Description of Artificial Sequence: Synthetic oligonucleotide
ugauugagagaugggcaaa

SEQ ID NO: 591699 - RNA, 19 nt, Artificial Sequence
  Description of Artificial Sequence: Synthetic oligonucleotide
ugauagccggggcuguaaa

SEQ ID NO: 591700 - RNA, 19 nt, Artificial Sequence
  Description of Artificial Sequence: Synthetic oligonucleotide
gacggucaaccaugaauuc

SEQ ID NO: 591701 - RNA, 19 nt, Artificial Sequence
  Description of Artificial Sequence: Synthetic oligonucleotide
ugguugacacacaguucac

SEQ ID NO: 591702 - RNA, 19 nt, Artificial Sequence
  Description of Artificial Sequence: Synthetic oligonucleotide
gcaccauuuuguguaauag

SEQ ID NO: 591703 - RNA, 19 nt, Artificial Sequence
  Description of Artificial Sequence: Synthetic oligonucleotide
aaguagccgaguacuccag

SEQ ID NO: 591704 - RNA, 19 nt, Artificial Sequence
  Description of Artificial Sequence: Synthetic oligonucleotide
guagauauucagggucuug

SEQ ID NO: 591705 - RNA, 19 nt, Artificial Sequence
  Description of Artificial Sequence: Synthetic oligonucleotide
caauccuagccacaguaaa

SEQ ID NO: 591706 - RNA, 19 nt, Artificial Sequence
  Description of Artificial Sequence: Synthetic oligonucleotide
caugccccgggauaugguc

SEQ ID NO: 591707 - RNA, 19 nt, Artificial Sequence
  Description of Artificial Sequence: Synthetic oligonucleotide
guccaagauauagugcgac

SEQ ID NO: 591708 - RNA, 19 nt, Artificial Sequence
  Description of Artificial Sequence: Synthetic oligonucleotide
caccuucucuuguguacgg

SEQ ID NO: 591709 - RNA, 19 nt, Artificial Sequence
  Description of Artificial Sequence: Synthetic oligonucleotide
aacaugcaguguaguagcu

SEQ ID NO: 591710 - RNA, 19 nt, Artificial Sequence
  Description of Artificial Sequence: Synthetic oligonucleotide
guggcgacggagcaaccug

SEQ ID NO: 591711 - RNA, 19 nt, Artificial Sequence
  Description of Artificial Sequence: Synthetic oligonucleotide
gucucucugcauauaacca

SEQ ID NO: 591712 - RNA, 19 nt, Artificial Sequence
  Description of Artificial Sequence: Synthetic oligonucleotide
gguaggagggcugauguca

SEQ ID NO: 591713 - RNA, 19 nt, Artificial Sequence
  Description of Artificial Sequence: Synthetic oligonucleotide
uagccggggcuguaaagac

SEQ ID NO: 591714 - RNA, 19 nt, Artificial Sequence
  Description of Artificial Sequence: Synthetic oligonucleotide
uuacagcagggagacgcug

SEQ ID NO: 591715 - RNA, 19 nt, Artificial Sequence
  Description of Artificial Sequence: Synthetic oligonucleotide
aaaugccgagacggaaacu

SEQ ID NO: 591716 - RNA, 19 nt, Artificial Sequence
  Description of Artificial Sequence: Synthetic oligonucleotide
ccaccgacaguuauuguac

SEQ ID NO: 591717 - RNA, 19 nt, Artificial Sequence
  Description of Artificial Sequence: Synthetic oligonucleotide
agcugaacaucaggcagug

SEQ ID NO: 591718 - RNA, 19 nt, Artificial Sequence
  Description of Artificial Sequence: Synthetic oligonucleotide
agcucacgagccuucugca

SEQ ID NO: 591719 - RNA, 19 nt, Artificial Sequence
  Description of Artificial Sequence: Synthetic oligonucleotide
gauaaccccaaaucguauu

SEQ ID NO: 591720 - RNA, 19 nt, Artificial Sequence
  Description of Artificial Sequence: Synthetic oligonucleotide
gcaagauguuuauuuguga

SEQ ID NO: 591721 - RNA, 19 nt, Artificial Sequence
  Description of Artificial Sequence: Synthetic oligonucleotide
accuagucucucugcauau

SEQ ID NO: 591722 - RNA, 19 nt, Artificial Sequence
  Description of Artificial Sequence: Synthetic oligonucleotide
ugcuagugaggcccacuuc

SEQ ID NO: 591723 - RNA, 19 nt, Artificial Sequence
  Description of Artificial Sequence: Synthetic oligonucleotide
uacacacuuccagagugua

SEQ ID NO: 591724 - RNA, 19 nt, Artificial Sequence
  Description of Artificial Sequence: Synthetic oligonucleotide
cugauuccuuagcuccacc

SEQ ID NO: 591725 - RNA, 19 nt, Artificial Sequence
  Description of Artificial Sequence: Synthetic oligonucleotide
cuaagggaucaaaagguau

SEQ ID NO: 591726 - RNA, 19 nt, Artificial Sequence
  Description of Artificial Sequence: Synthetic oligonucleotide
gugauaaccccaaaucgua

SEQ ID NO: 591727 - RNA, 19 nt, Artificial Sequence
  Description of Artificial Sequence: Synthetic oligonucleotide
agugguuggggugagccuu

SEQ ID NO: 591728 - RNA, 19 nt, Artificial Sequence
  Description of Artificial Sequence: Synthetic oligonucleotide
ccgacaguuauuguacucc

SEQ ID NO: 591729 - RNA, 19 nt, Artificial Sequence
  Description of Artificial Sequence: Synthetic oligonucleotide
aucccugcgggcacuaaag

SEQ ID NO: 591730 - RNA, 19 nt, Artificial Sequence
  Description of Artificial Sequence: Synthetic oligonucleotide
caguaagaugccuuuucaa

SEQ ID NO: 591731 - RNA, 19 nt, Artificial Sequence
  Description of Artificial Sequence: Synthetic oligonucleotide
ggcuuaguaccacccacug

SEQ ID NO: 591732 - RNA, 19 nt, Artificial Sequence
  Description of Artificial Sequence: Synthetic oligonucleotide
cucuuguguacggcguagg

SEQ ID NO: 591733 - RNA, 19 nt, Artificial Sequence
  Description of Artificial Sequence: Synthetic oligonucleotide
gucuauguaaauacacacu

SEQ ID NO: 591734 - RNA, 19 nt, Artificial Sequence
  Description of Artificial Sequence: Synthetic oligonucleotide
ugccuccauccgccgaagg

SEQ ID NO: 591735 - RNA, 19 nt, Artificial Sequence
  Description of Artificial Sequence: Synthetic oligonucleotide
ugcgggcacuaaagagccg

SEQ ID NO: 591736 - RNA, 19 nt, Artificial Sequence
  Description of Artificial Sequence: Synthetic oligonucleotide
ccaagauauagugcgacuc

SEQ ID NO: 591737 - RNA, 19 nt, Artificial Sequence
  Description of Artificial Sequence: Synthetic oligonucleotide
caagauauagugcgacucu

SEQ ID NO: 591738 - RNA, 19 nt, Artificial Sequence
  Description of Artificial Sequence: Synthetic oligonucleotide
ucacgcuguaggacugccu

SEQ ID NO: 591739 - RNA, 19 nt, Artificial Sequence
  Description of Artificial Sequence: Synthetic oligonucleotide
gcgggcacuaaagagccgg

SEQ ID NO: 591740 - RNA, 19 nt, Artificial Sequence
  Description of Artificial Sequence: Synthetic oligonucleotide
ugugcuagugaggcccacu

SEQ ID NO: 591741 - RNA, 19 nt, Artificial Sequence
  Description of Artificial Sequence: Synthetic oligonucleotide
gucacuucagugauuaaau

SEQ ID NO: 591742 - RNA, 19 nt, Artificial Sequence
  Description of Artificial Sequence: Synthetic oligonucleotide
auuguggguccuggagagg

SEQ ID NO: 591743 - RNA, 19 nt, Artificial Sequence
  Description of Artificial Sequence: Synthetic oligonucleotide
augccgagacggaaacugg

SEQ ID NO: 591744 - RNA, 19 nt, Artificial Sequence
  Description of Artificial Sequence: Synthetic oligonucleotide
caggcggugcccaucccug

SEQ ID NO: 591745 - RNA, 19 nt, Artificial Sequence
  Description of Artificial Sequence: Synthetic oligonucleotide
acggcguagcaggcggugc

SEQ ID NO: 591746 - RNA, 19 nt, Artificial Sequence
  Description of Artificial Sequence: Synthetic oligonucleotide
agggagacgcugccaucag

SEQ ID NO: 591747 - RNA, 19 nt, Artificial Sequence
  Description of Artificial Sequence: Synthetic oligonucleotide
ggaaagugguaccuguucu

SEQ ID NO: 591748 - RNA, 19 nt, Artificial Sequence
  Description of Artificial Sequence: Synthetic oligonucleotide
agaggaugccucucagcua

SEQ ID NO: 591749 - RNA, 19 nt, Artificial Sequence
  Description of Artificial Sequence: Synthetic oligonucleotide
ugccccgggauaugguccu

SEQ ID NO: 591750 - RNA, 19 nt, Artificial Sequence
  Description of Artificial Sequence: Synthetic oligonucleotide
gaugccuuuucaagggacu

SEQ ID NO: 591751 - RNA, 19 nt, Artificial Sequence
  Description of Artificial Sequence: Synthetic oligonucleotide
gagaugggcaaaagccgca

SEQ ID NO: 591752 - RNA, 19 nt, Artificial Sequence
  Description of Artificial Sequence: Synthetic oligonucleotide
guaggacugccucguucug

SEQ ID NO: 591753 - RNA, 19 nt, Artificial Sequence
  Description of Artificial Sequence: Synthetic oligonucleotide
caguuucgcaagauguuua

SEQ ID NO: 591754 - RNA, 19 nt, Artificial Sequence
  Description of Artificial Sequence: Synthetic oligonucleotide
cuugccaugccccgggaua

SEQ ID NO: 591755 - RNA, 19 nt, Artificial Sequence
  Description of Artificial Sequence: Synthetic oligonucleotide
guacuaaggauaccaguuu

SEQ ID NO: 591756 - RNA, 19 nt, Artificial Sequence
  Description of Artificial Sequence: Synthetic oligonucleotide
caccucugauuccuucaac

SEQ ID NO: 591757 - RNA, 19 nt, Artificial Sequence
  Description of Artificial Sequence: Synthetic oligonucleotide
gcuuguucgggguccaaga

SEQ ID NO: 591758 - RNA, 19 nt, Artificial Sequence
  Description of Artificial Sequence: Synthetic oligonucleotide
guaccaguuuucaccucug

SEQ ID NO: 591759 - RNA, 19 nt, Artificial Sequence
  Description of Artificial Sequence: Synthetic oligonucleotide
gucaaccaugaauucccaa

SEQ ID NO: 591760 - RNA, 19 nt, Artificial Sequence
  Description of Artificial Sequence: Synthetic oligonucleotide
gacaguuauuguacuccaa

SEQ ID NO: 591761 - RNA, 19 nt, Artificial Sequence
  Description of Artificial Sequence: Synthetic oligonucleotide
ggcaccuagucucucugca

SEQ ID NO: 591762 - RNA, 19 nt, Artificial Sequence
  Description of Artificial Sequence: Synthetic oligonucleotide
uacggcguaggcugcucau

SEQ ID NO: 591763 - RNA, 19 nt, Artificial Sequence
  Description of Artificial Sequence: Synthetic oligonucleotide
acggcguaggcugcucauc

SEQ ID NO: 591764 - RNA, 19 nt, Artificial Sequence
  Description of Artificial Sequence: Synthetic oligonucleotide
ggaugccucucagcuaagg

SEQ ID NO: 591765 - RNA, 19 nt, Artificial Sequence
  Description of Artificial Sequence: Synthetic oligonucleotide
cuaaagagccggcccucca

SEQ ID NO: 591766 - RNA, 19 nt, Artificial Sequence
  Description of Artificial Sequence: Synthetic oligonucleotide
caccuagucucucugcaua

SEQ ID NO: 591767 - RNA, 19 nt, Artificial Sequence
  Description of Artificial Sequence: Synthetic oligonucleotide
gacggcguagcaggcggug

SEQ ID NO: 591768 - RNA, 19 nt, Artificial Sequence
  Description of Artificial Sequence: Synthetic oligonucleotide
cagggagacgcugccauca

SEQ ID NO: 591769 - RNA, 19 nt, Artificial Sequence
  Description of Artificial Sequence: Synthetic oligonucleotide
gugcgacucuucuuucaca

SEQ ID NO: 591770 - RNA, 19 nt, Artificial Sequence
  Description of Artificial Sequence: Synthetic oligonucleotide
gcagaacauccuguuuccg

SEQ ID NO: 591771 - RNA, 19 nt, Artificial Sequence
  Description of Artificial Sequence: Synthetic oligonucleotide
cugguccuuucuucagcuc

SEQ ID NO: 591772 - RNA, 19 nt, Artificial Sequence
  Description of Artificial Sequence: Synthetic oligonucleotide
gguugacacacaguucaca

SEQ ID NO: 591773 - RNA, 19 nt, Artificial Sequence
  Description of Artificial Sequence: Synthetic oligonucleotide
gggguccaagauauagugc

SEQ ID NO: 591774 - RNA, 19 nt, Artificial Sequence
  Description of Artificial Sequence: Synthetic oligonucleotide
cucggcuuaguaccaccca

SEQ ID NO: 591775 - RNA, 19 nt, Artificial Sequence
  Description of Artificial Sequence: Synthetic oligonucleotide
ugacggcguagcaggcggu

SEQ ID NO: 591776 - RNA, 19 nt, Artificial Sequence
  Description of Artificial Sequence: Synthetic oligonucleotide
cacuaaagagccggcccuc

SEQ ID NO: 591777 - RNA, 19 nt, Artificial Sequence
  Description of Artificial Sequence: Synthetic oligonucleotide
cagaccuuagcuucugcau

SEQ ID NO: 591778 - RNA, 19 nt, Artificial Sequence
  Description of Artificial Sequence: Synthetic oligonucleotide
ccagagcacgcugacggcg

SEQ ID NO: 591779 - RNA, 19 nt, Artificial Sequence
  Description of Artificial Sequence: Synthetic oligonucleotide
ggcggugcccaucccugcg

SEQ ID NO: 591780 - RNA, 19 nt, Artificial Sequence
  Description of Artificial Sequence: Synthetic oligonucleotide
ccuguucagagccagugaa

SEQ ID NO: 591781 - RNA, 19 nt, Artificial Sequence
  Description of Artificial Sequence: Synthetic oligonucleotide
caggugccuccauccgccg

SEQ ID NO: 591782 - RNA, 19 nt, Artificial Sequence
  Description of Artificial Sequence: Synthetic oligonucleotide
gagcacgcugacggcguag

SEQ ID NO: 591783 - RNA, 19 nt, Artificial Sequence
  Description of Artificial Sequence: Synthetic oligonucleotide
gcguaggcugcucaucuca

SEQ ID NO: 591784 - RNA, 19 nt, Artificial Sequence
  Description of Artificial Sequence: Synthetic oligonucleotide
ccacgugagagauguguuc

SEQ ID NO: 591785 - RNA, 19 nt, Artificial Sequence
  Description of Artificial Sequence: Synthetic oligonucleotide
uguacggcguaggcugcuc

SEQ ID NO: 591786 - RNA, 19 nt, Artificial Sequence
  Description of Artificial Sequence: Synthetic oligonucleotide
ggggugagccuuuuccaga

SEQ ID NO: 591787 - RNA, 19 nt, Artificial Sequence
  Description of Artificial Sequence: Synthetic oligonucleotide
ggggcaccuagucucucug

SEQ ID NO: 591788 - RNA, 19 nt, Artificial Sequence
  Description of Artificial Sequence: Synthetic oligonucleotide
guagcugaaagggcuggua

SEQ ID NO: 591789 - RNA, 19 nt, Artificial Sequence
  Description of Artificial Sequence: Synthetic oligonucleotide
augugauagccggggcugu

SEQ ID NO: 591790 - RNA, 19 nt, Artificial Sequence
  Description of Artificial Sequence: Synthetic oligonucleotide
ccgaaggugcugaaggaga

SEQ ID NO: 591791 - RNA, 19 nt, Artificial Sequence
  Description of Artificial Sequence: Synthetic oligonucleotide
gcaugguauucuccacgug

SEQ ID NO: 591792 - RNA, 19 nt, Artificial Sequence
  Description of Artificial Sequence: Synthetic oligonucleotide
guaggagggcugaugucaa

SEQ ID NO: 591793 - RNA, 19 nt, Artificial Sequence
  Description of Artificial Sequence: Synthetic oligonucleotide
gggagacgcugccaucagc

SEQ ID NO: 591794 - RNA, 19 nt, Artificial Sequence
  Description of Artificial Sequence: Synthetic oligonucleotide
ccguguuacagcagggaga

SEQ ID NO: 591795 - RNA, 19 nt, Artificial Sequence
  Description of Artificial Sequence: Synthetic oligonucleotide
guugugcuagugaggccca

SEQ ID NO: 591796 - RNA, 19 nt, Artificial Sequence
  Description of Artificial Sequence: Synthetic oligonucleotide
gaaugaaccucagcagauu

SEQ ID NO: 591797 - RNA, 19 nt, Artificial Sequence
  Description of Artificial Sequence: Synthetic oligonucleotide
cugccugacaccacgugau

SEQ ID NO: 591798 - RNA, 19 nt, Artificial Sequence
  Description of Artificial Sequence: Synthetic oligonucleotide
gagugguuggggugagccu

SEQ ID NO: 591799 - RNA, 19 nt, Artificial Sequence
  Description of Artificial Sequence: Synthetic oligonucleotide
gcuaagggaucaaaaggua

SEQ ID NO: 591800 - RNA, 19 nt, Artificial Sequence
  Description of Artificial Sequence: Synthetic oligonucleotide
gccgagacggaaacugggc

SEQ ID NO: 591801 - RNA, 19 nt, Artificial Sequence
  Description of Artificial Sequence: Synthetic oligonucleotide
cccaccgacaguuauugua

SEQ ID NO: 591802 - RNA, 19 nt, Artificial Sequence
  Description of Artificial Sequence: Synthetic oligonucleotide
gcaaccugugcuguugcuc

SEQ ID NO: 591803 - RNA, 19 nt, Artificial Sequence
  Description of Artificial Sequence: Synthetic oligonucleotide
gcucggcuuaguaccaccc

SEQ ID NO: 591804 - RNA, 19 nt, Artificial Sequence
  Description of Artificial Sequence: Synthetic oligonucleotide
gagauguguucacgcugua

SEQ ID NO: 591805 - RNA, 19 nt, Artificial Sequence
  Description of Artificial Sequence: Synthetic oligonucleotide
caucccugcgggcacuaaa

SEQ ID NO: 591806 - RNA, 19 nt, Artificial Sequence
  Description of Artificial Sequence: Synthetic oligonucleotide
gaguuacuucccagaaggu

SEQ ID NO: 591807 - RNA, 19 nt, Artificial Sequence
  Description of Artificial Sequence: Synthetic oligonucleotide
gcacuaaagagccggcccu

SEQ ID NO: 591808 - RNA, 19 nt, Artificial Sequence
  Description of Artificial Sequence: Synthetic oligonucleotide
ccuagccacaguaaaugua

SEQ ID NO: 591809 - RNA, 19 nt, Artificial Sequence
  Description of Artificial Sequence: Synthetic oligonucleotide
gcugauuccuuagcuccac

SEQ ID NO: 591810 - RNA, 19 nt, Artificial Sequence
  Description of Artificial Sequence: Synthetic oligonucleotide
agacggaaacugggcagaa

SEQ ID NO: 591811 - RNA, 19 nt, Artificial Sequence
  Description of Artificial Sequence: Synthetic oligonucleotide
gcgacggagcaaccugugc

SEQ ID NO: 591812 - RNA, 19 nt, Artificial Sequence
  Description of Artificial Sequence: Synthetic oligonucleotide
gggcacuaaagagccggcc

SEQ ID NO: 591813 - RNA, 19 nt, Artificial Sequence
  Description of Artificial Sequence: Synthetic oligonucleotide
caccugguccccaccgaca

SEQ ID NO: 591814 - RNA, 19 nt, Artificial Sequence
  Description of Artificial Sequence: Synthetic oligonucleotide
cuuguucgggguccaagau

SEQ ID NO: 591815 - RNA, 19 nt, Artificial Sequence
  Description of Artificial Sequence: Synthetic oligonucleotide
uugugcuagugaggcccac

SEQ ID NO: 591816 - RNA, 19 nt, Artificial Sequence
  Description of Artificial Sequence: Synthetic oligonucleotide
acucuagagugaacuucau

SEQ ID NO: 591817 - RNA, 19 nt, Artificial Sequence
  Description of Artificial Sequence: Synthetic oligonucleotide
gcggugcccaucccugcgg

SEQ ID NO: 591818 - RNA, 19 nt, Artificial Sequence
  Description of Artificial Sequence: Synthetic oligonucleotide
cauccgccgaaggugcuga

SEQ ID NO: 591819 - RNA, 19 nt, Artificial Sequence
  Description of Artificial Sequence: Synthetic oligonucleotide
agagccggcccuccaccuu

SEQ ID NO: 591820 - RNA, 19 nt, Artificial Sequence
  Description of Artificial Sequence: Synthetic oligonucleotide
guaccacccacugucuggu

SEQ ID NO: 591821 - RNA, 19 nt, Artificial Sequence
  Description of Artificial Sequence: Synthetic oligonucleotide
agccaucggaagagugucu

SEQ ID NO: 591822 - RNA, 19 nt, Artificial Sequence
  Description of Artificial Sequence: Synthetic oligonucleotide
cacugagcucggcuuagua

SEQ ID NO: 591823 - RNA, 19 nt, Artificial Sequence
  Description of Artificial Sequence: Synthetic oligonucleotide
gcauucuaugcugccugac

SEQ ID NO: 591824 - RNA, 19 nt, Artificial Sequence
  Description of Artificial Sequence: Synthetic oligonucleotide
gugauagccggggcuguaa

SEQ ID NO: 591825 - RNA, 19 nt, Artificial Sequence
  Description of Artificial Sequence: Synthetic oligonucleotide
agagcacgcugacggcgua

SEQ ID NO: 591826 - RNA, 19 nt, Artificial Sequence
  Description of Artificial Sequence: Synthetic oligonucleotide
gugcuagugaggcccacuu

SEQ ID NO: 591827 - RNA, 19 nt, Artificial Sequence
  Description of Artificial Sequence: Synthetic oligonucleotide
gcgacucuucuuucacauc

SEQ ID NO: 591828 - RNA, 19 nt, Artificial Sequence
  Description of Artificial Sequence: Synthetic oligonucleotide
caccgacaguuauuguacu

SEQ ID NO: 591829 - RNA, 19 nt, Artificial Sequence
  Description of Artificial Sequence: Synthetic oligonucleotide
gcuuaguaccacccacugu

SEQ ID NO: 591830 - RNA, 19 nt, Artificial Sequence
  Description of Artificial Sequence: Synthetic oligonucleotide
uaggggcaccuagucucuc

SEQ ID NO: 591831 - RNA, 19 nt, Artificial Sequence
  Description of Artificial Sequence: Synthetic oligonucleotide
aggaugccucucagcuaag

SEQ ID NO: 591832 - RNA, 19 nt, Artificial Sequence
  Description of Artificial Sequence: Synthetic oligonucleotide
gccacaguaaauguaucuu

SEQ ID NO: 591833 - RNA, 19 nt, Artificial Sequence
  Description of Artificial Sequence: Synthetic oligonucleotide
ggcguaggcugcucaucuc

SEQ ID NO: 591834 - RNA, 19 nt, Artificial Sequence
  Description of Artificial Sequence: Synthetic oligonucleotide
ggugaaccacugaacucaa

SEQ ID NO: 591835 - RNA, 19 nt, Artificial Sequence
  Description of Artificial Sequence: Synthetic oligonucleotide
ggcguagcaggcggugccc

SEQ ID NO: 591836 - RNA, 19 nt, Artificial Sequence
  Description of Artificial Sequence: Synthetic oligonucleotide
ccuuucuauugcagggaaa

SEQ ID NO: 591837 - RNA, 19 nt, Artificial Sequence
  Description of Artificial Sequence: Synthetic oligonucleotide
gcagauuuggaagggugau

SEQ ID NO: 591838 - RNA, 19 nt, Artificial Sequence
  Description of Artificial Sequence: Synthetic oligonucleotide
gucgagcuagcuggaugaa

SEQ ID NO: 591839 - RNA, 19 nt, Artificial Sequence
  Description of Artificial Sequence: Synthetic oligonucleotide
gacggaaacugggcagaau

SEQ ID NO: 591840 - RNA, 19 nt, Artificial Sequence
  Description of Artificial Sequence: Synthetic oligonucleotide
gguaccuguucuccucaau

SEQ ID NO: 591841 - RNA, 19 nt, Artificial Sequence
  Description of Artificial Sequence: Synthetic oligonucleotide
ugguuggggugagccuuuu

SEQ ID NO: 591842 - RNA, 19 nt, Artificial Sequence
  Description of Artificial Sequence: Synthetic oligonucleotide
cgggcacuaaagagccggc

SEQ ID NO: 591843 - RNA, 19 nt, Artificial Sequence
  Description of Artificial Sequence: Synthetic oligonucleotide
cggcguagcaggcggugcc

SEQ ID NO: 591844 - RNA, 19 nt, Artificial Sequence
  Description of Artificial Sequence: Synthetic oligonucleotide
gccggggcuguaaagacau

SEQ ID NO: 591845 - RNA, 19 nt, Artificial Sequence
  Description of Artificial Sequence: Synthetic oligonucleotide
cucuugccuccauggggcu

SEQ ID NO: 591846 - RNA, 19 nt, Artificial Sequence
  Description of Artificial Sequence: Synthetic oligonucleotide
aggcccacuuauagauguu

SEQ ID NO: 591847 - RNA, 19 nt, Artificial Sequence
  Description of Artificial Sequence: Synthetic oligonucleotide
cggaaacugggcagaauua

SEQ ID NO: 591848 - RNA, 19 nt, Artificial Sequence
  Description of Artificial Sequence: Synthetic oligonucleotide
gccgcaccauuuuguguaa

SEQ ID NO: 591849 - RNA, 19 nt, Artificial Sequence
  Description of Artificial Sequence: Synthetic oligonucleotide
cgacggagcaaccugugcu

SEQ ID NO: 591850 - RNA, 19 nt, Artificial Sequence
  Description of Artificial Sequence: Synthetic oligonucleotide
ccauccgccgaaggugcug

SEQ ID NO: 591851 - RNA, 19 nt, Artificial Sequence
  Description of Artificial Sequence: Synthetic oligonucleotide
ggaagagugcugguccuuu

SEQ ID NO: 591852 - RNA, 19 nt, Artificial Sequence
  Description of Artificial Sequence: Synthetic oligonucleotide
cccgggauaugguccugca

SEQ ID NO: 591853 - RNA, 19 nt, Artificial Sequence
  Description of Artificial Sequence: Synthetic oligonucleotide
gcacgcugacggcguagca

SEQ ID NO: 591854 - RNA, 19 nt, Artificial Sequence
  Description of Artificial Sequence: Synthetic oligonucleotide
ccacuucggugaucucauc

SEQ ID NO: 591855 - RNA, 19 nt, Artificial Sequence
  Description of Artificial Sequence: Synthetic oligonucleotide
ccaguuucgcaagauguuu

SEQ ID NO: 591856 - RNA, 19 nt, Artificial Sequence
  Description of Artificial Sequence: Synthetic oligonucleotide
cgcugacggcguagcaggc

SEQ ID NO: 591857 - RNA, 19 nt, Artificial Sequence
  Description of Artificial Sequence: Synthetic oligonucleotide
guccccaccgacaguuauu

SEQ ID NO: 591858 - RNA, 19 nt, Artificial Sequence
  Description of Artificial Sequence: Synthetic oligonucleotide
ccgggauaugguccugcaa

SEQ ID NO: 591859 - RNA, 19 nt, Artificial Sequence
  Description of Artificial Sequence: Synthetic oligonucleotide
guucgggguccaagauaua

SEQ ID NO: 591860 - RNA, 19 nt, Artificial Sequence
  Description of Artificial Sequence: Synthetic oligonucleotide
guccugcaacaugcagugu

SEQ ID NO: 591861 - RNA, 19 nt, Artificial Sequence
  Description of Artificial Sequence: Synthetic oligonucleotide
cggcuuaguaccacccacu

SEQ ID NO: 591862 - RNA, 19 nt, Artificial Sequence
  Description of Artificial Sequence: Synthetic oligonucleotide
ccggggcuguaaagacauc

SEQ ID NO: 591863 - RNA, 19 nt, Artificial Sequence
  Description of Artificial Sequence: Synthetic oligonucleotide
cacgagccuucugcacaua

SEQ ID NO: 591864 - RNA, 19 nt, Artificial Sequence
  Description of Artificial Sequence: Synthetic oligonucleotide
gccccgggauaugguccug

SEQ ID NO: 591865 - RNA, 19 nt, Artificial Sequence
  Description of Artificial Sequence: Synthetic oligonucleotide
ccccaccgacaguuauugu

SEQ ID NO: 591866 - RNA, 19 nt, Artificial Sequence
  Description of Artificial Sequence: Synthetic oligonucleotide
cgaguacuccaggcucaua

SEQ ID NO: 591867 - RNA, 19 nt, Artificial Sequence
  Description of Artificial Sequence: Synthetic oligonucleotide
ccgcaccauuuuguguaau

SEQ ID NO: 591868 - RNA, 19 nt, Artificial Sequence
  Description of Artificial Sequence: Synthetic oligonucleotide
aagaugacccguuugacuc

SEQ ID NO: 591869 - RNA, 19 nt, Artificial Sequence
  Description of Artificial Sequence: Synthetic oligonucleotide
augacugugaaauaggcuc

SEQ ID NO: 591870 - RNA, 19 nt, Artificial Sequence
  Description of Artificial Sequence: Synthetic oligonucleotide
agagaggucgaauugaacg

SEQ ID NO: 591871 - RNA, 19 nt, Artificial Sequence
  Description of Artificial Sequence: Synthetic oligonucleotide
uguuggugcaaauauagag

SEQ ID NO: 591872 - RNA, 19 nt, Artificial Sequence
  Description of Artificial Sequence: Synthetic oligonucleotide
aauuguuacaccuguguca

SEQ ID NO: 591873 - RNA, 19 nt, Artificial Sequence
  Description of Artificial Sequence: Synthetic oligonucleotide
uuugaccugaauuucuugg

SEQ ID NO: 591874 - RNA, 19 nt, Artificial Sequence
  Description of Artificial Sequence: Synthetic oligonucleotide
aaaauagcccgcuggaaag

SEQ ID NO: 591875 - RNA, 19 nt, Artificial Sequence
  Description of Artificial Sequence: Synthetic oligonucleotide
aacgauaaucuucuauuuc

SEQ ID NO: 591876 - RNA, 19 nt, Artificial Sequence
  Description of Artificial Sequence: Synthetic oligonucleotide
aauugaacgaucuauuauu

SEQ ID NO: 591877 - RNA, 19 nt, Artificial Sequence
  Description of Artificial Sequence: Synthetic oligonucleotide
aguacuagaagacauuucu

SEQ ID NO: 591878 - RNA, 19 nt, Artificial Sequence
  Description of Artificial Sequence: Synthetic oligonucleotide
gauacccugaauuaucugc

SEQ ID NO: 591879 - RNA, 19 nt, Artificial Sequence
  Description of Artificial Sequence: Synthetic oligonucleotide
uuaauaucagccuguaaug

SEQ ID NO: 591880 - RNA, 19 nt, Artificial Sequence
  Description of Artificial Sequence: Synthetic oligonucleotide
auuguagcgguauaaacug

SEQ ID NO: 591881 - RNA, 19 nt, Artificial Sequence
  Description of Artificial Sequence: Synthetic oligonucleotide
auauagagaagguuucuuc

SEQ ID NO: 591882 - RNA, 19 nt, Artificial Sequence
  Description of Artificial Sequence: Synthetic oligonucleotide
aacuucuaauccuagggca

SEQ ID NO: 591883 - RNA, 19 nt, Artificial Sequence
  Description of Artificial Sequence: Synthetic oligonucleotide
ugaacgaucuauuauucga

SEQ ID NO: 591884 - RNA, 19 nt, Artificial Sequence
  Description of Artificial Sequence: Synthetic oligonucleotide
cucguuuugauaauggaac

SEQ ID NO: 591885 - RNA, 19 nt, Artificial Sequence
  Description of Artificial Sequence: Synthetic oligonucleotide
uauucccuuauuuguaccg

SEQ ID NO: 591886 - RNA, 19 nt, Artificial Sequence
  Description of Artificial Sequence: Synthetic oligonucleotide
auuuauagccgucagaauu

SEQ ID NO: 591887 - RNA, 19 nt, Artificial Sequence
  Description of Artificial Sequence: Synthetic oligonucleotide
uuuaaucuuccguugguca

SEQ ID NO: 591888 - RNA, 19 nt, Artificial Sequence
  Description of Artificial Sequence: Synthetic oligonucleotide
aggaaugucugauaaggag

SEQ ID NO: 591889 - RNA, 19 nt, Artificial Sequence
  Description of Artificial Sequence: Synthetic oligonucleotide
uuuaugaguguauuucaca

SEQ ID NO: 591890 - RNA, 19 nt, Artificial Sequence
  Description of Artificial Sequence: Synthetic oligonucleotide
uuuaccccauuuauagccg

SEQ ID NO: 591891 - RNA, 19 nt, Artificial Sequence
  Description of Artificial Sequence: Synthetic oligonucleotide
gauguuuaaucuuccguug

SEQ ID NO: 591892 - RNA, 19 nt, Artificial Sequence
  Description of Artificial Sequence: Synthetic oligonucleotide
uuaaugccaaacuuccacc

SEQ ID NO: 591893 - RNA, 19 nt, Artificial Sequence
  Description of Artificial Sequence: Synthetic oligonucleotide
uuuuaugaguguauuucac

SEQ ID NO: 591894 - RNA, 19 nt, Artificial Sequence
  Description of Artificial Sequence: Synthetic oligonucleotide
acuugacuaauuguuacac

SEQ ID NO: 591895 - RNA, 19 nt, Artificial Sequence
  Description of Artificial Sequence: Synthetic oligonucleotide
uacuuuucuagaaagccuc

SEQ ID NO: 591896 - RNA, 19 nt, Artificial Sequence
  Description of Artificial Sequence: Synthetic oligonucleotide
auuccaggcaauuuaauau

SEQ ID NO: 591897 - RNA, 19 nt, Artificial Sequence
  Description of Artificial Sequence: Synthetic oligonucleotide
uaucauuuagaguuuugac

SEQ ID NO: 591898 - RNA, 19 nt, Artificial Sequence
  Description of Artificial Sequence: Synthetic oligonucleotide
uugaacgaucuauuauucg

SEQ ID NO: 591899 - RNA, 19 nt, Artificial Sequence
  Description of Artificial Sequence: Synthetic oligonucleotide
aaucccguccgucacaccu

SEQ ID NO: 591900 - RNA, 19 nt, Artificial Sequence
  Description of Artificial Sequence: Synthetic oligonucleotide
cuaaugaaucaaauguaac

SEQ ID NO: 591901 - RNA, 19 nt, Artificial Sequence
  Description of Artificial Sequence: Synthetic oligonucleotide
uuauuguagcgguauaaac

SEQ ID NO: 591902 - RNA, 19 nt, Artificial Sequence
  Description of Artificial Sequence: Synthetic oligonucleotide
aaaucucgguaaugaaguc

SEQ ID NO: 591903 - RNA, 19 nt, Artificial Sequence
  Description of Artificial Sequence: Synthetic oligonucleotide
aguucucgucuauucauac

SEQ ID NO: 591904 - RNA, 19 nt, Artificial Sequence
  Description of Artificial Sequence: Synthetic oligonucleotide
uacuggauucuaaugaauc

SEQ ID NO: 591905 - RNA, 19 nt, Artificial Sequence
  Description of Artificial Sequence: Synthetic oligonucleotide
uuuauagccgucagaauuu

SEQ ID NO: 591906 - RNA, 19 nt, Artificial Sequence
  Description of Artificial Sequence: Synthetic oligonucleotide
auaucuaccucacagcuua

SEQ ID NO: 591907 - RNA, 19 nt, Artificial Sequence
  Description of Artificial Sequence: Synthetic oligonucleotide
aacgaucuauuauucgacu

SEQ ID NO: 591908 - RNA, 19 nt, Artificial Sequence
  Description of Artificial Sequence: Synthetic oligonucleotide
ucuuccguuggucaagcug

SEQ ID NO: 591909 - RNA, 19 nt, Artificial Sequence
  Description of Artificial Sequence: Synthetic oligonucleotide
ugucagaagagccaaucuc

SEQ ID NO: 591910 - RNA, 19 nt, Artificial Sequence
  Description of Artificial Sequence: Synthetic oligonucleotide
uguagcgguauaaacugcu

SEQ ID NO: 591911 - RNA, 19 nt, Artificial Sequence
  Description of Artificial Sequence: Synthetic oligonucleotide
uggguuaauaacacauucu

SEQ ID NO: 591912 - RNA, 19 nt, Artificial Sequence
  Description of Artificial Sequence: Synthetic oligonucleotide
ucuaagguaguuuguggga

SEQ ID NO: 591913 - RNA, 19 nt, Artificial Sequence
  Description of Artificial Sequence: Synthetic oligonucleotide
uuugugggauucuaccugc

SEQ ID NO: 591914 - RNA, 19 nt, Artificial Sequence
  Description of Artificial Sequence: Synthetic oligonucleotide
uguguguuaugaaguagca

SEQ ID NO: 591915 - RNA, 19 nt, Artificial Sequence
  Description of Artificial Sequence: Synthetic oligonucleotide
ugaccugaauuucuuggcc

SEQ ID NO: 591916 - RNA, 19 nt, Artificial Sequence
  Description of Artificial Sequence: Synthetic oligonucleotide
ucguuuugauaauggaacc

SEQ ID NO: 591917 - RNA, 19 nt, Artificial Sequence
  Description of Artificial Sequence: Synthetic oligonucleotide
aaucuuccguuggucaagc

SEQ ID NO: 591918 - RNA, 19 nt, Artificial Sequence
  Description of Artificial Sequence: Synthetic oligonucleotide
uacuagaagacauuucuuu

SEQ ID NO: 591919 - RNA, 19 nt, Artificial Sequence
  Description of Artificial Sequence: Synthetic oligonucleotide
auuuggacagaacuguuaa

SEQ ID NO: 591920 - RNA, 19 nt, Artificial Sequence
  Description of Artificial Sequence: Synthetic oligonucleotide
uucuaauuguugcucuuga

SEQ ID NO: 591921 - RNA, 19 nt, Artificial Sequence
  Description of Artificial Sequence: Synthetic oligonucleotide
agccgucagaauuugaucu

SEQ ID NO: 591922 - RNA, 19 nt, Artificial Sequence
  Description of Artificial Sequence: Synthetic oligonucleotide
uccaggcaauuuaauauca

SEQ ID NO: 591923 - RNA, 19 nt, Artificial Sequence
  Description of Artificial Sequence: Synthetic oligonucleotide
aguuucauugguugcauaa

SEQ ID NO: 591924 - RNA, 19 nt, Artificial Sequence
  Description of Artificial Sequence: Synthetic oligonucleotide
augacagaaguccugcugu

SEQ ID NO: 591925 - RNA, 19 nt, Artificial Sequence
  Description of Artificial Sequence: Synthetic oligonucleotide
cuugacuaauuguuacacc

SEQ ID NO: 591926 - RNA, 19 nt, Artificial Sequence
  Description of Artificial Sequence: Synthetic oligonucleotide
uugaccugaauuucuuggc

SEQ ID NO: 591927 - RNA, 19 nt, Artificial Sequence
  Description of Artificial Sequence: Synthetic oligonucleotide
cuaauccuagggcaguggg

SEQ ID NO: 591928 - RNA, 19 nt, Artificial Sequence
  Description of Artificial Sequence: Synthetic oligonucleotide
caacuucuaauccuagggc

SEQ ID NO: 591929 - RNA, 19 nt, Artificial Sequence
  Description of Artificial Sequence: Synthetic oligonucleotide
caaucccacugcuacaccg

SEQ ID NO: 591930 - RNA, 19 nt, Artificial Sequence
  Description of Artificial Sequence: Synthetic oligonucleotide
accggcuauuuugaaaucc

SEQ ID NO: 591931 - RNA, 19 nt, Artificial Sequence
  Description of Artificial Sequence: Synthetic oligonucleotide
uccuuguuggguuaauaac

SEQ ID NO: 591932 - RNA, 19 nt, Artificial Sequence
  Description of Artificial Sequence: Synthetic oligonucleotide
ugcuccaaauucuaauugu

SEQ ID NO: 591933 - RNA, 19 nt, Artificial Sequence
  Description of Artificial Sequence: Synthetic oligonucleotide
ucccuucuaagguaguuug

SEQ ID NO: 591934 - RNA, 19 nt, Artificial Sequence
  Description of Artificial Sequence: Synthetic oligonucleotide
gacucuuaugguaaaagga

SEQ ID NO: 591935 - RNA, 19 nt, Artificial Sequence
  Description of Artificial Sequence: Synthetic oligonucleotide
aauuggucgacgucuggaa

SEQ ID NO: 591936 - RNA, 19 nt, Artificial Sequence
  Description of Artificial Sequence: Synthetic oligonucleotide
ugcauagaguuucuccaug

SEQ ID NO: 591937 - RNA, 19 nt, Artificial Sequence
  Description of Artificial Sequence: Synthetic oligonucleotide
ucguacugccccaauaggu

SEQ ID NO: 591938 - RNA, 19 nt, Artificial Sequence
  Description of Artificial Sequence: Synthetic oligonucleotide
ucgacuugugagaauuucu

SEQ ID NO: 591939 - RNA, 19 nt, Artificial Sequence
  Description of Artificial Sequence: Synthetic oligonucleotide
gaauaucauuguugaauac

SEQ ID NO: 591940 - RNA, 19 nt, Artificial Sequence
  Description of Artificial Sequence: Synthetic oligonucleotide
aaguacuagaagacauuuc

SEQ ID NO: 591941 - RNA, 19 nt, Artificial Sequence
  Description of Artificial Sequence: Synthetic oligonucleotide
uggauacccugaauuaucu

SEQ ID NO: 591942 - RNA, 19 nt, Artificial Sequence
  Description of Artificial Sequence: Synthetic oligonucleotide
uaaaguacuagaagacauu

SEQ ID NO: 591943 - RNA, 19 nt, Artificial Sequence
  Description of Artificial Sequence: Synthetic oligonucleotide
acccguuugacucgaggac

SEQ ID NO: 591944 - RNA, 19 nt, Artificial Sequence
  Description of Artificial Sequence: Synthetic oligonucleotide
cuagcagauuacaaauaac

SEQ ID NO: 591945 - RNA, 19 nt, Artificial Sequence
  Description of Artificial Sequence: Synthetic oligonucleotide
aaauuggucgacgucugga

SEQ ID NO: 591946 - RNA, 19 nt, Artificial Sequence
  Description of Artificial Sequence: Synthetic oligonucleotide
agcgguauaaacugcucca

SEQ ID NO: 591947 - RNA, 19 nt, Artificial Sequence
  Description of Artificial Sequence: Synthetic oligonucleotide
aucauuccuacucguacug

SEQ ID NO: 591948 - RNA, 19 nt, Artificial Sequence
  Description of Artificial Sequence: Synthetic oligonucleotide
cuuuuaccccauuuauagc

SEQ ID NO: 591949 - RNA, 19 nt, Artificial Sequence
  Description of Artificial Sequence: Synthetic oligonucleotide
uauucgacuugugagaauu

SEQ ID NO: 591950 - RNA, 19 nt, Artificial Sequence
  Description of Artificial Sequence: Synthetic oligonucleotide
cugcuucuaucauuuagag

SEQ ID NO: 591951 - RNA, 19 nt, Artificial Sequence
  Description of Artificial Sequence: Synthetic oligonucleotide
ucgaauugaacgaucuauu

SEQ ID NO: 591952 - RNA, 19 nt, Artificial Sequence
  Description of Artificial Sequence: Synthetic oligonucleotide
ugacccguuugacucgagg

SEQ ID NO: 591953 - RNA, 19 nt, Artificial Sequence
  Description of Artificial Sequence: Synthetic oligonucleotide
aauagcccgcuggaaagag

SEQ ID NO: 591954 - RNA, 19 nt, Artificial Sequence
  Description of Artificial Sequence: Synthetic oligonucleotide
ucaguuauuguagcgguau

SEQ ID NO: 591955 - RNA, 19 nt, Artificial Sequence
  Description of Artificial Sequence: Synthetic oligonucleotide
uugcuaggauaucagguuc

SEQ ID NO: 591956 - RNA, 19 nt, Artificial Sequence
  Description of Artificial Sequence: Synthetic oligonucleotide
ucgucuauucauaccagua

SEQ ID NO: 591957 - RNA, 19 nt, Artificial Sequence
  Description of Artificial Sequence: Synthetic oligonucleotide
ucuaauccuagggcagugg

SEQ ID NO: 591958 - RNA, 19 nt, Artificial Sequence
  Description of Artificial Sequence: Synthetic oligonucleotide
agaauguuuucugcagagg

SEQ ID NO: 591959 - RNA, 19 nt, Artificial Sequence
  Description of Artificial Sequence: Synthetic oligonucleotide
acucuuaugguaaaaggaa

SEQ ID NO: 591960 - RNA, 19 nt, Artificial Sequence
  Description of Artificial Sequence: Synthetic oligonucleotide
guuggugcaaauauagaga

SEQ ID NO: 591961 - RNA, 19 nt, Artificial Sequence
  Description of Artificial Sequence: Synthetic oligonucleotide
aucucaaauuggucgacgu

SEQ ID NO: 591962 - RNA, 19 nt, Artificial Sequence
  Description of Artificial Sequence: Synthetic oligonucleotide
cugugaaauaggcucuccc

SEQ ID NO: 591963 - RNA, 19 nt, Artificial Sequence
  Description of Artificial Sequence: Synthetic oligonucleotide
uaauccuagggcaguggga

SEQ ID NO: 591964 - RNA, 19 nt, Artificial Sequence
  Description of Artificial Sequence: Synthetic oligonucleotide
auucccuuauuuguaccgg

SEQ ID NO: 591965 - RNA, 19 nt, Artificial Sequence
  Description of Artificial Sequence: Synthetic oligonucleotide
cucgagguuuugaaauugc

SEQ ID NO: 591966 - RNA, 19 nt, Artificial Sequence
  Description of Artificial Sequence: Synthetic oligonucleotide
uuguagcgguauaaacugc

SEQ ID NO: 591967 - RNA, 19 nt, Artificial Sequence
  Description of Artificial Sequence: Synthetic oligonucleotide
ucucaaauuggucgacguc

SEQ ID NO: 591968 - RNA, 19 nt, Artificial Sequence
  Description of Artificial Sequence: Synthetic oligonucleotide
auuauucgacuugugagaa

SEQ ID NO: 591969 - RNA, 19 nt, Artificial Sequence
  Description of Artificial Sequence: Synthetic oligonucleotide
cuggauacccugaauuauc

SEQ ID NO: 591970 - RNA, 19 nt, Artificial Sequence
  Description of Artificial Sequence: Synthetic oligonucleotide
auucuaauuguugcucuug

SEQ ID NO: 591971 - RNA, 19 nt, Artificial Sequence
  Description of Artificial Sequence: Synthetic oligonucleotide
aaaucccguccgucacacc

SEQ ID NO: 591972 - RNA, 19 nt, Artificial Sequence
  Description of Artificial Sequence: Synthetic oligonucleotide
guuugacucgaggacuucg

SEQ ID NO: 591973 - RNA, 19 nt, Artificial Sequence
  Description of Artificial Sequence: Synthetic oligonucleotide
ugcuucuaucauuuagagu

SEQ ID NO: 591974 - RNA, 19 nt, Artificial Sequence
  Description of Artificial Sequence: Synthetic oligonucleotide
ucaaaucccguccgucaca

SEQ ID NO: 591975 - RNA, 19 nt, Artificial Sequence
  Description of Artificial Sequence: Synthetic oligonucleotide
aggauaucagguucaugga

SEQ ID NO: 591976 - RNA, 19 nt, Artificial Sequence
  Description of Artificial Sequence: Synthetic oligonucleotide
uccaacaaauuuugcucgu

SEQ ID NO: 591977 - RNA, 19 nt, Artificial Sequence
  Description of Artificial Sequence: Synthetic oligonucleotide
aacucauagugcagcauga

SEQ ID NO: 591978 - RNA, 19 nt, Artificial Sequence
  Description of Artificial Sequence: Synthetic oligonucleotide
gacuaauuguuacaccugu

SEQ ID NO: 591979 - RNA, 19 nt, Artificial Sequence
  Description of Artificial Sequence: Synthetic oligonucleotide
guacugccccaauaggucc

SEQ ID NO: 591980 - RNA, 19 nt, Artificial Sequence
  Description of Artificial Sequence: Synthetic oligonucleotide
aaggaaugucugauaagga

SEQ ID NO: 591981 - RNA, 19 nt, Artificial Sequence
  Description of Artificial Sequence: Synthetic oligonucleotide
aguuauuguagcgguauaa

SEQ ID NO: 591982 - RNA, 19 nt, Artificial Sequence
  Description of Artificial Sequence: Synthetic oligonucleotide
uuggucgacgucuggaaau

SEQ ID NO: 591983 - RNA, 19 nt, Artificial Sequence
  Description of Artificial Sequence: Synthetic oligonucleotide
cucguacugccccaauagg

SEQ ID NO: 591984 - RNA, 19 nt, Artificial Sequence
  Description of Artificial Sequence: Synthetic oligonucleotide
agccaaucucccuucuaag

SEQ ID NO: 591985 - RNA, 19 nt, Artificial Sequence
  Description of Artificial Sequence: Synthetic oligonucleotide
ugcuggauacccugaauua

SEQ ID NO: 591986 - RNA, 19 nt, Artificial Sequence
  Description of Artificial Sequence: Synthetic oligonucleotide
guuucuacgacugguccac

SEQ ID NO: 591987 - RNA, 19 nt, Artificial Sequence
  Description of Artificial Sequence: Synthetic oligonucleotide
auggugauuuuaugagugu

SEQ ID NO: 591988 - RNA, 19 nt, Artificial Sequence
  Description of Artificial Sequence: Synthetic oligonucleotide
caaacgauaaucuucuauu

SEQ ID NO: 591989 - RNA, 19 nt, Artificial Sequence
  Description of Artificial Sequence: Synthetic oligonucleotide
agaugcucgagguuuugaa

SEQ ID NO: 591990 - RNA, 19 nt, Artificial Sequence
  Description of Artificial Sequence: Synthetic oligonucleotide
uuauagccgucagaauuug

SEQ ID NO: 591991 - RNA, 19 nt, Artificial Sequence
  Description of Artificial Sequence: Synthetic oligonucleotide
ucuacgacugguccacuuu

SEQ ID NO: 591992 - RNA, 19 nt, Artificial Sequence
  Description of Artificial Sequence: Synthetic oligonucleotide
gaagaugacccguuugacu

SEQ ID NO: 591993 - RNA, 19 nt, Artificial Sequence
  Description of Artificial Sequence: Synthetic oligonucleotide
aaauagcccgcuggaaaga

SEQ ID NO: 591994 - RNA, 19 nt, Artificial Sequence
  Description of Artificial Sequence: Synthetic oligonucleotide
gaugcucgagguuuugaaa

SEQ ID NO: 591995 - RNA, 19 nt, Artificial Sequence
  Description of Artificial Sequence: Synthetic oligonucleotide
ugauagcaugacagaaguc

SEQ ID NO: 591996 - RNA, 19 nt, Artificial Sequence
  Description of Artificial Sequence: Synthetic oligonucleotide
aauaugcuuugcagaauau

SEQ ID NO: 591997 - RNA, 19 nt, Artificial Sequence
  Description of Artificial Sequence: Synthetic oligonucleotide
uucggaugugacucuuaug

SEQ ID NO: 591998 - RNA, 19 nt, Artificial Sequence
  Description of Artificial Sequence: Synthetic oligonucleotide
caaauuggucgacgucugg

SEQ ID NO: 591999 - RNA, 19 nt, Artificial Sequence
  Description of Artificial Sequence: Synthetic oligonucleotide
cucuuaugguaaaaggaaa

SEQ ID NO: 592000 - RNA, 19 nt, Artificial Sequence
  Description of Artificial Sequence: Synthetic oligonucleotide
uucgacuugugagaauuuc

SEQ ID NO: 592001 - RNA, 19 nt, Artificial Sequence
  Description of Artificial Sequence: Synthetic oligonucleotide
ugggaauaacaggacacaa

SEQ ID NO: 592002 - RNA, 19 nt, Artificial Sequence
  Description of Artificial Sequence: Synthetic oligonucleotide
uuaucucaaauuggucgac

SEQ ID NO: 592003 - RNA, 19 nt, Artificial Sequence
  Description of Artificial Sequence: Synthetic oligonucleotide
auagccgucagaauuugau

SEQ ID NO: 592004 - RNA, 19 nt, Artificial Sequence
  Description of Artificial Sequence: Synthetic oligonucleotide
ugccccaauagguccauuc

SEQ ID NO: 592005 - RNA, 19 nt, Artificial Sequence
  Description of Artificial Sequence: Synthetic oligonucleotide
cucuguaucuagucuuauc

SEQ ID NO: 592006 - RNA, 19 nt, Artificial Sequence
  Description of Artificial Sequence: Synthetic oligonucleotide
uuaccccauuuauagccgu

SEQ ID NO: 592007 - RNA, 19 nt, Artificial Sequence
  Description of Artificial Sequence: Synthetic oligonucleotide
uccuagggcagugggaugu

SEQ ID NO: 592008 - RNA, 19 nt, Artificial Sequence
  Description of Artificial Sequence: Synthetic oligonucleotide
uacgacugguccacuuucu

SEQ ID NO: 592009 - RNA, 19 nt, Artificial Sequence
  Description of Artificial Sequence: Synthetic oligonucleotide
uucaugcauugcacuaggu

SEQ ID NO: 592010 - RNA, 19 nt, Artificial Sequence
  Description of Artificial Sequence: Synthetic oligonucleotide
cauuccaaggaaugucuga

SEQ ID NO: 592011 - RNA, 19 nt, Artificial Sequence
  Description of Artificial Sequence: Synthetic oligonucleotide
guuauuguagcgguauaaa

SEQ ID NO: 592012 - RNA, 19 nt, Artificial Sequence
  Description of Artificial Sequence: Synthetic oligonucleotide
gcuagcagauuacaaauaa

SEQ ID NO: 592013 - RNA, 19 nt, Artificial Sequence
  Description of Artificial Sequence: Synthetic oligonucleotide
uucuaauccuagggcagug

SEQ ID NO: 592014 - RNA, 19 nt, Artificial Sequence
  Description of Artificial Sequence: Synthetic oligonucleotide
uggccaacuucuaauccua

SEQ ID NO: 592015 - RNA, 19 nt, Artificial Sequence
  Description of Artificial Sequence: Synthetic oligonucleotide
uccucuguaucuagucuua

SEQ ID NO: 592016 - RNA, 19 nt, Artificial Sequence
  Description of Artificial Sequence: Synthetic oligonucleotide
uggugauuuuaugagugua

SEQ ID NO: 592017 - RNA, 19 nt, Artificial Sequence
  Description of Artificial Sequence: Synthetic oligonucleotide
auuggucgacgucuggaaa

SEQ ID NO: 592018 - RNA, 19 nt, Artificial Sequence
  Description of Artificial Sequence: Synthetic oligonucleotide
cuacgacugguccacuuuc

SEQ ID NO: 592019 - RNA, 19 nt, Artificial Sequence
  Description of Artificial Sequence: Synthetic oligonucleotide
ugugacucuuaugguaaaa

SEQ ID NO: 592020 - RNA, 19 nt, Artificial Sequence
  Description of Artificial Sequence: Synthetic oligonucleotide
cacggccaaaguauuugac

SEQ ID NO: 592021 - RNA, 19 nt, Artificial Sequence
  Description of Artificial Sequence: Synthetic oligonucleotide
gccucauucuuccaucagc

SEQ ID NO: 592022 - RNA, 19 nt, Artificial Sequence
  Description of Artificial Sequence: Synthetic oligonucleotide
aauugguauuccaggcaau

SEQ ID NO: 592023 - RNA, 19 nt, Artificial Sequence
  Description of Artificial Sequence: Synthetic oligonucleotide
accagguccaacaaauuuu

SEQ ID NO: 592024 - RNA, 19 nt, Artificial Sequence
  Description of Artificial Sequence: Synthetic oligonucleotide
ucucgguaaugaagucucu

SEQ ID NO: 592025 - RNA, 19 nt, Artificial Sequence
  Description of Artificial Sequence: Synthetic oligonucleotide
uuauucgacuugugagaau

SEQ ID NO: 592026 - RNA, 19 nt, Artificial Sequence
  Description of Artificial Sequence: Synthetic oligonucleotide
caaaucccguccgucacac

SEQ ID NO: 592027 - RNA, 19 nt, Artificial Sequence
  Description of Artificial Sequence: Synthetic oligonucleotide
aaguucucgucuauucaua

SEQ ID NO: 592028 - RNA, 19 nt, Artificial Sequence
  Description of Artificial Sequence: Synthetic oligonucleotide
gucgaauugaacgaucuau

SEQ ID NO: 592029 - RNA, 19 nt, Artificial Sequence
  Description of Artificial Sequence: Synthetic oligonucleotide
ccagcaacuacuaaauuua

SEQ ID NO: 592030 - RNA, 19 nt, Artificial Sequence
  Description of Artificial Sequence: Synthetic oligonucleotide
uugugggauucuaccugcu

SEQ ID NO: 592031 - RNA, 19 nt, Artificial Sequence
  Description of Artificial Sequence: Synthetic oligonucleotide
ggauguuuaaucuuccguu

SEQ ID NO: 592032 - RNA, 19 nt, Artificial Sequence
  Description of Artificial Sequence: Synthetic oligonucleotide
uaccccauuuauagccguc

SEQ ID NO: 592033 - RNA, 19 nt, Artificial Sequence
  Description of Artificial Sequence: Synthetic oligonucleotide
ggaaccuuaacuguuucua

SEQ ID NO: 592034 - RNA, 19 nt, Artificial Sequence
  Description of Artificial Sequence: Synthetic oligonucleotide
uucuacgacugguccacuu

SEQ ID NO: 592035 - RNA, 19 nt, Artificial Sequence
  Description of Artificial Sequence: Synthetic oligonucleotide
ugguugcauaaggaggaaa

SEQ ID NO: 592036 - RNA, 19 nt, Artificial Sequence
  Description of Artificial Sequence: Synthetic oligonucleotide
ccaggcaauuuaauaucag

SEQ ID NO: 592037 - RNA, 19 nt, Artificial Sequence
  Description of Artificial Sequence: Synthetic oligonucleotide
ggauacccugaauuaucug

SEQ ID NO: 592038 - RNA, 19 nt, Artificial Sequence
  Description of Artificial Sequence: Synthetic oligonucleotide
agaugccauagaagaugac

SEQ ID NO: 592039 - RNA, 19 nt, Artificial Sequence
  Description of Artificial Sequence: Synthetic oligonucleotide
gaugacccguuugacucga

SEQ ID NO: 592040 - RNA, 19 nt, Artificial Sequence
  Description of Artificial Sequence: Synthetic oligonucleotide
augugacucuuaugguaaa

SEQ ID NO: 592041 - RNA, 19 nt, Artificial Sequence
  Description of Artificial Sequence: Synthetic oligonucleotide
cagcaguuauagcuggaga

SEQ ID NO: 592042 - RNA, 19 nt, Artificial Sequence
  Description of Artificial Sequence: Synthetic oligonucleotide
uaccggcuauuuugaaauc

SEQ ID NO: 592043 - RNA, 19 nt, Artificial Sequence
  Description of Artificial Sequence: Synthetic oligonucleotide
gccgucagaauuugaucug

SEQ ID NO: 592044 - RNA, 19 nt, Artificial Sequence
  Description of Artificial Sequence: Synthetic oligonucleotide
ugcccaaguucucgucuau

SEQ ID NO: 592045 - RNA, 19 nt, Artificial Sequence
  Description of Artificial Sequence: Synthetic oligonucleotide
uaucuaccucacagcuuau

SEQ ID NO: 592046 - RNA, 19 nt, Artificial Sequence
  Description of Artificial Sequence: Synthetic oligonucleotide
gcucguuuugauaauggaa

SEQ ID NO: 592047 - RNA, 19 nt, Artificial Sequence
  Description of Artificial Sequence: Synthetic oligonucleotide
cagcaacuacuaaauuuaa

SEQ ID NO: 592048 - RNA, 19 nt, Artificial Sequence
  Description of Artificial Sequence: Synthetic oligonucleotide
gcaaacgauaaucuucuau

SEQ ID NO: 592049 - RNA, 19 nt, Artificial Sequence
  Description of Artificial Sequence: Synthetic oligonucleotide
acgacugguccacuuucuu

SEQ ID NO: 592050 - RNA, 19 nt, Artificial Sequence
  Description of Artificial Sequence: Synthetic oligonucleotide
ccguuggucaagcugugug

SEQ ID NO: 592051 - RNA, 19 nt, Artificial Sequence
  Description of Artificial Sequence: Synthetic oligonucleotide
cguacugccccaauagguc

SEQ ID NO: 592052 - RNA, 19 nt, Artificial Sequence
  Description of Artificial Sequence: Synthetic oligonucleotide
uggucgacgucuggaaauu

SEQ ID NO: 592053 - RNA, 19 nt, Artificial Sequence
  Description of Artificial Sequence: Synthetic oligonucleotide
cucgucuauucauaccagu

SEQ ID NO: 592054 - RNA, 19 nt, Artificial Sequence
  Description of Artificial Sequence: Synthetic oligonucleotide
ggauaucagguucauggau

SEQ ID NO: 592055 - RNA, 19 nt, Artificial Sequence
  Description of Artificial Sequence: Synthetic oligonucleotide
ccaaauucuaauuguugcu

SEQ ID NO: 592056 - RNA, 19 nt, Artificial Sequence
  Description of Artificial Sequence: Synthetic oligonucleotide
gggaauaacaggacacaaa

SEQ ID NO: 592057 - RNA, 19 nt, Artificial Sequence
  Description of Artificial Sequence: Synthetic oligonucleotide
agcaaacgauaaucuucua

SEQ ID NO: 592058 - RNA, 19 nt, Artificial Sequence
  Description of Artificial Sequence: Synthetic oligonucleotide
aucuuccguuggucaagcu

SEQ ID NO: 592059 - RNA, 19 nt, Artificial Sequence
  Description of Artificial Sequence: Synthetic oligonucleotide
gaaacucauagugcagcau

SEQ ID NO: 592060 - RNA, 19 nt, Artificial Sequence
  Description of Artificial Sequence: Synthetic oligonucleotide
caugcccaaguucucgucu

SEQ ID NO: 592061 - RNA, 19 nt, Artificial Sequence
  Description of Artificial Sequence: Synthetic oligonucleotide
uuucuacgacugguccacu

SEQ ID NO: 592062 - RNA, 19 nt, Artificial Sequence
  Description of Artificial Sequence: Synthetic oligonucleotide
ucccguccgucacaccuuu

SEQ ID NO: 592063 - RNA, 19 nt, Artificial Sequence
  Description of Artificial Sequence: Synthetic oligonucleotide
gcauugcacuagguguugg

SEQ ID NO: 592064 - RNA, 19 nt, Artificial Sequence
  Description of Artificial Sequence: Synthetic oligonucleotide
gguaaccaaucccacugcu

SEQ ID NO: 592065 - RNA, 19 nt, Artificial Sequence
  Description of Artificial Sequence: Synthetic oligonucleotide
cauuuauagccgucagaau

SEQ ID NO: 592066 - RNA, 19 nt, Artificial Sequence
  Description of Artificial Sequence: Synthetic oligonucleotide
ccggcuauuuugaaaucca

SEQ ID NO: 592067 - RNA, 19 nt, Artificial Sequence
  Description of Artificial Sequence: Synthetic oligonucleotide
ccucauucuuccaucagcu

SEQ ID NO: 592068 - RNA, 19 nt, Artificial Sequence
  Description of Artificial Sequence: Synthetic oligonucleotide
cuaccucacagcuuauauu

SEQ ID NO: 592069 - RNA, 19 nt, Artificial Sequence
  Description of Artificial Sequence: Synthetic oligonucleotide
gcugcagaagcaccauuaa

SEQ ID NO: 592070 - RNA, 19 nt, Artificial Sequence
  Description of Artificial Sequence: Synthetic oligonucleotide
cauaucuaccucacagcuu

SEQ ID NO: 592071 - RNA, 19 nt, Artificial Sequence
  Description of Artificial Sequence: Synthetic oligonucleotide
auagcccgcuggaaagaga

SEQ ID NO: 592072 - RNA, 19 nt, Artificial Sequence
  Description of Artificial Sequence: Synthetic oligonucleotide
cuggugaaggggugaauau

SEQ ID NO: 592073 - RNA, 19 nt, Artificial Sequence
  Description of Artificial Sequence: Synthetic oligonucleotide
cauaacaauuuggcuuuua

SEQ ID NO: 592074 - RNA, 19 nt, Artificial Sequence
  Description of Artificial Sequence: Synthetic oligonucleotide
cuucuaauccuagggcagu

SEQ ID NO: 592075 - RNA, 19 nt, Artificial Sequence
  Description of Artificial Sequence: Synthetic oligonucleotide
cacaccuuuuguauucauu

SEQ ID NO: 592076 - RNA, 19 nt, Artificial Sequence
  Description of Artificial Sequence: Synthetic oligonucleotide
agcccgcuggaaagagagg

SEQ ID NO: 592077 - RNA, 19 nt, Artificial Sequence
  Description of Artificial Sequence: Synthetic oligonucleotide
gucuguccccucugaaaua

SEQ ID NO: 592078 - RNA, 19 nt, Artificial Sequence
  Description of Artificial Sequence: Synthetic oligonucleotide
acauaacaauuuggcuuuu

SEQ ID NO: 592079 - RNA, 19 nt, Artificial Sequence
  Description of Artificial Sequence: Synthetic oligonucleotide
ggucgaauugaacgaucua

SEQ ID NO: 592080 - RNA, 19 nt, Artificial Sequence
  Description of Artificial Sequence: Synthetic oligonucleotide
cgucuauucauaccaguaa

SEQ ID NO: 592081 - RNA, 19 nt, Artificial Sequence
  Description of Artificial Sequence: Synthetic oligonucleotide
cugcagaagcaccauuaau

SEQ ID NO: 592082 - RNA, 19 nt, Artificial Sequence
  Description of Artificial Sequence: Synthetic oligonucleotide
cccgcuggaaagagagguc

SEQ ID NO: 592083 - RNA, 19 nt, Artificial Sequence
  Description of Artificial Sequence: Synthetic oligonucleotide
gcuggauacccugaauuau

SEQ ID NO: 592084 - RNA, 19 nt, Artificial Sequence
  Description of Artificial Sequence: Synthetic oligonucleotide
gucgacgucuggaaauuuu

SEQ ID NO: 592085 - RNA, 19 nt, Artificial Sequence
  Description of Artificial Sequence: Synthetic oligonucleotide
cucgguaaugaagucucuu

SEQ ID NO: 592086 - RNA, 19 nt, Artificial Sequence
  Description of Artificial Sequence: Synthetic oligonucleotide
gcccgcuggaaagagaggu

SEQ ID NO: 592087 - RNA, 19 nt, Artificial Sequence
  Description of Artificial Sequence: Synthetic oligonucleotide
augacccguuugacucgag

SEQ ID NO: 592088 - RNA, 19 nt, Artificial Sequence
  Description of Artificial Sequence: Synthetic oligonucleotide
ccgucagaauuugaucuga

SEQ ID NO: 592089 - RNA, 19 nt, Artificial Sequence
  Description of Artificial Sequence: Synthetic oligonucleotide
cccuuauuuguaccggcua

SEQ ID NO: 592090 - RNA, 19 nt, Artificial Sequence
  Description of Artificial Sequence: Synthetic oligonucleotide
aucccguccgucacaccuu

SEQ ID NO: 592091 - RNA, 19 nt, Artificial Sequence
  Description of Artificial Sequence: Synthetic oligonucleotide
caccggcaacagcggauga

SEQ ID NO: 592092 - RNA, 19 nt, Artificial Sequence
  Description of Artificial Sequence: Synthetic oligonucleotide
cguuuugauaauggaaccu

SEQ ID NO: 592093 - RNA, 19 nt, Artificial Sequence
  Description of Artificial Sequence: Synthetic oligonucleotide
cuccagcaacuacuaaauu

SEQ ID NO: 592094 - RNA, 19 nt, Artificial Sequence
  Description of Artificial Sequence: Synthetic oligonucleotide
agccuguaaugcaguuauu

SEQ ID NO: 592095 - RNA, 19 nt, Artificial Sequence
  Description of Artificial Sequence: Synthetic oligonucleotide
gcuaggauaucagguucau

SEQ ID NO: 592096 - RNA, 19 nt, Artificial Sequence
  Description of Artificial Sequence: Synthetic oligonucleotide
ggaucacggccaaaguauu

SEQ ID NO: 592097 - RNA, 19 nt, Artificial Sequence
  Description of Artificial Sequence: Synthetic oligonucleotide
cccguuugacucgaggacu

SEQ ID NO: 592098 - RNA, 19 nt, Artificial Sequence
  Description of Artificial Sequence: Synthetic oligonucleotide
cuacucguacugccccaau

SEQ ID NO: 592099 - RNA, 19 nt, Artificial Sequence
  Description of Artificial Sequence: Synthetic oligonucleotide
cccuucuaagguaguuugu

SEQ ID NO: 592100 - RNA, 19 nt, Artificial Sequence
  Description of Artificial Sequence: Synthetic oligonucleotide
ccauuacaaugcugcuucu

SEQ ID NO: 592101 - RNA, 19 nt, Artificial Sequence
  Description of Artificial Sequence: Synthetic oligonucleotide
ccguuugacucgaggacuu

SEQ ID NO: 592102 - RNA, 19 nt, Artificial Sequence
  Description of Artificial Sequence: Synthetic oligonucleotide
cggcuauuuugaaauccau

SEQ ID NO: 592103 - RNA, 19 nt, Artificial Sequence
  Description of Artificial Sequence: Synthetic oligonucleotide
ggucgacgucuggaaauuu

SEQ ID NO: 592104 - RNA, 19 nt, Artificial Sequence
  Description of Artificial Sequence: Synthetic oligonucleotide
cccguccgucacaccuuuu

SEQ ID NO: 592105 - RNA, 19 nt, Artificial Sequence
  Description of Artificial Sequence: Synthetic oligonucleotide
uaaguuaggacaaugauag

SEQ ID NO: 592106 - RNA, 19 nt, Artificial Sequence
  Description of Artificial Sequence: Synthetic oligonucleotide
aaagcuauuaucuaggaga

SEQ ID NO: 592107 - RNA, 19 nt, Artificial Sequence
  Description of Artificial Sequence: Synthetic oligonucleotide
uguaauucaauucugaacu

SEQ ID NO: 592108 - RNA, 19 nt, Artificial Sequence
  Description of Artificial Sequence: Synthetic oligonucleotide
acaucuuacacacugaggc

SEQ ID NO: 592109 - RNA, 19 nt, Artificial Sequence
  Description of Artificial Sequence: Synthetic oligonucleotide
uuuaaggaaagaaugaacc

SEQ ID NO: 592110 - RNA, 19 nt, Artificial Sequence
  Description of Artificial Sequence: Synthetic oligonucleotide
caaucuaaggcaaacaugg

SEQ ID NO: 592111 - RNA, 19 nt, Artificial Sequence
  Description of Artificial Sequence: Synthetic oligonucleotide
uuaagguuaucucaaaugc

SEQ ID NO: 592112 - RNA, 19 nt, Artificial Sequence
  Description of Artificial Sequence: Synthetic oligonucleotide
uacuagaugucuaagacag

SEQ ID NO: 592113 - RNA, 19 nt, Artificial Sequence
  Description of Artificial Sequence: Synthetic oligonucleotide
auuacuugaagaaaggccc

SEQ ID NO: 592114 - RNA, 19 nt, Artificial Sequence
  Description of Artificial Sequence: Synthetic oligonucleotide
aauagguagggcuaugauc

SEQ ID NO: 592115 - RNA, 19 nt, Artificial Sequence
  Description of Artificial Sequence: Synthetic oligonucleotide
uguacuaacagcuugcugu

SEQ ID NO: 592116 - RNA, 19 nt, Artificial Sequence
  Description of Artificial Sequence: Synthetic oligonucleotide
ugaacuuucucaaacuuag

SEQ ID NO: 592117 - RNA, 19 nt, Artificial Sequence
  Description of Artificial Sequence: Synthetic oligonucleotide
agaaaggccccucugaugc

SEQ ID NO: 592118 - RNA, 19 nt, Artificial Sequence
  Description of Artificial Sequence: Synthetic oligonucleotide
aauuagcuagccuauugac

SEQ ID NO: 592119 - RNA, 19 nt, Artificial Sequence
  Description of Artificial Sequence: Synthetic oligonucleotide
acuaauaaaccuuuaagga

SEQ ID NO: 592120 - RNA, 19 nt, Artificial Sequence
  Description of Artificial Sequence: Synthetic oligonucleotide
aauucggaugucuggauac

SEQ ID NO: 592121 - RNA, 19 nt, Artificial Sequence
  Description of Artificial Sequence: Synthetic oligonucleotide
ugggauugaauccauaugc

SEQ ID NO: 592122 - RNA, 19 nt, Artificial Sequence
  Description of Artificial Sequence: Synthetic oligonucleotide
uuuacuagaugucuaagac

SEQ ID NO: 592123 - RNA, 19 nt, Artificial Sequence
  Description of Artificial Sequence: Synthetic oligonucleotide
uuuaagguuaucucaaaug

SEQ ID NO: 592124 - RNA, 19 nt, Artificial Sequence
  Description of Artificial Sequence: Synthetic oligonucleotide
auagguagggcuaugaucg

SEQ ID NO: 592125 - RNA, 19 nt, Artificial Sequence
  Description of Artificial Sequence: Synthetic oligonucleotide
aaaauuagcuagccuauug

SEQ ID NO: 592126 - RNA, 19 nt, Artificial Sequence
  Description of Artificial Sequence: Synthetic oligonucleotide
gaugaugugggauugaauc

SEQ ID NO: 592127 - RNA, 19 nt, Artificial Sequence
  Description of Artificial Sequence: Synthetic oligonucleotide
ucuaaggcaaacauggaga

SEQ ID NO: 592128 - RNA, 19 nt, Artificial Sequence
  Description of Artificial Sequence: Synthetic oligonucleotide
cauuacuugaagaaaggcc

SEQ ID NO: 592129 - RNA, 19 nt, Artificial Sequence
  Description of Artificial Sequence: Synthetic oligonucleotide
uaucuaggagacaaaauca

SEQ ID NO: 592130 - RNA, 19 nt, Artificial Sequence
  Description of Artificial Sequence: Synthetic oligonucleotide
agaaacuauuaacaguggg

SEQ ID NO: 592131 - RNA, 19 nt, Artificial Sequence
  Description of Artificial Sequence: Synthetic oligonucleotide
aaacuauuaacagugggcu

SEQ ID NO: 592132 - RNA, 19 nt, Artificial Sequence
  Description of Artificial Sequence: Synthetic oligonucleotide
ucuuagucgagacagccgc

SEQ ID NO: 592133 - RNA, 19 nt, Artificial Sequence
  Description of Artificial Sequence: Synthetic oligonucleotide
ugaacaaguuguugcaugg

SEQ ID NO: 592134 - RNA, 19 nt, Artificial Sequence
  Description of Artificial Sequence: Synthetic oligonucleotide
ugaugcuaaacuuuacaag

SEQ ID NO: 592135 - RNA, 19 nt, Artificial Sequence
  Description of Artificial Sequence: Synthetic oligonucleotide
aaauuagcuagccuauuga

SEQ ID NO: 592136 - RNA, 19 nt, Artificial Sequence
  Description of Artificial Sequence: Synthetic oligonucleotide
aaugcaccuguugacauac

SEQ ID NO: 592137 - RNA, 19 nt, Artificial Sequence
  Description of Artificial Sequence: Synthetic oligonucleotide
aaguuacaaguaguaaugc

SEQ ID NO: 592138 - RNA, 19 nt, Artificial Sequence
  Description of Artificial Sequence: Synthetic oligonucleotide
uuagcuagccuauugacaa

SEQ ID NO: 592139 - RNA, 19 nt, Artificial Sequence
  Description of Artificial Sequence: Synthetic oligonucleotide
gaaacuauuaacagugggc

SEQ ID NO: 592140 - RNA, 19 nt, Artificial Sequence
  Description of Artificial Sequence: Synthetic oligonucleotide
uaaugcuagugccauaacc

SEQ ID NO: 592141 - RNA, 19 nt, Artificial Sequence
  Description of Artificial Sequence: Synthetic oligonucleotide
cuaugaucgaugauguggg

SEQ ID NO: 592142 - RNA, 19 nt, Artificial Sequence
  Description of Artificial Sequence: Synthetic oligonucleotide
ucagcaugugccaacaaug

SEQ ID NO: 592143 - RNA, 19 nt, Artificial Sequence
  Description of Artificial Sequence: Synthetic oligonucleotide
uuuaaguuaggacaaugau

SEQ ID NO: 592144 - RNA, 19 nt, Artificial Sequence
  Description of Artificial Sequence: Synthetic oligonucleotide
aagaaugaaccaucacggg

SEQ ID NO: 592145 - RNA, 19 nt, Artificial Sequence
  Description of Artificial Sequence: Synthetic oligonucleotide
acaaguaguaaugccacgc

SEQ ID NO: 592146 - RNA, 19 nt, Artificial Sequence
  Description of Artificial Sequence: Synthetic oligonucleotide
aauuuuacuagaugucuaa

SEQ ID NO: 592147 - RNA, 19 nt, Artificial Sequence
  Description of Artificial Sequence: Synthetic oligonucleotide
uguaugugcagaauucagc

SEQ ID NO: 592148 - RNA, 19 nt, Artificial Sequence
  Description of Artificial Sequence: Synthetic oligonucleotide
aaauggaauguccauuacu

SEQ ID NO: 592149 - RNA, 19 nt, Artificial Sequence
  Description of Artificial Sequence: Synthetic oligonucleotide
gaaguuacaaguaguaaug

SEQ ID NO: 592150 - RNA, 19 nt, Artificial Sequence
  Description of Artificial Sequence: Synthetic oligonucleotide
uuuuacuagaugucuaaga

SEQ ID NO: 592151 - RNA, 19 nt, Artificial Sequence
  Description of Artificial Sequence: Synthetic oligonucleotide
ucucaaaugcaccuguuga

SEQ ID NO: 592152 - RNA, 19 nt, Artificial Sequence
  Description of Artificial Sequence: Synthetic oligonucleotide
agaaguuacaaguaguaau

SEQ ID NO: 592153 - RNA, 19 nt, Artificial Sequence
  Description of Artificial Sequence: Synthetic oligonucleotide
ucaaucuaaggcaaacaug

SEQ ID NO: 592154 - RNA, 19 nt, Artificial Sequence
  Description of Artificial Sequence: Synthetic oligonucleotide
aagauguggagucuggagu

SEQ ID NO: 592155 - RNA, 19 nt, Artificial Sequence
  Description of Artificial Sequence: Synthetic oligonucleotide
uucauaaugucagucacgc

SEQ ID NO: 592156 - RNA, 19 nt, Artificial Sequence
  Description of Artificial Sequence: Synthetic oligonucleotide
aaugcuagugccauaacca

SEQ ID NO: 592157 - RNA, 19 nt, Artificial Sequence
  Description of Artificial Sequence: Synthetic oligonucleotide
ucugauuuauagagcacag

SEQ ID NO: 592158 - RNA, 19 nt, Artificial Sequence
  Description of Artificial Sequence: Synthetic oligonucleotide
ugccauaaagcuaauugug

SEQ ID NO: 592159 - RNA, 19 nt, Artificial Sequence
  Description of Artificial Sequence: Synthetic oligonucleotide
uuaaaccuauuaauacuag

SEQ ID NO: 592160 - RNA, 19 nt, Artificial Sequence
  Description of Artificial Sequence: Synthetic oligonucleotide
uugcucaagaagaaaacca

SEQ ID NO: 592161 - RNA, 19 nt, Artificial Sequence
  Description of Artificial Sequence: Synthetic oligonucleotide
accuauuaauacuaguuug

SEQ ID NO: 592162 - RNA, 19 nt, Artificial Sequence
  Description of Artificial Sequence: Synthetic oligonucleotide
ucaaacacccgccuguacc

SEQ ID NO: 592163 - RNA, 19 nt, Artificial Sequence
  Description of Artificial Sequence: Synthetic oligonucleotide
gacaguuaaagcuauuauc

SEQ ID NO: 592164 - RNA, 19 nt, Artificial Sequence
  Description of Artificial Sequence: Synthetic oligonucleotide
uuacaaguaguaaugccac

SEQ ID NO: 592165 - RNA, 19 nt, Artificial Sequence
  Description of Artificial Sequence: Synthetic oligonucleotide
agcaaucauauuaacaagg

SEQ ID NO: 592166 - RNA, 19 nt, Artificial Sequence
  Description of Artificial Sequence: Synthetic oligonucleotide
auugacaaguccucaguuc

SEQ ID NO: 592167 - RNA, 19 nt, Artificial Sequence
  Description of Artificial Sequence: Synthetic oligonucleotide
aaucccuuaguguaaaaua

SEQ ID NO: 592168 - RNA, 19 nt, Artificial Sequence
  Description of Artificial Sequence: Synthetic oligonucleotide
gcuacucacauucagaaag

SEQ ID NO: 592169 - RNA, 19 nt, Artificial Sequence
  Description of Artificial Sequence: Synthetic oligonucleotide
uuggauuugacuuuagguu

SEQ ID NO: 592170 - RNA, 19 nt, Artificial Sequence
  Description of Artificial Sequence: Synthetic oligonucleotide
aagcuauuaucuaggagac

SEQ ID NO: 592171 - RNA, 19 nt, Artificial Sequence
  Description of Artificial Sequence: Synthetic oligonucleotide
uuuuguagcuauauggcua

SEQ ID NO: 592172 - RNA, 19 nt, Artificial Sequence
  Description of Artificial Sequence: Synthetic oligonucleotide
aauaacccgcauguacucc

SEQ ID NO: 592173 - RNA, 19 nt, Artificial Sequence
  Description of Artificial Sequence: Synthetic oligonucleotide
aaauaugacaacagacgag

SEQ ID NO: 592174 - RNA, 19 nt, Artificial Sequence
  Description of Artificial Sequence: Synthetic oligonucleotide
aaccuauuaauacuaguuu

SEQ ID NO: 592175 - RNA, 19 nt, Artificial Sequence
  Description of Artificial Sequence: Synthetic oligonucleotide
aaaagaaguuacaaguagu

SEQ ID NO: 592176 - RNA, 19 nt, Artificial Sequence
  Description of Artificial Sequence: Synthetic oligonucleotide
cucaucuuagucgagacag

SEQ ID NO: 592177 - RNA, 19 nt, Artificial Sequence
  Description of Artificial Sequence: Synthetic oligonucleotide
uagccuauugacaaguccu

SEQ ID NO: 592178 - RNA, 19 nt, Artificial Sequence
  Description of Artificial Sequence: Synthetic oligonucleotide
uccuguauaauuuacuguu

SEQ ID NO: 592179 - RNA, 19 nt, Artificial Sequence
  Description of Artificial Sequence: Synthetic oligonucleotide
uauggcuauaccaauuuau

SEQ ID NO: 592180 - RNA, 19 nt, Artificial Sequence
  Description of Artificial Sequence: Synthetic oligonucleotide
uacaucuuacacacugagg

SEQ ID NO: 592181 - RNA, 19 nt, Artificial Sequence
  Description of Artificial Sequence: Synthetic oligonucleotide
uacacacugaggccuaacg

SEQ ID NO: 592182 - RNA, 19 nt, Artificial Sequence
  Description of Artificial Sequence: Synthetic oligonucleotide
uaucugauaaacuuuuaua

SEQ ID NO: 592183 - RNA, 19 nt, Artificial Sequence
  Description of Artificial Sequence: Synthetic oligonucleotide
gauagaaugugccagucaa

SEQ ID NO: 592184 - RNA, 19 nt, Artificial Sequence
  Description of Artificial Sequence: Synthetic oligonucleotide
auaaugucagucacgcugc

SEQ ID NO: 592185 - RNA, 19 nt, Artificial Sequence
  Description of Artificial Sequence: Synthetic oligonucleotide
gugauaagcaaucauauua

SEQ ID NO: 592186 - RNA, 19 nt, Artificial Sequence
  Description of Artificial Sequence: Synthetic oligonucleotide
uuacuagaugucuaagaca

SEQ ID NO: 592187 - RNA, 19 nt, Artificial Sequence
  Description of Artificial Sequence: Synthetic oligonucleotide
uguguugaaaacuccagua

SEQ ID NO: 592188 - RNA, 19 nt, Artificial Sequence
  Description of Artificial Sequence: Synthetic oligonucleotide
ugcuaaacuuuacaagaug

SEQ ID NO: 592189 - RNA, 19 nt, Artificial Sequence
  Description of Artificial Sequence: Synthetic oligonucleotide
uggcuaauaacccgcaugu

SEQ ID NO: 592190 - RNA, 19 nt, Artificial Sequence
  Description of Artificial Sequence: Synthetic oligonucleotide
aacgagccugccaagaaac

SEQ ID NO: 592191 - RNA, 19 nt, Artificial Sequence
  Description of Artificial Sequence: Synthetic oligonucleotide
aaagaugcuauaugucuau

SEQ ID NO: 592192 - RNA, 19 nt, Artificial Sequence
  Description of Artificial Sequence: Synthetic oligonucleotide
ugaagauugacaggaaaga

SEQ ID NO: 592193 - RNA, 19 nt, Artificial Sequence
  Description of Artificial Sequence: Synthetic oligonucleotide
accggcacaucauuuaagg

SEQ ID NO: 592194 - RNA, 19 nt, Artificial Sequence
  Description of Artificial Sequence: Synthetic oligonucleotide
aauugguugagggagguaa

SEQ ID NO: 592195 - RNA, 19 nt, Artificial Sequence
  Description of Artificial Sequence: Synthetic oligonucleotide
aaugaaccaucacgggauc

SEQ ID NO: 592196 - RNA, 19 nt, Artificial Sequence
  Description of Artificial Sequence: Synthetic oligonucleotide
uugaacaaguuguugcaug

SEQ ID NO: 592197 - RNA, 19 nt, Artificial Sequence
  Description of Artificial Sequence: Synthetic oligonucleotide
uaaccaaugcuacucacau

SEQ ID NO: 592198 - RNA, 19 nt, Artificial Sequence
  Description of Artificial Sequence: Synthetic oligonucleotide
cuaaacuuuacaagaugug

SEQ ID NO: 592199 - RNA, 19 nt, Artificial Sequence
  Description of Artificial Sequence: Synthetic oligonucleotide
aucaaucuaaggcaaacau

SEQ ID NO: 592200 - RNA, 19 nt, Artificial Sequence
  Description of Artificial Sequence: Synthetic oligonucleotide
auauccaugcaucucauuu

SEQ ID NO: 592201 - RNA, 19 nt, Artificial Sequence
  Description of Artificial Sequence: Synthetic oligonucleotide
uguauaauuuacuguucac

SEQ ID NO: 592202 - RNA, 19 nt, Artificial Sequence
  Description of Artificial Sequence: Synthetic oligonucleotide
aacuauuaacagugggcug

SEQ ID NO: 592203 - RNA, 19 nt, Artificial Sequence
  Description of Artificial Sequence: Synthetic oligonucleotide
uuaauacuaguuugaagau

SEQ ID NO: 592204 - RNA, 19 nt, Artificial Sequence
  Description of Artificial Sequence: Synthetic oligonucleotide
cacacacacacacacacag

SEQ ID NO: 592205 - RNA, 19 nt, Artificial Sequence
  Description of Artificial Sequence: Synthetic oligonucleotide
aacaaguuguugcauggau

SEQ ID NO: 592206 - RNA, 19 nt, Artificial Sequence
  Description of Artificial Sequence: Synthetic oligonucleotide
aaagcuaauugugucacaa

SEQ ID NO: 592207 - RNA, 19 nt, Artificial Sequence
  Description of Artificial Sequence: Synthetic oligonucleotide
uguugcucaagaagaaaac

SEQ ID NO: 592208 - RNA, 19 nt, Artificial Sequence
  Description of Artificial Sequence: Synthetic oligonucleotide
cuucauaaugucagucacg

SEQ ID NO: 592209 - RNA, 19 nt, Artificial Sequence
  Description of Artificial Sequence: Synthetic oligonucleotide
cuucaauucggaugucugg

SEQ ID NO: 592210 - RNA, 19 nt, Artificial Sequence
  Description of Artificial Sequence: Synthetic oligonucleotide
uugcauggauggaagauga

SEQ ID NO: 592211 - RNA, 19 nt, Artificial Sequence
  Description of Artificial Sequence: Synthetic oligonucleotide
guuacaaguaguaaugcca

SEQ ID NO: 592212 - RNA, 19 nt, Artificial Sequence
  Description of Artificial Sequence: Synthetic oligonucleotide
aaguaguaaugccacgcca

SEQ ID NO: 592213 - RNA, 19 nt, Artificial Sequence
  Description of Artificial Sequence: Synthetic oligonucleotide
ugccacgccaagaagaaac

SEQ ID NO: 592214 - RNA, 19 nt, Artificial Sequence
  Description of Artificial Sequence: Synthetic oligonucleotide
gcuaugaucgaugaugugg

SEQ ID NO: 592215 - RNA, 19 nt, Artificial Sequence
  Description of Artificial Sequence: Synthetic oligonucleotide
uguugacauacacugguuc

SEQ ID NO: 592216 - RNA, 19 nt, Artificial Sequence
  Description of Artificial Sequence: Synthetic oligonucleotide
uuccaagagguacaacgag

SEQ ID NO: 592217 - RNA, 19 nt, Artificial Sequence
  Description of Artificial Sequence: Synthetic oligonucleotide
auaauccuguauaauuuac

SEQ ID NO: 592218 - RNA, 19 nt, Artificial Sequence
  Description of Artificial Sequence: Synthetic oligonucleotide
uggaacuugagcagcggcc

SEQ ID NO: 592219 - RNA, 19 nt, Artificial Sequence
  Description of Artificial Sequence: Synthetic oligonucleotide
ucuacaugccauaaagcua

SEQ ID NO: 592220 - RNA, 19 nt, Artificial Sequence
  Description of Artificial Sequence: Synthetic oligonucleotide
cucacacacacacacacac

SEQ ID NO: 592221 - RNA, 19 nt, Artificial Sequence
  Description of Artificial Sequence: Synthetic oligonucleotide
augccauaaagcuaauugu

SEQ ID NO: 592222 - RNA, 19 nt, Artificial Sequence
  Description of Artificial Sequence: Synthetic oligonucleotide
uuaacagugggcuggggaa

SEQ ID NO: 592223 - RNA, 19 nt, Artificial Sequence
  Description of Artificial Sequence: Synthetic oligonucleotide
uggauuuaaauaugacaac

SEQ ID NO: 592224 - RNA, 19 nt, Artificial Sequence
  Description of Artificial Sequence: Synthetic oligonucleotide
guagcuauauggcuauacc

SEQ ID NO: 592225 - RNA, 19 nt, Artificial Sequence
  Description of Artificial Sequence: Synthetic oligonucleotide
gauaccgcuggcuaauaac

SEQ ID NO: 592226 - RNA, 19 nt, Artificial Sequence
  Description of Artificial Sequence: Synthetic oligonucleotide
cugaauuuuacuagauguc

SEQ ID NO: 592227 - RNA, 19 nt, Artificial Sequence
  Description of Artificial Sequence: Synthetic oligonucleotide
agggcuaugaucgaugaug

SEQ ID NO: 592228 - RNA, 19 nt, Artificial Sequence
  Description of Artificial Sequence: Synthetic oligonucleotide
aguuaggacaaugauagaa

SEQ ID NO: 592229 - RNA, 19 nt, Artificial Sequence
  Description of Artificial Sequence: Synthetic oligonucleotide
agauguggagucuggagug

SEQ ID NO: 592230 - RNA, 19 nt, Artificial Sequence
  Description of Artificial Sequence: Synthetic oligonucleotide
aagaaacuauuaacagugg

SEQ ID NO: 592231 - RNA, 19 nt, Artificial Sequence
  Description of Artificial Sequence: Synthetic oligonucleotide
cacacacacacacacacac

SEQ ID NO: 592232 - RNA, 19 nt, Artificial Sequence
  Description of Artificial Sequence: Synthetic oligonucleotide
uagaguacucuggauauug

SEQ ID NO: 592233 - RNA, 19 nt, Artificial Sequence
  Description of Artificial Sequence: Synthetic oligonucleotide
gaauauuauauucuggauu

SEQ ID NO: 592234 - RNA, 19 nt, Artificial Sequence
  Description of Artificial Sequence: Synthetic oligonucleotide
uacaaguaguaaugccacg

SEQ ID NO: 592235 - RNA, 19 nt, Artificial Sequence
  Description of Artificial Sequence: Synthetic oligonucleotide
acaaauggaauguccauua

SEQ ID NO: 592236 - RNA, 19 nt, Artificial Sequence
  Description of Artificial Sequence: Synthetic oligonucleotide
cagauuccagcuuagacca

SEQ ID NO: 592237 - RNA, 19 nt, Artificial Sequence
  Description of Artificial Sequence: Synthetic oligonucleotide
cucucucacacacacacac

SEQ ID NO: 592238 - RNA, 19 nt, Artificial Sequence
  Description of Artificial Sequence: Synthetic oligonucleotide
uuuguagcuauauggcuau

SEQ ID NO: 592239 - RNA, 19 nt, Artificial Sequence
  Description of Artificial Sequence: Synthetic oligonucleotide
gagguuuuccaagagguac

SEQ ID NO: 592240 - RNA, 19 nt, Artificial Sequence
  Description of Artificial Sequence: Synthetic oligonucleotide
cuacaugccauaaagcuaa

SEQ ID NO: 592241 - RNA, 19 nt, Artificial Sequence
  Description of Artificial Sequence: Synthetic oligonucleotide
agacccuucaaauaucaaa

SEQ ID NO: 592242 - RNA, 19 nt, Artificial Sequence
  Description of Artificial Sequence: Synthetic oligonucleotide
uaucauugcauugcacucc

SEQ ID NO: 592243 - RNA, 19 nt, Artificial Sequence
  Description of Artificial Sequence: Synthetic oligonucleotide
uucaauucggaugucugga

SEQ ID NO: 592244 - RNA, 19 nt, Artificial Sequence
  Description of Artificial Sequence: Synthetic oligonucleotide
auuaaaccuauuaauacua

SEQ ID NO: 592245 - RNA, 19 nt, Artificial Sequence
  Description of Artificial Sequence: Synthetic oligonucleotide
ugauagaaugugccaguca

SEQ ID NO: 592246 - RNA, 19 nt, Artificial Sequence
  Description of Artificial Sequence: Synthetic oligonucleotide
uucaguacaggccuucaua

SEQ ID NO: 592247 - RNA, 19 nt, Artificial Sequence
  Description of Artificial Sequence: Synthetic oligonucleotide
ugcauugcacuccauguau

SEQ ID NO: 592248 - RNA, 19 nt, Artificial Sequence
  Description of Artificial Sequence: Synthetic oligonucleotide
cucucacacacacacacac

SEQ ID NO: 592249 - RNA, 19 nt, Artificial Sequence
  Description of Artificial Sequence: Synthetic oligonucleotide
cauacugcaucuuuaaucu

SEQ ID NO: 592250 - RNA, 19 nt, Artificial Sequence
  Description of Artificial Sequence: Synthetic oligonucleotide
cagcaugugccaacaaugg

SEQ ID NO: 592251 - RNA, 19 nt, Artificial Sequence
  Description of Artificial Sequence: Synthetic oligonucleotide
cucaaaugcaccuguugac

SEQ ID NO: 592252 - RNA, 19 nt, Artificial Sequence
  Description of Artificial Sequence: Synthetic oligonucleotide
uccuuuaccuuauaauuuu

SEQ ID NO: 592253 - RNA, 19 nt, Artificial Sequence
  Description of Artificial Sequence: Synthetic oligonucleotide
gagcaacugucacuaaugc

SEQ ID NO: 592254 - RNA, 19 nt, Artificial Sequence
  Description of Artificial Sequence: Synthetic oligonucleotide
cuacucacauucagaaagc

SEQ ID NO: 592255 - RNA, 19 nt, Artificial Sequence
  Description of Artificial Sequence: Synthetic oligonucleotide
auaauuuacuguucacaau

SEQ ID NO: 592256 - RNA, 19 nt, Artificial Sequence
  Description of Artificial Sequence: Synthetic oligonucleotide
aauaguuuucagugccaau

SEQ ID NO: 592257 - RNA, 19 nt, Artificial Sequence
  Description of Artificial Sequence: Synthetic oligonucleotide
acccuucaaauaucaaauc

SEQ ID NO: 592258 - RNA, 19 nt, Artificial Sequence
  Description of Artificial Sequence: Synthetic oligonucleotide
uucagcaugugccaacaau

SEQ ID NO: 592259 - RNA, 19 nt, Artificial Sequence
  Description of Artificial Sequence: Synthetic oligonucleotide
aucucaaaugcaccuguug

SEQ ID NO: 592260 - RNA, 19 nt, Artificial Sequence
  Description of Artificial Sequence: Synthetic oligonucleotide
caaacacccgccuguaccc

SEQ ID NO: 592261 - RNA, 19 nt, Artificial Sequence
  Description of Artificial Sequence: Synthetic oligonucleotide
ucuggauauuggauuuccc

SEQ ID NO: 592262 - RNA, 19 nt, Artificial Sequence
  Description of Artificial Sequence: Synthetic oligonucleotide
auaaauugguugagggagg

SEQ ID NO: 592263 - RNA, 19 nt, Artificial Sequence
  Description of Artificial Sequence: Synthetic oligonucleotide
gucuauaaauugguugagg

SEQ ID NO: 592264 - RNA, 19 nt, Artificial Sequence
  Description of Artificial Sequence: Synthetic oligonucleotide
auuuuacuagaugucuaag

SEQ ID NO: 592265 - RNA, 19 nt, Artificial Sequence
  Description of Artificial Sequence: Synthetic oligonucleotide
caacugucacuaaugcuag

SEQ ID NO: 592266 - RNA, 19 nt, Artificial Sequence
  Description of Artificial Sequence: Synthetic oligonucleotide
gcuaauaacccgcauguac

SEQ ID NO: 592267 - RNA, 19 nt, Artificial Sequence
  Description of Artificial Sequence: Synthetic oligonucleotide
agugccauaaccaaugcua

SEQ ID NO: 592268 - RNA, 19 nt, Artificial Sequence
  Description of Artificial Sequence: Synthetic oligonucleotide
ugcaccuguugacauacac

SEQ ID NO: 592269 - RNA, 19 nt, Artificial Sequence
  Description of Artificial Sequence: Synthetic oligonucleotide
augcuacucacauucagaa

SEQ ID NO: 592270 - RNA, 19 nt, Artificial Sequence
  Description of Artificial Sequence: Synthetic oligonucleotide
auaguuuucagugccaaua

SEQ ID NO: 592271 - RNA, 19 nt, Artificial Sequence
  Description of Artificial Sequence: Synthetic oligonucleotide
uguacuccucaaacacccg

SEQ ID NO: 592272 - RNA, 19 nt, Artificial Sequence
  Description of Artificial Sequence: Synthetic oligonucleotide
aacgccauguuuaccaacu

SEQ ID NO: 592273 - RNA, 19 nt, Artificial Sequence
  Description of Artificial Sequence: Synthetic oligonucleotide
uguagcuauauggcuauac

SEQ ID NO: 592274 - RNA, 19 nt, Artificial Sequence
  Description of Artificial Sequence: Synthetic oligonucleotide
ugaucgaugaugugggauu

SEQ ID NO: 592275 - RNA, 19 nt, Artificial Sequence
  Description of Artificial Sequence: Synthetic oligonucleotide
uggcuauaccaauuuauau

SEQ ID NO: 592276 - RNA, 19 nt, Artificial Sequence
  Description of Artificial Sequence: Synthetic oligonucleotide
gucuacaugccauaaagcu

SEQ ID NO: 592277 - RNA, 19 nt, Artificial Sequence
  Description of Artificial Sequence: Synthetic oligonucleotide
aaacuaucuugcacugagg

SEQ ID NO: 592278 - RNA, 19 nt, Artificial Sequence
  Description of Artificial Sequence: Synthetic oligonucleotide
aggaaagaugcuauauguc

SEQ ID NO: 592279 - RNA, 19 nt, Artificial Sequence
  Description of Artificial Sequence: Synthetic oligonucleotide
cuggcuaauaacccgcaug

SEQ ID NO: 592280 - RNA, 19 nt, Artificial Sequence
  Description of Artificial Sequence: Synthetic oligonucleotide
acaguaucauugcauugca

SEQ ID NO: 592281 - RNA, 19 nt, Artificial Sequence
  Description of Artificial Sequence: Synthetic oligonucleotide
guaguaaugccacgccaag

SEQ ID NO: 592282 - RNA, 19 nt, Artificial Sequence
  Description of Artificial Sequence: Synthetic oligonucleotide
cuguauaauuuacuguuca

SEQ ID NO: 592283 - RNA, 19 nt, Artificial Sequence
  Description of Artificial Sequence: Synthetic oligonucleotide
uaauaacccgcauguacuc

SEQ ID NO: 592284 - RNA, 19 nt, Artificial Sequence
  Description of Artificial Sequence: Synthetic oligonucleotide
uggagugauaagcaaucau

SEQ ID NO: 592285 - RNA, 19 nt, Artificial Sequence
  Description of Artificial Sequence: Synthetic oligonucleotide
cugccaaguacacaugaac

SEQ ID NO: 592286 - RNA, 19 nt, Artificial Sequence
  Description of Artificial Sequence: Synthetic oligonucleotide
uuuuaagacccucccucuc

SEQ ID NO: 592287 - RNA, 19 nt, Artificial Sequence
  Description of Artificial Sequence: Synthetic oligonucleotide
uucggaugucuggauaccg

SEQ ID NO: 592288 - RNA, 19 nt, Artificial Sequence
  Description of Artificial Sequence: Synthetic oligonucleotide
gcauacugcaucuuuaauc

SEQ ID NO: 592289 - RNA, 19 nt, Artificial Sequence
  Description of Artificial Sequence: Synthetic oligonucleotide
aucauugcauugcacucca

SEQ ID NO: 592290 - RNA, 19 nt, Artificial Sequence
  Description of Artificial Sequence: Synthetic oligonucleotide
gcaacuaauaaauuuuaaa

SEQ ID NO: 592291 - RNA, 19 nt, Artificial Sequence
  Description of Artificial Sequence: Synthetic oligonucleotide
cugaugcuaaacuuuacaa

SEQ ID NO: 592292 - RNA, 19 nt, Artificial Sequence
  Description of Artificial Sequence: Synthetic oligonucleotide
ucucugauuuauagagcac

SEQ ID NO: 592293 - RNA, 19 nt, Artificial Sequence
  Description of Artificial Sequence: Synthetic oligonucleotide
ccaagagguacaacgagcc

SEQ ID NO: 592294 - RNA, 19 nt, Artificial Sequence
  Description of Artificial Sequence: Synthetic oligonucleotide
gugggauugaauccauaug

SEQ ID NO: 592295 - RNA, 19 nt, Artificial Sequence
  Description of Artificial Sequence: Synthetic oligonucleotide
uaccgcuggcuaauaaccc

SEQ ID NO: 592296 - RNA, 19 nt, Artificial Sequence
  Description of Artificial Sequence: Synthetic oligonucleotide
auuagcuagccuauugaca

SEQ ID NO: 592297 - RNA, 19 nt, Artificial Sequence
  Description of Artificial Sequence: Synthetic oligonucleotide
agacgaguguggauaaaac

SEQ ID NO: 592298 - RNA, 19 nt, Artificial Sequence
  Description of Artificial Sequence: Synthetic oligonucleotide
augaccagauuccagcuua

SEQ ID NO: 592299 - RNA, 19 nt, Artificial Sequence
  Description of Artificial Sequence: Synthetic oligonucleotide
auucggaugucuggauacc

SEQ ID NO: 592300 - RNA, 19 nt, Artificial Sequence
  Description of Artificial Sequence: Synthetic oligonucleotide
agcaacugucacuaaugcu

SEQ ID NO: 592301 - RNA, 19 nt, Artificial Sequence
  Description of Artificial Sequence: Synthetic oligonucleotide
cuaauaacccgcauguacu

SEQ ID NO: 592302 - RNA, 19 nt, Artificial Sequence
  Description of Artificial Sequence: Synthetic oligonucleotide
caacuguguugaaaacucc

SEQ ID NO: 592303 - RNA, 19 nt, Artificial Sequence
  Description of Artificial Sequence: Synthetic oligonucleotide
gguacaacgagccugccaa

SEQ ID NO: 592304 - RNA, 19 nt, Artificial Sequence
  Description of Artificial Sequence: Synthetic oligonucleotide
guacuccucaaacacccgc

SEQ ID NO: 592305 - RNA, 19 nt, Artificial Sequence
  Description of Artificial Sequence: Synthetic oligonucleotide
agucgagacagccgcuccg

SEQ ID NO: 592306 - RNA, 19 nt, Artificial Sequence
  Description of Artificial Sequence: Synthetic oligonucleotide
ucucacacacacacacaca

SEQ ID NO: 592307 - RNA, 19 nt, Artificial Sequence
  Description of Artificial Sequence: Synthetic oligonucleotide
acaaguuguugcauggaug

SEQ ID NO: 592308 - RNA, 19 nt, Artificial Sequence
  Description of Artificial Sequence: Synthetic oligonucleotide
uaauacuaguuugaagauu

SEQ ID NO: 592309 - RNA, 19 nt, Artificial Sequence
  Description of Artificial Sequence: Synthetic oligonucleotide
ucacacacacacacacaca

SEQ ID NO: 592310 - RNA, 19 nt, Artificial Sequence
  Description of Artificial Sequence: Synthetic oligonucleotide
ugacauacacugguucuca

SEQ ID NO: 592311 - RNA, 19 nt, Artificial Sequence
  Description of Artificial Sequence: Synthetic oligonucleotide
uuaagacccucccucucuc

SEQ ID NO: 592312 - RNA, 19 nt, Artificial Sequence
  Description of Artificial Sequence: Synthetic oligonucleotide
aaugccacgccaagaagaa

SEQ ID NO: 592313 - RNA, 19 nt, Artificial Sequence
  Description of Artificial Sequence: Synthetic oligonucleotide
aaaugcaccuguugacaua

SEQ ID NO: 592314 - RNA, 19 nt, Artificial Sequence
  Description of Artificial Sequence: Synthetic oligonucleotide
auguaugugcagaauucag

SEQ ID NO: 592315 - RNA, 19 nt, Artificial Sequence
  Description of Artificial Sequence: Synthetic oligonucleotide
ucucucacacacacacaca

SEQ ID NO: 592316 - RNA, 19 nt, Artificial Sequence
  Description of Artificial Sequence: Synthetic oligonucleotide
aucacgggaucucaucaca

SEQ ID NO: 592317 - RNA, 19 nt, Artificial Sequence
  Description of Artificial Sequence: Synthetic oligonucleotide
uuugggaacuucagguguu

SEQ ID NO: 592318 - RNA, 19 nt, Artificial Sequence
  Description of Artificial Sequence: Synthetic oligonucleotide
ugaccagauuccagcuuag

SEQ ID NO: 592319 - RNA, 19 nt, Artificial Sequence
  Description of Artificial Sequence: Synthetic oligonucleotide
cucugauuuauagagcaca

SEQ ID NO: 592320 - RNA, 19 nt, Artificial Sequence
  Description of Artificial Sequence: Synthetic oligonucleotide
gaucgaugaugugggauug

SEQ ID NO: 592321 - RNA, 19 nt, Artificial Sequence
  Description of Artificial Sequence: Synthetic oligonucleotide
cacacacacacacaguaga

SEQ ID NO: 592322 - RNA, 19 nt, Artificial Sequence
  Description of Artificial Sequence: Synthetic oligonucleotide
auaaccaaugcuacucaca

SEQ ID NO: 592323 - RNA, 19 nt, Artificial Sequence
  Description of Artificial Sequence: Synthetic oligonucleotide
uuugaacaaguuguugcau

SEQ ID NO: 592324 - RNA, 19 nt, Artificial Sequence
  Description of Artificial Sequence: Synthetic oligonucleotide
aaguuaggacaaugauaga

SEQ ID NO: 592325 - RNA, 19 nt, Artificial Sequence
  Description of Artificial Sequence: Synthetic oligonucleotide
uacucacauucagaaagca

SEQ ID NO: 592326 - RNA, 19 nt, Artificial Sequence
  Description of Artificial Sequence: Synthetic oligonucleotide
gaauccauaugcacauuga

SEQ ID NO: 592327 - RNA, 19 nt, Artificial Sequence
  Description of Artificial Sequence: Synthetic oligonucleotide
uugacauacacugguucuc

SEQ ID NO: 592328 - RNA, 19 nt, Artificial Sequence
  Description of Artificial Sequence: Synthetic oligonucleotide
aguaguaaugccacgccaa

SEQ ID NO: 592329 - RNA, 19 nt, Artificial Sequence
  Description of Artificial Sequence: Synthetic oligonucleotide
ucuguacuaacagcuugcu

SEQ ID NO: 592330 - RNA, 19 nt, Artificial Sequence
  Description of Artificial Sequence: Synthetic oligonucleotide
uagucgagacagccgcucc

SEQ ID NO: 592331 - RNA, 19 nt, Artificial Sequence
  Description of Artificial Sequence: Synthetic oligonucleotide
ugaaccaucacgggaucuc

SEQ ID NO: 592332 - RNA, 19 nt, Artificial Sequence
  Description of Artificial Sequence: Synthetic oligonucleotide
ccuauuaauacuaguuuga

SEQ ID NO: 592333 - RNA, 19 nt, Artificial Sequence
  Description of Artificial Sequence: Synthetic oligonucleotide
agaguacucuggauauugg

SEQ ID NO: 592334 - RNA, 19 nt, Artificial Sequence
  Description of Artificial Sequence: Synthetic oligonucleotide
acauacacugguucucaau

SEQ ID NO: 592335 - RNA, 19 nt, Artificial Sequence
  Description of Artificial Sequence: Synthetic oligonucleotide
cucaggauacacagaucug

SEQ ID NO: 592336 - RNA, 19 nt, Artificial Sequence
  Description of Artificial Sequence: Synthetic oligonucleotide
uaugaucgaugauguggga

SEQ ID NO: 592337 - RNA, 19 nt, Artificial Sequence
  Description of Artificial Sequence: Synthetic oligonucleotide
gaaugaaccaucacgggau

SEQ ID NO: 592338 - RNA, 19 nt, Artificial Sequence
  Description of Artificial Sequence: Synthetic oligonucleotide
guucucugauuuauagagc

SEQ ID NO: 592339 - RNA, 19 nt, Artificial Sequence
  Description of Artificial Sequence: Synthetic oligonucleotide
acgggaucucaucacauuu

SEQ ID NO: 592340 - RNA, 19 nt, Artificial Sequence
  Description of Artificial Sequence: Synthetic oligonucleotide
gcuaauugugucacaaaug

SEQ ID NO: 592341 - RNA, 19 nt, Artificial Sequence
  Description of Artificial Sequence: Synthetic oligonucleotide
acuaucuugcacugagguu

SEQ ID NO: 592342 - RNA, 19 nt, Artificial Sequence
  Description of Artificial Sequence: Synthetic oligonucleotide
ugccauaaccaaugcuacu

SEQ ID NO: 592343 - RNA, 19 nt, Artificial Sequence
  Description of Artificial Sequence: Synthetic oligonucleotide
uacaacgagccugccaaga

SEQ ID NO: 592344 - RNA, 19 nt, Artificial Sequence
  Description of Artificial Sequence: Synthetic oligonucleotide
ucucucucacacacacaca

SEQ ID NO: 592345 - RNA, 19 nt, Artificial Sequence
  Description of Artificial Sequence: Synthetic oligonucleotide
uauagagcacagacauuuu

SEQ ID NO: 592346 - RNA, 19 nt, Artificial Sequence
  Description of Artificial Sequence: Synthetic oligonucleotide
agcuuaacacacaucuuga

SEQ ID NO: 592347 - RNA, 19 nt, Artificial Sequence
  Description of Artificial Sequence: Synthetic oligonucleotide
cacacacacacacacagua

SEQ ID NO: 592348 - RNA, 19 nt, Artificial Sequence
  Description of Artificial Sequence: Synthetic oligonucleotide
ccuauugacaaguccucag

SEQ ID NO: 592349 - RNA, 19 nt, Artificial Sequence
  Description of Artificial Sequence: Synthetic oligonucleotide
uaacgccauguuuaccaac

SEQ ID NO: 592350 - RNA, 19 nt, Artificial Sequence
  Description of Artificial Sequence: Synthetic oligonucleotide
augcuagugccauaaccaa

SEQ ID NO: 592351 - RNA, 19 nt, Artificial Sequence
  Description of Artificial Sequence: Synthetic oligonucleotide
acacacacacacaguagag

SEQ ID NO: 592352 - RNA, 19 nt, Artificial Sequence
  Description of Artificial Sequence: Synthetic oligonucleotide
ucacaccgagacugcagcc

SEQ ID NO: 592353 - RNA, 19 nt, Artificial Sequence
  Description of Artificial Sequence: Synthetic oligonucleotide
caucacgggaucucaucac

SEQ ID NO: 592354 - RNA, 19 nt, Artificial Sequence
  Description of Artificial Sequence: Synthetic oligonucleotide
gcaacugucacuaaugcua

SEQ ID NO: 592355 - RNA, 19 nt, Artificial Sequence
  Description of Artificial Sequence: Synthetic oligonucleotide
cucuugcaaaaucccuuag

SEQ ID NO: 592356 - RNA, 19 nt, Artificial Sequence
  Description of Artificial Sequence: Synthetic oligonucleotide
guagggcuaugaucgauga

SEQ ID NO: 592357 - RNA, 19 nt, Artificial Sequence
  Description of Artificial Sequence: Synthetic oligonucleotide
ccuaacgccauguuuacca

SEQ ID NO: 592358 - RNA, 19 nt, Artificial Sequence
  Description of Artificial Sequence: Synthetic oligonucleotide
auauggcuauaccaauuua

SEQ ID NO: 592359 - RNA, 19 nt, Artificial Sequence
  Description of Artificial Sequence: Synthetic oligonucleotide
agaugcuaggagcuugcau

SEQ ID NO: 592360 - RNA, 19 nt, Artificial Sequence
  Description of Artificial Sequence: Synthetic oligonucleotide
gagugauaagcaaucauau

SEQ ID NO: 592361 - RNA, 19 nt, Artificial Sequence
  Description of Artificial Sequence: Synthetic oligonucleotide
ucacgggaucucaucacau

SEQ ID NO: 592362 - RNA, 19 nt, Artificial Sequence
  Description of Artificial Sequence: Synthetic oligonucleotide
agccuauugacaaguccuc

SEQ ID NO: 592363 - RNA, 19 nt, Artificial Sequence
  Description of Artificial Sequence: Synthetic oligonucleotide
ugcuacucacauucagaaa

SEQ ID NO: 592364 - RNA, 19 nt, Artificial Sequence
  Description of Artificial Sequence: Synthetic oligonucleotide
uaaaauuagcuagccuauu

SEQ ID NO: 592365 - RNA, 19 nt, Artificial Sequence
  Description of Artificial Sequence: Synthetic oligonucleotide
gaagcuacacaguaucauu

SEQ ID NO: 592366 - RNA, 19 nt, Artificial Sequence
  Description of Artificial Sequence: Synthetic oligonucleotide
acaacgagccugccaagaa

SEQ ID NO: 592367 - RNA, 19 nt, Artificial Sequence
  Description of Artificial Sequence: Synthetic oligonucleotide
uuagucgagacagccgcuc

SEQ ID NO: 592368 - RNA, 19 nt, Artificial Sequence
  Description of Artificial Sequence: Synthetic oligonucleotide
cucugaugcuaaacuuuac

SEQ ID NO: 592369 - RNA, 19 nt, Artificial Sequence
  Description of Artificial Sequence: Synthetic oligonucleotide
gucacuaaugcuagugcca

SEQ ID NO: 592370 - RNA, 19 nt, Artificial Sequence
  Description of Artificial Sequence: Synthetic oligonucleotide
ucgaugaugugggauugaa

SEQ ID NO: 592371 - RNA, 19 nt, Artificial Sequence
  Description of Artificial Sequence: Synthetic oligonucleotide
aaccaaugcuacucacauu

SEQ ID NO: 592372 - RNA, 19 nt, Artificial Sequence
  Description of Artificial Sequence: Synthetic oligonucleotide
agguacaacgagccugcca

SEQ ID NO: 592373 - RNA, 19 nt, Artificial Sequence
  Description of Artificial Sequence: Synthetic oligonucleotide
acacacacacacacaguag

SEQ ID NO: 592374 - RNA, 19 nt, Artificial Sequence
  Description of Artificial Sequence: Synthetic oligonucleotide
caguaucauugcauugcac

SEQ ID NO: 592375 - RNA, 19 nt, Artificial Sequence
  Description of Artificial Sequence: Synthetic oligonucleotide
uaaugucagucacgcugcu

SEQ ID NO: 592376 - RNA, 19 nt, Artificial Sequence
  Description of Artificial Sequence: Synthetic oligonucleotide
augaucgaugaugugggau

SEQ ID NO: 592377 - RNA, 19 nt, Artificial Sequence
  Description of Artificial Sequence: Synthetic oligonucleotide
agaccggcacaucauuuaa

SEQ ID NO: 592378 - RNA, 19 nt, Artificial Sequence
  Description of Artificial Sequence: Synthetic oligonucleotide
gccgccuucacaccgagac

SEQ ID NO: 592379 - RNA, 19 nt, Artificial Sequence
  Description of Artificial Sequence: Synthetic oligonucleotide
aacccgcauguacuccuca

SEQ ID NO: 592380 - RNA, 19 nt, Artificial Sequence
  Description of Artificial Sequence: Synthetic oligonucleotide
ucuucaguacaggccuuca

SEQ ID NO: 592381 - RNA, 19 nt, Artificial Sequence
  Description of Artificial Sequence: Synthetic oligonucleotide
ggaacuugagcagcggccc

SEQ ID NO: 592382 - RNA, 19 nt, Artificial Sequence
  Description of Artificial Sequence: Synthetic oligonucleotide
auggcuauaccaauuuaua

SEQ ID NO: 592383 - RNA, 19 nt, Artificial Sequence
  Description of Artificial Sequence: Synthetic oligonucleotide
augcacauugaguuucauu

SEQ ID NO: 592384 - RNA, 19 nt, Artificial Sequence
  Description of Artificial Sequence: Synthetic oligonucleotide
ggagugauaagcaaucaua

SEQ ID NO: 592385 - RNA, 19 nt, Artificial Sequence
  Description of Artificial Sequence: Synthetic oligonucleotide
uugaccugccaaguacaca

SEQ ID NO: 592386 - RNA, 19 nt, Artificial Sequence
  Description of Artificial Sequence: Synthetic oligonucleotide
aaguuguugcauggaugga

SEQ ID NO: 592387 - RNA, 19 nt, Artificial Sequence
  Description of Artificial Sequence: Synthetic oligonucleotide
aggcugagcaacugucacu

SEQ ID NO: 592388 - RNA, 19 nt, Artificial Sequence
  Description of Artificial Sequence: Synthetic oligonucleotide
guaaaauuagcuagccuau

SEQ ID NO: 592389 - RNA, 19 nt, Artificial Sequence
  Description of Artificial Sequence: Synthetic oligonucleotide
guuaggacaaugauagaau

SEQ ID NO: 592390 - RNA, 19 nt, Artificial Sequence
  Description of Artificial Sequence: Synthetic oligonucleotide
gauccuugccaacaauuau

SEQ ID NO: 592391 - RNA, 19 nt, Artificial Sequence
  Description of Artificial Sequence: Synthetic oligonucleotide
gaccggcacaucauuuaag

SEQ ID NO: 592392 - RNA, 19 nt, Artificial Sequence
  Description of Artificial Sequence: Synthetic oligonucleotide
caaucauguugcucaagaa

SEQ ID NO: 592393 - RNA, 19 nt, Artificial Sequence
  Description of Artificial Sequence: Synthetic oligonucleotide
aggccuaacgccauguuua

SEQ ID NO: 592394 - RNA, 19 nt, Artificial Sequence
  Description of Artificial Sequence: Synthetic oligonucleotide
gcuaaacuuuacaagaugu

SEQ ID NO: 592395 - RNA, 19 nt, Artificial Sequence
  Description of Artificial Sequence: Synthetic oligonucleotide
cagcuuagaccagaccggc

SEQ ID NO: 592396 - RNA, 19 nt, Artificial Sequence
  Description of Artificial Sequence: Synthetic oligonucleotide
augcaacuaauaaauuuua

SEQ ID NO: 592397 - RNA, 19 nt, Artificial Sequence
  Description of Artificial Sequence: Synthetic oligonucleotide
acucaaguuguaauucaau

SEQ ID NO: 592398 - RNA, 19 nt, Artificial Sequence
  Description of Artificial Sequence: Synthetic oligonucleotide
gaacaaguuguugcaugga

SEQ ID NO: 592399 - RNA, 19 nt, Artificial Sequence
  Description of Artificial Sequence: Synthetic oligonucleotide
uaagacccucccucucucu

SEQ ID NO: 592400 - RNA, 19 nt, Artificial Sequence
  Description of Artificial Sequence: Synthetic oligonucleotide
aucucuugcugggcacgcc

SEQ ID NO: 592401 - RNA, 19 nt, Artificial Sequence
  Description of Artificial Sequence: Synthetic oligonucleotide
agcuguucaggcugagcaa

SEQ ID NO: 592402 - RNA, 19 nt, Artificial Sequence
  Description of Artificial Sequence: Synthetic oligonucleotide
ccuguauaauuuacuguuc

SEQ ID NO: 592403 - RNA, 19 nt, Artificial Sequence
  Description of Artificial Sequence: Synthetic oligonucleotide
aagaugcuauaugucuaua

SEQ ID NO: 592404 - RNA, 19 nt, Artificial Sequence
  Description of Artificial Sequence: Synthetic oligonucleotide
auaugucuauaaauugguu

SEQ ID NO: 592405 - RNA, 19 nt, Artificial Sequence
  Description of Artificial Sequence: Synthetic oligonucleotide
guacaacgagccugccaag

SEQ ID NO: 592406 - RNA, 19 nt, Artificial Sequence
  Description of Artificial Sequence: Synthetic oligonucleotide
ugcggaccaccgccgacgc

SEQ ID NO: 592407 - RNA, 19 nt, Artificial Sequence
  Description of Artificial Sequence: Synthetic oligonucleotide
gguagggcuaugaucgaug

SEQ ID NO: 592408 - RNA, 19 nt, Artificial Sequence
  Description of Artificial Sequence: Synthetic oligonucleotide
cuauugacaaguccucagu

SEQ ID NO: 592409 - RNA, 19 nt, Artificial Sequence
  Description of Artificial Sequence: Synthetic oligonucleotide
uagguagggcuaugaucga

SEQ ID NO: 592410 - RNA, 19 nt, Artificial Sequence
  Description of Artificial Sequence: Synthetic oligonucleotide
aggauccuugccaacaauu

SEQ ID NO: 592411 - RNA, 19 nt, Artificial Sequence
  Description of Artificial Sequence: Synthetic oligonucleotide
cugcggaccaccgccgacg

SEQ ID NO: 592412 - RNA, 19 nt, Artificial Sequence
  Description of Artificial Sequence: Synthetic oligonucleotide
cacaaucugcaguguucug

SEQ ID NO: 592413 - RNA, 19 nt, Artificial Sequence
  Description of Artificial Sequence: Synthetic oligonucleotide
gcaugugccaacaauggaa

SEQ ID NO: 592414 - RNA, 19 nt, Artificial Sequence
  Description of Artificial Sequence: Synthetic oligonucleotide
aaacacccgccuguacccu

SEQ ID NO: 592415 - RNA, 19 nt, Artificial Sequence
  Description of Artificial Sequence: Synthetic oligonucleotide
cugauuuauagagcacaga

SEQ ID NO: 592416 - RNA, 19 nt, Artificial Sequence
  Description of Artificial Sequence: Synthetic oligonucleotide
uaacccgcauguacuccuc

SEQ ID NO: 592417 - RNA, 19 nt, Artificial Sequence
  Description of Artificial Sequence: Synthetic oligonucleotide
cucaaacacccgccuguac

SEQ ID NO: 592418 - RNA, 19 nt, Artificial Sequence
  Description of Artificial Sequence: Synthetic oligonucleotide
uagggcuaugaucgaugau

SEQ ID NO: 592419 - RNA, 19 nt, Artificial Sequence
  Description of Artificial Sequence: Synthetic oligonucleotide
aaauugguugagggaggua

SEQ ID NO: 592420 - RNA, 19 nt, Artificial Sequence
  Description of Artificial Sequence: Synthetic oligonucleotide
augaaccaucacgggaucu

SEQ ID NO: 592421 - RNA, 19 nt, Artificial Sequence
  Description of Artificial Sequence: Synthetic oligonucleotide
auagaaugugccagucaau

SEQ ID NO: 592422 - RNA, 19 nt, Artificial Sequence
  Description of Artificial Sequence: Synthetic oligonucleotide
gggauugaauccauaugca

SEQ ID NO: 592423 - RNA, 19 nt, Artificial Sequence
  Description of Artificial Sequence: Synthetic oligonucleotide
caauucggaugucuggaua

SEQ ID NO: 592424 - RNA, 19 nt, Artificial Sequence
  Description of Artificial Sequence: Synthetic oligonucleotide
cuaacgccauguuuaccaa

SEQ ID NO: 592425 - RNA, 19 nt, Artificial Sequence
  Description of Artificial Sequence: Synthetic oligonucleotide
gaaccucaucuuagucgag

SEQ ID NO: 592426 - RNA, 19 nt, Artificial Sequence
  Description of Artificial Sequence: Synthetic oligonucleotide
ugccaauagguagggcuau

SEQ ID NO: 592427 - RNA, 19 nt, Artificial Sequence
  Description of Artificial Sequence: Synthetic oligonucleotide
agcuauuaucuaggagaca

SEQ ID NO: 592428 - RNA, 19 nt, Artificial Sequence
  Description of Artificial Sequence: Synthetic oligonucleotide
caaaugcaccuguugacau

SEQ ID NO: 592429 - RNA, 19 nt, Artificial Sequence
  Description of Artificial Sequence: Synthetic oligonucleotide
guggauaaaacagcugaau

SEQ ID NO: 592430 - RNA, 19 nt, Artificial Sequence
  Description of Artificial Sequence: Synthetic oligonucleotide
uacaugccauaaagcuaau

SEQ ID NO: 592431 - RNA, 19 nt, Artificial Sequence
  Description of Artificial Sequence: Synthetic oligonucleotide
acacacacacacacacaca

SEQ ID NO: 592432 - RNA, 19 nt, Artificial Sequence
  Description of Artificial Sequence: Synthetic oligonucleotide
caacgagccugccaagaaa

SEQ ID NO: 592433 - RNA, 19 nt, Artificial Sequence
  Description of Artificial Sequence: Synthetic oligonucleotide
acuagaugucuaagacagu

SEQ ID NO: 592434 - RNA, 19 nt, Artificial Sequence
  Description of Artificial Sequence: Synthetic oligonucleotide
gaugaccagauuccagcuu

SEQ ID NO: 592435 - RNA, 19 nt, Artificial Sequence
  Description of Artificial Sequence: Synthetic oligonucleotide
acacacacacacacacagu

SEQ ID NO: 592436 - RNA, 19 nt, Artificial Sequence
  Description of Artificial Sequence: Synthetic oligonucleotide
cagaccggcacaucauuua

SEQ ID NO: 592437 - RNA, 19 nt, Artificial Sequence
  Description of Artificial Sequence: Synthetic oligonucleotide
ccgcuggcuaauaacccgc

SEQ ID NO: 592438 - RNA, 19 nt, Artificial Sequence
  Description of Artificial Sequence: Synthetic oligonucleotide
aucgaugaugugggauuga

SEQ ID NO: 592439 - RNA, 19 nt, Artificial Sequence
  Description of Artificial Sequence: Synthetic oligonucleotide
ggcuaugaucgaugaugug

SEQ ID NO: 592440 - RNA, 19 nt, Artificial Sequence
  Description of Artificial Sequence: Synthetic oligonucleotide
gcuauauggcuauaccaau

SEQ ID NO: 592441 - RNA, 19 nt, Artificial Sequence
  Description of Artificial Sequence: Synthetic oligonucleotide
gugccaauagguagggcua

SEQ ID NO: 592442 - RNA, 19 nt, Artificial Sequence
  Description of Artificial Sequence: Synthetic oligonucleotide
ggccuaacgccauguuuac

SEQ ID NO: 592443 - RNA, 19 nt, Artificial Sequence
  Description of Artificial Sequence: Synthetic oligonucleotide
ggcugagcaacugucacua

SEQ ID NO: 592444 - RNA, 19 nt, Artificial Sequence
  Description of Artificial Sequence: Synthetic oligonucleotide
gcucuugcaaaaucccuua

SEQ ID NO: 592445 - RNA, 19 nt, Artificial Sequence
  Description of Artificial Sequence: Synthetic oligonucleotide
ggauccuugccaacaauua

SEQ ID NO: 592446 - RNA, 19 nt, Artificial Sequence
  Description of Artificial Sequence: Synthetic oligonucleotide
gccauaaagcuaauugugu

SEQ ID NO: 592447 - RNA, 19 nt, Artificial Sequence
  Description of Artificial Sequence: Synthetic oligonucleotide
caauagguagggcuaugau

SEQ ID NO: 592448 - RNA, 19 nt, Artificial Sequence
  Description of Artificial Sequence: Synthetic oligonucleotide
gagguacaacgagccugcc

SEQ ID NO: 592449 - RNA, 19 nt, Artificial Sequence
  Description of Artificial Sequence: Synthetic oligonucleotide
agcuuagaccagaccggca

SEQ ID NO: 592450 - RNA, 19 nt, Artificial Sequence
  Description of Artificial Sequence: Synthetic oligonucleotide
gauugacaggaaagaugcu

SEQ ID NO: 592451 - RNA, 19 nt, Artificial Sequence
  Description of Artificial Sequence: Synthetic oligonucleotide
cacacacacacaguagagu

SEQ ID NO: 592452 - RNA, 19 nt, Artificial Sequence
  Description of Artificial Sequence: Synthetic oligonucleotide
gaaaggccccucugaugcu

SEQ ID NO: 592453 - RNA, 19 nt, Artificial Sequence
  Description of Artificial Sequence: Synthetic oligonucleotide
cuuagucgagacagccgcu

SEQ ID NO: 592454 - RNA, 19 nt, Artificial Sequence
  Description of Artificial Sequence: Synthetic oligonucleotide
ggauaccgcuggcuaauaa

SEQ ID NO: 592455 - RNA, 19 nt, Artificial Sequence
  Description of Artificial Sequence: Synthetic oligonucleotide
caagagguacaacgagccu

SEQ ID NO: 592456 - RNA, 19 nt, Artificial Sequence
  Description of Artificial Sequence: Synthetic oligonucleotide
uggauaccgcuggcuaaua

SEQ ID NO: 592457 - RNA, 19 nt, Artificial Sequence
  Description of Artificial Sequence: Synthetic oligonucleotide
uuguagcuauauggcuaua

SEQ ID NO: 592458 - RNA, 19 nt, Artificial Sequence
  Description of Artificial Sequence: Synthetic oligonucleotide
gccuauugacaaguccuca

SEQ ID NO: 592459 - RNA, 19 nt, Artificial Sequence
  Description of Artificial Sequence: Synthetic oligonucleotide
ccaauagguagggcuauga

SEQ ID NO: 592460 - RNA, 19 nt, Artificial Sequence
  Description of Artificial Sequence: Synthetic oligonucleotide
gggcuaugaucgaugaugu

SEQ ID NO: 592461 - RNA, 19 nt, Artificial Sequence
  Description of Artificial Sequence: Synthetic oligonucleotide
ccaaugcuacucacauuca

SEQ ID NO: 592462 - RNA, 19 nt, Artificial Sequence
  Description of Artificial Sequence: Synthetic oligonucleotide
gccccucugaugcuaaacu

SEQ ID NO: 592463 - RNA, 19 nt, Artificial Sequence
  Description of Artificial Sequence: Synthetic oligonucleotide
gccaauagguagggcuaug

SEQ ID NO: 592464 - RNA, 19 nt, Artificial Sequence
  Description of Artificial Sequence: Synthetic oligonucleotide
augccacgccaagaagaaa

SEQ ID NO: 592465 - RNA, 19 nt, Artificial Sequence
  Description of Artificial Sequence: Synthetic oligonucleotide
cagucacgcugcucuugca

SEQ ID NO: 592466 - RNA, 19 nt, Artificial Sequence
  Description of Artificial Sequence: Synthetic oligonucleotide
ggcauacugcaucuuuaau

SEQ ID NO: 592467 - RNA, 19 nt, Artificial Sequence
  Description of Artificial Sequence: Synthetic oligonucleotide
cagaugcuaggagcuugca

SEQ ID NO: 592468 - RNA, 19 nt, Artificial Sequence
  Description of Artificial Sequence: Synthetic oligonucleotide
ggccccucugaugcuaaac

SEQ ID NO: 592469 - RNA, 19 nt, Artificial Sequence
  Description of Artificial Sequence: Synthetic oligonucleotide
gccuaacgccauguuuacc

SEQ ID NO: 592470 - RNA, 19 nt, Artificial Sequence
  Description of Artificial Sequence: Synthetic oligonucleotide
cuggauaccgcuggcuaau

SEQ ID NO: 592471 - RNA, 19 nt, Artificial Sequence
  Description of Artificial Sequence: Synthetic oligonucleotide
cacgggaucucaucacauu

SEQ ID NO: 592472 - RNA, 19 nt, Artificial Sequence
  Description of Artificial Sequence: Synthetic oligonucleotide
cugaggccuaacgccaugu

SEQ ID NO: 592473 - RNA, 19 nt, Artificial Sequence
  Description of Artificial Sequence: Synthetic oligonucleotide
gcugcggaccaccgccgac

SEQ ID NO: 592474 - RNA, 19 nt, Artificial Sequence
  Description of Artificial Sequence: Synthetic oligonucleotide
guagaguacucuggauauu

SEQ ID NO: 592475 - RNA, 19 nt, Artificial Sequence
  Description of Artificial Sequence: Synthetic oligonucleotide
augcaccuguugacauaca

SEQ ID NO: 592476 - RNA, 19 nt, Artificial Sequence
  Description of Artificial Sequence: Synthetic oligonucleotide
ccggcacaucauuuaaggu

SEQ ID NO: 592477 - RNA, 19 nt, Artificial Sequence
  Description of Artificial Sequence: Synthetic oligonucleotide
gcuggcuaauaacccgcau

SEQ ID NO: 592478 - RNA, 19 nt, Artificial Sequence
  Description of Artificial Sequence: Synthetic oligonucleotide
cagcggccccguggcauac

SEQ ID NO: 592479 - RNA, 19 nt, Artificial Sequence
  Description of Artificial Sequence: Synthetic oligonucleotide
gccacgccaagaagaaacu

SEQ ID NO: 592480 - RNA, 19 nt, Artificial Sequence
  Description of Artificial Sequence: Synthetic oligonucleotide
gccugccaagaaacaucug

SEQ ID NO: 592481 - RNA, 19 nt, Artificial Sequence
  Description of Artificial Sequence: Synthetic oligonucleotide
agcggccccguggcauacu

SEQ ID NO: 592482 - RNA, 19 nt, Artificial Sequence
  Description of Artificial Sequence: Synthetic oligonucleotide
cgcuggcuaauaacccgca

SEQ ID NO: 592483 - RNA, 19 nt, Artificial Sequence
  Description of Artificial Sequence: Synthetic oligonucleotide
gcggaccaccgccgacgcc

SEQ ID NO: 592484 - RNA, 19 nt, Artificial Sequence
  Description of Artificial Sequence: Synthetic oligonucleotide
ccagaccggcacaucauuu

SEQ ID NO: 592485 - RNA, 19 nt, Artificial Sequence
  Description of Artificial Sequence: Synthetic oligonucleotide
ccucaaacacccgccugua

SEQ ID NO: 592486 - RNA, 19 nt, Artificial Sequence
  Description of Artificial Sequence: Synthetic oligonucleotide
gccgcuccggccgccuuca

SEQ ID NO: 592487 - RNA, 19 nt, Artificial Sequence
  Description of Artificial Sequence: Synthetic oligonucleotide
cgccgacgccgccaccagg

SEQ ID NO: 592488 - RNA, 19 nt, Artificial Sequence
  Description of Artificial Sequence: Synthetic oligonucleotide
ccggccgccuucacaccga

SEQ ID NO: 592489 - RNA, 19 nt, Artificial Sequence
  Description of Artificial Sequence: Synthetic oligonucleotide
cgacgccgccaccaggaga

SEQ ID NO: 592490 - RNA, 19 nt, Artificial Sequence
  Description of Artificial Sequence: Synthetic oligonucleotide
ccgccuguacccucaggau

SEQ ID NO: 592491 - RNA, 19 nt, Artificial Sequence
  Description of Artificial Sequence: Synthetic oligonucleotide
ggccgccuucacaccgaga

SEQ ID NO: 592492 - RNA, 19 nt, Artificial Sequence
  Description of Artificial Sequence: Synthetic oligonucleotide
cgcugcggaccaccgccga

SEQ ID NO: 592493 - RNA, 19 nt, Artificial Sequence
  Description of Artificial Sequence: Synthetic oligonucleotide
ugugaauguaccaagaagc

SEQ ID NO: 592494 - RNA, 19 nt, Artificial Sequence
  Description of Artificial Sequence: Synthetic oligonucleotide
aaauugucacacuaauugc

SEQ ID NO: 592495 - RNA, 19 nt, Artificial Sequence
  Description of Artificial Sequence: Synthetic oligonucleotide
uuugggaucacucaggaca

SEQ ID NO: 592496 - RNA, 19 nt, Artificial Sequence
  Description of Artificial Sequence: Synthetic oligonucleotide
aauaucucauuucaucagg

SEQ ID NO: 592497 - RNA, 19 nt, Artificial Sequence
  Description of Artificial Sequence: Synthetic oligonucleotide
uuuucgaucguucuuaaug

SEQ ID NO: 592498 - RNA, 19 nt, Artificial Sequence
  Description of Artificial Sequence: Synthetic oligonucleotide
uuuaugaccauuaauuggu

SEQ ID NO: 592499 - RNA, 19 nt, Artificial Sequence
  Description of Artificial Sequence: Synthetic oligonucleotide
ugagcuacuucacaaaagg

SEQ ID NO: 592500 - RNA, 19 nt, Artificial Sequence
  Description of Artificial Sequence: Synthetic oligonucleotide
uguaacuguacuuuguucc

SEQ ID NO: 592501 - RNA, 19 nt, Artificial Sequence
  Description of Artificial Sequence: Synthetic oligonucleotide
acuguuauagccugguagc

SEQ ID NO: 592502 - RNA, 19 nt, Artificial Sequence
  Description of Artificial Sequence: Synthetic oligonucleotide
aauacguggaacugguuuc

SEQ ID NO: 592503 - RNA, 19 nt, Artificial Sequence
  Description of Artificial Sequence: Synthetic oligonucleotide
aaugacgugugguccaucc

SEQ ID NO: 592504 - RNA, 19 nt, Artificial Sequence
  Description of Artificial Sequence: Synthetic oligonucleotide
aauagcgcugcauaccugg

SEQ ID NO: 592505 - RNA, 19 nt, Artificial Sequence
  Description of Artificial Sequence: Synthetic oligonucleotide
aaagcaaggcuuugaggcc

SEQ ID NO: 592506 - RNA, 19 nt, Artificial Sequence
  Description of Artificial Sequence: Synthetic oligonucleotide
ugcgaugcuuacaauaucg

SEQ ID NO: 592507 - RNA, 19 nt, Artificial Sequence
  Description of Artificial Sequence: Synthetic oligonucleotide
auaucggugacauuugggg

SEQ ID NO: 592508 - RNA, 19 nt, Artificial Sequence
  Description of Artificial Sequence: Synthetic oligonucleotide
uuucgaucguucuuaaugg

SEQ ID NO: 592509 - RNA, 19 nt, Artificial Sequence
  Description of Artificial Sequence: Synthetic oligonucleotide
aaaguguuaccuuggcaac

SEQ ID NO: 592510 - RNA, 19 nt, Artificial Sequence
  Description of Artificial Sequence: Synthetic oligonucleotide
uuaauuacaaaguguuacc

SEQ ID NO: 592511 - RNA, 19 nt, Artificial Sequence
  Description of Artificial Sequence: Synthetic oligonucleotide
aggaauaggcuuuuguugg

SEQ ID NO: 592512 - RNA, 19 nt, Artificial Sequence
  Description of Artificial Sequence: Synthetic oligonucleotide
agcaauaucucauuucauc

SEQ ID NO: 592513 - RNA, 19 nt, Artificial Sequence
  Description of Artificial Sequence: Synthetic oligonucleotide
ucugcuaacucuucaaugc

SEQ ID NO: 592514 - RNA, 19 nt, Artificial Sequence
  Description of Artificial Sequence: Synthetic oligonucleotide
gauaauaggacagacgcug

SEQ ID NO: 592515 - RNA, 19 nt, Artificial Sequence
  Description of Artificial Sequence: Synthetic oligonucleotide
agucaauuccaccuguggc

SEQ ID NO: 592516 - RNA, 19 nt, Artificial Sequence
  Description of Artificial Sequence: Synthetic oligonucleotide
uucugaugacucauaaugg

SEQ ID NO: 592517 - RNA, 19 nt, Artificial Sequence
  Description of Artificial Sequence: Synthetic oligonucleotide
gaucacucaggacagaacc

SEQ ID NO: 592518 - RNA, 19 nt, Artificial Sequence
  Description of Artificial Sequence: Synthetic oligonucleotide
ucuuaauggagcuaauuac

SEQ ID NO: 592519 - RNA, 19 nt, Artificial Sequence
  Description of Artificial Sequence: Synthetic oligonucleotide
acugaaguccacuuucggc

SEQ ID NO: 592520 - RNA, 19 nt, Artificial Sequence
  Description of Artificial Sequence: Synthetic oligonucleotide
uugugaauguaccaagaag

SEQ ID NO: 592521 - RNA, 19 nt, Artificial Sequence
  Description of Artificial Sequence: Synthetic oligonucleotide
uaggaaucaaagaaugagc

SEQ ID NO: 592522 - RNA, 19 nt, Artificial Sequence
  Description of Artificial Sequence: Synthetic oligonucleotide
ucacuuacaauuaggaauc

SEQ ID NO: 592523 - RNA, 19 nt, Artificial Sequence
  Description of Artificial Sequence: Synthetic oligonucleotide
caauugaugcacuauuucc

SEQ ID NO: 592524 - RNA, 19 nt, Artificial Sequence
  Description of Artificial Sequence: Synthetic oligonucleotide
uuuaguaauuauaugugua

SEQ ID NO: 592525 - RNA, 19 nt, Artificial Sequence
  Description of Artificial Sequence: Synthetic oligonucleotide
gaugcuuacaauaucggug

SEQ ID NO: 592526 - RNA, 19 nt, Artificial Sequence
  Description of Artificial Sequence: Synthetic oligonucleotide
agugguguuagccauaccu

SEQ ID NO: 592527 - RNA, 19 nt, Artificial Sequence
  Description of Artificial Sequence: Synthetic oligonucleotide
auaccuacaauaucaccac

SEQ ID NO: 592528 - RNA, 19 nt, Artificial Sequence
  Description of Artificial Sequence: Synthetic oligonucleotide
ugcaauaauuuucuugcgc

SEQ ID NO: 592529 - RNA, 19 nt, Artificial Sequence
  Description of Artificial Sequence: Synthetic oligonucleotide
aacaaguuccauuuuguau

SEQ ID NO: 592530 - RNA, 19 nt, Artificial Sequence
  Description of Artificial Sequence: Synthetic oligonucleotide
aauuacacguccuuagaaa

SEQ ID NO: 592531 - RNA, 19 nt, Artificial Sequence
  Description of Artificial Sequence: Synthetic oligonucleotide
aaauaguucauuucacuua

SEQ ID NO: 592532 - RNA, 19 nt, Artificial Sequence
  Description of Artificial Sequence: Synthetic oligonucleotide
uuaguaauuauauguguaa

SEQ ID NO: 592533 - RNA, 19 nt, Artificial Sequence
  Description of Artificial Sequence: Synthetic oligonucleotide
uuacucaccagcuaccuca

SEQ ID NO: 592534 - RNA, 19 nt, Artificial Sequence
  Description of Artificial Sequence: Synthetic oligonucleotide
ugaugacucauaauggcug

SEQ ID NO: 592535 - RNA, 19 nt, Artificial Sequence
  Description of Artificial Sequence: Synthetic oligonucleotide
agaagcaauaucucauuuc

SEQ ID NO: 592536 - RNA, 19 nt, Artificial Sequence
  Description of Artificial Sequence: Synthetic oligonucleotide
ccaauuacauccuugauag

SEQ ID NO: 592537 - RNA, 19 nt, Artificial Sequence
  Description of Artificial Sequence: Synthetic oligonucleotide
ucugaugacucauaauggc

SEQ ID NO: 592538 - RNA, 19 nt, Artificial Sequence
  Description of Artificial Sequence: Synthetic oligonucleotide
acucauaauggcuggacuc

SEQ ID NO: 592539 - RNA, 19 nt, Artificial Sequence
  Description of Artificial Sequence: Synthetic oligonucleotide
uuaauggagcuaauuacac

SEQ ID NO: 592540 - RNA, 19 nt, Artificial Sequence
  Description of Artificial Sequence: Synthetic oligonucleotide
uucaagguaagguccaaag

SEQ ID NO: 592541 - RNA, 19 nt, Artificial Sequence
  Description of Artificial Sequence: Synthetic oligonucleotide
cauaccuacaauaucacca

SEQ ID NO: 592542 - RNA, 19 nt, Artificial Sequence
  Description of Artificial Sequence: Synthetic oligonucleotide
ggucauguaacauuugccg

SEQ ID NO: 592543 - RNA, 19 nt, Artificial Sequence
  Description of Artificial Sequence: Synthetic oligonucleotide
ucacaguagacaacugacg

SEQ ID NO: 592544 - RNA, 19 nt, Artificial Sequence
  Description of Artificial Sequence: Synthetic oligonucleotide
ggaucaaacuguuauagcc

SEQ ID NO: 592545 - RNA, 19 nt, Artificial Sequence
  Description of Artificial Sequence: Synthetic oligonucleotide
uuuagucaggaaauagucu

SEQ ID NO: 592546 - RNA, 19 nt, Artificial Sequence
  Description of Artificial Sequence: Synthetic oligonucleotide
ucgguaacgaguaggcagg

SEQ ID NO: 592547 - RNA, 19 nt, Artificial Sequence
  Description of Artificial Sequence: Synthetic oligonucleotide
uuuugaauagcgcugcaua

SEQ ID NO: 592548 - RNA, 19 nt, Artificial Sequence
  Description of Artificial Sequence: Synthetic oligonucleotide
aauaggacagacgcugagg

SEQ ID NO: 592549 - RNA, 19 nt, Artificial Sequence
  Description of Artificial Sequence: Synthetic oligonucleotide
acaaugauuccuuaccgcu

SEQ ID NO: 592550 - RNA, 19 nt, Artificial Sequence
  Description of Artificial Sequence: Synthetic oligonucleotide
ugagcucagcaauacgugg

SEQ ID NO: 592551 - RNA, 19 nt, Artificial Sequence
  Description of Artificial Sequence: Synthetic oligonucleotide
ugaauagcgcugcauaccu

SEQ ID NO: 592552 - RNA, 19 nt, Artificial Sequence
  Description of Artificial Sequence: Synthetic oligonucleotide
ggcgcuaaugaccacaucg

SEQ ID NO: 592553 - RNA, 19 nt, Artificial Sequence
  Description of Artificial Sequence: Synthetic oligonucleotide
uuagacauugcuuuccaau

SEQ ID NO: 592554 - RNA, 19 nt, Artificial Sequence
  Description of Artificial Sequence: Synthetic oligonucleotide
auuaauuggucacuggcau

SEQ ID NO: 592555 - RNA, 19 nt, Artificial Sequence
  Description of Artificial Sequence: Synthetic oligonucleotide
uguaccaagaagcuuguuu

SEQ ID NO: 592556 - RNA, 19 nt, Artificial Sequence
  Description of Artificial Sequence: Synthetic oligonucleotide
uaugucggucacaucaaag

SEQ ID NO: 592557 - RNA, 19 nt, Artificial Sequence
  Description of Artificial Sequence: Synthetic oligonucleotide
gucgguaacgaguaggcag

SEQ ID NO: 592558 - RNA, 19 nt, Artificial Sequence
  Description of Artificial Sequence: Synthetic oligonucleotide
cuuaauggagcuaauuaca

SEQ ID NO: 592559 - RNA, 19 nt, Artificial Sequence
  Description of Artificial Sequence: Synthetic oligonucleotide
ucggucacaucaaaguuca

SEQ ID NO: 592560 - RNA, 19 nt, Artificial Sequence
  Description of Artificial Sequence: Synthetic oligonucleotide
uguuuaaagaucagccuau

SEQ ID NO: 592561 - RNA, 19 nt, Artificial Sequence
  Description of Artificial Sequence: Synthetic oligonucleotide
ucgaucguucuuaauggag

SEQ ID NO: 592562 - RNA, 19 nt, Artificial Sequence
  Description of Artificial Sequence: Synthetic oligonucleotide
uaauuacacguccuuagaa

SEQ ID NO: 592563 - RNA, 19 nt, Artificial Sequence
  Description of Artificial Sequence: Synthetic oligonucleotide
cuuaccgcuguguuuaaag

SEQ ID NO: 592564 - RNA, 19 nt, Artificial Sequence
  Description of Artificial Sequence: Synthetic oligonucleotide
uuuccuguauauguaacug

SEQ ID NO: 592565 - RNA, 19 nt, Artificial Sequence
  Description of Artificial Sequence: Synthetic oligonucleotide
cugauuuugaauagcgcug

SEQ ID NO: 592566 - RNA, 19 nt, Artificial Sequence
  Description of Artificial Sequence: Synthetic oligonucleotide
acuggcauuagacauugcu

SEQ ID NO: 592567 - RNA, 19 nt, Artificial Sequence
  Description of Artificial Sequence: Synthetic oligonucleotide
uacuugugaauguaccaag

SEQ ID NO: 592568 - RNA, 19 nt, Artificial Sequence
  Description of Artificial Sequence: Synthetic oligonucleotide
uggagcuaauuacacgucc

SEQ ID NO: 592569 - RNA, 19 nt, Artificial Sequence
  Description of Artificial Sequence: Synthetic oligonucleotide
aaagaagcaauaucucauu

SEQ ID NO: 592570 - RNA, 19 nt, Artificial Sequence
  Description of Artificial Sequence: Synthetic oligonucleotide
caacugacggagcacaucc

SEQ ID NO: 592571 - RNA, 19 nt, Artificial Sequence
  Description of Artificial Sequence: Synthetic oligonucleotide
gagucaauuccaccugugg

SEQ ID NO: 592572 - RNA, 19 nt, Artificial Sequence
  Description of Artificial Sequence: Synthetic oligonucleotide
cauuugccgcaauugaugc

SEQ ID NO: 592573 - RNA, 19 nt, Artificial Sequence
  Description of Artificial Sequence: Synthetic oligonucleotide
aacugguaugcaguuacuc

SEQ ID NO: 592574 - RNA, 19 nt, Artificial Sequence
  Description of Artificial Sequence: Synthetic oligonucleotide
ugauuuugaauagcgcugc

SEQ ID NO: 592575 - RNA, 19 nt, Artificial Sequence
  Description of Artificial Sequence: Synthetic oligonucleotide
uaauaggacagacgcugag

SEQ ID NO: 592576 - RNA, 19 nt, Artificial Sequence
  Description of Artificial Sequence: Synthetic oligonucleotide
gacgcugaggcagagagug

SEQ ID NO: 592577 - RNA, 19 nt, Artificial Sequence
  Description of Artificial Sequence: Synthetic oligonucleotide
acugguaugcaguuacuca

SEQ ID NO: 592578 - RNA, 19 nt, Artificial Sequence
  Description of Artificial Sequence: Synthetic oligonucleotide
aaguguuaccuuggcaacg

SEQ ID NO: 592579 - RNA, 19 nt, Artificial Sequence
  Description of Artificial Sequence: Synthetic oligonucleotide
accacuaugaagaaacuga

SEQ ID NO: 592580 - RNA, 19 nt, Artificial Sequence
  Description of Artificial Sequence: Synthetic oligonucleotide
guaacgaguaggcagguga

SEQ ID NO: 592581 - RNA, 19 nt, Artificial Sequence
  Description of Artificial Sequence: Synthetic oligonucleotide
ucuugcgaugcuuacaaua

SEQ ID NO: 592582 - RNA, 19 nt, Artificial Sequence
  Description of Artificial Sequence: Synthetic oligonucleotide
uguauguacuugugaaugu

SEQ ID NO: 592583 - RNA, 19 nt, Artificial Sequence
  Description of Artificial Sequence: Synthetic oligonucleotide
uccacuuucggcugaguca

SEQ ID NO: 592584 - RNA, 19 nt, Artificial Sequence
  Description of Artificial Sequence: Synthetic oligonucleotide
cugguaugcaguuacucac

SEQ ID NO: 592585 - RNA, 19 nt, Artificial Sequence
  Description of Artificial Sequence: Synthetic oligonucleotide
aggaaucaaagaaugagca

SEQ ID NO: 592586 - RNA, 19 nt, Artificial Sequence
  Description of Artificial Sequence: Synthetic oligonucleotide
aaauacccauggcucacug

SEQ ID NO: 592587 - RNA, 19 nt, Artificial Sequence
  Description of Artificial Sequence: Synthetic oligonucleotide
acauuuggggucaacuugg

SEQ ID NO: 592588 - RNA, 19 nt, Artificial Sequence
  Description of Artificial Sequence: Synthetic oligonucleotide
uaacgaguaggcaggugag

SEQ ID NO: 592589 - RNA, 19 nt, Artificial Sequence
  Description of Artificial Sequence: Synthetic oligonucleotide
cacaaugauuccuuaccgc

SEQ ID NO: 592590 - RNA, 19 nt, Artificial Sequence
  Description of Artificial Sequence: Synthetic oligonucleotide
uggcauuagacauugcuuu

SEQ ID NO: 592591 - RNA, 19 nt, Artificial Sequence
  Description of Artificial Sequence: Synthetic oligonucleotide
gcuaauuacacguccuuag

SEQ ID NO: 592592 - RNA, 19 nt, Artificial Sequence
  Description of Artificial Sequence: Synthetic oligonucleotide
uccugauuuugaauagcgc

SEQ ID NO: 592593 - RNA, 19 nt, Artificial Sequence
  Description of Artificial Sequence: Synthetic oligonucleotide
guuauagccugguagccac

SEQ ID NO: 592594 - RNA, 19 nt, Artificial Sequence
  Description of Artificial Sequence: Synthetic oligonucleotide
accuuaacacacuggcuuc

SEQ ID NO: 592595 - RNA, 19 nt, Artificial Sequence
  Description of Artificial Sequence: Synthetic oligonucleotide
ugauggcaguuccugauac

SEQ ID NO: 592596 - RNA, 19 nt, Artificial Sequence
  Description of Artificial Sequence: Synthetic oligonucleotide
uuaaacuugaugggacuca

SEQ ID NO: 592597 - RNA, 19 nt, Artificial Sequence
  Description of Artificial Sequence: Synthetic oligonucleotide
ucaguccgaacaaacugca

SEQ ID NO: 592598 - RNA, 19 nt, Artificial Sequence
  Description of Artificial Sequence: Synthetic oligonucleotide
cauagggcaauuuagaaau

SEQ ID NO: 592599 - RNA, 19 nt, Artificial Sequence
  Description of Artificial Sequence: Synthetic oligonucleotide
cacuauuuccucauugauc

SEQ ID NO: 592600 - RNA, 19 nt, Artificial Sequence
  Description of Artificial Sequence: Synthetic oligonucleotide
cagacgcugaggcagagag

SEQ ID NO: 592601 - RNA, 19 nt, Artificial Sequence
  Description of Artificial Sequence: Synthetic oligonucleotide
cauaugugguucucuuucc

SEQ ID NO: 592602 - RNA, 19 nt, Artificial Sequence
  Description of Artificial Sequence: Synthetic oligonucleotide
ugguaugcaguuacucacc

SEQ ID NO: 592603 - RNA, 19 nt, Artificial Sequence
  Description of Artificial Sequence: Synthetic oligonucleotide
aaaggcgcuaaugaccaca

SEQ ID NO: 592604 - RNA, 19 nt, Artificial Sequence
  Description of Artificial Sequence: Synthetic oligonucleotide
ugguguuagccauaccuac

SEQ ID NO: 592605 - RNA, 19 nt, Artificial Sequence
  Description of Artificial Sequence: Synthetic oligonucleotide
acauccaauuaacugguau

SEQ ID NO: 592606 - RNA, 19 nt, Artificial Sequence
  Description of Artificial Sequence: Synthetic oligonucleotide
cauuaauuggucacuggca

SEQ ID NO: 592607 - RNA, 19 nt, Artificial Sequence
  Description of Artificial Sequence: Synthetic oligonucleotide
uuacaggucauguaacauu

SEQ ID NO: 592608 - RNA, 19 nt, Artificial Sequence
  Description of Artificial Sequence: Synthetic oligonucleotide
uaggucugauggcaguucc

SEQ ID NO: 592609 - RNA, 19 nt, Artificial Sequence
  Description of Artificial Sequence: Synthetic oligonucleotide
accauccugauacagucga

SEQ ID NO: 592610 - RNA, 19 nt, Artificial Sequence
  Description of Artificial Sequence: Synthetic oligonucleotide
uagacauugcuuuccaauu

SEQ ID NO: 592611 - RNA, 19 nt, Artificial Sequence
  Description of Artificial Sequence: Synthetic oligonucleotide
caauaucggugacauuugg

SEQ ID NO: 592612 - RNA, 19 nt, Artificial Sequence
  Description of Artificial Sequence: Synthetic oligonucleotide
uuaccgcuguguuuaaaga

SEQ ID NO: 592613 - RNA, 19 nt, Artificial Sequence
  Description of Artificial Sequence: Synthetic oligonucleotide
uucggcugagucaauucca

SEQ ID NO: 592614 - RNA, 19 nt, Artificial Sequence
  Description of Artificial Sequence: Synthetic oligonucleotide
uguuucaggcaugagugcu

SEQ ID NO: 592615 - RNA, 19 nt, Artificial Sequence
  Description of Artificial Sequence: Synthetic oligonucleotide
acagucgauaauaggacag

SEQ ID NO: 592616 - RNA, 19 nt, Artificial Sequence
  Description of Artificial Sequence: Synthetic oligonucleotide
cucaccaaauguucccagg

SEQ ID NO: 592617 - RNA, 19 nt, Artificial Sequence
  Description of Artificial Sequence: Synthetic oligonucleotide
uaauuggucacuggcauua

SEQ ID NO: 592618 - RNA, 19 nt, Artificial Sequence
  Description of Artificial Sequence: Synthetic oligonucleotide
ugugguccaucccugagua

SEQ ID NO: 592619 - RNA, 19 nt, Artificial Sequence
  Description of Artificial Sequence: Synthetic oligonucleotide
guaagccucucuuugguuc

SEQ ID NO: 592620 - RNA, 19 nt, Artificial Sequence
  Description of Artificial Sequence: Synthetic oligonucleotide
auuuagaaauugucacacu

SEQ ID NO: 592621 - RNA, 19 nt, Artificial Sequence
  Description of Artificial Sequence: Synthetic oligonucleotide
ugagucaauuccaccugug

SEQ ID NO: 592622 - RNA, 19 nt, Artificial Sequence
  Description of Artificial Sequence: Synthetic oligonucleotide
agugagcuacuucacaaaa

SEQ ID NO: 592623 - RNA, 19 nt, Artificial Sequence
  Description of Artificial Sequence: Synthetic oligonucleotide
aguccgaacaaacugcauu

SEQ ID NO: 592624 - RNA, 19 nt, Artificial Sequence
  Description of Artificial Sequence: Synthetic oligonucleotide
gguauugcagcgcuuuucc

SEQ ID NO: 592625 - RNA, 19 nt, Artificial Sequence
  Description of Artificial Sequence: Synthetic oligonucleotide
uucauaagguguuguccug

SEQ ID NO: 592626 - RNA, 19 nt, Artificial Sequence
  Description of Artificial Sequence: Synthetic oligonucleotide
ccaauuaacugguaugcag

SEQ ID NO: 592627 - RNA, 19 nt, Artificial Sequence
  Description of Artificial Sequence: Synthetic oligonucleotide
uugccuaacccagcgacag

SEQ ID NO: 592628 - RNA, 19 nt, Artificial Sequence
  Description of Artificial Sequence: Synthetic oligonucleotide
augacgugugguccauccc

SEQ ID NO: 592629 - RNA, 19 nt, Artificial Sequence
  Description of Artificial Sequence: Synthetic oligonucleotide
auguguaaaucuauaaaau

SEQ ID NO: 592630 - RNA, 19 nt, Artificial Sequence
  Description of Artificial Sequence: Synthetic oligonucleotide
ucguucuuaauggagcuaa

SEQ ID NO: 592631 - RNA, 19 nt, Artificial Sequence
  Description of Artificial Sequence: Synthetic oligonucleotide
guuagccauaccuacaaua

SEQ ID NO: 592632 - RNA, 19 nt, Artificial Sequence
  Description of Artificial Sequence: Synthetic oligonucleotide
uguuauagccugguagcca

SEQ ID NO: 592633 - RNA, 19 nt, Artificial Sequence
  Description of Artificial Sequence: Synthetic oligonucleotide
guagacaacugacggagca

SEQ ID NO: 592634 - RNA, 19 nt, Artificial Sequence
  Description of Artificial Sequence: Synthetic oligonucleotide
ugcuaacucuucaaugcuc

SEQ ID NO: 592635 - RNA, 19 nt, Artificial Sequence
  Description of Artificial Sequence: Synthetic oligonucleotide
auaggaaacccaggcaaag

SEQ ID NO: 592636 - RNA, 19 nt, Artificial Sequence
  Description of Artificial Sequence: Synthetic oligonucleotide
ugugcaggugucgguaacg

SEQ ID NO: 592637 - RNA, 19 nt, Artificial Sequence
  Description of Artificial Sequence: Synthetic oligonucleotide
uuauagccugguagccacg

SEQ ID NO: 592638 - RNA, 19 nt, Artificial Sequence
  Description of Artificial Sequence: Synthetic oligonucleotide
acauuugccgcaauugaug

SEQ ID NO: 592639 - RNA, 19 nt, Artificial Sequence
  Description of Artificial Sequence: Synthetic oligonucleotide
uuaugaccauuaauugguc

SEQ ID NO: 592640 - RNA, 19 nt, Artificial Sequence
  Description of Artificial Sequence: Synthetic oligonucleotide
uggcuguaacaccaucugc

SEQ ID NO: 592641 - RNA, 19 nt, Artificial Sequence
  Description of Artificial Sequence: Synthetic oligonucleotide
aacauuugccgcaauugau

SEQ ID NO: 592642 - RNA, 19 nt, Artificial Sequence
  Description of Artificial Sequence: Synthetic oligonucleotide
ucaccuuaacacacuggcu

SEQ ID NO: 592643 - RNA, 19 nt, Artificial Sequence
  Description of Artificial Sequence: Synthetic oligonucleotide
auagucucucuguuagugu

SEQ ID NO: 592644 - RNA, 19 nt, Artificial Sequence
  Description of Artificial Sequence: Synthetic oligonucleotide
auaugugguucucuuucca

SEQ ID NO: 592645 - RNA, 19 nt, Artificial Sequence
  Description of Artificial Sequence: Synthetic oligonucleotide
uucgaucguucuuaaugga

SEQ ID NO: 592646 - RNA, 19 nt, Artificial Sequence
  Description of Artificial Sequence: Synthetic oligonucleotide
cucgcucugauuuuacuca

SEQ ID NO: 592647 - RNA, 19 nt, Artificial Sequence
  Description of Artificial Sequence: Synthetic oligonucleotide
uuccuuaccgcuguguuua

SEQ ID NO: 592648 - RNA, 19 nt, Artificial Sequence
  Description of Artificial Sequence: Synthetic oligonucleotide
ggcaauuuagaaauuguca

SEQ ID NO: 592649 - RNA, 19 nt, Artificial Sequence
  Description of Artificial Sequence: Synthetic oligonucleotide
cuugaugggacucaaggcu

SEQ ID NO: 592650 - RNA, 19 nt, Artificial Sequence
  Description of Artificial Sequence: Synthetic oligonucleotide
uacaccgcucagcucacca

SEQ ID NO: 592651 - RNA, 19 nt, Artificial Sequence
  Description of Artificial Sequence: Synthetic oligonucleotide
uucgcugcucuugcgaugc

SEQ ID NO: 592652 - RNA, 19 nt, Artificial Sequence
  Description of Artificial Sequence: Synthetic oligonucleotide
cauuacaggucauguaaca

SEQ ID NO: 592653 - RNA, 19 nt, Artificial Sequence
  Description of Artificial Sequence: Synthetic oligonucleotide
auugcagcgcuuuuccaau

SEQ ID NO: 592654 - RNA, 19 nt, Artificial Sequence
  Description of Artificial Sequence: Synthetic oligonucleotide
uaccgcuguguuuaaagau

SEQ ID NO: 592655 - RNA, 19 nt, Artificial Sequence
  Description of Artificial Sequence: Synthetic oligonucleotide
ugacggagcacauccaauu

SEQ ID NO: 592656 - RNA, 19 nt, Artificial Sequence
  Description of Artificial Sequence: Synthetic oligonucleotide
uccaauuaacugguaugca

SEQ ID NO: 592657 - RNA, 19 nt, Artificial Sequence
  Description of Artificial Sequence: Synthetic oligonucleotide
uccugauaccccuccauau

SEQ ID NO: 592658 - RNA, 19 nt, Artificial Sequence
  Description of Artificial Sequence: Synthetic oligonucleotide
gcuacuucacaaaagggac

SEQ ID NO: 592659 - RNA, 19 nt, Artificial Sequence
  Description of Artificial Sequence: Synthetic oligonucleotide
ucggcugagucaauuccac

SEQ ID NO: 592660 - RNA, 19 nt, Artificial Sequence
  Description of Artificial Sequence: Synthetic oligonucleotide
cuaauuacacguccuuaga

SEQ ID NO: 592661 - RNA, 19 nt, Artificial Sequence
  Description of Artificial Sequence: Synthetic oligonucleotide
agguauugcagcgcuuuuc

SEQ ID NO: 592662 - RNA, 19 nt, Artificial Sequence
  Description of Artificial Sequence: Synthetic oligonucleotide
agauaaagcaaggcuuuga

SEQ ID NO: 592663 - RNA, 19 nt, Artificial Sequence
  Description of Artificial Sequence: Synthetic oligonucleotide
agacauugcuuuccaauuu

SEQ ID NO: 592664 - RNA, 19 nt, Artificial Sequence
  Description of Artificial Sequence: Synthetic oligonucleotide
auuacaggucauguaacau

SEQ ID NO: 592665 - RNA, 19 nt, Artificial Sequence
  Description of Artificial Sequence: Synthetic oligonucleotide
ugguucauaagguguuguc

SEQ ID NO: 592666 - RNA, 19 nt, Artificial Sequence
  Description of Artificial Sequence: Synthetic oligonucleotide
ggugucgguaacgaguagg

SEQ ID NO: 592667 - RNA, 19 nt, Artificial Sequence
  Description of Artificial Sequence: Synthetic oligonucleotide
cacguccuuagaaauugug

SEQ ID NO: 592668 - RNA, 19 nt, Artificial Sequence
  Description of Artificial Sequence: Synthetic oligonucleotide
ugacucauaauggcuggac

SEQ ID NO: 592669 - RNA, 19 nt, Artificial Sequence
  Description of Artificial Sequence: Synthetic oligonucleotide
aauuggucacuggcauuag

SEQ ID NO: 592670 - RNA, 19 nt, Artificial Sequence
  Description of Artificial Sequence: Synthetic oligonucleotide
cacgagucauuacagguca

SEQ ID NO: 592671 - RNA, 19 nt, Artificial Sequence
  Description of Artificial Sequence: Synthetic oligonucleotide
cuguuucaggcaugagugc

SEQ ID NO: 592672 - RNA, 19 nt, Artificial Sequence
  Description of Artificial Sequence: Synthetic oligonucleotide
uuaauuggucacuggcauu

SEQ ID NO: 592673 - RNA, 19 nt, Artificial Sequence
  Description of Artificial Sequence: Synthetic oligonucleotide
uuaccuuggcaacgguuuc

SEQ ID NO: 592674 - RNA, 19 nt, Artificial Sequence
  Description of Artificial Sequence: Synthetic oligonucleotide
caccugcaaauacccaugg

SEQ ID NO: 592675 - RNA, 19 nt, Artificial Sequence
  Description of Artificial Sequence: Synthetic oligonucleotide
guuaguguccagcaccaaa

SEQ ID NO: 592676 - RNA, 19 nt, Artificial Sequence
  Description of Artificial Sequence: Synthetic oligonucleotide
agucauuacaggucaugua

SEQ ID NO: 592677 - RNA, 19 nt, Artificial Sequence
  Description of Artificial Sequence: Synthetic oligonucleotide
acaacugacggagcacauc

SEQ ID NO: 592678 - RNA, 19 nt, Artificial Sequence
  Description of Artificial Sequence: Synthetic oligonucleotide
ugaauguaccaagaagcuu

SEQ ID NO: 592679 - RNA, 19 nt, Artificial Sequence
  Description of Artificial Sequence: Synthetic oligonucleotide
ccacaaugauuccuuaccg

SEQ ID NO: 592680 - RNA, 19 nt, Artificial Sequence
  Description of Artificial Sequence: Synthetic oligonucleotide
gugagcuacuucacaaaag

SEQ ID NO: 592681 - RNA, 19 nt, Artificial Sequence
  Description of Artificial Sequence: Synthetic oligonucleotide
aucagccuaugucggucac

SEQ ID NO: 592682 - RNA, 19 nt, Artificial Sequence
  Description of Artificial Sequence: Synthetic oligonucleotide
gcuaaugaccacaucggcc

SEQ ID NO: 592683 - RNA, 19 nt, Artificial Sequence
  Description of Artificial Sequence: Synthetic oligonucleotide
cuguuauagccugguagcc

SEQ ID NO: 592684 - RNA, 19 nt, Artificial Sequence
  Description of Artificial Sequence: Synthetic oligonucleotide
uuccugauaccccuccaua

SEQ ID NO: 592685 - RNA, 19 nt, Artificial Sequence
  Description of Artificial Sequence: Synthetic oligonucleotide
gaucguucuuaauggagcu

SEQ ID NO: 592686 - RNA, 19 nt, Artificial Sequence
  Description of Artificial Sequence: Synthetic oligonucleotide
acugacggagcacauccaa

SEQ ID NO: 592687 - RNA, 19 nt, Artificial Sequence
  Description of Artificial Sequence: Synthetic oligonucleotide
gugcaguaaucuucaauca

SEQ ID NO: 592688 - RNA, 19 nt, Artificial Sequence
  Description of Artificial Sequence: Synthetic oligonucleotide
ggacucaaggcuuccauca

SEQ ID NO: 592689 - RNA, 19 nt, Artificial Sequence
  Description of Artificial Sequence: Synthetic oligonucleotide
cagcuugccuaacccagcg

SEQ ID NO: 592690 - RNA, 19 nt, Artificial Sequence
  Description of Artificial Sequence: Synthetic oligonucleotide
agccugguagccacgaguc

SEQ ID NO: 592691 - RNA, 19 nt, Artificial Sequence
  Description of Artificial Sequence: Synthetic oligonucleotide
ugggucuacuucugggaga

SEQ ID NO: 592692 - RNA, 19 nt, Artificial Sequence
  Description of Artificial Sequence: Synthetic oligonucleotide
guaugcaguuacucaccag

SEQ ID NO: 592693 - RNA, 19 nt, Artificial Sequence
  Description of Artificial Sequence: Synthetic oligonucleotide
uugguucauaagguguugu

SEQ ID NO: 592694 - RNA, 19 nt, Artificial Sequence
  Description of Artificial Sequence: Synthetic oligonucleotide
uucaacccaguuuccaguu

SEQ ID NO: 592695 - RNA, 19 nt, Artificial Sequence
  Description of Artificial Sequence: Synthetic oligonucleotide
gccaucagcuuucaguccc

SEQ ID NO: 592696 - RNA, 19 nt, Artificial Sequence
  Description of Artificial Sequence: Synthetic oligonucleotide
acaauaucggugacauuug

SEQ ID NO: 592697 - RNA, 19 nt, Artificial Sequence
  Description of Artificial Sequence: Synthetic oligonucleotide
auuagacauugcuuuccaa

SEQ ID NO: 592698 - RNA, 19 nt, Artificial Sequence
  Description of Artificial Sequence: Synthetic oligonucleotide
uuuguaucucucgcucuga

SEQ ID NO: 592699 - RNA, 19 nt, Artificial Sequence
  Description of Artificial Sequence: Synthetic oligonucleotide
uaacugguaugcaguuacu

SEQ ID NO: 592700 - RNA, 19 nt, Artificial Sequence
  Description of Artificial Sequence: Synthetic oligonucleotide
gauuuugaauagcgcugca

SEQ ID NO: 592701 - RNA, 19 nt, Artificial Sequence
  Description of Artificial Sequence: Synthetic oligonucleotide
uugcgaugcuuacaauauc

SEQ ID NO: 592702 - RNA, 19 nt, Artificial Sequence
  Description of Artificial Sequence: Synthetic oligonucleotide
auuuugaauagcgcugcau

SEQ ID NO: 592703 - RNA, 19 nt, Artificial Sequence
  Description of Artificial Sequence: Synthetic oligonucleotide
aaaaugacgugugguccau

SEQ ID NO: 592704 - RNA, 19 nt, Artificial Sequence
  Description of Artificial Sequence: Synthetic oligonucleotide
gcaauugaugcacuauuuc

SEQ ID NO: 592705 - RNA, 19 nt, Artificial Sequence
  Description of Artificial Sequence: Synthetic oligonucleotide
guguuagccauaccuacaa

SEQ ID NO: 592706 - RNA, 19 nt, Artificial Sequence
  Description of Artificial Sequence: Synthetic oligonucleotide
aaaugacgugugguccauc

SEQ ID NO: 592707 - RNA, 19 nt, Artificial Sequence
  Description of Artificial Sequence: Synthetic oligonucleotide
guuugcaugguuucugggu

SEQ ID NO: 592708 - RNA, 19 nt, Artificial Sequence
  Description of Artificial Sequence: Synthetic oligonucleotide
auuugccgcaauugaugca

SEQ ID NO: 592709 - RNA, 19 nt, Artificial Sequence
  Description of Artificial Sequence: Synthetic oligonucleotide
uuguaucucucgcucugau

SEQ ID NO: 592710 - RNA, 19 nt, Artificial Sequence
  Description of Artificial Sequence: Synthetic oligonucleotide
ucgcucugauuuuacucac

SEQ ID NO: 592711 - RNA, 19 nt, Artificial Sequence
  Description of Artificial Sequence: Synthetic oligonucleotide
uguuagccauaccuacaau

SEQ ID NO: 592712 - RNA, 19 nt, Artificial Sequence
  Description of Artificial Sequence: Synthetic oligonucleotide
agcgcuuuuccaauuacau

SEQ ID NO: 592713 - RNA, 19 nt, Artificial Sequence
  Description of Artificial Sequence: Synthetic oligonucleotide
cugcauaccuggagaacug

SEQ ID NO: 592714 - RNA, 19 nt, Artificial Sequence
  Description of Artificial Sequence: Synthetic oligonucleotide
acggagcacauccaauuaa

SEQ ID NO: 592715 - RNA, 19 nt, Artificial Sequence
  Description of Artificial Sequence: Synthetic oligonucleotide
agguaagguccaaagcuug

SEQ ID NO: 592716 - RNA, 19 nt, Artificial Sequence
  Description of Artificial Sequence: Synthetic oligonucleotide
ucaucuugcucaguccgaa

SEQ ID NO: 592717 - RNA, 19 nt, Artificial Sequence
  Description of Artificial Sequence: Synthetic oligonucleotide
cucagcaauacguggaacu

SEQ ID NO: 592718 - RNA, 19 nt, Artificial Sequence
  Description of Artificial Sequence: Synthetic oligonucleotide
gugagcucagcaauacgug

SEQ ID NO: 592719 - RNA, 19 nt, Artificial Sequence
  Description of Artificial Sequence: Synthetic oligonucleotide
guccuuagaaauuguguua

SEQ ID NO: 592720 - RNA, 19 nt, Artificial Sequence
  Description of Artificial Sequence: Synthetic oligonucleotide
cuguuaguguccagcacca

SEQ ID NO: 592721 - RNA, 19 nt, Artificial Sequence
  Description of Artificial Sequence: Synthetic oligonucleotide
gguaagguccaaagcuugg

SEQ ID NO: 592722 - RNA, 19 nt, Artificial Sequence
  Description of Artificial Sequence: Synthetic oligonucleotide
gaccccaucuguuaaacuu

SEQ ID NO: 592723 - RNA, 19 nt, Artificial Sequence
  Description of Artificial Sequence: Synthetic oligonucleotide
ugauuccuuaccgcugugu

SEQ ID NO: 592724 - RNA, 19 nt, Artificial Sequence
  Description of Artificial Sequence: Synthetic oligonucleotide
aacgaguaggcaggugagu

SEQ ID NO: 592725 - RNA, 19 nt, Artificial Sequence
  Description of Artificial Sequence: Synthetic oligonucleotide
cgaucguucuuaauggagc

SEQ ID NO: 592726 - RNA, 19 nt, Artificial Sequence
  Description of Artificial Sequence: Synthetic oligonucleotide
ugcagcgcuuuuccaauua

SEQ ID NO: 592727 - RNA, 19 nt, Artificial Sequence
  Description of Artificial Sequence: Synthetic oligonucleotide
cuugcgaugcuuacaauau

SEQ ID NO: 592728 - RNA, 19 nt, Artificial Sequence
  Description of Artificial Sequence: Synthetic oligonucleotide
aauggaacccgaacagcuu

SEQ ID NO: 592729 - RNA, 19 nt, Artificial Sequence
  Description of Artificial Sequence: Synthetic oligonucleotide
gacucauaauggcuggacu

SEQ ID NO: 592730 - RNA, 19 nt, Artificial Sequence
  Description of Artificial Sequence: Synthetic oligonucleotide
cugaugacucauaauggcu

SEQ ID NO: 592731 - RNA, 19 nt, Artificial Sequence
  Description of Artificial Sequence: Synthetic oligonucleotide
auaauaggacagacgcuga

SEQ ID NO: 592732 - RNA, 19 nt, Artificial Sequence
  Description of Artificial Sequence: Synthetic oligonucleotide
aagcaauaucucauuucau

SEQ ID NO: 592733 - RNA, 19 nt, Artificial Sequence
  Description of Artificial Sequence: Synthetic oligonucleotide
cauugaucagggccacaac

SEQ ID NO: 592734 - RNA, 19 nt, Artificial Sequence
  Description of Artificial Sequence: Synthetic oligonucleotide
ucuacaccgcucagcucac

SEQ ID NO: 592735 - RNA, 19 nt, Artificial Sequence
  Description of Artificial Sequence: Synthetic oligonucleotide
ccauaccuacaauaucacc

SEQ ID NO: 592736 - RNA, 19 nt, Artificial Sequence
  Description of Artificial Sequence: Synthetic oligonucleotide
uucuugcgcuguucaaggu

SEQ ID NO: 592737 - RNA, 19 nt, Artificial Sequence
  Description of Artificial Sequence: Synthetic oligonucleotide
gcuguaacaccaucugcac

SEQ ID NO: 592738 - RNA, 19 nt, Artificial Sequence
  Description of Artificial Sequence: Synthetic oligonucleotide
gguguuguccuggaaacca

SEQ ID NO: 592739 - RNA, 19 nt, Artificial Sequence
  Description of Artificial Sequence: Synthetic oligonucleotide
auaagguguuguccuggaa

SEQ ID NO: 592740 - RNA, 19 nt, Artificial Sequence
  Description of Artificial Sequence: Synthetic oligonucleotide
acuuacaauuaggaaucaa

SEQ ID NO: 592741 - RNA, 19 nt, Artificial Sequence
  Description of Artificial Sequence: Synthetic oligonucleotide
ugucgguaacgaguaggca

SEQ ID NO: 592742 - RNA, 19 nt, Artificial Sequence
  Description of Artificial Sequence: Synthetic oligonucleotide
cuaacccagcgacagaugu

SEQ ID NO: 592743 - RNA, 19 nt, Artificial Sequence
  Description of Artificial Sequence: Synthetic oligonucleotide
gcauagggcaauuuagaaa

SEQ ID NO: 592744 - RNA, 19 nt, Artificial Sequence
  Description of Artificial Sequence: Synthetic oligonucleotide
guuacucaccagcuaccuc

SEQ ID NO: 592745 - RNA, 19 nt, Artificial Sequence
  Description of Artificial Sequence: Synthetic oligonucleotide
gagucauuacaggucaugu

SEQ ID NO: 592746 - RNA, 19 nt, Artificial Sequence
  Description of Artificial Sequence: Synthetic oligonucleotide
gguaugcaguuacucacca

SEQ ID NO: 592747 - RNA, 19 nt, Artificial Sequence
  Description of Artificial Sequence: Synthetic oligonucleotide
gcgcuaaugaccacaucgg

SEQ ID NO: 592748 - RNA, 19 nt, Artificial Sequence
  Description of Artificial Sequence: Synthetic oligonucleotide
aggugacuaaaagaagcaa

SEQ ID NO: 592749 - RNA, 19 nt, Artificial Sequence
  Description of Artificial Sequence: Synthetic oligonucleotide
uccccuugucauaguaaau

SEQ ID NO: 592750 - RNA, 19 nt, Artificial Sequence
  Description of Artificial Sequence: Synthetic oligonucleotide
agaccccaucuguuaaacu

SEQ ID NO: 592751 - RNA, 19 nt, Artificial Sequence
  Description of Artificial Sequence: Synthetic oligonucleotide
ucacacuaauugccaugaa

SEQ ID NO: 592752 - RNA, 19 nt, Artificial Sequence
  Description of Artificial Sequence: Synthetic oligonucleotide
caguguugguggcuguaac

SEQ ID NO: 592753 - RNA, 19 nt, Artificial Sequence
  Description of Artificial Sequence: Synthetic oligonucleotide
ucaacccaguuuccaguuu

SEQ ID NO: 592754 - RNA, 19 nt, Artificial Sequence
  Description of Artificial Sequence: Synthetic oligonucleotide
agcuaauuacacguccuua

SEQ ID NO: 592755 - RNA, 19 nt, Artificial Sequence
  Description of Artificial Sequence: Synthetic oligonucleotide
gacgugugguccaucccug

SEQ ID NO: 592756 - RNA, 19 nt, Artificial Sequence
  Description of Artificial Sequence: Synthetic oligonucleotide
accccuccauaugugguuc

SEQ ID NO: 592757 - RNA, 19 nt, Artificial Sequence
  Description of Artificial Sequence: Synthetic oligonucleotide
gauuccuuaccgcuguguu

SEQ ID NO: 592758 - RNA, 19 nt, Artificial Sequence
  Description of Artificial Sequence: Synthetic oligonucleotide
gauccugccuguauguacu

SEQ ID NO: 592759 - RNA, 19 nt, Artificial Sequence
  Description of Artificial Sequence: Synthetic oligonucleotide
gaauagcgcugcauaccug

SEQ ID NO: 592760 - RNA, 19 nt, Artificial Sequence
  Description of Artificial Sequence: Synthetic oligonucleotide
ggcauagggcaauuuagaa

SEQ ID NO: 592761 - RNA, 19 nt, Artificial Sequence
  Description of Artificial Sequence: Synthetic oligonucleotide
aaggcgcuaaugaccacau

SEQ ID NO: 592762 - RNA, 19 nt, Artificial Sequence
  Description of Artificial Sequence: Synthetic oligonucleotide
ucugcccaucccagucugc

SEQ ID NO: 592763 - RNA, 19 nt, Artificial Sequence
  Description of Artificial Sequence: Synthetic oligonucleotide
aacccaguuuccaguuuca

SEQ ID NO: 592764 - RNA, 19 nt, Artificial Sequence
  Description of Artificial Sequence: Synthetic oligonucleotide
cuugccuaacccagcgaca

SEQ ID NO: 592765 - RNA, 19 nt, Artificial Sequence
  Description of Artificial Sequence: Synthetic oligonucleotide
agugcugaacugaauuuua

SEQ ID NO: 592766 - RNA, 19 nt, Artificial Sequence
  Description of Artificial Sequence: Synthetic oligonucleotide
cugaccacaaugauucuau

SEQ ID NO: 592767 - RNA, 19 nt, Artificial Sequence
  Description of Artificial Sequence: Synthetic oligonucleotide
ggcauuagacauugcuuuc

SEQ ID NO: 592768 - RNA, 19 nt, Artificial Sequence
  Description of Artificial Sequence: Synthetic oligonucleotide
augcaguuacucaccagcu

SEQ ID NO: 592769 - RNA, 19 nt, Artificial Sequence
  Description of Artificial Sequence: Synthetic oligonucleotide
aauggcggucacagcucuc

SEQ ID NO: 592770 - RNA, 19 nt, Artificial Sequence
  Description of Artificial Sequence: Synthetic oligonucleotide
cuucgcugcucuugcgaug

SEQ ID NO: 592771 - RNA, 19 nt, Artificial Sequence
  Description of Artificial Sequence: Synthetic oligonucleotide
gugaauguaccaagaagcu

SEQ ID NO: 592772 - RNA, 19 nt, Artificial Sequence
  Description of Artificial Sequence: Synthetic oligonucleotide
uaccccuccauaugugguu

SEQ ID NO: 592773 - RNA, 19 nt, Artificial Sequence
  Description of Artificial Sequence: Synthetic oligonucleotide
gacaccuguuucaggcaug

SEQ ID NO: 592774 - RNA, 19 nt, Artificial Sequence
  Description of Artificial Sequence: Synthetic oligonucleotide
uaucucucgcucugauuuu

SEQ ID NO: 592775 - RNA, 19 nt, Artificial Sequence
  Description of Artificial Sequence: Synthetic oligonucleotide
ugaccacaaugauucuaua

SEQ ID NO: 592776 - RNA, 19 nt, Artificial Sequence
  Description of Artificial Sequence: Synthetic oligonucleotide
caccuuaacacacuggcuu

SEQ ID NO: 592777 - RNA, 19 nt, Artificial Sequence
  Description of Artificial Sequence: Synthetic oligonucleotide
gcucuugcgaugcuuacaa

SEQ ID NO: 592778 - RNA, 19 nt, Artificial Sequence
  Description of Artificial Sequence: Synthetic oligonucleotide
aggcguaccaucugcucuu

SEQ ID NO: 592779 - RNA, 19 nt, Artificial Sequence
  Description of Artificial Sequence: Synthetic oligonucleotide
gguuuccuguauauguaac

SEQ ID NO: 592780 - RNA, 19 nt, Artificial Sequence
  Description of Artificial Sequence: Synthetic oligonucleotide
ucagccuaugucggucaca

SEQ ID NO: 592781 - RNA, 19 nt, Artificial Sequence
  Description of Artificial Sequence: Synthetic oligonucleotide
guuaccuuggcaacgguuu

SEQ ID NO: 592782 - RNA, 19 nt, Artificial Sequence
  Description of Artificial Sequence: Synthetic oligonucleotide
gcaauaggucugauggcag

SEQ ID NO: 592783 - RNA, 19 nt, Artificial Sequence
  Description of Artificial Sequence: Synthetic oligonucleotide
cuucaacccaguuuccagu

SEQ ID NO: 592784 - RNA, 19 nt, Artificial Sequence
  Description of Artificial Sequence: Synthetic oligonucleotide
auaccccuccauauguggu

SEQ ID NO: 592785 - RNA, 19 nt, Artificial Sequence
  Description of Artificial Sequence: Synthetic oligonucleotide
gucugauggcaguuccuga

SEQ ID NO: 592786 - RNA, 19 nt, Artificial Sequence
  Description of Artificial Sequence: Synthetic oligonucleotide
caggugucgguaacgagua

SEQ ID NO: 592787 - RNA, 19 nt, Artificial Sequence
  Description of Artificial Sequence: Synthetic oligonucleotide
aacugacggagcacaucca

SEQ ID NO: 592788 - RNA, 19 nt, Artificial Sequence
  Description of Artificial Sequence: Synthetic oligonucleotide
gcucaccaaauguucccag

SEQ ID NO: 592789 - RNA, 19 nt, Artificial Sequence
  Description of Artificial Sequence: Synthetic oligonucleotide
augacucauaauggcugga

SEQ ID NO: 592790 - RNA, 19 nt, Artificial Sequence
  Description of Artificial Sequence: Synthetic oligonucleotide
auagcaggaauaggcuuuu

SEQ ID NO: 592791 - RNA, 19 nt, Artificial Sequence
  Description of Artificial Sequence: Synthetic oligonucleotide
ccacgagucauuacagguc

SEQ ID NO: 592792 - RNA, 19 nt, Artificial Sequence
  Description of Artificial Sequence: Synthetic oligonucleotide
aggcgcuaaugaccacauc

SEQ ID NO: 592793 - RNA, 19 nt, Artificial Sequence
  Description of Artificial Sequence: Synthetic oligonucleotide
cuggcauuagacauugcuu

SEQ ID NO: 592794 - RNA, 19 nt, Artificial Sequence
  Description of Artificial Sequence: Synthetic oligonucleotide
aggugucgguaacgaguag

SEQ ID NO: 592795 - RNA, 19 nt, Artificial Sequence
  Description of Artificial Sequence: Synthetic oligonucleotide
ccaaagagugagcuacuuc

SEQ ID NO: 592796 - RNA, 19 nt, Artificial Sequence
  Description of Artificial Sequence: Synthetic oligonucleotide
cuaaggguaagccucucuu

SEQ ID NO: 592797 - RNA, 19 nt, Artificial Sequence
  Description of Artificial Sequence: Synthetic oligonucleotide
acuuucggcugagucaauu

SEQ ID NO: 592798 - RNA, 19 nt, Artificial Sequence
  Description of Artificial Sequence: Synthetic oligonucleotide
cauguaacauuugccgcaa

SEQ ID NO: 592799 - RNA, 19 nt, Artificial Sequence
  Description of Artificial Sequence: Synthetic oligonucleotide
aggccagugcaguaaucuu

SEQ ID NO: 592800 - RNA, 19 nt, Artificial Sequence
  Description of Artificial Sequence: Synthetic oligonucleotide
agccuaugucggucacauc

SEQ ID NO: 592801 - RNA, 19 nt, Artificial Sequence
  Description of Artificial Sequence: Synthetic oligonucleotide
agcuaaggguaagccucuc

SEQ ID NO: 592802 - RNA, 19 nt, Artificial Sequence
  Description of Artificial Sequence: Synthetic oligonucleotide
ggcaugagugcugaacuga

SEQ ID NO: 592803 - RNA, 19 nt, Artificial Sequence
  Description of Artificial Sequence: Synthetic oligonucleotide
acaccgcucagcucaccaa

SEQ ID NO: 592804 - RNA, 19 nt, Artificial Sequence
  Description of Artificial Sequence: Synthetic oligonucleotide
gugguguuagccauaccua

SEQ ID NO: 592805 - RNA, 19 nt, Artificial Sequence
  Description of Artificial Sequence: Synthetic oligonucleotide
gguguuagccauaccuaca

SEQ ID NO: 592806 - RNA, 19 nt, Artificial Sequence
  Description of Artificial Sequence: Synthetic oligonucleotide
accaaagagugagcuacuu

SEQ ID NO: 592807 - RNA, 19 nt, Artificial Sequence
  Description of Artificial Sequence: Synthetic oligonucleotide
ccucaccagcucuggaucc

SEQ ID NO: 592808 - RNA, 19 nt, Artificial Sequence
  Description of Artificial Sequence: Synthetic oligonucleotide
gggacucaaggcuuccauc

SEQ ID NO: 592809 - RNA, 19 nt, Artificial Sequence
  Description of Artificial Sequence: Synthetic oligonucleotide
cuaugucggucacaucaaa

SEQ ID NO: 592810 - RNA, 19 nt, Artificial Sequence
  Description of Artificial Sequence: Synthetic oligonucleotide
gcgcuuuuccaauuacauc

SEQ ID NO: 592811 - RNA, 19 nt, Artificial Sequence
  Description of Artificial Sequence: Synthetic oligonucleotide
gccacgagucauuacaggu

SEQ ID NO: 592812 - RNA, 19 nt, Artificial Sequence
  Description of Artificial Sequence: Synthetic oligonucleotide
gagcuaauuacacguccuu

SEQ ID NO: 592813 - RNA, 19 nt, Artificial Sequence
  Description of Artificial Sequence: Synthetic oligonucleotide
gccacggagugccaucagc

SEQ ID NO: 592814 - RNA, 19 nt, Artificial Sequence
  Description of Artificial Sequence: Synthetic oligonucleotide
ggccagugcaguaaucuuc

SEQ ID NO: 592815 - RNA, 19 nt, Artificial Sequence
  Description of Artificial Sequence: Synthetic oligonucleotide
cggagcacauccaauuaac

SEQ ID NO: 592816 - RNA, 19 nt, Artificial Sequence
  Description of Artificial Sequence: Synthetic oligonucleotide
ccacuaugaagaaacugaa

SEQ ID NO: 592817 - RNA, 19 nt, Artificial Sequence
  Description of Artificial Sequence: Synthetic oligonucleotide
uguuaguguccagcaccaa

SEQ ID NO: 592818 - RNA, 19 nt, Artificial Sequence
  Description of Artificial Sequence: Synthetic oligonucleotide
ugguagccacgagucauua

SEQ ID NO: 592819 - RNA, 19 nt, Artificial Sequence
  Description of Artificial Sequence: Synthetic oligonucleotide
aucggccuucaggcguacc

SEQ ID NO: 592820 - RNA, 19 nt, Artificial Sequence
  Description of Artificial Sequence: Synthetic oligonucleotide
ggcaguuccugauaccccu

SEQ ID NO: 592821 - RNA, 19 nt, Artificial Sequence
  Description of Artificial Sequence: Synthetic oligonucleotide
gguagccacgagucauuac

SEQ ID NO: 592822 - RNA, 19 nt, Artificial Sequence
  Description of Artificial Sequence: Synthetic oligonucleotide
aucguucuuaauggagcua

SEQ ID NO: 592823 - RNA, 19 nt, Artificial Sequence
  Description of Artificial Sequence: Synthetic oligonucleotide
gccauaccuacaauaucac

SEQ ID NO: 592824 - RNA, 19 nt, Artificial Sequence
  Description of Artificial Sequence: Synthetic oligonucleotide
cuucugggagaccccaucu

SEQ ID NO: 592825 - RNA, 19 nt, Artificial Sequence
  Description of Artificial Sequence: Synthetic oligonucleotide
gcugcauaccuggagaacu

SEQ ID NO: 592826 - RNA, 19 nt, Artificial Sequence
  Description of Artificial Sequence: Synthetic oligonucleotide
cugagucaauuccaccugu

SEQ ID NO: 592827 - RNA, 19 nt, Artificial Sequence
  Description of Artificial Sequence: Synthetic oligonucleotide
ccgcuguguuuaaagauca

SEQ ID NO: 592828 - RNA, 19 nt, Artificial Sequence
  Description of Artificial Sequence: Synthetic oligonucleotide
uucaggcaugagugcugaa

SEQ ID NO: 592829 - RNA, 19 nt, Artificial Sequence
  Description of Artificial Sequence: Synthetic oligonucleotide
ugcccaucccagucugcua

SEQ ID NO: 592830 - RNA, 19 nt, Artificial Sequence
  Description of Artificial Sequence: Synthetic oligonucleotide
gguaacgaguaggcaggug

SEQ ID NO: 592831 - RNA, 19 nt, Artificial Sequence
  Description of Artificial Sequence: Synthetic oligonucleotide
caccgcucagcucaccaaa

SEQ ID NO: 592832 - RNA, 19 nt, Artificial Sequence
  Description of Artificial Sequence: Synthetic oligonucleotide
uccuuaccgcuguguuuaa

SEQ ID NO: 592833 - RNA, 19 nt, Artificial Sequence
  Description of Artificial Sequence: Synthetic oligonucleotide
cagugguguuagccauacc

SEQ ID NO: 592834 - RNA, 19 nt, Artificial Sequence
  Description of Artificial Sequence: Synthetic oligonucleotide
caacuugcucuacaccgcu

SEQ ID NO: 592835 - RNA, 19 nt, Artificial Sequence
  Description of Artificial Sequence: Synthetic oligonucleotide
cacuuacaauuaggaauca

SEQ ID NO: 592836 - RNA, 19 nt, Artificial Sequence
  Description of Artificial Sequence: Synthetic oligonucleotide
ugggaucacucaggacaga

SEQ ID NO: 592837 - RNA, 19 nt, Artificial Sequence
  Description of Artificial Sequence: Synthetic oligonucleotide
auagggcaauuuagaaauu

SEQ ID NO: 592838 - RNA, 19 nt, Artificial Sequence
  Description of Artificial Sequence: Synthetic oligonucleotide
ggagcuaauuacacguccu

SEQ ID NO: 592839 - RNA, 19 nt, Artificial Sequence
  Description of Artificial Sequence: Synthetic oligonucleotide
guaggcaggugaguuuucu

SEQ ID NO: 592840 - RNA, 19 nt, Artificial Sequence
  Description of Artificial Sequence: Synthetic oligonucleotide
gcaacgguuuccuguauau

SEQ ID NO: 592841 - RNA, 19 nt, Artificial Sequence
  Description of Artificial Sequence: Synthetic oligonucleotide
ccuaacccagcgacagaug

SEQ ID NO: 592842 - RNA, 19 nt, Artificial Sequence
  Description of Artificial Sequence: Synthetic oligonucleotide
auccugccuguauguacuu

SEQ ID NO: 592843 - RNA, 19 nt, Artificial Sequence
  Description of Artificial Sequence: Synthetic oligonucleotide
ggguaagccucucuuuggu

SEQ ID NO: 592844 - RNA, 19 nt, Artificial Sequence
  Description of Artificial Sequence: Synthetic oligonucleotide
caauggcggucacagcucu

SEQ ID NO: 592845 - RNA, 19 nt, Artificial Sequence
  Description of Artificial Sequence: Synthetic oligonucleotide
gcaauggcggucacagcuc

SEQ ID NO: 592846 - RNA, 19 nt, Artificial Sequence
  Description of Artificial Sequence: Synthetic oligonucleotide
cuacaccgcucagcucacc

SEQ ID NO: 592847 - RNA, 19 nt, Artificial Sequence
  Description of Artificial Sequence: Synthetic oligonucleotide
ggcuuccaucacuuuggga

SEQ ID NO: 592848 - RNA, 19 nt, Artificial Sequence
  Description of Artificial Sequence: Synthetic oligonucleotide
ccacuuucggcugagucaa

SEQ ID NO: 592849 - RNA, 19 nt, Artificial Sequence
  Description of Artificial Sequence: Synthetic oligonucleotide
cugacggagcacauccaau

SEQ ID NO: 592850 - RNA, 19 nt, Artificial Sequence
  Description of Artificial Sequence: Synthetic oligonucleotide
ggagcacauccaauuaacu

SEQ ID NO: 592851 - RNA, 19 nt, Artificial Sequence
  Description of Artificial Sequence: Synthetic oligonucleotide
cagcuaaggguaagccucu

SEQ ID NO: 592852 - RNA, 19 nt, Artificial Sequence
  Description of Artificial Sequence: Synthetic oligonucleotide
ccccaucuguuaaacuuga

SEQ ID NO: 592853 - RNA, 19 nt, Artificial Sequence
  Description of Artificial Sequence: Synthetic oligonucleotide
gcuaaggguaagccucucu

SEQ ID NO: 592854 - RNA, 19 nt, Artificial Sequence
  Description of Artificial Sequence: Synthetic oligonucleotide
cagccuaugucggucacau

SEQ ID NO: 592855 - RNA, 19 nt, Artificial Sequence
  Description of Artificial Sequence: Synthetic oligonucleotide
caccaaagagugagcuacu

SEQ ID NO: 592856 - RNA, 19 nt, Artificial Sequence
  Description of Artificial Sequence: Synthetic oligonucleotide
ccuugucauaguaaauaau

SEQ ID NO: 592857 - RNA, 19 nt, Artificial Sequence
  Description of Artificial Sequence: Synthetic oligonucleotide
caaauacccauggcucacu

SEQ ID NO: 592858 - RNA, 19 nt, Artificial Sequence
  Description of Artificial Sequence: Synthetic oligonucleotide
cguccuuagaaauuguguu

SEQ ID NO: 592859 - RNA, 19 nt, Artificial Sequence
  Description of Artificial Sequence: Synthetic oligonucleotide
acgagucauuacaggucau

SEQ ID NO: 592860 - RNA, 19 nt, Artificial Sequence
  Description of Artificial Sequence: Synthetic oligonucleotide
ggugaguuuucuggaucaa

SEQ ID NO: 592861 - RNA, 19 nt, Artificial Sequence
  Description of Artificial Sequence: Synthetic oligonucleotide
ccuguauguacuugugaau

SEQ ID NO: 592862 - RNA, 19 nt, Artificial Sequence
  Description of Artificial Sequence: Synthetic oligonucleotide
gcgcuguucaagguaaggu

SEQ ID NO: 592863 - RNA, 19 nt, Artificial Sequence
  Description of Artificial Sequence: Synthetic oligonucleotide
cggcugagucaauuccacc

SEQ ID NO: 592864 - RNA, 19 nt, Artificial Sequence
  Description of Artificial Sequence: Synthetic oligonucleotide
gguaagccucucuuugguu

SEQ ID NO: 592865 - RNA, 19 nt, Artificial Sequence
  Description of Artificial Sequence: Synthetic oligonucleotide
guguuaccuuggcaacggu

SEQ ID NO: 592866 - RNA, 19 nt, Artificial Sequence
  Description of Artificial Sequence: Synthetic oligonucleotide
ggccacggagugccaucag

SEQ ID NO: 592867 - RNA, 19 nt, Artificial Sequence
  Description of Artificial Sequence: Synthetic oligonucleotide
ggagaacaaguuccauuuu

SEQ ID NO: 592868 - RNA, 19 nt, Artificial Sequence
  Description of Artificial Sequence: Synthetic oligonucleotide
gccuaacccagcgacagau

SEQ ID NO: 592869 - RNA, 19 nt, Artificial Sequence
  Description of Artificial Sequence: Synthetic oligonucleotide
cugguagccacgagucauu

SEQ ID NO: 592870 - RNA, 19 nt, Artificial Sequence
  Description of Artificial Sequence: Synthetic oligonucleotide
ccaucagcuuucaguccca

SEQ ID NO: 592871 - RNA, 19 nt, Artificial Sequence
  Description of Artificial Sequence: Synthetic oligonucleotide
gcacgggcaauggcgguca

SEQ ID NO: 592872 - RNA, 19 nt, Artificial Sequence
  Description of Artificial Sequence: Synthetic oligonucleotide
cacggagugccaucagcuu

SEQ ID NO: 592873 - RNA, 19 nt, Artificial Sequence
  Description of Artificial Sequence: Synthetic oligonucleotide
caucggccuucaggcguac

SEQ ID NO: 592874 - RNA, 19 nt, Artificial Sequence
  Description of Artificial Sequence: Synthetic oligonucleotide
cgauaauaggacagacgcu

SEQ ID NO: 592875 - RNA, 19 nt, Artificial Sequence
  Description of Artificial Sequence: Synthetic oligonucleotide
caguccgaacaaacugcau

SEQ ID NO: 592876 - RNA, 19 nt, Artificial Sequence
  Description of Artificial Sequence: Synthetic oligonucleotide
gcguaccaucugcucuuca

SEQ ID NO: 592877 - RNA, 19 nt, Artificial Sequence
  Description of Artificial Sequence: Synthetic oligonucleotide
ggcguaccaucugcucuuc

SEQ ID NO: 592878 - RNA, 19 nt, Artificial Sequence
  Description of Artificial Sequence: Synthetic oligonucleotide
ccgcaauugaugcacuauu

SEQ ID NO: 592879 - RNA, 19 nt, Artificial Sequence
  Description of Artificial Sequence: Synthetic oligonucleotide
gccgcaauugaugcacuau

SEQ ID NO: 592880 - RNA, 19 nt, Artificial Sequence
  Description of Artificial Sequence: Synthetic oligonucleotide
cgcaauugaugcacuauuu

SEQ ID NO: 592881 - RNA, 19 nt, Artificial Sequence
  Description of Artificial Sequence: Synthetic oligonucleotide
cgcugcauaccuggagaac

SEQ ID NO: 592882 - RNA, 19 nt, Artificial Sequence
  Description of Artificial Sequence: Synthetic oligonucleotide
caucagcuuucagucccau

SEQ ID NO: 592883 - RNA, 19 nt, Artificial Sequence
  Description of Artificial Sequence: Synthetic oligonucleotide
ccuuaccgcuguguuuaaa

SEQ ID NO: 592884 - RNA, 19 nt, Artificial Sequence
  Description of Artificial Sequence: Synthetic oligonucleotide
cacuuucggcugagucaau

SEQ ID NO: 592885 - RNA, 19 nt, Artificial Sequence
  Description of Artificial Sequence: Synthetic oligonucleotide
cguucuuaauggagcuaau

SEQ ID NO: 592886 - RNA, 19 nt, Artificial Sequence
  Description of Artificial Sequence: Synthetic oligonucleotide
uaucaugagaguaauaugg

SEQ ID NO: 592887 - RNA, 19 nt, Artificial Sequence
  Description of Artificial Sequence: Synthetic oligonucleotide
aauacauugaagaaggugg

SEQ ID NO: 592888 - RNA, 19 nt, Artificial Sequence
  Description of Artificial Sequence: Synthetic oligonucleotide
uuucauugaagauacacag

SEQ ID NO: 592889 - RNA, 19 nt, Artificial Sequence
  Description of Artificial Sequence: Synthetic oligonucleotide
aauaccaauuuucagagaa

SEQ ID NO: 592890 - RNA, 19 nt, Artificial Sequence
  Description of Artificial Sequence: Synthetic oligonucleotide
agauuaaccaaguagacca

SEQ ID NO: 592891 - RNA, 19 nt, Artificial Sequence
  Description of Artificial Sequence: Synthetic oligonucleotide
auuucuauaucucgaaugg

SEQ ID NO: 592892 - RNA, 19 nt, Artificial Sequence
  Description of Artificial Sequence: Synthetic oligonucleotide
uauguuauaaccuuugaaa

SEQ ID NO: 592893 - RNA, 19 nt, Artificial Sequence
  Description of Artificial Sequence: Synthetic oligonucleotide
ugaaguagggucuuaauca

SEQ ID NO: 592894 - RNA, 19 nt, Artificial Sequence
  Description of Artificial Sequence: Synthetic oligonucleotide
ucuauaaugggcccaauca

SEQ ID NO: 592895 - RNA, 19 nt, Artificial Sequence
  Description of Artificial Sequence: Synthetic oligonucleotide
ucaacaauauaauuucugc

SEQ ID NO: 592896 - RNA, 19 nt, Artificial Sequence
  Description of Artificial Sequence: Synthetic oligonucleotide
aagauuaaccaaguagacc

SEQ ID NO: 592897 - RNA, 19 nt, Artificial Sequence
  Description of Artificial Sequence: Synthetic oligonucleotide
uacaauuugaaguaggguc

SEQ ID NO: 592898 - RNA, 19 nt, Artificial Sequence
  Description of Artificial Sequence: Synthetic oligonucleotide
aauaugggucuugaaaagc

SEQ ID NO: 592899 - RNA, 19 nt, Artificial Sequence
  Description of Artificial Sequence: Synthetic oligonucleotide
aguuuaucuauaaugggcc

SEQ ID NO: 592900 - RNA, 19 nt, Artificial Sequence
  Description of Artificial Sequence: Synthetic oligonucleotide
uaaaacaugcauuaucugu

SEQ ID NO: 592901 - RNA, 19 nt, Artificial Sequence
  Description of Artificial Sequence: Synthetic oligonucleotide
uuaagauacaauugcagcu

SEQ ID NO: 592902 - RNA, 19 nt, Artificial Sequence
  Description of Artificial Sequence: Synthetic oligonucleotide
uauuucuauaucucgaaug

SEQ ID NO: 592903 - RNA, 19 nt, Artificial Sequence
  Description of Artificial Sequence: Synthetic oligonucleotide
uucacguuuaguaacuugc

SEQ ID NO: 592904 - RNA, 19 nt, Artificial Sequence
  Description of Artificial Sequence: Synthetic oligonucleotide
uuaaugaaguaucaugaga

SEQ ID NO: 592905 - RNA, 19 nt, Artificial Sequence
  Description of Artificial Sequence: Synthetic oligonucleotide
uuuaguaacuugcauuuca

SEQ ID NO: 592906 - RNA, 19 nt, Artificial Sequence
  Description of Artificial Sequence: Synthetic oligonucleotide
auauccacuacauuuagga

SEQ ID NO: 592907 - RNA, 19 nt, Artificial Sequence
  Description of Artificial Sequence: Synthetic oligonucleotide
cacaaggccagcaauaucc

SEQ ID NO: 592908 - RNA, 19 nt, Artificial Sequence
  Description of Artificial Sequence: Synthetic oligonucleotide
uucaacaauauaauuucug

SEQ ID NO: 592909 - RNA, 19 nt, Artificial Sequence
  Description of Artificial Sequence: Synthetic oligonucleotide
aaagauuaaccaaguagac

SEQ ID NO: 592910 - RNA, 19 nt, Artificial Sequence
  Description of Artificial Sequence: Synthetic oligonucleotide
agucaccuauguuauaacc

SEQ ID NO: 592911 - RNA, 19 nt, Artificial Sequence
  Description of Artificial Sequence: Synthetic oligonucleotide
agguguauuaaauuugaag

SEQ ID NO: 592912 - RNA, 19 nt, Artificial Sequence
  Description of Artificial Sequence: Synthetic oligonucleotide
gguguauuaaauuugaaga

SEQ ID NO: 592913 - RNA, 19 nt, Artificial Sequence
  Description of Artificial Sequence: Synthetic oligonucleotide
uucuauaucucgaauggga

SEQ ID NO: 592914 - RNA, 19 nt, Artificial Sequence
  Description of Artificial Sequence: Synthetic oligonucleotide
aauccuacaauaccaauuu

SEQ ID NO: 592915 - RNA, 19 nt, Artificial Sequence
  Description of Artificial Sequence: Synthetic oligonucleotide
agcuucuacaauuugaagu

SEQ ID NO: 592916 - RNA, 19 nt, Artificial Sequence
  Description of Artificial Sequence: Synthetic oligonucleotide
ugaauuauuucuauaucuc

SEQ ID NO: 592917 - RNA, 19 nt, Artificial Sequence
  Description of Artificial Sequence: Synthetic oligonucleotide
agcaauauccacuacauuu

SEQ ID NO: 592918 - RNA, 19 nt, Artificial Sequence
  Description of Artificial Sequence: Synthetic oligonucleotide
aguaauaugggucuugaaa

SEQ ID NO: 592919 - RNA, 19 nt, Artificial Sequence
  Description of Artificial Sequence: Synthetic oligonucleotide
ugugauacugacaaaggaa

SEQ ID NO: 592920 - RNA, 19 nt, Artificial Sequence
  Description of Artificial Sequence: Synthetic oligonucleotide
ucuacucucauuaggguca

SEQ ID NO: 592921 - RNA, 19 nt, Artificial Sequence
  Description of Artificial Sequence: Synthetic oligonucleotide
agaccauugguuuugaagu

SEQ ID NO: 592922 - RNA, 19 nt, Artificial Sequence
  Description of Artificial Sequence: Synthetic oligonucleotide
agcacuuugugucauguuc

SEQ ID NO: 592923 - RNA, 19 nt, Artificial Sequence
  Description of Artificial Sequence: Synthetic oligonucleotide
uugacuuugcacauuauau

SEQ ID NO: 592924 - RNA, 19 nt, Artificial Sequence
  Description of Artificial Sequence: Synthetic oligonucleotide
uauugguuaauacauugaa

SEQ ID NO: 592925 - RNA, 19 nt, Artificial Sequence
  Description of Artificial Sequence: Synthetic oligonucleotide
ucuaauucccaugaaagac

SEQ ID NO: 592926 - RNA, 19 nt, Artificial Sequence
  Description of Artificial Sequence: Synthetic oligonucleotide
cauuauaucauauucaggu

SEQ ID NO: 592927 - RNA, 19 nt, Artificial Sequence
  Description of Artificial Sequence: Synthetic oligonucleotide
auacaauugcagcugcccc

SEQ ID NO: 592928 - RNA, 19 nt, Artificial Sequence
  Description of Artificial Sequence: Synthetic oligonucleotide
uagaccauugguuuugaag

SEQ ID NO: 592929 - RNA, 19 nt, Artificial Sequence
  Description of Artificial Sequence: Synthetic oligonucleotide
uuacacuaaugucugaaac

SEQ ID NO: 592930 - RNA, 19 nt, Artificial Sequence
  Description of Artificial Sequence: Synthetic oligonucleotide
accugggucauacuugucc

SEQ ID NO: 592931 - RNA, 19 nt, Artificial Sequence
  Description of Artificial Sequence: Synthetic oligonucleotide
uucguuccuuuccugaugg

SEQ ID NO: 592932 - RNA, 19 nt, Artificial Sequence
  Description of Artificial Sequence: Synthetic oligonucleotide
uggagauuaaugaaguauc

SEQ ID NO: 592933 - RNA, 19 nt, Artificial Sequence
  Description of Artificial Sequence: Synthetic oligonucleotide
ugaaguaucaugagaguaa

SEQ ID NO: 592934 - RNA, 19 nt, Artificial Sequence
  Description of Artificial Sequence: Synthetic oligonucleotide
aaacaugcauuaucuguag

SEQ ID NO: 592935 - RNA, 19 nt, Artificial Sequence
  Description of Artificial Sequence: Synthetic oligonucleotide
uauaucucgaaugggaucu

SEQ ID NO: 592936 - RNA, 19 nt, Artificial Sequence
  Description of Artificial Sequence: Synthetic oligonucleotide
uucgcuuccagauacuucu

SEQ ID NO: 592937 - RNA, 19 nt, Artificial Sequence
  Description of Artificial Sequence: Synthetic oligonucleotide
uaauaugggucuugaaaag

SEQ ID NO: 592938 - RNA, 19 nt, Artificial Sequence
  Description of Artificial Sequence: Synthetic oligonucleotide
gacuuugcacauuauauca

SEQ ID NO: 592939 - RNA, 19 nt, Artificial Sequence
  Description of Artificial Sequence: Synthetic oligonucleotide
ucuuaaucacgugaaaagc

SEQ ID NO: 592940 - RNA, 19 nt, Artificial Sequence
  Description of Artificial Sequence: Synthetic oligonucleotide
uaauuuguagaagauuccc

SEQ ID NO: 592941 - RNA, 19 nt, Artificial Sequence
  Description of Artificial Sequence: Synthetic oligonucleotide
aaugaaguaucaugagagu

SEQ ID NO: 592942 - RNA, 19 nt, Artificial Sequence
  Description of Artificial Sequence: Synthetic oligonucleotide
agucagucaauacagacau

SEQ ID NO: 592943 - RNA, 19 nt, Artificial Sequence
  Description of Artificial Sequence: Synthetic oligonucleotide
uaauacauugaagaaggug

SEQ ID NO: 592944 - RNA, 19 nt, Artificial Sequence
  Description of Artificial Sequence: Synthetic oligonucleotide
aguaucaugagaguaauau

SEQ ID NO: 592945 - RNA, 19 nt, Artificial Sequence
  Description of Artificial Sequence: Synthetic oligonucleotide
uuaaucacgugaaaagcaa

SEQ ID NO: 592946 - RNA, 19 nt, Artificial Sequence
  Description of Artificial Sequence: Synthetic oligonucleotide
caugagaguaauauggguc

SEQ ID NO: 592947 - RNA, 19 nt, Artificial Sequence
  Description of Artificial Sequence: Synthetic oligonucleotide
ucuggaguacuguaaaaca

SEQ ID NO: 592948 - RNA, 19 nt, Artificial Sequence
  Description of Artificial Sequence: Synthetic oligonucleotide
uaucgcauucaacacacca

SEQ ID NO: 592949 - RNA, 19 nt, Artificial Sequence
  Description of Artificial Sequence: Synthetic oligonucleotide
uccuacaauaccaauuuuc

SEQ ID NO: 592950 - RNA, 19 nt, Artificial Sequence
  Description of Artificial Sequence: Synthetic oligonucleotide
cacucuacucucauuaggg

SEQ ID NO: 592951 - RNA, 19 nt, Artificial Sequence
  Description of Artificial Sequence: Synthetic oligonucleotide
ugugaaucuucccugcagc

SEQ ID NO: 592952 - RNA, 19 nt, Artificial Sequence
  Description of Artificial Sequence: Synthetic oligonucleotide
augauagaagcguacaggu

SEQ ID NO: 592953 - RNA, 19 nt, Artificial Sequence
  Description of Artificial Sequence: Synthetic oligonucleotide
uggaguacuguaaaacaug

SEQ ID NO: 592954 - RNA, 19 nt, Artificial Sequence
  Description of Artificial Sequence: Synthetic oligonucleotide
guaauaugggucuugaaaa

SEQ ID NO: 592955 - RNA, 19 nt, Artificial Sequence
  Description of Artificial Sequence: Synthetic oligonucleotide
cuugugauacugacaaagg

SEQ ID NO: 592956 - RNA, 19 nt, Artificial Sequence
  Description of Artificial Sequence: Synthetic oligonucleotide
uugaaguagggucuuaauc

SEQ ID NO: 592957 - RNA, 19 nt, Artificial Sequence
  Description of Artificial Sequence: Synthetic oligonucleotide
uaagauacaauugcagcug

SEQ ID NO: 592958 - RNA, 19 nt, Artificial Sequence
  Description of Artificial Sequence: Synthetic oligonucleotide
uugugauacugacaaagga

SEQ ID NO: 592959 - RNA, 19 nt, Artificial Sequence
  Description of Artificial Sequence: Synthetic oligonucleotide
ugaguguagacaucuggag

SEQ ID NO: 592960 - RNA, 19 nt, Artificial Sequence
  Description of Artificial Sequence: Synthetic oligonucleotide
uugaguguagacaucugga

SEQ ID NO: 592961 - RNA, 19 nt, Artificial Sequence
  Description of Artificial Sequence: Synthetic oligonucleotide
uguuauaaccuuugaaaau

SEQ ID NO: 592962 - RNA, 19 nt, Artificial Sequence
  Description of Artificial Sequence: Synthetic oligonucleotide
augagaguaauaugggucu

SEQ ID NO: 592963 - RNA, 19 nt, Artificial Sequence
  Description of Artificial Sequence: Synthetic oligonucleotide
aagcguacagguuucuucu

SEQ ID NO: 592964 - RNA, 19 nt, Artificial Sequence
  Description of Artificial Sequence: Synthetic oligonucleotide
ucucauuagggucaauagu

SEQ ID NO: 592965 - RNA, 19 nt, Artificial Sequence
  Description of Artificial Sequence: Synthetic oligonucleotide
agguuuuaguuucuuaucu

SEQ ID NO: 592966 - RNA, 19 nt, Artificial Sequence
  Description of Artificial Sequence: Synthetic oligonucleotide
ucgaaugggaucuacacuu

SEQ ID NO: 592967 - RNA, 19 nt, Artificial Sequence
  Description of Artificial Sequence: Synthetic oligonucleotide
ucauuagggucaauagugc

SEQ ID NO: 592968 - RNA, 19 nt, Artificial Sequence
  Description of Artificial Sequence: Synthetic oligonucleotide
uucuaauucccaugaaaga

SEQ ID NO: 592969 - RNA, 19 nt, Artificial Sequence
  Description of Artificial Sequence: Synthetic oligonucleotide
aucuauaaugggcccaauc

SEQ ID NO: 592970 - RNA, 19 nt, Artificial Sequence
  Description of Artificial Sequence: Synthetic oligonucleotide
auccacuacauuuaggaaa

SEQ ID NO: 592971 - RNA, 19 nt, Artificial Sequence
  Description of Artificial Sequence: Synthetic oligonucleotide
ucuauaucucgaaugggau

SEQ ID NO: 592972 - RNA, 19 nt, Artificial Sequence
  Description of Artificial Sequence: Synthetic oligonucleotide
aaaccucucaucuggcaca

SEQ ID NO: 592973 - RNA, 19 nt, Artificial Sequence
  Description of Artificial Sequence: Synthetic oligonucleotide
aucuacacuuccuucaaca

SEQ ID NO: 592974 - RNA, 19 nt, Artificial Sequence
  Description of Artificial Sequence: Synthetic oligonucleotide
uuuugagacaaucccuggu

SEQ ID NO: 592975 - RNA, 19 nt, Artificial Sequence
  Description of Artificial Sequence: Synthetic oligonucleotide
ucgugcaaagggcugauga

SEQ ID NO: 592976 - RNA, 19 nt, Artificial Sequence
  Description of Artificial Sequence: Synthetic oligonucleotide
gguuaauacauugaagaag

SEQ ID NO: 592977 - RNA, 19 nt, Artificial Sequence
  Description of Artificial Sequence: Synthetic oligonucleotide
aguauucuaguuggagugc

SEQ ID NO: 592978 - RNA, 19 nt, Artificial Sequence
  Description of Artificial Sequence: Synthetic oligonucleotide
aagcuucuacaauuugaag

SEQ ID NO: 592979 - RNA, 19 nt, Artificial Sequence
  Description of Artificial Sequence: Synthetic oligonucleotide
aaagcuucuacaauuugaa

SEQ ID NO: 592980 - RNA, 19 nt, Artificial Sequence
  Description of Artificial Sequence: Synthetic oligonucleotide
uucaaaagcacguguuaga

SEQ ID NO: 592981 - RNA, 19 nt, Artificial Sequence
  Description of Artificial Sequence: Synthetic oligonucleotide
guaacuugcauuucauuga

SEQ ID NO: 592982 - RNA, 19 nt, Artificial Sequence
  Description of Artificial Sequence: Synthetic oligonucleotide
ugacuuugcacauuauauc

SEQ ID NO: 592983 - RNA, 19 nt, Artificial Sequence
  Description of Artificial Sequence: Synthetic oligonucleotide
uuucuauaucucgaauggg

SEQ ID NO: 592984 - RNA, 19 nt, Artificial Sequence
  Description of Artificial Sequence: Synthetic oligonucleotide
cauguucgcuuccagauac

SEQ ID NO: 592985 - RNA, 19 nt, Artificial Sequence
  Description of Artificial Sequence: Synthetic oligonucleotide
gaaguagggucuuaaucac

SEQ ID NO: 592986 - RNA, 19 nt, Artificial Sequence
  Description of Artificial Sequence: Synthetic oligonucleotide
ucuucugaucuauaaccca

SEQ ID NO: 592987 - RNA, 19 nt, Artificial Sequence
  Description of Artificial Sequence: Synthetic oligonucleotide
acuaaugucugaaacaaaa

SEQ ID NO: 592988 - RNA, 19 nt, Artificial Sequence
  Description of Artificial Sequence: Synthetic oligonucleotide
ucaugagaguaauaugggu

SEQ ID NO: 592989 - RNA, 19 nt, Artificial Sequence
  Description of Artificial Sequence: Synthetic oligonucleotide
ucagagucaccuauguuau

SEQ ID NO: 592990 - RNA, 19 nt, Artificial Sequence
  Description of Artificial Sequence: Synthetic oligonucleotide
gggucaauagugcagaaug

SEQ ID NO: 592991 - RNA, 19 nt, Artificial Sequence
  Description of Artificial Sequence: Synthetic oligonucleotide
ugcaaauacccguguagcc

SEQ ID NO: 592992 - RNA, 19 nt, Artificial Sequence
  Description of Artificial Sequence: Synthetic oligonucleotide
gaaaagcuucuacaauuug

SEQ ID NO: 592993 - RNA, 19 nt, Artificial Sequence
  Description of Artificial Sequence: Synthetic oligonucleotide
acaugcauuaucuguagau

SEQ ID NO: 592994 - RNA, 19 nt, Artificial Sequence
  Description of Artificial Sequence: Synthetic oligonucleotide
ucuauaacccaggauuuga

SEQ ID NO: 592995 - RNA, 19 nt, Artificial Sequence
  Description of Artificial Sequence: Synthetic oligonucleotide
caucuacaaauuaauuaac

SEQ ID NO: 592996 - RNA, 19 nt, Artificial Sequence
  Description of Artificial Sequence: Synthetic oligonucleotide
caggaaucuugcuugcugg

SEQ ID NO: 592997 - RNA, 19 nt, Artificial Sequence
  Description of Artificial Sequence: Synthetic oligonucleotide
uuuaucuauaaugggccca

SEQ ID NO: 592998 - RNA, 19 nt, Artificial Sequence
  Description of Artificial Sequence: Synthetic oligonucleotide
ugaugguccacgcacgcac

SEQ ID NO: 592999 - RNA, 19 nt, Artificial Sequence
  Description of Artificial Sequence: Synthetic oligonucleotide
ucuuuagauuucagaaacu

SEQ ID NO: 593000 - RNA, 19 nt, Artificial Sequence
  Description of Artificial Sequence: Synthetic oligonucleotide
ugauacugacaaaggaagu

SEQ ID NO: 593001 - RNA, 19 nt, Artificial Sequence
  Description of Artificial Sequence: Synthetic oligonucleotide
auaacccaggauuugacuu

SEQ ID NO: 593002 - RNA, 19 nt, Artificial Sequence
  Description of Artificial Sequence: Synthetic oligonucleotide
gaucgcacgggguaccggg

SEQ ID NO: 593003 - RNA, 19 nt, Artificial Sequence
  Description of Artificial Sequence: Synthetic oligonucleotide
cuucaaaagcacguguuag

SEQ ID NO: 593004 - RNA, 19 nt, Artificial Sequence
  Description of Artificial Sequence: Synthetic oligonucleotide
acaauuugaaguagggucu

SEQ ID NO: 593005 - RNA, 19 nt, Artificial Sequence
  Description of Artificial Sequence: Synthetic oligonucleotide
aucaugagaguaauauggg

SEQ ID NO: 593006 - RNA, 19 nt, Artificial Sequence
  Description of Artificial Sequence: Synthetic oligonucleotide
aacaugcguaaugucauca

SEQ ID NO: 593007 - RNA, 19 nt, Artificial Sequence
  Description of Artificial Sequence: Synthetic oligonucleotide
aaguagaccauugguuuug

SEQ ID NO: 593008 - RNA, 19 nt, Artificial Sequence
  Description of Artificial Sequence: Synthetic oligonucleotide
auuauaucauauucagguu

SEQ ID NO: 593009 - RNA, 19 nt, Artificial Sequence
  Description of Artificial Sequence: Synthetic oligonucleotide
cccacuaaaaggaaugacc

SEQ ID NO: 593010 - RNA, 19 nt, Artificial Sequence
  Description of Artificial Sequence: Synthetic oligonucleotide
uaccgggcugcaaauaccc

SEQ ID NO: 593011 - RNA, 19 nt, Artificial Sequence
  Description of Artificial Sequence: Synthetic oligonucleotide
auacagacauccccaaaca

SEQ ID NO: 593012 - RNA, 19 nt, Artificial Sequence
  Description of Artificial Sequence: Synthetic oligonucleotide
acguuuaguaacuugcauu

SEQ ID NO: 593013 - RNA, 19 nt, Artificial Sequence
  Description of Artificial Sequence: Synthetic oligonucleotide
aacaugcauuaucuguaga

SEQ ID NO: 593014 - RNA, 19 nt, Artificial Sequence
  Description of Artificial Sequence: Synthetic oligonucleotide
agagauaacuaaaaucuau

SEQ ID NO: 593015 - RNA, 19 nt, Artificial Sequence
  Description of Artificial Sequence: Synthetic oligonucleotide
gaaccuuccucuuuaaagu

SEQ ID NO: 593016 - RNA, 19 nt, Artificial Sequence
  Description of Artificial Sequence: Synthetic oligonucleotide
ucaaaagcacguguuagau

SEQ ID NO: 593017 - RNA, 19 nt, Artificial Sequence
  Description of Artificial Sequence: Synthetic oligonucleotide
aaguuccaaaucuuccaau

SEQ ID NO: 593018 - RNA, 19 nt, Artificial Sequence
  Description of Artificial Sequence: Synthetic oligonucleotide
cuauaucucgaaugggauc

SEQ ID NO: 593019 - RNA, 19 nt, Artificial Sequence
  Description of Artificial Sequence: Synthetic oligonucleotide
aaguagggucuuaaucacg

SEQ ID NO: 593020 - RNA, 19 nt, Artificial Sequence
  Description of Artificial Sequence: Synthetic oligonucleotide
ucauacuuguccacccacu

SEQ ID NO: 593021 - RNA, 19 nt, Artificial Sequence
  Description of Artificial Sequence: Synthetic oligonucleotide
cucuacucucauuaggguc

SEQ ID NO: 593022 - RNA, 19 nt, Artificial Sequence
  Description of Artificial Sequence: Synthetic oligonucleotide
cuauaacccaggauuugac

SEQ ID NO: 593023 - RNA, 19 nt, Artificial Sequence
  Description of Artificial Sequence: Synthetic oligonucleotide
uauugaguguagacaucug

SEQ ID NO: 593024 - RNA, 19 nt, Artificial Sequence
  Description of Artificial Sequence: Synthetic oligonucleotide
aaucccaucacaggcacua

SEQ ID NO: 593025 - RNA, 19 nt, Artificial Sequence
  Description of Artificial Sequence: Synthetic oligonucleotide
caucacaggcacuaauaug

SEQ ID NO: 593026 - RNA, 19 nt, Artificial Sequence
  Description of Artificial Sequence: Synthetic oligonucleotide
augaaucccuuuucaaagu

SEQ ID NO: 593027 - RNA, 19 nt, Artificial Sequence
  Description of Artificial Sequence: Synthetic oligonucleotide
ugaccaaggcaccuggguc

SEQ ID NO: 593028 - RNA, 19 nt, Artificial Sequence
  Description of Artificial Sequence: Synthetic oligonucleotide
uauucuaguuggagugcug

SEQ ID NO: 593029 - RNA, 19 nt, Artificial Sequence
  Description of Artificial Sequence: Synthetic oligonucleotide
cauccuuuagcugaagcuc

SEQ ID NO: 593030 - RNA, 19 nt, Artificial Sequence
  Description of Artificial Sequence: Synthetic oligonucleotide
uuaucuauaaugggcccaa

SEQ ID NO: 593031 - RNA, 19 nt, Artificial Sequence
  Description of Artificial Sequence: Synthetic oligonucleotide
ugugugaaucuucccugca

SEQ ID NO: 593032 - RNA, 19 nt, Artificial Sequence
  Description of Artificial Sequence: Synthetic oligonucleotide
ugucaaugugucaggccug

SEQ ID NO: 593033 - RNA, 19 nt, Artificial Sequence
  Description of Artificial Sequence: Synthetic oligonucleotide
aagcuugacuauugguuaa

SEQ ID NO: 593034 - RNA, 19 nt, Artificial Sequence
  Description of Artificial Sequence: Synthetic oligonucleotide
cacacacgccuuaaaauuc

SEQ ID NO: 593035 - RNA, 19 nt, Artificial Sequence
  Description of Artificial Sequence: Synthetic oligonucleotide
aguagggucuuaaucacgu

SEQ ID NO: 593036 - RNA, 19 nt, Artificial Sequence
  Description of Artificial Sequence: Synthetic oligonucleotide
guucacguuuaguaacuug

SEQ ID NO: 593037 - RNA, 19 nt, Artificial Sequence
  Description of Artificial Sequence: Synthetic oligonucleotide
cugcaaauacccguguagc

SEQ ID NO: 593038 - RNA, 19 nt, Artificial Sequence
  Description of Artificial Sequence: Synthetic oligonucleotide
uugcugagguguauuaaau

SEQ ID NO: 593039 - RNA, 19 nt, Artificial Sequence
  Description of Artificial Sequence: Synthetic oligonucleotide
cuauguuauaaccuuugaa

SEQ ID NO: 593040 - RNA, 19 nt, Artificial Sequence
  Description of Artificial Sequence: Synthetic oligonucleotide
auuuggcaauccuacaaua

SEQ ID NO: 593041 - RNA, 19 nt, Artificial Sequence
  Description of Artificial Sequence: Synthetic oligonucleotide
auagaagcguacagguuuc

SEQ ID NO: 593042 - RNA, 19 nt, Artificial Sequence
  Description of Artificial Sequence: Synthetic oligonucleotide
aacccaauaaaugcauuuu

SEQ ID NO: 593043 - RNA, 19 nt, Artificial Sequence
  Description of Artificial Sequence: Synthetic oligonucleotide
aucaugauagaagcguaca

SEQ ID NO: 593044 - RNA, 19 nt, Artificial Sequence
  Description of Artificial Sequence: Synthetic oligonucleotide
uuacuucagccauaaugaa

SEQ ID NO: 593045 - RNA, 19 nt, Artificial Sequence
  Description of Artificial Sequence: Synthetic oligonucleotide
uucagccauaaugaauccc

SEQ ID NO: 593046 - RNA, 19 nt, Artificial Sequence
  Description of Artificial Sequence: Synthetic oligonucleotide
cuucagccauaaugaaucc

SEQ ID NO: 593047 - RNA, 19 nt, Artificial Sequence
  Description of Artificial Sequence: Synthetic oligonucleotide
cagucaauacagacauccc

SEQ ID NO: 593048 - RNA, 19 nt, Artificial Sequence
  Description of Artificial Sequence: Synthetic oligonucleotide
cauacuuguccacccacuc

SEQ ID NO: 593049 - RNA, 19 nt, Artificial Sequence
  Description of Artificial Sequence: Synthetic oligonucleotide
cauugugagcuccuuucac

SEQ ID NO: 593050 - RNA, 19 nt, Artificial Sequence
  Description of Artificial Sequence: Synthetic oligonucleotide
acucuacucucauuagggu

SEQ ID NO: 593051 - RNA, 19 nt, Artificial Sequence
  Description of Artificial Sequence: Synthetic oligonucleotide
uucuugcaacuugaguucc

SEQ ID NO: 593052 - RNA, 19 nt, Artificial Sequence
  Description of Artificial Sequence: Synthetic oligonucleotide
ucuaguuggagugcugcaa

SEQ ID NO: 593053 - RNA, 19 nt, Artificial Sequence
  Description of Artificial Sequence: Synthetic oligonucleotide
caugcguaaugucaucauc

SEQ ID NO: 593054 - RNA, 19 nt, Artificial Sequence
  Description of Artificial Sequence: Synthetic oligonucleotide
uucuaguuggagugcugca

SEQ ID NO: 593055 - RNA, 19 nt, Artificial Sequence
  Description of Artificial Sequence: Synthetic oligonucleotide
acgcacgcacuucaucugg

SEQ ID NO: 593056 - RNA, 19 nt, Artificial Sequence
  Description of Artificial Sequence: Synthetic oligonucleotide
guugcugagguguauuaaa

SEQ ID NO: 593057 - RNA, 19 nt, Artificial Sequence
  Description of Artificial Sequence: Synthetic oligonucleotide
agaguaauaugggucuuga

SEQ ID NO: 593058 - RNA, 19 nt, Artificial Sequence
  Description of Artificial Sequence: Synthetic oligonucleotide
gagaguaauaugggucuug

SEQ ID NO: 593059 - RNA, 19 nt, Artificial Sequence
  Description of Artificial Sequence: Synthetic oligonucleotide
cagucagucaauacagaca

SEQ ID NO: 593060 - RNA, 19 nt, Artificial Sequence
  Description of Artificial Sequence: Synthetic oligonucleotide
cagccuuaaugaucuuugg

SEQ ID NO: 593061 - RNA, 19 nt, Artificial Sequence
  Description of Artificial Sequence: Synthetic oligonucleotide
ugcuaucaucuuucaauaa

SEQ ID NO: 593062 - RNA, 19 nt, Artificial Sequence
  Description of Artificial Sequence: Synthetic oligonucleotide
guagacaucuggaguacug

SEQ ID NO: 593063 - RNA, 19 nt, Artificial Sequence
  Description of Artificial Sequence: Synthetic oligonucleotide
uucacaaggccagcaauau

SEQ ID NO: 593064 - RNA, 19 nt, Artificial Sequence
  Description of Artificial Sequence: Synthetic oligonucleotide
gucaaugugucaggccugg

SEQ ID NO: 593065 - RNA, 19 nt, Artificial Sequence
  Description of Artificial Sequence: Synthetic oligonucleotide
agagagcgcaggcccggcc

SEQ ID NO: 593066 - RNA, 19 nt, Artificial Sequence
  Description of Artificial Sequence: Synthetic oligonucleotide
auacauugaagaaggugga

SEQ ID NO: 593067 - RNA, 19 nt, Artificial Sequence
  Description of Artificial Sequence: Synthetic oligonucleotide
ggucaauagugcagaaugg

SEQ ID NO: 593068 - RNA, 19 nt, Artificial Sequence
  Description of Artificial Sequence: Synthetic oligonucleotide
auagugcagaaugggaagu

SEQ ID NO: 593069 - RNA, 19 nt, Artificial Sequence
  Description of Artificial Sequence: Synthetic oligonucleotide
ccacuaaaaggaaugacca

SEQ ID NO: 593070 - RNA, 19 nt, Artificial Sequence
  Description of Artificial Sequence: Synthetic oligonucleotide
ucauguucgcuuccagaua

SEQ ID NO: 593071 - RNA, 19 nt, Artificial Sequence
  Description of Artificial Sequence: Synthetic oligonucleotide
gguuuuaguuucuuaucuc

SEQ ID NO: 593072 - RNA, 19 nt, Artificial Sequence
  Description of Artificial Sequence: Synthetic oligonucleotide
gcacucuacucucauuagg

SEQ ID NO: 593073 - RNA, 19 nt, Artificial Sequence
  Description of Artificial Sequence: Synthetic oligonucleotide
aucuauaacccaggauuug

SEQ ID NO: 593074 - RNA, 19 nt, Artificial Sequence
  Description of Artificial Sequence: Synthetic oligonucleotide
ugccuuguugucuguauuu

SEQ ID NO: 593075 - RNA, 19 nt, Artificial Sequence
  Description of Artificial Sequence: Synthetic oligonucleotide
ugcguaaugucaucaucuu

SEQ ID NO: 593076 - RNA, 19 nt, Artificial Sequence
  Description of Artificial Sequence: Synthetic oligonucleotide
uauuuuccagcagccuuga

SEQ ID NO: 593077 - RNA, 19 nt, Artificial Sequence
  Description of Artificial Sequence: Synthetic oligonucleotide
gaugaucgcacgggguacc

SEQ ID NO: 593078 - RNA, 19 nt, Artificial Sequence
  Description of Artificial Sequence: Synthetic oligonucleotide
auacccguguagccggcag

SEQ ID NO: 593079 - RNA, 19 nt, Artificial Sequence
  Description of Artificial Sequence: Synthetic oligonucleotide
ucacaaggccagcaauauc

SEQ ID NO: 593080 - RNA, 19 nt, Artificial Sequence
  Description of Artificial Sequence: Synthetic oligonucleotide
ccuuuucaaagucugugug

SEQ ID NO: 593081 - RNA, 19 nt, Artificial Sequence
  Description of Artificial Sequence: Synthetic oligonucleotide
ugaguuccaaggccccacu

SEQ ID NO: 593082 - RNA, 19 nt, Artificial Sequence
  Description of Artificial Sequence: Synthetic oligonucleotide
acaugcguaaugucaucau

SEQ ID NO: 593083 - RNA, 19 nt, Artificial Sequence
  Description of Artificial Sequence: Synthetic oligonucleotide
caaggcaccugggucauac

SEQ ID NO: 593084 - RNA, 19 nt, Artificial Sequence
  Description of Artificial Sequence: Synthetic oligonucleotide
ugaugaucgcacgggguac

SEQ ID NO: 593085 - RNA, 19 nt, Artificial Sequence
  Description of Artificial Sequence: Synthetic oligonucleotide
uaaugggcccaaucauuuc

SEQ ID NO: 593086 - RNA, 19 nt, Artificial Sequence
  Description of Artificial Sequence: Synthetic oligonucleotide
ucacugcuaucaucuuuca

SEQ ID NO: 593087 - RNA, 19 nt, Artificial Sequence
  Description of Artificial Sequence: Synthetic oligonucleotide
auauaauuucugccuuguu

SEQ ID NO: 593088 - RNA, 19 nt, Artificial Sequence
  Description of Artificial Sequence: Synthetic oligonucleotide
guaaugucaucaucuucaa

SEQ ID NO: 593089 - RNA, 19 nt, Artificial Sequence
  Description of Artificial Sequence: Synthetic oligonucleotide
gcaggaaucuugcuugcug

SEQ ID NO: 593090 - RNA, 19 nt, Artificial Sequence
  Description of Artificial Sequence: Synthetic oligonucleotide
gagagauaacuaaaaucua

SEQ ID NO: 593091 - RNA, 19 nt, Artificial Sequence
  Description of Artificial Sequence: Synthetic oligonucleotide
cccaaucauuuccucaucc

SEQ ID NO: 593092 - RNA, 19 nt, Artificial Sequence
  Description of Artificial Sequence: Synthetic oligonucleotide
auaucgcauucaacacacc

SEQ ID NO: 593093 - RNA, 19 nt, Artificial Sequence
  Description of Artificial Sequence: Synthetic oligonucleotide
uccgccgagccgcacguac

SEQ ID NO: 593094 - RNA, 19 nt, Artificial Sequence
  Description of Artificial Sequence: Synthetic oligonucleotide
gccauaucgcauucaacac

SEQ ID NO: 593095 - RNA, 19 nt, Artificial Sequence
  Description of Artificial Sequence: Synthetic oligonucleotide
cuuugugucauguucgcuu

SEQ ID NO: 593096 - RNA, 19 nt, Artificial Sequence
  Description of Artificial Sequence: Synthetic oligonucleotide
caaggccagcaauauccac

SEQ ID NO: 593097 - RNA, 19 nt, Artificial Sequence
  Description of Artificial Sequence: Synthetic oligonucleotide
gucaccuauguuauaaccu

SEQ ID NO: 593098 - RNA, 19 nt, Artificial Sequence
  Description of Artificial Sequence: Synthetic oligonucleotide
guagggucuuaaucacgug

SEQ ID NO: 593099 - RNA, 19 nt, Artificial Sequence
  Description of Artificial Sequence: Synthetic oligonucleotide
ggcugaugaucgcacgggg

SEQ ID NO: 593100 - RNA, 19 nt, Artificial Sequence
  Description of Artificial Sequence: Synthetic oligonucleotide
aauuugaaguagggucuua

SEQ ID NO: 593101 - RNA, 19 nt, Artificial Sequence
  Description of Artificial Sequence: Synthetic oligonucleotide
gagcaagccacauugucuu

SEQ ID NO: 593102 - RNA, 19 nt, Artificial Sequence
  Description of Artificial Sequence: Synthetic oligonucleotide
auuaaccaaguagaccauu

SEQ ID NO: 593103 - RNA, 19 nt, Artificial Sequence
  Description of Artificial Sequence: Synthetic oligonucleotide
gaaguaucaugagaguaau

SEQ ID NO: 593104 - RNA, 19 nt, Artificial Sequence
  Description of Artificial Sequence: Synthetic oligonucleotide
caauccuacaauaccaauu

SEQ ID NO: 593105 - RNA, 19 nt, Artificial Sequence
  Description of Artificial Sequence: Synthetic oligonucleotide
cauuaucuguagauucaaa

SEQ ID NO: 593106 - RNA, 19 nt, Artificial Sequence
  Description of Artificial Sequence: Synthetic oligonucleotide
ggucuuaaucacgugaaaa

SEQ ID NO: 593107 - RNA, 19 nt, Artificial Sequence
  Description of Artificial Sequence: Synthetic oligonucleotide
caacaugcguaaugucauc

SEQ ID NO: 593108 - RNA, 19 nt, Artificial Sequence
  Description of Artificial Sequence: Synthetic oligonucleotide
gaguaauaugggucuugaa

SEQ ID NO: 593109 - RNA, 19 nt, Artificial Sequence
  Description of Artificial Sequence: Synthetic oligonucleotide
cacacgccuuaaaauucug

SEQ ID NO: 593110 - RNA, 19 nt, Artificial Sequence
  Description of Artificial Sequence: Synthetic oligonucleotide
uguucgcuuccagauacuu

SEQ ID NO: 593111 - RNA, 19 nt, Artificial Sequence
  Description of Artificial Sequence: Synthetic oligonucleotide
aggcugguuuugucaaaug

SEQ ID NO: 593112 - RNA, 19 nt, Artificial Sequence
  Description of Artificial Sequence: Synthetic oligonucleotide
cuuuagauuucagaaacuu

SEQ ID NO: 593113 - RNA, 19 nt, Artificial Sequence
  Description of Artificial Sequence: Synthetic oligonucleotide
cuauaaugggcccaaucau

SEQ ID NO: 593114 - RNA, 19 nt, Artificial Sequence
  Description of Artificial Sequence: Synthetic oligonucleotide
ugaucgcacgggguaccgg

SEQ ID NO: 593115 - RNA, 19 nt, Artificial Sequence
  Description of Artificial Sequence: Synthetic oligonucleotide
aauacccguguagccggca

SEQ ID NO: 593116 - RNA, 19 nt, Artificial Sequence
  Description of Artificial Sequence: Synthetic oligonucleotide
cuggaguacuguaaaacau

SEQ ID NO: 593117 - RNA, 19 nt, Artificial Sequence
  Description of Artificial Sequence: Synthetic oligonucleotide
cacgcacgcacuucaucug

SEQ ID NO: 593118 - RNA, 19 nt, Artificial Sequence
  Description of Artificial Sequence: Synthetic oligonucleotide
gaucuauaacccaggauuu

SEQ ID NO: 593119 - RNA, 19 nt, Artificial Sequence
  Description of Artificial Sequence: Synthetic oligonucleotide
gagacaaucccugguaaau

SEQ ID NO: 593120 - RNA, 19 nt, Artificial Sequence
  Description of Artificial Sequence: Synthetic oligonucleotide
augaucgcacgggguaccg

SEQ ID NO: 593121 - RNA, 19 nt, Artificial Sequence
  Description of Artificial Sequence: Synthetic oligonucleotide
gaaucccuuuucaaagucu

SEQ ID NO: 593122 - RNA, 19 nt, Artificial Sequence
  Description of Artificial Sequence: Synthetic oligonucleotide
agcacguguuagaugaaaa

SEQ ID NO: 593123 - RNA, 19 nt, Artificial Sequence
  Description of Artificial Sequence: Synthetic oligonucleotide
acuuugugucauguucgcu

SEQ ID NO: 593124 - RNA, 19 nt, Artificial Sequence
  Description of Artificial Sequence: Synthetic oligonucleotide
ggugccauaucgcauucaa

SEQ ID NO: 593125 - RNA, 19 nt, Artificial Sequence
  Description of Artificial Sequence: Synthetic oligonucleotide
auccuacaauaccaauuuu

SEQ ID NO: 593126 - RNA, 19 nt, Artificial Sequence
  Description of Artificial Sequence: Synthetic oligonucleotide
guaccgggcugcaaauacc

SEQ ID NO: 593127 - RNA, 19 nt, Artificial Sequence
  Description of Artificial Sequence: Synthetic oligonucleotide
acaaucccugguaaauuau

SEQ ID NO: 593128 - RNA, 19 nt, Artificial Sequence
  Description of Artificial Sequence: Synthetic oligonucleotide
agacaaucccugguaaauu

SEQ ID NO: 593129 - RNA, 19 nt, Artificial Sequence
  Description of Artificial Sequence: Synthetic oligonucleotide
ugucacacacacgccuuaa

SEQ ID NO: 593130 - RNA, 19 nt, Artificial Sequence
  Description of Artificial Sequence: Synthetic oligonucleotide
uggaggcaucgugcaaagg

SEQ ID NO: 593131 - RNA, 19 nt, Artificial Sequence
  Description of Artificial Sequence: Synthetic oligonucleotide
ugagaguaauaugggucuu

SEQ ID NO: 593132 - RNA, 19 nt, Artificial Sequence
  Description of Artificial Sequence: Synthetic oligonucleotide
aaaucccaucacaggcacu

SEQ ID NO: 593133 - RNA, 19 nt, Artificial Sequence
  Description of Artificial Sequence: Synthetic oligonucleotide
ggccccacuaaaaggaaug

SEQ ID NO: 593134 - RNA, 19 nt, Artificial Sequence
  Description of Artificial Sequence: Synthetic oligonucleotide
aucgcacgggguaccgggc

SEQ ID NO: 593135 - RNA, 19 nt, Artificial Sequence
  Description of Artificial Sequence: Synthetic oligonucleotide
uguucacguuuaguaacuu

SEQ ID NO: 593136 - RNA, 19 nt, Artificial Sequence
  Description of Artificial Sequence: Synthetic oligonucleotide
guagccggcagccggaggu

SEQ ID NO: 593137 - RNA, 19 nt, Artificial Sequence
  Description of Artificial Sequence: Synthetic oligonucleotide
acacgccuuaaaauucugu

SEQ ID NO: 593138 - RNA, 19 nt, Artificial Sequence
  Description of Artificial Sequence: Synthetic oligonucleotide
gagguguauuaaauuugaa

SEQ ID NO: 593139 - RNA, 19 nt, Artificial Sequence
  Description of Artificial Sequence: Synthetic oligonucleotide
cuguucacguuuaguaacu

SEQ ID NO: 593140 - RNA, 19 nt, Artificial Sequence
  Description of Artificial Sequence: Synthetic oligonucleotide
cauuuggcaauccuacaau

SEQ ID NO: 593141 - RNA, 19 nt, Artificial Sequence
  Description of Artificial Sequence: Synthetic oligonucleotide
guacuguaaaacaugcauu

SEQ ID NO: 593142 - RNA, 19 nt, Artificial Sequence
  Description of Artificial Sequence: Synthetic oligonucleotide
agccuucguuccuuuccug

SEQ ID NO: 593143 - RNA, 19 nt, Artificial Sequence
  Description of Artificial Sequence: Synthetic oligonucleotide
cauugaagauacacaguau

SEQ ID NO: 593144 - RNA, 19 nt, Artificial Sequence
  Description of Artificial Sequence: Synthetic oligonucleotide
uagaagcguacagguuucu

SEQ ID NO: 593145 - RNA, 19 nt, Artificial Sequence
  Description of Artificial Sequence: Synthetic oligonucleotide
cacuaaugucugaaacaaa

SEQ ID NO: 593146 - RNA, 19 nt, Artificial Sequence
  Description of Artificial Sequence: Synthetic oligonucleotide
gggcugaugaucgcacggg

SEQ ID NO: 593147 - RNA, 19 nt, Artificial Sequence
  Description of Artificial Sequence: Synthetic oligonucleotide
cucgaaugggaucuacacu

SEQ ID NO: 593148 - RNA, 19 nt, Artificial Sequence
  Description of Artificial Sequence: Synthetic oligonucleotide
guauucuaguuggagugcu

SEQ ID NO: 593149 - RNA, 19 nt, Artificial Sequence
  Description of Artificial Sequence: Synthetic oligonucleotide
ggcugguuuugucaaaugu

SEQ ID NO: 593150 - RNA, 19 nt, Artificial Sequence
  Description of Artificial Sequence: Synthetic oligonucleotide
aaagcacguguuagaugaa

SEQ ID NO: 593151 - RNA, 19 nt, Artificial Sequence
  Description of Artificial Sequence: Synthetic oligonucleotide
cagaagcuugacuauuggu

SEQ ID NO: 593152 - RNA, 19 nt, Artificial Sequence
  Description of Artificial Sequence: Synthetic oligonucleotide
ucccaacauuuggcaaucc

SEQ ID NO: 593153 - RNA, 19 nt, Artificial Sequence
  Description of Artificial Sequence: Synthetic oligonucleotide
ccaaucaugauagaagcgu

SEQ ID NO: 593154 - RNA, 19 nt, Artificial Sequence
  Description of Artificial Sequence: Synthetic oligonucleotide
ucguuccuuuccugauggu

SEQ ID NO: 593155 - RNA, 19 nt, Artificial Sequence
  Description of Artificial Sequence: Synthetic oligonucleotide
accgggcugcaaauacccg

SEQ ID NO: 593156 - RNA, 19 nt, Artificial Sequence
  Description of Artificial Sequence: Synthetic oligonucleotide
ccugaugguccacgcacgc

SEQ ID NO: 593157 - RNA, 19 nt, Artificial Sequence
  Description of Artificial Sequence: Synthetic oligonucleotide
agcaggugccauaucgcau

SEQ ID NO: 593158 - RNA, 19 nt, Artificial Sequence
  Description of Artificial Sequence: Synthetic oligonucleotide
ccguguagccggcagccgg

SEQ ID NO: 593159 - RNA, 19 nt, Artificial Sequence
  Description of Artificial Sequence: Synthetic oligonucleotide
caggcacuaauaugagaua

SEQ ID NO: 593160 - RNA, 19 nt, Artificial Sequence
  Description of Artificial Sequence: Synthetic oligonucleotide
caaacccagccuuaaugau

SEQ ID NO: 593161 - RNA, 19 nt, Artificial Sequence
  Description of Artificial Sequence: Synthetic oligonucleotide
gaguuccaaggccccacua

SEQ ID NO: 593162 - RNA, 19 nt, Artificial Sequence
  Description of Artificial Sequence: Synthetic oligonucleotide
cacguuuaguaacuugcau

SEQ ID NO: 593163 - RNA, 19 nt, Artificial Sequence
  Description of Artificial Sequence: Synthetic oligonucleotide
gccuucguuccuuuccuga

SEQ ID NO: 593164 - RNA, 19 nt, Artificial Sequence
  Description of Artificial Sequence: Synthetic oligonucleotide
gucaggccuggcauacaug

SEQ ID NO: 593165 - RNA, 19 nt, Artificial Sequence
  Description of Artificial Sequence: Synthetic oligonucleotide
ccuugacugcauuuucuga

SEQ ID NO: 593166 - RNA, 19 nt, Artificial Sequence
  Description of Artificial Sequence: Synthetic oligonucleotide
cacugcuaucaucuuucaa

SEQ ID NO: 593167 - RNA, 19 nt, Artificial Sequence
  Description of Artificial Sequence: Synthetic oligonucleotide
cgcauucaacacaccacag

SEQ ID NO: 593168 - RNA, 19 nt, Artificial Sequence
  Description of Artificial Sequence: Synthetic oligonucleotide
ccauugguuuugaagucaa

SEQ ID NO: 593169 - RNA, 19 nt, Artificial Sequence
  Description of Artificial Sequence: Synthetic oligonucleotide
gcacucaauucuugcaacu

SEQ ID NO: 593170 - RNA, 19 nt, Artificial Sequence
  Description of Artificial Sequence: Synthetic oligonucleotide
gggucuuaaucacgugaaa

SEQ ID NO: 593171 - RNA, 19 nt, Artificial Sequence
  Description of Artificial Sequence: Synthetic oligonucleotide
auguucgcuuccagauacu

SEQ ID NO: 593172 - RNA, 19 nt, Artificial Sequence
  Description of Artificial Sequence: Synthetic oligonucleotide
ccccacuaaaaggaaugac

SEQ ID NO: 593173 - RNA, 19 nt, Artificial Sequence
  Description of Artificial Sequence: Synthetic oligonucleotide
auaucucgaaugggaucua

SEQ ID NO: 593174 - RNA, 19 nt, Artificial Sequence
  Description of Artificial Sequence: Synthetic oligonucleotide
cugaugguccacgcacgca

SEQ ID NO: 593175 - RNA, 19 nt, Artificial Sequence
  Description of Artificial Sequence: Synthetic oligonucleotide
aggccccacuaaaaggaau

SEQ ID NO: 593176 - RNA, 19 nt, Artificial Sequence
  Description of Artificial Sequence: Synthetic oligonucleotide
gcugguuuugucaaauguu

SEQ ID NO: 593177 - RNA, 19 nt, Artificial Sequence
  Description of Artificial Sequence: Synthetic oligonucleotide
cguuccuuuccugaugguc

SEQ ID NO: 593178 - RNA, 19 nt, Artificial Sequence
  Description of Artificial Sequence: Synthetic oligonucleotide
gcaauccuacaauaccaau

SEQ ID NO: 593179 - RNA, 19 nt, Artificial Sequence
  Description of Artificial Sequence: Synthetic oligonucleotide
ccacgcacgcacuucaucu

SEQ ID NO: 593180 - RNA, 19 nt, Artificial Sequence
  Description of Artificial Sequence: Synthetic oligonucleotide
gcaggcccggcccuccgcc

SEQ ID NO: 593181 - RNA, 19 nt, Artificial Sequence
  Description of Artificial Sequence: Synthetic oligonucleotide
ccgccgagccgcacguacg

SEQ ID NO: 593182 - RNA, 19 nt, Artificial Sequence
  Description of Artificial Sequence: Synthetic oligonucleotide
caauuugaaguagggucuu

SEQ ID NO: 593183 - RNA, 19 nt, Artificial Sequence
  Description of Artificial Sequence: Synthetic oligonucleotide
gccccacuaaaaggaauga

SEQ ID NO: 593184 - RNA, 19 nt, Artificial Sequence
  Description of Artificial Sequence: Synthetic oligonucleotide
ccaucacaggcacuaauau

SEQ ID NO: 593185 - RNA, 19 nt, Artificial Sequence
  Description of Artificial Sequence: Synthetic oligonucleotide
caauugcagcugccccaca

SEQ ID NO: 593186 - RNA, 19 nt, Artificial Sequence
  Description of Artificial Sequence: Synthetic oligonucleotide
gggucuugaaaagcuucua

SEQ ID NO: 593187 - RNA, 19 nt, Artificial Sequence
  Description of Artificial Sequence: Synthetic oligonucleotide
ccgggcugcaaauacccgu

SEQ ID NO: 593188 - RNA, 19 nt, Artificial Sequence
  Description of Artificial Sequence: Synthetic oligonucleotide
acccagccuuaaugaucuu

SEQ ID NO: 593189 - RNA, 19 nt, Artificial Sequence
  Description of Artificial Sequence: Synthetic oligonucleotide
ggauuugacuuugcacauu

SEQ ID NO: 593190 - RNA, 19 nt, Artificial Sequence
  Description of Artificial Sequence: Synthetic oligonucleotide
gagcgcaggcccggcccuc

SEQ ID NO: 593191 - RNA, 19 nt, Artificial Sequence
  Description of Artificial Sequence: Synthetic oligonucleotide
ggcccggcccuccgccgag

SEQ ID NO: 593192 - RNA, 19 nt, Artificial Sequence
  Description of Artificial Sequence: Synthetic oligonucleotide
gggguaccgggcugcaaau

SEQ ID NO: 593193 - RNA, 19 nt, Artificial Sequence
  Description of Artificial Sequence: Synthetic oligonucleotide
cgggguaccgggcugcaaa

SEQ ID NO: 593194 - RNA, 19 nt, Artificial Sequence
  Description of Artificial Sequence: Synthetic oligonucleotide
acgggguaccgggcugcaa

SEQ ID NO: 593195 - RNA, 19 nt, Artificial Sequence
  Description of Artificial Sequence: Synthetic oligonucleotide
cacgggguaccgggcugca

SEQ ID NO: 593196 - RNA, 19 nt, Artificial Sequence
  Description of Artificial Sequence: Synthetic oligonucleotide
cgcacgggguaccgggcug

SEQ ID NO: 593197 - RNA, 19 nt, Artificial Sequence
  Description of Artificial Sequence: Synthetic oligonucleotide
ccggcccuccgccgagccg

SEQ ID NO: 593198 - RNA, 19 nt, Artificial Sequence
  Description of Artificial Sequence: Synthetic oligonucleotide
cgccgagccgcacguacga

SEQ ID NO: 593199 - RNA, 19 nt, Artificial Sequence
  Description of Artificial Sequence: Synthetic oligonucleotide
ggcauacaugauggagauu

SEQ ID NO: 593200 - RNA, 19 nt, Artificial Sequence
  Description of Artificial Sequence: Synthetic oligonucleotide
ccuccgccgagccgcacgu

SEQ ID NO: 593201 - RNA, 19 nt, Artificial Sequence
  Description of Artificial Sequence: Synthetic oligonucleotide
cuccgccgagccgcacgua

SEQ ID NO: 593202 - RNA, 19 nt, Artificial Sequence
  Description of Artificial Sequence: Synthetic oligonucleotide
ugaagaaauacagagagcc

SEQ ID NO: 593203 - RNA, 19 nt, Artificial Sequence
  Description of Artificial Sequence: Synthetic oligonucleotide
aagucgaaccuccacacgc

SEQ ID NO: 593204 - RNA, 19 nt, Artificial Sequence
  Description of Artificial Sequence: Synthetic oligonucleotide
gauagcgucgaaaauaucc

SEQ ID NO: 593205 - RNA, 19 nt, Artificial Sequence
  Description of Artificial Sequence: Synthetic oligonucleotide
guagguaggaaccacgacg

SEQ ID NO: 593206 - RNA, 19 nt, Artificial Sequence
  Description of Artificial Sequence: Synthetic oligonucleotide
gaagguuuggaauuugccc

SEQ ID NO: 593207 - RNA, 19 nt, Artificial Sequence
  Description of Artificial Sequence: Synthetic oligonucleotide
uacaugggguacaugagcg

SEQ ID NO: 593208 - RNA, 19 nt, Artificial Sequence
  Description of Artificial Sequence: Synthetic oligonucleotide
ugugguacuacaccaaggc

SEQ ID NO: 593209 - RNA, 19 nt, Artificial Sequence
  Description of Artificial Sequence: Synthetic oligonucleotide
aagaugucgugugaguucc

SEQ ID NO: 593210 - RNA, 19 nt, Artificial Sequence
  Description of Artificial Sequence: Synthetic oligonucleotide
uguacacccacacuuugcg

SEQ ID NO: 593211 - RNA, 19 nt, Artificial Sequence
  Description of Artificial Sequence: Synthetic oligonucleotide
ucgaaaauauccacguugc

SEQ ID NO: 593212 - RNA, 19 nt, Artificial Sequence
  Description of Artificial Sequence: Synthetic oligonucleotide
ucaucgaucacgucucgcg

SEQ ID NO: 593213 - RNA, 19 nt, Artificial Sequence
  Description of Artificial Sequence: Synthetic oligonucleotide
gaaugaucuaaacccagug

SEQ ID NO: 593214 - RNA, 19 nt, Artificial Sequence
  Description of Artificial Sequence: Synthetic oligonucleotide
uucaagucgaaccuccaca

SEQ ID NO: 593215 - RNA, 19 nt, Artificial Sequence
  Description of Artificial Sequence: Synthetic oligonucleotide
uucaucgucgaagugggcg

SEQ ID NO: 593216 - RNA, 19 nt, Artificial Sequence
  Description of Artificial Sequence: Synthetic oligonucleotide
agcgguaaccauccgagcg

SEQ ID NO: 593217 - RNA, 19 nt, Artificial Sequence
  Description of Artificial Sequence: Synthetic oligonucleotide
uuugcgcccagaaaagaag

SEQ ID NO: 593218 - RNA, 19 nt, Artificial Sequence
  Description of Artificial Sequence: Synthetic oligonucleotide
guaggaucggcccucaaag

SEQ ID NO: 593219 - RNA, 19 nt, Artificial Sequence
  Description of Artificial Sequence: Synthetic oligonucleotide
aagucuuccgaguaguuuu

SEQ ID NO: 593220 - RNA, 19 nt, Artificial Sequence
  Description of Artificial Sequence: Synthetic oligonucleotide
acgaauggccucuaguguc

SEQ ID NO: 593221 - RNA, 19 nt, Artificial Sequence
  Description of Artificial Sequence: Synthetic oligonucleotide
cugaaguagcagcaaagcg

SEQ ID NO: 593222 - RNA, 19 nt, Artificial Sequence
  Description of Artificial Sequence: Synthetic oligonucleotide
gugcaagccaaauaggagc

SEQ ID NO: 593223 - RNA, 19 nt, Artificial Sequence
  Description of Artificial Sequence: Synthetic oligonucleotide
ucagcgauagcgucgaaaa

SEQ ID NO: 593224 - RNA, 19 nt, Artificial Sequence
  Description of Artificial Sequence: Synthetic oligonucleotide
gacgccuuugcccaaagac

SEQ ID NO: 593225 - RNA, 19 nt, Artificial Sequence
  Description of Artificial Sequence: Synthetic oligonucleotide
aaagcgugcgccagaagac

SEQ ID NO: 593226 - RNA, 19 nt, Artificial Sequence
  Description of Artificial Sequence: Synthetic oligonucleotide
cagaagaccguccuugccg

SEQ ID NO: 593227 - RNA, 19 nt, Artificial Sequence
  Description of Artificial Sequence: Synthetic oligonucleotide
ugagccuagacccaacuua

SEQ ID NO: 593228 - RNA, 19 nt, Artificial Sequence
  Description of Artificial Sequence: Synthetic oligonucleotide
ugcggauccucaaaggcug

SEQ ID NO: 593229 - RNA, 19 nt, Artificial Sequence
  Description of Artificial Sequence: Synthetic oligonucleotide
auccgagcgaccuucagug

SEQ ID NO: 593230 - RNA, 19 nt, Artificial Sequence
  Description of Artificial Sequence: Synthetic oligonucleotide
uucaccucaucucggaaac

SEQ ID NO: 593231 - RNA, 19 nt, Artificial Sequence
  Description of Artificial Sequence: Synthetic oligonucleotide
ggaacauccuauccaagcg

SEQ ID NO: 593232 - RNA, 19 nt, Artificial Sequence
  Description of Artificial Sequence: Synthetic oligonucleotide
cucacuggggcagaaaccg

SEQ ID NO: 593233 - RNA, 19 nt, Artificial Sequence
  Description of Artificial Sequence: Synthetic oligonucleotide
auccaagcgagugacacuc

SEQ ID NO: 593234 - RNA, 19 nt, Artificial Sequence
  Description of Artificial Sequence: Synthetic oligonucleotide
uauccagacgccuggggcc

SEQ ID NO: 593235 - RNA, 19 nt, Artificial Sequence
  Description of Artificial Sequence: Synthetic oligonucleotide
auacccgucuccgugcucc

SEQ ID NO: 593236 - RNA, 19 nt, Artificial Sequence
  Description of Artificial Sequence: Synthetic oligonucleotide
aaaccgaauuugcggucgg

SEQ ID NO: 593237 - RNA, 19 nt, Artificial Sequence
  Description of Artificial Sequence: Synthetic oligonucleotide
aagcgugcgccagaagacc

SEQ ID NO: 593238 - RNA, 19 nt, Artificial Sequence
  Description of Artificial Sequence: Synthetic oligonucleotide
auaggagcgucccucgaag

SEQ ID NO: 593239 - RNA, 19 nt, Artificial Sequence
  Description of Artificial Sequence: Synthetic oligonucleotide
gaagaugucgugugaguuc

SEQ ID NO: 593240 - RNA, 19 nt, Artificial Sequence
  Description of Artificial Sequence: Synthetic oligonucleotide
aauaggagcgucccucgaa

SEQ ID NO: 593241 - RNA, 19 nt, Artificial Sequence
  Description of Artificial Sequence: Synthetic oligonucleotide
aaagugacaaggggcacca

SEQ ID NO: 593242 - RNA, 19 nt, Artificial Sequence
  Description of Artificial Sequence: Synthetic oligonucleotide
agccaaauaggagcguccc

SEQ ID NO: 593243 - RNA, 19 nt, Artificial Sequence
  Description of Artificial Sequence: Synthetic oligonucleotide
acgccuuugcccaaagacc

SEQ ID NO: 593244 - RNA, 19 nt, Artificial Sequence
  Description of Artificial Sequence: Synthetic oligonucleotide
aaccauccgagcgaccuuc

SEQ ID NO: 593245 - RNA, 19 nt, Artificial Sequence
  Description of Artificial Sequence: Synthetic oligonucleotide
aagaccguccuugccgucg

SEQ ID NO: 593246 - RNA, 19 nt, Artificial Sequence
  Description of Artificial Sequence: Synthetic oligonucleotide
guaccgaccguccuugaag

SEQ ID NO: 593247 - RNA, 19 nt, Artificial Sequence
  Description of Artificial Sequence: Synthetic oligonucleotide
gaacauccuauccaagcga

SEQ ID NO: 593248 - RNA, 19 nt, Artificial Sequence
  Description of Artificial Sequence: Synthetic oligonucleotide
agcgucgaaaauauccacg

SEQ ID NO: 593249 - RNA, 19 nt, Artificial Sequence
  Description of Artificial Sequence: Synthetic oligonucleotide
caagcgagugacacucugg

SEQ ID NO: 593250 - RNA, 19 nt, Artificial Sequence
  Description of Artificial Sequence: Synthetic oligonucleotide
gaacucgugagcugccacc

SEQ ID NO: 593251 - RNA, 19 nt, Artificial Sequence
  Description of Artificial Sequence: Synthetic oligonucleotide
cauccuauccaagcgagug

SEQ ID NO: 593252 - RNA, 19 nt, Artificial Sequence
  Description of Artificial Sequence: Synthetic oligonucleotide
uugaauccaguaugugaug

SEQ ID NO: 593253 - RNA, 19 nt, Artificial Sequence
  Description of Artificial Sequence: Synthetic oligonucleotide
auaagaaaggggcccugca

SEQ ID NO: 593254 - RNA, 19 nt, Artificial Sequence
  Description of Artificial Sequence: Synthetic oligonucleotide
ugcuccgcgacaccaaacu

SEQ ID NO: 593255 - RNA, 19 nt, Artificial Sequence
  Description of Artificial Sequence: Synthetic oligonucleotide
guagcgucggcucggguag

SEQ ID NO: 593256 - RNA, 19 nt, Artificial Sequence
  Description of Artificial Sequence: Synthetic oligonucleotide
cgggcaauaagaaaggggc

SEQ ID NO: 593257 - RNA, 19 nt, Artificial Sequence
  Description of Artificial Sequence: Synthetic oligonucleotide
accguccuugaagaaauac

SEQ ID NO: 593258 - RNA, 19 nt, Artificial Sequence
  Description of Artificial Sequence: Synthetic oligonucleotide
ucaucgucgaagugggcgu

SEQ ID NO: 593259 - RNA, 19 nt, Artificial Sequence
  Description of Artificial Sequence: Synthetic oligonucleotide
aucucugcggcccucgcug

SEQ ID NO: 593260 - RNA, 19 nt, Artificial Sequence
  Description of Artificial Sequence: Synthetic oligonucleotide
gguacaugagcgcuuccgg

SEQ ID NO: 593261 - RNA, 19 nt, Artificial Sequence
  Description of Artificial Sequence: Synthetic oligonucleotide
agggauacccgucuccgug

SEQ ID NO: 593262 - RNA, 19 nt, Artificial Sequence
  Description of Artificial Sequence: Synthetic oligonucleotide
aaauaggagcgucccucga

SEQ ID NO: 593263 - RNA, 19 nt, Artificial Sequence
  Description of Artificial Sequence: Synthetic oligonucleotide
gaagcgauacaugggguac

SEQ ID NO: 593264 - RNA, 19 nt, Artificial Sequence
  Description of Artificial Sequence: Synthetic oligonucleotide
uacuacaccaaggcgcacc

SEQ ID NO: 593265 - RNA, 19 nt, Artificial Sequence
  Description of Artificial Sequence: Synthetic oligonucleotide
auagcgucgaaaauaucca

SEQ ID NO: 593266 - RNA, 19 nt, Artificial Sequence
  Description of Artificial Sequence: Synthetic oligonucleotide
aaguagguaggaaccacga

SEQ ID NO: 593267 - RNA, 19 nt, Artificial Sequence
  Description of Artificial Sequence: Synthetic oligonucleotide
guuaugguggugccauuug

SEQ ID NO: 593268 - RNA, 19 nt, Artificial Sequence
  Description of Artificial Sequence: Synthetic oligonucleotide
acaaaagccguagagcuua

SEQ ID NO: 593269 - RNA, 19 nt, Artificial Sequence
  Description of Artificial Sequence: Synthetic oligonucleotide
guacaugagcgcuuccggc

SEQ ID NO: 593270 - RNA, 19 nt, Artificial Sequence
  Description of Artificial Sequence: Synthetic oligonucleotide
cuggggacucuuuguaggg

SEQ ID NO: 593271 - RNA, 19 nt, Artificial Sequence
  Description of Artificial Sequence: Synthetic oligonucleotide
agaagaccguccuugccgu

SEQ ID NO: 593272 - RNA, 19 nt, Artificial Sequence
  Description of Artificial Sequence: Synthetic oligonucleotide
aaggcgcaccauccgugcg

SEQ ID NO: 593273 - RNA, 19 nt, Artificial Sequence
  Description of Artificial Sequence: Synthetic oligonucleotide
guaauggccucagaagggc

SEQ ID NO: 593274 - RNA, 19 nt, Artificial Sequence
  Description of Artificial Sequence: Synthetic oligonucleotide
uaccgaccguccuugaaga

SEQ ID NO: 593275 - RNA, 19 nt, Artificial Sequence
  Description of Artificial Sequence: Synthetic oligonucleotide
agugucgaagcucgaggug

SEQ ID NO: 593276 - RNA, 19 nt, Artificial Sequence
  Description of Artificial Sequence: Synthetic oligonucleotide
uccgcgacaccaaacugaa

SEQ ID NO: 593277 - RNA, 19 nt, Artificial Sequence
  Description of Artificial Sequence: Synthetic oligonucleotide
gaagcucgaggugguagcg

SEQ ID NO: 593278 - RNA, 19 nt, Artificial Sequence
  Description of Artificial Sequence: Synthetic oligonucleotide
agcgauagcgucgaaaaua

SEQ ID NO: 593279 - RNA, 19 nt, Artificial Sequence
  Description of Artificial Sequence: Synthetic oligonucleotide
aggaucggcccucaaagau

SEQ ID NO: 593280 - RNA, 19 nt, Artificial Sequence
  Description of Artificial Sequence: Synthetic oligonucleotide
ugcuucgaggccguacacg

SEQ ID NO: 593281 - RNA, 19 nt, Artificial Sequence
  Description of Artificial Sequence: Synthetic oligonucleotide
ucgaucacgucucgcggca

SEQ ID NO: 593282 - RNA, 19 nt, Artificial Sequence
  Description of Artificial Sequence: Synthetic oligonucleotide
agaaauacagagagcccug

SEQ ID NO: 593283 - RNA, 19 nt, Artificial Sequence
  Description of Artificial Sequence: Synthetic oligonucleotide
agcgagugacacucugggg

SEQ ID NO: 593284 - RNA, 19 nt, Artificial Sequence
  Description of Artificial Sequence: Synthetic oligonucleotide
aguagcgucggcucgggua

SEQ ID NO: 593285 - RNA, 19 nt, Artificial Sequence
  Description of Artificial Sequence: Synthetic oligonucleotide
uagcgucgaaaauauccac

SEQ ID NO: 593286 - RNA, 19 nt, Artificial Sequence
  Description of Artificial Sequence: Synthetic oligonucleotide
caagucgaaccuccacacg

SEQ ID NO: 593287 - RNA, 19 nt, Artificial Sequence
  Description of Artificial Sequence: Synthetic oligonucleotide
gaucacgucucgcggcaag

SEQ ID NO: 593288 - RNA, 19 nt, Artificial Sequence
  Description of Artificial Sequence: Synthetic oligonucleotide
uggguuaccucugagccua

SEQ ID NO: 593289 - RNA, 19 nt, Artificial Sequence
  Description of Artificial Sequence: Synthetic oligonucleotide
agagaucaccaguuuguau

SEQ ID NO: 593290 - RNA, 19 nt, Artificial Sequence
  Description of Artificial Sequence: Synthetic oligonucleotide
uagacccaacuuauccaga

SEQ ID NO: 593291 - RNA, 19 nt, Artificial Sequence
  Description of Artificial Sequence: Synthetic oligonucleotide
ucgccugccgaguugcccc

SEQ ID NO: 593292 - RNA, 19 nt, Artificial Sequence
  Description of Artificial Sequence: Synthetic oligonucleotide
aggcgcaccauccgugcgg

SEQ ID NO: 593293 - RNA, 19 nt, Artificial Sequence
  Description of Artificial Sequence: Synthetic oligonucleotide
acgugagcggugucaccgc

SEQ ID NO: 593294 - RNA, 19 nt, Artificial Sequence
  Description of Artificial Sequence: Synthetic oligonucleotide
auccuauccaagcgaguga

SEQ ID NO: 593295 - RNA, 19 nt, Artificial Sequence
  Description of Artificial Sequence: Synthetic oligonucleotide
gcucggguaggacaaaagc

SEQ ID NO: 593296 - RNA, 19 nt, Artificial Sequence
  Description of Artificial Sequence: Synthetic oligonucleotide
uccguguagagugucucac

SEQ ID NO: 593297 - RNA, 19 nt, Artificial Sequence
  Description of Artificial Sequence: Synthetic oligonucleotide
agucgaaccuccacacgcg

SEQ ID NO: 593298 - RNA, 19 nt, Artificial Sequence
  Description of Artificial Sequence: Synthetic oligonucleotide
ccagcgguaaccauccgag

SEQ ID NO: 593299 - RNA, 19 nt, Artificial Sequence
  Description of Artificial Sequence: Synthetic oligonucleotide
gcgagugacacucugggga

SEQ ID NO: 593300 - RNA, 19 nt, Artificial Sequence
  Description of Artificial Sequence: Synthetic oligonucleotide
caagccaaauaggagcguc

SEQ ID NO: 593301 - RNA, 19 nt, Artificial Sequence
  Description of Artificial Sequence: Synthetic oligonucleotide
uccgagcgaccuucagugg

SEQ ID NO: 593302 - RNA, 19 nt, Artificial Sequence
  Description of Artificial Sequence: Synthetic oligonucleotide
cuuugcgcccagaaaagaa

SEQ ID NO: 593303 - RNA, 19 nt, Artificial Sequence
  Description of Artificial Sequence: Synthetic oligonucleotide
aggagcgucccucgaaggu

SEQ ID NO: 593304 - RNA, 19 nt, Artificial Sequence
  Description of Artificial Sequence: Synthetic oligonucleotide
accaaggcgcaccauccgu

SEQ ID NO: 593305 - RNA, 19 nt, Artificial Sequence
  Description of Artificial Sequence: Synthetic oligonucleotide
auggccgaacucgugagcu

SEQ ID NO: 593306 - RNA, 19 nt, Artificial Sequence
  Description of Artificial Sequence: Synthetic oligonucleotide
gaagugggcgucucccuga

SEQ ID NO: 593307 - RNA, 19 nt, Artificial Sequence
  Description of Artificial Sequence: Synthetic oligonucleotide
ucgaaccuccacacgcgcu

SEQ ID NO: 593308 - RNA, 19 nt, Artificial Sequence
  Description of Artificial Sequence: Synthetic oligonucleotide
ugaggucgcccucgaaggu

SEQ ID NO: 593309 - RNA, 19 nt, Artificial Sequence
  Description of Artificial Sequence: Synthetic oligonucleotide
aagcgauacaugggguaca

SEQ ID NO: 593310 - RNA, 19 nt, Artificial Sequence
  Description of Artificial Sequence: Synthetic oligonucleotide
accgaauuugcggucggug

SEQ ID NO: 593311 - RNA, 19 nt, Artificial Sequence
  Description of Artificial Sequence: Synthetic oligonucleotide
guacacccacacuuugcgc

SEQ ID NO: 593312 - RNA, 19 nt, Artificial Sequence
  Description of Artificial Sequence: Synthetic oligonucleotide
cuccgcgacaccaaacuga

SEQ ID NO: 593313 - RNA, 19 nt, Artificial Sequence
  Description of Artificial Sequence: Synthetic oligonucleotide
gugcgggcaauaagaaagg

SEQ ID NO: 593314 - RNA, 19 nt, Artificial Sequence
  Description of Artificial Sequence: Synthetic oligonucleotide
caguaugugauguuauggu

SEQ ID NO: 593315 - RNA, 19 nt, Artificial Sequence
  Description of Artificial Sequence: Synthetic oligonucleotide
agcuuauccuggucguagu

SEQ ID NO: 593316 - RNA, 19 nt, Artificial Sequence
  Description of Artificial Sequence: Synthetic oligonucleotide
ggguuugccguccccauug

SEQ ID NO: 593317 - RNA, 19 nt, Artificial Sequence
  Description of Artificial Sequence: Synthetic oligonucleotide
caguuuguauccagcaaaa

SEQ ID NO: 593318 - RNA, 19 nt, Artificial Sequence
  Description of Artificial Sequence: Synthetic oligonucleotide
ggggcagaaaccgaauuug

SEQ ID NO: 593319 - RNA, 19 nt, Artificial Sequence
  Description of Artificial Sequence: Synthetic oligonucleotide
ggguacaugagcgcuuccg

SEQ ID NO: 593320 - RNA, 19 nt, Artificial Sequence
  Description of Artificial Sequence: Synthetic oligonucleotide
ucggugucguagucggcug

SEQ ID NO: 593321 - RNA, 19 nt, Artificial Sequence
  Description of Artificial Sequence: Synthetic oligonucleotide
ugccgucgaagggauaccc

SEQ ID NO: 593322 - RNA, 19 nt, Artificial Sequence
  Description of Artificial Sequence: Synthetic oligonucleotide
cacaguagcgucggcucgg

SEQ ID NO: 593323 - RNA, 19 nt, Artificial Sequence
  Description of Artificial Sequence: Synthetic oligonucleotide
guguacacccacacuuugc

SEQ ID NO: 593324 - RNA, 19 nt, Artificial Sequence
  Description of Artificial Sequence: Synthetic oligonucleotide
ucgaagggauacccgucuc

SEQ ID NO: 593325 - RNA, 19 nt, Artificial Sequence
  Description of Artificial Sequence: Synthetic oligonucleotide
aucucagcgauagcgucga

SEQ ID NO: 593326 - RNA, 19 nt, Artificial Sequence
  Description of Artificial Sequence: Synthetic oligonucleotide
gucgaaccuccacacgcgc

SEQ ID NO: 593327 - RNA, 19 nt, Artificial Sequence
  Description of Artificial Sequence: Synthetic oligonucleotide
agcgugcgccagaagaccg

SEQ ID NO: 593328 - RNA, 19 nt, Artificial Sequence
  Description of Artificial Sequence: Synthetic oligonucleotide
cacacgccaguagaaucgg

SEQ ID NO: 593329 - RNA, 19 nt, Artificial Sequence
  Description of Artificial Sequence: Synthetic oligonucleotide
uggugcacgaauggccucu

SEQ ID NO: 593330 - RNA, 19 nt, Artificial Sequence
  Description of Artificial Sequence: Synthetic oligonucleotide
ugccgugcuccguguagag

SEQ ID NO: 593331 - RNA, 19 nt, Artificial Sequence
  Description of Artificial Sequence: Synthetic oligonucleotide
aguaccgaccguccuugaa

SEQ ID NO: 593332 - RNA, 19 nt, Artificial Sequence
  Description of Artificial Sequence: Synthetic oligonucleotide
agcgcuuccggcacugaag

SEQ ID NO: 593333 - RNA, 19 nt, Artificial Sequence
  Description of Artificial Sequence: Synthetic oligonucleotide
ggcgucaucgaucacgucu

SEQ ID NO: 593334 - RNA, 19 nt, Artificial Sequence
  Description of Artificial Sequence: Synthetic oligonucleotide
guacacgcgggugaacgug

SEQ ID NO: 593335 - RNA, 19 nt, Artificial Sequence
  Description of Artificial Sequence: Synthetic oligonucleotide
uccgugcggccaucugugg

SEQ ID NO: 593336 - RNA, 19 nt, Artificial Sequence
  Description of Artificial Sequence: Synthetic oligonucleotide
ccgugcuccguguagagug

SEQ ID NO: 593337 - RNA, 19 nt, Artificial Sequence
  Description of Artificial Sequence: Synthetic oligonucleotide
gguacuacaccaaggcgca

SEQ ID NO: 593338 - RNA, 19 nt, Artificial Sequence
  Description of Artificial Sequence: Synthetic oligonucleotide
ucggcccucaaagaugaau

SEQ ID NO: 593339 - RNA, 19 nt, Artificial Sequence
  Description of Artificial Sequence: Synthetic oligonucleotide
ucgcggcaagucuuccgag

SEQ ID NO: 593340 - RNA, 19 nt, Artificial Sequence
  Description of Artificial Sequence: Synthetic oligonucleotide
agucuuccgaguaguuuug

SEQ ID NO: 593341 - RNA, 19 nt, Artificial Sequence
  Description of Artificial Sequence: Synthetic oligonucleotide
cccucggcgauucaggaac

SEQ ID NO: 593342 - RNA, 19 nt, Artificial Sequence
  Description of Artificial Sequence: Synthetic oligonucleotide
ucgugcagaggggagcccu

SEQ ID NO: 593343 - RNA, 19 nt, Artificial Sequence
  Description of Artificial Sequence: Synthetic oligonucleotide
caucuguggugcaagccaa

SEQ ID NO: 593344 - RNA, 19 nt, Artificial Sequence
  Description of Artificial Sequence: Synthetic oligonucleotide
uccaagcgagugacacucu

SEQ ID NO: 593345 - RNA, 19 nt, Artificial Sequence
  Description of Artificial Sequence: Synthetic oligonucleotide
cccucgcugguacaggugg

SEQ ID NO: 593346 - RNA, 19 nt, Artificial Sequence
  Description of Artificial Sequence: Synthetic oligonucleotide
ucggcgauucaggaacuuc

SEQ ID NO: 593347 - RNA, 19 nt, Artificial Sequence
  Description of Artificial Sequence: Synthetic oligonucleotide
gaaccuccacacgcgcucc

SEQ ID NO: 593348 - RNA, 19 nt, Artificial Sequence
  Description of Artificial Sequence: Synthetic oligonucleotide
aaccgaauuugcggucggu

SEQ ID NO: 593349 - RNA, 19 nt, Artificial Sequence
  Description of Artificial Sequence: Synthetic oligonucleotide
uugccgugcuccguguaga

SEQ ID NO: 593350 - RNA, 19 nt, Artificial Sequence
  Description of Artificial Sequence: Synthetic oligonucleotide
auccgugcggccaucugug

SEQ ID NO: 593351 - RNA, 19 nt, Artificial Sequence
  Description of Artificial Sequence: Synthetic oligonucleotide
cagcgguaaccauccgagc

SEQ ID NO: 593352 - RNA, 19 nt, Artificial Sequence
  Description of Artificial Sequence: Synthetic oligonucleotide
acgugcgggcaauaagaaa

SEQ ID NO: 593353 - RNA, 19 nt, Artificial Sequence
  Description of Artificial Sequence: Synthetic oligonucleotide
uugcggucggugucguagu

SEQ ID NO: 593354 - RNA, 19 nt, Artificial Sequence
  Description of Artificial Sequence: Synthetic oligonucleotide
uggccgaacucgugagcug

SEQ ID NO: 593355 - RNA, 19 nt, Artificial Sequence
  Description of Artificial Sequence: Synthetic oligonucleotide
gaggccguacacgcgggug

SEQ ID NO: 593356 - RNA, 19 nt, Artificial Sequence
  Description of Artificial Sequence: Synthetic oligonucleotide
gucaucgaucacgucucgc

SEQ ID NO: 593357 - RNA, 19 nt, Artificial Sequence
  Description of Artificial Sequence: Synthetic oligonucleotide
cucgaagguuuggaauuug

SEQ ID NO: 593358 - RNA, 19 nt, Artificial Sequence
  Description of Artificial Sequence: Synthetic oligonucleotide
uggggacucuuuguagggu

SEQ ID NO: 593359 - RNA, 19 nt, Artificial Sequence
  Description of Artificial Sequence: Synthetic oligonucleotide
accgacuggccuguguaca

SEQ ID NO: 593360 - RNA, 19 nt, Artificial Sequence
  Description of Artificial Sequence: Synthetic oligonucleotide
acgcgcucccugcucaaca

SEQ ID NO: 593361 - RNA, 19 nt, Artificial Sequence
  Description of Artificial Sequence: Synthetic oligonucleotide
gacgccuggggcccagcac

SEQ ID NO: 593362 - RNA, 19 nt, Artificial Sequence
  Description of Artificial Sequence: Synthetic oligonucleotide
acgacgccuuugcccaaag

SEQ ID NO: 593363 - RNA, 19 nt, Artificial Sequence
  Description of Artificial Sequence: Synthetic oligonucleotide
agcgauacaugggguacau

SEQ ID NO: 593364 - RNA, 19 nt, Artificial Sequence
  Description of Artificial Sequence: Synthetic oligonucleotide
ccacgugcgggcaauaaga

SEQ ID NO: 593365 - RNA, 19 nt, Artificial Sequence
  Description of Artificial Sequence: Synthetic oligonucleotide
uugccgucgaagggauacc

SEQ ID NO: 593366 - RNA, 19 nt, Artificial Sequence
  Description of Artificial Sequence: Synthetic oligonucleotide
gccacgugcgggcaauaag

SEQ ID NO: 593367 - RNA, 19 nt, Artificial Sequence
  Description of Artificial Sequence: Synthetic oligonucleotide
cugcggauccucaaaggcu

SEQ ID NO: 593368 - RNA, 19 nt, Artificial Sequence
  Description of Artificial Sequence: Synthetic oligonucleotide
ccguacacgcgggugaacg

SEQ ID NO: 593369 - RNA, 19 nt, Artificial Sequence
  Description of Artificial Sequence: Synthetic oligonucleotide
ccauuugaggucgcccucg

SEQ ID NO: 593370 - RNA, 19 nt, Artificial Sequence
  Description of Artificial Sequence: Synthetic oligonucleotide
ucacgucucgcggcaaguc

SEQ ID NO: 593371 - RNA, 19 nt, Artificial Sequence
  Description of Artificial Sequence: Synthetic oligonucleotide
ucgcugguacagguggagu

SEQ ID NO: 593372 - RNA, 19 nt, Artificial Sequence
  Description of Artificial Sequence: Synthetic oligonucleotide
gggacucuuuguaggguag

SEQ ID NO: 593373 - RNA, 19 nt, Artificial Sequence
  Description of Artificial Sequence: Synthetic oligonucleotide
cuccguguagagugucuca

SEQ ID NO: 593374 - RNA, 19 nt, Artificial Sequence
  Description of Artificial Sequence: Synthetic oligonucleotide
cacgugcgggcaauaagaa

SEQ ID NO: 593375 - RNA, 19 nt, Artificial Sequence
  Description of Artificial Sequence: Synthetic oligonucleotide
cacgaauggccucuagugu

SEQ ID NO: 593376 - RNA, 19 nt, Artificial Sequence
  Description of Artificial Sequence: Synthetic oligonucleotide
cagugucgaagcucgaggu

SEQ ID NO: 593377 - RNA, 19 nt, Artificial Sequence
  Description of Artificial Sequence: Synthetic oligonucleotide
acagcucgccugccgaguu

SEQ ID NO: 593378 - RNA, 19 nt, Artificial Sequence
  Description of Artificial Sequence: Synthetic oligonucleotide
cgaagcucgaggugguagc

SEQ ID NO: 593379 - RNA, 19 nt, Artificial Sequence
  Description of Artificial Sequence: Synthetic oligonucleotide
agacgccuggggcccagca

SEQ ID NO: 593380 - RNA, 19 nt, Artificial Sequence
  Description of Artificial Sequence: Synthetic oligonucleotide
cuggucguaguuggcugug

SEQ ID NO: 593381 - RNA, 19 nt, Artificial Sequence
  Description of Artificial Sequence: Synthetic oligonucleotide
ggccgaacucgugagcugc

SEQ ID NO: 593382 - RNA, 19 nt, Artificial Sequence
  Description of Artificial Sequence: Synthetic oligonucleotide
gucgcccucgaagguuugg

SEQ ID NO: 593383 - RNA, 19 nt, Artificial Sequence
  Description of Artificial Sequence: Synthetic oligonucleotide
ccaaggcgcaccauccgug

SEQ ID NO: 593384 - RNA, 19 nt, Artificial Sequence
  Description of Artificial Sequence: Synthetic oligonucleotide
gauacccgucuccgugcuc

SEQ ID NO: 593385 - RNA, 19 nt, Artificial Sequence
  Description of Artificial Sequence: Synthetic oligonucleotide
gaccacagcucuucaucgu

SEQ ID NO: 593386 - RNA, 19 nt, Artificial Sequence
  Description of Artificial Sequence: Synthetic oligonucleotide
gaagaccguccuugccguc

SEQ ID NO: 593387 - RNA, 19 nt, Artificial Sequence
  Description of Artificial Sequence: Synthetic oligonucleotide
cacgcgggugaacgugagc

SEQ ID NO: 593388 - RNA, 19 nt, Artificial Sequence
  Description of Artificial Sequence: Synthetic oligonucleotide
gugcacgaauggccucuag

SEQ ID NO: 593389 - RNA, 19 nt, Artificial Sequence
  Description of Artificial Sequence: Synthetic oligonucleotide
ccaagcgagugacacucug

SEQ ID NO: 593390 - RNA, 19 nt, Artificial Sequence
  Description of Artificial Sequence: Synthetic oligonucleotide
cggucggugucguagucgg

SEQ ID NO: 593391 - RNA, 19 nt, Artificial Sequence
  Description of Artificial Sequence: Synthetic oligonucleotide
cucccucggcgauucagga

SEQ ID NO: 593392 - RNA, 19 nt, Artificial Sequence
  Description of Artificial Sequence: Synthetic oligonucleotide
ccagucucuagaagagauc

SEQ ID NO: 593393 - RNA, 19 nt, Artificial Sequence
  Description of Artificial Sequence: Synthetic oligonucleotide
cucagcgauagcgucgaaa

SEQ ID NO: 593394 - RNA, 19 nt, Artificial Sequence
  Description of Artificial Sequence: Synthetic oligonucleotide
cacacgcgcucccugcuca

SEQ ID NO: 593395 - RNA, 19 nt, Artificial Sequence
  Description of Artificial Sequence: Synthetic oligonucleotide
aggcgucaucgaucacguc

SEQ ID NO: 593396 - RNA, 19 nt, Artificial Sequence
  Description of Artificial Sequence: Synthetic oligonucleotide
gucggcucggguaggacaa

SEQ ID NO: 593397 - RNA, 19 nt, Artificial Sequence
  Description of Artificial Sequence: Synthetic oligonucleotide
gucggugucguagucggcu

SEQ ID NO: 593398 - RNA, 19 nt, Artificial Sequence
  Description of Artificial Sequence: Synthetic oligonucleotide
gguuugccguccccauugc

SEQ ID NO: 593399 - RNA, 19 nt, Artificial Sequence
  Description of Artificial Sequence: Synthetic oligonucleotide
cauccgagcgaccuucagu

SEQ ID NO: 593400 - RNA, 19 nt, Artificial Sequence
  Description of Artificial Sequence: Synthetic oligonucleotide
gcuccgcgacaccaaacug

SEQ ID NO: 593401 - RNA, 19 nt, Artificial Sequence
  Description of Artificial Sequence: Synthetic oligonucleotide
gcgcuuccggcacugaaga

SEQ ID NO: 593402 - RNA, 19 nt, Artificial Sequence
  Description of Artificial Sequence: Synthetic oligonucleotide
gugagcggugucaccgcgc

SEQ ID NO: 593403 - RNA, 19 nt, Artificial Sequence
  Description of Artificial Sequence: Synthetic oligonucleotide
guggugcacgaauggccuc

SEQ ID NO: 593404 - RNA, 19 nt, Artificial Sequence
  Description of Artificial Sequence: Synthetic oligonucleotide
cauccgugcggccaucugu

SEQ ID NO: 593405 - RNA, 19 nt, Artificial Sequence
  Description of Artificial Sequence: Synthetic oligonucleotide
accgaccguccuugaagaa

SEQ ID NO: 593406 - RNA, 19 nt, Artificial Sequence
  Description of Artificial Sequence: Synthetic oligonucleotide
gcgucaucgaucacgucuc

SEQ ID NO: 593407 - RNA, 19 nt, Artificial Sequence
  Description of Artificial Sequence: Synthetic oligonucleotide
gcggucggugucguagucg

SEQ ID NO: 593408 - RNA, 19 nt, Artificial Sequence
  Description of Artificial Sequence: Synthetic oligonucleotide
gggaagacgcacagcucgc

SEQ ID NO: 593409 - RNA, 19 nt, Artificial Sequence
  Description of Artificial Sequence: Synthetic oligonucleotide
caucgucgaagugggcguc

SEQ ID NO: 593410 - RNA, 19 nt, Artificial Sequence
  Description of Artificial Sequence: Synthetic oligonucleotide
cguccuugccgucgaaggg

SEQ ID NO: 593411 - RNA, 19 nt, Artificial Sequence
  Description of Artificial Sequence: Synthetic oligonucleotide
gccgucgaagggauacccg

SEQ ID NO: 593412 - RNA, 19 nt, Artificial Sequence
  Description of Artificial Sequence: Synthetic oligonucleotide
cugcggcccucgcugguac

SEQ ID NO: 593413 - RNA, 19 nt, Artificial Sequence
  Description of Artificial Sequence: Synthetic oligonucleotide
acacgcgggugaacgugag

SEQ ID NO: 593414 - RNA, 19 nt, Artificial Sequence
  Description of Artificial Sequence: Synthetic oligonucleotide
acgucucgcggcaagucuu

SEQ ID NO: 593415 - RNA, 19 nt, Artificial Sequence
  Description of Artificial Sequence: Synthetic oligonucleotide
gagcccggagaucuggguu

SEQ ID NO: 593416 - RNA, 19 nt, Artificial Sequence
  Description of Artificial Sequence: Synthetic oligonucleotide
cacagcguggugcacgaau

SEQ ID NO: 593417 - RNA, 19 nt, Artificial Sequence
  Description of Artificial Sequence: Synthetic oligonucleotide
ugcggcccucgcugguaca

SEQ ID NO: 593418 - RNA, 19 nt, Artificial Sequence
  Description of Artificial Sequence: Synthetic oligonucleotide
cgaaccuccacacgcgcuc

SEQ ID NO: 593419 - RNA, 19 nt, Artificial Sequence
  Description of Artificial Sequence: Synthetic oligonucleotide
ccgacuggccuguguacac

SEQ ID NO: 593420 - RNA, 19 nt, Artificial Sequence
  Description of Artificial Sequence: Synthetic oligonucleotide
guccuggcagaaauaggcu

SEQ ID NO: 593421 - RNA, 19 nt, Artificial Sequence
  Description of Artificial Sequence: Synthetic oligonucleotide
ucucagcgauagcgucgaa

SEQ ID NO: 593422 - RNA, 19 nt, Artificial Sequence
  Description of Artificial Sequence: Synthetic oligonucleotide
cacgucucgcggcaagucu

SEQ ID NO: 593423 - RNA, 19 nt, Artificial Sequence
  Description of Artificial Sequence: Synthetic oligonucleotide
cgagcgaccuucaguggug

SEQ ID NO: 593424 - RNA, 19 nt, Artificial Sequence
  Description of Artificial Sequence: Synthetic oligonucleotide
gcuccguguagagugucuc

SEQ ID NO: 593425 - RNA, 19 nt, Artificial Sequence
  Description of Artificial Sequence: Synthetic oligonucleotide
gcaccgacuggccugugua

SEQ ID NO: 593426 - RNA, 19 nt, Artificial Sequence
  Description of Artificial Sequence: Synthetic oligonucleotide
gcgauagcgucgaaaauau

SEQ ID NO: 593427 - RNA, 19 nt, Artificial Sequence
  Description of Artificial Sequence: Synthetic oligonucleotide
aggucgcccucgaagguuu

SEQ ID NO: 593428 - RNA, 19 nt, Artificial Sequence
  Description of Artificial Sequence: Synthetic oligonucleotide
gguaaccauccgagcgacc

SEQ ID NO: 593429 - RNA, 19 nt, Artificial Sequence
  Description of Artificial Sequence: Synthetic oligonucleotide
gugcuccgcgacaccaaac

SEQ ID NO: 593430 - RNA, 19 nt, Artificial Sequence
  Description of Artificial Sequence: Synthetic oligonucleotide
cgugagcggugucaccgcg

SEQ ID NO: 593431 - RNA, 19 nt, Artificial Sequence
  Description of Artificial Sequence: Synthetic oligonucleotide
ggcgcaccauccgugcggc

SEQ ID NO: 593432 - RNA, 19 nt, Artificial Sequence
  Description of Artificial Sequence: Synthetic oligonucleotide
guacuacaccaaggcgcac

SEQ ID NO: 593433 - RNA, 19 nt, Artificial Sequence
  Description of Artificial Sequence: Synthetic oligonucleotide
acacgccaguagaaucggu

SEQ ID NO: 593434 - RNA, 19 nt, Artificial Sequence
  Description of Artificial Sequence: Synthetic oligonucleotide
aucgguccuggcagaaaua

SEQ ID NO: 593435 - RNA, 19 nt, Artificial Sequence
  Description of Artificial Sequence: Synthetic oligonucleotide
cgucgaagggauacccguc

SEQ ID NO: 593436 - RNA, 19 nt, Artificial Sequence
  Description of Artificial Sequence: Synthetic oligonucleotide
ccauccgagcgaccuucag

SEQ ID NO: 593437 - RNA, 19 nt, Artificial Sequence
  Description of Artificial Sequence: Synthetic oligonucleotide
cgcgggugaacgugagcgg

SEQ ID NO: 593438 - RNA, 19 nt, Artificial Sequence
  Description of Artificial Sequence: Synthetic oligonucleotide
gugcuccguguagaguguc

SEQ ID NO: 593439 - RNA, 19 nt, Artificial Sequence
  Description of Artificial Sequence: Synthetic oligonucleotide
gagcggugucaccgcgcuc

SEQ ID NO: 593440 - RNA, 19 nt, Artificial Sequence
  Description of Artificial Sequence: Synthetic oligonucleotide
ccuauccaagcgagugaca

SEQ ID NO: 593441 - RNA, 19 nt, Artificial Sequence
  Description of Artificial Sequence: Synthetic oligonucleotide
cgucaucgaucacgucucg

SEQ ID NO: 593442 - RNA, 19 nt, Artificial Sequence
  Description of Artificial Sequence: Synthetic oligonucleotide
guggcgcaccagcgguaac

SEQ ID NO: 593443 - RNA, 19 nt, Artificial Sequence
  Description of Artificial Sequence: Synthetic oligonucleotide
gaggucgcccucgaagguu

SEQ ID NO: 593444 - RNA, 19 nt, Artificial Sequence
  Description of Artificial Sequence: Synthetic oligonucleotide
ucggcucggguaggacaaa

SEQ ID NO: 593445 - RNA, 19 nt, Artificial Sequence
  Description of Artificial Sequence: Synthetic oligonucleotide
ggauacccgucuccgugcu

SEQ ID NO: 593446 - RNA, 19 nt, Artificial Sequence
  Description of Artificial Sequence: Synthetic oligonucleotide
gccgaacucgugagcugcc

SEQ ID NO: 593447 - RNA, 19 nt, Artificial Sequence
  Description of Artificial Sequence: Synthetic oligonucleotide
ccucgcgggaggagcccgg

SEQ ID NO: 593448 - RNA, 19 nt, Artificial Sequence
  Description of Artificial Sequence: Synthetic oligonucleotide
ccgucgaagggauacccgu

SEQ ID NO: 593449 - RNA, 19 nt, Artificial Sequence
  Description of Artificial Sequence: Synthetic oligonucleotide
accgcgcuccacaccgcga

SEQ ID NO: 593450 - RNA, 19 nt, Artificial Sequence
  Description of Artificial Sequence: Synthetic oligonucleotide
caaaagccguagagcuuau

SEQ ID NO: 593451 - RNA, 19 nt, Artificial Sequence
  Description of Artificial Sequence: Synthetic oligonucleotide
cgauagcgucgaaaauauc

SEQ ID NO: 593452 - RNA, 19 nt, Artificial Sequence
  Description of Artificial Sequence: Synthetic oligonucleotide
cagcgauagcgucgaaaau

SEQ ID NO: 593453 - RNA, 19 nt, Artificial Sequence
  Description of Artificial Sequence: Synthetic oligonucleotide
ggagcccggagaucugggu

SEQ ID NO: 593454 - RNA, 19 nt, Artificial Sequence
  Description of Artificial Sequence: Synthetic oligonucleotide
caccgcgaaggcgcgggca

SEQ ID NO: 593455 - RNA, 19 nt, Artificial Sequence
  Description of Artificial Sequence: Synthetic oligonucleotide
cgguaaccauccgagcgac

SEQ ID NO: 593456 - RNA, 19 nt, Artificial Sequence
  Description of Artificial Sequence: Synthetic oligonucleotide
ccgaccguccuugaagaaa

SEQ ID NO: 593457 - RNA, 19 nt, Artificial Sequence
  Description of Artificial Sequence: Synthetic oligonucleotide
ggucggugucguagucggc

SEQ ID NO: 593458 - RNA, 19 nt, Artificial Sequence
  Description of Artificial Sequence: Synthetic oligonucleotide
cccgccgccucgcgggagg

SEQ ID NO: 593459 - RNA, 19 nt, Artificial Sequence
  Description of Artificial Sequence: Synthetic oligonucleotide
cgucucgcggcaagucuuc

SEQ ID NO: 593460 - RNA, 19 nt, Artificial Sequence
  Description of Artificial Sequence: Synthetic oligonucleotide
gaccguccuugccgucgaa

SEQ ID NO: 593461 - RNA, 19 nt, Artificial Sequence
  Description of Artificial Sequence: Synthetic oligonucleotide
cacgacgccuuugcccaaa

SEQ ID NO: 593462 - RNA, 19 nt, Artificial Sequence
  Description of Artificial Sequence: Synthetic oligonucleotide
cgcugguacagguggagua

SEQ ID NO: 593463 - RNA, 19 nt, Artificial Sequence
  Description of Artificial Sequence: Synthetic oligonucleotide
ccgagcgaccuucaguggu

SEQ ID NO: 593464 - RNA, 19 nt, Artificial Sequence
  Description of Artificial Sequence: Synthetic oligonucleotide
agcccucaaggaagcgaua

SEQ ID NO: 593465 - RNA, 19 nt, Artificial Sequence
  Description of Artificial Sequence: Synthetic oligonucleotide
cgggcaaaggcgucaucga

SEQ ID NO: 593466 - RNA, 19 nt, Artificial Sequence
  Description of Artificial Sequence: Synthetic oligonucleotide
ggguuaccucugagccuag

SEQ ID NO: 593467 - RNA, 19 nt, Artificial Sequence
  Description of Artificial Sequence: Synthetic oligonucleotide
gcgggugaacgugagcggu

SEQ ID NO: 593468 - RNA, 19 nt, Artificial Sequence
  Description of Artificial Sequence: Synthetic oligonucleotide
uggccacgugcgggcaaua

SEQ ID NO: 593469 - RNA, 19 nt, Artificial Sequence
  Description of Artificial Sequence: Synthetic oligonucleotide
ggucgcccucgaagguuug

SEQ ID NO: 593470 - RNA, 19 nt, Artificial Sequence
  Description of Artificial Sequence: Synthetic oligonucleotide
gcaagccaaauaggagcgu

SEQ ID NO: 593471 - RNA, 19 nt, Artificial Sequence
  Description of Artificial Sequence: Synthetic oligonucleotide
ggccguacacgcgggugaa

SEQ ID NO: 593472 - RNA, 19 nt, Artificial Sequence
  Description of Artificial Sequence: Synthetic oligonucleotide
ggccacgugcgggcaauaa

SEQ ID NO: 593473 - RNA, 19 nt, Artificial Sequence
  Description of Artificial Sequence: Synthetic oligonucleotide
aucggcccucaaagaugaa

SEQ ID NO: 593474 - RNA, 19 nt, Artificial Sequence
  Description of Artificial Sequence: Synthetic oligonucleotide
ggugcacgaauggccucua

SEQ ID NO: 593475 - RNA, 19 nt, Artificial Sequence
  Description of Artificial Sequence: Synthetic oligonucleotide
ccgaacucgugagcugcca

SEQ ID NO: 593476 - RNA, 19 nt, Artificial Sequence
  Description of Artificial Sequence: Synthetic oligonucleotide
gccguacacgcgggugaac

SEQ ID NO: 593477 - RNA, 19 nt, Artificial Sequence
  Description of Artificial Sequence: Synthetic oligonucleotide
caguagcgucggcucgggu

SEQ ID NO: 593478 - RNA, 19 nt, Artificial Sequence
  Description of Artificial Sequence: Synthetic oligonucleotide
cguacacgcgggugaacgu

SEQ ID NO: 593479 - RNA, 19 nt, Artificial Sequence
  Description of Artificial Sequence: Synthetic oligonucleotide
cucggcgauucaggaacuu

SEQ ID NO: 593480 - RNA, 19 nt, Artificial Sequence
  Description of Artificial Sequence: Synthetic oligonucleotide
ccucggcgauucaggaacu

SEQ ID NO: 593481 - RNA, 19 nt, Artificial Sequence
  Description of Artificial Sequence: Synthetic oligonucleotide
cuacaccaaggcgcaccau

SEQ ID NO: 593482 - RNA, 19 nt, Artificial Sequence
  Description of Artificial Sequence: Synthetic oligonucleotide
ccauugccgugcuccgugu

SEQ ID NO: 593483 - RNA, 19 nt, Artificial Sequence
  Description of Artificial Sequence: Synthetic oligonucleotide
gccgugcuccguguagagu

SEQ ID NO: 593484 - RNA, 19 nt, Artificial Sequence
  Description of Artificial Sequence: Synthetic oligonucleotide
cgugcuccguguagagugu

SEQ ID NO: 593485 - RNA, 19 nt, Artificial Sequence
  Description of Artificial Sequence: Synthetic oligonucleotide
gcgugcgccagaagaccgu

SEQ ID NO: 593486 - RNA, 19 nt, Artificial Sequence
  Description of Artificial Sequence: Synthetic oligonucleotide
cgucgaaaauauccacguu

SEQ ID NO: 593487 - RNA, 19 nt, Artificial Sequence
  Description of Artificial Sequence: Synthetic oligonucleotide
cguagucggcugugguacu

SEQ ID NO: 593488 - RNA, 19 nt, Artificial Sequence
  Description of Artificial Sequence: Synthetic oligonucleotide
gcgccagaagaccguccuu

SEQ ID NO: 593489 - RNA, 19 nt, Artificial Sequence
  Description of Artificial Sequence: Synthetic oligonucleotide
gcgcaccagcgguaaccau

SEQ ID NO: 593490 - RNA, 19 nt, Artificial Sequence
  Description of Artificial Sequence: Synthetic oligonucleotide
cgaggccguacacgcgggu

SEQ ID NO: 593491 - RNA, 19 nt, Artificial Sequence
  Description of Artificial Sequence: Synthetic oligonucleotide
ccgcgacaccaaacugaau

SEQ ID NO: 593492 - RNA, 19 nt, Artificial Sequence
  Description of Artificial Sequence: Synthetic oligonucleotide
ccacagcguggugcacgaa

SEQ ID NO: 593493 - RNA, 19 nt, Artificial Sequence
  Description of Artificial Sequence: Synthetic oligonucleotide
uuuagagugguccagggag

SEQ ID NO: 593494 - RNA, 19 nt, Artificial Sequence
  Description of Artificial Sequence: Synthetic oligonucleotide
cuuaucacgagcuacguag

SEQ ID NO: 593495 - RNA, 19 nt, Artificial Sequence
  Description of Artificial Sequence: Synthetic oligonucleotide
aauggcucugggcugaggc

SEQ ID NO: 593496 - RNA, 19 nt, Artificial Sequence
  Description of Artificial Sequence: Synthetic oligonucleotide
acggcgaaacacuugaucc

SEQ ID NO: 593497 - RNA, 19 nt, Artificial Sequence
  Description of Artificial Sequence: Synthetic oligonucleotide
acugacaugacuugggguc

SEQ ID NO: 593498 - RNA, 19 nt, Artificial Sequence
  Description of Artificial Sequence: Synthetic oligonucleotide
aguguaaugacuucuguga

SEQ ID NO: 593499 - RNA, 19 nt, Artificial Sequence
  Description of Artificial Sequence: Synthetic oligonucleotide
ugaugaaugcgaaagugug

SEQ ID NO: 593500 - RNA, 19 nt, Artificial Sequence
  Description of Artificial Sequence: Synthetic oligonucleotide
gauacaauuguugacugcc

SEQ ID NO: 593501 - RNA, 19 nt, Artificial Sequence
  Description of Artificial Sequence: Synthetic oligonucleotide
uguggcaacagaaggaggc

SEQ ID NO: 593502 - RNA, 19 nt, Artificial Sequence
  Description of Artificial Sequence: Synthetic oligonucleotide
auuaaucacaucuacccca

SEQ ID NO: 593503 - RNA, 19 nt, Artificial Sequence
  Description of Artificial Sequence: Synthetic oligonucleotide
uuauuagugauaucaguac

SEQ ID NO: 593504 - RNA, 19 nt, Artificial Sequence
  Description of Artificial Sequence: Synthetic oligonucleotide
aguaguagguuccugaggu

SEQ ID NO: 593505 - RNA, 19 nt, Artificial Sequence
  Description of Artificial Sequence: Synthetic oligonucleotide
gaaugugaggccuaggaac

SEQ ID NO: 593506 - RNA, 19 nt, Artificial Sequence
  Description of Artificial Sequence: Synthetic oligonucleotide
uguaagauggugagaguag

SEQ ID NO: 593507 - RNA, 19 nt, Artificial Sequence
  Description of Artificial Sequence: Synthetic oligonucleotide
uugagggaaccccacagcg

SEQ ID NO: 593508 - RNA, 19 nt, Artificial Sequence
  Description of Artificial Sequence: Synthetic oligonucleotide
uguuccgcaugccaaauag

SEQ ID NO: 593509 - RNA, 19 nt, Artificial Sequence
  Description of Artificial Sequence: Synthetic oligonucleotide
ucggaauccgucucgaagg

SEQ ID NO: 593510 - RNA, 19 nt, Artificial Sequence
  Description of Artificial Sequence: Synthetic oligonucleotide
uggaguuucccacaggaca

SEQ ID NO: 593511 - RNA, 19 nt, Artificial Sequence
  Description of Artificial Sequence: Synthetic oligonucleotide
agguaauagacuuggaacu

SEQ ID NO: 593512 - RNA, 19 nt, Artificial Sequence
  Description of Artificial Sequence: Synthetic oligonucleotide
ugaugaucaagccgggucc

SEQ ID NO: 593513 - RNA, 19 nt, Artificial Sequence
  Description of Artificial Sequence: Synthetic oligonucleotide
caaacagcgagcauugcgc

SEQ ID NO: 593514 - RNA, 19 nt, Artificial Sequence
  Description of Artificial Sequence: Synthetic oligonucleotide
guccauuuaccaaacagcg

SEQ ID NO: 593515 - RNA, 19 nt, Artificial Sequence
  Description of Artificial Sequence: Synthetic oligonucleotide
agcauugcgccguucagac

SEQ ID NO: 593516 - RNA, 19 nt, Artificial Sequence
  Description of Artificial Sequence: Synthetic oligonucleotide
ggaacgagcauccagacac

SEQ ID NO: 593517 - RNA, 19 nt, Artificial Sequence
  Description of Artificial Sequence: Synthetic oligonucleotide
ugcgaaagugugcacaucu

SEQ ID NO: 593518 - RNA, 19 nt, Artificial Sequence
  Description of Artificial Sequence: Synthetic oligonucleotide
aaauaggaggcuagcacuc

SEQ ID NO: 593519 - RNA, 19 nt, Artificial Sequence
  Description of Artificial Sequence: Synthetic oligonucleotide
uuccgcaugccaaauagga

SEQ ID NO: 593520 - RNA, 19 nt, Artificial Sequence
  Description of Artificial Sequence: Synthetic oligonucleotide
uuaucacgagcuacguagg

SEQ ID NO: 593521 - RNA, 19 nt, Artificial Sequence
  Description of Artificial Sequence: Synthetic oligonucleotide
agcacucuugcuauguucc

SEQ ID NO: 593522 - RNA, 19 nt, Artificial Sequence
  Description of Artificial Sequence: Synthetic oligonucleotide
cacaaguuuagaguggucc

SEQ ID NO: 593523 - RNA, 19 nt, Artificial Sequence
  Description of Artificial Sequence: Synthetic oligonucleotide
ucugggaacgagcauccag

SEQ ID NO: 593524 - RNA, 19 nt, Artificial Sequence
  Description of Artificial Sequence: Synthetic oligonucleotide
cauuaaucacaucuacccc

SEQ ID NO: 593525 - RNA, 19 nt, Artificial Sequence
  Description of Artificial Sequence: Synthetic oligonucleotide
ugacggauacaauuguuga

SEQ ID NO: 593526 - RNA, 19 nt, Artificial Sequence
  Description of Artificial Sequence: Synthetic oligonucleotide
ugcacagccucugagaggc

SEQ ID NO: 593527 - RNA, 19 nt, Artificial Sequence
  Description of Artificial Sequence: Synthetic oligonucleotide
aaugcgaaagugugcacau

SEQ ID NO: 593528 - RNA, 19 nt, Artificial Sequence
  Description of Artificial Sequence: Synthetic oligonucleotide
ucugugaaugaauucaauu

SEQ ID NO: 593529 - RNA, 19 nt, Artificial Sequence
  Description of Artificial Sequence: Synthetic oligonucleotide
uaauagacuuggaacuucu

SEQ ID NO: 593530 - RNA, 19 nt, Artificial Sequence
  Description of Artificial Sequence: Synthetic oligonucleotide
ugcauuggcauuccguugu

SEQ ID NO: 593531 - RNA, 19 nt, Artificial Sequence
  Description of Artificial Sequence: Synthetic oligonucleotide
agagcguacggcgaaacac

SEQ ID NO: 593532 - RNA, 19 nt, Artificial Sequence
  Description of Artificial Sequence: Synthetic oligonucleotide
gaaagggacauccacaagu

SEQ ID NO: 593533 - RNA, 19 nt, Artificial Sequence
  Description of Artificial Sequence: Synthetic oligonucleotide
aucggaauccgucucgaag

SEQ ID NO: 593534 - RNA, 19 nt, Artificial Sequence
  Description of Artificial Sequence: Synthetic oligonucleotide
augggaguucuucaugggg

SEQ ID NO: 593535 - RNA, 19 nt, Artificial Sequence
  Description of Artificial Sequence: Synthetic oligonucleotide
agagcugacggauacaauu

SEQ ID NO: 593536 - RNA, 19 nt, Artificial Sequence
  Description of Artificial Sequence: Synthetic oligonucleotide
uaccaaacagcgagcauug

SEQ ID NO: 593537 - RNA, 19 nt, Artificial Sequence
  Description of Artificial Sequence: Synthetic oligonucleotide
cuucuuggugagcaaagcc

SEQ ID NO: 593538 - RNA, 19 nt, Artificial Sequence
  Description of Artificial Sequence: Synthetic oligonucleotide
auugggcucgcaccaaaac

SEQ ID NO: 593539 - RNA, 19 nt, Artificial Sequence
  Description of Artificial Sequence: Synthetic oligonucleotide
cucgcaccaaaacaugugg

SEQ ID NO: 593540 - RNA, 19 nt, Artificial Sequence
  Description of Artificial Sequence: Synthetic oligonucleotide
uccgacacuccccaggggc

SEQ ID NO: 593541 - RNA, 19 nt, Artificial Sequence
  Description of Artificial Sequence: Synthetic oligonucleotide
cugacggauacaauuguug

SEQ ID NO: 593542 - RNA, 19 nt, Artificial Sequence
  Description of Artificial Sequence: Synthetic oligonucleotide
aaugugaggccuaggaaca

SEQ ID NO: 593543 - RNA, 19 nt, Artificial Sequence
  Description of Artificial Sequence: Synthetic oligonucleotide
aacagcgagcauugcgccg

SEQ ID NO: 593544 - RNA, 19 nt, Artificial Sequence
  Description of Artificial Sequence: Synthetic oligonucleotide
cuuuagugucucaucuucc

SEQ ID NO: 593545 - RNA, 19 nt, Artificial Sequence
  Description of Artificial Sequence: Synthetic oligonucleotide
uuaaucacaucuaccccaa

SEQ ID NO: 593546 - RNA, 19 nt, Artificial Sequence
  Description of Artificial Sequence: Synthetic oligonucleotide
uaagauggugagaguagca

SEQ ID NO: 593547 - RNA, 19 nt, Artificial Sequence
  Description of Artificial Sequence: Synthetic oligonucleotide
gugguaggagagcugacgg

SEQ ID NO: 593548 - RNA, 19 nt, Artificial Sequence
  Description of Artificial Sequence: Synthetic oligonucleotide
acaaguuuagaguggucca

SEQ ID NO: 593549 - RNA, 19 nt, Artificial Sequence
  Description of Artificial Sequence: Synthetic oligonucleotide
uccaguguaaugacuucug

SEQ ID NO: 593550 - RNA, 19 nt, Artificial Sequence
  Description of Artificial Sequence: Synthetic oligonucleotide
uugggcucgcaccaaaaca

SEQ ID NO: 593551 - RNA, 19 nt, Artificial Sequence
  Description of Artificial Sequence: Synthetic oligonucleotide
gaugggaguucuucauggg

SEQ ID NO: 593552 - RNA, 19 nt, Artificial Sequence
  Description of Artificial Sequence: Synthetic oligonucleotide
acuuccgacacuccccagg

SEQ ID NO: 593553 - RNA, 19 nt, Artificial Sequence
  Description of Artificial Sequence: Synthetic oligonucleotide
aguacccaacuccauuggg

SEQ ID NO: 593554 - RNA, 19 nt, Artificial Sequence
  Description of Artificial Sequence: Synthetic oligonucleotide
augaaugcgaaagugugca

SEQ ID NO: 593555 - RNA, 19 nt, Artificial Sequence
  Description of Artificial Sequence: Synthetic oligonucleotide
ucaucaguccaguguaaug

SEQ ID NO: 593556 - RNA, 19 nt, Artificial Sequence
  Description of Artificial Sequence: Synthetic oligonucleotide
ucuugaguucccuggggcc

SEQ ID NO: 593557 - RNA, 19 nt, Artificial Sequence
  Description of Artificial Sequence: Synthetic oligonucleotide
gaugaaugcgaaagugugc

SEQ ID NO: 593558 - RNA, 19 nt, Artificial Sequence
  Description of Artificial Sequence: Synthetic oligonucleotide
ugcugguguaagaugguga

SEQ ID NO: 593559 - RNA, 19 nt, Artificial Sequence
  Description of Artificial Sequence: Synthetic oligonucleotide
uccgcaugccaaauaggag

SEQ ID NO: 593560 - RNA, 19 nt, Artificial Sequence
  Description of Artificial Sequence: Synthetic oligonucleotide
uuguugacugccacacugc

SEQ ID NO: 593561 - RNA, 19 nt, Artificial Sequence
  Description of Artificial Sequence: Synthetic oligonucleotide
cacacgaaugcugacaaug

SEQ ID NO: 593562 - RNA, 19 nt, Artificial Sequence
  Description of Artificial Sequence: Synthetic oligonucleotide
gacggauacaauuguugac

SEQ ID NO: 593563 - RNA, 19 nt, Artificial Sequence
  Description of Artificial Sequence: Synthetic oligonucleotide
ucagcuuaucacgagcuac

SEQ ID NO: 593564 - RNA, 19 nt, Artificial Sequence
  Description of Artificial Sequence: Synthetic oligonucleotide
uuagagugguccagggaga

SEQ ID NO: 593565 - RNA, 19 nt, Artificial Sequence
  Description of Artificial Sequence: Synthetic oligonucleotide
uggugagaguagcaggagc

SEQ ID NO: 593566 - RNA, 19 nt, Artificial Sequence
  Description of Artificial Sequence: Synthetic oligonucleotide
ggagaggggauccaugccg

SEQ ID NO: 593567 - RNA, 19 nt, Artificial Sequence
  Description of Artificial Sequence: Synthetic oligonucleotide
ugggcucgcaccaaaacau

SEQ ID NO: 593568 - RNA, 19 nt, Artificial Sequence
  Description of Artificial Sequence: Synthetic oligonucleotide
ucacgagcuacguaggcaa

SEQ ID NO: 593569 - RNA, 19 nt, Artificial Sequence
  Description of Artificial Sequence: Synthetic oligonucleotide
uccugagguguccuggacc

SEQ ID NO: 593570 - RNA, 19 nt, Artificial Sequence
  Description of Artificial Sequence: Synthetic oligonucleotide
agggcaauguccccucuuc

SEQ ID NO: 593571 - RNA, 19 nt, Artificial Sequence
  Description of Artificial Sequence: Synthetic oligonucleotide
uggcauuccguuguggcag

SEQ ID NO: 593572 - RNA, 19 nt, Artificial Sequence
  Description of Artificial Sequence: Synthetic oligonucleotide
uaucacgagcuacguaggc

SEQ ID NO: 593573 - RNA, 19 nt, Artificial Sequence
  Description of Artificial Sequence: Synthetic oligonucleotide
auuuaccaaacagcgagca

SEQ ID NO: 593574 - RNA, 19 nt, Artificial Sequence
  Description of Artificial Sequence: Synthetic oligonucleotide
ucgcaccaaaacauguggc

SEQ ID NO: 593575 - RNA, 19 nt, Artificial Sequence
  Description of Artificial Sequence: Synthetic oligonucleotide
gauggugagaguagcagga

SEQ ID NO: 593576 - RNA, 19 nt, Artificial Sequence
  Description of Artificial Sequence: Synthetic oligonucleotide
uacggcgaaacacuugauc

SEQ ID NO: 593577 - RNA, 19 nt, Artificial Sequence
  Description of Artificial Sequence: Synthetic oligonucleotide
gauaucaguacaguggagu

SEQ ID NO: 593578 - RNA, 19 nt, Artificial Sequence
  Description of Artificial Sequence: Synthetic oligonucleotide
uguugacugccacacugcu

SEQ ID NO: 593579 - RNA, 19 nt, Artificial Sequence
  Description of Artificial Sequence: Synthetic oligonucleotide
uagggaaccccagcuaccg

SEQ ID NO: 593580 - RNA, 19 nt, Artificial Sequence
  Description of Artificial Sequence: Synthetic oligonucleotide
agggagaguccauuuacca

SEQ ID NO: 593581 - RNA, 19 nt, Artificial Sequence
  Description of Artificial Sequence: Synthetic oligonucleotide
aggaggggacuuccgacac

SEQ ID NO: 593582 - RNA, 19 nt, Artificial Sequence
  Description of Artificial Sequence: Synthetic oligonucleotide
cuuccgacacuccccaggg

SEQ ID NO: 593583 - RNA, 19 nt, Artificial Sequence
  Description of Artificial Sequence: Synthetic oligonucleotide
ggauccuagacguuugggc

SEQ ID NO: 593584 - RNA, 19 nt, Artificial Sequence
  Description of Artificial Sequence: Synthetic oligonucleotide
gaggcuagcacucuugcua

SEQ ID NO: 593585 - RNA, 19 nt, Artificial Sequence
  Description of Artificial Sequence: Synthetic oligonucleotide
uucaguacccaacuccauu

SEQ ID NO: 593586 - RNA, 19 nt, Artificial Sequence
  Description of Artificial Sequence: Synthetic oligonucleotide
guaagauggugagaguagc

SEQ ID NO: 593587 - RNA, 19 nt, Artificial Sequence
  Description of Artificial Sequence: Synthetic oligonucleotide
auaucaguacaguggaguu

SEQ ID NO: 593588 - RNA, 19 nt, Artificial Sequence
  Description of Artificial Sequence: Synthetic oligonucleotide
cucuugaguucccuggggc

SEQ ID NO: 593589 - RNA, 19 nt, Artificial Sequence
  Description of Artificial Sequence: Synthetic oligonucleotide
agccaagagagcguacggc

SEQ ID NO: 593590 - RNA, 19 nt, Artificial Sequence
  Description of Artificial Sequence: Synthetic oligonucleotide
aacaccccugcggacaguc

SEQ ID NO: 593591 - RNA, 19 nt, Artificial Sequence
  Description of Artificial Sequence: Synthetic oligonucleotide
acagcgacugaacaccccu

SEQ ID NO: 593592 - RNA, 19 nt, Artificial Sequence
  Description of Artificial Sequence: Synthetic oligonucleotide
ugggccggcagccaugaug

SEQ ID NO: 593593 - RNA, 19 nt, Artificial Sequence
  Description of Artificial Sequence: Synthetic oligonucleotide
gaaugcgaaagugugcaca

SEQ ID NO: 593594 - RNA, 19 nt, Artificial Sequence
  Description of Artificial Sequence: Synthetic oligonucleotide
acacuugaucccugcauug

SEQ ID NO: 593595 - RNA, 19 nt, Artificial Sequence
  Description of Artificial Sequence: Synthetic oligonucleotide
ccgcaugccaaauaggagg

SEQ ID NO: 593596 - RNA, 19 nt, Artificial Sequence
  Description of Artificial Sequence: Synthetic oligonucleotide
caugccgacaccagucccc

SEQ ID NO: 593597 - RNA, 19 nt, Artificial Sequence
  Description of Artificial Sequence: Synthetic oligonucleotide
aggacugacuccagggccc

SEQ ID NO: 593598 - RNA, 19 nt, Artificial Sequence
  Description of Artificial Sequence: Synthetic oligonucleotide
cuugagggaaccccacagc

SEQ ID NO: 593599 - RNA, 19 nt, Artificial Sequence
  Description of Artificial Sequence: Synthetic oligonucleotide
gccaagagagcguacggcg

SEQ ID NO: 593600 - RNA, 19 nt, Artificial Sequence
  Description of Artificial Sequence: Synthetic oligonucleotide
uccaugccgacaccagucc

SEQ ID NO: 593601 - RNA, 19 nt, Artificial Sequence
  Description of Artificial Sequence: Synthetic oligonucleotide
caccaaaacauguggcaac

SEQ ID NO: 593602 - RNA, 19 nt, Artificial Sequence
  Description of Artificial Sequence: Synthetic oligonucleotide
uucauggggucugggaucc

SEQ ID NO: 593603 - RNA, 19 nt, Artificial Sequence
  Description of Artificial Sequence: Synthetic oligonucleotide
uuggcauuccguuguggca

SEQ ID NO: 593604 - RNA, 19 nt, Artificial Sequence
  Description of Artificial Sequence: Synthetic oligonucleotide
ucuaccccaacagguuugg

SEQ ID NO: 593605 - RNA, 19 nt, Artificial Sequence
  Description of Artificial Sequence: Synthetic oligonucleotide
ugugauaagguggcccagc

SEQ ID NO: 593606 - RNA, 19 nt, Artificial Sequence
  Description of Artificial Sequence: Synthetic oligonucleotide
uguugggaugugccaguag

SEQ ID NO: 593607 - RNA, 19 nt, Artificial Sequence
  Description of Artificial Sequence: Synthetic oligonucleotide
gagcugacggauacaauug

SEQ ID NO: 593608 - RNA, 19 nt, Artificial Sequence
  Description of Artificial Sequence: Synthetic oligonucleotide
gcugguguaagauggugag

SEQ ID NO: 593609 - RNA, 19 nt, Artificial Sequence
  Description of Artificial Sequence: Synthetic oligonucleotide
ugguagcggagcaugcaug

SEQ ID NO: 593610 - RNA, 19 nt, Artificial Sequence
  Description of Artificial Sequence: Synthetic oligonucleotide
acgccccacacacgaaugc

SEQ ID NO: 593611 - RNA, 19 nt, Artificial Sequence
  Description of Artificial Sequence: Synthetic oligonucleotide
caucaguccaguguaauga

SEQ ID NO: 593612 - RNA, 19 nt, Artificial Sequence
  Description of Artificial Sequence: Synthetic oligonucleotide
acguaggcaaagucccuuc

SEQ ID NO: 593613 - RNA, 19 nt, Artificial Sequence
  Description of Artificial Sequence: Synthetic oligonucleotide
gacacuucugguagcggag

SEQ ID NO: 593614 - RNA, 19 nt, Artificial Sequence
  Description of Artificial Sequence: Synthetic oligonucleotide
cagaucggaauccgucucg

SEQ ID NO: 593615 - RNA, 19 nt, Artificial Sequence
  Description of Artificial Sequence: Synthetic oligonucleotide
cagggagaguccauuuacc

SEQ ID NO: 593616 - RNA, 19 nt, Artificial Sequence
  Description of Artificial Sequence: Synthetic oligonucleotide
ggugagaguagcaggagcc

SEQ ID NO: 593617 - RNA, 19 nt, Artificial Sequence
  Description of Artificial Sequence: Synthetic oligonucleotide
caaguuuagagugguccag

SEQ ID NO: 593618 - RNA, 19 nt, Artificial Sequence
  Description of Artificial Sequence: Synthetic oligonucleotide
gcuacguaggcaaaguccc

SEQ ID NO: 593619 - RNA, 19 nt, Artificial Sequence
  Description of Artificial Sequence: Synthetic oligonucleotide
aaagggacauccacaaguu

SEQ ID NO: 593620 - RNA, 19 nt, Artificial Sequence
  Description of Artificial Sequence: Synthetic oligonucleotide
aggugccucacagcgaaac

SEQ ID NO: 593621 - RNA, 19 nt, Artificial Sequence
  Description of Artificial Sequence: Synthetic oligonucleotide
gaucuuggagcagaucuca

SEQ ID NO: 593622 - RNA, 19 nt, Artificial Sequence
  Description of Artificial Sequence: Synthetic oligonucleotide
gaaacacuugaucccugca

SEQ ID NO: 593623 - RNA, 19 nt, Artificial Sequence
  Description of Artificial Sequence: Synthetic oligonucleotide
uccgucucgaaggcguugg

SEQ ID NO: 593624 - RNA, 19 nt, Artificial Sequence
  Description of Artificial Sequence: Synthetic oligonucleotide
ccaaacagcgagcauugcg

SEQ ID NO: 593625 - RNA, 19 nt, Artificial Sequence
  Description of Artificial Sequence: Synthetic oligonucleotide
cauucuuaggugcugggaa

SEQ ID NO: 593626 - RNA, 19 nt, Artificial Sequence
  Description of Artificial Sequence: Synthetic oligonucleotide
agacauugggucauguaga

SEQ ID NO: 593627 - RNA, 19 nt, Artificial Sequence
  Description of Artificial Sequence: Synthetic oligonucleotide
augacuugggguccacugu

SEQ ID NO: 593628 - RNA, 19 nt, Artificial Sequence
  Description of Artificial Sequence: Synthetic oligonucleotide
auccuacacgucuggcaac

SEQ ID NO: 593629 - RNA, 19 nt, Artificial Sequence
  Description of Artificial Sequence: Synthetic oligonucleotide
cagcgcuuggcucuguggc

SEQ ID NO: 593630 - RNA, 19 nt, Artificial Sequence
  Description of Artificial Sequence: Synthetic oligonucleotide
uagcacucuugcuauguuc

SEQ ID NO: 593631 - RNA, 19 nt, Artificial Sequence
  Description of Artificial Sequence: Synthetic oligonucleotide
guaccagcucauucuuagg

SEQ ID NO: 593632 - RNA, 19 nt, Artificial Sequence
  Description of Artificial Sequence: Synthetic oligonucleotide
cugggaacgagcauccaga

SEQ ID NO: 593633 - RNA, 19 nt, Artificial Sequence
  Description of Artificial Sequence: Synthetic oligonucleotide
gacguuugggcuugaggga

SEQ ID NO: 593634 - RNA, 19 nt, Artificial Sequence
  Description of Artificial Sequence: Synthetic oligonucleotide
ucugggauccuagacguuu

SEQ ID NO: 593635 - RNA, 19 nt, Artificial Sequence
  Description of Artificial Sequence: Synthetic oligonucleotide
cugugaaugaauucaauuu

SEQ ID NO: 593636 - RNA, 19 nt, Artificial Sequence
  Description of Artificial Sequence: Synthetic oligonucleotide
agcugacggauacaauugu

SEQ ID NO: 593637 - RNA, 19 nt, Artificial Sequence
  Description of Artificial Sequence: Synthetic oligonucleotide
acauguggcaacagaagga

SEQ ID NO: 593638 - RNA, 19 nt, Artificial Sequence
  Description of Artificial Sequence: Synthetic oligonucleotide
ugacuugggguccacuguu

SEQ ID NO: 593639 - RNA, 19 nt, Artificial Sequence
  Description of Artificial Sequence: Synthetic oligonucleotide
gguagcggagcaugcaugc

SEQ ID NO: 593640 - RNA, 19 nt, Artificial Sequence
  Description of Artificial Sequence: Synthetic oligonucleotide
ugggucagcuuaucacgag

SEQ ID NO: 593641 - RNA, 19 nt, Artificial Sequence
  Description of Artificial Sequence: Synthetic oligonucleotide
uccauuggggccuccucac

SEQ ID NO: 593642 - RNA, 19 nt, Artificial Sequence
  Description of Artificial Sequence: Synthetic oligonucleotide
ggaguuucccacaggacag

SEQ ID NO: 593643 - RNA, 19 nt, Artificial Sequence
  Description of Artificial Sequence: Synthetic oligonucleotide
agagagcguacggcgaaac

SEQ ID NO: 593644 - RNA, 19 nt, Artificial Sequence
  Description of Artificial Sequence: Synthetic oligonucleotide
cacuugaucccugcauugg

SEQ ID NO: 593645 - RNA, 19 nt, Artificial Sequence
  Description of Artificial Sequence: Synthetic oligonucleotide
cacucuugcuauguucccg

SEQ ID NO: 593646 - RNA, 19 nt, Artificial Sequence
  Description of Artificial Sequence: Synthetic oligonucleotide
guaauagacuuggaacuuc

SEQ ID NO: 593647 - RNA, 19 nt, Artificial Sequence
  Description of Artificial Sequence: Synthetic oligonucleotide
cauuggggccuccucacug

SEQ ID NO: 593648 - RNA, 19 nt, Artificial Sequence
  Description of Artificial Sequence: Synthetic oligonucleotide
caacagguacauuccccag

SEQ ID NO: 593649 - RNA, 19 nt, Artificial Sequence
  Description of Artificial Sequence: Synthetic oligonucleotide
auccacaaguuuagagugg

SEQ ID NO: 593650 - RNA, 19 nt, Artificial Sequence
  Description of Artificial Sequence: Synthetic oligonucleotide
gaucccugcauuggcauuc

SEQ ID NO: 593651 - RNA, 19 nt, Artificial Sequence
  Description of Artificial Sequence: Synthetic oligonucleotide
uccccagguaauagacuug

SEQ ID NO: 593652 - RNA, 19 nt, Artificial Sequence
  Description of Artificial Sequence: Synthetic oligonucleotide
uggggcaauggcucugggc

SEQ ID NO: 593653 - RNA, 19 nt, Artificial Sequence
  Description of Artificial Sequence: Synthetic oligonucleotide
cacgucuggcaacugacuc

SEQ ID NO: 593654 - RNA, 19 nt, Artificial Sequence
  Description of Artificial Sequence: Synthetic oligonucleotide
ugaaugcgaaagugugcac

SEQ ID NO: 593655 - RNA, 19 nt, Artificial Sequence
  Description of Artificial Sequence: Synthetic oligonucleotide
ugggaacgagcauccagac

SEQ ID NO: 593656 - RNA, 19 nt, Artificial Sequence
  Description of Artificial Sequence: Synthetic oligonucleotide
gcuugagggaaccccacag

SEQ ID NO: 593657 - RNA, 19 nt, Artificial Sequence
  Description of Artificial Sequence: Synthetic oligonucleotide
gcagcauugggcucgcacc

SEQ ID NO: 593658 - RNA, 19 nt, Artificial Sequence
  Description of Artificial Sequence: Synthetic oligonucleotide
cugacaugacuuggggucc

SEQ ID NO: 593659 - RNA, 19 nt, Artificial Sequence
  Description of Artificial Sequence: Synthetic oligonucleotide
cauccagccggcagaucgg

SEQ ID NO: 593660 - RNA, 19 nt, Artificial Sequence
  Description of Artificial Sequence: Synthetic oligonucleotide
cacaucuaccccaacaggu

SEQ ID NO: 593661 - RNA, 19 nt, Artificial Sequence
  Description of Artificial Sequence: Synthetic oligonucleotide
cauccuacacgucuggcaa

SEQ ID NO: 593662 - RNA, 19 nt, Artificial Sequence
  Description of Artificial Sequence: Synthetic oligonucleotide
ugucaucaguccaguguaa

SEQ ID NO: 593663 - RNA, 19 nt, Artificial Sequence
  Description of Artificial Sequence: Synthetic oligonucleotide
cagccaagagagcguacgg

SEQ ID NO: 593664 - RNA, 19 nt, Artificial Sequence
  Description of Artificial Sequence: Synthetic oligonucleotide
uggcaacagaaggaggcug

SEQ ID NO: 593665 - RNA, 19 nt, Artificial Sequence
  Description of Artificial Sequence: Synthetic oligonucleotide
gucccuuccacugucccgc

SEQ ID NO: 593666 - RNA, 19 nt, Artificial Sequence
  Description of Artificial Sequence: Synthetic oligonucleotide
guuccgcaugccaaauagg

SEQ ID NO: 593667 - RNA, 19 nt, Artificial Sequence
  Description of Artificial Sequence: Synthetic oligonucleotide
aucacgagcuacguaggca

SEQ ID NO: 593668 - RNA, 19 nt, Artificial Sequence
  Description of Artificial Sequence: Synthetic oligonucleotide
uccuacacgucuggcaacu

SEQ ID NO: 593669 - RNA, 19 nt, Artificial Sequence
  Description of Artificial Sequence: Synthetic oligonucleotide
cugcauuggcauuccguug

SEQ ID NO: 593670 - RNA, 19 nt, Artificial Sequence
  Description of Artificial Sequence: Synthetic oligonucleotide
guguaagauggugagagua

SEQ ID NO: 593671 - RNA, 19 nt, Artificial Sequence
  Description of Artificial Sequence: Synthetic oligonucleotide
uccuagacguuugggcuug

SEQ ID NO: 593672 - RNA, 19 nt, Artificial Sequence
  Description of Artificial Sequence: Synthetic oligonucleotide
cucggcuacuggaggacag

SEQ ID NO: 593673 - RNA, 19 nt, Artificial Sequence
  Description of Artificial Sequence: Synthetic oligonucleotide
ugccaaauaggaggcuagc

SEQ ID NO: 593674 - RNA, 19 nt, Artificial Sequence
  Description of Artificial Sequence: Synthetic oligonucleotide
uuguuccuggguguugaug

SEQ ID NO: 593675 - RNA, 19 nt, Artificial Sequence
  Description of Artificial Sequence: Synthetic oligonucleotide
uuccgacacuccccagggg

SEQ ID NO: 593676 - RNA, 19 nt, Artificial Sequence
  Description of Artificial Sequence: Synthetic oligonucleotide
aggcuagcacucuugcuau

SEQ ID NO: 593677 - RNA, 19 nt, Artificial Sequence
  Description of Artificial Sequence: Synthetic oligonucleotide
ucggcuacuggaggacagg

SEQ ID NO: 593678 - RNA, 19 nt, Artificial Sequence
  Description of Artificial Sequence: Synthetic oligonucleotide
acgagcuacguaggcaaag

SEQ ID NO: 593679 - RNA, 19 nt, Artificial Sequence
  Description of Artificial Sequence: Synthetic oligonucleotide
cagauccuuucccucuccc

SEQ ID NO: 593680 - RNA, 19 nt, Artificial Sequence
  Description of Artificial Sequence: Synthetic oligonucleotide
ucaugcaggcugguggcga

SEQ ID NO: 593681 - RNA, 19 nt, Artificial Sequence
  Description of Artificial Sequence: Synthetic oligonucleotide
cacacacgaaugcugacaa

SEQ ID NO: 593682 - RNA, 19 nt, Artificial Sequence
  Description of Artificial Sequence: Synthetic oligonucleotide
uaaucacaucuaccccaac

SEQ ID NO: 593683 - RNA, 19 nt, Artificial Sequence
  Description of Artificial Sequence: Synthetic oligonucleotide
ugaggccuaggaacaguau

SEQ ID NO: 593684 - RNA, 19 nt, Artificial Sequence
  Description of Artificial Sequence: Synthetic oligonucleotide
gaauccgucucgaaggcgu

SEQ ID NO: 593685 - RNA, 19 nt, Artificial Sequence
  Description of Artificial Sequence: Synthetic oligonucleotide
ucuuaggugcugggaauuc

SEQ ID NO: 593686 - RNA, 19 nt, Artificial Sequence
  Description of Artificial Sequence: Synthetic oligonucleotide
gaaggcguugggguuccag

SEQ ID NO: 593687 - RNA, 19 nt, Artificial Sequence
  Description of Artificial Sequence: Synthetic oligonucleotide
ugauaagguggcccagcuu

SEQ ID NO: 593688 - RNA, 19 nt, Artificial Sequence
  Description of Artificial Sequence: Synthetic oligonucleotide
cauugcgccguucagacau

SEQ ID NO: 593689 - RNA, 19 nt, Artificial Sequence
  Description of Artificial Sequence: Synthetic oligonucleotide
agccggcagaucggaaucc

SEQ ID NO: 593690 - RNA, 19 nt, Artificial Sequence
  Description of Artificial Sequence: Synthetic oligonucleotide
accaaacagcgagcauugc

SEQ ID NO: 593691 - RNA, 19 nt, Artificial Sequence
  Description of Artificial Sequence: Synthetic oligonucleotide
ccagcuaccgaggaggggc

SEQ ID NO: 593692 - RNA, 19 nt, Artificial Sequence
  Description of Artificial Sequence: Synthetic oligonucleotide
gauaaguccuccuccucau

SEQ ID NO: 593693 - RNA, 19 nt, Artificial Sequence
  Description of Artificial Sequence: Synthetic oligonucleotide
auacaauuguugacugcca

SEQ ID NO: 593694 - RNA, 19 nt, Artificial Sequence
  Description of Artificial Sequence: Synthetic oligonucleotide
guagguuccugaggugucc

SEQ ID NO: 593695 - RNA, 19 nt, Artificial Sequence
  Description of Artificial Sequence: Synthetic oligonucleotide
gcagccaugaugaaugcga

SEQ ID NO: 593696 - RNA, 19 nt, Artificial Sequence
  Description of Artificial Sequence: Synthetic oligonucleotide
auccuagacguuugggcuu

SEQ ID NO: 593697 - RNA, 19 nt, Artificial Sequence
  Description of Artificial Sequence: Synthetic oligonucleotide
uugugguaggagagcugac

SEQ ID NO: 593698 - RNA, 19 nt, Artificial Sequence
  Description of Artificial Sequence: Synthetic oligonucleotide
gacauugggucauguagau

SEQ ID NO: 593699 - RNA, 19 nt, Artificial Sequence
  Description of Artificial Sequence: Synthetic oligonucleotide
ucucgaaggcguugggguu

SEQ ID NO: 593700 - RNA, 19 nt, Artificial Sequence
  Description of Artificial Sequence: Synthetic oligonucleotide
aucuaccccaacagguuug

SEQ ID NO: 593701 - RNA, 19 nt, Artificial Sequence
  Description of Artificial Sequence: Synthetic oligonucleotide
cugggucagcuuaucacga

SEQ ID NO: 593702 - RNA, 19 nt, Artificial Sequence
  Description of Artificial Sequence: Synthetic oligonucleotide
guugacugccacacugcug

SEQ ID NO: 593703 - RNA, 19 nt, Artificial Sequence
  Description of Artificial Sequence: Synthetic oligonucleotide
cacuggguggucccuguug

SEQ ID NO: 593704 - RNA, 19 nt, Artificial Sequence
  Description of Artificial Sequence: Synthetic oligonucleotide
agcgcuuggcucuguggcu

SEQ ID NO: 593705 - RNA, 19 nt, Artificial Sequence
  Description of Artificial Sequence: Synthetic oligonucleotide
gagagcguacggcgaaaca

SEQ ID NO: 593706 - RNA, 19 nt, Artificial Sequence
  Description of Artificial Sequence: Synthetic oligonucleotide
auaggaggcuagcacucuu

SEQ ID NO: 593707 - RNA, 19 nt, Artificial Sequence
  Description of Artificial Sequence: Synthetic oligonucleotide
ucccugcauuggcauuccg

SEQ ID NO: 593708 - RNA, 19 nt, Artificial Sequence
  Description of Artificial Sequence: Synthetic oligonucleotide
uacguaggcaaagucccuu

SEQ ID NO: 593709 - RNA, 19 nt, Artificial Sequence
  Description of Artificial Sequence: Synthetic oligonucleotide
gaacaguauccagggcccc

SEQ ID NO: 593710 - RNA, 19 nt, Artificial Sequence
  Description of Artificial Sequence: Synthetic oligonucleotide
agacaugaucuuggagcag

SEQ ID NO: 593711 - RNA, 19 nt, Artificial Sequence
  Description of Artificial Sequence: Synthetic oligonucleotide
ggaaugugaggccuaggaa

SEQ ID NO: 593712 - RNA, 19 nt, Artificial Sequence
  Description of Artificial Sequence: Synthetic oligonucleotide
gagcauugcgccguucaga

SEQ ID NO: 593713 - RNA, 19 nt, Artificial Sequence
  Description of Artificial Sequence: Synthetic oligonucleotide
agaucggaauccgucucga

SEQ ID NO: 593714 - RNA, 19 nt, Artificial Sequence
  Description of Artificial Sequence: Synthetic oligonucleotide
agcuuaucacgagcuacgu

SEQ ID NO: 593715 - RNA, 19 nt, Artificial Sequence
  Description of Artificial Sequence: Synthetic oligonucleotide
gagaggggauccaugccga

SEQ ID NO: 593716 - RNA, 19 nt, Artificial Sequence
  Description of Artificial Sequence: Synthetic oligonucleotide
acguuugggcuugagggaa

SEQ ID NO: 593717 - RNA, 19 nt, Artificial Sequence
  Description of Artificial Sequence: Synthetic oligonucleotide
caggaggggacuuccgaca

SEQ ID NO: 593718 - RNA, 19 nt, Artificial Sequence
  Description of Artificial Sequence: Synthetic oligonucleotide
cagggccccauuaaucaca

SEQ ID NO: 593719 - RNA, 19 nt, Artificial Sequence
  Description of Artificial Sequence: Synthetic oligonucleotide
ucucggcuacuggaggaca

SEQ ID NO: 593720 - RNA, 19 nt, Artificial Sequence
  Description of Artificial Sequence: Synthetic oligonucleotide
augcgaaagugugcacauc

SEQ ID NO: 593721 - RNA, 19 nt, Artificial Sequence
  Description of Artificial Sequence: Synthetic oligonucleotide
ccuucaguacccaacucca

SEQ ID NO: 593722 - RNA, 19 nt, Artificial Sequence
  Description of Artificial Sequence: Synthetic oligonucleotide
acaucuaccccaacagguu

SEQ ID NO: 593723 - RNA, 19 nt, Artificial Sequence
  Description of Artificial Sequence: Synthetic oligonucleotide
ccccauuaaucacaucuac

SEQ ID NO: 593724 - RNA, 19 nt, Artificial Sequence
  Description of Artificial Sequence: Synthetic oligonucleotide
gagaggaaccgcacccgac

SEQ ID NO: 593725 - RNA, 19 nt, Artificial Sequence
  Description of Artificial Sequence: Synthetic oligonucleotide
uccguuguggcagcuucuc

SEQ ID NO: 593726 - RNA, 19 nt, Artificial Sequence
  Description of Artificial Sequence: Synthetic oligonucleotide
auugggucauguagauugu

SEQ ID NO: 593727 - RNA, 19 nt, Artificial Sequence
  Description of Artificial Sequence: Synthetic oligonucleotide
gcgacugaacaccccugcg

SEQ ID NO: 593728 - RNA, 19 nt, Artificial Sequence
  Description of Artificial Sequence: Synthetic oligonucleotide
gggauccuagacguuuggg

SEQ ID NO: 593729 - RNA, 19 nt, Artificial Sequence
  Description of Artificial Sequence: Synthetic oligonucleotide
gaagcagcgcuuggcucug

SEQ ID NO: 593730 - RNA, 19 nt, Artificial Sequence
  Description of Artificial Sequence: Synthetic oligonucleotide
gacuccucuugugggcugc

SEQ ID NO: 593731 - RNA, 19 nt, Artificial Sequence
  Description of Artificial Sequence: Synthetic oligonucleotide
ggucugggauccuagacgu

SEQ ID NO: 593732 - RNA, 19 nt, Artificial Sequence
  Description of Artificial Sequence: Synthetic oligonucleotide
ugaucccugcauuggcauu

SEQ ID NO: 593733 - RNA, 19 nt, Artificial Sequence
  Description of Artificial Sequence: Synthetic oligonucleotide
augugaggccuaggaacag

SEQ ID NO: 593734 - RNA, 19 nt, Artificial Sequence
  Description of Artificial Sequence: Synthetic oligonucleotide
cucgaaggcguugggguuc

SEQ ID NO: 593735 - RNA, 19 nt, Artificial Sequence
  Description of Artificial Sequence: Synthetic oligonucleotide
cgcaugccaaauaggaggc

SEQ ID NO: 593736 - RNA, 19 nt, Artificial Sequence
  Description of Artificial Sequence: Synthetic oligonucleotide
caagagagcguacggcgaa

SEQ ID NO: 593737 - RNA, 19 nt, Artificial Sequence
  Description of Artificial Sequence: Synthetic oligonucleotide
aagagagcguacggcgaaa

SEQ ID NO: 593738 - RNA, 19 nt, Artificial Sequence
  Description of Artificial Sequence: Synthetic oligonucleotide
cagcauugggcucgcacca

SEQ ID NO: 593739 - RNA, 19 nt, Artificial Sequence
  Description of Artificial Sequence: Synthetic oligonucleotide
uccacuguucucggcuacu

SEQ ID NO: 593740 - RNA, 19 nt, Artificial Sequence
  Description of Artificial Sequence: Synthetic oligonucleotide
cuggggcccaacacaagca

SEQ ID NO: 593741 - RNA, 19 nt, Artificial Sequence
  Description of Artificial Sequence: Synthetic oligonucleotide
gacuuccgacacuccccag

SEQ ID NO: 593742 - RNA, 19 nt, Artificial Sequence
  Description of Artificial Sequence: Synthetic oligonucleotide
ggaauccgucucgaaggcg

SEQ ID NO: 593743 - RNA, 19 nt, Artificial Sequence
  Description of Artificial Sequence: Synthetic oligonucleotide
cugugauaagguggcccag

SEQ ID NO: 593744 - RNA, 19 nt, Artificial Sequence
  Description of Artificial Sequence: Synthetic oligonucleotide
accgcacccgacacucccc

SEQ ID NO: 593745 - RNA, 19 nt, Artificial Sequence
  Description of Artificial Sequence: Synthetic oligonucleotide
ccccucaugucaucagucc

SEQ ID NO: 593746 - RNA, 19 nt, Artificial Sequence
  Description of Artificial Sequence: Synthetic oligonucleotide
cgaaacacuugaucccugc

SEQ ID NO: 593747 - RNA, 19 nt, Artificial Sequence
  Description of Artificial Sequence: Synthetic oligonucleotide
ccugugauaagguggccca

SEQ ID NO: 593748 - RNA, 19 nt, Artificial Sequence
  Description of Artificial Sequence: Synthetic oligonucleotide
gcgccguucagacaugauc

SEQ ID NO: 593749 - RNA, 19 nt, Artificial Sequence
  Description of Artificial Sequence: Synthetic oligonucleotide
gcagacagacuuuauuagu

SEQ ID NO: 593750 - RNA, 19 nt, Artificial Sequence
  Description of Artificial Sequence: Synthetic oligonucleotide
ugccaguaguagguuccug

SEQ ID NO: 593751 - RNA, 19 nt, Artificial Sequence
  Description of Artificial Sequence: Synthetic oligonucleotide
gaucggaauccgucucgaa

SEQ ID NO: 593752 - RNA, 19 nt, Artificial Sequence
  Description of Artificial Sequence: Synthetic oligonucleotide
ggacuuccgacacucccca

SEQ ID NO: 593753 - RNA, 19 nt, Artificial Sequence
  Description of Artificial Sequence: Synthetic oligonucleotide
gagcguacggcgaaacacu

SEQ ID NO: 593754 - RNA, 19 nt, Artificial Sequence
  Description of Artificial Sequence: Synthetic oligonucleotide
acacacgaaugcugacaau

SEQ ID NO: 593755 - RNA, 19 nt, Artificial Sequence
  Description of Artificial Sequence: Synthetic oligonucleotide
cuuugaggguggggcuugg

SEQ ID NO: 593756 - RNA, 19 nt, Artificial Sequence
  Description of Artificial Sequence: Synthetic oligonucleotide
gaaccccacagcgacugaa

SEQ ID NO: 593757 - RNA, 19 nt, Artificial Sequence
  Description of Artificial Sequence: Synthetic oligonucleotide
gcaggugccucacagcgaa

SEQ ID NO: 593758 - RNA, 19 nt, Artificial Sequence
  Description of Artificial Sequence: Synthetic oligonucleotide
gcagaucggaauccgucuc

SEQ ID NO: 593759 - RNA, 19 nt, Artificial Sequence
  Description of Artificial Sequence: Synthetic oligonucleotide
ccaggaggggacuuccgac

SEQ ID NO: 593760 - RNA, 19 nt, Artificial Sequence
  Description of Artificial Sequence: Synthetic oligonucleotide
cccugugauaagguggccc

SEQ ID NO: 593761 - RNA, 19 nt, Artificial Sequence
  Description of Artificial Sequence: Synthetic oligonucleotide
cguacggcgaaacacuuga

SEQ ID NO: 593762 - RNA, 19 nt, Artificial Sequence
  Description of Artificial Sequence: Synthetic oligonucleotide
cauugggcucgcaccaaaa

SEQ ID NO: 593763 - RNA, 19 nt, Artificial Sequence
  Description of Artificial Sequence: Synthetic oligonucleotide
gcucgcaccaaaacaugug

SEQ ID NO: 593764 - RNA, 19 nt, Artificial Sequence
  Description of Artificial Sequence: Synthetic oligonucleotide
cgucuggcaacugacuccg

SEQ ID NO: 593765 - RNA, 19 nt, Artificial Sequence
  Description of Artificial Sequence: Synthetic oligonucleotide
acacgucuggcaacugacu

SEQ ID NO: 593766 - RNA, 19 nt, Artificial Sequence
  Description of Artificial Sequence: Synthetic oligonucleotide
gucagcuuaucacgagcua

SEQ ID NO: 593767 - RNA, 19 nt, Artificial Sequence
  Description of Artificial Sequence: Synthetic oligonucleotide
ggguccuucaguacccaac

SEQ ID NO: 593768 - RNA, 19 nt, Artificial Sequence
  Description of Artificial Sequence: Synthetic oligonucleotide
cacugacaugacuuggggu

SEQ ID NO: 593769 - RNA, 19 nt, Artificial Sequence
  Description of Artificial Sequence: Synthetic oligonucleotide
cggcgaaacacuugauccc

SEQ ID NO: 593770 - RNA, 19 nt, Artificial Sequence
  Description of Artificial Sequence: Synthetic oligonucleotide
gggccggcagccaugauga

SEQ ID NO: 593771 - RNA, 19 nt, Artificial Sequence
  Description of Artificial Sequence: Synthetic oligonucleotide
augccgacaccaguccccu

SEQ ID NO: 593772 - RNA, 19 nt, Artificial Sequence
  Description of Artificial Sequence: Synthetic oligonucleotide
ggagaggaaccgcacccga

SEQ ID NO: 593773 - RNA, 19 nt, Artificial Sequence
  Description of Artificial Sequence: Synthetic oligonucleotide
ugcgccguucagacaugau

SEQ ID NO: 593774 - RNA, 19 nt, Artificial Sequence
  Description of Artificial Sequence: Synthetic oligonucleotide
ccauccuacacgucuggca

SEQ ID NO: 593775 - RNA, 19 nt, Artificial Sequence
  Description of Artificial Sequence: Synthetic oligonucleotide
aggguccuucaguacccaa

SEQ ID NO: 593776 - RNA, 19 nt, Artificial Sequence
  Description of Artificial Sequence: Synthetic oligonucleotide
gcgagcauugcgccguuca

SEQ ID NO: 593777 - RNA, 19 nt, Artificial Sequence
  Description of Artificial Sequence: Synthetic oligonucleotide
ggcagaucggaauccgucu

SEQ ID NO: 593778 - RNA, 19 nt, Artificial Sequence
  Description of Artificial Sequence: Synthetic oligonucleotide
gggucauguagauuguuuu

SEQ ID NO: 593779 - RNA, 19 nt, Artificial Sequence
  Description of Artificial Sequence: Synthetic oligonucleotide
ggcauuccguuguggcagc

SEQ ID NO: 593780 - RNA, 19 nt, Artificial Sequence
  Description of Artificial Sequence: Synthetic oligonucleotide
auccgucucgaaggcguug

SEQ ID NO: 593781 - RNA, 19 nt, Artificial Sequence
  Description of Artificial Sequence: Synthetic oligonucleotide
gacaugacuugggguccac

SEQ ID NO: 593782 - RNA, 19 nt, Artificial Sequence
  Description of Artificial Sequence: Synthetic oligonucleotide
ugcugcguccuggggccag

SEQ ID NO: 593783 - RNA, 19 nt, Artificial Sequence
  Description of Artificial Sequence: Synthetic oligonucleotide
gggaacgagcauccagaca

SEQ ID NO: 593784 - RNA, 19 nt, Artificial Sequence
  Description of Artificial Sequence: Synthetic oligonucleotide
agggccccuaccugcccca

SEQ ID NO: 593785 - RNA, 19 nt, Artificial Sequence
  Description of Artificial Sequence: Synthetic oligonucleotide
gguaggagagcugacggau

SEQ ID NO: 593786 - RNA, 19 nt, Artificial Sequence
  Description of Artificial Sequence: Synthetic oligonucleotide
cuaccccaacagguuuggc

SEQ ID NO: 593787 - RNA, 19 nt, Artificial Sequence
  Description of Artificial Sequence: Synthetic oligonucleotide
cccuaccugccccaaacuc

SEQ ID NO: 593788 - RNA, 19 nt, Artificial Sequence
  Description of Artificial Sequence: Synthetic oligonucleotide
gcauuggcauuccguugug

SEQ ID NO: 593789 - RNA, 19 nt, Artificial Sequence
  Description of Artificial Sequence: Synthetic oligonucleotide
ggucagcuuaucacgagcu

SEQ ID NO: 593790 - RNA, 19 nt, Artificial Sequence
  Description of Artificial Sequence: Synthetic oligonucleotide
ccaagagagcguacggcga

SEQ ID NO: 593791 - RNA, 19 nt, Artificial Sequence
  Description of Artificial Sequence: Synthetic oligonucleotide
cgcccaacgccccacacac

SEQ ID NO: 593792 - RNA, 19 nt, Artificial Sequence
  Description of Artificial Sequence: Synthetic oligonucleotide
ccaugccgacaccaguccc

SEQ ID NO: 593793 - RNA, 19 nt, Artificial Sequence
  Description of Artificial Sequence: Synthetic oligonucleotide
guagcggagcaugcaugca

SEQ ID NO: 593794 - RNA, 19 nt, Artificial Sequence
  Description of Artificial Sequence: Synthetic oligonucleotide
gguaauagacuuggaacuu

SEQ ID NO: 593795 - RNA, 19 nt, Artificial Sequence
  Description of Artificial Sequence: Synthetic oligonucleotide
ucccgcccaacgccccaca

SEQ ID NO: 593796 - RNA, 19 nt, Artificial Sequence
  Description of Artificial Sequence: Synthetic oligonucleotide
agggccccauuaaucacau

SEQ ID NO: 593797 - RNA, 19 nt, Artificial Sequence
  Description of Artificial Sequence: Synthetic oligonucleotide
agcguacggcgaaacacuu

SEQ ID NO: 593798 - RNA, 19 nt, Artificial Sequence
  Description of Artificial Sequence: Synthetic oligonucleotide
agcuaccgaggaggggcag

SEQ ID NO: 593799 - RNA, 19 nt, Artificial Sequence
  Description of Artificial Sequence: Synthetic oligonucleotide
ccguucagacaugaucuug

SEQ ID NO: 593800 - RNA, 19 nt, Artificial Sequence
  Description of Artificial Sequence: Synthetic oligonucleotide
agcgagcauugcgccguuc

SEQ ID NO: 593801 - RNA, 19 nt, Artificial Sequence
  Description of Artificial Sequence: Synthetic oligonucleotide
gguggggcuuggcuuggac

SEQ ID NO: 593802 - RNA, 19 nt, Artificial Sequence
  Description of Artificial Sequence: Synthetic oligonucleotide
ccagggccccauuaaucac

SEQ ID NO: 593803 - RNA, 19 nt, Artificial Sequence
  Description of Artificial Sequence: Synthetic oligonucleotide
gaagggcaauguccccucu

SEQ ID NO: 593804 - RNA, 19 nt, Artificial Sequence
  Description of Artificial Sequence: Synthetic oligonucleotide
cagcucauucuuaggugcu

SEQ ID NO: 593805 - RNA, 19 nt, Artificial Sequence
  Description of Artificial Sequence: Synthetic oligonucleotide
ggcgaaacacuugaucccu

SEQ ID NO: 593806 - RNA, 19 nt, Artificial Sequence
  Description of Artificial Sequence: Synthetic oligonucleotide
gucaucaguccaguguaau

SEQ ID NO: 593807 - RNA, 19 nt, Artificial Sequence
  Description of Artificial Sequence: Synthetic oligonucleotide
ugcugacaaugggcugggc

SEQ ID NO: 593808 - RNA, 19 nt, Artificial Sequence
  Description of Artificial Sequence: Synthetic oligonucleotide
cuacguaggcaaagucccu

SEQ ID NO: 593809 - RNA, 19 nt, Artificial Sequence
  Description of Artificial Sequence: Synthetic oligonucleotide
cacuggguucauccuucca

SEQ ID NO: 593810 - RNA, 19 nt, Artificial Sequence
  Description of Artificial Sequence: Synthetic oligonucleotide
gcuuaucacgagcuacgua

SEQ ID NO: 593811 - RNA, 19 nt, Artificial Sequence
  Description of Artificial Sequence: Synthetic oligonucleotide
cagcuaccgaggaggggca

SEQ ID NO: 593812 - RNA, 19 nt, Artificial Sequence
  Description of Artificial Sequence: Synthetic oligonucleotide
cggaauccgucucgaaggc

SEQ ID NO: 593813 - RNA, 19 nt, Artificial Sequence
  Description of Artificial Sequence: Synthetic oligonucleotide
cugguagcggagcaugcau

SEQ ID NO: 593814 - RNA, 19 nt, Artificial Sequence
  Description of Artificial Sequence: Synthetic oligonucleotide
agcauugggcucgcaccaa

SEQ ID NO: 593815 - RNA, 19 nt, Artificial Sequence
  Description of Artificial Sequence: Synthetic oligonucleotide
gaacgagcauccagacacu

SEQ ID NO: 593816 - RNA, 19 nt, Artificial Sequence
  Description of Artificial Sequence: Synthetic oligonucleotide
gggcucgcaccaaaacaug

SEQ ID NO: 593817 - RNA, 19 nt, Artificial Sequence
  Description of Artificial Sequence: Synthetic oligonucleotide
cuucaguacccaacuccau

SEQ ID NO: 593818 - RNA, 19 nt, Artificial Sequence
  Description of Artificial Sequence: Synthetic oligonucleotide
gcuaccgaggaggggcagc

SEQ ID NO: 593819 - RNA, 19 nt, Artificial Sequence
  Description of Artificial Sequence: Synthetic oligonucleotide
ccguuguggcagcuucucc

SEQ ID NO: 593820 - RNA, 19 nt, Artificial Sequence
  Description of Artificial Sequence: Synthetic oligonucleotide
cacgagcuacguaggcaaa

SEQ ID NO: 593821 - RNA, 19 nt, Artificial Sequence
  Description of Artificial Sequence: Synthetic oligonucleotide
cggcagaucggaauccguc

SEQ ID NO: 593822 - RNA, 19 nt, Artificial Sequence
  Description of Artificial Sequence: Synthetic oligonucleotide
gcuagcacucuugcuaugu

SEQ ID NO: 593823 - RNA, 19 nt, Artificial Sequence
  Description of Artificial Sequence: Synthetic oligonucleotide
cccacacacgaaugcugac

SEQ ID NO: 593824 - RNA, 19 nt, Artificial Sequence
  Description of Artificial Sequence: Synthetic oligonucleotide
ccacaaguuuagagugguc

SEQ ID NO: 593825 - RNA, 19 nt, Artificial Sequence
  Description of Artificial Sequence: Synthetic oligonucleotide
cuguuccgcaugccaaaua

SEQ ID NO: 593826 - RNA, 19 nt, Artificial Sequence
  Description of Artificial Sequence: Synthetic oligonucleotide
gcgaaagugugcacaucuc

SEQ ID NO: 593827 - RNA, 19 nt, Artificial Sequence
  Description of Artificial Sequence: Synthetic oligonucleotide
gguccacuguucucggcua

SEQ ID NO: 593828 - RNA, 19 nt, Artificial Sequence
  Description of Artificial Sequence: Synthetic oligonucleotide
gcgaaacacuugaucccug

SEQ ID NO: 593829 - RNA, 19 nt, Artificial Sequence
  Description of Artificial Sequence: Synthetic oligonucleotide
ggggauccaugccgacacc

SEQ ID NO: 593830 - RNA, 19 nt, Artificial Sequence
  Description of Artificial Sequence: Synthetic oligonucleotide
gcgauguucuuggcaggug

SEQ ID NO: 593831 - RNA, 19 nt, Artificial Sequence
  Description of Artificial Sequence: Synthetic oligonucleotide
gaggggcugcccugugaua

SEQ ID NO: 593832 - RNA, 19 nt, Artificial Sequence
  Description of Artificial Sequence: Synthetic oligonucleotide
ccuuugaggguggggcuug

SEQ ID NO: 593833 - RNA, 19 nt, Artificial Sequence
  Description of Artificial Sequence: Synthetic oligonucleotide
gggcugcuccccugugaag

SEQ ID NO: 593834 - RNA, 19 nt, Artificial Sequence
  Description of Artificial Sequence: Synthetic oligonucleotide
gccccucaugucaucaguc

SEQ ID NO: 593835 - RNA, 19 nt, Artificial Sequence
  Description of Artificial Sequence: Synthetic oligonucleotide
cauggggucugggauccua

SEQ ID NO: 593836 - RNA, 19 nt, Artificial Sequence
  Description of Artificial Sequence: Synthetic oligonucleotide
gcguacggcgaaacacuug

SEQ ID NO: 593837 - RNA, 19 nt, Artificial Sequence
  Description of Artificial Sequence: Synthetic oligonucleotide
ggacaggggagaggggauc

SEQ ID NO: 593838 - RNA, 19 nt, Artificial Sequence
  Description of Artificial Sequence: Synthetic oligonucleotide
cuaccgaggaggggcagcu

SEQ ID NO: 593839 - RNA, 19 nt, Artificial Sequence
  Description of Artificial Sequence: Synthetic oligonucleotide
gagagcugacggauacaau

SEQ ID NO: 593840 - RNA, 19 nt, Artificial Sequence
  Description of Artificial Sequence: Synthetic oligonucleotide
aagcagcgcuuggcucugu

SEQ ID NO: 593841 - RNA, 19 nt, Artificial Sequence
  Description of Artificial Sequence: Synthetic oligonucleotide
ggcucgcaccaaaacaugu

SEQ ID NO: 593842 - RNA, 19 nt, Artificial Sequence
  Description of Artificial Sequence: Synthetic oligonucleotide
gccccauuaaucacaucua

SEQ ID NO: 593843 - RNA, 19 nt, Artificial Sequence
  Description of Artificial Sequence: Synthetic oligonucleotide
cguuugggcuugagggaac

SEQ ID NO: 593844 - RNA, 19 nt, Artificial Sequence
  Description of Artificial Sequence: Synthetic oligonucleotide
gccccuagguagggaaccc

SEQ ID NO: 593845 - RNA, 19 nt, Artificial Sequence
  Description of Artificial Sequence: Synthetic oligonucleotide
ugccgacaccaguccccuc

SEQ ID NO: 593846 - RNA, 19 nt, Artificial Sequence
  Description of Artificial Sequence: Synthetic oligonucleotide
gcuccccugugaaggggag

SEQ ID NO: 593847 - RNA, 19 nt, Artificial Sequence
  Description of Artificial Sequence: Synthetic oligonucleotide
gcauugcgccguucagaca

SEQ ID NO: 593848 - RNA, 19 nt, Artificial Sequence
  Description of Artificial Sequence: Synthetic oligonucleotide
ccaguguaaugacuucugu

SEQ ID NO: 593849 - RNA, 19 nt, Artificial Sequence
  Description of Artificial Sequence: Synthetic oligonucleotide
gucuggcaacugacuccgc

SEQ ID NO: 593850 - RNA, 19 nt, Artificial Sequence
  Description of Artificial Sequence: Synthetic oligonucleotide
gucugggaacgagcaucca

SEQ ID NO: 593851 - RNA, 19 nt, Artificial Sequence
  Description of Artificial Sequence: Synthetic oligonucleotide
ggcgauguucuuggcaggu

SEQ ID NO: 593852 - RNA, 19 nt, Artificial Sequence
  Description of Artificial Sequence: Synthetic oligonucleotide
gggcuugagggaaccccac

SEQ ID NO: 593853 - RNA, 19 nt, Artificial Sequence
  Description of Artificial Sequence: Synthetic oligonucleotide
caggguccuucaguaccca

SEQ ID NO: 593854 - RNA, 19 nt, Artificial Sequence
  Description of Artificial Sequence: Synthetic oligonucleotide
cccagcuaccgaggagggg

SEQ ID NO: 593855 - RNA, 19 nt, Artificial Sequence
  Description of Artificial Sequence: Synthetic oligonucleotide
gugccaguaguagguuccu

SEQ ID NO: 593856 - RNA, 19 nt, Artificial Sequence
  Description of Artificial Sequence: Synthetic oligonucleotide
gaguucccuggggcccaac

SEQ ID NO: 593857 - RNA, 19 nt, Artificial Sequence
  Description of Artificial Sequence: Synthetic oligonucleotide
uaccgaggaggggcagcuu

SEQ ID NO: 593858 - RNA, 19 nt, Artificial Sequence
  Description of Artificial Sequence: Synthetic oligonucleotide
gguggaggucugggaacga

SEQ ID NO: 593859 - RNA, 19 nt, Artificial Sequence
  Description of Artificial Sequence: Synthetic oligonucleotide
gggguuccagaaggaaucu

SEQ ID NO: 593860 - RNA, 19 nt, Artificial Sequence
  Description of Artificial Sequence: Synthetic oligonucleotide
ccuacacgucuggcaacug

SEQ ID NO: 593861 - RNA, 19 nt, Artificial Sequence
  Description of Artificial Sequence: Synthetic oligonucleotide
gcugacggauacaauuguu

SEQ ID NO: 593862 - RNA, 19 nt, Artificial Sequence
  Description of Artificial Sequence: Synthetic oligonucleotide
gcccaacgccccacacacg

SEQ ID NO: 593863 - RNA, 19 nt, Artificial Sequence
  Description of Artificial Sequence: Synthetic oligonucleotide
ggaggggacuuccgacacu

SEQ ID NO: 593864 - RNA, 19 nt, Artificial Sequence
  Description of Artificial Sequence: Synthetic oligonucleotide
caggugccucacagcgaaa

SEQ ID NO: 593865 - RNA, 19 nt, Artificial Sequence
  Description of Artificial Sequence: Synthetic oligonucleotide
guacggcgaaacacuugau

SEQ ID NO: 593866 - RNA, 19 nt, Artificial Sequence
  Description of Artificial Sequence: Synthetic oligonucleotide
ccgcccaacgccccacaca

SEQ ID NO: 593867 - RNA, 19 nt, Artificial Sequence
  Description of Artificial Sequence: Synthetic oligonucleotide
cccgcccaacgccccacac

SEQ ID NO: 593868 - RNA, 19 nt, Artificial Sequence
  Description of Artificial Sequence: Synthetic oligonucleotide
gccguucagacaugaucuu

SEQ ID NO: 593869 - RNA, 19 nt, Artificial Sequence
  Description of Artificial Sequence: Synthetic oligonucleotide
cauuccguuguggcagcuu

SEQ ID NO: 593870 - RNA, 19 nt, Artificial Sequence
  Description of Artificial Sequence: Synthetic oligonucleotide
ggggcucccacuggguggu

SEQ ID NO: 593871 - RNA, 19 nt, Artificial Sequence
  Description of Artificial Sequence: Synthetic oligonucleotide
gggccccauuaaucacauc

SEQ ID NO: 593872 - RNA, 19 nt, Artificial Sequence
  Description of Artificial Sequence: Synthetic oligonucleotide
uccccucuucaggguccuu

SEQ ID NO: 593873 - RNA, 19 nt, Artificial Sequence
  Description of Artificial Sequence: Synthetic oligonucleotide
cugacuccagggccccauu

SEQ ID NO: 593874 - RNA, 19 nt, Artificial Sequence
  Description of Artificial Sequence: Synthetic oligonucleotide
cgagcuacguaggcaaagu

SEQ ID NO: 593875 - RNA, 19 nt, Artificial Sequence
  Description of Artificial Sequence: Synthetic oligonucleotide
cggcuacuggaggacagga

SEQ ID NO: 593876 - RNA, 19 nt, Artificial Sequence
  Description of Artificial Sequence: Synthetic oligonucleotide
cgacacuccccaggggcuc

SEQ ID NO: 593877 - RNA, 19 nt, Artificial Sequence
  Description of Artificial Sequence: Synthetic oligonucleotide
ccccagacauugggucaug

SEQ ID NO: 593878 - RNA, 19 nt, Artificial Sequence
  Description of Artificial Sequence: Synthetic oligonucleotide
cugcugcguccuggggcca

SEQ ID NO: 593879 - RNA, 19 nt, Artificial Sequence
  Description of Artificial Sequence: Synthetic oligonucleotide
ccccuaccugccccaaacu

SEQ ID NO: 593880 - RNA, 19 nt, Artificial Sequence
  Description of Artificial Sequence: Synthetic oligonucleotide
ccgacaccaguccccuccu

SEQ ID NO: 593881 - RNA, 19 nt, Artificial Sequence
  Description of Artificial Sequence: Synthetic oligonucleotide
ccuagacguuugggcuuga

SEQ ID NO: 593882 - RNA, 19 nt, Artificial Sequence
  Description of Artificial Sequence: Synthetic oligonucleotide
gggcucccacugggugguc

SEQ ID NO: 593883 - RNA, 19 nt, Artificial Sequence
  Description of Artificial Sequence: Synthetic oligonucleotide
uaaguuauaacaaagagca

SEQ ID NO: 593884 - RNA, 19 nt, Artificial Sequence
  Description of Artificial Sequence: Synthetic oligonucleotide
aauucuuguauuuuaauug

SEQ ID NO: 593885 - RNA, 19 nt, Artificial Sequence
  Description of Artificial Sequence: Synthetic oligonucleotide
aaaagugcgagacacuaac

SEQ ID NO: 593886 - RNA, 19 nt, Artificial Sequence
  Description of Artificial Sequence: Synthetic oligonucleotide
uuaccuugaaagaaggccg

SEQ ID NO: 593887 - RNA, 19 nt, Artificial Sequence
  Description of Artificial Sequence: Synthetic oligonucleotide
gacaaauccauacuuauug

SEQ ID NO: 593888 - RNA, 19 nt, Artificial Sequence
  Description of Artificial Sequence: Synthetic oligonucleotide
cuaaguuauaacaaagagc

SEQ ID NO: 593889 - RNA, 19 nt, Artificial Sequence
  Description of Artificial Sequence: Synthetic oligonucleotide
aguuauaacaaagagcauc

SEQ ID NO: 593890 - RNA, 19 nt, Artificial Sequence
  Description of Artificial Sequence: Synthetic oligonucleotide
uuaagaacuauuaguaaga

SEQ ID NO: 593891 - RNA, 19 nt, Artificial Sequence
  Description of Artificial Sequence: Synthetic oligonucleotide
auuaauaugaaguuauaau

SEQ ID NO: 593892 - RNA, 19 nt, Artificial Sequence
  Description of Artificial Sequence: Synthetic oligonucleotide
aaucauggagcucuaucac

SEQ ID NO: 593893 - RNA, 19 nt, Artificial Sequence
  Description of Artificial Sequence: Synthetic oligonucleotide
aagaacuauuaguaagaac

SEQ ID NO: 593894 - RNA, 19 nt, Artificial Sequence
  Description of Artificial Sequence: Synthetic oligonucleotide
uuuaccuugaaagaaggcc

SEQ ID NO: 593895 - RNA, 19 nt, Artificial Sequence
  Description of Artificial Sequence: Synthetic oligonucleotide
ugcuaaucgggaaaugucg

SEQ ID NO: 593896 - RNA, 19 nt, Artificial Sequence
  Description of Artificial Sequence: Synthetic oligonucleotide
ucacuagacacaauugccg

SEQ ID NO: 593897 - RNA, 19 nt, Artificial Sequence
  Description of Artificial Sequence: Synthetic oligonucleotide
aauugugagacucaauuua

SEQ ID NO: 593898 - RNA, 19 nt, Artificial Sequence
  Description of Artificial Sequence: Synthetic oligonucleotide
aaauuuaccucaaacccuc

SEQ ID NO: 593899 - RNA, 19 nt, Artificial Sequence
  Description of Artificial Sequence: Synthetic oligonucleotide
uacauaucuauccaucuca

SEQ ID NO: 593900 - RNA, 19 nt, Artificial Sequence
  Description of Artificial Sequence: Synthetic oligonucleotide
aauggagaucuucauagcu

SEQ ID NO: 593901 - RNA, 19 nt, Artificial Sequence
  Description of Artificial Sequence: Synthetic oligonucleotide
agugcgagacacuaacucc

SEQ ID NO: 593902 - RNA, 19 nt, Artificial Sequence
  Description of Artificial Sequence: Synthetic oligonucleotide
ugagacucaauuuaugaac

SEQ ID NO: 593903 - RNA, 19 nt, Artificial Sequence
  Description of Artificial Sequence: Synthetic oligonucleotide
uucacuagacacaauugcc

SEQ ID NO: 593904 - RNA, 19 nt, Artificial Sequence
  Description of Artificial Sequence: Synthetic oligonucleotide
uuagcaacaaaucuaccuc

SEQ ID NO: 593905 - RNA, 19 nt, Artificial Sequence
  Description of Artificial Sequence: Synthetic oligonucleotide
ugaggguucauuuuaccag

SEQ ID NO: 593906 - RNA, 19 nt, Artificial Sequence
  Description of Artificial Sequence: Synthetic oligonucleotide
cuuuacucaugucaaagcc

SEQ ID NO: 593907 - RNA, 19 nt, Artificial Sequence
  Description of Artificial Sequence: Synthetic oligonucleotide
guaauuaaaagugcgagac

SEQ ID NO: 593908 - RNA, 19 nt, Artificial Sequence
  Description of Artificial Sequence: Synthetic oligonucleotide
agucauuagauuuuauugu

SEQ ID NO: 593909 - RNA, 19 nt, Artificial Sequence
  Description of Artificial Sequence: Synthetic oligonucleotide
cauccaauggcucuaauac

SEQ ID NO: 593910 - RNA, 19 nt, Artificial Sequence
  Description of Artificial Sequence: Synthetic oligonucleotide
cauugauccuuaaauauac

SEQ ID NO: 593911 - RNA, 19 nt, Artificial Sequence
  Description of Artificial Sequence: Synthetic oligonucleotide
acucaugucaaagccaacc

SEQ ID NO: 593912 - RNA, 19 nt, Artificial Sequence
  Description of Artificial Sequence: Synthetic oligonucleotide
guaagugaggaguucauug

SEQ ID NO: 593913 - RNA, 19 nt, Artificial Sequence
  Description of Artificial Sequence: Synthetic oligonucleotide
ucagauggcaugaaaugca

SEQ ID NO: 593914 - RNA, 19 nt, Artificial Sequence
  Description of Artificial Sequence: Synthetic oligonucleotide
uucucauagcaccuucugg

SEQ ID NO: 593915 - RNA, 19 nt, Artificial Sequence
  Description of Artificial Sequence: Synthetic oligonucleotide
ugucccuuggaaaugaguc

SEQ ID NO: 593916 - RNA, 19 nt, Artificial Sequence
  Description of Artificial Sequence: Synthetic oligonucleotide
acaucguugggugucaggc

SEQ ID NO: 593917 - RNA, 19 nt, Artificial Sequence
  Description of Artificial Sequence: Synthetic oligonucleotide
ucuucacuagacacaauug

SEQ ID NO: 593918 - RNA, 19 nt, Artificial Sequence
  Description of Artificial Sequence: Synthetic oligonucleotide
auccaauggcucuaauacc

SEQ ID NO: 593919 - RNA, 19 nt, Artificial Sequence
  Description of Artificial Sequence: Synthetic oligonucleotide
cauaguagccuugucaugc

SEQ ID NO: 593920 - RNA, 19 nt, Artificial Sequence
  Description of Artificial Sequence: Synthetic oligonucleotide
uuaacugaguguuugugau

SEQ ID NO: 593921 - RNA, 19 nt, Artificial Sequence
  Description of Artificial Sequence: Synthetic oligonucleotide
uggauaucuacauaucuau

SEQ ID NO: 593922 - RNA, 19 nt, Artificial Sequence
  Description of Artificial Sequence: Synthetic oligonucleotide
aaauugugagacucaauuu

SEQ ID NO: 593923 - RNA, 19 nt, Artificial Sequence
  Description of Artificial Sequence: Synthetic oligonucleotide
gaauacggguuauuaacug

SEQ ID NO: 593924 - RNA, 19 nt, Artificial Sequence
  Description of Artificial Sequence: Synthetic oligonucleotide
uacgaauucuucacuagac
